United States Patent Application Publication US 2007/0067865 A1 - sequence listing, part 37

SEQ ID NO: 229130 - DNA, 387 bp, Gossypium hirsutum
tgacacttttaatccagctcagtcaaaagagcgcgctggcgccggtccggcatttccgggatcagcctttctgagcacccttctttctttcagccaactgctcgctcgctcacctccctcctcggcaccatgaccacctgcagtcgccagttcacctcctccagctccatgaagggctcctgcggcatccggggcggcatcgggggcggatccagccgcatctgctccgtcctggccggagggtcctgccgcgcccccagcacctacggcgggggcctgtctggctcttactgccgcttctcctccgggggagcctgcgggctggggggctgctctggcggtggcttcagcagcagcagcagcttttgtagtggcttctggggagga

SEQ ID NO: 229131 - DNA, 372 bp, Gossypium hirsutum
cccacgcgtccggttaagaagcgaatgaagaagcctatctatgtctactaccaactggacaatttctaccagaatcatcggaggtatgtgaagagccgaagtgactcacagttgaaagaaaatagcagttgggatgatgttagttcttgtaagcctgaagatatgtctaaggaccagccaattgttccctgtggtcttatagcttggagtttatttaatgatacctatagtttctccctcaacgatcagcaattggcagtgaacaagaagggcatctcctggaaaagtgatagggacagtaaattcgggaaagatgtatttccccaaaattttcagaatgggagtcttaaaagtggtgcaacgcttaatcta

SEQ ID NO: 229132 - DNA, 323 bp, Gossypium hirsutum
cgtttgtctcaaatgtcaaaaaatggcccgtaccaagcaaaccggccgtaagtctactggtgggaagggtccaaggaagcaacttgctaccaaggctgcccgtaaatctgccccaaccaccggtggtgtgaagaagcctcatcgataccgtcctggaactgttgctcttcgtgaaattcgtaaataccagaagagtactgagcttcttatcaagaaattgcctttccagaggcttgttcgtgaaattgcccaggacttcaagactgatttgcgtttccagagccatgctgttctagctctccaggaagctgcagaggcatacc

SEQ ID NO: 229133 - DNA, 372 bp, Gossypium hirsutum
cttactctcaaccaaaaatgactgctcaggccgacaaagagatcgaagagatcctggcagctcatctcgaccaacaaaaaatcgattccgagataccagagcaacctgttgttgaagatgacgacgaggaagatgacgatgacgatgatgatgaagatgatgccgaaggtcatcatgagggagaaggagatggaactggtaggtcaaagcaaagccgaagtgaaaagaagagtcgcaaagctatgttgaagcttgggatgaaaccgatccctggtgttagccgggtcactgtgaagaagagcaagaatattttatttgtcatctcaaaaccagacgtgttcaagagcccagcatcagatacttatgtaatat

SEQ ID NO: 229134 - DNA, 372 bp, Gossypium hirsutum
ctttcccttctttttctcttcaatggctgcctagctcgccagaccttttcgtcacagcagtcccaaaatgagtgtcaaatcaataggctccgcgcctctgcaccccagacccgaattcgctccgaagccggcaccaccgagtggtggaaccccaactgtcaacagctcaggtgtgctggtgtatctgtaatgaggcagactattgaacctaatggccttgttttgccttccttcaccaatgctcctcagcttctctacattgtccaaggaagaggtattcaaggtattgtgatgcctggatgtgccgaaacattccaggattcacagcaatggcagcatcaaagccgtggcaggttccaggaccagcaccag

SEQ ID NO: 229135 - DNA, 362 bp, Gossypium hirsutum
aaaatacagagctatcgtaatcatggtgaggaataagtcagcttgcgtagttttgctcttttctcttttcctttcctttggcttgctttgttctgccaaagactttcccggcagaagaggcgacgatgatccttcgaagaggtacgaggactgccggaggcgatgcgaatgggatacacgtggacaaaaggagcaacagcagtgtgaagaaagttgtaaaagtcagtatggggagaaaggtcaacagcagcgccaccgccctgaagatccccagaggagatacgaggagtgtcagcaagaatgccgacagcaagaagaaaggcaacaaccacaatgccaacaaaggtgcttgaaacgattcg

SEQ ID NO: 229136 - DNA, 401 bp, Gossypium hirsutum
atgcactgtgcccatctatgaggggtatgccctgccccatgccatcctgcgtctggacccgtctggccgggacctgactgactacctcatgaaaatcctgactgagcgcggctacagcttcaccaccacaggcgagcggaaaatcgctgcgtacattaatgagaaactgtgctatgtcgccctagacttcgagcaggagatggccacaggaggcttccagctcctccctggagaatatctaccagctgcccgatggccaagccatcaccatcggcaacgagcggttacgctgacctgaggctctcttgcaacctttctttctgggcatggagtgctgtggcatccacgaaactaccttcaactgcatcatgaagtgcgacgtggacatccgttaagacctg

SEQ ID NO: 229137 - DNA, 379 bp, Gossypium hirsutum
cctcgctcaagctttcaacgttgaccacgacatcattaggaaaatccaacgtgtacgaggaaatagaggcaccatcatcagagtcagggacagactccaagtcgtaacaccacccagaatggaggaagaagaacgtgaggagcgccagcaggagcagcgataccgccatacgagaggagggtctcaagataatggcctcgaggaaactttctgctccatgaggatcaaggagaaccttgctgaccctgaacgtgccgacattttcaacccacaagccggtcgtatttccaccctcaacaggtttaacctccccatcctccaacgacttgagctcagcgccgagaggggtgtcctctacaacagagctggtttgattcca

SEQ ID NO: 229138 - DNA, 366 bp, Gossypium hirsutum
  unsure (1)..(366): unsure at all n locations
atcgaggctgtcaccagggtgttccctcaggtcaatgtcacgaagatgggcagttggggacacttcaactgttcctactcctgctccttccttctggctccggaagaccccatgttccccgtcatcgggagcctcttcctgcgagagctggtcaaagagtttggcacagaccacatctatggggccgacactttcaacgagatgcaaccaccctcctcagcgccctcctaccttgccgcagccaccacgggcgtctatgaggccatgattgcagtggatactgaggctgtgtggctgcttcaaggctggctcttccagcaccagccccagttctgggggcccgcccagattanggctgcgctgggg

SEQ ID NO: 229139 - DNA, 372 bp, Gossypium hirsutum
  unsure (1)..(372): unsure at all n locations
cgaaaatatccactccgagatgtacagtctccttctcgagacttacataaaagattccgatgaaaagaaccgtcttttccgcgccatcgagacggtgccgtgtgtggctaaaaaagccgagtgggctatgaaatggatcgacggcggagaaactttcgccgaacggttaatcgcttttgcttgcgtagaggggatctttttctccggaagtttctgtgccatattttggttaaaaaagagggggttaatgcccggattaactttctcaaacgagttaatctcacgagatgaaggtctccactgtgatttcgcttgcttgctgtactctctcctncggtcaaagctgagtgaagaacgcgtgagagggatagt

SEQ ID NO: 229140 - DNA, 393 bp, Gossypium hirsutum
acagtagcatttgtgccaatttctggttggaatggtgacaacatgctggagccaagtgctaacatgccttggttcaagggatggaaggtcacccgtaaggatggcaatgccagtggaaccacgctgcttgaggctctggactgcatcctaccaccaactcgtccaactgacaagcccttgcgcctgcctctccaggatgtctacaaaattggtggtattggtactgttcctgttggccgagtggagactggtgttctcaaacccggtatggtggtcacctttgctccagtcaacgttacaactgaagtaaaatctgtcgaaatgcaccatgaagctttgagtgaagctcttcctggggacaatgtgggcttcaatgtcaagaatgtgtctgtc

SEQ ID NO: 229141 - DNA, 399 bp, Gossypium hirsutum
atggctcaccctgggggaaatggtgtatatccctgcaggcagaattcctgaattccccactctccaggctgcaaggtgttgaccaaaggcctgggtgtgtcctctctctagcaccaccacgcactggaatggctaacaggggacctgcatatggcctgagccgggaggtgcagcagaagattgagaaacagtatgatgcagatctggagcagatcctgatccagtggatcaccacccagtgccgaaaggatgtgggccggccccagcctggacgcgagaacttccagaactggctcaaggatggcacggtgctatgtgagctcattaatgcactgtaccccgaggggcaggccccagtaaagaagatccaggcctccaccatggccttcaagcagatgg

SEQ ID NO: 229142 - DNA, 380 bp, Gossypium hirsutum
ctcaaagtgccctttgcgggttttcactttggcccttttccatttttattaggtctcaaagcgccctttgtgggttttcactttggcttcttcccctcattttttcgagttttcactttggcttcttcccctcattaggtataatactttttgactaaattcgagttcactggattagacaagttttttcatctatttcagccaggattaatgctcctccgaagaaagcttttttcaccacataagactcctcccaatttggcatctattttcttctgaaatccttctgtataggaagaatctttttcagaaccaaatctccctcgtgaaattctcttgggtgaacctctttgtcataagccagcatcattcttttttgt

SEQ ID NO: 229143 - DNA, 314 bp, Gossypium hirsutum
atcgataatctgtgctttgctgggctcatctccatgattgaccctccacgggcggccgttcctgatgccgtgggcaaatgtcgaagtgctggaattaaggtcatcatggtcacaggagaccatccaatcacagctaaagctattgccaaaggtgtgggcatcatctcagaaggcaatgagaccgtagaagacattgctgcccgtctcaacatcccagtcagccaggtgaaccccagggatgccaaggcctgcgtagtgcatggcagtgatctaaaagacatgacctccgagcagctcgatgacattttgaagta

SEQ ID NO: 229144 - DNA, 363 bp, Gossypium hirsutum
atgtccagcagctccagatctcagttgaccaacatggtgacaacctgaagaacaccaagagtgaaatcgcagagctcaacaggatgatccagaggctgcgggcagagatcgagaacatcaagaagcagtgccagactcttcaggcatccgtggctgatgcagagcagcgtggtgagaatgcccttaaagatgcccacagcaagcgcatagagctggagactgccctgcagcaggccaaggaggagctggcacgaatgctgcgtgagtaccaggagctcatgagtgtgaagctggccctggacatcgagatcgccacctaccgcaaactcctggagggcgaggagtgcagaatgtctggagaat

SEQ ID NO: 229145 - DNA, 380 bp, Gossypium hirsutum
cgaagataaagacaatgctaggaaagatgaaattgctgctcttggaggtcaaacggctactggaattaatgtctttagtgcattttatgatagattgaaggagattcgtgagtaccatagaaagcacccggctgctcgacttgtcaatgctaatgaagatgatgaggctttactcaaggaagaaccagttattgagttcagtggcgaggaagcctttggtcggtacctggacctgcacgaattgttcaatcagtacattaattctaaatttggatccaaaattgaatactcagcttacctcgacgtctgttcacagccgcacaatatcccttggaaattgaagtcaacacggcaatacaaaaagtacatggagaatttgc

SEQ ID NO: 229146 - DNA, 365 bp, Gossypium hirsutum
ggtggacaaggtggttgtactctggactgcaaacactgagaggtacagcaatgtcgttgtggggctaaacgacaccatggagaacctcttggcttcttttgagaagaatgagtcagagatttctccttccactttgtacgctatcgcttgtgtttttgaggatgttcccttcatcaatggaagccctcaaaacacatttgttccagggttaattgatttggctatccagaggaactgtctgattggaggagacgattttaagagtggccagaccaagatgaaatccgttctagtggatttccttgttggggcttgtatcaagccaacatcaatagtgagctacaaccatcttggaaacaatgatg

SEQ ID NO: 229147 - DNA, 390 bp, Gossypium hirsutum
atgccggagaccagcccacagccgcctgtatctgtgtccagcccgggtcccgcctgtcccagctgcgctcgcccctcagtcccgcacccgttcgacccaggctaggttagccctcaccatgccggtcaaaggaggcaccaagtgcatcaaatacctgctgttcggatttaacttcatcttctggcttgccgggattgctgtccttgccattggactatggctgcgattcgactctcagaccaagagcatcttcgagcaagaaactaataataataattccagcttctacacaggagtctatattctgatcggagccggcgccctcatgatgctggtgggcttcctgggctgctgtggggctgtgcaagagtcccagtgcatgctgggact

SEQ ID NO: 229148 - DNA, 401 bp, Gossypium hirsutum
atcggcgcgatcctcgcttacgtgagagttggcccgggaggaaagatggtgctggatctggatttgtttcgggtggataaaggaggggacccagccctcattcgagagacgcaggagaagcgcttcaaggacccgggactagtggaccagctggtgaaggcagacagcgagtggcgacgatgtagatttcgggcagacaacttgaacaagctgaagaacctatgcagcaagacgattggagagaaaatgaagaaaaaagagccagtggaagatgatgagtctgtcccagagaacgtgttgaatttcgatgaccttactgcagacgctttagctaacctgaaagtctcacaaatcaaaaaagtccgactgctcattgacgaagccatcctgaagtgtgacgc

SEQ ID NO: 229149 - DNA, 361 bp, Gossypium hirsutum
atggtgggcatcgtccccatgaaggtcctggtggaggcatgggcaacagcagtggacatcgtccccacgaaggccctggcagtggcatgggcagtgggcatcgcccccatgaaggccctggcagtagcatgggtgggggtggaggacatcgtccccacgaaggccctggtggtggcatcagtggtggcagtggccatcgtccccatgaaggccctggtggaggaatgcatggcttgtggagacatctatcccacgaaagccctggctgaagcatggctggaagtggaggacatcgtccccatgaaggtcctggacacggggggccccatggccaccggccttatgatgttcctggtcaccg

SEQ ID NO: 229150 - DNA, 377 bp, Gossypium hirsutum
attttacctcgttctaagatggtgaatgctgatcttggtaggatcattaactccgatgaggttcagtcggtcgttaagccaattaagaaggagatcaagagggcacctttgaagaagaatccactcaagaacttgaatgctatgctgaagttgaacccttacgcaaagactgctagaaggatgtctcttttggctgaggcacaacgtgttaaggccaagaaggagaagcttgacaagaagaggaagcctatatctaaggaggaagcaaccgcaatcaagtcagctggcaaagcatggtatcaaactatgatctccgacagcgattacacagagttcgagaacttctccaagtggttgggcgtgtcgcagtaaatttt

SEQ ID NO: 229151 - DNA, 392 bp, Gossypium hirsutum
atgttctttgatgcggagctgtcccagatgcagacgcatgtctctgacacctccgtggtcctctccatggacaacaaccgcaacctggacctggacagcatcatcgccgaggtcaaggcccagtatgaggagatcgccaaccgcagccggaccgaagctgagtcttggtaccagaccaagtatgaggagctgcagcagacagctggccggcatggcgatgacctccgcaacaccaagcatgagatctctgagatgaaccggatgatccagaggctgagagctgaaattgacaatgtcaagaaacagtgtgccaacctgcagaacgccattgcggatgccgagcagcgtggggagctggcgctcaaggacgccagaaacaagctggccgagct

SEQ ID NO: 229152 - DNA, 393 bp, Gossypium hirsutum
attggagtcgcccggcccagtgagagcctagtcccggccagggtcgccccggcaagcacgagtccagccaatcagcgccctggactgcaccagcgccatggtcggcaaaagagcactgatcgtactggctcactcagaaaggacatccttcaactatgccatgaaggaggctgctgtagcagctttgaagaagaaagggtgggaggtggcggagtcggacctctatgccatgaacttcaatcccatcatttccagaaaggacatcacaggtaaactgaaggaccctgcgaactttcagtatgctgccgaatctactctggcttataaagagggccgtctgagcccagatattgtggctgaacaaaagaagctggaagctgcagaccttgtgat

SEQ ID NO: 229153 - DNA, 373 bp, Gossypium hirsutum
caaagccttttctcttctcctctgaaatctcgctctaagatttcgtcgtttatatttctccatctggattttgattgagctctctctcctttcgtcttaattggtttcactatgtcttcttatacccctaagaacatcctcataactggggcagctggttttattgcgtcacatattgctaaccggctcataaggaactacccggactacaagattgttgtgcttgacaagcttgattactgctcgaacctgaaaaacctccttccttccaagtcatctccgaactttaagtttgtgaaaggtgacattggtagtgctgaccttgttaactacctccttattaccgagtctatcgacacaataatgcactttg

SEQ ID NO: 229154 - DNA, 335 bp, Gossypium hirsutum
atgcagtcgttcggctcaaaaacgaccaggctaactactcactcaacacagatgacccgctcatcttcaagtccaccctggacactgattaccagatgaccaaacgggacatgggctttactgaagaggagtttaagaggctgaacatcaatgcggccaaatctagtttcctcccagaagatgagaagagggagctactcgacctgctctataaagcctatgggatgccacctccagcctctgcagggcagcacctctgaggacaacacccctccaagcctttgccctgtggagtcaccccaattctgtggcgctgagcaacatttttacattta

SEQ ID NO: 229155 - DNA, 327 bp, Gossypium hirsutum
ttaccatatgaccaaactgtacatgtgctttactgaagaggatttctaagaagctgaacatcaatgcttccaaatctagtttcctcccaaaagatgacaagagggagctactcgacctgctctataaagcctatgggatgccacctccagcctctgcagggcatcacctctgaggacaacacccctccaagcctttgccctgtggagtcaccccaattctgtggcgctgagcaacatttttacatttattccttccaagaagaccatgatctcaatcgtcagttactgatgcttctgaagcctgtgtgtccatttctgcacacacct

SEQ ID NO: 229156 - DNA, 388 bp, Gossypium hirsutum
gagaaaagtgagaaaaaaaaagaacaaactagttaagagccatggaagatgatgcaatggcaaccgaggctcctttagcaccagtcacttctggaaggagagtcagaaatgacttggaagataagcttcctaaaccttatatggcgagagctttggtggctccggatgtcgatcacccgaacggaacgccgggccattaccataacggaatgagtgttcttcaacaacatgcggcatatttcgaccaggacgacaatggaatcatttattcttgggagacttacgccagttgtcgagccttgggatttaatcccattgcctctctttttttcaccattcttattaatggatctatgagctatcctacacttccaggatggttaccttc

SEQ ID NO: 229157 - DNA, 381 bp, Gossypium hirsutum
caccaatgctcctcagcttctctacattgtccaaggaagaggtattcaaggtattgtgatgcctggatgtgccgaaacattccaggattcacagcaatggcagcatcaaagccgtggcaggttccaggaccagcaccagaaagtccgacggttccgccagggtgacatcattgctttgccgcagggtgtggttcactggagctacaatgatggcaatgagcgtgttgttactatcaatctacttgacactggcaacagtgctaatcagctcgacaacatccctagaagattccatcttgctggtaacccagaagaggaacagaggcaactgaggaggctagcacagcagatgcaaggaagaagtgagaggggggaggagtc

SEQ ID NO: 229158 - DNA, 361 bp, Gossypium hirsutum
gtaaaagcatttggtcggatcgatattctggttaacaatgcggctgaacagtacaaggctagcagtgtggaggagattgatgaggagaggcttgatagggtgtttaggaccaacatctattcccaattcttcctggccaggcatgctctgaagtacatgaaagaaggcagctccataatcaatactacatccgtaaatgcatataaagggaatgacaagctacttgattacacagcaaccaagggtgcaattgtggctttcactagaggcctttcactacagctgatgaagcgaggcatacgtgtgaatgccgtagcacccgggcccatatggactccattgataccagcatcatttgatg

SEQ ID NO: 229159 - DNA, 354 bp, Gossypium hirsutum
ggcattcgcaaatttattgtttatatctaagaaatggttgcttaattttggaaaacaaaagttattgtagttagttttgcttcttgcgtgtccagccagcaaaatgggtgccggtggtaggatgccaattgacggtataaaggaggaaaatcgaggctcggtcaatcgagttccgatcgagaagcctccgtttacgctcggtcagatcaagcaagccattccgccccactgttttcgccgctccctccttcgatccttctcctacgtggaccatgacctatgcttagcctctctcttttactacattgcaacatcatattttcactttctcccacaaccctttttctacattgc

SEQ ID NO: 229160 - DNA, 382 bp, Gossypium hirsutum
ccctcactccgccatgttcaataatttcttgcgttgatctttgttagagattagctttttaatttttcattatgggaaagatcaagatcggaatcaatggatttggaaggatcgggcgtttggttgcgagagttgctctccaaagcgatgatattgagctcgttgctgttaacgatcctttcatcaccactgaatacatgacgtacatgtttaagtacgacagtgttcacggtcaatggaagcatcatgagcttaaggtgaaggactcaaagacccttctctttggtgaaaagcctgtcacagttttcggtatcagaaaccctgaggaaatcccatgggctgaggctggagctgagtatgttgttgagtctactggtgtttt

SEQ ID NO: 229161 - DNA, 380 bp, Gossypium hirsutum
atcgcgcgtgcgcgcggccgggcagcctgggcagggggtcctgcctgtgacgggcggcggcggtcggtcctgcctgtaacggcggcggcggctgctgctccagacacctgcggcggcggcggcggcgaccccgcggcgggcgcagagatgtggcccctggtagcggcgctgttgctgggctcggcgtgctgcggatcagctcagctactatttaataaaacaaaatctgtagaattcacgttctgtaatgacactgtcgtcattccatgctttgttactaatatggaggcacaaaacactaccgaagtatatgtaaagtggaaatttaaaggaagagatatttacacgtttgatggagctctaaacaaggtcaccggccc

SEQ ID NO: 229162 - DNA, 399 bp, Gossypium hirsutum
atgagcagggtagtgagtggcgttgtggggataggatgccctgggtgtgcacacaggccaggagccctgatggcatgaacaccccccaacagaggcagaggagtcgtttgaatttgtggtggtgtccctcaccgggcagacgtggcacttcgaggcctcaacggcggaggagcgggagctgtgggttcagagtgtgcaggcccagatccttgccagcctgcaaggctgccgcagtgccaaggacaagactcgactggggaaccagaacacagctctggctgtgcaggcggtccgcaccgttcgtggcaacagcttttgtatcgactgcgatgcacctaatccagactgggccagcctgaacctgggtgccctgatgtgcattgagtgctcaggcattca

SEQ ID NO: 229163 - DNA, 268 bp, Gossypium hirsutum
atctcagccttgctgagcaccttgctttctttcagccaacgtgctcgctcgctcacctccctcctcggcaccatgaccacctgcagtcgccagttcacctcctccagctccatgaagggctcctgcggcatctggggcggatacaggcgcatatcctccgtcctggccggagggtcctgccgcgcccccagcacctacggcgggggcctgtctgtctcctcctcccgcttctcctctgggggagcctgcgggctggggggcggctatg

SEQ ID NO: 229164 - DNA, 339 bp, Gossypium hirsutum
  unsure (1)..(339): unsure at all n locations
ctttctctgagtacccaccccgtggacggtttgctgtcagggacatgcttcagactgtggctgttggtgtcatcaagagcgttgagaagaaggatccaaccggggctaaggtcaccaaatctgctgccaagaagaaatgagattgcatttgatagtatcaaagccttttgattttggttttctatgtagtctggtacttaacagttttttagaccaattttgatatgtgttcatttggttgagactggcatctggccacggattgggtgtttgctttttccgtgtcaattgtagttgaattccttcagaaaaaaatttgtgaagaagaagaaaaanagg

SEQ ID NO: 229165 - DNA, 396 bp, Gossypium hirsutum
aatcactatgcgtagagaaccaaatatggcgagatttggctcaaaccaacgaggcaactgccaacgcgttacggaccaacttataacaagtactcgccgccgctgccaacacccgtgaggaggctgaagcggcggctgcagacgaggtggacgatgcacaatcttgttgcgggagcaactgggaagcaactgcggagaaaaccgtctccggcggtggaggacaggagtgtacgaattgcaggaaagagatagcgtgtgtgttgctgttgccgtgtaagcatttgtgcttgtgtacgatttgtgggtccacacttcacgtttgccccgtttgtaaatccactaaaaatgctagtggtcatgttaacttgtgaataacccccaaaccaaaagaaaata

SEQ ID NO: 229166 - DNA, 406 bp, Gossypium hirsutum
atcgccaagggagcaggacggagccatggacccggccaggaaagcaggtgcccaggccgtgatctggaacgcaggctggctgctgctgctgctgctgctgctttgcagaggagcgcaggccctggagtgctacagctgcgtgcaaaaagcagatgacggatgctccccacacaagatgaagacggtgaagtgcgcgccgggcgtggacgtctgcaccgaggcagtcggggcggtggagaccatccacggacaattctcgatgggagtgcggggttgcggttcgggactccccggcaagaatgaccgcggcctggatcttcacgggcttctggcgttcatccagctgcagcaatgcgctcaggaccgctgcaacgccaagctcaacctcacctcgcgggcgctcgac

SEQ ID NO: 229167 - DNA, 344 bp, Gossypium hirsutum
cccacgcgtccgcaccgttgccaacggcaagagcaagggcccgaacggaagcaacaatgtgtgaaggaatgcagggaacagtaccaagaggatccatggaagggagagagagaaaacaagtggagagaagaagaagaggaggaaagtgacgaaggagagcaacaacaaaggaacaacccttactacttccatcgcagatcgttccaagaacgattcagggaagaacatggcaatttcagagtcctccagaggtttggtggccaacattatttacttaagggcattaaccaggtccggattggcattttaggaggcaaccccaacactttcggtcttccacacca

SEQ ID NO: 229168 - DNA, 344 bp, Gossypium hirsutum
cttcattttgtctaagaaagggaaatgccaggcctcaccattggagacacagtgcccaaccttgaagttgaaaccacccacggaacattcaaccttcatgactacttcaacaatgggtggaccatcattttctctcatccttctgatttcactcctgtgtgtacaacggaactggggaagatggcggcttacctgtctgagtttgaaaaacgagggattaagcttctaggcttctcttgcgacgatgtgcagtcacacaaggagtggatcaaagatgttgaagcctacacgcctgggtgcaaggtggcatacccaatcgttgcagatcccaggagagagatcat

SEQ ID NO: 229169 - DNA, 364 bp, Gossypium hirsutum
  unsure (1)..(364): unsure at all n locations
gtttttactatacttcgactgtgtaatcaacttgttgattaacacaaaccatggtcctcttattctttgttgtaacagcaacgaccataccctgaagcaaatcccagaaaggggagctcaccaccccccagtttcttagaagaaaataaactagttaaagaacgagtaaattgtcttttaattgctactcccgccaaggaaaatgagcgcctacagattcataaagtgtgtcaccgtcnnaaatcatgccaactgcaggacctgtacactaatttcttataccagctatactttccctacggactatgtgcagacagtcttggacaatttcagcacaaatgttgccatggatcgtagcactgtc

SEQ ID NO: 229170 - DNA, 407 bp, Gossypium hirsutum
attgccatcctgcgtctggacctggctggccgggacctgactgactacctcatgaagatcctcactgagcgcggctacagcttcaccaccacggccgagcgggaaatcgtgcgtgacattaaggagaagctgtgctatgtcgccctagacttcgagcaggagatggccacggcggcttccagctcctccctggagaagagctacgagctgcccgatggccaggtcatcaccattggcaacgagcggttccgctgccctgaggctctcttccaaccttccttcctgggtgagtggagacccgcctcccggccctgcctgacctgggggtcacccttggggctgggctttggaagctaagtccgccctcatttcttcctcaggcatggagtcctgtggcatccacgaaa

SEQ ID NO: 229171 - DNA, 374 bp, Gossypium hirsutum
cggacgcgtgggttcgaaatcttcgaaatctctctctaacatcttaacatacgattttggttgtgtgggagagagagatggacgcccttgacaacgtggtagatcctttgagagacttcgccaaggacagcgtccgcctcgtcaagcgttgccacaagcctgatcgtaaagagttcacgaaggtggctttccgtacagcgatcggtttcgtagtgatgggattcgtcggattcttcgtcaagctcatctttattcctattaacaacatcatcgttggctccgcttaggctcgtagaaattggtgggggatatgaccagttggcgtagttgcagattctcatagaaaatgaatgttagaatgcagcagttggggg

SEQ ID NO: 229172 - DNA, 363 bp, Gossypium hirsutum
atcgaggatggcgatcatggcgccccgaaccctgctcctggtgctctcaggggtgctggccctgacccagacccgggcgggctcccactccttgaggtatttccacaccgccgtgtcccggcccggccgcggggagccccgcttcttcaccgtgggctacgtggacgacacgcagttcgtgcggttcgacagcgacgccgcgagtccgagaaaggagccgcgggcgccgtgggtggagcaggaggggccggagtattgggaccgggagacacggatcttcaagaccaacacacagacctaccgagagggcctgcagatcctgcgcggctactacaaccagagcgaggctgggtctcacaccta

SEQ ID NO: 229173 - DNA, 394 bp, Gossypium hirsutum
atccggtccacctcacagccttcctgggatacaaggctggcatgacccacatcgtgcgggaagtcgacaggccaggatctaaggtgaacaagaaggaggtggtggaggctgtaaccattgtggagacgccacccatggtggttgtgggcattgtgggctacgtggaaacccctcgaggcctccggaccttcaagactgtcttcgctgagcacatcagtgatgaatgcaagaggcgtttctataagaactggcataaatctaagaagaaggcctttaccaagtactgcaagaaatggcaggatgaggatggcaagaagcagctggagaaggacttcagcagcatgaagaagtactgccaagtcatccgtgtcattgcccacacccagatgcgcct

SEQ ID NO: 229174 - DNA, 319 bp, Gossypium hirsutum
atgctgaaggccccccgggcccggaccagcccaggggaggacgaggacgaccttctccccccagagcagaaggccgagcgggagaaggagcgccgggtggccaataacgcccgggagcggctgcgggtccgtgacatcaacgaggcctttaaggagctggggcgcatgtgccagctgcacctcaacagcgagaagccccagaccaaactgctcatcctgcaccaggccgtctcggtcatcctgaacttggaacagcaagtgcgagagcggaacctgaatcccaaagcagcctgtttgaaacggcgagaagaggaaaagg

SEQ ID NO: 229175 - DNA, 367 bp, Gossypium hirsutum
gaagcagaaggcaagcaaaatgaagaccattctttcttcagagacaatggacatccctgatggggttgatattaaggtgaaggccaagatgatcgaggttgaaggtcccaggggtaagctcatccgtaacttcaagcacctcaacctcgattttcatcttatcaaggacgaggagagcggcaaacgcaagctcaggatcgaggcttggtttggctctagaaagactagcgccgccatccgtactgctctcagccacgttgagaatctcatcaccggcgtcaccaagggctaccgttacaagatgaggtttgtttatgctcattttcccatcaacgcctccatcactaacggcaacaagtccatcgag

SEQ ID NO: 229176 - DNA, 391 bp, Gossypium hirsutum
gccgtgtaaattttggaagagcggagatggatgccgccacttcatggtcgaatggaatgttaacatcagcttgctttccaattgcgttggcggttatgttcgcgatgacaactctgacatcgtcgctactgacaccatgaaaaactctgtttatgtcaaagcaaaggaatgttcaaaacaactttcggcagaggaatttgctattctacttggcaagcacttcacatcattttatccacaggtttttactggaatagtaaagatagtggaaaagccatgggaacgcatttctgtcaatggccaaccacatgaacatggctttaaactgggatctgaaaagcatacaactgaagcgattgtacagaagtctggtgttttacagctgactttt

SEQ ID NO: 229177 - DNA, 350 bp, Gossypium hirsutum
  unsure (1)..(350): unsure at all n locations
attgccagtgctgagccaggccctcgctgggctggacctggcggactacctgatgaagatcctcactgagcgcggctacagcttcaccaccacgggcgagcgggaaatcgtgcgtgacattaaggagaagctgtgctatgtcggcctagacttccagcaggagatggccacggcggcttccagctccttcctggagaagagctacgagctgcccgatggccaggtcatcaccattggcaacgagcggttccgctgccctgaggctctcttncaaccttncttcctgggggaggggagacccggcttccgggcctgcctgacctgagggtcacccttggggctgtgctggg

SEQ ID NO: 229178 - DNA, 398 bp, Gossypium hirsutum
caaagaaccggttcctgaatctgtctaatcctcactttcttccccatcaaacacaccttcgattttcccaaggttgtagaagatggcagaaggtgaggatattcagccacttgtttgtgacaatggaactggaatggttaaggctggatttgctggggatgatgctccccgagccgtattccctagcatcgttggtcggccacgtcacaccggtgtgatggttggcatgggccagaaagatgcatatgttggtgatgaagctcaatcaaagagaggtattttgactttgaaataccctattgagcatggtattgtgagcaactgggatgatatggaaaagatttggcatcataccttttataatgagcttcgtgttgcccccgaagagcacccagttc

SEQ ID NO: 229179 - DNA, 354 bp, Gossypium hirsutum
atctagggagagccgtggaactgtcgccaggtcgctgtcgctccacgccgcccgtcgcgctgcccgcccgctcagcgtccgccgccgccatgggagtgcaggtggaaaccatctccccaggagacgggcgcaccttcccgaagcgcggccagacctgcgtggtgcactacaccgggatgcttgaagatggaaagaaatttgattcctcccgggacagaaacaagccctttaagtttatgctaggcaagcaggaggtgatccgaggctgggaagaaggggttgcccagatgagtgtgggtcagagagccaaactgactatatctccagattatgcctatggtgccactgggcacc

SEQ ID NO: 229180 - DNA, 325 bp, Gossypium hirsutum
tcgctgtgatcctgctgctgggactgtgagatgccgatgtgaaaacacagcgattatcggtgagaggaaaaatgtcaaccttactggtgtcgtggcggatcttcccacactcactgagaaggataaagaagacatcttgggatggggagttcccaacagtattgatatgattgctctttcctttgtacgcaaagggtctgatcttgtcaatgttcgtaaggtcctcggtccccatgctaagaagattcaattgatgtcaaaggttgagaatcaggagggtgttatcaacttcgacgagatcttgcgtgagactgatgcatttatg

SEQ ID NO: 229181 - DNA, 353 bp, Gossypium hirsutum
gaaaagttagggttttcgctccttacgattatcgagatcgtcctcttgaattgaagtatgggaaagaggaaatcaagagcaaagcctgctcctaagaagcgaatggataagcttgacactgtgttcagctgccccttttgtaaccatggaaccagtgttgagtgccgacttgatatgaagaacttgattggcgaagcctcttgcagaatatgccaggaaagctttagcactgttataacagctttgactgaaccaatagacatatacagtgaatggattgatgaatgtgaacgtgttaacaaccttgaagaagaggatgatggggatcaggatgaaggttatgtacctagaaa

SEQ ID NO: 229182 - DNA, 374 bp, Gossypium hirsutum
atcctgggcatggagtcctgtggcatccacgaaactaccttcaactccatcatgaagtgtgacgtggacatccgtaaagacctgtacgccaacacagtgctgtctggtggcaccaccatgtaccctggcattgctgacaggatgcagaaggagattactgccctggcgcccagcacgatgaagatcaagatcattgctcctcctgagcgcaagtactctgtgtggatcggcggctccatcctggcctcgctgtccaccttccagcagatgtggatcagcaagcaggagtatgacgagtctggcccttccatcgtccaccgcaaatgcttctaggcggactgtgacttagttgcgttacaccctttcttgacaaa

SEQ ID NO: 229183 - DNA, 373 bp, Gossypium hirsutum
atcacccgggccgagatgtctcgctcagtggccttagccgtgctggcgctactctctctttctggcctggaggctatccagcgtactccaaagattcaggtttactcacgccatccaccagagaatggaaagccaaatttcctgaattgctatgtgtctggatttcatccatctgatattgaagttgacttactgaagaatggagagaaaatgggaaaagtggagcattcagacttgtctttcagcaaagactggtctttctatctcttgtactacactgaattcacccccaatgaaaaagatgagtatgcctgccgtgtgaaccatgtgactttgtcagggcccaggacagttaagtgggatcgagacatgt

SEQ ID NO: 229184 - DNA, 364 bp, Gossypium hirsutum
cccacgcgtccggtggccgacaaaggaaagaagatgaaagtagcatagaaagtataggaagagaaccatgaacaaatagatggagacctcgtcatttccatcgagaagcttcaagagatccaagatgagcttgagaagatcaatgaagaggcaagcgagaaagtcttggaagtggagcataaatacaatgaggttcgcaagccggtctatgataagcggaatgaaatcatcaattcaattcctgatttctggttaacagctttcttgagccatcctgctcttggtgatcttttgactgaagaggaccagaagatattcaaatatattaactcacttgaagtggaggattttaaagatctgaaat

SEQ ID NO: 229185 - DNA, 354 bp, Gossypium hirsutum
ctcacttcggaaggtcaggcccgcccgacatcaccgacacctactcccttctcgtcctcaacattaccttccgcacgactgctgatgatttgtttccgctcttcgacaagtacgggaaggtcgtcgacatcttcattcccaaagatcgaaggactggtgattctcgaggctttgcatttgtgcgctacaagtatgccgatgaggctcagaaagctgtagataggctcgatgggagagttgttgatggtcgggagataactgtcagtttgcaaaatatgggcctaatgcagagagaattcagaaaggaaggattattgaatcatttccaaggtcaagaagccgcagtcctcgcag

SEQ ID NO: 229186 - DNA, 339 bp, Gossypium hirsutum
gcttgtaataataaggatactaaattatgtgatttgcggattgatgatagagttttttcggatggtagggctcaacaaggaactcatatggcgggtgagactagtaacagcaaagatcacatttgggatgcatctagctgcacgaggataaaaacaatggatgggcatatgattaccacattgacgccttagctaggagctctactatgatatcttgtggaagtcgagataagagcaaccttcaaagagatatacgtgagcacgatgatcatcctcgtcaactgtctgaaaacaagtcacaggtctgcaggctgaagtggtcatatgacaaccgtgaac

SEQ ID NO: 229187 - DNA, 341 bp, Gossypium hirsutum
gggaggctaaacaagtgtggggtgattagtcctcgttttgatgtcggagtcaaagagattgagggttggactgctaggctacttccttctagacaatttggatatattgtgctaaccacatctgctggcatcatggaccatgaagaagctagaaggaagaatgttggtgggaaagtacttggctttttctactgagtcaaatttttgatattttcctttgttcttttttaatttcactccatgtagaacttgatactttactgcaattttaattttgtattgggagttataattatgtttttggttataatgtttgagattatgaattgttggtttgcctt

SEQ ID NO: 229188 - DNA, 363 bp, Gossypium hirsutum
atttgctgctacttgcatggccatggaaggtgttgaactggttaatggtttagagaataagatagcttgcaactcatacaagatctcttatgtgttggacaccgaagatttcttcttccgtaggagaagaaagtcaccgcaatgcagatcttcatacaataatcaagcaagagtacaacggttccagaaatttttatctgcttcgcagtaattcagtattctttctcagaccggcataaatgcagcccttgctttaacccaaccttgaaaaggccttcaaaactgaaacatgtttcttgaatgttcatagtttgatgctaattggtcatactagtagtgaaggatgatgaatggttaggaaat

SEQ ID NO: 229189 - DNA, 371 bp, Gossypium hirsutum
atgtctttgactacctgcatgccacagcattccagggcacacctctagcccaggctgtggaggggcccagtgagaatgtcaggaagctgtctcgtgcagacttgaccgagtacttcagcactcattacaaggcccctcgaatggtgctggcagcagctggaggagtggagcaccagcaactgttagaccttgcccagaagcaccttggtgacatcccttggacatacgcagaggacactgtgcccgctcttactccgtgccgcttcactggcagtgagatccgccaccgtgacgatgctctaccttttgctcatgtggccattgcagtagagggtcctggctgggccagcccggacaatgtggccttgcaa

SEQ ID NO: 229190 - DNA, 351 bp, Gossypium hirsutum
cccacgcgtccgcttaaaaagcacattgatgctaccctgggcagtggaaacctaagggaagcagtgaggctacctcctggggaggatttaaatgaatggctcgcagtcaacactgtggatttcttcaatcaggtgaatctgctctatggtaccctgactgagttttgtactcctgagaactgtcctacaatgaccgcaggccctaagtatgaatatagatgggcagatggcgtgcaaatcaagaaacctatcgaggtttctgccccaaaatacgtcgaatatctaatggactggatcgaaacacaacttgatgatgaatcaatatttcctcaaaaactgggtgcaccattt

SEQ ID NO: 229191 - DNA, 340 bp, Gossypium hirsutum
cctatctcttcaacgttcacaatgggcgcatttcaccgactcaacttgctccatttcacgctctctttagttgtcattgccgtcaatggccacaatataacggccattctcgaaggttttccagattactctgtttacaatagtttcctcacccaaacaaagctggccgatgagattaacacccgagagaccatcacttgccttgtcctcaacaatggggctatgtctgccctcacatccaaacaccccctttccgtcgtcaaaaacatcctcagccttcacgttcttctggactactatgacccccaaaagctccacaaaatctttgatggcactaccc

SEQ ID NO: 229192 - DNA, 366 bp, Gossypium hirsutum
tatccctttatttcctttgccgaacgtggggttttattacattcgccacatggcttctgcagatgtcgagtacacagtgctttgtcggaggtatcacatggaccattaacgaccgggctctccaagaatccttgagtgcttacggagagatcgttgattcgaagatcattaacgatcgtgagactggaagatccagaggctttggcttctgtactttccgtgatgagaaatctatgaaagatgctatagaaggaatgaacggtcggagactctatggaaggaatataactcgtaacgaagcacaaactcgcctaagccacagcagcagtggtggtggaggataaagaggaaacggggggtacaacc

SEQ ID NO: 229193 - DNA, 362 bp, Gossypium hirsutum
gggcgttcttcttgaagcagaaaagcgatatgtttttctcatttaagttttggaaaatcatgattgaaaaatagatggaaaaacaaataaaatacctccgtacaaacaatggcttaaagttctgttatgatgagtttaatagactgtgcaagtcagaagggatcgagagacacttgacagtttgtcatactgcacagcaaaatggcgttgcagaacgaatgaacaaaacgatcatggagaaggttcgatgtatgtaaatgtcaacttaccaaagtcattatgggccgaagcaacctctacttcatgttttttgatcaaccgatccccatccgttgccattgagaaaaagactccacacgaag

SEQ ID NO: 229194 - DNA, 378 bp, Gossypium hirsutum
ataacccccacttcatcttcgacgtgcacgtccacgaggtggtggacgcctcgctgtcagtcatcgcccagaccttcatggacgcctgcacgcgcacggagcataagctgagccgcgactctcccagcaacaagctgctgtatgccaaggagatctccacctacaagaagatggtggaggattactacaagggcatccggcagatggtgcaggtcagcgaccaggacatgaacacacacctggcagagatttcccgggcacacacggactccctaaacaccctcgtggcactacaccagctctaccaatacacacagaagtactatgacgagatcatcaatgccttggaggaggaccccgccgcccagaagatgcagc

SEQ ID NO: 229195 - DNA, 380 bp, Gossypium hirsutum
atgtcgcggcagtggtggcttcctatctccaaaaggcgccctccgactcctggcgccgcgctgctcgccgggccagtccggaaacaggtcgtggagccccgcaccactcccgctggttcccgaacgcggatcccttcttctgagagttgcgagcaactttcccttgtccccggcgctgcagcggctcggggaccgtggcagccgcaggtttctgaaccctgggccactctccccgtgcctcggcttcgcgctcgtgtagatcgttccctgtctggttgcacgctggggatcccggacctcgattctgcgggcgagatgcccctgggacacatcatgaggctggacctggagaaaattgccctggagtacatcgtgccctg

SEQ ID NO: 229196 - DNA, 378 bp, Gossypium hirsutum
atgcaagaactctgcgatgagaactgaaccaacaacggagagcaacagaaaggcagattccaggccggtggacgtgtcccctgacgggggttctcctccttcctgtgtgcctcaggcacttaacttttctccagaggaaagcgatactgttttctccaaaagcaccaccacagaagcagctcgggaggaaaccaagccgggtggagacgcagcccctagtgaggctcttcttgtagatatcaaactggacccactcgcagtcactccagatgctgcaagccagcccctcgttgacccccctctcattgacttctgcaataccccagaagcaaacgtggctgtgggatctgaaagcaggcctctgatcgacctcatgat

SEQ ID NO: 229197 - DNA, 354 bp, Gossypium hirsutum
gtttgagaaggaggctgctgagatgaacaaaaggtcatttaagtatgcatgggtgcttgacaagcttaaggccgagcgtgaacgtggtattaccatcgatattgccctctggaagtttgagactaccaaatactactgtactgtcattgatgcccctggacatcgtgacttcatcaagaacatgattactggtacctcacaggctgactgcgctgttctcattatcgactcgaccactggtggtttcgaagctggtatctcaaaggatggtcagacacgtgagcatgctttgcttgcgtttacccttggtgtcaagcagatgatttgctgctgcaacaagatggatgcaacaac

SEQ ID NO: 229198 - DNA, 372 bp, Gossypium hirsutum
atcccggataggcagtggcagaagagcatttggcagtgggtatcgcagggatgatgactacagaggaggcggggaccgctatgaagaccgatacgacagacgggatgatcggtcgtggagctccagagatgattactctcgggatgattataggcgcgatgacagaggtccccctcaaagacccaaactgaatctaaagcctcggagtactcctaaggaagatgattcctctgctagtacctcccagtccagtcgagctgcttctatctttggaggggcaaagcctgttgacacagctgctagagaaagagaagtagaagaacggctacagaaggaacaagagaagttgcagcgtcagctggatgagccaaa

SEQ ID NO: 229199 - DNA, 377 bp, Gossypium hirsutum
atgacctgactctctgaggctcattttgcagttgttgaaattgtccccgcagttttcagccatgtctgaaccaatcagagtccttgtgactggagcagctggtcaaattgcatattcactgctgtatagtattggaaatggatccgtctttggtaaagatcagcctataattcttgtgctgttggatatcacccccatgatgggtgtcctggacggtgtcctaatggaactgcaagactgtgcccttcccctcctgaaagatgtcatcgcaacagataaagaagaggttgccttcaaagacctggatgtggccattctcgtgggctccatgccaagaagagaaggcatggagagaaaagatttactgaaagcaaatg

SEQ ID NO: 229200 - DNA, 362 bp, Gossypium hirsutum
caaaggatcgatcttcgtaccgcactacaattcaaaggctacattcgtggtcctcgtcaccgacggaaacggccacgtcgaaatggtctgccctcacctttctaggcagagctcacactggtcctcccgagaacaagaagaacaagaagaacaagaagaacaagaagatgaaaggagaagtggacaatacaagagagtgagagcccagttatcaaccggtgacatatttgtagtcccagcaggccatccagtcacattcgttgcctcccaaaacaagaacctaggattgctcgggttcggactctacaacggccaagacaacaagaggatcttcgtggctgggaaaaccaacaatgtgagac

SEQ ID NO: 229201 - DNA, 379 bp, Gossypium hirsutum
atgtcagcgacatgtccgtggtcctctccatggacaacaaccgcaacctggacctggacagcattattgctgaggtccgtgcccagtacgaggagattgcccagaggagcaaggctgaggccgaggccctgtaccagaccaaggtccagcagctccagatctcagttgaccaacatggtgacaacctgaagaacaccaagagtgaaatcgcagagctcaacaggatgatccagaggctgcgggcagagatcgagaacatcaagaagcagtgccagactcttcaggcatccgtggctgatgcagagcagcgtggtgagaatgcccttaaagatgctcacagcaagcgcatagagctggagactgccctgcagcaggccaa

SEQ ID NO: 229202 - DNA, 386 bp, Gossypium hirsutum
gcccaactctttcatcctcacatcagcttagcgcttgcttcacttgtttgcattcattactagcgagctgcatcagtaggcaaagtgatcattactcattaaacgaggcttggactgcatgcaacagaaagcacgcttctcttgctgctcgtctctgtcagaatgtacaaaaggctttgctgcaatcagatgttcaatccaaaactgataaaactcctgtaacagcagctgattatggctcacaggcactggttagttttgtgctgcagcacgaacttcatgctgacattctcattagttgccgaggaggattctaaagatcttcgcaaagatggtgcctcagaaatagtagagcgcattacataacttgtgaacgactctttaac

SEQ ID NO: 229203 - DNA, 375 bp, Gossypium hirsutum
atggccaacttctctggactggaccagaagtttctagccggccagttgctacctccctttatcgcctccttcccctctggcaccgaggaggctatttccagacacttccacccctctctggccacgtcacccccgcctttaattcataaaggtgcccggcgccggcttcccggacacgtcggcggcagagaggggcccacggcggcggcccggccagagactcggcgcccggagcccgcgccccacacccgcgccccggcgggcagaccccgacccggcatgagcgccgccacccactcgcccatgatgcaggtggcgtccggcaacggtgaccgcgaccccctgccccccggctgggagatcaagatcgacccg

SEQ ID NO: 229204 - DNA, 357 bp, Gossypium hirsutum
taatttttcacttcactcccacactgcttcaacaatggcgacgcccacatttcgccggctagaccttacccttttaaccctttctttactcgccgtcgccgtcaatgctcacaacatcaccgccatactcgaaggtttccctgattactccgtttacaacgatttcctcactaaaaccaagctcgccgatgagatcaatactcgacaaaccatcacttgccttgttcttaataatggagctatgtctgctctcactgctaaacacccactttccgtcgttaaaaacatccttagccttcatgttcttttagattattatgacccacaaaaactccataaaatttccgatggtactac

SEQ ID NO: 229205 - DNA, 379 bp, Gossypium hirsutum
atggccgtgagtggtgcgagcgccgctttcgctttcccttcgcggtgcccactccgttcctcgtgcggcgctaggccccccgtcccggtcatggccacgctcagggtccagcccgaggcccaagccaaggtggatgtgtttcgtgaagacctctgtaccaagacagagaacctgctcgggagctatttccccaagaagatttctgagctggatgcatttttaaaggagccagctctcaatgaagccaacctgagcaatctgaaggccccgttggacatcccagtgcctgatccagtcaaggagaaagagaaagaggaacggaagaaacagcaggagaaggaagacaaggatgaaaagaagaagggggaggatgaagaca

SEQ ID NO: 229206 - DNA, 378 bp, Gossypium hirsutum
atctgccccagcacccaaatcagccacatccttgacaggtaggggtggctgtccactgggatggaggggggatctcaaaaaggcccccaacccacacatacagctcagcctgccccttccctaggcagctgccccggctgccccagctcttgtccagtgaaagtgtgaacctgcggatcgctgctggtgaaaccattgcactgctctttgagcttgcccgggaccttgaggtgcgagggacaaggatggggggtgcttggtgataccacctgcccatcacaggctggatgcagggggtgccacaaaaaacagagcagctttaggtcattatgcagaggaggtggccccaacacagattcatctgctagatgtcatgat

SEQ ID NO: 229207 - DNA, 365 bp, Gossypium hirsutum
tataagcacctacccataagcgaaccacggaggaaagcttggagagagacccaaaaacaatgtctaaggaagtgagtgaagaaggacagggtcgtaaggactatgtggaccctccaccggcacctctgattgatatggctgaactcaagtcatggtctttttacagagccctcatagctgagttcatagccactctcctcttcctctatgtcactgttgctaccgcaattggtcacaagaaacaacaagatgcatgtgatggtgttggtctcttgggtattgcatgggctttcggtggcatgatctttatccttgtttactgcactgccggtatctcaagtggacacattaaccctgcggtgact

SEQ ID NO: 229208 - DNA, 377 bp, Gossypium hirsutum
ataacaaggtggagctggaggccaaggtggacagtcttaatgatgagatcaacttcctgaaggtcctctatgatgcggagctgtcccagatgcagacccacgtcagcgacatgtccgtggtcctctccatggacaacaaccgcaacctggacctggacagcattattgctgaggtccgtgcccagtacgaggagattgcccagaggagcaaggctgaggccgaggccctgtaccagaccaaggtccagcagctccagatctcagttgaccaacatggtgacaacctgaagaacaccaagagtgaaatcgcagagctcaacaggatgatccagaggctgcgggcagagatcgagaacatcaagaagcagtgccagact

SEQ ID NO: 229209 - DNA, 365 bp, Gossypium hirsutum
cgttgaccaacatggtgaccgggtggggagcaccaagagtgaaaccgcagagctcaacaggatgatccacaggctgcgggcagagatcgagaacatcaagaagcagggccagactcttcaggcatccgtggctgatgcagagcagagtggtgagaatgcccttaaagatgcccacagcaagcgcatagagctggagactgccctgcagcaggccaaggaggagctggcacgaatgctgcgtgagtaccaggagctcatgagtgtgaagctggccctggacatcgagatcgccacctaccggaaactactggagggcgaggagggcagaatgtctggagaatgccagagtgccgtgagcatctctg

SEQ ID NO: 229210 - DNA, 365 bp, Gossypium hirsutum
ctgaaagcttactggcgatctttctccggtaaccatggcggctaacggtgaacgtgaggttcaaaagaactactggatggagcactccattgatttaacagaggatggtacgatacttgattccaaggacgcagatctcgacaaagaagaccgactcgaagtgctctccctgctcccgccatatgaagagaaatctattttggagttaggagctggcattggtcgatttaccggtgaattagctcagaaggctgatagtgttatagctttagacttcattgaggatgttatcaagaagaatgaaagcatcaatggacactataagaacatcaaattcctttgtgcagatgcgacttccccagatt

SEQ ID NO: 229211 - DNA, 379 bp, Gossypium hirsutum
atcattagtataggtttaggtggcgtgtttgtgtgtttttggtgaaacattagtataggtgtaggtggtggttgtgtgcttaactgaccccctaaaaacaagaccaaataagtaacttaagacacggaatgtattcctgtttatgacatggaattcaatacagcccgtcagtggtataaagacttttcctggattcctttaggatagggtcagagttggtttagtatctggccttcagtttttaaaagggcccattctttgatatagcagtggcgttaattttttttttcttttgcctttacaggtgagaaaccttaccactgtgactgggacggctgtggatggaaatttgcccgctcagatgaactgaccaggcact

SEQ ID NO: 229212 - DNA, 363 bp, Gossypium hirsutum
cggacgcgtgggaaaatcatgaggagcatttgtgttgtgcttgttatctctttgcctttccttctcggcattgcccagggtttcgatttctacgacaatgatttagcgtcggaggatagtttgtgggatctatacgagcgctggcggagccaccacacggtttccaggagtctcgacgagaaacatcggaggttcaatgtgttcaagcagaatgttttgcatgttcacaacaccaacaacaaggacaaaccttacaagttgaagatcaacaagtttgctgatatgaccaaccacgaatttaggaatgcttacgctagttccaagattaaacatcataagatgttccaaggacagtcccgtggc

SEQ ID NO: 229213 - DNA, 357 bp, Gossypium hirsutum
gcgaggcgatcgcgtatgaagaaacaaaagctactcgaagatttagttaacgaagtgagtgcattgcagaaaaataacacccagatctgtgaaaagatcaagttcacaacccaacgcttcgtcaaaatggaagcttccaacagtgtcttaagagctcaagtaattgaattgaccgagagcttgcagtccttgaactcgatgctgcatatggtggaagacataagcgggtacgacgtcgatatcccggagatccccgatcctctgatgaagccatggcaacttccttgtgcgacgcagccgatatgctcgacttttgatggataaaaattaaaaaaaaaacaaaaaaaaaaacccttc

SEQ ID NO: 229214 - DNA, 376 bp, Gossypium hirsutum
atggagccggagcgcatagacctcgcagacctcgccggcttcacactcacctcggtgtctgctgcacccgccgcttcttctcctaggccacgagacccagcggctagaaattcaccatgtctattctcaaggtccatgccagggagatctttgactctcgtgggaatcccactgttgaggttgatctcttcacctcaaaaggtctcttcagagctgctgtgcccagtggtgcttcaactggtatctatgaggccctagaactccgggacaatgataagactcgctatatggggaagggtgtctcaaaggctgttgagcacatcaataaaactattgcgcctgccctggttagcaagaaactgaacgtcacagaaca

SEQ ID NO: 229215 - DNA, 383 bp, Gossypium hirsutum
attcagcatctgctcaaggacagtcctgcctcacctgctccttctgaccatcttcctgcccagggctcaggattccgctggaagaatctcagccagagtcctgaacagcagcggaaagtgctgacgttggagaaggaggataaccagacctttggctttgagatccagacttatggccttcaccaccgggaggagcagcgtgtggaaatggtgacctttgtctgccgagttcatgagtctagccctgcccagctggctgggctcacaccaggggacaccatcgccagcgtcaatggcctgaacgtagaaggcatccggcatcgagagattgtggacatcataaaggcgtcaggcaacgttctcagactggaaactctatatgg

SEQ ID NO: 229216 - DNA, 362 bp, Gossypium hirsutum
ctccaagccgttgcagcatcttcttctttttttcatttttcttcccatttccttccaaccttttccctccttttcatgcttctatcctgaccaaccctttaacaaaccctaacaaccctcaacaaggccttcaattacgaatcgtatgaggtaacagagtaacagagagtagcagcaatggttcccaagttcgtgctactcctggtcatacaatgggttgtgttacctatgtcacgggagatggacctgatcaacctcagccaaggatggctttcacaggagatgctctgttgataaggggatgtgggaggacagattttcagatttttacattaccgaaagagacattgctatatccagct

SEQ ID NO: 229217 - DNA, 359 bp, Gossypium hirsutum
gcgccgagaggggtgtcctctacaacagagctggtttgattccacaatggaacgtcaacgctcacaaaatactctacatgttaagaggctgtgccagagtccaagtggtgaaccacaacggcgacgcagtgttcgacgataacgtggagcaaggtcagctcctgacggtgccacagaactttgcgttcatgaaacaagcaggaaacgaaggagccgaatggatttccttcttcaccaatagcgaagccaccaacaccccaatggctggaagtgtctccttcatgcgagcactgccggaggaagtggtggcagcgtcgtatcaggtgtcaagagaagatgcaaggcggattaagttcaac

SEQ ID NO: 229218 - DNA, 357 bp, Gossypium hirsutum
cccacgcgtccgcggacgcgtgggctttagcttcttcagcttccagagtggatcagaaaactttcatcgttagagtccaaaacgaagccaagccttccgttttcaccactcacaagcactggtatgaatcttcactttcctctgttctctccccatcaactcctatccaacttcttcacgtctacgacagcgttttccacggtttctcggctaagctttcgccgactgaagccctcaagcttcaaacgcttccccatttcatcgccgtcatacccgaacaagtccggcacttgcaaaccacgcgttctcctctcttcttaggtctcaaaaccaccgacagtgctggccttttgaaag

SEQ ID NO: 229219 - DNA, 382 bp, Gossypium hirsutum
  unsure (1)..(382): unsure at all n locations
atgcaggacacaaaggagagatgggggagcctggtgtgccgggccagtcgggggcccctggcaaggagggcctgatcggtcccaagggtgaccgaggctttgatgggcagccaggccccaagggtgaccagggcgagaaaggggaacggggaaccccaggaattgggggcttcccaggccccaggggtagtgatggctctgctggttccccggggccacctggcggtgttggtcccagaggccctgaaggacttcagggccagaagggtgagcgaggtccccctggagagagagtggtgggggctcctggggcccctggagcccctggcgagagaggggagcaggggcngccagggcctgcttgcccccgaggcgagaaggg

SEQ ID NO: 229220 - DNA, 360 bp, Gossypium hirsutum
cccacgcgtccggtgaggcagccgccggttcctttgaccaccaccaccaccaccaccacctctctgtgatcaaccttcactctctttttcaaggaaattagctgaaatggctggaggattaatccaccaggttttaaggaggaaatttcaatcacagtctgctgttcaagctttatcatggttttcatcaaggaaagttaatgacgatgcgggttctgctggtatgaggaccgttgcactccttggagctggtgtttcaggtttactaggttttgcaacagtagcatctgctgatgaggcagaacacggtttaggagttccaaattatccttggcctcacgcaggcatcctcagttcata

SEQ ID NO: 229221 - DNA, 377 bp, Gossypium hirsutum
atgactggtctaggtgctgctcctgaacttggtctctgagccatggcttcccatagacactcaggtccctccagctataaggtgggcaccatggcggagaagtttgactgccactactgcagggaccccttgcaggggaagaagtatgtgcaaaaggatggccaccactgctgcctgaaatgctttgacaagttctgtgccaacacctgtgtggaatgccgcaagcccatcggtgcggactccaaggaggtgcactataagaaccgcttctggcacgacacctgcttccgctgtgccaagtgccttcaccccttggccaatgagacctttgtggccaaggacaacaagatcctgtgcaacaagtgcaccactcggga

SEQ ID NO: 229222 - DNA, 361 bp, Gossypium hirsutum
ggaaagagtacaccccatgcttgcttggaaaataacaccacttgggatcttattgatgacattgaaaagctaagagaacacttgaaaattccagaatggcaggtctttggtggctcttggggaagtacacttgctcttgcttacagtgaatcacatcctgacaaggttactggcttggtcctaagagggatattccttttgcggaagaaagagatcgattggttttatgaaggtggtgctgctgttatttatcctgatgcttgggaaccgtttagagatcttattccagaaaaggagagggagagttttgttactggttatcacaggagactgaattctgaggatttggaaatacaatatg

SEQ ID NO: 229223 - DNA, 363 bp, Gossypium hirsutum
gctaagctttgagatttatcaatggcggagaagagtttcaagtacgtcatcctcggtggtggtgtcgctgccgggtatgcggcgagggagtttgccaaacagggagttcagcctggtgagctagccattatttccaaggaagcggttgctccatatgaacgtcctgctctgagtaaggcgtatctcttccctgagggagctgcaagacttcctggtttccatgtctgtgttggaagtggtggagagagattgcttcctgagtggtacaatgaaaaaggaattcagttgatccttagcactgaaatagtgaaagcagatcttcctgccaagactctagtaagcgcagctggagaaacgttcaaa

SEQ ID NO: 229224 - DNA, 366 bp, Gossypium hirsutum
cggacgcgtgggctagccttcttccttttcctccgcggctacatttccactctcgttcccgcgatatcaaagtaaaaatgaaggtggtcgccgcctacttgcttgccgtactcggaggaaacgcttctccttccgccgatgacttgaaggttattctcggatcagttggagctgaggctgatgatgataggatagagttgctattgtctgaagttaaaggcaaagatatcaccgagctaattgcaagtggaagggagaagttggcttctgttccttctggtggtggtgctgttgcggttgccgctcctacagctggtggtggcagtgctgctgcacctgccgctgaggccaagaaagaggagaagg

SEQ ID NO: 229225 - DNA, 314 bp, Gossypium hirsutum
ggaagaaatggaggtgcagcaaagaagcagtcccagaccataaatactgtgagagacacatgcatagaggccgacagcgttcaggaaagcttgtggaagcttctcaagctaccagtagtggtagtcgtattatcaggcatggaaatgctgacaccaacctctccatttctctgcaacttgataacagtaatactagcagtagtggcagcagcagcaatctttcttccggctttattggtttctccccaaagagtgttcttcgtggaagtaacccaaaatctgaatcttcaatacaatttcaagaaatttagaag

SEQ ID NO: 229226 - DNA, 374 bp, Gossypium hirsutum
atcggacacctccagtagcactcaacagctccagaatgagctgctttagtcgtcctagcatgtccccaacacctcttgaccgctgcagatcacctggaatgcttgaaccccttggcagctctagaacacccatgtctgtcctgcagcaagccggtggctccatgatggatggtccaggtccccgaatacctgaccaccagagaacatctgtgccagaaaatcatgctcagtccaggattgcacttgccctgaccgctatcagtcttggcactgctcggcctcctccgtccatgtctgctgctggccttgctgcaagaatgtcccaggttccagccccggtgcctctcatgagtctcagaaccgctccagcagcc

SEQ ID NO: 229227 - DNA, 369 bp, Gossypium hirsutum
atgcagtacatccaggaccggattccctcctggactggagccggcttcgtccgagtgcctgaaggggcttatttggagtttttcattgacgacataccatattccatggagtatgacatcctaattcgctatgagccacagctacccgaccactgggaaaaagctgtcatcacagtgcagcgacctggaaagattccacccagcagccgatgtggtaataccatccctgatgatgacaaccaggtggtgtcattatcaccaggctcaagatatgtcgtccttcctcggccggtgtgctttgagaagggaacgaactacacggtgaggttggagctgcctcagtacacttcctctgatagcgacgtggag

SEQ ID NO: 229228 - DNA, 345 bp, Gossypium hirsutum
attgctctgaaagaacactctatgtctaatatagccagtgtcaagagtccttatgaggcagagaactctggggaagagctggatcagaggtattccaaggccaagccaatgtgtaacacatgtgggaaagtattttcagaagccagcagtttgagaaggcacatgagaatacacaaaggagttaaaccttacgtctgccacttatgtggaaaggcatttacccaatgtaaccagctgaaaacgcatgtaagaactcatacaggtgagaagccatacaaatgtgaattgtgtgataaaggatttgctcagaaatgtcagctagtcttccatagtcgcatgcatcat

SEQ ID NO: 229229 - DNA, 356 bp, Gossypium hirsutum
tcgcggacccctgggcgaggggatgtgaactctctacttcttttgcttggattaatgtgccattcgctgccattgctgagccgtatgagtggagcatacggtgttctcacagtcgacccaacgctgcagttgtcaagagcaagcagcattgtcatgttgattgcatacgtgtcatacatagactttccactattcactcacaggcagttgtttgaagctccagaggaagcagaaggcgacgactattgaatatcagaagaagagccaataattggattttggagcgggcttatatcgctagttggaatgactgttgccatttctcttctctctggatatgtagtggacactattga

SEQ ID NO: 229230 - DNA, 312 bp, Gossypium hirsutum
atgtcttcctcagggtgctccacagcaattcccctatccaccaaactatggtacaaatccaggaaccccacctgcttctaccagcccgttttcacaactagcagcaaatcctgaagcatccttggccaaccgcaacagcatggtgagcagaggcatgacaggaaacatgggaggacagtttggcactggaatcaatcctcagatacagcagaatgtcttccagtatccaggagcaggaatggttccccaaggtgaggccagctttgctccatctctaagccctgggagctccatggtgccgatgccaatccc

SEQ ID NO: 229231 - DNA, 350 bp, Gossypium hirsutum
cggacgcgtgggcaagcggatgtgaactctctccttcttttgcttggattattgtgccattcgctgccattgctgttccgtatgagtggagcatccgctgctctcacagccgacccaacgctgcagttgtcaagagcaagcagcattgtcatgttgattgcatacgtgtcatacatagtcttccaactattcactcacaggcagttgtttgaagctccagaggaagcagaaggcgacgacgatggaatatcagaagaagagccagtaattggattttggagtgggtttatatggctagttggaatgactgttgtcatttctctcctctctgaatatgttgtagaaactat

SEQ ID NO: 229232 - DNA, 158 bp, Gossypium hirsutum
  unsure (1)..(158): unsure at all n locations
atcagatggccaggaaaagaagttctgggaatcagcctcacaggcattcccggagacctccggcatcagctcggtcttcagcagcacctagtncttctcaggctccaccacacccgtggctgtcacacgcacccacaagcgctccgtctcagggctct

SEQ ID NO: 229233 - DNA, 351 bp, Gossypium hirsutum
gttttataaccctttcagccccacactcccaactccattcattctctctcttttcttttgcttaatacaaatggcattaatggcagatcaccattccttggcagttgcatttggtgtcttaggtaacatcatctcagtccttggatatctggctccactaccaacattctacagaatatacaaaaagaaatcaacggaaagtttccaatcactgccttaccaggtggcattgttcagctcaatgctatggctttattacgcgttaatgaaaaaaggtgccttccttctcatcaccatcaactcctttgggtgtgttgtagagactatatacatagctatgtacatagctta

SEQ ID NO: 229234 - DNA, 373 bp, Gossypium hirsutum
agaggcgatattcgatgagcaggttgagaggggtcaggtcataaccgtaccccataatcatgcagaggtgaaaaaagcaggaaggcgagggtttgaatggatagcattcaagacaaatgccaatgctaagattagtcagattgctggacgtgtcttcattatgcgaggattgccggtggacgtgctggccaactcctttggtatatcccgggaggaggccatgaggttgaagcataacacacaggaggcgtcggtttttagcccaaggcaaggctcgcaacagtagatcaaacaactaatctaagtgtacgtacgttcgttattgcatcaacaataaaacccagatccccatatctggattctgaataaatat

SEQ ID NO: 229235 - DNA, 293 bp, Gossypium hirsutum
tcgcggacacgtggggagcttagtagttttcttgtagcaatgggtgatatttctttgagaaagactggggtagatgagaagagggctaaagtgcacacagagtccaaaactcttcttgagtatactcgaaaagcaatagctaggttaacctatttgaaaaggacattagcacaactagaagatgatgtggctccatgtgatgctcaaatggaaaaatgggagaccaactctggtggtatggcatcaaaggagcggcagtgcatgcaacagtataacaactataaagcattact

SEQ ID NO: 229236 - DNA, 347 bp, Gossypium hirsutum
cccacgcgtccggaagaagaagacaaccccagccgccgcagccgccaccaggaggaggaggagcaggggcgggaaagctcatcatgcaacaaccttctctgtgccttcgacagaaacttcctcgctcaagctttcaacgttgaccacgacatcattaggaaaatccaacgtgtacgaggaaatagaggcaccatcatcagagtcagggacagactccaagtcgtaacaccacccataatggaagaagaagaacgtgaggagcgccagcaggagcagcgataccgccatacgagaggagggtctcaagataatggcctcgaggaaactttctgctccatgaggatcaa

SEQ ID NO: 229237 - DNA, 385 bp, Gossypium hirsutum
attcatcctctcagtgggcgaggaagatgaagggtccatcaatgaggcagcctaggcggttgtggaggccatttacttccatggggagggcacctttgatacatccaagtcggatgggcagtttaagaagacagccagtaacaacaagctgaggacctacctgcctgacttccggttcacacctttcaagcaggcggtgaaggagacctgtgcttggttcactgacaactactagcaggcccggaaatgaaactggaaggcaggagcaagtgccagtggaccatctgctggcatagccaccacccatcaaccctgccaggagctgagggcaccacctgggcccacattccgtgcgctctgcagccccaagcatatatccagtggg

SEQ ID NO: 229238 - DNA, 312 bp, Gossypium hirsutum
cggactcgtgggcggacgcgtggggtaaaggattgggggtttttcttttttgtgcgtgaaaaaagagtggagctgtgcttgtagctgttgcagcaacaattggtaacttgctgcaaggatgggataatgccaccattgcaggcgctgttctatacataaagagagagtttagtttggaaagcgaaccaactatagaaggcctgattgtagccatgtctcttattggagccacctgcattactacctgctcgggaggcatatcggactggctaggccgccggccaatgctaattatctcggctggtctttatt

SEQ ID NO: 229239 - DNA, 352 bp, Gossypium hirsutum
ttctctcttgatctgctgcactacttgcaaagtaacgagctgaagccgtgctacaataacactagtgttttcaacaataaattaatcatagctgcagcttgtttcttttaaactctaaatataaaggaggccaaacatgccgcctcgtagataccaatttgggagggctgatgaggccactcatcccgactccatgagagccaccttggctgaattcctctccactatcattttcgtctttgccggcgaaggctcaattcttgctcttgacaagatgtacaaggatacgagtgcgacgcctgcaagactggtgatgatagcacttgcgcatgggttgtctctgtttgcagct

SEQ ID NO: 229240 - DNA, 308 bp, Gossypium hirsutum
atgtaacaggcaaaaatttccttgactgtccagatgagcttatggaaaagtcatttgatgtgaatttcaaagcacatttatggacttataaagcctttctacctgctatgattgctaatgaccatggacatttggtttgcatttcaagttcagctggattagttggagtaaatgggctggcagattattgtgcaagtaaatttgcagcctttgggcttgctgaatctgtatttgtagaaacatttgtccaaaatcaaaaggggatcaaaaccacaattgtgtgcccctttttttataaaaactggaat

SEQ ID NO: 229241 - DNA, 390 bp, Gossypium hirsutum
atgttaggacacacacaggagaaagaccttattactgcacagagccaggatgtgggagggcatttgccagtgcaacaaattataaaaaccacgtgaggatacacacaggggaaaagccatatgtttgtacagttcctgggtgtgacaaaaggtttacagaatattccagtttgtacaaacatcatgttgtccacactcattccaaaccttacaactgtaaccactgtgggaagacatacaagcagatctccacgctggccatgcacaaacggacagcccacaacgatactgagcccatcgaggaggagcaggaagccttctttgagccacccccaggtcaaggtgaagatgttcttaaggggtcccagattacatatgtaacaggtgtag

SEQ ID NO: 229242 - DNA, 368 bp, Gossypium hirsutum
gagaaatacacaagagaaaaaaaaaaaaacaagtgagcagataaattgaagacttttatttctgttaacatccattatgagtactgctggtcaagtcatccgttgcaaagctgcggtagcatgggagtcggggaagccactgtcaatagaggaagtggaagtggcaccaccgcagaaggatgaagtccgtattaagatactcttcacttctttatgtcacaccgatgtctacttctgggatgctaagggacaaaaccctctgtttcctcgcatactaggtcatgaagctggagggattgtggagagtgtaagtgagggggtgactgatctaaaggcaggtgatcatgttctccccatcttcacggggg

SEQ ID NO: 229243 - DNA, 372 bp, Gossypium hirsutum
caaggtttaatcagtattatagattgttcatccagagatctaagcttattagcttaagctataaaaatggtgaaaagatcgttgggctttttctttcttctcctcattgtcttagcctcgcaatggggggtgcagccaactgaggcaagggtttgccagtcacagagccataagttccacggtgcatgtttgagtagccacaactgtgcgatggtgtgcaggaacgaaggtttctccggcggcagatgtcgaggattccgtcgccgctgcttctgcactaagctttgctaatgcaagcttgcccttagctcatattttaaggatcatttcatgagtaaaagacctttatgtttttcgtgcatgcatgtcaat

SEQ ID NO: 229244 - DNA, 373 bp, Gossypium hirsutum
gataccttgtaatgtgtcaataaaccattccacagaggttgtttgctaagaactttggggtttccaagaattacaataccatatcgagcacgtgttaaggcaacattaagcctgcggggatcatctagaaatccaataccctaaaaagtttatagaacagtttaaaagtagcatgttagtttgttccataattaaagcatatagagagagagaggacagagagggttaaaatattagtattagacttggaatgaacaccataactagaggttaatccaccaaacaaatgaaaaatatcacaaagaaaaactttcaacaaacttatgaatagtgcagaaattgaatattagtttgacataagactgagattcaa

SEQ ID NO: 229245 - DNA, 372 bp, Gossypium hirsutum
atcgggtttgccgccagaacacaggtgtcgtgaaaactacccctaaaagccaaaatgggaaaggaaaagactcatatcaacattgtcgtcattggacacgtagattcgggcaagtccaccactactggccatctgatctacaaatgcggtggcatcgacaaaagaaccattgaaaaatttgagaaggaggctgctgagatgggaaagggctccttcaagtatgcctgggtcttggataaactgaaagctgagcgggaacgtggtatcaccattgatatctccttgtggaaatttgagaccagcaagtattatgtgactatcattgatgccccaggacacagagacttcatcaaaaacatgattacagggaca

SEQ ID NO: 229246 - DNA, 362 bp, Gossypium hirsutum
catactttccatttactagcaatttcttcaagttcttttctttgtttttttagtcaatggctgaccaccaccttcaaaacactcaaccaatgactcaccaaatggtgaaagccgctactgccgcaacagccggtggttccctcctcattctctccggtttaatcctagctggcaccgatattgcactcactatagccactccactcttcgttattttcagtccagttcttgtccctgctctcattgcaacagctctcctagcaacgggtttagtcgcctccggcggtttcggtgttgcagcctccacggttctgtcctggatttacaggtatgtgacggggaggcacccaccggcggcggat

SEQ ID NO: 229247 - DNA, 361 bp, Gossypium hirsutum
cggacgcgtggggagaaaacagaggcaggcagccatggcaaggatcaaggtgcacgagttaaggagcaaatcaaagacagagctgttgactcagctcaaggatttaaaagccgaactttctctccttcgtgttgccaaggtcactggtggtgcccccaataagctctccaagattaaggtggtgaggctatccattgctcaagtattgacggtgatatcccaaaaacagaaggctgctttgagggaagcttatacgaagaagaagtttttgcctcttgatctccgtcccaagaagaccagagctattcgccgccgccttaccaagcaccagcaatctttgaaaaccgagcgggagaaaaag

SEQ ID NO: 229248 - DNA, 382 bp, Gossypium hirsutum
atgtttttccaaaaccagtgactgcattggaatgtacattcagtaggtctgatccaacttcttatgcagggtacattgaagaccttaagaagtttctaaaaccgtatactttagaagaacagaagaacctcacagtctgtcctgatggagcactttttgaacagaagggtccagtttatgttgcatgtcagtttcctatttcattacttcaagcatgcagtggtatgaatgatcctgattttggctattcccaaggaaacccttgtattcttgtgaaaatgaacagaataattggattaaagcctgaaggagtgccaaggatagattgtgtttttgagaatgaagatataccaaatgtagcaggttatcctcataatggaat

SEQ ID NO: 229249 - DNA, 362 bp, Gossypium hirsutum
atctctgttctctccagcacctcccaacccactagtgcccggttcttttgctccaccaggaacaagccatcatgtctcgccagtcaagtgtgtccttccggagtgggggcagtcgtagcttcagcaccgcctctgccatcaccccgtctgtctcccgcaccagcttcacctctgtgtcccggtccgggggtggcggtggtggctttggcagggtcagccttgggggtgcttgtggagtgggtggctatggcagccggagcctctacaatctggggggctccaaaaggatatccatcagcactagtggtggcagcttcaagaaccgatttggtgctggggctggaggcggctatggcttttga

SEQ ID NO: 229250 - DNA, 352 bp, Gossypium hirsutum
  unsure (1)..(352): unsure at all n locations
gcgagatctccaagtacctcttcaagagggtgtttgctatgcaaagaaagattacaacttggcgaagcacccagaaatcgatgttcccaatcttcaagtcataaagctgatgcaaagcttcaagtcaaaagaatacgtgcgtgaaacttttgcatggatgcattattactggtaccttaccaatgatggcattgagttccttaggacatatctgaatcttccttctgagattgttcccgctactttgaagaaacaagctaagcctgctggtcgtnccatgggccctcctggtgaccgcccacgtggtcctcctcgctttggtgacggtgagaggagaattggtgatagagat

SEQ ID NO: 229251 - DNA, 364 bp, Gossypium hirsutum
cccacgcgtccgaaagagtcctgttactactcctcagctccaaacagcttcattcacagcagatacttgtcatgtagtagatcatgtttcatctaggtaccccaaagcaagtatttatgctgttggttggtctcttggaggcaatatccttgtcaattacttgggaagggagcaccataggtgctctctctctggtgctgtatcactgtgcaatcctttcaacttagtgattgcagatgaaaatctccgaaagggcttcaacaatatttatgacagagcacttaggggaggtctttctagaacttttgacaaacatgcttccctcttcgaagaaatgcatgatgaatataatgtccaagcgggt

SEQ ID NO: 229252 - DNA, 365 bp, Gossypium hirsutum
gcaatttcttcaagggcttttctttgtttttttaatcaatggctgaccactacctccaaaacactcaaccaatgactcaccaaatggtgaaagccgctactgccgcaacagccggtggttccctcctcattctctccggtttaatcctagctggcaccgttattgcgctcaccatagccactccactcttcgttattttcagtccaggtcttgtccctgctctcattccaacagctctcctagcaacgggtttcgttgcctccggcggtttcggtgttgcagctgtcacggtcctgtcctggatttacaggtatgtgacggggaggcacccaccggctgcggatcaattggatagtgcagggatg

SEQ ID NO: 229253 - DNA, 357 bp, Gossypium hirsutum
gtcccctctcctccttgaacctctcccacggctccgtcgttttcctctactaccagggtgaacgcaccgtccgcggcggaccccccgtctgtcccgccggatccttcgggcgtaagatgacgatggacgacctcatcgctaagcagacacggatcacccgccaggaatcgcctcactgcgattcggtttccttcgaccgcgattccgccaatgctttccagcggtacgtcaacgaaacgctggtgttcgccgtgaaacgcggcggctttatgtacggcaccgtctccgaagaaggtagggtggaagtcgatttcatttacgagccgcctcagcaagggatggaagatgatttgattc

SEQ ID NO: 229254 - DNA, 346 bp, Gossypium hirsutum
ccttgtcccacccttccgagagagaaacgctcagactgtctctagcttacatacaccaacagggaatggcggtgacattcaacgactcgggttctgctgccgtcttgagaaagctcgatgagtatgtcctcactcgcaaatacatgtctcgtgaccaagcttcaaaggatgatatcaccgtctacacagctctatctggggccccatcgtctagctatctgaatgtttctcgatggtacaaacacatcgatgcccttttgaggatcttacgggtgtattaagaacgctgcggtgtgactgctgaaggatttttttccactgaggctgtggccactcctccaattgc

SEQ ID NO: 229255 - DNA, 340 bp, Gossypium hirsutum
cccacgcgtccgcccacgcgtccgcaagttttatgaggcattctcaaagaacctcaagcttggtatccatgaggactctcagaacaggactaaaattgccgaattgctccgctaccactccaccaagagtggtgatgagctgaccagcttgaaggactatgtgaccagaatgaaggagggtcagaatgatatctactacatcactggtgagagtaaaaaggcagttgagaactctcccttccttgagaagctgaagaagaagggttatgaggtcctttacatggttgatgctattgatgagtatgctgtcggacagctcaaagaatttgagggcaaaaag

SEQ ID NO: 229256 - DNA, 260 bp, Gossypium hirsutum
atgctttgacgagctccagcgcatccatttccgcagtgacaaagggcactgtgtggatctgccagacacaggactctgcaaggagagcatcccgcgctggtactacaaccccttcagtgaacactgtgcccgctttacctatggcggttgttatggcaacaagaacaactttgaggaagagcagcagtgcctcgagtcttgtggcggcatctccaagaaggatgtgtttggcctgaggcgggaaaaccccattcccaaca

SEQ ID NO: 229257 - DNA, 370 bp, Gossypium hirsutum
caaaaaacatctttctgttcaattcaatcctcctttttctattcaaccataatgtcttgcttcattagcaaatacgccgatgagttggctaaaaacgctgcttacattggcacccctggaaagggtatccttgctgctgatgaatccaccggcaccatcggcaagcgtctttcaagcattaatgtagtaaatattgaagaaaacaggcgtgctctccgtgagctcctcttcactgctccaggagctcttcagtacctcagtggtgttattctcttcgaggaaaccctttatcaaaaaaccgcttcgggcaagcccttcgttgatgttttgaaagaaggtggtgtcctccctggcatcaaggtcgacaagg

SEQ ID NO: 229258 - DNA, 356 bp, Gossypium hirsutum
gcgtccacgcgtgcgggactctgagaaatacttctatgatacttacgaataccggcatgttggttttactcctgaaggggccaaacttcttcctaagagtcgccttctctttgaaaatgagtggcgtgcgattggagtacagcagagtcgaggttgggtccattatgctattcatcgccctgaaccacacatcatggtattgaggaggcctcttaactatcagcagcagcaggagaatcaggctcagcaagctatgcttgccaagtaattaaaatagcttttggtattttgaaagaaaaagggaggaaaacccgaatatggttatatctgcataaacaggatggatgttatggaat

SEQ ID NO: 229259 - DNA, 374 bp, Gossypium hirsutum
gttctagatcgcgaggggccgcccttttctttctttttctcctaaaccatcatgaatctcattaataggctcagccccaagcgtctctttcgatctaataaaaaagatagatccatcgtctgcaagttcgacccctcctcctatagttccggttccgccgcttcctcctcttcctcctccgaatccgtctgttccaccctcaaaggacatcagtacccttccgcggctaccgctggcttcgtaacgcccaccagtgttttgccccaaacatcacgtgactggtccgattttcccgctaatttttatctagaactctgtcaggcgtttaaaatgttagacaaagataacgacggcgttatatcaagaagcgagct

SEQ ID NO: 229260 - DNA, 249 bp, Gossypium hirsutum
cccacgcgtgcgcaacactttcgttctcccacaccattgtgacgctgagaaaatttaccttgtcaccaacggaagaggaacgcttacgttcttgacacatgaaaacaaagagtcttacaatgtagtaccgggagttgtagtcagagtcccagcaggaagcactgtgtacttggctaaccaagacaacaaggaaaagctaatcatagcagtgcttcaccgccctgttaataaccctggacaaattcgggg

SEQ ID NO: 229261 - DNA, 287 bp, Gossypium hirsutum
gcgaccacgcgtgcggggacaacaatgcccttgatgaagccatctatgggtctgatgaattccggatgtacgcttacaagatcaaacgctgtaccaggatgcgtagccacgattggacggagtgcccctacgcccaccgtggtgagaaggcttaacgccgggaccttctgaagatcccctacaccggcattgcctgccctgcctttcgtaacgggaaatgccaaaagggcgacgcctgcgagttcgctcacagcgtattagagtactggctgcaccccatgaagtac

SEQ ID NO: 229262 - DNA, 364 bp, Gossypium hirsutum
aggaaaaatggtgataggaatagaatatggtacggtaaaacagcagctagaagaagctgaggaagccatcatgcagctatttgatgtcaatcgcaaactgatgacacacgttgaagatcgttctcggtctctagatgggaaacctgcattagaatctgatgagagtggttcctttaggaggcggagagtatcagaacaagttcgaagagggtctgaaaaaatagtgcggttgcaattggaggtgcagaaaatacagttcatgttactgaaacttgacgaaaaagaaagcaaaggacgaaccaggatcatggagcgcaaaacaagagttgtattgcgggactatctttatggcgggataagaaag

SEQ ID NO: 229263 - DNA, 368 bp, Gossypium hirsutum
cggacgcgtggggtgctaacctttttcctttgcagactctctttgaacttaatcctaaaccccaaaattccctcctctttcaattaacttctcagaatgggagaaacgagggacaacgatgcttacgaggaagagcttctcgactacgaggaagaagaagagaaagcacctgactccgtgactgctaaagtcaacggcgaggccgggaagaagggctatgttgggattcacagttcaggattcagagacttccttttgaagccagagcttcttcgggcaattgttgactctgggtttgagcacccttccgaagtgcaacatgaatgtattccccaagccatactgggtatggatgtcatttgccaagc

SEQ ID NO: 229264 - DNA, 371 bp, Gossypium hirsutum
gataaataagcgtttgtctcagatttttgaagatggcccgtaccaagcagacagcccgtaagtcgactggtgggaaggctccaaggaagcaacttgctaccaaggctgcccgtaaatctgccccaaccaccggtggtgtgaagaagcctcatcgctaccgtcctggaactgttgctcttcgtgaaattcgaaagtaccaaaagagtactgagcttcttatcaggaaattgcctttccagaggcttgttcgtgaaattgcccaggacttcaagactgatttgcgtttccagagccatgctgttctagctctacaggaagctgcagaggcataccttgtgggtctttttgaagacaccaacctttgtgcgatc

SEQ ID NO: 229265 - DNA, 385 bp, Gossypium hirsutum
atctcaggctgcccacccccatcagtcacccagcctggtcaggcagcagacattccctcattacgaggcaagcagtgctaccaccagtcccttctttaagcctcctgctcagcacctcaacggttctgcagctttcaatggtatagatgatggcaggttggcctcagcagacaagcatacagaggttcctacaggcacctgcccggtggatccttttgaagcccagtgggctgcattagaaaacaagtccaagcagcgtactaatccctcccctaccaaccctttctccagtgacttacagaagacgtttgaaattgaactttaagcaatccctatggctgtgtatcttgtccataccagacagggagcaaggggtagaggtcaa

SEQ ID NO: 229266 - DNA, 357 bp, Gossypium hirsutum
cttaattatgtacctgctagtggtactgctatcatcaaaagtctcattgttcttagtttctttactagtaatcaccttgtcggtcgctgaaggagcaagctggtgcgtggccagcagtgatgcaagcaaccaagctcttcaaaccgcactcgactatgcatgcgcctctggagctgactgcacccctctacagtcagatgggcttggtttccttgccaacaccatccaagctcatgcttcttatgctttcaatagttactatcaacgtacagcaatagctcctggttcctgtgactttgctggcactgccactgttgccaaaactgatcccagttatggatcttgtatgtacccatc

SEQ ID NO: 229267 - DNA, 392 bp, Gossypium hirsutum
atggaatgcgcccgcgccggcttcccgcgcgcgcaccggcacaagctctgctgcctgcgccaggagctggtggacgcctttgtggagcacaggtacctcctctttatgaagctggctgccctgcagctgatgcagcagaaagccagccagctggagaccccctcctccctggaaaatggtggtccttcctccttggagtccaagtctgaggaccctccaggaccggaggcgggaagtgaggaggagggtagcagcgccagcggcctggccaaggtgaaggagctggcagagaccatcgccgcagacgacggcacagcagaccctcggagccgggaggtgatccgcaacgcgtgcaaggcggtcggctccatcagcagcaccgccttcgacat

SEQ ID NO: 229268 - DNA, 313 bp, Gossypium hirsutum
gaaagctggttcgcccccgtgcgccgttcccggattgccatgtggccccacccgttctccgaacacgggcgggggcaagctatgctggctgggccagcagctgcttgaagaatttgtggaagacatctacctcctttttatgaagcttcgcaaactgatgacacaccttgaaaatggttctcggcttttaaatgggtaacctctgtaaaaaggtgatccttactccttggattccaagtctgatgaccctacacgaccggccgcggggagtgaggaagttgggagcatcgccttggggctgcccaaagtgaag

SEQ ID NO: 229269 - DNA, 316 bp, Gossypium hirsutum
atcagcgacatgtccgtggtcctctccatggacaacaaccgcaacctggacctggacagcattattgctgaggtccgtgcccagtacgaggagattgcccagaggagcaaggctgaggccgaagccctgtaccagaccaaggtccagcaggctgcagatctcagttgaccaacatggtgacaacctgaagaacaccaagagtgaaatcgcacagctcaacaggatgatccagaggctgcgggcagagatcgagaacatcaagaagcagtgccagactctttaagcattcgtggctgatgcaaaacaagcgggtgag

SEQ ID NO: 229270 - DNA, 357 bp, Gossypium hirsutum
  unsure (1)..(357): unsure at all n locations
ctttgttcatcaatactaccttatcttacatcaatcccctgagctggttcaccggttttaccatgatagcagcaaacttggccgccccgaagaaaatggcggcatgagtattacaactactatgcaagccatcaatgagaagatactctcacttggttatggagaattcactgcagaaataacaactgtagacgcacaagactctcacaatggaggagtacttgttcttgtgactgggtatttaactggaaaggacaaagtgaagaggaaattcactcaaagtttttttttggcacctcaagacaagggctattntcgtttaaatgatgtttttagatttgtcgatgatacgaaaca

SEQ ID NO: 229271 - DNA, 352 bp, Gossypium hirsutum
gattcatcagtcttcttctctgagtagaggttttggatttgtaagcatttacaatgtcttcgtcctatctcccagcaaccactgactcaattgctctggccttagaagccaaaacaccatctgaagccatctcaatcctttaccgtgtactagaaaatcctgcatctgctcccgatgctctacggattaaagagcaggccataacaaatctatctgatcttcttagacaagagaaccgagcagaggagctcagaagccttctgacccaactgaggcccttttttgcactaattccaaaggcaaaaactgctaaaattgtccgtggtataattgatgatgtagctaagatacc

SEQ ID NO: 229272 - DNA, 333 bp, Gossypium hirsutum
tcgcggacgcgtgggtacggaggtggcagtcccccatcatacggaggtggcagtcccccatcatatggaggtggcagtccaactactcctattgatccaggaactccaagcattccctcacctccattcttttctgctccaactccaccaattggtggtacatgcgatttctggaggagtcaccccacactgatatggggtctgcttggttggtggggcactgtacgcaacgcatttggcgtgaccaacctttctggacttggaacaagcatgagcttgccccaagcactttcaaacacacttactgatggacttggggcgctttacccagaa

SEQ ID NO: 229273 - DNA, 347 bp, Gossypium hirsutum
cccacgcgtccgaccggagctaaattcgaggaggatcttgatgcaatgcttccaaaatgtgacattattgtcataaatatgcctctaactgagaagacaagagggatgtttgacaaagatcggatcgcgaagatgaagaagggagtcctgattgttaacaatgctcgaggagcgatcatggatactcaaagctgagctgatgctcgttcaagttgacacattgcaggtcacagttgagatgttcggtacccgcaacctgctacgaaagaccatccatggcgttacatgctaaatcaagctaagactcctcatatgtctggtaccaccattaatacgcagctgcgata

SEQ ID NO: 229274 - DNA, 367 bp, Gossypium hirsutum
gagcctggtgccttggttgaccctgaaggaaagggtctcagatcattgtcgagagcccagctggatgagattctaggaccagctgagtgcactatagtttcttcactatcaaactatcatttggactcctatgtcctttctgagtctagcctctttgtatatccatacaagatcatcatcaaaacctgcgggacaacaaagctacttgtttcgatcccacccatcctgaagttggcgggtagcctttctcttaccgtaaaatctgttcggtacactcgtgggagttttatcttccctgctgctcagccatatcctcatcgttacttcactgaagaagttgttattcttgatagctattttggcaagc

SEQ ID NO: 229275 - DNA, 312 bp, Gossypium hirsutum
ctcaagataatggcctcgaggaaactttctgctccatgaggatcaaggagaaccttgctgaccctgaacgtgccgacattttcaacccacaagccggtcgtatttccaccctcaacaggtttaacctccccatcctccaacgacttgagctcagcgccgagaggggtgtcctctacaacagagctggtttgattccacaatggaacgtcaacgctcacaaaatactctacatgttaagaggctgtgccagagtccaagtggtgaaccacaacggcgacgcagtgttcgacgataacgtggagcaaggtcagc

SEQ ID NO: 229276 - DNA, 346 bp, Gossypium hirsutum
aacatggctggtctatgacttcagagtatcaactggcagacggtctttaaccgacaagggcattacacacacaagttctctagccgggagctcatcttgcggagaggccaaaactttcaggtcttaatgctcatgaacaaaggccttggctctaacgaaagactggagttcattgtctccacagggccttaccccttcgagtcggccatgacgaaggctgtgtttccactctccaatggcagtagcggtggctggagtgcggtgcttcaggccatcaatggcaatactctgactattagcatctccagtcctgccagcgcacccataggacagtacacaatggccc

SEQ ID NO: 229277 - DNA, 381 bp, Gossypium hirsutum
attgcgattctacgacggcatctgcaaatgggaggagggcagtcccacacctgtgctgcacgtgggctgggccacctttcttgtgcagtccctaggccgtttcgagggacaggtgcggcagaaggtgcgcatagtgagccgagaggccgaggcagctgaggccgaggagccatggggcgaggaagcccgggaaggccggcggcggggcccacggcgggagtccaagccagaggagcccccgccacccaagaagccagcactggacaagggcctgggtgccagccagggtgcagtgtcaggacccccccggaagccccctgggacggtccctggcacagcccgaggccctgaaggtggcagcacggctcaagtgccagcgcc

SEQ ID NO: 229278 - DNA, 277 bp, Gossypium hirsutum
gctttccaatacaaagcttcatattatcttttttagttccgacaaaagaaaacgaaaaaaatagaagaaatacaatcgttttctttttgaagtcgggttttagtttttggggagaaaaaaatgttgggagtatttagcagtgcgatagtgtctccgccggacgagctggtggcggccggttgccgaactccatcacctaagataacggcggatgctctggtgaaacggttccttgagacgaacttctccggcgtgttcatgcagatcggagaccatg

SEQ ID NO: 229279 - DNA, 336 bp, Gossypium hirsutum
gcgtttgtctcagatttttgaagatggcccgtaccaagcagacagcccgtaagtcgactggtgggaaggctccaaggaagcaacttgctaccaaggctgcccgtaaatctgccccaaccaccggtggtgtgaagaagcctcatcgctaccgtcctggaactgttgctcttcgtgaaattcgaaagtaccaaaagagtactgagcttcttatcaagaaattgccttttcaaaagcttgttcgtgaaattgcccaagacttcaagactgatttgcgtttccagagccatgctgttctaactcttcaggaagctgcagaggcataccttgtgggtcttt

SEQ ID NO: 229280 - DNA, 381 bp, Gossypium hirsutum
atctttttcatacgtagacgcctcctgtataatagatttgatctggagctcttcactcccggtgacgtagaacgagagtgcaatgaagaactttgcaattatgaggaagccagagagatttttgtggatgaagataaaacgatcgcattttggcagaaatattcagctaaaggaccaaccacaaaatcagatggcaacagagagaaaattgacgttatgggccttctgactggattgattgctgctggagtatttttggttatttttggattacttggctactatctttgtatcactaagtgtaataggctacaacatccacagtaagtactaagtaaaattatttaattcattactagacattctatattattattttaa

SEQ ID NO: 229281 - DNA, 382 bp, Gossypium hirsutum
attcctgttgaatagtccaccctccttgcactctacctgagacagctgcagcctgcaattcactcccacctcctgggattgcactggatcggtgtgctcagaacaaggtgcccgcccagttgcagccatgaggatccgtagcctcaccctgctctccttcctcctactggctgctcaggtgctcctggtggagggagaaaaaaaaagtgaagaatggacttcacagcaaagtggtctcagaacaaaaggacactctaggcaacacccagattaagcagaaaaacaggcctgggaacaaaagcaagtttgtcaccaaagaccaagccaactgcagatgggctgcgactgagcaggaggagggcatctctctcaaggttgagtg

SEQ ID NO: 229282 - DNA, 381 bp, Gossypium hirsutum
atcagaggagcctgagaagaggcagaggagggcgaaacatggctgctctaggactccagagtatcaactggcagacggccttcaaccgacaagcgcatcacacacacaagttctctagccgggagctcatcttgcggagaggccaaaacttccaggtcttaatgctcatgaacaaaggccttggctctaacgaaagactggagttcattgtctccacagggccttacccctccgagtcggccatgacgaaggctgtgtttccactctccaatggcagtagcggtggctggagtgcggtgcttcaggccatcaatggcaatactctgactattagcatctccagtcctgccagcgcacccataggacagtacacaatggccc

SEQ ID NO: 229283 - DNA, 307 bp, Gossypium hirsutum
atgcgggctggggggcggctatggcggtggcttcagcagcagcagcagctttggtagtggcttcgggggaggatatggtgctggcttgggtggtggctttggtggtggctttggtggtggctttgctggtggtgatgggcttctggtgggcagtgagaaggtgaccatgcagaacctcaacgaccgcctggcctcctacctggacaaggtgcgtgctctggaggaggccaacgccgacctggaagtgaagatccgcgactggtaccagaggcagcggcccagtgagatcaaagactacagtccctac

SEQ ID NO: 229284 - DNA, 388 bp, Gossypium hirsutum
atccagatgcagacccacatctcagacacatccgtggtgctgtccatggacaacaaccgcaacctggacctggacagcatcattgctgaggtcaaggcccaatacgaggagattgctcagaggagccgggctgaggccgagtcctggtaccagaccaagtacgaggagctgcagatcacagcgggcagacatggggacgacctgcgcaacaccaagcaggagattgctgagatcaaccgcatgatccagaggctgagatctgagatcgaccacgtcaagaagcagtgtgccagcctgcaggccgccattgctgatgctgagcagcgtggggaaatggcactcaaggatgccaagaacaagctggaagggctggaggatgccctgcaga

SEQ ID NO: 229285 - DNA, 379 bp, Gossypium hirsutum
atcctctacctcacgaaggttggaatatctccagataaactccgcttccggcagcacatggagaatgagatggcccattacgcctgtgactgttgggatgcagaatccaaaacatcctacggttggattgagattgttggatgtgctgatcgttcctgttatgacctctcctgtcatgcacgagccaccaaagtcccacttgtagctgagaaacctctgaaagaacccaaaacagtcagtgttgttcagtttgaacccaataagggagcaattggtaaggcgtataagaaggatgcaaaactggtgatggagtatcttgccatttgtgatgagtgctacattacagaaatggagatgctgctgaatgagaaaggggaat

SEQ ID NO: 229286 - DNA, 358 bp, Gossypium hirsutum
atgtgaaagccggcttcgccggggatgacgcccctagggccgtgttcccgtccatcgtgggccgcccccgacaccagggcgtcatggtcggtatgggtcagaaagattcctacgtgggcgacgaggctcagagcaagagaggtatcctgaccctgaagtaccctatcgagcatggcatcatcaccaactgggacgacatggagaagatctggcaccacaccttctacaacgagctccgcgtggctcccgaggagcaccccaccctgctcaccgaggcccccctcaatcccaaggccaaccgcgagaagatgacccagatcatgtttgagaccttcaacgtgcccgccatgtacgtggc

SEQ ID NO: 229287 - DNA, 282 bp, Gossypium hirsutum
cgggccaccaatccggccttccagggggggggtttaaggttattggccttggggaacctttttcttccatgtggataagggagaacttggtttcccttgacgagccggcatttttaacccacaagcccggcgtattttcacccttaacaagtttaaccttcccattcttcaacgacttgagctcaacgcccagaggggttgccttttaaaccaaacttgtttggttcccaaatggaaccttaacctttaaaaaatacttttcattttaaaaggctttgccaa

SEQ ID NO: 229288 - DNA, 387 bp, Gossypium hirsutum
atagacaagccccaggctgtgcccgtggatgtccatatatggcagattgcccaacgtgactacagctggcaccctaccacgtcccaggcgaagggaccaagcccccagagcaacaaggaactgggaaactttttccggagcctgtggggacctcatgctggctgggcccaagcggtgctgttcagtgctgacctgcaccaatcccaccgtgctcaggagccaccagcaaagcgcagaaagggttccaaagggctggaagtctagatggggcaccctggacaaaggaattcccccaagccccttcccctccattccccacttctctctccccatccccacccagtctcatgttggggaggggcctccctgtgaccacctcaagggcca

SEQ ID NO: 229289 - DNA, 216 bp, Gossypium hirsutum
ggatagtgcacactatctatctccttatgctgtgaaggttcagtctctaagtgttaaattgcctgcttctagaattgaattctatacaaaactggagaacacaaagattcatggttcagaaaatcaaatatggcccttatcagaatgatcctttattctccggcccagccatagcaggtcattttgcaagctacataccctatgatgacgctcatt

SEQ ID NO: 229290 - DNA, 366 bp, Gossypium hirsutum
gaatctgataaactggatggattacctaatgtgatttcagcaatatcagcacagaaatatgtccaaaagggttatgatgcttaccttgcatatgtgctggatactaaggcatttgagttaaagattcaatcagtgctggttgtatgtgaatttcctgatgtattcccagaagaattacctagtttaccatcagatagagaagtggaattctctatagatctcatttcgggaacaacacctatatctatagcaccttacaaaatggctcttactaaattgaaagagttgaaagtgcagttgcaagagttgattgaaaaaagttttgctcgacctaatttctcaacttggggtgcgttggttctattt

SEQ ID NO: 229291 - DNA, 383 bp, Gossypium hirsutum
atggcaaccgcatcacgccgtcctatgtggccttcactcctgaaggggaacgtcttatcggcgatgccgccaagaaccagctcacctccaaccccgagaacacggtctttgacgccaagcggctcatcggccgcacgtggaacgacccatctgtgcagcaggacatcaagttcttgccgttcaaggtggttgaaaagaaaactaaaccatacattcaagttgatattggaggtgggcaaacaaagacgtttgctcctgaagaaatttctgccatggttctcactaaaatgaaagaaaccgccgaggcttatttgggaaagaaggttacccatgcagttgttactgtaccggcctatttcaatgatgcccaacgccaagcaacc

SEQ ID NO: 229292 - DNA, 368 bp, Gossypium hirsutum
cttaatttccatttactagcaatttcttcaagttcttttctttgtttttttaatcaatggctgaccactacctccaaaacactcaaccaatgactcaccaaatggtgaaagccgctactgccgcaacagccggtggttccctcctcattctctccggtttaatcctagctggcaccgttattgcgctcaccatagccactccactcttcgttattttcagtccagttcttgtccctgctctcattgcaacagctctcctagcaacgggtttcgttgcctccggcggtttcggtgttgcagctgtcacggtcctgtcctggatttacaggtatgtgacggggaggcacccaccggctgcggatcagttg

SEQ ID NO: 229293 - DNA, 358 bp, Gossypium hirsutum
ttcttgtcctcaggctgaagacattatcaaggagcaagttaagctactgtacaagcgacacaaaaacactgctttttcttggctgagaaacattttccatgactgtgctgtccagtcatgtgatgcttcactgctgctggactccacaagaaggagcttgtctgagaaggagacagacaggagctttggcctaaggaatttcaggtacattgagaccatcaaagaagctgtagaaagggaatgtcctggagttgtttcttgtgctgatatccttgttctgtctgctagagaaggcatcgtttcgttgggaggcccttacattcctctcaaaactggaagaagagacggtagaaggagc

SEQ ID NO: 229294 - DNA, 360 bp, Gossypium hirsutum
gaaaaccacaaaagcttcagtgtttcttcttttcatcatcttcttagtcacaccatcatcctttttgtttggtgtggccaacgctacaaatgaacctgtgctcgacactgatggcaacgaagtccaaacaggcaccgaatactacgttgtgtcggcgatatggggtgctggtggtggtgggcttgccctaggcaggccaagcggaaacccatgcccggaagtcgttgctcaaagacgatctggtgacgacggtataccggtgatattttctagttcggactccgacgatggagttgttcgcctatcctctgacataaacatagagtttgttccgctcagacccagactttgccgaacaac

SEQ ID NO: 229295 - DNA, 363 bp, Gossypium hirsutum
tgaaggcaaagaagaaggatacaggaatagtgtatgctttgaagatcatggacaaaaagttcatcaccaaggaaaataaaacagcttacgtaaaattggaacgtatcgtgcttgaccaactggaccatcctggtattatgcgactctattttacatttcaagataatttctcactatacatggcacttgaaccctgtgaaggtggagaactttttgaccaaataaacagaaaaggtcggttaccggaggatgaagctcggttctatgctgcaaaagttgtagatgctcttgaatatatacacagcatgggattgatacatagagatattaagccggagaacttgcttcttactaaagatgggc

SEQ ID NO: 229296 - DNA, 369 bp, Gossypium hirsutum
ctttccttcaatccaatccaatccaatccaggtaagggctaaggcaagagggagtgaaaatggttgagaaaacaagaggaagaaaggaagaggtggtgaccagggagtacaccatcaaccttcacaagcgcctccatggctgcacattcaagaagaaggctcccaaggctataaaggagattaggaagtttgcagaaaaagcaatggggacaaaggatgtgagagttgatgtcaagctgaacaaacatatctggagccgagggatccgaagtgttcctagaaggattagggtccgcattgcccgcaagagaaatgatgatgaagatgcgaaggaagagctctactctctagtaactgttcctgaaatcc

SEQ ID NO: 229297 - DNA, 382 bp, Gossypium hirsutum
atcacaaaacatgggcctgccccagaaccgtatcattttttcacctgttgctcctaaagaggaacatgtcaggagaggccagctggctgatgtctgcttggacactccactctgtaatgggcacaccacagggatggatgtcctctgggcagggacccccatggtgactatgccaggagagactcttgcttctcgagttgcagcttcccagcttacttgcttaggctgtcttgagcttattgctaaaaacagacaagagtatgaagacatagctgtgaagctgggaactgatctagaatacctgaagaaaattcgtggcaaagtctggaaacaaagaatatctagccctctgttcaacaccaaacaatacacaatggaacta

SEQ ID NO: 229298 - DNA, 377 bp, Gossypium hirsutum
atcccacactgtgcccatctacgaggggtatgccctcccccatgccatcctgcgtctggacctggctggccgggacctgactgactacctcatgaagatcctcactgagcgcggctacagcttcaccaccacggccgagcgggaaatcgtgcgtgacattaaggagaagctgtgctatgtcgccctagacttcgagcaggagatggccacggcggcttccagctcctccctggagaagagctacgagctgcccgatggccaggtcatcaccattggcaacgagcggttccgctgccctgaggctctcttccaaccttccttcctgggcatggagtcctgtggcatccacgaaactaccttcaactccatcatgaagt

SEQ ID NO: 229299 - DNA, 364 bp, Gossypium hirsutum
cggacgcgtggggcgatttgcaatctcaactcaccgtttctcacgattggattctccttaaaatcatggctgctcagattagcaagaagcgcaagtttgttgcggatggagtgttctacgcggagctaaatgaggttttgacaagggagcttgctgaggatggatactccggagttgaagtcagagttactcctatgcgtactgagatcatcatcagagctactcgtactcaaaatgttcttggtgagaagggtagaaggattagagagttgacttctgttgttcagaaacgattcaagtttccggagaacagtgtggagctctatgctgagaaagttaacaacaggggtctttgcgccattgc

SEQ ID NO: 229300 - DNA, 365 bp, Gossypium hirsutum
cccacgcgtccgatatactattacttttctttttcatcatccatggctgaccgtgaccgtgaccctgaccgcaaccagcctcaagagattcagctacttcaccctccaccccactaccgtcaaacagaaccatcaagcacccagattgtagctgtcctcactctcctccctgtcggtggctcattgcttgctttggcagcgcttacactcaccggcaccctcatcgggcttagcatcgccatacccctcttcattatcttcagcccagttattgtccctgccaccatcgccatttccatggcggtggctggtttcttgtcgtcgggagcattcgggttgacggggctgtcttcgctcaactatgg

SEQ ID NO: 229301 - DNA, 368 bp, Gossypium hirsutum
cggacgcgtggggtgttttgcttttcatactcatttagcccctttcattagcatcaaaattactccagttttctttatcactgaaaaatgtcttgctgtggtggaaactgtggctgcggtactggctgcaagtgtggcagtggctgtggaggatgcaagatgtatccagacctgaacgctgccgagatgaccacaactgagactctggttcttggtgtagcaccccagaaagcacactttgagggagctgagatggaattcggggctgagaacggctgcaagtgtggagacaactgcacctgcaacccttgcaattgtaaatgattagagaccaaagccaaagctccctggaagcagaggcgcctttg

SEQ ID NO: 229302 - DNA, 384 bp, Gossypium hirsutum
atggagaagaacggggagctagcatcatggcagaacaggatgtggaaaatgatcttttggattacgatgaagaggaagagccccaggctcctcaagagagcacaccggctccccctaagaaagacatcaagggatcctacgtttccatccacagctctggcttccgggactttctgctgaagccggagctcctgcgggccatcgtggactgtggctttgagcatccgtctgaggtccagcacgagtgcattccccaggccatcctgggcatggacgtcctgtgccaagccaagtctgggatgggcaagacagcggtcttcgtgctggccaccctacagcagattgagcctgttaacggacaggtgacggtcctggtcatgtgcc

SEQ ID NO: 229303 - DNA, 364 bp, Gossypium hirsutum
cccacgcgtccgagcctcactccgccatcttcaataatttcttccgttgatctttgttagagattagctttttaatttttcattatgggaaagatcaagatcggaatcaatggatttggaaggatcgggcgtttggttgcgagagttgctctccaaagcgatgatattgagctcgttgctgttaacgatcctttcatcaccactgaatacatgacctacatgtttaagtacgacagtgttcacggtcaatggaagcatcatgagcttaaagtgaaggactcaaagacccttctctttggtgaaaagcctgtcacagttttcggtattagaaaccctgaggaaattccatgggctgaggctggag

SEQ ID NO: 229304 - DNA, 365 bp, Gossypium hirsutum
ctcttctctcccgaaggaaggaaatcggggaaaaatgaaaatggaaggaatcgaaggcgacgcctcggtgggaggagcagggcgttacattttgaatccgacgcgaataaacagcgaggacataatattttgcgttgatgtggacgcagagtcgcttgttgaaatgaaaacagcaggagtcaccagattggattccataaagcaagctatccttctctttgtcaattccaagctctctatcaaccccgaccaccgcttcgctttcgccactctctccaaaaccgcctcttggcttagaaaagagtttagtagtgatgttgagtctaccattggtgctgttcgagcactctcggctaccactgtct

SEQ ID NO: 229305 - DNA, 359 bp, Gossypium hirsutum
  unsure (1)..(359): unsure at all n locations
atgtccagcagcggtccagagcgcgcgaggttcggggagctcggcgaggctgctggtacctgcgtccgcccggcggacggctgctctggtttgtgacttccggacaggacggccatcctctccagaatgaagatcttcttgccggtgctgctggctgcgcttctgggtgtggagcgagccagctcgctgatgtgcttctcctgcctgaaccagaagagcaatctgtactgcctgaagccgaccatctgctccgaccaggacaactactgcgtgaccgtgtctactagtgccggcattgggaatctcgtgacatttggccacagcctgagcaagacctgttncccggcctgccccctccc

SEQ ID NO: 229306 - DNA, 365 bp, Gossypium hirsutum
cccacgcgtccgataattttgatcaactgctagcgctgcgacgtgaacaaaatcctcggtttattaatgaactgatctctatgttcaccaacgatgctgaagcttacattgccgaaatcactaatgctctgagcttaactgaggtggacttttcaaccatcataagcaaactccatcagctcaaaggcagcacctctggcattggcggtcaccggatgtatcaagcttgttgcgagttacgtgtcgccgccgacgacggcgacaaagacaggtgcgatgaattatttctgcgagtgaaggaggagttcaatactttgaagcaatgcttggattccatatcccagatgcggagcaacatcatcagc

SEQ ID NO: 229307 - DNA, 357 bp, Gossypium hirsutum
agaaaagaagatttctttggaaattaaaagcagtagctcttaattaattattttattttttatttttacaaggctcaacggcaggagtaagcagaatcctgcaatcaaattccatccatagaatctggagtcgggactgtaaattatgagaacagttgacattcaattgtattggtgaagaccggaaggaacgtgtaattaattagagagtaaacaagacagagatgttctcactcttttatggactttataagtacctatttagcaagacagagtttcatgtactcattcttggaatcgacaaggctgggaaaacaactttgttggagaaattgaaatccgtatactcaaacttgg

SEQ ID NO: 229308 - DNA, 366 bp, Gossypium hirsutum
cccacgcgtccggaagcactgtgtacttggccaaccaagacaacagggaaaagctaaccatagcagtgctgcaccgacctgtcaataaccctggacaattccagaaattcttccctgctggacaggaaaatcctcagtcatacttacgaatcttcagccgggaaattcttgaggctgtcttcaatacacgaagtgagcagctagacgagctgtttggtgggaggcaaagccatcgaaggcagcagggacagggaatgttccgtaaagccagccaagaacaaataagggcattgagccaaggagctacttcaccaagggggaaaggtagcgagggatacgccttcaacttattgagccaaacccctc

SEQ ID NO: 229309 - DNA, 318 bp, Gossypium hirsutum
atggaaaggcttcaatgaagggctgtgggagatccagaacaacccccacgccagctacagcgcccctccgccggtgagctcttccgacagcgaggcccccgaggccaaccccgccggcggcagtgaggctgacgaggacgacgaggaccggggagtcatggccgtcacagcggtgactgccacagctgccagcgacaggatggagagcgactcggactcagacaagagtagcgacaacagtggcctgaagaggaagacgcctgcgctaaagatgtcggtctcgaaacgagcccgaaaggcctccagcgacctgaatca

SEQ ID NO: 229310 - DNA, 339 bp, Gossypium hirsutum
atttttcaagaaccctagtttcctaaatcacctttccaaaatgccttcaattccagaagagccactgctggccgcgaacccagaccgattctgtatgtttccgatccaatacccagaagtatgggaaatgtacaagaaagccgaagcgtccttttggaccgcagaggaagtcgatctggcttccgatcttcgccactgggtaactcttacccccgatgagcatcacttcattagtcacgttctcgactttttcgccgtctccgatggcatagtcctggagaaccttgctgttcggatcatgaaagaggtccagatctccgaggcgcgtgctttttatgg

SEQ ID NO: 229311 - DNA, 361 bp, Gossypium hirsutum
cggacgcgtggggtgaacatgaaggcctgaagtacccggttttatcggtttgtatcgataagaagacggtgattcgagtaaagaggctgcaatggaattttagaggaaaccagacgatatttgttgatggattgtttcttcagccatatcgcctaaaacaaggcctatctcggaatcaaccatgactaaaacatagaacccatcaacaggttcgggtcccgtatcatacttagcagtggaaagatcccagaagacttcgatcttggaatgatcggattcgatcactttgttgcctttcttcttcctgaagaatctcaagttggtgttgagcttgaaagatgtggaagggtcatcaccgatg

SEQ ID NO: 229312 - DNA, 370 bp, Gossypium hirsutum
cggacgcgtgggcggcagaagaagcgaggatgatcctcaacagaggtacgaggactgccggaagcgatgccaattggagacacgtggacaaacggagcaagacaagtgtgaagacaggtgtgaaacgcagttgaaggaggagcagcagcgtgacggagaagatcctcagaggagataccaggattgccgacaacactgccaacaggaagaaagaaggctgcgtccacattgcgaacaaagctgcagggaacaatacgagaaacagcagcagcagcagcctgacaagcaattcaaggagtgtcaacagcgttgccaatggcaagagcaaaggcccgaacggaagcaacaatgtgtgaaggaatgcagggaa

SEQ ID NO: 229313 - DNA, 330 bp, Gossypium hirsutum
ctttgatggtgcatcaaatgcattgtggcatgggattggagcagtcttagtatcaccagaagggaaccattatccgttcactgccaggctgaatttcttctgtaccaataacatagcgaaatatgaggcctgtatcatgggactttgtgcagctattgaacgaaacatcgaaatcttaaaagtgtacggggactcagcattagtgatataccaaatcctgtgagattggcaagtgaaggattcaaaattagtcaaatacagcgatctagtggcaagactgattaaagaattcaaagaaataacttttaattactttccacgagaagaaaa

SEQ ID NO: 229314 - DNA, 358 bp, Gossypium hirsutum
atcctggacctgcctcccctccccgggtacctccgcgggagcccctgtcccctcaaggctcgaggacacccagccccctggtaccacctggtagctccccactgccaccccgactctcaagctcacctgggaagaccatgcccaccacccagagctttgcctcagaccccaagtacgccaccccccaggtgatccaggcgcctggcccgcgggccggtccctgcatcctgcccattgtccgggatggcaagaaggtcagcagcacccactattatttgctgcctgagcggccgtcctacctggagcgctaccagcgcttcctgcgtgaggcccagagccccgaggagccggcccccct

SEQ ID NO: 229315 - DNA, 123 bp, Gossypium hirsutum
attcccagctggggttccggggccgacctgtggggctcagacagcgacaccagtttgagaagccgcgcatggatgatgggctgctggaggtggtgggcgtgacgggcgtcgtgcacatgggcc

SEQ ID NO: 229316 - DNA, 364 bp, Gossypium hirsutum
  unsure (1)..(364): unsure at all n locations
atgagacatgcagctgatctgtgaggcataccacctgatgaaagacgtgctgggcatggcgcaggacgagatggcccaggcctttgaggattggaataagacagagctagactcattcctgattgaaatcacagccaatatactcaagttccaagacaccgatggcaaacacctgctgncaaagatcagggacagcgcggtgcagaagggcacggngaagtggaccgacatcttcgccctggagtacggcgtacccgtcaccctcattggagaagctgtctttgctcggtgcttatcatctctgaaggatgagagaattcaagctagcanaaagctgaagggtccccagaagttccagtttgat

SEQ ID NO: 229317 - DNA, 422 bp, Gossypium hirsutum
acaacaaggtacgcaaaaacacgcggctgccgccccggaataaccgggatctgctctcccgccccagcatcagcatcactacctcatgctacccgctcccctccatctgcgtgcgggaccccgtgagcgactggtttgagagcctagcgcagtgcctgcactggaacgtccggaagaagcaagcccacttcgaggaggaggaggagggggagggctaggtcgagccctgtccaggccggaatccttccgctggcttcatttctgccctccaagctccctctggggacagaccaatctgtgtgtgtctgtgaccacctctgtctcaatggcgcggccacttccttcctgtagctgggtcagagcctgggtctgcccttttgtccagaacagcaggtttttttaacattttaagtcagactttt

SEQ ID NO: 229318 - DNA, 286 bp, Gossypium hirsutum
atgcctgcatgtcttgcgggtggagaagctgaagccagtgcccgtggcaccagagaaccagggcgatttcttctcggtggactactacctagtgctgcacaatggcccataagaggtttcccatttgcacctgtggataggtgagcagtgatcccgacatgagcagggggcctgtgccgtgctggctgtgcacctcaacacgcttgtgtgagagcgcactgtgcagcaccgtgaggcgcaggccaatgagtccgacctcttcatgagctactttccacaaggcctt

SEQ ID NO: 229319 - DNA, 362 bp, Gossypium hirsutum
gttttccaaaatccctagcccgatctcctgtggaggcagccatgaggaccctattttcaaccaccaaacgcctcatttcttgcactagcgccaccgccgtggccacccattcccgttccttcagcttgatacccatggtgatcgagcactcttcccgcggcgagagggcttacgacattttctctcgtctcctcaaggaaaggatcgtctgcatcaacggacccatcaacgacgacacctcccacgtcgttgtggcccagctcctcttccttgaatccgaaaacccatccaagcctatcaacatgtaccttaacttccctggcggtcaagtcactgcaagtcttgcaatttatgatacgatg

SEQ ID NO: 229320 - DNA, 355 bp, Gossypium hirsutum
cccacgcgtccggaaattcgtgttatggcatcagctctgtccaaggaaatgggaatgatggaagctcagttgaatcgctggaaggagactgctcacgaagccatttccttgcatgaagaagcccaagcactaaaagctttgttaagcgataagacaaatctacaaaagcgcttggcagaagagtgtgctgagcagattgcagaaatcaaatctctcaatgatatgattgagaaattgcagaaggaaaagttggaattgcagatcttcttggacatgtatggccaagaaggctatgatgatagagatgtgatggaaataagagaatctaaaaatagagctcattcgcaagctgaaa

SEQ ID NO: 229321 - DNA, 340 bp, Gossypium hirsutum
atctggaacgcacgctggctgatgctgctgctgctgctgctttgcagaggagcgcacgccctggagtgctacagctgcgtgcaaaaagcagatgacggatgctccccacacaagatgaagacggtgaagtgcgcgccggacgtggacgtctgcaccgaggcagtcggggcggtggagaccatccacggacaattctcgatgggagtgcggggttgcgggtcgggactccccggcaagaatgaccgcggcctggatcttcaccggcttctggcgttcatacagctgcagcaatgcgctcaggaccgctgcaacgccaagctcaacctcacctcgcgggcgc

SEQ ID NO: 229322 - DNA, 367 bp, Gossypium hirsutum
agactattgaacctaatggccttgttttgccttccttcaccaatgctcctcagcttctctacattgtccaaggaagaggtattcaaggtattgtgatgcctggatgtgccgaaacattccaggattcacagcaatggcagcatcaaagccgtggcaggttccaggaccagcaccagaaagtccgacggttccgccagggtgacatcattgctttgccgcagggtgtggttcactggagctacaatgatggcaatgagcgtgttgttactatcaatctacttgacactggcaacagtgctaatcagctcgacaacatccctagaagattccatcttgctggtaacccagaagaggaacagaggcaact

SEQ ID NO: 229323 - DNA, 360 bp, Gossypium hirsutum
ggaggtgtggtaagaggaggtcaaagcagagaccgaaaccaaaggcaaagcagaacccagagaggggaacgggaggaggaagagtcgcaagagagcggcggaaacaatgtgctcagtggctttcgcgacaatctcctggcgcaggctttcggaattgataccaggctagcaaggaagctacaaaacgaaagagataacaggggagccattgttagaatggagcatggatttgagtggcccgaggaagggcagaggcgacaaggacgtgaagaggagggagaagaagaaagagaaccgaaatggcagaggcgacaagaaagtcaagaagagggatctgaggaagaagaaagagaagaacga

SEQ ID NO: 229324 - DNA, 339 bp, Gossypium hirsutum
atcagggctggggctaccatgttctctcgcgcgggcgtagctgggctgtcggcctggaccttgcagcctcaatggattcaagttcgaaatatggcaactttgaaagatattaccaggagactaaagtccatcaaaaacatccagaaaattaccaagtctatgaaaatggtagcagcagcaaaatatgcccgagctgagagagagctgaaaccagctcgaatatatggattgggatctttggctttgtatgaaaaagctgatatcaaggttcctgaagacaagaagaaacacctccttattggtgtgtcctcagatcgaggactgtgtggtgctattcat

SEQ ID NO: 229325 - DNA, 308 bp, Gossypium hirsutum
acgctggagcgcctgcaggcaccgccccgatttccccgatgcgacgcacaccttcgctgctctggggctggagggaatcaactggcagacggccttcaaccgacaagcgcatcacacacacaaggtctatagccgggagctcatcttgcggagaggccaaaactttcacgtcttaatgctcatgaacaaaggccttggctctaacgaacgactgctgttcattggctgcacaagaccttacctcttcgtggcagtcatgacgaaagctgcggttacactatccaactgcaataccggcggctgaagtg

SEQ ID NO: 229326 - DNA, 368 bp, Gossypium hirsutum
atgctgtccccgctgttccgcctgaggcgagtgacgctggccgccaacgaggtatacgtcctgggtccctcgccctcagtctcgtctccggcgcggctgctcgccccgttttccctctgagctgacctgctccgagccgtgggccgcccatggcgggggccgctccgaccacggccttcgggcaggcggtgatcggccctccgggctcagggaagaccacgtactgtctgggcatgagtgagttcctgcgcgcgctgggccggcgcgtggccgtggtgaacctggacccggccaacgaggggctgccgtacgagtgtgccgtggacgtaggcgaactggtggggctgggcgacgtgatggacgcgctg

SEQ ID NO: 229327 - DNA, 252 bp, Gossypium hirsutum
caattccaggagtgtcaggaacattgccaccagcaagaacaaaggccggaaaagaagcaacaatgtgtgagggaatgcagggaaaagtaccaggagaatccatggaggggagagagagaagaagaagcagatgaggaggaaactgaagaaggagagcaagaacaaagccataaccctttgcacttgcatcgcagatcattccaatctctattcagggaagaacatggcaatttcaaggtcctgcaaaggttt

SEQ ID NO: 229328 - DNA, 380 bp, Gossypium hirsutum
attggacagcatcattgctgaggtcaaggcccaatacgaggagattgctcagaggagccgggctgaggccgagtcctggtaccagagcaagtacgaggagctgcaggtcacagcgggcagacatggggatgacctgcgcaacaccaagcaggagattgctgagatcaaccgcatgatccagaggctgagatccgagatcgaccacgtcaagaagcagtgtgccaacctgcaggctgccattgctgatgctgagcagcgtggggagatggcactcaaggatgccaagaacaagctggaagggctggaggatgccctgcagaaggccaagcaggacctggcccgactgctgaaagagtaccaggagctgatgaatgtcaagc

SEQ ID NO: 229329 - DNA, 365 bp, Gossypium hirsutum
cggacgcgtgggcggcagaagaagcgaggatgatcctcaacagaggtacgaggactgccggaagcgatgccaattggagacacgtggacaaacggagcaagacaagtgtgaagacaggtgtgaaacgcagttgaaggaggagcagcagcgtgacggagaagatcctcagaggagataccaggattgccgacaacactgccaacaggaagaaagaaggctgcgttcacattgcgaacaaagctgcagggaacaatacgagaaacagcagcagcagcagcctgacaagcaattcaaggagtgtcaacagcgttgccaatggcaagagcaaaggcccgaacggaagcaacaatgtgtgaaggaatgca

SEQ ID NO: 229330 - DNA, 361 bp, Gossypium hirsutum
gtggtgcatgacaggcctcatgctgctgacaagatcaggcctaatcccaatgcatctgcaaacaataacagcggagcacctgctaacaaggcacaggttgtaggttggccacctatcagatcatttaggaagaactcattgtcctcggctttgaagaacactgatgaagtcgatggaaaggcaaggcctggtgctttgtttgtgaaggttagcatggatggtgctccgtatttgaggaaagtagacttgaaaaactacactaaatatcaagagctgtcttctgcacttgagaagatgttcagctgttttaccataagtcagtatggatctcatggaacctcgggcaaggagctgttgagcg

SEQ ID NO: 229331 - DNA, 367 bp, Gossypium hirsutum
cccacgcgtccgctttgtttctttgatttgtttctaaggatttaatctctaaaccttcttcccatttcttcattacattgttcaagaacaaacaaaaaaaaaaagaagcaaaaaaacatggccaaagttctgttgttcattgctctatgtgtgcttccagctttggttagtgctacacgcattctgaataaccaattggtggttgaaggctatgtgtactgtgatacttgccgtgctggttttgaaacccctaagactagaaagctagctgatgccatggttaagctggtatgctccgacaggaagaccggcggagttgttttcgagaaggaaggatataccgacaaaaccggaaaataccagattc

SEQ ID NO: 229332 - DNA, 355 bp, Gossypium hirsutum
ggctcaagcaactttcacagccgaagatcaaaagattgagtcttttaggttactaagtggccacaaaatccctgcaattgggttaggcacttggagatccggttcacaagccgataactccgtcaagaccgccattgttgagggtggttatagacatatagatacagcttgggaatacggtgttcaagaaagtgttggccatggagtcaaagcagcaatacatgcaggagtagaaagaagggatattttcattacatccaagctatggtgcaccgagttgagtccagaacgtgttcgacctgctttattgaacaccctcgaagaactccaacttgaataccttgatctttacctg

SEQ ID NO: 229333 - DNA, 324 bp, Gossypium hirsutum
  unsure (1)..(324): unsure at all n locations
atggcggcggcagggctgagccagcgacgccctccattcactctccgcgcccgctctccggctgtccgcccgttccgctgcccgccccgccaccatgacggaacaggccatctccttcgccaaggactttttggccggaggcatcgccgccgccatctccaagacggccgtggctccgatcgagcgggtcaagctactgctgcaggtccagcacgccagcaagcagatcgccgccgacaagcagtacaagggcatcgtggactgcatcgtccgtatccccaaggagcanggcgtgctgtcgttctggagaggcaacctggccaa

SEQ ID NO: 229334 - DNA, 354 bp, Gossypium hirsutum
cccacgcgtgcggcgataccgccatacgagaggagggtctcaagataatggcctcgaggaaactttctgctccatgaggatcaaggagaaccttgctgaccctgaacgtgccgacattttcaacccacaagccggtcgtatttccaccctcaacaggtttaacctccccatcctccaacgacttgagctcagcgccgagaggggtgtcctctacaacagagctggtttgattccacaatggaacgtcaacgctcacaaaatactctacatgttaagaggctgtgccagagtccaagtggtgaaccacaacggcgacgcagtgttcgacgataacgtggagcaaggtcagctcct

SEQ ID NO: 229335 - DNA, 380 bp, Gossypium hirsutum
atgggaagattccagggtcccaacagcttcagagttgcaaagcctgtagaggtgacgtgtgtttttcccctggctgctttggaaattatggaaaaaaatcaaataccaaggaagaaaaatctataatgaaattagatgtggatttctttttatgtattcagcttggggcttataatacttccagtacccaaagctctgcctgcttaggactctgcccagccaggaaggaaacctacaggaggaagaatggctgcagggtggctgacaacctggtcacagaactccgtgaccttccaggaagtggcagtggacttttcccaggaggagtgggcattgctggaccctgctcaaaaaaatctatacaaagatgtgatgctgga

SEQ ID NO: 229336 - DNA, 357 bp, Gossypium hirsutum
cccacgcgtccgctaaatcttcgctaattgtttatgcccattctgctctcccataaaaaccgttagagatattcctagggtttgcatttgcggtttggggtatagggttttagacaacgccaaatcttggatttgaggaatggcgactgcgacgggacaggtgaacgcgaagagaaagccggtgttcgtgaaagtggaggatttgaagcccggtactagtgggcacactttgatcgtcaaagtggtggagatgaccccagtcaagacttccgccaggcccaacaggtcccgtgctctcctttctcgacctgtccctccggtccggatcgctgagtgcgtcgttggggacgagactgg

SEQ ID NO: 229337 - DNA, 359 bp, Gossypium hirsutum
gttccgtggtaaaatgagcaccaaggaagtggatgagcagatgttgaatgtccagaacaagaactcctcatactttgttgagtggatcccgaacaatgtgaaatcgaccgtttgtgacatcccacccactgggctgaagatggcatcaacatttattggcaattcaacatccatacaggagatgttcaggcgtgtgagtgagcagttcacagctatgtttaggaggaaggccttcttgcattggtacacaggggaaggcatggatgagatggagttcactgaagctgagagcaacatgaatgatctggtctccgagtatcagcagtaccaagatgcaacagctgatgatgaagagtacg

SEQ ID NO: 229338 - DNA, 358 bp, Gossypium hirsutum
cggaattgatctgactacactcggattaaatttgaattcatcggaaaatctttacaagacatttggttctccatggtctgatgaaccagctaagggtgacccggagttcactgtgccacaatgttattacgctaagcaaccacctcctttacaccaaggttatttttcaaagttcactgtggacacattggtctatatattttacagcatgccaaaagatgaagctcaattatacgctggaaatgaactttacaatagaggctggttttaccacaaggagcactggggttggatcataagggttcccaatgtggagccactagtgaagacgaacacgtacgagagaggttcttatcac

SEQ ID NO: 229339 - DNA, 352 bp, Gossypium hirsutum
ggtttgggctctgggatctcccttttcatagccaccaatatctgtgaaaacataatctggaaagcctttagccctacaacaatcaacagcggtcgtggggctgaattcgaaggtgctgtcattgccatgttccatcttttaataaccaggacggacaaagttcgagcacttcgtgaagctttctaccgacagaatcttccaaacgttacaaatttactcgctacggttttgatcttccttattgttatctacttccaaggtttccgagttgttttgcctgtaagatcgaagaatgctcgagggcagcaagggtcggatcccattaagctattctacacctgcaacatgccca

SEQ ID NO: 229340 - DNA, 371 bp, Gossypium hirsutum
atgcgaggccgggtctcacaccttccagaggatgtacggctgcgacctggggcccgacgggcgcctcctccgcgggtatagccagtacgcctacgacggcagggattacatcgccctgaacggggacctgcgttcctggacggcagcggacatggcggctcagaacacccagcggaagtgggaggcggcgggtgtggcggagcggttcagaacctacgtggagggccgatgtgtggagtggctccgcagatacctggagaacgggaaggagacgctgcagcgcgcggacccccccaagacacatgtgacccatcaccccgtctctgaccatgaggccaccctgagatgctgggccctgggcttctaccctg

SEQ ID NO: 229341 - DNA, 346 bp, Gossypium hirsutum
cttaaagctcttcgagtcaagagcaatcacccattacattgctcatgaatacagcgacaaagggacccaactcttaatccctggctctaacaaggatatggctgtcttagaattatggaaggaagtggaagcccaccagttcgattctccatcttcaaaaatagcctgggaggcgttttacaagccatttttcggcatggttaccgactccgcggctgtggaggaaaatgaaggtaagcttgccaaagttcttgacgtgtacgaggctcgattgacacagtcaaaatacttggcaagtgactgcttcaccttggccgacctgcatcacattcccaacattcaatgc

SEQ ID NO: 229342 - DNA, 370 bp, Gossypium hirsutum
tcggttgtttcttgtgctgatatccttgttctgtctgctagagaaggcatcgtttcgttgggaggcccttacattcctctcaaaactggaagaagagacggtagaaggagcagagcagatgttgtggaggagtatcttccggaccacaatgagaccatctctggcgttctcgacaggtttgccgccatgggtattgacacccctggagtcgttgccctcctaggagctcacagtgtcggcagaactcactgtgtgaagctggtgcatcggttgtacccagaggttgaccctgccctcagccccgaccatgttccacacatgctccataaatgccctgatcaaatcccagaccccaaggccgtccagtatg

SEQ ID NO: 229343 - DNA, 385 bp, Gossypium hirsutum
atgatttccctctgtgggtaagtccacattcttgagtctgatgacctccacggccagcgaggcagcgtcctatgagttcaccactctgacgtgtattcctggggtcattgaatacaaaggcgccaacatccagctcctggaccttcctggaatcattgaaggcgcagcccaaggaaaaggccgtggccggcaggtgatcgctgtggcacgcacagctgatgtcgtcatcatgatgctggatgccaccaagggagaggtgcagaggtctctgctggagaaggagctggagtctgtgggcatccgcctcaacaagcacaagcctaacatctacttcaagcccaagaaaggcggtggcatctcctttaactcaacagtcacgctgacc

SEQ ID NO: 229344 - DNA, 373 bp, Gossypium hirsutum
attgatgatggcacaggccagaaacagatctggagaattgaaggctccagcaaagtacccgtggaccctgccacatatggacagttctatggaggagacagctacatcattctgtacaactaccgccatggaggccgccaggggcagataatctacaactggcagggtgcccagtctacccaggatgaggtcgctgcatctgccatcctgactgctcagctggatgaggagctgggaggtacccctgttcagagccgtgtggtccaaggcaaggagcccgcacacctcatgagcctgtttggtgggaagcccatgatcatctacaagggcggcacctcccgcgagggcgggcagacagcccctgccagcaccc

SEQ ID NO: 229345 - DNA, 355 bp, Gossypium hirsutum
cggacgcgtgggtatttccaatgctagctgcactaccaactgtcttgctccccttgctaaggttattcatgacaaattcggcatcattgagggacttatgacaacggttcattctattacggctacacaaaaaactgtggatggtccatcaatgaaggactggagaggaggaagagctgcttcgttcaacatcattcctagcagtactggagctgctaaggctgttggaaaagtgcttcctgccttgaatggaaaattaactggaatggctttccgtgttcccaccgttgatgtttcagtggttgacctcacagtaagactagagaaagcagcctcttatgatgaaatcaaagct

SEQ ID NO: 229346 - DNA, 376 bp, Gossypium hirsutum
atgcctgtctttgacttccctcccgaattctacgagcatgccaaggctctgtgggaggacgaaggagtacgtgcctgctatgaacgctccaacgagtaccagctgattgactgtgcccagtacttcctggacaagatcgatgtgatcaagcaggctgactatgtgccgagcgaccaggacctgcttcgctgccgcgtcctgacttctggaatcttcgagaccaagttccaggtggacaaagtcaacttccacatgtttgacgtgggtggccagcgcgatgaacgccgcaagtggatccagtgcttcaatgatgtgactgccatcatcttcgtggtggccagcagcagctacaacatggtcattcgggaggacaacc

SEQ ID NO: 229347 - DNA, 370 bp, Gossypium hirsutum
  unsure (1)..(370): unsure at all n locations
atccaaggtggacagtcttaatgatgagatcaacttcctgaaggagctgtcccagatgcagacccacgtcagcgacatgtccgtggtcctctccatggacaacaaccgcaacctggacctggacagcattattgctgaggtccgtgcccagtacgaggagattgcccagaggagcaaggctgaggccgaggccctgtaccagaccaaggtccagcagctccagatctcagttgaccaacatggtgacaacctgaagaacaccaagagtgaaatcgcagagctcaacaggatgatccagaggctgcgggcagagatcgagaacatcaagaagcagtgccagactcttcangcatccgtggctgatgcagag

SEQ ID NO: 229348 - DNA, 357 bp, Gossypium hirsutum
tatgcagtagtgaagaggagaggaagaaattgctccaatgttcctgttgtgggaaacttgtgcatcctgcttgtttagttccacctattacagatttagtccctgagaagtggtcatgttattcctgcaaggagaaaacagatgaatacatgcaagcaaggcgtgcatatatagaggaacttttaaagaggtatgaacaagctttgcagcgcaaatcaaaaattttggatataattcgctctttggatcttccaaacaatcccttggatgacattattgatcagcttggaagtcctgataaggttgcggaaatgacagggaggcgcggcatgcttgtaagggcttcaagtgggaaag

SEQ ID NO: 229349 - DNA, 356 bp, Gossypium hirsutum
gggaagcctatcacactggaggaagcagagccaataattagccgcctatcgtctctaatatacaaggcagaagatgctcattatgacattgcaactacgatagtgacgatgaaatctcatattcaagctcttgaagagcgagccaatgctgcaactgttcagagtacagtgtttggacaattggtagctgaggcatttcctaagagtcttcactgcctccttctcaagctttcggctgattggcttaaaaggccgccccttcaagaccttgcaaacgagcggagaaactctcctcgactcgtggacaacaatctctatcatttttgcatattttcagacaatgttctggctacctc

SEQ ID NO: 229350 - DNA, 344 bp, Gossypium hirsutum
caaattgaaaacttcagtttgagatttggcaaatcaagcgaaaatgctaacagcggatatacctcccaatcaaactatttacatcaagaacctcaacgagaagatcaaaaaagaagaattaaagagatccctttatgctttattttctcaatatggaaggattttggatgtcgttgccttgaagacgcctaagcttcgtggacaagcatgggttgtgtttgatgaattgacttccgctagtaacgccttccgtcagatgcaaaatttcccgttttatgataaacctatgcggatacaatatgcaaagacaaagtcagattgtatcgccaaaaatgatggaagct

SEQ ID NO: 229351 - DNA, 356 bp, Gossypium hirsutum
atgatatttttatttattcatgagatgagtctgagcatgccgagcatttgagaattgtattgaaaactctgtgtgaaaagcaattatttgctaagtttagcaaatgtgaattttggcttcgggaagttggatttttgggacttgttgtattagtcgagggtatcagagttgatcctagcaaaatttcaactgctgttgaatggaaacctctgagaaatgtatttgaagttagaagatttctaggactagctggatattacagaagattcgctaaaggattctcgatgattgctacacctatggcaagattattgcaaaaagatgtgaaatttgagtggtctgagaaatgctagcaa

SEQ ID NO: 229352 - DNA, 347 bp, Gossypium hirsutum
cttactgaggcactttgtggcttccagtttatactgacccacctagatggcaggcaacttctcattaagacccatcctggtgaagtggttaagcctgatcaattcaaggccataaatgatgaagggatgcctatgtatcaaaggccattcatgaggggtaaactatacattcactttactgtcgattttcccgactccttggcccccgagcagtgcaaggcactcgaggctgtgctacctccgaggacctcagtccagctgacagacatggagctggatgagtgtgaagaaacaactctatatgatgtcaacatcgaggaagagatgcgtaggaagcaagcgcaagc

SEQ ID NO: 229353 - DNA, 359 bp, Gossypium hirsutum
cttcctgtaggttatgacctggtatggaggaattgtctagatgactacaccacaccggtctctatttggtatccgcgagcacctgatggattcttctccctgggatgtgtagctgttgcgggttttgaagagccagaagctgatttggtacgttgtgtggcagaaacagttgcagaggagacaacatttgaggagcagaaggtatggtgtgctccagaatcatatccgtggggttgtcatgtataccaagttcaaagtgacgcacttcattttgttgctctaagagaaactaaggaagaatccaactggaaaccctcaagggttcgtgatgatttccagtctccacgatcatcagaatc

SEQ ID NO: 229354 - DNA, 332 bp, Gossypium hirsutum
atgggcttcctggtcttcatcggacagtgaaatttgtttgggtgtccaaacaaaatatgaaagagctgtaatacttcctgtagtgtatttcaaaggattgtgtcctcctcttccttccctgtggtcaatctccacctgtctacccttccgtgacaatggttcaatggaagagactctgccggcagcattacttgtgggccctgggctgctatatgctgctggccattgtggctctgaaactttctttaaggttgaagtgtgactctgaccacttgggtctggagtccagggaatttcaaagccagtactgtaggaatatcttgtttaattcc

SEQ ID NO: 229355 - DNA, 352 bp, Gossypium hirsutum
cggacgcgtgggctcttttcctccaggaaacccaaaggctgcctcgatccggaaaatttcagagagtttaagcttgtcaagcgccagcagctgagtcataatgtggcgaagttcacatttgaacttcctactcctacttcagttttgggtcttcccatcggacagcatataagttgcaggggcaaggatagccaaggtgaggaggttattaaaccatatacacctactacattggattctgatgttggtcattttgaattagttattaagatgtatcctcaaggaaggatgtcacaccatttcagagagttgcgtgttggtgattatcttgctgtgaagggtcccaaggggc

SEQ ID NO: 229356 - DNA, 352 bp, Gossypium hirsutum
tttcactgatctaaacatcctcctcaacctagtttccatcggcactctctttgtgttctacatggtatccaatgctgtcatctacaggcgatatgttatggttgggacaacaaagccatggcctaccttatccttcctatgcttattctccctcacatccaccattttcaccctcgtgtggcattttacgccaccaggcaagcctaagcccttcttgcttggtgcttgtgttgtgattgccatttccatattacaagttttccattgtatggtaccacaagcaaggaagcctgcattttggggtgtccctttcatgccttggttaccgtccatatccatcttcttgaatgtt

SEQ ID NO: 229357 - DNA, 321 bp, Gossypium hirsutum
  unsure (1)..(321): unsure at all n locations
atgaaccattgaaaaatttgagaaggaggctgctgagatgggaaagggctccttcaagtatgcctgggtcttggataaactgaaagctgagcgggaacgtggtatcaccattgatatctccttgtggaaatttgagaccagcaagtattatgtgactatcattgatgccccaggacacagagacttcatcaaaaacatgattacagggacatctcangctgactgtgctgtcctgattgttgctgctggtgttggtgaatttgaagctggtatctncaagaatgggcagacccgagagcatgctcttctggcttacacact

SEQ ID NO: 229358 - DNA, 363 bp, Gossypium hirsutum
caaaatactctacatgttaagaggctgtgccagagttcaagtggtgaaccacaacggcgacgcagtgttcgacgataacgtggagcaaggtcagctactgacggtgccacagaactttgcgttcatgaaacaagcaggaaacgaaggaaccgaatggattttcttcttcaccaatagcgaagccaccaacaccccaatggctggaagtgtctacttcatgcgagcactgccggatgaagtggtggcagcgtcctatcaggtgtcaagagaagatgcatggcggattaagttcaacaacaaaaacacctttttcttcactgcttcacagtccgagaagagggccgatgcttaaacttcatccga

SEQ ID NO: 229359 - DNA, 377 bp, Gossypium hirsutum
atcgctcccccctccccccgagcgccgctccggctgcaccgcgctcgctccgagtttcgggctcctgctaagctagcgccgccgtcgtctcccttcagtcgccgtcatgattatctaccgggacctcatcagccacgatgagatgttctccgacatctacaagatccgggagatcgcggacgggctgtgcctggaggtggaggggaagatggtcagtaggacagaaggtaacattgatgactcgctcattggtggaaatgcctccgctgaaggcccagagggcgaaggtaccgaaagcacagtaatcactggtgtcgatattgtcatgaaccatcacctgcaggaaacaagtttcacgaaagaagcctacaagaagt

SEQ ID NO: 229360 - DNA, 378 bp, Gossypium hirsutum
atcgtgaagcgttccatatttttgatgttagaattgatcatccttcagcctgtgagtgggaactgtgttctttcctctgaggggttgttcatgaggacctccgcctgctcttggagacccacctgccatccaaaaagaagaaagtactcttgggagttggggatcccaagattggtgctgcaatacaggaggaattagggtacaactgccagactggaggcgtcatagctgagatcctgcgaggagttcgtctgcacttccacaatctggtgaagggtctgactgatctgtcagcttgtaaagcacagctggggctgggacacagctattcccgtgccaaagttaagtttaatgtgaaccgagtggacaatatgatca

SEQ ID NO: 229361 - DNA, 373 bp, Gossypium hirsutum
atcgccgccgccccctcggcccgccatgctgctatccgtgccgctgctgctcggcctcctcggcttggccgccgccgagcccgccgtctacttcaaggagcagtttctggacggagacgggtggacttcccgctggatcgaatccaaacacaagtcagattttggcaaattcgtcctcagttccggcaagttctacggtgacgaggagaaagataaaggtttgcagacaagccaggatgcacgcttttatgctctgtcggccagtttcgagcctttcagcaacaaaggccagacgctggtggtgcagttcacggtgaaacatgagcagaacatcgactgtgggggcggttatgtgaagctgtttcctaatagt

SEQ ID NO: 229362 - DNA, 352 bp, Gossypium hirsutum
atttgaagctgcatttagttccacaaagaaacaacatatagattataagcacctccccataagcaaaccacaaaggaaagcttggagagagacccaaaaacaatgtctaaggaagtgagtgaagaaagacagggtcgtaaggactatgtggaccctccaccggcacctctgattgatatggctgaactcaagtcatggtctttttacagagccctcatagctgagttcatagccactctcctcttcctctatgtcactgttgctaccgtaattggtcacaagaaacaacaagatgcatgtgatggtgttggtctcttgggtattgcatgggctttcggtggcatgatcttta

SEQ ID NO: 229363 - DNA, 355 bp, Gossypium hirsutum
ctggtaatttccaagatagatctttattctggatatcatcagcttaaggttaaggaagttgatgttcataagacggcctttaggactcgttatgggcattacgagtttctagtcatgccctttggtttgacaaatgctctggctacattcatagatctgatgaaccagtttttctagccgtatttggattacttcatcttagtcttcattaacgacatcctggtatactctaagaccgaagatgatcacgatgagcattttaaagtagttcttcaaatgcttcgagagaaaaagctctatgctaagttgagaaagtgtgaattttggttaagagaagtaacatttctggggcatg

SEQ ID NO: 229364 - DNA, 383 bp, Gossypium hirsutum
atccaccatccagcgagtgcgggccgaggagcgtgaacagatcaagaccctcaacaacaagttcgcctccttcatcgacaaggtgcggttcctggagcagcagaacaaggttctggaaaccaagtggaccctgctgcaggagcagggcaccaagaccgtgaggcagaacctggagccgttgttcgagcagtacatcaacaacctcaggaggcagctggacagcatcgttggggaacggggccgcctggactcggagctcagaggcatgcaggacctggtggaggacttcaagaacaagtatgaggatgaaatcaacaagcgcacagcagcagagaatgaatttgtgactctgaagaaggacgtggatgctgcctacatgaaca

SEQ ID NO: 229365 - DNA, 373 bp, Gossypium hirsutum
atcaaatgtagtttggttcgcacgtgtgcgccttccctcctccccgcccgcagggtccacggccaccatggcgtattaggggcagcagtgcctgcggcagcattggcctttgcagcggcggcagcagcaccaggctctgcagcggcaccccccccagcggcttaagccatggcgcttctcacggcattcagcagcagcgttgctgtaaccgacaaagacatcttcgaattaagcacattcctcgattccagcaaagcaccgcaacatgaccgaaatgagcttcctgagcagcgaggtgttggtgggggacttgatgtcccccttcgaccagtcgggtttgggggctgaagaaagcctaagtcttttagatgac

SEQ ID NO: 229366 - DNA, 377 bp, Gossypium hirsutum
atgaaagaggcacgttcctggtgcacaggtggctctgcagcataatttaggccttggaggagctgtggttgtcacactctacaagatgggttttccggaagccgccagttcatttagaactcatcaaattgaagcgggtccaaccaactctgcaagtgatggatttaaggcaaatcttgtctttaaggagattgagaagaaacttgatgaggaaggggaacagtttgtgaagaaaattgtgggtatttgtgccttcaaggtgaaagatggccctgggggtaaagaggccacctgggtggtggatgtgaagaatggcaaatgatcagttcttcctaactcagataagaaagctgactgcacaatcacaatggctgact

SEQ ID NO: 229367 - DNA, 374 bp, Gossypium hirsutum
gctcttgacaagatgtacaaggatacgagtgcgacgcctgcaagactggtgatgatagcacttgcgcatgggttgtctctgtttgcagctgtggcatctagtgtaaacgtatctggtggccatgtgaatccagcagtcactttcggtgccttgctcggtggaagaatctctctcgttcgggcgctgtactactggattgcccagctcttaggttccattgtggcttgtctcttgctccgcctcaccgctggaatgcgaccgggggggttcgccctggcgtcaggagtaggggagttgcgtggtctgatattggagatagtgctgacatacggattggtgtacacagtttatgcaacagggatcgatcccaaaag

SEQ ID NO: 229368 - DNA, 376 bp, Gossypium hirsutum
caaatggctcgtactaagcaaactgcgaggaaatcaaccggcggcaaggccccacgcaagcaactagccacgaaggctgctcggaagtcagctccggcgacaggaggagtgaagaagcctcaccgtttcaggccaggaactgtggctctcagggaaatcaggaagtaccagaagagcaccgagctcttgatcagaaagcttccattccagaggcttgtgagagaaatcgctcaagatttcaagaccgatttaaggttccaaagcagcgctgtcgccgctcttcaagaagctgccgaggcttatctcgtcggactgtttgaagatactaatctatgtgctattcatgctaagatggttaccatcatgcctaaagata

SEQ ID NO: 229369 - DNA, 379 bp, Gossypium hirsutum
cccacgcgtccggtggaatggtgaggtttgaggtgattgagaagattggtcctgatgttaagtgtaggtgcactgatccgggattgttgcttcctcgagccaatttgactttttggagggatgggagtcttgttcgtgagcgtaatgcaatgcttcctaccatttcttccaaggattggttagacatcgactttggggttgcagaaggtgttgattttattgcaatatcctttgtcaaatcagctgaagtgattaaccatctcaaaagctatattgctgctaggtcacgtggtagtgacatagctgtgattgcaaagattgagagtattgactcattaaagaacttggaagaaattattcaagcatcagatggagctat

SEQ ID NO: 229370 - DNA, 370 bp, Gossypium hirsutum
atctcaatcctgctctcaccatgagcctccgcctgcagagctcctccgccagctatggaggtggttttgggggtggctcttgccagctgggaggaggccgcggtgtctctagctgttcaactcggtttgtctctgggggatcagctggaggctacggaggcggcgtgacctgtggctttggtggaggggctggtagtggctttggaggtggctacggaggtggccttggaggtggctttggtgggggttatgctggtggctttgttgattttggtgcttgtgatggtggcctcctcactggcaatgagaagatcaccatgcagaacctcaacgaccgcctggcttcctacctggagaaggtgcgcgccct

SEQ ID NO: 229371 - DNA, 381 bp, Gossypium hirsutum
cccacgcgtccgatctgattattttctccataccagcataaatcaacaatggcaaagctcgcagtttacttagccaccctggctctcattttgttccttgccaatgcttcaatcacatctgtgacggtcgaaagcgaggaaaaccgggatagctgtgaacagcagataaggaagcaagcccacctgaagcactgccagaagtacatggaggaagagtggggtggcgaaggcagcgacaatatagccggcgggtacattgactcatgttgccagcagctagagaagatggatacgcaatgcagatgtcaaggtctaagacatgcaacgatgcaacagatgcaacagatgcaagaacaaatggggagcaaacagatgcgagag

SEQ ID NO: 229372 - DNA, 346 bp, Gossypium hirsutum
atggagtgccctcgacaggcagggagggctaagctgtgcatccctccgctcgcgttgcagggagatggctcagcgacttctcctaaggaggttcctggcctccgtcatctccaggaatccttctcagggtcggtggccacccctcacttccagagccctgcagaccccacaatgcagtcctggtggcctgactgtaacactcaacccagcccggacaatatacaccaccaggatctccttgacgacctttaatatccaggacggacctgactttcaagaccgagtggtcaacagtgagacgccagtggttgtggatttccacgcacagtggtgtgggccctgcaag

SEQ ID NO: 229373 - DNA, 387 bp, Gossypium hirsutum
cccacgcgtccgcaagaattggaagagttgcaggcaacaaagatctctatcttggcacatttagcacccaagaagaagcagctgaagcctatgatattgcagcaatcaagtttagaggcttaaacgcggttacaaattttgatatgagccgctacgatgtaaacagcattgcaaacagcaatcttcccattggaggactgaacaacaaatccaaaaactgcaatgattcaacttctgataggagcaccgatgaggagcgagatcactctggatcatcgggcatgacctttacatctcagcccgctgcaagctccacagtaggctttgcaattaacatcaagcaagacccatccgattattggtcaaacgttctcggatacaatgata

SEQ ID NO: 229374 - DNA, 358 bp, Gossypium hirsutum
atgcggagagcggaccccagagagccctgagcagccccaccgccgccgccggcctagttaccatcacaccccgggaggagccgcagctgccgcagccggccccagtcaccatcaccgcaaccatgagcagcgaggccgagacccagcagccgcccgccgccccccccgccgcccccgccctcagcgccgccgacaccaagcccggcactacgggcagcggcgcagggagcggtggcccgggcggcctcacatcggcggcgcctgccggcggggacaagaaggtcatcgcaacgaaggttttgggaacagtaaaatggttcaatgtaaggaacggatatggtttcatcaacaggaatga

SEQ ID NO: 229375 - DNA, 362 bp, Gossypium hirsutum
atgcggctatggcggtggcttcagcagcagcagcagctttggtagtggcttcgggggaggatatggtgctggcttcggtggtggcttgggtgctggcttgggtggtggcttgggtggtggctttgctggtggtgatgggcttctggtgggcagtgagaaggtgaccatgcagaacctcaacgaccgcctggcctcctacctggacaaggtgcgtgctctggaggaggccaacgctgacctggaggtgaagatccgcgactggtaccagaggcagcggcccgctgagatcaaagactacagtccctacttcaagaccattgaggacctgaggaacaagattctcacggccacagtggacaatg

SEQ ID NO: 229376 - DNA, 401 bp, Gossypium hirsutum
atgccgacctggaggtgaagatccgcgactggtaccagaggcagcggcccagtgagatcaaagactacagtccctacttcaagaccatcgaggacctgaggaacaagatcattgcagccaccattgagaatgcgcagcccattttgcagattgacaatgccaggctggcagccgatgacttcaggacaaagtacgagcatgaactggccctgcggcagaccgtggaggccgatgtcaatggcctgcgccgggtgttggatgagctgaccctggccaggaccgacctggagatgcagatcgaaggcctgaaggaggagctggcctacctgaggaagaaccatgaggaggagatgcttgctcttcgaggtcagagcggtggagatgtgaacgtggagatggat

SEQ ID NO: 229377 - DNA, 274 bp, Gossypium hirsutum
gcatcatgatacaaatgtatcggtgcaccatacacggagctgttggtggcttagagatggttcagacggtgcacagcctcaaacaagctttcttgagcctcctgatttcaaccgtcattcttcaaaccacccatacgataacttctctgagaggaatgtggaagatgaagaccaatttcttgattggagggattcttggaggttatcccgaacgacttacttggatgatcttgaagccggagaggatgtaaatcttcattttgatgatatttac

SEQ ID NO: 229378 - DNA, 354 bp, Gossypium hirsutum
gcatcccaaaaccagaacctgcggatgactgggttcggtctttacaaccagaacattaacccagaccataaccagaggatcttcgtggctggaaaaatcaaccatgtgagacaatgggatagccaagccaaggagttggcctttggggtgtcatcgaggttggtggatgagatattcaacaacaacccacaagagtcttacttcgtgtctcgacagaggcagcgtgcatctgaataaagagttagaggcaataataaccacatagtctcgagtttacggactaatgtgaaattttctagttttaagcaggcatgtaatgaaataaaaatggtgacctatgtaaaggaggagacc

SEQ ID NO: 229379 - DNA, 387 bp, Gossypium hirsutum
  unsure (1)..(387): unsure at all n locations
ataattcctccatgcccaggaggaggtgaagcgaatccaaagcatcccgctggtcatcggacaatttctggaggctgtggatcagaatacagctattgttggctctaccacaggctccaactattatgtgcgcatcctgagcaccatcgatcgggagctgctcaagcccaaccctcagtggccctccacaaacacagcaatgcactggtggacgtactgccccccgaagccgacagcagcatcatgatgctcacctcagaccagaagccagatgtgatgtacgcggacattggaggtatggacattcagaanccagaggtgcgggaggctgtggagctcccactcacgcatttcgagctctacaagcagatcggcatcgatcccccc

SEQ ID NO: 229380 - DNA, 399 bp, Gossypium hirsutum
atcccaggccaagcaagcttctgtctgcacctgctctcaatcctgctctcaccatgagcctccgcctgcagagctcctccgccagctatggaggtggttttgggggtggctcttgccagctgggaggaggccgcggtgtctctagctgttcaactcggtttgtctctgggggatcagctggaggctacggaggcggcgtgacctgtggctttggtggaggggctggtagtggctttggaggtggctacggaggtggccttggaggtggctttggtgggggttatgctggtggctttgttgattttggtgcttgtgatggtggcctcctcactggcaatgagaagatcaccatgcagaacctcaacgaccgcctggcttcctacctggagaaggtgcgcg

SEQ ID NO: 229381 - DNA, 377 bp, Gossypium hirsutum
cttctatgggcgtgtggatcatctggtgaatgcagcgagtttgggacataccttctacttcgatgaagttacagactcctcagtgtttcctattttgttggacataaacttttggggaaatgtttatcctacatttgtcgctcttccatacctacatcagagtaatggccgagtcattgtgaatgcatcggtggagaactggttaccgttaccaagaatgagtttgtatgctgctgcaaaagctgctcttgtgaatttctatgagaccctcagacttgaagtaaataatgatgttgggataacgattgctacacatggatggataggaggcgaaatgacaagaggaaagtttatgcttgaagagggagccgagatgc

SEQ ID NO: 229382 - DNA, 363 bp, Gossypium hirsutum
cccacgcgtccggtagggtggaatgcacccggtggtccgtatgtatggggatactgctttactaagcaaataaaccctccttcagattatttggacaagacatgcaaagagtacccatgtgttcctggtcagaaatattatggtcgaggccccatacaacttacttgtaaggaactacaactatggtcaatttggagcaaccattgggatggaaaaggagttgttagaaaacccagacctgatagtaagcgatgccacattgtgtttccaatctgcattatggttctggatgactccgcaagggttaaagccttcttgccacgatgtgatcactggagcgtggacgccttcagctagggacgt

SEQ ID NO: 229383 - DNA, 364 bp, Gossypium hirsutum
gcgcccacacgtgcgggcaggttttcaagctttaacgatcaaccccaaggaatgatttctgtcagatagctgcaaaaaatgggatattactgaggcttattaatactctgtatagtttaaatgaggcaactcgacttgctgctaaatctgttgggggtcgattctcatcagatggttcagctcgacagcaacgttctggtcctttagattccagtcatcgtctgttttctcagaacgaaattccactctcttcaactgatcatttgttagagagacatggaatgactgagcattcgttttcaactgttactcaagaatcttcacgggcttcaacttcacattctcagaggtcagatatcaatct

SEQ ID NO: 229384 - DNA, 370 bp, Gossypium hirsutum
ttttagctgaacccattacagggttctttctaagctctgggacttcaggcgggcagccaaagctgatgcctgtcactgctgaagttggtaataagtgggatttatttcgtcgcttgtacgagtctcctgtgataaagcactttgatgacatcaaccaagccggtaaaagattggagcttatgtttgccagaccagagattgaaactcctagtggcctcaaggcagcatctgtttcaacgagcatatacagcgggagtaattttagaaccaggttgcctaagctttacacaagtcccgttgggaccatcttttgcccaaaccccaaccagggcttatactgtcaattactttttggtttaatccaacgaga

SEQ ID NO: 229385 - DNA, 384 bp, Gossypium hirsutum
atcctttgcccattcgtctgccctcacccttaaaaccaaaactcggtcctgctgctcaccgacctagcattactctcgccatggctctcagcgatgctgacgtgcagaagcagataaagcatatgatggctttcatcgaacaagaagccaatgagaaggcagaagaaatagatgcaaaggcagaagaagagttcaacatagagaaaggtcggcttgtgcaaacccaaagactaaagatcatggaatattatgagaagaaagagaaacagattgagcagcagaagaaaattcagatgtccaatttgatgaatcaagcgagactcaaagtcctcagagcgagagatgaccttatcacagacctactaaatgaagcaaacagagact

SEQ ID NO: 229386 - DNA, 380 bp, Gossypium hirsutum
aattttccgaattgctgaccaagatcgacaggcgatctggaaaggagcttgagaaggagcccaagttcttgaagaatggtgatgcagggatgataaagatggttcccaccaagcctatggttgtggagactttctctgagtacccaccacttggacggtttgctgtcagggacatgcgtcagactgtggctgttggtgtcatcaagagcgttgagaagaaggacccaacgggtgctaaggtcaccaaatctgctgccaagaagaaatgagattgcatttgatagtatcagagccttttgattttggttatctttgtagtttggtacttgcagttttttagaccaattttgatgtgtgttcatttggttgagactgtcatc

SEQ ID NO: 229387 - DNA, 383 bp, Gossypium hirsutum
gaaagtattgtattgagtatcatatcaatgctttcaagccctaatgatgaatctcctgcgaatgttgaagctgctaaggagtggagagagaggaaagatgaatttaagagaaaggttggccgctgtgtccgacggtcgcaagaaatgttgtgatcaatgatggctgttgctgctgttccttttctagaatatatgaactcgtggaatgccttaatttttatcatgtacggagatgagttgcggctgattacaccgcagaatccttgtgaacctagggagtgccttaaaacttaaagcccccctccccttccccttccctttccccatctctttctatttttatttattgtgcttttaagtggtagtgttcttttgtattcgaa

SEQ ID NO: 229388 - DNA, 404 bp, Gossypium hirsutum
atcgccagcccgccgccctctgccgccgcaccctgcacacccgcccctcttctgtgccaggaacttgctaccaccagcaccatgccctaccaatatccagcgctgaccccggagcagaagaaggagctgtctgacatcgctcaccgcatcgtggcacccggcaagggcatcctggctgcagatgagtccactgggagcattgccaagaggctgcagtccattggcaccgagaacaccgaggagaaccggcgcttctaccgccagctgctgctgacagctgacgaccgcgtgaacccctgcattgggggtgtcatcctcttccacgagacactctaccagaaggcggatgatggtcgtcccttcccccaagttataaaatccaagggcggtgttgtgggcatcaa

SEQ ID NO: 229389 - DNA, 372 bp, Gossypium hirsutum
acgactagctgctgacgttgaagatgttaagtgtcgaattcacgaatatgaaaagggaaaaactgagttctctcctgaggaggatccacatgtcattgctgattgtatcaagtatgtcattcgagagttgccatcatgtcctgtccctgcttcatgctgcaatgcactactagaagcatatcgaactctgggtggtgatagagtcaacactatgcgtgaagcagtatcggacgcgtttcctgagccaaaccgtcgcctactacagagaattctaatgatgatgcgagctgtggcttctaataaaactttaaatcggatgagctcttcagctgtggcagcatgcatggcacccttgattcttcgaccccttgt

SEQ ID NO: 229390 - DNA, 374 bp, Gossypium hirsutum
gcattaccagatggcggtgtattgctgcttgagaatgtgaggttctacaaggaggaagagaagaatgatcctgaattcgcaaagaagctagcttctctcgctgatctctatgttaatgatgcatttggcactgcgcacagagcccatgcttccacagagggagtggctaagtacttaaagccttctgttgctggttttcttatgcagaaggaactcgattatcttgttggagctgtggcaaatcccaagaagccatttgctgcaattgtcggtggttctaaggtatcaaccaagattggagtgattgaatcactcttggccaaggttgatattctcatactgggtggaggaatgatgtttaccttctacaaggc

SEQ ID NO: 229391 - DNA, 353 bp, Gossypium hirsutum
atttactagcaatttcttcaagttcttttctttgtttttttaatcaatggctgaccactacctccaaaacactcaaccaatgactcaccaaatggtgaaagccgctactgccgcaacagccggtggttccctcctcattctctccggtttaatcctagctggcaccgttattgcgctcaccatagccactccactcttcgttattttcagtccagttcttgtccctgctctcattgcaacagctctcctagcaacgggtttcgttgcctccggcggtttcggtgttgcagctgtcacggtcctgtcctggatttacaggtatgtgacggggaagcacccaccggctgcggatc

SEQ ID NO: 229392 - DNA, 398 bp, Gossypium hirsutum
atcctctacattgctgatcggaaggctcgtgaagctgtggaaatgcgtgcccaagtagagagaaaaatggctcagaaagaaaaggaaaaacacgaagagaaacttagagaaatggctcagaaagccagggagagaagagctgggatcaaaactcacgtggaaaaagaggatggggaggcacgtgagagggatgaaatccggcatgacaggcgaaaagagagacagcatgaccggaatctttccagggcagctcctgataagaggtcgaaacttcagagaaatgaaaatcgggatatcagtgaagtcattgctctcggtgttcctaatcctcggacttccaatgaagttcagtatgaccaaaggctcttcaaccaatccaagggtatggacagtggatt

SEQ ID NO: 229393 - DNA, 376 bp, Gossypium hirsutum
gattcctgctcctcagatcgttaagaaatctgaagacccatatgctataacagacaatgattggagttgggaagataaagcaatactcaaacatccttgagaagccccttagcaagggcaaacaagaggttagcttgagtgcctttacatttttgttctctgagcttgttcagtacaatcaaactcgggttgacaacattgctgaattagaaagaaggctggaggatgcaaggtatgctgttggggctcgagttcttgaacttttatgccatagggataaggggaatagaagggagacacgattgctgggtattttatcctttgtgcacagcactgtctggaaggcgttatttggaaaggtggctgactctcttga

SEQ ID NO: 229394 - DNA, 384 bp, Gossypium hirsutum
gtgaccttgggttgagtgtagagatgaggaaaatcatgggtgccaaagttctcttcttctttgctttgctttccttttcagctgtgtcggcatttgcaggatgaggaagaccaaggtcttgttatgaacttctacaaggattcttgtcctcaggctgaagacattatcaaggagcaagttaagctactgtacaagcgacacaaaaacactgctttttcttggctgagaaacattttccatgactgtgctgtccagtcatgtgatgcttcactgctgctggactccacaagaaggagcttgtctgagaaggagacagacaggagctttggcctaaggaatttcaggtacattgagaccatcaaagaagctgtagaaagggaatgg

SEQ ID NO: 229395 - DNA, 389 bp, Gossypium hirsutum
gagaaaacaagtggagagaagaagaagaagaggaaagtgacgaaggagagcaacaacaaaggaacaacccttactacttccatcgcagatcgttccaagaacgattcagggaagaacatggcaatttcagagtcctccagaggtttgctgacaaacatcatttacttaggggcatcaacgagttccgcattgccattttagaagcaaaccccaacactttcgttctcccacaccattgtgacgcggagaaaatttacgttgtcactaacggaagaggaacagttacgttcgtgacacatgaaaacaaagagtcatacaatgtagttcctggagttgtagtaagaattccagcaggaagcactgtgtacttggccaaccaagacaacagg

SEQ ID NO: 229396 - DNA, 382 bp, Gossypium hirsutum
gaatgctatcaacggacgtgctcacaaggaacgagctcaaccgtcatcgaggaaaaaatttgggcttcttgagaaacacaaggattatgtcgtccgtgcgaaagcattccacaagaaggaagaaacgttacggaaactcaaggagaaagctgcattcagaaacccagatgaattttactttcagatgataaaaacgagaactgtggatggagttcataaacctgagagtcaggctaacaaatacactcaagaagaactcatgctaatgaaaactcaagacataggatatatactacagaaattgcaaagtgaaaggaagaaaattgagaagctaactgcagtgttgcattctgttgataatcatccatctaacagacacatt

SEQ ID NO: 229397 - DNA, 384 bp, Gossypium hirsutum
gctccaacctctggtctggcgagctatcaaaacttgctgccaatgccttcttggcgcagagaatctcttcggttaatgctatgtccgcattgtgtgaggccaccggtgctgatgtgagccaagtggctcatgctgttgggaaagacacaagaattggacccaagttcttgaatgcgagtgtgggtttcggtggatcgtgtttccaaaaggatattttgaacctggtctacatctgtgagtgcaatggcctcccagaggttgcaaactactggaaacaagtcattaagattaatgactaccagaaaactcggtttgtgaaccggattgtttcctcaatgtttaacacagtttcagggaagaagattgccattctcgggtttgctt

SEQ ID NO: 229398 - DNA, 390 bp, Gossypium hirsutum
ctttcaaggctaagccaccaccaccactaccacgatggccttgaccaccatgctccgccgccgactcttctcccgggctttctcctcccacgacggtccaagccggtggacgacgcccggtcaccaggaacgacccaatggttacctcttcaacaggaccccaccacctccaggccaatcccgtaaatgggaagattgggagttgccttgctacgtcacgagcttcctcaccatcgtcatcctcggtgttggtctcaacgccaagcccgatctcactatcgagacttgggcacatcaaaaagcccttgaaaaactcgccgccgagtcgtcgtcatcttcttctgactgagatgttttgaagcaaatttcgaccgggatctggggtacggg

SEQ ID NO: 229399 - DNA, 306 bp, Gossypium hirsutum
cccacgcgtacgcccatggctgcctccgttgatcctctcgttgttggtcgcgtcattggcgatgttgtcgacatgttcgttcccaccgtcaccatgtccgtctactatggttccaagcacgtctctaacggatgtgacattaagccttctatggctatcaaccctcccaaagttgccatcgatggccttcctgaccagttttatactttggtgatgactgaccctgatgcgccaaatcccagcgagccaaccatgcgtgaatgggttcactggatcgtgtctgacattcctggagggaccaacccc

SEQ ID NO: 229400 - DNA, 374 bp, Gossypium hirsutum
gcaaaccccaacactttcgttctcccacaccattgtgacgcggagaaaatttacgttgtcactaacggaagaggaacagttacgttcgtgacacatgaaaacaaagagtcatacaatgtagttcctggagttgtagtaagaattccagcaggaagcactgtgtacttggccaaccaagacaacagggaaaagctaaccatagcagtgctccaccgacctgtcaataaccctggacaattccagaaattcttccctgctggacaggaaaatcctcagtcatacttacgaatcttcagccgtgaaattcttgaggctgtcttcaatacacgaagtgagcagctagacgagctgtttggtgggaggcaaagccatcg

SEQ ID NO: 229401 - DNA, 377 bp, Gossypium hirsutum
gttcggtccaaaacaaaggtgtacgacatttacgatcgtacaaagcctcgtaaggcgccatattgatgctcgattgaaaactattattatatgcgaattcaaccaaaggtaagtatcgttcccacaaggcactaaactcaaggatgcaacatctcaacatatcctcgagtatctgaataattcgctcggattgaccatcggtctggggatgaaaagcggtgctaaaatgcaacttagtacccaattcttctttccatttcttccaaaatcgcgatgtgaatctcggtaccccgtgtaaccttacaatctgagaaacatacaattcaactaacttatcaagtgaataatctgtacgtatgggaataaaatgagccgac

SEQ ID NO: 229402 - DNA, 389 bp, Gossypium hirsutum
ctacattcgtggtcctcgtcaccgaaggaaacggccacgtcgaaatggtctgccctcacctttctaggcagagctcacactggtcctcccgagaggaagaagaacaagaagaacaagaagttgaaaggagaagtggacaatacaagagagtgagagcccagttatcaaccggtgacctatttgtagtcccagcaggccatccagtcacattcgttgcctcccaaaacgaggacctaagattgctcgggttcggactctacaacggccaagacaacaagaggatcttcgtggctgggaaaaccaacaatgtgagacaatgggatcgccaagccaaggagctggcgtttggggtggagtcaaagttggtggatgaggtattcaacaacaac

SEQ ID NO: 229403 - DNA, 375 bp, Gossypium hirsutum
gggttacccttccagtaggcataaggttccctctttccccactttatcctctccctccctttctttattgctctcaacgtctcctcccatggctttatattcacctccgccctgccaggacaaagcaaagtaaatatgattaactagctaattgcagtaaaaagttataaacactaggcatttttttctccattaacgtcgtgtgaatttaggcaatatgtagcagaatttaccatccccagaaggtccaatcagggaacacaatgtccagtgctgctttctctccacagtaatgaaaagccggcggtggtgatgtagcattgagtcctttgtagtctcttttcatgatcatagtcttgtctccactatagaaca

SEQ ID NO: 229404 - DNA, 265 bp, Gossypium hirsutum
tttcgtctaggcggtggaggatgttcttctaatggctttggaaggccttggattaactgtgtgcccccctggagacattcaaaaggccaccgttaaccagattctactgactaccctcaacctgcaaatcgacccgaccatccaaagagtgccgaccgaggaacgtgaacagatcaagaccctaaacaacaatttcaactgcttcatctacaatgtgcggctcatgtagcaccagaacacggttcttgaaaccaagtgtaccctg

SEQ ID NO: 229405 - DNA, 371 bp, Gossypium hirsutum
atcaagacccatcagtctgctgtattcaggagacccatctcacacgcagagacatacataggctcaaaataaagggatggaggaagatttaccaagcaaatggagaacaaaaaaaagcgggggttgcaatactagtctctgataaaacagactttaaaccatcaaagatcaaaagagacaaagaaggccattacataatggtaaacggatcaattcaacaggaagagctaactatcctaaatatatatgcacccaatacaggagcacccagattcataaagcaagtccttaaaaaacttacaaagagacttagactcccatacaataataatgggagacttcaacactccactgtcaacattagacagatc

SEQ ID NO: 229406 - DNA, 328 bp, Gossypium hirsutum
atcggatgacaacttctccaccatagtggctgccgttgaggaggggcgggcaatctacaacaacatgaaacagttcatccgctacctcatctcgtccaacgttggggaagttgtctgtattttcctgacagcagcccttggatttcccgaggctttgattcctgttcagctgctctgggtcaatctggtgacagatggcctgcctgccactgcactggggttcaaccctcctgatctggacatcatgaataaacctccccggaacccaaaggaaccattgatcagcgggtggctctttttccgttacttggctattggctgttacgtc

SEQ ID NO: 229407 - DNA, 368 bp, Gossypium hirsutum
aacgaggaagaggaaggagaaggtcaggaaacggcttagaagaaacattctgctcaatgagactggaaacacaggacccctgcttcctctgctgatgttttcaacccacgaggtggtcgcatcaccacagttaacagtttcaatcttcccattctccaatacctccaactcagcgccgagaggggagtcctttacaataatgctatctacgctcctcactggaacatgaatgcccacagcattgtttacatcacaaggggaaatggaaggattcaaattgtgtcggaaaatggagaggcgatattcgatgagcaagttgagaggggtcaagtcataaccgtaccccagaatcatgcagtggtgaaaaa

SEQ ID NO: 229408 - DNA, 371 bp, Gossypium hirsutum
atcggggatggcggttgtggcggcggctgcaggctggctgctcaggcttagggcggcaggggctgaggggcactggcgtcggttccgtggcgtggggctggcgcggggatttctgcacccctccgcgactgtcgaggatgcggcccagaggcggcaggtggctcattttactttccagccagatccggagccccgagagtacgggcaaactcagaaaatgaatcttttccagtcagtaacaagtgccttggataactcattggccaaagatcctactgcagtaatatttggtgaagatgttgcctttggtggagtctttagatgcactgttggcttgcgagacaaatatggaaaagatagagtttttaata

SEQ ID NO: 229409 - DNA, 271 bp, Gossypium hirsutum
attgcggatgagcccgtggagaagacgccccagactcagcaggatgagctctacatccactcggagcctctgggcgtggtccttgtcatcggcacctggaactaccccttcaacctcaccatccagcccatggtgggcgccatcgctgcagggaacgcggtggtcctcaagccctcggagctgagtgagaacatggcgagcctgctggctaccatcatcccccagtacctggacaaggatctgtacccagtcattaatgggggtgtccctg

SEQ ID NO: 229410 - DNA, 371 bp, Gossypium hirsutum
cccacgcgtgcgcggacgcgtgggtttccatttactagcaatttcttcaagttcttttctttgttttttttaatcaatggctgaccactaccttcaaaacactcaaccaatgactcaccaaatggtgaaagccgctactgccgcaacagccggtggttccctcctcattctctccggtttaatcctagctggcaccgttattgcgctcaccatagccactccactcttcgttattttcagtccagttcttgtccctgctctcattgcaacagctctcctagcaacgggtttcgttgcctccggcggtttcggtgttgcagctgtcacggtcctgtcctggatttacaggtatgtgacggggaggcacccac

SEQ ID NO: 229411 - DNA, 352 bp, Gossypium hirsutum
  unsure (1)..(352): unsure at all n locations
atcaatgacctgcggcactttgaccctgagtttactgaagagcctgtccccaattccatcggcaagtcccccgacagcatcctcgtcacagccagcgtcaaggaagctgctgaggctttcctaggcttttcctacgcgcctcccacggactctttcctctgaacgctgatagggcttggttttaaagggttttatgtgtgtttctgaatgttttagttagccttttggtggagccgtcagctgacaggacatgttacaagagaatttgcacatctctggaagcttagcaatcttattgcacactgttcgctggaagctttttgaagagcacatactnctcagtgagctcatg

SEQ ID NO: 229412 - DNA, 373 bp, Gossypium hirsutum
ccagaacattaaaaaggaaaaaaaaaatcattggtctttctcgattgttgggtctttgagatatgtcgtcggagatcgaggtggtggaggaggctgtacctttgaagcaattgagtggcgttgtagcgaatggaaatgaatatgggggagggcatcatggggttgtcggtgatgttgccgatgatgagagcttgaagaacgatgtctataccgctgctgcttatggggatttggagaaacttcagaggttggttgagtccgaaggttgctctctttccgagcctgatggccttggttactatgcccttcagtgggctgctttgaataatagaaccgcagctgctcaatacatcatcgagcatggtggagatgt

SEQ ID NO: 229413 - DNA, 263 bp, Gossypium hirsutum
atttttcactttccgcacacttagcttaactaagcaagctcgtaagctgttttcatcaatggccgaccgtgaccgctcttaccggacgtttgaccaggttgttcgtggtgatagaacgaactatcaaagcggaccatcaacaacccaagttctaactgtcctcaccctccttcccataggcggcactctccttgcattagccgggctaaccctcaccggcaccgtcatcggcctatgcatggcaacgccactcttcgtcatct

SEQ ID NO: 229414 - DNA, 350 bp, Gossypium hirsutum
gggtagatcttctttcaaccgcgcctaataaccgctcggatttttctcagacgtgaaaaaaatggggctgtctttcaccaagctattcagccggctatttgccaaaaaggagatgcgtatactgatggttgggcttgatgctgctggtaaaaccaccattctttacaagctgaagttgggagagattgtcactaccattcccaccatcggtttcaatgttgagaccgttgaatacaagaacatcagcttcactgtttgggatgttggtggccaggacaagatccgaccattgtggagacactatttccaaaacatgcaaggacttattttcgtggttgatagcaatgatc

SEQ ID NO: 229415 - DNA, 278 bp, Gossypium hirsutum
atggctgaacaactcaaccttctctgcacagtgggtccagcatcctttgaagcatgagttcttaccaggagaagcagacctttaccccaccacctcagctttaacagcagcaggtgaaacaacccagccagcctccacctcaggaaccatttgttcccataaccaaggagccatgccacccaaaggttccacatcctgtaaacacaaagattccagagccagattgcaccaaggtccctaagccaggctacaccaaggaccctgagccaggcagcacc

SEQ ID NO: 229416 - DNA, 340 bp, Gossypium hirsutum
atgtggtggggtagccctgaattcttttgacgacctaagtcccgactgcttgggccatgcaggacttgtgtatgagtatacattgggagaagagaagttcacctttattgagaaatgtaacaaccctcgttctgtcacattattgatcaaaggaccaaacaagcacacactcactcagatcaaagatgcagtgagggatggcttgagggctgtcaaaaatgctattgatgatggctgtgtggttccaggtgctggtgcttgggaagtggcaatggcagaagccctgattaaatataagcccagtgtaaagggcaaggcacagcttggagtccaagcattt

SEQ ID NO: 229417 - DNA, 399 bp, Gossypium hirsutum
atgtggtggggtcgccctgaatgctgtggacgacctaagtgccgactgcttgggccatgcaggacttgtgtatgagtatacattgggagaagagaagttcacctttattgagaaatgtaacaacctctggttctgtcacattattgatcaaaggaccaaacaggcacacactcactcagatcaaagatacagtgagggatggcttgagggctggcaaaaatgctattgatgatggatgtgtggttacaggtgctggtgctgtgagaggcgcaatggcagaagccctgattaaatataagcccagtgtaaagggcaggggacagctaggagtccaagcatttgctgatgcgttgctcattattgccaaagatcttgctcagaactctggttttgaccttc

SEQ ID NO: 229418 - DNA, 348 bp, Gossypium hirsutum
ctcgaaaaaaaaaatgtcttcaggttgcaattgcggatctaactgcagctgcggtgacaactgctcatgcagcaggaaccttaaccttggatattcggagaagacaaccagcactcagaccatcatctccggagttgcgccagtgaaaatgacctttgagggaccagagatgagcactactgaatcaggacatggatgcaagtgtggatcaaactgctcttgtgatccatgcaactgttgaaaagcttgatgaaagccatagattatgaaaaaaagaaagcagcaaaaataacaggcctctgtaatgatatattgtcaaggatggatgcctgcaaggtctataattat

SEQ ID NO: 229419 - DNA, 318 bp, Gossypium hirsutum
cccacgcgtccgtggaaagcaagaacctagaaatcaagaaaataaatgatgagaagaaggcatccatggctgctcagtttgcagctgaggccactctgcggagggttcatgctgctcaaaaggacgatgatatgcctccaattgaagcaattcttgcacccttggaggctgagctgaagcttgctcggcaagagattgcaaagcttcaagatgataacaaagctctcgatcgtctaactaaatcaaaagaagcagctttaattgatgctgaaagaactgtagagtttgcattggcgaaagcttccatggtagatgatc

SEQ ID NO: 229420 - DNA, 345 bp, Gossypium hirsutum
cggacgcgtgggctcctctttctcccatggctgcctccgttgatcctctcgttgttggtcgtgttattggcgatgttgtcgacatgttcgttcccaccgtcaccatgtccgtctactatggttccaagcacgtctctaacggatgtgacattaagccttctatggctatcaaccctcccaaagttgccatcgatggccttcctgaccagttttatactttggtgatgactgaccctgatgcgccaagtcccagcgagccaaccatgcgtgaatgggttcactggatcgtgtctgacattcctggaggaaccaaccccactcgagggaaggaaatcctggcataca

SEQ ID NO: 229421 - DNA, 374 bp, Gossypium hirsutum
atcggctgtgttgctcgtttctctgagccatccagtgccatcctcgtcgctgcagcgacacacgcgctcgccgccgccatgactgagcagatgacccttcgtggcaccctcaagggccacaacggctgggtaacccagatcgctactacccccgcagttcccggacatgatcctgtccgcctctcgagataagaccatcatcatgtggaaactgaccagggatgagaccaactatggaattccacagcgtgctctgcggggtcactcccactttgttagtgatgtggttatctcctcagatggccaggtttgccctctcaggctcctgggatggaaccctgcgcctctgggatctcacaacgggcaccaccacg

SEQ ID NO: 229422 - DNA, 289 bp, Gossypium hirsutum
  unsure (1)..(289): unsure at all n locations
gccgacgccgctgattccaactcaacccattggtccccagcgcactcctccgctctctaccgcatcgacggatggggagccccctacttttccgtcaataacgccggcaatatcaccgttcgtccgtacggaacggacactctggcccaccaagaaatcgatttgctgaaaatcgttaagaaagtctcggatccgaaatctgtgggcgggctgggtttacagcttnccctcattgttcgggtgcccgatgtgctgaaaaaccggctcgagtctcttcaatcggcttttg

SEQ ID NO: 229423 - DNA, 335 bp, Gossypium hirsutum
aagagaaatacacaagaaaaaaaaaaaaaaaacaagtgagcagataaattgaagacttttatttctgttaacatccattatgagtactgctggtcaagtcatccgttgcaaagctgcggtagcatgggagtcggggaagccactgtcaatagaggaagtggaagtggcaccaccgcagaaggatgaagtccgtattaagatactcttcacttctttatgtcacaccgatgtctacttctgggatgctaaaggacaaaaccctctgtttcctcgcatactaagtcatgaagcttgagggattgtggaaagtgtatgttaaggggtgactgatctaa

SEQ ID NO: 229424 - DNA, 363 bp, Gossypium hirsutum
cggacgcgtggggaagcagccagccagccctcgtttccctcattttcctcttcattttctcgggaaaaaagaagcatgggaaaaggtcctggtctctactccgatatcggcaaaaaggctagagatcttctttacaaggattaccaggttgaccacaagttcactgtcactacttacacttccaatggagtcgcaatcacatcaaccgggactaagaaaggtgatttgcttttggctgatgtaaatactcagctcaagaacaagaacatcacaactgatgtgaaagtcgactccagatcgaatcttttcaccactgtcactattgatgaacctgcaccaggattgaagaccatctttagtttc

SEQ ID NO: 229425 - DNA, 281 bp, Gossypium hirsutum
ctggatttgagggtgataacatgattgagaggtctaccaaccttgactggtacaagggtcccactctccttgaggctcttgaccagatcaatgagcccaagaggccttcagacaagccgctccggctcccacttcaggatgtctacaagattggcggcattggaactgtgcctgttggtcgtgttgagactggtgttcttaaacctggtatggtagtgacctttggcccctctggcctgaccactgaagttaagtctgttgagatgcaccatgaagccctc

SEQ ID NO: 229426 - DNA, 340 bp, Gossypium hirsutum
atgaaaagatggcggctgccgcacaatcccgggttgtccgggtcctgccaatgtcacgttctgccattactgcaatagccacatcagtgtgtcatggcccgccctgtcgccagcttcatcatgccgtcatacctcatgggaaaggtggacgttcctcagtcagtgggatcgtggccactgtgtttggagcaacaggattcctggggcgatacgttgtcaaccaccttggacgcatagggtcacaggtaatcataccccatcggtgtgatatatatgacaccatgcaccttcgtcccatgggtgacctgggccagcttctgtttctggaatgggacgcgag

SEQ ID NO: 229427 - DNA, 258 bp, Gossypium hirsutum
ccacatttcacttccacctgcttgcttacctatttgttgcgataatctcgaagcttccttttccgttttagatctcaaaattcaaaaggctctctttttcatctcatggctgctactattgtctccgtcaaagctaggcagatcttcgacagccgtggaaatcctacggttgaggttgatgtggaaatatcgaacggtataaaggctagggccgcagttcctagcggtgcatccactggaatttacgaggctcttgag

SEQ ID NO: 229428 - DNA, 391 bp, Gossypium hirsutum
gattggctctcgttatgaagagtgggaaatacactttgggttacaaaactgttctcaagtctcttagaagctccaaaggtaagttgattatcattgccaacaactgccctcctcttaggaagtcggagattgagtattatgccatgttgtgcaaggttggagttcaccactacaatggaaacaacgtagacttgggcactgcttgcggcaaatactttagagtgtgctgcctcagcattattgaccctggtgactctgatattataaagagcatgcccggtgatcactaagctatggggggataacttcctaggtgctgatttagtttcaatttttgggtgtctaaaaacatttgtgatgttaaagacaaacttattctgaaattcagaac

SEQ ID NO: 229429 - DNA, 386 bp, Gossypium hirsutum
atggcaacggcaccggctccgcggcgcgcaggctaggctgcagactctcggcggcagcgttcggtggatctaggatctggcttccaacatgtggtggctctgggcctccctctgctgcctgctggcgttgggcgatgcccggagcaggccctctttccatcccctgtcggatgagctggtcaactatgtcaacaaacagaacaccacgtggcaggccgggcacaacttctacaacgtggacgtgagctacttgaagaggctgtgtggtaccttcctgggtgggcccaagccggccccagagagttatgtttaccgaggacctgaagctgcctgaaaagctcgatgcacgggaacaatggccacagtgtcccaccatcaaagagatc

SEQ ID NO: 229430 - DNA, 391 bp, Gossypium hirsutum
atgaaatatgggactatgtgaaaaaacaaaatctacgtttggctggtgtacctgaaggtgatgcatagaaaggaaccaagctgcaaaacactcttcaggatattttccatgagaacttccccaacctaacaaggcaggccaacattcaaattcaggaaagacagacaacaccacaaagatatactttgagaaaagcaaccccaagacacataattgtcagattcaccaaggttgaaatgaaggaaaaaatgctaagggcagccagagagaaaggccaggatacccacaaagggaagcccatcagactaacagcagatccttccgcagaaactctacaaagccagaagagagtgggagccaatattcaacattcttaaaagaaaagaatttc

SEQ ID NO: 229431 - DNA, 364 bp, Gossypium hirsutum
gtagatatggcgattaacccttctttgctctttctttcccttctttttctcttcaatggctgcctagctcgccagaccttttcgtcacagcagtcccaaaatgagtgtcaaatcaataggctccgcgcctctgcaccccagacccgaattcgctccgaagccggcaccaccgagtggtggaaccccaactgtcaacagctcaggtgtgctggtgtatctgtaatgaggcagactattgaacctaatggccttggttttgccttccttcaccaatgctcctcagcttctctacattgtccaaggaagaggtattcaaggtattgtgatgcctggatgtgccgaaacattccaggattcacagcaa

SEQ ID NO: 229432 - DNA, 333 bp, Gossypium hirsutum
cacgaagtgagcagctagacgagctgtttggtgggaggcaaagccatcgaaggcagcagggacagggaatgttccgtaaagccagccaagaacaaataagggcattgagccaagaagctacttcaccaaggggaaaaggtagcgagggatacgccttcaacttattgagccaaacccctcgctactccaaccaaaacggccgcttctatgaggcttgccctcgtaatttccagcagcaactccaagaagtggattcctccgttgttgccttcgaaataaacaaaagatcgatcttcgtaccgcactacaattcaaaggctacattcgtggtcc

SEQ ID NO: 229433 - DNA, 372 bp, Gossypium hirsutum
aatggggattggagaggaaaggggaaactgaaggcggaagctgttttacaggcggctacgttggcggccagcggtcagccgttcgaggttgtttattacccaagagcgacaacaccggagttttgcgttaaggcgtcgtcggtgaaggcggcaatgagggttccttggtgttgtgggatgaggtttaagatggctttcgagacagaagattcttcaaggattagttggttcatggggactgtgtcttctgttcaagttgtcgatcccattcggtggcctaattccccatggcgacttcttcaggtaacatgggatgaaccggatttgcttcaaaacgttaaaacgtggtaatccttgatggttgaattggta

SEQ ID NO: 229434 - DNA, 133 bp, Gossypium hirsutum
ggaagatgttcgcccaatattttgggctaaccgtccaaagagttacttatctaggactattggttgggatcagtacccacaggggcgatggggtgattctcgaaatccatcgtatggtgcactattccgctat

SEQ ID NO: 229435 - DNA, 257 bp, Gossypium hirsutum
gcgaggacgcataggatcgtctgtcaggaattaaagaaacaccgctggctgatttaatgccattgtttgacaatgttctgctgcaagaaggttatgcagggatgaacattccatcaaaagtgaccctggcatgtcgaatggaacctcttattattagtgcttacccgaaatatttcgccaccctagacattgctccttttgcctttttcttagagcggaaaacaaggactaagctcaccatgccaatacttttacag

SEQ ID NO: 229436 - DNA, 279 bp, Gossypium hirsutum
gtgtgttttgcttttcatactcatttagcccctttcattagcatcaaaatcactccagttttctttatcactgaaaaatgtcttgctgtggtggaaactgtggctgcggtactggctgcaagtgtggcagtggctgtggaggatgcaagatgtatccagacctgaacgctgccgagatgaccacaactgagactctggttcttggtgtagcaccccagaaagcacactttgagggagctgagatggaattcggggcttgaaacggctgcaagtgtggag

SEQ ID NO: 229437 - DNA, 261 bp, Gossypium hirsutum
gcgatggcttcttctttccttcttttccttctcattttcctttccgtttcttctttcatccttttatctgaatctcaaaagacttcgaaaccgaacaggttcgttttgcagctgcaaaaagatccgaaaactaaactttatgtgactaacatatacaagagaactccttcacagaaagtcccatttgttgtggacttgaatggaaagttactatgggttacttgggagaaaaagtaccggtcgtccacctaccattcccct

SEQ ID NO: 229438 - DNA, 398 bp, Gossypium hirsutum
ggatttgtgagactgatcttggtattgtttcccagtgctgcttgactaaacatgtatttagaatgagcaaacaatatttggccaatgtggcattgaaaattaatgtaaaggttgggggaagaaatactgttcttgttgatgcaatatcacgaaggatacctcttgtcagtgaccgtccaactataatttttggcgctgatgttacccatcctcaccctggggaggattcaagcccttctattgcagctgttgttgcctctcaagattggccagaggttacaaagtatgctggcctggtttgtgctcaagctcatcgtcaggagctcatccaagatttattcaagacatggcaggatcccgtaagggggactgtttctggtggcatgattaaagagctt

SEQ ID NO: 229439 - DNA, 363 bp, Gossypium hirsutum
aagaaagagagcaatggaaagaatacggcataagatggtgaatgtcaatggtatatcgatgcatgtagctgaaaaaggagaagggccggttatcctcttccttcatggcttcccggaactatggtacacttggaggcatcaaattattgcactaagctcactcggctaccacgctgttgccccagatcttcgtggctatggtgataccgaagctcccactgctatcagtagctactcttgcatgcagatcgttggtgacctcgttgcactcattgactctcttggtgtaaagcaagtctttctggttgctcatgattggggtgccattattggatggtacctttgctttgttcgtcccgatag

SEQ ID NO: 229440 - DNA, 344 bp, Gossypium hirsutum
accttccgctgaaaatattacaaatccttatatccttcctagacatcttaacctgatcaaaaatggctgggtttgaaggattgattttacctggcaccatgcgtgcccacaccgacatggtgacagccattgctactcccatcgataacctcgacatgatcgggactacctcccgggacaaatgcatcatcctttgggacttaaccaaggacgaaaagacctacggtgtccctcgtcgtcgtctcaccggtcactctcacttcgtgcaagacgttgtcctctctttcgattctcaaatcgctctctctggttcctgggatggggagcttcgtctctgggactta

SEQ ID NO: 229441 - DNA, 351 bp, Gossypium hirsutum
cggacgcgtgggttcaaagcctctcgtctcctctccataaatctctcactcaacgcagagcgaataggcggagacttccaagaatctatcgcatcagctaatcacgctctaaagaatggatcaggttcaacacccatctatcatgcagaaggtagcaggccagctccttcgttctagccattctcaagattttcaaggttataatgggtctttcaggagtcctgctctatgccaaaggcgtgctgcatatggcaattactccaatgctgcactgcagcatcctgtccgggcttgtggagacctgtctatggttccatcaacagcttctgctatttgcgttcaggctcctgc

SEQ ID NO: 229442 - DNA, 280 bp, Gossypium hirsutum
accaattatcagcaagaaaatgctgagcagattatgatcaatcaagctcgtaaggctgaagatttagctgctgcaatggcagcaagcaaggggatcccagtacaggccgatactgatgggaactcacaagcagggtttgtagctggtacccaaggtcaatatgcaccgacagttgctggaggacagccacgaccaacaggcatggcaccacaaccggtaccacttgctggtgggctggacatgcatggctatgctcttgatgatgaggaaatgatgaggc

SEQ ID NO: 229443 - DNA, 343 bp, Gossypium hirsutum
cggaaaatggagaggcgatattcgatgagcaggttgagaggggtcaggtcataaccgtaccccagaatcatgcagtggtgaaaaaagcaggaaggcgagggtttgaatggatagcattcaagacaaatgccaatgctaagattagtcagattgctggacgtgtctccattatgcgaggattgccggtggacgtgctggccaactcctttggtatatcccgggaggaggccatgaggttgaagcataacagacaggaggtgtcggtttttagcccaaggcaaggctcgcaacagtagatcaaacaacttatctaggtgtacgtacgtacgtaattgcatcaaca

SEQ ID NO: 229444 - DNA, 337 bp, Gossypium hirsutum
cggaaaatggagaggcgatattcgatgagcaggttgagaggggtcaggtcataaccgtaccccagaatcatgcagtggtgaaaaaagcaggaaggcgagggtttgaatggatagcattcaagacaaatgccaatgctaagattagtcagattgctggacgtgtctccattatgcgaggattgccggtggacgtgctggccaactcctttggtatatcccgggaggaggccatgaggttgaagcataacagacaggaggtgtcggtttttagcccaaggcaaggctcgcaacagtagatcaaacaactaatctatgtgtacgtacgtacgtaattgca

SEQ ID NO: 229445 - DNA, 316 bp, Gossypium hirsutum
atggcaagctctagaatgagagaaaataattgcaaatcatagatcttataaggaccccaaatccagaatatatgaggaacttctataactcaacaacaagaaaaccaaataactcaatttttaaaaatgggcaaaggacttgcacagacatttctccaaagaaggcatacaaatggtcaataagaacataaaaatatgctcaacattgctaattattagggaaatataaatcaaaatcacaatgagttatcatctcacgcccatcatgctggccactatcagaagaacaaaaaaaaataagtattggggagaatgc

SEQ ID NO: 229446 - DNA, 356 bp, Gossypium hirsutum
ctggaaaagccaccatcaatgttgaaaatgttgatgaattcaagtggcttaattcatcctattgccctgtcctccggcagcttgagactgcagcgatgaaggagtactacttcaaggcagatcagccaaccaattctggatcttcgaacttgaagtatcgaaacccaaagtatctctcaatgcttaatcacttgcggttctatctgccacaggtctacccaaagttagataagatcctctttcttgatgatgacattgttgtccagaaagacttgactggattatggtctgtagagctccatggaaaagtgaatggtgcagtagaaacttgcggtgaaagctttcatcgttttgac

SEQ ID NO: 229447 - DNA, 353 bp, Gossypium hirsutum
cccacgcgtccgaccggagcctctcctgctcgctgcgtcttcgtctgcaagatctcaattctcaaattgtagcgcccttttatatcaagcaatggctctggtcttgcatgctggaaaaacaaacaaaaatgcctttaaggcactcattgctgcagaatatagtggtgtgcaggtcaaaatggttgagaattttgagatgggtgtgtcaaataagactcctgagttcatcaagatgaaccctttggggaaggttcctgtgttggaaacacctgagggtcctgtatttgagagcaatgccattgctcattatgttgctcgctcaaaggttaacaaccctatatgtggttctacat

SEQ ID NO: 229448 - DNA, 379 bp, Gossypium hirsutum
atgctgaaaaccgcagtgccttcagctaccattgcaagaccccagattgcaagggatggtgcttctttgaggatgatgtcaacgagttcacctgccctgtgtgtttccacgtcaactgcctgctctgcaaggccatccacgagcagatgaactgcaaggagtatcaggaggacctggccctgcgggctcagaatgatgtggctgcccggcagacgacagagatgctgaaggtgatgctgctgcagggcgaggccatgcgctgcccccagtgccagatcgtggtacagaagaaggacggctgcgactggatccgctgcaccgtctgccacactgagatctgctgggtcaccaagggtccacgctggggccccgggggccc

SEQ ID NO: 229449 - DNA, 364 bp, Gossypium hirsutum
ctctcttcgtgctcccgccgtatttcacttcccctctcttctctcttcttttccttccttccttccttctgtcaacaccactttctaatggcttcccttgctggttcatccatctctatgcaacctcgccagaccctggctacaagcagggtttctgggttgaaattggtttcatttgtgaaccggggaagaagcagcctctcctttaggctgcgtccggatcgcttgcggatttcatgtgctgccaaaccagagacagtggataaggtatgtgaaatagtaaggaaacaactagccctaccaagtgacaaagcagtcacaggtgaatcaaaatttgctgaacttggagccgattctcttgata

SEQ ID NO: 229450 - DNA, 361 bp, Gossypium hirsutum
ctcccacaccattgtgacgctgagaaaatttaccttgtcaccaacggaagaggaacgcttacgttcttgacacatgaaaacaaagagtcttacaatgtagtaccgggagttgtagtcagagtcccagcaggaagcactgtgtacttggctaaccaagacaacaaggaaaagctaatcatagcagtgcttcaccgccctgttaataaccctggacaattcgaggaattcttcccagctggaagccaacgccctcagtcatatctccgagcctttagtcgtgaaattcttgagcctgccttcaatacacgaagtgagcagctagacgagctgtttggtgggaggcaaagccaccgaaggcagc

SEQ ID NO: 229451 - DNA, 358 bp, Gossypium hirsutum
agcttatttcggagaatcatcttggggtgaggaatgctgcccaaaggaagcttttggatgagctcggtattcctcctgaagatgttcctgttgatcagttcgtcccactgagccgcatgctgtacaaggcaccttctgacggcatgtggggcgagcatgaacttgattacctcctattcattgtccgagatgttaacgttcatccaaaccctgatgaggtagcagaggctaaatacgtgaaccgtgaccaactgaaggagttactgcgtaaagctgatgctggtgaagatggtttgaaactgtcaccatggttcagactcgtcgtggataatttcttgttcaagtggtgggatcatgt

SEQ ID NO: 229452 - DNA, 355 bp, Gossypium hirsutum
gcgtaccatgcttgaaattgtcaaccagcttgatggctttgatgctcgtggaaacatcaaagtcctgatggcaacaaacaggccggacacgctagatcctgcattattacgtcctggacgattagatcgtaaggttgagtttggtctccctgatttggagagtcgaacacagatatttaaaattcatacaagaacgatgaactgtgaacgtgatattagatttgaacttttagcccgactttgcccaaattctaccggggccgacataagaagtgtgtgcacagaggctggaatgtatgctattcgggctcgaagaaaaacagtgacagagaaagatttcctagatgcggtgaac

SEQ ID NO: 229453 - DNA, 360 bp, Gossypium hirsutum
cccacgcgtccgtattttctctccataagaagtctttttctcttcattctcccaatatcttcatttgaagcagctatgtcttttagaggaggaaatgcatcatcgggcatgggagtggctgaacacagcaaaagcacgtacctggaactgcagagaaagaaggtgttccgatatgttatcttcaagattgatgagaagaaaaaggaggtcatagttgaaaagactggaggtccgacagagagctatgatgatttcgcagcctcattgccggagagtgactgccgctatgcagtttatgacttcgattttgtgacttccgagaattgtcagaagagcaagatcttttttattgcgtggtct

SEQ ID NO: 229454 - DNA, 353 bp, Gossypium hirsutum
cggacgcgtgggcgacagcttgaggggtggaatcaattttatggctgccaataatgactgtagcatgagagaatatgatacggagagatttcagcttctaaaccatctccgtttcccttggccagtaaatcatacatcagtcagccctgaccgaaggcttattactgttgttggagatagcttggatgggttgcttgtggatttgcaaaacggaaagactgtagccacggtggtaggtcatctagattactcctttgcatctgcatggcacccagatgggcgcatatttgccactggaaatcaggataagacttgccgtgtgtgggacgttcgaaacctctcaaggccagttg

SEQ ID NO: 229455 - DNA, 321 bp, Gossypium hirsutum
gtctgtctctcttgcagtcgcctttatcagaagcaaaaacactaagctttagcttctacatcggagaaaatggtgaagggacgccaaggagagcgagtcaggctctatgtaagaggaaccatcttgggttacaagagatcaaagtcgaaccagtacccaaacacttcgttgatccagattgagggagttaacaccaaggaggaagtagcttggtatgctggcaagcgtatggcttatatctacaaggccaaagtgaagaagaatggctcacactatcgctgcatttggggaaaagttactagacctcatggtaacagtggg

SEQ ID NO: 229456 - DNA, 364 bp, Gossypium hirsutum
tagatcttccttatcatactgaacctccatggcctccaagtttgagagaatttctttaaacactgttaagtgttcgtgcacagatgcaccttcctccaaacgatgagcacaaagatgttgcttcatatgcagcttgctagttagagttttcgacatacatatttgttccaaccacttccataatccagcgacgatcttctccttcatcacatcctgcaaaatttcgttcgacaaatgcagatgtaactgtgttaatgcctttcgatccttgcgcttcttctattcttccgtcaatgttgaaggcatcttatctacccctagcagggcttcttctaagtccatctatgcaagaactgcctgcatc

SEQ ID NO: 229457 - DNA, 332 bp, Gossypium hirsutum
tcttgtttcaggggaaaaaaactgaaaggaacaaacttgtttcggcgaaaaggaaaacgaagaggctttgtatttatttctttattgttagttaggccccccgatggagaccggaccaaccggcggtggcctatgtggtgacgatctatcccaatcgtatcctgcgaccgctatatcgcggtggagcttcaaggtgtcgcggcggtaccaacacgttctggacaagactgtcccgcacattctgtaccgttggatagcatgtctggtgctggggctgatctacgccggacgcctgtactttgtgcaaggattttacattatcacctactggc

SEQ ID NO: 229458 - DNA, 356 bp, Gossypium hirsutum
cggacgcgtgggaaaaaaatggggcttgaagaaaatctcaaatcaatgaacatcaacgaagaagagaacaagaaccctaaccctaacactaaagatgaagaagatggtgaacttgaagaaggggagatcgcaggtgaagaagatgatacgacgtcgtcttcgttaaagaaaggtgtcgtcgaacagcctcaccagttggagcattcatggaccttttggtttgataacgcttctgctaaatcaaaacaagctccttggggtagttctatgcgcgctatttacactttctccaccatcgaacaattctggagtctatacaataacatacatcatccaagcaaattggctgtgggagc

SEQ ID NO: 229459 - DNA, 359 bp, Gossypium hirsutum
ggagaagtgggcaatacaggaaaataaggtcccagttgtcgcgtggagacatatttgtagtcccagcaaacttcccagttacattcgttgcatcccaaaaccagaacctgcggatgactgggttcggtctttacaaccagaacattaacccagaccataaccagaggatcttcgtggctggaaaaatcaaccatgtgagacaatgggatagccaagccaaggagttggcctttggggtgtcatcgaggttggtggatgagatattcaacaacaacccacaagagtcttacttcgtgtctcgacagaggcagcgtgcatctgaataaagagttagaggcaataataaccacatagtctcg

SEQ ID NO: 229460 - DNA, 365 bp, Gossypium hirsutum
attcttgcttctctgatagctcccagcttactctctgcagccatgattgccagacagcagtgtgtccgaggcgggtctcggggcttcagctgtggctcagccatcgtaggcagtggcaagagaggtgccttcagctcagtctccgtgtctggaggtgctggccgatgctcttctgggggctttggcagcaggagcctctacaacctcggggggaacaagagcatctccatgagcgtggctgggtcacgacaaggcgcctgctttggaggtgctggaggcttcggcactggtggctttggcggtggatttgggggctccttcagcggtaagggtggccctggcttccctgtctgccctgctggggg

SEQ ID NO: 229461 - DNA, 347 bp, Gossypium hirsutum
ctttattattcttcgtcttctgaaaaattttctttgaaattccagcttttgactacaatgtcaggaaggggaaagggaggtaaggggctcggaaagggaggagccaagaggcataggaaggtcttaagggacaacattcagggcattaccaagcctgcgattcgccgtctggctcgtaggggaggtgtgaaaagaatcagcggtttgatctacgaagaaacccgaggcgtattgaagatcttcttggagaacgtgattcgtgatgccgtgacatacactgaacacgccagaaggaagaccgttaccgccatggatgttgtttatgccttgaaaaggcaaggcaggac

SEQ ID NO: 229462 - DNA, 340 bp, Gossypium hirsutum
tttcctcatcaccatcgtctgctattcttcacaaaaaagaaaagaaaaattacagtgaaaatggcaacccttaaagttccagctcatgtacctgccccttctgaggatgctgagcaacttcgtaaagcttttgaaggatggggtacaaatgagcaattgattatcgacattttggctcacaggaatgcagctcagcgcaatttgattcgtaaaacttatcgtgaagcttatggggaagatctccttaagtctttggatgaggaactttcaagtgactttgagcgagctgtggtgcttgttactttggaccctgcaaagcgtgatgcatttcttgctcatg

SEQ ID NO: 229463 - DNA, 364 bp, Gossypium hirsutum
atgctgcgcggaggcacacaggccgggagaccgttctgggtccgagggtccgggcaggggttgagacaccatctgacctcaagcttcgtcgtgtcgccggttctgcaggcaccatgagccaggacaccgaggtggatatgaaggaggtggagctgaatgagttagaacccgagaagcagccgatgaacgcggcgtctggggctgccatggccgtggtgggagcagagaagaatggtctggtgaagatcaaggtggcggaagacgaggcggaggcagtagccgccgctaagttcacgggcctgtccaaggaggagctgctgaaggtggcgggcagtcccggctgggtacgtacccgctgggtgct

SEQ ID NO: 229464 - DNA, 401 bp, Gossypium hirsutum
tgccccgccggaatttccggggtgctcctcaacagcacgtttgcctccttcatcgacaaggtgcggttcttagagcaacagaataaggtcctggagaccaaatggaagctgctccagcagcagacgaccagcacctccagcaaaaaccttgagcccctctttgagacctacctcagtgtcctgaggaagcaactagataccttggtcaatgacaaagggcgcctgcagtctgagctgaagaccatgcaggacagcgtggaggacttcaagaccaaatatgaagaggagatcaacaaacgcacagcagctgagaatgactttgtggtcctcaagaaggacgtggatgctgcctatatgaacaaggtggagctggaggccaaggtggacagtcttaatgatga

SEQ ID NO: 229465 - DNA, 356 bp, Gossypium hirsutum
caaatagtgcactttggctcctcagattcccagctgctggagaaacgagactgcgagcatatgctgctgcacaaggggtacagccagagcaaataattttcacagatgttgcaatgaaacatgaacatatcaggcgcagtgctttagctgatctctgtctcgacacccctttatgcaatgcacatactactggcacggatgtgttatgggctggtttacctatggtgactctaccccttgagaaaatggctacaagggttgctggttcactttgtctcgctactggtttgggggaggagatgattgtgaacagtatgaaggaatatgaagaaagggctgtctcgttggcattaaat

SEQ ID NO: 229466 - DNA, 360 bp, Gossypium hirsutum
ctttgttctaatgcttggcacccgcagactcccatttcctgcatttgcatttgacttaattcactgctctcgttgccttatcccttttacagcttataatgcaacatatttcgttgaagtggatcggttgcttcgtccgggtggatatttggtcatctccggaccccctgtgcagtggcctaagcaagacaaggagtggacagacctccaggctgttgcaagagcattgtgttatgagcttattgctgtggatggaaacacagccatttggaagaagcctgatggagattcatgtctaccaaaccaaaatgaatttgggcttgaattatgtgatggatctaatgacccaagtaatgcatg

SEQ ID NO: 229467 - DNA, 353 bp, Gossypium hirsutum
cccacgcgtccgcccacgcgtccggaaactagcaatggagtcactttctgatattcattgtgacataaaaaacctgataactgaacttgacctccctgtgactgagtgggatgaaaaatggatggatgtgtacctggatatcagtgtgaagttgcttgatattagtattgcttttacctctgagcttacacggcttaaccaaggccatctcttacttcaatatggtctgcacaagttggagtcggattccccagaactgttcagtcgggcctcttcctcacttaatagctggaaacagcacattggctccaaaaatcccagagttgaaacttgtcgacctatctttgacaacc

SEQ ID NO: 229468 - DNA, 375 bp, Gossypium hirsutum
atgtgttcaccatcatgagctgaccaacaatttctaaattcctgctcagaaacacagcaaggggaatgcagtcaagcacaaagggcttaaatgaccaggtaaggctgggctggatgaataaagaggaatgtcctatgagtgtgactgtatagttttacagtatcctgtttcaatggttaacatttgacttgtggccttgtagacagtgtattaatatcagatcttctttttcagaactgttttaatcatggacaaacaaaacacacagatgaatgcttctcaccctgaaacaaacttgccagttgggtatcctcctcagtatccaccgacagcgttccaagatagatcagatactgattcatcagcagattgaac

SEQ ID NO: 229469 - DNA, 357 bp, Gossypium hirsutum
gcaaggtcagctcctgacggtgccacagaactttgcgttcatgaaacaagcaggaaacgaaggagccgaatggatttccttcttcaccaatagcgaagccaccaacaccccaatggctggaagtgtctccttcatgcgagcactgccggaggaagtggtggcagcgtcgtatcaggtgtcaagagaagatgcaaggcggattaagttcaacaacaaaaacacctttttcttcactgcttcacagtccgagaggagggccgatgcttaaactccagccgatgccaatgcaatcaaaatcagggggatctttgtagggtaacgtaagtaggaagtaataaaaagagttgcagagctatg

SEQ ID NO: 229470 - DNA, 333 bp, Gossypium hirsutum
atcaaaggtacagggtgagcttgatgaaatcgtcggaaaatcagggccgctgacggaaccaggcgttcaatcaatggtttacctacaggctgtgctgaaggaagttctgaggttgcacccacctggtccacttctatcatgggcccgtttgtcaatcatggacacaaccgttgatggacatcacgtgccatctgggaccacagccatggttaacatgtgggccataacaagggacccagatgtttgggtggacccactcaagttcatgcctgagagattcgtgtccaaggacagtggtgacgtggaagtagtgtcagtgttggggtctgacct

SEQ ID NO: 229471 - DNA, 373 bp, Gossypium hirsutum
atcacaaatgtgtcgaaggtttagcaatataatagcaaagtcctactccagtaaataaaagttgatatgtttgtactaactttcaaagacattatgcgtttttatcattacaaggcatctaattgttcccttcatgtgataaaggtggtggaggtggatacagcagtcggagaacatctggcagagacaaatacggaccacctgttcgtacagaatacaggcttattgtagaaaatctttctagtcggtgcagttggcaagatttaaaggattttatgcgacaagcaggtgaagtaacctatgcggatgcccacaaggaacgaacaaatgagggtgtaattgagtttcgctcctactctgacatgaagcgtgc

SEQ ID NO: 229472 - DNA, 356 bp, Gossypium hirsutum
gttcgtagtggcagagaaactctttcttggagttttccttcattgcttggtcttggacggcaaattcatcagagtagctctctaatagaggaacaacttgacccattttcacttgtttctgatgaactgtcacttgtcgctaacaggttgcgggctatggttattgctgaggttcctaagcttgcttcagctgctgagtacttcttcagattgggggtggaaggaaagagatttcgtcccacggttttgcttttgatggctacagctttgaatgttcatatacctgaaccagttggtggtggtgtaggagatactgtggcaactgaattacgtacaagacagcagtctatagctga

SEQ ID NO: 229473 - DNA, 348 bp, Gossypium hirsutum
acggatttggaagaatcggacgtttggttgccagagttgctcttcagaggaacgatgttgaactcgtcgccgttaacgatcccttcatttccaccgattatatgacatacatgttcaaatacgacagcgttcacggtcaatggaagcaccatgatcttaaggtcaaagactctaaaaccctcctcttcggcgaaaaacccgtcactgttttcggaatcaaggaccctggaggagattccatgggctgaagccggggctgagttcgttgttgagtcaactggagtgttcactgacaaagacaaggctgctgctcacttgaagggtggtgctaagaaagttgtgatatct

SEQ ID NO: 229474 - DNA, 292 bp, Gossypium hirsutum
cggacgcgtggggcgaaaaagtgaataaaataaaatatattattttattaaagtttttgtttgggggaaattgagagaaaattttgaaaaaaaaaaatccaagatgaagatcacatcgttagtagtgctgaagtgcaacccggaaggatccgatccgataatactagcgaacgctaccgatttgagccattttggttacttccaaaggtcaagcgtcaaggagttcatcgttttcgtttctcgaactgttgctaaacgtactccttctggtcagcgccaatccgttcagcac

SEQ ID NO: 229475 - DNA, 351 bp, Gossypium hirsutum
aaccaaggccttggatcaaaagactccattcgaagcctggtttggattcaagccatcattggctcatttgaaggtctttggatgcatctgttatgctcatgtacctgctgtcaaaagggacaaattgtctgaaagggctcgacctggtattttggtgggctacagcactgttaagaagggctataggatcttggatccttcaacaaagaaagtgtcagtcagtaaggatgtggtatttgatgaaaagtcatgttggaactgggaaaaacatgaacctgagaaagtttcagaaggacttgcagcagatcaagctaagccagatcaaaatgttcctgaaatggacattgatga

SEQ ID NO: 229476 - DNA, 351 bp, Gossypium hirsutum
tgcttctgttggaaagactacgtatgttcactgcaaggcaggtcgaggacgcagcacaaccattgttctctgctacttggtagaacataggcatatgactcctgatgcagcttatgagtatgtgagatctatcagacctagggtccttctggcacctgcacagcagcaggctgttcaagattactatcttcacaaggtcaataataatggaatctgtggagactcttgctcaatgataataaagaaaactctagttgtacctgaaaaacaggatatagcggtcttcgatgatggctctgtagttgttgtaacagagtcggaccttgacgggtatgacgctagctttgacac

SEQ ID NO: 229477 - DNA, 361 bp, Gossypium hirsutum
cacgcgtcccgcctggtgggggaaagaatacgtatgttcactgcaaggcaattcgaggacacagcacaaccattgtaacgggcttcttggtataacataggaatatgaaccctggtgcactttattagtatgcgagatctatcaaacctaagggaggtttgggacctgcgcagaatcttggtgttcaagattactatctttacaagggcaataataatggaatctgtggagactctcgctgaatgataataaagaaaactctagttgtacctgaaaaacaggatatatcggccttagatgatggctctgtagatgttgtaacaaagtcggaccttgacgggtatgacgctagctttgacac

SEQ ID NO: 229478 - DNA, 345 bp, Gossypium hirsutum
cgctagggtttcaagggatttcttccagtgcgaagagcagcagccatggttctcaagacggagctttgccgatttagtggtgccaagatataccctgggaaaggcatcagatttgttcgtggtgattcccaggtcttcctcttttccaattcaaaatgcaagaggtacttccacaaccgcctgaagccatcaaaacttacatggacggccatgtacaggaagcaacacaagaaggacattgcccaagaagctgtgaagaagaggagacgtactgcaaagaagccatactccagatccattgtgggtgccaccttagaggttatccagaagaagaggagtgagaaa

SEQ ID NO: 229479 - DNA, 256 bp, Gossypium hirsutum
cacgtttcaactcgagtaatgggaacatatggatatgctgcacctgaatatgttatgactggtcatctgactgcgaggagtgatgtatacagcttcggagttgttcttttggagcttttgacgggaagaaaatctgttgataagacaagaccaagcaaggagcagaatttggtggattgggctcgcccaaaactgaatgataagagaaaattacttcaaataattgacccaagattggagaaccagtattcagcaa

SEQ ID NO: 229480 - DNA, 217 bp, Gossypium hirsutum
  unsure (1)..(217): unsure at all n locations
gcgcccacgcgtncgcgtgttccaaaaggccttcatttccaaaaaagccattgttggccgggaacccaaaccgtttttgtttgtttccgatccaataccaaaaagtttgggaatggtccaaaaaagccgaaccgtctttttgaaccgaaaaggaagccatcttgctttccaaccttggtaactgggaaactttaacggcggtgagcattaatttatt

SEQ ID NO: 229481 - DNA, 375 bp, Gossypium hirsutum
atgcccgaacgtcatttcttattttagttgggctgggtcccccagactcccaccacctcaccaggacttttggacagcccaattatactcccagagtaccccaccccaaccccctatgaattcccagtattttcccacgtctcacccccccagcagaacactggtctcacctgtgggtatgcagagctgggcacagggaagacggcaggccggggcatgtgaggcatggggtgggcagggtgagctgggtgagtgaggtactgagggctacagggcaagtggggctgtagagcagtgtaggggtgcaggccaagggagtggccatgccccagtcctggacccgggtacaaactagaccccaccgagatgacgggc

SEQ ID NO: 229482 - DNA, 353 bp, Gossypium hirsutum
taaagccagccaggaacaaataagggcattgagccaagaagctacttcaccaagggagaaaagtggcgagagattcgccttcaacttattgagccaaacccctcgctactccaaccaaaacggccgcttcttcgaggcttgcccacgtgaattccggcaactcagggacatcaatgtcaccgtttcagccttgcaattaaaccaaggatcaatctttgtgccgcactacaattcaaaggctacattcgtgatccttgttaccgaaggaaatggatacgctgaaatggtttctcctcatcttcctaggcaaagctcatatgaagaagaagaagaagaagacgaagaagaagaac

SEQ ID NO: 229483 - DNA, 377 bp, Gossypium hirsutum
atgcaagtttgctgagctgaaggaaaagattgatcgccgttctggtaaaaaactggaagatggccctaaattcttgaagtctggtgatgctgccattgttgatatggttcctggcaagcctatgtgtgttgagagcttctcagactatccacctttgggtcgctttgctgttcgtgatatgaggcagacagttgcggtgggtgtcatcaaagcagtggacaagaaggctgctggagctggcaaggtcaccaagtctgcccagaaagctcagaaggctaaatgaatattatccctaatacctgccaccccactcttaatcagtggtggaagaacggtctcagaactgtttgtttcaattggccatttaagtttagtag

SEQ ID NO: 229484 - DNA, 351 bp, Gossypium hirsutum
gggaaaactgcgaatcttagtgctaatttagccgggagagtggaagggaatgtgtttgacattattcatgggttagaagatttaggatcaaatttaggattctccggcgcgtccgatgttgaccgctgtgttgttagttcaggggtagttaaggatattactcactttgtcggtgtttcggattttatcccatttgcttatgatgttcccggattcccggttgttaaagagtcgacaaaaactgggagtttttgggaaaaagaagaagttcctcctggggagcatataccgagttggttgcctgcttttcctgaccctgagacttatgagaactcgttgagtgtagagaat

SEQ ID NO: 229485 - DNA, 390 bp, Gossypium hirsutum
tttaggcgacactatagaacaagtttgtacaaaaaagcacgctgctgcctttccgggatgccagaataccacaaattcctcatcggcaaggggggcggcaaaattcgcaaggtgcgtgacagcacgggagcacgcgtcatcttccccgcggctgaggacaaggaccaggacctaatcaccatcattggaaaggaggacgccgttcgagaggcacagaaggagctggaggccttgatccaaaacctggataatgtggtggaagactccatgctggtggaccccaagcaccaccgccactttgtcatccggagaggccaggttttgcgggagattgctgaagagtatggcggggtgatggtcagcttcccacgctctggcacacagagcgac

SEQ ID NO: 229486 - DNA, 354 bp, Gossypium hirsutum
gtcctgagtgctagacaaaatgctcctcatgaaacttatgtttatttcatggatctcttggcaaaaacagtgagagatgaaatagctggatgcagtgagaaggcatatgattatctttcaattaacgatgcccgacagatgttacttttctcatctgatcaagaacttttggaatacatcaaagaggagcatcctgactgggaggtgaagaatggatccgtgtatttccagaaggctaaagattctgcaccatgtaaggagatcccatccctacaactgattaaccaaactcttagctatgctagggagttggagcggattgtgtaggcaagctgctatccagtggttgctttt

SEQ ID NO: 229487 - DNA, 366 bp, Gossypium hirsutum
tacttatggtaatcatggtgaggaacaagtcagttttcgtagttttgctcttttctcttttcctttcctttggcttgctttgctctgccaaagacttccccggccgaagaagcgaggatgatcctcgacagaggtacgaggactgccagaggcgatgccagtcggagacacgtggacaaacggagcaagacaagtgtgaagacaggtgtgaaaggcagtttaaggaggagcagcagcgtgacggagacgatcctcagaggagataccaggattgccgacaacactgccaacaggaagaaagaaggctgcgtccacagtgctaacaaagctgccaggaacaatacgagagacaacagcagcagcagc

SEQ ID NO: 229488 - DNA, 369 bp, Gossypium hirsutum
attactgctcaaaaacctgagcagcgatacgaagacagtgacagtgaacatgacagcctggaccatcgtctacaatggcacacttgtacatgaagtgtggaaggactctgccaccatgtccctggaccctgaggaagaggcagagcatcctgtaaagatctcgtacgctcagtatgaaaagtacctgaagtccgacaacatgatccggatcacagccgtgtgcaaggtcccagatgaacctggggtggtggtggagcgggacatcatcctggacaaccccaccttgactctggaggtgctggatgaggctcgtgtgcggaagcctgtgaacgtgcagatgctcttctccaatccactggatgagccagt

SEQ ID NO: 229489 - DNA, 362 bp, Gossypium hirsutum
gcgggatgttcgttccgatgctcaaactcataataggctgtgaccccaagtattccacaggcatttacaagcgtatgatcatgggtgcagctggatcaactgtatactataacctgagacttaggcacccaacactggaaatgcctctcatagattatgacttggcattgctatttcagcccatgcttatgcttggaatcagcattggagttgcccttaatgtcatgtttgctgattggatggtcacggttctgcttatcattctcttcattggtacatcaacgaaagccttattcaaaggtatagacacatggaagaaagagacaatattgaaaaaggaagctgccaaggtggaatcagaa

SEQ ID NO: 229490 - DNA, 273 bp, Gossypium hirsutum
atgctgggaggaggccgcggtgtctctagctgttcaactcggtttgtctctgggggatcagctggaggctacggaggcggcgtgacctgtggctttggtggaggggctggtagtggctttggaggtggctacggaggtggccttggaggtggctttggtgggggttatgctggtggctttgttgattttggtgcttgtgatggtggcctcctcactggcaatgagaagatcaccatgcagaacctcaacgaccgcctggcttcctacctggag

SEQ ID NO: 229491 - DNA, 359 bp, Gossypium hirsutum
atgaggcctacaagaagggcctaattgattatgaaaccttcaaagaactgtgtgagcaggaatgtgaatgggaagaaataaccatcacgggatcagatggctccaccagggtggtcctggtagacagaaagacaggcagtcagtatgatattcaagatgctattgacaagggccttgttgacaggaagttctttgatcagtaccgatccggcagcctcagcctcactcaatttgctgacatgatctccttgaaaaatggtgttggcaccagcagcagcatgggcagtggtgtcagcgatgatgtttttagcagcacccgccatgattcagtaagtaagatttccaccatatccagcgtc

SEQ ID NO: 229492 - DNA, 330 bp, Gossypium hirsutum
cggacgcgtgggcaaaaccctaacggctacagctctagaattcaagcctttcgaccatggcggatgttgagacggaggtagcggcggctggagtgcccaagaagagaacattcaagaagtttagcttcagaggtgttgatttggatgctctccttgatatgtccactgatgagcttgtcaagctctttcctgcccgtgctcgcagaaggttccagaggggtctcaagagaaagcccatggctttaatcaagaaacttcgcaaggcgaaaagggaggctccaccaggtgagaagccagaaccagtcagaacccaactccgaaatatgatca

SEQ ID NO: 229493 - DNA, 350 bp, Gossypium hirsutum
atttacagcttctcttattcatatcaatgttgaatatggagatgggcagcttgaattaaatatggaacggttgagaatggctgttgacgagctccttatgaagcttgcaaaaatgttttcaaaaccaaaattacaaatcgtgttcctaataaacaactgtgacatgacaattgcagttctgaaggaagctggtcctgaaggtgggaaaatccaacagcactttgaggagatgctaaagagtaacacaggattatttgtagaggaacttctgatggagcattttagcgatttgataaagtttgtgaaaactcgagcctcggaggatcctaatggtagcaacgaaaggccta

SEQ ID NO: 229494 - DNA, 352 bp, Gossypium hirsutum
gtaaaaaatgagtaggaaggaaatggcgtggtggttgaggttggcagtgttgatgatggttggaagccattgggcatgggggcagtgcgagacgagtatccccaagctcatatcccaatgcgggcaatacgtagaaggatcagggccggaaacgactccatccaaggcttgctgtgatgtgataacaagtctggatattccatgcatgtgcaagtacgtgacaccagatgttgagaagcttgtgaacatggaaaaagttgtgtttgttgctaaatcctgtggattgacacttcaacccggaatgaaatgcggaagtacctactttacatacctttaacatccttccattttt

SEQ ID NO: 229495 - DNA, 363 bp, Gossypium hirsutum
ctaaaaagaaatcgataaaaatggggatggcgagtgttcgatctggtctcctacgagcaggccttcgcggcggctctcgtcctactgctcctcccacgcgtggcttcgcttcctcttctcatcacgatgatgcttatgaaaccgcaaaatgggaaaagataacatatttaggtgttgctacctgcactgttttagcgatttataacctatcaaaaggtcatccccaccatgaagagcctcctgcatacccatatttgcacattcgcaacaaggagttcccatggggtccggatggtctgtttgagagaaaggagcatcactagggatggccggatggatgcatatcttttcgagttcggcgca

SEQ ID NO: 229496 - DNA, 377 bp, Gossypium hirsutum
atgtcatttcattggcgtttgagtcagcaaagaagtcaagatggccaaagttccggacatgtttgaagacctgaagaactgttacagtgaaaatgaagaagacagttcctccattgaccatctgtctctgaatcagaaatccttctatgatgtaagctatggcccactccatgaaggctgcatggatcagtctgtgtccctgagtatctctgaaatctctaaaacatccaagctgaccttcaagcagagcatggtggtagtatcaaccaatgggaaggttctgaagaagagacggttgagtttaagccagtccatcactgataataacctggaggccatcgccaacgactcagaggaagaaatcatcaagcccaggt

SEQ ID NO: 229497 - DNA, 378 bp, Gossypium hirsutum; identical to SEQ ID NO: 199112

SEQ ID NO: 229498 - DNA, 372 bp, Gossypium hirsutum
atgcagcgtcatcctcaccggggagtacatcagcaaggatggtgttccatactgcgagtctgactaccacgcccagtttggcattaaatgtgagacttgtgaccgatacatcagtggcagagtcttggaggcaggaggggaagcactaccacccaacctgtgccaggtgtgtacgctgccaccagatgttcaccgaaggagaggagatgtacctcacaggttctgaggtttggcaccccatctgcaaacaggcagcccgggcagagaagaagttaaagcatagacggacatctgaaacctccatctctccccctggatccagcattgggtcacccaaccgagtcatctgcgacatctacgagaacctggacc

SEQ ID NO: 229499 - DNA, 374 bp, Gossypium hirsutum
atgcgcgccctaaggagtggcactttttaaaagtgcagccggagaccagcccacagccgcctgtatctgtgtccagcccgggtaccgcctgtcccagctgcgctcgcccctcagtcccgcacccgttcgacccaggctaggttagccctcaccatgccggtcaaaggaggcaccaagtgcatcaaatacctgctgttcggatttaacttcatcttctggcttgccgggattgctgtccttgccattggactatggctgcgattcgactctcagaccaagagcatcttcgagcaagaaactaataataataattccagcttctacacaggagtctatattctgatcggagccggcgccctcatgatgctggtggg

SEQ ID NO: 229500 - DNA, 355 bp, Gossypium hirsutum
cccacgcgtccgatcgatcttcgtaccgcactacaattcaaaggctacattcgtggtcctcgtcaccgaaggaaacggccacgtcgaaatggtctgccctcacctttctaggcagagctcacactggtcctcccgagaggaagaagaacaagaagaacaagaagttgaaaggagaagtggacaatacaagagagtgagagcccagttatcaaccggtgacctatttgtagtcccagcaggccatccagtcacattcgttgcctcccaaaacgaggacctaggattgctcgggttcggactctacaacggccaagacaacaagaggatcttcgtggctgggaaaaccaacaatgtg

SEQ ID NO: 229501 - DNA, 317 bp, Gossypium hirsutum
gagatgcggaaaatcatgggtgccaaaggtctcttcttctgtgctttgctttccttttcagctgggccggcattcgcacaggatgaggaagaccaaggtcttgttatgatttctacaaggattcttgtcctcaggctgaagacattatcaaggagcacgttaagctactgtacaagcgacacaaaaacactgctttttcttggctgggaaacagtttccatgactgtgctgtccagtcatgtgatgcttcactgctgctggactccacaagaaggagcttgtctgagaaggagacagtcaggagctttggcctaaag

SEQ ID NO: 229502 - DNA, 363 bp, Gossypium hirsutum
ctggacaattcgaggaattcttcccagctggaagccaacgccctcagtcatatctccgagcctttagtcgtgaaattcttgagcctgccttcaatacacgaagtgagcagctagacgagctgtttggtgggaggcaaagccaccgaaggcagcagggacagggaatgttccgtaaagccagccaagaacaaataagggcattgagccaagaagccacttctccaagggagaaaagtggcgagagattcgccttcaacttattgtaccaaacccctcgctactccaaccaaaacggccgcttctatgaggcttgcccacgtgaattccggcaactcagggacatcaatgtcaccgtttcagcct

SEQ ID NO: 229503 - DNA, 325 bp, Gossypium hirsutum
atcagctccatggtgatccgggacctgaccctgcgcagcgccgccagcttcggctccttccacctcatccgcctgctctacgacgagtacatgttctacctggtggagcaccgcgtcgcggaggccaccggagagacgccgatcgctgtgatgggagagttcaacgatctcgcctctctgtcgctgacgctgcttgacaaagacgacatgggtgatgagcagcgcggcagcgaggcgggcccggatgcccacagcctgggcgagcccctggtgaagcgggagcgcagtgatcccaaccactccctgcagggcatctagcagcccc

SEQ ID NO: 229504 - DNA, 358 bp, Gossypium hirsutum
ggtttttcttcttcattttctcctttcctcgatcaaaaacctcagctctcttaccgccaaaggaggatcatcttttcaggttttgcgatggcatcgaagcggatcttgaaggaattgaaggatttacagaaggatcctcctacatcttgcagcgctggtcctgttgctgaagacatgttccattggcaggcaacaatcatgggtccaccagacagtccttatgctgggggtgttttcctggtgaccatccattttcctccagattatcccttcaagcctcccaaggtggcatttagaacgaaagtattccatcctaatattaacagcaatgggagcatttgcctagacatcttaaagg

SEQ ID NO: 229505 - DNA, 357 bp, Gossypium hirsutum
ggtttttcttcttcattttctcctttcctcgatcaaaaacctcagctctcttaccgccaaaggaggatcatcttttcaggttttgcgatggcatcgaagcggatcttgaaggaattgaaggatttacagaaggatcctcctacatcttgcagcgctggtcctgttgctgaagacatgttccattggcaggcaacaatcatgggtccaccagacagtccttatgctgggggtgttttcctggtgaccatccattttcctccagattatcccttcaagcctcccaaggtggcatttagaacgaaagtattccatcctaatattaacagcaatgggagcatttgcctagacatcttaaag

SEQ ID NO: 229506 - DNA, 350 bp, Gossypium hirsutum
cggacgcgtgggctttgaagagcggctgctcagattttgcctatttctcagatttttctctcagtttgaaacgatgtctacggctggcgaagctgcttgttcttacgctgctttaattctctatgatgatggcattcccatcaccgctgagaaaattgcaacaattgttaaagctgcaaatgtctcggttgaatcttattggccaagcttgtttgcaaagcttttcgaaaagtgcaacattgaggatcttataaccaatgttggtgctggtggtgctggtgctccagttgccgcagctgcacctgttgctgcttgtggtggatgtgtgccgctgctccacctactgctga

SEQ ID NO: 229507 - DNA, 304 bp, Gossypium hirsutum
  unsure (1)..(304): unsure at all n locations
cccacgcgtccgggttgacctgtcagatgcagcccagaaggaacgggtgaatcagatgattgaagactgcgagccatttgagggagagcctctcttggatgccaagtgctttaagtgatagaatatgttcttaattttacttttttatatttctggtacctttttgcatgtcaggttttatttatagatcgctgttttcagtttttgattaaggtaacattacaanttaagttttaatgtcttagatgttggaatttgaaaggctttatttatgttatattaaggagatataggttctattgtt

SEQ ID NO: 229508 - DNA, 359 bp, Gossypium hirsutum
catgaaacaactgcatctaactggcgttttgaggctttagctaaagagattgaatgcttccgtgaactgttatcgttggtggactgtaaaattggaaagcttacacttgctagattactgaaggcttatgatgcaatgtcatatccgttcgctaacaaactggtgcattcagaagaagttcttgagctgtatagtgatttgatgaaattggatccaacacattaccagttctacaaggatgaacatagcattgtcttgctacagaaggtgacatctagtaaagagtctttacttcaacattgctttcagtataaggactcggcttcatcagctatatgtgaccctatctgtctccggct

SEQ ID NO: 229509 - DNA, 357 bp, Gossypium hirsutum
  unsure (1)..(357): unsure at all n locations
accacgcgtccgggagggcactgtcctattgccccatcaaccgataccggcatttgtgttcaagcccctgcagagaaaggattgaccagctttgccattgatttccataagtgtggagtgagcgcatctgtgccaaaaacagctgatggtcctaaagagcgtgttaagctgttgatacagaaccgagatgaaatgatcataactgggaggctatcagagccctacaagggtatacagggataggctcacgcgaccaatgaatagatgaaggagtggaccctttgtggaggcgtaacacaagataatgntatacgctatcaccccactcatactttgaacatggatttcaaggactac

SEQ ID NO: 229510 - DNA, 347 bp, Gossypium hirsutum
cggacgcgtgggttttcgtgcaaaatgtattgagtggagagaaatgggaggagataaaggaacagtgtgtgtgactggaggtactgggttcataggttcatggctcatcaagaggcttcttcaggagggttattctgtccgtaccactgtcagtgctgatccagaaaacaaaaaagaccttagtttcctcactagtctaccaggagcagccgaaatgctgaaaatcttgagtgcagatcttaatgaccccaacagtttcgatgcagccattgaaagaagcaaggcagtgctccatgttgccactcccatgagtttcgatggtaaagaatctctggaagcggtaacag

SEQ ID NO: 229511 - DNA, 356 bp, Gossypium hirsutum
ggcagaggcgacaaggacgtgaagaggagggagaagaagaaagagaaccgaaatggcagaggcgacaagaaagtcaagaagagggatctgaggaagaagaaagagaagaacgaggaagaggaaggagaaggtcaggaaacggcttagaagaaacattctgctcaatgagactgaaacacaggacccctgcttcctctgctgatgttttcaacccacgaggtggtcgcatcaccacagttaacagtttcaatcttcccattctccaatacctccaactcagcgccgagaggggagtcctttacaataatgctatctacgctcctcactggaacatgaatgcccacagcattgtttac

SEQ ID NO: 229512 - DNA, 372 bp, Gossypium hirsutum
atgcggcggcggcggcggtggtatcggcggcggctgtgagggggttccgggaagatggtgctgatcaaggaattccgtgtggttttgccatgttctgttcaggagtatcaggttgggcagctttactctgttgcagaagctattaagaatgatactggcggtggagaaggaattgaagtcttaaagaatgaaccttatgagaaggatggagaaaagggacaatatacacacaaaatttatcacctaaagagcaaagttcctgcattcgtgaggatgattgctcccaaaggctccttggtgtttcacgagaaagcctgaaatgcgtacccctactgtagaacaattgttacgaatgaatatatgtaagatgat

SEQ ID NO: 229513 - DNA, 369 bp, Gossypium hirsutum
atctttccaacgccatggccagggcgctgcaccggcacattatgatggagcgggagcgcaagcggcaggaggaagaagaggtggataagatgatggaacagaagatgaaggaagaacaggagagaaggaagaaaaaggagatggaagagagaatgtcactagaggagaccaaggaacaaattctgaagttggaggagaagcttttggccctacaggaagagaagcatcagcttttcctgcagctcaagaaagttttacatgaggaagaaaaacggaggcgaaaggaacagagtgacctgaccaccctgacatcagctgcataccagcagagcctgactgtccacacaggaactcatctcctcagcatgc

SEQ ID NO: 229514 - DNA, 431 bp, Gossypium hirsutum
cactatctaacaagttggaacgaagaagcacgctggtgccccgccgcaatttccgggatgcggccgacgcggccgtgggatctgcggtggctgtaaaggggttacaggaagatggcgctgatcaaggaatttcgtgtggttttgccatgtgctgtacaggagtatcaggttgggcagatttactctggtgcagaagctattaagaatgaaactgggggtggagaaggaaatgaaggcttaaagaatgaaccttatgagaaggatggagaaacgggacaatatacacacaaaacctatcacctatagagcaaaggtcctgcattcgtgaggatgatagctcccgaaggctgcttggtgtttcacgagaaagcctgcaatgcgtacccctactgttgaacaattgtaacgaatgaatatatgaaagatgagtt

SEQ ID NO: 229515 - DNA, 356 bp, Gossypium hirsutum
tctaatggcttacacttctttgctttcttttagcgtttgcttgcttgttctcttccatggctgctgtgctcagatagatctcgtcactaaccatcaccaggatccaccttgggggcagcctcagcaacctcagccacgtcaccaatcccaatgccaactccagaacttgaatgctcttcagcctaagcaccggtttaggtcagaggctggtgaaactgagttctgggaccaaaatgaggatcaattccagtgtgctggtgttgctttcctacgtcataagatccagcgcaaaggacttttattgccttcatttaccagtgctcctatgcttttctatgttgaacaaggggagggta

SEQ ID NO: 229516 - DNA, 255 bp, Gossypium hirsutum
ctatttacgtgacactatagaacaagcttgtacacaaaagcagtccggtaccggaactgaattctcgggatcattgcaacgccatgtgcatggcacttctttgctttcttttagcggttgcttagttgatctcttccatgaatgatgtgctcatatagatctcgacataaccataagcagaacccgccttgagggcgaaactgagcaacctcagccacgtgaccaatcccgatgccaactgcagaacttgaatgc

SEQ ID NO: 229517 - DNA, 352 bp, Gossypium hirsutum
ggagatttcagttggggatgctgtcccagtgtggtacaacatggtcgaacaaggtcttatcaaagaccaggtattttcattttggcttaatcgcaatgtaggagaagaaatgggtggtgaaattgtgtttggtgggattgatccaaaccactacaagggcaagcacacatacgttcctataacacaaaaaggctattggcagtttgacatgggtgatgttcttattggtgacaaaccaactggatattgtgctggtggttgtgcagcaattgcagattctggaacttccctgctggcaggtcctacgactgtgattaccatgataaaccaagcaattggagcctctggagtg

SEQ ID NO: 229518 - DNA, 373 bp, Gossypium hirsutum
atggtttgtgctccccccactgcctatatcgacttcgcccggcagaagctagatcccaagattgctgtggctgcacagaactgctacaaagtgactaatggggcctttactggggagatcagccctggcatgatcaaagactgcggagccacgtgggtggtcctggggcactcagagagaagacatgtctttggggagtcagatgagctgattgggcagaaagtggcccatgctctggctgagggactcggagtaatcgcctgtattggggagaagctagatgaaagggaagctggcatcactgaaaaagttgtttcgagcagacaaaggtcatcgcagataatgtgaaagactggagcaaggttgtcctggc

SEQ ID NO: 229519 - DNA, 316 bp, Gossypium hirsutum
atggcgaccaatttgatccgtggagcgatgaacatgacgtcacgtttgcggtcatcgacagtggctccagcgtcgcggctggtgttggaccgtccttacgccaccgaaacggaagctcaaaaggtggaaccgaaagcctcctccggcagcggcggcaccagcatgaaaaccttccaaatctatcgatggaacccagataatcctacgaaaccccaacttcaagacttcaaaatcgacttaaaagaatgcggacccatggtgcttgatgccttgatcaagatcaagaacgagatggatccatcgctcaccttccgtc

SEQ ID NO: 229520 - DNA, 377 bp, Gossypium hirsutum
atgaccaaataaggtttttgatctttgcgtagtgtgtggagacaaagcatcaggacgtcattatggagcagtaacttgtgaaggctgcaaaggattttttaaaagaagcatccgaaaaaatttagtatattcatgtcgaggatcaaaggattgtattattaataagcaccaccgaaaccgctgtcaatactgcaggttacagagatgtattgcgtttggaatgaagcaagactgtatgtattagcttttaaggagaaaatactttttaaagattccagcaaactagaagagtattgaaattaacaaattaaaataggtcaaatatgtatactttttagtttacagttttccaactaaaaatataagaatacagacat

SEQ ID NO: 229521 - DNA, 377 bp, Gossypium hirsutum
attgccacccgtgcacccagtccgctcagccagcccagtccgtccagtcctcaccgcctgccggcctgcccaccccccaccgcagccatggacgccatcaagaagaagatgcagatgctgaagctggacaaggagaacgccatcgaccgcgccgagcaggccgaagccgacaagaaacaagctgaggaccgctgcaagcagctggaggaggagcagcaggccctccagaagaagctgaaggggacagaggatgaggtggaaaagtattctgaatccgtgaaggaggcccaggagaaactggagcaggccgagaagaaggccactgatgctgaggcagatgtggcctctctgaaccgccgcattcagctggttgagga

SEQ ID NO: 229522 - DNA, 357 bp, Gossypium hirsutum
cccacgcgtccgggaaaaaggaagaaaaaaaaaggctaaaaaaatgtttttgcgaatgatatcgcggccgttgttggctaaggtgaaggagacaacggggatcgtcggattagacgttgtccctaacgcaagggaagtccttatcggtctctacaacaagactctgaaggagatccaggccgtacctgaagacgagggttaccgtaaggccgttgaaagcttcacgcgccaccgtctgaaggtttgccaagaggaagaagattgggaaatgattgagaagcgccttggatgtggccaggtcgaggagctcatcgaggaagcgcgtgacgagctcactcttatcggaaaaatgatcga

SEQ ID NO: 229523 - DNA, 349 bp, Gossypium hirsutum
gattataagaggcttaggtccttggggtccagatcttgtacgaaagtatacagctgctaggtttaccaacagatattcacctgagggtgtatttacagaggaggagtctagacttctatctggtattattatgtgtaccatacctcagctgccaaagcaagtggagagctctgcttaaaatatatatttgcatttggagcatttaatcgggcacttttaaacagtgcatctgagtggaaagtgccaaccacttttatatatggggctgaagattggatgaactaccaaggagcccaagaagctcgcgagcaaatgaaggtcccatgtgaaattatcaaggttccagatc

SEQ ID NO: 229524 - DNA, 346 bp, Gossypium hirsutum
gctttcggtcctttacctttacctttacattgtgcccaactccatctctctctttaccaccccgctctgttaatatccaaaaaccaaaacaatcccaaattcaaaaaaataaaaaataaaaaatctagggttttcttctaaaaggcttctttgttttgttgatcaagatattggttgataattagcaggacatggaagataccaagtctgaggcgcatataacctctgctgcagcttttgtggaagggggaattcaagatgcttgtgatgatgcctgcagtatatgccttgaagcattctgtgaaagtgatccatccacggtgacctgctgcaagcacgagtttca

SEQ ID NO: 229525 - DNA, 353 bp, Gossypium hirsutum
gtccaaggaagaggtattcaaggtattgtgatgcctggatgtgccgaaacattccaggattcacagcaatggcagcatcaaagccgtggcaggttccaggaccagcaccagaaagtccgacggttccgccagggtgacatcattgctttgccgcagggtgtggttcactggagctacaatgatggcaatgagcgtgttgttactatcaatctacttgacactggcaacagtgctaatcagctcgacaacatccctagaagattccatcttgctggtaacccagaagaggaacagaggcaactgaggaggctagcacagcagatgcaaggaagaagtgagaggggggaggagtc

SEQ ID NO: 229526 - DNA, 372 bp, Gossypium hirsutum
atggtgcctctggtcccaggtcgggagctctgggccaggggatccaggggccttggggtggggaaggctggccaggagcagcaatgtctgtgcaggtggtggctcccggaagtgcggggctgggcccagagcgcctgagccctgaggagctggtacggcagacgcggcaagtggtccaggggctggaggcgctgcgggcagagcaccgtggcctggctgggcacctggcagaggccctggcgggacagggcccagcgactggcttggagatgctggaggaaaagcagcaggtggtgagccactcgctggaggccatcgagctggggctgggcgaggcccaagtgctgctggccttgtcggcacacgtgggtg

SEQ ID NO: 229527 - DNA, 353 bp, Gossypium hirsutum
caagctcttcttcaacagcagtctctctatcatcccggcatattagctcctcctcagatagagccaattcccagtggaaatctgcctgctggttttgatccaagcacttgccgcagtgtgtatgtgggaaatatccatacacaagtgactgaaccactacttcaagaggtttttgcaagtactggccctgttgaaggttgcaagcttgtcagaaaggaaaagtcatcgtatggattcgtccactacttcgatcgcagatcagctgctcttgctatattgtctctaaatggaaggcatttgtttggacagcctatcaaggtcaattgggcatatgctagtggtcagagagagga

SEQ ID NO: 229528 - DNA, 358 bp, Gossypium hirsutum
cggacgcgtggggaaatacacaagaaaaaaaaaaaaaaacagcgtgagcagataaattgaagacttttatttctgttaacatccattatgagtactgatggtcaagtcatccgttgcaaagctgcggttgcatgggagtcggggaagccactgtcaatagaggaagtggaagtggcaccaccgcagaaggatgaagtccgtattaagatactcttcacttgtttatgtcacaccgatgtctacttgtgggatgctaagggacaaaaccctctgtttactcgcatactaagtcatgaagctggagggattgtggagagtgtaggtgagggggtgactgatctaaagccaggtgatcatg

SEQ ID NO: 229529 - DNA, 363 bp, Gossypium hirsutum
atcagagcttgctgacccccctgcacgtggagattgaccctgagatccagaaagtccggacagaggagcgagaacagaaaaagataacacggatcgaattagtctactttgtcttcgaggagcggctcttacagtatcagagtacggttctggtgaccaaatggaagctggtccatgagcaaacaaacaggacgttctgcaaagaccttgagcgcatctttgagacctacctgagtgtcctgaggaagcaactagataccttggtcaatgacaaaaggcgcctgcagtctgagctgaagaccatgcacgacagcgtggaggacttcaagaccaaatatgaagaggagatcaacaaacgcacag

SEQ ID NO: 229530 - DNA, 362 bp, Gossypium hirsutum
atccgatttctgcccgaatagccaagaaacccaagctggaggagtaatgtttgagatccaacctggcggccacagacgtgaccttcctcctgtgctgcgtccccttcacggcgctgctgtacccgctgcctgcctgggtgctcggcgatttcatgtgcaagttcgtcaactacatccagcaggtctcggtgcaggccacgtgcgccactctgaccgccatgagcgtggaccgctggtacgtgacggtgttcccgttgcgcgccttgcaccgccgcacgccccggctggcgctggctgtcagcctcagcatctgggtaggctctgcggcggtgtctgcgccggtgctcgccctgcaccgcctg

SEQ ID NO: 229531 - DNA, 283 bp, Gossypium hirsutum
ctctaatacgacttactataaagaaagctggtacccctgccggtacccccccggtactttttgtgtgcccctcgccaacaaaaccaagcttgtggagtaatgttttagattccacctggcgggcacagacgtgacccttctcctgtgcttcgtcccctttacggcgctgctgtacccgctgcctgccttggtgctctgggactttatgtgccagttcgtcaactacattcaacaggtctcggtgcagggcacgtgcgccactctgaccgccattagcgtggac

SEQ ID NO: 229532 - DNA, 380 bp, Gossypium hirsutum
atggcgggcgcaggcccctgcggcggcggcggcgggatgtttgtgcaggaggagaagatcttcgcgggcaaggtgctgcggctgcacatctgcgcgtccgacggcgccgagtggctggaggaggccaccgaggacacctcggtggagaagctcaaggagcgctgcctcaagcactgtgctcatgggagcttagaagatcccaaaagtataacccatcataaattaatccacgctgcctcagagagggtgctgagtgatgccaggaccatcctggaagagaacatccaggaccaagacgtcctattattgataaaaaagcgtgctccatcaccacttcccaagatggctgaggtctcagcagaagaaaagaaaaaacaaga

SEQ ID NO: 229533 - DNA, 295 bp, Gossypium hirsutum
  unsure (1)..(295): unsure at all n locations
ctctgctggaaccgcttggacaattgttcatctcgcgcatttctttgtcacatatcacttctttcactggaagaagggaacaccgtttgctgatgaccaaggtatctacaacggtttgacttggtgggagcaaatagacaatggcaagcaactgacacggaacangaagtttttgactgttgtacctgttgtgctgtcccttatcngctcacatacaacagattatcaaaacccaatgctcttcttcaatacgttggccgtatttgtgctggtggttgcaaagttccccaacatg

SEQ ID NO: 229534 - DNA, 339 bp, Gossypium hirsutum
ctcgacagaggcagcgtgcatctgaataaagagttaaaggcaataataatcacatagtctcgtgtttatggactaatgtgaaattttctagttttaagcaggcatgtaatgaaataaaaatggtgacctatgtaaagtaggtgaccgttatgctggcagactatgtgatgctggtgcttgtgatggtggcctcctcactggcaatgagaagatcaccatgcagaacctcaacgaccgcctggcttcctacctggagaaggtgcgcgccctggaggaggccaacgccgacctggaggtgaagattcgtgactggcacctgaagcagagcccatctagccc

SEQ ID NO: 229535 - DNA, 356 bp, Gossypium hirsutum
ctcaagagaaaaacccagagccaaaaaaatggccaaattattgctgttcattgcactatttgtggttccatgtcttgttagtgctacacgcatggtgaagaacccgttggtggttcaaggtcaagtttactgtgaccattgccgtgctgggtttgaaacaccaaagactagaaacatggctggtgccaaggttaaggtggtatgttccaaccggaagaccggtgatgtcgtgtacgagaaggaaggacacacggattcaaccggacaatacaagatcgctgtctccgaggatcatttggatgagatctgcgacgctgttctcgttaagagctcgcagccggagtgcgctgaaatgt

SEQ ID NO: 229536 - DNA, 373 bp, Gossypium hirsutum
atcgccgagatgcggtcatggcgccccgaaccctgctcctggtgctctcaggggtcctggccctgaccaagacctgggcctgctcgcactccttgaggtatttccacacctccgtgtcccggcccggcctcggggagccccgcttcatctccgtgggctacgtggacgacacgcagttcgtgcggttcgacagcgacgccgagagtcagagaaaggagccgctggcgccgtggatggagcaggaggggccggagtattgggaagaggagacacggatcgccaagggccacgcacagactgaccgagggaacctgcagatcctgctccgctactacaaccagagcgaggccgggtctcacacccttcagtggat

SEQ ID NO: 229537 - DNA, 258 bp, Gossypium hirsutum
atcgtgaatgtataaaaccctagtttggctcccacggttattctcctcagataagtagtcccccagagtctcttccctcatctacccccaaatctcctcacattatgtctttggtggccaacgaagattttcagcacattttacgtgtgctgaacaccaacgttgatgggaagcagaagattatgtttgcattgacctccatcaagggtatcggaaggcgattcgctaacatcgtttgcaagaaggctgatgtcgaca

SEQ ID NO: 229538 - DNA, 368 bp, Gossypium hirsutum
atcggccgcgcagtaggacgcagccctatccgagactcgcgccgcgccgatctgatttgtgtccactgtcaccagtactgctcacttaggactttctggatccagacccagctgcagcgcacacgggactcctgaggaagaaggagactgtgattttggattccttggtggaggaaaatcaaacactctggtcttgcccccaacgatgcaagtgtgactgctggcgtcttcatgagctccagaggtcacagcacactaccaaggactctcatggcccctcggatgatttccgagggagacttaggaggcattgctcaaatcacctcctctctattcctgggcagaggcagtgtggcctccaatcggca

SEQ ID NO: 229539 - DNA, 338 bp, Gossypium hirsutum
  unsure (1)..(338): unsure at all n locations
atcccagatgtggacgcgaacctcggggnggggtgggtagttggtgttggacccaaggtggacactgatgtcccagaagtgaatatcgaaggtccagatgcaaaactgaagggccccacgttcaagatgcctgatagtaatatcaaagctcccaagatctccatacctggtgtcgacctagatttgaaaggacccaaagggaatggagagtatgatgtgtccatccctaatgaagaagggactttgaaaggcccacaactagaccttaaaggtccaaacctggatttccaaagccccaatgcaaaactcagtggcccatctttgaagatgccatcacc

SEQ ID NO: 229540 - DNA, 323 bp, Gossypium hirsutum
  unsure (1)..(323): unsure at all n locations
atagttgatgtcccgctgcggagaggggnncgcgagttcgccacnagctgctccgccaggcgctggccgaatgcctggggaccctcatcctcgtgatgtttggctgtggctccgtggcccaagttgtgctcagccggggcacccatggtggtttcctcaccatcaacctggcctttggctttgctgtcactctgggcatcctcattgctggccaggtctctggggcccacctgaaccctgccgtgacctttgccatgtgctttctggctcgtgagccctggatcaagctagccgtctataccctggcacagacgctgggagcc

SEQ ID NO: 229541 - DNA, 403 bp, Gossypium hirsutum
  unsure (1)..(403): unsure at all n locations
cggacgccccncctgtctcgtggggtgtacttctaagtctcttgattttatcgattttagttttcattcagctgaaaagaaaatttgaaaaaaaaagattattattattttttattttttgcatctggattcttcaaaatcgaataacgagatactcagcacaatggctaaaagtagcttcaagatcgagcatgactttgagaaaaggcgcgctgaggctgcaagaattagggtaaaatacccagatagaattccagtgattgtggagaagacgaaaggaaacgacatccctaacattgacaagaagaaatacttagtaccagctgacttgacagtgggtcaatttgaaaaaaaaaaacgcaaaagaatcaaattgagtgctggaaaggctatcttcttattt

SEQ ID NO: 229542 - DNA, 423 bp, Gossypium hirsutum
  unsure (1)..(423): unsure at all n locations
atccgccccgcgcctcgtcggccggnnnnaggcactcagcgtgcggccgagcagctgtgtatgctgagccgctgccgcagccgactgctccacgtcctgggccttagcttcctgctgcagacccgccggccgattctcttctgccctccccgtctcatgaagccgctggtagtgttcgtcctcggcggccccggcgccggcaaggggacccagtgcgcccgcatcgtcgagaaatatggctacacacacctttctgcaagagagctgcttcgtgatgaaaggaagaacccagattcacagtatggtgaacttattgaaaagtacattaaagaaggaaagatngtaccagttgagataaccatcagnnnattaaagagggaaatggatcagacaatggctgccaatgctcaagagaataaattc

SEQ ID NO: 229543 - DNA, 326 bp, Gossypium hirsutum
  unsure (1)..(326): unsure at all n locations
atcccaaacagagtggaagatatggnnnnattttgagtgcactggtgcctttgggcgtgacttaaaaaaaaaaaattaaatactctctgggtgcggtgactcacacctagtttcccagcacttcaggaggctgaggtgggtggatcacgtagtcaagagatcagagaccatcctggcctacacgctgaaactatgcctctactaaaaatacataaattagctgggcatggtggtgtgtgcctgttattccaaatactctggaggctaaggcatgagaatcacttaaactctagcagtggaagttgctgtggacctgaattaaacca

SEQ ID NO: 229544 - DNA, 316 bp, Gossypium hirsutum
  unsure (1)..(316): unsure at all n locations
tctgnnnnagcntgcgaggaaantcctcagtcatatttacgaatcttcagccgagaaattcttgaagctgtcttcaatacacgaagtgagcagctagacgagctgtttggtgggaggcaaagccatcgaaggcggtcaggacagggaatgttccgtaaagccagccaataacaaattaaggcattgagccaaaaagctacttcaccaaagggaaaaagtagcgagggattcgccttctacttattgagccaaacccctcgcttcttcaaccaaaacaggcgcttctattaagcttgcccttataattttcaacagc

SEQ ID NO: 229545 - DNA, 405 bp, Gossypium hirsutum
  unsure (1)..(405): unsure at all n locations
atggagcttatcacagattttnaaggagaggatactttntctcatcagcgtccctgtttattaaaaagtttgaagagagaaggtgctaacaaactcagatatcctcccaacagccagtcaaaggtggattggggaaaattttttctcttgagacggttcaacaaagaaaaactcggtctcctggtgctcactttcctgggcattgtagccgctgtgctggtcaaagctggatattactgaaaaatgatcccgttcaacctcctagtgcctctactgaattattcctcttttaaatggttaatgaaccaatactttttaaatcctaccaaaaatagttagaaaatatgcaaacacactgtnntcaaactcaaaagtcattgccattcatcattaataaaacttgcc

SEQ ID NO: 229546 - DNA, 382 bp, Gossypium hirsutum
  unsure (1)..(382): unsure at all n locations
gcggggnaagtcattatggtttnccttcaaaacaccatcaaagtaaggattaacgccagaaagatttcaaaaaggttgagaaaacaaggggaagaaaggaagaggaggtgaccagagaatacaccatcaaccttcacaagagactccatggctgcacattcaagaagaaggctcccaaagctataaaggagatcaagaaatttgccgaaaaagccatggggacaaaggatgtacgagtcgacgtgaagctgaacaagcacatatggagccgagggatccgaagtgtcccaagaaggattaaggttcgtattgctcggaggagaaacgatgacgaaaatgcaaaggnnaaactctactctttggtaaccagtgctgaaatccc

SEQ ID NO: 229547 - DNA, 396 bp, Gossypium hirsutum
  unsure (1)..(396): unsure at all n locations
gcgnnnnttgttgtcgagaattacccggattttatctcgtcggttcgggagttcgcggatgcggacccggcccatcggaagatcttcgtacacgggttgagttgggataccactgccgaaacccttaccgccgagttttcaaagtacggcgagatcgaagaatgcaaagcggttactgattgggtttccgggaaatcgaaagggtacgcttttattctatttaaacataggagtggggcgcggcgggctttgaaacagccacagaagaagatcggtattcgaaccacttcttgtcagctggcagcgcaaggaccggtttctgctccgcctcccaatggtacgnnagtttccgagtatacccagaggaagatttttgttagtaacgtatcgcctgaa

SEQ ID NO: 229548 - DNA, 269 bp, Gossypium hirsutum
  unsure (1)..(269): unsure at all n locations
atacaagctccagcagannnncctttgcacggcgacntgcctgagaggacccaccccccggtgtccggtggtcagtcgccccacgatggggactacagtcagagcagccttggtcttggcctatttggccattgcttctgctgcctctgaaggaggccttaaagctacagggcagaggcagctgaggccagagcactttcaagaaattggctacgcaactccccccttcccacccctattccgaagcctcctcatggatcaccctgaca

SEQ ID NO: 229549 - DNA, 267 bp, Gossypium hirsutum
  unsure (1)..(267): unsure at all n locations
cccacgnnnaatggactcaagggcnaataaaatagccattgttgtgaaaggtgaaggatactttgaaatggtatcacctcctgtttcccccaagtccaatcaggaggattcagcaggaaaaaagagtgggtctcgttatcaaaagataagctcacgtttgagatccgacacggtgttcgttgttccagcaaggcatcctttcgttacagttgcttcaagaaacaataatctaaagattctatgctttgaggtcaacataaaaaacaa

SEQ ID NO: 229550 - DNA, 339 bp, Gossypium hirsutum
  unsure (1)..(339): unsure at all n locations
cccacgnnnaatggaccctcttttnatcaaagcaaaaacaaccagaattcaatggggaagaaagctgtgttgattggaatcaactatccacgcacaaaggctgaactgaaaagctgcataaacgatgtgaagagaatgtacaaatgccttatagaacgctatggattctctgaagaagacatcacggtattgatagacaccgattattcttatgatcagcccacagggaagaacatcagaaaggctttgaatgatcttgggagatcggctgagcctggggattttctgtttgggcacttcagtggccatgggactaggctttctgctggagactggggg

SEQ ID NO: 229551 - DNA, 401 bp, Gossypium hirsutum
  unsure (1)..(401): unsure at all n locations
cgcaactnnnnngtgtgcatctggagaaaagccggttcgcgagcttgttaaggatgatgcatggttgaatggagaattcataaccactgtccaacaacgtggtgctgcaatcatcaaagctaggaaactctcaagtgcactatctgctgctagtgctgcttgtgatcacattcgtgattgggtccttggaactcccgagggcacatgggtttccatgggggtttactctgatggttcatacaatgcaccagctggggtcatctattccttccctgtaacttgtaagaatggagaatggacaattgtccaagggctggcaattgatgaattctcgaggaagaagttnnacttgaccggagtggagctgaccgaagagaaagaattggcatactcgtgcctct

SEQ ID NO: 229552 - DNA, 186 bp, Gossypium hirsutum
  unsure (1)..(186): unsure at all n locations
atggcaaagatctgtggnnnaaggagttttctgttttggagcgagaggactcctgcgcctccatgtacagccgctccatccagggtcaccacgtctgcctcctggtgaaaaagggggagaactctgtctcggtcgatgggaagtgcagtgactccacgctgctgagcaacttgttagaagagatga

SEQ ID NO: 229553 - DNA, 395 bp, Gossypium hirsutum
  unsure (1)..(395): unsure at all n locations
gnnnntttntgtagcttgggtttacagtccgatcggcgaaaaccttaatcgtcttcaagtaccgttagattaaccagcaacgaaaagaaaatcaatggctgcgatcttcgctcgcaactctctcaccgctctcagagctcgacatctcgctttgtcagggcaagcgttgcagggttcatcacaacactatgggctgcgactcggtgcacactcctatggcaccatggaagatgatgaagaaagagagcagcttgcaaaggagatttcgaaagactggagttctgttttcgagcgtagcataaacacattgtttctaactgaaatggttagggggctcatggnnacactcaagtacttctttgaaagaaaagttactattaactatccttttgaga

SEQ ID NO: 229554 - DNA, 333 bp, Gossypium hirsutum
  unsure (1)..(333): unsure at all n locations
gnnnnaatgagatgtttgattctatcagaacagcaactgaaatatgctcaagaaaaagtgaaggaagctggactccaggataacatcaaaatacttctctgtgactatcgccagttacctaaggaacaccaatttgacagaatcatatctgtagagatggtagaacatgttggtgaagaatatattgaggagttttacagatgctgtgaccaattactgaaagaagatgggctttttgttcttcagttcatatctatcccagaagagctttccaaaaaaatccagcaaacagcaggttttctaaaggaatatatattccctggaggaaccctg

SEQ ID NO: 229555 - DNA, 414 bp, Gossypium hirsutum
  unsure (1)..(414): unsure at all n locations
atgccaaggtggacagtgtnnnnaatgagatcaacttcctgaaagtcctctatgatgcggagctgtcccagatgcagacccacgtcagcgacatgtccgtggtcctctccatggacaacaaccgcaacctggacctggagagcattattgctgaggtccgtgcccagtacgaggagattgcccagaggagcaaggctgaggccgaggccctgtaccagaccaaggtccagcagctccagatctcagttgaccaacatggtgacaacctgaagaacaccaagagtgaaatcgcagagctcaacaggatgatccagaggctgcgggcagagatcgagaacatcaagaagcagtgcctgactnnncaagcatccgtggctgatgcagagcagcgtggtgagaatgcccttaaagatg

SEQ ID NO: 229556 - DNA, 330 bp, Gossypium hirsutum
  unsure (1)..(330): unsure at all n locations
cgacggnnnnttggagaccgccaanactattgcttcacctggtcgtggaatactggcaattgatgaatcgaatgcaacatgtgggaagagattatcttctattggcttagacaatactgaacccaaccgccaggcttacagacagcttctgctcacaactcctggcctcggagaatatatttccggtgccattcttttcgaggaaacactttaccagtcaactacagatgggaagaagtttgttgatgtcttgcacgaccagaaaatcgtacctggcatcaaagtagataaaggtttggttcctctacctggatcaaacaatgaatcttg

SEQ ID NO: 229557 - DNA, 404 bp, Gossypium hirsutum
  unsure (1)..(404): unsure at all n locations
atttccggnnnccgctagatcctcttcatctgccgcatctcagtacctccgcagttcactgagaaatggatgaggaagttaaggctgtggttcctgagtcactcttgaagaaacagaagagggctgaagaatgggagcttgccaaaaagcaggagcttgaagttgcaaagaagaagaaagtcgagaaccgcaagctgatttacactagggctaagcagtatgcaaaggagtacgaggctcaagaaaaagagctgattcaattgaagcgggaggcaaagttgaaaggaggattctatgtagatccagaagctaaactcttgttcatcatccgaatccgtggtttcaatgcnnagcacccgagaacaagaaagatcttgcagctattgcgtttgagacagattttc

SEQ ID NO: 229558 - DNA, 333 bp, Gossypium hirsutum
  unsure (1)..(333): unsure at all n locations
aggggaaggggttcaggcagancttcgtcaaaaccctaacggggaaaaccataacccttgaggtcgagtcttctgacaccatcgacaatgtcaaagccaagatccaagacaaggaaggcatccctcccgatcaacaacgccttatcttcgccgggaagcagcttgaagacggccgcaccttatccgactacaatatccagaaggaatccactcttcacctcgtcctccgcctccgaagtggtgcccagaagaggaagaagaagacctacaccaagcccaagaagatcaagcgcaagaagaagaaggtcaagctcgccgcggtccagttttaca

SEQ ID NO: 229559 - DNA, 309 bp, Gossypium hirsutum
  unsure (1)..(309): unsure at all n locations
ataggcggcgcgcccgggnnnnaagagagagtagctcctactcgggccgccgcggccccgggcgtcgccatgaccagcgagctggacatcttcgtggggaacactacccttatcgacgaggacgtgtatcgcctctggctcgatggttactcggtgaccgacgcggtggccctgcgggtgcgctcgggaatcctggagcagacgggcgccacagcagcggtgctgcagagcgacaccatggaccattaccgcaccttccacatgctcgagcggctggtgcacgcaccacccaagcttctgcaccagctc

SEQ ID NO: 229560 - DNA, 395 bp, Gossypium hirsutum
  unsure (1)..(395): unsure at all n locations
gtgcannnnnatgnttcaacagttcgggcaaaccatcatcgatctacttttagctgagacacaaccacagaaaatctgctcccaaattggattgtgcacttttgatggagctcatggcgttagcacgggcattgagagtgtggtggaagagggcaacggcaaatcatccggagttcaaggcaatgctatgtgccctgcttgtgagatggctgttgtttggatgcagaaccaattaaagcagaatcagactcaagacatcatattgaactacgtcaatcagctatgtgaccgtatgccgagtccgatgggagaatctgctgttgaatgtggaagtctatcgtccannncaactgtttccttcactattggtgacgaagttttcgacctttcccctg

SEQ ID NO: 229561 - DNA, 396 bp, Gossypium hirsutum
  unsure (1)..(396): unsure at all n locations
cttcannnnttggattttgcttttntaatcaatggctgaccactacctccaaaacactcaaccaatgactcaccaaatggtgaaagccgctactgccgcaacagccggtggttccctcctcattctctccggtttaatcctagctggcaccgttattgcgctcaccatagccactccactcttcgctattttcagtccagttcttatccctgctctcattgcaacaactctcctaacaacgggtttcgctgcctacagcggtttcagcgttgcagctgtcacggtcctgtcctggatttacaggtatgtgacggggaggcacccaccggctgcggatcagttgnnnagtgcagggacgaaattggctagcaaggcacgggagatgaaagatagggc

SEQ ID NO: 229562 - DNA, 402 bp, Gossypium hirsutum
  unsure (1)..(402): unsure at all n locations
aaaaagnnnttggctggtgcccggaaatgtcggacgaggaacaccattttgaatccaaggccgacgccggtgccttcaaaacctacccactacaggccggaaccattcgtaagaatggttacatcgtcataaaaaaccgtccctgcaaggttgttgaagtttcgacctccaagactgggaagcatggtcatgctaagcgtcactttgttggaattgacatcttcaccgccaagaagctggaagatattgttccctcttcccacaactgtgatgttccacatgttaatcgtactgactaccacttgatcgacatttctgaggatggatttgagagttagctgaccggnnatggagacactaaagatgatctgaggctcccaactgatgagaacctgttgaaac

SEQ ID NO: 229563 - DNA, 274 bp, Gossypium hirsutum
  unsure (1)..(274): unsure at all n locations
gagcgaggggnncggtgagcggggggatgaaggacgaggaacaccccttggaatccaaggccgacgccggagcctccgagacctacccgcatcgggccgtacccatgcgcgagaatgggtacgctcggccaaagaaccggccgtggaagggggctgcagcctcgacctccacgaccgaggcgctgggtcatgccatgcgtgtcttaggccggatggacatgctcaccgccaagtagctggaagatatagtgccctcttcccacatcagtgatgt

SEQ ID NO: 229564 - DNA, 258 bp, Gossypium hirsutum
  unsure (1)..(258): unsure at all n locations
atgccgaccccagagtgnnnntgtatggctggttgtgggagcggagcgggtcgggcggggccgggcggggcccaaccccgccgcgggccctgttggggccgcgcggcggcccggccggcggacagcgggatgggctgcacaatgagcgcccaggacaaagcggcggccgagcgctcttatatgatcgacaagaaacctcgggaggacggaaaaaaaacagcgccggaggtgaaattgctgctgttgggtgctggggag

SEQ ID NO: 229565 - DNA, 325 bp, Gossypium hirsutum
  unsure (1)..(325): unsure at all n locations
annnnggtnctgcttgctgagnttattcatgaccgatgaggaatcgctgagggtgtcataactaccggtcatgccattactgcgacacataagaccgaatgtggaccataaatgcatgactggagaggaggatgagccccttacttcaacatcattgctagcagcaccggtcgctgccaaagctgctggaaaggttcttcactgccctcaatggcaaactgacatggaaagggaggcgagtatataccgtcaatgtatcacccgtgagatgcaccgccaagcttgagaaaggtgcgtaccatgatgagaacaaaaccgctctcaa

SEQ ID NO: 229566 - DNA, 418 bp, Gossypium hirsutum
  unsure (1)..(418): unsure at all n locations
atgctggcgtaactggaattgnnnaagattcttttttcaacggtggtataggcagcagtggcctggttggcaccagcatgggtgctgggggtggggccctgagtggagctggcataagtggtggtggcattggcctgagcagcttgggagggacagccaccattggccacatgaggagttcctctgaccatcactttaaccaaaccattgggtccgcctcccctagcacagctcgaagtcgaatcacaaagtacagtaccgtgcaatatagcaagtagtcaggaccccagctcactttttcatagtcactgaggtttagatccaattcccaccactaaaaaactaacaatgtgaattataaannacaacttcatgctcaagtcatctaggagcaaagtgagaaaacacaatgagaaaa

SEQ ID NO: 229567 - DNA, 345 bp, Gossypium hirsutum
  unsure (1)..(345): unsure at all n locations
caccgnnnnntgggtgaccctgganaattccagaaattcttccctgctggacaggaaaatcctcagtcatacttacgaatcttcagccgtgaaattcttgaagctgtcttcaatacacgaagtgagcagctagacgagctgtttggtgggaggcaaagccatcgaaggcagcagggacagggaatgttccgtaaagccagccaagaacaaataagggcattgagccaaggagctacttcaccaagggggaaaggtagcgagggatacgccttcaacttattgagccaaacccctcgctactccaaccaaaacggccgctttttcgaagcttgccctcgttatttc

SEQ ID NO: 229568 - DNA, 401 bp, Gossypium hirsutum
  unsure (1)..(401): unsure at all n locations
cttcttcatnnnnactntgcgtctccactnaactcttgctaaacggtatcgttttagtcagtctttcatcaatggcgaaagaaccggttcgcgtcctcgttactggagctgcaggacaaatcgggtatgctcttgtacccatgattgctaggggagtcatgttgggtgctgaccagcccgtgatccttcacatgcttgatatcccacctgctgcggaggctttgaatggtgtcaaaatggagttggtggatgctgcttttcctcttctaaagggtgttgttgctacaactgatgttgttgaggcatgcactggagtcaatgttgctgtcatggttggtggtttcccaagnnnagaaggaatggagaggaaagatgttatgtcaaagaatgtgtctatttac

SEQ ID NO: 229569 - DNA, 365 bp, Gossypium hirsutum
  unsure (1)..(365): unsure at all n locations
atgtcctgcgcggctgctctctggaggnnnnctggtgggtctccgnccgccttctctcccacataagtgcgtgccgccacctgatggaagattcgatggacatggacatgagccccctgaggccccagaactatcttttcggttgcgaactaaaggccgacaaagattatcactttaaggtggataatgatgaaaatgagcaccagttatctttaagaacggtcagtttaagggctggtgcaaaggatgaattgcacattgttgaagcagaggcaatgaattacgaaggcagtccaattaaaagaacactggcaactttgaaaatgtctgtacagccaacggtttcccttgggggctttgaaata

SEQ ID NO: 229570 - DNA, 411 bp, Gossypium hirsutum
  unsure (1)..(411): unsure at all n locations
ctctattattttnnagggagtatatcgctttgatttcgcatccttgctgtgcactcgatggcaaatcgatggttgagagcctgaggtgtatccgctgtttgcggccgtaagtgttgctgtcggaatctgcgggtttcagttggtgcgcaatatctgcatcaaccctgaagtcagggtaaccaatgagaacagggctgctggggttttggacaactttgctgagggagaaaaatattctgagcatttcttgagaaaatatgtccgcaacaagacgccagaaatcatgcccagtatcaacagcttcttcactgacccaaagtgaggcttcactcttgctttatgcttattcttttaaataaaaaaaatagaagaacttagtcttattcaatcaataccaaattatgccctttc

SEQ ID NO: 229571 - DNA, 354 bp, Gossypium hirsutum
  unsure (1)..(354): unsure at all n locations
atccggatcgccttcggnnnnaaggagcgactcgcgttagctcccggcccgtcctcgcccccgccttcgccaccgcctcggcccgcagagctcgccctctccccacctgcagatatgtccgagtccaagagcggccctgagtatgcttcgtttttcgccgtcatgggcgcctcggccgccatggtcttcagcgccctgggcgctgcctatggcacagccaaaagcggcaccggcattgcggccatgtctgtcatgcggccagagctgatcatgaagtccatcatcccagtggtcatggctggcatcatcgccatctacagactggtggtggcagtcctcatcgccaacttcctg

SEQ ID NO: 229572 - DNA, 323 bp, Gossypium hirsutum
  unsure (1)..(323): unsure at all n locations
atagccttttnccttntcctcctaaggagaaaagaggcgagagattccccttcaacttattgagccacacccctcgctactccaaccaaaacggccgcttcttcgaggcttgcccacctgaattcccgcaactcagggacatcaatgtcaccgtttcagccttgcaattaaaccaaggatcaatctttgtgccgcactacaattcaaaggctacattcgtgatccttgttaccgacagtaatggatacgctgaaatggtttctcctcatcttcctaggccaagctcatatgaagaagaagaagatgaaaacgcacaacaagaa

SEQ ID NO: 229573 - DNA, 422 bp, Gossypium hirsutum
  unsure (1)..(422): unsure at all n locations
atgtctctctgaagaggctatcatagnnnnntgncctgccgactggtattcccattgtctatgaattggacaagaacttgaagcctatcaagcccatgcagttcctgggggatgaagagacggtgcgcaaagccatggaagctgtggccgcccagggcaaggccaagaagtgaaggccagcggggaggatactgtccccaggagcaccctccctgcctgtcttgtccctctgcccctcccacctgcacatgtcacactgaccacatctgtagacatcttgagttgtatctgcagatggggactggtggctcccattttcattttagccattttgtcttctgcacccactcccttcgtacaatctagtnnnaatagcacttctagagcacaggttctcaatccaagctgtggaaaagctcccc

SEQ ID NO: 229574 - DNA, 394 bp, Gossypium hirsutum
  unsure (1)..(394): unsure at all n locations
nnnccgtcggtaaaagagatccttgtggtctggaacaaagggataccgccaaaggtgagtgatctcaattcagcagtgcctgttcggatcagggttgaggatctgaactccctcaataatagattcaaggtcgatccattgattaagactcgtgctgttcttgagcttgatgatgatataatgatgccttgtgatgatgttgagcggggatttatgttgtggcgtcaacatcccgataggattgtgggattctaccctcggtatgttgacaggagccgattggagtataatggtgagaagtatgccagaaaaaataaagggtataatatgattcttacnnaggctgctttcatggatagtcaagtagcctttgaacggtattggagtgagcaag

SEQ ID NO: 229575 - DNA, 365 bp, Gossypium hirsutum
atggcgactgaatgcactaacagcagcaggctccgacctgcttccctggacatttcccggaccgtgagcgagggaaccacgttgccctggattcttgccaactgtacaaagttgaccaggaaaatggctcagcagacaagcccggacaccttaacagtacctgaagtggataatccgcattgtccaaacccgtggctgaacgaggaccttgtgaaatccttgcgagaaaacctgttgcagcatgagaagtccaagacagcgaggaaatcggtttctcccaagctctctccagtgatctctccgagaaattcccccaggctcctgcgcagaatgcttctcagcagcaacattcccaaacagcggcg

SEQ ID NO: 229576 - DNA, 179 bp, Gossypium hirsutum
ggaacatcgtgtatcagtttaggaaggcccagaatgaaatcgaccagtatttgaagattgttcctcttatcacgctggtggataattctcgagtcagggagagactagaagttatagagaaagatcaacatgaatacacattggatgaagaggaccgaagggtgcaagatgttatactg

SEQ ID NO: 229577 - DNA, 390 bp, Gossypium hirsutum
gcccttacaatgttatcaagaactggaattacactgcctttgttgatgccatccacaatggtgaaggcagatgctggacagccaaggtgaggaccgaggatgaactgatagatgcaattgcggcagcaacaggagaaaagaaagattcactgtgtttcattgaagtttttgcacacaaagatgacaccagcaaagagttgctggaatggggatccagagtttcctctgctaacagccggcctccaaatcctcagtagagctgttgattctgaaatgtttagggaaagacagactggaagcaccataagctggaaataagatagatggggcagatttgcttggcttggatgagatttctgttaatctttttactgcattaaactttgtaaa

SEQ ID NO: 229578 - DNA, 357 bp, Gossypium hirsutum
gcgcatcagatccactctccctctctttcacaggcttttgagatccgattccctgccttctcacactcccagagctgctcttcaccgaactctactttgtcccgaactgtcgaggaaatattccacttctccgaagaaggacgagaatgttaaggtgcctttggctttgtttggtggatctggaaactatgcatctgcactgtaccttgcagccgtaaaaggaaatgctctggacaaggttgagtctgaacttcttgaccttgttcaggcatcaaaaaacagtcaattcttttctcaattcactaaggacttgtcagtacctgcagagacacgggtcaaagccattaatgagatatg

SEQ ID NO: 229579 - DNA, 384 bp, Gossypium hirsutum
acaattccctgaaaaaatttgttggagtcttattgctcagcaggatgagactttcatctggcagaaaactgttgatgctcagtgctattcttctcgcaagcagaatgatgtacccctttgcaaaggacatgatgcttcctattatcaggccttgagcccatgcattattggaccttccagcaaacccctggattcctattcagaacaggtcctctagctcagaattgagctctgcggagcttgcacttcatggagtcagtctagaagatttctttgaagacttgcaaggtgcttgagaaccattggcttcctttaatattggaccccaatgggatggaaatgaatgctcataatgggggttaaaatgctgcattcctggaggaa

SEQ ID NO: 229580 - DNA, 378 bp, Gossypium hirsutum
caaaatacagagcttatcgtaatcatggtgaggaataagtcagcttgcgtagttttgctcttttctcttttcctttcctttggcttgctttgttctgccaaagactttcccggaagaagaggcgacgatgatcctccgaagaggtacgaggactgccggaggcgatgcgaatgggatacacgtggacaaaaggagcaacagcagtgtgaagaaagttgtaaaagtcagtatggggagaaagatcaacagcagcgccaccgccctgaagatccccagaggagatacgaggagtgtcagcaagaatgccgacaacaagaagaaaggcaacgaccacaatgccaacaaaagtgcttgaaacgattcgagcaagaacaacaa

SEQ ID NO: 229581 - DNA, 376 bp, Gossypium hirsutum
tttgaagtgcagaatcaagggattgtgggtggagaagaagcggtgacggatctaacttggaactccgttttctcttcttaccgctattcccgacctatctctaaccccctcaatttctctcaggtagatattccttgtgttcaagcgtcttcatggcttcaaagcggattttgaaagaacttaaggatttgcagaaggatccaccaacttcctgtagtgcaggtcctgtagcggaagacatgtttcattggcaagcaacaattatgggcccctccgatagcccttttgcaggaggtgtgtttttggttaatattcattttcctccggattatccattcaagcctcctaaggttgcatttaggaccaaggtcttcca

SEQ ID NO: 229582 - DNA, 275 bp, Gossypium hirsutum
gcgtgattacttactccctaccagcgtgaatcaaccatggcaaagctcgggggttactcagcccccctggctctcattttgttccttgccaaggcttcaatcacatgcgcagacgtcgaaagcgaggtaaacctggatagctgtgaaccgcagataagggagcacgcccacctgaagcactgtcagaagtacatggaggaagagtggggttgccaatgcagcgacaatatattcggcgggtacattgactcatgttgccagcagcttgagaagat

SEQ ID NO: 229583 - DNA, 386 bp, Gossypium hirsutum
ggcttacacttctttgctttcttttagcgtttgcttgcttgttctcttccatggctgctgtgctcagatagatctcgtcactaaccatcaccaggatccaccttgggggcagcctcagcaacctcagccacgtcaccaatcccaatgccaactccagaacttgaatgctcttcagcctaagccaccggtttaggtcagaggctggtgaaactgagttctgggaccaaaatgaggatcaattccagtgtgctggtgttgctttcctacgtcataagatccagcgcaaaggacttttattgccttcatttaccagtgctcctatgcttttctatgttgaacaaggggagggtattcatggggcggtcttcccaggttgtcccgagaca

SEQ ID NO: 229584 - DNA, 324 bp, Gossypium hirsutum
gaaatgtggagagggcattgtggctgatgaagatatcaagcatggagagtttgtaatagaatatgtcggggaagttattgatgacaaaacatgtgaggagaggctttggaacatgaagcatcgtggagaaaccaatttctacttatgtgaaatcaatcgtgatatggtaattgatgccacatacaaggggaacaaatccagatatataaaccatagttgctgtcccaatactgagatgcagaaatggataattgatggtgaaacaaggattggcatattttcaatgcgagatataaaaaagggggagcatctgaactatgatta

SEQ ID NO: 229585 - DNA, 371 bp, Gossypium hirsutum
gggctgttatctcagtttttgtgatgctagccatgtttcaattcgtggtgaagcaagggcaggccgccgtaacttgcaaacaagttgatgatgcattggcagcctgcgttccttaccttaccaacggtggggttccttcgactccgtgttgtaatggtgtaggggaactccggaatagtgccgaaaccacggcagacaggcaagcagcttgcaactgtgttaaacaagccgccgctcgtatccccactatcaaagaagatgacgccgcaactctccctgcaaagtgccatgtccaagttgatttcccaatctccaagaacaccaactgcgaggacattcactaagatggaagccatcaagacgcaaatata

SEQ ID NO: 229586 - DNA, 375 bp, Gossypium hirsutum
cccacgcgttcggcttacacttctttgctttcttttagcgtttgcttgcttgttctcttccatggctgctgtgctcagatagatctcgtcactaaccatcaccaggatccaccttgggggcagcttcagcaacctcagccacgtcaccaatcccaatgccaactccagaacttgaatgctcttcagcctaagcaccggtttaggtcagaggctggtgaaactgagttctgggaccaaaatgaggatcaattccagtgtgctggtgttgctttcctacgtcataagatccagcgcaaaggacttttattgccttcatttaccagtgctcctatgcttttctatgttgaacaaggggagggtattcatggggcggtc

SEQ ID NO: 229587 - DNA, 312 bp, Gossypium hirsutum
ggagaaaaggtgttgccatagactttgtgactctagatgatgaaagaatgctgtttgatatccagaagttctacaatgttgtcatcgaggagctgccatcgaatgtcgcggatctcctttgatgagagattacgttttcaaaaaggtggcgaggcgagcgctttcattggtttgaagtccaattaaaggggctctttttttcttttttgggtttccctttttagcaatttaaggtgaatggtctttaaaatatttgaccatttaaatatgtggtctaaaaatgctacataaaggttattcactttttctccc

SEQ ID NO: 229588 - DNA, 386 bp, Gossypium hirsutum
ctcttatcctattctttcttgttttcagtttcttcactcactggcccaagtctctcaggtgaacggagatggcaggaaaaggtggaaaggggcttttggcggcgaaaacaaccgcagctaacaaggacaaggacaaggataaggacaagaagcgtccggtttctcgttcatctcgtgccggaattcagttcccagtgggtcgtatccaccgtcatctcaagtctagggcatctgcaaatgggagagttggggccacagccgccgtttacttggcctctattcttgaatacctgacagctgaggttcttgagttggctggaaacgcaagcaaggatctgaaagtgaaaagaatcaccccaaggcatctgcagctggctattaggggg

SEQ ID NO: 229589 - DNA, 277 bp, Gossypium hirsutum
cagccagcagtattgcagcgtctgtgggataatcaagtctggcttttcaccaaagatggacggaatctccacgctatcaacgagctggagagcacacatggcggtccctgaggatgtagaggaagagttcaagttcatgaacgtgaaacgggccatgcttgtctgccgggtggtagcgggtagggtggggtcagaaggggatgaaacaaacaaggaggatggcggatttgattcggtgatagggaggggaggggggaatatggcacatcataccaag

SEQ ID NO: 229590 - DNA, 371 bp, Gossypium hirsutum
gacagagttctttgggttaccttttcgggagcggagaagctccacctccaaaaccaaccaacgtcacgagtactggcaccaccagtaatgaagttcctcagaagcagattgaggttgtgaaggaaactgtgcaaaaaccgaccactgcttcaccatcatcgggtgatgccaaggagatccctgcaggtgttccagggagcaaaacgaacaactatttccgagctgatggccagaattgtggcaactttcttacggagcgcaggacaactaaggttcacgcagcgcctggcggtgggtcttccttggattacctgtttggtggcagcgagaagtgatatgtgagatattaaatgttggaaccactgcttatg

SEQ ID NO: 229591 - DNA, 349 bp, Gossypium hirsutum
cggacgcgtgggccgacaccatcgacaatgtcaaagccaagatccaagacaaggaaggcatcccacccgaccaacagcgcctcatctttgccggaaagcagctcgaggacggccgcaccttagccgactacaacatccagaaggaatccaccctccatctcgtgctccgtcttaggggaggtgctaagaagagaaagaagaagacctacaccaagcccaagaagatcaagcacaagaagaagaaggtcaagctcgctgtgctacagttctacaaggtggatgaatcgggtaaggttcaaaggctgaggaaagagtgtcctaatgctgagtgtggtgctggaactttcat

SEQ ID NO: 229592 - DNA, 377 bp, Gossypium hirsutum
aacaatttcaaaatattaaatattctttctctttgatcgatacttgaataatatgtcaggaagaggaaagggaggcaaggggttgggcaagggcggagcaaagcgccaccgcaaggtcctccgtgataacatccagggaatcacgaaaccggcgatccggcgtctagctcgtaggggaggtgttaagcgtatcagtggcttgatctacgaggaaacccgtggagtgttgaagatcttcttggagaacgtgatccgcgacgccgtgacctacactgagcacgccaggagaaagacggtgaccgccatggatgtcgtttatgccctcaagaggcagggtaggactttgtacggtttcggtggttagattggtgtttact

SEQ ID NO: 229593 - DNA, 350 bp, Gossypium hirsutum
atcgtgtgcggaagcctgtgaacgtgcagatgctcttctccaatccactggatgagccagtgagggactgtgtgctgatggtggagggaagcggcctgctgttgggtaacctgaagatcgagtgagtcctgggcctgagtggccggtgcgggagggtgggagggggcgggggggggccctacagatcctctgggtgggacagacagagctccctctgaccttaagttctttactcttttgggggccttggaactctagaatctgcatttgcatttggtttgggggttcaccaaacttgaactcttgagaagtccaggtcatcagagctaagagctggtcttcagggctta

SEQ ID NO: 229594 - DNA, 297 bp, Gossypium hirsutum
cttaaatctaggcggcatttaaatgtccgaggaaaaagtgctacgctgccttctattacagaaaaggactgggatgacataaaatttggagtagacaataaagtcgacttttatgctgtttcttttgttaaagatgcagaagtggttcatgagttgaagaattatctgcagagttgcgatgcagatattcatgttattgttaaaattgaaagtgcagattctattccaaatttgcattcaattataacagcatctgatgcggcaatggttgcaagaggagatcttggtgcagagctg

SEQ ID NO: 229595 - DNA, 411 bp, Gossypium hirsutum
atcgggacagttcaggaggaaaggaagagaagaaacatcataagtcctcggacaagcacagataataaagactttccatcaaggctatggacagaccccctaagctgaaagtctcccagaggaggatgccaaagctccgtgcgtcactctcagaacgatatctcccataattaagagcttctggtgctgtccatttaatgggaatctgctttaagtcagaagatgaatacacaccaccatcctcttgacgagacattccaaagtcactgattttcagaacattattttcacctccaggcagtttcttgcagcaaggtccctgtgtatacattttttactcgagatacgccatccagaatcagcatctaatgaaaatttcactaactgagttttagttcattcttctttctc

SEQ ID NO: 229596 - DNA, 392 bp, Gossypium hirsutum
caattttggctccaaggaagattttgacagtctcttgcaatcggctaaaaaaaagagcatccgtgtcattctggacctcactcccaactaccggggtgagaacttgtggttctccacccaggttgacagtgtggccaccaaggtgaaggatgctctggagttttggctgcaagctggcgtggatgggttccaggttcgggacatagagaatctgaaggatgcatcctcattcttggctgagtgggaaaacatcaccaagggcttcagtgaagataggctcttgattgcagggactaactcctccgaccttcagcagatcgtgagcctactcgaatccaacaaagacttgctgttgaccagctcatacctgtctgattccagctttactgggg

SEQ ID NO: 229597 - DNA, 379 bp, Gossypium hirsutum
ttatttttcactttccgcacacttagcttaactaagcaagctcgtaagctgttttcatcaatggccgaccgtgaccgctcttaccggacgtttgaccaggttgttcgtggtgatagaacgaactatcaaagcggaccatcaacaacccaagttctaactgtcctcaccctccttcccataggcggcactctccttgcattagccgggctaaccctcaccggcaccgtcatcggcctatgcatggcaacgccactcttcgtcatcttcagcccggttctggtcccagctgccatcgcggtcttcatggctgtggccggtttcttgtcgtccggggcattcgggttgacggggctgtcctcgctctcctacgtatttaacc

SEQ ID NO: 229598 - DNA, 396 bp, Gossypium hirsutum
atcccggccagacggcgggcaagacagctgggtgtgcagcgtcctcgaaaccacgagcaagcgagcagatcctccgaggcaccacggactccagcccatgccatggcggattctgagcgcctctctgcccctggctgctgggccgcctgcaccaacttctcgcgcacccgaaagggaatcctcctgtttgctgagattatattatgtctggtgatcctgatctgcttcagtgcctccacaccaggctactcctccttgtcggtggttgagatgatccttgctgctattttctttgttgtctacatgtgtgacctgcacaccaagataccattcatcaactggccttggagtgatttcttccgaaccctcatagcggcaatcctctacctgatcacc

SEQ ID NO: 229599 - DNA, 389 bp, Gossypium hirsutum
gttatctctgaaggtgtcttaataaacgccttcgatttaccttcgatttccatttacttctctattgctacgtttttgaatttttagtgagcgaaaatgagagagtgcatttcagtccacatcggtcaggctggtattcaagtcggaaatgcctgctgggaactttactgccttgaacatggaatccagcctgatggccagatgccaagtgacaagactgtcggaggaggtgatgatgcttttaacacctttttcagtgaaactggtgctggaaagcacgtccctcgtgctgtctttgtggatcttgagcctactgttattgatgaagtgaggactggtacttaccgtcagcttttccaccctgagcaactcatcagcggcaaggaaga

SEQ ID NO: 229600 - DNA, 397 bp, Gossypium hirsutum
atgacagctgctgctcctgcttctcctgaacagatcattgttcatgctttatccccagaacatttgttgaacacaagtgataatgttacagtacagtgtcacacaccaagagtcatcattcagactgttgccacagaggacatcacttcttccatatcccaagcagaactgacagtagatagtgatattcagtcatctgattttcctgagcctccagatgccctagaagcagacactttcccagatgaaattcatcaccctaagatgactgtggagccatcatttaatgatgctcatgtatccaaattcagtgaccaaaatagcacagaactgatgaatagtgttatggtcagaacagaagaagaaatttctgacaccgaccttaaacaagaggaat

SEQ ID NO: 229601 - DNA, 343 bp, Gossypium hirsutum
cccacgcgtccggccttcagctgggcagaaaattgatattcccaacgtccccaggaaccaaagtggaattgttactatgtaacctgtccaataatgaggccttaatctccagtcagatgaagttcctatcgaggaagcagttatatagtatctcctcacaagaagtgcaacagccatcaacatgaatatgactagaatgctcacagatggctagcttgttaagacatccaagcttgaaaagaaagcaatcagaccacttgagacggcagtttttggtgttccagtctggatggacaaaagaccatggtctgatcacttgtgctcatgcaatatgattcgtgta

SEQ ID NO: 229602 - DNA, 386 bp, Gossypium hirsutum
cccacgcgtccgtccagtacttgattggatcgggaatggatcctcatacagagaatagtccttatcgaggatttatatacacttcgttccaagaaagggcgacttttatctcccatgggaatacaggcaggctcgccaaggagtatggggatattaacttggctcaaatttgcggtagcattgcctcagatgagaagcgccacgagacagcctataccaaaatcgttgaaaagctgtttgagattgatcccgatgaaacagttcgggcatttgctgacatgatgaggaagaaaatcaccatgccagctgagttcatctatgatggccgaaattacaacctatttgaccactactcggctgtcgcccaaagaatcggggtttacact

SEQ ID NO: 229603 - DNA, 401 bp, Gossypium hirsutum
atggagaaaggtgaggagctctcctgcgaagagcgaaacctgctctcagtagcctacaagaatgtggtgggcggccagagggctgcctggagggtcctgtccagtattgagcagaaaagcaatgaggaggcctcggaggagaagggccccgaggtgcgtgagtaccgggagaaggtggagactgagctccggggcgtgtgcgacaccgtgctgggcctgctggacagccatctcatcaaggaggctggggacgcggagagcagggtcttctacctgaagatgaagggcgactactaccgctacttggccgaggtggccactggtgacgacaagaagcgcatcatcgactcagcccggtcagcctaccaggaggccatggacatcagcaagaaggagatgcc

SEQ ID NO: 229604 - DNA, 383 bp, Gossypium hirsutum
taacccttctttgctctttctttgccttctttttctcttcaatggctgcctagctcgccagaccttttcgtcacagcagtcccaaaatgagtgtcaaatcaataggctccgcgcctctgcaccccagacccgaattcgctccgaagccggcaccaccgagtggtggaaccccaactgtcaacagctcaggtgtgctggtgtatctgtaatgaggcagactattgaacctaatggccttgttttgccttccttcaccaatgctcctgagcttctctacattgtccaaggaagaggtattcaaggtattgtgatgcctggatgtgccgaaacattccaggattcacagcaatggcagcatcaaagccgtggcaggttccaggacc

SEQ ID NO: 229605 - DNA, 382 bp, Gossypium hirsutum
ggtaaatggattcaaaccgaagaatggtatgttcgagaaggaaagtgctattaggagagagactgagggtgagtttagactgttgggtgggagagaagggagcaggttcgccaatggtagacttttcggttttgatgatgacgaccaagtggcaagcttgggtcgcaaggtatcttttagcatggaagacagcaggattgaaattccgagccggttggagcctggtgaagtttcgttgactaccttgcctgatgatgaatccggtaccgatgaagactacgattacgatgaccaagagtgcagtagaaaggaacctgagatcatttgccggcacctcgaccacgtcaacatgttgggtctaaacaaaacgactcttagacta

SEQ ID NO: 229606 - DNA, 404 bp, Gossypium hirsutum
atggcgtctccggggacgggcagagcctcgagggcgcctgcggggacgggcagagcctcgagggcgtctccggggacgggcagagcctcgagggcgtctccggcgacgggcagagcctcgagggtgtctccggtgatgggcagagcctcgagggtgtctctggcgccggccacagcgcagggctcgcggccgggcagggccccggggctgacgagctgggcttgtcccgcgggaagccctacgcctgcggcgagtgcggggaggccttcgcgtggctttcgcacctcatggagcaccacagcagccatggcggccggaagcgctacgcctgtcaaggctgctggaagaccttccacttcagcctggccctagccgagcaccagaagacccacgagaaggagaaa

SEQ ID NO: 229607 - DNA, 363 bp, Gossypium hirsutum
cccacgcgtccggctgtccagtcatgtgatgcttcactgctgctggactccacaagaaggagcttgtctgagaaggagacagacaggagctttggcctaaggaatttcaggtacattgagaccatcaaagaagctgtagaaagggaatgtcctggagttgtttcttgtgctgatatccttgttctgtctgctagggaaggcatcgtttcgttgggaggcccttatattcctctcaaaactggaagaagagacggtagaaggagcagagcagatgttgtggaggagtatcttccggaccacaatgagaccatctctggcgttcttgacaggtttgccgccatgggtattgacacccctggagtc

SEQ ID NO: 229608 - DNA, 393 bp, Gossypium hirsutum
atccggactacggggcgccgctgagccaagtgggcgacccgggcaaggacgggctcccgggtcacgtgacacggagctggccgaattctgcaggaggcaacgccatagcctagaggtgccacctcatggagacccccgaggccgccgcccctgccgggagcttatttccctccttcctgctcctggcctgcgggacgctggtggccgccttgctaggcgccgcgcaccgcctggggctcttctatcagctgctgcacaaggtggacaaggcaagcgtccggcatggtggagagaacgtggccgctgtgctgagggcccatggcgtgcggttcatcttcacgctggtcggtgggcacatttccccactgctggtggcctgtgagaaactgggca

SEQ ID NO: 229609 - DNA, 228 bp, Gossypium hirsutum
atccgcaggtgacgtggacatcggtgatgcagcctactactgcgagagggacgtcaagggcgagtctctattccagggccgcggcggcctggacttgcgcgtgcgcggagaagcccctgcaggtggagcgcacgctcatctattacctggacgagattcccccgaagttcttcatgaagcgccttaccggcgggcttatcggcgtcatcgtggtggtggtggtggccc

SEQ ID NO: 229610 - DNA, 318 bp, Gossypium hirsutum
atcgcccgcctgtgtgtccccagagccatggagagagccagtctgatccagaaggccaagctggcagagcaggccgaacgttatgaggacatggcagccttcatgaagggcgccgtggagaaaggtgaggagctcttcttcgaagagagaaacctggtctctaaagcctacaagaatgtggtgggcggccagagggctgcctggagggtcctgtccagtattgagccgaaaagccaccaggagggctctcgggagaaaggcccccaggtgcgtgagtacccggagaaagtggagactgagctcctgggcgtgtgcgac

SEQ ID NO: 229611 - DNA, 409 bp, Gossypium hirsutum; identical to SEQ ID NO: 199083

SEQ ID NO: 229612 - DNA, 403 bp, Gossypium hirsutum
atccagcctgcaggccgccattgctgatgctgagcagcgtggggaaatggcactcaaggatgccaagaacaagctggaagggctggaggatgccctgcagaaggccaagcaggacctggcccggctgctgaaggagtaccaggagttgatgaacgtgaagctggccctggacgtggagattgccacctaccgcaagctgctggagggcgaggagtgcaggctgaatggcgaaggcgttggacaagtcaacatctctgtggtacaatccaccgtctccagtggctatggcggtgccagtggtgtcggcagtggcttaggcctgggtggaggaagcagctactcctatggcagtggtcttggcgttggaggtggcttcagttccagcagcggcagagccattgga

SEQ ID NO: 229613 - DNA, 393 bp, Gossypium hirsutum
cttcgttgctctttctttcccttctttttctcttcaatggctgcctagctcgccagaccttttcggcacagacgtcccaaaatgagtgtcaaatcaataggctccgcgcctctgcaccccagacccgaattcgctccgaagccggcaccaccgagtggcggaaccccaactgtcaacagctcaggtgtgctggtgtatctgtaatgaggcacactattgaacctaacggccttgatttgccttgcttcaccaatgctcctcagcttctctacattgtccaaggaagaggtattcaagggtattgtgatgcctggatgtgccgaaacattacaggattcacagcaatggcagcatcaaagccagggcaaggtccaggaccagcaccagaaagtc

SEQ ID NO: 229614 - DNA, 374 bp, Gossypium hirsutum
acgagttcgcatttggaagcaatgcaacaggactcgtgaaaccgtgggaaggagagaggattcatgaagattgcggatcggatgacctagaactcacccttggcagttccaggactaggtgagttttttaagcttattgagtagatagatggccaaaattgactccttttgttttcccttcctgtttttactttgtgttacaataccttgcatataaagcaatctgtatgaactttgattccatattttgctctctgaaaaaagggaacaaaagggatcagggtgagcatgaatcttattattagccttcatttaattttataattttttttctctaaatatatagtcagtttttcaatggtgatttcttagca

SEQ ID NO: 229615 - DNA, 386 bp, Gossypium hirsutum
cgtgaactcaatgtcgaaacgctacgtgcctccgctacctcctccctcgcaacaatcaagccctttgttcaagcagcggtcatggtctcctgacgctgagcgagacgaggcgtggctcaggcggaaggaagtttacggctcggggatccgccgtagtcagagcttcacggaagatgatttggatgagctcaaaggttgtttagatttaggtttcggcttcgaaccagattcgcctgagttagatccgaaactatcccatgctttacccgctttgccgttttactgtgccgttaatcgtcagtacaatggcaggatatcgaggtcttcgtccgcgtcatcgatggactcttttagtgacgccggtagcgctaactcgataattgatc

SEQ ID NO: 229616 - DNA, 398 bp, Gossypium hirsutum
atgctattcttcctgactctctccctcctcccaccaaccactcttcaacaggacccagtgtgtgttgttccccgccatgtgtccatgtattctcattattcagctttcacttataagtgagaacatgcagtatttggttttctggtcctgtgctagtttgcaaagaataatagcctccagctccatccacgtccctgcaaatgacaagatcccattcctttttatggttatatagtattccatgataaatacacaccacattttctttatccagtctatcattgatgagcatttaggttgattctatgtctttgctactgtgaataatgctgcagtgaacatacatgtgcatgtgtctttataatagaatgatttacattcctttgggtatatacaca

SEQ ID NO: 229617 - DNA, 405 bp, Gossypium hirsutum
atcgtggaaggactcatgaccacagtccacgccatcactgccacccagaagactgtggatggcccctccgggaaactgtggcgtgatggccgcggagctctccagaacatcatccctgcctctactggcgctgccaaggctgtgggcaaggtcatccctgagctgaacgggaagctcactggcatggccttccgtgtccccactgccaacgtgtcagtggtggacctgacctgccgtctggaaaaacctgccaagtacgatgacatcaagaaggtggtgaagcaggcgtcggagggccccctcaagggcatcctgggctacactgagcaccaggtggtctcctccgacttcaacagcgacacccactcttccaccttcgacgctggggctggcattgccctcaac

SEQ ID NO: 229618 - DNA, 358 bp, Gossypium hirsutum
caaaaaagaaaatgtcaagtgctttagagatgtcgctcgacgatctcatcaagcgtaaccgtaagccgagatccggcaaatctcgcggccggggacgtggatccggacctggaccggcccgccgttttcctaatcgtggagcaaaccgctcggcaccgtatgctcctgctaaggtgctggagacgacgcggcagcaggatatgttttccgataagggagcggcgttgcaaggactagcgggtcggaattctggaatagaaaccggaacgaagctctatatctctaatttagattacggtgtttcaaacgacgacatcaaggaattggtttctgaggtcggtgacctgaaacgattttc

SEQ ID NO: 229619 - DNA, 390 bp, Gossypium hirsutum
atgggcagtggtggcctgggtggcgcatgtggaggagctggctggggcagccgcagcctgtatggcctggggggctccaagaggatctccattggagggggcagctgtgccatcggtggcggctatggcagcagagccggaggcagctatggctttggtggcgccgggagtggatttggtttcggtggtggagccggcattggctttggtctgggtggtggagccggccttgctggtggctttgggggccctggcttccctgtgtgcccccctggaggcatccaagaggtcaccgtcaaccagagtctcctgactcccctcaacctgcaaatcgaccccgccatccagcgggtgcgggccgaggagcgcgagcagatcaagaccctcaac

SEQ ID NO: 229620 - DNA, 360 bp, Gossypium hirsutum
atggcgtggtgtatgtggaggtgcggaacaatccgcacgtgtttgccaattactaagtggtgccaatccctttgaaccagcctgaagaggactttattccagacgtggttgtgtccctagaggcccaactcctgctagagagggagcgagacttcatagtgaaggcccaacccatactgcactgcatgcgccaccagcctaactcatccctcgatgcagatgaattttgtcacaagtaccaccagaagactgtggcaagcacttaccttgctggacatgaaaccataccaggatgcaatctcttttctggacatgtgcacgtctaccatgatgctgcgaacagcgggatttaccatactg

SEQ ID NO: 229621 - DNA, 367 bp, Gossypium hirsutum
gttccaacgtcactaaagctgactgcttgctctctagtctctaccatgaagccaccaccaccatccctcaactcactaccactcttcctcttcctcctcctctccgccgtcatctccgccgctaccaccaccacaaatgccacctctaaacttccccctgctccttcccccaccactgaaactccctcttcttcttcctcctcctcttctactctagaccctaaacaaattgaagcacttgaatccctcaacattcccaccgcaagagacccttgcatccaaccttcccctcacaacgccaccgtttgtgacagctctaagccctttcgccacctcgtttccctccacctttccaactgctcctctg

SEQ ID NO: 229622 - DNA, 357 bp, Gossypium hirsutum
ccagagtctcttccctcatctacccccaaatctcctcacattatgtctttggtggccaacgaagattttcagcacattttacgtgtgctgaacaccaacgttgatgggaagcagaagattatgtttgcattgacctccatcaagggtatcggaaggcgattcgctaacatcgtttgcaagaaggctgatgtcgacatgaacaagagggctggtgaattgactgcacaggagttggacaatctcatgaccattgttgcaaaccccaggcagtttaaaatccctgactggtttttaaataggcagaaggattacaaggacgggaagtattcccaagtcgtgtctaatgctcttgacatg

SEQ ID NO: 229623 - DNA, 382 bp, Gossypium hirsutum
atgacgagagtgagacagcagtgaagccgctggcatctgcgctgctgcagatgatggaagggaacgggaacggccacgagcactgcagcgattgcgagaatgaggaggacaacagctacaaccggggtggtttgagtccagccaatgacactggagccaaaaagaagaaaaagaaacaaaaaaagaagaaagaaaaaggcagtgagacagattcaacccaggatcagcctgtaaagatgaactctttgccagcagagaggatccaggaaatacagaaggccattgagctgttctcagtgggtcaaggacctgccaaaaccatggaagaggctagcaagcgaagctaccagttctgggatacgcaagcccgtccccaagctgg

SEQ ID NO: 229624 - DNA, 365 bp, Gossypium hirsutum
cagaggcagaaaagcaaacctgcttcaaagtgtttagctaagtctgcatcttttccttctgctgtgtctacccccgatgatgatgatgatgatgaaattgtaactgcaatgcagcgaatgttctctgaggattctgtgcagtcgctgtcgacctactcccgctcgatttctttgcctactcccttgaagctggtatcagcccttaaaggtagccgtgagaaacagggattgccgacaaagaagcttaccgtgaaatgggcaccagatgtgtatgatcctccgccgacatcagtattgcacacagttagaagcaaaaagcagcagaaatcaaaaaagaaaaatgacaagaataaaaatgggaagaa

SEQ ID NO: 229625 - DNA, 374 bp, Gossypium hirsutum
atggccctgcggcagaccgtggaggccgatgtcaatggcctgcgccgggtgttggatgagctgaccctggccaggactgacctggagatgcagatcgaaggcctgaaggaggagctggcctacctgaggaagaaccatgaggaggagatgcttgctcttcgaggtcagagcggtggagatgtgaacgtggagatggatgctgcacctggcgtggacctgagccgcatcctgaatgagatgcgtgaccagtatgagcagatggcagagaaaaaccgcagagatgctgaggcctggttcctgagcaagaccgaggagctaaacaaagaagtggcctccaacagcgaactggtacagagcagccgcactgaggtgac

SEQ ID NO: 229626 - DNA, 373 bp, Gossypium hirsutum
agctttagtagtttacatttgctgattctcagaagttgtgttttttttttggggggtatagagaaatagatcatggcaaaagtagatgaaccacagccacatccaccaaaggagcagctgcccaacatttcttactgcattacaagtccacctccatggcccgaggccatccttcttggtttccaacattatcttgtgatgcttggaacgacagtgatcattccaacttcacttgttccccagatgggaggtggaaatgaggagaaagcaaaggttatccagactctactctttgttgctggtttgaacacattattgcagtcactgtttgggtctagattgcctgctgtgatcggagggtcttatacctttg

SEQ ID NO: 229627 - DNA, 321 bp, Gossypium hirsutum
cccacgcgtccgctatcttagaagcaaaccccaacactttcgttctcccacaccattgtgacgctgagaaaatttaccttgtcaccaacggaagaggaacgcttacgttcttgacacatgaaaacaaagagtcttacaatgtagtaccgggagttgtagtcagagtcccagcaggaagcactgtgtacttggctaaccaagacaacaaggaaaagctaatcatagcagtgcttcaccgccctgttaataaccctggacaattcgaggaattcttcccagctggaagccaacgccctcagtcatatctccgagcctttagtc

SEQ ID NO: 229628 - DNA, 383 bp, Gossypium hirsutum
atgccatcctgacccccaatgacggccgctgtcacctggaggacaacatgtacaagaggagcaacgagttcgactacccatcggtgggccagctggcgcacaagctggccgaaaacaacatccagcccatcttcgcggtgaccaggaagatggtgaagacgtatgagaaactcactgagatcatcccgaagtcagcagtgggggagctgtctgacgactccagcaatgtggtccagctcattaagaacgcttacaataaactctcctccagggtcttactggatcacaacgccctccccgacaccctgaaagtcacctatgactccttctgcagcaatggagtgaccctcaaggaccagtccagaggtgactgtgacggcgtg

SEQ ID NO: 229629 - DNA, 364 bp, Gossypium hirsutum
gtgaaaatggcaacccttaaggttccagctcatgtacctgccccttctgaggatgctgagcaacttcgtaaagcttttgaaggatggggtacaaatgagcaattgattatcgacatattggctcacaggaatgcagctcagcgcaatttgattcgtaaaacttatcgtgaagcttatggggaagatctccttaagtctttggatgaggaactttcaagtgactttgagcgagctgtggtgctgtttactttggaccctgcagagcgtgatgcatttctggctcatgaagctacaaagaggttcacatcaagccattgggttctcatggaaattgcttgcactaggtcttcacatgaactgttca

SEQ ID NO: 229630 - DNA, 390 bp, Gossypium hirsutum
atggcttgggtggtggcttgggtggtggctttggtggtggctttgctggtggtgatgggcttctggtgggcagtgagaaggtgaccatgcagaacctcaacgaccgcctggcctcctacctggacaaggtgcgtgctctggaggaggccaacgctgacctggaggtgaagatccgcgactggtaccagaggcagcggcccgctgagatcaaagactacagtccctacttcaagaccattgaggacctgaggaacaagattctcacggccacagtggacaatgccaacgtccttctgcagattgacaatgcccgtctggccgcggatgacttccgcaccaagtatgagacagagctgaacctgcgcatgagtgtggaggccgacatcaatg

SEQ ID NO: 229631 - DNA, 382 bp, Gossypium hirsutum
atgtccgtctgcagctgcgtgactgtctgtctctgacatgtctctctccccatgccgggcccagaggggcttcagctctcgctcagcctgttctgctcgctcaaggggctgcagcaggggaggcttcagcagcaggagccttaattcctttggggggtgcctgggaggctctcgtgggagtacctgggggtcagggggaaggctgggggtgcagtttggggagtggagtgctgggcctgggctctccctgtgccctccggggggcatccaagaagtgaccattaaccagaatctgctgaccccactgaagattgagatcgacccccagttccaggtggtgcggacgcaagagacccaggagatcaggaccctcaacaaccag

SEQ ID NO: 229632 - DNA, 385 bp, Gossypium hirsutum
atctccgctcccgtgagtaacttggctccgggggctccggtcgcctgcccgtacgccgccagccacccaggaccgcgccgccggcctccgccgcgagcaaacccttccgacggccttcgctgcgcaggccgggacgcctctcccccctccgcccccgccgcggaaagttaagtttgaagaggggggaagaggggaacatggacatgaagaggagaatccacctggaactgaggaaccggaccccggcagctgttcgagaacttgtcttggacaattgcaaatcaaatgatggaaaaattgagggcttaacagctgaatttgtgaacttagagttcctcagtttaataaatgtaggcttgatctcagtttcaaatctccccaagct

SEQ ID NO: 229633 - DNA, 371 bp, Gossypium hirsutum
attattttctccataccagcataaatcaacaatggcaaagctcgcagtttacttagccaccctggctctcattttgttccttgccaatgcttcaatcacatctgtgacggtcgaaagcgaggaaaaccgggatagctgtgaacagcagataaggaagcaagcccacctgaagcactgccagaagtacatggaggaagagtggggtggcgaaggcagcgacaatatagccggcgggtacattgactcatgttgccagcagctagagaagatggatacgcaatgcagatgtcaaggtctaagacatgcaacgatgcaacagatgcaacagatgcaagaacaaatggggagcaaacagatgcgagagatcatgc

SEQ ID NO: 229634 - DNA, 389 bp, Gossypium hirsutum
atccggagcgcatagacctcgcagacctcgccggcttcacactcacctcggtgtctgctgcacccgccgcttcttctcctaggccacgagacccagcggctagaaattcaccatgtctattctcaaggtccatgccagggaaatctttgactctcgtgggaatcccactgttgaggttgatctcttcacctcaaaaggtctcttcagagctgctgtgcccagtggtgcttcaactggtatctatgaggccctagaactccgggacaatgataagactcgctatatggggaagggtgtctcaaaggctgttgagcacatcaataaaactattgcgcctgccctggttagcaagaaactgaacgtcacagaacaagagaagattgacaaac

SEQ ID NO: 229635 - DNA, 383 bp, Gossypium hirsutum
atctctcctgttacagaagttctgatttttcctagagacctggaggaaagtgatttgccttgaaggaaactggggagtcagaaaattgggaactcatatcagcatggcaagcctactgaaaacactggtgactggctgctcgtgtcctttacttagcaatttggggtcctgtaagggtctacatgtgaagaaggattttttacgaacatttcatactcaccaagaactgtggtgtaaagcgcctgtaaaaccaggaattccatataagcaactgactgttggagtccccaaagagatattccaaaatgaaaagcgagtggcattgtctcctgctggcgttcagaccttggtcaagcagggttttaatgttgtcgtggaatctg

SEQ ID NO: 229636 - DNA, 370 bp, Gossypium hirsutum
cggacgcgtgggcggacgcgtgggagatgtttgagatgctgtgaaagacacctatttagatttagaaaacgctttacagatctttgagttaaaaataaaactctagaaggctaggtaaggggaaaaagaaattacttttattataattagatgatgtctctttggcaagaactagatcaatgctataatgatgaatgagagtgtaccgaagatagtgtaaaagctatgaaaaaagaggagaatgagcgaacttatttatttctcgctggtttaaataaagaatttgatgaagtgagatctcggatcctaggaaaaaatcgctttcaacactccgtgagatttttttttgaggttagaagagaggagacaa

SEQ ID NO: 229637 - DNA, 369 bp, Gossypium hirsutum
gtggcgccgggagtttcatgtacgagaacgtcgaccgtgtcccgccgtccgttgattggcgacagaaaggtgccgtcactgctgttaaggatcaaggccagtgtggtagttgctgggcattttcaacagttgtagcggttgagggaatcaatcaaattaaaaccaataaattagtatcattatcggagcaagaattgatagattgcgacactgaagaaaaccaaggttgcaatggtggtttaatggacattgcattcaatttcattaaaaagaaaggtgggatcactactgagtccaattacccttaccaagctaatgatggaagttgcgattctgccaaggtgaattctccggcagtggctatcgatg

SEQ ID NO: 229638 - DNA, 370 bp, Gossypium hirsutum
atggacaatgctgagataagagtccacacagttgaggattatcaggcaattgttgatgctgagtggaacattctctatgacaagttagagaagatccatcattctggagccaaagttgtcttgtccaaactccccattggggatgtggccacccagtactttgctgacagggacatgttctgtgctggccgagtacctgaggaggatctgaagaggacaatgatggcgtgtggaggcttaaatcagaccagtgtgaatgctctgtcagcagatgtgctgggtcgatgtcaggtgtttgaagagacccagattggaagcgagaggtacaatttttttactggcttgcccaaagccaagacatgtaccttca

SEQ ID NO: 229639 - DNA, 391 bp, Gossypium hirsutum
atcattaatccagccatgatggctgctgcccaggcagcactacagagcagttggggtatgatgggcatgttagccagccagcagaaccagtcaggcccatcgggtaataaccaaagccaaggcaacatgcagagggagccaaaccaggccttcggttctggaaataactcttatagtggttctaattctggtgcagcaattggttggggatcagcatcaaatgcagggtcgggcagtggttttaatggaggctttggctcaagcatggattctaagtcttctggctggggaatgtaggcagtggggttgtggttggtggtatagaatggtgggaattcaaatttttctaaactcatggtaagtatattgtaaaatacgtatgtactaagaa

SEQ ID NO: 229640 - DNA, 389 bp, Gossypium hirsutum
atgccctcttgcttctctgatagctcccagcttactctctgcagccatgattgccagacagcagtgtgtccgaggcgggtctcggggcttcagctgtggctcagccatcgtaggcagtggcaagagaggtgccttcagctcaatctccgtgtctggaggtgctggccgatgctcttctgggggctttggcagcaggagcctctacaacctcggggggaacaagagcatctccatgagcgtggctgggtcacgacaaggcgcctgctttggaggtgctggaggcttcggcactggtggctttggcggtggatttgggggctccttcagcggtaagggtggccctggcttccctgtctgccctgctgggggaattcaggaggtcactatca

SEQ ID NO: 229641 - DNA, 383 bp, Gossypium hirsutum
atcccggctgtcctacagtcctcaaggctctactccctgagcgggatggtgaccgtgccctccagcatcttgggcacccagacctacgtctgcaacgtaaaccacaagcccagcaacaccaaggtggacaagagagttgagataaaaacatgtggtggtggcagcaaacctcccacgtgcccaccgtgcccagcacctgaacttctggggggaccgtcagtcttcctcttccccccaaaacccaaagacaccctcatgatctcccggacccctgaggtcacatgcgtggtggtagacgtgagccaggaagaccccgatgtcaagttcaactggtacgtaaacggcgcggaggtgcatcatgcccagacgaagccacgggagac

SEQ ID NO: 229642 - DNA, 361 bp, Gossypium hirsutum
caatctcatctctctcctttggtttcccttttgtctctctctctctttttccaaccctaaccctacctcaccaaccaggattcaacatgaagggaggaaaatccaagtcagatactaagagtgccaagctatccgtgaaatccaaagctggaaagaaatcggggaaggctgccaaggatccaaacaagccaaagaggcctgctagtgccttctttgttttcatggaggagttccgtgagcaatacaagaaggatcaccctaaaaacaaatccgttgcggctgtcggcaaagctggtggagataaatggaagagcttgtctgaagctgaaaaggcaccttatgtagctaaggcagaaaagcg

SEQ ID NO: 229643 - DNA, 354 bp, Gossypium hirsutum
atcggtcctacgcccgatcgcgcgctcgccccgccgctcgtggcggagtcccagggcccctcgcagccgccaccatggacgccatcaagaagaagatgcagatgctgaagctcgacaaggagaacgccttggatcgagctgagcaagcggaggccgacaagaaggcggcggaagacaggagcaagcagctggaagatgagctggtgtcactgcaaaagaaactcaagggcaccgaagatgaactggacaaatactctgaggctctcaaagatgcccaggagaagctggagctggcagagaaaaaggccaccgacgctgaagccgatgtagcttctctgaacagacgcatccagc

SEQ ID NO: 229644 - DNA, 368 bp, Gossypium hirsutum
cggacgcgtgggttcgatagaagcttgccaacccgtgaaaactcctcacttggctgatgttcgttggacacggccattcgttgatcgccttgaccttttcttggtcaacttctaatccacgagcacttaccacaaagcctagaaaaacaacttcattagtgcaaaaagaacatttctttaaattggcataaagtacctcttttcgcaagacttcaagcacggcacgtagatgttgaatatgatcttccaagctcttgctatagactaaaattccctatgaacgaacgtaaaacataattcatgagacgcatgaaagtactaggagcgttggtaagtccgaatggctttaccaaccattcatacaaacc

SEQ ID NO: 229645 - DNA, 388 bp, Gossypium hirsutum
atctggagtgctgctggaaacgcgttctgccaggctgcgcagctgcacctgcagctccagagcaagcacgacgcagccacctgctttgtggacgccggcaacgcattcaagaaagctgacccccaagaggccattaactgtttgatgcgagcaatcgagatctacacagacatgggccgattcacgattgcggccaagcaccacatctgcattgctgagatctatgagacggagttggtagacatcgagaaggccatcgcccactacgagcagtccgcagactactacaaaggcgaagagtccaacagctcagccaacaagtgtctgctgaaggtggctggctacgccgcactgttggagcagtatcagaaagccattgacatctacg

SEQ ID NO: 229646 - DNA, 314 bp, Gossypium hirsutum
attgacaatgcccgtctggccgcggatgacttccgcacgaagtatgagacagagctgaacctgcgcatgagtgtggaggccgacatcaatggcctgcgcagggtgctggatgaactgaccctggccagagctgacctggagatgcagattgagagcctgaaggaggagctggcctacctgaaaaagaaccacgaggaggagatgaatgccctgagaggccaggtgggtggagatgtcaacgtggagatggacgctgcacctggcgtggacctgagccgcatcctgaacgagatgcgtgaccagtatgagaagat

SEQ ID NO: 229647 - DNA, 362 bp, Gossypium hirsutum
cttctttagatcaaacagcaataaccttcaatgcacgtggggatgtaatttatgctatcctgaggagaaatcttgaagatgtgatgtcagcagttaatacccgtcgcgtgaaacatcctttatttgctgctttccgcacattagatgccattaactactctgatattgcaactattccagtggatcgatgtgttcttgactttgcaactgaaccaactgattcctttgttgggttgattacaatggatgaccaagaagagatgttttcatcagccagggtttatgaaattggtcgccgaaggccgactgatgatgattctgatcctgatgatgcagaaagtgatgaggacgaggatgacgac

SEQ ID NO: 229648 - DNA, 367 bp, Gossypium hirsutum
aactttcccatgtgggctacgacctgggtggcgggcgcatctacaagcccctgcggacccgggatgagctggaccagttcctggacaagatggacgaccctgattactggcgcactgtgcaggacccgatgacagggcaggacctgaggctgacagatgagcaggtggccctggtgcggcggctgcagagtggccagtttggggacatgggcttcaacccctatgagccggctgtcgacttcttcagcggggacgtcatgatccacccggtgaccaaccgcccggccgacaagcgcagcttcatcccctccctggtggagaaggagaaggtctctcgcatggtgcacgccatcaagatgggctggat

SEQ ID NO: 229649 - DNA, 384 bp, Gossypium hirsutum
atgcaagaattccctggattgtgaaatagtcagtgccaaatcttccgagatgaatgtcctcattcctacagaaggcggtgactttaatgaattcccagttcctgagcagttcaagaccctctggaatgggcagaagttggtcaccacagtgacagaaattgctggataagcgaagtgccactgggttctttgccctcccttcacaccatgggataaatctgtatcaagacggttcttttctagatttcctctacctttctgctcttaaaactgcttctctgctctgagaagcacagctacctgccttcactgaaatatacctcaggctgaaatttggggtgggatagcaggtcagttgatcttctgcaggaaggtgcagctttt

SEQ ID NO: 229650 - DNA, 384 bp, Gossypium hirsutum
atgtttctccaggctggaccagtagtcaacacccacatgccaaaggatagagtcactggccagcaccaaggctatggctttgtggaattcttgagtgaggaagatgctgactatgccattaagatcatgaacatgatcaaactctatgggaagccaatacgggtgaacaaagcatcagcccacaacaaaaacctggatgtaggggccaacattttcattgggaacctggaccctgagattgatgagaagttgctttatgatactttcagcgcttttggggtcatcttacaaacccccaagattatgcgggaccctgacacaggcaactccaaaggttatgcctttattaatttgcttcatttgatgcttcggatgcagcaattg

SEQ ID NO: 229651 - DNA, 376 bp, Gossypium hirsutum
atgtttctccaggctggaccagtagtcaacacccgggtggcaaaggatagagtcactggccagcaccaaggctatggctttgtggaattcttgagtgaggaagatgctgactatgccattaagatcatgaacatgatcaaactctatgggaagccaatacgggtgaacaaagcatcagcccacaacaaaaacctggatgtaggggccaacattttcattgggaacctggaccctgagattgatgagaagttgctttatgatactttcagcgcttttggggtcatcttacaaacccccaagattatgcgggaccctgacacaggcaacttcaaaggttatgcctttattaatttgcttcatttgatgcttcggatgc

SEQ ID NO: 229652 - DNA, 362 bp, Gossypium hirsutum
tacctagtggccctggcaaccagacagaagatgaagttcccctcctacaaaacatatattggaaagagttatcgtcgctcgtgtatgtatggattggttttcttattgtgcagatcattaaggaatatcttccaacttgctcagtcatgtactggattgtgacctccttgcagatacccattgctgcctctgtgacaatctttgaagccatatgcttatgcaaagggaccagagtgattgcatccaaaggaaaggaaatcacaaactggaagatgcatcggattcttctttattgttcctgtggcataatagctggtatggtaggagggctgctaggactaggaggtggcttcatcttgggt

SEQ ID NO: 229653 - DNA, 362 bp, Gossypium hirsutum
  unsure (1)..(362): unsure at all n locations
cagaaggtgaatagcatcattagagatgccattgattttaaatgtgtcgcagaattccaaaaaattcgccaagtgggtgtttgggtcctcatcctgcaaaccatcaaactgaacaaattgctgtatcatttgaatcatgttaggtttcagtttaaaattatttgtagcaatagcaggcctaactatacttgactcagttcctgttaaattcggtttagcataatcatacatagtgcgtggagcatgattctgatttactggatcagcggcaatcgcaggaggtagtgaattttcatgattttcagccatctcctcggttgtggtttgaatatcngcctcttgctcttcctctgtgtatttta

SEQ ID NO: 229654 - DNA, 386 bp, Gossypium hirsutum
atctcggcgcgactcgcttcattcggttctacctgggagaatccaccgccatccgccaccatggtgaacttcacggtagaccagatccgcgccatcatggacaagaaggccaacatccgaaacatgtctgtcatcgcccacgtggaccacggcaagtccacgctgacagactccctggtgtgcaaggcgggcatcatcgcctcggcccgggccggggagacacgcttcactgacacccggaaggatgagcaggagcgttgcatcaccatcaagtcaactgccatctccctcttctacgagctctcggagaatgacttgaacttcatcaagcagagcaagggacggcgccggcttcctcattaacctcatcgactcccccgggcacg

SEQ ID NO: 229655 - DNA, 368 bp, Gossypium hirsutum
tacctaatggacatggcgggcgggcagaacatgaagttccgctactacaaaacatatataggatcgcgtgctttgctgcacagtacgttctgataactctctttctttctaaattgcctacagactccaagaatgaaaaggctctgggccgcataataaactcctgggaattatcaaggtgtgggcattcattcctgagcaacttgcacttgacgaatggcgaactggtcatgcaagaaatggggatttactacatggtattccaaacatactatgaatttcaggaggatgtctaggactacacaaagaacggcaagcacatggcccaatatatttacaaatacacaagttatcctgaccatatactg

SEQ ID NO: 229656 - DNA, 372 bp, Gossypium hirsutum
  unsure (1)..(372): unsure at all n locations
gcgcgccacgcgttcggaacttttctgcattcgttatgcatcactggaaaattgcaaaacctttatgcaaatgttccaagaagttgctgaatcacaaaaaccaaaagaggaaaacaaggatgcatctgatgctgctggacaacttgagaagttgagctttcaagagaaagctggagagaaggctgttgctaagaaggaagagaaggaaacaaaagtggatacagaaaaagcagatacagagaacaaagatggggagccagcttcctcaacttgaaaagagtttggctctgttcttcatgccattggcttttggcgaatatggtgagattagtcagctgatcaacctnctcacccatgtctaggatattccta

SEQ ID NO: 229657 - DNA, 367 bp, Gossypium hirsutum
gtgctcaaaagattatttatcaagtgggccaaaagcgaggtaggttgaccattgatgaagaggatgatcaacccaagaagaaggttcgtcttggtgttcctgctacacagtggatttcaatctacaatgcaagacttccaatgaagcagaggtatcattacaatgtggcagatgcaaggttggcccaacacgtggagaaaggaatggcagatggtctgctaataagctgtgtggcatcttataccaatctttgggcattaattatggatgctggaactggtttcacaagccaagtttatgagctttcaccttccttcttacacaaggagtggatcatggatcagtgggagaagaactattacattag

SEQ ID NO: 229658 - DNA, 329 bp, Gossypium hirsutum
attgccgccgtcccgcccgccagcgccctagcgaggaagcagcgcgcagcccgcggcccagcgcacccgcagcagcgcccgcagctcgcccgcgccatgttccaggcggccgagcgcccccaggagtgggccatggagggtccccgcgacgggctgaagaaggaacgactgctggacgaccgccacgacagcggcctggactccatgaaggatgaggagtacgagcagatggtcaaggagctgcaggagatccgcctcgagccgcatgaggtgccgcgcggcgcggagccctggaagcagcagctcaccgaggacgggggactcggttc

SEQ ID NO: 229659 - DNA, 316 bp, Gossypium hirsutum
gatcattcgctgctctcttcgatctcaaggactgccggtggcagcaatagagccagttcccgagagttgcgtgtcctctgtagaggagagaacgatggaggaaagggaaaggtggtggaagatgggattgaaggctatatcggaaggcaaattggctgttttgcttctatccggtggccaggggactcggcttggaagttcagatcccaagggatgtttcaacattggacttccttctgggaagtcactttttcaactgcaagctgagcggattttgtgtgttcaaagattagccgcacaagctaaaaatgagggc

SEQ ID NO: 229660 - DNA, 316 bp, Gossypium hirsutum
gacgcggagaaaatttacgttgtcactaacggaagaggaacagttacgttcgtgacacatgaaaacaaagagtcatacaatgtagttcctggagttgtagtaagaattccagcaggaagcactgtgtacttggccaaccaagacaacagggaaaagctaaccatagcagtgctccaccgacctgtcaataaccctggacaattccagaaattcttccctgctggacaggaaaatcctcagtcatacttacgaatcttcagccgtgaaattcttgaggctgtcttcaatacacgaagtgagcagctagacgagctgt

SEQ ID NO: 229661 - DNA, 383 bp, Gossypium hirsutum
atggagtttgagactagcctgagcaacaaagtaagactcctcatgtcaacagaaaatgtaataaaataaataaaaagaatagtcccagtatcaaatgttcagactcatctcactttcttaggatcttaagattgaaagtgatgttcaagaaccaactgaaccagaggatgaccttgacattatgcttggcaataaaaagaagaaaaagaagaatgttaagttcccagatgaggatgaaatactagagaaagatgaagctctagaagatgaagacagcaaaaaagatgatggtatctcattcagtaatcagacaggccctgcttgggcaggctcagaaagagactacacatacgaagagctgctgaatcgagtattcaacatca

SEQ ID NO: 229662 - DNA, 227 bp, Gossypium hirsutum
ctcccattttcttatatctcgaaaccccataaaccaaaggatcgaacccatttcagattgtattcaatggcatcatcggacttgaaagaatcagctgccaataaccctgggcttcatactacccctgatgaagctaccaaagactacatcatgcagcaaactatgtttcgaattaaagatccaaaagccagtcttgatttttactctcgtgtgttgggcatgtcgct

SEQ ID NO: 229663 - DNA, 284 bp, Gossypium hirsutum
catcatccttggcatggatgtgtctcatggctctcctgggcagtctgatattccatcaattgctgcggtggtcagctcccggcagtggcctttgatttcccgctatagagcatctgtgcgtacacaatctcctaagcttgaaatgatagattctctattcaaaaaagtctctgacaaggaggatgaaggtatcatgagggaggttctcttggacttttatacaagttcaggaaagaggaagcctgatcaaattatcatattcagggatggagttagcgagtcgc

SEQ ID NO: 229664 - DNA, 264 bp, Gossypium hirsutum
ggcttgcaggctttcagaggaaggtttttgatgtcttatacaaggttgctgacattcctttcttaagcaaatacaagcatcaaattctcgatcttattgagcatgctgagacacagccgaacctcaccattggtgtcttggtctctattgtggtgattattctcacgattttcttcaagctcatttttggtgggaagaaacagccaagagtagagaagaaaccagaggttgctaaaacatcaaatggtgaaggaaagcagggag

SEQ ID NO: 229665 - DNA, 279 bp, Gossypium hirsutum
atgcctaccgcgcgaggacgtgatccgcctctgctccggcttggattgcagccttgacgaggtctgagcgaccatggacgggccggggttcatggcgtcgctggtggctggtggggtagcaggtgtttctgttgacttgatattatttcctctggataccattaaaaccaggctgcagagtccccaaggatttaataaggctggtggttttcgtggaatatatgctggtgttccttctgctgctgttggatcccttcctaatgctgctgcatttttatc

SEQ ID NO: 229666 - DNA, 347 bp, Gossypium hirsutum
caaaattagattaattaactggagaaaggcgttaatgaatttgcacaggtttaactcacccatcagagtcagttacaactacatggatatttctatgatgatattgtcaaattataacttgaaacacggatcatatcttacccaatcttgaaggcatacataatcctcttcaggtcggtattttgtattgttcttcccagtaacgatctctaatgcaacaatcccaaaactataaacgtttgccttgaaggtgagatagccccataatgcatattcaggggccatgtatcctctgcaaaaaatggagctttaagcgcaacattctcatgcatatcaacttcgttcac

SEQ ID NO: 229667 - DNA, 351 bp, Gossypium hirsutum
ctcaattctcaaaaccctaatttctctgctttcccttttgcttaatcaatcgatccttgtcaatggccaacagtaatctccctcgaagaatcatcaaggaaactcagcgtctcctcagtgaacctgcacctggaattagtgcttcaccatcagaggataacatgcgatatttcaatgtgatgatccttggtccaacacagtcaccatatgaaggtggggttttcaagttggaactatttttgcctgaagaatatcccatggctgctcccaaggttcgatttcttacaaagatatatcatcctaacattgacaagcttggaagaatatgccttgatattctcaaagacaaat

SEQ ID NO: 229668 - DNA, 255 bp, Gossypium hirsutum
atcacaaatgtagtaagtgcagcaattcatatggtacagaatgggacctgaaaagacacacagaggactgtggcaagacctttcggtgcacatgcggctgtccctacgccagtagaacagcattgcagtcccacatctaccgaacgggccacgagatccctgcagaacacagggacccacctagtaagaaaaggaaaatggaaaactgtatgcaaaaccagaagttatccaacaagaccattgaatcattgaaca

SEQ ID NO: 229669 - DNA, 341 bp, Gossypium hirsutum
atgtgctccttgcttcctccgctttcttccgagtggtcgcgtgaacggcttcctgcagcctggccatggcgcttcacgttcccaaggctccgggctttgcccagatgctcaaggagggagcgaaacacttttcaggattagaagaggctgtgtatagaaatatacaagcttgcaaggagcttgcccaaaccactcgtacagcatatggaccaaatggaatgaacaaaatggttatcaaccacttggagaagttgtttgtgacaaatgatgcagcgactattttaagagaactagaagtacagcatcctgctgcaaaaatgattggaatggcttctcatatg

SEQ ID NO: 229670 - DNA, 391 bp, Gossypium hirsutum; identical to SEQ ID NO: 199248

SEQ ID NO: 229671 - DNA, 298 bp, Gossypium hirsutum
ggtaaaaatacaaggattgttaaccaaggaaaataattcgtggtaaagacaagatacacttggaccagaaaaacccgtgctcaaaaaaaacctttttgagcacgggttttttcagtaaaaaaaatcaaatggattcaaaatgtattcaactagggttttctggaccgtatcaataagctagacccatacttcgagttgtttcatgccataaataaactcgaacgctcaagatatccgttggaaaagcggattcacatctcttacaaccaacacaatcttctgtttttggaggggaagc

SEQ ID NO: 229672 - DNA, 329 bp, Gossypium hirsutum
atgccggcagagacccaccgagcgtcggcggagggagcggcgccggggcgcacgcggccaccatgacccagacgcccgccttcgacaagcccaaagtggaactgcacgtccacctagacggagccatcaagcctgaaaccatcttatactatggcaggaggagagggatcgccctcccagctaacacagcagaggggctgctgaacgtcattggcatggacaagccgctcaccctgccggaattcctggccaagtttgactactacatgcctgctattgcgggctgccgggaggctatcaaaaggatcgcctacgagtttatagagatg

SEQ ID NO: 229673 - DNA, 211 bp, Gossypium hirsutum
atgaaaaaagttgagaagtctgtcaatgaagtgatggaatggatgaataatgtcatgaatgctcaggctaaaaagagtcttgatcaggatccagttgtacgtgctcaggagattaaaataaaaatcaaggaattgaacaacacatgtgaacctgttgtatcacatccgagaccaaaaattgaatcacccaagctggaaagaactccaaatg

SEQ ID NO: 229674 - DNA, 360 bp, Gossypium hirsutum
aaatctccctaatgaaaggcaagaggaagctaaaagactcctcactcgttgccttgatattggaatctctgctcttcgttctaacctctccgccattgacgtcgttgaacttgtcgtgagggaattggaaacggatcctttgtttaattccgggcgtggatcagcacttacggagaaagggacggtggaaatggaagctagtattatggatggaccgaagagacgatgcggtgctgtttcgggtttaacgacggtgaagaatccgatatctcttgctcgacttgttatggataaaacaccacattcgtatttgggttttgcccgcgccgaaaaagttgcgaggaaacaaggtgtggaagt

SEQ ID NO: 229675 - DNA, 297 bp, Gossypium hirsutum
ggcgattaacccttgtttgctctttctttcccttctttttctcttcaatggctgcctagctcgccagaccttttcgtcacagcagtcccaaaatgagtgtcaaatcaataggctccgcgcctctgcaccccagacccgaattcgctccgaagccggcaccaccgagtggtggaaccccaactgtcaacagctcaggtgtgctggtgtatctgtaatgaggcagactattgaacctaatggccttgttttgccttccttcaccaatgctcctcagcttttctacattgtccaaggaag

SEQ ID NO: 229676 - DNA, 325 bp, Gossypium hirsutum
aagctttcaacgttgaccacgacatcattaggaaaatccaacgtgtacgaggaaatagaggcaccatcatcagagtcagggacagactccaagtcgtaacaccacccagaatggaggaagaagaacgtgaggagcgccagcaggagcagcgataccgccatacgagaggagggtctcaagataatggcctcgaggaaactttctgctccatgaggatcaaggagaaccttgctgaccctgaacgtgccgacattttcaacccacaagccggtcgtatttccaccctcaacaggtttaacctccccatcctccaacgacttgagct

SEQ ID NO: 229677 - DNA, 335 bp, Gossypium hirsutum
atgaaatgtggggccaaacctgcggggtccggcctggtgtcctgccttctgggcccagccctggggcctgtgcccccagaggcctacaggggcaccatgctgcactgcccgctgaacttcactggcaccccaggccccttgaagggccaggctgcactccccttcagccccctggtcatcccagccttcccagcccacttcctggccactgcgggcccctcacccatggctgctggcttgatgcacttcccgcccacgtccttcgacagtgctctccgccacagactttgcccggcctcatctgcctggcatgcaccaccagtcacaacctatgc

SEQ ID NO: 229678 - DNA, 305 bp, Gossypium hirsutum
cccacgcgtccggtgatggaaggtatttcagcgaccatgtacaagaacttgaaagggtactggcaaaggagaggctacatcaagctaaatggtacgaaaggaggaggacggcggagcaaggtggagcttgggtcgtcgcgacggaggcgattctggaagataagggtgaaagcgaagctgagattaccttcgcccaagaagttctttgtttggctacgtgatgcgtacgtgaaaatgatgctggagttggctaactacgcgatggttagtaccggctacggtggagctatgggggaccatcatgg

SEQ ID NO: 229679 - DNA, 300 bp, Gossypium hirsutum
gtaatcatggtgaggaacaagtcagttttcgtaggtttgctcttttctcttttcctttcctttggcttgctttgctctgccaaagacttccccggcagaagaagcgaggatgatcctcaacagaggtacgaggactgccggaagcgatgccaattggagacacgtggacaaacggagcaagacatgtgtgaagacaggtgtgaaacgcagttgaaggaggagcagcagcgtgacggagaagatcctcagaggagataccaggattgccgacaacactcccaacaggaagaaagaaggctg

SEQ ID NO: 229680 - DNA, 383 bp, Gossypium hirsutum
cggacgcgtggggcagacacacactctcattctctctctgtatttcctttgtctctttaatggctactttcttcttcttcctcctctccttccttatctgctttcacttctcaagtgctgagccgtttattggagtgaactacggccaagtggcggacaacttaccgccgccatcagccaccgcgaagcttctaaaatcgacgtcgattgagaaagttagattgtacggagcggatccggcgattatcaaagctttggctaataccgaaattgggatcgtaatcggagcagctaatggagatattccttctttggcttccgatccaaactcagcagctcagtggattaactccaacgtgttgcctttttaccctgttagcaaa

SEQ ID NO: 229681 - DNA, 283 bp, Gossypium hirsutum
attgaggagattgctcagaggagccgggctgaggccgagtcctggtaccagaccaagtacgaggagctgcagatcacagcgggcagacatggggatgacctgcgcaacaccaagcaggagattgctgagatcaaccgcatgatccagaggctgagatctgagatcgaccacgtcaagaagcagtgtgccagcctgcaggccgccattgctgatgctgagcagcgtggggaaatggcactcaaggatgccaagaacaagctggaagggctggaggatgccctgc

SEQ ID NO: 229682 - DNA, 294 bp, Gossypium hirsutum
agctcgcagtttacttagccaccctggctctcattttgttccttgccaatgcttcaatcacatctgtgacggtcgaaagcgaggaaaaccgggatagctgtgaacagcagataaggaagcaagcccacctgaagcactgccagaagtacatggaggaagagtggggtggcgaaggcagcgacaatatagccggcgggtacattgactcatgttgccagcagctagagaagatggatacgcaatgcagatgtcaaggtctaagacatgcaacgatgcaacagatgcaacagatgc

SEQ ID NO: 229683 - DNA, 371 bp, Gossypium hirsutum
atgattttggcatcaagaactaacaaagaaatcagagacattaacagggtctacagagaggaactgaagagagatctggccaaagacataacttcagacacatctggagattttcggaacgctttgcttcctcttgctaagggtgaccgatctgaggactttggtgtgaatgaagacttggctgattcagatgccagggccttgtatgaagcgggagaaaggagaaaggggacagatgtaaacgtgttcaataccatccttaccacccgaagctatccacatcttcgcagagtgtttcagaaatacaccaagtacagtaagcatgacatgaacaaagttctgggacctgggagtgaaagtgacatttgaga

SEQ ID NO: 229684 - DNA, 334 bp, Gossypium hirsutum
cccacgcgtccgggggttctcaaaatccttgaccctagactgtcttcggttcccctccacgaggtaatgcatgtattctacgttgcgatgctctgcgttgaagaacaagctgtagagagaccaacaatgagagaagtggttcaaattctaacagaggttcctaaaccacccagctcaaagcagcagcagggagactccgcaatcactgagtcctcaccaatatcacaacccacaactctagagtctcctagagatgcaacaacaaaggaaccaaaagaccaacacactccaccacctgatcttcttagcatttaaagtggggtttttttttttt

SEQ ID NO: 229685 - DNA, 354 bp, Gossypium hirsutum
atccggtccaggctttacagaagggaagaactggtaacttgacagcaggctctctggagtccacggaacccatatacgtctacaaagcacaaggtgcaggagtcacgccgcctccaacgccctcgggcagccgcaccaagcagaggcttccaggccagaagccttttaagaggtccctgcgaggttcagatgctttgagtgagaccagctcagccagccacattgaagacttagaaaaggtggagcgcctgtccggtgggccggagcagatcaccctcgaggccagcagcactgagggacacccaggggctcccagccctcagcacgccagccggagcgaggccttccagaaag

SEQ ID NO: 229686 - DNA, 316 bp, Gossypium hirsutum
attctgcctctcaatcttggataggagtctgaatttccgccgtgaccctgctactgatgtggcccgcagaaatgaccccaaatatgttggccgggtgctgagtgccatgatcaatagcaatgatgacaacggtgtgcttgctgggaattggagcggcacttacacgggtggtcgtgacccaaggaactggaacggcagcgtggagatcctcaaggactggaaaaaatctggctttagcccagtccgatatggccagtgctgggtctttgctgggaccctcaacacagcgctgcggtcttgggggaattcttccggg

SEQ ID NO: 229687 - DNA, 283 bp, Gossypium hirsutum
aaaactgcaaagatgtcatcatcaacagcggccaatcaagtgagggcatctcacatactcatcaagcaccaaggctctcgtcgtaaggcttcttggaaggatccagaaggtcgcgtcatctccaccaccacccgagacgccgctgtctcacagcttaaacttctccgcgacgacatcgtttccaacaaggctaagttcgacgaggttgcctctcgctactccgattgcagctccgctaaacgtggcggtgatctcggtccttttggtcgaggccagatgcaaa

SEQ ID NO: 229688 - DNA, 347 bp, Gossypium hirsutum
atcggtcccggagccagtggccgcacccgtgcgggtagcgcctctgccaccgctcaccatgggcccgggtcctcggctgctgctacctctcttgctttgcgtggggctcggcgcgcttgtgtcttcttcgggggccgggggcttccgcatgcgaggcccctctgtgacagccaaggttttctctgatgtgaggattggagacagagatgatggcagaattgtgatttggcctctttggaaaagttgtgcccaagacggtagaaaattttggtgctctagcaacaggagagaaaggatatggatttaaagggagcctgcgtcattgtgtcaccaaaggatttcatgat

SEQ ID NO: 229689 - DNA, 372 bp, Gossypium hirsutum
atcaattctggcgtgtaaccttttggccgttaattcccgagataagcactccagaactccatacatttagcagtatgggccagacaagcgcaggtagtgagttatctttgcaagcaaaaggctgatgttggtgctgctgccatggatggcatgggtgcgattcattttgtagcgcagaaaggacatctagaggttgtctgaactctgctttcatcaggagtttcagtgagagccactaatcgtaagggattcactccacttcactatgctgttcaagggtcccatctagaaggaattaaagtcttattaaagaaaggtgcaagtggctagcaatttgatgggagagggtgatcagttaatgcaacgcttaca

SEQ ID NO: 229690 - DNA, 292 bp, Gossypium hirsutum
atgcctgaggagccattttgagcaatggggaacgctcacggactgggtggtaatgagagatccaaacaccaagcgttccaggggctttgggtttgtcacatatgccactgtggaggaggtggatgcagctatgaatgcaaggccacacaaggtggacggaagagttgtggaaccaaagagagctgtctcaagagaagattctcaaagaccaggtgcccacttaactgtgaaaaagatatttgttggtggcgttttagaagacaccgcagaacatcacctaagagattatttt

SEQ ID NO: 229691 - DNA, 406 bp, Gossypium hirsutum
atccaccatggaggcccagaccacactgaccacaaatgacattgtcattagcaagcttacccagatcctttcatacctgaggcagggaacccgtaacaagaagcttaagaagaaggataaagggaagctagaagagaagaaacctcctgaggctgacatgaatatttttgaagacattggggattacgtaccctccacaaccaagacacctcgggacaaggagcgggagagatatcgggaacgggagcgtgatcgggagagagacagagaccgtgaccgagagcgagagagagaacgagatcgagaacgagagcgagagcgggacccggagagagaagaggaaaagaagagacacagctactttgagaagccaaagtagatgatgagcccatggatgttgacaaag

SEQ ID NO: 229692 - DNA, 286 bp, Gossypium hirsutum
atccagaggcagcggcccgctgagatcaaagactacagtccctacttcaagaccattgaggacctgaggaacaagattctcacggccacagtggacaatgccaacgtccttctgcagattgacaatgcccgtctggccgcggatgacttccgcaccaagtatgagacagagctgaacctgcgcatgagtgtggaggccgacatcaatggcctgcgcagggtgctggatgaactgaccctggccagagctgacctggagatgcagattgagagcctgaaggaggagc

SEQ ID NO: 229693 - DNA, 284 bp, Gossypium hirsutum
agaggttgaaaagcattgggatgattgatagtgtgccagggatgaaggcactggatatgaatacagctgaggatgctatagtgaggctgactagggaaattgtgcctgggatgattgtcaccgggatggaagttgctgagattgatggatccccaagaatggggccaacatttggagcaatgatgatatcagggcaaaaggcagcccatcttgccctgaaatcattaggattgcctaatgcaattgatggaacacatgtgggaaccattcacccggagcttatc

SEQ ID NO: 229694 - DNA, 317 bp, Gossypium hirsutum
atgagatttacgaatgaaagccgaagattatgaagtagtgaaggtgattggtagaggtgcatttggagaagttcaattggtaaggcataaatccaccaggaaggtatatgctatgaagcttctcagcaaatttgaaatgattaagagatctgattctgcttttttctgggaagaaagggacatcatggcttttgctaatagtccgtgggttgttcagcttttttatgcattccaagatgatcgttatctctacatggtgatggaatacatgcctggtggagatcttgtaaacttaatgagcaactatgatgtgcctg

SEQ ID NO: 229695 - DNA, 285 bp, Gossypium hirsutum
cccacgcgtccgacttaatttccatttactagcaatttcttcaagttcttttctttgtttttttaatcaatggctgaccactacctccaaaacactcaaccaatgactcaccaaatggtgaaagccgctactgccgcaacagccggtggttccctcctcattctctccggtttaatcctagctggcaccgttattgcgctcaccatagccactccactcttcgttattttcagtccagttcttgtccctgctctcattgcaacagctctcctagcaacgggtttc

SEQ ID NO: 229696 - DNA, 388 bp, Gossypium hirsutum
cgtggaccctgttcctacgtctatagatgctggatttaatcaatcagataatgcccccttgtacttcaattcagaccagggaagtaactcgatcaattgttccgactatggctggggagaacagggtgccaaaactcctgaaatatcatccattcttgaagcttctgtagagggtgatgagtttcttgaggatgctaaccctagcaagaagctgaaaccaagttccgacaatgttatgcctgccgaagacaactccgcgaagaccttgtcggacgagctgttggctttggacaaccagatgaaatacttccaaatgccgccatttattgaaggaaactgggacgccactattgatgctttcctcaatggagatgcaacacaggatggg

SEQ ID NO: 229697 - DNA, 295 bp, Gossypium hirsutum
aaataatttgtaatctacagtgatgctttattgaccagtttgggatgtgttgtgatgcaacaacattggcctttcccggatgataatcgataacaagctcgtaatcttttagcaattctagccatcttctctgtcgcaggttcaaatctttccgagttatcaagtatttcaaacttttatgattagaataaacgtgacatttctcaccaaatagatagtggcgccaaatcttcaaagcaaatacaatatccgccaattctagatcgtgtgtcaaatagttctttttatgctactt

SEQ ID NO: 229698 - DNA, 352 bp, Gossypium hirsutum
cggacgcgtgggggctgaagctcagtcaaagtgctgtcttaaaaccctagttttcgagctctctttcagttttccggaatccatgtgaaggagaaaggttagggagcccaaggaggagaatactaaccttggacctgctgttcgagagggtgagcatgtttttggggtggctcacatttttgcttcattcaatgacacatttattcacgtgactgatttgtctggaagggaaacaatggttcgaatcactggtggtatgaaggtgaaagctgatagggatgagtcttccccttatgcggccatgcttgcggcacaagatgtttctcaacgctgcaaggagttgggtattact

SEQ ID NO: 229699 - DNA, 314 bp, Gossypium hirsutum
cgccgttctaaatcacagaaagctttgaagaagaagcttttggaggtgcaaaacatggggccgaagaaaggtggaaaggtggctgtgcccgccaagaagaaacaagagaaggttgtcaatccgttatttgagaagcgtccaaagcagttcggcattggaggggctttacctcctaagaaggatttgcatcgattcgtgaagtggcctaaggttgttcgtattcaaaggaagaagaggatcctcaagcagaggttgaaggttccaccagcattgaaccagttcaccaagactcttgacaagaacctcgcaacaag

SEQ ID NO: 229700 - DNA, 376 bp, Gossypium hirsutum
  unsure (1)..(376): unsure at all n locations
atggagctgcaggtcacagcgggcagacatggggatgacctgcgcaacaccaagcaggagattgctgagatcaaccgcatgatccagaggctgagatccgagatcgaccacgtcaagaagcagtgtgccaacctgcaggctgccattgctgatgctgagcagcgtggggagatggcactcaaggatgccaagaacaagctggaagggctggaggatgccctgcagaaggccaagcaggacctggcccgactgctgaaagagtaccaggagctgatgaatgtcaagctggccttggacgtggagatcgccacctatcgcaagctgctggagggcgaggagtgcangctgaatggcgaaggcgttggacaagtcaaca

SEQ ID NO: 229701 - DNA, 384 bp, Gossypium hirsutum
atcggcgagggcgagagcggccccatgggcaacatcatgatcgatcctgtcctcggtaccgtgggcttcgggtctggtctccatgggtgggccttcaccctgaagcagtttgcggagatgtacgtggccaagtttgctgccaaaggggagggccagttggggcctgccgagcgggccaaaaaagtggaggacatgatgaagaagctgtggggtgacaggtactttgacccagccaacggcaagttcagcaagtcagccaccagccccgatgggaagaagctgccacgcaccttctgccagttgatcctggaccccatcttcaaggtgtttgatgccatcatgaatttcaagaaagaggagacagcaaaactgatagagaaactg

SEQ ID NO: 229702 - DNA, 372 bp, Gossypium hirsutum
atctcagctgtaggtctgttggagattgcttgaggtccactctagaccctgtttgcctgggtatcagcagcggaggttgcagaagataaaatattgctgaacagcgagtgttcctgtctgattcttgttctggaagcttcatcaggggtgtaccccaccgtgtgaggtgtgggatgttggtctgcacctagtgtgggctgtctcccagttagtctactcaggggtcagggacccacttgagcaggcagtctgtccgttctcagatctcaacctctgtgttgggagatccaccgctctcttcaaagctgtcagacagggtcatttgcatctgaagaggtttcagctgcttttttgttagctatgccctgtccc

SEQ ID NO: 229703 - DNA, 281 bp, Gossypium hirsutum
atgcttcggcactggtggctttggcggtggatttgggggctccttcagcggtaagggtggccctggcttccctgtctgccctgctgggggaattcaggaggtaactatcaaccagagcttgctgacccccctccacgtggagattgaccctgagatccaaaaagtccggacagaggagcgagaacagatcaagctcctcaacaacaagtttgcctgcttcatcgacaaggtgcggttcttagagcaacagaataaggtcctggagaccaaatggaaagctg

SEQ ID NO: 229704 - DNA, 365 bp, Gossypium hirsutum
ctcgattttcacaccaacaaaaagattatcgaagaagtagctataatcccatccaagaggctccgtaacaagattgccggtttctcgacccatcttatgaaacgtatccagaaaggaccagttcgcgggatttctcttaagcttcaagaagaagagcgcgagcgtcgcatggattttgtccccgatgaatcggccatcaaggtcgaccaaatcgaagttgataaggaaacacttgatatgctttcggttattggaatgggtgatattcccggccttgttaaggttgacccggttgctgtttcggttcctcaagttgggttcggtcgcggtggtggacccgggaggaggttttgagtggtgggtct

SEQ ID NO: 229705 - DNA, 377 bp, Gossypium hirsutum
tgttgatgctgatcaagttgtgagggcagatatgggagaactctatgacatggatataaagggaagacctcttgcatatactcctttttgcgataacaataaggacatggatggctatcggttttggagacaagggttctggcgagagcatttgcggggcagaccataccatataagtgcattgtacgtggttgacttggtgaagtttcgtgagacagcagcaggggataatctaagagtcttttatgaaagtcttagcaaagatccaaacagtctagccaatctggatcaggatcttccgaactacgcacaacacacagtaccaatcttttcattaccccaaagatggctatggtgtgaatcatggtgggggaatg

SEQ ID NO: 229706 - DNA, 387 bp, Gossypium hirsutum
atccctggtagagttccggaacctggagaacttcaaacaaggtcgctggagcaattcctacaagctcccgtacagctggatcggcacaggccacgtggtatacaatggcgccttctactacaatcgcgccttcacccgcaacatcatcaagtatgacctgaagcagcgctacgtggctgcctgggccatgctgcatgatgtggcctacgaggaggccaccccctggcgatggcagggacactcagacgtggactttgctgtggacgagaatggcctatggctcatctacccagccctggacgacgagggcttcagccaggaggtcattgtcctgagtaagctcaatgccgcggacctgagcacacaaaaagagaccacatggcgcac

SEQ ID NO: 229707 - DNA, 361 bp, Gossypium hirsutum
gtgaaattggcattgcaggggataaataagatattggagaccaaggtagcaaagctgaatcttgattattcggaatggaggcaggagttaaacgagcagaagctgaaattccctttgagttacaagacctttggtgaagctattccacctcaatatgcaattcaggttcttgatgaattaactggcgggaatgcaattataagtactggtgttggtcagcatcaaatgtgggctgctcaattttacaagtataagaagcctcgtcaatggttaacatctgggggattgggtgctatgggatttggattgcctgctgctattggagctgccgttgcaaacccagaggcagtcgttgtagaca

SEQ ID NO: 229708 - DNA, 366 bp, Gossypium hirsutum
cttcgctccaattttcccatctctttcgcaagagaaccaaaagagaagaaaaaataactactaaaaaatgcttgagcttaggctagttcagggttcgcttctaaagaaagtcttggaagcgattaaggacttggtcaacgatgccaacttcgactgttcggcgacggggttttctctgcaggccatggattcgagtcatgttgcgctggtggccctgttgctgagatcggaagggttcgagcactatcgctgcgacaggaacatttccatggggatgaatctcggtaacatgtccaagatgctgaaatgtgccggaaatgatgacatcatcacaatcaaggctgatgatggcagcgacactgttac

SEQ ID NO: 229709 - DNA, 293 bp, Gossypium hirsutum
atcacgggtgatctggactggagcagcagcagcgtgagcgactctgacgagcggggcagcatgcagagcctcggcagtgacgagggctattccagcgccagcatcaagagaataaagctgcaggacagtcacaaggcatgtcttggtctctaagagaatgggcactgcggctgcctccttgaaggttctccctgttggttctgattaggtaacgtattggacctgcccacaactcccttgcacgtaaacttcagtgtcccaccttgaccaaaatcagctttgtaactgttttc

SEQ ID NO: 229710 - DNA, 345 bp, Gossypium hirsutum
cccacgcgtccgatccgcaacaacaccttatctggcaatgtaccaccagttttgaagaggctgcatgctgggttccaatatgaaaacaatattggcttgtgtggtgttgggtttcctaacttgaaagattgtgcggattcgagtaagattatagaagcagacctgaaccattcaaacccaatggccttaaccaaaagaatatccgggagtcggctgatttaccaactgaatgcagcaaagctaactgctcgagtccatccggtagtgcaaaaatcggtgtggtctccggcattgttggtgttgctcttgtgttgacagttgcagcactttttacttttgcatggt

SEQ ID NO: 229711 - DNA, 261 bp, Gossypium hirsutum
acactatctaacaagttggtacgcagaagcacgctggtgccccgccgcaatttccgggatgggaaccgcgcgctcgttgaccatgatggttaaaagggcctggccaaggtgcatattgaggaagctggctggagctatgttgggggctggactggccaacgtggctctaaacttgagactaaacggactctacccaagaagagctttgctcagatcactgccaatgtaactaagcctaacattcatggcctggtcatgatt

SEQ ID NO: 229712 - DNA, 311 bp, Gossypium hirsutum
gaggaaatccacaagagctgaaatggaacgccagaagctggaggagatggccaagaaagggtaaggacaggtagattgataaaggaaggcttattggactgggagaaagaaatgtagtatagctcgtgtttgggttgaacctggtgatgggaagttcattatcaatgacaaagaatttgatgtctatttcccaatgcttgatcaccgtgctgctcttcttcggccattctcagagaccaagaccttgggcctttgggacatcaaatgcacagttaaaggaggtggtctttcttgtcaagtaggagcaattc

SEQ ID NO: 229713 - DNA, 321 bp, Gossypium hirsutum
cccacgcgtccgaagattacaagaatctattggacgcggttgcgaaaattgtacaggcggaaggaccgggaggactatacaaaggcctcactccaagtgtgatgggagttgttccttatgctgcctctaattattttgcttatgatacactaagaaatgcttataaaaaagcttttaagaaagaggaaattgggaatgttatgactcttctaataggatcagcggccggtgcgatctcgagcacggcaacttaccctctcgaggtggctcggaagcagatgcaggctggtgctattaatggaagacaatgccacagcatga

SEQ ID NO: 229714 - DNA, 255 bp, Gossypium hirsutum
cccacgcgtgcggttcacaggtacttgattacattgaagatagtgggcttgaggtgcttgcatctagttgcaaggacttgcaagaattacgcgtgtttccatctgatccatttggtgcagagccaaatgtgtccttgacagaacagggccttgttgccgtatctttgggttgtcccaagctacaatcagtattgtacttctgccgccgaatgtctaatgaggcattagttaccattgctcgtagccgtccaaact

SEQ ID NO: 229715 - DNA, 383 bp, Gossypium hirsutum
atccgccgccagctcgcgcatcttgttcttctgccgctcaactgtcctagtcctccgccggtcgcaatggaagaagagatcgccgccctcgtcattgacaatggctccggcatgtgcaaagctggctttgctggggacgatgcaccccgagccgtgtttccctccatcgtcgggcgcccccgacaccagggcgtgatggtgggcatgggccagaaggactcctacgtgggtgacgaggcccagagcaagcgcggcatcttgaccctgaagtaccctattgagcatggcattgtcaccaactgggacgacatggagaaaatctggcaccatactttctacaatgagctgcgcgtggccccagaggagcacccggtgctgctgac

SEQ ID NO: 229716 - DNA, 349 bp, Gossypium hirsutum
cggacgcgtggggttctagatcgcgagcggcgccatggctcaggaatgcagcaaatccgaggccaagacctggtgggtgcatgttcaggccgtggatatgtgaacagggagaacatccgacaacagctcggatgcgttgttgtaggaaccgatgtgttgaccttaactctgatgatgctcactgtggcttatgtgcgcttagatgtccatttacttggcaatgctgcaggggggtttgtattaatacgaatattagtcctctgaattgtggtcgctgtggaaaccgatgcccatttagggttccatgctcgtttgggatgtgtggatatgcacagccttgtccattccc

SEQ ID NO: 229717 - DNA, 374 bp, Gossypium hirsutum
atctctattacaccccacattctcttttctttaattcttgtctgttctgcctcactcctgagctctactgactcccaacagagcacccaagaggaaaatggccataagtggagtccccgtgctaggatttttcatcatagctgtgctgatgagcgctcaggaatcatgggctatcaaagaagaacacgtgatcatccaggctgagttctatctgaaccctgaccaatcaggagagtttatgtttgactttgatggtgatgagattttccacgtggatatggcaaagaaggagacggtctggcggcttgaagaatttggacgatttgccagctttgaggctcaaggtgcactggccaacatagctgtggacaaag

SEQ ID NO: 229718 - DNA, 364 bp, Gossypium hirsutum
cttgtttgtccgagttggctgacttgagcaacactttcaagcaagcccagaatgcttgtatggagcaactagcagcaactgtgacacctcaaatccgtccagtactagacagtgtagcaaccatcagctatgaactatcagagtctgaatatgccgagaacgaggtgaatgatccttgggtacagagacttcttcatgctgttgaaatcaatgtggcttggctccaacccctgatgactactaacaactacgattcatttgtacatttggtaatcgacttcattgtgaagaggttggaagtgattatgatgcagaaacggtttagtcaactcggtggccttcagcttgacagagatacccgagc

SEQ ID NO: 229719 - DNA, 341 bp, Gossypium hirsutum
cggacgcgtgggcggacgcgtgggttcccttctttctttcttcctttttcttttatttgtttcttgatcactatgtatgtgatacagtatttttattttcttaataatcattcattcctttgattagtctaaggtgttattggaagctgtattcttcattttattgcttgtaaaagctattagcttttctcctttagctttaataacttgtatctcgatgagaacaagtcattgatcttaaagattgttgagagccagaattctgggaaattgagtgaatgtgctgagaaccaagcaaggctgcagcgaaacctcatgtacctggctgccattgcggattc

SEQ ID NO: 229720 - DNA, 381 bp, Gossypium hirsutum
atctggactcagagctcaaatctgaactctacctccagacagaatgaagttcatctcggcatctctgcttctcatgctgctggtcagcagcctctctccagtccaaggtgttctagaggtctattacacacacttgaggtgtagatgtgtccaagagagctcagtctttatccccagacgcttcattgatcgaattcaaatctcacctcgtgggaatggttgtccaaggaaagaaatcatagtctggaagaagaacaagtcagttgtgtgtgtggaccctcaagctgaatggatacagagaataatggaaatgttgagaaagaaaagttcttcaactccaccagttccagtgtttaagagaaagattccctgatgctgata

SEQ ID NO: 229721 - DNA, 360 bp, Gossypium hirsutum
  unsure (1)..(360): unsure at all n locations
tggcctcactcgccaacacaaccgcaggtgccgttgccggcgcccggaaaatttccaacggaaaacgtattcccatcatttcttccaaatccctctcctttccctctttcaggccttccatttcctcactgaaacccttaatccccaccaaattctcctctctttcccctctccaatgctcccctaatccctccccttctacctccccgccttccctcaaatctcgcctccgcaacggcgaaaccctctacggcatcttcctcctctcattctcccccactttggctgagatcgtcgccttctctggctacgactntgtagtcatcgacatggaacacggccccgggggaatccatgagt

SEQ ID NO: 229722 - DNA, 365 bp, Gossypium hirsutum
atacctggacaaggtgcgtgctctggaggaggccaacgccgacctggaggtgaagatccgtgactggtaccagaggcagcggcccagtgagatcaaagactacagtccctacttcaagaccatcgaggacctgaggaacaagatcattgcagccaccattgagaatgcgcagcccattttgcagattgacaatgccaggctggcagccgatgacttcaggacaaagtacgagcatgaactggccctgcggcagaccgtggaggccgatgtcaatggcctgcgccgggtgttggatgagctgaccctggccaggaccgacctggagatgcagatcgaaggcctgaaagaggagctggcctacctga

SEQ ID NO: 229723 - DNA, 365 bp, Gossypium hirsutum
cacgaactgctgttgctcctttggaacgtttaaaaatcttacttcaggttcaaaatccacatagtattaaatacaatggaacaattcaaggcttgaagtacatttggagaacagaaggttttcgcggattattcaaaggcaatggtactaattgtgcacgcattgttccaaactcggcggtcaagttcttcagctacgagcaagcttcaaagggaatcctatatctgcatcaacggcaaactggcaatggtatgatcaatattgccatcgtctttttgctgagcaaccatctcatgtttgctttacactgataacatatggaattcagttatcttttaggttcatcgattgatgcctgcatacat

SEQ ID NO: 229724 - DNA, 368 bp, Gossypium hirsutum
gaaaggaccagttcgcgggatttctcttaagcttcaagaagaagagcgcgagcgtcgcatggattttgtccccgatgaatcggccatcaaggtcgaccaaatcgaagttgataaggaaacacttgatatgctttcggttcttggaatgggtgatattcccggccttgttaaggttgatccggttgctgtttcggttcctcaagttgggttcggtcgcggtggtggacccgggaggaggttttgagtggtgggtcttcatggatttcatgggttttttttaagcttctatgtttttttctctgttttggggtagtttctaattttgtgttttttatggaacagtactagttaagtggaactgaaatttt

SEQ ID NO: 229725 - DNA, 362 bp, Gossypium hirsutum
gagccgcccaaagaatcaaatctctgctactgcatagtaaaagagagaaagagcgacaatggaggcagcaagaacagttaaggacgtttcccctcacgatttcgtcaaggcttacgccgcccatctcaagcgctccggcaagattgagcttccttcatggactgatattgtcaagaccggcaaactcaaggaacttcctccatatgatcctgattggtactatatcagagccgcttccatggcgaggaaaatatacctgaggggaggtcttggtgttggtgcctttagaaggatttacggtggggctaagagaaatggaagccgtcctcgccatttcttgtagagcagtggatctgttgctc

SEQ ID NO: 229726 - DNA, 364 bp, Gossypium hirsutum
atcgagaagacaggtgaacatttccgcctggtctatgacaccaagggccgttttgctgttcaccgcatcacagtggaagaggcaaagtacaagttgtgcaaagtgaggaagatcactatgggaatgaagggaatccctcacctggtgactcatgatgctcgtaccatccgctacccagatcctctcattaaggtgaatgatactgtgcaaattgatttagggactggcaagataatcaactttatcaaatttgagacgggcaatgtgtgtatggtgattggtggagccaacctcggtcgtgttggtgtgatcacaaacagggaaagacatcctggttcttttgatgtggtgcatgtgaaggatg

SEQ ID NO: 229727 - DNA, 367 bp, Gossypium hirsutum
tcaaaactcacaagagaagcagccgctcctccttccatctcctaaacaagaatggattcgcaaattaagtttgctgtggtggtgaaaataatgggaaggaccggttcaagaggtcaagtgacgcaggtgagagtgaagttcttggacgatcagaaccggttcattatgaggaacgtgaagggaccggttcgtgagggagatatcctcacattgctggagtctgagagagaagctaggaggcttcgttgaagggttatttttatactttttggggtttatgcttgttttgaattgtctaccgtattgcttttgaattacgtttagtaggtattcgtatatcgagacttgcgatttgggagaatggttg

SEQ ID NO: 229728 - DNA, 231 bp, Gossypium hirsutum
atggccaagcaagcttctgtctgcacctgctctcaatcctgctctcactatgagcctccgcctgcagagctcctccgccagctatggaggtggttttgggggtggctcttgccagctgggaggaggccgcggtgtctctagctggtcaactcggtttgtctctgggggatcagctggaggctaccgaggccgcgtgacctgtggctttggtggaggggctggtaatggctt

SEQ ID NO: 229729 - DNA, 385 bp, Gossypium hirsutum
atcttcctgtatcttatcactggcaatttagaaaaacttcgcaagatgatgaagattgctgagatcagaaaggacatgagtggccactatcagaatgccctatacctgggtgatgtgtcagagcgtgtgcggatcctaaagaactgtgggcagaagtccctggcctatctcacagctgctacccatggcttagatgaagaagctgagagcctaaaggaaacatttgacccagagaaggagacaatcccagacattgaccctaatgccaagttgctccagccacctgcacctatcatgccattggataccaattggcctttattgaccgtatccaaaggattttttgaaggcaccattggcagcaaagggaagggaggagcactgg

SEQ ID NO: 229730 - DNA, 332 bp, Gossypium hirsutum
aatacacgaagtgagcagctagacgagctgtttggtgggaggcaaagccatcgaaggcagcagggacagggaatgttccgtaaagccagccaagaacaaataagggcattgagccaaggagctacttcaccaagggggaaaggtagcgagggatacgccttcaacttattgagccaaacccctcgctactccaaccaaaacggccgcttttacgaggcttgccctcgtaatttccagcagcaactccgagaagtggattcctccgttgttgccttcgaaataaacaaaggatcgatcttcgtaccgcactacaattcaaaggctacattcgt

SEQ ID NO: 229731 - DNA, 357 bp, Gossypium hirsutum
atcagcagccctgagccacaggaaggtacagacacaactgaggccccctttcaaggggatcagaggtccctggagtttctgcttcctccagagccagactactcactgctgctcaccttcatctacaacgggcgtgtggtgggcgaggcccaggtgcaaagcctggattgccgccttgtggctgagccctcaggctctgagagcagcatggagcaggtgctgttccccaagcctggcccactggagcccacgcagcgcctgctgagccagcttgagaggggcatcctggtggccagcaacccccgaggcctcttcgtgcagcgcctttgccccattcccatcttctgggatgcaccc

SEQ ID NO: 229732 - DNA, 358 bp, Gossypium hirsutum
atggtgatatcaccctcaagtgtcctgtgatgctggtggtaggagaccaagcacctcatgaagatgcagtggtggaatgtaactcaaaactggaccccacccagacctcgttcctcaagatggctgactctggaggtcagccccagctgactcagccaggcaagctgactgaggccttcaagtacttcctgcaaggcatgggctacatggcctcatcctgcatgactcgcctgtcccggtctcgtacggcctctctaaccagtgcagcatccattgatggcaaccggtcccgctctcgcaccctgtctcagagcagcgagtctggaactctttcttcggggcccccggggcacaccat

SEQ ID NO: 229733 - DNA, 356 bp, Gossypium hirsutum
atgtttgatgcatgcaaaaaattggcagattgtttagtttttaaatgttaagcccaatatataaagaagcgattgctaggtgtgtgttgctgttgcagaacccattcattaatcaatgtgttgaagcgttcattttaaggtgttgcaggcttaagtgtgtacttctttggattttaggcttccgttttctaaacgagaggtgccggtggctagtgggtctgggtttattgtgtcggaagatggactgatcgtgacaaatgcccacgtggtgaccaacaagcaccgggtcaaagttgagctgaagaatggtgccacctatgaagccaaaatcaaagatgtgggtgagaaaacagaca

SEQ ID NO: 229734 - DNA, 358 bp, Gossypium hirsutum
gcagcagggacagggaatgttccgtaaagccagccaagaacaaataagggcattgagccaagaagccacttctccaagggagaaaagtggcgagagattcgccttcaacttattgtaccaaacccctcgctactccaaccaaaacggccgcttctatgaggcttgcccacgtgaattccggcaactcagggacatcaatgtcaccgtttcagccttgcaattaaaccaaggatcaatctttgtgccgcactacaattcaaaggctacattcgtggtccttgttaacgaaggaaatggatacgttgaaatggtttctcctcatcttcctaggcaaagctcatttgaagaagaagaagaa

SEQ ID NO: 229735 - DNA, 390 bp, Gossypium hirsutum
atcgccttccccgccgccaggatgcccaagaggaaggtcagctccgccgaaggggccgccaaggaagagcccaagaggagatcggcgcggttgtcagctaaacctcctgccaaagtggaagcgaagccgaaaaaggcagcagcgaaggataaatcttcagacaaaaaagtgcaaacaaaagggaaaaggggagcaaagggaatacaggccgaagtggctaaccaagaaactaaagaagatttacctgcagaaaacggtgaaacgaaaactgaggagagtccagcctctgatgaagcatgagagaaagaagccaagtctgattaataccatataccatgtcttcccagtggtccctgtctcccttcttgtacaatccagaggaatattttt

SEQ ID NO: 229736 - DNA, 366 bp, Gossypium hirsutum
gtgaaagcaaaattttcggagtggatttgattaaaaattctgaacagaaagtaaaaataattagtgaaagtctgaaggcagcatcagatcgtcagaagtcgtacgcggatttaaaatgaagagatattgagtatcaggtgggagacaaagtgtttcttaaggtatcgccttggaagaagatactcagatttggccgtaagggcaaattgagtccgagattcattgggctgtatgagatctccgaacgagttggcccagttgcatataggttgcttttaccccctgaactcgaaaggatccacaacgtttttcatgtttcgatgcttcgacgttacagatccgatccttcgcacgtaataaacccct

SEQ ID NO: 229737 - DNA, 387 bp, Gossypium hirsutum
atgcaatgagaagatcaccatgcagaacctcaacgaccgcctggcttcctacctggagaaggtgcgcgccctggaggaggccaacgccgacctggaggtgaagatccgtgactggcacctgaagcagagcccagctagccctgagcgggactacagcccctaccacaagaccattgaagagctgcgggacaagatcctgaccgccactattgaaaacaaccgggtcatcctggagattgacaatgccaggctggctgcggatgacttcaggctcaagtatgagaacgagctggccctgcgccagagcgtggaggctgacatcaacggcctgcgccgggtgctggatgagctcaccctgtctaagactgacctggagatgcagatcga

SEQ ID NO: 229738 - DNA, 366 bp, Gossypium hirsutum
caaaaacacctattctcttgagtaactgtaacaaaattcagcaaatatggaagccaacaggggccagaacggtattcaacagctgctagctgcggaacaagatgctcagcatattgtcaatgctgcaagaaatgcaaaaatggctagactgaaacaggccaaggaagaggcagagaaagagattgctgaatatcgtgctcaagtagagtatgagttcaagaagaaagtggcggaggcgatagacttgcttcgagacccagttatccttgattacaatatgagctaaaccattaaccatgtttgtggattatcagagtagcggatactcgggggctaatgtgaagcggctcgagacggaaacagatg

SEQ ID NO: 229739 - DNA, 383 bp, Gossypium hirsutum
atcgccttcttcctgccggagctgatatttgggttcctggtctggaccctggtagccgccacccacgtagtattcccattgctgcaaggatgggtgatgtatgtctcaatcacctcgtttctcatctccttgatgttcctgttgtcttacttgtttggattttacaaaatatttgaatcctggagagttctggacagcctgtaccacgggaccactggcatcctgtacatgagtgctgccgtcctacaagcacatgccacgattgtttctgagatcatggacccgagaatttactacattaacacggcagcctcgttcttcgccttcatcaccacgctgctctacatcctccatgccttcagcatctattaccattgatgcac

SEQ ID NO: 229740 - DNA, 380 bp, Gossypium hirsutum
  unsure (1)..(380): unsure at all n locations
atccagaatacacaggttccaatacatatgaagaggcagctgcctatattcaatgccagtttgaagatctgaacagaagaaaagataccaaggagatctacactcacttcacctgtgccacagacacgaanaatgtgcagtttgtttttgatgctgttacagatgtcatcattaaaaacaacttaaaggaatgtggactttattgaaaagcatggatgttagtgaaagttactacagtgtggagtgttgagaccagacaccttttgctgtcttacggggcagctacaaacatgaacgggaccagggaatggcagcagcatgcagaatcttagcactctttagcacaatcttctatattagggaacttttaattgacatga

SEQ ID NO: 229741 - DNA, 313 bp, Gossypium hirsutum
  unsure (1)..(313): unsure at all n locations
gcgaggtcacgtggaatcgatctgnttaagatcgatatgggacgtcctttggctgatcaaggaccgtttgattgcgtgcttcacaagttgtacggtgaggattggaggagtcaacttgaggatttccgttctcaaaaccctaatgctgtaatcattgattctcctgctgcaatcgaacggctccacaataggatttcgatgctccacgtggtgtccgaactcaagatcgaaaatcaaagcgaaacctttgagatccctaaacagatcgtgatttacgatcgggaaaccttgcttgataaccaatcttgggaat

SEQ ID NO: 229742 - DNA, 409 bp, Gossypium hirsutum
atccgccatctgctctgcagtcaagaagcagcaaccatgcgtgagtgcatctccatccatgttggccaggctggtgtccagattggcaatgcctgctgggagctctactgcctggaacacggcatccagcccgatggtcagatgccaagtgacaagaccattgggggaggagatgattccttcaacaccttcttcagtgagacgggcgctggcaagcatgtgccccgggccgtgtttgtagacttggaacccacggtcattgatgaagttcgcactggcacctaccgccagctcttccaccctgagcagctcatcacaagcaaggaagatgctgccaataactatgcccgagggcactacaccattggcaaggagatcattgaccttgtgttggaccgaattcgtaagc

SEQ ID NO: 229743 - DNA, 355 bp, Gossypium hirsutum
atggggagggccagttggggcctgccgagcgggccaaaaaagtggaggacatgatgaagaagctgtggggtgacaggtactttgacccagccaacggcaagttcagcaagtcagccaccagccccgatgggaagaagctgccacgcaccttctgccagttgatcctggaccccatcttcaaggtgtttgatgccatcatgaatttcaagaaagaggagacagcaaaactgatagagaaactggacatcaaactggacagtgaagacaaggacaaggaaggcaaacccctgctaaaggctgtgatgcgccgctggctgcccgccggagacgccttgttgcagatgatcaccatcca

SEQ ID NO: 229744 - DNA, 386 bp, Gossypium hirsutum
  unsure (1)..(386): unsure at all n locations
ggagaaggtcaggaaactgcttagaagaaacattctgctcaatgagactgaaacacaggacccctgcttcctctgctgatgttttcaacccacgaggtggtcgcatcaccacagttaacagtttcaatcttcccattctccaatacctccaactcagcgccgagaggggagtcctttacaataatgctatctacgctcctcactggaacatgaatgcccacagcattgtttacatcacaaggggaaatggaaggattcaaattgtgtcggaaaatggagaggcgatattcgatgagcaggttgagaggggtcaggtcataaccgtaccccagaatcatgcagtggtgaaaaaagcangaaggcgagggtttgaatggatagcattc

SEQ ID NO: 229745 - DNA, 389 bp, Gossypium hirsutum
  unsure (1)..(389): unsure at all n locations
cggacgcgtgggcggacgcgtgggttctaaacccaaatcagacaccgcaggagttcaatctgccatgggggcttacaagtacgtgtcagagctatggaggaagaagcaatccgatgtgatgaggttcttgcagagggtgaggtgctgggagtaccgtcagcacccttccatcgtgcgagttaaccacccaactcgccccgacaaggctcgtcgattggggtacaaagccaagcagggttatgtcgtctatcgtgtccgtgtaaggcgtggtgggaggaagagaccagttcctaagggtattgtatatggaaagcccacaaaccagggtgttacccagctgaaattccaacgtancaaacgatcagttgcagaggaacgagctggccgga

SEQ ID NO: 229746 - DNA, 386 bp, Gossypium hirsutum
tttccttttcctgtaaaaatggagggttcctcgtctgacaagctgatcgttgtgacccgtgaacctgatgggatcgctattgttaccatcaatcgacccaaatctctcaactccttgacccgacccatgatggtggacttggccaaggctttcaaggctcttgcgaaggacaactcggtgcgggtcatcatcttgtctggagctggacgggctttctgttcaggcgtggatttgacggctgcacaagatgttttcaagggtgacgttaaggacccggagacggatccggttgttcagatggagcaatgccccaaacccatcatcggagctatcaacggcgttgctattactgccggcttcgagatcgccctcgcttgtgacatgct

SEQ ID NO: 229747 - DNA, 253 bp, Gossypium hirsutum
atgccgcctggactcagagctgagaaacatgcaggacctggtggaggacttcaagaacaagtatgaggatgaaatcaacaagcgcaccactgccgagaatgagtttgtgatgctgaagaaggatgtagatgctgcctacatgaacaaggtggagctagaggccagggtcgatgcactgatggatgagattaatttcatgaagatgttctttgatgcggagctgtcccagatgcagacgcacgtctctgacacc

SEQ ID NO: 229748 - DNA, 417 bp, Gossypium hirsutum; identical to SEQ ID NO: 199261

SEQ ID NO: 229749 - DNA, 397 bp, Gossypium hirsutum
cccacgcgtccgagcgtttgtctcagatctcagaagatggcccgtaccaagcaaaccgcccgtaagtctactggtgggaaggctccaaggaagcaacttgctaccaaggctgcccgtaaatctgccccaaccaccggtggtgtgaagaagcctcatcgataccgtcctggaactgttgctcttcgtgaaattcgtaaatactagaagagtactgagcttcttatcaggaaattgcctttccagaggcttgttcgtgaaattgcccaggacttcaagactgatttgcgtttccagagccatgctgttctagctctccaggaagctgcagaggcataccttgtgggtctttttgaagacaccaacctttgcgcgatccatgccaagcgtgtcacaatta

SEQ ID NO: 229750 - DNA, 393 bp, Gossypium hirsutum
atgcccagctaattttcgtagatcagtataaatggggcttctccatgttggccaggctagtcttgaactcctgacttcaggtatccgcccgcctcggcctaccaaagtggtgggattacaggagtgagccactgcacccagacggcccgtctctttttgtttactctaggctgctctcaaatacgtttcctcttctttatcttgctaacccctacaaatacctcaaaactcagccctggtgtctctgcggcatgcatgaggtgtctgacctgtctgaccttccagctgaactgttagctccttgagcagagcgcctggcacggcacagataattgtcaagaagctttgatgagcaaatgcatgccaagcaatttctagatgtcaactcactga

SEQ ID NO: 229751 - DNA, 376 bp, Gossypium hirsutum
cccaacttaccagagaaatctatactaacccagttcttgagaacttcgacggtagcttccgtggttctgcccaaggtatcgaaggctccatcaggagcccacacttgatggacatcttgaacagcataactatctacaccgatgctcacagaggagagtattactggtctggacaccagatcatggcctctccagttggattcagcgggcccgagtttacctttcctctctatggaactatgggaaacgccgctccacaacaacgtatcgttgctcaactaggtcagggtgtctacagaaccttgtcttccaccttgtacagaagacccttcaatatcggtatcaacaaccagcaactttccgttcttgacggaac

SEQ ID NO: 229752 - DNA, 367 bp, Gossypium hirsutum
ggcgattaacccttctttgctctttctttcccttctttttctcttcaatggctgcctagctcgccagaccttttcgtcacagcagtcccaaaatgagtgtcaaatcaataggctccgcgcctctgcaccccagacccgaattcgctccgaagccggcaccaccgagtggtggaaccccaactgtcaacagctcatgtgtgctggtgtatctgtaatgaggcagactattgaacctaatggccttgttttgccttccttcaccaatgctcctcagcttctctacattgtccaaggaagaggtattcaaggtattgtgatgcctggatgtgccgaaacattccaggattcacagcaatggcagcatcaa

SEQ ID NO: 229753 - DNA, 389 bp, Gossypium hirsutum
gaagccccaagagaaaagaaaaaggaggtgtgtggaatcttcaaagaagaccaggaggaagaatccttcccttttttctttttttccccagaaagagcgattcctttcccttcccttctagttcctcgtttactttttcttcttctttcccttctgattataataagatttgggtttcgttatcctctgaaactctctctctggtttgaaaggagattgaaaaaatatggctgaagaacatagatgtcaagcaccacagttatgtgccaacaactgtggatttttcggaagcccgacgactcaaaatctctgctctaaatgttatcgcgatcttcaacttaaagaacaacaatcttgctctgccaaacaagcctttaatcacactttcg

SEQ ID NO: 229754 - DNA, 392 bp, Gossypium hirsutum
atgtggctttgctggtggtgatgggcttctggtgggcagtgagaaggtgaccatgcagaacctcaacgaccgcctggcctcctacctggacaaggtgcgtgctctggaggaggccaacgccgacctggaggtgaagatccgcgactggtaccagaggcagcggcccagtgagatcaaagactacagtccctacttcaagaccatcgaggacctgaggaacaagatcattgcagccaccattgagaatgcgcagcccattttgcagattgacaatgccaggctggcagccgatgacttcaggacaaagtacgagcacgaactggccctgcggcagaccgtggaggccgatgtcaatggcctgcgccgggtgttggatgagctgaccctggcca

SEQ ID NO: 229755 - DNA, 393 bp, Gossypium hirsutum
agctgctctccaagtctttcaagtcatcatggcttcagagaagaaattgtcgaacccaatgagggaaatcaaagttcaaaagctcgtcctcaatatctccgtcggcgaaagcggcgatcgtctcacacgcgccgccaaggtcttggaacaactcagtggtcaaacccctgttttctctaaggcaagatataccgtgagatctttcggaattaggcgtaatgagaaaattgcttgctacgttacggtgaggggagagaaggcaatgcaacttctcgagagtggtttgaaggttaaggaatacgagcttttaaggaggaacttcagtgataccggctgcttcggatttggtatccaagaacacatcgatcttggcatcaagtatgatccttcaac

SEQ ID NO: 229756 - DNA, 389 bp, Gossypium hirsutum
cttctttcaacttccaaactccatcatcatttccgtttctctcctctcaaatcccctcgcttctcctgctcagcctctgcttcaagcacaatggctaaacaagttttggtgccgatcgcgaacgggacggagccgatggaggcggtgattacgatcgacgtgattaggagatcgggagctgacgtcacggtggcttccgtcgagaaagagcttcgcgttgacgcttgccacggtgttaaaattgttgctgatgctcttgtcgctgattgtaagaataccgttttcgatcttatcgcgcttcctggaggcatgcctggtgctagcaactttaaagattgtggagctcttgaaagtcttgtgaaaaagcaggctgcagatgggcggcttta

SEQ ID NO: 229757 - DNA, 345 bp, Gossypium hirsutum
atggaaaacagtatggcgattcctcaaggatctagaactagatgtaccatatgacccagccatcccattactgggtatatacccaaaggattataaatcatgctgctataaagacacatgcacacgtatgtttactgcggcactattcacaatagcaaagacttggaatcaacccaaatgtccatcagtgacagactggattaagaaaatgtggcacatatacaccatggaatactatgcagccatcaaaaaagatgagtttgcgtcctttgtaaggacatggatgcagctggaaaccatcattcttagcaaactatcacaagaacagaaaaccaaacacctcat

SEQ ID NO: 229758 - DNA, 393 bp, Gossypium hirsutum
cccgaacatcgttaccccattaccaaaatctgaatgatttcgaatggtgcttcagcggcggtgacgaatgtaggtttgctaccgctcacaatactcctcgttttggcaatgcaggtcggtccaatgctcctacgacaccgactcagagtgtgtgcggggacggatattttaggccatattccaacttccccaactatatgaccaacacacaatcgtttaaggcgaaattacgatcttacagtgccccaaagcaaagaccagaatcaggaggtgcaaagaagaggctttcgctcaatgaaataatggctgctagaaacagcataagtggagttagaatgaacaaatcatattaccaaattcatcatcaattttgaataggaaacaaaaaaagat

SEQ ID NO: 229759 - DNA, 368 bp, Gossypium hirsutum
ctgcatttaatttcttaggtagagcttatttcggttcaaacccggttgatactaaactcggaaccgacggtccgagtttgatcgctaaatgggtattatttcaacttgctccggttctttcccttggtttacccaaatatatagaagaccttttaattcatacgtttccgttaccatcttttcttgtgaaaaaagactacaaaagattatacgattttttctacgaatcggccggttcggttcttgatgaagctgaaaaatgggcatttcacgtgaagaagcttgtcataatctttattcgctacgtgctttaataccttcggcggcatgaaaatcttcttccccaacatattgaaatggatcggtaa

SEQ ID NO: 229760 - DNA, 376 bp, Gossypium hirsutum
atggactacgtggacattgtgcaggggcggcgcattggtgtctggaatgtgccctatatttcaaacatctacttgatcaaaggcagtgccctacggggtgagctgcagtccccagatctcttccaccacagcaagctggaccctgacatggccttctgtgccaatgtccggcagcaggatgtgttcatgttcctgaccaaccggcacacccttggccacctgctctccctggacagctaccgcaccgcccacctgcacaatgacctctgggaggtgttcagtaaccccgaggactggaaggagaagtacatccaccagaactacaccaaggccctggcggtgaagctggtggagacgcccttgccggatgtctact

SEQ ID NO: 229761 - DNA, 390 bp, Gossypium hirsutum
gagatattgtttactcctgaactatcttcatataatctcagaaagcacgagctgtgtaaaatccgtcggctctacaaaagagtttaagatctaacattccgcctcttaaattctatcagatctgcgtcttgctgattccatcttacattttcattgatagactttttctttggttagatccgtgatggatttcatgaaggtctttgatcagacggttcgcgaaataaagagggaggttaatctaaaggtattgaaggttccggagatcgagcagaaggtactggatgctacagataatgaaccatggggtcctcatgggactgcattggcagaaatagcacaggccacaaagaaattctctgaattccagatggttatgaatgtgctctg

SEQ ID NO: 229762 - DNA, 392 bp, Gossypium hirsutum
gaaaaccctttgggcaattgggaaattagggtagagcaaaaatggcgagaacatcatccagcaaagaaaatgctcaagctttattccattctcttcgctctgcttatgctgccactccagtcaatctcaagatcattgatctgtatgtgggtttcgcagtcttcactgctctgatccaggtggtttacatggctagtgtgggatcatttcctttcaactcttttctttctggagtgctttcttgtgttgggactgctgtccttgctgtttgtcttcgcattcaggtgaacaaggaaaacaaggaattcaaggatctaccacctgagagagcttttgcagattttgttctttgcaacttggtgctccatttggtgatcatgaatttccttgga

SEQ ID NO: 229763 - DNA, 409 bp, Gossypium hirsutum
atcactgagccacctcctcctgttcgccaggagccatctcccaagcccaacaacaagacccctgcaattctgcatacctacagaggcctgcgtaatagacgagctgccgtctatgtgggcagcttctcctgggttggattgatctctgaaagagaactatcctgaggacgtactggtgccgaagaaagcaatgattaatggaccacagaccagcagctgatccaggttattcgctctataggagtctatgatgtggtggagttgaaatttgcagagaatcgagcaaatggccagtccaaagggtatgctgaggtggtggtagcctctgaaaactctgtccacaaattgttggaactcctaccaggaaaagttcttaatggagaaaaagtggacgtgaagccggccaccc

SEQ ID NO: 229764 - DNA, 414 bp, Gossypium hirsutum
atggcttctggtgggcagtgagaaggtgaccatgcagaacctcaacgaccgcctggcctcctacctggacaaggtgcgtgctctggaggaggccaacgccgacctggaggtgaagatccgcgactggtaccagaggcagcggcccagtgagatcaaagactacagtccctacttcaagaccatcgaggacctgaggaacaagatcattgcagccaccattgagaatgcgcagcccattttgcagattgacaatgccaggctggcagccgatgacttcaggacaaagtacgagcacgaactggccctgcggcagaccgtggaggccgatgtcaatggcctgcgccgggtgttggatgagctgaccctggccaggactgacctggagatgcagatcgaaggcctgaaggaggagct

SEQ ID NO: 229765 - DNA, 417 bp, Gossypium hirsutum
ataaaatgtataggccagcacgtgtaccatcgacttcaagatttctgaatccatatgtcgtatgtttcattgtcgtcgcaggggtagtgatcctggcagtgaccatagctctacttgtttactttttagcttttgatcaaaaatcttacttttacaggagcagttttcaactcctaaatgttgaatataatagtcagttaaattcaccagctacacaggaatacaggactttgagtggaagaattgaatctctgattactagaacattcaaagaatcaaatttaagaaaccagttcatgagagctcatgttgtcaaactgagtcaagatggtagtggtgtgagagcggatgttgtcatgaaatttcgattcactagaaataacaatggagcatcaatgaaaagcagaattgagtctg

SEQ ID NO: 229766 - DNA, 379 bp, Gossypium hirsutum
gaagcctctctgcaagttttgcggggctttgatacagatatttctgttgaagttaatgaaatcaagagagctgtagcatcatcaagcaggagaacaacaattcgatttgcagatctcaagcgaaaaagatattggtatcccttgacgatagggattgggttactggtgcttcagcaactaagtggcatcaacggtgttttattctattccagcaatatcttcgcaagtgctggggttgcgtctagtgatgttgcgacatttggggttggggccattcaggtcattgcaactggggtgactacatggttggtggacaaaactggccgcagacttcttcttatggtatcctcggcttaaatgacactgagtctgctaattg

SEQ ID NO: 229767 - DNA, 360 bp, Gossypium hirsutum
aagaacgtgaggagcgccagcaggagcagcgataccgccatacgagaggagggtctcaagataatggcctcgaggaaactttctgctccatgaggatcaaggagaaccttgctgaccctgaacgtgccgacattttcaacccacaagccggtcgtatttccaccctcaacaggtttaacctccccatcctccaacgacttgagctcagcgccgagaggggtgtcctctacaacagagctggtttgattccacaatggaacgtcaacgctcacaaaatactctacatgttaagaggctgtgccagagtccaagtggtgaaccacaacggcgacgcagtgttcgacgataacgtggagcaag

SEQ ID NO: 229768 - DNA, 415 bp, Gossypium hirsutum
atgccacttgtttcatcccacctgggcattaggttgacttcaaagatgcctcagttactgagaaacattaatgggatcatcgaggccttcaggcgctacgcaaggacggagggcagctgcacagcgctcacccgaggggagctgaaaagactcttggagcaagagtttgccgatgtgattgtgaaaccccacgatccagccactgtggacgaggtcctgcgtctgctggatgaagaccacacagggactgtggaattcaaggaattcctggtcttggtgtttaaagtcgcccaggcctgtttcaagacactgagcgagagtcctgagggagcctgcagctctcaagagtctggaagcctccattctggggcctggcaggagctgagtgaaggacagagaagtggcactgaagtgg

SEQ ID NO: 229769 - DNA, 367 bp, Gossypium hirsutum
atcggcaggaagtgccggaggcgtggtggaggctgccatctcatacaccggcgacgtgtccgaccccagccgcaccaagtactcactgcagtactacatgggcttggccgaagagctggtgcgagctggcacccacatcctgtgcatcaaggatatggctgggctgctgaagcccacggcctgcaccatgctggtcagctccctccgggaccgcttccccgacctcccactgcacatccacacccacgacacgtcaggggcaggcgtggcagccatgctggcttgtgcccaggctggagctgatgtggtagatgtggcagccgattccatgtctgggatgacgtcacagcccagcatgggggccctg

SEQ ID NO: 229770 - DNA, 384 bp, Gossypium hirsutum
aagcaattttgagactcttccatttagcaatggcttcttctctagctcttaagaggctcgtctcatccaacatcctccctaactccttacgcgtcgccatcgctccatccacctccagactctttaataccaacgccgccacgcctgatgaccacgatgatcgccgtcgtgctgacggtttcttctcagatctgcaggggcggcgccagggggccaaaaaagatgtgtttgatcctttgtctccaacaaggagcctgaacatgatggatcaagtcaaggggaatcgatttctctccacatcccgtgacattccagggcttgggagcgaggccaaagaatcaaaccttcgccccgtatctcctcatcttcctatttataagccac

SEQ ID NO: 229771 - DNA, 401 bp, Gossypium hirsutum
gttggtatgattggcctgaacctttgaaaaatcgccatcttgcggccttagaaaaaatatacgaggaaaagaaggatttcatagacttgttcattgctaaacaattcctgttccaaaggcagtggaagaaaattcgcaactatgcacagacaaagggagtcagcataatgggagacatgcctatttatgttggttatcacagtgctgatgtttgggcaaataagaaacattttttgctgaataggcatggttatcctatgctagtcagtggtgttcctcctgatgccttcagtgatactggtcagctctgggggagtcctctatatgattggaaagccatggagaaagatggatttttatggtggataagtcgcattagacgtgcacagaatctatatgat

SEQ ID NO: 229772 - DNA, 375 bp, Gossypium hirsutum
atctctggaaaagctcttcttgcaaaaaataaatgaactacccacagaagaaaccgagatcatgatagtccaggcaaaaggaagaggacgtgggaggaaagaagcagggacagcaaaacctggcgtttccacggtaccaaacacaactcaagcatcaactcctccgcagacccagacccctcagccgaatcctcctcctgtgcaggccacgcctcaccccttccctgccgtcaccccagacctcatcgtccagacccctgtcatgacagtggtgcctccccagccactgcagacacccccgccggtgcccccccagccacaacccccacccgcttcagcttcccaggctgtacagagccacccacctatcatcgc

SEQ ID NO: 229773 - DNA, 379 bp, Gossypium hirsutum
attcgaggtggagcccagtgacactattgaaaatgtcaaggcaaagatccaggacaaggagggcatccctcctgaccagcagaggttgatctttgctggaaagcagctggaagatgggcgcaccctgtctgactacaacatccagaaagagtccaccctgcacctcgtgctccgcctcagaggtgggatgcagatcttcgtgaagaccctcactggcaagaccatcaccctcgaggtggagcccagcgacaccattgagaatgtcaaggcaaagatccaggataaggaaggcatcccgcctgaccagcagaggttgatctttgctgggaaacagctggaagatgggcgcaccctgtctgactacaacatccagaaagag

SEQ ID NO: 229774 - DNA, 389 bp, Gossypium hirsutum
gcggcaactacttccatggttacttcattaaccttcacaattccttcgctagggcttcgcctacccactcgtagctacccatgtctaaaaccccagagacgttttgtgaggaaggctgcttcaaatgttataacggcaacatatgagttgaaggcacctccatatcccttgaatgcattggaaccccatatgagccgagaaaccctggagtatcattggggaaaacatcacagaacctatgtggagaacctaaacaagcaagttgtaggaacagatctagaagggttgtctttggaagacattatcattgttacatacaacaggggtgatatactccctgcattcaacaatgctgcacaagcctggaaccatgattttttctgggaatc

SEQ ID NO: 229775 - DNA, 363 bp, Gossypium hirsutum
aatggcttacacttctttgctttcttttagcgtttgcttgcttgttctcttccatggctgctgtgctcagatagatctcgtcactaaccatcaccaggatccaccttgggggcagcctcagcaacctcagccacgtcaccaatcccaatgccaactccagaacttgaatgctcttcagcctaagcaccggtttaggtcagaggctggtgaaactgagttctgggaccaaaatgaggatcaattccagtgtgctggtgttgctttcctacgtcataagatccagcgcaaaggacttttattgccttcatttaccagtgctcctatgcttttctatgttgaacaaggggagggtattcatggggc

SEQ ID NO: 229776 - DNA, 357 bp, Gossypium hirsutum
ggtcttctctgcttttggtcctgttcaaaagattgccatgtttgataagaatggtggactacaggcactaattcagtacccagatgttcagacagctgttttggctaagggcaccttggaagggcactgcatatatgatggaggattttgcaagctccatctctcatattcacgccacactgatcttagtataaaggtcaacaatgatcggagcagagattacacaatccctaacccggccatggttaaccctcagccttcaacattgaggcaacagccagttcaagcaatgggtggtccagctgctcatcaatacaatggggctgcatatgctttaggttacaacaacctaccatg

SEQ ID NO: 229777 - DNA, 393 bp, Gossypium hirsutum
caacgctctccttctgtttctggtcaagccaatctcaaaagactccccttttagctcacagctcctctcttgagtactataatgggtaaggagaaggttcacatcaacattgtggtcattggccatgtcgactctgggaagtctacaaccactggtcatttgatctacaagcttggtggtattgacaagcgtgtgattgagaggtttgagaaggaggctgctgagatgaacaaaaggtcatttaagtatgcatgggtgcttgacaagcttaaggccgagcgtgaacgtggtattaccatcgatattgccctctggaagttgagactaccaaatactactgtactgtcattgattcccctggacatcgtgacttcatcaagaacatgattactg

SEQ ID NO: 229778 - DNA, 391 bp, Gossypium hirsutum
atcttacctctaacctactgctcattggcatggaaggaaatgtgacacctgctcattatgatgagcagcagaacttttttgctcaaataaaaggttacaaacgatgcatcttatttcctccggatcagtttgagtgcctctacccataccctgttcatcacccatgtgacagacagagccaggtggactttgacaatcccgactacgagaggttccctaatttccaaaatgtggttggttacgaaacagtggttggccctggtgatgttctttacatcccaatgtactggtggcatcacatagagtcattactaaatggggggattaccatcactgtgaacttctggtataagggggctcccacccctaagagaattgaatatcctctcaa

SEQ ID NO: 229779 - DNA, 382 bp, Gossypium hirsutum
taacctttttgacactcttctaacttgaaactactcccaaaaattcctctaacaaaaccagttcgtgtgtgagacaatgaagggtaaggcaaccaagaacccaatcttcgccttcaccacatggatccgacgacaaccaccgaagatgaaagcgtttttagtgaccatctcagggatggcagctcttttgttcttgagaatggtggtggaagatcacaacaatctttttgttgctgctgagactgttcatgctttgggtacttttgtccttatttacaagcttaccaaagagaaagcttgtgctggactttcccttaaatcacaggaactaacagctatatttttagccgttcgattatactgcagttttgtaatggaatac

SEQ ID NO: 229780 - DNA, 380 bp, Gossypium hirsutum
gggatctagagcaaggttagtgaccttgggttgagtgtagagatgaggaaaatcatgggtgccaaagttcttttattatttgctttgctttccttttcagctgtctcggcatttgcacaggatgaggaagaccaaggtcttgttatgaacttctacaaggattcttgtcctcaggctgaagacattatcaaggagcaaggtaagctactgtacaagcgacacaaaaacactgctttttcttggctgagaaacattttccatgactgcgctgtccagtcatgtgatgcttcactggtgctggactccacaagaaggagcttgtctgagaaggagacagacaggagcttttgcctaaggaatttcaggtacattgagaccat

SEQ ID NO: 229781 - DNA, 344 bp, Gossypium hirsutum
atagctccggcaccaacagcagcgccgctgacaccttccaccttctggcgacaccaccacagccaccttcttctccttcgctgtgctctcccgtactcgcctctgtcgactatcatgcgagccttgaaccacgatggctgagccccgccaggagttcgacgtgatggaagatcacgctgtgacgtacaggttgggggacaggaaacatcaagagggctacaccatgctccaagaccaagagggggacacggacgctggcctgaaagaatatcccctgcagacccacgctgaggattgatctgaggaaccgggctctaaaacacttgatgctaagagcactccaa

SEQ ID NO: 229782 - DNA, 396 bp, Gossypium hirsutum
atggggccaggacccctgccagagtgactcaggaggccccctggtctgtgatgagaccctccaaggcatcctgtcatggggtgtttacccctgcggctctgcccagcatccagctgtctacacccagatctgcaaatatatgtcctggatcaataaagtcatacgctccaactgatccagatgcccagaggctccgtcgtccatcctcttcctccccagtcggctgaactctccccttgtctgcactgctcaaacctctgccaccctccacgcctctaaacatctctcctctcgcctcattcccccacccatccccattctctgactgcactgaagcctgaatgcagagaaacattattccagaaaagcaaggaagccggtcatcgcccattctct

SEQ ID NO: 229783 - DNA, 370 bp, Gossypium hirsutum
agtgaggaaactgaggaaaaaagaacaaactagttaagagcaatggaagatgatgcaatggcaaccgaggctcctttagcaccagtcacttgtggaaggagagtccgaaatgacttggaagataaacttcctaaaccttatatggcgagagctttggtggctccggatgtcgatcacccgaacggaacgccgggccattaccataacggaatgagtgttcttcaacaacatgcggcatatttcgaccaggacgacaatggaatcatttatccttgggagacttacgccggttgtcgagccatgggatttaatccgattggctctctttttttcaccattcttattaatggatctatgagctatcctacac

SEQ ID NO: 229784 - DNA, 307 bp, Gossypium hirsutum
gcgtaaagccacccaaaagcaccaaaaacacaaacagagaagagatataattgaaagaaaagaaaaatggttctgctagagaaactttgggatgatgtagtggccggtcctcaaccggaacgtggccttggccggctgaggaagatcaccaccaccccacccttgtccaccaaagatgaggcttcatcaatggcgatgccgacgagtccgacgacacctgggacaccatcgacgccggtgtcggctcgtagggacaacgtgtggaggagcgtgttcaatccaggtagcaaccttgcaaccaaaggta

SEQ ID NO: 229785 - DNA, 338 bp, Gossypium hirsutum
atctgttgcaagccgccacgccgctctaaatcttggatgcgatctgtatgccctggatcggatttggaaagacatgcgaacatacctgaatgttgatgatgtgagacccaaacaaagctaatgcactcacaagtgtgacacagctcttgtgttcgcaagtatacaatattgccggggaattaatatgaggcattcgatctttcgccttatattctaagggcccccatcgcgatgcaggcagaagcatattgttactacacacacgcttgtggagttctaattgagacccaaaaactggatgaacaaacaagtggatgccacaattagatagaatgatt

SEQ ID NO: 229786 - DNA, 405 bp, Gossypium hirsutum
ataagcattagaatctggttgttcttatgtaaatactgatatgttaaagttgcccaaaattaattctagcttaaaactttcctttacattgggattctaggtgctgtccaaccctgagtttctggcatagggaacggccatcaatgacctaaagtacccagacagggtactgattggaggggatgaaactccagagggccagacagctgtgcaggccctgtgtgctgtatatgatcactagcttcccagagtaaagatcctcaccactaatacttggtctttagagctttacaaactggcagcaaatgcttctcttgcccagagaataagcagcattaattccataagcgctctgtgtgaagcaacaggagctgatgtataagaggtagcaacagcaattggaat

SEQ ID NO: 229787 - DNA, 368 bp, Gossypium hirsutum
cttcctttgaggatgacactagcattccatgtggagttgccttgaagaggatggctggcctactggacaagtcggaaaggagcatacagaggcttatcaaactgaggaattcagtaatccgttcttatcaggagtgtaagattccagttgattggatgcttgataccggaatggtgtataaaataaagcaggcttctatgaagctggtcacaatgtacataaagagagtgggaaccggaccttcaattggtacgcaagtttagacaaggaatctgcacaagaggcactgcttcttcaaggcatgcattttgcaaatagggctcaccagtttgctggagatcttgattcagaaacactgggtgcttttg

SEQ ID NO: 229788 - DNA, 376 bp, Gossypium hirsutum
  unsure (1)..(376): unsure at all n locations
catttttatcacataaaaatctgcagggaagataaggctattgactttgactaatacatcctcgaggactccttcggggtgcacaacagacctgtctgccaactgaatgatgacacctgtctttttcaaaaaaccggtgttaagtgactcataaatagaataaggcataatatttatggatgcccctaaatcacacatggcctttttaatccccaaatggcctattttgcatggtatagcgaacatacccctatctttacattttgccggcattttccgctgtagcactgcgaatacattctcaccaacacttatcttttcactgcctgtaagttttggtttgttggtgcaaagttctttgaggaactntgcatac

SEQ ID NO: 229789 - DNA, 400 bp, Gossypium hirsutum
atgcgactgcgtgagcctgcactgcggcctcaacgagcacatccaccaccttatcaacgacttcaccgtcaagcagatgagacaaggggccttcctggtgaacacagcccggggcggcctggtggacgagaaggcgctggcccaggccctgaaggagggccggatccgcggcgcggccctggacgtgcacgagtcggaacccttcagctttagccagggccccctgaatgatgcacccaatcttatctgcaccccccacgctgcgtggtacagcgagcatgcttccatcgagatgcgagaggaggcggcacgggagatccgcatagccatcacatgccggatcccagacagtctgaagaactgtgtcatcaaggaccatctgacggcagccacccactgg

SEQ ID NO: 229790 - DNA, 243 bp, Gossypium hirsutum
ataagctgcggaagcccagacaccaggaaggtgagatcttcgacacagaaaaagagaaatacgagattacagagcagcgcaagattgatcagaaagctgtggactcacaaattctaccaaaaatcaaagctgttcctcagctccagggctacctgcgatctgtgtttgccctgacgaatggaatttatcctcacaaattggtgttctaaatgtcttaagaacctcattaaatagctaagtcca

SEQ ID NO: 229791 - DNA, 378 bp, Gossypium hirsutum
cccacgcgtccgattttgcagatcggttctctaatccttttttcgggtgtagcgttgtttatacgtttggttgttgttgaagaagtgctactaccatggctacaaagaagagcgttggggacttgaaggaagctgatttgaagggaaagaaagtgtttgttagagtcgatctgaacgttccattggatgataacttcaacataactgatgacacaaggatccgtgccgctgttcccaccatcaagtatttgatgggtcatggctctaaagtcatcctctctagtcatttgggacgcccaaagggtgtcactcccaagtacagtttgaagcctcttgtgccaaggttatctgaactccttggagtcgaggttaaaatgg

SEQ ID NO: 229792 - DNA, 393 bp, Gossypium hirsutum
atggccttcacaaacatccctggaattactctgcttaatgtaagcaaactgaacattttgaagcttgctcctggtgggcatgtgggacgtttctgcatttggactgagagtgctttccggaagttagatgaattgtatggcacttggcgtaaagccgcttctctcaagagtaactacaatcttcccatgcacaagatgattaatacagatcttagcagaatcttgaaaagcccagagatccaaagagcccttcgagcaccacgcaagaagattcatcgcagagtcctaaagtagaacccactgaaatacctgagaatcatgttgaagctaaacccatatgcaaagaccatgcgccggaataccattcttcgccaggccaggaatcacaagctc

SEQ ID NO: 229793 - DNA, 350 bp, Gossypium hirsutum
cccacgcgtccggcggcataagagttttaaggaaaatgcagatcttcgtgaaaaccctaactgggaagaccataaccctagaggttgaatccagcgacactatcgacaatgttaaggctaagatccaggacaaggaaggtatcccgccggaccagcagaggttgatcttcgccggaaagcagcttgaggatggtcgtacacttgccgactacaatatccagaaagaatcaacattgcatctggttctgaggcttcgtggtggcattatcgagccatctttgatggcattggctaggaaatacaaccaggacaagatgatctgccgcaagtgctatgctcgtctacaccca

SEQ ID NO: 229794 - DNA, 373 bp, Gossypium hirsutum
ggaccgatgaaagcaataattttctcacaatggactggtatgttgaacttggttgagcactcgctacgccatcatggtataagctataggagacttgatggaacaatgactttaactgcacgagaccggaatgtcaaagatttcaatactgacccagaggtaactgtgatgctgatgtcattaaaagcgggaaaccttggtttgaatatggttgctgcttgccatgttatccttctggacctctggtggaatccaaccactgaagaccaggctattgatcgagcacatagaatcggacagactcctcctgttactgtaactcggatcaccattaaagacacagtggaagatcgaatattatctcttcaggatg

SEQ ID NO: 229795 - DNA, 375 bp, Gossypium hirsutum
cccacgcgtccgttctttggaaattaaaagcagtagctcttaattaattattttattttttatttttacaaggctcaacggcaggagtaagcagaatcctgcaatcaaattccatccatagaatctggagtcgggactgtaaattatgagaacagttgacattcaattgtattggtgaagaccggaaggaacgtgtaattaattagagagtaaacaagacagaaatgttctcactcttttatggactttataagtacctatttagcaagacagagtttcatgtactcattcttggaatcgacaaggctgggaaaacaactttgttggagaaattgaaatccggatactcaaacttggaaggtctaccacctgatc

SEQ ID NO: 229796 - DNA, 376 bp, Gossypium hirsutum
cccacgcgtccgcaaggcttttttcgaataagccaattcatttgggatcctgcggatccactctttttcctattcaaagatcagccctttgtctctgtgttttcacaccgagaattctttgcagatgaagagatgtcaaaggggcttcttacttcccaaacagatcctcctacatctatatataaacgctggtttatcaagaatacgcaagaaaagcacttcgaattattgattcatcgccagagatggcttagaaccaatagttcattatctaatgctaatggatttttccgttctaatactccatccgagagttatcagtatttatcaaatctgttcctatctaacggaagactattggatcaaatgacaaaga

SEQ ID NO: 229797 - DNA, 377 bp, Gossypium hirsutum
aaagagggaaaaagaaattacagttttcgtgttgggtttggcattttagagagagtcgttggctgagatccgagttttgcgagaaaattaaagggaagtactagtagttgaggcgaagctgaagctaatacaaaacagcggcaatttctgatttcagccctccgacacttcatccagattctgctcaatttctccgtttgattgaggattgggccaatcaaaacatcctataggtatctaaatcttctttatttacatttttggatctgcgccattgctattgcaatgtcccttttatccagattgcgatgtatcactgtggatgttactgggactctcatagcttataaaggggagcttggtgattactactgcat

SEQ ID NO: 229798 - DNA, 377 bp, Gossypium hirsutum
cagaatttgagaacttctctaagtggctgggtgtgtctcagtaattctagtctttgatttacatattcggtgcagacaatgttttcagctttgttatggtgtcgtccttttaattatttcggtgtttttagttgcgggtggaaggaaaattactgaaatatcatgctttgatacgcttctgttttgtcctgctcccctgttttcgcattctatggctagtcgaatactttctatattctgagaacacgagattgatcagcttgccctggacatcgagatcgccacctaccgcaaactcctggagggcgaggagtgcagaatgtctggagaatgccagaatgccgtgagcatctctgtggttggaggtagcaccagca

SEQ ID NO: 229799 - DNA, 344 bp, Gossypium hirsutum
gatgaaagaagatcggagtatcaatccaaactggactacatttagcacaatggctaccatgtatatcaagatgggactgtctgaaaaagctgaagaatgcttgagaaatgtagagagtaggatcaccggtcgggatcgtataccatatcattaccttattacactttatggtactgttggtaataaagaggaggtgtatcggatatggaaggtttacaagtctattttccccagtgttccaaatttgggttatcatgctatgatatcatctctggttagggccagtgatattgaaggggcagaaaagatttatgaagaggggctatcagttaaaacatcttatg

SEQ ID NO: 229800 - DNA, 389 bp, Gossypium hirsutum
acactatataacaagttggtacgataaagcacgctggtgcccgtccgcaatttccgggatggcatggactcctgcattgccgcggggcgcggggctacattgggcctacggcgcattttccaagccatcaggactttgttccccgcgccagcctatttgtcctgcaaggttcacgccgtgcctgtgcaagcgtacagtactggaccttacaatccctgcgcgtttcagccatcgacaaagcctgtcataatgcacaagcgcctgccttcggcacaagaacgcacattcttgagtcctgaattcattcctcgcatgggaagaacagatcctctgaaagttcaaatattaagataagatgtgttagaaacgagaaaagatctccacatgcc

SEQ ID NO: 229801 - DNA, 376 bp, Gossypium hirsutum
cccacgcgtccgcggacgcgtgggctggtatattagcaaatgcaggtactcctagtctgggaaccaccggattcgagctccccaaagactcttctcgttcattccaagctccgacgggttggtccggtcgtttttggggtcgaacggggtgtaaattcgacggatccggctccggaacttgtctcaccggcgattgcgggtcgggtcaagtagaatgcaacggactcggtgctgctccgccggtgactctagctgagttcactcttggaaccaccggtggtcaagatttttacgacgttagtctcgtcgatggttataatatgccgatgatagttgaaggccgtggtgggtcgggcctttgttcttcgacgggttg

SEQ ID NO: 229802 - DNA, 401 bp, Gossypium hirsutum
atgagaactacagttcgtgggtactgctggagttggctcatctaggctccctcccacctccccttccctgcagaggacctgtcagaccccgctgaaagggacaattatgagctgctctgcccagacaatactcggaagccagtggacaagttcaaggagtgccacctggcgcgggtcccttctcatgccgttgtggcacgaagtgtgaacggcaaggaggacgccatctgggagcttctccgccaggcacaggagaagtttggaaaggacaagtcaccagagttccagctctttggctccccgagagggcagaaggatctgctgttcaaggactccgccatcgggttttcgagggtccccctgaggatcgattctgggctgtaccttggctctggctactt

SEQ ID NO: 229803 - DNA, 299 bp, Gossypium hirsutum
attccagatctcagttgaccaacatggtgacaacctgaagaacaccaagagtgaaatcgcagagctcaacaggatgatccagaggctgcgggcagagatcgagaacatcaagaagcagtgccagactcttcaggcatccgtggctgatgcagagcagcgtggtgagaatgcccttaaagatgctcacagcaagcgcatagagctggagactgccctgcagcaggccaaggaggagctggcacgaatgctgcgtgagtaccaggagctcatgagtgtgaagctggccctggacatcgaga

SEQ ID NO: 229804 - DNA, 358 bp, Gossypium hirsutum
caagaaacaaacaagtcatcacttaaacccactcaaacgcaaatggcacgtaccaagcaaaccgctagaaaatcaacgggaggcaaggcgccgaggaagcagttagccacaaaagcggcgcgaaaatcagctccggcaaccggtggagtcaagaagccgcataggttcaggccaggaactgtggcgttacgtgaaatccggaagtatcagaagagcacggaacttttgatcaggaaactcccatttcagaggttggtaagagaaatcgcccaggatttcaaaacagatctgaggttccaaagcagcgctgttgctgctctccaggaggccgccgaagcttacttggttggactttttg

SEQ ID NO: 229805 - DNA, 381 bp, Gossypium hirsutum
agttaacaaagacctggtttctcgtatcaattacgctggagccaccgctgtgggcctttctggcatggacggccgccttttagttgcccggcccagcccaaacgctgcacagttggggtttgtgggagaagttgcgagagtggaccccacagtcctccaaacgatcgtggacaacggaagcatcccggtgattgcttcagtggcggcggatgagtatggtcagccttacaacatcaatgcagacacggtagccggtgaggtggcggcggcattgggggcagagaaactgattctgttgaccgacgtcgcagggattctgagaaaccgagaggaccctggaagcttggtgaaagagattgatataaagggagtgaagaaaat

SEQ ID NO: 229806 - DNA, 397 bp, Gossypium hirsutum
atatcaactccaagtgggagaaggtgcagcagctggtgccaaaacgggaccacgccctcctggaggagcagagcaagcagcagtccaatgagcacctgcgccgccagtttgccagccaggccaacgtcgtgggcccctggatccagaccaagatggaggagatcgggcgcatctccattgagatgaacgggaccctggaggaccagctgagccacctgaagcagtatgaacgcagcatcgtggactacaagcccaacctggacctgctggagcagcagcaccagctcatccaggaggccctcatcttcgacaacaagcacaccaactacaccatggagcacattcgcgtgggctgggagcagctgctcaccaccattgcccgcaccatcaacgaggt

SEQ ID NO: 229807 - DNA, 239 bp, Gossypium hirsutum
ataagcattagaatctggttgaccctatgtaaatactgatatgctaaagtggcccaaaattaattgtagcttaaaactctcctttacattgggattctaggtgctgtccaaccctgagtttctggctaagggaacggcccttaatgacctaaagtacccacacagggtactgattggaggggatgaaacttcatagggccagagagctgtgcacgccctgtgtgctgtatatgagcact

SEQ ID NO: 229808 - DNA, 374 bp, Gossypium hirsutum
tctgattattttctccataccagcataaatcaacaatggcaaagctcgcagtttacttagccaccctggctctcattttgttccttgccaatgcttcaatcacatctgtgacggtcgaaagcgaggaaaaccgggatagctgtgaacagcagataaggaagcaagcccacctgaagcactgccagaagtacatggaggaagagtggggtggcgaaggcagcgacaatatagctggcgggtacattgactcatgttgccagcagctagagaagatggatacgcaatgcagatgtcaaggtctaagacatgcaacgatgcaacagatgcaacagatgcaagaacaaatggggagcaaacagatgcgagagatcatg

SEQ ID NO: 229809 - DNA, 392 bp, Gossypium hirsutum
atccgccatgttgggtcttgtgggtcgtgtggccactgcttcggcctccggggccttgcggggactcactccttcagcgtcgctacccccagctcagctcttactgcgggccgctccgacggcggtccatcctgtcagggactatgcggcgcaaacatctccttcgccaaaagcgggcgccgccaccgggcgcatcgtggcggtcattggcgcagtggtggacgtccagtttgatgagggactaccaccaattctaaatgccctggaagtgcaaggcagggagaccagactggttttggaggtggcccagcatttgggtgagagcacagtaaggactattgctatggatggtacggaaggcttggttagaggccagaaagtactggattctg

SEQ ID NO: 229810 - DNA, 379 bp, Gossypium hirsutum
cttgggttgagtgtagagatgaggaaaatcatgggtgccaaagttcttttcttctttgctttgctttccttttcagctgtctcggcatttgcacaggatgaggaagaccaaggtcttgttatgaacttctacaaggattcttgtcctcaggctgaagacattatcaaggagcaagttaagctactgtacaagcgacacaaaaacactgctttttcttggctgagaaacattttccatgactgtgctgtccagtcatgtgatgcttcactgctgctggactccacaagaaggagcttgtctgagaaggagacagacaggagctttggcctaaggaatttcaggtacattgagaccatcaaagaagctgtagaaagggaat

SEQ ID NO: 229811 - DNA, 384 bp, Gossypium hirsutum
actctcccttgatttcaaatgggcccttcttttttcattttcaatatcattatctccctagcattaaccttagtgaatggagatgctggtttgatccaaaaaacttgcaaaaccaccaagtactatgacctttgtgtctcctccctcaaatccgatccgactagcgccaattcggacacaaagggcttggctatgatcatggtgggagtcggaatggctaatgccacggccacatcgaccctcttatcatcccaattacttactaccaaaaatgacacaatcatgaggaaagtattgaaagaatgctctgacaagtatgctcacgctgccgatgctcttcaagattccgttcaagatttcgactcggagttatatgattatgtc

SEQ ID NO: 229812 - DNA, 298 bp, Gossypium hirsutum
cttaattaagcaagctcgtaagctgttttcatcaatggccgaccgtgaccgctcttaccgatttgaccaggttgttcgtggtgatagaacgaactatcaaagcggaccatcaacaacccaagttctaaccgtcctcaccctccttcccatcggcggcactctccttgcattagccgggctaaccctcaccggcaccgtcatcggcctatgcgtggcaacgccactcttcgtcatcttcagcccggttctgctcccagctgccatcgcggttttcatggctgtggccggtttcttgtcg

SEQ ID NO: 229813 - DNA, 371 bp, Gossypium hirsutum
aaaaggaaaaaaaaatggagctcttgtttctaactttgctgctttgctctcttcttctatgttcttcagtttttgaaccaacaatggctcagcctcgttcacctttttgtgaagggaaatgcaaagggaggtgcaataaagcggcggtttgggatcgatgcttcaaatattgcggcatatgttgcgaggagtgtaaatgtgttccttccggtacttatgggaacaaacacgagtgtccttgctacagagacaaggtgaataacaagggcaaacccaaatgcccttggaaatgaaatatattcgagctcgggatttcatcaagcttaaagatcgaggacgaagaggctatatatatatatatgcatgctgat

SEQ ID NO: 229814 - DNA, 348 bp, Gossypium hirsutum
atcgcaacctggacctggacagcatcatcgccgaggtcaaggcccagtatgaggagatcgccaaccgcagccggaccgaagctgagtcttggtaccagaccaagtatgaggagctgcagcagacagctggccggcatggcgatgacctccgcaacaccaagcatgagatctctgagatgaaccggatgatccagaggctgagagctgagattgacaatgtcaagaaacagtgtgccaacctgcagaacgccattgcggatgccgagcagcgtggggagctggcgctcaaggacgccagaaacaagctggccgagctggaggaggccctgcagaaggccaagcatgaca

SEQ ID NO: 229815 - DNA, 323 bp, Gossypium hirsutum
gggatatttttctcttctctttgaaaaatccgaaaagtaattttccaaagggaaacttttgctcgtaatattctcagatctgctctcaaatcgtcacattttgaatagccaatatgggaggcgggttcagagtacttcatttggttagaccatttctttcgtttctgcctgaagttcagagtgctgataggaaaatcccttttagagagaaggtcatctatactgtgatatccctctttattttcctggtttgcagtcagcttcccctttatggaatacattctacgacgggcgctgatccgttttattggatgcgtgttatc

SEQ ID NO: 229816 - DNA, 397 bp, Gossypium hirsutum
atcggctgatcaatgacctgactgcgcagagggggcgcctgcagactgaatctggtgaattttcacgccagctcgatgaaaaggatgctctggtgtctcagttatcaaggggcaaacaagcctttactcaacagattgaagaactaaagaggcaacttgaagaggagataaaagccaagaacgccctggcgcatgccctgcagtcttcccgccacgactgtgacctgctgcgggaacagtatgaggaggagcaggaatccaaggctgagctgcagagggcgctgtccaaggccaacaccgaagttgcccagtggaggaccaaatatgagacggacgccatccagcgcacagaggagctggaggaggcaaagaagaagctggcccagcggctccaggc

SEQ ID NO: 229817 - DNA, 373 bp, Gossypium hirsutum
attactgaaatgttttcttctccgaagaaagaagatgatgattcaggccaaggctttcgttttgacaagtctctccaggaactgagagatttgcggtctcagcttcattacgctgcggattactgtgaaacaacatttttaaagtctgaagagaagaaaactgtggtggaaaacacaaaagaatacctatgcaaggcacttgtcactttcgttgatcatctgggaaacgtctctgctaatctaaatcactccatttcccagactaattcattttccgaggctgagctccgcatcaattgcctccatcaaagacttctctcatgccaacaatttgctcacaagcttgctctaaccagagtcaaatggaacccca

SEQ ID NO: 229818 - DNA, 382 bp, Gossypium hirsutum
cccacgcgtccgaagcaaccacaaagcgatgtcgaatcatgcgcaagttccaggcgagcccactgaaaccaccacttccctcgtcgagaccgccaccggtgccatccaaggcttccgccccatcaaacaaatccatgaacatctctgcgcatttcatttctatggctacgacatgacccgtcaagtcgaagcgcaccatttctgcgcacatcaaaacgaagaaatgcgacaatgtctcatatatgacacccccgaagccgatgcaaagctcatcggattggagtatatgatatcggagaatttgtttttgacgttgccggacgaagagaagccgctttggcattcgcatttgtacgaagtgaagagtggggtgttgtttatg

SEQ ID NO: 229819 - DNA, 288 bp, Gossypium hirsutum
tcctgatgcacgaagtatagctgttgtaaaacttttatgcgatctgagtgccatggatcggatctctgatgacataggtgcataccgatatgttaagcttgttgcaaaaaactaacgttttgcggtcaaaaggactacacagaacttgaatgcccaagttctaaatattgcctgtataagcattgacgacttggatctttcatcttatattataagggcccacttcaggatggactcagaagcttatactgctgacacacagcttgctgggacctaattgatacccgt

SEQ ID NO: 229820 - DNA, 377 bp, Gossypium hirsutum
catctctctcctttgttttcccttttgtctctctctctctttttccaaccctaaccctacctcaccaaccaggattcaacatgaagggaggaaaatccaagtcagatactaagagtgccaagctatccgtgaaatccaaagctggaaagaaatcggggaaggctgccaaggatccaaacaagccaaagaggcctgctagtgccttctttgttttcatggaggagttccgtgagcaatacaagaaggatcaccctaaaaacaaatccgttgcggctgtcggcaaagctggtggagaaaaatggaagagcttgtctgaagctgaaaaggcaccttatgtagctaaggcagaaaagcggaaggttgagtatgaaaagaac

SEQ ID NO: 229821 - DNA, 359 bp, Gossypium hirsutum
ctctctctcctatactaacttcttccacttaaaagcaagttagctagctagggttttttgagccagagagatgggttcgaaaagaacagcatcactagccctcctctttgcactcaacatcctcttcttttccctggtgagtgcttgtggttcctgcccttcccccaaccccaaacctaaacctaaacctaaaccaaagccaaaccctactccctccccatcttcttctggcaagtgccctagagatgctcttaaactcggtgtatgtgctgatttgctccgtggcttgctcaacgtcaccattggtacccctcctgttcaaccctgctgctctctcatccaaggtcttgctgatcttg

SEQ ID NO: 229822 - DNA, 386 bp, Gossypium hirsutum
cgatgccagacttcagggacatttccaaatggaacaaccgcgtggtgagcaacctgctctattaccagaccaactacctggtggtggctgccatgatgatttccgttgtagggtttctgagtcccttcaacatgatcctgggaggaatcgtggtggtgctggtgttcacagggtttgtgtgggcagcccacaataaggacgcccttcgccggctgaagaagcgctaccccacgacgttcgttatggtggtcatgttggcgagttatttccttatatccatgtttggaggcgtcatggtctttgtgtttggcattacttatgctttgctgttgatgtttatccatgcatcgttgagactccggaacctcaagaacaaactggagaat

SEQ ID NO: 229823 - DNA, 358 bp, Gossypium hirsutum
aaaatggtctgctccactgattgataaccccaattacaagggtatttggaagcctcaagagattccaaaccccgactacgttgagcttgataagcctgactttgagcctattgctgctgttggtattgagatttggacaatgcaagatggcatattgtttgacaatattttgattgccaaaaatgacaaggttgctgagtcatatagggagaccacatggaagcctaagtttgaggttgagaaagaaaaacagaaggctgaggatgagtccactgattcagatggactttcaggcgtccagaagaaggtctttgatgtcctttacaaggttgctgatattcctttcttaagtgaatac

SEQ ID NO: 229824 - DNA, 339 bp, Gossypium hirsutum
cccacgcgtccgaaaggctacattcgtggtcctcgtcaccgaaggaaacggccacgtcgaaatggtctgccctcacctttctaggcagagctcacactggtcctcccgagaggaagaagaacaagaagaacaagaagttgaaaggagaagtggacaatacaagagagtgagagcccagttatcaaccggtgacctatttgtagtcccagcaggccatccagtcacattcgttgcctcccaaaacgaggacctaggattgctcgggttcggactctacaacggccaagacaagaggatcttcgtggctgggaaaaccaacaatgtgagacaatgggatcg

SEQ ID NO: 229825 - DNA, 378 bp, Gossypium hirsutum
atgacggaacccaggggtcgtaatatatgtgaactggcgtccgtgctgcgtgcccagagtagtggccgaataccttaacgggtctgtgcgcgaggagagcatccactgcaagtcggtcgaggagatctcgacgctggtgcagaagctggccaaccagtcgggtttggacgtgatccgcatccgcaagcccttccacaccgacaaccctagcatccagggccaatggcaccccttcaccaacaagccgaccactttccgcgagctatgcccccgagaggttcaggatcctgccccagcccaggtgcaagcacagtgaagagttgctccaccccaggctttggactgtttctccagtaaaggtggttcttcccctttggg

SEQ ID NO: 229826 - DNA, 381 bp, Gossypium hirsutum
atccacgcctcgcagccatccatgactgtggacggcgttaccgacccctacaattcggagcgcttctgcctcgggctgctctccaatgtcaacaggaatgcagcagtggagctgacgcggagacacattggaagaggcgtgcggctctactacatcggaggggaggtcttcgcagagtgcctcagtgacagcgctatttttgtccagtctgccaactgtaaccagcgctatggctggcacccggtcaccgtctgctagattccaccaggatgcaagctgaagatcttcaacaaccaggagtttagtgaccttctggcccaagccgtctaccagggctttgtggcgggctaccagttgacccgaatgtgtaccatccgcatg

SEQ ID NO: 229827 - DNA, 384 bp, Gossypium hirsutum
  unsure (1)..(384): unsure at all n locations
atcaagattccattaacctcttcctgggagtttttcatcccactgaagggaaacctcatctctgggaactcccaacagatttttatttgcatcacaaaaataccatgagacttttgccaacaagaagaagttatacttactggtggacaccagaggtaataaagcattttaccattaccctatgatgaagttatctgtgctgtgaacttaaagaagttgatagtgaagaaattccacacatatgaagaagagattgatatccacaatgagttctttcggccatatgagttgagcagctttgatgataccttttgcttggctatgacaagctcagcacgtgactntatgcctaagactgttggaattgatccaagtccatttact

SEQ ID NO: 229828 - DNA, 371 bp, Gossypium hirsutum
  unsure (1)..(371): unsure at all n locations
gcgcccacgcgtccgcggacgcgtgggcaggtgcaagcatttcaggtggactgaaggcaaactacagcattactgctgcaaagggtatgtattattcggcccgaggaccagatccagaagacagttctctagatgatgcagacataatgaaaccgaacttgattgcccctggaaataagatatgggctgcctggagttccctcgggacagattcagttgaattccaaggtgaaagctttgcaatgatgtctggaacaagcatggcagctcctcatattgctgggcttgctgcattgataaagcaaaagatttctcattttagtcctgcagccatcgcctctgcactttngacaacagattatctttatgac

SEQ ID NO: 229829 - DNA, 367 bp, Gossypium hirsutum
  unsure (1)..(367): unsure at all n locations
tcgcccacgcgttcggccaaagctatcgcaaacgaatgtcaggcaaacttcattagcgtcaagggtccggaattgctcacaatgtggttcggagaaagtgaggccaatgttcgtgaaattttcgataaggctcgccagtctgctccttgtgtccttttctttgatgaacttgactcaattgctactcanagaggaagcagtgtcggagatgcacgtggtgccgccgatagggttctgaaccaacttcttaccgagatggatggcatgtctgccaagaaaactgttttcatcatcggagccaccaaccgaccagacattatagatcccgcacttttgcggccaggtcgtctcgatcagttaatctata

SEQ ID NO: 229830 - DNA, 352 bp, Gossypium hirsutum
cggactcgtggggacaaaggtgtagaacttgataacatcattcgtaaaactggcatcaccggcattgtgaatggcatggatgttcaagaatggaatcctgcctctgacaaatacatcagtgtcaaatatgatgcaacaactgtgatgaaggcacagccattgttaaaggaagctcttcaagctgaggtgggattgccttgcgacggagatgttcctttgatcggattcattggtaggctagaagagcagaagggttcagatattttggcagaagctattccgaaattagttgctgaaaattgccagattgtagtccttggcacacgcaaaaaggccatggagaagcacattg

SEQ ID NO: 229831 - DNA, 346 bp, Gossypium hirsutum
cccacgcgtgcgcttgcagttcggacattattcagccgtgctaggacatgttcaccatgcatacttttttttgatgaggtttgtggctctcttttttatttctaagtgaaaggaaaaatttctggaaaaaaattgctactgttgaatttgataattttgaggattttctgtaaaatgtaggtggatgctttgaccacaaagcggggaaaagaggggggatgggtcgttgagcgacttctgaaccagttactcatagagttagatggtgcagaccagcggtgtggtgtttttgttattggtgccactaataggcctgaggtgatggatcgtgctgatttacgccctg

SEQ ID NO: 229832 - DNA, 326 bp, Gossypium hirsutum
acggtacactgtgtgcattagccggtttaacactggcctgcaccatcattgggctgatgctagccacaccgatgttcatgatcttcagcccagttcttgtaccagctgccattgccattgccatggcagagacggggttcttgtggtcacgcgcgtttgggttaacaggggtggagaaggctagttacacgcttaacaggctgtggtacacaacagggacggagcatctagatctagaccattcagagagacggggacaggacatctgagactatgtggtgcaaaagacaaatgaagatgggcagaacactgagaacaaggcacat

SEQ ID NO: 229833 - DNA, 382 bp, Gossypium hirsutum
ataacggctcgggtctccgccatggcttctctactggccaaggacgcctacctgcagagcctggccaagaagatctgctcccattcgggcccggagcagcaggcgcgcacgcgggctggcaaaactcgaggctcagtagctgcagggcccccaaaaaagaaaaggaagaaaacacaaaagaaattccggcagcggaagagaaggctgctgagcacaaggccaagtccttgggagagaagtctccagcagcctctggggccaggaggcctgaggcagccaaagaggaagcagctggggcttccagttcagcagggaaccctgcagatggcctggccactgagcctgagtctgtctttgcactggatgttctgcgacagcgact

SEQ ID NO: 229834 - DNA, 373 bp, Gossypium hirsutum
atccgggcccaggggctccgcacagcaggttctccccatgacaccacctgaacgtctcttactcttaagggtgcgtggcacccccctacacctcctccttctggggctgctgctggtcctgctgcctggggcccacgggctccctggtgttggcctcacaccttcagctgcccagactgcccgtcagcaccccaagatgcatcttgcccacagcaccctcaaacctgctgctcacctcattggagaccccagcaagcagaaactcactgctctggagagcgaacacggaccgtgccttcctccaggatggtttctccttgagcaacaattctctcctggtccccaccagtggcatctactttgtctactccca

SEQ ID NO: 229835 - DNA, 353 bp, Gossypium hirsutum
ctgaaaaatgtcttgctgtggtggaaactgtggctgcggtactggctgcaagtgtggcagtggctgtggaggatgcaagatgtatccagacctgaacgctgccgagatgaccacaactgagactctggttcttggtgtagcaccccagaaagcacactttgagggagctgagatggaattcggggctgagaacggctgcaagtgtggagacaactgcacctgcaacccttgcaattgtaaatgattagagaccaaagccaaagctccctggaagcagaggcgcctttgtctttaagaaataatatgttttgttgtttatgtgtttttagaataaagtagccatggcttgtcgt

SEQ ID NO: 229836 - DNA, 288 bp, Gossypium hirsutum
gccacgcgtgcggcgctgtactactggattgcccagctcttaagttccattgtggactagtatattgctccgcctcaccgctggaatgcgaccggtggggttcgccctggcgtcaagagtatgggagtagcgtgggctgatattggggatagtgctgacatacggattggtgttcacagtttatgcaacagggatcgatcccaaaagaggaagcgtggggacaatagcaccggttgctataggcttgatagcgagcgccaacaatttagtatggggaccatatgatgg

SEQ ID NO: 229837 - DNA, 360 bp, Gossypium hirsutum
cggacgcgtgggctcaatttgtgaatggattatttgactcgagaaatgatttgtccacttttaaaaatcacatacgggacttccttgtgcaatcaaaagaattttcagctcaggacaataaagatctctatgcagaagaggctgccctacaaagggaaagagagcgacaacggatgctttctatcccagggctcattgccccaaatgagatacaagatgagatgttagactcgtagatgtggctaattttggcatggaggctaatttgtttaattttgacttgggagttaaggttgcgccttgattttatgacctgtatccctgaatgtaatcagatatgatacagcattttcacccatt

SEQ ID NO: 229838 - DNA, 368 bp, Gossypium hirsutum
atatgccagcaagctcagcatcgacgaggaggtggagctttgagaatctcatgcagctggtggagcactacacctcagacgcagatggactctgtacgcgcctcattaaaccaaaggtcatggagggcacggtggcggcccaggatgagttctaccgcagtggctgggccctgaacatgaaggagctgaagctactgcagaccattgggaagggggagttcggagacgtgatgctgggcgattaccgagggaacaaagtcgctgtcaagtgcattaagaacgactccaccgcccaggccttcctggctgaagcttcagtcatgacgcaactgcggcatatcaacctggtgcagctcctgggcgtgatc

SEQ ID NO: 229839 - DNA, 374 bp, Gossypium hirsutum
  unsure (1)..(374): unsure at all n locations
atgcggcggcggcgcggagaggcgcancgganggtggcctggtttcggaccccagcggccggatggtgaaatcctccctgcagcggatcctcaatagccactgcttcgccagagagaaggaaagggataaacccagcgccaccatccacgccagccgcaccatgccgcttctaagcctgcacagccgcggaggcagcagcagtgagagttccagggtctccctccgctgctgtagtaacccgggtccggggcctcggtggtgctcctgatgcccctcacccacccctgaagatcccaggtgggcgagggaatagtcagagggatcacaatctttcagctaacttattctactccgatgatcggctgaatgtaac

SEQ ID NO: 229840 - DNA, 380 bp, Gossypium hirsutum
atggccgcagccagcaccgggcggagagggccacggggggaaaatcgcgctgcaactcaaagccacgctggagaacatcaccaacctccggcccgtgggcgaggacttccggtggtacctgaagatgaaatgtggcaactgtggtgagatttcggacaagtggcagtacatccggctgatggacagtgtggcactgaaggggggccgtggcagtgcttccatggtccagaagtgcaagctgtgtgcaagagaaaattccatcgagatattaagcagcaccatcaagccttacaatgctgaagacaatgagaacttcaagacaatagtggagtttgagtgcaggggccttgaaccagttgatttccagccccaggctgggt

SEQ ID NO: 229841 - DNA, 360 bp, Gossypium hirsutum
  unsure (1)..(360): unsure at all n locations
tcggccactcgtggggccacgcgtncgggattcatcatcacatttgacaaagagcaaaggccacaagggaacacagagggtgaaagagagagagcaatggaaggaatacggcataagatggtgaatgtcaatggtatatcgatgcatgtagctgaaaaaggagaaggaccggttatcctcttccttcacggcttcccggaactatggtacacttggaggcatcaaattcttgcactaagctctctcgggtaccacgctgttgccccggatctccgtggctatggtgataccgaagctcccactgctatcactagctactcttgcatgcacatcgttggtgacctcgttgcactcattgac

SEQ ID NO: 229842 - DNA, 380 bp, Gossypium hirsutum
  unsure (1)..(380): unsure at all n locations
atcatggtcataggaaactaccggacgcagctgtatgacaagcagcgggaggagtaccagccggccaccccggggcttggcatgtttgtggaggtgaaggacccanaggacaaggtcatcctggcccggcagtatggctccgagggcaggttcactttcacctcccatacccctggcgagcaccagatctgtcttcactccaattccaccaagttctccctgtttgctggaggcatgctgagagttcacctggacatccaggtaggtgaacatgccaacgactatgcagaaattgccgctaaagacaagttgagtgagttgcagctacgagtgcgacagctggtggaacaagtagagcagatccagaaagagcagaacta

SEQ ID NO: 229843 - DNA, 301 bp, Gossypium hirsutum
cgggatgcggccgccctgttttttttttttttagacatggggtcttggtgggcatgggggctcgcctataattccagcgacttgggaggccaaggcaggaggatcacttgagcccagcactttgagactagcctgggcaatataaggagatgttgtctctacaagaaatttaaaacatgatctgggtgtggtggcatgtgcctgaggccccagctactcaagaggctgaggtgggaggatcgctttaaccagggatgtcaacgctgcaatgagttctgattggaccactgtactccagcct

SEQ ID NO: 229844 - DNA, 358 bp, Gossypium hirsutum
cggacgcgtgggtggctgcctccgttgatcctctcgttgttggtcgtgtcattggcgatgttgtcgacatgttcgttcccaccgtcaccatgtccgtctactatggttccaagcacgtctctaacggatgtgatattaagccttctatggctatcaaccctcccaaagttgccatcgatggccttcctgaccagttttatactttggtgatgactgaccctgatgcgccaagtcccagcgagccaaccatgcgtgaatgggttcactggatcgtgtctgacattcctggaggaaccaaccccactcgagggaaggaaatcctggcatacatgggtccacggcctccagtaagcataca

SEQ ID NO: 229845 - DNA, 291 bp, Gossypium hirsutum
atgggcagcgtctcctggcctatgtggatccccttgcagaagaaggctggaaacagaaacccaacctcaatgccatccgctctctggaggctgtgatccgggtgcacagtaaatactggggctgcatgcagcgcctggcctcctgtccagactcctgggtgcctagagtgccaggggctgacaaagaagaagtggaggcagtgaccgcactggcatccctctctgtgggcatcctggctgaagacaggccctcggagcagctggtggaggaggaagaacctatgaatctct

SEQ ID NO: 229846 - DNA, 326 bp, Gossypium hirsutum
cgtatttaaccgcttcagacaggcgactggcaccgagcagctcgacgcggaccgggccaagaggggcatgcaagatatggtggggtatgtgggacaaaagactaaggaaactgggcagactatcgaaaacaaggctcatgagggtggtaggacatgaatgtgaaccatggaaggttactttgcttgcttgtaaaatgtacttttaagtgtttttcattttcgagaagtcttttgcctttgcgattttcgtgcgtgttcattttatcttcttctttttctctagttgtgaaataatgggtaatatagtaatatattagatttgtggt

SEQ ID NO: 229847 - DNA, 290 bp, Gossypium hirsutum
cgcggtgggtttaaacttagacccaacaggggctactccatgcgtatcccttccctgtggtgcgggcgtttctggggtcgtcacggctgctacttcgacgcatacggactaagaccgtgcgcttctggtgactgcggcgggtccctcttttgtaacggcctcggcggtgccccccctgcctcgctaggcgaaattaccctttgccaggaccaggatttctacgatgtgagcttggtggatggcttccacataacaatgtcaataaccccattcaaagggtcaagcaaatg

SEQ ID NO: 229848 - DNA, 322 bp, Gossypium hirsutum
atgtggtgggagaggcctgcgtctgtacaccccactggggtccccgctgtgtgtgcccctcatgcggtcaccagccctaccaggtcctcctctcccggcaggtcttcgccttgatcgtgttctcctgcatctatggcgagggctacagcaacacccacaagtctaagcagatgtactgcgtattcaaccacaatgagggatgcctgccgctatggcagtggcatcggggtgctggccttcctggcctcgggcttcttcttggtgatcgacgcatattttccccagatcagcaacgccactggaccgaagtacctgggcattg

SEQ ID NO: 229849 - DNA, 403 bp, Gossypium hirsutum
acactatataacaagatggaacgcagaagcacgctggtgccccgccgcgatttccggggtgtgcccgagccagagactgaaacgcgctctcaccacacagactcaccgagcactcgttcggctatggtataggagccggttcgagccgcccacgaaaaccaggcgatctgcaccctgcgcagccatgaccaccaagggcgagtcctcgggctcctaccgtatgaggttctgtgggccgggcaccgctagccgatcgagctccaaccggagctacacggctacgtgcacacgcacctacagactgggcagggcgctgcgccccataaccaagcgcaggctatacgcctcgtgctcgggcggtgtgtatgccacgcgctcactctgctgtgcgcctgacagagca

SEQ ID NO: 229850 - DNA, 387 bp, Gossypium hirsutum
tccctttctgtgtcggtcagagaaactccgaggtgttgggtctcaacgagcactccatgcaggcgctgtcctggcgcaagctctatttgagccgcgccaagctcaaagcctccagccggacctcggctctgctctccggcttcgccatggtggcaatggtggaggtgcagctggacgccgaccacgactacccgccagggctgctcatcgccttcagtgcctgcaccacggtgctggtggctgtgcacctgtttgcactcatgatcagcacctgcatcctgcccaacatcgaggcggtgagcaacgtgcacaacctcaactcggtcaaggagtccccccacgagcgcatgcaccgacacatcgagctggcctgggccttctccaccg

SEQ ID NO: 229851 - DNA, 395 bp, Gossypium hirsutum
gcttgtgaacgtgctaagcgtacgctctcttccagcacccaggccagtattgagatcgattctctctatgaaggaatcgacttctatacctccattacccgtgcccgatttgaagaattgaatgctgacctgttccgtggcaccctggacccagtagagaaagcccttcgagatgccaaactagacaagtcacagattcatgatattgtcctggttggtggttctactcgtatccccaagattcagaagcttctccaagatttcttcaacggaaaagaactgaataagagcatcaaccctgatgaagctgttgcttatggtgcagctgtccaggcagccatcctgtctggagacaagtctgaaaatgttcaagatttgttgctcttggatgtcac

SEQ ID NO: 229852 - DNA, 387 bp, Gossypium hirsutum
attgattttgcagatcggttctctaatccttttttcgggtgtagcgttgtttatacgtttggttgttgttgaagaagtgctactaccatggctacaaagaagagcgttggggacttgaaggaagctgatttgaagggaaagaaagtgtttgttagagtcgatctgaacgttccattggatgataacttcaacataactgatgacacaaggatccgtgccgctgttcccaccatcaagtatttgatgggtcatggctctaaagtcatcctctctagtcatttgggacgcccaaagggtgtcactcccaagtacagtttgaagcctcttgtgccaaggttatctgaactccttggagtcgaggttaaaatggcaaatgactgtattggt

SEQ ID NO: 229853 - DNA, 406 bp, Gossypium hirsutum
ataaatctgctaaatttctaaatattacataactgaggaaatcccagacctacaacgttggaacagtgaaatattagtccaaggatccagtgagagacacagaagtgctagaagccactcctggggacctagggggaaaaggaccggccaggggacaaccttgacacatggttagagatatcacataacacaggccaatgtgcctcattgagaacactaatgggcgactgatggcgaatccagaagctctgaagatcctgtctgccattacacagcctgtggttgtggtggcgattgtgggcctctatcgcacagggaaatcctacctgatgaacaagctggctggaaagaaaaagggcttctctctgggctccacagtgcagtctcacactaaaggaatctggat

SEQ ID NO: 229854 - DNA, 379 bp, Gossypium hirsutum
ggaaatggatacgttgaaatggtttctcctcatcttcctaggcaaagctcatttgaagaagaagaagaacaacaacaagaacaagaacaagaagaggaaaggagaagtgggcaatacaggaaaataaggtcccagttgtcgcgtggagacatatttgtagtcccagcaaacttcccagttacattcgttgcatcccaaaaccagaacctgcggatgactgggttcggtctttacaaccagaacattaacccagaccataaccagaggatcttcgtggctggaaaaatcaaccatgtgagacaatgggatagccaagccaaggagttggcctttggggtgtcatcgaggttggtggatgagatattcaacaacaacccac

SEQ ID NO: 229855 - DNA, 384 bp, Gossypium hirsutum
caaacgcctcactctccacaaatcaaatatggcaagcaaagagcccgatcacgagcacagagaagacgatgacgcccccgccgccgatgatgaagacaccggtgctcaagttgcccctatcgtcaggcttgaggaagtcgccgttaccaccggcgaggaagaagaagatgccatactcgatctgaagtcgaaactgtaccgatttgataaagacgggaatcaatggaaagagagaggcgctggtactgtgaagatgttgaagcacaaaaagaccggaaaagttcgccttgttatgaggcaatctaagactctcaagatctgcgccaatcattatgtgttggcaacgatgacggtgcaagagcacgcaaggaacgacaaatcgtg

SEQ ID NO: 229856 - DNA, 400 bp, Gossypium hirsutum
atgcggcgatggcggcggggatggtggcttctcggagactccgcgacctactgagccggcgattgacagcctccaactactcgggcctcagtattagccttcgcctcactggctcctctgcacaagaggaagccccagaccacagctatgagtcccttcgtgtgacatctgcgcagaaacacgttctgcatgtccagctcaaccggcccaacaagaggaatgccatgaacaaggccttctggagagagatggtagagtgcttcaacaagatttcgagagacgctgactgtcgagcggtggtgatctctggtgcaggaaaaatgttcactgcaggtattgacctgatggacctggcttcggacatcctgcagcccaaaggagatgatgtggcccggatcaa

SEQ ID NO: 229857 - DNA, 394 bp, Gossypium hirsutum
cccacgcgtccgggacatataatgctttcggattttgacctctctcttagatgtgctgtctctcctactctggtcaaatcctcgaactcgaccctggaatcaaaacattccttgtactgtgctcaacctgcatgcattgagccaacttgtgtggtgcagccggattgtatccaacctgcatgttttggaccacgttttttttcaagcaagccgaagaaagaaaagaagaacaaagtaaagatcgaaacgggccatcaagtgagtccgcttcctgagctcatagcagaacctaccaatgctcgatcgatgtccttcgtgggcactcatgaatacttggcaccggagatcattaaaggtgaagggcacggaagtgctgtagactggtggacatttg

SEQ ID NO: 229858 - DNA, 381 bp, Gossypium hirsutum
cggacgcgtgggcacaaattcacaatgttccatagcaaagtaaatgtgatatatttattcatcactcgaagcaaagcaaaaggaaaagtcggagggttttgaggagagtgaaaaatggttggtcctacttcatcggagagtgaagtcattctggaaataccattcgggtcaggaggttgccctagttcccaccattttatcggtggaaatcatgaagcttccaattatttatgtgaattgtaagtcaccccttttttttcatatgttttagcttggggattttaattcttttatgaaaaggcgttgaattttaccttctgcaattgaaatgtgtgaactttaggtattatgggggatgggcattacctaatatatactttt

SEQ ID NO: 229859 - DNA, 387 bp, Gossypium hirsutum
  unsure (1)..(387): unsure at all n locations
tttccatttactagcaatttcttcaagttcttttctttgtttttttagtcaatggctgaccaccacctccaaaacactcaaccaatgactcaccaaatggtgaaagccgctactgccgcaacagccggtggttccctcctcattctctccggtttaatcctagctggcaccgttattgcactcactatagccactccactcttcgttattttcagtccagttcttgtccctgctctcattgcaacagctctcctagcaacgggtttcgtcgcctccggcggtttcggtgttgcagccgccacggttctgtcctggatttacaggtatgtgacggggaggcacccaccggcggcggatcagttggatagtgcggngatgaaattggct

SEQ ID NO: 229860 - DNA, 309 bp, Gossypium hirsutum
atgacaagatctcggctcccttgctcatgccccagagactcccttctcccttgccagctcatccgtccgtcgactcttctgtcttgctccaagccctgaagccgatcccccctttaaacttagaaaccaaagactaaactctaggggatcctgctgctttgctttccttcctcgctacttcctaaaaaacaacaaaaaagtttttgtgaatgctgcaagattgttgcattgtgtatactgagataatctgaggcatggagagaagattcaaggtgtgtgtgtgtgtgtgtgtgtgtgtgtgtgtatgta

SEQ ID NO: 229861 - DNA, 410 bp, Gossypium hirsutum
gggatgggggccatctcacccacggctacatgtctgacgtcaagcggatatcagccacgtccatcttcttcgagtctatgccctataagctcaatcccaaaactggcctcattgactatgaccagctggcactgactgctcgacttttccgaccgcggctcatcatagctggcaccagtgcctatgctcgcctcattgactatgcccgcatgagagaggtgtgtgatgaagtcaaagcacacctgctggcagacatggctcacatcagtggcctggtggctgccaaggtgattccctcgcctttcaagcacgcggacatcgtcaccaccactactcacaagactcttcgaggggccaggtcagggctcatcttttaccggaaaggggtgaaggctgtggaccccaagact

SEQ ID NO: 229862 - DNA, 391 bp, Gossypium hirsutum
tcggccacgcgttcgtattcttttagtaccgatttagaagtttccattcccgattaaagccatcatcggccctaagagctttacagcccaaaatcttgttttccgggaaactccaccgataatcgacgaactctctctcgatctcacctaagattcgccgataatcgaaaatttaaaaataacccgacaacaacaaagatgaagaaagaagacacagtgaaactcattagcgctgaaggaatggaattcgttatcgacaaagaagctgctatggtttctcaaacaatccgtaacatgcttacttctccaggtggtttcgctgaggcggagcatggggaagtgactttcccggagataagtgctgtgattcttgagaagatttgtcagtatt

SEQ ID NO: 229863 - DNA, 359 bp, Gossypium hirsutum
gtttgctattaccaatggcctcttcccggcattgatcagtttggagtgtttggtatctgtgatgggcatggtggtgttgaggctgccaaatctgcgagcaagattctgccagagatgcttgctaccattttatcggatcctgttataagagagagggttttgtcacagcatgatgcctcagatgttcttaaagatgcattccttcgagcagaagcgaacatgaataactattatgagggctgtactgcaacagttcttcttgtttgggctgatgctgacgaaaatttctatgcacaatgtgcaaatgttggggattcagcatgtcttatgaatgtcggagtagcagataagatgacaga

SEQ ID NO: 229864 - DNA, 401 bp, Gossypium hirsutum
atggctgaaatacagattgtgaagttatcactctatttcttcattctccatttagcaaggtcatggaagatttggaggaaacattatttgaagaatttgaaaactattcctatgccctagactattactctctggagtctgatttggaggaaaaagtccagctgggagttgttcactgggtctccctggtgttatattgtttatcttttgtcctgggaattccaggaaatgccattgttatttggttcacggggttcaagtggaagaagacagtcagcactctgtggttcctcaatctagccattgcggatttcatctttcttctcttcctgcccctgtacatctcctatgtggtcatgaatttccactggccctttggcatctggctgtgcaaagccaat

SEQ ID NO: 229865 - DNA, 389 bp, Gossypium hirsutum
aaatgctgttgcaaaggcacaaggagcattaaccagagatgggtttatggggggtatgaagcctacacatgtatggagacgggtttacatggtaaatttcatccctgaacttgatagagaaaaatacccctttgctgcattaaaattagatgatggtgttaaacctccaccttgtttattgtctgggtacatgcaggcaatccctgttgcctggacggctaaacatcacttaaaagaaaacacagatatcattctacgcattaacaagcgtacatggaggaccagatataattatcacaaaaatcgtgattgtggagggctttctggtggttggaagtgttttgtgaatgacaataatttaatagaacatgatgtgtgtgtatttgagc

SEQ ID NO: 229866 - DNA, 377 bp, Gossypium hirsutum
gagattttggtattagattttgctgaggcacttcctctgggtctaggagttttggctattggatttgaaggaattttaaatgacagaatgaaaggtttctatagaagtacatacgagcacaatggtgagaagaagaatatggcagttacacagtttgagccagctgatgctaggcgatcctttccatgttgggatgaaccttctttcaaggctacgtttaagatcaccttagatgtgccatctgagctaatggccctctcaaacatgccagtcatcgaagagaaagttaatgggcctctggaaactgtttcttatcaagaatcaccaatcatgtccacttatttagtggcttacgttgttggtttgtttgattatgt

SEQ ID NO: 229867 - DNA, 404 bp, Gossypium hirsutum
atatcacctccagcgccaaagtggacatgacgttcgaggaggaggcacagctcctgcagttgaaggtgaagtgtctgaacaacctggcggcctcgcagctgaagctcgaccactaccgcgcggccctgcgctcctgcagccttgtgctggagcaccagccagataacatcaaggctctcttccgcaagggcaaggtgctggcccagcagggggagtacagtgaggccatccccatcctgagggcggccctgaagctggaacctttcaacaagacgatccacgcagaactctcgaagctggtgaagaagcatgcagcacagcggagcacagagactggcttgtaccggaaaatgctgggcaaccccagccggctgtctgccaagtgccctggcaagggtgcctgg

SEQ ID NO: 229868 - DNA, 385 bp, Gossypium hirsutum
aacacgtagatatggcgattaacccttctttgctctttctttcccttctttttctcttcaatggctgcctagctcgccagaccttttcgtcacagcagtcccaaaatgagtgtcaaatcaataggctccgcgcctctgcaccccagacccgaattcgctccgaagccggcaccaccgagtggtggaaccccaactgtcaacagctcaggtgtgctggtgtatctgtaatgaggcagactattgaacctaatggccttgttttgccttccttcaccaatgctcctcagcttctctacattgtccaaggaagaggtattcaaggtattgtgatgcctggatgtgccgaaacattccaggattcacagcaatggcagcatcaaagccg

SEQ ID NO: 229869 - DNA, 400 bp, Gossypium hirsutum
atctggcatcgaaaagttaaaaatatatcaaatgaacaacctaacattacacctagaggacctagagaaacaagagaaaacgtatcccagagctagcagagcagaagacaagaaaaaaaaaaaaatcagagtggaactcaaggaaattgagttgtgaaaaaccatacaaaggtcaaagaatgctggagtaggttctctgaaagaataagttagacaaactgctagctagattaataaagggaaaaagaggaagatccaaataaacacaatcagaaatgacaaaggggatattaccactgaacccacaaaaatacaaaaattatcagagactactataaacaccctatgcacaccaactagaaaacctggaagaaatagataaatttctggaaacataaaa

SEQ ID NO: 229870 - DNA, 358 bp, Gossypium hirsutum
gaaacctttaggcggcgactactactcgagcttcataacacacgaagcttttaactatggcgggtgtagagacggaggttgcggcggccggtgtgcccaagaagagaacattcaagaagtttagcttccgaggtgtcgatttggatgctctccttgatatgtccactgatgagattgtcaagctcttccctgctcgagctcgcagaaggttccagaggggtttgaagagaaagcccatggctctaattaagaagcttcgcaaggcgaaaagggaggctccacctggtgagaagccggaaccagttagaacccacctgcgtaacatgatcattgtaccccgaatgattggaagcattat

SEQ ID NO: 229871 - DNA, 384 bp, Gossypium hirsutum
caggactgcaggcttttcagcagttcactggcatcaatacagttatgtactatagcccaacaatcgtccagatggctggcttcaattccaatcagctagcacttctgctgtctctcattgtcgctgccatgaatgcaggaggaactgttgtcggcatttaccttatcgatcattttggaaggaaaaagctggctctttcaagcttatccggtgtcatcgtgtcccttgtcatccttgctggggctttctttgctgaaacacctggttcttctaatggaatttatggatggctggcagtcattggattagccctctacattgcattcttcgcacctgggatggggcctgttccatggactgtgaactcagagatataccctgagc

SEQ ID NO: 229872 - DNA, 156 bp, Gossypium hirsutum
atccccgccctcctcagcaccgacctggcccacttctcggaaaacccaatactctacctgctcctgcctcttatctttgtcaacaagtgttcgtttgggtgcaaagtggaactcgaggttctgaaggggctcatgcaagagcccccagcccatgct

SEQ ID NO: 229873 - DNA, 404 bp, Gossypium hirsutum
atgccgaggatggcggtcatggcgccccgaaccctcctcctggtgctctcaggggtcctggccctgaccgagacctgggcgggctcccactccatgaggtatttctacacctccatgtcccggcccggccgcgggcagccccgcttcatctccgtgggctacgtggacgacacgcagttcgtgcggttcgacagcgacgccgagagtccgagagaggagccgcgggcgccgtgggtggagcaggaggggccggagtattgggaccggaacacacggatcgccaaggccgacacacagacctaccgagagaacctgaggaccctgctccgctactacaaccagagcgaggcggggtctcacaccatccagaggatgtacggctgcgacctggggcccgacgggcg

SEQ ID NO: 229874 - DNA, 397 bp, Gossypium hirsutum
atcatccatctgcacagcaacgacatcttccaggtgggggagtgccggcgcgtgcagcagctggccttgagccccagcgcaggcctgctggttgtgctgtgtggccgcggccccagtgtgcgtctctttgccctggcggagctggagaacatagaggtagcaggtgccaagatccctgagtctcgaggctgccaggcactggcagctgggagcatcctgcaggcccgcaccccagtgctctgtgtagccgtcaagcgccaggtgctctgctaccagctgggcccgggccctgggccctggcagcgccgtatccgtgagctgcaggcacccgccactgtgcagagcctggagctgctgggcgaccggctatgtgtgggcgctgccggtggctttgcgc

SEQ ID NO: 229875 - DNA, 355 bp, Gossypium hirsutum
gataaataagcgtttgtctcagatttttgaagatggcccgtaccaagcagacagcccgtaagtcgactggtgggaaggctccaaggaagcaacttgctaccaaggctgcccgtaaatctgccccaaccaccggtggtgtgaagaagcctcatcgctaccgtcctggaactgttgctcttcgtgaaattcgaaagtaccaaaagagtactgagcttcttatcaggaaattgcctttccagaggcttgttcgtgaaattgcccaggacttcaagactgatttgcgtttccagagccatgctgttctagctctccaggaagctgcagaagcataccttgtgggtctttttgaagacac

SEQ ID NO: 229876 - DNA, 389 bp, Gossypium hirsutum
cccacgcgtccgttcccatttcacaatattaattactagacggtagaccagccctgcttgactcctgctaatcaaagccaaaacccttgacctgttgtttccagctcacattccggcgatggatctccgtgaatcgatcactagccaaaccgacgtcgctttgaccctgaccaaaaacgttctccaaactgaagccaaggactcgaacctactgttctcgcccctgtcgatccatgttgtgctcagcttgatcgccgctggtgctaagggtccaaccctcgaccagctcctctctttcctcaagttcaaatccaacgaccagctcagctccttctcctccgagcttgtttccgttgtcttcgcggatggaagtccagccggtggtcccc

SEQ ID NO: 229877 - DNA, 388 bp, Gossypium hirsutum
taaggaggaaggttcttctcggagaagtgaaaccagaaaggcttattacaatgaccccagaggaaatggcaagtgaacaaaggcaacgtgaaattaatgaaattaaagaaaaagctttatttgattgcgagcgaggtgttgcaccaaaggcaacgacagatcaatttaagtgcggtcgttgtggtcaacgcaagaccacttactatcaaatgcagacaaggagtgcagatgaacctatgacaacctatgttacgtgtgtcaactgcaacaaccattggaaattctgttagtgaaatccagagatgtcgtgttgaccatcttggttgcttcactctgtttatgaggagtttgtggtcattaactttagaattcatctttcattcatatt

SEQ ID NO: 229878 - DNA, 403 bp, Gossypium hirsutum
attgaatacagagttcctgaactgaatgttcaaaatggagtgttaaagtcactttccttcttgtttgaatatattggtgaaatgggaaaagactacatttatgctgtaacaccggtacttgaagatgctttaatggatagagaccttgtacacagacagacggctagtgcagtggtgcagcacatgtcacttggggtttatggatttggttgtgaagattcgctgaatcacttgctgaactatgtatggcccaatgtgtttgagacatctcctcatgtaattcaggcagatatgggagccctagagggtctgagagttgctattggaccatgtagaatgttgcagcattgtttacagggtctgtttcacccagcccggaaagtcagagatgtatattggaaaa

SEQ ID NO: 229879 - DNA, 386 bp, Gossypium hirsutum
ttttccattctttgaggctaaagcaaccatgtcggcaactccaacccagaaatcctccaacgtcaaccaggaggaactccaaaaagtcttcaaccagttcgacgccaacagggatggcaagatctcggtgacggagctccgcgatgtgttgaaatcaatgggctccagcatcactgaggaagaactcaaacgtgtcttggaagacatcgacaccgacaaagacggcttcatcaacctctccgagttctcctctctcttccggtcttcatccgatgaagtcaccgccgccttggagctgcgcgacgccttcgatttgtacgaccaggacaagaacggcctgatttcgacgagcgagttgcacctggttctgaatcagctagggatga

SEQ ID NO: 229880 - DNA, 386 bp, Gossypium hirsutum
cttgttcctctcttaattgcgttctatattgaggatgggttgtactaagaaaactctggctttccttttgatgctggcttttgtgggagtctctcttggtgcggttcacaaagtgggcgattccaccggctggactagtcttgggaatattgactacctcaagtgggcttccaccaagaatttccatgttggcgactctcttctttttcagtacaaccctcaattccacaacgcgatgcaagtgacccacgacgatttccagtcatgcaacggaacatctgccatcgcctcctacacctctggatccgactccgtaaccctcaaaaggcctggccacttttatttcctttgcggtgttccaggccactgccaagccggtcagaaag

SEQ ID NO: 229881 - DNA, 380 bp, Gossypium hirsutum
gttcttgtcatgtcggcctacaggattggcaaagaattgtaggatgatcttgattgctttatatcctgttgtgaaagagagttttcaattatatgcagatatttgcgaggttttggctgtgctgcttgataagtttttcgatatggagtacccagattgtgtcaaggcatttgatgcatatgcaagtgcagcgaagcagatagatgagttgattgcattttataattggtgtaaggatacgggtgtggctagatcgtcggagtatcccgaggtgcaaaggatcactagtaagttgttggagacattggaggagtttgtgagggatagagctaagaggccaaagagtccagaaaggaaagagctcccttcttcacctaaag

SEQ ID NO: 229882 - DNA, 331 bp, Gossypium hirsutum
tggtgatagcaaggctgaggccgtggccctgtaccagaccaaggtccagcagctccagatctcaattgaccaacatggggacaacctgaaaaacaccaaaaagtaaattcgaaagctcaacaagatgatccaaaagctgcgggcatagatcgagaacattaaaaaacaatggccaaatctttaagcattcgtggctgatgcaaaacaacgtggtgaaaatgcccttaaaaattcccacaacaaaggcattgagctggagactgccctgcaacaagccaaggaggaacttgcaccaatgcttcgtgagtaccaaaaacttataagtgtgaaa

SEQ ID NO: 229883 - DNA, 399 bp, Gossypium hirsutum
cccaatacgaggagattgctcagaggagccgggctgaggccgagtcctggtaccagaccaagtacgaggagctgcaggtcacagcgggcagacatggggacgacctgcgcaacaccaagcaggagattgctgagatcaaccgcatgatccagaggctgagatctgagatcgaccacgtcaagaagcagtgtgccagcctgcaggccgccattgctgatgctgagcagcgtggggaaatggcactcaaggatgccaagaacaagctggaagggctggaggatgccctgcagaaggccaagcaggacctggcccggctgctgaaggagtaccaagagttgatgaacgtgaagctggccctggacgtggagattgccaactaccgcaagctgctggagggcg

SEQ ID NO: 229884 - DNA, 201 bp, Gossypium hirsutum
cggacgcgtgggtagccttcttctttttcctccgcggctacatttccactctcgttcccgagatatcaaagtaaaatgaaggtggtcgccgcctacttgcttgccgtgctcggaggaaacgcttctccttccgccgatgacttgaaggttattctcggatcaattggagctgaggctgatgatgataggatagagttgcta

SEQ ID NO: 229885 - DNA, 384 bp, Gossypium hirsutum
tttagggaatgctggaaaaaccttaaaggaagaaattcataagaaaattgaaaaatggcaagaaccacctcctgcaaagcagcctaaaccacttcctgttcctgattctgaacctaagaaaaagaggggtggtcgtcgcttaaggaagatgaaagaaaggtatgctataacagatatgaggaagctagcgaacaggatgcaatttggagtacctgaggaaagctctttaggtgatggactaggtgaaggttatggaatgcttggtcaggctgggagtggcaaactgcgtgtttcaattggtcagagcaaacttgcagccaaagttgctaagaagttcaaggaaaagaattacggaagcagtggtgccacctctgggctgacttc

SEQ ID NO: 229886 - DNA, 328 bp, Gossypium hirsutum
tgaagttgaagtgaaatcagaagctgcaaaaaggttgaaaattgggatttattttgcaacttggtgggctttgaatgtggttttcaatatatataacaagaaggttttgaatgcttacccttacccatggttgacttcaactttgtcccttgcttgtggttctttgatgatgttaatttcatgggctacaaggattgctgagaccccaaaaacagattttgagttttggaagactttgtttccggttgctgtagcacataccattggacatgtagcagcaacagtgagtatgtcgaaagttgcagtttcggtcacccacatcatcaaa

SEQ ID NO: 229887 - DNA, 379 bp, Gossypium hirsutum
ctttgaggaaaccaaggagctcaaagatgcactggagaaggaaattttaaaggctaaggagcaatcttgtgtgagaaagagatcaatatctgctatgacaccgcttgtcaaagaagaggccgcttctttacccaattgtgttgaaatccccaccgatggaactgatgcgtgggaaattgattccaggcagctcaaaattgaacacaagattgcatctgggtcctattgcgatctatacagaggcacatattatagtcaagaagtggctattaaagtcctcaagcctgagcgggttacaagggaattgctgagagagttttctcaagaaggttttattattaagaaaattccgcctaagaaagatggtcaattcataggt

SEQ ID NO: 229888 - DNA, 255 bp, Gossypium hirsutum
atttttcactttccgcacacttagcttaactaagcaagctcgtaagctgttttcatcaatggccgaccgtgaccgctcttaccggacgtttgaccaggttgttcgtggtgatagaacgaactatcaaagcggaccatcaacaacccaagttctaactgtcctcaccctccttcccataggcgggactctccttgcattagccgggctaaccctcaccgggaccgtgatagggctatgcatgggaacgccactctt

SEQ ID NO: 229889 - DNA, 345 bp, Gossypium hirsutum
ccatggaggctgcgtctggctcccgctctcacagggattgcagaacattgagctccataaagacaggaactgagcaagtgtgagcccaacgggcactgcgcgactatgtgcctggctgagggaaaataactaaacatgggcacaggagatcctaagaagccgcttggtaaactgtattgataaggagtggttgggcaaacttgactgatggagcacaagaagaagtacccagttgctttagtcaacttttcagagctttctaagaagtgctcacagaggcggtaggtaagagggcttataacatgctaacaaggtaattagacaattttcaattgaggatgctta

SEQ ID NO: 229890 - DNA, 372 bp, Gossypium hirsutum
cccacgcgtccgcttgccctaggcaggccaagcggaaacccatgcccggaagtcgttgctcaaagacgatctggtgacgacggtataccggtgatattttctagttcggactccgacgatggagttgttcgcctatcctctgacataaacatagagtttgttccgctcagacccagactttgccgaacaacaacggtgtggaaggtcgatgattacgaccattcagccggaaaatggtgggtgataaccgatggggttaaagggaacccgggtgccgacactttgaccagttggtttagaatagagaaggggggtgttcttggttacaaatttaagtactgccccgcagtatgtggaacatgcccagcttta

SEQ ID NO: 229891 - DNA, 344 bp, Gossypium hirsutum
ccgaggagaagatacgggtagcttacgacaagaaatcccgtaggttgaaacgacttgatgaacggggtgctgaagctactaaagttgattcaacccggaatataatcaggagcctatctacaaagttacgaattgcaattcaagttgttgataagatatctgtaacaatcaataagatcagggacgatgaactatggccgctgctcaatgaactgattgatgggttaagcagaatgtggaaatgtatgctcaaatgccatcgaaatcagtatgaggtgatcagagaagccaaagctttaagttctattggatcaggcaaaatgctcagcgatgaccaccttaca

SEQ ID NO: 229892 - DNA, 369 bp, Gossypium hirsutum
cttctacattatgcaagaagctcctaaggtccgagagagatggcttcaaaatgatcggcatcggttgccctcttttttgcactcaacattctcttcttttcacttgtcagtgctaattgttcttgcccttcccccaagccaaaaccaaaccccactccctccccaactcctgctgcggaaggaaagtgccccataaatacccttaaactaggtgtatgtgctgaggtgcttggtttagtcaatgtaactgttgggtcacccccagttcaaccttgctgcacccttatcaaaggccttgctgatcttgaagctgctgtttgcctttgcacagcgatcaaaggcaacattttgggtatcaatcttaatatc

SEQ ID NO: 229893 - DNA, 354 bp, Gossypium hirsutum
aaacccaacctggggaagtcgttaagcctgatcaattcaaagcaataaacgatgaaggaatgccgatttatcagaggccatttatgagaggtaaacttttcattcacttcactgttgacttccctgactcgttgaccccagaccaatgcaaggcactggaggctgtgcttcctcccaaggcatcggttcagctgactgacatggagctggatgagtgcgaggaaacaaccatgcatgatgttaacattgaggaagagatgcgtaggaaacaggctcaagctcaacaagaagcttatgaggaaaatgaggacatgcatggtggggcgcagagagtccattgcgctcaacattgtt

SEQ ID NO: 229894 - DNA, 298 bp, Gossypium hirsutum
  unsure (1)..(298): unsure at all n locations
ctctttgtgtttttgtcctctcccgttgtcatggatccttttggtctcttctgtactggggctcttcttgcctgcgggctttactggttcgtctgccttttagggccggccgagcaaaagggcaagcgagccgtcgatctcttcggcgggtccatctctgtcgggaaaggttaggacaaccaccaacaggattgggctttttttcgcccacccaaagaggtcgaaaccccccnaaaagaaccagattatgtcgatacttttttcaacacaatcaccgatatttaccaatgggggtggg

SEQ ID NO: 229895 - DNA, 356 bp, Gossypium hirsutum
ctactattacactggcggaaaaaaatcatggccaccgtcacgacgcaagcctctgccgctgttttccggccatgtgcatcgaaaacacggttccttactggttcttccggtaagttaaaccgagacgtttcatttaaaccagtggctgctacatcgactagctcattcaaagttgaagcaaagaaaggggagtggttacctggtcttccttcaccagcttacctgaatggcagtcttccaggtgataatggctttgatcctcttggattggctgaggaccctgagaacttaagatggtatgtacaagctgagcttgtgaattgtactttggctatgttgggtgttgcaaggatgct

SEQ ID NO: 229896 - DNA, 347 bp, Gossypium hirsutum
cacggctgttcctgatgccaccaaatgggaaatcgcagtgatggaacaataagaaatccaagatctgggctagtttgacgggtagtagagatagctcaggtatgattaatttggttgtggatcataagtttgacgcttctaggcaaactttctatgccagcaacaatacaaagccagcagtgaccaccattgtcggttacaaaggcatgtgcttgctagcaagtggaagtcggttgtggctggaagactgcgtgagcaacgatgctaaacaacaatgggcgatatatccagatgggaccatcaggccccaaaagaatagaaacggttgcctcaagtatgcaaacgat

SEQ ID NO: 229897 - DNA, 374 bp, Gossypium hirsutum
acaagatggatgccactacccctaaatactcgaaggctaggtatgatgaaattgtgaaggaagtctcttcctacttgaagaaggtgggatacaaccctgacaagattccatttgttcccatttctggttttgagggtgacaacatgattgagaggtctaccaacttggactggtacaagggccctactcttcttgaggctcttgaccagatcaatgagcccaagaggccttcagacaagcctctccgtctcccacttcaggatgtgtacaagattggtggtattggaactgttccagttggtcgtgttgaaaccggtgtcttgaagcctggtatggttgtgacatttggcccttctggtctgacaaccgaagtt

SEQ ID NO: 229898 - DNA, 369 bp, Gossypium hirsutum
ataccagacaagctccagcagctggcccttcacatccagacttgcctgagaggacccacccctgggtgtccggtggtcagtcgccccaggatggggactacagtcagagcagcgttggtcttggcctatttggccattgcttctgctgcctctgagggaggcttcaaggctacagggcagaggcagctgaggccagagcactttcaagaagttggctacgcagctcccccctccccacccctatcccgaagcctcctcatggatcaccctgacagctctcagcatggccctccctttgagggacagagtcaagtgcagcctcctccctctcaggaggccacccctatccaacaggaagagctgatgcct

SEQ ID NO: 229899 - DNA, 334 bp, Gossypium hirsutum
atcgccctgtcagccgccacggccgccgccgtcgtcagagtcgccatgcagatcccgcgcgccgcgctgctcccactgctgctactgctgctgctggcggcgcccgcctcggcgcagctgtcccgggccggccgctcggcgcctttggccaccgggtgccccgagcgctgcgagccggcgcgctgcccgccgcagccggagcactgcgagggcggccgggcccgggacgcgtgcggctgctgcgaagtgtgcggcgcgccggagggcgccgcgtgcggcctgcatgagggcccgtgcggcgaggggctgcagtgcgtggtgcccttcggggtgc

SEQ ID NO: 229900 - DNA, 389 bp, Gossypium hirsutum
atgcacgctccagggcctggagattgagttgcagtcccagctgagcatgaaagccgggctggagaacaccgtggcggagacggagtgccgctacgccctgcagctgtagcagatccaggggctcatcagcagcatcgaggcccagctgagcgagctccgcagcgagatggagtgccagaaccaggagtacaagatgctgctggacatcaagacgcggctggagcaggagatcgccacctaccgcagcctgctcgagggccaggacgccaagatgactggtgtcccttcctcagcaggaagcgtcagcccccgaagcacctctgttaccacaacttccagtgtctctgctaccaccacctctaatgcctctggccggcgcacttctgatg

SEQ ID NO: 229901 - DNA, 352 bp, Gossypium hirsutum
cttttctcttaccatcatcataatcatgccgatcaacgatcaaaacagacccatggctcaaaagctctacgactcagctccgtcgtctcgccaggtggctaagttcttgaccgcctcgacgttgggcgcaacgctgcttttcttgtctgggttaaccttgaccgggacggtcattgccttgataatagctacgccgttgatggttatcttcagtccggttctagtcccggccgggataaccatattcttggtgacgacggggttcttgttttcgggcgggtgtggggtggcggcattaacggcgttgtcgtggatatacaattacgtgcaagggaaacacccaccaggagct

SEQ ID NO: 229902 - DNA, 360 bp, Gossypium hirsutum
attaagagttgtaccacttttcgagaagcttgcggatttagaggctgcacctgctgcattggctcgacttttctctatagattggtatagaaaccggatcaacggcaaacaagaagttatgattgggtactcagattcgggcaaagatgctgggcgtttctctgctgcgtggcagttgtacaaagctcaagaggagcttataaaggtagctaagcaggtcggtgtgaagctaacgatgttccatggtcgcggtggaactgttggaagaggaggtggtcccacccaatcttgctatatttactcaaccaccggcaacctatttacgggtcacttcttgttacagggtaaggtgaaggtatt

SEQ ID NO: 229903 - DNA, 381 bp, Gossypium hirsutum
cccgatatccgggatgcatcagaagctttggtagaggcttaaggggaggatatggtgctggcttcggtgctggcttgggtgctggcttgggtggtggctttggtggtggctttgctggtggtgatgggcttctggtgggcagtgagaaggtgaccatgcaaaacctcaacgaccgcctggccttctacctggacaaggtgcgtgctctggaggaggccaacgccgacctggaggtgaagatccgcgactggtaccataggcagcggcccagtgagatcaaagactacagtccctacttcaagaccatcgaggacctgaggaacaagatcattgcagccaccattgagaatgcgcaatccattttgcagattgacaatgcca

SEQ ID NO: 229904 - DNA, 392 bp, Gossypium hirsutum
atggctgtgtctgcagcgctcttgtctactgggggtctcggtgcccgctccttttcgtttccggaaacatggcctccggtgtggctgtctctgatggtgtcatcaaggtgttcaacgacatgaaggtgcgtaagtcttcaacgccagaggaggtgaagaagcgcaagaaggcggtgctcttctgcctgagtgaggacaagaagaacatcatcctggaggagggcaaggagatcttggtgggcgatgtgggccagactgtcgacgacccctatgccacctttgtcaagatgctgccagacaaggactgccgctacgccctctatgatgcaacctatgagaccaatgagagcatgaaggaggacctggtgtttatcttctgggcccctgagtgt

SEQ ID NO: 229905 - DNA, 387 bp, Gossypium hirsutum
gggccgaaatacccgggatgaggcgatggcggcggcggctgcggaagccgggggcgacgacgcccgctgggtgcgggtgaacgcctagcgggcacaggcgctgctggccgaagtggacacattgctgtttgactgcgacagcgtactgtggcgcggagagacggccgtgcctggtgctcccgaggccctgcgggcgctgcgggcccgcggcaagcgcatgggcttcatcaccaacaacagcagcaagacccgcgctgcctacgccgagaagctgcggagactgggcttcggcgggcccgcggggcccggcgccggcctggaggaattaggaacggctactggaccggtctctacctgcgccagcgcctaggcggagcgaccgcgccc

SEQ ID NO: 229906 - DNA, 364 bp, Gossypium hirsutum
ctaattgttggaagaagaagcagaagagaagaaatggagatgcctactgttgatttgagttttctctttcattttctctattgattttctcgacatccaaacaatggagagattatacctctgcgctgccgcttccttcagcttcaacccccttcttttttcctgatctcttctctcatccccttctcatttttggtagctagctttttctggtccctacgatccattccagccctaaaccttcaaccaaacaaaaattgtgcctcgtgagggttttggtacaaagaattcatgtctctggaagtatctttggtgctctcccaatcgaaagaaaacctaaatttctcgctaggtttaataaccc

SEQ ID NO: 229907 - DNA, 389 bp, Gossypium hirsutum
atgaaatgtttcatcgcgggagcggacaatgtgggctccaagcagatgcagcagatccgcatgtcccttcgagggaaggccgtggtgctgatgggcaagaacaccatgatgcgcaaggccatccgagggcacctggaaaacaacccagctctggagaaactgctgcctcatatccgggggaatgtgggctctgtgttcaccaaggaggatctcactgagatcagggacatgttgctggccaataaagtgccagctgctgaccgtgctggtgccattgctccatgtgaagtcactgtgccaggccagaacactggactcgggcccgagaagacctcctttctccaggctttaggtatcaccactaaaatctgcaggggcaccattgaaat

SEQ ID NO: 229908 - DNA, 382 bp, Gossypium hirsutum
cttttccttatcattttcctttccgtttcttctttcatccttttatctgaatctcaaaagacttcgaagccgaacaggttcattttgcagctgcaaaaagatccgaaaactaaactttatgtgactaacatatacaagagaactccttcacagaaagtcccatttgttgtggacttgaatggaaggttactatgggttacttgtgagaaaagttaccgttcgtccacctaccatgcccctcggtgccactcgactcaatgctctagagctggcagtcattattgccacatatgctccaccagggatggaccagggtgccataacaacacatgtggggtcatgtcaatgaatcctgtgacaggcctaaccgccatgagtgagc

SEQ ID NO: 229909 - DNA, 378 bp, Gossypium hirsutum
atgccgatcccgccggaagcgccaggacaatggggacccgggacgacgagtacgactacctattcaaagtggtgctcatcggggactcgggcgtgggcaagagcaacctgctgtcgcgcttcacccgcaacgagttcaacctggagagcaagagcaccatcggcgtggagttcgccacccgcagcatccaggtggacggcaagaccatcaaggcgcagatctgggacaccgtcggccaggagcgctaccgcgccatcaccttcgcgtactaccgaggcgcattgggcgccctgctggtgtatgacatcgccaagcacctgacctatgagaacgtggagcgctggctgaaagagcttctggaccacgcagacagcaaca

SEQ ID NO: 229910 - DNA, 287 bp, Gossypium hirsutum
atgccttttctgtgtttggccaggtagagagggctgtagtcattgtggatgatcgaggaaggccctcaagaaaaggcattgttgagttctcagggaagccagctgctcggaaagctctggacagatgcagtgaaggctccttcctgctaaccacatttactcgtcctgtgactgtggagcccatggaccagatagatgatgaaaagggacttccaaagaagctgtttataaaaaaccagcagattcacaaggaacgagagcagccacccagatttgtacaacctggc

SEQ ID NO: 229911 - DNA, 363 bp, Gossypium hirsutum
atacggaaatatctgcgcagtgtaggagatggagaaactgtagagtttgatgtggttgaaggagagaagggtgcagaagctgccaatgtgactggcccggatggagttcctgtggaagggagtcgttacgctgctgatcggcgccgttacagacgtggctactatggaaggcgccgtggccctccccggaatgctggtgagattggagagatgaaggatggagtcccagagggagcacagcttcaaggaccggttcatcgaaatccaacttaccgcccaaggtaccgtagcagaggaccttctcgcccacgacctgccccagcagttggagaggctgaagataaagaaaatcagcaagccttc

SEQ ID NO: 229912 - DNA, 359 bp, Gossypium hirsutum
atcgagatgcaggtcatggcgccccgaaccctgctcctgctgctcttgggggccctggccctgaccgagacctgggccgtctcccactccatgaggtatttcagcactgcagtgtcccggcccggccgccgggaaccctggtatctcgaagtcggctacgtggacgacacgcagttcgtgtggttcgacagcgacaccgagagtccgaggatggagccgcgggcgccctgggtggagcaagaggggccggagtatttggacccggacacacagagagccaaggggcaacgccaaactgagcgagggagcctgagggccctgctccgctactacaaccagagcgagggggggtctcacac

SEQ ID NO: 229913 - DNA, 368 bp, Gossypium hirsutum
cccacgcgtccgaacagggaaaagctaaccatagcagtgctccaccgacctgtcaataaccctggacaattccagaaattcttccctgctggacaggaaaatcctcagtcatacttacgaatcttcagccgtgaaattcttgaggctgtcttcaatacacgaagtgagcagctagacgagctgtttggtgggaggcaaagccatcgaaggcagcagggacagggaatgttccgtaaagccagccaagaacaaataagggcattgagccaaggagctacttcaccaagggggaaaggtagcgagggatacgccttcaacttattgagccaaacccctcgctacttcaaccaaaacggtcgcttttacga

SEQ ID NO: 229914 - DNA, 374 bp, Gossypium hirsutum
cccacgcgtccggttcaagggatgtactttgatgcccaatattggctatggttcagacaagaagacccgacactatcttccaaatggctttaagaagtttgtcgtgcacaatgttggagagcttgaactgttaatgatgcacaacaggacatattgtgccgagattgcccatgatgtttcaacaaagaagagaaaggagattgtggaacgggcagcccagcttgatgttgttgttacgaacaagcttgctaggctgcgcagccaagaagatgaatgagattaagcttgtcttttatgtttatctttgagctttgtttgcgtttcttataaatttttggtaattttgttgctttagatgtggcaataactttctc

SEQ ID NO: 229915 - DNA, 341 bp, Gossypium hirsutum
cccacgcgtccgcaacgatatttctgcaggtgactcccaacaatgttgatattgccaaagtagcaccaacataccatctatacaccccttcagaggtggaagctgtcattactcgcctatgagaatgcgctgccatcatacgatcttaccatgcaacaacctgctttactgtcataatgatgcatgacttgagggggagaagcttgtatttgtttcttgggattcaagctgtgaaacgttatttttggtgtggcactaaactcatctactctttcagttggataatttaattacaccagatcagaaaaaagaaccttttttaattggatattatgttctcg

SEQ ID NO: 229916 - DNA, 358 bp, Gossypium hirsutum
atctctatctccgggcaggctcacccgagatcccccccacaccgaactccctctgcacgctcggcccagcggtgttgccccgggagcggacgtttctgtagctatttgagcacaccttgacgtcggcggagggagctggacagggccagcggcgaaggaggcaggccccgcgcggggaatctcggaagccctgcggtgcatcatgaagttccagtacaaggaggaccatccctttgagtatcggaaaaaggaaggagaaaagatccggaagaaatatccggacagggtccccgtgattgtagagaaggctccaaaagccagggtgcctgatctggacaagaggaaagtcctagtgccc

SEQ ID NO: 229917 - DNA, 274 bp, Gossypium hirsutum
tcggaccattggaatcatgcttgacaccaaaggtcctgagggtaggagtggcgacttgcgcttaaccaattacattaacaaccgggcaggaattcacttttacaattcggagaggggttgggacacctgattgtgtgagagtgaactatgaggagattgtgaatgaggtagaaaagggtgacacgctttttgttgatggggggatgatgtcattagaggggaagtctaatacagaggattcagagaagtgtgaagtagttgatggtggtgagct

SEQ ID NO: 229918 - DNA, 366 bp, Gossypium hirsutum
ccgcagcaaaaataacgaatttgttcagtcgttcctttgctaaagacctaggacactgctgaaaatatgataactatcttcctcgttttgtcgacatcgagggcaaagggcattagctactgctttcttctgcttgaggttgactaatgaaggaatgaaattccaagatattctccatattgttaatgtaacctttgaagggatgtgtagcttccacaattttctgtaaaagttattagtttcggtctgtaaattaatattgctaggatcttcgctagtctcttgtaatagtttataggcactccttaccgagaattcccctgacatctccctcctccaaacttggaagtcctcgtgtgctagctc

SEQ ID NO: 229919 - DNA, 433 bp, Gossypium hirsutum
cacaatataaggaaagctgatgcgcctgcaggctcttgcccggacgtactggccggaatcactcgtggagaaggaccacgtgaccaagcctactgccatggcccagggccgagtggctcacctcattgagtggaagggctggagcaagccgagtgactcgcctgctgccctggaatcagccttttcctcctattcggacctcagcgagggcgaacaagaggctcgctttgcagcaggagtggctgagcagtttgccatcgcggaagccaaactccgagcgtggtcttctgtggatggcgaggactccactgatgactcctatgatgaggactttgctgggggaatggacacagacatggctgtgcagctgcccctggggccccaccttcaggacctgttcaacggccatcggttctcccgggctgtgcgccag

SEQ ID NO: 229920 - DNA, 366 bp, Gossypium hirsutum
atggtgccactgccggcaggagcccgaggagagcctgggccgcttcctggagggcctgggtgccgtcttcccccatgagccctggctgcagctgtgccgggagagaggcggcacgttctggagctgcgaggtcacccaccggcaagcgcccgctgcccccagtgcccctggtgaggaccaggtcatgctcatcttctatgaccagcgccaggtgctgctgtcacagctacacccgcccaccgtcctgcccgaccgccaggctggagccacccctgccagcacggggggcctggctgtggtctttgacacagtggcacgcagtgaggtcctcttccgcagcgaccgctttgatgagggccccgtgcg

SEQ ID NO: 229921 - DNA, 355 bp, Gossypium hirsutum
agacaacagggaaaagctaaccatagcagtgctccaccgacctgtcaataaccctggacaattccagaaattcttccctgctggacaggaaaatcctcagtcatacttacgaatcttcagccgtgaaattcttgaggctgtcttcaatacacgaagtgagcagctagacgagctgtttggtgggaggcaaagccatcgaaggcagcagggacagggaatgttccgtaaagccagccaagaacaaataagggcattgagccaaggagctacttcaccaaaggggaaaggtagcgagggatacaccctcaacttattgagcgaaacacctcgctacttcaaccaaaacaagacgttt

SEQ ID NO: 229922 - DNA, 360 bp, Gossypium hirsutum
gcagtggcttgacgttcccctttgctcccttcttccagaagccaaaagtttgagttaagaacaatggcttatgctacaatgaagccgaccaaacctggtttggaggagtcccaggagcagattcacaagatcaggatcactctctcctccaagaatgtgaaaaaccttgagaaagtttgtgctgatttggttcgtggtgccaaggataagagactgagggttaaggggccagtgagaatgcccaccaaggttcttcacatcacaacgaggaagtctccctgtggtgaaggaacaaacacatgggatagatttgagctccgtgttcacaagcgagttattgatcttttcagctcccctgat

SEQ ID NO: 229923 - DNA, 382 bp, Gossypium hirsutum
atgccggatcgccttcgccgccgcccgcctcctcgctttagctcccggcccgtcctcgcccccgccttcgccaccgcctcggcccgcagagctcgccctctccccacctgcagatatgtccgagtccaagagcggccctgagtatgcttcgtttttcgccgtcatgggcgcctcggccgccatggtcttcagcgccctgggcgctgcctatggcacagccaagagcggcaccggcattgcggccatgtctgtcatgcggccagagctgatcatgaagtccatcatcccagtggtcatggctggcatcatcgccatctacggcctggtggtggcagtcctcatcgccaactccctgaatgacgacatcagcctctacaggagc

SEQ ID NO: 229924 - DNA, 314 bp, Gossypium hirsutum
atcttcggagaaaggtctgttcagatcctttgcccgttttttaattgggttgatttttttttttttattgttgagttattggagttctttttatattctggatattaaccctttatcagatacattatttgcaaatgttttctctcattctgtaagttaacttttctctctgttgattgtgtctttggatgcacaaaagttcttaagtttgatatagtcccatttatcttattttgcttttgtttcctttccttttggtgtcatatccaagaaatacttgccaaatccagtatttattaagcttttcctccatg

SEQ ID NO: 229925 - DNA, 383 bp, Gossypium hirsutum
atccgagaatgagtttgtgatgctgaagaaggatgtagatgctgcctacatgaacaaggtggagctagaggccagggtcgatgcgctgatggatgagattaacttcatgaagatgttctttgatgcggagctgtcccagatgcagacgcacgtctctgacacctccgtggtcctctccatggacaacaaccgcaacctggacctggacagcatcatcgccgaggtcaaggcccagtatgaggagatcgccaaccgcagccggaccgaagctgagtcttggtaccagaccaagtatgaggagctgcagcagacagctggccggcatggcgatgacctccgcaacaccaagcatgagatctctgagatgaaccggatgatccaga

SEQ ID NO: 229926 - DNA, 358 bp, Gossypium hirsutum
gatctgaaaaatcggcatctctttaggggaaaaaaggggaagaaatggcaagagcaggagggataacgaacgccgttaacgtagggatagcagtccaagccgattgggagaatcgcgaattcatctctcacatttccctcaatgttcgtcgcctctttgaatttctcctccaattcgaggctacaacgaagagcaaattagcatccttgaacgagaaactggacaccctggaacgtcgtttggagcttcttgaagttcaagttggaactgcgtccgctaacccttctcttttcagtacgtgattcatatttaaaagttgtatttgtttccatatctttgtcgggattttgttcctctc

SEQ ID NO: 229927 - DNA, 364 bp, Gossypium hirsutum
cccacgcgtccgatggcttacacttctttgctttcttttagcgtttgcttgcttgttctcttccatggctgctgtgctcagatagatctcgtcactaaccatcaccaggatccaccttgggggcagcctcagcaacctcagccacgtcaccaatcccaatgccaactccagaacttgaatgctcttcagcctaagcaccggtttaggtcagaggctggtgaaactgagttctgggaccaaaatgaggatcaattccagtgtgctggtgttgctttcctacgtcataagatccagcgcaaaggacttttattgccttcatttaccagggctcctatgcttttctattgtgaacaaggggagggta

SEQ ID NO: 229928 - DNA, 367 bp, Gossypium hirsutum
caagaagctacttcaccaaggggaaaaggtagcgagggatacgccttcaacttattgagccaaacccctcgctactccaaccaaaacggccgcttctatgaggcttgccctcgtaatttccagcagcaactccaagaagtggattcctccgttgttgccttcgaaataaacaaagctacattcgtggtcctcgtcaccgacggaaacggccacgtcgaaatggtctgccctcacctttctaggcagagctcacactggtcctcccgagaacaagaagaacaagaagaacaagaagaacaagaagatgaaaggagaagtggacaatacaagagagtgagagcccagttatcaaccggtgacatatttg

SEQ ID NO: 229929 - DNA, 360 bp, Gossypium hirsutum
cggacgcgtgggctagccatggttgcctctcgatcctcctcgatatcagctcgaatcatcgctatctccatctccttataataatcttcaacacttctatttccttgagtaaggttttgaagtcgttgataaagatctcgatggtaggatgatggaataaatcttttccgcatgactggtttcatttctccccaaggagagatgggtctttcacaatttcatcgtcgacttgttacaagctggtcccactacactatggcatatagtcagaaaactcaattgccgcgagtttcacctttttactctccgaatagttgtggcaatcaaaaacaagctcaatcttcttttcccactccaaat

SEQ ID NO: 229930 - DNA, 366 bp, Gossypium hirsutum
gcacaatcaaaggaaacggaaaaggatggaatccaaccgagaatcagcgaggcggtctaggatgaggaaacaaaagcacttggacgagttaatggcacaagtgactcagttggttaaagataataatcaaatcttaaccaccatcaacttcaccactcaacactacatcaacatggaagctgagaactcggttttgagagctcagatgatggaactgagtcaaagactggagtcactcaatgaaatcctcaattatcttaatagtggtaccaatagcaacaacagcaacgatgggtttgaaacgagtgagggatttgaaacaacaagtgatgaaagcttcaccaccattatcagcaaccacaacaa

SEQ ID NO: 229931 - DNA, 366 bp, Gossypium hirsutum
cctagatcgtctccaagagagagatctccttacagctaccgtacacattcacacacacattcactgaatgggtcgagtcatccgagctcaacgtaagggtgctggttccgtcttcaaggcccacacccaccaccgcaagggtcctgctcgtttccgcagcctcgacttcggtgaacgaaatggctacctcaagggtgttgtcaccgatgtcatccacgaccctggccgtggcgctcctttggcccgtgtcgtcttccgtcaccctttccgttacaagaagcagaaggagcttttcgttgccgccgagggtatgtacactggacagttcgtctattgtggtaagaaggctactcttgtggtcggaaa

SEQ ID NO: 229932 - DNA, 375 bp, Gossypium hirsutum
atggaagagaagaaatttgatgaagccctgaagttgagaggccggagcttcatgaacaactgggaggtatacaagcttctagctcatgtcagacccccggtatctaagagtggttcgcacacagtggctgtgatgaatgtgggggctccggctgcaggcatgaatgctgctgttcgctccactgtgaggattggacttatccagggcaaccgagtgctcgttgtccatgatggtttcgagggcctggccaaggggcagatagaggaagctggctggagctatgttgggggctggactggccaaggtggctctaaacttgggactaaaaggactctacccaagaagagctttgaacagatcagtgccaatataact

SEQ ID NO: 229933 - DNA, 283 bp, Gossypium hirsutum
atcccagtacgaggagattgcccagaggagcaaggctgaggccgaggccctgtaccagaccaaggtccagcagctccagatctcagttgaccaacatggtgacaacctgaagaacaccaagagtgaaatcgcagagctcaacaggatgatccagaggctgcgggcagagatcgagaacatcaagaagcagtgccagactcttcaggcattcgtggctgatgcagagcaccgtggtgagaatgcccttaaagatgctcacagcaagcgcatagagctggagact

SEQ ID NO: 229934 - DNA, 362 bp, Gossypium hirsutum
cccacgcgtccgctgaatcttatgtccaaaggggagatcaagcttcaattataggaggagctatcaatttcgtgaaggagcttgagcactgtgttcaattgttaagtgctaagaaagaaacgaaggaaagaccaaatgggagtagtagtggctgttcatcgccttttggtgagttcttcacattcccacagtactcaacgagctcgactcggggtgataacaattccatccccatgaatgagtcaatggttgggacccgatctgccatagctgacatagaagttaccatggtggagagccatgcaaacctcaaaataaggtcgaaaaagggaccagcacagctcttgaaactggtttcaggg

SEQ ID NO: 229935 - DNA, 363 bp, Gossypium hirsutum
gtttccccttcggatttccaggttttgctttctcttcaaggtcaatattccccttccgatgctcctgctgccgaattcctacattccctcattttgtcggtctgtcctccgccttcgttaccgatttctatcgaactcacagctgctttattggcaaaagataagctcaatgcttttggcttgatggaacctttctctctacaacaagacggagagaggtccgtccgtgcttaccggatctatcccaaagcatctttcttcaaccatgattggcttccaaatgcttgcagattcgattacctcgactcagcttcgggccagaacaccgacatgattgttaggatgattcatgatgtccctgta

SEQ ID NO: 229936 - DNA, 384 bp, Gossypium hirsutum
atggggacgctctcagctctcggcgcacggcccagcttccttcaaaatgtctactgttcatgaaatcctgtgcaagctcagcttggagggtgatcactctacacccccaagtgcatatgggtcagtcaaagcctacaccaactttgatgctgagcgcgatgctttgaacattgaaacagccatcaagaccaaaggtgtggatgaggtcaccattgtcaacattttgaccaaccgcagcaatgcacagagacaggatattgccttcgcctaccagagaaggaccaaaaaggaacttgcatcagcactgaagtcagccttatctggccacctggagacggtgattttgggcctattgaagacacctgctcagtatgacgcttctga

SEQ ID NO: 229937 - DNA, 363 bp, Gossypium hirsutum
gaatgtcattgctatcaaagccagtgttcatctcccttttgatcaccgtatgcttgttcaaaatcttacagcagtggctttcaacaatgcaactgtacccccttcagttcaagctactttcccttacgtatttgctgttagcaagtacttacagcctggaacttttgatcttgtgggttcgattatctatgatattgatcagcaaccataccaaagtacattctataatggtaccattgaagttgttgaggctggtggtttcctcagtgttgagtccgttttccttgttacccttgggattgcacttcttgttctccttggtttgtggcttcacggtcaatttcagcgtatcaccaagaaaac

SEQ ID NO: 229938 - DNA, 363 bp, Gossypium hirsutum
gctagggctaagaaagaggcagaacacaaggcaaatgctgagaaatcaactggagcagagtcttctgctgctgctaatactggaaaagggaaatcatctactgagaaggatggagaagccatgcaggttgatagccctccagagaagaaatccgagcctgagccatcatttgagattttgaccaacccagcacgagcggttcctgctcaggagaaggtcatcaagtttttagaagacagtcgatatgtgcctgtgaagatggcaccatccggattcgttcttctcagagacctgtgccctaatgaaccggaggtgctctctctaacagatgcacccacattcacggcatccccggcaggtgga

SEQ ID NO: 229939 - DNA, 363 bp, Gossypium hirsutum
aacaaagagtcctacaatatagtaccgggagttgtagtcaaagtcccagcaggaagcactgtgtacttggctaaccaagacaacaaggaaaagctaatcatagcagtgcttcaccgccctgttaataaccctggacaattcgaggaattcttcccagctggaagccaacgccctcagtcatatctccgagcctttagtcgtgaaattcttgagcctgccttcaatacacgaagtgagcagctagacgagctgtttggtgggaggcaaagccgtcgaaggcagcacggacagggaatgttccgtaaagccagccaggaacaaataacggcattgagccaagaagctactctaccaagggagaaa

SEQ ID NO: 229940 - DNA, 388 bp, Gossypium hirsutum
atgagaaacgaaagaatcccataggaaggataaatctggctaattgtaccagtcatcagatagaaccagccaacagagaattttgtgcaagacgcaacacttttgaattaattactgtccgaccacaaagagaagatgaccgagagactcttgtcagccaatgcagggatacactctgtgtcaccaagaactggctgtctgcagatactaaagaagagcgggatctctggatgcaaaaactcaatcaagttcttgttgatattcgcctctggcagcctgatgcttgctacaaacctattggaaagccttaaactgggaaatttccatgctatctagaggttttttgatgtcatcttaagaaacacacttaagagcatcagatttactg

SEQ ID NO: 229941 - DNA, 352 bp, Gossypium hirsutum
cccacgcgtccgacaaagagcagatggaagtgcacacttaaggatggcatcatgcatataaacaataaagacattctctttaataaggcaacaggcgaatttgatttctgattttgttagataaaactgtagtcgccatcgtattgcagcagttgccctaaaagagcaagtcaaggggtgttattctgtgtttcgtaatttgtcttttaattattattagagtgaaaggttgattgaggggcatgggatatgctttattttaatgtcttccttaagacttgggttcgatggttgtcgtattgtacataaaggaagagagccatttcggccttagaatggatgactacttgag

SEQ ID NO: 229942 - DNA, 271 bp, Gossypium hirsutum
acaaacccaaaaaacaaagcagtgtttcaagaacagaatatcggcaaaaatgttcattgagagctttaaggttgagagtccaaatgtcaagtacacagacaatgcaatccagtcggtgtacaactatgagactactgagcttgttcatgagaacagggatggaacctatcaatgggttgtcaagcccaagactgttaaatatgaattcagaactgatatccatgtccctaaactgggggtaatgcttgttggatggggaggaaacaatggc

SEQ ID NO: 229943 - DNA, 390 bp, Gossypium hirsutum
atcgccgacgccgtccccattcagcacgtgagcccgcccgcgcccaccatggccacagttcaacagctggaaggaagatggcgcctggtggatagcaaaggctttgatgaatacatgaaggagctaggagtgggaatagctttgcgaaaaatgggcgcaatggccaagccagactgtatcatcacttgtgatggcaaaaacctcaccataaaaactgagagcactttgaaaacaacacagttttcttgtaccctgtgagagaaatttgaagaaaccacagctgatggcagaaaaactcagactgtctgcagctttacagatggtgcattggttcagcatcatgagtgggatgggaaggaaagcacaataacatgaaaattgaaagatggg

SEQ ID NO: 229944 - DNA, 358 bp, Gossypium hirsutum
ctcaattctcaaattgtagcgcccttttatatcaagcaatggctctggtcttgcatgctggaaaaacaaacaaaaatgcctttaaggcactcattgctgcagaatatagtggtgtgcaggtcaaaatggttgagaattttgagatgggtgtgtcaaataagactcctgagttcatcaagatgaaccctttggggaaggttcctgtgttggaaacacctgagggtcctgtatttgagagcaatgccattgctcattatgttgctcgctcaaaggttaacaaccctatatgtgggtctacattgattgattatggtcatatcgagcaatggattgatttcgcagccatggaaattgatgc

SEQ ID NO: 229945 - DNA, 382 bp, Gossypium hirsutum
atgccttgccagcctccaccccaggaaccatgcatccccaaaaccaaggagccctgcctccccaaggtgcctgagccctgccaccccaaagtgcctgaaccctgccagcccaaggttccagagccctgccaccccaaggtgcctgagccctgcccttcaacggtcactccagcaccagcccagcagaagaccaagcagaagtaatgtggtccacagccatgcccttgaggagccagccagcagatgctgaatcccctatctcattctgcgtatgagtcccatttgccttgcaattagcattctgcctccaccaaaaaagaatgtgctatgaagctttatttcctatacactctgagtctctgaatgaagctgaaggtcttag

SEQ ID NO: 229946 - DNA, 386 bp, Gossypium hirsutum
atggagattgctgagatcaatcgcatgatccagaggctgagatccgagatcgaccacgtcaagaagcagtgtgccaacctgcaggctgccattgctgatgctgagcagcgtggggagatggcactcaaggatgccaagaacaagctggaagggctggaggatgccctgcagaaggccaagcaggacctggcccgactgctgaaagagtaccaggagctgatgaatgtcaagctggccttggacgtggagatcgccacctatcgcaagctgctggagggcgaggagtgcaggctgaatggcgaaggcgttggacaagtcaacatctctgtggtacaatccactgtctccagtggctatggcggtgccagcggtgtcggcagtggctt

SEQ ID NO: 229947 - DNA, 268 bp, Gossypium hirsutum
gacccctatgccacctttgtcaagatgctgccagacaaggactgccgctacgccctctatgatgcaacctatgagaccaaggagagcaagaaggaggacctggtgtttatcttctgggcccctgagtgtgcgccccttaagagcaaaatgatctatgccagttccaaggatgccatcaagaagaagctgacaaggatcaaacctgaattggcaggcaaccggttccaggaagtcaaaggaccgttgacccttggagagaaattggggg

SEQ ID NO: 229948 - DNA, 371 bp, Gossypium hirsutum
ctccaccaccccctcagactctatctggtttttagggcttttctaacttttctgattattttttgataatccagagttcaatcatctaaaagaagccctaaaatctttgaatcaggtctgagcttgtggtttgttaggcctctttgatcaaactaagtttcatgtctgatcttgacgttcaaattcctactgccttcgatccctttgctgatgcaaatgctgaggactcaggtgcgggtgcaaaggagtatgtgcatattcgtattcagcagaggaatggtcgcaaaagcctgacaactgtccaggggttgaagaaagaattcagctataacaagatacttaaagacctgaagaaggagttttgctgcaat

SEQ ID NO: 229949 - DNA, 388 bp, Gossypium hirsutum
atcgctgagatgggggcggcggcggcggaagcggatcggactctctttgtgggcaaccttgaaacgaaagtgaccgaggagctccttttcgagcttttccaccaggctgggccagtaataaaggtgaaaattccaaaagataaggatggtaaaccaaagcagtttgcgtttgtgaatttcaaacatgaagtatctgttccttatgcaatgaatctacttaatggaatcaaactttacggaaggcctatcaaaattcaatttagatcaggaagtagtcatgcctcgcaagatgtcagtttgtcatatccccagcatcatgttggaaattcaagccctaccttcacgtctcctagcagcaggtacgaaaggactatggataacatgactt

SEQ ID NO: 229950 - DNA, 346 bp, Gossypium hirsutum
gtgaggcagcggggagagatgggagagatgggagagaggagaagaaagcagtgacgccattgagggaaatgacaccagagaggatttttgggaagatgggtcacttgcagaggttgttagatcggttcttgtcatgtcggcctacaggattggcaaagaattgtaggatgatcttgattgctttatatcctgttgtgaaagagagttttcaattatatgcagatatttgcgaggttttggctgtgctgcttgataagtttttcgatatggagtacccatattgtgtcaaggcattagatgcatattcaagtgcattgaagcatatagatgagttgttttattttat

SEQ ID NO: 229951 - DNA, 366 bp, Gossypium hirsutum
ggatgtcatttgccaagctaaatcagggatggggaagactgcagtttttgttctatcaacactacagcaaattgaacctagtccaggacaagttattgcccttgttttatgccatacaagggagttagcttaccagatttgtcacgagtttgagaggttcagtacttatctgcctgatatcaaggttgttgtcttctatggaggtgtcaacatcaaagttcacaaagatctactgaaaaatgaatgcccccacattgttgttgggacacctggaaggatattggctcttactagagacaaggatctttctttgaagaatgtgagacatttcattcttgatgaatgtgacaaaatgcttgaatcact

SEQ ID NO: 229952 - DNA, 368 bp, Gossypium hirsutum
catttcccctaaattccgtcttttttcttcaaattccccacaaatggccatcactttctcagatctccacacggaatctggccttaaatcccttaatgacttcctcaccggcaaatcttacatctctggggataagctgactaaggatgacataaaagtttatgctgctgttttgaaaaatcctggtggttcatttcccaatgtgagccaatggtataattgtgtgtcttcccatctcgcttctagcttccctgggaaagctgttggcgtttcacttggtggcaaagctgatccagctcaatctgctgaagctaagtctcctgctgcggacgatgacgatgatgacttggatctgtttggcgatgaaa

SEQ ID NO: 229953 - DNA, 378 bp, Gossypium hirsutum
gctgtcgcggtcccgctgtgtgtcccgggcattcagccgctcgctctctgccttccagaaggggaactgccctctagggagacgttccctgcctggggtctccttatgccagggaccaggttaccctaacagcaggaaggttgtcattaacaacaacagtgtcttcagtgttcgcttcttcagaactacagctgtatgcaaggatgacttggttacagtcaaaaccccagcatttgcagaatctgtcacagagggagatgtcaggtgggagaaagctgttggagacaccgttgcagaagatgaagtggtttgtgagattgaaactgacaagacatctgtgcaggttccatcaccagcaaatggcgtgattgaagctct

SEQ ID NO: 229954 - DNA, 360 bp, Gossypium hirsutum
cccacgcgtccgacaaagagcagatggaagtgcacacttaaggatggcatcatgcatataaacaataaagacattctctttaataaggcaacaggcgaatttgatttctgattttgttagataaaactgtagtcgccatcgtattgcagcagttgccctaaaagagcaagtcaaggggtgttattctgtgtttcgtaatttgtcttttaattattattagagtgaaaggttgattgaggggcatgggatatgctttattttaatgtcttccttaagacttgggttcgatggttgtcgtattgtacataaaggaagagagcattttcggccttagaatggatgactacttgagacagcttc

SEQ ID NO: 229955 - DNA, 329 bp, Gossypium hirsutum
gggatccccgcggttgagagcatgggttctacaggggccggtagagcgccgccggagttaccggagcggaactgtgggtaccgcgaagtccagtactgggatcagcgctaccaaggtgcagccgattctgccccctacgattgggtcggggacttatactccttccgtgcccccctagagccggagctgcggcccgaggaccgtattcttgtgttaggatgtgggaacagtgccctgagctatgaggctgttcttggaggctttcctgatgtgaccagagtggactactcgtcagtcacggtggctggcatgcaggctcgctatgttca

SEQ ID NO: 229956 - DNA, 286 bp, Gossypium hirsutum
atcaaacacctcaagaaaaggtaaaaaagcatggagagctaacataagcacagaagacatccatgatttcttcgagaaatccactaaagatgctctctctgggggttctcttacttcagctcctactgaatccctcttcttcatcgacaaatctcaagatctttctgtgaaaaaaaagattgagaagaaaagagaaaaggtattgcgtgtggatagtatgttgaagaagaacccttttgttgaagctgtaccatcttcgaagcaaaagagttctaagaagaaaaag

SEQ ID NO: 229957 - DNA, 369 bp, Gossypium hirsutum
tcgcccacgcgtccgtttgtcttttgcatcctttgtttgtctcttcatctcctgcactacttgcaaaataactcgctgaagccgtgctacaatggcactagcgttttcaacaattaattaatcagagccgcagcttgtttcttttaaactctaaatataaaggaggccaaacatgccgcctccgtaaataccaatttgggagggctgatgaggccactcatcccgactccatgagagccaccttggctgaattcctctccactatcattttcgtctttggcggcgaaggctcaattctcgctcttgacaagatgtacaaggatacgagtgcgacgcctgcaagactggtgatgatagcacttgcgcatg

SEQ ID NO: 229958 - DNA, 362 bp, Gossypium hirsutum
ggtgatagccggctgagcccggatgtggggcacctggtgctgaccaccctctgcccggccctccatgccctggtggcggatgggctgaagcctttccggaaggacctcatcaccgggcagcgcaggagcagcccctggagcgtggtggaggcgtcggtgaagccaggctccagcacccgctcccttggaaccctgtatagccaggtcagccgtctagccccgctgagcagcagccgtagccgcttccatgcctttatcctgggccttcttaacaccaagcagttggagctgtggttttccagtctccaggaagatgcaggccctgttttccttctgtaccctgcaacaggaattttttttcc

SEQ ID NO: 229959 - DNA, 218 bp, Gossypium hirsutum
cgacaacgtgaaagccaaaatccaagacaaggaaggcatcccgccagaccagcaacgtctcatcttcgccggaaagcaactcgaggacgggcggactttagccgatttcaatatccagaagggatctggctttcaatctggtcctctcgtctttcgaggggggatgcaagatctttcttcaagaactttgaccgggtagaccattacttttaaaagtg

SEQ ID NO: 229960 - DNA, 355 bp, Gossypium hirsutum
ctttttgacgaatttgcagccagtttttgagtcttgtttgcagctcaaggtgttaaaattacaagcatgcaagtatctggcggactcatcattggagcccctttacaaggaaggtgctttacgagaactccgggatttggacttgtcatatggtaccctgtgccagtctgccatagaggagcttcttgcttattgcacgcatcttacccatgtgagcttgaatggatgcataaatatgcatgacctaaattggggttctactggtggtggatttgaatcacttaacggatctagcatgtttccttttgagaacatgaacgactcaattgagcaaccaaatcgtttactgcagaac

SEQ ID NO: 229961 - DNA, 378 bp, Gossypium hirsutum
ctaacattcagccaaggtgtaaatatgagagctggtatcaataaaattgcacttctaagcattgctgttggtcttccggtatgcgctctccctccctccctctctctctctccttctctgctcttgtgattttggaatttctttgactgactgaatatttggtttgaatgcagaacgttggtccacattttgagacatggaatgccggtgttcttggcccggttacactgaatggcctcaatgagggaaggagagatctctcgtggcagaaatggtcttacaagattggccttaagggggaagcattgaatcttcattctctaagtggtaggtcatctgtggagtgggcagaagggtcgttagtggcacaaaagcagc

SEQ ID NO: 229962 - DNA, 389 bp, Gossypium hirsutum
gggggtttgtaataggattcataagagggcccgaactaagcaaaccttataagtgttgaatgatgggaaggtttctaagaggcgcccagctatcactggcgaactaaaaaatgtcttaaccaatgttgaagtgaagacgccttataaattccgagcggcaactgtagctttttaataacttcggaaccgccccaatagttctgcccttcttatcacggaatcctcgttccagatatttgatcgggaaaatgcccagaccaaaagactgaattgtgcacacagagccatgccgatcttgctcttgatgaagctgcagaagcataccttgtgggcttaattgaagacaccaaccagtgtgcgacacacgccaagcgagtgactataacgcc

SEQ ID NO: 229963 - DNA, 390 bp, Gossypium hirsutum
cctgcttcctctgctgatgttttcaacccacgaggtggtcgcatcaccacagttaacagtttcaatcttcccattctccaatacctccaactcagcgccgagaggggagtcctttacaataatgctatctacgctcctcactggaacatgaatgcccacagcattgtttacatcacaaggggaaatggaaggattcaaattgtgtcggaaaatggagaggcgatattcgatgagcaggttgagaggggtcaggtcataaccgtaccccagaatcatgcagtggtgaaaaaagcaggaaggcgagggtttgaatggatagcattcaagacaaatgccaatgctaagattagtcagattgctggacgtgtctccattatgcgaggattgccg

SEQ ID NO: 229964 - DNA, 398 bp, Gossypium hirsutum
tctaattctaaagctaagagttttaagttaacgaagcatttgggtcgtttcgaagtaatggaaacttcaggaaaagtaaagaagggagccggaggaaggaaaggtggtggcccgaagaagaagcccgtttcaaggtctgtcaaagctggtctccagttccccgttggtaggatcggccgttacttgaagaaaggaaggtattcacagcgtgttggaaccggagccccggtttacttggctgctgttcttgagtacttggctgctgaggtcctggaattggctgggaacgctgcacgtgacaacaagaaaaacaggatcatcccaaggcacgttctacttgccgtgaggaacgacgaagaattagggaagcttctcgccggcgtaacaatcgctcacgg

SEQ ID NO: 229965 - DNA, 348 bp, Gossypium hirsutum
atcctgaccgccactattgaaaacaaccgggtcatcctggagattgacaatgccaggctggctgcggatgacttcaggctcaagtatgagaacgagctggccctgcgccagagcgtggaggctgacatcaacggcctgcgccgggtgctggatgagctcaccctgtctaagactgacctggagatgcagatcgagagcctgaatgaggagctggcctacatgaaggagaaccacgaggaggagatgaaggaattcagcaaacccaggggtcgggcaggtcaacgtggagatggatgccaccccgggcattgacctgacccgcgtgctggcggagatgcgggagcagta

SEQ ID NO: 229966 - DNA, 375 bp, Gossypium hirsutum
gagttgctgactttgttcatggctctgatggaatggggaatatatttctacctcctccaaaaacagagaaatctgataagagtgcctctgaatttttagttgaaaaggtctctcagtaccctggtgaagtatccatacttgcacttggaccactgacaaatgtggcattggcaatcaaaagagactcttcctttcctagcaaggttaaaaaaatagtagtacttggtggctcattctttgcattaggaaatgttaatcctgcagctgaagcaaatatttatggtgatcctgaagcagctgatgttgtgtttacttcgggagcaaatatcgttgttgtcgggataaacattactacacaagtccaaatgacagatg

SEQ ID NO: 229967 - DNA, 374 bp, Gossypium hirsutum
gtgcgagcagccgcagccagcaagcagcagtagcaacagcaggagcggaagaatgtctcacaggaaatttgagcacccaaggcatggttcccttggatttcttccaaggaagcgagcctctcgtcacagaggaaaagtgaaggcattcccaaaggatgaccctaccaaaccttgcaagctcactgcctttctggggtacaaggctggtatgacacacattgtcagagaggtcgaaaaacccggatctaagcttcacaagaaggagacatgtgaagctgttacaatcattgaaacccctcctatggtgattgttggggtggttggatatgtgaagacaccacgtggccttcgctccttgaacaccgcctgggctc

SEQ ID NO: 229968 - DNA, 395 bp, Gossypium hirsutum
atgcacctacaccagccaacccagatcccgaggtccaacagcgcccggcccagatccccacgcctgccagtagcaagccgagagccagccggccggcgcactccgactccgagcagtctccgtccttctgcccgagccccgagccctttccgggacccctgccccgcgggcagcgctgccaacctgccggccatggagaccccgtcccagcggcgcgccacccgcagcggggcgcaggccagttccactccgctgtcgcccacccgcatcacccggctgcaggagaaggaggacctgcaggagctcaatgatcgcttggcggtctacatcgaccgtgttcgctcgctggaaacggagaacgcaaggctgcgccttcgcatcaccgagtctgaaga

SEQ ID NO: 229969 - DNA, 439 bp, Gossypium hirsutum
caagtttgtacgctgaagcacgctggtgccgcgccgcgatttccgggatgaaacacactacttgctggtgataacaaaaaggattccactgagccaccctacagccagaagagatacaacggaattggttaggaagtcagcacttacattaagaaaactggctacaacccggacacagcagcatttgagccaatttctggccggaatggggacaacatgctggagccaagtgctaacatgccttggctcaagggatggaaggtcacccgttaggatggcaatgcccgtggaaccacgctgcttgaggctctggactgcatgctaccaccaactcgaccaactgacaagtccttgcgcctgcctattgcggatgtctacaaaattggtggaattggtactgttcctgctggcccagtggagactggtgttctcaaacccg

SEQ ID NO: 229970 - DNA, 386 bp, Gossypium hirsutum
cccattttgaccatgcctaatgatgatataacacatcctacaccagatctgactggttatattactgaagggcagatttacattgatagacaacttcacaatcgacagatatacccaccaattaatgtactcccttcactctctcgattaatgaagagtgctattggtgaggggatgactcgtagagatcatgctgatgtgtccaaccagctctatgcaaattatgctatcggaaaagatgttcaagcaatgaaagctgtagttggagaggaagcactttcttctgaggatctgctttatctggagttcctagacaaatttgagagaaaattcgtgactcaaggtgcttatgatactcgcaacatcttccagtcgcttgatctaac

SEQ ID NO: 229971 - DNA, 295 bp, Gossypium hirsutum
gcgtaccgttcctgtataataacaccaggacaatatcgaggagattgttctagctgtaagccaacaccctcatgtgtatacactagcctttacaggagaaatttttgggccagacttcaatacacgaagggagcagctacacaagctgtgtggtgtgaggcaaagccgtctgacgtagcagggacagggaatgtttgctaaagacagtcaggaactaagtgcggcattgagctatgtcgctgacataccaagggagaaaagttgcgagagaagcgccttcaacttattgagccaa

SEQ ID NO: 229972 - DNA, 391 bp, Gossypium hirsutum
ggcatggtcagtttggcattgatttgttcgttttcaaagatgagaagccatttgaatttaagggatgtgaaggcggaagaagtgccagaggctactttgaatgtcgttgctgaaactctcagaacttcctcttccctcagggtttctgaagacgggaagaaagttggtagaagcactgcactattagagcctgaagaattgttagagcaattagacagtagaacaattgctgcatcaccatttgagtttaatgtcaagatggaagctgtagaagccttttttggtcaatatgctaaggtaaatagtgtgaggttacctcgtcatgtagcaaacaaaaagtatttttgtggcactgctttaattgaattctcagctgaggaagatgcacaaa

SEQ ID NO: 229973 - DNA, 374 bp, Gossypium hirsutum
  unsure (1)..(374): unsure at all n locations
cggacgcgtgggctcccgtggagatgtaactatactgccaacccttgtgataaacaacagacagtatagagggaagttggacagaggagctgttctcaaggcaatttgtgcaggttttcaagagaccacagagccagcaatttgcttaactgaagatatacaaactaacgagtgcttagaaaacaatggtggttgctggcaggacaaaagtgccaacataactgcatgcagggatanccttccgggaagagtgtgcgaatgcccgttagttaatggtgtgaagttttctggagatggttatacacattgtgaagcttctgcggctttacgctgtgaaatcaacaatggaggatgtttgagagaaacacgggaag

SEQ ID NO: 229974 - DNA, 376 bp, Gossypium hirsutum
atcacccctgcactccagcctgagtgacagagtgagattgtcttaaagaaaaaaaagctcttcccagagattttcaccaagtttttctttcatctttaggcaccttgacagcagtagcaatgagcgtccagatattagttccatccagagacgtattaaggtatccaaatgggatttgggagaaaacttgggaaataagtttaaatgattttttcacgtttctgatttttacagagactggcattcaactactgctcaataaatatttgttgaatgagccaagaatcaatcttgttctttgttttagaaagtaactcatgacatggacatgtgctatgggatgatgggaagcctgtttcgcagtggctcccggcag

SEQ ID NO: 229975 - DNA, 379 bp, Gossypium hirsutum
cccacgcgtccggtttctataaaaacccgaaccagaaaaccctaactcgtcgttgttattttctctcgaagagccgctcctcaccttccggaccagacaggcgcagatcctctcagcccagcgaccatgacaaagagaacgaagaaggccggaattgttggaaaatatggtacccgttatggtgccagtttgaggaagcaaattaagaagatggaggtgagtcaacacagcaagtacttctgcgagttctgtggaaagtatgcagtgaagagaaaggctgtaggaatctggggctgcaaggattgcgggaaagttaaagctggtggtgcttatactttgaacactgccagcgctgtgacggtgaggagtactattagga

SEQ ID NO: 229976 - DNA, 392 bp, Gossypium hirsutum
cccacgcgtccggaagaggaacaattacgttcgtgacacatgaaaacaaagagtcatacaatgtagctcctggagttgtagtaagaattccagcaggaagcactgtgtacttggccaaccaagacaacagggaaaagctaaccatagcagtgctccaccgccctgtcaataaccctggacaattccagaaattcttcccttctggacaggaaaatcctcagtcatatttacgaatcttcagccgtgaaattcttgaggctgtcttcaatacacgaagtgagcagctagacgagctgtttggtgggaggcaaagccatcgaaagcagcagggacagggaatgtttcgtaaagccagccaagaacaaataaaggcattgagccaagaagctact

SEQ ID NO: 229977 - DNA, 409 bp, Gossypium hirsutum
atgtggctcactccctttcctctgttgcctctcggtcacgcttgctctttcaccatgcctggatcgcttcctttgaatgcggaagcttgctggccaaaagatgtgggaattgttgcccttgagatctattttccttctcaatatgttgatcaagcagagttggaaaaatatgatggtgtagatgctggaaagtataccattggcttgggccaggccaagatgggcttctgcacagatagagaagatattaactctctttgcatgactgtggttcagaatcttatggagagaaataacctttcctatgattgcattgggcgactagaagttggaacagagacaatcatcgacaaatcaaagtcagtgaagactaatttgatgcagctgtttgaagagtctgggaataccg

SEQ ID NO: 229978 - DNA, 378 bp, Gossypium hirsutum
ccatttcacagaaggcagaaaacagaaatggtgtgtttgaagctgcagaagcggctagccgctagcgtcctgaagtgcggtcgcggcaaggtctggctcgatcctaatgaaatcaacgaaatctccatggccaactccaggcagaacgttaggaaacttgtgaaggatgggttcatcatcaggaagcctactaagattcactcccgctctcgcgcacgtaggatgaaggaggccaaaagaaagggaagacactctggatatggtaagaggaagggtaccagggaggcaaggttgccaacaaagattctttggatgaggagaatgcgggtactgaggcgattgtttcgtaagtacagggaattcaagaagattgacaag

SEQ ID NO: 229979 - DNA, 378 bp, Gossypium hirsutum
gagtattagcaattgcagtcccaacaagtctgctagatcaatggagggttttacaacaagaacaaaggcatccgctcaacctttggagaacgccgacgagcttatcgcctccgtcgagactttcatctttgattgtgatggagttatatggaagggtgataaattaatagatggagtccctgaaactcttgatatgcttcggtcaaagggaaagagactggtttttgtcacgaataactcaaccaaatccaggaaacaatatggtaaaaaatttgagacacttggcctgaatgttaatgaggaggaaatttttgcttcttcatttgctgctgctgcatatttgaagtccattaatttcccaaaagataaaaaagttta

SEQ ID NO: 229980 - DNA, 409 bp, Gossypium hirsutum
atcgccatgggccgtgtgatccgtggacagaggaagggcgccgggtctgtgtttcgcgcgcatgtgaagcaccgtaagggcgctgcgcgcctgcgcgccgtggatttcgccgagcggcacggctacatcaagggcatcgtgaaggacatcatccacgacccgggccgcggagcgccgctcgccaaggtggtcttccgggatccgtaccggtttaagaagcggacggagctgttcattgccgccgagggcattcacacgggacagtttgtgtattgcggcaagaaggcccagctcaacattggcaatgtgctccctgtgggcaccatgcctgagggtacgatcgtgtgctgcctggaggagaagcctggagaccgtggcaagcttgcccgggcatcagggaactatgcca

SEQ ID NO: 229981 - DNA, 331 bp, Gossypium hirsutum
ctttttgacgaatttgcagccagtttttgagtcttgtttgcagctcaaggtgttaaaattacaagcatgcaagtatctggcggactcatcattggagcccctttacaaggaaggtgctttacgagaactccgggatttggacttgtcatatggtaccctgtgccagtctgccatagaggagcttcttgcttattgcacgcatcttacccatgtgagcttgaatggatgcataaatatgcatgacctaaattggggttctactggtggtggatttgaatcacttaacggatctagcatgtttccttttgagaacatgaatgactcaattgag

SEQ ID NO: 229982 - DNA, 385 bp, Gossypium hirsutum
tggtcaaagaagaattctgttctctggttctattcattatcccagaagcacacctgatatgtgggaagatctgattcagaaagctaaagatggtggacttgatgtgattgagagttatgttttttggaatgtccatgaaccatctcctggaaattataattttgaaggaagatatgaccttgtgagattcataaaaacagtacaaaaagcaggtctttatgctcatcttcgtattggaccttatgtttgtgctgaatggaactttggagggttccctgtgtggttaaaatttgtgccaggcattagcttcagaacagataatgagcctttcaagagagctatgcaagggtttactgagaagattgttggactgatgaagagccat

SEQ ID NO: 229983 - DNA, 383 bp, Gossypium hirsutum
atcggccagatgccaccaagaatgccaggaatgatttcctgaaagaggtgaagatcatgtcaaggctcaaggacccaaacatcatccggctgctgggcgtgtgtgtgcaggacgaccccctctgcatgattactgactacatggagaacggtgacctcaaccagttcctcagcgcccaccagctggaggacaaggcagctgagggggcccctggggatgggcaggctgcgcaggggcccaccatcagctacccaatgctgttgcatgtggcagcccagatcgcctccggcatgcgctatctggccacactcaactttgtacattgcgacctggccacgcggaactgcctagttggggaaaatttcaccatcaaaatcgcagac

SEQ ID NO: 229984 - DNA, 394 bp, Gossypium hirsutum
gggatggagccgaagcagcagcgcaggttatccccgtttcccctcccccttcccttctccggttgccttcccgggccccctacactccacagtcccggtcccgccatgtcccagaaacaagaagaagagaaccctgcggaggagaccggcgaggagaagcaggacacgcaggagaaagaaggtattctccctgagagagctgaagaggcaaagctaaaggccaaatacccaagcctaggacaaaagcctggaggctccgacttcctcatgaagagactccagaaagggcaaaagtactttgactcaggagactacaacatggccaaagccaagatgaagaataagcagctgccaagtgcaggaccagacaagaacctggtgactggtgaccaca

SEQ ID NO: 229985 - DNA, 364 bp, Gossypium hirsutum
attggaaacaggctatagcgcttactcctggtaattatattgaagcgcagaattggttaaagatcacgcggcgtttcgaataagaacaagagctctctgtttatttattattattttagttttaggattcgaaattcgaattagaaattagagaattctatttaattctatttctatttaatttctattaaatccatttatttaatatttaatttaattaaataaattacggtactatttaaattattaaattcgattttctagtcaatttgaatatttaaattaaatagtaaaaaatattaatttaattggaattgttaattgtgtaatggtttggtttcgtggacccatgggtcaaataaaa

SEQ ID NO: 229986 - DNA, 391 bp, Gossypium hirsutum
atgcaaccacatcaagctgtcgggcagcaacccctacaccactgtcaccccgcagatcatcaactccaagtgggagaaggtgcagcagctggtgccaaaacgggaccacgccctcctggaggagcagagcaagcagcagtccaatgagcacctgcgccgccagtttgccagccaggccaacgtcgtgggcccctggatccagaccaagatggaggagatcgggcgcatctccattgagatgaacgggaccctggaggaccagctgagccacctgaagcagtatgaacgcagcatcgtggactacaagcccaacctggacctgctggagcagcagcaccagctcatccaggaggcccttatctttgacaacaagcacaccaactacaccatg

SEQ ID NO: 229987 - DNA, 396 bp, Gossypium hirsutum
aattcagttaagagtggagttgtgtacatggggaatgactcacttagtaaagtaatcagtgttggtactatttagatcaagatgcacgatgggataattaggacattgtcaaatgtcaggcatatgattaacttaaagaaaaatctcatctcctttggaaatttggaccagaagggttgtaaaattaacatcgagtcaagcgtcattaaagtatctcgtggggctttcattttgatgaaaggtaaaaatattgacagtctttatgttctagaaggatcaacgatgacccgtaaaataggacgtccatcgtctgttaaggagtcgaagttgactcatttgaagtggagacaacttggccataggagggaaaaaagtataactgtttcgtttaagaga

SEQ ID NO: 229988 - DNA, 361 bp, Gossypium hirsutum
agattatgatagattgagagaatctattgacttgcatgataactttgatcagattggccttgctcaaaagattgagaaacatgaactacttgagatgagacgtgttgccgcatacatatacaaaaaggcgggcagatggaagcagtccattgccttgtcaaagaaagacagcctttacaaagatgctatggaaactgcttcacagtctggtgatcgtgaacttgctgaggagttgcttgtttacttcattgagcagggcaagaaggaatgttttgcggcatgcctctttgtctgttatgacttaattcgaccagatgttgctcttgaaatggcctgggttaacaatatgatagacttcaca

SEQ ID NO: 229989 - DNA, 379 bp, Gossypium hirsutum
gagaaataagaaaggtcaaagcccaactaaatggaggatttgatatgaaagatttaggaccagcaaagaagatacttggtatggagattctcagagatagaaaagcaagtaaattgtaccttcagaaggggtacattgagaaaattctttgcaggttcaatatgcagagtgctaagcctgttagtactcctttagcagcctatttcagactttcattggctttgtctccacaatcagatgatgagattgagtacatgtcacatgttccatactttagtgcagtgggatctctcatgtatgctatggtttgctcacattcagatttatcatattgcagtcagtacaattagcaaatacatggcaaatcccggaaaagaac

SEQ ID NO: 229990 - DNA, 326 bp, Gossypium hirsutum
ctttcattagcatcaaaatcactcgaggtttctttatcactgaaaaatgtcttgctgtggtggaaactgtggctgcggtactggctgcaagtgtggcagtggctgtggaggatgcaagatgtatccagacctgaacgctgccgagatgaccacaactgagactctggttcttggtgtagcaccccagaaagcacactttgagggagctgagatggaattcggggctgagaacggctgcaagtgtggagacaactgcaccttgcaacccttgcaattggaaaatgattagagaccaaagccaaagcttcctggaagcagaggcgcct

SEQ ID NO: 229991 - DNA, 394 bp, Gossypium hirsutum
ttacggtgctcctatgcttttctatgggggacaatgggagggtattcatggggcggacttcccaggttgtcccgagacatatcaatcacagtcgcaacaaaatatacaagataggccacaaagagatcagcaccaaaagctcagacggttgaaggagggcgatgtggttgccttgcctgctggagtagctcactggattttcaacaatgggcggtctcaacttgtgttggtcgcacttgttgatgttggcaatgatgccaaccagcttgatgagaactttaggaaaattttccttgctggtagtccacaaggaggtgtggtaagaggaggtcaaagcagagaccgaaaccaaaggcatagcagaacccaaagaggggtacgggaggaggaagag

SEQ ID NO: 229992 - DNA, 371 bp, Gossypium hirsutum
atgggccctcttgcttctctgatagctcccagcgtactctctgcagccatgattgccagacagcagtgtgtccgaggcgggtctcggggcttcagctgtggctcagccatcgtaggcagtggcaagagaggtgccttcagctcagtctccgtgtctggaggtgctggccgatgctcttctgggggctttggcagcaggagcctctacaacctcggggggaacaagagcatcttcatgagcgtggctgggtcacgacaaggcgcctgctttggaggtgctggaggcttcggcactggtggctttggcggtggatttggtggctccttcagcggaaagggtggccctggcttccctgtctgccctgctggggg

SEQ ID NO: 229993 - DNA, 289 bp, Gossypium hirsutum
ataccgagtgtacttggcagttccgcgcgtccgagcagtcgatcccggcacccctgcccgcgggtctgttcgtgttcagctcgcgtcctgcagacgtccgacgtgctccagttggagaccgaggttcccgggctctagctgagtgggcggcggcaccggtggagatgcctgggaagaaggcgcgcaagaacgcgcaaccgagcccaacgcgggctcaggcagagctcgaagtcgagtgtgctactcaactcaggagatttggagacaaactgaacttccggcagaaact

SEQ ID NO: 229994 - DNA, 299 bp, Gossypium hirsutum
atggcccgctgagatcaaagactacagtccctactttaagaccattgaggacctgaggaacaagattctcacggccacagtggacaatgccaacgtccttctgtagattgacaatgcccgtctggccgcggatgactttcgcaccaagtatgagacagagctgaacctgcgcatgagtgtggaggccggcatcaatggcctgcgcagggtgctggatgaactgaccctggccagagctgacctggagatgcaaattgagagcctgaaggaggagcttgcctacctgaaaaagaaccact

SEQ ID NO: 229995 - DNA, 374 bp, Gossypium hirsutum
gaagtattaattcacctataccaacatcaataatggttctagcagttgctaaaaaggactgacctagaatcagaggtacatcactatcctcatctatgtctaaaacaataaaatcaactgggaatatgaacttatcaattttcacaagtacgtcctcaataatacccctaggaaatctaatggttctatctgctaattgaatacttatcctagtttgtttgggttttccgagaactagttgcttaaacatcttatagagcatggcattaatactaacccctaaatcaagcaaagcattattaacatttaaacttctaattaaaaaaggaatagtaaaactccctagatctttcaatttgtggggtagcttattc

SEQ ID NO: 229996 - DNA, 376 bp, Gossypium hirsutum
atctcgcccgacccgccggtcaccagctacgccccgtccgatgtgccctcggggatcgcgctgctcctcaccatccctttcgccttcttcctgccggagctgatatttgggttcctggtctggaccctggtagccgccacccacgtagtattcccattgctgcaaggatgggtgatgtatgtctcaatcacctcgtttctcatctccttgatgttcctgttgtcttacttgtttggattttacaaaatatttgaatcctggagagttctggacagcctgtaccacgggaccactggcatcctgtacatgagtgctgccgtcctacaagcacatgccacgattgtttctgagatcatggacccgagaatttactaca

SEQ ID NO: 229997 - DNA, 453 bp, Gossypium hirsutum
ctaatacgtgtcactatagaacaagctggtacacatgagcgtgctggtaccggttctgagtttccgccataccggagcgtgtgtatgcagcctgtgcatttggaccatgcttgatctgatcgcagcagacacacgattggacttggtcctgttgctggcctttagtgagcacaatacggctggaaatatattcatctatgcctttagcatttcatctgcgatggccatggtctttctggggaccagagggaacacggcagcacagctgtccaagacttttcatttcaacacggttgaagagattcattcaagattccagagtctgaacgctgagatcaacaaacctggagcgtcttatattctgaaacttgctaatagaatatatggagagaaaacttacaatttcctccctgagttcttggcttcgactcaaaaaacatatggtgctgacct

SEQ ID NO: 229998 - DNA, 389 bp, Gossypium hirsutum
attgcagttccattgggatcgcttccgcacttttgctcgactagacaaaaaaacagatgaaagccttaccaagtacttccatggctttgtggccatgtgccgccaagtatgccgccttcccccagcagctggagatgaacccccagaccctaatctgttcattgagcccatcactgaggagagggcctcacggactctttaccgtatagaattgcttcggcgcttacgggaacaagttttatgccacccccttttggaagatcgactggcattgtgtcagcctcctggtcctgaattgcccaaatggtgggagcctgttcggcatgatggggagcttctacgaggggcagcccgccatggggtgagccaaacagactgcaacatcatgc

SEQ ID NO: 229999 - DNA, 266 bp, Gossypium hirsutum
catgaatccagccagggcatttggtccagccttggtaggatggaggtggaaccaccactggatctactgggtaggtccactgataggtggaggtttagcggctctgatatacgagtacatggtgatcccagcagctgagccaggacacccaacgcaccagcccttggctgcagaagattactagtacagtgtttcttgtgttttgtacctgtacctgtacctgtacctagctacataatttgagtctttacggatccatcatgctt

SEQ ID NO: 230000 - DNA, 366 bp, Gossypium hirsutum
gcacttcaaagggttgcttcaaaggctcctattcttaggggcctcaaagaggtccccttatctatcttagaagcaaacccccacactttagttctcccacaccattgtgacgctgagaaaatttaccttgtcgcccacggaagaggaacgcttaccctcttgacacatgaaaacaaaaaggcctacaatatagtaccgggagttgtagtcaaagtcccagcaggaagcactgtgtacttggctaaccaagacaacaaggagaagctaattatagcagtgcttcaccgccctgttaataaccctggacaattcgagggattatttccagctggaagccaacgccctcagtcatatatacgagccttt

SEQ ID NO: 230001 - DNA, 314 bp, Gossypium hirsutum
agccttccgaaaaacccagccttagcagagcggctgaacctaccataatattaatccatgccggcaccgatctggctatgggctttctctgtagccctaactctggttccgtctgtttttggaaactctgaaggagatgctcttaacacgttgagaaaaagtttgaccgatccagataacatactccagagctgggatccgaaccttgttaatccttgtacttggtttcacatcacttgtaaccaaaataatcgagtcactcgagtagatttaggtaattctaacctgtctggacatttggtacctgagcttgg

SEQ ID NO: 230002 - DNA, 235 bp, Gossypium hirsutum
cttgtttcttttaaactctaaatataaaggaggccaaacatgccgcctcgtagataccaatttgggagggctgatgaggccactcatcccgactccatgagagccaccttggctgaattcctctccactatcattttcgtctttgccggcgaaggctcaattcttgctcttgacaagatgtacaaggatacgagtgcgacgcctgcaagactggtgatgatagcacttgcgcatg

SEQ ID NO: 230003 - DNA, 268 bp, Gossypium hirsutum
gttcaatgccatgtcgatgcgacattacttttactaacgaaattttcttatttcacgactctttaacctctcgagctaaaatttggatcgacttttcttcaatatttatatcagactaaattttgatctcagatagaggaatcacatgcgaaggatcagatctgtaacgtcgaaacatccatacgtgaaacacattatgaatcttttctaattctggtggcaacaacaatctatatgctatcggcccaatacgttatataatttcata

SEQ ID NO: 230004 - DNA, 355 bp, Gossypium hirsutum
atgtgcccgaggcagcggcccattgcgatcaaaggctacaggccatacttgaagaccatcgaggacctggggaacaagatcattgcagccaccattgagaatgcgcaccccattttgcagattgacaatgccaggctgtgagtcgatgacttcatgacaaagtactagcacgaactggccctgcggcataccgtggaggccgatgtcaatggactgcgccggctggtggatgagctgaccctggccaggactgacctggagatgcagatctaaggcctgaaggaggagctggcctacctgaggaagaaccacttggaagtactgcttgcactttgagggcctagctctggagaag

SEQ ID NO: 230005 - DNA, 235 bp, Gossypium hirsutum
gttcttttgtatgtatgtaatgatgatcgtgctaatgcccgatgtgtaagtattctatgagggatggtcattatattgggtcaggcattaccattctaaactttttaaggactccgagatcaatccacctatggttttactggatcctgttcgagaacgtgatgtcgttgcaccggacaaaggcaacgtttatctggctcctagaggcagggagagccaatgaatgggtcgtgac

SEQ ID NO: 230006 - DNA, 400 bp, Gossypium hirsutum
atacctggacaaggtgcgtgctctggaggaggccaacgccgacctggaggtgaagatccgcgactggtaccagaggcagcggcccagtgagatcaaagactacagtccctacttcaagaccatcgaggacctgaggaacaagatcattgcagccaccattgagaatgcgcagcccattttgcagattgacaatgccaggctggcagccgatgacttcaggacaaagtacgagcacgaactggccctgcggcagaccgtggaggccgatgtcaatggcctgcgccgggtgttggatgagctgaccctggccaggactgacctggagatgcagatcgaaggcctgaaggaggagctggcctacctgaggaagaaccatgaggaggagatgcttgctcttcga

SEQ ID NO: 230007 - DNA, 378 bp, Gossypium hirsutum
  unsure (1)..(378): unsure at all n locations
agaaaaatggctgatttgagagacgaacacggcaaccctattcaactcaccgacgaacacggcaacccggttcaactcactgacgaacacggtaaccccatttatgtcaccggtattgccaccaagcatcccacgacgacaacgtcactgtcgggtttaatgggatatggcaccggttccgccgtcgccactgatcagtcacaacagcagctgcagccaccgcctccgcagcaaacacagccgctgcattacgaggtttccggcaaggaaaagattcaacgctccagcagcttcaactccagcttcagctttagcttcgtngaagattaatggattggccgtagaaggaagaaagggctgaaagagaaagtaaaggag

SEQ ID NO: 230008 - DNA, 186 bp, Gossypium hirsutum
actgcgttgttcttccgctcacgattttgatccccgaagtttgggttcctatttggggagctgattatattgcgtcaggcattaccattctaaacttttgtaggactccgagatcaatccacctattgttttactggatcctgttcgagaacgtgatgccgattcaccgcacaacagcgacgtgaa

SEQ ID NO: 230009 - DNA, 380 bp, Gossypium hirsutum
cttaagccaagcgtgcgctatctccatgtctctgtctcccccccatttcagatctcaaaggcctagacgctgtttcctgtttcaaagcgtgagatggcgacaacatcagcagctacattctcgatcggatcaactgtctcctttggaagaagggggagtccacttctgctaacaaaaccttctgctgcagggtgctcctcacagaattcacttgcaagtttcagtggccttaaggcagcaacatacgtgaactgtgattctgaatcctccttccttggcaaggaaagcagtgcaactcttagggtctctttcacgcggaaagcacagaagccaaaccagagttctaaccatggcttacagcttcaagcatcttacaaagt

SEQ ID NO: 230010 - DNA, 402 bp, Gossypium hirsutum
atatcttcgcggaggtgaatgccgaccgcatcacctggctgtatgatggcaccaccggcagacagacgaagaattccgtggatactcgcaccattggcaggtacatcagcaccaaggcagtgggaagtaacgctcgcatggacgtcacggacaagtacaagtacccagaaggctctgaccaggaaagacgagtgttccaaaaggctttggggaaacttaaacccaatgcgtcatttggcgcaacgtcttcaatgggtttggaagcagaggaacgggagtccagcatcatcgggaagttcaaggtcactggcatgctagcagtgggcaaagaagtcaacctggtcctactgctcaaaaacctaagcagcgatacgaagacagtgacagtgaacatgacaggct

SEQ ID NO: 230011 - DNA, 340 bp, Gossypium hirsutum
ccagtttcagaatcaactgctaaaaaacaagctatggagagtggtgagcctagcaagaaatcttcttttcagcttcagaatcaacctcctccacgtcctttctctataaaaagtatcatctttgtggcttccattgccgccggtatccaattcgggtgggccttgcagttatccctccttacgccatacgttcaactcctcggtatccctcacaaatgggcttctcttatttggctctgtggacccatctctgggatgctagttcaacccatcgttggttaccacagtgaccgttgcacctcccgtttcggccgtcgccgcccttttatagctgcgggag

SEQ ID NO: 230012 - DNA, 408 bp, Gossypium hirsutum
attgtatgtggaggtgcggtacagtccgcacctgcttgccaattccaaagtggagccaatcccctggaaccaggctgaaggggacctcaccccagacgaggtggtggccctagtggcccagggcctgcaggagggggagcgagacttcggggtcaaggcccggtccatcctgtgctgcatgcgccaccagcccaactggtccctcgaggtggtggagctgtgtaagaagtaccagcagcagaccgtggtagccattgacctggctggagatgagaccatcccaggaagcagcctctttcctggacatgtcgaggcctaccaggaggctgtgaagagcggcattcaccgtactgtccacgctggggaggtgggctcggccgaagtagtaaaagaggctgtggatatact

SEQ ID NO: 230013 - DNA, 428 bp, Gossypium hirsutum
cgacactataatacgagtcagtacagggaaagctgctgctcccgcgtccgcacagttccggggatcacgatattgagcgtgggtggatcttggtcaccaaggaacagcaccggcaactcaaatctctgcaagagaaggtctccaagaaggagttcctgagactggcccagacactgcggcactatggctacctgcgctttgatgcctgtgtggctgacttcccggaaaaggactgtcccgtggtggtgagcgcgggcaacagtgagctcagcctgcagctccgcctgcctggccagcaactccgagaaggctccttccgggtcacccgcatgcgatgctggcgggtcaccttctcttgtgccattgcccaatggaagcacgagcagcccgggccggggcccgggcgaagtgcgcctggaactggcttt

SEQ ID NO: 230014 - DNA, 376 bp, Gossypium hirsutum
cccacgcgtccgtgcacatgcaacttctactcttgctggtgacctagctgagatcaatgctattaaaaaggtattcaagaatacatcagacatcaaaatcaatgcaacaaagtccatgatagggcattgtctgggcgcatcgggtggtttagaagccattgccacagtgaaggccatcacaacaggatggctgcatccctccataaatcaatttaatccagagccttcagttgagtttgacactgtggccaaccagaagaaacagcacgaagttaatgttgcaatttcgaattcattcggatttggtggacacaactcaatggttgccttttcggccttcaagccttgaaagtctttggcatttaattttgcattg

SEQ ID NO: 230015 - DNA, 386 bp, Gossypium hirsutum
cggacgcgtggggtttgactcagatggaagggcttaacatgtatggcaatggggttgataatgggttggtgttaaggaagagagtgatggttgtagtggatgagagctcgcattctaagcatgcaatgatttgggcactcactcatgtggctaacaagggtgatttgcttactttacttcatgttattcccccaacccaaaagacttcttattcttcttcttctttttctccttaccttgctaactctcttgggtcactttgcaaggcttgtaaacctgaggttgaagtggaagcactggtaatccaggggccaaagctggggacagtgatgagccaagtgaagaaacttgaggtttcagtgttggtactgggtcaaaaaaagcat

SEQ ID NO: 230016 - DNA, 383 bp, Gossypium hirsutum
atcaccctcaagttccaggcgagcccacccaaaccaccacttccctcgtcgagaccgccaccggcgccatccaaagcttccgccctatcaaacaaatccatcaacacctctgcgcatttcatttctatggctacgacatgacccgtcaagtgcaagcgcaccatttctgcgcacatcaaaacgaagaaatgcgacaatgtctcatatatgacacccccgaagccgatgcaaagctcatcggattggagtacatcatatcggagaatttgtttttgacgttgccggacgaagagaagccgctttggcattcacatttgtacgaagtgaagagtggggtgttgtttatgccgcgagttccggggccgatcgagaggcaagatctg

SEQ ID NO: 230017 - DNA, 386 bp, Gossypium hirsutum
atcagcggcctcggctccctgggtccggacgcagcggcccccggaggaccgggattgggcgcggagctgggcccggggctgtcgtgggctcccctcgtcttcggctacgtcactgaggatggggacacggcactgcacttggccgtgattcatcagcatgaacccttcctggattttcttctaggcttctcagctggtactgagtacatggacctgcagaatgacctaggccagacggccctgcacctggcagccatcctgggggaggcatccacggtggagaagctgtatggagcaggcgcccggctgtgcgtggcggagcgtatgggccacacggcgctgcacctggcctgccgtgtgggagcacacgcctgtgcccgtgccct

SEQ ID NO: 230018 - DNA, 365 bp, Gossypium hirsutum
atgctttgtctttggatttagcgtttcagaattgcaattccaaaatgtgtaagacaggagattctcttctgtgctgtcaagggacatggatttgattgatatactttggaggcaagatatcgatcttggagtaagtcgagaagtatttgacttcagtcagcgacggaaagagtatgagctggaaaaacagaaaaaacttgaaaaggaaagacaagaacaactccaaaaggagcaagagaaagcctttttcgctcagttacaactagatgaagagacaggtgaatttctcccaattcagccagcccagcacatccagtcagaaaccagtggatctgccaactactcccaggtttgccacattccca

SEQ ID NO: 230019 - DNA, 383 bp, Gossypium hirsutum
cccacgcgtccgcttaaacccttcctttcattccttctacctcctcttcattattatctttcctttaagcttttgcaattaatttctttgctttcaaagagatgtgtggtggtgctatcatttctgaattcatcacccggaaaggcgcccatggcgtcactgcttctgacatctggcccaattcccctttcgtcaaaaatggctttagctctgactcaactcaatccttccattatgactcactcgccctctgtaaaaggaaccgaccccaatcctcagatggggtgcaagtggagaagaaagtgaaaaggcagagaaaaaacctatacaggggcatacgccagcgtccatggggcaaatgggcggcggagatccgtgacccg

SEQ ID NO: 230020 - DNA, 386 bp, Gossypium hirsutum
tgaatatttcattacagaagacaatgtggggatgcttaagttagcaaaagaagcaaactcaatcctgttcgattaccgtatcccaaccctcaccacctgcggtggcagcgcagccatggaaaatcaattacaaatgaacggcttaccaatcagtctctacgccccagaaacagtaggttgcgttgtagttgacaaacaaggtcattgcgctgccgctacttccaccggtggattaatgaacaagatgaccggaaggattggtgactcgccgctgattggttcagggacttatgcttgtgacttagtggctgtttcatgtaccggtgaaggtgaagccattatacgaagcactttggctagggaagtagcggcggtgatggaatata

SEQ ID NO: 230021 - DNA, 346 bp, Gossypium hirsutum
  unsure (1)..(346): unsure at all n locations
ggaaatgatactctgaatcatagaactataatgaaatatacgatcaaccaacatttatcgaatttgaaaaagagtcagaagaaatggttcgatcctcttattttgatttctcggaccgagagatccatgaatcgggatcctaatgcatatagatacaaatggtccaatgggagcaagaatttccaggagcatttggaacatttcgtttctgagcagaagagccgttttcaaagagtgttcgatcgattacgtattaatcaatattcgattgattggtctgaggttatcgacaaanaaaatttgtctaagtcactttcgttctttttgtccaaggtacttctctttt

SEQ ID NO: 230022 - DNA, 441 bp, Gossypium hirsutum
  unsure (1)..(441): unsure at all n locations
ggcgacactataaaacaagtcactataaggaaagctggtgcgcccgctcgctgccgtcccgggatcagggttccgccacacacacccggctaagtaaggggttgatgggtgcatgtattttaccatgttggccagcatggtctctaactcctggcctcacgtgatccacctgcctcagccttccaaagtgctgggattacagctgtgagccatcatgcccagccgagtgtgcatgttttcaatctctccctgttctgatgctcaaagttacaactacacaaacactgcaactggctttgctttttgtcctgatagtatctcacaagggttccctgatgcaggcagtcttactttctagacaacctaccaaccgtcgtncacaacacacttctggggccataataagggaacacttttgtaatgaaatgtgagtgaaatcag

SEQ ID NO: 230023 - DNA, 386 bp, Gossypium hirsutum
aaacatttctctactgcaatcaagacagggaaaggaagagttgatcttctcaccaaattcacacacaactcggatattcttcgtggcattgagaattatcgactggccctccttgttgccagtccaaagtcattcgtagtcccaaatcatttcgatgctaacgccatatttgttgtcactcaaggacgtggaacactcacgctgatccatgaagataagagagagagctttaacattgaaactggagacatcatctatgttcgtgctgggactcctctatatttgatcaacagagatgacgacgagaaactgtttatcgtcaagttattgcaacccatcaatcaaccagatcattacgaggtattttatggtgctggtggtgcaaa

SEQ ID NO: 230024 - DNA, 387 bp, Gossypium hirsutum
atggcggcccggccggccggtggctgcaccacgctgggtcctgcgctggagtcagcggcctgctgaggagccgggggccgggcgggagagccggggcgagccggccgctgagcgtgtcggcgcgggcgcggagcagctcagaagataaaataacagtccactttataaaccgtgatggtgaaacattgacaaccaaaggaaaagttggtgattctctgctagatgttgtggctgaaaataatctagatattgatggctttggtgcatgtgagggaaccctggcttgttcaacctgtcacctcatctttgaagatcacatatatgagaagttagatgcaatcactgatgaggagaatgacatgcttgatctggcatatggactcacag

SEQ ID NO: 230025 - DNA, 391 bp, Gossypium hirsutum
atcgggaaattgtgcgcgacatcaaggagaagctgtgctacgtcgccctggacttcgagcaggagatggccaccgccgcatcgtcctcttccctggagaagagctacgagctgcctgatggccaggtcatcaccatcggcaatgagcggttccggtgtccggaggcgctgttccagccgtctttcctgggcatggaatcttgtggcatccatgagaccacctttaactccatcatgaagtgtgacgtggacatccgcaaagacctgtatgccaacacggtgctgtctggtggcaccaccatgtacccaggcattgccgacaggatgcagaaggagatcaccgccctggcacccagcaccatgaagatcaagatcatcgcacccccagagcg

SEQ ID NO: 230026 - DNA, 374 bp, Gossypium hirsutum
cccacgcgtccggtttaatcagtattatagattgttcatccagagatctaagcttattagcttaagctataaaaatggtgaaaagatcgttgggctttttctttcttctcctcattgtcttagcctcccaatggggggtgcagccaactgaggcaagggtttgccagtcacaaagccataagttccacggtgcatgtgtgagtagccacaactgtgcgatggtgtgcagggacgaaggtttctccggcggcagatgtcgaggattccgtcgccgctgcttctgcactaagctttgctaatgcaagcttgcccttagctcatattttaaggatttttcttgagtaaaagacctttatgtttttcgtgcatgcatg

SEQ ID NO: 230027 - DNA, 366 bp, Gossypium hirsutum
gcattgtgaggtttacagttaagtcaaagagcaaaagagaaaaggaaaatgagagcttcaagtgagtttttggctaccttggttcttgtgctggtttcggtttcttcagtggctcatggagatccccttgttcctgcactcatcatctttggggactcggttgttgatgtggggaataacaacaatctcaacacacttatcaaatcaaactttccaccatatggaagagattttgttaatcacaggccaactggaagattctgcaatggaaaacttgctacagatttcactgctgagtaccttgggtttacttcatacccaccggcttaccttagtcgagatgccataggaaatgctctcctgact

SEQ ID NO: 230028 - DNA, 173 bp, Gossypium hirsutum
cgaaaaatggctgatttgagagacgaacacggcaaccctattcaactcaccgacgaacacggcaacccgggtcaactcactggcgaacaccggaaccccatttatgtcaccgggtttggcaccaagcattccacgacgacaaccgcactggcgggtttaatgggatatgggac

SEQ ID NO: 230029 - DNA, 380 bp, Gossypium hirsutum
atcacaggtgtcgtgaaaactacccctaaaagccaaaatgggaaaggaaaagactcatatcaacattgtcgtcattggacacgtagattcgggcaagtccaccactactggccatctgatctacaaatgcggtggcatcgacaaaagaaccattgaaaaatttgagaaggaggctgctgagatgggaaagggctccttcaagtatgcctgggtcttggataaactgaaagctgagcgggaacgtggtatcaccattgatatctccttgtggaaatttgagaccagcaagtattatgtgactatcattgatgccccaggacacagagacttcatcaaaaacatgattacagggacatctcaggctgactgtgctgtcctga

SEQ ID NO: 230030 - DNA, 389 bp, Gossypium hirsutum
atggtttccggaaagtggtccacatcgagcagggtggcctggtcaagccagagagagacgacacggagttccagcacccgtgcttcctgcgcggccaggagcagctccttgagaacatcaagaggaaagtgaccagtgtgtccaccctgaagagtgaagacataaagatccgtcaggacagtgtcaccaagctgctgacggacgtgcagctgatgaaggggaagcaggagtgcatggactccaagctcctggccatgaagcatgagaatgaggctctgtggcgggaggtggccagccttcggcagaagcatgcccagcaacagaaagtcgtcaacaagctcattcagttcctgatctcactggtgcagtcaaaccggatcctgggggtg

SEQ ID NO: 230031 - DNA, 373 bp, Gossypium hirsutum
aacacgtagatatggcgattaacccttctttgctctttctttcccttctttttctcttcaatggctgcctagctcgccagaccttttcgtcacagcagctttcaacgttgaccacgacatcattaggaaaatccaacgtgtacgaggaaatagaggcaccatcatcagagtcagggacagactccaagtcgtaacaccacccagaatggaggaagaagaacgtgaggagcgccagcaggagcagcgataccgccatacgagaggagggtctcaagataatggcctcgaggaaactttctgctccatgaggatcaaggagaaccttgctgaccctgaacgtgccgacattttcaacccacaagccggtcgtatt

SEQ ID NO: 230032 - DNA, 353 bp, Gossypium hirsutum
gttcgttggagcttagcccgagcacttgcaaaactggcattgcttcccattgtgataatggaaaggatggtgatgtagctcttatagatgtaggaaccggccttgagtatttcacacttggctatgtttctccttcattgaaaatcgatctgagtggctgcaaagcatcttgtgttagtagttgccactatatagttatgttctatgacaacagttcgagggattgtttcttgtttaatgacgttgggagctttcagagatctaaacacaggtccaatttggttgcttttgtgatgtcgagaaatgaaaatggtggagagggtgcaaaagggacaagagccttcccatatgtt

SEQ ID NO: 230033 - DNA, 150 bp, Gossypium hirsutum
atgggatgtggtttccgttaagctggacaacagtgcctccggagccagcgtggtggccatagacaacaagatcgaacaggccatggatctggtgaagaatcatctgatgttgcttgagagagaggtgaaatctgaggacaatccaagctg

SEQ ID NO: 230034 - DNA, 358 bp, Gossypium hirsutum
  unsure (1)..(358): unsure at all n locations
cccacgcgtccggctgtccagtcatgtgatgcttcactgctgctggactccacaagaaggagcttgtctgagaaggagacagacaggagctttggcctaaggaatttcaggtacattgagaccatcaaagaagctgtagaaagggaatgtcctggagttgtttcttgtgctgatatccttgttctgtctgctagagaaggcatcgtttcgttgggaggcccttacattcctctcaaaactggaagaagagacggtagaaggagcagagcanatgttgtggaggagtatcttccggaccacaatgagaccatctctggcgttctcgacaggtttgccgccatgggtattgacacccctg

SEQ ID NO: 230035 - DNA, 364 bp, Gossypium hirsutum
cggacgcgtgggcaactgccgaacgagaaattgttcgtgacatgaaagaaaaacttgcttatgttgctctcgattttgagcaagaattggagactgccaagagtagttctgctattgaaaagagttacgaattgcctgatggacaagtaatcacaattggagcagagaggttccgttgccccgaagtactcttccaaccatctctgattggtatggaagcagccggaatccatgaaactacatacaactccatcatgaagtgtgacgttgatatcaggaaggatctatacggaaacatcgtgcttagcggtggatcaaccatgttccctggtattgccgataggatgagcaaggaaatcacagc

SEQ ID NO: 230036 - DNA, 368 bp, Gossypium hirsutum
ctcacgcgtgcgattatgtaggagaaacttgcaattgctgatctggtacattttgattttatggacccacctgctacggagacattgatgcgtgcattgcaagtgctgaattacttgggagcattggctgatgagggtaacttaacagatactggtgagagcatgagtgaatttatcttggatcctgaaatgtcaaagatgctcgtagctagttctgagttcaactggtcaaatgagattctttcagttgccgtcatgcttatcagtacccaattgctttgtacgggctacggaggcacaaaaagctgtagatgaagcaaaagctctgtttgggcatatcgatggtgatcatctcacacttttgaacg

SEQ ID NO: 230037 - DNA, 269 bp, Gossypium hirsutum
ggtggatcttcgttcaaccacgcctaataaccgttcggatttttctcaaacgtgaaaaaaatggggctgtttttcaccaagttattcagccggctatttgccaaaaaggagatgcgcatactgatggttgggcttgatgctgctggtaaaaccaccattctttacaagctgaagttgggagagattgtcactactattcccaccatcggtttcaatgttgagaccgttgaatacaagaacatcagcttcactgtttgggatgttggcgg

SEQ ID NO: 230038 - DNA, 247 bp, Gossypium hirsutum
ccacaatggaccgtcaacgctaacaaaatactttacatgttaaaaggctgtgccaaattccaggtggggaacaacaccggcgacgcagtgttcgacgataacgtggagcaaggtcagctcctgacggtgccacagaactttgcgttcatgaaacaagcaggaaacgaaggagccgaatggatttccttcttcaccaatagcgaagccaccaacaccccaatggttggagagtgtctcttttatgcga

SEQ ID NO: 230039 - DNA, 390 bp, Gossypium hirsutum
atgttcttcgccccctggtgtggacactgcaagagacttgctcctgaatatgaagctgcagctaccagattaaaaggaatagtcccattagcaaaggttgattgcactgccaacactaacacctgtaataaatacggcgtcagtggatatccaaccctgaagatatttagagatggtgaagaagcaggtgcttatgatggacctaggactgctgatggaattgtcagccacctgaagaagcaggcaggaccagcttcagtgcctctcaggactgaggaagaatttaagaaattcattagtgataaagatgcgtctgtagtaggttttttcgatgatttattcagtgaagctcactctgagttcctaaaagcagccagcaacttgagggat

SEQ ID NO: 230040 - DNA, 387 bp, Gossypium hirsutum
atggaggatgaaacccggccggggggataccattgcagtcaatgtgacagagtcctgatgtccatgcaggggctgcgttctcatgagaggagccacctggccctggccatgtttacccgcgaggacaagtacagctgccagtattgctcctttgtttctgctttcaggcacaatttggatcgccatatgcaaacgcaccacggacaccataaaccattccgatgcaaactctgctccttcaagtcctcctataacagccggctgaaaacacatatactcaaagctcatgctggtgagcatgcctacaagtgttcttggtgctcgttctccaccatgacaatcagccagctgaaggaacactccctcaaggtccacggaaaagccctg

SEQ ID NO: 230041 - DNA, 189 bp, Gossypium hirsutum
gcttagtggtggatccaccatgtttcctggtattgccgatagaatgagcaaggaaatcacagctcttgcaccaagcagcatgaaaaataaaggggtagcaaccccaaagaggaaatacaaggtcctgaatggtgggtctaatttaacttctcttaatacattccaacagatgtggatatcaaaagccga

SEQ ID NO: 230042 - DNA, 372 bp, Gossypium hirsutum
acaaaatactctacatgttaagaggctgtgccagagtccaagtggtgaaccacaacggcgacgcagtgttcgacgataacgtggagcaaggtcagctcctgacggtgccacagaactttgcgttcatgaaacaagcaggaaacgaaggagccgaatggatttccttcttcaccaatagcgaagccaccaacaccccaatggctggaagtgtctccttcatgcgagcactgccggaggaagtggtggcagcgtcgtatcaggtgtcaagagaagatgcaaggcggattaagttcaacaacaaaaacacctttttcttcactccttcacagtccgagaggagggccgatgcttaaactccagccgatgccaatg

SEQ ID NO: 230043 - DNA, 384 bp, Gossypium hirsutum
atcgtccgccccgcgagcacagagcctcgcctttgccgctccggcgcccgttcacacccgccgccagctcgccatggatgatgatatcgccgcgctcgttgtcgacaacggctccggcatgtgcaaggccggcttcgcgggcgacgatgccccccgggccgtcttcccctccatcgtggggcgccccaggcaccagggcgtgatggtgggcatgggtcagaaggattcatatgtgggcgacgaggcccagagcaagagaggcattctcaccctgaagtaccccatcgagcacggcatcgtcaccaactgggatgacatggagaagatctggcaccacaccttctacaatgagctgcgtgtggctcctgaggagcaccccgtgct

SEQ ID NO: 230044 - DNA, 365 bp, Gossypium hirsutum
cccacgcgtccgcaccgttggcaacggcaagagcaagggcccgaacggaagcaacaatgtgtgaaggaatgcagggaacagtaccaagaggatccatggaagggagagagagaaaacaagtggagagaagaagaagaggaggaaagtgacgaaggagagcaacaacaaaggaacaacccttactacttccatcgcagatcgttccaagaacgattcagggaagaacatggcaatttcagagtcctccagaggtttgctgccaaacatcatttacttaggggcatcaacgagttccgcatttgccatttagaagcaaaccccaacactttcgttctcccacaccattgtgacgcggagaaaattta

SEQ ID NO: 230045 - DNA, 303 bp, Gossypium hirsutum
  unsure (1)..(303): unsure at all n locations
gggatggagcccaccctggaaagtncacagtgttcattcgggggtcacacaaaacacaaaggccttcaccatggagtttggcttgaactgggttttccttgtcctaatttaaaaaggggtccaggggggggggtccttgggggagtctgaaggaggttgggtccacccgggggggtccttggaactttcttggggagcctttggattaaccttaagcttttttggcttaagtggggtccgccaggttccaggaaaggggctgcaggggtcttaaatatataaaaaggaggttcttttatatac

SEQ ID NO: 230046 - DNA, 384 bp, Gossypium hirsutum
atgaccgcctggcttcctacctggagaaggtgcgcgccctggaggaggccaacgccgacctggaggtgaagatccgtgactggcacctgaagcagagcccagctagccctgagcgggactacagcccctaccacaagaccattgaagagctgcgggacaagatcctgaccgccactattgaaaacaaccgggtcatcctggagattgacaatgccaggctggctgcggatgacttcaagctcaagtatgagaacgagctggccctgcgccagagcgtggaggctgacatcaacggcctgcgccgggtgctggatgagctcaccctgtctaagactgacctggagatgcagatcgagagcctgaatgaggagcctgcctacatga

SEQ ID NO: 230047 - DNA, 371 bp, Gossypium hirsutum
atctccccatcaccatcctcttcctcttgccttttcaatggctttaatgcttgataattgtgaaggcatattactatcacttgactcacacaaaccagtaccagctccatttttaaccaaaacttaccaacttgtcgacgatcccaccaccgatcacattgtttcatggggtgaagatgatactacttttgttgtatggcggccacccgagtttgctcgtgatcttcttcctaattacttcaagcacaataatttctctagctttgtgagacaactcaacacttatggttttaggaagattgtaccggatagatgggaatttgccaatgagtacttcaagaaaggtgaaaaacacttgctttgtgagatcc

SEQ ID NO: 230048 - DNA, 370 bp, Gossypium hirsutum
cggacgcgtgggggcgattaacccttctttgctctttctttcccttctttttctcttcaatggctgcctagctcgccagaccttttcgtcacagcagtcccaaaatgagtgtcaaatcaataggctccgcgcctctgcaccccagacccgaattcgctccgaagccggcaccaccgagtggtggaaccccaactgtcaacagctcaggtgtgctggtgtatctgtaatgaggcagactattgaacctaatggccttgttttgccttccttcaccaatgctcctcagcttctctacattgtccaaggaagaggtattcaaggtattgtgatgcctggatgtgccgaaacattccaggattcacagcaatgg

SEQ ID NO: 230049 - DNA, 314 bp, Gossypium hirsutum
aaccacgtggccttgtaaattgtggtaacagctgttatgccaatgctgtccttcaatgcttgactttcactcctcctctgactgcttactttcttcatggaatccattccaaagcatgtgcaaagaaagattggtgtttcacttgtgagtttgaaaaattaattttgaaggctaaagatgggaaatcaccgctgtcccctatgggaatactttcccaactacaaaatattggcagtcaacttgctaatgggaaagaggaagatgcacatgaatttttaaggtatgctattgatgctatgcaatctatttgtctt

SEQ ID NO: 230050 - DNA, 364 bp, Gossypium hirsutum
  unsure (1)..(364): unsure at all n locations
cccacgcgtncgctcatcttgaagaaactgggaatcgatgatctggtacattttgattntatggacccacctgctccggagacattgatgcgtgcattggaagtgttgaattacttgggagcattggatgatgagggtaacttaacaaagctgggtgagatcatgagtgaattccccttggatcctcaaatgtcaaagatgctcgtagttagttctgagttcaactgttcaaatgagattctttcagttgccggcatgctttcagtacccaattgctttgtacggcctatggaggcacaaaaagctgcagatgaagcaaaagctcggtttgggcatatcgatggtgatcatctcacacttttga

SEQ ID NO: 230051 - DNA, 370 bp, Gossypium hirsutum
gtcgttaagtcgtgtaaatattgaactcgtagactggttgaagtaaaagcgaaaatggaagggattggattggaaggagatgggtcaaacggggaagctcttgggaagtgcttgagtgggttggtggacgatggtagcaccgagagtcatcgatactacctgtcccggagaactgtgctggagatgcttagggacagaggctatgccgtacccaacactgaaatcgacctctctctccatgaatttcgtgccattcacggccaaagccctgattttgatcgtctcaaactctctgttactcataaaactgactcttccaagcggacgctggtagttttctatgggcctggtgtagttaaagtcagtggga

SEQ ID NO: 230052 - DNA, 371 bp, Gossypium hirsutum
cttttcccttccgtttacattatatactcagatgcgaacatatttaacgaatccagattactgtttggttagagtgagcgaaaggagcgaagatgataaaagctgtgatggtgatgaacactcaaggcaagtcacgactggcaaaattttatgagtatctgtcagttgagaagcagcaggagcttattcgcggcgttttttcagtcttatgcagtagagctgagaacgtaagcaatttcatagatgcggaatcaatttttggtctggatagtcgtcttgtatacaagcattttgctacactttactttgtctttgtatttgatagttctgaaaacgagctagccgtgcttgacttgatacaagtttttgtg

SEQ ID NO: 230053 - DNA, 373 bp, Gossypium hirsutum
cttcaaggcatcctattcttaggggcatcaatgagttccgcttatctatcttagaagcaaaccccaacactttcgttctcccacaccattgtgacgctgagaaaatttaccttgtcaccaacggaagaggaacgcttacgttcttgacacatgaaaacaaagagtcctacaatatagtaccgggagttgtagtcaaagtcccagcaggaagcactgtgtacttggctaaccaagacaacaaggaaaagctaatcatagcagtgcttcaccgccctgttaataaccctggacaattcgaggaattcttcccagctggaagccaacgccctcagtcatatctccgagcctttagtcgtgaaattcttgagcctgc

SEQ ID NO: 230054 - DNA, 292 bp, Gossypium hirsutum
catcagaaagggtcggggtttcagtgagcgctactcttatgcacgaagatacacaaccccttctccagatcgttctcctgtgagggcctatcgcttcagtggtaggattgatcgtgagaggtattcaagttacaggcggtattcacctaggcgctatagaagccccccaagaggaagaactcctccaaggtatagaggcagaagaagccggacaagaagtctgtctgtatcaccgagcccgaggtatagaaatcgtcgctatggtcatagccgcagtcgtagcccaagtcgt

SEQ ID NO: 230055 - DNA, 306 bp, Gossypium hirsutum
gtttcaaagatgattcctggttctgataagggcagattctttgcttttggtcgtgtcttttctggcaaagtctcaactggattgaaggttaggatcatgggtccgaactatgtccctggtgagaagaaagacttgtatgttaagagtgtgcaaagaactgtcatttggatgggaaagaagcaggagactgttgaagatgtaccttgtggtaacacagttgccatggttggtttggatcagtttatcaccaagaatgctactttgacaaacgagaaggaagttgatgcccacccaattcgtgcaatg

SEQ ID NO: 230056 - DNA, 359 bp, Gossypium hirsutum
ctcgcacgctctcatgattgtcctccgggaccgtcagtctccccaaacaccttctttccgagaaaaagaaaagctcaagagagaagaccatggccgatcaacttacggacgatcagatctctgagttcaaggaggctttcagcctttttgacaaggatggcgatggttgcattactaccaaggagctggggactgtgatgcgatcacttggtcagaaccctactgaggcagaactccaagatatgatcaatgaagttgatgctgatggaaatgggaccattgattttcctgaattccttaacctaatggcaaggaagatgaaggatactgattccgaggaagaacttaaagaggctttc

SEQ ID NO: 230057 - DNA, 384 bp, Gossypium hirsutum
  unsure (1)..(384): unsure at all n locations
atcatggctgtaggtgccactgagtgtatcagccccaaggactctaccaaacccaataatggagtgcttgcaaaaattaccagccaccatggtggggaccacttttgaggtattgggcgtcttgaaaccatgattgatgctctggcatcctggcatatgaactaatggaccagcgtggtagtaggaggctcttcaataagcaagaatgctaactacgaaccggatgtgcttcttcactggacgcacgtggaagggatgtgtcttttgaggtttgaaaagcagagatgatgtcccaaaactagtgactgagttcctggcaaagaaatttgacctggaccagntgataactcatgttttaccatttaaaaaaatcaatgaaggatt

SEQ ID NO: 230058 - DNA, 367 bp, Gossypium hirsutum
ttcgcgcgattgcagaaaaacataacttcatgatatttgaagaccgtaaatttgcagacatcggtaacacagtaacaatgcagtatgaagggggtatcttccatatattggattgggctgatattgttaatgctcacataatctctggtcctggaattgttgatggtttgaaattgaagggtctgcctcgtggtagggggctgttgctacttgctgaaatgagctctgctggtaaccttgccacgggggactacacagctgctgccgtaaaaattgccgaacaacactccgattttgtcatcggtttcatctcagtcaaccccgcatcttggcccggtgcacctgtaaatccagcattcattcaggc

SEQ ID NO: 230059 - DNA, 291 bp, Gossypium hirsutum
tgattattttctccataccagcataaatcaacaatggcaaagcgcagtttacttaaccaccctggctcttattttggtccttgccaaagcttcaatcacatctgtgaccggcgaaagcgaggaaaacccggatagcttggaacaggaaataaaggagcaaggccaccttgagcacttgccgaagtacattgaagaaaaatggggtggccaaagccgcgaccatattacccgcgggtaccttggcttatggtggccgcaacttgagaagattgataccccatggcaaagtta

SEQ ID NO: 230060 - DNA, 375 bp, Gossypium hirsutum
gagaaacaccttcccatgtatcaagaaatggcatccaagcccaatgtagagtatattgctggaggtgctactcaaaattcaatcaaagttgcacagtggatgcttcaaattcctggtgcaactggttacattggctgcattgggaaggacaagtttggggaggaaatgaagaagaactcaaaagctgctggtgttaatgttcaatatctcgaggatgaaactgcaccaacaggaacttgtgctgtttgtgttgttggtggtgaaaggtcactcattgcaaatctatcagctgctaactgctataagtctgagcatttgaagaagcctgagaattgggcgttggttgagaaggccaagtacttctatattgctgga

SEQ ID NO: 230061 - DNA, 372 bp, Gossypium hirsutum
ggctccttcagttttcactaccagaaatgtgggaaaaactctcgtcacccgtactcagggtaccaagattgcttctgaaggactcaaacaccgtgtgtttgaggtttccctggctgatcttcaaggtggtgatgaggatcatgcttacagaaagattcgtttgagagctgaagaggttcaaggaaaaaatgttttgaccaacttctggggaatgaattttacaactgacaaactgaggtctttggttcgtaaatggcaaaccctgattgaagctcatgttgacgtgaagacaactgacaattacactttgagaatgttctgcattggattcactaagagacgcccaaaccaggttaaaaggacttgttacgc

SEQ ID NO: 230062 - DNA, 367 bp, Gossypium hirsutum
gtgattgttgcagcaagccctcccacagaggatgctttgattgctacagaaccattgacgaaacaggatcttgttggataccttgcatctggatgtaagtctaaggaaaaatggaggataggtacagagcatgaaaagtttggttttgagatcaaaactctgcggcctatgaaatatgaacaaatagcagaattgcttaatggtatttcagagagatttgattgggagaaagtaatggaaggtgataaaattataggacttaaacaggggaagcaaagcatatcattggaacctggagggcagtttgagctcagtggtgcacctcttgaaactctgcatcaaacatgtgccgaggtcaattcacacc

SEQ ID NO: 230063 - DNA, 359 bp, Gossypium hirsutum
caaaggttctctctctctctctctctctctattgttgaaggtcataagcttttgtatcaatggctgaagtccgtgaccgcaacctgcctcaccaagttcaagttcacccacagtaccgtttcgacaatacaaccggaggcggttacggtgcaaagaactatcacagtggaccatcaacaagccaagttctagccgtccttacacttctccccattggtggtacactgcttgcattagccgggttaacactggccggcaccgtcattgggctgatgctagccacaccgctgttcatcatcttcagcccagttcttgtcccagctgccattgccattgccatggcagtgacggagttcttg

SEQ ID NO: 230064 - DNA, 389 bp, Gossypium hirsutum
atgccgacctggaggtgaagatccgtgactggtaccagaggcagcggcccgctgagatcaaagactacagtccctacttcaagaccattgaggacctgaggaacaagattctcacggccacagtggacaatgccaacgtccttctgcagattgacaatgcccgtctggccgcggatgacttccgcaccaagtatgagacagagctgaacctgcgcatgagtgtggaggccgacatcaatggcctgcgcagggtgctggatgaactgaccctggccagagctgacctggagatgcagattgagagcctgaaggaggagctggcctacctgaaaaagaaccacgaggaggagatgaatgccctgagaggccaggtgggtggagatgtcaac

SEQ ID NO: 230065 - DNA, 373 bp, Gossypium hirsutum
atggacagactgcggggcggacggtggacgctgggacgcgtttgtaactccggccccacggttccgacccccgccgccgtcgccgccatgacggggctagcgctgctctactccggggtcttcgtggccttctgggcctgcgcgctggccgtgggaatctgctacaccatttttgatttgggcttccgctttgatgtggcatggttcctgacggagacttcgcccttcatgtggtccaacctgggcattggcctagctatctccctgtctgtggttggggcagcctggggtatctatattactggctcttccatcattggtggaggagtgaaggcccccaggatcaagaccaagaacctagtcagcatcatct

SEQ ID NO: 230066 - DNA, 374 bp, Gossypium hirsutum
atgcagcgtggtgagaatgcccttaaagatgcccacagcaagggcataaaacttgagactggccttcaacaaggccaggaagaagctggcacgaatgctgcgtgagtaccaggagctaatgagtgtgaagctggccctggacatcaagatcgccacctaccgaaaactcttgaaggccaaggagtgcaaaatgtttgaagaatgccaaagtgccgtgagcatctctgtggttggaggtagcaccagcactggaggcatcagtggaggattaggaagtggctctgggtttggcctgagtagtggctttggctccggctctggaagtggctttgggtttggtggcagtgtctctggcagttccagtagcaagatca

SEQ ID NO: 230067 - DNA, 362 bp, Gossypium hirsutum
atggaagtgacatcgtctttaaaccctgcgtggcaatccctgacgcaccgccgtgatgcccagggaagacagggcgacctggaagtccaactacttccttaagatcatccaactattggatgattatccgaaatgtttcatcgtgggagcggacaatgtgggctccaagcagatgcagcagatccgcatgtcccttccagggaaggccgtggtgctgatgggcaagaacaccatgatgcgcaaggccatccgagggcacctggaaaacaacccagctctggagaaactgctgcctcatatccgggggaatgtgggctttgtgttcaccaaggaggatctcactgagatcagggacatgttgc

SEQ ID NO: 230068 - DNA, 373 bp, Gossypium hirsutum
cccacgcgtccgctctgtagccgccgcctgcgtctctctcttcatctctctgaaccaaaaagtctttagcttttcgcttcgagagagaccatgttggtttaccaggatctcatctccggtgacgagcttctttctgactcattcccctacaaggaaatcgagaatgggatgctgtgggaagttgagggaaagtgggttgtgcaaggagctgtcgatgttgacattggtgccaatccttcagccgaaggtgctgatgaggatgaaggtgttgatgaccaagctgtgaaggttgttgacattgttgacactttcaggcttcaggagcaaccccctttcgacaagaagcagtttgtcgtgttcatcaagaagttca

SEQ ID NO: 230069 - DNA, 360 bp, Gossypium hirsutum
gctatacgctgaatatcacttccgtacaaggatttgaaacctttatgtcaagcttaaagaataaaacatttcgcccaagtaaggaaggtagcggagtggatcttggttttaagttgtgtagacaattaccaaagcagggatggtggtcaaccaggcttgcactgagttgaataaggcatggatggagtctggtgtatctgaggatgcagtttcaggtcatatacagttgctgattccgggagaaactgcttgttttgcatgtgcacctcctttggttgtagcatctggagtggatgaacgaacactcaaccgtgaaggggtttgggcggaatttttgccaactaccatggaagttgttgt

SEQ ID NO: 230070 - DNA, 378 bp, Gossypium hirsutum
cccacgcgtccggtccacagggtttggtgccactgtgaatgtagctaaacccaaaaagggtcaatccgttgcaatatttggactaggtgctgtcggtcttgctgctgctgaaggagcaagagtttctggggcttccaggatcattggtgtcgatttgaaccctagcagattcgaactagccaagaacttcggtgttacggagtttgtgaatccgaaagatcacaacaaacctgttcaagaggtcattgctgagatgacgggtggaggagtcgaccgcagtgtttgatgtaccgggagcatccaggccatgatttctgcatttgaatgtgtccacgatggttggggaggttcactgcttgtgggggttcccaacaaaga

SEQ ID NO: 230071 - DNA, 380 bp, Gossypium hirsutum
gaaataagcaagaaactttatgttcgacccgtgattggagtccgagccaagctgagaaccaaacactcgggtcatttcggatccacctcgggtgagaaaggtaagttcgggttgacaacgatccagattttaagggttgttaaaaagcttcaggattcggggatgcttgattgtctgcaattgctacacttccatattggatcccaaatcccttcaacagctttgcttcaagctggtgtcgtcgaagctgctcaaatctattccgaattagcccgtcttggtgctgacatgaaagttattgacattggaggcggccttggaatcgattacgacgggtcaaaatccgggaattctgatctctctggttcttatggccttca

SEQ ID NO: 230072 - DNA, 393 bp, Gossypium hirsutum
gtacactagcaaatcaagaggactcaggaggtggtacaatccaccctggttctctgactctattccatcggttccatatgatccgtttgttctcagacatgcacttgagaatgctgtgatcaaaaggctaatgactgatttcccttttggagttttgctatccggaggccttgattcttcattgattacttctataacggctcggtacttggctgctaccaaggctgccaaacacgggggaaagctccattctttctgtatcggcctagagggttcacccgatttgaaagctgcaagggaggctgcagattatttgggcactgtccatcatgagtttcacttcaccgttcaagatggaattgatgcgattgaagatgttatctaccacattgg

SEQ ID NO: 230073 - DNA, 383 bp, Gossypium hirsutum
gctgaatctcacaatcaaaatccatcgttagttcatcgacgcagcctcgttcagattcaactatagaagcgaaatggctggttccagggttgctcatgctaccttgaaaggaccaagtgttgttaaggagatagttatcggaataacacttggcctttgtgctggtgggctttggaagatgcatcactggaatgagcagaggaaagtgagagcattctacgacatgctcgagaaaggtgaaatcagtgtcattgcagaagaataaatgttcttttagtcttgtgaaagtgtggacagcttcagctgtgtttcgttatatgcattctcttcatttggctcttagatagaagatgagcaaaacacaatttggagcttctaagaat

SEQ ID NO: 230074 - DNA, 230 bp, Gossypium hirsutum
acgcccacgcgtccgaggacgcgtggggttactaactgcaacattgatatggagagtttaatatctgaccaaaatagaagcattgccacacttgcaatcactacccttcttaagactggaaatgagtctagtgtggatcgtctgatgaagcaaataaccgtattttaatgtctgatattgcatgatgaattcaaaattgttagttggggaagccataaagatctctatgc

SEQ ID NO: 230075 - DNA, 389 bp, Gossypium hirsutum
aggaaacgaaggagccgaatggatttccttcttcaccaatagcgaagccaccaacaccccaatggctggaagtgtctccttcatgcgagcactgccggaggaagtggtggcagcgtcgtatcaggtgtcaagagaagatgcaaggcggattaagttcaacaacaaaaacacctttttcttcactccttcacagtccgagaggagggccgatgcttaaactccagccgatgccaatgcaatcaaaatcagggggatctttgtagggtaacgtaagtaggaagtaataaaaagagttgcagagctatgtccgccatggattttgtttgtgatcgttgaggtactgaaagaatagggtttagaggatgaataataaaaagaaagggtcttac

SEQ ID NO: 230076 - DNA, 382 bp, Gossypium hirsutum
gtttgcttgcttggtctctgccatggctgctgtgctcagatagatctcgtcactaaccatcaccaggatccaccttgggggcaggctgagcaacctgagccacgtcaccaatcccaatgccaactccagaacttgaatgctcttcagcctaagcaccgggttaggtcagaggctggtgaaactgagttctgggaccaaaatgaggatcaatcccagcgtgctgctgttgctttcctacgtcataagatccagcgcaaaggacttttattgccttcatctaccagtgctcctatgcttttctatgttgaacaaggggagggtattcatggggcggtcttcccaggctgttcggagacatatcaatcacagtcgcatcaaaaca

SEQ ID NO: 230077 - DNA, 381 bp, Gossypium hirsutum
gtcttttctggcagagttgcaactggtttgaaggtcagaatcatgggtccaaactatgtacctggggagaagaaagacttgtatgtaaagagtgtacagagaactgtgatttggatgggaaagaagcaggagacagttgaggacgttccttgtggtaatacagttgccatggttggtttggatcagttcatcaccaagaatgctacattgaccaatgagaaggaagttgatgcccacccaattcgtgccatgaagttttctgtctcccctgttgtccgtgttgctgttcagtgcaaggttgcatcagatcttcccaaacttgttgaagggttgaagcgtttggccaagtctgatcctatggttgtctgtaccattgaagag

SEQ ID NO: 230078 - DNA, 375 bp, Gossypium hirsutum
ccctaaactacctatatactatatgggctcttatcaatacctgggttctgagcttttttctcttccctctctttttaagataaatcactaatcatctattttctgcatgcaacggaccttcagtcatatactccgaaggcgcaaaagaagaagtagccggatgttgataagcagcaattcgtaagacttatcggctgcctgagaaaggatgccaaaccagctatggtttgcactagaaatgatttatcagcgtggaaggatttcccaaagggtctcagggaccttcttcttgatgaagacaccaattctgctgcagagataaaatcaaagcttgaagctatggattatattgtatataccttctgcaatgaaaat

SEQ ID NO: 230079 - DNA, 410 bp, Gossypium hirsutum
ataatgaccgtccttattaagcgtaataccaccattcctaccaagcagacacagaccttcactacctattctgacaaccagcctggtgtgcttattcaggtctatgaaggagagcgtgccatgaccaaggataacaacctgcttggcaagtttgaactcacgggcatacctcctgcaccccgaggtgttcctcagattgaagtcacttttgacattgatgccaatggtatcctgaatgtctctgctgtggacaagagtacaggaaaagagaataagattactatcactaatgacaagggccgtttgagcaaggaagacattgaacgtatggtccaggaagctgagaagtacaaagctgaagatgagaagcagagggacaaggtatcatccaagaattcacttgagtccta

SEQ ID NO: 230080 - DNA, 356 bp, Gossypium hirsutum
gaggtaccgccccgaaattcgggattcggcccacgcgtacgaactgttgtaataccaaacatggggggcacttacaggccttaactacctattgtgacaaccatcctgccgtgctaattaacgtacactaaagcgagcgagccgtgcccatggagaacaccctgcttctcaagagaacactgacggacatacttgctgcacccaccggggaacctcagaaggaagggagctctgacatttatgccaatggaatgctgaacgtatcagctgtggacaacagtacattaaaagagaataagattgctatcactaatgacaagggctcgagtgagcaaggaagacagttgacgtatggt

SEQ ID NO: 230081 - DNA, 406 bp, Gossypium hirsutum
atgccatgggcagtattcctctctaataatgaagggtgtcaggtcagttttttagcaccttttgagagtagtaattggattactcaggccaccaacagagatgaatttcaaattgatgaaattttgatacaatatgaagggtcttttaccttcctgcttaatctgtaaaggtatttttttattctctgagcactgcatctttatcatgagtaaagcttagaaataatgaagtactttaacttgtactgtttctttcatggaaaaggaccaaactcttacccaggatctgccggagcagctgttggagcccatgacgcttaccgggatgcgaaagagaagcgttctaaaagccaagatgcagatttacctggaagttctggggcccctgaaaacttgacattcaagg

SEQ ID NO: 230082 - DNA, 384 bp, Gossypium hirsutum
gttttgaaactcacgagaaactgggttttcatttctttaagcttaaaagaaattctgggttgtttttttttggccattttgagtatagaaaaacatggcaaagcttgaaaattcgtcatcaatggcggtttctctcattcaagcatttcaacagacagatggtgtacaatcgaagaagaaaagaaatctccctggaatgccagatcctgaagctgaggtaatatcactatcaccaaaatccttactggccaccaaccgtttcatttgcgagatttgcaacaaaggctttcaacgtgaacaaaaccttcaactccaccgccgaggacataacttaccgtggaagctccggcaaagaaccgacggcaacgaaacaagaaagaaacg

SEQ ID NO: 230083 - DNA, 379 bp, Gossypium hirsutum
cggacgcgtgggccggtgagccgggttcacgtggggattgatcggaaaaccgggatgtgtaggggatttggttacgtcaattttgtgaagaaggaagatgccgaaagagcggtattgaagctaaatggttatggatatgatagtctcatattgagggttgaatgggccgatccaagaaccaattagatattcttcttttttttgagaattataactttatttttaatttaggttttctttttgggatattttaatttttaagtatctagacatattaggttttttttattaataaatttttatgtggaaattaaattccactaatcattaataaaattcaactaatttagtgtaaatttaatccaactattagtaaata

SEQ ID NO: 230084 - DNA, 387 bp, Gossypium hirsutum
tcgtccacgcgtccgggcaagtgagatgtctcttagaatggagagattgttcatgggagaccagcagatgcttcaagaagacttctctagtgatgaaggtgaatctgtcaactctcggagttgtttaatttttgagtattttgaacaagacactccttatagccgggaacccttagccaacaagattgcagatctggccttccaattccctgaactgaagacactaagaagctgtgatttgttgtcttccagctggatttctgtggcatggtatccaatttacagaatacctactgggcctacattaaaagatctagatgcttgctttctgacttatcattatcttcatacacccatagtggacgggcaccggccatgacatgttcc

SEQ ID NO: 230085 - DNA, 382 bp, Gossypium hirsutum
cggacgcgtgggatttattttcttccataccagcataaagcaacaatggcaaagctcgcagtttacttagccaccctggctctcattttgttccttgccaatgcttcaatcacatctgggaacggtcgaaagcggggaaaaccgggatagctgtgaacagcagataaggaagcaggcccacctgaagcactgccagaggtacatggaggaggagtgggttgccgaaggcagcgacaatatagccggcggatacattgactcatgttgccagcacctagagaggatggatccgcattgcagatgtaaaggtctaagacatgcaacgttgcaacagatgcaacagatgcaagaacataaggggagcaaacagatgcgagagatc

SEQ ID NO: 230086 - DNA, 349 bp, Gossypium hirsutum
atgcgaccgccgacatattagggaccgcggagcccgggagcccgtcagcggcggctgcggccgggcttgcgggagctgcgggggccggaggcgggcgctgtgcggtgccggtagaggcggtgtcggcgggagccagcgagcgacgggagcgagccaggctaaccttgccgcaggccgagccctgcctcgccatggaccaggactatgagcggcgcctgctccgccagatcgtcatccagaatgagaacacgatgccacgcgtcacggagatgcggcggaccctgacgcctgccagctcccccgtgtccttgcccagcaagcacggagaccgcttcattcccctctagag

SEQ ID NO: 230087 - DNA, 398 bp, Gossypium hirsutum
atgctttattgcgggtggatgtgccacgttcctgtgtcagcccctggatgtgctgaagacccgtctgatgaactccaagggggagtatcagggcgttttccactgcgccgtggagacagcgaagctcgggcctctggccttttacaagggcctcgtcccagctggcatccgcctcatcccccacaccgtgctcacttttgtgtttctggaacagctacgcaaaaactttggcatcaaagtgccatcctgaccggccgtgggaatggctgggctgccaggccggctgcgctaagttcttccaaagagtcccaagcccagcacctgcttctggggccacaacctcgctggccatggccacccgtcctccccagcaggcccctgctgtccccccacctgct

SEQ ID NO: 230088 - DNA, 398 bp, Gossypium hirsutum
atcggctgtatgctgtgggcggctatgacgggacctcagacctggctaccgtggagtcctacgatcccgtgactaacacgtggcagccggaggtgtccatgggcacgaggcgaagctgcctgggtgtggccgccttgcacggactcctgtactcggctggcggctatgacggggcctcctgcctgaacagtgccgaacgctacgaccccctgactggaacgtggacatccgtcgctgccatgagcacccggaggcgctatgtgcgagtggccacgcttgatgggaacctgtatgccgtgggcggctacgacagctcctcacacctggccactgtggagaagtatgagccccaggtgaacgcttggtcgtccgtggcgtccatgctaagccgacgcagc

SEQ ID NO: 230089 - DNA, 386 bp, Gossypium hirsutum
gaagaagaagagaaggaaagtagcaaggaggagaaaatcgttacggccacaaagaaaggggtggctgttctggatcaagggatcccagatgacataaaggctcattatcatgttctacaaaagggtgatgatatctatgatgccatgttaaatcagacgaatgttgggcaaaacaataacaaattctttgtgatccagcttctagaatctgatgactcgaagacatacatggttcataacagatggggtagagttggtgtgaagggtcaaattaagttacatggcccctttacttcacgacaagccgcaattgatgagtttcaaaccaaattctttaacaagaccaaaaactattggtacaacagaaaagactttgtttgtcaccc

SEQ ID NO: 230090 - DNA, 369 bp, Gossypium hirsutum
caaggtttaatcagtattatagattgttcatccagagatctaagcttattagcttaagctataaaaatggtgaaaagatcgttgggctttttctttcttctcctcattgtcttagcctcgcaatggggggtgcagccaactgaggcaagggtttgccagtcacagagccataagttccacggtgcatgtttgagtagccacaactgtgcgatggtgtgcaggaacgaaggtttctccggcggcagatgtcgaggattccgtcgccgctgcttctgcactaagctttgctaatgcaagcttgcccttagctcatattttaaggatcatttcatgagtaaaagacctttatgtttttcgtgcatgcatgtc

SEQ ID NO: 230091 - DNA, 382 bp, Gossypium hirsutum
tctcgaccaacacaaacatttggttttggttttgatttcgattttgattatatttcactttattccctgttaacttgttgttcgttcctctcagagcaatcaattgtccatcacaagaatctctctcactctttcttttccgattcaagactcggacaacccaatgaacgatctcgagcgagtcaagaaggaagacccgtttctcgtcaagtatcagccctccgaactcagaatcgcctctgagttcttaaccacgtggcttcctttcctttccagggatctctgccgtcgatgcactcaaatcctctcccgacgaatccgctctctagacccaggagatgctgagctggccaacaatgatctgaatgcaatccattctacc

SEQ ID NO: 230092 - DNA, 380 bp, Gossypium hirsutum
cggacgcgtggggccgccgcctgcgtctctctcttcatctctctgaacctaaaagtctttagcttttcgcttcgagagagaccatgttggtttaccaggatctcatctccggtgacgagcttctttctgactcattcccctacaaggaaatcgagaatgggatgctgtgggaagttgagggaaagtgggttgtgcaaggagctattgatgttgacattggtgccaatccttcagccgaagatgctgatgaggatgaaggtgttgatgaccaatctgtgaaggttgttgacattgttgacactttcaggcttcaggagcaaccccctttcgacaagaagcaagttgtcgtgttcatgaagaagttcatcaagaacttgaca

SEQ ID NO: 230093 - DNA, 376 bp, Gossypium hirsutum
ctcaaagtgcaggaacgccagaaccgtgtttgcacaactgtggctattgcaattgttgctgaaacatgttcaccttttacagttttgccagcattgatgaatgagtaccgcgtgctagaacttaatgtgcagaatggggtcttgaagtctctttccttcctttttgagtatattggtgaaatgggaaaggattacatctatgctgtgactccattacttgaggatgctcttatggatagagatttggttcacaggcaaactgcagcttcagctgtcaagcacatggctttgggtgttgctgggttaggttgtgaggatgctttagtccacttgatgaactatgtctggcccaacatatttgagacttcacctcacg

SEQ ID NO: 230094 - DNA, 384 bp, Gossypium hirsutum
atcccaaatgaacagagttaggaacggtgaactttaccgttacatttgtgacacaaagggtgccttcgtacaacccgcattatatgaagcctttgggttgactgtcgttgaggccatgacttgtggtttgccgacattcgcaacttgcaatggtggacctgccgagattattgttcacggtaaatccggcttcaacattgatccttaccacggcgaccaagctgctgagatccttgtcgacttcttcgagaaatgcaagacagactcatcttactggaccaaaatctctgagggaggtttgaaacgtatcgaagagaagtacacatggaaaatttactctgagagactattaaccttgaccggtgtctacgggttctggaagca

SEQ ID NO: 230095 - DNA, 324 bp, Gossypium hirsutum
cccacgcgtccggcaacataagcaagaactggagactgccaagagcagctcatctgttgagaagaactatgagttgcctgacggacaagtcattactattggagctgagagattccgttgcccggaagtcctcttccagccatctttcatcgggatggaagctgctggaatccatgaaactacctacaactctatcatgaagtgcgatgtggatatcaggaaggatctctacggtaacattgtgctcagtgggggttcaaccatgttccctggtattgcagaccgcatgagcaaggagatcactgctcttgctccaagcagcat

SEQ ID NO: 230096 - DNA, 367 bp, Gossypium hirsutum
cccacgcgtccggaaaaagctttctctttcacgaaacgtaatatgctccaagtgcaagggcaaagggtctaaatcaggtgcatcaatgaaatgtaccggttgtcaaggttcaggaatgaaagtctccattcggcacctcggtccttccatgatccaacaaatgcagcatccttgcaatgagtgcaagggtactggtgaaaccatcaacgataaggatcgttgcccacaatgcaaaggtgataaggttgtgcaagagaagaaagtcttggaggttattgttgagaagggtatgcagaatggacaaaggattactttcccaggagaagctgatgaagcgcccgatacggttactggggacattgtattc

SEQ ID NO: 230097 - DNA, 400 bp, Gossypium hirsutum
atgtccagagcagagtcagccagcatgaccgagcgccgcgtccccttctcgctcctgcggggccccagctgggatcccttccgcgactggtacccgcacagccgcctcttcgaccaggccttcgggctgccccggctgcccgaggagtggtcgcagtggttgggcggcagcagctggccaggctacgtgcgccccctgccccccgccgcgatcgagagccccgcggtggccgcgcccgcctacagccgcgcgctcagccggcagctcagcagcggggtctcggagatccggcacacggcggaccgctggcgcgtgtccctggatgtcaaccacttcgccccggacgagctaacggttaagaccaaggatggcgtggtggagatcaccggtgagtccccct

SEQ ID NO: 230098 - DNA, 384 bp, Gossypium hirsutum
cccacgcgtccgcccattcactgagtctcaacaccgagtcatcatcactcatggctatcgaggcttggtttatggatgaaagcaaagaagaccaaaggcttcctcatcgacgcaaccccaacgaacctgtttcgttggagcacttggcagagctgggagtgttgtattggcatttgaaccccaaggattacgagaacgatgaagagttgaagaagattagagaagccagaggttataattacatggatttgcttgatttatgccctgagaaagttgacaactatgaggagaaactgaggaacttttacaccgagcacatccatgctgacgaagagatacgctactgcctggaaggcagtgggtattttgatgttagggacaagg

SEQ ID NO: 230099 - DNA, 381 bp, Gossypium hirsutum
gagtgtcaaatcaataggctccgcgcctctgcaccccagacccgaattcgctccgaagccggcaccaccgagtggtggaaccccaactgtcaacagctcaggtgtgctggtgtatctgtaatgaggcagactattgaacctaatggccttgttttgccttccttcaccaatgctcctcagcttctctacattgtccaaggaagaggtattcaaggtattgtgatgcctggatgtgccgaaacattccaggattcacagcaatggcagcatcaaagccgtggcaggttccaggaccagcaccagaaagtccgacggttccgccagggtgacatcattgctttgccgcagggtgtggttcactggagctacaatgatggcaat

SEQ ID NO: 230100 - DNA, 375 bp, Gossypium hirsutum
ttttaatccgagaccatatttcagattatttatcaactggctgttagatcttggttccttggaccctgtcactgatggtgcaaattttcagattttgacggccttcgccaacacatttcatgttctccagccccttaaagttccttccttctgctttgcatggctagagcttgtcagtcataggactttcatgccaaaattgctcactgggaattctcagaagggttggccctatatccaacgtttgctggtggacttgcttcagttcctggagccgtttttgaggaatgctgagcttggagttccggttcattttctgtataaaggcacactaagggtgctgctggttctgcttcatgactttccggagttcct

SEQ ID NO: 230101 - DNA, 387 bp, Gossypium hirsutum
gtcttgaccttgcaggtcgtgatctaaccgatgccttgatgaagattcttaccgagagaggttacatgttcaccaccactgctgaacgggaaattgtccgtgacatgaaggagaagcttgcttatgttgccctggactatgagcaggaactggagactgcgaagagcagctcatctgttgagaagaactatgagttgcctgacggacaagtcattactattggagctgagagattccgttgcccggaagtcctcttccagccatctttcatcgggatggaagctgctggaatccatgaaactacctacaactctatcatgaagtgtgatgtggatatcaggaaggatctctacggtaacattgtgctcagtgggggttcaaccatgt

SEQ ID NO: 230102 - DNA, 405 bp, Gossypium hirsutum
atatcgaggacctgaggaacaagatcattgcagccaccattgagaatgcgcagcccattttgcagattgacaatgccaggctggcagccgatgacttcaggacaaagtacgagcacgaactggccctgcggcagaccgtggaggccgatgtcaatggcctgcgccgggtgttggatgagctgaccctggccaggactgacctggagatgcagatcgaaggcctgaaggaggagctggcctacctgaggaagaaccatgaggaggagatgcttgctcttcgaggtcagagcggtggagatgtgaacgtggagatggatgctgcacctggcgtggacctgagccgcatcctgaatgagatgcgtgaccagtatgagcagatggcagagaaaaaccgcagagatgctg

SEQ ID NO: 230103 - DNA, 385 bp, Gossypium hirsutum
atctccggaacctcaagaacaaactggagaataaaatggaaggaataggtttgaagaggacaccgatgggcattgtcctggatgccctagaacagcaggaggaaggcatcaacagactgactgactatatcagcaaagtgaaggaataaacataacttacctgagatagggttacagcagaaattgagttgcagtttgcccttgtccagacctactttctacttgtgtttttgaaataggaggtgcacgtaccacccaattatctatggcagcatgcatgtataggctgaactattatcagctctgatgtttcagagagaaggcctcagaaactgaaagaaaaccaccaccctcctattgtatctgaagtttcacgtgtgtttat

SEQ ID NO: 230104 - DNA, 380 bp, Gossypium hirsutum
ctctcccatgcatcatagagggtctctaaatccatctgtacaaaggaagagatatcattcctcaacttagctgtcttagccgatgggaagtacctcaataggaatttatcagtaatttgatcccatgtagtgataaaacctcgtggtaagtaattcaaccactatttagctttattcctcaacgagaaaggaaacaaccgtaggtgaatgacatcgtcagaaatgccatttatcttgaaagtatcatagacttctagaaaattagccaaatgagtatttggatcttcgtcttgtaaaccatctaactaaacaaattgttgaatcatctgaatagtgttcggcttcaattcgaagttattcacagcaataataagtctcac

SEQ ID NO: 230105 - DNA, 363 bp, Gossypium hirsutum
  unsure (1)..(363): unsure at all n locations
atgcgcatgcagcacctgattgcccgtgaggcagaggccggcatctaccacttgcaattatttgaggaactccgccgcctggcgcccattaccagcgaccccacagaagccaccgccgtgggtgccgtggaggcctccttcaagtgctgcagtggggccataatcgtcctcaccaagtctggcaggtctgctcatcaggtggccagataccgcccacgtgcccccatcattgctgtgacccggaatccccagacagctcgtcaggcccacctgtaccgtggcatcttccctgtgctgtgcaaggacccagtccaggaggcctgggctgaggacgtggacctncgggtgaactttgccatgaat

SEQ ID NO: 230106 - DNA, 379 bp, Gossypium hirsutum
cggacgcgtgggtgataactgtaaaccagataggtttacatacaatattctcattcatggtgtttgtaaagccggtgtcatcgatgaggcagttcggttagttaagcagatggaaattttcggatactcaccgaatatgtgtacttataccatcttaattgatgggtactgtaatgccaggagggtcgatgatgcgtttaaacttattgagacgatgaagaaaaggaatgtgtttcctaatgaagctaccgtgagatcgttgattcatggggttttccgttgtgtggctccacgaaaggcattcgagttgttgataatgttcttggagaaggagcctatgatgcagagattggcttgtgatactctactgctttgtctt

SEQ ID NO: 230107 - DNA, 383 bp, Gossypium hirsutum
cgaaatggtctgccctcacctttctaggcagagctcacactggtcctcccgagaggaagaagaacaagaagaacaagaagttgaaaggagaagtggacaatacaagagagtgagagcccagttatcaaccggtgacctatttgtagtcccagcaggccatccagtcacattcgttgcctcccaaaacgaggacctaggattgctcgggttcggactctacaacggccaagacaacaagaggatcttcgtggctgggaaaaccaacaatgtgagacaatgggatcgccaggccaaggagctggcgtttggggtggagtcaaggttggtggatgaggtattcaacaacaacccgcaagaatcttacttcgtgtctggacagagtc

SEQ ID NO: 230108 - DNA, 408 bp, Gossypium hirsutum
atcgcgcagttcggcagcagcagccgcggagcagtagccgccgtgggagggagccatgaagcactacgaggtggagattctggatgcaaagacaagggagaagctgtgtttcctggacaaggtggagccccacgccaccattgcggagatcaagaacctcttcaccaagacccatccgcaatggtaccccgcccgccagtccctccgcctggaccccaagggcaagtccctgaaggatgaggatattctacagaagctgcccgtgggcaccacggccacgctctacttccgggacctgggggcccagatcagctgggtgacggtcttcctaacagagtacgcagggccccttttcatctacctgctcttctacttccgagtgcccttcatctatggccacaaatacga

SEQ ID NO: 230109 - DNA, 381 bp, Gossypium hirsutum
gaacgagagaatgaacggcaacccgcaatccagcgatgggaagcacgatgatgactctgctctctccgatttccttgcctctcttatggattatgctcccactatacctgacgaattggtggaacattacttagccaagagtggatttcaatgtcccgatgttcgattaataaggcttgtcgctgttgccactcagaagttcgttgcggaagttgcaagtgatgcacttcagcattgcaaggcaaggcaagctgcagttgtcaaagacaaaagggagaagcagcaaaaggataagcgcctaatcttgacgatggacgatctttcaaagtcattgcgcgagtatggggtgaatgtgaagcaccaggagtattttgctgatag

SEQ ID NO: 230110 - DNA, 378 bp, Gossypium hirsutum
cccacgcgtccgcggacgcgtgggctgtttctctcttctatattttcccaagattattttctctttcctttttttcctccctattttttttctcgggaaaaaaagactttttttccggtatacccagatcttgtttagttccaagctttaggttgtcatcgttttctcgaggttttaaactatgggtatctcttgaatttgtgaagcaaagggagaaatattggttaaaaactagtagcagtgtattgaatcaagttttacaaaaaaagaagttaaaaagaaagatgaaaatccagtgtgatgtttgtgagagagctccagcaacagtgatatgttgtgcagatgaggctgcactttgtgctaaatgtgatatcgaag

SEQ ID NO: 230111 - DNA, 400 bp, Gossypium hirsutum
  unsure (1)..(400): unsure at all n locations
atcggcactggtggctttggcggtggatttgggggctccttcagcggtaagggtggccctggcttccctgtctgccctgctgggggaattcaggaggtaactatcaaccagagcttgctgacccccctccacgtggagattgaccctgagatccaaaaagtccggacagaggagcgagaacagatcaagctcctcaacaacaagtttgccttcttcatcgacaaggngcggttcttagagcaacagaataaggtcctggagaccaaatggaagctgctccagcagcagacgaccagcacctccagcaaaaaccttgagcccctctttgagacctacctcagtgtcctgaggaagcaactagataccttggtcaatgacaaagggcgcctgcagtctgagc

SEQ ID NO: 230112 - DNA, 412 bp, Gossypium hirsutum
atgcacctacggcgggggcctgtctgtctcttcctcccgcttctcctctgggggagcctgcgggctggggggcggctatggcggtggcttcagcagcagcagcagctttggtagtggcttcgggggaggatatggtggtggcttcggtggtggcttgggtggtggcttgggtggtggctttggtggtggctttgctggtggtgatgggcttctggtgggcagtgagaaggtgaccatgcagaacctcaacgaccgcctggcctcctacctggacaaggtgcgtgctctggaggaggccaacgccgacctggaggtgaagatccgcgactggtaccagaggcagcggcccaatgagatcaaagactacagtccctacttcaagaccatcgaggacctgatgaacaagatcatt

SEQ ID NO: 230113 - DNA, 389 bp, Gossypium hirsutum
cggacgcgtggggaagacccgatcggccgtgttttgaagaaaacacagcttgcagatggacttattttagagaaaacctcaagtcctttgggtgttcttttgattgtttttgaatctcgacctgatgcgcttgtacagatagcctcattagctatccgaagtggtaacgggctccttttgaaagggggaaaggaggccaagcggtccaatgctattttgcataaggtaataactgaagccattccagacattgttgggggtaaagttattggacttgtaacttcaagagatgagattcctgatcttttaaaggttggtggccgtattggttcttggatcccacgaggcagcaacaagcttgtttcccaaatcaagagttcaaccaaaat

SEQ ID NO: 230114 - DNA, 358 bp, Gossypium hirsutum
ctgtactgaagtttgcacaatgcactggttgtcatgcaattgctggaaggcacactcctggtaccttcactaaccagctccagacatcgttcagtgagcctcgtcttcttatcctcacagatcccaggactgaccaccagcccatcaaggaagcagctctcggaaacattccaaccattgctttttgtgatactgactcaccaatgcgatatgttgacattggtatccctgccaataacaagggaaagcacagcattggttgccttttctggctgttagctaggatggttcttcaaaagcgtgggaacaattgctcctggacagaaatgggatgtcatgggtggtctattcttctaca

SEQ ID NO: 230115 - DNA, 340 bp, Gossypium hirsutum
atggaaagcaccggaagacaggccgcgacgtggcagttaaggtcattgacaaactgcgcttccccaccaagcaggagagccagctccggaacgaagtggccattctgcagagcctgcggcaccctgggatcgtgaacctggagtgcatgttcgagacgcctgagaaagtgtttgtggtgatggagaagctgcatggagacatgttggagatgatcctgtccagtgagaagggccggctgcctgagcgcctcaccaagttcctcatcacccagatcctagtggctttgagacatcttcacttcaagaacattgtccactgtgacttgaaaccaggaaacgt

SEQ ID NO: 230116 - DNA, 426 bp, Gossypium hirsutum
atcaggacagcgtggaggacttcaagaccaaatatgaagaggagatcaacaaacgcacagcagctgagaatgactttgtggtcctcaagaaggacgtggatgctgcctatatgaacaaggtggagctggaggccaaggtggacagtcttaatgatgagatcaacttcctgaaggtcctctatgatgcggagctgtcccagatgcagacccacgtcagcgacatgtccgtggtcctctccatggacaacaaccgcaacctggacctggacagcattattgctgaggtccgtgcccagtacgaggagattgcccagaggagcaaggctgaggccgaggccctgtaccagaccaaggtccagcagctccagatctcagttgaccaacatggtgacaacctgaagaacaccaagagtgaaatcgcagagc

SEQ ID NO: 230117 - DNA, 396 bp, Gossypium hirsutum
atgtgtgatgagaacggctctaagggttatgcatttgtccacttcgagacccaagaggctgccgacaaggccatcgagaagatgaatggcatgctcctcaatgaccgcaaagtatttgtgggcagattcaagtctcgcaaagagcgggaagctgagctgggagccaaagccaaggaattcaccaatgtttatatcaaaaactttggggaagaggtggatgatgagagtctgaaagagctattcagtcagtttggtaagaccctaagtgtcaaggtgatgagagatcccagtgggaaatccaaaggctttggctttgtgagttacgaaaaacacgaggatgccaataaggctgtggaagagatgaatggaaaagaaataagtggtaaaataatattt

SEQ ID NO: 230118 - DNA, 409 bp, Gossypium hirsutum
cggacgcgtgggctgaaatataattacgatgaggatgagctgtaatggctgcagggtcctgcgtaagggctgcaccgaaaactgcaccattagaccttgtcttcaatggatcaagtcctctgattctcaagccaatgctactctcttccttgccaaattctatggccgagctggtctcctcaacctaattgaagccggccctgaaaaccttcgccctgctatttttagatcacttttatacgaggcctgtgggcgtgtggtaaatccagtttatgggtcaattgggatgctttggtccgggaactggggtgagtgccaagcagccgttgatgctgtgctgaaaggctcccccataacccaaacttcatcatctttggaatcagttgaagaagagcaaccgatttcccct

SEQ ID NO: 230119 - DNA, 345 bp, Gossypium hirsutum
atggggtctgggatgggtaccctcctcatcagcaagatccgggaggagtacccagacaggatcatgaacacgttcagtgtggtgccttcgcccaaggtgtcagacacagtggtggagccctacaacgccaccctctcagtccaccagctcgtagaaaacacagacgagacctactgcattgataacgaagctctctacgacatttgcttcagaaccctaaagttgaccacgcccacctatggtgacctgaaccacctggtgtctgctaccatgagtggggtcaccacctgcctgcgctttccgggccagcttaatgctgacctgcggaagctggctgtgaacatg

SEQ ID NO: 230120 - DNA, 398 bp, Gossypium hirsutum
cggacgcgtgggcaccgccataagcgaaatcaaaagccagcagcgctgcagctaaaagagcagtcgtttgacaattattcgccatgggtaaggttcacggatctctagctcgtgctggtaaggtgagaggccaaactcctaaagtggccaagcaagacaagaagaagaagccccgtggccgcgcttacaagcggatgcaatacaaccgccgcttcgtcaccgcagtggttggatttggcaaaaagaggggacctaactcatctgagaagtaagagatctatgtaggtgaaagaaggcaagaagccttgttgaaagctttgatggattttaagtctttgttttcttttgataatgtttttatgatactggtttcaaggattggattgaactaccatttt

SEQ ID NO: 230121 - DNA, 406 bp, Gossypium hirsutum
cccacgcgtccgcccacgcgtccgcaaatttctgcgaaaaataaagctatatatataaaaagcagctattgaaagaagtggagctgatgggttcgtctttcggtgaagcttttccagcaatgcaggaaactttgctggagtttcgtgctggtaaaatgatgttggaaggaaaaagggttgtccctgatacacgtaaagggctcattcgcatagctaggggtgaggagggactggttcattttcagtggcttgatcggactcaaaatgttattgaagatgatcagattattttccccgatgaggctgtttttgagaaggttaatcaagcatcaggcagggtttacatattaaagttcaataccgacgaccggaagttctttttctggatgcaagagccgaaagctga

SEQ ID NO: 230122 - DNA, 409 bp, Gossypium hirsutum
gatagatctcgtcactaaccatcaccaggatccaccttgggggcagcctcagcaacctcagccacgtcaccaatcccaatgccaactccagaacttgaatgctcttcagcctaagcaccggtttaggtcagaggctggtgaaactgagttctgggaccaaaatgaggatcaattccagtgtgctggtgttgctttcctacgtcataagatccagcgcaaaggacttttattgccttcatttaccagtgctcctatgcttttctatgttgaacaaggggagggtattcatggggcggtcttcccaggttgtcccgagacatatcaatcacagtcgcaacaaaatatacaagataggccacaaagagatcagcaccaaaagctcagacggttgaaagagggcgatgtggtt

SEQ ID NO: 230123 - DNA, 409 bp, Gossypium hirsutum
gagaatgtttccatcattccaattgtggggttaggagggttaggaaagactgctttggcgcaatttgtctataatgatgaaatggtcaaaaatcattttgagttgatgatgtttgtgtgcgtttcagatgtttttgatgtcaaaataattgtagaaaatatgatcaaatctgcaactggtgaagcaccaaatcaaaaactcgaaatggatcaattgcaaacccaacttcgaggaaaaattggtgggaaaaaatatttgcttgttttggatgacatttggaatgaggagtgggaagaatgggttagtttaaaagagttattagtaggtggggctaaaggaagtaggataatagtaactactcgctctttgagagtagcaaagattacaagtaaatgtcaaccttatgttc

SEQ ID NO: 230124 - DNA, 426 bp, Gossypium hirsutum
atcggagggtcgtcttaaagggcccgcgcgccgccgccccctcggcccgccatgctgctatccgtgccgctgctgctcggcctcctcggcttggccgccgccgagcccgccgtctacttcaaggagcagtttctggacggagacgggtggacttcccgctggatcgaatccaaacacaagtcagattttggcaaattcgtcctcagttccggcaagttctacggtgacgaggagaaagataaaggtttgcagacaagccaggatgcacgcttttatgctctgtcggccagtttcgagcctttcagcaacaaaggccagacgctggtggtgcagttcacggtgaaacatgagcagaacatcgactgtgggggcggttatgttgagcttgttcctaatagtttggaccagacggacatgcacggagac

SEQ ID NO: 230125 - DNA, 388 bp, Gossypium hirsutum
gttcgttttgcatctctgctgctctttcttctctaattattgaggaaatccaccgatcaaagttgttcaaatcgtgggtgaaagttttgagaaactaaaatggcgtccacattcagcggcgatgaaactgctccattctttggcttccttggggccgctgctgctctcgttttctcctgtatgggagcggcgtacggaacggccaagagcggtgtcggagtggcgtccatgggagtgatgaggccagagctggtaatgaaatcgatcgtccccgttgatatggctggtgttttaggtatttatcggttgattcttgcggttattataagcaccgggattaacccaaaggccaaatcttactaccttttcgatggttatgctcatcttt

SEQ ID NO: 230126 - DNA, 403 bp, Gossypium hirsutum
ggttaacgctgatattgtggagacctataaggctgcttgcgataaatatcttatgaaccgagggagtagaggcaaaagaaagaataagcaatattttgaatccgacagtctccctgttggtccttctggagtttatatgcaatcccctgtctccttggacaaggcattgaaaaatccgtctgagttagaagggatgcagaattctcacttgagggatgcagctgctttggcacagttctggtgctggctggaagaggaaattcataagaacgtgaaacttactgaggtagaccttgcagacaaacttctagaattccgttcgaagcaagatggtttcctagatacgagctttgatacaataagcggctcgggtgcaaatggtgctattattcattacacacct

SEQ ID NO: 230127 - DNA, 404 bp, Gossypium hirsutum
aagaagagggatctgaggaagaagaaagagaagaacgaggaagaggaaggagaaggtcaggaaacggcttagaagaaacattctgctcaatgagactgaaacacaggacccctgcttcctctgctgatgttttcaacccacgaggtggtcgcatcaccacagttaacagtttcaatcttcccattctccaatacctccaactcagcgccgagaggggagtcctttacaataatgctatctacgctcctcactggaacatgaatgcccacagcattgtttacatcacaaggggaaatggaaggattcaaattgtgtcggaaaatggagaggcgatattcgatgagcaggttgagaggggtcaggtcataaccgtaccccagaatcatgcagtggtgaaaaaagca

SEQ ID NO: 230128 - DNA, 394 bp, Gossypium hirsutum
tgaaaaacatgcatccggaaataccaaagtgggtattgacttggggggaggtgactccgaggatggtgtttgcaaagatgtgtcaaccctgaatatttgggatctttatgtcaccaagtttttcgctctcaaatatgctgctgatgctgcctgcactgttctacgggttgatcagattataatggcaaaaccagctggaggtcctggaaggagagagcagcctgcaggaatggatgaggactaagtcttctaatctgcaacatgatatgccattcctttctttttttctcatcagggctggttcggactttgttaggcatcttcggagatgctaaaaaccctttgaaacaaagttttgcttttgttttgaaaattgttatggttctgtgttttc

SEQ ID NO: 230129 - DNA, 323 bp, Gossypium hirsutum
attgccgcgcccccagcacctacggcgggggcctgtctgtctcctcctcccgcttctcctctgggggagcctatgggctggggggcggctatggcggtggcttcagcagcagcagcagctttggtagtggcttcgggggaggatatggtggtggcttgggtagtggcttgggtggtggctttggtggtggctttgctggtggtgatgggcttctggtgggcagtgagaaggtgaccatgcagaacctcaacgaccgcctggcctcctacctggacaaggtgcgtgctcttgaggaggccaacgccgacctggaggtgaagatc

SEQ ID NO: 230130 - DNA, 404 bp, Gossypium hirsutum
agcaaatatgtggagacattggaagaactgaggaatttcaaggcagctgggaaccctttcactgatgaattctttcaaatatttcaatctgtttataggcaacaaatagcaatgcttgagaagctgcatcagaggaagaacaagcttgacaagaagctcaagtgtatccacacgtggcgtaaggtatcgagcatgatattcgttgccacgttcgccacagtgttgatttgttcggttgtggcagccgccatggctgctcctccggtggctgctgcactcgccgctgcaacgtccatcccattgggttcgatggggaaatggatcgattccctgtggaggaactacgaaaacgtgttgaaagggcaaaaggaagtgatcacctcaatgcaagcaggcacttatgt

SEQ ID NO: 230131 - DNA, 317 bp, Gossypium hirsutum
atgtcagccgcgttttctcttgcatcgccagcgcatccctgagacaccatggggaaggtgaaggtcggagtcaacggatttggtcgtattgggcgcctggtcaccagggctgcttttaactctggtaaagtggatattgttgccatcaatgaccccttcattgacctcaactacatggtttacatgttccagtatgattccacccatggcaagttccatggcaccgtgaaggctgagaacgggaagctcgtcatcaatggaagccccatcaccatcttccaagagcgagatccctccaaaatcaaatggggcgatgc

SEQ ID NO: 230132 - DNA, 368 bp, Gossypium hirsutum
cccacgcgtccgcctcttgatgatatctatgccaatgctatcagaaactgtgatcctgagggtcctcttatgctctatgtttcaaagatgattcctgcttctgataagggcagattctttgcttttggtcgtgtcttttctggcaaagtctcaactggattgaaggttaggatcatgggtccgaactatgtccctggtgagaagaaagacttgtatgttaagagtgtgcaaagaactgtcatttggatgggaaagaagcaggagactgttgaagatgtaccttgtggtaacacagttgccatggttggtttggatcagtttatcaccaagaatgctactttgacaaacgagaaggaagttgatgccca

SEQ ID NO: 230133 - DNA, 405 bp, Gossypium hirsutum
atcatggtgaggaacaagtcagttttcgtagttttgctcttttctcttttcctttcctttggcttgctttgctctgccaaagacttccccggcagaagaagcgaggatgatcctcgacagaggtacgaggactgccagaggcgatgccagtcggagacacgtggacaaacggagcaagacaagtgtgaagacaggtgtgaaaggcagtttaaggaggagcagcagcgtgacggagacgatcctcagaggagataccaggattgccgacaacactgccaacaggaagaaagaaggctgcgtccacagtgcgaacaaagctgccaggaacaatacgagagacaacagcagcagcagcctgacaagcgattcaaggagtgtcaacaccgttgccaacggcaagagcaa

SEQ ID NO: 230134 - DNA, 420 bp, Gossypium hirsutum
atcccgccgccagctcgccatggatgatgatatcgccgcgctcgttgtcgacaacggctccggcatgtgcaaggccggcttcgcgggcgacgatgccccccgggccgtcttcccctccatcgtggggcgccccaggcaccagggcgtgatggtgggcatgggtcagaaggattcatatgtgggcgacgaggcccagagcaagagaggcattctcaccctgaagtaccccatcgagcacggcatcgtcaccaactgggacgacatggagaagatctggcaccacaccttctacaatgagctgcgtgtggctcctgaggagcaccccgtgctgctgaccgaggcccccctgaaccccaaggccaaccgcgagaagatgacccagatcatgtttgagaccttcaacaccccagccatgtacgt

SEQ ID NO: 230135 - DNA, 376 bp, Gossypium hirsutum
ctggtgatgatttaaaccaggtggtgactgaccctgatgcgccaagtcccagcgagccaaccatgcgtgaatgggttcactggtacgttgtttcccgcccccccttgtttttgagaaaatattttgtaatcatgttgctgatcatttcgtaaaccatcacgcaatttgctttcgtcgctgtttcaggatcgtgtctgacattcctggaggaaccaaccccactcgagggaaggaaatcctggcatacatgggtccacggcctccagtaggcatacatcgctacatactggtgctgttccaacaaaagggcccgttgggtgcggtgcagcaaccggcgacaagagctaacttcagcactcgatttttcgctgaccac

SEQ ID NO: 230136 - DNA, 403 bp, Gossypium hirsutum
ggaaagtgacgaaggagagcaacaacaaaggaacaacccttactacttccatcgcagatcgttccaagaacgattcagggaagaacatggcaatttcagagtcctccagaggtttgctgacaaacatcatttacttaggggcatcaacgagttccgcattgccattttagaagcaaaccccaacactttcgttctcccacaccattgtgacgcggagaaaatttacgttgtcactaacggaagaggaacagttacgttcgtgacacatgaaaacaaagagtcatacaatgtagttcctggagttgtagtaagaattccagcaggaagcactgtgtacttggccaaccaagacaacagggaaaagctaaccatagcagtgctccaccgacctgtcaataaccct

SEQ ID NO: 230137 - DNA, 425 bp, Gossypium hirsutum
atcccgaacctcctcagccgcccggagccgcgcccggagcccggctatagaggctgcagtcgcagccgggagcccgcagcccgcgccccgagcccgccgccgcccttcgagggcgtcccaggccgcgccatggtgaaagtgacgttcaactccgctctggcccagaaggaagccaagaaggatgagcccaagagcggcgaggaggcgcttatcatcccccccgacgccgtcgctgtggactgcaaggacccagatgatgtggtaccagttggccaaagaagagcctggtgttggtgcatgtgctttggactggcatttatgcttgcaggtgttattctaggaggagcatacttgtacaaatattttgcacttcaaccagatgacgtgtactactgtggaataaagtacatcaaagatgatgtcat

SEQ ID NO: 230138 - DNA, 405 bp, Gossypium hirsutum
ctctaaaaccctcctcttcggcgaaaaacccgtcactgttttcggaatcaggaaccctgaggagattccatgggctgaagccggggctgagttcgttgttgagtcaactggagtgttcactgacaaagacaaggctgctgctcacttgaagggtggtgctaagaaagttgtgatatctgcccctagcaaagatgcacccatgtttgtaatgggtgtaaacgagaaagactacaagccagagcttgacattgtttccaatgctagctgcactaccaattgtcttgctccccttgctaaggttatccatgaccgatttggaatcgttgagggtctcatgactaccgttcatgccattactgcaacacaaaagaccgtcgatggaccatcaatgaaggactggagagg

SEQ ID NO: 230139 - DNA, 416 bp, Gossypium hirsutum
atgagccaggtaggggaacgcagcggccagacacctcagcgctacctggcagaactggatttctctcccacctgcggcttaagtctgactgccagcctgcctgccacagccggactccaccactccggtagcctcatggctgcaacctgtgagattagcaacatttttagcaactacgtcagtgcgatgtacagctcagaggactccgccctggcccctgttccccctgctgccgcctttggggccgatgacttggtgctgaccctgagcaacccccagatgtcattggagggtacagagaagaccagctggtcgggagaacagccccagttctggtcgaagacacaggttctggactggatcagctaccaagtggagaagaacaagtacgacgcaagcgccattgacttctcacg

SEQ ID NO: 230140 - DNA, 233 bp, Gossypium hirsutum
aaaatatcaggcatatgttctctcattgctgaagactttcctatggtagaccaggcgccagtacgtaaaggtggaagtggaaaatcggctgcccgtctgaagtgcccaaaaaatactttgatttctaatgtgaaatttgctagcttcggaaatcctacaggaaagtgtgggtcttacagcatgggggagtgccatgatcctaactcaacattggcagtcgaaaaggtctgcct

SEQ ID NO: 230141 - DNA, 392 bp, Gossypium hirsutum
gatgattgggagcactactccaaactaaccaaggaaatcggagaaaaagttcagattgtaggagatgatcttttggtcaccaacccaaagagggttgcgaaggctattgccgaaaaaaacttgtaatgcccttcttctcaaggtcaatcaaattggatctgttaccgaaagtatcgaagctgtgaaaatgtccaagcaagctggatggggtgtgatggccagccaccgcagtggtgaaacggaggatacttttattgctgatctttcagtcggtttggccacgggccaaattaagaccggagctccatgcaggtctgagcgtttagccaagtacaatcagcttctgcgaattgaggaggagcttggtgcggaagctgtctatgctggagcca

SEQ ID NO: 230142 - DNA, 424 bp, Gossypium hirsutum
  unsure (1)..(424): unsure at all n locations
atggtacatatacaccatggaatactatgcagccataaaaaagaatgagatcatgtcttttgtgggaacatggatggagctggaggccatcatccttagcagactaacacaggaacagaaaaccaaataccacatgttctcacttataagtgggagctaaaggatgagaacacatggacacaaaaggaacagacatgggggcctacttgagggtagagggtaggaggagggagaggagcanaaaaaataactattgagtactaggcttggtacctgggtgacgaaataatctgtacaacaaacccctatgacactagtttatctaacaaacctgcacttagtgacattattttcatatgtctcttggccacatatgattcttctttgaactatttattcataacctttgtccatttttagattc

SEQ ID NO: 230143 - DNA, 311 bp, Gossypium hirsutum
cttgctttcagaaaggtgttcgaagtccctgatttcgcctctcagtagaaaagatgtcttcagctggcgaagctgcttgctcttacgccgcattgattctctatgatgatggcatccccatcactgatgagaagattgcaactctagtcaaagctgcaaatgtctctgttgaatcttattggccaagcttgtttgctaagctttttgaaaagtgtaacattgaggatctcataaccaatgttggtgctgccggtgctggtgccgcagttgctgcagctgcacctgttgcagctgatgcgctgtggggagct

SEQ ID NO: 230144 - DNA, 357 bp, Gossypium hirsutum
cccacgcgtccggtccagtcatgtgatgcttcactgctgctggactccacaagaaggagcttgtctgagaaggagacagacaggagctttggcctaaggaatttcaggtacattgagaccatcaaagaagctgtagaaagggaatgtcctggagttgtttcttgtgctgatatccttgttctgtctgctagggaaggcatcgtttcgttgggaggcccttatattcctctcaaaactggaagaagagacggtagaaggagcagagcagatgttgtggaggagtatcttccggaccacaatgagaccatctctggcgttcttgacaggtttgccgccatgggtattgacacccctgga

SEQ ID NO: 230145 - DNA, 384 bp, Gossypium hirsutum
acttaatttccatttactagcaatttcttcaagttcttttctttgtttttttaatcaatggctgaccactacctccaaaacactcaaccaatgactcaccaaatggtgaaagccgctactgccgcaacagccggtggttccctcctcattctctccggtttaatcctagctggcaccgttattgcgctcaccatagccactccactcttcgttattttcagtccagttcttgtccctgctctcattgcaacagctctcctagcaacgggtttcgttgcctccggcggtttcggtgttgcagctgtcacggtcctgtcctggatttacaggtatgtgacggggaggcacccaccggctgcggatcagttggatagtgcagggatg

SEQ ID NO: 230146 - DNA, 349 bp, Gossypium hirsutum
cgtagatatggcgattaacccttctttgctctttctttcccttctttttctcttcaatggctgcctagctcgccagaccttttcgtcacagcagtcccaaaatgagtgtcaaatcaataggctccgcgcctctgcaccccagacccgaattcgctccgaagccggcaccaccgagtggtggaaccccaactgtcaacagctcaggtgtgctggtgtatctgtaatgaggcagactattgaacctaatggccttgttttgccttccttcaccaatgctcctcagcttctctacattgtccaaggaagaggtattcaaggtattgtgatgcctggatgtgccgaaacattc

SEQ ID NO: 230147 - DNA, 396 bp, Gossypium hirsutum
ggaaacatgttttccatgtggtgacggacaagatgaatcttggggcaatgcacgttatgttcaaattgaaagattataatggagctcatattgaagtgaaggcggtagaggattataagtttttgaattcatcctatgttccagtgttgagacagttagaatcggctaatctccagaagttttattttgagaacacgcttgagaatgccacgaaagatacgactaacatgaagtttaggaaccccaagtatttatcaatcttgaatcatttgaggttttatttaccggagatgtaccccaagttgcataggatattgcttttggatgatgatattgtggtgcagaaggatttgactggcttgtggaagattgatatggatgggaaagtgaatgggg

SEQ ID NO: 230148 - DNA, 390 bp, Gossypium hirsutum
atgacaaggtgcgcgccctggaggaggccaacactgaactggaggtgaagatccgtgattggtaccagaggcaggccccggggcccgcccgtgactacagccagtaccacaggacgatcgaggagctgcagaacaagatcctcacagccaccgtagacaatgccaacatcctgttgcagatcgacaatgcccgtctggctgctgatgacttccgcaccaagtttgagacagagcaggccctgcgcctgagcgtggaggccgacatcaatggcctgcgcagggtgctggatgagctgaccctggccagagccgacctggagatgcagattgagaacctcaaggaggagcttggctaccttgagaagaaccacgaggaggagatgaatgccc

SEQ ID NO: 230149 - DNA, 373 bp, Gossypium hirsutum
gttagatgtcacaaatgtccgtgaacttgaagattttatcatcaatgaatgcatatatgcgggtatagtcagaggaaagctggatcagctgcgaagatgttttgaggtccaatttgctgctggaagggatttgaggccaggacaacttgggagtatgatacaaacactatcaaactggttgggcacattaaacaacttactcatctcaattcaagagaagataaaatgggctgatacaatgagcgagttggacaagaagcatcggaaggaggtcgaagataaggtggaagaagtaaagaagtcagttgccgtcaaggccgaccttgactttcgagggattgaagagatctactctggacctggtggagtgatg

SEQ ID NO: 230150 - DNA, 395 bp, Gossypium hirsutum
cccacgcgtccgcggacgcgtggggtcgaaataggactaagacgatgtgcgatggcattactgatccggatttgggtccgatgtgtggaagaccattaggtttagggttccattacgctacgaatcagttgtatgtttgtgatgcataccttggtctcatggtgttagggtccggcagaagactagcaaccccactttcgaccggtgtagaaggcgtgccttaccgattttgcaatggtttagatgtccaccaattgtccggaaacgttttcttcaccgattccaccactaactatgatctaagaaatgcttcgaaaggattggaatcgaatgattcgacagggaggttgttaatgtataaacccgagcaataatcgagttacaggggtggttaa

SEQ ID NO: 230151 - DNA, 385 bp, Gossypium hirsutum
gtctcttccctcatctacccccaaatgtcctcacattatgtctttggtggccaacgaagattttcagcacattttacgtgtgctgaacaccaacgttgatgggaagcagaagattatgtttgcattgacctccatcaagggtatcggaaggcgattcgctaacatcgtttgcaagaaggctgatgtcgacatgaacaagagggctggtgaattgactgcacaggagttggacaatctcatgaccattgttgcaaaccccaggcagtttaaaatccctgactggtttttaaataggcagaaggattacaaggacgggaagtattcccaagtcgtgtctaatgctcttgacatgaagttgagggatgatttggagcgtttgaagaag

SEQ ID NO: 230152 - DNA, 351 bp, Gossypium hirsutum
cttcattgctcttccacctccgcaaatccccgcccaactctccgccgccgccaccgccaccgcaaccgccaccgccacagatccaagcaatgggccgcgtccgtaccaaaacagtgaagaaatcctcccgtcaggtcatcgagcgctactactctcgcatgaccctcgatttccacactaacaagaagatcatcgaagaagttgccattatcccatccaagaggctccgcaacaagatcgccggcttctcgacccatttgatgaaacggatccagaggggtccggttcgcggcatttccttgaagctccaagaggaagagcgtgagcgccgcatggatttccgccccgatg

SEQ ID NO: 230153 - DNA, 411 bp, Gossypium hirsutum
atcccacctggatttccatttccagggcctcctaattttcccccacaaagcatgtttggatttccaccacatttgccacctccattacttccccctccaggctttggctttgctcaaaatcccatggttccctggccacctgttgttcatctcccaggtcagccacagcgtatgatgggtcctctctcccaagcatcaaggtatataggcccacagaatttttaccaggttaaagacgttcggagaccagaaaggcgccatagtgacccttggggtaggcaagaccaacagcaactggataggccatttaataggggtaaaggggaccgcccaaagatttaataggattcacaccacttgaaaagagagcgacatgaaaaggaatgggagcaagaatctgaaaggcataga

SEQ ID NO: 230154 - DNA, 162 bp, Gossypium hirsutum
atccgtggtgctgtccatggacaacaaccgaaacctggacctgcacagtattattggtggtgtcagggcccaatacgaggagatttgctagagcacccctgatgccgactactggtgccacaccacgtactacgagctgctggttacaacaggcagacatgg

SEQ ID NO: 230155 - DNA, 312 bp, Gossypium hirsutum
ggtgacactgtcgctctagaacaggcatgaacagcaggagcgggctggtaccggaccggcagtcccgggatgggcaccggcgcccgggggcgatgccacccggtgccgactgaggccaccggaccatggcccgatcgctgacctggcgctgctgcccctggtgcctgacggaggatgagaaggccgccgccccggtggaccaggagatcaacaagatacttttcgaggccaacaagcatgaccgtgccgagcttaagctgttgcttttgggccctgtggagagcgggaagagcaccttcatcaagcagatgc

SEQ ID NO: 230156 - DNA, 412 bp, Gossypium hirsutum
atccagggcccagatgggaaaatgcatggcaacacctgctccatgtgtgaggtcttctttcaacaagaagaaagagcaaaagcaaaggctaaaagagaagctgcaaaggaaatctgcagtgaatttcgggaccaagtgaggaatggaacacttacatgcaccagggagcataatcctgtccgtgacccagatggcaaaatgcatggaaacaagtgtgccatgtgtgccagcgtgttcaaacttgaagaagaagagaagaaaaataataaagaagaaaaagggaaagttgaggctgaaaaagttaagagagaagcagtacaagagctgggcagtgaatattggcaatatttgaggaatggacgactcccctgtaccagagagaatgatcctattgagggtctagatgggaaaa

SEQ ID NO: 230157 - DNA, 273 bp, Gossypium hirsutum
atcgcgggggcggcgctgggcaattaatccggcccatgagcgccgaggacgaggagcagcagcccactgagatcgaatcgctatgcatgaactgttactgcaatgtgaggcgggggggtagggcttgggccgggacgagccgggggtcggacccagccaggtgggccttgccggggaccccgagacgcacccggagatagtaaggcggggaacgggagtttcattgattttttttccttcgctgctttctgcttcaccagggcatgacgcgcc

SEQ ID NO: 230158 - DNA, 477 bp, Gossypium hirsutum
gtgacagtgtcactctagaacaggcatgaacgcagggtcgggctggtaccggaactgccgggatggacaaggcgcgtgctctggaggaggccaacgccgacctggaggtgaagatccgtgactggtaccagaggcagcggcccgctgagatcaaagactacagtccctactgtaagaccattgaggacctgaggaacaagattctcacggccacagtggacaatgccaacgtccttctgcagattgacaatgcccgtctggccgcggatgacttccgcaccaagtatgagacagagctgaacctgcgcatgagtgtggaggccgacatcaatggcctgcgcagggtgctggatgaactgaccctggccagagctgacctggagatgcagattgagagcctgaaggaggagctggcctacctgaaaaagaaccacgaggaggagatgaatgccctgagaggccaggtgggtggagatg

SEQ ID NO: 230159 - DNA, 348 bp, Gossypium hirsutum
atggctttgctggtggtgatgggcttctggtgggcagtgagaaggtgaccatgcagaacctcaacgaccgcctggcctcctacctggacaaggtgcgtgctctggaggaggccaacgccgacctggaggtgaagatccgtgactggtaccagaggcagcggcccgctgagatcaaagactacagtccctacttcaagaccattgaggacctgaggaacaagattctcacggccacagtggacaatgccaacgtccttctgcagattgacaatgcccgtctggccgcggatgacttccgcaccaagtatgagacagagctgaacctgcgcatgagtgtggaggccgaca

SEQ ID NO: 230160 - DNA, 399 bp, Gossypium hirsutum
aaaaaaaaagaagcaaaaaaacatggccaaagttctgttgttcattgctctatgtgtgcttccagctttggttagtgctacacgcattctgaataaccaattggtggttgaaggctatgtgtactgtgatacttgccgtgctggttttgaaacccctaagactagaaggctagctgatgccatggttaagctggtatgctccgacaggaagaccggcggagttgttttcgagaaggagggatataccgacaaaaccggaaaataccagattcgtgtatccgaggatcacttggatcaaatctgggatgcagttcttgtgaagagcccccagcttggatgtgccacaatgtcccccggtcgtgaacgtgcccgtgttatcttgaccaactccaatggcat

SEQ ID NO: 230161 - DNA, 402 bp, Gossypium hirsutum
atgggagccaatgggagatgggaagaaaatcatttcattggccgataaccatatcctgctgtgggatttacaggaaagctcaagccaggctgtgctggccagctcagcctccctgggagggaagggacaactgaagttcacctcgggacggtggagtccgcatcacaactgcacccaggtggccacagcgaacgacaccaccctccgtggctgggacacccggagcatgagccagatctattgcatagagaatgcccacggacagctggtgcgggatcttgacttcaatcccaacaagcagtactacttggccagctgcggagacgactgtaaggtgaagttctgggacacccgaaacgtcaccgaacccgtgaagaccctggaggagcactcccactgggt

SEQ ID NO: 230162 - DNA, 367 bp, Gossypium hirsutum
cccaaccccaatcctgttgctcttttgcatcctttgtttgtctcttcatctcctgcactacttgcaaaataacgagctgaagccgtgctacaataacactagtgttttcaacaataaattaatcatagccgcagcttgcttcttttaaactctaaatataaaggaggccaaacatgccgcctcgtagataccaatttgggagggctgatgaggccactcattccgactccatgagagccaccttggctgaattcctctccactatcattttcgtctttgccggcgaaggctcaattcttgctcttgacaagatgtacaatgatacgagtgcgacacctgcaagactggtgatgatagcacttgcgca

SEQ ID NO: 230163 - DNA, 410 bp, Gossypium hirsutum
atggagattgctcagaggagccgggctgaggccgagtcctggtaccagaccaagtacgaggagctgcagatcacagcgggcagacatggggatgacctgcgcaacaccaagcaggagattgctgagatcaaccgcatgatccagaggctgagatctgagatcgaccacgtcaagaagcagtgtgccagcctgcaggccgccattgctgatgctgagcagcgtggggaaatggcactcaaggatgccaagaacaagctggaagggctggaggatgccctgcagaaggccaagcaggacctggcccggctgctgaaggagtaccaggagttgatgaacgtgaagctggccctggacgtggagattgccacctaccgcaagctgctggagggcgaggagtgcatgctgaatgg

SEQ ID NO: 230164 - DNA, 332 bp, Gossypium hirsutum
gcaacagcatctgccgaaaaagatggtttcggggtcagggatctgcgccaaaagggtggtggtagatgcaaggcatcacatgttgggaaggttagcgtcgatattggctaaggaattgttgaatgggcaaaaagttgtggttgtaagatgcgaagaaatttgcatgtctggtggattggtgaggcagaaaatgaagtacatgaggttcttgaggaagcgtatgaacactaaaccttctcatggtcctatccattttcgtgctcctgctaagatcctatggcgtaccattcgtggaatgattcctcataagactaagcgcggagcaacaacac

SEQ ID NO: 230165 - DNA, 308 bp, Gossypium hirsutum
cgatcggatcccggagcgtgccttggcagcatatcgggggtggctttcgcaaagctcagcgtaccattatgtaccgcctcactaactccatgatctatgcacggcctgaacaacggccagaagctgatgactgttcgcatcgtcaagcatgcctactagatcatacacctgctcacatgggagaaccctctgtctgggctgttcaactccatcatcatcagtggttccaggcaggtcttcacccgcattggacgttccttgactgtaagacgacagtttgtggacatgtctccactgtacttcgtgat

SEQ ID NO: 230166 - DNA, 318 bp, Gossypium hirsutum
attataaggatagctgctcttatacattagacaaaattctgctacagactcctgacacagctacatatgtgccaatttctgggtgtaattgcaacaacatacgtaggacccaagtgctaacattccttaactcaagggatggaatgtcacaccaaatgatggctatgccagtggaaccacactgctttaggctctggactccattctaccaccaactggtgcatatgacaaggccttgcgcctggcttttcaggatgtgtacaaaattggtggtattggtactgttcccgttggccgagtggagactgattttctcaa

SEQ ID NO: 230167 - DNA, 383 bp, Gossypium hirsutum
ggaacttgcggcggttattcttgaacctgttgttgtgaactctggcttcattccgcctaaacctgacttccttgaggctctacaacgcttaaccaaggcaaatggcactctcctcatatttgatgaagtgatgactggatttcgcttgtcctatggcggggcacaggaatattttgggattactcctgatttaacaaccctagggaagataattggtggtggtcttcctgttggtgcatatggaggaaggagggagatcatggagatggtggcaccagcagggccaatgtaccaggctgggaccttgagtgggaacccattggcgatgacagccgggatacagacccttaagcggttgaaagagccaggaacatacgaatact

SEQ ID NO: 230168 - DNA, 249 bp, Gossypium hirsutum
atgccaagtacctccctcacaacgcacggcggtatgccgccgggcgcttccgcaaagctcagtgccccattgtggagcgcctcaccaacttcatgatgatgcacggccccaacaacggcatgaagctgatgactgtgcgcatcgtcaagcatgccttcgagatcatacacctgctcacaggcgagaaccctctgcaggtcctggtgtacgccatcatcaacagtgggtcacgggaggactccaccccca

SEQ ID NO: 230169 - DNA, 325 bp, Gossypium hirsutum
atacccaggctgccctgaaggtcctcgcccagaaagccagggaggctcagcctcctgttgccaggacccagcgttcacgtggggctgacagtgctgtgggaacgctccctgcaacgtgtccccagagtacccccgtccaggccaaagggaccaacaagctcagaaaacctaagcttcctgagggccagcaggccaccaaagcccctgggagctcatatgacagtgaggacagcagcaacagctcttcatggagcgaggaagatgctgaagggccccaggtggccaagtcggtccacacgctggtaggtcccacccccttcaggac

SEQ ID NO: 230170 - DNA, 379 bp, Gossypium hirsutum
gaaaatttaccttgtcaccaacggaagaggaacgcttacgttcttgacacatgaaaacaaagagtcctacaatatagtaccgggagttgtagtcaaagtcccagcaggaagcactgtgtacttggctaaccaagacaacaaggaaaagctaatcatagcagtgcttcaccgccctgttaataaccctggacaattcgaggaattcttcccagctggaagccaacgccctcagtcatatctccgagcctttagtcgtgaaattcttgagcctgccttcaatacacgaagtgagcagctagacgagctgtttggtgggaggcaaagccgtcgaaggcagcatggacagggaatgttccgtatagccagtcaggaacaaatt

SEQ ID NO: 230171 - DNA, 396 bp, Gossypium hirsutum
atgaggaaagcatgatgggagccacgaagggactgtgtattttaaatgcaggcacccaacaggaggatcctttattcgtccgaataaggtaaattttggaacagactttcttactgcaattaagaaccgctatgtgttagaagatggaccagaggaagatagaaaagaacaaattgttacacttggaaataaacctgtggagactgttggttttgactctcttatgaaacagcaaagtcagctgagcaagttgcaagaagtttctctgaggaactgtgcagtaagttgtgctggtgaaaaaggaggagttgccgaagcatgtcctaatattagaagggtagatttgtcaaaaaacctgttgtcatcatgggatgaagtgatccacattgctgatca

SEQ ID NO: 230172 - DNA, 356 bp, Gossypium hirsutum
ccgggatcctacctggacaaggtgcgtgctcttgatgagggcgggggccacctggaggtggagatacccgactggttccacaggcagctgggcattgagatcaaagactacagggcctacttcaagaccatcgaggacctgtggaacaagatcattgcagacaccattgagaatgcgcagtccattttgcagattgacaatgccaggctggcagccgatgactctcaggacagagtacgagcacgcactggccctgcggcagaccccagaggccgctgtcgatggcctgcgcccggtgttggatgaactgaccctggcccggactgacctggagatgcagatcgaaggccttaaag

SEQ ID NO: 230173 - DNA, 399 bp, Gossypium hirsutum
atggagattgctcagaggagccgggctgaggccgagtcctggtaccagaccaagtacgaggagctgcagatcacagcgggcagacatggggatgacctgcgcaacaccaagcaggagattgctgagatcaaccgcatgatccagaggctgagatctgagatcgaccacgtcaagaagcagtgtgccagcctgcaggccgccattgctgatgctgagcagcgtggggaaatggcactcaaggatgccaagaacaagctggaagggctggaggatgccctgcagaaggccaagcaggacctggcccggctgctgaaggagtaccaggagttgatgaacgtgaagctggccctggacgtggagattgccacctaccgcaagctgctggagggcgaggagtgc

SEQ ID NO: 230174 - DNA, 374 bp, Gossypium hirsutum
gacccacgcgtccggtttttgctttgaatctttgcagaggggcttcgagcaacaatggttatctttaacattttcaaaggcaatatttcttggtaatggtcttgttgccattttggctgggttgtttggaaacgtgctcgttgattcattatcccttggacctgtggctccttttgatgctgctgcgatctttcttgccattgggatggccattattttatcatcatggaccgaaaatttcggagatccttcagaaaataaggacttgctgacccagttcaggggcgctgctgtagcaatagcttcggatgaaaaaattgctttgctgggtgcaatacagtctctgttcgaaggttcaatgtacacatttgtgt

SEQ ID NO: 230175 - DNA, 310 bp, Gossypium hirsutum
agtgcactgacctctagtaacaagcataaacaaaagaggtgccggtcccggattccaattatacccatgactaacctgcatgtaaaaggccacaaagccagggggggtcaaccttctgtttccaggacccatccttcatgtccagatcacagagctttgggaacactctctacaacgagtccccacagtacacctcgccatgccaaaaagacctacacgctcagaaaacctattttacctgaggtcaaatgaggcaccaaaggcccggtaagctcagcatacactatgctcaggagcaacagatcttcac

SEQ ID NO: 230176 - DNA, 356 bp, Gossypium hirsutum
atcctacctggacaaggtgcgtgctctggaggaggccagcgccgacctggaggtgaagatccgcgactggtaccagaggcagcagcccagtgagatcaaagactacagtccctacttcaagaccatcgaggacctgaggaacaagatcattgcagccaccattgagaatgcgcagcccattttgcagattgacaatgccaggctggcagccgatgacttcaggacaaagtacgagcacgaactggccctgcggcagaccgtggaggccgatgtcaatggcctgcgccgggtgttggatgagctgaccctggccaggactgacctggagatgcagatcgaaggcctgaaggaggagc

SEQ ID NO: 230177 - DNA, 381 bp, Gossypium hirsutum
gaatctcacaaaacagaaacaattcgcaccaatgtggctggaaccttgaccttagcagatgtttgcagagaacatgggcttttgatgatgaattttgctacagggtgtatattcgagtacgatgcaggacatcctgagggctccggcattgggtataaagaggaagacaaacccaatttcactggttccttctattcaaaaaccaaggctatggttgaagagctgttgaaagaatatgaaaacgtctgcactctcagagttcgaatgccgatctcatctgacctaaacaaccctcgtaactttattgccaagattgcacgctacaacaaggtggtcaacattcccaacagcatgacaatcttggatgaacttctgcctatt

SEQ ID NO: 230178 - DNA, 388 bp, Gossypium hirsutum
atgcgtatattagatattgttcctcctaccttctcagctctatgtcctgcaaacccaacctgcatttacaagtatggagatgaaagtagcaattctcttcctggacattctgttgccctctgtttagcagttgcctttaaaagtaaggcaaccaatgatgaaatcttcagcattctgaaagatgtaccaaatcccaaccaggatgatgatgacgatgaaggattcagttttaacccattgaaaatagaagtctttgtacagactctgctacacttggcagccaaatcattcagccactccttcagtgctcttgcaaagtttcatgaagtcttcaaaaccctagctgaaagtgatgaagggaagttacatgtgctaagagttatgtttg

SEQ ID NO: 230179 - DNA, 408 bp, Gossypium hirsutum
atggatttgatggcgtgatgtctcacagaaagttctcggctcccagacatgggtcgctcggcttcctgcctcggaagcgcagcagcaggcatcgcgggaaggttaagagcttccctaaagatgatccgtctaagccggtccacctcacagccttcctgggatacaaggctggcatgacccacatcgtgcgggaagtcgacaggccaggatctaaggtgaacaagaaggaggtggtggaggctgtaaccattgtggagacgccacccatggtggttgtgggcattgtgggctacgtggaaacccctcgaggcctccggaccttcaagactgtcttcgctgagcacatcagtgatgaatgcaagaggcgtttctataagaactggtgagggaggaggccctgcagtccct

SEQ ID NO: 230180 - DNA, 381 bp, Gossypium hirsutum
ggaaaaggaaaacgaagaaaatggcgtgcctctctgcccaaatccctctctgcttggccttaatgatggctgcctgtttgatgataggcatcaatggaagcatacatggagctcaaagggagttcgattactttgctttgtctcttcaatggcccggcaccatctgccacaagactcgccattgctgctcctccaatgcctgctgccgaggctcgaactctccaactgaatttaccattcatggattgtggccggattataatgatggaacctggccttcctgttgttaccgatctcagtttgatgtcaaagagatttcaacattgcttgatgcacttgagaagtactggccatcgttatattgtggcaaatcatcaacct

SEQ ID NO: 230181 - DNA, 395 bp, Gossypium hirsutum
atcgggttaggaggagctaggctgccatcggaccggtgcagatacggggttgctcttttgctcataagaggggcttcgctggcagtctgaagggcaacgcggtaaaaatactgctttggtgggcgacgcggtacaggtgccgaagagcgttcgttacgggaatgccgaagcgtgggaaaaagggagcggtggcagaagacggggatgagctcaagacagagccagagcccaagaagagtaagacgcccgcaaagaaaaatgacaaggaggcagcaggagagggcccagccctgtatgaggacccccccgatcagaaaacctcacccagtggcaaacctgccacactcaagatctgctcttggaacgtggatgggcttcgagcctggattaagaag

SEQ ID NO: 230182 - DNA, 276 bp, Gossypium hirsutum
cggacgcgtgggtaaggaaggaatcccaccagaccagcagaggctgatttttgctgggaagcaacttgaagatgggaggacccttgcagattacaacatccagaaggaatccactttgcacctggtccttcgcctccgcggtggttttaagtgttgtgccgaacacctgtccagttattgttgatgtgttaagtttgttatgtttgtgggtcgtatgctgatgtgagctggccactaggcaggggaagcttacaagtaaaaataattgctttttat

SEQ ID NO: 230183 - DNA, 372 bp, Gossypium hirsutum
cattcctggcattaatggacctagtgagggagttcccagagttcttgcatgctttagtaataatctcctacgtcgcgaaccacttaagctcgtggatggtggcgaatctcaaataacttttatatacataaaggatgctattgaagctggtctctcgatgattgaaaatgcagatagggccaatggccatattttcaatgtgggtaacccggacaatgaagtcacagttaggcaacttgctgaaatgatgactaacgtctatgccaaggttagtggagaaactgcgctggagtcttcaacagttgatgtcatctccaaggaattttatcgagagggttatgatgatagtgacaagagaattccagacatgac

SEQ ID NO: 230184 - DNA, 384 bp, Gossypium hirsutum
ttatttttgagacagaaaagcacaatggtattgctgaattgcttgaaatcttgggcagcataataaatgggtttgctttgccgttgaaggaagagcacaagctcttcttggtccgagcgctcattcctcttcacaagcctaagtgtgtgtctatgtaccatcagcaactttcttattgcattactcagtttgttgagaaagacttcaagttggctgataccgtcatcagaggccttctaaagtattggcctgtaactaatagttcaaaggaggtaatgttccttggagagttggaagaagttcttgaagctactcagacagcagaattccaacgctgcatggttcctcttttccgacagattggccgatgcctcaacagcttgc

SEQ ID NO: 230185 - DNA, 395 bp, Gossypium hirsutum
atgccgcggcgggagttgagcgcgcagccttgtttagcccaggcgccggcagccatggcggtggaaggaggaatgaaatgtgtgaagttcttgctctacgtcctcctgctggccttttgcgcctgtgcagtgggactgattgctgtgggtgtcggggcacagcttgtcctgagtcagaccataatccagggggctacccctggctctctgttgcctgtggtcatcatcgcagtgggtgtcttcctcttcctcgtggcctttgtgggctgctgcggggcctgcaaggagaactattgtcttatgatcacgtttgccatctttctgtctcttatcatgtttttggaggtggccgcagccattgctggctatttttttacagataaagtgatgtcaga

SEQ ID NO: 230186 - DNA, 338 bp, Gossypium hirsutum
gctttgttgtatctcaatgtatatggcctcacacctatgaataactacctttactggtttgggattgggatattccactcgggtatagaagtacatggtttggagtacggatttggagcgcatgagtaccctacaagtggggtgtttgaagtggaaccaagaagttgtcccggcttcatcttcagaagatcaatattattgggcagcactaacttgtctacgtcagaactggggaaacttatggagcacccttctcagaaataccatggggacacgcaccatttaatggctgagaattgcaaccatgtcaccaatgaagtgtgcatgcaactaactgg

SEQ ID NO: 230187 - DNA, 388 bp, Gossypium hirsutum
aatcaacaatggcaaagctcgcagtttacttagccaccctggctctcattttgttccttgccaatgcttcaatcacatctgtgacggtcgaaagcgaggaaaaccgggatagctgtgaacagcagataaggaagcaagcccacctgaagcactgccagaagtacatggaggaagagtggggtggcgaaggcagcgacaatatagccggcgggtacattgactcatgttgccagcagctagagaagatggatacgcaatgcagatgtcaaggtctaagacatgcaacgatgcaacagatgcaacagatgcaagaacaaatggggagcaaacagatgcgagagatcatgcaaaaggttaccaagaatataatgtccgaatgtgagatgga

SEQ ID NO: 230188 - DNA, 403 bp, Gossypium hirsutum
atacggcaatgaaagcagctttccagtcacagtacaagagtcactttgttgcagccagtttaagtaatcagaaggctggaagctctgctgctggggcaagtgggtggactagcgcagggagcttgaattctgttccaactaactcagcacaacagggccataacagtcctgacagccctgttgccagtgccaccaagggcattccaggctttggcaatactggcaacatcagtggtgcccctgtgacctacccatctgctggagcccagggagtcaacaacacagcttcagggaataacagccgagaagggactgggggcggcaacgggaaaagagagagatatgagaaccggtgcagcagccgtcacattcacggagagactggcaatcggcatagcgatgg

SEQ ID NO: 230189 - DNA, 404 bp, Gossypium hirsutum
atcccaggccctgtggggctggcagatgagtaagcaggcaggctgggtgcacccatccctccccttcccctcccctaccctcccttctaccccccatccactgtccgccagcacagtgcattcatgcagctgggtcccgccccgtctccagaggcacctcctgctagcaacagtctccccaggcacgacacagctaacagaaggccgggcaggcaggactctgggacagacgcaggccagctgcccagagagcccagacccagcatggacgctgtggacgccaccatggagaaactccgggcgcagtgcctgtcccgcggtgcctcgggcatccagggcctggccaggtttttccgccaactagaccgggacgggagcagatccctggatgctgacgagttcgg

SEQ ID NO: 230190 - DNA, 387 bp, Gossypium hirsutum
gtcaactggcaaagtttctctgtctggtcgctctctctattggtgaagttcataagcttttgtatcaatggctgaagtccgtgaccgcaacctgccgcaccaagttcaagttcacccacagtaccgtttcgacaatacaaccggaggctgttactgtgcacagaactatcacagtggaccatcaacaagccaagttctagccgtccttacacttctccccattggtggtacactgcttgcattagccgggttaacactggccggcaccgtcattgggctgatgctagccacaccgctgttcatcatcttcagcccagttcttgtcccagctgccattgccattgccatggcagggacggggttcttgtcgtccggggcgtttgggtt

SEQ ID NO: 230191 - DNA, 168 bp, Gossypium hirsutum
atggatatttgtttttgtccttttaaaaatcatattagggtcaggtgaggtggctcatgcttgtaatctcagcactttgagaggccgaggtgagtggatcacctgaagtcaggagttcaagaccagcttgatcaacatggtgaaaccctatgtctactaataatacaa

SEQ ID NO: 230192 - DNA, 375 bp, Gossypium hirsutum
cccacgcgtccgccgatggggcggaattggggacaaaattggcatataaattctgatctaaggaatcaaccactttcatttgaggtcactaatagtgatggtcttacacttacatcttacaatgttgctcctaaaaattggaactttggccaaacttttgaaggaaagcaattcgaggtctaagatgaaagaaaagcatcatcatcaacacaatgtaatgttgggtattatttattttatatatatagaccagactgtcctattcttttctttctttttgtttatctggtgttttgtactgattggggatggaaatggaagggtagaattggcgacttttttattgtgtgtaaggacttaaaatagcaggatata

SEQ ID NO: 230193 - DNA, 388 bp, Gossypium hirsutum
ggaaccgcttccatcagcttagattacaaacatgggccatacccaagtacggaatacagtaccgcttgaaatggcaaaaggaatccgtcaataacatgattgaggaagctgtattagaggctgaggaaaaaggtgctagtgtgttgagtctaggcctcatgaatcagggtgaagagctaaacaggtacggtgaggtctatgtgaagaagcatcctcagttgaaagtgaagttagtggatgggagtagcttggcagttgcagttcttctaaatagcataccaaagggaacaacccaagtactccttagaggccacttgactaaagttgcttttgcagttgcctttgccctatgccaaaagggcattcaggtcactatattgcgtgaggg

SEQ ID NO: 230194 - DNA, 382 bp, Gossypium hirsutum
ggacaagaaaaaaattgttaaaaaaaaaaagaaccctctgcagccatggctgagcatcaccagcaattgcgccgaactgatgacatgaagaatttcttccatgaaaatggaccctcaacatcaaaagttcttatggttgccaccctccttcctgttggtggcatcctcctcttgcttgctggtttgagccttattggatccctcataggtcttgctattgccgccccacttttccttattttcagccctgttttggtacctgctgcttttctcattgcgggttccatagccggattcttgacctccggagcatttgggatcactggactgtcatcgctgtcgtggattgctacttatattcgtggaagcaggggctctatgt

SEQ ID NO: 230195 - DNA, 370 bp, Gossypium hirsutum
gcgcccacgcgtccgtattttcatttcagtgaaggacaagaaaaaaatttttaaaaaaaaaaagaaccctctgcagccatggctgagcatcaccagcaattgcgccgaactgatgacatgaagaatttcttccatgaaaatggaccctcaacatcaaaagttcttatggttgccaccctccttcctgttggtggcatcctcctcttgcttgctggtttgagccttattggatccctcataggtcttgctattgccgccccacttttccttattttcagccctgttttggtacctgctgcttttctcattgcgggttccatagccggattcttgacctccggagcatttgggatcactggactgtcatcgc

SEQ ID NO: 230196 - DNA, 385 bp, Gossypium hirsutum
cccaaacaatcccaaagagaaaaaaaaaaccacccatagccagaaagcaagccaaaaaaaatgtcagacgatgaaacagtggaagagtacttattcaaaatagtgataataggagattcagctgtcggtaaatccaacctcctttctcgattcgcacgaaacgagttcaacgctcactcaaaagaaaccattggagttgagtttcaaacccagagcgttgaaatcgacggaaaagaagttaaagctcagatttgggacactgcgggccaagaacgtttccgtgctgtaacttcggcttattacaggggtgctttcggtgctttgttggtttatgatattagccgaagagctacgttcgataacgttgctcggtggcttgatgagc

SEQ ID NO: 230197 - DNA, 387 bp, Gossypium hirsutum
  unsure (1)..(387): unsure at all n locations
taatttccttttatttattggttgtttgttttctggtgctttctttctctatcctgaaaccacagccgtaaccatgtcttccttcctagccaacggcatttccagcttctcaccacagcctacttccgattcaaccaagttccttaaaggcttcttcccaaagctcgattccgtcaaatccataaccccaaaactccaaagttcaaggcttttgaaggtcagagcagatgttggtttcgatcctcaaactctcacgtcagatcccagctcttcatcaggtaaatcctacgatgacaaaatccaggaaattcttcgaaaccgtgattatgataagaagtttggctntactatggatatcgattcttttgcgatacccaaagggctttc

SEQ ID NO: 230198 - DNA, 351 bp, Gossypium hirsutum
cccgtttccttccggagtttttcgacggtcgctcggcttccaaaggccccagtctttacatttattacaggaactcaattataaagctattcagggaaaacccttcccgtaagattaccttcactgacgtcaggaagactcttgttggcgatgttggatccattcggagggttttcgatttccttgaccactggggtctcatcaattactctgcctcctctgctctttccaagccctccaaagatactggttctaatattaaatcctcagattccccttctgttgaatccacttcttctgctgcccccacctgcaaacactcctctaatttcaggcgaatctgcggggcgt

SEQ ID NO: 230199 - DNA, 397 bp, Gossypium hirsutum
atggcttgggtggtggctttgctggtggtgatgggcttgtggtgggcagtgagaaggtgaccatgcagaacctcaacgaccgcctggcctcctacctggacaaggtgcgtgctctggaggaggccaacgccgacctggaggtgaagatccgtgactggtaccagaggcagcggcccgctgagatcaaagactacagtccctacttcaagaccattgaggacctgaggaacaagattctcacggccacagtggacaatgccaacgtccttctgcagattgacaatgcccgtctggccgcggatgacttccgcaccaagtatgagacagagctgaacctgcgcatgagtgtggaggccgacatcaatggcctgcgcagggtgcttgatgaactgaccct

SEQ ID NO: 230200 - DNA, 254 bp, Gossypium hirsutum
tcgcccacgcgttcgcccaaacgcctcgctctaagaaaaaaacaattatggcaagcaaagaacccgaacacgagcacagagaagatgaagaagctcctggcgccgaggatgaagacactggagctcaagtcgaccctattgtcaagctagaggaagtcgctgtcagtacatgcgaggaaaatgaagatccgatcctcgatctgaagtcgaagctgtatcgatctgataaagaagggaatcaatggaaagagaga

SEQ ID NO: 230201 - DNA, 390 bp, Gossypium hirsutum
cggacgcgtgggggtcataaccgtaccccagaatcatgcagtggtgaaaaaagcaggaaggcgagggtttgaatggatagcattcaagacaaatgccaatgctaagattagtcagattgctggacgtgtctccattatgcgaggattgccggtggacgtgctggccaactcctttggtatatcccgggaggaggccatgaggttgaagcataacagacaggaggtgtcggtttttagcccaaggcaaggctcgcaacagtagatcaaacaactaatctaggtgtacgtacgtacgtaattgcatcaacaataaaacccagatcccaatatctggattcggaataaatatatatataaataaaataatatggccttaacaggcatgcaact

SEQ ID NO: 230202 - DNA, 410 bp, Gossypium hirsutum
atgctgtcagtgaggaaatggtggaaagacagattagctgggcataatgacggatctggagcaaagctattctgtgaggctgaatgatggacacttcatgccagtgctgggatttggcacttatgctcctgatcatactcccaaaagccaggctgctgaagccaccaaagtggctattgacgtaggcttccgccatattgattcagcgtacttataccaaaatgaggaggaggttggacaggccatttgggagaagattgctgatggtactgtcaagagagaggatatattctacactaccaagctttgggctactttccttcggccagaattggttcgcccagccctagaaagttcactgaagaaacttggactggattatgtagatctcttcattattcatgtaccat

SEQ ID NO: 230203 - DNA, 368 bp, Gossypium hirsutum
tttctccataccagcataaatgaacaatggcaaagctcgcagtctacttagccaccctggctctcattttgttccttgccaatgcttcaatcacatctgtgacggtcgaaagcgaggaaaaccgggatagctgtgaacagcagataaggaagcaagcccacctgaagcactgccagaagtacatggaggaagagtggggtggcgaaggcagcgacaatatatccggcgggtacattgactcatgttgccagcagctagagaagatggatacgcaatgcacatgtcaaggtctaagacatgcaacgatgcaacagatgcatcagatgcaagaacaaatggggagcaaacagatgcgagagatcatgcaa

SEQ ID NO: 230204 - DNA, 386 bp, Gossypium hirsutum
ggatcttgtaggattcccaagaaattcttcgatttcttccggaagcagatgattattcatccgcttctcacgttccgtgaatagccgggacattgaggaatatccagaaaggcacttagggaatcggtctgattctatctccgttcgttccgtttgaagaaaggaaggatcccaaagaatcgatctttcttttagttgttgaatctctctttgattgatcaatgtgtgatattccgaatcctcattactaatggaatcgaaacgatctctggattgatcagaagatcctttcaattggcgagaatccgttacttgaacgaaactagatcttgtggaatcatattgaatatttgacgatacattccgtaccttgctaaaaaatcgat

SEQ ID NO: 230205 - DNA, 378 bp, Gossypium hirsutum
cccacgcgtccgaagaattccagcaggaagcactgtgtacttggccaaccaagacaacagggaaaagctaaccatagcagtgctccaccgacctgtcaataaccctggacaattccagaaattcttccctgctggacaggaaaatcctcagtcatacttacgaatcttcagccgtgaaattcttgaggctgtcttcaatacacgaagtgagcagctagacgagctgtttggtgggaggcaaagccatcgaaggcagcagggacagggaatgttccgtaaagccagccaagaacaaataagggcattgagccaaggagctacttcaccaagggggaaaggtagcgagggatacgccttcaacttattgagccaaacccc

SEQ ID NO: 230206 - DNA, 398 bp, Gossypium hirsutum
gtcgaagcggaaacctttttcagtttcgtcttctctcctgtttaagttcaaaacccttgattattcgcaacttctacctaatattttctgatataataaaataattttatatgcgaaagatgggttcatcttcgtcggagacgaagctactgcaagaattgatcttatacgccgccagcgctgcccttagttgcttggtcctcttcgcggggctccgacacctcgacccaaaccgggaagcttctaaaaaggctttggagcacaagaaagaaattgccaagcgtttgggtcgtcctctaatcaatactaatccctacgaggatgtaatagcatgtgatgtcataaatcctgatcacattgacgtggaatttgagtctattggaggattagaagccatc

SEQ ID NO: 230207 - DNA, 393 bp, Gossypium hirsutum
caaaattgttgatgatggaattcatgagctctttctggagtatgtagcacttccactgcctttgacaccaacttacacagaagaaggcaatgcgggaaacaatggaaagaccgatgaatcccaacaaggaaatcttctttcagaccagggacttacagatttcgatgtgtacattatggagactagcagccagcaaatgaaatctgagctggatcaatacttagaagagtccttgttgcctcgagtccaagagtttgatgtattaggctggtggaagctcaataagatgaagtatccaactctttcgaagatggctcgtgacattttgtcaattccagtatcagctgctgctccggactcggtctttgacatcataataaagcaactggatga

SEQ ID NO: 230208 - DNA, 398 bp, Gossypium hirsutum
gcacgctctcatcattttccttctgctaccttctctcaacccaaacacatatttcccaggaaaaagaaaaagcttgagcgaacaagaaaatggccgatcagcttaccgacgatcagatctctgaattcaaggaggcctttagcctgttcgacaaggatggagatggttgcattactaccaaggagttgggaactgtgatgcgatcacttgggcagaaccccactgaggcagaactgcaagatatgattaatgaagtcgatgctgatggaaatgggaccattgattttcctgaattccttaacctgatggcaagaaaaatgaaggatacagactctgaggaggagcttaaagaggcattcagggtgtttgacaaggatcagaatgggttcatttctgca

SEQ ID NO: 230209 - DNA, 413 bp, Gossypium hirsutum
atgcggcagtggctggagaaggtcgtggagcagcacctggcctgcagggtgttccaagaatcagccatgtcatccctgtacccatctctagaagacctaaaagtggaccaggccattcaggcccaggccagagcctcgcccaagatgccagccctgccagtccaggcggcagccatttccccaccaccagttttgtacccaaacttggcagaattggaaaattatatgggtctttccctctccagccaagaagtccagcagagcctgcttcagattccggagggtgacagtacagcggtctcgggccccgcgcctggccagatggtggcaccggtgtccgggtacagcctgggcgtgcggcgagcagagatcaagcccgtggtgcgcgagatccacctgtgcaaggacgagcg

SEQ ID NO: 230210 - DNA, 419 bp, Gossypium hirsutum
atcggccaggcacccctgcaacatggcctggaacaccaacctccgctggcggctgccgctcacctgcctgctcctgcaggtagctatggtgattctcttcggggtgttcgtgcgctacgacttcgatgccgacgcccactggtggacagagaggaagcacaagaacttgagcgaggtggagaacgaattctactatcgctacccgagcttccaggacgtgcacgtgatggtcttcgtgggcttcggcttcctcatgaccttcctgcagcgctacggcttcagcgctgtcggcttcaacttcctgctggcggccttcggcatccaatgggcgctgctcatgcagggctggttccacttcttagaaggccgctacatcgtcgtgggagtggagaatctcatcaacgctgacttctgcgtgg

SEQ ID NO: 230211 - DNA, 366 bp, Gossypium hirsutum
cagcaatatggtctggcaaagtcggcaaatgaagtgattttggtcattgaagcttacaaggcccttcgtgaccgagcaccttatcctccaaaccatgtggttggccatctaattgggagctttgctttcattgtctttgacaaatccacctccactttgtttgtggcttctgatcaatttggtaaggttcctctctattggggaatcaccgccgacggatatgtggcctttgctgataatgctgaattgctgaaaggtgcctgtggcaaatctcttgcttcttttcctcaaggctgtttctactccacagcagtaggaggattaagaagctatgagaatcctaagaacaagatcactgcagtgcct

SEQ ID NO: 230212 - DNA, 416 bp, Gossypium hirsutum
atctactacaagcgctgccgtgctgcccggtcctatgaggcagtggcggctgcagctgcctccgtgtataattacgcagagcagaccctgtcccagctgccacaagtccagaatacagccatggccagtcacctcacctccacctctctcgatccctacgatagacacctgttgccgacctcaggagctgctgccacagctgctgctgcagcagcagccgctgctgctgttactgcagcttccacttcatattacgggcgggatcggagccccctgcgtcgcgctacagccccagtccccactgttggagagggctacggttacgggcatgagagtgagttgtcccaagcttcagcagccgcgcggaattctctgtacgacatggcccggtatgagcgggagcagtatgccgatcg

SEQ ID NO: 230213 - DNA, 388 bp, Gossypium hirsutum
  unsure (1)..(388): unsure at all n locations
ggaggaagttttggggttaggccctctctctgagtacgagaaagaagggttggagagcctcaaaccagaacttaaatcatctattgagaaggggatcaagttcgccaaccagaattaaacctgaactacttatgatttcttccattagcccaatccgaaattcttaaaaagttttttttttgtgttactgttgtatttcatgctgcaagcagcatcggctttactgaataggataggccctacataccatcaagttttcatgtnataattcccagtgacctgttacaaaggagggtttggttttaaaaaaaaaatctatttttccagtttaggtggggtgttccattcatttaactatataaattgtgaaatcacgtttgctctgggg

SEQ ID NO: 230214 - DNA, 391 bp, Gossypium hirsutum
  unsure (1)..(391): unsure at all n locations
cggacgcgtggggtcatcctcgacatgaagttgcatctctgcgttccggttttgtctatgaaccaagaagatggcgttccaccaatgcttctgcatttgcatccatatcagcgttgcttgaaaagctccgaagggaaaaggatggcatcaaattggagaagaatggttgtaatattcatgaagattttaaaggaaaggacaatatggaggaggactcgaaacaaggccttgtcgtgaagagtccccgaacatctatactataacctctattattgaccgaacggctgcatcaaacatggttgaggcagaaccatacatcatgaagctgacggaggatcagataatgcagttactgtcaggtttctggatacagaccaatctntctgataat

SEQ ID NO: 230215 - DNA, 377 bp, Gossypium hirsutum
atgccggtgagaagacagcgacatggcgcctccggcccccggcccggcgtccggcggctccggggaggtggatgagctgttcgacgtaaagaacgccttctacatcggcagctaccagcagtgcataaacgaggcgcagcgggtgaagctgtcaagcccggagagagacgtggagaaggacgtcttcctgtatagagcgtaccttgcgcagaggaagttcggcgtggttctggacgagatcaagccctcctcggcccccgagctccaggccgtgcgcatgttcgctgactacctcgcccacgagagccggagggacagcatcgtggccgagctggaccgagagatgagcaggagcgtggacgtgaccaacactacct

SEQ ID NO: 230216 - DNA, 419 bp, Gossypium hirsutum
atcttttggccaagtgtttccttgaccataagacactgtactatgacacagaccctttcctcttctacgtcatgacggagtatgactgtaagggcttccacatcgtgggctacttctccaaggagaaagaatcgacagaagactacaatgtggcctgcatcctaaccctgcctccctaccagcgccggggctacggcaagctgctgatcgagttcagctatgaactctccaaagtggaagggaaaacagggacccctgagaagcccctctcagaccttggcctcctatcctatcgaagttactggtcccagaccatcctggagatcctgatggggctgaagtcagagagcggggagaggccacagatcaccatcaatgagatcagtgaaatcaccagcatcaagaaggaggatgtcatc

SEQ ID NO: 230217 - DNA, 271 bp, Gossypium hirsutum
atcttttggccaagtgtttccttgaccataagacactgtactatgacacagaccctttcctcttctacgtcatgacggagtatgactgtaagggcttccacatcgtgggctacttcttcaaggagaaagaatcgacagaagactacaatgtggcctggatcctaaccctgccttcctaccagcgccggggctaccggaaggtgctgatcgaggtcaactatgaactcttcaaagtggaagggaaaacaaggacccctgagaagcccctttt

SEQ ID NO: 230218 - DNA, 398 bp, Gossypium hirsutum
cagtgacactcaatagtttgtgaagaatcacaatagaaaatcgatggaaaaactttgcaacttcaatcaccaattcgtcattgttcatctgctactcttttcttcacttctaagcttcacaaatccaacaccatccccgacccaagatgaacaatcccaaatcatatcaaggttccaagaatacctccgaatcaacacatcccaaccatccccgaactataaaaaatcgacccaattcatcctatccttagccgaatccctttctttagaaacccaagtcatagagttcgtccaaggaaagccgctcgttatcctcaaatggccaggctccgaccttttccttccttctatcttactcaactcccacaccgatgtcatcccttctgagcgttcgaagt

SEQ ID NO: 230219 - DNA, 371 bp, Gossypium hirsutum
cccacgcgtccgcaggctctaaaggacttatacagacatctgacccctatacaacgtgtacacattgcccgacaccccaacagacctacattccttgatcatatatttagcattaccgataagtttgtggaacttcatggagatcgatcagggtatgatgatccagctattgttactggtataggaaccatcgatgataggcgatacatgtttatcggtcagcaaaagggtagaaacactaaagagaatattcaccgcaactttggaatgccaacgccccatggttacaggaaggctttacgcatgatgtattatgcagatcatcatgggttttctataggtacttttatcgacactcctggggcttatgc

SEQ ID NO: 230220 - DNA, 396 bp, Gossypium hirsutum
  unsure (1)..(396): unsure at all n locations
attggagttgatgagagatccggtgatagtttcaacaggacagacttatgaccggagttcgataactaggtggatcgaggaagggcattgtacttgtccaaagacagggcaaatgcttgaccatacgcggcttgttccgaatcgagctttgaggaacttgatcgtgcaatggtgtactgctcatggtgtcccatatgatccaccagagactagggatgcatcggcagagtcttttgccactgcttgcccaatcaaagcancagtggaagccaatagagcaacagcaacgcttcttatcaaacaactagcagatggatctcagggagctcagactattgcttctagagagattcggttattgactaaaacgggaaaggaaaaccgtgcttttattgc

SEQ ID NO: 230221 - DNA, 405 bp, Gossypium hirsutum
gtggtccgatgcctcctgctaaagctggccgtttgacgaatgcatatgtctcatctttcccggcacctcctccatttgtaaggtctccctcccacacccagtaccctactccagtcccaggatacccatccccacctcccatgtatggaagcaggagcccacccaccaacccctatgcttactcaccagaagcagcccctcctccccttgctggttcataccctggagctcccatgaactatcctgcatacgggggctatggtaatggtttggcaccagcatatcagcaggcttactaccgataggcaatgatgacactactctggcgatggtaaccactgatacgctgactaccgacccatctaagtttttatttctaaatggttggtttgtaatcactaaccg

SEQ ID NO: 230222 - DNA, 404 bp, Gossypium hirsutum
atgccaccggctggatggcttcccacctgggcggcctctcttcagaaaatctgaaccaaatctgccttcctgaccgtcagcatgtggtatatggtccctggaacctaccacagtccggctactcccacctcactcgccagggtgagaccctcaatttcctggagattggatattcccgctgctgccactgccgcagccacacaaaccgcctagagtgtgccaaacttgtgtgggaggatacccttgacaaatactgtgaccgggagtatgccgtgaagacccaccaccactcatgttgccgacaccctcccagccctattcgggatgagtgctttgcccgtctggctccgtaccccaactatgaccgggacatcttggccatcgacatcagccgagtcaccccc

SEQ ID NO: 230223 - DNA, 419 bp, Gossypium hirsutum
atcagatgcagacgcatgtctctgacacctccgtggtcctctccatggacaacaaccgcaacctggacctggacagcatcatcgccgaggtcaaggcccagtatgaggagatcgccaaccgcagccggaccgaagctgagtcttggtaccagaccaagtatgaggagctgcagcagacagctggccggcatggcgatgacctccgcaacaccaagcatgagatctctgagatgaaccggatgatccagaggctgagagctgaaattgacaatgtcaagaaacagtgtgccaacctgcagaacgccattgcggatgccgagcagcgtggggagctggcgctcaaggacgccagaaacaagctggccgagctggaggaggccctgcagaaggccaagcaggacatggcccggctgctgcgt

SEQ ID NO: 230224 - DNA, 377 bp, Gossypium hirsutum
cccacgcgtccggcacaaacagtagtaggttttgcattatggtgctgcaagaaggggctgttccaccactagtggcattgtcccagtccggcaccccgagagccaaagagaaggtacataccgcttctgccgggttttctctcttttctacatcacctcctttaactccgaaaatttatatatatatcataaacttctggtccttacaggcacaggcacttctgagctactttcgaagccaacgacatggaaatgctagaagaggctgaaagtcagaaaaacaacctccattggcactatccgatgtttcgtgtctatacggtttgttgcacatttgatgttcgcaaataatgcatgcgaagttttgctgcttgaca

SEQ ID NO: 230225 - DNA, 383 bp, Gossypium hirsutum
gcaagctcgtaagctgttttcatcaatggccgaccgtgaccgctcttaccgatttgaccaggttgttcgtggtgatagaacgaactatcaaagcggaccatcaacaacccaagttctaaccgtcctcaccctccttcccatcggcggcactctccttgcattagccgggctaaccctcaccggcaccgtcatcggcctatgcgtggcaacgccactcttcgtcatcttcagcccggttctgctcccagctgccatcgcggttttcatggctgtggccggtttcttgtcgtccggggcttttgggttgacgggactgtcctcgctctcctacgtatttaaccgcttcagacaggcgactggcaccgagcagctcgacgcggacc

SEQ ID NO: 230226 - DNA, 401 bp, Gossypium hirsutum
agagaaggagatggaacaagtaaacattaaaccaagtcttgatgtccgccttagtgatttgaagcttgttttaggaccagaactgaggatagtttatcctttgattctaaactttgctgttagtggggaactcgagttgaatggccaagctcatcccaaatggattaaacccaagggcattttaacatttgagaatggtgatgtgaatcttgttgcaactcaagtgaggcttaagcgggaacatctaaacctagcaaaatttgaacctgagtatggtttagatccaatgctggacttagctttggttggatcagaatggcaattcaggattcaaagtcgagccagcaattggcaggacaagttgttggtgacctcaacacgttcagtggagcaggatgttc

SEQ ID NO: 230227 - DNA, 361 bp, Gossypium hirsutum
  unsure (1)..(361): unsure at all n locations
cagattctcgactctgtctcccctatcgctctttttcatcgatcagatctcttcaaacccatcaattcaaacaaccctccactcattccatccatgacgcttggctcaggaggatccagtgttgtggtgcctcggaacttcagattgctggaggagcttgagcgtggagaaaaaggtattggagatggtactgtcagctatggaatggatgacggagatgacatttaccttcccctctgggactggcaccattatgggtcctcataatactgtacatgaaggtcgaatctatcagctgaagctgntctgtgataaagattatccagagaagccaccaagcgtccgttttcattcaagaatc

SEQ ID NO: 230228 - DNA, 399 bp, Gossypium hirsutum
  unsure (1)..(399): unsure at all n locations
agaaaacaaccgttaaccctgtggaggcaagccaactgctaaacgcttcatctgaaaccctaacttttgcgctcacctgtatgcacacatgcgctcctctattatcatgttccatggctaccataccagctaacccggaacccttcttgaacaatgtgactggaaagactgttatagcgaagctcaaatgggggatggaatacaaaggttttgttgcatctgttgattcatacatgaactggcagcttggcaatgcttcanagtatgtcgatgggcaattcactggagatttaggggagattttgatcagatgcaataacgttctctatcttcgtggggttccggaagatgaagatatagaagatgcatacaaggactagatggttcgcatgtggttga

SEQ ID NO: 230229 - DNA, 381 bp, Gossypium hirsutum
acaagattggcggcattggaactgtgcctgttggtcgtgttgagactggtgttcttaagcctggtatggtagtgacctttggcccctctggcctgaccactgaagttaagtctgttgagatgcaccatgaagccctctctgaggctctccctggtgacaatgttggattcaatgtcaagaacgttgctgttaaggatctcaagcgtggtttcgttgcttcaaactctaaggatgatcctgcaaaggaggctgccagcttcacctctcaggtcatcatcatgaaccaccctgggcagattggaaacggatatgccccaatccttgactgccatacctcccacattgctgtgaaattttccgaattgctgaccaagatcgaca

SEQ ID NO: 230230 - DNA, 396 bp, Gossypium hirsutum
cattggtatacttcaaaagctcatctgtcaccccagagccccttctctccgccgaatctcctttttcccccgtaaaaaatgtctctggtggccaacgaagattttcagcacattttgcgtgtcctgaacaccaacgttgatggaaagcagaagattatgtttgctttgacctccatcaagggtatcggaaggcgttttgccaacattgtttgcaagaaagccgatgtagacatgaacaagagggctggtgaactgactgcacaggaattggacaatctcatgacgattgtggcgaacccgaggcagtttaaaatcccagattggtttttgaacaggcagaaggattacaaggatggaaagtattcccaagttgtgtccaatgctctcgacatgaag

SEQ ID NO: 230231 - DNA, 247 bp, Gossypium hirsutum
atgagcacccaagaagaaaatggccataagtggagtccccgtgctaggatttttcatcatagctgtgctgatgagcgctcaggaatcatgggctatcaaagaagaacacgtgatcatccaggctgagttctatctgaaccctgaccaatcaggagagtttatgtttgactttgatggtgatgagattatccacgtggatatggctaaaaaggagactgtctgtcagtttgtatattttgtactattt

SEQ ID NO: 230232 - DNA, 123 bp, Gossypium hirsutum
atcaacaacattccagctgatatcgtctttgttttaaaggacaggccacacaatatctttaagagagatggctctgatgtgatttatcctgccaggatcagcctccgggaggctctggtggct

SEQ ID NO: 230233 - DNA, 238 bp, Gossypium hirsutum
atggtctgcagaacgtagcgcacgccaccatggatcgcgatcgcgagcacggtctccgtgtggagctcaaccgcattcaggtcaaacgatcaatgaccaaacgtgcgctgtctgtccccgacgactccaagtctgtatgcatgcacatgtgtatttacatgacctccgttgctcccatcagcctgctcattcttcaccttctcttgcaagacacgtttgtgcatatctctgccgacta

SEQ ID NO: 230234 - DNA, 376 bp, Gossypium hirsutum
gagataataaagaagaatttgagagagggaagggaagaggaggtgtcccaaatgacaaattaattttcaaattccaattcaccacataaaaggaaaagaaaattattgggggaaagcacaaaactgaaaacagataagagaagggaagggaattatggaaggcagagaagagattaagggatcaaaacccagttttcctttaagcttttgggaggtgacgatggcttttacggtggtgatgggttttgttttggggcttgggggagtttatttaaccatgcccgcttctgattatagcttccttaaattacccagaagccttgaagatcttcatatcctcagagatcaccttgaaatctacacaagtgactacacc

SEQ ID NO: 230235 - DNA, 379 bp, Gossypium hirsutum
cccacgcgtccggcaggaatcaatacagtctgcatgtttgaagatgcacctccagacatgtcccttttcagagctataatggacacaaatttctggggttcggtttatacaacccgatttgcagttccacaccttaaaaacagcaaaggcaagatcgttgtcatgtcttcagcagcttcatggatgaatgatccaagaacaagcgtctacaatgcaagcaaagcagcattgacagcctttttcgatacattaaggattgaacttggatccgaggttaagataacaattgtaacacctggttttatcgagtctgaaatcacccaaggcaaattccttcaaagagatggtaacatggaagttcagcaagacatgagagatg

SEQ ID NO: 230236 - DNA, 377 bp, Gossypium hirsutum
gcagaacccagagaggggaacgggaggaggaagagtcgcaagagagcggcggaaacaatgtgctcagtggctttcgcgacaatctcctggcgcaggctttcggaattgataccaggctagcaaggaagctacaaaacgaaagagataacaggggagccattgttagaatggagcatggatttgagtggcccgaggaagggcagaggcgacaaggacgtgaagaggagggagaagaagaaagagaaccgaaatggcagaggcgacaagaaagtcaagaagagggatctgaggaagaagaaagagaagaacgaggaagaggaaggagaaggtcaggaaacggcttagaagaaacattctgctcaatgagactgaaacac

SEQ ID NO: 230237 - DNA, 403 bp, Gossypium hirsutum
aaaatacagagcttatcgtaatcatggtgaggaataagtcagcttgcgtagttttgctcttttctcttttcctttcctttggcttgctttgttctgccaaagactttcccggaagaagaggcgacgatgatcctccgaagaggtacgaggactgccggaggcgatgcgaatgggatacacgtggacaaaaggagcaacagcagtgtgaagaaagttgtaaaagtcagtatggggagaaagatcaacagcagcgccaccgccctgaagatccccagaggagatacgaggagtgtcagcaagaatgccgacaacaagaagaaaggcaacgaccacaatgccaacaaaggtgcttgaaacgattcgagcaagaacaacaacaatcccagaggcaattccaggagtg

SEQ ID NO: 230238 - DNA, 420 bp, Gossypium hirsutum
atctgagatctgagatcgaccacgtcaagaagcagtgtgccagcctgcaggccgccattgctgatgctgagcagcgtggggaaatggcactcaaggatgccaagaacaagctggaagggctggaggatgccctgcagaaggccaagcaggacctggcccggctgctgaaggagtaccaggagttgatgaacgtgaagctggccctggacgtggagattgccacctaccgcaagctgctggagggcgaggagtgcaggctgaatggcgaaggcgttggacaagtcaacatctctgtggtacaatccaccgtctccagtggctatggcggtgccagtggtgtcggcagtggcttaggcctgggtggaggaagcagctactcctatggcagtggtcttggcgttggaggtggcttcagttcca

SEQ ID NO: 230239 - DNA, 325 bp, Gossypium hirsutum
ctttgatcgatacttgaataatatgtcaggaagaggaaagggaggcaaggggttgggcaagggcggagcaaagcgccaccgcaaggtcctccgtgataacatccagggaatcacgaaaccggcgatccggcgtctagctcgtaggggaggtgttaagcgtatcagtggcttgatctacgaggaaacccgtggagtgttgaagatcttcttggagaacgtgatccgcgacgccgtgacctacactgagcacgccaggagaaagacggtgaccgccatggatgtcgtttatgccctcaagaggcagggtaggactttgtacggtttc

SEQ ID NO: 230240 - DNA, 401 bp, Gossypium hirsutum
  unsure (1)..(401): unsure at all n locations
ctgtgctccaagatttgtttttgctgtgctgctctatttcttccttctctactagagtgttggaatttagcaaaaacatgagttatctgggtgtgggagttagccctgggaatgttcccgtctaccatggcactaatttgaaggtcattgatagaagagtgagagttgcagagctggttttgaggtgtctcatatgtggcttaagcgttcttgcagctgttcttgttggaacagatacccagatcaaagagatcttcactattcaaaagaaagctagatttacagacatgaaagctcttgtgtttttggtggcggccaacggcataactgcagcttactcattggtacaaggactgcgttgcgttgtgggtatggtgagaggaagtgtncctttagtaagc

SEQ ID NO: 230241 - DNA, 419 bp, Gossypium hirsutum
atgcgggcagtccaatcttaaagctccaaaatgacctcctttgactccaagtctcccatcagggtcacgctgatgcaagaggtgggcttccatggtcttgggcagctctgcctctgtggctttgcagggtacagcctccctcctggctgtaacatttatttacagccaactgttctttgacaaagtcaacaaaaacacacagtgatgaatgggcactctattcaataaatggtgttgggaaattggatggccgtatgcagaagaataaaactggaacaatgtctcttgccttatgcaaaaattaactcaaaatggattgatgacttaaatgaaagacctgaaactgtaataattctagaggaaaatatgggacaaactctcctacgtattgacctaggcaaaagatttatgactgaatc

SEQ ID NO: 230242 - DNA, 421 bp, Gossypium hirsutum
atggtgcgtgctctggaggaggccaacgccgacctggaggtgaagatccgcgactggtaccagaggcagcggcccagtgagatcaaagactacagtccctacttcaagaccatcgaggacctgaggaacaagatcattgcagccaccattgagaatgcgcagcccattttgcagattgacaatgccaggctggcagccgatgacttcaggacaaagtacgagcacgaactggccctgcggcagaccgtggaggccgatgtcaatggcctgcgccgggtgttggatgagctgaccctggccaggactgacctggagatgcagatcgaaggcctgaaggaggagctggcctacctgaggaagaaccatgaggaggagatgcttgctcttcgaggtcagagcgggggagatgtgaacgtggaga

SEQ ID NO: 230243 - DNA, 396 bp, Gossypium hirsutum
cggacgcgtgggcggacgcgtggggcgcggagaagctaagctgagaaaagatgcaggcgattacgaggcgattagggcaccaatctctgaggccaactgcttcaatctcttctatcaagtctatttgcgctctctccgatcactactatggaggtgatcatccgcgatacggatctacactggcttcccacaagggcatgggccacctcgttcgcaagggcaccggtggccgatcttccgtcagtggcattattgctactgttttcggcgctactggattccttggtcgttatcttgtgccacaactggctaaaatgggatctcaggtgttagttcccttcagaggttccgaggataaccctcgtcatctcaagttgatgggagatttaggacaga

SEQ ID NO: 230244 - DNA, 398 bp, Gossypium hirsutum
cccacgcgtccgtgcagctcgcttctctagaaaggccgcggcctcggcgttctccggctgccgctacgtcaccgcttccagtagtttctccgcggaggctgccaaaacgatctcgccatcgtcggatcgagtgaagtgggactacaggggtcaaagaaaaatagtccctctcggtcagtgggtccctaaggtagctgtcgacgcttacgttgcccccaacgttgtcttggccggtcaagtaacagttaacgacggagcctcggtgtggaatggttgcgtcctacgtggcgatctcaacaagatcaccgttgggttctgctctaatgtccaggaacgctgcgtcattcacgccgcttggtcctctccgaccggacttccagctgagacatcaattgaga

SEQ ID NO: 230245 - DNA, 390 bp, Gossypium hirsutum
atggccgcgatggcgctggtggccggcgggctctgtagagggctgggctcccacccggccgccccaggccgggacgcggtagtcttcgtgtggctcctgcttagcacctggttcacagcccctgccagggccatccaggtgaccgtgtccgacccctaccacgtggtgatcctcttacagcccgtgaccctaccctgtacctaccagatgaccttgacccccacgtaccccattgatatctggaagtacaagtctttctgacatgaccgcatcgatgatgccttattcccagccagcgtcgacaaccagctcaatgcccagctggtagccgggaacccaggctacaacccctacgtcgagtgccaagacagcgtgcgcaccgtcagggtc

SEQ ID NO: 230246 - DNA, 370 bp, Gossypium hirsutum
cccacgcgtccggcgttaaactgctttctttaaagcctgcaaaatgggtgccggtggtaggatgctagttgacggtaaaaaggaggaaaaacgaggctcggtcaatcgagttccgatcgagaagcctccgtttacgctcggtcagatcaagcaagccattgcgccccactgttttcgccgctccctccttcgatccttctcctacgtggtccatgacctatgcttagcctctctcttttactacattgcaacatcatattttcactttctaccacaacccttttactacattgcttggcctgtctattgggttctccaaggttggatcctcaccggtgtttgggtcatcgcacacgagtgcggtcaccac

SEQ ID NO: 230247 - DNA, 368 bp, Gossypium hirsutum
cccacgcgtccgcggacgcgtggggctgggtgacgcatctgcttcatttgagaagaactgcgtgaggggaattcaagccaatagggaaagaatttctaaattactgcatgaggtcaatgccacatcctgaatattttaagtttattttgataccatatgatagattgtcaagctaatgatcatatgttgtcttgtgacattttgactggtcttgcagtctctaatgcttgtcacatctttgaaccctgtaagttctcttccctgcttctatctaggatcagttgttcctcaatgagtcttttgcattttgaacacgtctctaatgatctctttgcttccagaaaattggttacgacaatgctgcagca

SEQ ID NO: 230248 - DNA, 370 bp, Gossypium hirsutum
ctctttctcccatggctgcctccgttgatcctctcgttgttggtcgtgtcattggcgatgttgtcgacatgttcgttcccaccgtcaccatgtccgtctactatggttccaagcacgtctctaacggatgtgacattaagccttctatggctatcaaccctcccaaagttgccatcgatggccttcctgaccagttttatactttggtgatgactgaccctgatgcgccaagtcccagcgagccaaccatgcgtgaatgggttcactggatcgtgtctgacattcctggaggaaccaaccccactcgagggaaggaaatcctggcatacatgggtccacggcctccagtaggcatacatcgctacatact

SEQ ID NO: 230249 - DNA, 372 bp, Gossypium hirsutum
tatcattgagtatgtgaaggaagcagggcgcgtaggcaagggaaatttaccattggagggcacacccgagattgcaaagacagaagcatgggacggtaaagatggagaaatcatggaagaggatgagatctcacttgaagaactcatgggagattttacagcaagtaaagatgagttgtaataaaattggaattagtttagggtaaaaagaagggttttgatgttcgggcgtgtccgttattttggtttttactgattgaaacaattatcccaagtgaaacagattattagagatgatccaaatatttaaggagtgttatttcatctaccaacaatggttaataacctgggttggtagatatactattaaaa

SEQ ID NO: 230250 - DNA, 346 bp, Gossypium hirsutum
cttgagtaaagagtagacctttttgggggggttctagaatttgaaagcgagaactcctttactttatctttatttggtgtaactacttgagccggatgagaggaaactctcatgtccgattttgagggggggatcccgcagggccctatcctaatttttcttttgctaggcccatcgctaaaaaacctactttcttacgattacgaggttgattcgaatatgaaattcaatcctggaaatacagtatcccacttttttttactacccaaggtttcgatacatttcgaagtcgcgaaatttctaccggagcaagtgctattcgagaacaattagccgatctaaaatt

SEQ ID NO: 230251 - DNA, 383 bp, Gossypium hirsutum
atcacagcttccgcccagcgtaccgcaaggtgttcctgcacgaagcaactgtgcgcctgatggcaggagccagccccacccgcacccaccagctgctggaacacagcctgcggcggcgcaccacacagagcgccaagcacggagaggtggatgcctggcctggccagcgagagcgggccaccgccatcctgctggcctgccgccacctgcccctctccttcctctcctccccgggccagcgggcagtgctactggccgaggctgcccgcaccctggagaaggtgggtgaccggcgctcctgcaacgactgccagcagatgattgtcaagctgggtggtggcactgctattgccgcctcctgaccaccaggctcagcccacccc

SEQ ID NO: 230252 - DNA, 383 bp, Gossypium hirsutum
  unsure (1)..(383): unsure at all n locations
ataaaatgtctactgttcatgaaatcctgtgcaagctcagcttggagggtgatcactctacacccccaagtgcatatgggtcagtcaaagcctacaccaactttgatgctgagcgcgatgctttgaacattgaaacagccatcaagaccaaaggtgtggatgaggtcaccattgtcaacattttgaccaaccgcagcaatgcacagagacaggatattgccttcgcctaccagagaaggaccaaaaaggaacttgcatcagcactgaagtcagccttatctggccacctggagacggtgattttgggcctattgaagacacctgctcagtatgacgcttctgagctaaaagcttncatgaaggggctgggaaccgacgaggac

SEQ ID NO: 230253 - DNA, 440 bp, Gossypium hirsutum
acactatagaacaagtttgtacaaaaaagcaggctggacccggcccggatttccggggttggaatttgcagagcctatgaatgggatgacttaaaggtttggagccgtgaaccttaattcttcattgaacatgcttcctgtccgaccccaaactaacactttgatagggggacccatgcctatgagcatgcccaatgtggtgactggccccatgggaatggcccctcttggaaatactccaatgatgaaccagagcatgatgggcatgaacatgaacatatggatgtccgctgctgggatgggcctgacgggcacaatgggaatgggcatgcccaacatagacatgacttctggaactgtgcaacccaagcaagatgcctttgcaaatttcgccaattttagcaaataagagattgttaaagaagcagattgaatgaaga

SEQ ID NO: 230254 - DNA, 393 bp, Gossypium hirsutum
atcttacattaagaaaattggctacaaccccgacacagtagcatttgtgccaatttctggttggaatggtgacaacatgctggagccaagtgctaacatgccttggttcaagggatggaaggtcacccgtaaggatggcaatgccagtggaaccacgctgcttgaggctctggactgcatcctaccaccaactcgtccaactgacaagcccttgcgcctgcctctccaggatgtctacaaaattggtggtattggtactgttcctgttggccgagtggagactggtgttctcaaacccggtatggtggtcacctttgctccagtcaacgttacaactgaagtaaaatctgtcgaaatgcaccatgaagctttgagtgaagctcttcctgggga

SEQ ID NO: 230255 - DNA, 406 bp, Gossypium hirsutum
atgtgcgcgccctggaggaggccaacgccgacctggaggtgaagatccgtgactggcacctgaagcagagcccagctagccctgagcgggactacagcccctaccacaagaccattgaagagctgcgggacaagatcctgaccgccactattgaaaacaaccgggtcatcctggagattgacaacgccaggctggctgcggatgacttcaggctcaagtatgagaacgagctggccctgcgccagagcgtggaggctgacatcaacggcctgcgccgggtgctggatgagctcaccctgtctaagactgacctggagatgcagatcgagagcctgaatgaggagctggcctacatgaagaagaaccacgaggaggagatgaaggaattcagcaaccaggtggtcgg

SEQ ID NO: 230256 - DNA, 373 bp, Gossypium hirsutum
cggacgcgtggggccgattccgccaccgcgtcttcccccctcaaagtcattgctggagctgattctttcggcgccgagctaaaagacgccatggtatcccacctgcgctccctcaacatagaagtcgaagatctcggaatcacctcctactacaacatcggtgctgaagtcggccgtcgagtctcttccgccaccacctacccctccgtggagacccgtggcctccttgcttgcggaacgggcgtcggagtcgggatcttcgccaacaaattccccggcgtattcgccaccacatgtctcactccggacgaagctcgcaacaatcgctccatcaataactgcaacgtcctggcactctccggcatgtcaacgt

SEQ ID NO: 230257 - DNA, 383 bp, Gossypium hirsutum
cggacgcgtgggagctattcaagagcataagcagttctgtgattgatgatgggctgatcaacaaggaagagtttcaattagcactgtttcagaataggaagaaggagaacattttcgcaaatcggatttttgatttatttgacgcaaagaagaagggagtcattgattttggtgactttgttcgagcactcaatgtcttccatccaaatgtctcacaagaggacaagatgaattttgcgtttagactctatgacatggatggaacgggttttattgagcgtaacgaggtcaagcaaatggtgattgcactgttatgtgaatctgaaatgaagttagctgatgaaaccattgaggcaattcttgataagacattcttggatgcg

SEQ ID NO: 230258 - DNA, 399 bp, Gossypium hirsutum
atcccgcctggggcctccggacattgctccctgaaccctcggaggtggcggtggatcttactccttccagccagtgaggatccagcaatcttctccgtgcctccccccgcgcctgttggttggaagtgacaaccttgaagatcggccggttggaagtgaagaccttgaagatcggcgggcgcagcggggccgagggggcgggtctggcactaggtcccgcccctgcacgccaggaaccccagaggaagtcgcagttcagcccagctgagtcctgtctgcagaatccacaccaaccagcatcatgtccatgacactggggtactgggacatccgcgggctggcccacgccatccgcctgctcctggaatacacagactcaagctatgaagaaaagaagta

SEQ ID NO: 230259 - DNA, 371 bp, Gossypium hirsutum
ggccaatgcatctgggtttttcacgccttcagttccaaggctgaggagcaagattcagccttcaataggcgtttctcgatctgggttttgcttctctgctggaatctcgaggagggtagtgtgctcaagtgccattgaaggtgcagagaagcatgtttccccttctgaatctcgaatgcccaagcttgtcagtaaaggctgtaagttagttggctgcgggtcagcagtgccatctctttcagtttccaatgatgatctttcgaaaatagttgatacatctgatgaatggatctctgtccgcactggaatacgaaatcgacgggtaatgtcaggaaaggaaagtttgaaaaagctagcagttgaagcggcac

SEQ ID NO: 230260 - DNA, 387 bp, Gossypium hirsutum
cccacgcgtccgagttattcctgtctttgtgctatcattggctgatgttgatccacaacttatgatggaagatgaaagctttgtttggactggaaatgatgttgtcatagtacttgagcaccaaagtccaaatatacctctgagttatgtttctgagactgagagaaggcatgctattccatcacaagcacagcgccatattgtagcagggcttgcttctgctgtgggtggtttgagtgcaccatatgaaaaagcttctcatgtacatgaaagacctgttgtgaattggctctgggctgcgggttgtcacccgtttggaccattctcaaatacatctcgaattagtcaaatgcttcaggatgttgcactgagaaatacgatttatgc

SEQ ID NO: 230261 - DNA, 393 bp, Gossypium hirsutum
atccgcggtgtctctagctgttcaactcggtttgtctctgggggatcagctggaggctacggaggcggcatgacctgtggctttggtggaggggctggtagtggctttggaggtggctacggaggtggccttggaggtggctttggtgggggttatgctggtggctttgttgattttggtgcttgtgatggtggcctcctcactggcaatgagaagatcaccatgcagaacctaaacgtccgaatgggttgctacctggacaaggtgcgcgccctggaggaggccaacgccgacctggaggtgaagatccgtgactggcacctgaagcagagcccaactagccctgagcgggactacagtccctaccacaagaccattgaagagctgcgggac

SEQ ID NO: 230262 - DNA, 374 bp, Gossypium hirsutum
cccacgcgtccgaaaaatttccccaatttattttttcaatcacaaacaattcagtaatagtttattggttctttccttttaatttatttttgaattgaaccgggtggttcaatcttatacataaggtccaatggctggtggctctgatgcggcggagacgctttcatgtgctcgttgtagcaatcctgctagccttcagtgtcctaagtgtgtggagttaaagcttcctcgtgaaggtgctgccttctgcactcaggattgtttcaaggcttcttggagctcacacaagtcagttcatttgaaggcaaagctgtcttcacttggtacggatggtgctggtggacaaaactctgatttagctagtgagggttggc

SEQ ID NO: 230263 - DNA, 383 bp, Gossypium hirsutum
tgttttggtacctgctgcttttctcattgcgggttccatagccggattcttgacctccggagcatttgggatcactggactgtcatcgctgtcgtggattgctacttatattcgtggaagcaggggctctatgtctcaggggctagacccagtgaagtggcccttgccggacacggcagtgagtatggagcagaagatccagaataggagccaaggaggaggaaggatctctgagggaggcagagaacaggaaggtggcaagagtaagacacaagaaggtggcaagagtaagacacaagaaggtggcaagagtaagacacaagaaggtggaaacaagactgtgggttgaagtttcctattgtagcagtcggctgatatgctag

SEQ ID NO: 230264 - DNA, 383 bp, Gossypium hirsutum
gtttttcttttatatctaagatggcttacattaataccctactcatcatgttctttgttttctgttttccttcaatggttctttccgaatcgttccgatcgattcaattgccaccgaatgtcacgggtcccgaatccattgcctttgagctggcaactggacgattttacgtcggtgtaactgatggtagaattttgcaatataacggaccaactgttggatttatggagtttggttccaccggtcgaaataggactaagacgatgtgcgatggcattactgatccggatttgggtccgatgtgtggaagaccattaggtttagggttccattacgctacgaatcagttgtatgtttgtgatgcataccttggtctcatggtg

SEQ ID NO: 230265 - DNA, 371 bp, Gossypium hirsutum
cccacgcgtccgctcaaggctgccaaagggcttggcacctttacagaacaatcaaactgctatgatgtacaaacagggagcaacggggattggggccattacttttattatgggggccctggtaaaaaccccaattgtccttaagagcaagagggaaaagcacctttttctttttggcgttgtgttttctacctttgttcccgtgtatcattcaaaccctagtgtactgtctcctcttatatatctttttggtttttactattaggttgggttagtaacctctctagcggaaaatttagttttgattctggttgttttacttgaaaaagatcccatcccatgtaagtggtctggaattcggccaagtttct

SEQ ID NO: 230266 - DNA, 372 bp, Gossypium hirsutum
cactctttgacgatagccaaacatcatatattgactttttttccttaaatactcctgttgaggattccacttacaaaatctgcatctatggtattgaaatctatggatatggatatacgaaagttgatcttggttttgtttttgttggctctagtttttggtgttgctgagagttttgattaccatgagagcgacctggcctcagaggagagcctgtgggacttgtatgagagatggaggagccaacatacagtctcgcgtgacctggaggagaagcaaaagcgtttcaatgtgttcaaggagaatcttaaacatatccaccaggtgaaccagatggataagccttacaagttgaaactgaacaagtatgct

SEQ ID NO: 230267 - DNA, 385 bp, Gossypium hirsutum
atcccggtccgccctgccctggaattacaaaagtcttagactgtgcctgagtgcccagcctccttaggagaccctcccaggcagcctgagtgccagacccgggagctgggtgctctggccctgcctgcctgcctctcactggaccctctccttccaggtgcggcttcaggtccagagcatggagaagcctcagtaccgtgggacgttgcactgcttcaagtccatcatcaagcaagagagtgtgctgggtctgtacaagggcctgggctcgccgctcatggggctcaccttcatcaacgcgctggtgttcggggtacagggcaacaccctccgggccctgggccacgactcgcctctcaaccagttcctggcaagcgcggcggcg

SEQ ID NO: 230268 - DNA, 376 bp, Gossypium hirsutum
ctccaccgccctgtcaataaccctggacaattccagaaattcttcccttctggacaggaaaatcctcagtcatatttacgaatcttcagccgtgaaattcttgaggctgtcttcaatacacgaagtgagcagctagacgagctgtttggtgggaggcaaagccatcgaaggcagcagggacagggaatgttccgtaaagccagccaagaacaaataagggcattgagccaagaagctacttcaccaaggggaaaaggtagcgagggatacgccttcaacttattgagccaaacccctcgctactccaaccaaaacggccgcttctatgaggcttgccctcgtaatttccagcagcaactccaagaagtggattcct

SEQ ID NO: 230269 - DNA, 386 bp, Gossypium hirsutum
agaaggttcagagattttagagagaacaaacaacaatggctgctacatctggggctgtactaaatggattaggctcttcatttctttgtgggggaaagaggagccaagcccttttgggtgccagcattggggccaaaggctcgccctcccctactgctggaactagaaagttgatcgttgtggtagccgccgcacctaaaaagtcttggatccctgctgttagaggtggtggcaacttcattgaccctgaatggctcgatggatcgctccctggagactacggatttgacccactaggtcttggaaaagacccagcattcctcaaatggtaccgagaagctgagctgatccatggacgttgggccatggctgctgtcgtcggcatc

SEQ ID NO: 230270 - DNA, 377 bp, Gossypium hirsutum
cgcgtgtcggatcgtgtcgacacaagtactgcatcccaaattgctccgagcccggagatggctcaaatggctcaaatggtttgtggctcttgtcgtcaattgctttcatatcctgaaggaactcggcaagctaaatgttcatgttgtgaaacagtcaactttgtactggaagctcatcaggttggactggttaggtgtgacagttgtgcattgttgctgatgtacccctatgggtcttcgtcagtcaaatgttcatcttgcctttctgtgacagaaattggggaacacaataggcgccctccatggtctgttcaacaggggcaaccaacccctcccaactctgtgcattaaactgctccaatgcctttctaatccat

SEQ ID NO: 230271 - DNA, 377 bp, Gossypium hirsutum
aaggtatcatgagggaggttctcttggacttttatacaagttcaggaaagaggaagcctgatcaaattatcatattcagggatggagttagcgagtcgcagttcaatcaagtattgaacattgaactggatcaagtaattgaggcttgcaaatttcttgatgagagttggaaccccaagtttgtggtcattgtggcacagaaaaaccatcatactaagtttttccagcagggatctcctgacaatgtcccgcctggaaccgttatagacaacaaaatctgtcatcctaagaacaatgacttctatctttgtgcccatgctggaatgattggaaccacgaggcctactcattatcatgttctcttagatcagattggg

SEQ ID NO: 230272 - DNA, 382 bp, Gossypium hirsutum
cggacgcgtgggaaaaaagtttaattgagttatcggatcatggccctctctactcgtatcctctcaaaatctcgccagctttgtggtagtcaatctattctacaaaaggagaataccattcctgttcgtttttatgccaaagaggctgctgctccccttgctaataagggagatgagatattgaaaaatatctttttggaggttaaggcaaaatatgagacggcattgggaatatttaggaaggagaagatcaccattgacccagatgaccctgctgctgtttctcagtatgcaaaagttatgaagacagttaggcagaaggctgacttgttttcagaatctcagcgcatccagtacaccatccaaatacgagctcaggacg

SEQ ID NO: 230273 - DNA, 381 bp, Gossypium hirsutum
ggaggttctcttgattcaactgagacggtgcgaaactatgaacttttggagatggaatctgttgaatgccatgtttccaaaaaaatcaatgactgctgttacgatccagagtctccttgggctggggatgggaaggctgagccatggtggcgcacaacagataaagatgagcttgcctctttggttgcacagaagtcgttggatttcattgagaattgtgatcttcccccacctcagaagatgcatgtaagaaggtacttgtgtgcatcttccggttcttatggcggtaatcggaagtctgaagcaggccctatgcttggtccaatcctcaatgcgcagggctctcctgattctgtaataactcttggaagaaagatgcag

SEQ ID NO: 230274 - DNA, 331 bp, Gossypium hirsutum
agcttttattcttctatggggtggctggaccacaacacaactgaattctcggtctgatcatgtactttaaacatctatgacaggttggataatggcaattgtgatggccctttagagtggatttgctggagtcgacaccgaggctataattaagaagcgcccatcaaggaatataaatgtgcagaatttttggttggatattttcggaatgaccttcaatgctatagcaatactgatacaagattttgatgctgtcatgaacaagggcttcttccatggatactcgataattaccactctcatgatccttaatcatgcactaagtggaatt

SEQ ID NO: 230275 - DNA, 371 bp, Gossypium hirsutum
cccacgcgtccggaaaaccagactcctttaactggtgtgcggggtcccttgttggatgaagtacatcaacagctgaattcatggatatcacaggttaccagggtatacaagggaaaagagcatgctgaggtcgagttcagtattggacctattcctgtgaatgatgggataggtaaagaaatcatcactcaaattacaacaactatgaggaccaacaaaacgttctatacagattctaatggacgtgacttcattaaacggattcgagattttaggaaagactgggaccttcaagttaaccaaccaattgctggaaattactacccggttaaccttggaatctatgtccaagatgatagcacagagctctc

SEQ ID NO: 230276 - DNA, 428 bp, Gossypium hirsutum
cgcgacaccaactaacaagagggaacgctgaagcacgctgatgccccgccccaatatccgcgatagaccatagacgacctgtcgaacaagatggttacaggctcagaggacaatgccaacgttcttttctagattgacaatgcaccgcatggccgcggatgactaacgtaccaagtatgagacagagctgaacctgcgcatgatgtgcggtggcctgaatgaacgacctgatgcagggtgctggatgaactgaccatgtccagagctgacctggagatacagatcgtgagcctgatggtggagctggactacctgtaaaagaaccacgaggaggtaatgaatgccctgacaggccatgtggctggagatatcaacgcatagattgaccctgaacctgtcaatgacctgagccatatcttaaacgagat

SEQ ID NO: 230277 - DNA, 372 bp, Gossypium hirsutum
cccacgcgtccgattgatttcttattcgagatgccagaaatttctgctataggaaacaatgcgacgctattcaactcgggtgtgatggttgttgagccatcgaattgtacattccagctactaatggatcacatcaatgagattgaatcatacaatggtggtgatcagggttatctgaacgaaatatttacttggtggcatcggattccaaaacacatgaacttcttgaagcacttctgggaaggtgatgaggtggagaagaaacagatgaagactcgcctctttggagccgatccaccaattctttatgtcatccattatctgggaaacaagccatggctatgcttgcgggactacgattgcaactggaat

SEQ ID NO: 230278 - DNA, 347 bp, Gossypium hirsutum
attgacgagtgctatgacatggaactctacgagtggaagaaggttgacctctcagatgcatcccagaaggaacgggtgaatcagatgattgaagactgcgagccatttgagggagagcctctcttggatgccaagtgctttaagtgaatatgtcttggttttatgttgcttgctactgttctgcctgtcagggttttctatacggtcagttttttcaggttcggacttatttttcttttctcccctttttgagtctggttcagccaacattacaattaagttttaagttctcagatgttgattatggaacgtgttatttatgttattaaggaggtatggtttttgtt

SEQ ID NO: 230279 - DNA, 401 bp, Gossypium hirsutum
atcagcaattgatgctgatgatcccaatgccctcaatgggatgttgaggtacagaatcctgtctcaggctccaagcaccccttcacccaacatgtttacaatcaacaatgagactggtgacattatcacagtggcagctggacttgatcgagaaaaagtgcaacagtatacgttaataattcaagctacagacatggaaggcaatcccacatatggcctttcaaacacagccacggccatcatcacagtgacagatgtcaatgacaatcctccagagtttactgccatgacgttttatggtgaagttcctgagaacagggtagatgtcatagtagctaatctaactgtgactgataaggatcaaccccatacaccagcctggaatgcagtgtacagaatca

SEQ ID NO: 230280 - DNA, 397 bp, Gossypium hirsutum
atagctgagatcacagacaagctggggctgcactccctacgccacaggaactggtacattcaggccacctgcgccaccagcggtgacgggctctatgaaggactggactggctgtccaatcagctccggaaccagaagtgaatgcgacccccctccctctcactcctcttgccctctgctttactctcatgtggcaaacgtgcggctcgtggtgtgagtgccagaagctgcctccgtggtttggtcaccgtgtgcatcgcaccgtgctgtaaatgtggcagacgcagcctgcggccaggctttttatttaatgtaaatagtttttgtttccaatgaggcagtttctggtactcctatgcaatattactcagctttttttattgtaaaaagaaaaatc

SEQ ID NO: 230281 - DNA, 301 bp, Gossypium hirsutum
atgaacaagattctcacggccacagtggacaatgccaacgtccttctgcagattgacaatgcccgtctggccgcggatgacttccgcaccaagtatgaaaccagaactgaacctggccatgaatggggagggccgccataaatggcttggccagggggcctggataaactgaccttggcaggagctgacctgaaaatccaaatgagagcctgaaagaggagctggcctacctggaaaagaaccacgaggaggagatgaatgccctgagaggccaagtgggtggagatgtcaacgtggagat

SEQ ID NO: 230282 - DNA, 377 bp, Gossypium hirsutum
tgggtgttgtaatcattgacggatcgacggtgagagcctttgtgactgacgaccagcagttcacgaagagcgtggatgagcgtttcgcagctcttgacctcaacaacgacggtgtcctctccaggtccgagcttcgcaaggccttcgagtctctgcgtctcctcgagtcccacttcggtgtcgacgtcgccactccccccgacgagctcactcagctttacaactccattttcgagaggttcgattgcgatggcagcggcaccgttgacctccaggagttcagatctgagatgaagaagattctgcttgctattgctgatggattgggatcttgccctatccagatggttcttgaggatgatgaccaaagttttctg

SEQ ID NO: 230283 - DNA, 381 bp, Gossypium hirsutum
ctctctcctatactaacttcttccacttaaaagcaagttagctagctagggttttttgagccagagagatgggttcgaaaagaacagcatcactagccctcctctttgcactcaacatcctcttcttttccctggtgagtgcttgtggttcctgcccttcccccaaccccaaacctaaacctaaacctaaaccaaagccaaaccctactccctccccatcttcttctggcaagtgccctagagatgctcttaaactcggtgtatgtgctgatttgctccgtggcttgctcaacgtcaccattggtacccctcctgttcaaccctgctgctctctcatccaaggtcttgctgatcttgaagctgccgtttgcctttgcacgg

SEQ ID NO: 230284 - DNA, 399 bp, Gossypium hirsutum
atcacgggctcgggccgccaggaggcccagaagacggacgcggagtaccggaagctcttcgacctggcgctgcagggcctgcagctgctgtcgcagtggagcgcgcacgtgatggaagtgtattcctggaagcttgtgcaccccaccgacaagtactccaacaaggactgcccggacagcgcggaggagtacgagcgggccacgcgctacaactacaccagcgaggagaagttcgccctggtggaggtgatcgccatgatcaaaggcctgcaggtgctgatgggcaggatggagagcgtgttcaaccacgccatccggcacaccgtctatgctgcactgcaggacttctcccaagtgaccctccgggagccgctgcggcaggccatcaagaagaagaag

SEQ ID NO: 230285 - DNA, 365 bp, Gossypium hirsutum
ggaaactgaggaaaaaagaacggactagttaagagcaatggaagatgatgcaatggcaaccgaggctcctttagcaccagtcacttgtggaaggagagtccgaaatgacttggaagataaacttcctaaaccttatatggcgagagctttggtggctccggatgtcgatcacccgaacggaacgccgggccattaccataacggaatgagtgttcttcaacaacatgcggcatatttcgaccaggacgacaatggaatcatttatccttgggagacttacgccggttgtcgagccatgggatttaatccgattgcctctctttttttcaccattcttattaatggatctatgagctatcctacac

SEQ ID NO: 230286 - DNA, 372 bp, Gossypium hirsutum
tcgaggtgaaccagatggataagccttacaaggtgaaactgaacaagtatgctgatatgaccaaacatgagttcatgagtacaaggagctcaaaggttagccattaccggatgctccatggtccaaggcagatgactgatttcagacatgataaaactgacaacctacctcctttcattgattggaggacgaaaggagcagtgactggtatcaaggaccaaggcaaatgtggtagctgctgggcattttcaactgtcgttgcagtggagggtataaacaaaataaaaacaggggagcttgtgactttatccgaacaagagctggttgattgtgataaggagaaccaaggttgtgagggaggattgatggaac

SEQ ID NO: 230287 - DNA, 381 bp, Gossypium hirsutum
gcacaagaaaaaggtggacgcaaagaacgcgttggagaactacgcatacaacatgaggaacacagtgaaggatgagaagattggtgccaaacttgctgcagcagataagaagaaggttgaagatgcaattgacgaggccatccaatggttagacaacaaccagcttgcagagtcagatgaatttgaagacaagatgaaggaattggagagcatctgcaaccccatcattgccaaaatgtaccaaggcgctggagctgacatgggtggcatggatgaggatgccccagctagtggaaccggcgcaggccccaagattgaggaagtggactaagaaatttctctccattcttttcgacccttacatttgttcctttagtcgtt

SEQ ID NO: 230288 - DNA, 379 bp, Gossypium hirsutum
gacgattaaagaagctggatatcaccaaaactcaacctgaggaccttacacctgaagaagttaagaaatttgctaggcttgatattgacccgaattctattacgtggagaagagtgatggatgttaatgatcggttcttgaggaaaatcaccgttggccagggcccggaagagaaagggatggtgagggaaactggatttgatatttcagttgctagtgaaataatggctgttttagccctgactacgtctctcactgatatgagagagaggctaggaaaaatggtgatcggaaatagcaaggctggtgaacctataactgctgatgatcttggtgttggaggtgctttaacagttctcatgaaggatgccattaaccc

SEQ ID NO: 230289 - DNA, 385 bp, Gossypium hirsutum
acgcccacgcgtccggaaaagccaactgggtatgcccgtgaagcaagggaatttttaagaacacgccttgtaggaaaacaggtgagtgtacaaatggaatattccaggaaagtccccatggcagatggagctcctgctgcatctgcagattcaagggtaatggattttggctcagtcttcctcctgtctcccatcaagggtgacggtgatgaggtttctgcagcaaacgcatctgcagctggcagccagcagcctggcctgaatgtggccgagttggttgttggacgtggctttggcactgtgataagacatagagattttgaggaaagatcaaactattatgatgcccttctggctgctgaatcccgtgctatttctgggaaga

SEQ ID NO: 230290 - DNA, 402 bp, Gossypium hirsutum
atcaaaattgatgagaaaaactttgtggtggttatggtgaccaaacccaaagcagtgtccacaccagcaccagctacaactcagcagtcagctcctgcgagcactacagccattacttcctctaccgcaacaactgtggctcaggctccaacccctgtccctgctttggctcccacttccacacctgcatccatcactccagcatcagcgacagcatcttctgaacctgcacctgctagtgcaactaaacaagagaaacctgcagaaaagccagcagagacaccagtggctacaatgctacccctgaatttgaaggtagaggaggtgatgaccttggcaccgagatcgctaacaccctctatcggatatttaacaataaaagcagtgtcgacttgaagaccc

SEQ ID NO: 230291 - DNA, 372 bp, Gossypium hirsutum
gtcaactgtcaaagtttctctgtctctctctctctctctattgttgaagttcataagcttttgtatcaatggctgaagtccgtgaccgcaacctgcctcaccaagttcaagttcacccacagtaccgtttcgacaatacaaccggaggcggttacggtgcaaagaactatcacagtggaccatcaacaagccaagttctagccgtccttacacttctccccattggtggtacactgcttgcattagccgggttaacactggccggcaccgtcattgggctgatgctagccacaccgctgttcatcatcttcagcccagttcttgtcccagctgccattgccattgccatggcagtgacggggttcttgtcgt

SEQ ID NO: 230292 - DNA, 359 bp, Gossypium hirsutum
cccacgcgtccgcggcatttatggaagagttattcaattcggatattaaatgaatatcagaattactatttgaagttataaacttctttttcttttcatattcggtttcccaatcagacaatattcatggtcggcctgctttagactggacaaggcggaagaggatagccttaggtactgctagggggcttgtatacttgcatgaacagtgtgacccaaaaatcattcatcgggatgtcaaagctgccaacatcttgttggacgaagactttgaggccgttgttggagatttcgggttggcaaagcttttagaccaccgagattctcatgtaacgactgcagtccgtggtacagttggt

SEQ ID NO: 230293 - DNA, 360 bp, Gossypium hirsutum
cagtcactttcggtgccttgctcggtggaagaatctctctcgttcgggcgctgtactactggattgcccagctcttaggttccattggggcttggctcttgctccgcctcaccgctggaatgcgaccgggggggttcgccctggcgtcaggagtaggggagttgcgtggtctgatattggagatagtgctgacatacggattggtgtacacagtttatgcaacagggatcgatcccaaaagaggaagcgtggggacaatagcaccgctggctataggcttaatagtgagcgccaacatcttagtaggcggaccatttgatggagccgccatgaatccagcaagggcatttggtccagcct

SEQ ID NO: 230294 - DNA, 363 bp, Gossypium hirsutum
ctggaaggggggtcaccgtggacgagcttaaggctgatgatatttcaaagaaacttgcaccgcccattggcatggctgttcatcaccagctcccgaacaaatgacttgacgggcttgacgccaatggcaataggcttaggccctacagcgccaaactagtgggcttcccacggcgtgctcgcaagttcaaggctggggattcaactgccgaaaagctcgcaactgcaacccaagtccaaggaccatacatgcctatttctcgagagaagcctttcgttgagctcgggaaggtcaccgaggacatgaaattattcaaggcatacaacaagctccgtgttgaacgtgcgaacgaactgtatattg

SEQ ID NO: 230295 - DNA, 327 bp, Gossypium hirsutum
cgacaatgggattctatgatgagagatgtaacgctaatctcgttgaacggaaaggaaggcccaccacaggattggcgcggcttgaaagagggcacaaagactgaccatcttccttgccaaaagacgcggcgatcctcaacaattcattcaagcagccggctctcggtgccggatccagccggacgacgctgtttatcaggccacacaagaatcagaaggcttgattccttggaatggaaaagaagatattttaatagattgattcagaggcctagccctaattgagtttattcaggagccggggacacgacaatttggggatcaaga

SEQ ID NO: 230296 - DNA, 357 bp, Gossypium hirsutum
aacaaaaggggtttttctgataccatggatggattctctgaggtgaaaggctatgtgtacactgagaaaagttggatgtttcatgaagctggttctgattctgaatctccacaatctgtgggacatggaatatcctggtaattcaggggttaatgtgattttgtcaacaaggtctcctggagttcaagcatttgtaaagcaagatgagcctgcaaatgtgttacaagagcaacctcgtgctactaatggaaccagtctcaagcaaactgccatttctaacaacaccaccggtgcacctgctgccaaggcgcatgttgttggttggccaccaataagacccatttatgactaaaacgc

SEQ ID NO: 230297 - DNA, 325 bp, Gossypium hirsutum
tgtacatgatgacacatgtgaaactgacgcgccgccttcatgcattggctgtggggtgatgtaacaccttctttgcggtggttattgtcaaccttgtgctgcgggtcagttatccacaccgctaaattccgatgtaagataatgtgaccgaaaaggtgaaccttctgaacaatgctggggccatggaacacttccacatgaagctttttcgtgcccagaggaatccctacattgctggtttatccttgctgatgcccttcctggttagacacctggtgactctcatttgggagcagtccacactgctggcttctaatgaagcctt

SEQ ID NO: 230298 - DNA, 395 bp, Gossypium hirsutum
cggacacgaagtcacaggttagacccacgcgtccggtcaatccttggctcctacggggcatgtctgtgtcattcggcctgcacttcttgatcctctatgtgccattccttgctcaagtattcggtatcgtacctttaagctttaacgaatggctgctggttctggccgtcgcattccctgtgattttgatcgacgaagtgttgaagttcgtagggaggttgggacggcggatgagatcctccagtcaaagacctttgaaacccaaaacagagtgaagacagatatggtataaatccgataagtggatactagacagccaatgctagcctctaaaatgattaaaattcttgggaactgtcctctaacatggcgtttttacaatctgtgttatataa

SEQ ID NO: 230299 - DNA, 310 bp, Gossypium hirsutum
gacccatgcgtcccgcggtgacccgatcggtgggggcaggaacatggaccaccacgccctgcactttgatgtgaatgtcatcagggagtcctcgaagatgcgggtgcaacccttcaatgagtaccgaaagaggtttggaatgaaaccctacacctccttccaggagctcaaaggccagaaggaaatggcaccggagatcgaggagctgcaaggagacatcgacacaccggagtttctaccctgggctgcttattgaaaagctgccaatcaaactttatgtttaaggagggtctgagaggacattggtgac

SEQ ID NO: 230300 - DNA, 401 bp, Gossypium hirsutum
tcgatgacaccaaactagtgcttggtgtcacgctggcatcatattgcaccaagcctgtgggaaggtggacttacagtccgtagatgaacacgacggatgcggacacggtcagagatagcctgatcctatgggaaatggtggagaaactaaatgtctaagtttattatgataaaaatgtggttatttggggtaatgatgcatcaactcaatatcctgataaaaattacgcaagtgttattactctatctgtagaaaagacctttagcgagcttgctaaggatgatgcatggttaatgcaataataaaaacaggatttgttgtgtgattaaataaattaatttgaaatgagatttttgaaacatcattttgaaattattgattcattaaaggttgaatggaga

SEQ ID NO: 230301 - DNA, 374 bp, Gossypium hirsutum
atctttgatctcggtggccagtacttgcgggtgggcaaggccgtcacaccgcccatgcccctactcacaccggccacgcctggaggcctcccacctgccgctgctgtggcagctgctgcagccactgccaagatcacagctcaggaagcagtggccggagcagcagtgttgggtaccctgggcacacctggactggtgtccccagcactgaccctggcccagcccctggggactttgccccaggctgtcatggctgcccaggcacctggagtcatcacaggtgtgaccccagcccgtcctcctattccggtcaccatcccctcagtgggagtggtgaaccccatcctggccagccctccgacgctgggtctcct

SEQ ID NO: 230302 - DNA, 361 bp, Gossypium hirsutum
atttcatcaagagctggaaacttgactcttacaaacttaggtgctgaagcgattagtgatgtaacctcttcatcagggccagttaaattggaagacttgcaaagaatactgagcagtattggtccagcagaggtagctggtgagccagatggaggcttggggttggatgatattttgaagccagatttgataatgccattaattgagacattgtcgttggaagagcgattagcttcatatttaccagagggtcaatggacacctgaggatttgttagagttgctgcagagtcctcctttccgtcaacaagtagattcatttacctatgtacttcgaaccggacagatagatttgtttcagt

SEQ ID NO: 230303 - DNA, 336 bp, Gossypium hirsutum
ccgattctcgggatcaggtccacgcttccgaagctgccaggaaattacttggtagagaaaaccagcccctcatctacagcataatccggactgggttgattccaaaatttgagttcttcttgagcagaactgattgtagtcccagtcagttggtgtctgcttgggcactcactaacattggttctgggacatcataacagaccaaggctgtggtgagatggaggtgccatcccagcgttcatttctctggtggcatatccccatgctcacattagtgaacaagccagtggggctctaggaaacattagaagtgacggctcagtgatccgagacttg

SEQ ID NO: 230304 - DNA, 377 bp, Gossypium hirsutum
atgtttgccactctgtcaccatgtgtatcttcacctgcaccggccaacactcctttgtgcacctgggccagctggactggtacacttgggtccctaacgcaccctgcacgatgcggttgcccccgccgaccaccaaggatgcaacgctggagacagtgatggcaacgctgcccaacttccaccaggcttctctgcagatgtccatcacttggcagctgggcagacgccagcccattatggtggctgtgggccagcatgaggaggagtatttttcggcccctgagcctaaggctgtgctgaagaagttcagggaggagctggctgccctggataaggaaatcgagaaccggaatgcaaagctggacatgccgtacgag

SEQ ID NO: 230305 - DNA, 363 bp, Gossypium hirsutum
cctgaacgtgccgacattttcaacccacatgccggtcgtatttccaccctcaacaggtttaacctccccatcctccaacgacttgagctcagcgccgagaggggtgtcctctacaacagagctggtttgattccacaatggaacgtcaacgctcacaaaatactctacatgttaagaggctgtgccagagtccaagtggtgaaccacaacggcgacgcagtgttcgacgataacgtggagcaaggtcagctcctgacggtgccacagaactttgcgttcatgaaacaagcaggaaacgaaggagccgaatggatttccttcttcaccaatagcgaagccaccaacaccccaatggctggaagt

SEQ ID NO: 230306 - DNA, 344 bp, Gossypium hirsutum
cccacgcgtccgaaccttcttcccatttattcattacattgttcaagaaaaaagaagcaaaaaaacatggccaaagttctgttgttcattgcactatgtgtgcttccagctttggttagtgctacacgcattctgaataatcaattgttggtagaaggctatgtgtactgtgatacttgccgtgctgtttttgaaacccctaagactagaagcctagctgatgccatggttaggttgtaatgctccgacaggaagagcggccaagttgttttcaaaaaggagggattcactgacaaaaccggaaaataccatattcttgtatccgaggatcacttttatcaaat

SEQ ID NO: 230307 - DNA, 361 bp, Gossypium hirsutum
cggacgcgtgggcttaatttccatttactagcaatttcttcaagttcttttctttgtttttttaatcaatggctgaccactacctccaaaacactcaaccaatgactcaccaaatggtgaaagccgttactgccgcaacagccggtggttccctcctaattctctccggtttaatcctagctggcaccgctattgcgctcaccatagccactccactcttcgttattttcagtccagttcttgtccctgctctcattgcaacagctctactagcaacgggtttcgttgcctccggccggtttagtgttgcagctgtcacggtcctgtcctggatttacaggtatgtgacgcggaggcaccc

SEQ ID NO: 230308 - DNA, 362 bp, Gossypium hirsutum
gccacgcgtccgattatggggtccataccagcataaatcaacaatggcaaagctcgcaacttacttagccaccctggctctcatttagttccttgccaatgctagaaacacatatgcgacggtcgaaagcgaggaaaaccgggatagctgtgaacagcagataaggaagcaagcccacctgaagcactgccagaagaacatggaggaagagtggggtggcgaacgcagcgacaatataaccggccggtacaatgggctatggtgccagcaactagagaagatggatacgcaatgcagatgtcaaggtctaagacaagcaacgatgcaacagatgcaacagatgcaagaacaaatggggagca

SEQ ID NO: 230309 - DNA, 359 bp, Gossypium hirsutum
acggttctgcattgcatacaaagtggaaaatgcactggagctgggactcttactactggagcgctctttctagggcctaacgatattcaagcaattagctgcgattatgactccatttcagacgcctcggaattactgagattatggggatacttatgaaacccacgactctgcataaggttgaaagcaagacaatggaggtctacaagcgcaaggcgaatgactgaacttactatgagcattaaaaggagcaacagacccagagcttaataaaccaaaggatcacggctcatattgatcaagctgcgggtttacagcactttggtgctgatttcaatcaacattcaatggcccagagg

SEQ ID NO: 230310 - DNA, 364 bp, Gossypium hirsutum
cataatcatgccgatcaacgatcaaaacagacccatggctcaaaagctctaccactcagctccgccgtctcgccaggtggctaagttcttgaccgcctccacgttgggcgcaacgctgtttttcttgtctgggttaaccttgaccggtacggacattgccttgataatagctacgccgttgatggttatcttcagcccggttctagtcccggccgggataaccatattcttggtgacgatggggttcttgttttcggccgggtgtggggtggcgcatttaacagcgttgtcgtggatatacaattacgtgcaagggaaacacccaccaggagctgatcagctcgtttactcaggaaacaagctg

SEQ ID NO: 230311 - DNA, 414 bp, Gossypium hirsutum
cgctggagcgggttggtgccccgccgcaatttccgggattgggcctactggagcagcaaaacatggttctggacaccaaatggaccctgctgcatgagcagggctccaagaccgtgaggcagaacctggagccattgtttgagcagtacatcaacaacctcaggaggcagctggacagtttcgttggggaacggtgccgcctggactcagagctgagaaacatgcaggacctggtggaggacttcaagaacacgtttgaggatgaaatcaacaagcgcaccactgccgagaatgagtttgtgatgctgaagaaggatgtatatgctgcctacatgaacaaggtggagctagaggccagggtcgctgcgctgatggatgagattaacttcatgaagatgttctttgatgcggagc

SEQ ID NO: 230312 - DNA, 423 bp, Gossypium hirsutum
caagttggaacgaagaagcgcgcgggtaccccgccgcaatttccgggatggggcccacgcgtcgggcttggatccttatccgggacaagggttcttggttcttcagaaacaaactacctggcttgcaccctttgccctgacatgccgagcctgttacgccaaggatcgagaacgtctagaactgtcaggatgggcaacacctgcagcctgacatgtccaatgctgacacgctggaagctgggaggcggcacgcataacgggtggcagccctaggaaatgacccgctgtcccggctggtgatgctaaatgtgactcccaatcagcaccagtactccaacatgcacttggacatccacctgcaccagtaagatgctatacatgcaaactctgactcagtgcaaattatcatccacctcatgggct

SEQ ID NO: 230313 - DNA, 329 bp, Gossypium hirsutum
atgagccacagttttggtggaaagggctccgactattaaagatacaagaaaactggctccaaacggaggaaataaacggggcggcaagaagcctgcgccgaagactaaagccatagctgggaatgcccacacagagaaaaagcctaaggcagcgaaaaagctccccaaggaaggcgcaccggctgccggagacatgaacaagaaaagaggttacaagagcgtcgagacctacaagacatacatgtataaggtactggagcaggtgcaccctgacatcgtgatctatagcacagatttggggatcatgaacagtttcaacagtgattttt

SEQ ID NO: 230314 - DNA, 374 bp, Gossypium hirsutum
gtcgcgaagattgcggagtgaagcatgtcctgacagatctccactgcatacacggtggaaaagcttatgtgaatggaacccagaagcttcgagtgggctttctgaagcccaagtttaaagatggtggtagaggggccaatgactccacttcatccatgcccgagatgatgaaatcacagtggatccggacgaaacgcacccatgtgcccaagggtggaatcaaggccaatgccaactacatcgccatggattatgactacgccctcctggaacttaaaacgccccacaagagaaaattcataaagagcggggtgagcaatcactctcagagagttactgggggctaaatccaactgtcttgttgttgttatgac

SEQ ID NO: 230315 - DNA, 418 bp, Gossypium hirsutum
gaagcgggttggtgccgggccgggatttccgggatcggcacgagacgtctgggttcccttccgcggcgaccagggcccgagccgtgagtagcagttgttgttacccgcccagaaactagacacaatagtgcgacgaagacgagaccaccgccctcgtgtgcgacaatggctccggcctggtgaaagccggcttcgccggggatgacgcccctagggccgtgtttccgtccatcgtgggccgcccccgacaccagggcgtaatggtcggtatgggtcataaagatgcttacgtgggcgacatggctcatagcaagagaggtatcctgaccctgaagtaccctatcgagcatggcatcattaccaactgggacgacatggagaagatctggcaccacaccttatacaacgagctccgcgt

SEQ ID NO: 230316 - DNA, 149 bp, Gossypium hirsutum
tggtatttgtcaccaagctggttcagatagtttgcttacttgttgtacattcatgaaactgaaagaaaatttctttagtggttcggccgagaaatatgctggtgtgttatatggtcttggtgttgagaatggatagaatactctctaat

SEQ ID NO: 230317 - DNA, 361 bp, Gossypium hirsutum
gttgaaaggagaagtggacaatacaagacagtgagagcccagttatcaaccggtgacctatttgtagtcccagcaggccatccagtcacattcgttgcctcccaaaacgaggacctaggattgctcgggttcggactctacaacggccaagacaacaagaggatcttcgtggctgggaaaaccaacaatgtgagacaatgggatcgccaggccaaggagctggcgtttggggtggagtcaaggttggtggatgaggtattcaacaacaacccggcaagaatcttacttcgtgtctggacagagtcggcgtggatttgatgagaggaggggaagtaataaccccttatcgccgttcctggac

SEQ ID NO: 230318 - DNA, 344 bp, Gossypium hirsutum
cttaatcagcttgatggattggggcagtttgggaaggttaaaatgatcatggctacaaaccgccctgatgatcttgaccctggactggttcgtcctggacggctggacagaaagatagagatcccattgccaaatgagcagtcatgaatggaaatcctcaagattcatgctgctggcatagccaagcatggtgaaattgactacgaggctgcagttaaacttgctgagggctttaatgatgctgatctactaaatgtttgcacggaaagctgtaatgtcagcaattcgttcagaacgtgataatgtcatacacgaagattatatgaaggcagtgggaaaattga

SEQ ID NO: 230319 - DNA, 382 bp, Gossypium hirsutum
atgacgccttctagctgacccccaagcagcccagcgaaactcataggagcgcgcgcagcgcgatggacggtcgggtgcaactgatgaaggccctcctggcccggcccctccggcccgcggcgcgtcgctggaggaatccgattccctttcccgagacgtttgatggcgataccgaccggctcccggagttcatcgtgcagacgggctgctacatgttcgtggacgagaacacgttctacaacgacgccctgaaggtgacgttcctcatcacccgcctcacggtgcccgccctgcagtgggtgatcccctacatcaagaaggagagccccctactcagtgattaccggggcttcctggccgagatgaaccgggtctttggatg

SEQ ID NO: 230320 - DNA, 400 bp, Gossypium hirsutum
gtccgcaatttccgggatgacacctactcgctgacccccacgtaggccatcctgggtcatatgagcgcgcgcagagcgactcacgcgcgggtacaactgttaaaggccctcttggcccgtcccctctgacccgcagcgcgtccctggaggaatacaactacctttcctgcgacattggttggcgaaaccgaccggttaccagagttcattgtgcagacggactgttacatgttcaagaactggaacactttctccaacgacgcccttaaacttaatttcttcatgacgcgattcacggtgaacaccgtgaagtggttgcccccctagatcaagaatgggggccgcctactcattgattaccgtggcttcctggccgggatgaaccgggtttttgtattgt

SEQ ID NO: 230321 - DNA, 366 bp, Gossypium hirsutum
gtatactcaaatgtatgggatagactatcttgagacatttgcccctgttgcaaagatgaacactgtaagagtgttgttgtcactagctgccaaccgaggctggaaattacagcaatttaacataaaaaatgcctttttacacggtgaccttgaggaggaagtctatatggatgttcctccaggattcagtccaaatacaggacaggcagtttgcagactgaaaaaggctttatatggactaaaacagtccccgagggcttggtttggaagatttaccaaagtgatgctcaagttggggtataaatagagtcaaggagatcatactctgttcgtaaaacattcatcttcagggggagtgactgcttt

SEQ ID NO: 230322 - DNA, 378 bp, Gossypium hirsutum
ctcttatgcctcctattcatggaggtgttgaagatattcccaaacctccggtggtcaatagacctccggagaagagacagcgagtcccatctgcctacaaccgcttcatcaaggacgaaatccaacgcatcaaagctggaaaccctgatatcagtcatagagaggccttcagtgccgctgccaagaattgggcccacttccctctcatacatttcggacttatgcctgatcaacccgtgaagaaaactaacgtgcaccaacaggaaggagaggagatggtgatgaaagatgggttctttgctccaaacaacgtgggtgttaccccttaccaaacagtccaaactactgctagggtttctgtgccttctctcttttact

SEQ ID NO: 230323 - DNA, 236 bp, Gossypium hirsutum
gaaagacattagtggtaaccctagagctcttagaaggttgagaacttcttgcgagagggcaaaaagaactttttcgtccaccgctcaaaccaccattgaaatagattcgttatacgaaggtattgactattactcaaccataacccgagccagataagaggagctcaacatggatttattcaaaaagtgtatgtaaccagttgtaaaatgcttaagggatgccaatatggacaaga

SEQ ID NO: 230324 - DNA, 288 bp, Gossypium hirsutum
cggacgcgtgggcggacgcgtggggtagatatggcgattaacccttctttgctctttctttcccttctttttctcttcaatggctgcctagctcgccagaccttttcgtcacagcagtcccaaaatgagtgtcaaatcaataggctccgcgcctctgcaccctagacccgaattcgttccgaagccggcaccaccgagtggtggaaccccaactgtcaacagctcaagtgtgctgggtgtatctgtaatgaggcggactattggaacctaatggcctttgttttgcct

SEQ ID NO: 230325 - DNA, 281 bp, Gossypium hirsutum
aacacgtaaatatggcgattaaccctacttagctctttctttcccttattttcctctacaatggctgcctagctcgccagaccttttcgtcacagcagtcccaaaatgagtgtcaaatcaataggctccgcagcctttgcaccccagacccgaattcgctccgaagccggcaccaccgagtggtggaaccccaactgtcaacagctcaggtgtgctggtgtatctgtaatgaggcaaactattgaacctaatggccttgttttgccttccttcaccaatgc

SEQ ID NO: 230326 - DNA, 361 bp, Gossypium hirsutum
atcatcccagaaaagaaccgcagggagatatcaaagtatctctttcaagagggtgtttgctacgccaaaaaagattacaacttggcaaaacacccagaaatcgatgttccaaatcttcaagtaataaagctgatgcaaagcttcaaatccaaggaatacgttcgtgaaacttttgcttggatgcattattactggtaccttaccaacgatggcattgaatttttaaggacataccttaatctcccctctgagattgttcctgctactttgaagaagcaaactaggcccggtggtggtcgtcccatgggtccttctgatagccgcccacgtggtccgccacgctttggcgacggtgagaggc

SEQ ID NO: 230327 - DNA, 423 bp, Gossypium hirsutum
acgtaaaagcaggctggcaccgtgccggagttcccgggatgcccgaccgtgaggagagaattttcagcgctgtggtctggcgctgaggaggcggcggtggctcccggggcgtttgagcgggctcacccgagcccgcgggccaacgcggatccaggcccgaccggcgggaccgccccggactccccgcgggccttcctagccgccatggaggacggcgtctatgaacccccagacctgactccggaggagcggatggagctgtagaacattcggcggcggaagcaggtgctgctggcggagattaagcgcctgcggtaggagttcagtgaacccatgagcgagtaagaccttgcagcggaaccggtagttggcatagggctggaagaaggttaacatggtctccacgaagggtgatctgttttt

SEQ ID NO: 230328 - DNA, 367 bp, Gossypium hirsutum
caaaatcatgaggagcatttgtgttgtgcttgttatctctttgcctttccttctcggcattgcccagggtttcgatttccacgacaatgatttagcgtcggaggatagtttgtgggatctatacgagcgctggcggagccaccacacggtttccaggagtctcgacgagaaacatcggaggttcaatgtgttcaagcagaatgttttgcatgttcacaacaccaacaacaaggacaaaccttacaagttgaagatcaacaagtttgctgatatgaccaaccacgaatttaggaatgcttacgctagttccaagattaaacatcataagatgttccaaggacagtcccgtggcgccgggagtttcatg

SEQ ID NO: 230329 - DNA, 361 bp, Gossypium hirsutum
atgtcaaagcaaaagcaacagctcaagcagcctccttggagaaaatctgaaaattcaacttgttcaagagaaggtcttgtacgtgcctaagttccagagcctcctgacgtgagcatggctgagagtgaggacccctctctgaggatcgttctggtagggaaaactggaagtgggaaaagtggaacagcgaacaccatccttggaaagaaaatctttgagtctagaattgctgcccaagctgttaccaagacctgtcaaaaagcatcccgggaatggcaggggagacacctttttgttgttgacactccagggctctttgacaccaaggagaggctggaaaccacctgtagggaaatcagcc

SEQ ID NO: 230330 - DNA, 284 bp, Gossypium hirsutum
atgttaaacattgcagatggtggttttactgagttgcactccctttggcagaatgaagagcggtcagccacagttaccaagaagactaacgagatctggcatcgacggcatgactactggctgctagccgccatcataaaccatggctatgcccgggggcaagacatccagaatgacccacgctatgccatcctcaatgagcctttcaagggtgaaatgaaccgcggcattttcttagagatcaatgataaatttctagctcaaaggtttaagctcttagaaca

SEQ ID NO: 230331 - DNA, 362 bp, Gossypium hirsutum
gtctctcccgctccttctcgctgcgatttcgtcttcaagatctcagttctcaaatcgtagcgctcttttctatcaagccatggctctggtcttgcatgcaggaaaaacaaacaaaaatgcctttaaggcactcattgctgcagaatatagtggtgtgcaggtcaaaatggttgagaattttgagatgggtgtgtcaaataagactcctgagttcatcaagatgaaccctttggggaaggttcctgtgttggaaacacctgagggtcctgtatttgagagcaatgccattgctcgttatgttgcttcgctcaaaggttaacaaccctatatgtggttctacattgattgattatggtcatatc

SEQ ID NO: 230332 - DNA, 308 bp, Gossypium hirsutum
cccttgtttatttgatattggcccctcatggccgccgctgatgacaagtaccggcgcttagggggcgggctcgcatggtccaccgactaccggtccctaaaagaagccttcagtgcgatagaggaaaccgtctaatcgaagatcattaacgatcgagagactggaagatcccgaggctttggattccttactttccgtgacgagaaagctatgagggacgcgatcgaaggaatgaacggtcaaaatcttgatggaaggaacatcaccttcaacgaagcctaatctcgcagaagtggaggcggtggcgg

SEQ ID NO: 230333 - DNA, 348 bp, Gossypium hirsutum
aaatgacttaagtacttaacgttttattccttaacataaaaagacaaaaaaggcactcaaaaagttcatacaagttattgcactacaaaacaagggtctcctcctttacataggtcaccatttttatttcattacatgcctgcttaaaactagaaaatttcacattattccgaaaacacgagactatggggttgttattgcctctaactttttattcagatgcacgctgcctttgtcgagacacgaagtaagacttttgtgggttgttgttgaatatctcatccaccaacctcgttgacaccctaaaggccaactccttgtgttggatatcccattgtcttacatggt

SEQ ID NO: 230334 - DNA, 356 bp, Gossypium hirsutum
cccacgcgtccgatcaaagacccatttttgaagaatgagcagtggagcagtttcagcaagcaaagcctggattgtggcagccacaatcggagcagttgaggtattgaaagaccaaggcatttgcaggtggaattacaccattaggtcactgcatcaacatgccaagaaaaatatcagatcttcttctttcttttcttcttcttcatctttttcttctgctgctgctgtttcaaataagttgagggaggaaaagatgaggaaagctgagcagactatgaagaaagttatggatttgaactgttggggtcctaatactgttagattttaatgttcatacaaagtgctacaatattttt

SEQ ID NO: 230335 - DNA, 354 bp, Gossypium hirsutum
gaaatagaggcaccatcatcagagtcagggacagactccaagtcgtaacaccacccagaatggaggaagaagaacgtgaggagcgccagcaggagcagcgataccgccatacgagaggagggtctcaagataatggcctcgaggaaactttctgctccatgaggatcaaggagaaccttgctgaccctgaacgtgccgacattttcaacccacaagccggtcgtatttccaccctcaacaggtttaacctccccatcctccaacgacttgagctcagcgccgagaggggtgtcctctacaacagagctggtttgattccacaatggaacgtcaacgctcacaaaatactctaca

SEQ ID NO: 230336 - DNA, 381 bp, Gossypium hirsutum
atcttcagagaagaatttccccttagttctttgcaagaaggtagagataaagacactttttcaaaaatggcaatggtatcagaattcctcaagcaggcctggtttattgaaaatgaagagcaggaatatgttcaaactgtgaaatcatccaaaggtggtcctggatcagcagtgagcccctatcctaccttcaatccatcctcggatgtcgctgccttgcacaaggccataatggttaaaggtgtggatgaagcaaccatcattgacattctaactaagcgaaacaatgcacagcgtcaacagatcaaagcagcatatctccaggaaacaggaaagcccctggatgaaacactgaagaaagcccttatgggtcaccttgag

SEQ ID NO: 230337 - DNA, 394 bp, Gossypium hirsutum
gcgcctgcagctaccttcccggaatttttcaggagcaggaatacgcccctcgaccactcgtccggtcatacaaggtaattactgtagttgaaaaatggcaatggtatcagaattcctcatgcgggcctggtttattgaaaatgaagagcaggaatatgttcaaactgtgaaatcatccaaaggtggtcctggatcagcagtgtgcccctatcctaccttcaatccatcctcggatgttgttgacttgcacaaggccataatggttaaaggtgtggatgaagcaaccatcattgacattctaactaagcgaaacaatgcacagtgtaaacagatcaaagcagcatatctccaggaaacatgaaagcccacggatgaaacaatgcattaagccctt

SEQ ID NO: 230338 - DNA, 429 bp, Gossypium hirsutum
acggtgccacaagagaacacgtatgtgcaggactgctggctggtcccggtccggggtatgcccaaggccagagtcagcagtctgcaggaggtagccatgttcctacaagcctctgtcctggagcgggactcagaacagcaaaggctgcaggatgaactggagctcaccagacgggctctggaggagcggctacacagcccaggtgcaaccagcacagcagaacaggggtccagaggggagcagggcatgcatctgggagaggtctcaggagtagaggctgagcctagtcctgctggaatggaggagaagcagtcatggagacaaaggcttgaacacctgcagcaagcggtggcccggctggagattgacaggagcaggctgcagcgccacaatgtccagctgcggagcaccttagagcaggtggagcga

SEQ ID NO: 230339 - DNA, 377 bp, Gossypium hirsutum
atccaagttcttcttgacagacaacctcgtctttgactccctctgtgaccttatcacacactaccagcaggtgcccctgcgctgcaatgagtttgagatgcgactttcagagcctgtcccacagaccaatgcccatgagagcaaagagtggtaccacgcgagcctgaccagagcacaggctgagcacatgctgatgcgtgtccctcgtgatggggccttcctggtgcggaagcggaatgagcccaactcatatgccatctctttccgggctgaaggcaagatcaagcattgtcgtgtccagcaagagggccagactgtgatgctagggaactcggagttcgacagccttgttgaccttatcagctactatgagaagc

SEQ ID NO: 230340 - DNA, 282 bp, Gossypium hirsutum
cccacgcgtccgcgctctctgtagccgccgcctgcgtctctctcttcatctctctgaaccaaaaagtctttagcttttcgcttcgagagagaccatgttggtttaccaggatctcatctccggtgacgagcttctttctgactcattcccctacaaggaaatcgagaatgggatgctgtgggaagttgagggaaagtgggttgtgcaaggagctgtcgatgttgacattggtgccaatccttcagccgaaggtgctgacgaggatgaaggcgttgatctcca

SEQ ID NO: 230341 - DNA, 361 bp, Gossypium hirsutum
cccacgcgtccggtcatacaatgtagttcctggagttgtagtaagaattccagcaggaagcactgtgtacttggccaaccaagacaacagggaaaagctaaccatagcagtgctccaccgacctgttaataaccctggacaattccagaaattcttccctgctggacaggaaaatcctcagtcatacttacgaatctttagccgtgaaattcttgaggctgacttcaatacacgaagtgagcagctagactagctgcttggtgggaggcaaagccatctaaggcagctagggacagggaatgttccgtaaagccagccaagaacaaataagggcattgagccaaggagctactttaccaag

SEQ ID NO: 230342 - DNA, 367 bp, Gossypium hirsutum
cggacgcgtgggaagcaatcgcggagctcattcctaatgaagtgccaaccatagagaaaagaagaaaaaaggaggagaagaagccttccattgttgttgtccaaggtcctaagcctgggaaacctactgactgttcgaggatgagacagatactagtgaaactaaagcacaacacaccttctcacctgaagcactctccgccaccaccaccagcagctgctgctgcaaaagatcaagatgcaaaaactggtaatacttcttctgtcccagctgctcttccagtcacaagcacccctgaagctgtagtagctgcttagatagttttcattttaacttatcagcttctgtaataaaaaaaaaaaagtat

SEQ ID NO: 230343 - DNA, 359 bp, Gossypium hirsutum
ggaaaatggtgagcgaccaattcaaagcgaggttctcgcgaagcagagccgaatctgaaatcgtagtgtgagaggagagagaagagaggacgctgaacgactatggcgatgcttgaaagcattgtcgttttcactctccttctccttatgttgatccttatcattatcctcattctcttcgccttcaaaccatggcgtttcttctcctcccttttatctttcccttctcgttctcgctccatcaaggttgaagacgtagagaggcctctagtatcagatgatgtcaatcacagtcaagatcaaagcaatgatttgacaagaaattatgacttagagggtgcatgttaccaaagtgaagc

SEQ ID NO: 230344 - DNA, 276 bp, Gossypium hirsutum
cctctaggaaggcaattggaatgtcacacacgtgggttctgaacaagaagcgaacgtagctgcttgtgaaagtgtgcccatgcggccgcaaatggacgtgagaggaatcctacatggctgccatcgaggctgggatgtagaccgtgctgctagatgatacaccgtgactgtggggatgactctgtacatgaagagagacgttgcatatgagaaatactcacatgctttggttgaatatggaccagatgaatctgagtgtgtggtagagttgacgta

SEQ ID NO: 230345 - DNA, 362 bp, Gossypium hirsutum
atccccttcgtggtgcctgtggcttctccgtctggcgatgcccgccgtctcactgtttctagccttcatgagtcagggctaaaggtcaaccagccagcctcttttgcagtcagcctgaatggggccaagggggcgatcgatgccaaggtgcacaggccctcaagagccctggaggagtgctatgtcacagaaattgaccaacataaatatgctgtgcgcttcatccctcgggagaatggcgtctacctgattgacgtcaagttcaatggcacccacatccctggaagccccttcaagatccgagttggagagcccggtcatggaggggacccacgcttggtgtctgcttacggagcaggcct

SEQ ID NO: 230346 - DNA, 362 bp, Gossypium hirsutum
ccgcttttacgaggcttgccctcgtaatttccagcagcaactccgagaagtggattcctgcgttgttgccttcgaaataaacaaaggatcgatcttcgtaccgcactacaattcaaaggctacattcgtggtcctcgtcaccgaatgaaacggccacgtcgaaatggtctgccctcacctttctaggcagagctcacactggtcctcccgagagggagaagaacaagaagaacaagaagttggatggagaagtggacaattcaatgtgagtgggagcccagtttttaaccggtgacctatttttagttccagcagagccattcagtcacattcgttgcctcccaaaacgaggacctaagatt

SEQ ID NO: 230347 - DNA, 202 bp, Gossypium hirsutum
ttccccttgcttgcaacgccttagcttttctatagggtaacctaattcaaatcaactggccgtggttctacaccttcgggcctggaaaaaccctgacgttaccaaacttattggccttgaagcaaatccccttttggccagttggcttaataccaaaaaggcccgaaccattcgcctttccaaacatttgcccagcctgatt

SEQ ID NO: 230348 - DNA, 352 bp, Gossypium hirsutum
cccacgcgtccggttttgagggtgataacatgattgagaggtctaccaacttggactggtacaagggccctacacttcttgaggctcttgaccagatcaatgagcccaagaggccttcagacaagcctctccgtctaccacttcaggatgtgtacaagattggtggtattggaactgtcccagttggtcgtgttgaaactggtgtcttgaagcctggtatggttgtgacctttggtcctactggtctgaccactgaagttaagtctgttgagatgcaccatgaagctcttacggaggcgcttcctggtgataatgttgggttcaatgttaagaatgtcgctgttaaggatct

SEQ ID NO: 230349 - DNA, 408 bp, Gossypium hirsutum
atgctgaccaatcacagcagcagccgccgcacagtaaaactgcacctttacctctcagtcaccttctatactggtgtcactgggaccatcttcaaggagaccaagaaggaagtggagctggcaccaggggcctcggaccgtgtgaccatgccagtggcctacaaggaataccggccccaccttgtggaccagggggccatgctgctgaacgtctcaggccatgtcaaggagagcgggcaggtgctggccaagcagcacaccttccgtctgcgtaccccagacctctccctcacgttactgggagcggcagtggttggccaggagtgtgaagtacagattgtcttcaagaacccccttcccgtcaccctcaccaatgtcgtcttccgactcgagggctctgggttacag

SEQ ID NO: 230350 - DNA, 369 bp, Gossypium hirsutum
atcgatgaagtggattcccttaaggaagccttgccatacaatggtgcactggtgaagcggaacgaccactaccagcatacattgcagaaggcacgtaacatgacaaaggtgcctcttgattcacaaaaggatgaccagatgacagaggcttcacggatgacttcttaaggagcaggggaggtagtcgcccaggtgaccagcgaacaggccccgccatgggcagcctcttcagagatggcccttccctgcgaggatccaacataggatttccgtgatcccacagaagatgatagagcacagagaccacgactccagcttaaacctcgaacagtcgcgactcctctcaatcaagtagccaatcccaactct

SEQ ID NO: 230351 - DNA, 398 bp, Gossypium hirsutum
agtgacagcgtttaacaaagcttagagaaacctccaggagactgctatcatggcagagaaacccaagctccactacctcaatgcacggggcagaatggagcccatccggtggctcctggctgcagctggagtagagtttgaagagaaatttctagaatctgcagaagatttggacaagttaagaaatgatgggagtttgctgttccagcaagtaccaatggttgagattgatgggatgaagctggtgcagaccagagccattctcaactacattgccagcaaatacaacctctacgggaaagacataaaggagagagccctgattgatatgtatacagaaggtatagtagatttgactgaaatggtccttcttctgatcacgtgtcaacctgaggaaa

SEQ ID NO: 230352 - DNA, 383 bp, Gossypium hirsutum
agaacatggaaatgattggaaaatctgatccttatgttgtcgtgcatatccgacctctcttcaagattaaaacaaaagtcatcgagaacaacctgaatcccgtttggaatgaaacatttgagttgattgccgaagatcgagagacacaggaactcactgtagaggttttcgaccaggacattgggcaagacaagaggttgggaattgcaaaattccgtttgattgaactggaaccggagacaccaaaggaggttaatctgaaccttctgtcctcacttgatacacttaaaataaaagataacaaggacaggggaagttgtaccattaagcttttgtaccatcaatttaacaaggaggaacagttgattgctttggaagaagag

SEQ ID NO: 230353 - DNA, 406 bp, Gossypium hirsutum
atgaaacagaccatgctggagagtctcagcacagaaaagaactcactggtctttcaactggagcgcctcgaacagcagatgaactccacctctggaagtagtagtaatgggtcctcgattaatatgtctggaattgacaatggtgaaggcactcgtctgcgaaatgttcctgttctttttaatgacacagaaactaatctggcaggaatgtacggaaaagttcgcaaagctgctagttcaatcgatcagtttagtattcgcctgggaatttttctccgaagataccccatagcgcgagtttttgtaattatatatatggctttgctccacctctgggtcatgattgttctgttgacttatacaccagaaatgcaccacgaccaaccatatggcaaatgaaccaagc

SEQ ID NO: 230354 - DNA, 409 bp, Gossypium hirsutum
atgctatgtgtaaggaaaaactggaaaaggaagcagctgaaaaaaaaaagaaagaggatgaaaacaggagcaatacgggagaaaggagcaatgacaaagaggatctgtgtcgtgaatttcgaagcatgcggataaatgggaagcttatctgcaccagagaaaataaccctgttcgaggcccatatggcaagatgcacatcaataaatgtgctatgtgtcagagcatcttcgatcgagaagctaatgaaagaaaaaagaaagatgaagagaaatcaagtagcaagccctcaaataatgcaaaggatgagtgcagtgaatttcgaaactatataaggaacaatgagctcatctgccctagagagaatgacccagtgcgcggtgctgatggaaagttctatacaaacaagtg

SEQ ID NO: 230355 - DNA, 373 bp, Gossypium hirsutum
  unsure (1)..(373): unsure at all n locations
atccagaacacaggtgtcgtgaaaactacccctaaaagccaaaatgggaaaggaaaagactcatatcaacattgtcgtcattggacacgtagattcgggcaagtccaccactactggccatctgatctacaaatgcggtggcatcgacaaaagaaccattgaaaaatttgagaaggaggctgctgagatgggaaagggctccttcaagtatgcctgggtcttggataaactgaaagctgagcgggaacgtggtatcaccattgatatctccttgtggaaatttgagaccagcaagtattatgtgactatcattgatgccccaggacacagagacttcatcaaaacatgattaccaggacatctcangctgact

SEQ ID NO: 230356 - DNA, 387 bp, Gossypium hirsutum
cccacgcgtccgctgcccaacaccaccaaccaaggacacttgccccattgacacactgaaattgggtgcttgtgtggatctgctgggagggttggtgcacattggactaggtgacccggttgtgaaccaatgttgtccggttctttcaggactcgccgagctcgaagctgcggtctgcttgtgcaccaccctcaaacttaaggttctcaaccttaaaatttatgtgccactggctcttcaactccttgtcacatgtgggaaaacaccccctcctggttacacttgctctctctaaaaccaaggttgctaggttgatggactctatatgatggaatggacatgagaggatgtcgagcttttctctttgtttcttagttggattggaaa

SEQ ID NO: 230357 - DNA, 341 bp, Gossypium hirsutum
cccacgcgtccggttctctgttggctctccttgctgggctcattggcttgagcttccacaattcgccttccttctgattctcgtaaagactccttgactttgcattacgagtccctctgcccatacagtgccaatttcattgtcaattacctgcccaagctcttcaatgaggatctcattcccatctgcgatctccgcctcgttccttggggaaacgcttagctcaaaggcaacgacacctttgattgccagcatggccctactgaatgcttgctaaacactgcggaagcttgtgcaattgatgcctcgcctaaactgaatgaccatttaccgcttatcta

SEQ ID NO: 230358 - DNA, 232 bp, Gossypium hirsutum
aaatgattcagaagatggatgaggaacataaagcccagagagtggtggatagaagaattttgtgatgaactaactaataagatgaatatatagaagaaaaggggtcttagttccagtaacaatggagaactcttgtggcaatgagatgatgaattagtactaaggaaaaagaaaatgaacatcgcatgcaccattgattggtggttagatggatttagtggtgtattcaaaa

SEQ ID NO: 230359 - DNA, 245 bp, Gossypium hirsutum
gtgaccttgggttgagtgtagagatgaggaaaatcatgggtgccaaagttctcttcttctttgctttgctttccttttcagctgtgtcggcatttgcacaggatgaggaagaccaaggtcttgttatgaacttctacaaggattcttgtgcccaagctgaaaacattatcaaggagcaagttaagctactgtacaagcgacacaaaaacactgctttttcttggctgagaaacattttccatgac

SEQ ID NO: 230360 - DNA, 408 bp, Gossypium hirsutum
atgtcttttctttccctgattccaggccctggaggaagcactgagcatccaaaccccaccatcctctccaccaacagcatttggtagcccagaaggagcaggggccctcctaaggaaacaggagctggtcacgcagaatgagttgctgaaacagcaggtgaagatcttcgaggaggacttccagagagagcgcagtgatcgtgagcgcatgaatgaggagaaggaagagctgaagaagcaagtggagaagctgcaggcccaggtcaccctgtcgaatgcccagctaaaagcattcaaagatgaggagaaggcaagagaagccaacagacagcagaagaggaaagcaaaggcctcgggagagcgctaccacgtggagccccacccggaacatctctgcggggcctaccc

SEQ ID NO: 230361 - DNA, 403 bp, Gossypium hirsutum
atactttcttaagagctttcgtcactgaattactaagcttattcttcttccaggggccactaaatatagatgttgctccaggagctccccaggaaaagaatggagttcacagaaagagtgatcctgaggaactaagggagccgcagcaaagcttttctgaagctcagcagcagctgtgcaacaccagacaggaagtgaatgaattaaggaagctgctggaagaagaacgagaccaaagagtggctgccgagaatgctctctctctggccgaggagcagatcagacggttagagcacagtgaatgggactcttcccggactcctatcattggctcctgtggcactcaggagcaggcactgttaatagatcttacaagcaacagttgtcgaatgacccggagtgg

SEQ ID NO: 230362 - DNA, 405 bp, Gossypium hirsutum
atggaacttgatgggggccgaagaatgtactatttttaagtaatgtggtattgtaccacaaagtagatctaaataagctttatgctgtatttgaactaactggggcatgttactgggaggaggttggggggatttttggttatgttaaatgtttgatgtttaaattgttgcatgttgaattcaaactttttaacaagtccttgatgtttcaatttgaaagtgaccaatggggctgaggctgtgtccactgaggctaagatgactgcctttcctgattggccttggcttttgcatacattgtgtgacccttgccctatgaccctttggctgaccttaccggaagccatgacgacagcagccttttgccattagacgcatggtgatggtgaggattccaagggttag

SEQ ID NO: 230363 - DNA, 409 bp, Gossypium hirsutum
atgtggagcaagatggctgtggagctgggcgtgctggttgtccggccctggcccggaaccgggctgggcagagtgatgcggactcttctgctgctactgtggttggcgacgcgcggaagcgcgctctactttcacatcggagagacggagaagaagtgctttattgaggagatcccggacgagaccatggtcataggaaactaccggacgcagctgtatgacaagcagcgggaggagtaccagccggccaccccggggcttggcatgtttgtggaggtgaaggacccagaggacaaggtcatcctggcccggcagtatggctccgagggcaggttcactttcacctcccatacccctggcgagcaccagatctgtcttcactccaattccaccaagttctccctgtttg

SEQ ID NO: 230364 - DNA, 407 bp, Gossypium hirsutum
atcgggaggtggcgagcgccatggcgagcccgggccgcctactgtgcgtgctgggcctgctactctgcggggcggcgagcctccggctgtccagaccccacggtgacaccgccaagaagcccatcatcggaatattaatgcaaaaatgccgcaataaagtcatgaaaaactatggaagatactatattgctgcatcctatgtaaagtatttggagtctgcaggtgcaagagttgtaccagtaaggctggatcttacagagaaagactatgaaatacttttcaaatctattaatggaatccttttccctggaggaagtgttgacctgaggcgctcagattatgctaaagtggccaaaatattttacgacttgtccatacagagttttcacgatggagactattttcct

SEQ ID NO: 230365 - DNA, 369 bp, Gossypium hirsutum
ggcacgcgtccttgaatgatgatagagagatgccgccaaccatgggtgccaaagatgatattcttatttgctttgctgtccttttcagctgtgtcggcatttgcacaggatgtggaagaccaaggtcttgttatgaacttctacaaggattcttgtcctcaggctgaagacattatcaaggagcaagttaagctactgtacaagcgacacaaaaacactgctttttcttggctgagaaacattttccatgactgggctgtccagtcatgtgatgcttcactgctgctggactccacaagaaggagcttgtctgagaaggagacagacaggagctttggcctaaggaatttcaggtacattgagaccatt

SEQ ID NO: 230366 - DNA, 386 bp, Gossypium hirsutum
gactagagcccatctctttgcttcaaagctcctgtccaggttgaattcttttcttcccttgcgttgtgttctttgctgttcaatcgccatggcttcaaagcggattttgaaagaactcatggatttgcagaaagatccacccacttcttgcagtgctggtccagtagctgaagacatgtttcattggcaagcaacaatcatgggaccctcagatagcccttatgctggaggtctgtttttagttactatccatttccctccagattatcctttcaagcctcctaaggtcgcgtttaggaccaaggtcttccatcccaacatcaacagcaatggaagcatttgtcttgatatcctcaaagaacaatggagccctgcactaaccattt

SEQ ID NO: 230367 - DNA, 401 bp, Gossypium hirsutum
atgcagcctccgcgcgagtgtgtggtgccgtgccgttagcgcgcgccgtctgtgaatcagtccgtccgtccgtccgtccgttcgtctgttcgtctgggcgccgcagctgccaccagtcccagcggtcccggcccttattgttcccgtacccggagccacccggtggagtgggctttgccgcgtcagtcatgtccatgggcctggagatcacgggcacctggctggccgtgctgggctgtatgcgcaccatcgtgtgctgctcgctgtccatgtggcgcgtgacggtcttcatcggcagcaacatgatgacgtcacagaccatgtgtgagggcctgtggttgaactgcgtggtgcagagcaccgtcctgatgcagtgcaaggtgtacgactcgctgttggca

SEQ ID NO: 230368 - DNA, 365 bp, Gossypium hirsutum
cggacgcgtggggttttccttcaaaaccctaatagctgtcctcgcctcctgaacgtgttcgaaaatggccggttctgagggattgactctacgtggcaccatgcgtgcccacaccgacatggtgacagccattgctactcccatcgataactccgacatgatcgtcacttcctcccgcgacaaatccatcatcctttggcacttaaccaaggacgaaaagacctacggtgtccctcgtcgtcgtctcaccggtcactctcacttcgtccaagacgttgtcctctcttccgattctcagttcgctctctctggttcctgggatggtgagcttcgtctctgggacttatctgccggtatctcagctc

SEQ ID NO: 230369 - DNA, 354 bp, Gossypium hirsutum
gtcaaagaacttcgatttacagaggtgtcaccagacacagatggacgggtagatatgaagctcatctatgggataacagctgcaggagagagggtcaagccagaaaaggccgtcaagtatacttaggtggttatgataaggaagaaaaggctgctcgggcttacgatctggccgctttaaaatactggggtcctacagcaaccatcaacttcccgatttcggattattcaaaagagttggaagagatgaagcatgcgaccaagcaagagtttattgcatccttgaggaggaaaagtagcggattttcaaggggtgcatcgatttacagaggtgtcacaaggcatcatcaacagg

SEQ ID NO: 230370 - DNA, 386 bp, Gossypium hirsutum
gtttcagtctcagcagcagttttgaacttccaaaacacagtggccacctctgatttctgttttaagaagtaaatccagcaatatctcgataaatcgtcaatgaacagtatgaaatacctgtttccacttaatgactcagtcttcatagggccacacacatcagtatgcaccagttggagtttttcagaggctctccaggcttgattcgagggaaatgggagtctggcctgctttcctagctgacatacttcacatacatcatcatggtccactgagttgatgaagttttcagccaggtcttctctgaccattcgggccatcgatttgaagttggcatgtcccagtctttgatgccacagcttggattcatctgaagtggctgtgta

SEQ ID NO: 230371 - DNA, 324 bp, Gossypium hirsutum
atcccgcccgcttgctcgccgcgccgcactgccgaccgccagcatgctgccgagagtgggctgccctgcgctgccgctgccgccgccgccgctgctgccgctgctgctgcttctgctgggcgcgagtggcggcggcggcggcggggcgcacgcggaggtgctgttccgctgccctccctgcacacccgagcgcctggccgtctgcgggcccccgccggtcgcgccgccggccgcggtggccgcggtggccggaggagcccgcatgccatgcgccgagctagtccgggagccgggctgcggctgctgctcggcgtgcgcccggct

SEQ ID NO: 230372 - DNA, 403 bp, Gossypium hirsutum
atgttgggcccggcgcgatccgaaggagccaagagagcgcgggactagagtgcagagctcgggacgtggatcggagccggcacgatgggcggagagcaggaggaggagcggttcgacggcatgttgctggccatggctcagcagcacgagggcggcgtgcaggagcttgtgaacaccttcttcagcttccttcgacgcaaaacagactttttcattggaggagaagaggggatggcagagaagcttatcacccagactttcagccaccacaatcagctggcacagaagacccggcgggagaagagagcccggcatgaggccgagcggcgggagaaggcagagcgggcggccaggctggccaaagaagccaagtcagagacctcatggccccagatcaaggagc

SEQ ID NO: 230373 - DNA, 392 bp, Gossypium hirsutum
cccacgcgtccgacgagctgaagccgtgctacaataacactagtgttttcaacaataaattaatcatagccgcagcttgtttcttttaaactctaaatataaaggaggccaaacatgccgcctcgtagataccaatttgggagggctgatgaggccactcatcccgactccatgagagccaccttggctgaattcctctccactatcattttcgtctttgccggcgaaggctcaattcttgctcttgacaagatgtacaaggatacgagtgcgacgcctgcaagactggtgatgatagcacttgcgcatgggttgtctctgtttgcagctgtggcatccagtgtaaacgtatctggtggccatgtgaatccagcagtcaccttcggtgcctt

SEQ ID NO: 230374 - DNA, 385 bp, Gossypium hirsutum
atgtcatactctcgtccgactcccgtataatggccaaccgttacaccatggatctgactggcatctacgagagcctcctgtcgatgatccctgacgctcctgggccatccgaccatggaaggactgagttcagcccaggctggggctcctaaagactatgcatcctgagtccctgcgactgcagcacgtacggtgtcacctcccgtcttgctggccgctccaccattctagttgaaggccgcagctgaggctgggttcccccaccgccctgattaggaccgctggctccccgcctgagccccatgctgtaaccgttacccacttcgtccactagaacctccaccaccctgtagggctacaagactgaactatgtccgaccttctc

SEQ ID NO: 230375 - DNA, 389 bp, Gossypium hirsutum
cggacgcgtgggaaagtttctctctctctctctctctctctattgttgaagttcataagcttttgtatcaatggctgaagtccgtgaccgcaacctgcctcaccaagttcaagttcacccacagtaccgtttcgacaatacaaccggaggcggttacggtgcaaagaactatcacagtggaccatcaacaagccaagttctagccgtccttacacttctccccattggtggtacactgcttgcattagccgggttaacactggccggcaccgtcattgggctgatgctagccacaccgctgttcatcatcttcagcccagttcttgtcccagctgccattgccattgccatggcagtgacggggttcttgtcgtcggaggcgtttgggt

SEQ ID NO: 230376 - DNA, 404 bp, Gossypium hirsutum
atcgcagggcggcctggcggaattcaaccccttctcagagacaaatgcagcgacaacagttcctgtcacacaactccctgggtcctcgcagccagcggttctccagccatcagtggaaccaacccagccgaccccccaggctgcggtgtctgcagcccaggcaggcctgcttcggcagcaggaagaactggacaggaaagctgctgagctggaacgcaaggagcgggagctgcagaacactgtagccaacttgcatgtgagagagaactggccccccctgccctcgtggtgccctgtgaagccctgcttctatcaggatttctccacagagatccctgccgactaccagcggatatgcaagatgctctactatctgtggatgttgcattcagtgactctgtttc

SEQ ID NO: 230377 - DNA, 390 bp, Gossypium hirsutum
cccacgcgtccgcggccgaggaggacagcggggagttttacctccgctactacgtgggccacaaagggaaattcgggcacgagtttttggagttcgagttcaggccagatgggaagctccggtacgctaacaactccaactacaaaaacgacactatgatccgcaaagaggtcttcctcactcctgccgttcttaaggaatgccgccgcatcatcgccgagagcgagataatgaaggaagatgataacaattggccagaaccagaccgtgttgggcggcaagagcttgagatagtgatggggaatgagcacatctctttcacaacttcaaagattgggtcccttgttgatgttcagagcagtaaggatcctgaaggtcttcgcatatttt

SEQ ID NO: 230378 - DNA, 409 bp, Gossypium hirsutum
atgcagtatattcatatgtaggctacaataaaatgtatatcttcggtattattgatttctattaaagaagcagttgatcatagagaattttctgcaaatttatcaacatgatataagtaacacttctaactgtttagacctgtcaaggcttaagtaaaacaattttttctatttctaactcgtatatctattttcacagggtgatagagttgtattgtttagccaatttaccatgatgctggatatcttagaggttctgttaaaacatcatcagcataggtacctcagattagatggaaagactcagatttctgaaaggttggtatacttcatgttccaaaaaaaaaaccactcatttgttgttgttgttagaattttaaatgtctagagtacttgatagaattttgtt

SEQ ID NO: 230379 - DNA, 304 bp, Gossypium hirsutum
ctttatttttcactttccacacacttaacttaattaagcaagctcgtaagctgttttcatcaatggccgaccgtgaccgctcttaccgatttgaccaggttgttcgtggtgatagaacgaactatcaaagcggaccatcaacaacccaagttctaaccgtcctcaccctccttcccatcggcggcactctccttgcattagccgggctaaccctcaccggcaccgtcatcggcctatgcgtggcaacgccactcttcgtcatcttcagaccggttctgctcccagctgccatcgcggttttcat

SEQ ID NO: 230380 - DNA, 387 bp, Gossypium hirsutum
cttctatcaagcaatgcattgttggctctcggttctgactggcccgttacaagtacttatcctttgcgtgctataagaacagcaatgaatagaattcctcctggttgggacactgcttggataccatccgagcgcctttcgctaaatgatgcattaatcgcgcacacgatttcagctgctcgggcatgctttcgggagaacgaaataggatcattattaactggaaaattggctgatttcgtcatactatcatctgattcatgggatgagtttgccacatgaggatctacatcagttaatgcaacatatgttggtggtatccaagcctatccctgaaagcttttgattttaaaactggcttaactgttttcagacagttcactagtt

SEQ ID NO: 230381 - DNA, 393 bp, Gossypium hirsutum
atgccatcaccccgtctgtcacccgcaccagcttcacctctgtgtcccggtctgggggtggcggtggtggctttggcagggtcagccttgggggtgcttgtggagtgggtggctatggcagccggagcctctacaatctggggggctccaaaaggatatccatcagcactagtggtggcagcttcaggaaccgatttggtgctggtgctggaggcggctatggctttggaggtggtgccggtagtggatttggtttcggcggtggagctggtggtggctttgggctcggtgccagagctggctttggaggtggcttcggaggccctggctttcctgtctgcccccctggaggcatccaagaggtcaccgtcaaccagagtcttctgactcccc

SEQ ID NO: 230382 - DNA, 408 bp, Gossypium hirsutum
atcccggccaggcacccctgcaacatggcctggaacaccaacctccgctggcggctgccgctcacctgcctactcctgcaggtagctatggtgattctcttcggggtgttcgtgcgctacgacttcgatgccgacgcccactggtggacagagaggaagcacaagaacttgagcgaggtggagaacgaattctactatcgctacccgagcttccaggacgtgcacgtgatggtcttcgtgggcttcggcttcctcatgaccttcctgcagcgctacggcttcagcgctgtcggcttcaacttcctgctggcggccttcggcatccaatgggcgctgctcatgcagggctggttccacttcttagaaggccgctacatcgtcgtgggagtggagaatctcatcaacgct

SEQ ID NO: 230383 - DNA, 405 bp, Gossypium hirsutum
atgcgactggtaccagaggcagcggcccagtgagatcaaagactacagtccctacttcaagaccatcgaggacctgaggaacaagatcattgcagccaccattgagaatgcgcagcccattttgcagattgacaatgccaggctggcagccgatgacttcaggacaaagtacgagcatgaactggccctgcggcagaccgtggaggccgatgtcaatggcctgcgccgggtgttggatgagctgaccctggccaggaccgacctggagatgcagatcgaaggcctgaaggaggagctggcctacctgaggaagaaccatgaggaggagatgcttgctcttcgaggtcagagcggtggagatgtgaacgtggagatggatgccgcacctggcgtggacctgagccg

SEQ ID NO: 230384 - DNA, 390 bp, Gossypium hirsutum
cggacgcgtgggcgaagaagaagaacaagaacaagaagaggaaaggagaagtggacaatacaggaaaataaggtcccggttgtcgcgtggagacatatttgtagtcccagcaaactttccagttacattcgttgcatcccaaaaccagaacctgaggatgactgggttcggtctttacaaccagaacattaacccagaccataaccagaggatcttcgtggctgggaaaatcaaccatgtgagacaatgggatagccaagccaaggagttggcctttggggtgtcatcgaggttggtggatgagatattcaacagcaacccacaagagtcttacttcgtgtctcgacagaggcagcgtgcatctgaataagagttaaaggcaataataat

SEQ ID NO: 230385 - DNA, 384 bp, Gossypium hirsutum
gttgaatgctaataatttggaaacaacccccgaaatgggtgagaacgctgacccattttttgctgatcgtgatgactatattgatactgctgaatatgagatgctgttcggacagtttgctgagaatgagaatgcatttattgggaagcctccggcttcgaaatctgtagttgagaatcttccttgtgtggtcgtgactcaggaggatgttgtgaataacaatgcgctttgtgcggtttgtaaggatgaggttaaccttggtgaaaagatgaagcagctgccatgtgctcatcgctatcatggagattgtattataccttggctgggaataaggaatacctgccctgtttctcgtcatgagttgccaacagatgatgctgacta

SEQ ID NO: 230386 - DNA, 411 bp, Gossypium hirsutum
atccaggacccaaggaaccaaaattgcatctgatggtctcaagggtcgtgtgtttgaagtgagtcttgctgatttgcagaatgatgaagttgcatttagaaaattcaagctgattactgaagatgttcagggcaaaaactgcctgactaacttccatggcatggatcttacccgtgacaaaatgtgttccatggtcaaaaagtggcagacaatgattgaagctcatgttgatgtcaagactaccgatggttacttgcttcgtctgttctgtgttggttttactaaaaaacgcaacaatcagatacggaagacctcttatgctcagcaccaacaggtccgccaaatccggaagaagatgatggaaatcatgacccgagaggtgcagacaaatgacttgaaagaagtggtcaa

SEQ ID NO: 230387 - DNA, 383 bp, Gossypium hirsutum
cggacgcgtgggctggtggggacttccgtgctgacatccatgacatcatgcttacaattgtcaacttcttgagtcttagttctgcacccttcactgtgaacatctatccttttataagcctctattctgatcccaacttcccagttgagtacgcattctttgatggcaatgcatcgccagtaagtgatggtgggacattatattacaatatgtttgacgctaaccttgatacccttgcacatgcattacaaaaaaatggatttgcagatttgcccattatagttggtgagattgggtggcccactgatggagaccgaaatgctaacacagagtatgctcggcggttcaatcaaggttttatgtctcatatttcaggtgggaga

SEQ ID NO: 230388 - DNA, 392 bp, Gossypium hirsutum
tataaaactaagtaggtgccgactgctccgttctttgtagcaaagcaaagttttgtgaagcatggccgtcgggaagaacaagaggatttccaagggaaagaagggaggaaagaagaaggcagcggatccttttgctaagaaggattggtacgatatcaaggctccttcagttttcactaccagaaatgtggggaaaactctcgtcacccgtactcagggtaccaagattgcttctgaaggactcaaacaccgtgtgtttgaggtttccctggctgatcttcaaggtggtgatgaggatcatgcttacagaaagattcgtttgagagctgaagatgttcaaggaaaaaatgttttgaccaacttctggggaatgaattttacaactgacaaac

SEQ ID NO: 230389 - DNA, 393 bp, Gossypium hirsutum
gtggtttgtcgggaaagctcaaaaaaaatctgaaagggaggctgaactgaaacatcgatttgagcagacaatgaaagaggcagcagataaatttcaaggagcaaacttgtatgtcaagaatttggatgatagcataagtgacgaaaagctcaaagagctattctctcaatatggtaccataacatcatgcaaggttatgcgggaccctagtggaataagtaaaggatcagggtttgttgcgttttcgaccccagaagaagcttctagagctcttgcagagatgaatggcaaaatggttgtcaacaaacctctctatgttgcacaagctcaaaggaaggaagataggagagccaggttgcaggctcagttttctcaaatgcgaccacttacaat

SEQ ID NO: 230390 - DNA, 400 bp, Gossypium hirsutum
atagccccttcaccacccccacctcctccacccccacaacctgccccagagcagcagaccatgcccccaccaagctccccttctggtggggcagggagtcctggaggcctgggtcttgagagcctatcaccggagttttttacctcagtggtgcagggtgtgctgagctccctgctgggctccttgggggctcgggctggcagcagtgaaagtattgctgccttcatacaacgcctgagtggatccagcaacatctttgtgcctggagctgatggggcccttggattctttggggccctgctctctcttctgtgccagaacttctctatggtggacgtagtgatgcttctccatgggcattttcagccactacaacggctgcaaccccagctgcgatcct

SEQ ID NO: 230391 - DNA, 341 bp, Gossypium hirsutum
atatgctgaactacctcatcgagtgtttcgaccgagttggaatagaggaaaaaaaagcaccaaagatgtgcagccagccagcagtcagccagcttctgagcaacatccgctcacagtgcatatcccatactgctttagtactacaaggctccctaacacagcccaggtatgaagacccgtgacgtgcttgacattagctggcagaaggccctagccatcagcggacatcaggctctccggccattcttgcaccaccttggataactcccttcctcacctgtaaaatgaagatccctttccttctctaaaataccatgaaaataaacgctccttttttcctc

SEQ ID NO: 230392 - DNA, 401 bp, Gossypium hirsutum
atggcggtagcggctgtgttgctcgtttctctgagccatccagtgccattctcgttggtgcagcgacacacgcgctcgccggcgccatgactgatcagatgacccttcgtggcaccctcaagggccacatcggctgggtaacccagatcgctactaccccgcagttcccggacatgatcctgtccgcctctcgagataagaccatgatcatgtggaaactgaccagggatgagaccaactatggaattccacagcgtgctctgcggggtcactcccactttgttagtgatgtggctatgtcctcagatggccagtttgccctctcatgctcctgggatggaaccctgcgcctctgggatctcacaacgggcaccaccacgaggcgatttgtgggccatacc

SEQ ID NO: 230393 - DNA, 385 bp, Gossypium hirsutum
agcgtgttaaggccaagaaggagaagcttgacaagaagaggaagcctatatctaaggaggaagcaaccgcaatcaagtcagctggcaaagcatggtatcaaactatgatctccgacagcgattacacagagttcgagaacttctccaagtggttgggtgtgtcgcagtaaattttagtttctgcggagtggttgtatcagttttgttttcggtgtttttgacatttttatttcatttgatgatgtttggagttttggaagtaaaattagtggaatggcatggaccctatttctcttttcatttagccatctccaccatgttttcactctttatgattaggggaatagtttcaatgaaaatgagaactagcattgaaatagtttac

SEQ ID NO: 230394 - DNA, 336 bp, Gossypium hirsutum
ctcctttgtcacttggtattgagacactaggtggaatattcactaggctaatcaaccggaacacaaccattccaacaaagaaaagtcaggtgttctctactgcagctgataaccagactcaagtaggtatcaaggtgcttcaaggtgagcgtgaaatggctgctgacaacaagcttttgggtgagttcgacttggtaggcattccccctgctcctagaggtatgcctcagattgaggttacatttgacattgatgccaatggtattgtcactgtttcggccaaagataaagccactggtgaagaacagcaaattacgatacgttcctttggtgggc

SEQ ID NO: 230395 - DNA, 366 bp, Gossypium hirsutum
agaaaatccgaaagccctacaccataaccaagtccagagagagttggactgaacctgaacacgacaagttcctcgaggctctccagctatttgaccgtgactggaaaaagatcgaagcatttgtcgggtcaaagactgttattcagattcgtagtcatgcccagaaatattttctaaaggttcagaagaatggaacaaatgaacatctacctccacctcgacctaaaaggaaagcagctcatccatatccgcagaaagcctcaaaaaatgttcatgtacagccacaagcatcagggtctcttcaatcatcaaatgcattaattgacactggatgtgttctgagatctgatccctcattgatgctta

SEQ ID NO: 230396 - DNA, 190 bp, Gossypium hirsutum
ataaccatgaaaaccacaaaagcttcagtgtttcttcttttcatcatcttctcagtcacaccatcatcctttttgtttggtgtggccaacgctacaaatgaacctgtgctcgacactgatggcaacgaagtccaaacaggcaccgaatactacgttgtgtcggcgatatggggtgctggtggtggtgggc

SEQ ID NO: 230397 - DNA, 379 bp, Gossypium hirsutum
cacaggtttcccatgccgtcggtaaggactcgaggattggaccaaagttcttgaatgctagtgttgggtttggtggatcttgttttcaaaaggatatattgaatttagtatatatatgtgaatgcaatggattagccgaagttgcaaattattggaaacaagtgattaaagtgaatgattatcaaaagaatcgatttgtaaatagggtggtctcgtcgatgttcaacacggtttccggcaagaaaattggtataatgggatttgcattcaagaaagatacgggtgatacacgggagactccggctattgacgtatgtaaaggcttgttgggggataaggctcggttgagtatttacgatccgcaggtgactgcggatca

SEQ ID NO: 230398 - DNA, 379 bp, Gossypium hirsutum
gcaaaaccctccttgcagacgtcttctgcttcttcctccaaacaatctccaaggaaacgaaaatggctgcctcttccgcttttctttctacttttatttctccccaaacggtctccttctcacccaaatcctcctcttctcttcgcctccttcctccaactagcgtgcgcatggtacgaactgtgaccctagccaccgcttcacagcccgccaccagcccccggacgccacgcggcatcatgaagccgcgtcgtgtaacgcctgagatgcaggatgtcgtcggagtccctgaaattccccgaactcaagcccttaagcagatttgggcttacattaaagagcacaatcttcaggaccctgaaaacaagaagattataaa

SEQ ID NO: 230399 - DNA, 358 bp, Gossypium hirsutum
cggacgcgtgggcgcacacttagcttaactaagcaagctcgtaagctgtgttcatcaatggccgaccgtgaccgctcttaccggacgtttgaccaggttgttcgtggtgatagaacgaactatcaaagcggaccatcaacaacccaagttctaactgtactcaccctacttgccataggcggcactctccttgcattagccgggctaaccctcaccggcaccgtcatcggcctatgcatggcaacgccactcttcgtcatcttcagcccggttctggtcccagctgccatcgcggtcttcatggctgtggccggtttcttgtcgtccggagcattcgggttgacggggctgttctcgc

SEQ ID NO: 230400 - DNA, 390 bp, Gossypium hirsutum
  unsure (1)..(390): unsure at all n locations
atgcgcttcctccagcttggcgccaaggtcccaaagggcgcactgctgctcggtccccccggctgtgggaagacgctgctggccaaggcggtggccacggaggctcaggtgcccttcctggcgatggccggcccagagttcgtggaggtcattggaggcctcggcgctgcccgcgtgcgaagcctcttcaaggaagcccgagcccgggccccctgcatcgtctacatcgatgagattgacgcggtgggcaagaagcgctccaccaccatgtccggcttctccaacacggaggaggagcagacgctcaaccagcttctggtagaaatggacggaatgggcaccacagaccatgtcatcgtnctggcgtncacgaaccgagctgacattttg

SEQ ID NO: 230401 - DNA, 383 bp, Gossypium hirsutum
acttcctgccatacaaggcctcataaggtgccatcttcaaactcgtctgaaaactgttgttgtaggcaaattctactaccggcaaatatttttcccagctaccctgaaattcaaggatgcaacatcgcaacatgtcctcaagaatctgaatcattagcccagactgaccatctgtctgagggtgaaaagctgtactaaagcttaacttcgtacccaaggcttcttgtaatttatttcagaatctcaaagtgaaccttaggtctctgtcggaagtaatcgatagtggtaccccatgcaatcttacaatctcagaaatgtacaagtcggccaatctatcgagggagtaatctattctcaccggaataaaatgagccgacttcgtc

SEQ ID NO: 230402 - DNA, 368 bp, Gossypium hirsutum
ggcatgccccacaaattctaccatggccggactggtcgtgtttggaaccgtaccaaacgccccattcgcgttgggggcaacaaggcagtgggttacccggttattaaggagagggttcatggtaaagtggagcctggtcaggctttaaggggcacttgggaattcaaactgaggaagataaagaatgatcagctcaaggcagaggccaaggcaaagggtgaggtgattagcacaaagaggcagcctgagggcccaaaacctggtttcatggtcgagggtgcaatgttggaaacggttactcccattccatatgatgttgttaatgatctcaaagggggctactagatctactctgtgttttgggttat

SEQ ID NO: 230403 - DNA, 370 bp, Gossypium hirsutum
atcccaatacgaggagattgctcagaggagccgggctgaggccgagtcctggtaccagaccaagtacgaggagctgcagatcacagcgggcagacatggggacgacctgcgcaacaccaagcaggagattgctgagatcaaccgcatgatccagaggctgagatctgagatcgaccacgtcaagaagcagtgtgccagcctgcaggccgccattgctgatgctgagcagcgtggggaaatggcactcaaggatgccaagaacaagctggaagggctggaggatgccctgcagaaagccaagcaggacctggcccggctgctgaaagagtaccaggagttgatgaacgtgaagctggccctggacgtggag

SEQ ID NO: 230404 - DNA, 349 bp, Gossypium hirsutum
gcttttagttgcctcgatttcaagtgaatcagaatgggtaaggaaaagactcacattaacattgtggtcatcggccacgtcgattctgggaaatcaaccaccactggccacctgatttacaagcttggtggtattgacaagcgtgtgattgaaaggttcgagaaagaagctgctgagatgaacaagaggtcattcaagtatgcttgggtgcttgacaagctcaaagctgagcgtgagcgtggtatcaccattgatattgccttgtggaaatttgagaccaccaaatactactgcactgtgattgatgcacctggacaccgtgactttatcaagaatatgattactggta

SEQ ID NO: 230405 - DNA, 249 bp, Gossypium hirsutum
atgctcccccctccccccgagcgccgctccggctgcaccgcgctcgctccgagtttcgggctcctgctaagctagcgccgccgtcgtctcccttcaatcgccgtcatgattatctaccgggacctcatcagccacgatgagatgttctccgacatctacaagatccgggagatcgcggaccggctgtgcctggaggtggaggggaagatagtcaataagacacaaggtgacattgatgactcgctcatt

SEQ ID NO: 230406 - DNA, 382 bp, Gossypium hirsutum
accctgtaggaccagaaaggccagctagagtcaccgctgccgccgttcccgaattgagaatgaatttgtgactctgaagaaggacgtggatgctgcctacatgcacaacgttgaactggacgacaacgcagacactctcacaaacgagatcaatcttctgggagacttgtatgacaccaaagctgtcccagatgcagacccacatctcagacacatacgtggtgctgtgcatggacaacaaccgcaacctggacctggacagcatcatcgctgaagtcaaggcccaataccaggagattgctcagaggagccgggctgaggccgagtcctggtaccagaccaagtacgaggagctgcagatcacagcgggcagacatgggga

SEQ ID NO: 230407 - DNA, 384 bp, Gossypium hirsutum
agaggaccattaccaaggcgaggttaaccgcaatggaggcagctggctccgactccgacggcagagaattcaaaaacgcacaagagatgtggagggaacaaatcggagatgaaggtgatgatcctaagaagattcaatggtaccgtgaaggcgttgcttattgggaaggtgtggaggcgtctgtggatggagtattgggtggatttgggcaagtaaatgatgctgatattaaaggtagtgaagcttttctcaattcccttttgcatgaaagatttggtgatggtggaagaaatcagcaccttgttgcccttgattgtggttctggcatagggaggataaccaagaatctactcataagatattttaatgaggttgatcttcttg

SEQ ID NO: 230408 - DNA, 382 bp, Gossypium hirsutum
cccacgcgtccgattcttcccagctggaagccaacgccctcagtcatatctccgagcctttagtcgtgaaattcttgagcctgccttcaatacacgaagtgagcagctagacgagctgtttggtgggaggcaaagccgtcgaaggcagcagggacagggaatgttccgtaaagccagccaggaacaaataagggcattgagccaagaagctacttcaccaagggagaaaagtggcgagagattcgccttcaacttattgagccaaacccctcgctactccaaccaaaacggccgcttcttcgaggcttgcccacgtgaattccggcaactcagggacatcaatgtcaccgtttcagccttgcaattaaaccaaggatcaatc

SEQ ID NO: 230409 - DNA, 394 bp, Gossypium hirsutum
attcgccatggatgatgatatcgccgcgctcgttgtcgacaacggctccggcatgtgcaaggccggcttcgcgggcgacgatgccccccgggccgtcttcccctccatcgtggggcgccccaggcaccagggcgtgatggtgggcatgggtcagaaggattcatatgtgggcgacgaggcccagagcaagagaggcattctcaccctgaagtaccccatcgagcacggcatcgtcaccaactgggacgacatggagaagatctggcaccacaccttctacaatgagctgcgtgtggctcctgaggagcaccccgtgctgctgaccgaggcccccctgaaccccaaggccaaccgcgagaagatgacccagatcatgtttgagaccttcaacacc

SEQ ID NO: 230410 - DNA, 376 bp, Gossypium hirsutum
catgaagtgtgatgtggatatcaggaaggatctctacggtaacattgtgctcagtgggggttcaaccatgttccctggtattgcagaccgcatgagcaaggagatcactgcacttgctccaagcagcatgaagattaaggtcgttgcaccaccagagagaaagtacagtgtctggattggaggatctatcttggcatcactcagcaccttccagcagatgtggatttccaagggtgagtatgatgaatccggtccatccattgtccacaggaagtgcttctaagttttgtaattgcttttgatggtgatctacattttgcatttagttggctttttttgtgtgcggtgtcaagtgaactccaaagtctggtttatg

SEQ ID NO: 230411 - DNA, 369 bp, Gossypium hirsutum
  unsure (1)..(369): unsure at all n locations
gcttacacttctttgctttcttttagcgtttgcttgcttgttctcttccatggctgctgtgctcagatagatctcgtcactaaccatcaccaggatccaccttgggggcagcctcagcaacctcagccacgtcaccaatcccaatgccaactccagaacttgaatgctcttcagcctaagcaccggtttaggtcagaggctggtgaaactgagttctgggaccaaaatgaggatcaattccagtgtgctggtgttgctttcctacgtcataagatccagcgcaaaggacttttattgccttcatttaccagtgctcctatgcttttctatgttgaacaaggggagggtattcatggngcggtcttccca

SEQ ID NO: 230412 - DNA, 371 bp, Gossypium hirsutum
gccgaatggatttccttcttcaccaatagcgaagccaccaacaccccaatggctggaagtgtctccttcatgcgagcactgccggaggaagtggtggcagcgtcgtatcaggtgtcaagagaagatgcaaggcggattaagttcaacaacaaaaacacctttttcttcactccttcacagtccgagaggagggccgatgcttaaactccagccgatgccaatgcaatcaaaatcagggggatctttgtagggtaacgtaagtaggaagtaataaaaagagttgcagagctatgtccgccatggattttgttgttgatcgttgaggtactgaaagattagggtttagaggatgaataataaaaagaaagggt

SEQ ID NO: 230413 - DNA, 396 bp, Gossypium hirsutum
atctcagatctccagctgtctctgtgctaatgaagctaaaacctatcactggaacatcacagctgtcaaattgggtcacattaactttactattagtacaaagattctggacagcaatgaaccatgtgggggccagaaggggtttgttccccaaaagggccggagtgacacgctcatcaagccagttctcgtcaaacctgaaggagtccttgtggagaagacacacagctcattgctgtgcccaaaaggaaaggtggcatctgaatctgtctccctggacctcccagtggatgttgttcctgactcgaccaaggcttatgttacagttctgggagacatcatgggcacagccctgcagaacctagatggtctggtgcagatgcccagtggctgtgg

SEQ ID NO: 230414 - DNA, 357 bp, Gossypium hirsutum
ccagaatacagaggttcgggaccgtgcttttagtaggctaaagaggtaaaattgagttaatgtatcgagccaacggcaataaaaaagtggtagttgtgcctcattccatgggagtagcctattttcttcacttccttaaatgggtcgaaacgccacctccgatgggaggcggtggtggcctcggttggtgcgctgaacatatcaaggcaattgtgaacatcggcccgtcatttcttggtgttccaaaggctgttagcaatatactctctgccgagggcaaagacgttgcttatttcagagcaatggcaccgggagttttggattcgggtactttagggcttcgagcattagagcatg

SEQ ID NO: 230415 - DNA, 363 bp, Gossypium hirsutum
gccctattgaaccacttgggggttaagcggaatgaggtaacaagcgatggtttgttctcagtcggagaaatggaatgtatgggatgttgtgtaaatgctcctatgatcacagttgctgattactccaatggatctgaaggatacacatataattactatgaagatattaccccaaaaagagttattgagatagttgagatgctaagaaggggagagaagctaccacctggcactcaaaatccaaaacgaatcaagagtggaccagaaggtggaaataccactttgctaaccgatccgaaacctcctccatgccgagatcttgatgcctgctaatgttaacatgccaccgcagtctcaaataat

SEQ ID NO: 230416 - DNA, 365 bp, Gossypium hirsutum
gtaggaacagtaaagaactagtggagattgttaaagaagttgatgaatatttccttaaagctgctgatgccggtagccatctttcattactgttagaagcttcaaatcccaatctttcaggcaaagggtataataactatgcctgtaacttaaccccaacaacatggacatggaattggagccccaaaatagtggaaaacaccattgttggacatacaggaaatactagccattgttccaccatagagaggttatatgcttgggagaagaaactataccaggaagtcaagaatgctgaggctataaagatagaacatgagaagaaagtggcacatatgaggaaacttgaagtgaagagagctgag

SEQ ID NO: 230417 - DNA, 368 bp, Gossypium hirsutum
ctttttctcttcaatggctgcctagctcgccagaccttttcgtcacagcagtcccaaaatgagtgtcaaatcaataggctccgcgcctctgcaccccagacccgaattcgctccgaagccggcaccaccgagtggtggaaccccaactgtcaacagctcaggtgtgctggtgtatctgtaatgaggcagactattgaacctaatggccttgttttgccttccttcaccaatgctcctcagcttctctacattgtccaaggaagaggtattcaaggtattgtgatgcctggatgtgccgaaacattccaggattcacagcaatggcagcatcaaagccgtggcaggttccaggaccagcaccagaaagt

SEQ ID NO: 230418 - DNA, 350 bp, Gossypium hirsutum
cggacgcgtggggtagagatgaggaaaatcatgggtgccaaagttctcttcttctttgctttgctttccttttcagctgtgtcggcatttgcacaggatgaggaagaccaaggtcttgttatgaacttctacaaggattcttgtcctcaggctgaagacattatcaaggagcaagttaagctactgtacaagcgacacaaaaacactgctttttcttggctgagaaacattttccatgactgtgctgtccagtcatgtgatgcttcactgctgctggactccacaagaaggagcttgtctgagaaggagacagacaggagctttggcctaaggaatttaggtacattgag

SEQ ID NO: 230419 - DNA, 356 bp, Gossypium hirsutum
atagaaattgctgacaccatggtacaaatattcaaaggacttcaagaaaggtttcagactgaaattcaaacggtgaataaacagttcccatgtgagccattcaaatttttggagccaactctaagactagaatattgtgaagcattggctatgcttaaggaagctggagtcgaaatgggagatgaagacgatctgagtacaccaaatgaaaagctgttgggtcacttggtaaaagaaaagtatgatacagatttttatattcttgataaatattcattggctgtaagacctttctatacgatgcctgacccaagaaattctaaacagtccaactcttacgatatgttcatgagagg

SEQ ID NO: 230420 - DNA, 375 bp, Gossypium hirsutum
agagcctcttcgcatctcggagaagtcgcagaaaagtgagagagctgaaacgctgtcgtcaaacaaatggctgtctcctcgtgttcctttcctcctagggttttcaatgcttattcttcattcgagtgccgttccgatcccgacttctccggtacgccgaccggggagaagcctcgcatcgggtctaaccgacgagtaacggcatcgttgttttgtacaggcggtgggggtttgtcgtctttgatctttcgtttccccccgaacttcgtccgccagctcagcgtcaaggctcgccgcaactgtagcaacatcggtgtcgcgcaagttgtcgcggcttcgtggtcgaacggtcccacttccggttacccctcatcg

SEQ ID NO: 230421 - DNA, 374 bp, Gossypium hirsutum
cttgcccctgttatgggaaaggatattacttgttcaaaacttctgcccgtggttattaatgcttctaaagatagggttccgaacatcaaatttaatgtcgccaaggtgttgcagtcacttatccctattgttgatcaatctgtaagtaaatttattttcgttttaaagggaaaatcatatattcggagtatattctaccctcttgttcgaaaatgcgtcggatattgatatagaaaaaaggggttgagtttgctactagcatgcaaaattttcatatgcaatgcctattttgtttcattaggtgtctttttggcttttgcttagactctaggctaaagtatgtttcaagttcttgtatctttttatttatcgct

SEQ ID NO: 230422 - DNA, 359 bp, Gossypium hirsutum
ctttctcttttaacatttctccttctacatctttctttcttttctttttttgggttggggtttggtactctcgtttgaatcaaagaaaccataactgtttgttctttttttctccctttgaattgaaacgattgaaagaagaaatgggttcagaaggatcatgtgttgttgtacccaggagtttcagattgctagaagagcttgagaggggtgaaaagggaattggagatggaactgttagctatgggatggacgatgctgatgatatatacatgcagtcatggactgggactattattggccctccaaacactgttcacgaaggatgcatatatcagttgaaactgttctgtggcaag

SEQ ID NO: 230423 - DNA, 332 bp, Gossypium hirsutum
caatccagttatatatatcaaaaaacgtaccatggcaaagttcgctctcctcgtagccactttcgctctcgctttcttcctcgtcaacgcctccatctaccggaccacggacggcgacgaagaaaactggtaccgacacgatcggcgatcgtgtcaagaccagatatggcagcaaggctacctcccaaactgtcagtggtacatgaacgaacaggccggccgcagccacagcggatatggcacccactacctcaactcgtgctgctacgagctccagaacctaaggcaggattgccggtgccaaggcttgaaacaagcgttaggacaacagc

SEQ ID NO: 230424 - DNA, 387 bp, Gossypium hirsutum
atcgcttatcatcccccccgacgccgtcgctgtggactgcaaggacccagatgatgtggtaccagttggccaaagaagagcctggtgttggtgcatgtgctttggactggcatttatgcttgcaggtgttattctaggaggagcatacttgtacaaatattttgcacttcaaccagatgacgtgtactactgtggaataaagtacatcaaagatgatgtcatcttaaatgagccctctgcagatgccccagctgctctctaccagacaattgaagagaatattaaaatctttgaagaagaagaagttgaatttatcagtgtgcctgttccagagtttgcagatagtgatcctgccaacattgttcatgactttaacaagaaacttac

SEQ ID NO: 230425 - DNA, 373 bp, Gossypium hirsutum
cccacgcgtccgaaaagatctggcatcatacattctacaatgaactccgtgttgctcctgaggagcaccctgtgcttctcacggaggcacctctcaaccccaaggccaatagagaaaagatgactcagatcatgtttgagaccttcaatgtacctgctatgtatgttgccatccaggctgccctctctttgtatgccagtggtcgtacaacaggtattgtgctggattccggagatggtgtttctcacaccgagccaatctatgaacgatatgcccttgcacatgccattctacgacttgaccttgcaggtcgagatctaaccgatgccttgatgaagattcttaccgagagaggttacatgtctaccaccac

SEQ ID NO: 230426 - DNA, 372 bp, Gossypium hirsutum
gaaaatgatggtcctacaactgtgaatgttcgaattactggtcttactcctgggcctcatggcttccacctacatgagtatggtgacacaacgaatgggtgcatgtctacaggagcacatttcaatcctaacaatatgacacatggtgctcctgaggatgaagtacgccatgcgggtgacctgggaaacataattgctaatgctgatggagtggcagaggcaacaattgtggacaatcagataccactaagtggccccaatgcggttgttggaagagcatttgtggttcatgagcttgaggatgatcttggaaagggtggacatgaacttagtctaaccactgggaatgctggcggaagattgcatgtggtg

SEQ ID NO: 230427 - DNA, 337 bp, Gossypium hirsutum
gctgttttaagaaaaacattgcgaatagggagaagggtgagagagataaaaggggaacaaaagaactgcaaaaaaattgaactttttttttcctaaaaaacctcaattagaagagcgattatcgcttcatcttccccgaaacgacttcgtcagatttttttcaggttgcttttgttgccatggctgctgctgcgactgcctctggtggtccacgatatgctccgcctgaccctactcttcccgaaccatggaaaggcctggttgatggaaaaactggttatctctacttttggaatccggaacaaatgtcacgcaatatgagaggcctagagggata

SEQ ID NO: 230428 - DNA, 373 bp, Gossypium hirsutum
atcgattggttgaaaggcctgaaagaaaacgttgtgcttgggggtatgatacccgccggtaccggattcaaaggattagtgcaccggtcacggcaacataacaacattcttttggaaacaaaaaaaaagaatttcttcgggggagaaatgagagatattttcttccaccaccgagaattatttgactcttgcatttcaaacaatttacatgatacatcaggccgctcttttataggtatagaatttaatgattcttaagataatttgttgtggtcatttgagttgttaatttgttaatagtaataaagagaataacgaatagaaagtaatggcttggctcgtggataaacgaccaatccccggtagaagagaa

SEQ ID NO: 230429 - DNA, 311 bp, Gossypium hirsutum
tccccttactgaagattgagacaaataatccctctttgctagctggaaattggtgtcaactttgtgcgacatgcaagattgttaggcctcttcgtgcaaaacactgcttcacttgtgatcgttgtgtcgaacagattgatcatcattgcccttgggtatcaaattgtgttggaaagagaaacaaatgggactttattcttttccttgatttagagggttgagcaatgctcgttacttgtggaggtactattgcaagaattgtgtaagatccagtggctccgtcatcatttttgccatggatgaactatgct

SEQ ID NO: 230430 - DNA, 378 bp, Gossypium hirsutum
aaaaaattaaaccatgtatcaccctcaagttccaggcgagcccacccaaaccaccacttgcctcgtcgagaccgccaccggcgccatccaaagcttccgccctatcaaacaaatccatcaacacctctgcgcatttcatttctatggctacgacatgacccgtcaagtgcaagcgcaccatttctgcgcacatcaaaacgaagaaatgcgacaatgtctcatatatgacacccccgaagccgatgcaaagctcatcggattggagtacatcatatcggagaatttgtttttgacgttgccggacgaagagaagccgctttggcattcacatttgtacgaagtgaagagtggggtgttgtttatgccgcgagttccggg

SEQ ID NO: 230431 - DNA, 355 bp, Gossypium hirsutum
gttccaagaacgattcagggaagaacatggcaatttcagagtcctccagaggtttgctgacaaacatcatttacttaggggcatcaacgagttccgcattgccattttagaagcaaaccccaacactttcgttctcccacaccattgtgacgcggagaaaatttacgttgtcactaacggaagaagaacagttacgttcgtgacacatgaaaacaaagagtcatacaatgtagttcctggagttgtagtaagaattccagcaggaagcactgtgtacttggccaaccaagacaacagggaaaagcttaccataagagtgcttcaccgacctgtcaataaccctggacaatttcag

SEQ ID NO: 230432 - DNA, 393 bp, Gossypium hirsutum
atgggagacctcttgggtgtggggtagagaaagttgaggtgccctaggagaacaggcatttttctgtacccacaggctactgatactataagctccaggctgacttcttctcagaccacctgggctgtgtcaccaagtgccggaagccatgcagtgtgaccagctaccagctctaggctggttactcacgatggacctcggtgacatcccaggaatgggtcttcgagatgctatcgcgacagaacaactacaccatcaacaacaagagaaatggagtggccaaagtcaacatcttcttcaaggagctgaactacaaaaccaattctgagtctccctctgtcacgatggtcaccctcctgtccaacctgggcagccagtggagcctgtggttcg

SEQ ID NO: 230433 - DNA, 382 bp, Gossypium hirsutum
gctacttcaccaagggagaaaagtggcgagagattcgccttcaacttattgagccaaacccctcgctactccaaccaaaacggccgcttcttcgaggcttgcccacgtgaattccggcaactcagggacatcaatgtcaccgtttcagccttgcaattaaaccaaggatcaatctttgtgccgcactacaattcaaaggctacattcgtgatccttgttaccgaaggaaatggatacgctgaaatggtttctcctcatcttcctaggcaaagctcatatgaagaagaagaagaagaagacgaagaagaagaacaagaacaagaagaggaaaggagaagtggacaatacaggaaaataaggtcccggttgtcgcgtggagaca

SEQ ID NO: 230434 - DNA, 271 bp, Gossypium hirsutum
atgttgagtaggcagaaaaaggagcctattcattaaggattaaaaggtataggccagcacgtgtaccatcgacttcaagatttctgaatccatatgtcgtatgtttcattgtcgtcacaagggtagtgatcctggcagtgaccatagatctacttgtttactttttagcttttgatcaaaaatcttacttttacaggagcagttgtcaactcctaaatgttgtatatattagtcagttaaattcaccagctacacacgaatacacgacttt

SEQ ID NO: 230435 - DNA, 353 bp, Gossypium hirsutum
cggacgcgtggggcagaaaatatctcaaatctcctcctcctcctcggaaatcttagtatcatcaccatggcctcaaatcccaaggtcttctttgacatgactatcggtggtcagcccgctggtcggattgtgatggagcttttcgcagattgcactcctcgcactgctgagaacttccgtgccctctgtaccggcgagaaaggcgtcggccgcagcggtaagcccctccactacaaaggctcctctttccatcgtgtgatccctaactttatgtgccaaggaggtgacttcaccgccggaaacggtaccggaggtgaatccatctacggatccaagttcgctgacgagaactt

SEQ ID NO: 230436 - DNA, 374 bp, Gossypium hirsutum
atcgggcggtggacagtcatggcggcccggcgcggggctctcatagtgctggagggcgtggaccgcgcggggaagagcacgcagagccgcaagctggtggaaacgctgtgcgccgcgggccaccgcgccgaactgctccggttcccggaaagatcaacggaaatcggcaaacttctgagttcctacttggaaaagaaaagtgacgtggaggatcacgcggtgcacctgcttttttctgcaaatcgctgggaacaagtgcccttaattaaggaaaagttgagccagggtgtgaccctcatcgtggacagatatgcattttctggtgtggccttcaccggtgccaaggagaatttttccctagattggggtaaaca

SEQ ID NO: 230437 - DNA, 360 bp, Gossypium hirsutum
gacccacgcgtccgcaggcatatttataggggaactccgaggagacatttgttgactacagggtggagtgctttcgtcaaccggaaaaaactcgttgccggcgactcagtcgtgttcttgagagctgagaacggcggaattcgtgtcgggatcaggcgagccaagcttgggattggggatggtgattgttacggaagtttgggtttttgtgggaattcgaaagggaacggaaaagtgaagccggaggaggttttggaggcggcgaaggcggcttccggtggccggaagccattcgaggttgcttattatccgagaacaagagggccggagttttgtgttaaggcatctgcagtgaataca

SEQ ID NO: 230438 - DNA, 219 bp, Gossypium hirsutum
atgcggcagctgcggtttcgcttcgcggggtagtgttgggcccgcggggcgcggggctcccgggcgcgcgtgcccggggtctgctgtgcagcgcgcggcccgggcagctcccgctacggacacctcaggcagtggccttgtcgtcgaagtatggcctttcccgaggccgaaaggtgatgttgtcagcgctgggcatgcttgcggcaaggggtgcggggc

SEQ ID NO: 230439 - DNA, 262 bp, Gossypium hirsutum
aatgaacttcttgatccaaacggcttcatttgctgcctcactagctgcaatatactaagcctctgttatagaatcggctactgtactttactttgaactcttccagctcacagcaccaccattaaggcaaaacacaaaacttgattgcgatcgagaatcatccttatcgatttggaagctggcatcagtttaaccttttacacttaactcttcctcacctccatatattaggaacgtatccttagttcttcttaagtactta

SEQ ID NO: 230440 - DNA, 355 bp, Gossypium hirsutum
  unsure (1)..(355): unsure at all n locations
gaaaaattacagtgaaaatgggaacccttaaagttccagctcatgtacctgccccttctgaggatgctgagcaacttcgtaaagcttttgaaggatggggtacaaatgagcaattgattatcgacattttggctcacaggaatgcagctcagcgcaatttgattcgtaaaacttatcgtgaagcttatggggaagatcttcttaagtctttggatgaggaactttcaagtgactttgagcgagctgtggtgctgtttactttggaccctgcagagcgtgatgcatttctggctcatgaagctacaaagaggttcacatcaagccattgngttctcatggaaattgcttgcactag

SEQ ID NO: 230441 - DNA, 352 bp, Gossypium hirsutum
gagatgaggaaaatcatgggtgccaaagttcttttcttctttgctttgctttccttttcagctgtctcggcatttgcacaggatgaggaagaccaaggtcttgttatgaacttctacaaggattcttgtcctcaggctgaagacattatcaaggagcaagttaagctactgtacaagcgacacaaaaacactgctttttcttggctgagaaacattttccatgactgtgctgtccagtcatgtgatgcttcactgctgctggactccacaagaaggagcttgtctgagaaggagacagacaggagctttggcctaaggaatttcaggtacattgagaccatcaaagaagctg

SEQ ID NO: 230442 - DNA, 383 bp, Gossypium hirsutum
atgccaacaccaagttcatgttcgatctgttccaacaggtgggaaaatcacaaattaacaacaccttctattcccctatcagcatcacaacagcattagggatggtcctcttaggggccaaagacaacactgcacaacaaattaacaaggttcttcacttcgatcaagtcccagagaacaccacagaaaaagctgcaacatatcacgttgataggtcaggaaatggtcatcaccagtttcaaaagcttctgactgaattaaacaaatccactgatgcatatgagctgaagatcgccaacaagctcttcggagaaaagacgtttcaatttttacaggaatatttaaatgccatcaagaaattttaccagaccagtgtggaatct

SEQ ID NO: 230443 - DNA, 371 bp, Gossypium hirsutum
atcgggagtgggatcgcagttcttgtttgtgtgtgggtgggatcgccacttgacaatgcagatcttcgtgaagaccctgactggcaagaccatcacccttgaggttgagcccagtgacaccattgagaatgtcaaggcaaagatccaagataaggaaggcattcctcccgaccagcagaggctgatctttgccggaaagcagctggaagatgggcgcaccctgtctgactacaacatccagaaagagtccaccctgcacctcgtgctccgactcagaggtgggatgcacatcttcgtgaagaccctgactggcaagaccatcaccctcgaggtcgagcccagtgacaccatctataacgtcaaagcaaaga

SEQ ID NO: 230444 - DNA, 348 bp, Gossypium hirsutum
cccacgcgtccggacagagcgtgttcttgctgcttgctacaaggctttgaatgatcaccatgtcatgctagaaggtactcttttgaagcctaacatggtgacccctggttccgactccccgaaggttgccccagaggttattgctgagtacactgtccgtgccttgcagcgtaccgtccctgctgcagtccctgctattgtgttcttgtctggtgggcaaagtgaggaggaggctacccttaaccttaatgccatgaacaagctccagaccaagaaaccatggtcactctcattctcatttggacgtgcccttcagcagagcactctcaaggcctgggctggaaagga

SEQ ID NO: 230445 - DNA, 357 bp, Gossypium hirsutum
agccttagacatgtgtgggatcaagtcgataacacgggaactgtaaccccattcgttgtcataccaagtcacaagcttaacaaagttgtcattcaaagcaattccagccttggcatcaaaaatgcttgacctgttgtctccgatgaagtcagttgagactaaatcttcgtctacataaccaagaattcccttcaagttgccttcagattccgccttgatagcagccttaattgagtgagtgattgtgcttggtgtatccaagctttagcaattttaatttagaagagatgttatgagagaataaacgaattgtacggagcatatttttgtgtgaagaagggttgtttcagttttatt

SEQ ID NO: 230446 - DNA, 349 bp, Gossypium hirsutum
cagaattagggtttcggtgacggtaaccccagcataggccctacaactccgacatcatttgggtccctttgtccttcaattagatcacagcttttcgttcaaaaatatattctcttggtattggtcttaatttcaagcaacaatggcggagcacttggcctcaatctttggtacggagaaggaccgcgtgaattgccccttctatttcaagattggagcatgccggcacggggacaggtgttcacggctccacaaccgggcgacgatctctccgactctgctcctttccaacatgtaccagcgcccggacatgatcactcccggagtggatgcccagggccaggccatc

SEQ ID NO: 230447 - DNA, 372 bp, Gossypium hirsutum
cccacgcgtccggccgcagctgggttgttttaaactctaaatataaaggaggccaaacatgccgcctcgtagataccaatttgggagggctgatgaggccactcatcccgactccatgagagccaccttggctgaattcctctccactatcattttcgtctttgccggcgaaggctcaattcttgctcttgacaagatgtacaaggatacgagtgcgacgcctgcaagactggtgatgatagcacttgcgcatgggttgtctctgtttgcagctgtggcatccagtgtaaacgtatctggtggccatgtgaatccagcagtcaccttcggtgccttgctctgtggaaggatctctctcgttcgggcgctgta

SEQ ID NO: 230448 - DNA, 358 bp, Gossypium hirsutum
cctccacctcgtcctccgtctgggcgggggcatgcagatcttcgtgaaaaccttgactggcaagaccatcaccttagaggtggagagttcggacaccatcgacaatgtaaaggcgaagattcaagacaaggaagggatcccaccagaccaacaacgtttgatctttgcagggaagcagcttgaggatgggaggaccttggctgattataacatccagaaggaatcgacccttcaccttgttttgaggcttcgtggaggcatgcagattttcgttaagacattgactgggaaaacaatcacattggaggtggaaagttcggatacaattgataatgtgaaggcgaagattcaggacaag

SEQ ID NO: 230449 - DNA, 218 bp, Gossypium hirsutum
ggaacagttacgttcgtgacacgatggaaacaaagagtcatacaatgtagttcctggagttgtagtaagaattccagcaggaagcactgtgtacttggccaaccaagacaacagggaaaagctaaccatagcagtgctccaccgacctgtcaataaccctggacaattccagaaattctttcctggtggacagggaaattctcagtcatacttaccaa

SEQ ID NO: 230450 - DNA, 363 bp, Gossypium hirsutum
cccacgcgtccggcaacaaatgctagaagcaaggtcttaagcaggctacaaaacatgactggtttagccacattgtatgacttcacaaagaaaatcccttaccagacagaatttgctgtcaggtttcttaacatagctgaggtaaagagagcattaggagtgaatgaatccatggttttcgaggagtgcagcgatgttgttggggatgtattgcatgaagatgtgatgaagagcgtgaagtacatggtggagttcttggtgaagaatagcaaggtactgttgtatcaagggcaatatgatttaagggatggtgtggtatcaacagaggcatgggtgaagaccatgaaatgggaagggattgag

SEQ ID NO: 230451 - DNA, 362 bp, Gossypium hirsutum
  unsure (1)..(362): unsure at all n locations
gaaatacacaagaaaaaaaaaaaaaaaacaagtgagcagataaattgaagacttttatttctgttaacatccattatgagtactgctggtcaagtcatccgttgcaaagctgcggtagcatgggagtcggggaagccactgtcaatagaggaagtggaagtggcaccaccgcagaaggatgaagtccgtattaagatactcttcacttctttatgtcacaccgatgtctacttctgggatgctaagggacaaaaccctctgtttcctcgcatactaggtcatgaagctggagggattgtggagagtgtangtgagggggtgactgatctaaagccaggtgatcatgttctccccatcttcac

SEQ ID NO: 230452 - DNA, 373 bp, Gossypium hirsutum
atgtcaccgtcaaccagagtctcctgactcccctggacctgcaaatcgaccccaccatccagcgagtgcgggccgaggaacgtgaacagatcaagaccctcaacaacaagttcgcctccttcatcgacaaggtgcggttcctggagcagcagaacaaggttctggaaaccaagtggaccctgctgcaggagcagggcaccaagaccgtgaggcagaacctggagccgttgttcgagcagtacatcaacaacctcaggaggcagctggacagcatcgttggggaacggggccgcctggactcggagctcataggcatgcatgacctggtggaggacttcaagaacaaatatgaggatgaaatcaacaagcgcac

SEQ ID NO: 230453 - DNA, 362 bp, Gossypium hirsutum
cttcttcgcggtgatctcgaggccatggctgttgttgagaatgcttcgaatcaagacacggcggctgcaacagtgacgtcaaacgaccaagatcagtcaaagcttcggtcaacaaccgatctgagcttacacgacaacgagcaagggttgtacaacaagatcggtggaaccaacggtggtggtggtaaagatgagcatggggatagtttcaaaagagatatgagagagttacaagaactgttctctaagcttaaccccatggctgaagagtttgtacctcactcgcttgttaacaatggactcaatggtgggtttcacactaacaatattgcttttcaaaacaacaataacaacatctcaag

SEQ ID NO: 230454 - DNA, 363 bp, Gossypium hirsutum
atcgtccctctgttttctctacgtttggaagatctcttgtgacgatggcccaagcagatcagattagcaacagccctgaaatcaaagagccatccccgaaaggcccaaaactcggtcaaaatggagtacatgaagttacccatggtccagcctccctcttgaaaggcaaaaagctttctgaaaaagccgtgttgccgtcaagaggctctcctctcgccgctggctacgatctgtcaagtgcaacggatacaaaggtgccagccagaggaaaagcgttgattcccactgatctaagcattgctatccctgaaggaacatatggtcgcgttgcgccaagggctggtttggcttggaagcattcca

SEQ ID NO: 230455 - DNA, 355 bp, Gossypium hirsutum
taacgagctgaagccgtgctacgataacactagtgttttcacaataaattaatcatagctgcagcttgtttcttttaaactctaaatataaaggaggccaaacatgccgcctcgtagataccaatttgggagggctgatgaggccactcatcccgactccatgagagccaccttggctgaattcctctccactatcattttcgtctttgccggcgaaggctcaattcttgctcttgacaagatgtacaaggatacgagtgcgacgcctgcaagactggtgatgatagcacttgcgcatgggttgtctctgtttgcagctgtggcatctagtgtaaacgtatctggtggccatgtg

SEQ ID NO: 230456 - DNA, 360 bp, Gossypium hirsutum
cgattagcttcccactataacgcttatggccccatttactccgatcgcgagaggctacaagtttacatctccgatactggtatatttgcggtaatttatgtactttataagattgctgcaacaaaagggctggcttggcttttatgcacttatggggtgcctctacttattgtgaatgccttccttgtgttgatcacctacttgcaacatactcactcggcattgccgcattatgactcgtccgaatgggattggttgcgaggagcattgtcgacgatggatcgagatttcggggtgttgaacaaagtgttccataacatcaccgatacgcatgttgctcatcacctcttcttaacgatg

SEQ ID NO: 230457 - DNA, 365 bp, Gossypium hirsutum
gcagaagcagggccgtcagcaggtgttagtgaggatgggcgaacagagagaagaaagggaaatgagtgagaagcaattggctgatgaagtttgtgatgatcgtgaagatggtgatgatgatgatgataaggaagatggtgctggagctttggctggttttgtacctggtccgctcctttctctcaaggagcagattgagaaagacaaggatgatgacagcttaaggagatggaaggagaagcttcttggttgtgttgaagaagacctaaatggccaaatggaacctgaagtcaagtttcactcaataggaattatttcgaatgaccttgaggaagtttcttatccattgccattggatttgaatc

SEQ ID NO: 230458 - DNA, 361 bp, Gossypium hirsutum
gtgaaccagaggaagagaaacgaaagaaaatggcactcctttgtgcttcaacctcagtcatcttctcttcttcttcttcttcagagaggccttcctttgcttcattgaaaaggactagtcccagtaaccaaagctcatttcttgggttcttccctgtagtggcattgtccaaaccttcttatgctcggacaacaaccttgtctttctccaaacgggatttcaaggtttgctgccgggacctatctcttgtccctgaaaaccaacgttggatgttcgaggaatccgaggctgatggccctgacatttggaacaacacatggtatcccaaagctaaagaccacattaataatgaaaaaacatg

SEQ ID NO: 230459 - DNA, 390 bp, Gossypium hirsutum
atctccggaatcactgcagcccccccctcgccccgagccagagcggcccgggtcccgccaggccctcacactcccagcagaatgggcaaggagaagacccacatcaacatcgtggtcattggccatgtggactctggcaagtccaccaccacgggccacctcatctacaagtgcgggggcatcgacaaaaggaccatcgagaagttcgagaaggaggcagctgagatggggaagggatccttcaagtatgcctgggtgctggacaagctgaatgcggagcgtgagcgcggcatcaccatcgacatctccctctggaagttcgagaccaccaagtactacatcaccatcatcgatgcccccggccaccgtgacttcatcaagaacatgatc

SEQ ID NO: 230460 - DNA, 358 bp, Gossypium hirsutum
cggacgcgtgggccttgcacagggatgccagaagtactatgaagctggtgcccgctttgctaaatggcgtgctgtccttaagattagtgctaatgagccaaccgagcttgcaatccaagaaaatgccaacgggctagctatgtatgctgccatctgccagcaatgtggccttgtccccattgttgagcctgaaattcttgttgacggatcacatgacattaaaaagtgtgctgcggtgacagagcgtgttcttgctgcttgctacaaggctttgaatgatcaccatgtcatgctagaaggtactcttttgaagcctaacatggtgacccctggttccgactccccgaaggttgcccca

SEQ ID NO: 230461 - DNA, 380 bp, Gossypium hirsutum
atacaagctccagcagctggcccttcacatccagacttggctgagaggacccacccctgggtgtccggtggtcagtcgccccaggatggggactacagtcagagcagccttggtcttggcctatttggccattgcttctgctgcctctgagggaggcttcaaggctacagggcagaggcagctgaggccagagcactttcaagaagttggctacgcagctcccccctccccacccctatcccgaagcctcctcatggatcaccctgacagctctcagcatgggcctccctttgagggacagagtcaagtgcagcctcctccctctcaggaggccacccctatccaacaggaagagctgatgcctgcccaactgcctgctg

SEQ ID NO: 230462 - DNA, 364 bp, Gossypium hirsutum
cccacgcgtccgcgataaacaaggcaaaggacccttcctcgaagcttccatagaacaaatcgaggccatgagtagccatgaggaaggcagcaaaggcggtggtttgtggccatttggaagtgagtcaaaatcaaagagtgcattcaacctcttcagaaagcgtgagccttcacattgtaacagatatggtcagctctttgaagttgaagaagatgaattcaagcgccttaaagacttcgatctcagggtctcctatgccaacatcaccaagggatgtatgtcagccccattctacaactcaagggcaataaagatagccattgttgtgaaaggtgaaggatactttgaaatggtatcacctcct

SEQ ID NO: 230463 - DNA, 383 bp, Gossypium hirsutum
atatgaaattgagaaaactggaggagcgcttttatcaaatgacgggtgaagcctggaaattaagcagtggtcacaaacttgggggtgatgaaggtacaagtcagtcatcttttgaaacatcaaatagagaagcagcaaagagccagaacttgcctaaacctttaactgaatttccatctcctgctgtacagcccacatgcaaggagattcctgatttacctgaagaaccttctcaaacagcagaagaagtagttactgttgctctccgatgtcccagtgggaatgtcctgaggagaaggtttttgaagtcctgcagctcacaggtcttacttgactggatgatgagaattgggtaccacacatctctatacagcctttctact

SEQ ID NO: 230464 - DNA, 378 bp, Gossypium hirsutum
atgtcccgctgcggggagatgctccacatccgccgaccgggtgctccgccaggcgctggccgaatgcctggggaccctcatcctcgtgatgtttggctgtggctccgtggcccaggttgtgctcagccggggcacccatggtggtttcctcaccatcaacctggcctttggctttgctgtcactctgggcatcctcattgctggccaggtctctggggcccacctgaaccctgccgtgacctttgccatgtgcttcctggctcgtgagccctggatcaagctgcccgtctataccctggcacagacgctgggagccttcttgggtgctggaatcgtttttgggttgtattatgatgcaatctggggctttgccgacaa

SEQ ID NO: 230465 - DNA, 380 bp, Gossypium hirsutum
  unsure (1)..(380): unsure at all n locations
atgtcatcaatgggggtgtccctgagaccacngagctggggaaggagaggttcgaccacatcctgtacacgggcagcacgggcgtagggaagatcgtcatgacggctgctgcccagcacctgacccctgtcacgctggagctgggagggaagagcccctgctacgtggacaagaactgtggcctggacgtggcctgccgacgcatcgcctgggggaaattcatgaacagtggccagacctgcgtggcccccgactacatcctctgtgacccctcgatccagaaccaaattgtggagaaactcaagaagtcactgaaagagttctatggggaagatgccaagaagtcccgggactatggaagaatcattagtgcgcggcac

SEQ ID NO: 230466 - DNA, 359 bp, Gossypium hirsutum
ctctctctcctatactcaactggttggacttaaaagcaaggtagctagctagggttttgtgagccagagagatgggttcaaaaagaacggcatcactagccctcttctttgcactcaacatcctcttcttttccctggtgagtgcttgtggttcctgcccttcccccaaccccaaacctaaacctaaaccaaagccaaaccccactccctccccatcttcttctggcaagtgccctagagatgctcttaaactcggtgtatgtgctgatttgctcggtggcttgctcaacgtcaccattggtacgcctcctgttcaaccctgctgctctctcatccaaggtcttgctgatcttgaagct

SEQ ID NO: 230467 - DNA, 360 bp, Gossypium hirsutum
aaatcccctctcccattgatcttttgatcttctagacacttctcttcctcgttgtgagtctcttggtttgccctggtaatggcgtctgctttagaaaccaaagccaaagaagcatacttcgatgaccactttgaactcgccctcgatctgtactcgcaagccatcggaatcaaccctaaaaaggccgagctctacgctgaccgtgctcaagccaacatcaaactgaacaatctccctgatgctgtggcagatgctaacaaagcaattgagttggatccgtccatgtctaaagcctacttgcgtaaagctactgcgtgtatgaagcttgaggagtatcaaactgctaaggctgcgttggag

SEQ ID NO: 230468 - DNA, 367 bp, Gossypium hirsutum
  unsure (1)..(367): unsure at all n locations
ggccatccagtcacattcgttgcctgggaaaacgaggacctaggattgctcggnttcggactctacaacggccaagacaacaagaggatcttcgtggctgggaaaaccaacaatgtgagacaatgggatcgccaggccaaggagctggcgtttggggtggagtcaaggttggtggatgaggtattcaacaacaacccgcaagaatcttacttcgtgtctggacagagtcggcgtggatttgatgagaggaggggaagtaataaccccttatcgccgttcctggactttgcacgcttgttctaagtagtagttttgtaaggcatgtaatggtggaataaaataagggtggcctatgtaaagaggaagg

SEQ ID NO: 230469 - DNA, 384 bp, Gossypium hirsutum
atcaaaaaagggccagaatggataggaaaggactcccaaaatctgagcataccagccgcttaaggagaaatgttgctagacaaccatagttgaggttagaaagaggaaagaaggaagagttagtgggctagagaggggaaggatgtgatttgagcagatagttctcattctcctctgtccagagtacctgaactatgaggatgggaaattctctaagagccggggtgtgggagtgtttggggacatggcccaggacacggggatccctgccgacatctggcgcttctatctgctgtacattcggcctgagggccaggacagtgctttctcctggacggacctgctgctgaagaataattctgagctgcttaacaacctgggcaa

SEQ ID NO: 230470 - DNA, 378 bp, Gossypium hirsutum
  unsure (1)..(378): unsure at all n locations
atgggccctcttgcttctctgatagctcccagcttactcgtgtggggcatgattggcgggcaggantgtttcctatgcgggcctcggggcttcagctgtggctcagccatcgtaggcagtggcaagagaggggccttcagctcagtctccgtgtctgaaggtgctggccgatgctcttctgggggctttggcagcaggagcctctacaacctcgggggggacaagagcatctccatgagtgtggctgggtcacgacaaggcgcctgctttggaggtgctggaggcttctgcactggtggctttggcggtggggttgggggctccttcagcggtaagggtggccctggcttccctgtctggcctggtggggggattcag

SEQ ID NO: 230471 - DNA, 350 bp, Gossypium hirsutum
gaaaaaaaagaatggtgcccagcagccggcttcgatcaactctcaaaacccagcttggttcatatataaaaaatgctgctgcgtacagaagttctatggaccacccacttaagggtgcattactggcaagattatatagtaccgagccatctttgcagagagatgattcagatttaaaggatggcaatgggtttaaggggcatgatatgctggctccattcacagctgggtggcagaccactgacttacatcccctggttattgaaaagtctgagggaagctatgtttatgatacccatgggaaaaagtatctggattctctcgctggtctatggtgtacagcattagga

SEQ ID NO: 230472 - DNA, 362 bp, Gossypium hirsutum
gaaaaaaagatgggaaaatcaggctactcaaagcttcacatcgccatgtttccctgggttgcatatggtcatttcatccccttccttcatctctcaaataagttggctcataaaggccataaaatttccttcattttgcctaaaggagtgcaaccaaagctggaaaacatgaaccaataccccaacttgattcaattcgtccctctagttataccccatgtcgatggcctccctccaggtgctgaaactacatctgttgttcctctgaaccaacaaaaataccttgcttttgctgtagatcaaaccagggaccaagttgaaggcatcctaggggctttaaaacctgatatggttttttatga

SEQ ID NO: 230473 - DNA, 376 bp, Gossypium hirsutum
atcggcgcgatccgcatgagcctagatagcgcgggactagggtgcagagctcgggacgtggatcggagccggcgcgatgggcggagagcaggaggaggagcggttcgacggcatgttgctggccatggctcagcagcacgagggcggcgtgcaggagcttgtgaacaccttcttcagcttccttcgacgcaaaacagactttttcattggaggagaagaggggatggcagagaagcttatcacccagactttcagccaccacaatcagctggcacagaagacccggcgggagaagagagcccggcaggaggcctagcggcgggagaaggcatagcgggcggccaggctggccaaggaagccaagtcagagacctca

SEQ ID NO: 230474 - DNA, 385 bp, Gossypium hirsutum
atccggacgccggagcccgagccccgccgagtcccctcgcctcatgcgcccgcgtgcgatccgcgctcctccgtcccaccatggctcggggccccggcctcgcgccgacaccgcttcggctcccactgctgctgctgctgctggcggcggtgaccggccacactggcgcacaggacaactgcacgtgtcccaccaacaagatgaccgtgtgcagccccgacggtccctgtggccgatgccagtgccgcgcgctgggctcaagcgtggcagtcgactgctccacgctgacctccaagtgtctgctgctcaaggcgcgcatgagcgcccccaagaacgcccgcacgctggtgcggccgaatgagcacgcgctcgtggacaacgatgg

SEQ ID NO: 230475 - DNA, 361 bp, Gossypium hirsutum
gagagattttgatggggcttggcggcgtctacgaggcggtgataccgtacaatctgaacggcgaatccaattggtggcacgacattaacgattcaccgctctggcaggaccgcatttttcacattctcaccgccctttatggcctcgtcgccgtcattgctctcgttcaattggtacggatacaattgagagttcccgaattcggttggaccacgcagaaggtcttccattttctaaattttcttgtgaatggggttcgtgggctagtttttattttcaggcggaatgtgcaggacttacatccagagatcgttcgacacatcttgctggacatgccaagtctagtgttcttcacgacata

SEQ ID NO: 230476 - DNA, 289 bp, Gossypium hirsutum
gcgagggatactccttgaactgattgagccaaacccctcgctactccaaccaaaacggccgcttttacgaggcttgccctcgtaatttccagcagcaactccgagaagtggattcctccgttggtgcgcttcgaaataaacaaaggatcgatcttcgtaccgcactacaattcaaaggctacattcgtggtcctcgtcaccgaaggaaacggccacgtcgaaatggtctgccctcacctttctaggcagagctcacactggttctcccgagaggaagaagaacaagaag

SEQ ID NO: 230477 - DNA, 369 bp, Gossypium hirsutum
attttgccgccagaacacatgtgtcgtgaaaactaccccgaaaagcgaaaatgggaaaggagaaagactcatatcaacattgtcgtcattggacacgtagattcgggcaagtccaccactactggccatctgatctacaaatgcggtggcatcgacaaaagaaccattgaaaaatttgagaaggaggctgctgagatgggaaagggctccttcaagtatgcctgggtcttggataaactgaaagctgagcgggaacgtggtatcaccattgatatctccttgtggaaatttgagaccagcaagtattatgtgactatcattgatgccccatgacacagagactttatcaaaaacatgattacaaggaca

SEQ ID NO: 230478 - DNA, 332 bp, Gossypium hirsutum
aacttctttgcttactcttagcggtcggtcgctcgttctgtcccatggctacttcgctcagatagatctcatgactaaccatcaccaggatccacctcgggggcagcctaagcaacctcaaccacgtgaccaatcccaatgccaactccagaacttgaatgctcttcagtctaagcaccaacttacgtcagaggctggtgaaactgagttctgccaccaaaatgaggatcaattccagtgtgctaatggtgatttcctacgtgataagatccagcacaaaggacttccattgtcttcatttaccagtgctgctatgcttttctatgatgaac

SEQ ID NO: 230479 - DNA, 380 bp, Gossypium hirsutum
atcacctccagcaaaaaccttgagcccctctttgagaccgacctcagtgtcctgaggaagcaactagataccttggtcaatgacaaagggcgcctgcagtctgagctgaagaccatgcaggacagcgtggaggacttcaagaccaaatatgaagaggagatcaacaaacgcacagcagctgagaatgactttgtggtcctcaagaaggacgtggatgctgcctatatgaacaaggtggagctggaggccaaggtggacagtcttaatgatgagatcaacttcctgaaggtcctctatgatgcggagctgtcccagatgcagacccacgtcagcgacatgtgcgtggtcctctccatggacaacaaccgcaacctggacct

SEQ ID NO: 230480 - DNA, 359 bp, Gossypium hirsutum
cccacgcgtccgatttgaaactgcctgcttctagctctccttttgaatcaatctccatttttagttttcgtaaagtgaaaggatgttaggcattttcaagaaagaattaatgaatccaccaaaggagctgcatagcccagcttcactcacttcatcaaacaagaccaagcttcccaatcaaatcatcaaccatttcctttcttcaaatcccaacaatgctttctcaatggggttcggatcctcagcttgctttgcttatgctcccacagagaatcgtttccccaatcatcaaaggttgttctgtggagtggatgaaatatactgcatattcttgggggatttgaataatttgagcagcc

SEQ ID NO: 230481 - DNA, 366 bp, Gossypium hirsutum
atataattgaaagaaaagaaaaatggttctgctagagaaactttgggatgatgtagtggccggacctcaaccggaacgtggccttggccggctgaggaagatcacaaccaccccacccttgtccaccaaagatgaggcttcatcaatggcgatgccgacgagtccgacgacacctgggacaccgtcgacgccggtgtcggctcgtagggacaacgtgtggaggagcgtgttcaatccaggtagcaaccttgcaaccaaaggtattggcgctgaagttttcgacaagcctcaacctaactctcctactgtttatgactggctttacagcggggagacccggagcaagcatcaccgctgattgggcga

SEQ ID NO: 230482 - DNA, 367 bp, Gossypium hirsutum
gaagaggaacgcttacgttcttgacacatgaaaacaaagagtcttacaatgtagtaccgggagttgtagtcagagtcccagcaggaagcactgtgtacttggctaaccaagacaacaaggaaaagctaatcatagcagtgcttcaccgccctgttaataaccctggacaattcgaggaattcttcccagctggaagccaacgccctcagtcatatctccgagcctttagtcgtgaaattcttgagcctgccttcaatacacgaagtgagcagctagacgagctgtttggtgggaggcaaagccaccgaaagcagcagggacagggaatgttccgtaaagccagccaagaacaaataatggcattgag

SEQ ID NO: 230483 - DNA, 378 bp, Gossypium hirsutum
atggcgcctgctttggaggtgctggaggcttcggcactggtggctttggcggtggatttgggggctccttcagcggtaagggtggccctggcttccctgtctgccctgctgggggaattcaggaggtcactatcaaccagagcttgctgacccccctccacgtggagattgaccctgagatccaaaaagtccggacagaggagcgagaacagatcaagctcctcaacaacaagtttgcctccttcatcgacaaggtgcggttcttagagcaacagaataaggtcctggagaccaaatggaagctgctccagcagcagacgaccagcacctccagcaaaaaccttgagcccctttttgagacctacctcagtgtcctga

SEQ ID NO: 230484 - DNA, 363 bp, Gossypium hirsutum
cccacgcgtccggaagtggacaatacaagagagtgagagcccagttatcaaccggtgacatatttgtagtcccagcaggccatccagtcacattcgttgcctcccaaaacaagaacctaggattgctcgggttcggactctacaacggccaagacaacaagaggatcttcgtggctgggaaaaccaacaatgtgagacaatgggatcgccaggccaaggagctggcgtttggggtggagtcaaggttggtggatgaggtattcaacaacaacccgcaagaatcttacttcgtgtctggacagaatcggcgtggatttgatgagaggaggggaagtaataaccccttatcgtcgttcctggact

SEQ ID NO: 230485 - DNA, 366 bp, Gossypium hirsutum
atgtcctcgtggaagtgacatcgtctttaaaccctgcgtggcaatggctgacgcaccgccgtgatgcccacggaagacagggcgacctggaagtccaactacttccttaagatcatccaactattggatgattatccgaaatgtttcatcgtgggagcggacaatgtgggctccaagcagatgcagcagatccgcatgtcccttcgagggaaggccgtggtgctgatgggcaagaacaccatgatgcgcaaggccatccgagggcacctggaaaacaacccagctctggagaaactgctgcctcatatccgggggaatgtgggctttgtgttcaccaaggaggatctcactgagatcagggacatg

SEQ ID NO: 230486 - DNA, 354 bp, Gossypium hirsutum
gcttctcatcacattttattgggcttctctctcagatcttgaaaatgtatacatcaatgaagaagatccacaaagataaggatgttgaaccaacagaatttgaggaatcagttgcccaggcattctttgatttggagaataccaaccaggatctgaaaagtgacctcaaggatctctacattaattcagcagtccaaattgatgtgtctgggagccggaaagctgttgttatccatgtcccctaccgattgaggaaagcttttcgcaaggttcatgttaagcttgtgagggagcttgaaaagaagttcagtggaaaggatgtgattcttattgccacccggaggatattgaggc

SEQ ID NO: 230487 - DNA, 357 bp, Gossypium hirsutum
aaaaaagccacggttactttccatccacagtcgacgggctgactttgcggcggcccatggcgatcgtcgaccggcatcagcggagctccgaaagaaagatgtttagtctttgtcccttttggcagacttcgaccacgatgaacaactcttcctcttcttcttccactaaaaatctcaaccacaatggcagtcgacactcggagacggttgccgccaagcgctctaaatccgtctcatccattgctagatcgcttctccctccacggcgccggctgcgcctcgatccttctaataaactctatttcccttatgagcctggaactcaagcgagaagtgcgatcaggttgaagaacacta

SEQ ID NO: 230488 - DNA, 348 bp, Gossypium hirsutum
gcgatatgaatctcatcactgatgatgatttcagagagttggtggataaagtcccaaaaggtagccgcattacaatcgtatcagattcatgccacagtgggggattgattgatgaggccaaagagcaaattggtgatagctctaagccccaaggttcagaaccagaatcagaatcaggttcaagtgggttcaggagcttcttgcaccacactgtactagatgcatttgaatctcgtggaattcatgttccttctagattacgccaccgcgaccaccaccatgataaggaagaggtggatgacaggggagtgattgaagactatgatgacagtggctacgtcaaaagca

SEQ ID NO: 230489 - DNA, 378 bp, Gossypium hirsutum
tcatctcctccttgcgagagcagctgccgcccaccacggtccagaccattgtcaaacgctgtggcctgcccagcagtggcaagcgcagggcccctcgcagagtttatcagatcccccagcgacggaggctgcagggcaaagacccccgctgggccaccatggctgacctgaagatgcaggccgtgaaggagatctgctacgaggtggccctggctgacttccgccacgggcgggctgagattgaggccctggccgccctcaagatgcgggagctgtgtcgcacctatggcaagccggatggccccggagatgcctggagggccgtggcccgggatgtctgggacactgtgggcgaggaggaatgaggtggagctggca

SEQ ID NO: 230490 - DNA, 333 bp, Gossypium hirsutum
gcaactcgtacgctctcatgatctttctccgggaccgtcagccttaccaaacaccttctttacgagaaaatataagctcaagagagaagaccatggccgatcaacttaccgacgatcagatctacgagctcatggaggctttcaacgtgtctgacaaggattgcgacaggtgcattactaccaaggagactaccactgtgatgcggtctcttgttcagaaccctactgaggacgatactcaagatatgatcaatgaaattgatgctgatggaaatggtaccattgattgtaccgaatttcttaacctaatggctaggcaaatggaaggtactg

SEQ ID NO: 230491 - DNA, 378 bp, Gossypium hirsutum
atctgagatcaaccgcatgatccagaggctgagatctgagatcgaccacgtcaagaagcagtgtgccagcctgcaggccgccattgctgatgctgagcagcgtggggaaatggcactcaaggatgccaagaacaagctggaagggctggaggatgccctgcagaaggccaagcaggacctggcccggctgctgaaggagtaccaggagttgatgaacgtgaagctggccctggacgtggagattgccacctaccgcaagctgctggagggcgaggagtgcacgctgaatggcgaaagcgttggacaagtcaacatctctgtggtacaatccaccgtctccagtggctatggcggtgccagtggtgtcggcagtggctt

SEQ ID NO: 230492 - DNA, 384 bp, Gossypium hirsutum
atgccctgccgcaccctggtgcttctgagctgttctgacgggggtctctgtggggaagggtgaggccagggctgtctcaaccccacttcccagccatgttgactttgcctctttcccctcccagcagaaaaatggctacaaacttcctagtacatgagaagatctggtttgacaagttcaaatatgacgatgcacaaaggagattctacgagcagatgaacgggcctgtggccggtgcctcccgccatgagaatggcgccagcgtgatccttcgtgacattgcgagagccagagagaacatccagaaatccctggccggaacctcatgccccggggcctccatcggccccagcggagaccacagagagcttgtcgtccggatcg

SEQ ID NO: 230493 - DNA, 366 bp, Gossypium hirsutum
gatcagacgcccacattcacattcagcggcactcatgggttccaacaccaaactcattctagcgctgctaggcctcctcatcaccaccgctaccgtcgcaaccggttacaccaaccacaccgttggcggtgatgctggctggttctttcattctaaaactaacacatccgccaccaattacacgttctgggctgctaatcagactttcagtctcggcgactatctcatatttaggaccaccacatatcagacggtgatccagacgtacaatgaaacgacttatcgtaattgtactacggacgatgcttcagacaccgataccttccaatacaacggcgggaacacagactttgatcaatccttgac

SEQ ID NO: 230494 - DNA, 262 bp, Gossypium hirsutum
caagctcgcaaaacaatgtgatagcaatgaagttatcaaagctctttgtgatgaagctggtcggactgttgaacccgatggcactacttataggaagggttgcaagccttcggagcgcatggatgtacgtaagtggataacaaaacagagagcctcattttatattaccacccaatgaatgatgtaatctcgcttgatcaaggttaccgtcctcttcggatgtgggacatctcaaacaaaaagggagtattaccatcccata

SEQ ID NO: 230495 - DNA, 392 bp, Gossypium hirsutum
atgctgaacaactcaaccttctctgcacagtgggtgcagcatcctttgaagcatgagttcttaccaggagaagcagacctttaccccaccacctcagcttcaacagcagcaggtgaaacaacccagccagcctccacctcaggaaccatttgttcccataaccaaggagccatgccacccaaaggttccacaacctggaaacacaaagattccagagccagattgcaccaaggtccctaagccaggctacaccaaggaccctgagccaggcagcaccaaggtccctgacaaaggctgcaccaaggtccctgagccaggcagcaccaaggtccctgacaaaggctgcaccaaggtccctgagccaggcagcaccaaggtccctgagccaggca

SEQ ID NO: 230496 - DNA, 352 bp, Gossypium hirsutum
atcgagaaagtcgagtggccaacgagccggcagagacccaccgagcgtcggcggagggagcagcaccggggcgcacgcggccaccatgacccagacgcccgccttcgacaagcccaaagtggaactgcacgtccacctagacggagccatcaagcctgaaaccatcttatactatggcaggaggagagggatcgccctcccagctaacacagcagaggggctgctgaacgtcattggcatggacaagccgctcaccctgccggaattcctggccaagtttgactactacatgcctgctattgcgggctgccgggaggctatcaaaaggatcgcctacgagtttatagagatg

SEQ ID NO: 230497 - DNA, 387 bp, Gossypium hirsutum
atctcctacctgtcttctgggtgccactcctctggctttgtggggagcgggggctggttctgcgagggctccttcaatggcagcgagaaggagaccatgcagttcctgaatgaccgcctggccaactacctggagaaggtgcgtcagctggagcgggagaacgcggagctggagagccgcatccgggagtggtacgagtctcagatcccatacatctgcccagactaccagtcctacttcaagaccatcgaagatttccagcagaagatcctgctgactaagtctgagaatgccaggctggtcctgcagattgataatgccaagctggccgctgacgacttccggaccaagtacgagacagagctgtccctgcggcagctggtggag

SEQ ID NO: 230498 - DNA, 302 bp, Gossypium hirsutum
attgggccgacccgagagcatgctcttttgggttacacactgtgtgtgaaacaactaattgttggtgttaacaaaatggattccactgagccaccctacagccagaagagatacgaggaaattgttaaggaagtcagcacttacattaagaaaattggctacaacccggacacagtagcatttgtgccaatttctggttggaatggtgacaacatgctggagccaagtgctaacatgccttggttcaagggatggaaagtcacccgtaaggatggcaatgccagtggaaccacgctgcttga

SEQ ID NO: 230499 - DNA, 311 bp, Gossypium hirsutum
aatttcgaagcaactgctgaggcaatgaacgaggcaatctcgatggctgatgctgagaagcagttacgacacgagaagcattataggtacattagttcacatgatgtagcgttttggtctcgtagtttctttcaagatatggaaaggacgtgtaaagatcattttagaagacgatgctggggaattggtttgagcttcgggtttagagttgtagcactggaccctaacttcagaaagttgtctatcgatcacatagaatccgtgtatgtaaggtccaaaaatcgggctatattattagactatgatggaac

SEQ ID NO: 230500 - DNA, 374 bp, Gossypium hirsutum
atccgagacgggctgaagctcatgttgctcctggaggtcatatcaggggagcggttacctaagccggagcgggggaaaatgagagtgcacaaaatcaacaacgtgaacaaagcactggactttattgccagcaaaggtgtcaagctggtctccatcggggcagaagagattgtggacggcaacgcaaagatgaccctgggaatgatctggaccatcatccttaggttcgccatccaggacatctccgtggaagagacctcggccaaggaagggcttcttctctggtgccagagaaagacagccccgtataagaacgtcaacgtgcagaacttccacattagctggaaagacggtctttgcctcaatgccctgat

SEQ ID NO: 230501 - DNA, 374 bp, Gossypium hirsutum
tcgcccacgcgttcgcccacgcgtccgcggacgcgtgggcttgccagaaggattgtggagactgaaatgccaatcatggttcagatacagcaattgatccgaggagcgaaaaatgctgtgtcactcgctcagggagtggtttactggaaaccacccaaacaggcattggataaggttaaagcacttgtagaggagtcttcagttagttgttatggtgctgatgaaggtcttcctgaacttagagaagcattgataagaaagttacgtcaggagaacaatttgcagaggtcttcggtgatggtcactgcaggagcaaatcaggcatttgtgaatcttgttctaacactgtgtgatgcgggggactcggttgtcat

SEQ ID NO: 230502 - DNA, 353 bp, Gossypium hirsutum
agaaaatttacgttgtcactaacggaagaggaacagttacgttcgtgacacatgaaaacaaagagtcatacaatgtagttcctggagttgtagtaagaattccagcaggaagcactgtgtacttggccaaccaagacaacagggaaaagctaaccatagcagtgctccaccgacctgtcaataaccctggacaattccagaaattcttccctgctggacaggaaaatcctcagtcatacttacgaatcttcagccgtgaaattcttgaggctgtcttcaatacacgaagtgagcagctagacgagctgtttggtgggaggcaaagccatcgaaggcagcagggacagggaatg

SEQ ID NO: 230503 - DNA, 349 bp, Gossypium hirsutum
atggtgcggtggtcggcggggaggcccccgcgctggaaaatgatgcccgtcgcgcccgcgcgaccatgcaatggcgagcgcttgtcctggggctggtgctcctccggcttggcctccatggagtattgtggctcgtcttcgggctggggcccagcatgggcttctaccagcgctttccgctcagcttcggcttccagcgtctgaggagccccgacggccccgcgttgcccgcctcggggcccgtgggccggcctggggggctattcggtccgtagtggctggagacgccggggaccgcggcgtcgcatagcccgcgcatggttccgcggcgtgctgagccgggggtgtg

SEQ ID NO: 230504 - DNA, 368 bp, Gossypium hirsutum
cccacgcgtccggtcaactgtcaaagtttctctctctctctctctctctctattgttgaagttcataagcttttgtatcaatggctgaagtccgtgaccgcaacctgcctcaccaagttcaagttcacccacagtaccgtttcgacaatacaaccggaggcggttacggtgcaaagaactatcacagtggaccatcaacaagccaagttctagccgtccttacacttctccccattggtggtacactgcttgcattagccgggttaacactggccggcaccgtcattgggctgatgctagccacaccgctgttcatcatcttcagcccagttcttgtcccagctgccattgccattgccatggcagtg

SEQ ID NO: 230505 - DNA, 343 bp, Gossypium hirsutum
gagctgtttggtgggaggcaaagccatcttaggcagcagggacagggaatgttccgtaaagccagccaggaacaaataagggcattgagccaagaagctacttcaccaagggagaaaagtggcgagagattcgccttcaacttattgagccaaacccctcgctactacaaccaaaacggccgcttctttgaggcttgcccacgtgaattccggcaactcatggacatcaatgtcaccgttttagccttgcaattaaaccaaggatcaatctttgtgccgcactacaattcaaaggctacattcgtgatccttgtttccgaaggaaatggatacgctgaaatgg

SEQ ID NO: 230506 - DNA, 354 bp, Gossypium hirsutum
atcacatcaacaaaatcatgaggagcatttgtgttgtgcttgttatctctttgcctttccttctcggcattgcccagggtttcgatttccacgacaatgatttagcgtcggaggatagtttgtgggatctatacgagcgctggcggagccaccacacggtttccaggagtctcgacgagaaacatcggaggttcaatgtgttcaagcagaatgttttgcatgttcacaacaccaacaacaaggacaaaccttacaagttgaagatcaacaagtttgctgatatgaccaaccacgaatttaggaatgcttacgctagttccaagattaaacatcataagatgttccaaggacagt

SEQ ID NO: 230507 - DNA, 358 bp, Gossypium hirsutum
cccacgcgtccgcattgagagaataaattaccgtaaatagtaaaatcatccataaatacctctattcctcgctcgatgtgatcagagaaaatgcttaacatgcatcgttggaatgtgaccggagcgttgcaaagaccgaaaggcattcttctataggcgaaagttccgaaagggcaagtgaatgttgttttttcttggtcttcaggcgccaccggaacctgaaaaaatccaaaaaatccatcaagacaacagtaatgtgtttttccagcaagtctttcgatcatttgatcgataaatggtatagaaaaatggtcctttcgggtttgcgagttgagtttcctataatcgatacacattc

SEQ ID NO: 230508 - DNA, 386 bp, Gossypium hirsutum
atgcgagctgactggttgtgtggtcgcgtctcggaaaccggtagcgcttgcagcatggctgaccaactgaccgaagagcagattgcagaattcaaagaagctttttcactatttgacaaagatggtgatggaactataacaacaaaggaattgggaactgtaatgaggtctcttgggcagaatcccacagaagcagagttacaggacatgattaatgaagtagatgctgatggtaatggcacaattgacttccctgaatttctgacaatgatggcaagaaaaatgaaagacacagacagtgaagaagaaattagagaagcattccgtgtgtttgataaggatggcaatggctatattagtgctgcagaacttcgccatgtgatgac

SEQ ID NO: 230509 - DNA, 357 bp, Gossypium hirsutum
aacaaacagaagcccatctggatgaggaagcctgaggagattaccaaggaagaatatgctgctttctacaagagccttacaaatgactgggaagagcatttggccgtcaagcacttctcagttgaggggcaacttgagttcaaggctgtcctctttgtccccaagagggctccttttgatctctttgatacaaggaagaagcccaacaacattaagctctatgtgagacgtgtctttatcatggacaactgcgaggagttgattcctgaattcctcagctttgttaagggtattgtcgactcagaggaccttcctttgaacatctcaagagaaatgttgcagcaaaacaagatcttg

SEQ ID NO: 230510 - DNA, 218 bp, Gossypium hirsutum
tcgcggacgcgtgggtccgagccttctttgacaagaggatctcccaagaagtcagtggtgatgcccttggcgaggagtttaagggctatgtgttcaagataatgggaggctgtgacaagcaaggttttccaatgaagcaaggagttctgactccaagccgtgttcgtcttttgcttcacagaagtactccctgcttccgtgggtatggtaggagaaat

SEQ ID NO: 230511 - DNA, 352 bp, Gossypium hirsutum
cacacccgaaagcgcaaaaaaaaaaaaaaaaaagaaaagaggaaaaacgttctctcccacgaaacccaccattactgcaaatggcgacgacggcccccgacaacctgagccgcgatcagtacgtttacttagcgaagctatccgagcaagctgagcgctatgaggagatggttcagttcatgcaaaaactggtcctcggctcaaccccagccgctgaattaactgtcgaggaaaggaaccttctctccgtcgcctacaaaaacgtcatcggatctctacgtgccgcgtggagaatcgtttcttccatcgagcagaaagaagaaggtcgaaagaacgaggaacatgttgtgct

SEQ ID NO: 230512 - DNA, 385 bp, Gossypium hirsutum
atccgggagtgggatcgcagttcttgtttgtgtgtcggtgtcatcgccacttgacaatgcagatcttcgtgaagaccctgactggcaagaccatcacccttgaggttgagcccagtgacaccattgagaatgtcaaggcaaagatccaagataaggaaggcattcctcccgaccagcagaggctgatctttgccggaaagcagctggaagatgggcgcaccctgtctgactacaacatccagaaagagtccaccctgcacctggtgctccgcctcaaaggtgggatgcagatcttcgtgaagaccctgactggcaagaccatcaccctcgaggtggagcccagtgacaccatcgagaacgtcaaagcgaagatccaagacaagga

SEQ ID NO: 230513 - DNA, 338 bp, Gossypium hirsutum
gtttgccgccatgggtattgacacccctggagtcgttgccctcctaggagctcacagtgtcggcagaactcactgtgtgaagctggtgcatcgtttgtacccagaggttgaccctgccctcaaccccgaccatgttccacacatactccataaatgccctgatcagatcccagaccccaaggccgtccagtatgtgagaaacgaccgtgggacacccatggttttggataacaactactacaggaacatactggacaacaagggtttgttgattgtggatcaccaactggcgtacgacaaaaggaccagaccttatgtgaagaaaatggccaagagcc

SEQ ID NO: 230514 - DNA, 392 bp, Gossypium hirsutum
atgtcgacacatcctgttgcagtatctcattttattccaatatctcaaggggcaggtcaaattcaaaagttcaaactatgttttaactgatgaacaatcactttggattgaagatactacaaaatcagtttatcaactactatctgaaaacccccccgatggagaaagattttcaaagatggtagagcatatattaaacactgaagaaaactggaactcatggaaaaatgaaggttgcccaagttttgtgaaagaaagaacatcagataccaaacctacgagaataattcggaagagaacagcacccgaggacttcctagggaaaggacccagcaaaaaaattctgatgggaaatgaggagttaacaaggctttggaatctttgtcctgata

SEQ ID NO: 230515 - DNA, 368 bp, Gossypium hirsutum
gtgtttttgcggcaagcattggccttgggaatcttgggtttttctgcaaaaatgttggcggtttttgagaaagcaacaggaaatccaccggaggagctcaggcttccttcagttggattggattctgacggtaagggaactcgagaagaaatcttgcagactttcaggttgctgtggccagagtcgaccttttaccacctttcaaatggaaatttcatgacactgtcacatggagctcagagtcctttgcatccaaggtccatggttgtcatggatgacatcttctgcatctttattgggactcttgtgaacatttgcgaactcaggcgacattacggcttgtccagacaagcaacagaagccatgct

SEQ ID NO: 230516 - DNA, 353 bp, Gossypium hirsutum
  unsure (1)..(353): unsure at all n locations
agaagcctcaccgtttcaggccaggaactgttgctttgagagagatccgtaagtatcagaagagcactgaactgttgatcaggaagcttcctttccagaggttggtgagggaaatcgcgcaagatttcaagaccgatctgaggttccaaagcagcgccgtcgctgctcttcaagaagcggcggaggcttatcttgtcggactgtttgaagacactaatttgtgtgcaattcatgctaagagagttacaatcatgcctaaggatatccagcttgctaggaggattagaggtgagagagcttangttgcctgtatttacttgattgattataaaatttagaaagatctaaatctt

SEQ ID NO: 230517 - DNA, 364 bp, Gossypium hirsutum
cggacgcgtgggctggaattacaaggtttattatgtatatggctttatgctgctggtcttcctgattctcatcattgtaactgtttgtgtgacaattgtggggacatatttcttgctaaatgctgagaattatcactggcagtggacatcgttcttctctgctgcctccacagctgtctatgtgtatttgtactccgtatactattaccacgttaaaaccaagatgtcaggcttctttcaaaccagcttctacttcggatacactttgatgttttgtcttggcttgggaattctctgcggagctgtaagttatcttggttccaatttattcgtacggaggatctatagaaacattaagtgtgac

SEQ ID NO: 230518 - DNA, 368 bp, Gossypium hirsutum
ctccatttgatctcgctaattatgatacaattcaaacaccgtcttcccatcctcttctcttctctgtcaccgcttctctcacggcgccgcgcacgttaggcaatggacctaatgcatcattcttctacttttctgctccctacgattcccctacaccaccgcccttctctaacgtacgcccttgttgttcttaaccaaaccctccccagattcgcccctttgctttggaaacacgctcagcttcgtctctgtgctgatggtggcgccaaccgtgtgttcgatgaaatgcctctgttgttccctgaggaagatgcttccgatgttcgacgcagatacaaaccggatgtaattaacggtgatatggattc

SEQ ID NO: 230519 - DNA, 375 bp, Gossypium hirsutum
atagaaagtcgagtggccaacgagccggcagagacccaccgagcgtcggcggagggagcagcgccggggcgcacgcggccaccatgacccagacgcccgccttcgacaagcccaaagtagaactgcacgtccacctagacggagccatcaagcctgaaaccatcttatactatggcaggaggagagggatcgccctcccagctaacacagcagaggggctgctgaacgtcattggcatggacaagccgctcaccctgccggaattcctggccaagtttgactactacatgcctgctattgcgggctgccgggaggctatcaaaaggatcgcctacgagtttatagagatgaaggccaaagagggcgtggtgtatg

SEQ ID NO: 230520 - DNA, 388 bp, Gossypium hirsutum
atggaatcctggccctatcccacaccatcagccccttcatgaataagttttttccggccacctttccaaatcgacagtaccagctgctcttcacacagggttctggggaaaacaaggaagagatcatcaattatgaatttgacaccaaggacctggtatgcctaggcctgagcagcatcgttggcgtctggtacctgctgaggaagcactggattgccaacaacctttttggcctggccttctcccttaatggagtagagctcctgcacctcaacaatgtcagcactggctgcatcctgctgggcggactcttcatctacgatgtcttctgggtatttggcaccaatgtgatggtgacagtggccaagtcctttgaggcaccaataaa

SEQ ID NO: 230521 - DNA, 382 bp, Gossypium hirsutum
atgtctttggcaagatatggcaaaagcccatacctttatccactctatggccttggagaactgccccaaggatttgcaaggctaagtgctatttatggaggtacctatatgctgaataaacccattgaagaaatcattgtgcagaatggaaaagtaattggtgtaaaatctgaaggagaaattgctcgttgtaagcagctcatctgtgaccccagctatgtaaaagatcgggtagaaaaagtgggccaggtgatcagagttatttgcatcctcagccaccccatcaagaacaccaatgatgccaactcctgccagatcattattccacagaaccaagtcaatcgaaagtcagatatctatgtctgcatgatctcctttgcgc

SEQ ID NO: 230522 - DNA, 378 bp, Gossypium hirsutum
atctgtgtgcccccctggaggcatccaagaggtcaccgtcaaccagagtctcctgactcccctcaacctgcaaatcgaccccgccatccagcgggtgcgggccgaggagcgcgagcagatcaagaccctcaacaacaagttcgcctccttcatcgacaaggtgcggttcctggagcagcagaacaaggttctggacaccaagtggaccctgctgcaggagcagggcaccaagaccgtgaggcagaacctggagccgttgttcgagcagtacatcaacaacctcatgaggcagctggacagtatcgtcggggaacggggccgcctggactcagagcttgaaaacatgcaggacctagtggaggacctcaagaacaaata

SEQ ID NO: 230523 - DNA, 366 bp, Gossypium hirsutum
cggacgcgtgggaaccaacaaaaagcattagaaagaaaactgcctttaaaaattaaaattctattcaacttctttgtttatctctctctggtatatttttcctctctattgtctctctttagaacaatcctttcatccaaaaacccaatacaactgtttacaaaccctagaaagaggaattgaaagagaaaacggacaattttggatcaaaggctttgatcggtgagggttcttacggaagagtttattatgctagcttgaacaatggaaaagctgtggctgtgaaaaagcttgatgtttccactgagtccgagtcgaatgtggagtttttgacccaggtttccatggtttcaagactgaagcatg

SEQ ID NO: 230524 - DNA, 356 bp, Gossypium hirsutum
cgggctttctgttcaggcgtggatttgacggctgcacaagatgttttcaagggtgacgttaaggacccggagacggatccggttgttcagatggagcaatgccccaaaccaatcatcggagctatcaacggccttgctattactgccggcttcgagatcgccctcgcttgtgatatgctggtcgctgctaagggagccgctttcgttgatactcacgccagatttggtatatttccttcatggggtttatcccagaagcttgcacgctttataggaccaaacaaggctcgcgaagtgtcgttggcagccatgcctttgtcagcagaggaagctgagaaattggggtttgtcaatta

SEQ ID NO: 230525 - DNA, 368 bp, Gossypium hirsutum
atctcctgcactacttgcaaagtaacgagctgaagccgtgctacaataacactagtgttttcaacaataaattaatcatagctgcagcttgtttcttttaaactctaaatataaaggaggccaaacatgccgcctcgtagataccaatttgggagggctgatgaggccactcatcccgactccatgagagccaccttggctgaattcctctccactatcattttcgtctttgccggcgaaggctcaattcttgctcttgacaagatgtacaaggatacgagtgcgacgcctgcaagactggtgatgatagcacttgcgcatgggttgtctctgtttgcagctgtggcatctagtgtaaacgtatctgg

SEQ ID NO: 230526 - DNA, 187 bp, Gossypium hirsutum
atcctgtgcatggcatcctgttggattcacgaaaccaccttgggctgtattctgaattgtgaccatcacatccacaaagacctgtacgccaacacagtgctgtctggtggcaccaccatgtaccctggcattgcttacaggatgcagaatgagattcatgtccttgctcccagcacgaagaatatta

SEQ ID NO: 230527 - DNA, 389 bp, Gossypium hirsutum
atccgctgcggggagatgctccacatccgccaccggctgctccgccaggcgctggccgaatgcctggggaccctcatcctcgtgatgtttggctgtggctccgtggcccaggttgtgctcagccggggcacccatggtggtttcctcaccatcaacctggcctttggctttgctgtcactctgggcatcctcattgctggccaggtctctggggcccacctgaaccctgccgtgacctttgccatgtgcttcctggctcgtgagccctggatcaagctgcccgtctataccctggcacagacgctgggagccttcttgggtgctggaatcgtttttgggttgtattatgatgcaatctggggctttgccgacaaccagctttttgtttc

SEQ ID NO: 230528 - DNA, 400 bp, Gossypium hirsutum
atcgcgcagttcgcagcagcagccgtgagcttaaccgccggggaggtagccatgaagcactaccaggtggagattctggatgcaaagacaagggagaagctgtgtttcctggacaaggtggagccccacgccaccattgcggagatcaagaacctcttaccaagacccatccgcaatggtaccccgtccgccagtccctccgtctggaccccaagggcaagttccttaaggatgaggatattctacagaagctgcccgagggcaccacggccacgctctactttcgggacctgggggcccagatcaactgggtgactgtcttcctaacagagtacgcagggccccttttcatctaccttcttttctacttccgagtgcccttcatctatggccacaaatt

SEQ ID NO: 230529 - DNA, 384 bp, Gossypium hirsutum
atgccggccttgctggtggctttgggggccctggcttccctgtgtgcccccctggaggcatccaagaggtcaccgtcaaccagagtctcctgactcccctcaacctgcaaatcgaccccaccatccagcgagtgcgggccgaggaacgtgaacagatcaagaccctcaacaacaagttcgcctccttcatcgacaaggtgcggttcctggagcagcagaacaaggttctggaaaccaagtggaccctgctgcaggagcagggcaccaagaccgtgaggcagaacctggagccattgttcgagcagtacatcaacaacctcaggaggcagctggacagcatcgttggggaacggggccgcctggactcggagctcagaggcatgc

SEQ ID NO: 230530 - DNA, 382 bp, Gossypium hirsutum
gcgcccacgcgtccgaccacgcgtccggaaacacaggacccctgcttcctatgctgatgttttcaacccacgaggtggtgcgcatcaccacagctcacagcttcaatctttctattcttcaataccttcaacttagcgcctggaggggagatctttacaataatgctctgtacgctcatcactggaacatgaatgcccacagcattgtttacatcacatggggagatggatggattcaaattgagtctgaacacggagaggcgctattctatgagcaggtagagaggggtccgggcatatccgtactctagaatgatgcagtgctgaaaaaagcatgaaggcgagggtttgaatggatagcattcaagacatatgccaatgc

SEQ ID NO: 230531 - DNA, 378 bp, Gossypium hirsutum
gttgaaattgtctacacaaagagggtgatttagaaatggatgctgatccatggactctttgtctttcttcaactgctaggagatatcaatcagctcttcagtcacgatctgatatgtttatggggtttgaagaaatggatggagaagacgatgtaagagaggagtttccatgccctttttgttcagagtatttcgatatcgtgggcttgtgctgtcacattgatgatgaacatcctgtggaggctaacaatggggtatgtcctgtctgtgcaatgagggtgggagtagatatggttgcgcatataacgcaacaacatggacatatattcaagcgtaagcggagatcacgtagaagtggatctcattcaacgctctctc

SEQ ID NO: 230532 - DNA, 378 bp, Gossypium hirsutum
tcgttcatactcatttatcccctgtgggggcattgaaatcactccagttttctttatcactgaaaaatgtcttgctgtggtggaaactgtggctgcggttctggctgcaagagtggcagtggctgtggaggatgcaagatgtacccagacctgaacgttgcctagatgaccacaactgagactctggttcttggtgtagcaccccagaaagcacactttgagggagctgatatggaattcggggcttagaacggctgcaagtgtggagacaactgcacctgcaacccttgcaattgtaaatgatttgagaccaaagcctaagctccctggaagcagagacgccttttgcatttaagaaataatatattttgctgttta

SEQ ID NO: 230533 - DNA, 386 bp, Gossypium hirsutum
cttgggttgagtgtagagatgaggaaaatcatgggtgccaaagttctcttcttctttgctttgctttccttttcagctgtgtcggcatttgcacaggatgaggaagaccaaggtcttgttatgaacttctacaaggattcttgtcctcaggctgaagacattatcaaggagcaagttaagctactgtacaagcgacacaaaaacactgctttttcttggctgagaaacattttccatgactgtgctgtccagtcatgtgatgcttcactgctgctggactccacaagaaggagcttgtctgagaaggagacagacaggagctttggcctaaggaatttcaggtacattgagaccatcaaagaagctgtagaaagggaatgtcctgg

SEQ ID NO: 230534 - DNA, 397 bp, Gossypium hirsutum
atagatgataatcgtggccttgagcaaggtgtccaggataataagattacagctaatctatttcgaatactactagaaaaaagaagtgcagttaatacggaagaagaaaagaattcggtcagttatccttctctccttagccacataacttcttctttcatgaatcatccagtctttccaatgacaaataagttctcctcacctacccttgatctgcaaggtgaattctctccattacagtcatctttgccttgtgacattcatctggttaatctgagaacaatacagtcaaaggtgggcagtgggcattccaatgaggcagctttaatcctccacagaaaagggtttgattgtcggttctctagcaaaggcacagggctgttttgttctactactc

SEQ ID NO: 230535 - DNA, 384 bp, Gossypium hirsutum
  unsure (1)..(384): unsure at all n locations
gtcaactgtcaaagtttctctctctctctctctctctctattgttgaagttcataagcttttgtatcaatggctgaagtccgtgaccgcaacctgcctcaccaagttcaagttcacccacagtaccgtttcgacaatacaaccggaggcggttacggtgcaaagaactatcacagtggaccatcaacaagccaagttctagccgtccttacacttctccccattggtggtacactgcttgcattagccgggttaacactggccggcaccgtcattgggctgatgctagccacaccgctgttcatcatcttcagcccagttcttgtcccagctgccattgccattgccatggcagtgacggngttcttgtcgtcggtggcgtttg

SEQ ID NO: 230536 - DNA, 370 bp, Gossypium hirsutum
gttctagtgaaaaagatagaatgggagccaaaaagaatgaaggttgccatagaattcataacacaaatgggaaatgcaaggcataggaatttgatcagattacttggtttctgctacaacaaccatatggcttatatgttgtacgattacttgcctaatggaaatttggctgagaaggtaacaatgcctagagattggtcaaccaagtgcagaattataactgggattgcaagaggactttgcttccttcaccatgactggaatcctgcaatttctcatggagatttgaactcaagtaccatagtctttgacgataatttcgaaccccgtttagctgatttcgggttcaagtatctgatagagttgatca

SEQ ID NO: 230537 - DNA, 378 bp, Gossypium hirsutum
cgagtcatgaccgccggttgcacctatatccgactcattgagtcggtcactcggttcgtcttccattaacgacatgttaaggaatttacagcttgggaaagttaagttcatgcctattggtctttgatcatcaccttctccttccatgttcgggtcacccagagattcaatgatcctacacggattttgtagccttctcaacactccgacccagaacttgacccgtcatgggatcggcggatacttggatttatttgaaaaacggtgtgaagaagatgaaccagccatggaaagagctgaatgcggaagggatttacgtgcacaattatttgagaaattgagtaaagagaattgttcgggaaggggtaatccgggtca

SEQ ID NO: 230538 - DNA, 383 bp, Gossypium hirsutum
gtctttccaccccccaaagacctgcacaactgtctcttggacattccgcatattttacgagaaggcactgttagaatatgaaaagtataagagagagaatggtgagattcaacttcctgcttcttcactccctcatgcaagtggtgaaaaggagtcaagtggtttcctagccttggggtcaggtagggcacgcagggatgctgcagctcgtgcaatgcagggttggcatgctcaacgttctgttggatatggtgagattaccgagcccattgtgaaggagaaaatcatgggttctgctccgaaacgtgaaagacatctcaaaagtattggtttgcagaagcagaagatgccaataagcgcagagcttgataaatctgcacatg

SEQ ID NO: 230539 - DNA, 398 bp, Gossypium hirsutum
atcgcgggctggagaagcgggtcctacgcacgctttgttgcccgcgctttccctcggtccttccccctactcccgccttacctgacttacttttgggaggaagatccttgagcaaccaacggtgggacaaaggatttggcgaaacccagggctaaagtcacgtttttcctcctttaagccttacctcaacacttcactccatggcagttcccgagacccgccctaaccacactatttatatcaacaacctcaatgagaagatcaagaaggatgagctaaaaaagtccctgtacgccatcttctcccagtttggccagatcctggatatcctggtatcacggagcctaaagatgaggggccaggcctttgtcatcttcaaggaggtcagcagcgccacc

SEQ ID NO: 230540 - DNA, 380 bp, Gossypium hirsutum
gcgcatttcatttctacggctacgggatgacccgtcaagtcgaagcgcaccatttctgcgcacatcaaaacgaagaaatgcgacaatgtctcatatatgacacccccgaagccgatgcaaagctcatcgggttggagtacatgatatcggagaatttgtttttgacgttgccggacgaagagaagccgctttggcattcgcatttgtacgaagtgaagagcggggtgttgtttatgccgcgagttccggggccgatcgagaggcatggtctggacaaagtttgcaagacttatgggaagaccatccatttttggcaagtcgataaaggtgataatctccctcttgggttacctcaattgatgatggctctcactagagat

SEQ ID NO: 230541 - DNA, 397 bp, Gossypium hirsutum
atagcaaagagcaggtggccaactcagcttttgtggagcgagtgcggaaacggggcttcgaggtggtatatatgaccgagcccattgacgagtactgtgtgcagcagctcaaggagtttgatgggaagagcctggtctcagttaccaaggagggtctggagctgcctgaggatgaggaggagaagaagaagatggaagagagcaaggcaaagtttgagaacctttgcaagctcatgaaagaaatcttagataagaaggttgagaaggtgacaatttccaataggcttgtgtcttcaccctgctgcattgtgaccagcacctatggctggacagccaatatggagcggatcatgaaagcccaggcacttcgggacaactccaccatgggctatatgat

SEQ ID NO: 230542 - DNA, 402 bp, Gossypium hirsutum
atcggagatcggcatagtaccccctccctcctggaggcagccttgacccaggaggcctcgactcctgacagtcaggtttggcccacagcacctgacattactcgtgagacctgcagcaccctggcagaaagccccaggaatggccttcaggaaaagcacaagagcctggccttccaccgaccaccatatcacctgctgcagcaacgtgacagtcaggatgccagtgctgagcaaagtgaccatgatgatgaggtggccagtcttgcctctgcttcaggaggctttggcaccaaagttcctgctccacggctgcctgccaaggactggaagaccaagggatcccctcgaacctcacccaagctcaaaaggaaaagcaagaaggatgatggggatgcagccatg

SEQ ID NO: 230543 - DNA, 383 bp, Gossypium hirsutum
gcgaggaattcaagggctatgttttcaagatcatgggaggttgcgacaagcaaggattcccgatgaagcagggtgttctgactcctggtcgtgttcggctcttgcttcatagaggtaccccatgcttccgtggatatggaagacgtaatggtgagcgtagaaggaagtctgttcgtggatgcattgttagccaagacctttctgttttgaacttggttattgtgaagaagggtgagaatgatttgcctgggctaacggacactgaaaaacctaggatgagaggtccaaagagggcctccaagattagaaagctctttaacctttcaaaggaagatgatgtccggaagtatgtcaacacttacaggaggactttcaccacaaaa

SEQ ID NO: 230544 - DNA, 386 bp, Gossypium hirsutum
atatgattcatcaaaaacttgttctcaaaatgttgagttgacagatcccattatttctcgatttgacatcttatgtgttgtcaaggatgttgttgaccctgtgacagatgagatgcttgcaaagtttgtagttgacagccacttcaggtctcaacctaagggtgctaatttagatgacaaagccttcagtgagtcccaagaagaagctcaagcctctgctaggccagatgattcaaagatactttctcaagaattgctaaggaaatatttaacatatgccaagttaaatgttttcccaaggttccatgaaaaagatatggctaagcttaccaaagtttatgctgatttgcgaaaagaatcttcccgtggacaaggtgtccctatag

SEQ ID NO: 230545 - DNA, 442 bp, Gossypium hirsutum
cgccactaaagaacaagagggaacgcaaaagcacgctggtgccccgccgcaatatccgggatggcggcgcaggcggccattctgatgggggacaagagcgagaacgtgcaagacctgttgatgctacacgaggcttctttgtcactgaagctggagacggtcggaggcgaaatgactgtcctgatcaagctcaacttcaccatccgcaccaagcaggcacaaagatgtaccacctactgaaacaaccaaccatgagcgctgatccaagtgtacgagggcgagagggacatgacaaaggacaacaatctggagctgcgcttgaagctgagcgtgataactgctgcccgcaggggcacgcccgagatcgaggagaccttcgacatcaatgccaacagactactgaacgagacggccacagacaagaacacctgcgaggtcaaca

SEQ ID NO: 230546 - DNA, 399 bp, Gossypium hirsutum
atgggcgcctgcagtctgagctgaagaccatgcaggacagcgtggaggacttcaagaccaaatatgaagaggagatcaacaaacgcacagcagctgagaatgactttgtggtcctcaagaaggacgtggatgctgcctatatgaacaaggtggagctggaggccaaggtggacagtcttaatgatgagatcaacttcctgaaggtcctctatgatgcggagctgtcccagatgcagacccacgtcagcgacatgtccgtggtcctctccatggacaacaaccgcaacctggacctggacagcattattgctgaggtccgtgcccagtacgaggagattgcccagaggagcaaggctgaggccgaagccctgtaccagaccaaggtccagcagctccaga

SEQ ID NO: 230547 - DNA, 374 bp, Gossypium hirsutum
tcggcaaaccccaacactttcgttctcccacaccattgtgacgcggagaaaatttacgttgtcactaacggacgaggaacaattacgttcgtgacacatgaaaacaaagagtcatacaatgtagctcctggagttgtagtaagaatttcagcaggaagcactgtgtacttggccaaccaagacaacagggaaaagctaaccatagcagtgctccaccgccctgtcaataaccctggacaattccagaaattcttcccttctggacaggaaaatccttagtcatatttacgaatcttcagccgtgaaattcttgaggctgtcttcaatacacgaagtgagcagctagacgagctgattggtgggaggcaaagcca

SEQ ID NO: 230548 - DNA, 396 bp, Gossypium hirsutum
atggatggaaggtcacccgtaaggatggcaatgccagtggaaccacgctgcttgaggctctggactgcatcctaccaccaactcgtccaactgacaagcccttgcgcctgcctctccaggatgtctacaaaattggtggtattggtactgttcctgttggccgagtggagactggtgttctcaaacccggtatggtggtcacctttgctccagtcaacgttacaactgaagtaaaatttgtcgaaatgcaccatgaagctttgagtgaagctcttcctggggccaaggggggcttaaatgtcaaaaatgtttctgtcaaggatgttcgttggggcacctttgctggtgccagcaaaaatgacccaccaatggaagcagctgccttaactgctaagg

SEQ ID NO: 230549 - DNA, 377 bp, Gossypium hirsutum
aattccagaaattcttgggtgctggacaggaaaatcctcagtcatacttacgaatcttcagccgtgaaattcttgaggctgtcttcaatacacgaagtgagcagctagacgagctgtttggtgggaggcaaagccatcgaaggcagcagggacagggaatgttccgtaaagccagccaagaacaaataagggcattgagccaaggagctactttaccaagggggaaaggtagcgagggatacgccttcaacttattgagccaaacccctcgctactccaaccaaaacggccgcttttacgaggcttgccctcgtaattttcagcagcaactccgagaagtggattcctccgttgttgccttcgaaataaacaaagga

SEQ ID NO: 230550 - DNA, 382 bp, Gossypium hirsutum
aaacctttgtccgtaaaaaaaacccttgtttttctctttgaaagatgtgggcaagttcagagggaggtgcaccagaggttactctagaaacctctatgggtgccttcactgttgagctatattacaagcatgcacccagaacttgtcggaacttcattgaactttccaggagaggctattatgacaatgtcaaattccatagaattatcaaggattttatagttcagggtggagatccaactgggactggaaaaggtggagaatctatttatggtcctgtattcgatgatgagataaggtccgagttaaaacatactggagctggtattttatctatggctaatgcgggtccgaattcaaatggaagtcagttcttcattac

SEQ ID NO: 230551 - DNA, 401 bp, Gossypium hirsutum
atgttcaagagaaaacacaagaaggacatcagccagaacaagcgagccgtgaggcggctgcgcaccgcctgcgagagggccaagcggaccctgtcgtccagcacccaggccagcctggagatcgattccctgtttgagggcatcgacttctacacgtccatcaccagggcgaggttcgaggagctgtgctcggacctgttccgaagcaccctggagcccgtggagaaggctctacgcgacgccaagctggacaaggcccagatccacgacctggtcctggtcgggggctctacccgcatccccaaggtgcagaagctgctgcaggacttcttcaacgggcgcgacctgaacaagagcatcaaccccgacgaggctgtggcctacggggcggcggtgcaggc

SEQ ID NO: 230552 - DNA, 383 bp, Gossypium hirsutum
aagaacggttcattccacttgaggggaaatgtttacgtgcattataaatcactagaatctgctgtccttgcttatgattcaataaatgggcgatactttgctggcaaacaggtaaaatgtgagtttgtcaacattaccagatggaaggttgccatttgtggggaatttatgaagtcaagattgaagacatgttctcgtggaactgcctgcaattttatccactgtttccggaaccctggcggagactacgaatgggcagattgggacaaaccaccccctaggtattggatgaaaaagatggctgctttatttggatatggtgatgaggctgagtttgagaaacagagagagcaagacaattttgggcatttgaggaaccctaa

SEQ ID NO: 230553 - DNA, 375 bp, Gossypium hirsutum
  unsure (1)..(375): unsure at all n locations
atttgtattaagaatcgccctttagtgatcagtgaggtgaagaaaaatgtcttgctgtggtggaaactgcggttgcggcttccgttgcaagtgccgcaaccgcttccgcggttgcaagatgtaccctgagatgaactttgctgagcaaaccacaaccgggacacttgttcttggcgtggcaccccggaaagtgcactttgatggagctgaaatggaaactgtggctgaaaatggctgcaaatgtggagataactgcacttgcaacccttgcgattgtgaatgagaaaaaaagctcagcatattatggaagctgatctaaataatatatgatgtatntgggtttttactattagaataaagcagctatggttcatt

SEQ ID NO: 230554 - DNA, 385 bp, Gossypium hirsutum
tgaggcactgctgcaagagttcaagactgattacaatcagactcactttgtaaggaacaaggagttcaaagaagctgctgataagattgatggtcctttgagacaaatcttcgttgagttcttggagaggtcttgtactgctgagttctctggttttctcctctacaaagaacttggaaggaggctgaagaaaaccaatccagttgtggctgagattttctctcttatgtcaagggatgaagccaggcatgccgggtttctgaacaagggtttatccgatttcaatttggcattagaccttggcttcttgacaaaagccaggaagtacacttttttcaagccaaagttcattttctatgccacttatttatctgagaaaattggg

SEQ ID NO: 230555 - DNA, 383 bp, Gossypium hirsutum
cccacgcgttcggcgcggggggccaatccaaaccaagaataacatcaaactcgtcaaacggcaaaagcatcatagacagagaaatcgatgtcatcggaaaatgcagtaagatgaccagaagaccatttgagagaaacagagccaataaacatggaccagaaagcaagcaggagaattgcagccaagacccagaatttgtacccacttttacccaagaatccagcagttacggagctatctttcttcacaacactcggcgttgctagttgctgtgaagtgattggtattggcggtgttgtgggtgaaacttgctccttcattttcagttctcaaacacagctttcaagggcgtcccctggtttggctaaaatgtaaaaggcagt

SEQ ID NO: 230556 - DNA, 403 bp, Gossypium hirsutum
atgggtgatcactctacacccccaagtgcatatgggtcagtcaaagcctacaccaactttgatgctgagcgcgatgctttgaacattgaaacagccatcaagaccaaaggtgtggatgaggtcaccattgtcaacattttgaccaaccgcagcaatgcacagagacaggatattgccttcgcctaccagagaaggaccaaaaaggaacttgcatcagcactgaagtcagccttatctggccacctggagacggtgattttgggcctattgaagacacctgctcagtatgacgcttctgagctaaaagcttccatgaaggggctgggaaccgacgaggactctctcattgagatcatctgctccagaaccaaccaggagctgcaggaaattaacagagtctaca

SEQ ID NO: 230557 - DNA, 387 bp, Gossypium hirsutum
ctgcattcggggacagtccctgcgcgctctgggcgcaccatggcccgcggggctgcgctggcgctgctgctcttctgcctgctgggtgctctggtcgccgccccggatgatggtttcgatttatctgatgcccttcctgacaaagaaggcaagaaacccactgcaacccccaagaagcccagtgctggggatgactttgacttaggagatgctgttgttgatggaggaaatgacgacccaccaccaccgaacccacccaagccgaagccaaatccaaaccccaaccaggctggttcctctggtagcttctcagatgctgaccttgcggatggcgtttcaggtggagaaggaaaaggaggcagtgatggtggaggaagccacaggaaa

SEQ ID NO: 230558 - DNA, 368 bp, Gossypium hirsutum
gctattcttcacaaaaaagaaaagaaaaaatacagtgaaaatggcaacccttaaggttccagctcatgtacctgccccttctgaggatgctgagcaacttcgtaaagcttttgaaggatggggtacaaatgagcaattgattatcgacatattggctcacaggaatgcagctcagcgcaatttgattcgtaaaacttatcgtgaagcttatggggaagatctccttaagtctttggatgaggaactttcaagtgactttgagcgagctgtggtgcttgttactttggaccctgcaaagcgtggatgcatatctggctcatgaagctacaaagaggttcacatcaagccattgggttcttatggaaaat

SEQ ID NO: 230559 - DNA, 383 bp, Gossypium hirsutum
cccacgcgtccggttggactcactggtggaccctcttcaaaagacaattaatttcaagcccaaacaagatgctgtcaaacaggaagtagaccgtaatgaagatatgatccgtagtgctcttcgtgcaatcgcatccttgaaccgaataagtgggggagatagcagtatgaagttgaagaatctcatgagtgaaatatcgaaatctccaacattatgggacaagtattactccatccggaacgagtgaggtaatcttctaattgtgtaaagtaggtaaaggtttgatcggattggatttatatccgaaaccaggggaacattgttgttgtgaaagatgataattgttggatattgagttggtttcatgtatgattgcatcctgc

SEQ ID NO: 230560 - DNA, 387 bp, Gossypium hirsutum
ggttacctttcattggtccaatcaaagaccggctcgattatttctacaaccaaggtcgggacaaatttttcaaatccaaaattcaaaaataccaatcgacagtaatccgaaccaacatgccaccaggtccattcatcgcttcgaaccctaaagttattgctttacttgacggaaagagctttccaatccttttcgacgtatcaaaagtcgaaaaagaaaaccttttcactggtacttacatgccatcaaccaacctcaccggcgggtatcggattttatcctatcttgatccgtcggaacccacacacactatgctcaaacaactacttttttttctcttgaaatcgagtagtaaccgagttttccctgagtttgaagcgtgttaca

SEQ ID NO: 230561 - DNA, 374 bp, Gossypium hirsutum
tggtgaaagtgaaaatggaggtttacagcagaaggctaatggttctggtgtttgcatttgcactagtaagcatagggtacgcgcaagagtcgaactcgaccactctggttccagcaatactgacttttggtgactcagtggtagatgtgggcaataatgattatctccccaccatcttcagggctaattaccctccttatgggagggacttcgccaaccaaaagcctactgggaggttttgtaatggcaagttggccactgacatcactgctgaaactctggggtttactacttatccaccagcatatctaagccctgaagcatcagggagcaaccttcttattggagccaattttgcttcagctggatctggc

SEQ ID NO: 230562 - DNA, 405 bp, Gossypium hirsutum
atcagatttacagaaaagtgaagaactaatcaaaaaagaaatgatcacaatgcttcattatgaccttctacatcacccttatgaaccatctggaaataaaaaaggcaaaactgtagggtttggtaccaataattcagagcacattacctacctggaacataatccttatgagaagttctccaaagaagagctgaaaaaggcccaggatgttttggtgcaggagatggaagtggttaaacaaggaatgagccatggagaactctcaagtgaagcctataaccaggtgtgggaagaatgctacagtcaagttttatatcttcctgggcagagccgctacacacgggccaatctggctagtaaaaaggacagaattgaatcacttgaaaagaggctcgagataaacag

SEQ ID NO: 230563 - DNA, 383 bp, Gossypium hirsutum
cggacgcgtggggtgatggcatccgggtggggaatcaacggtaacaaaggcaggtgctacgatttctgggtcgacttcagcgagtgcatgtcccgttgcagagagcccaaggactgtggacttctccgtgaagattatctcgagtgcctccaccattctaaagaatttcaacgaaggaatcgaatttataaggaggagcaacgtaaattaagagctgccgcacgaaaagacaaggaaggcgaaaatggtgttcatcatcatgcatagtcataatttgtgatcctttaattttccaataataataatgcatggagattgttgtatttatgttgggattgatattttaactctttgctaaataaccttttgggtttccctttcgt

SEQ ID NO: 230564 - DNA, 372 bp, Gossypium hirsutum
cccacgcgtccgaggaaccccacttgttttctttcttcttctcaccccttcttttttccctagaaaaattttaaaaagtttttccaagaaagtttctccctttttttttttcctattcttctttctcccagaactggctccaaatgatcaatattgatcaagaaacaacggttagagaaatcaaaccaaaaagcagaagaatcatgggaggaggtggtccggattatgatgatgataaagaggaagtgaagtggccgccatggctgagaccactgctacaaacaagcttttttgttcaatgcaaactccatgctgacgctcataagagtgaatgcaatatgtattgcttggattgcatgaacggtgctcttt

SEQ ID NO: 230565 - DNA, 398 bp, Gossypium hirsutum
  unsure (1)..(398): unsure at all n locations
atgcgacatcaaggagaagctgtgctacgtcgccctggacttcgagcaggagatggccaccgccgcatcgtcctcttccctggagaagagctacgagctgcctgatggccaggtcatcaccatcggcaatgagcggttccggtgtccggaggcgctgttccagccgtctttcctgggcatggaatcttgtggcatccatgagaccacctttaactccatcatgaagtgtgacgtggacatccgcaaagacctgtatgccaacacggtgctgtctggtggcaccaccatgtacccaggcattgccgacaggatgcagaaggagatcactgccctggcacccagcaccatgaagatcaagatcatcgcacccncagagcgcaagtactcagtgtggatcg

SEQ ID NO: 230566 - DNA, 357 bp, Gossypium hirsutum
gtagagatgaggaaaggcatgggtgccaaagttcttttcttctttgctttgctttccttttcagctgtctcggcatttgcacaggatgaggaagaccaaggtcttgttatgaacttctacaaggattcttgtcctcaggctgaagacattatcaaggagcaagttaagctactgtacaagcgacacaaaaacactgctttttcttggctgagaaacattttccatgactgtgctgtccagtcatgtgatgcttcactgctgctggactccacaagaaggagcttgtctgagaaggagacagacaggagctttggcctaaggaatttcaagtacattgagaccatcaaagaagctgta

SEQ ID NO: 230567 - DNA, 403 bp, Gossypium hirsutum
atcgccgacctggaggtgaagatccgcgactggtaccagaggcagcggcccagtgagatcaaagactacagtccctacttcaagaccatcgaggacctgaggaacaagatcattgcagccaccattgagaatgcgcagcccattttgcagattgacaatgccaggctggcagccgatgacttcaggacaaagtacgagcacgaactggccctgcggcagaccgtggaggccgatgtcaatggcctgcgccgggtgttggatgagctgaccctggccaggactgacctggagatgcagatcgaaggcctgaaggaggagctggcctacctgaggaagaaccatgaggaggagatgcttgctcttcgaggtcagagcggtggagatgtgaacgtggagatggatg

SEQ ID NO: 230568 - DNA, 397 bp, Gossypium hirsutum
attggctccaccagggtggtcctggtagacagaaagacaggcagtcagtatgatattcaagatgctattgacaagggccttgttgacaggaagttctttgatcagtaccgatccggcagcctcagcctcactcaatttgctgacatgatctccttgaaaaatggtgttggcaccagcagcagcatgggcagtggtgtcagcgatgatgtttttagcagcacccgccatgattcagtaagtaagatttccaccatatccagcgtcaggaatttaaccataaggagcagctctttttccgacaccctggaagaatcgagccccattgcagccatctttgacacaaaaaacctggagaaaatctccattacagaaggtatagagcggggcatcgtcgaca

SEQ ID NO: 230569 - DNA, 375 bp, Gossypium hirsutum
gtaaatggcgccgttcggaagggcatgccccacaaattctaccatggccgcactggtcgtgtctggaacgtcaccaagcgcgccatcggcgttgaggtcaacaagcaggtgggtaaccggattatcaggaagaggattcatgtcagagtggagcatgttcagccttcaaggtgcactgaggaattcaaactgaggaagataaagaatgatcagctcaaggcagaggccaaggcaaagggtgaggtgattagcacaaagaggcagcctgagggcccaaaacctggtttcatggtcgagggtgcaatgttggaaacggttactcccattccatatgatgttgttaatgatctcaaaggtggctactagatctactct

SEQ ID NO: 230570 - DNA, 387 bp, Gossypium hirsutum
gcgccgagaggggtgtcctctacaacagagctggtttgattccacaatggaacgtcaacgctcacaaaatactctacatgttaagaggctgtgccagagtccaagtggtgaaccacaacggcgacgcagtgttcgacgataacgtggagcaaggtcagctcctgacggtgccacagaactttgcgttcatgaaacaagcaggaaacgaaggagccgaatggatttccttcttcaccaatagcgaagccaccaacaccccaatggctggaagtgtctccttcatgcgagcactgccggaggaagtggtggcagcgtcgtatcaggtgtcaagagaagatgcaaggcggattaagttcaacaacaaaaacacctttttcttcactcctt

SEQ ID NO: 230571 - DNA, 378 bp, Gossypium hirsutum
atctcgaagcttccttttccgttttagatctcaaaattcaaaaagctctctttttcatctcatggctgctactatcgtctccgtcaaagctaggcagatcttcgacagccgtggaaatccaacggttgaggttgatgtggaaacatcgaacggtataaaggctagggccgcagttcctagcggtgcatccactggaatttacgaggctcttgagttgagagatggaggttccgattacctcggtaaaggtgtatcgaaggctgttgctaatgttaacacaatcatcggccctgcattgattggaaaggacccaaccgagcagactgcaattgacaatttcatggttcaacaactggatggaacccaaaatgagtgggg

SEQ ID NO: 230572 - DNA, 390 bp, Gossypium hirsutum
cttctcccaccgaagagaatcaaggatcccagtgcaaagaagcctgaagattgggatgacaaggaattcatccctgatcctgaagacaagaagccagagggttatgatgacattccaaaagaaatccctgatcctgatgctaagaagccagaagattgggatgatgaagaagatggtgaatggacaccctcaacaattcccaacccagagtacaatggcccatggaagcctaagaaaatcaagaaccccaactacaatggcaagtggaaggctccaaaaattgacaacccagacttcaaggatgatcctgatctttatgttttccccaacttaaagcatgttggtattgaattgtggcaggtaaaatctggaacattgtttgataatatc

SEQ ID NO: 230573 - DNA, 385 bp, Gossypium hirsutum
ggtgacaatactttgataggttattggccagcggagctatttactcacctagcagaccgggcaaccatggtggaatggggtggtgaagtggtgaactcgagggccaatggccaacacacctcaactcagatgggttccggtcattttcccgaagacgggttcggaaaatcgagctattttcggaacttagaggttgttgatgcggataatagcttgagttctgttcgtggcatatcaaccctagctgaaaatacaaattgttacaacatcaggagctcatataacaaggaatggggcacatttttttattatggggggcctgggaataacccacgctgcccttagatcaatattattgtttgaattaaatattgattcttttaat

SEQ ID NO: 230574 - DNA, 379 bp, Gossypium hirsutum
cccacgcgtccgctaacattctgttggacaaggattttgaggctcatattactgattttggcattgcgaaaagcttatgcatctcaaagtctcacacttccacttacatcatgggcactattggttatatagaccctgaatatgcccgcacttcccgcctgactgagaagtcagatgtttacagctatgggattgtcctactcgaattactgactggaaggaaacctgtagacaacgaatccaatctccatcatcatcttttgtccaaggctgccaataactctgtcatggaaactgttgatccggagatcactgatacatgcaaggatcttggagcagttaagaaaagttttcagctagcccttctatgcacaaagag

SEQ ID NO: 230575 - DNA, 399 bp, Gossypium hirsutum
atgcgaggcaagcgagaggtctgcgcgcagtctgagcggcgcgcgtccagtcccgaggcccacgccagcacgccctcatggcccccgcagcggcgtcggggggcagcaccctgcccagtggcttctcggtcttcaccaccttccccgacttgctcttcatctttgagttatcttcgggggcctggtgtggatcctggtggcctcctccctggtgccctggcccctggtccagggctgggtgatgttcgtgtctgtgttctgcttcgtggccaccaccaccttgatcatcctgtacctaattggagcccacggtggagagacttcctgggtcaccttggatgcagcctaccactgtactgctgccctcttttacctcagcgcctcggtcctggaggccct

SEQ ID NO: 230576 - DNA, 377 bp, Gossypium hirsutum
gttcattgtgggggatcttgacagcgtttataccacaccagggatgaaggaatatgttaatggtggagatttcaaaagagatgcgcccatgttggaagaagttgtgataatggagggcgttggtcatttcatcaaccaagaaagagctgatgaaatcaactcacacattcatgatttcatcaaaaatttctgatctgctttgttttatctctatgctcaaagctgctttgtttatctcttttgagttttattaatgtgatttctcatgttagattctatgaaccaagtttgaactttaagaaatcataaaaaagtgcttgaagaataattcagacctaaaaaaaaaaaaaaaaaaaaataaagggttgtcgttctaa

SEQ ID NO: 230577 - DNA, 427 bp, Gossypium hirsutum
  unsure (1)..(427): unsure at all n locations
cagaaaagaggcggagaattgtgattgtttgcagggttttcaagtttgtcattcattgggtggcggtactggatctggaatgggaacccttcttatttccaagatcagggaggagtatccagatcgcatgatgttgacattttcggtcttcccttcgcccaaggtatccgatacagttgttgaaccatacaatgctaccctttctgttcatcagcttgttgagaatgctgatgaatgcatggtgttggacaatgaagctctttatgacatctgcttccgcaccctcaagctcgccactcctacctttggtgaccttaaccacctcatctctgctaccatgagtggtgttacatgctgtctacggttccctggacagctgaactctgatctccgtaagctggccgntaaccttatccctttccctcga

SEQ ID NO: 230578 - DNA, 458 bp, Gossypium hirsutum
ctctgcctctatccagattgattgaattcatgaagggcaaggaggataagattgcagtggtagttggaactgtcaccgatgacattcgtatatatgaagttcccgctctgaaggttactgcactaaggttcactaagacagcgagggcgagaattgacaaggctggtggggaatgtttaacatttgaccaacttgctcttcgagcacctcttggacagaacacggttctcctttgaggtccaaagaatgctcgtgaggctgtgaagcacttcggacctgctcctggtgtgccacacagccacaccaagccctatgtgcggtcaaaagcaaggaaatttgagagggctagaggaagaaggaacagcaaaggcttcaaggtttgagattccaactgcactggaaaaaaaaaaaacttatcaacccatcatgataatgggaatgctcaggttttgtttttt

SEQ ID NO: 230579 - DNA, 368 bp, Gossypium hirsutum
gaaagatgaagaaaacccaaaaaacaaacaaagagaaagaatcaaacaccaaaacccgaaccaaagaatcggagatatttgcttcgtgttcattctccagtcttggcctccactccactctgtctgaacaactacaagaaaggttgggttttgaagctccaactcttgtccaagctcaagctattcctgttatactctctggtcgtcatgtacttgttaatgcagaaacggggtctggcaaaacaatagcatatttggctccaatcattcattacttgcagggttacaatccccgaattgagcgttctcacggtacttttgcgttggtccttgtaccaacgcgtgagttatgtttgcaggtgtatgag

SEQ ID NO: 230580 - DNA, 464 bp, Gossypium hirsutum
tccacgcgtccggtttttccaatcgacctccggaccttcagatccgaccaacgttgcaccaccgccatgttatcctccgtccgctctttctctctttccgccttcattttcttcgtcttcttctcctctctcgccttcgcttccgagtcagatcataagtatcagccggatgatccaattaccctatgggtaaataaagttggaccatataacaatccacaagaaacttataactattacatccttccgttttgtcatccgggtgtcaatcctgcgcacaaatggggtggccttggtgaggtccttggtggaaatgaactgattgatagccagattgatataaagtttcaaaagaatgtggacaaaggtaccatttgccaactggaacttgatgaagctaaagtcaagcagttcaacgatgctatcgagaacaattattggtttgaattctttgtggatgatct

SEQ ID NO: 230581 - DNA, 445 bp, Gossypium hirsutum
cccacgcgtccgcttccctctcatcctttgaaaatgaagtccttagctatgggaaaaaagctactaacttctgttctcgtaggactagtagttgcttcagctataacccaaaccgtgttggctcaaaactgtggttgtgcgccaaacttgtgttgcagtcaacatggttattgcggtcagggtaacgattactgtggcactggttgcaaagaaggcccttgtttctccaagtctcccactggtgcttcagttgcctccattatttcacctcagttcttcaacgggataatcagccaagctcgtgcagattgtgcaggcaagaaattctatacacgacaagctttcctgactgcacttgattcctttcccgattttggaaaaatgggttctgatgttgaatccaagcgtgagattgctgctttctttgcccatgccacccatgaga

SEQ ID NO: 230582 - DNA, 439 bp, Gossypium hirsutum
gccaattgtttgagctagctagctcttactcaaatggcaaccaaaacgatgatgttgcaaatattttcacttttcttctttttgttcagtatctgcaactccattttccttggtgctaatggagatgacaatggtggttggcaaactgcccatgccaccttctacggtggtgctgatgctaccggcacaatggggggagcttgtggttatggaaacctgtacagtcaagggtatggaacgagcacagcagctttgagcactgcacttttcaacaatggcttgagctgcggtgcctgctacgagctccggtgcaacaatgatcctcaatggtgcattagtcgaaccataaccgtgacagccaccaacttttgtccccctaactatgctttatctagtgacaatggcgggtggtgcaatcccccacgagaacactttgatt

SEQ ID NO: 230583 - DNA, 496 bp, Gossypium hirsutum
aaaccctcaaatatccgatatcgtctttcccaaaaccagatccaaaagccagcagattcatccaccgatggccgacgaagccaaagccaaaggcaacgccgccttttcctctggtgatttcaacgccgcaatcaaacacttcaccgatgctataaacctttcccccaccaaccacgtcctttactctaaccgatccgctgcgtatgcttctctccatcaatacgaggccgcattgtcggacgccaaaaggaccgttgagcttaaacctgactggtctaaaggttacagcaggctaggcgcggctcacctcggtttgcaccaatatcaagatgctgtttcggcgtataagaagggtctggagattgatcctaataatgaagctttgaagtctggattggctgatgctcaatcggcggcgacggcttcggcttcgcgttctagggctgctccgccacctaatccgtttggtgatgcttttcagggaccggagatgtgg

SEQ ID NO: 230584 - DNA, 586 bp, Gossypium hirsutum
aaaacagcgtggagctttacgctgagaaggtcaataacagaggcctgtgtgccattgctcaggctgagtcccttcgctataagctcctcggaggtctcgccgtccgtagggcctgctatggtgtgcttagatttgtcatggagagcggagccaagggttgcgaggttattgttagtggaaagctaagggcacaacgtgccaaatccatgaagttcaaagacggatacatgatttcttctggtcacccagtgaacgagtacattgactctgctgttcgacatgttcttctgagacagggagtactgggcatcaaggtgaagatcatgcttgactgggatccaaagggtaagcaaggcccaacaactccactcccggatcttgtcaccatccaccctcccaaggaggatgaagttatcaaggtggaagcacctgtgccgaccgagattgaacttccgccagtggcttaaagccaatgataactgttatgatagtcatctatttgatatttggagcatgttaagtgtcttaaattttgtagtttttaagtttggcacctaaaatgaaactatgctggatgcttttttct

SEQ ID NO: 230585 - DNA, 468 bp, Gossypium hirsutum
  unsure (1)..(468): unsure at all n locations
tcgggaagtgatgatcatcaactccatcatnaccaccaccaccaccaccaccgacaggagcagcaacaccgccccactttcccattccaattacttgagaagaaagaagatgataaccagccttgttcttcctcttcttcccctcctttcccttcccttgtcccaccttcttcctcttcttcatcctctgctgatcaacccaacacgagtcgttccatttcaagcctccaaatctcgccagaaccttttaaaaaaccaccccctaaacgtacttcaaccaaagatcgacataccaaggtcgatggacgtggccgtaggatccgaatgccagctctttgtgcagccagggtttttcaactcactcgtgaattaggccataaatctgatggtgaaaccattgaatggctactccaacaagctgaaccagctgtgatcgccgccactggtactggaacaatcccagcaaac

SEQ ID NO: 230586 - DNA, 386 bp, Gossypium hirsutum
ccaacaccttgactcgagcattgcgagtcgggacggtatggattaactgctacgacatatttgatgctgcagtcccatttggcgggttcaagatgagtggtcaaggaagagagaaagggatttatggcctttcaagttacttgcaagtcaaggcagttgtcactcctttgaagaacccagcatggttgtaatgtttgtttgtttgttttcttacaaattgccatgaatctaaacttgaactaataagctgccagtttttttaaattttgaatgatcagcgtatggtaggatcattcctgaactgataaatttgctcatatttggatgagtatggggcataatgttttaaatatatgaataagaaaaaaggcttaaaataatatttt

SEQ ID NO: 230587 - DNA, 428 bp, Gossypium hirsutum
gccgccggcggtcccggccggatttcccggtcgcccaacccttccagtggaggcagccgttcttccttttttttcttaaccaagattggtttcccaaattaagtttgctgtggtggtgaaaatattgggaaggcccggttcaggaggtcaagtgacccaagtgagagtgaagtttttggatgatcagaaccggttcattatggggaacgtgaagggaccggtcgtgaggagatatcctacatgctgagtctgagagagaacaaggagcttcgtgagggtattttatacttttgggttgtgctgttgaatgctccgattctttgattcgttagtagatcgatatggctgcattggagatgtgttctaactgatttatgtattgtgatgaaaaaaaaaaaaaaaaaaaaaaaaaaaggcgcgttaagtca

SEQ ID NO: 230588 - DNA, 437 bp, Gossypium hirsutum
cggacgcgtgggttttttttttttttttttgaattctcaaaacttccaaagcaaccacatcaaaacaaaactacgatgaacaactcataacgttctcagatttttctcaagtcttctaatcctgaatctttctactaataaagacaaacttagtcaaagagactgaatcccatatcatcatcagactcttcttctggttctggttttttctcctccacaggggcagcagcagccggagcagcaccgccagcagcagaaacaggggcagcagcaacggcaaatttgcttggatccgccaaatactctttcactttatcagcctgagggaaagaatactctgttgcaactgcaacagccaagacattcttgtagccattgatgaacatgtgtggtgcagctgcaagggtcgggtatgagatggcaagagacaatgcagt

SEQ ID NO: 230589 - DNA, 409 bp, Gossypium hirsutum
gcaatgatccctacctttacagtaccaacaattttctgggaagacaaacgtgggagttcgatccaagagcaggtacagctgaagaacgagctgaggttgaagaagctcgtcttaacttctacaacaatcggtacaatgttcagcccagttctgatctcctctggcaaatgcagtttctaagagagaagaagacgcaacaaaccattccccaaccaaagatagaggatggtgaagaagtgacatatgaagttactactgcagcagtgaagagagatgtccacttgttttcagcactacaatcaagacatggccattggccagctgaaaattctggccccatgtattatattcctcctttggtcatgtctctctatatcacaggacatctcaatactatattctctagaga

SEQ ID NO: 230590 - DNA, 443 bp, Gossypium hirsutum
  unsure (1)..(443): unsure at all n locations
tgtgtggaaagagttgtanggcttcggtggatgaactatttaagaccggatattaagagaggtaacataacacccgaggaagacgaccttatcatccgattacattcacttctcggcaaccgatggtcactcatcgccggcagacttcccggtcgaaccgataacgagataaaaaactactggaactgccatctcagtaaacggcttttaaaccaaggaaccgaccccaacacccgtaagaaactatcacaacaagccacgaacacgagaaagaacatcagtgacacaagcaaaacattttccgagagacccaaaattcatctcccgaaacccattagggttaccagatcttctttcccaagaaaccaaagcttcgaattggacaaccaccaatgcaatgcgaacacccaagcaggaggaaacccttcgtcggactatgccta

SEQ ID NO: 230591 - DNA, 410 bp, Gossypium hirsutum
ctctaaaacctctttttagtgttattgttttctaagccatttttttataatcaagaactggctaacacaaaggataacattctggaggaaaccaacaagagccaacaagtggttctcgtcctctatgaggccataaacactcgagacgtccaaaccgttcatcaaatccttgcccctgacctagaatggtggttccatggtcctccagcccaccagtttatgatgcgcctcctcaccggagcttcatcggaccaaactttccttttcgacgttgaccctctttcggtcaccacttttgggtccaccgtcatcgttgaaggctgtgatcataaacgttcaatctcttgggttcatgcttggactgtcagtactgatgggataataacacaagtgagagagtatttcaatac

SEQ ID NO: 230592 - DNA, 505 bp, Gossypium hirsutum
aaaacagttacttggatataatttccccttgtcaaaccgaccctctgtaagcaatccgccatggacacattagcagctcgattcaagctcattgttttgccctttctatccatttctttgcttttcttaccttttctccaggccactgatttcgattactgcgataataaaggtaattacgttgtaaaagtcgatggagtcgacatatcacctaatcctgtgattagcgggaaaccggccaccttcacgatctcagcttctactggtcaagctatcactggtggcaaagcggtgattgacgtttacttcttcgggtttcatatccatcaagaaactcatgacctttgtgaggaaacatcttgccctattactgttggcaactttgtgctctctcacaatcaagttttacctggttttactccacctggttcctacaaacttaagatgacattatcaggtgcgggaattaaacagttaacttgcatttccttcgatttcaaaatca

SEQ ID NO: 230593 - DNA, 521 bp, Gossypium hirsutum
ctagccgtctcgcgtgcgccctgtggctctcttcaaccctcgcatatctcttcaagatctgatctgatctgacaaaaaaatgttcgggagagcaccaaagaaaagcgataatactaaatactatgagatattgggagtgcccaaaaccgcttcccaagatgatttgaagaaggcttatagaaaagctgcaattaagaatcatcctgataaaggcggtgatcctgaaaagtttaaagagttggctcaagcttatgaggtgctgagtgacccagagaagcgtgagatatatgatcagtatggcgaggacgcccttaaagaaggaatgggtggaggcggtggtgcccatgatccatttgatatcttccaatccttctttggtggcaatccttttggtggtggtggtagcagccgaggccgaagacaaagaaggggagaggatgtaattcatcccctaaaggtttctttggaagatctctataatgggatttccaaagagctttctctttcacgcaacataattt

SEQ ID NO: 230594 - DNA, 391 bp, Gossypium hirsutum
  unsure (1)..(391): unsure at all n locations
cttctttcaacttccaaactccatcatcatttccgtttctctcctctcaaatcccctcgcttctcctgctcagcctctgcttcaagcacaatggctaaacaagttttggtgccgatcgcgaacgggacggagccgatggaggcggtgattacgatcgacgtgattaggagatcgggagctgacgtcacggtggcttccgtcgagaaagagcttcgcgttgacgcttgccacggtgttaaaattgttgctgatgctcttgtcgctgattgtaagaataccgttttcgatcttatcgcgcttcctggaggcatgcctggtgctagcaactttaaagattgtggagctcttgaaagtcttgtgaaaaagcangctgcagatgggcggctttatg

SEQ ID NO: 230595 - DNA, 409 bp, Gossypium hirsutum
agaaaagcacctctgtaaatgtaggaggtggtggtgtaaacgtcaatacaggaaaagggaagcctgggggtgacacccatgtgaacgttggaggcaaaggagttggagtgaacacgggaaagccagggggtggcactcatgtgaatgttggagacccttttaattacctatatgcagccagtgaaactcaaatccatgaagacccgaatgtggctcttttctttctggaaaaggatatgcaccccggggcaacaatgagcctgcatttcactgaaaatacagagaaatcagctttcttaccttatcaaactgcccaaaaaataccgttttcatctgacaagttgccagaaattttcaacaagttttcagtgaaacctggatcactgaaggcagagatgatgaagaacac

SEQ ID NO: 230596 - DNA, 422 bp, Gossypium hirsutum
  unsure (1)..(422): unsure at all n locations
cggacgcgtgggtagaaggtgtcttaggagacgccttctttcttcttcttctccctttctttgctttttcgaatttttcttaagcgagaatgagagagtgcatttcgattcacatcggtcaggccggtatccaggtcggaaacgcctgctgggagctttactgcctcgagcatggaatccagcctgatggtcagatgccaagtgacaaaactgtcggaggaggtgatgatgcttttaacacctttttcagtgaaactggtgctgggaagcacgtccctcgtgccgtctttgtggatcttgaacccacttgtattgatgaagtgagaactggtgcttaccgccagctcttncacccagaacaactcatcagcggcaaggaagacgcagctaacaactttgcccgtggtcactacactattggc

SEQ ID NO: 230597 - DNA, 494 bp, Gossypium hirsutum
gtagaatgaaaagagagggtattctggatatagaaatttcatttatctccgccaagttctaacagttctatatttttctacaacttcccttttctttgtatttctatcgacttagccaatgcttgctcactttcactcattcccctaatcactgcaaacaggatctcttcttcttctccgatcaccggtgtctgctcagcgccttattttgatcggataagttagggttccaacgttatatctctgtctgaattgcttttttcctctccttttttaattttattccccaaaaaatggcgtctgaagatgtgaaaagaagcgagtcggcggtctcgacgatcgtgaatcttgcggaagaagcgaagatagctagcgaaggagttaaagcgccgagtcatgcgctgcttagtatttgcaagtctcttgttgctggtggtgtcgcccgtggagtgtcacgtaatgctggtgctcccctagaaagattaaaaatttta

SEQ ID NO: 230598 - DNA, 382 bp, Gossypium hirsutum
gttgctctccaaagcgatgatattgagctggttgctgttaacgatcctttcatcaccactgaatacatgacctacatgtttaagtacgacagtgttcacggtcaatggaagcatcatgagcttaaggtgaaggactcaaagacccttctctttggtgaaaagcctgtcacagttttcggtatcagaaaccctgaggaaatcccatgggctgaggctggagctgagtatgttgttgagtctactggtgtttttactgacaaggacaaggctgctgctcacttgaagggtggcgcgaagaaggttatcatttctgctcccagtaaggatgctcccatgtttgttgtgggtgtcaatgagaaggaatataagcctgaccttaaca

SEQ ID NO: 230599 - DNA, 352 bp, Gossypium hirsutum
cccacgcgtccgatttcaagctttgttatagagaccgaccgaaaagaagactaatagaagattttagattcttctttcttacactttactttctgtttcgcattgattttctctggaaatatacaaatcttattcctccattctttttttccagatccaaattccaatatcaatttcgtagtttttaagatattggaaaaagatggaggcatcgtcgacgagtcaacctgagtttgactatttgtttaagttgttactaataggggattcgggtgtggggaagagtactctgctcttgagttttacttccgatacctttgaggaactcaatcctaccatttgtgtggatttt

SEQ ID NO: 230600 - DNA, 431 bp, Gossypium hirsutum
acgcaaaactctcaagagagatgtaaaagccttaaatgagattaaagcatcacttggatggagagtggtatatgcatggattggagatgatccctgtggagatggtgatttaccaccttggtctggtgtaacatgttctactcaaggagactatagagttgttaccgaattggaagtctatgcagtatcaattgttggtccttttcctattgccgtaactaatttgttggatttaacaaggctggatctccataacaacaagcttacgggcccaattcctccccaaattggacgccttagacgacttagaatgttaaatttgaggtggaataaactccaagatgtccttcctcctgagatcggtgagctgaaaagactaacccatctgtcgttgagctttaacaattttaagggtgagattccaagggagc

SEQ ID NO: 230601 - DNA, 366 bp, Gossypium hirsutum
gtgtagcgattctcagttagtcttttctttaagcttacagcttctctccagagttttataatgggtaaggagaaggttcacatcaaccttgttgtcattggccatgtcgactctggcaagtcgaccactaccggtcatttgatctacaagcttggtggtattgacaagcgtgtgattgagaggttcgagaaggaggctgctgaaatgaacaaaaggtcattcaagtatgcttgggtgcttgacaagcttaaggctgagcgtgaacgtggtatcaccattgatattgccctgtggaagtttgagaccaccaaatactattgcaccgttattgatgcacctggacaccgtgactttatcaagaacatg

SEQ ID NO: 230602 - DNA, 413 bp, Gossypium hirsutum
gacaatagagaaaaagtagcgacgaacatggaaagagagcaacaagtttacttggcaaggcttgctgagcaagctgaacgatatgacgaaatggtcgaggccatgaaaaatgttgccaagttggatgttgaactgactgtagaagagaggaatctgttatctgtggggtataagaatgtgattggagcaagaagggcatcgtggcggatactgtcttcgatcgaacaaaaagaggaagcttagggtaatgaacaaaatgtgaagaggataaaggggtatcggcagagggttgaagattagcttgcaaagatcttggatgatatactatccgacattgattagcatcttattccatctttctcgacaggggaatcaactgttttctattacaagatgaaaggagaatttttttg

SEQ ID NO: 230603 - DNA, 271 bp, Gossypium hirsutum
cgtctgttctagacttttaagcaatgtcgagacacatttctatactgcaagccattggtaccaattgacggtacctttatgtttggtaaatatacccattggctattgctagcagtggcacaggatagaagtgggagaattcttccaattgcatttgcaataacatcgggggagtcaactaatgactgagatttctttctatttaggttaaggaggcatgtgtgcccctaacctgatatttgcgttatttcagatcggagcaaccgaatac

SEQ ID NO: 230604 - DNA, 251 bp, Gossypium hirsutum
  unsure (1)..(251): unsure at all n locations
cagcgaaagggatagctttgtggagacgcttgaaggttgggctagaacagttgtgacaggaagggcaaagcttggaggaatccctgtaggaatagttgcagttgagacacagacggtgatgcaggttatccctgctgatccaggacaacttgattcccatgagagagttgtccctcaagctggacaggtatggtttccagattctgctacaaagacagctcangcaataatggatttcaatagggaagagc

SEQ ID NO: 230605 - DNA, 371 bp, Gossypium hirsutum
atttcctcgtccatataaaaaccaataaaatagaagagatatatttcacatttatttttctctaacaaaatccaaaaatggcagctccggcagtggagggagtagccgtgacggccctccgatcggtcctactccgagtccgacaggcagctgaacgggcgggtactcaacccgaacgggtccgggttgtggccgtttcgaagactaaacccgtgtcactcatccgccaaatttacgacgccggtcaccgctgtttcggtgaaaattatgtccaagaatttgttcaaaaagcccctcagagcaacaaagttaaaacccttctcggtggagtgccaaatctagcctcttttcagggtgttgataatgagaag

SEQ ID NO: 230606 - DNA, 405 bp, Gossypium hirsutum
tcgtatacattaagctgactttcacatacatttccatcattcttttttcacactttttttatataattttgatagtataatatggagaaatggtatggggtttcagggctggtgttggttttgagtttgttctttggggttaaaggagaaccccaagtcccatgttacttcatttttggagattcattggtagataatgggaacaataatgaacttcgttcattggctagagctgattacttgccttatgggattgactttgctaatggaccgaccggccggttttcgaacggtcgaactacggtggatgtcatagctgaacttttggggtttgacgattacattcctccatactcaactgcaagtggtagacaaatactgggaggagttaactatgcatctgct

SEQ ID NO: 230607 - DNA, 333 bp, Gossypium hirsutum
gttgccaaggaaatcaaagccatgtctcaggaagatatcttagctcttacgaaagctggagaggtgactattgctacacactgtttgaagctgactgaaattaagcttgtgcgggaatttaaacatcctgatggcatgacagataaagagatggatgcagctggagatggtgatgttttggtggttttggatatacgtcctgatgagtcattgtttgaagctggtgttgcacgtgaggtggttaatagaattcaaaaatcacgaaagaaagctggccttgagccgacagatatggtggaggtctactttgagtcattggatgaagacaagtca

SEQ ID NO: 230608 - DNA, 429 bp, Gossypium hirsutum
tctccctctaaaccaaacccaaccaaagcccctctctgcaagcaaaacttaaactaggaattaaacctattctttataaattgctacgaagggttgggttttgttcttaagatcatggatttggagttcctgcaatccatggatgttcagattcttgttggtttaggagtagctgttttagccattcttgttgctgctgcttatctcttttcctccaggaaacccaaaggttgccttgatccggaaaatttcagagagtttaagcttgtcaagcgccagcagctgagtcataatgtggcgaagttcacatttgaacttcctactcctacttcagttttgggtcttcccatcggacagcatataaattgcaggggcaaggatagccaaagtgaggaggtcattaaaccatatacgcctactacattggat

SEQ ID NO: 230609 - DNA, 381 bp, Gossypium hirsutum
cgcttcgccattcactccgttcacccttttttttttcattttgcctgatttttcgagttttagatttcttatataatcaactacctaatcctctcgctctctcaaccacaagctaactagcaaacacccacacatactaacatctatggggagttcagggcagcaagtctcctggaaattggcggatcacccaacacttccaaaggggaagacccttgctctcatcgttctcgatggctggggcgagtacaaacccgatgagtacaattgcattcatgttgctcaaactcccaccatggattctctcaaacagggtgcccctgaaaagtggagattaatcagagctcatggtaaggctgtagggctccccacagaggatga

SEQ ID NO: 230610 - DNA, 417 bp, Gossypium hirsutum
gccggaaaaatctctgtcttaacacagagtttggcaagcgagagaaacaaaatccgaagggaatcccaatttcttcgcttttcatcttctctcgcttccatttctccgtttttcccctccggcaatggctatcgattctgattctttcaaacaatcacttctccctagcttcctttactcttctgctcccaactctttctctctggatcgactcctcaacgccaacagccctgctttctctgcttcgcgctccactatacccgatgctcctgcggcctcttcctcgccatcgatcaaggcgagaactttcatgatcccctcccccaatgagcccgggaagaagatcgagatgtattcgcctcagttctacgctgcttgtacctttggcgggatccttagctgtggtctcactcacat

SEQ ID NO: 230611 - DNA, 412 bp, Gossypium hirsutum
  unsure (1)..(412): unsure at all n locations
aagcaatcaataacctctgcgtgaaactgtggttgaagtgcccaatatcaagtggggaagatatggaaggtctgggaaatgttaaaagggagcttcaaaagacggttcaatatccagtggggcatcccaggaggttggggaggttgggaatgtcaccgtcgaaagggagtgctattctacgggcccttctggatgtggggaaaacccttcttggccaaagctatcgcaaacgaatgtcaggcaaaacttcattagcgtcaagggtccggaattgctcacaatgtggttcggagaaagtgaggncaatgttcgtgaaattttcgataaggctcgccagtctgctccttgtgtccctttctttgatgaacttgactcaattgctactcagagaggaagcagtgtcggagatgca

SEQ ID NO: 230612 - DNA, 419 bp, Gossypium hirsutum
  unsure (1)..(419): unsure at all n locations
gaactggtaagatccaacaggaaattccaaagtcttcaaattattatgttgctgtggggaatttgaacactaaggaggttgagatacagttgaacttctcagtgaaggctctaagttatgacacaagtcaagcgtattacacatgttctntgggggatcatttgtgtgatttggagctgtatcttctacgtcccaatgttgctgtcttgtcttcacctggtcgtaatgaggtaaaaagaacactcttacaaagtcctcaatattagtgagaattgccattaggtatttaggtcctcacatatgaaattatggcagcttgaactagaaacttgttttcttcaatgtttttcttaagttaataaatattttttttcacgatcaagggaattatntataacaaaacctaatgtcttttgtaa

SEQ ID NO: 230613 - DNA, 352 bp, Gossypium hirsutum
gcaaagcattagcaaccatagccatggcttcctcaccaaaactcttctctatgtctatcctcttcctttttgccctcttctccatgcaaatccatgctagagagtacttcagcaaattcccaagagttaacaccaatgagaaagagacaacaaccagagagcaagagcacgagaccttcgttccccagaccacccaaaagccagaagagcaagagccaaggttcatccctgaaacccaaaatggttatggcctttacggccacgagtcaggctcaggctcaggctcaggctcaagccggcccagtttcaccaccaaagaaacctatgaaccctatgtcacccctgttagatt

SEQ ID NO: 230614 - DNA, 438 bp, Gossypium hirsutum
cggacgcgtgggctggaacatgataccatttatttctatcggtgcggaggacaaggtcctgaatttcagctcaagaccccacccggacaatttcctgttacctttgccgtagctggcgatttaggtcaaactggctggactaaatcaactttagaccacatcgaccaatgcaaatatgatgtacatctgcttcctggggacctttcttatgctgattgcatgcagcatctctgggacaactttggtgagctggtacagccacttgcgagtgccagaccgtggatggtaacacaaggcaaccatgaaaaggagaagataccattttttacagatgcatttgagtcctataatgcaagatggaaaatgccgtttgaggaaagtgaatcgacctcaaatctttattattctttcgaagttgcaggggtccatgttatcatg

SEQ ID NO: 230615 - DNA, 392 bp, Gossypium hirsutum
  unsure (1)..(392): unsure at all n locations
attttaactctttttcaactgaactctggctaaacggtatcgtttaagtcaggctttcatcaatggcaaaggaaccggttcgggtcctcgtacttggggctgcaggacaaatcgggtatgctcttgtacccatgattgctaggggagtcatgttgggtgctgaccagnccgtgatccctcacatgcttgatatcccacctgctgcggaggctttgaatggtgtcaaaatggagttggtggatgctgcttttcctcttctaaagggtgttgttgctacaactgattgttgtgaggcatgcactggagtcaatgttgctgtcatggttggtggttttccaaggaaggaaggaatggagaggaaagatgttatgtcaaagaatgtgtctatttac

SEQ ID NO: 230616 - DNA, 319 bp, Gossypium hirsutum
gatttctgcgattgtcctgatggcaccgatgaacctggtacatccgcttgccctactgcaaaattctactgcagaaatgctggacatgtttcactgttcttgttttcttccagagtcaatgatgggatctgcgattgttgtgatgggagtgatgagtatgatggtagagtgaagtgtcccaatacatgttgggaggctggtaaagtggcttgagataggctggtgaaaaaaattaatacttataaggtgggggttacattgagaactaatgaaatcgaacaggctaagatagtatttgcttaagatgaagcagttctta

SEQ ID NO: 230617 - DNA, 419 bp, Gossypium hirsutum
aaaaaaaaaaggctttcttccaaaatcaaacgatttcgatctctgatctgggatttgttaccatgagcgacggagaagacgctgtacggcgccataatgcgattgcggagtaccgaaagaaactccttcaacacaaggagtacgagtccagggttcgggcaggtagggagaatctgagagctgctaagaaggagtttaacaaaacagaagacgatttgaagtctcttcagagtgttggacagatcattggagaagttctcaggcctcttgacaatgaacgcctgattgttaaagcaagcagtggccctcgctatgtggttggttgccgcagcaaagttgacaaggagaaactgacttctggaactagagtggtccttgacatgacaacacttacaattatgcgggctctttcacgtgaa

SEQ ID NO: 230618 - DNA, 316 bp, Gossypium hirsutum
ctcaactaaacttataacgttcgatcgtttaacgcaaacccatttttaagtgagggaaaggtttcagttcagagtcataagcaacatcaatggctccttcaactctgacggctcttgcggaagagaaaaccttgcaggcaagcttcgttcgtgatgaagatgagcgtcctaaggttgcttacaaccaattcagtaatgatatccctgtcatctctcttgctggtatcgatgatgttgatggcaagaggggtgagatatgcaagaagattgttgaggcttgtgaggattgtggggtctttcaggttgtggatcatgg

SEQ ID NO: 230619 - DNA, 386 bp, Gossypium hirsutum
cccacgcgtccggttaagtttttgaggcttgcaaataggctcgggcagactccccataatgttgttgtggcacaggttttgtacagactaggattagctgagcagctccgggggagaaatgggggccgggttggtgccttcagctttgaccgtgcaagtgctatggctgaacagcttgaggcagctggaaatgaaccccttgatttctcctgtacaattatggtccttgggaagaccggagttggtaaaagtgctactattaattcaatatttgatgaagtcaagtttggcaccgatgctttccagactggtaccaaaaaggttcaggatgttgtgggtactgtgcatggtattaaagttcgtgtaattgacacaccaggccttct

SEQ ID NO: 230620 - DNA, 168 bp, Gossypium hirsutum
agttactggggacctaattagcctttcagaacaagaacttgtagattgtgataccagcaactatgggtgtgaaggaggatacatggactatgctttcgagtgggttataaacaatggcgggatcgatagcgaaaccgactacccctacactggtgtggattgcacatg

SEQ ID NO: 230621 - DNA, 407 bp, Gossypium hirsutum
  unsure (1)..(407): unsure at all n locations
tcgtgcaaatccaagcacaatcaagacaaaagaagaagaacaaagcaccagtggagtactgagctcagctaattaatggagttctgaaatcaccaatctcctcgtcctcctcctctttccgaaaaataaagatatcatcagacagactatttgctcgaatcccatccgtgagaatcttgttttgtttagttatgcatactttgatgggctgcttttgcttgaagaaactaggacacaagcctgggtatgaagcgcctatcaatcttgcttccgaaacaccttttacggtgaacgaagtagaagctttatatgatctgttcaagaagttaagcagctccataattgacgatggtctgattcacaaggaagaatttcagcttgcactctntaaaaacagcaataagcat

SEQ ID NO: 230622 - DNA, 235 bp, Gossypium hirsutum
tcggtgtgaaggctccacgtaagcagctaggcactaaagctgctcggaagtgagcaccgtccaccggaggagtgaagaagcctcaccgtttcagaccaggaactgtggctcttagggaaatcaggaagtaccagaagagcaccgagctcttgatccgaaagcttccattccagaggcttgtgagagaaatcgttcaagattttaagactgatttgagatttcaaagcagtgccgt

SEQ ID NO: 230623 - DNA, 295 bp, Gossypium hirsutum
cttcaaggaagtccttcccgagagtgaccaatgaggctgttcaaaaggctgctgctgctttgaagggctctgaccaccggcgtgctacaaatgttactgctagactcgatgcccagcagaaaaagcttaacctgccagtgctacccaccacaaccattggatccttccctgaaactttggagctcaggagagttcgtcgtgaattcaaggctaacaagatctcagaggttgattatggtaaagccattaaagagggaattaataaagttgctgacctttaagaagagcgttacat

SEQ ID NO: 230624 - DNA, 311 bp, Gossypium hirsutum
ccgaaggagaaactctttcccaaagcatttttgaactttctttcatggcggatatacttgcttctttgaggtctttaatggcctctcaatctcctcctctcgatgccttacttgtcgcttctgaagattatcatcagagcgaatatgtttctgctcgtgacaaaaggcgcgagtttgtttctggattcaccggaagtgcaagattggcacttataacaaaaaatgaagcaaggctatggaccgacggccgatatttcttgcaagcaacgcagcagcttagtgatcagcggaaactaatgcgtatcggagaa

SEQ ID NO: 230625 - DNA, 309 bp, Gossypium hirsutum
aagttatttcccattttttggtctttctttatgccaactgataatcaaatgaaagacatgaaaccgaattccataatgggatcgtcagtcaccgacggcgagatcgtgtgcgtaacaggcggctctgggttcattggttcatggctcatcaagctgctcttggaacgcggttatgtcgtccgagccactgtgcgcgaccctggcaactcgaagaaggtgaagcatttactagagctacctaaagcagagacgcactttgactctttggaaagcagatatagctgaagagggaagctttgatgatgcaat

SEQ ID NO: 230626 - DNA, 300 bp, Gossypium hirsutum
cgtttgagattatcaaaacgaagccttcttcgaatttcctcattcaagaagcaggagttttgctaagaccctcaccggaaagaccatcacattggaggtggagagttctgatactactgacaatgtataggccatgtcataagacacggtatgcatctcctcagacacagcaaagcgtgagcttctctgtgtagcaacttgaggatcgccgtacgtacttttgacacaacatgcagaaggggtacacactgtacttagtgctttgtctccagcgacgaatgcacattattgttaagacta

SEQ ID NO: 230627 - DNA, 414 bp, Gossypium hirsutum
cccacgcgtccggctgtctttcacaaagctatttagccggcttttcgccaagaaggagatgcgtatcctcatggttgggcttgatgctgctggtaaaactaccattctttacaagcttaagttgggagagattgtcactaccattcccaccatcggtttcaatgttgagaccgttgaatacaagaacatcagctttactgtttgggatgttggtggccaggacaagatccgaccattgtggagacactacttccaaaacacccaaagacttatttttgtggttgatagcaacgatcgtgatcgtgtggttgaagctagagatgagttgcacaggatgttgaatgaggatgagctgagggatgctgtgctgctagtaatcgcaaacaagcaagaatcttcaaatgctatgaatgc

SEQ ID NO: 230628 - DNA, 244 bp, Gossypium hirsutum
tgaataaaatcattatgagcacctaacactgacaggatttaccaaaacagccgagaatggcggccaatttctggacttctgctcactttaaacagcttttggaccccgaagaggtggatgtggttcatcaacaagataaaggtaaaggcatcacgcttgaagaatttaagctggttaagatgcatatggcgaactatataatgcaactgggtcaaaatgtttaagtgaggcaaagggttgttgc

SEQ ID NO: 230629 - DNA, 197 bp, Gossypium hirsutum
acgcgtgcgaattaaatcgagcgcacaagagaatgggaagtgatatgtgcggaacacggcatatattcaacggagcgtgacaatggagataatgttctacgactcaagaggatgagatgtttactacaatgaatacagttgaggtagggtcgttcctcgtgctgttcttatggatcgtgagccagggaccattgata

SEQ ID NO: 230630 - DNA, 262 bp, Gossypium hirsutum
tcgaaaaaaaatcattatgagcacctaacactaacaggattcaccaaaacagcaaagaatggcggccaatttctggacttcttctcactttaaacagcttttggacccggaagaggtggatgtggttcatcaacaagataaagataaaggcatcacgcttgaagaatttaagctgattaagatgcatatggcgaactatataatgaaactggctcaaaatgtaaagtgaggcaaagggttgtagcaactgcaggtacatata

SEQ ID NO: 230631 - DNA, 328 bp, Gossypium hirsutum
gcgcatttgcccaatctccaaacccccaaaagtccatcgccaccaggaggaaaaaagcaaaagaaccctaccgacgatgttccggcaagcgtcacgcctgttggctcgaactaccaccccatggaggggaagtcgagcattttcgtcagatgtaccagccacacccgctcaagattcgagcttcatcgaatcatggtccaaagtcatacccaacttagacccttccaagacaccatcttctttcatgaccccttgccccgccaccccttctgctatcccttctaaactcaccgttaaccttggtcgtccttatgcatctgagctcttc

SEQ ID NO: 230632 - DNA, 335 bp, Gossypium hirsutum
agctagctagctcttactcaaatggcaaccaaaacgatgatgttgcaaatatttccacttttcttctttttgttcagtgtctgcaactccattttccttggtgctaatggagatgacaatggtggttggcaaactgcccatgccaccttctacggtggtgctgatgctaccggcacaatggggggagcttgtggttatggaaacctgtacagtcaagggtatggaacgagcacagcagctttgagcactgcacttttcaacaatggcttgagctgcggtgcctgctacgagctccggtgcaacaatgatcctcaatggtgcattaggtcgaccat

SEQ ID NO: 230633 - DNA, 331 bp, Gossypium hirsutum
tcgtttgttttgaaggtgaccaacaacagcacaccacacagcagcgcatttagtcttgttcttgttcttcttctagttgtttccaatggaaaagctggaacacctcaaatctgccgtcgctgctctttctgaaatcagtgaaaatgagaaaaacggattcatcaaccttgtctcccgctatctcagtggagaagctcagcacatagagtggagtaagatccagactccaactgatgaagtggttgttccttatgacaccttgtctccctctcctgatgatcctgctgaaaccaaaaagctcttggacaaacttgttgtcttaaagcttaat

SEQ ID NO: 230634 - DNA, 156 bp, Gossypium hirsutum
atagccatggcttcctcaccaaaactcttctctatgtctatcctcttcctttttgcgctcttgtccatgcaaatccatgctagagagtacttcagcaaattcccaagagttaacatcaatgagaaagagacaacaaccagagagcaaaagcacgag

SEQ ID NO: 230635 - DNA, 393 bp, Gossypium hirsutum
gaaggtttagttttacaaacatggctagttccggtgtccttaagttggtttccatgattctcatggtgtgcatgacgatgatgagtgcacccaaggcagccaaagccgccatcacgtgcagcgacgtggtgaaccacttgatcccgtgcttgtcctacgtacaaaacggcggtacacccgctgctgcatgctgcagtggggtaaaagcactctacggcgaggttcagacctccccggaccgccaaaacgtgtgcaagtgcatcaaatcggcggtgaacggaattccgtacaccagcaataacctcaatctcgcagccggcctacctgctaaatgtggtctccaactcccttacagcatcagccccttcactgactgcaacaaggtgcaatgag

SEQ ID NO: 230636 - DNA, 403 bp, Gossypium hirsutum
aatggaattagcaatagctcagttttggtcaagtggcatgggaagtcacgagacgacaattgtagattttgagatcgtctttcatggaattggagtcaacagaactgaagtagtccttgatggaagtgaagcacccatcagaattgaggctgaagcactattggcctctgaaagacttgcccctactgctactttaaacaagataagagttccatatcgacctactgaggcaaaactttgtactcttccaactaatcgtgacaaattaccatcagggaaacagatactggcattgacactaacttaccactttaaattggaagatggagcagaagtgaaaccgcatattccattgctcaataatcgtatatatgacacaaaatttgagtcccaattttacatg

SEQ ID NO: 230637 - DNA, 361 bp, Gossypium hirsutum
tcttactcgtccgctccctctcttcttagggctgctgtatcttagttcttgggtgattagccaatcacagcagccatgtctctcctcaatgatctcatcaacctcaacctcagcgacaccactgaaaagatcatagccgaatacatatggatcggtggatctggtatggatctgagaagcaaagcaaggactttgcctggaccagtgacggacccttcaaaactcccgaagtggaactacgatggttccagtaccaatcaagcacctggagatgacagtgaggtcattctttatccttaagctatattcaaggatccatttaaaaaatgaaacaacatcttggttatgtgcgattcttaca

SEQ ID NO: 230638 - DNA, 394 bp, Gossypium hirsutum
ggcaagccttggttaatttatatcaagttgtggatgaagatgagaggtatgctaaactcgtagtggaagttggtggcattgtgaatgtgttagtaggctttcttgattcacctgagatggagattcaagaagaggcttcaaagattgtatctttactatcagggttcgatttgtacaagggggttttggttggagctgggattattgggcctttggttcgggttctggaaaatggcagtgagttgggtaaagaaggagccgctaggtgtcttcagagattgactgttaattcagacaacgcatggtcagtgtcggctcatggtggggtgactgcccttctgaaaatatgttcaagcggtgagttttgaaggggaactgatcggtcttgcttgtg

SEQ ID NO: 230639 - DNA, 376 bp, Gossypium hirsutum
cccacgcgtccggtgaaggggaggcaataattgggagcatgactgttgcaccaaacaagaagaatccccgagacgttgatataatggttaaatattcattgagtggacgacgttgtgtggtttcgagagttcaattctataagatgcgctgattttgttgcagagcatttcatcaccactactagctgtaggaggggaccttgtttgcatgttccttaaacgtttcaccaaacatttttttaattccttttctactttctttttcctcgaaaggtttttcctgagaaagaaaaacacataagatgcatgtacttcattaactcaatccaactgttttcttctcatttatgcttcatattgaatcttgtggtttctt

SEQ ID NO: 230640 - DNA, 395 bp, Gossypium hirsutum
  unsure (1)..(395): unsure at all n locations
cggacgcgtgggcgcatttcaaattgttatctctgaaggtgtcttaataaacgccttcgatttaccttcgatttccatttacttctctattgctacgtttttgaatttttagtgagcgaaaatgagagagtgcatttcagtccacatcggtcaggctggtattcaagtcggaaatgcctgctgggaactttactgccttgaacatggaatccagcctgatggccagatgccaagtgacaagactgtcggaggaggtgatgatgcttttaacacctttttcagtgaaactggtgctggaaagcacgtncctcgtgctgtctttgtggatcttgagcctactgttattgatgaagtgaggactggtacttaccgtcagcttttccaccctgagcaac

SEQ ID NO: 230641 - DNA, 375 bp, Gossypium hirsutum
catccttctatctttattttctcgcctgtgacgagaagccgacgctaccatggttcacgtcagtttctaccgcaactatgggaagacctttaagaagccacgacttccgtatgagaaggaacgattggatgctgagttgaggcttgtaggagagtatgggctccgatgtaagagggagctgtggagggttcagtatgctttgagccgcatccgtaatgctgctagggaccttctcactcttgatgagaagaaccctcgtcgtatttttgaaggtgaagcccttcttcgtaggatgaacagatatggacttttggatgagagccagaacaagctcgattatgtgttggctttgactgttgaaaacttccttgaacg

SEQ ID NO: 230642 - DNA, 400 bp, Gossypium hirsutum
  unsure (1)..(400): unsure at all n locations
caactttcctctggtcaggagagccttttaagtaccatcgtctttgctgggatgcttctcggagccaatacatggggccttttatcagataactacgggaggaggaaaggttttcttactatatctatggtaacttttggagctggattactgagcacattctctccaaactatttaacgcttgttcttcttcgaggtttggttggttttggccttggtggctcatctgtattcttatcctggtttctagagtttattccagcttctaatagaggcatgtggatggtagtgttttctactttctggacatttggatcaatttttgaggctactcttgcatggattgtcatgcccagattaaactggaagtgggtacttgcattttcngctgtgccatctt

SEQ ID NO: 230643 - DNA, 315 bp, Gossypium hirsutum
gagggcatgggatgtggatgatgacactgccacggccctaattggtaaccaaaagggcaaaggcattgtcaagcttgatgccaatttcaagatgcctgaacccaagcccgatcaccgcaaaggaatggccttgaactgtgaagaagctccgttggacaccgacatcaagaatgccggcaacgtcgtgctcttgaacactaaaaacctccctttggtcggccaggtgggtatgggggccgatctcgtcaggctggaaggtaatgcaatgtgctcccctggcttttcttgtgattcagccttgcaagttacgtacat

SEQ ID NO: 230644 - DNA, 431 bp, Gossypium hirsutum
tacacgccccctcttacttatatcattcaataattttcatcaacaaagaaaaatgagagagtgtatttcgattcacattggtcaggccggaattcaggtcggaaatgcttgttgggaactttactgtctcgagcatggcattcagcctgatggccaaatgcctagtgacaagactgttggtggaggagacgatgctttcaacacctttttcagcgaaaccggtgccggaaaacacgtccctcgagctatatttgttgatctggagcctactgttatcgatgaagtgaggactggaacataccgccaactgttccaccctgagcaactcatcagtggtaaagaagacgctgcaaacaattttgctcgtggccattatacaattggaaaagagattgttgacctctgcttggatcgtatccgaaagcttgctg

SEQ ID NO: 230645 - DNA, 361 bp, Gossypium hirsutum
aaatatggccaggagaagggttgttttggtgcagattttggcactagccttggccgctgttatgccattgctctcaggaggtgtggatattcaacaagttagggtgctggcagctaaattcaacgtgacttgcgtagtggtattcggagactccagcgtggatccaggcaataacaactatattgctacgccctttaagggtaatttcctaccgtatgggaaagacttcttcaaaggccacccgactggacggttcagcaatggaaggctagccactgattttattgctgaagctttgggttacacgaacgaaattcgacctttccttaacaagagattgagaccagttgatatcttgcat

SEQ ID NO: 230646 - DNA, 424 bp, Gossypium hirsutum
  unsure (1)..(424): unsure at all n locations
ctttcttctccatattttcctctgtggagaacccatccccctcctttagggtttagcagttaaaaagagaaaaacaaaagtatggcgaccgccactgtccccgccgccgcaaggcagctttctcctaaagaagccgacatccaaatgatgttggccgccgaagtccatctcggtaccaaaaactgtgacttccaaatggagcgttacgtcttcaagcgtcgcaatgacggaatctacatcatcaaccttggcaagacctgngagaaacttcaacttgctgctcgtgttattgttgctattgagaaccctcaggacatcattgtccaatctgcaaggccctatggtcagagagctgtactgaagtttgcacagtacactggttgtcatgcaattgctggaaggcacactccntgtaccttcacta

SEQ ID NO: 230647 - DNA, 367 bp, Gossypium hirsutum
cttttcaattagcttcttgaaagctttatttggttaagaacaggaaaccgcgtgaggagatggcaccaccaattgagactccaaccaagtcctctggctctcaccacgcttcacatcctcctttgaatgaaaggattctttcatcgatgagcagaaggtctgttgctgctcacccatggcatgatcttgagattggacctggagctccaatggttttcaactgtgtgattgaaatcccaaaaggtagcaaggtgaaatatgaacttgacaagataccagcgagggggtttgaaggatacttatcctgatgatttacttgcacctgttttaacggcagtgatagagaaaacacattttgatcctactg

SEQ ID NO: 230648 - DNA, 431 bp, Gossypium hirsutum
cggacgcgtgggatttttcctgcattttctccctcgccaaacagaaatcttagttcatttctagacgcagggaacgatggagaaagcgatcaaccgacagcaagttttgcttcaacaccttaatccttcagcttcttctttttcgtcgcaccaaaacaactctgccctctctgcatcggcttgtttagctggagatagcgctgcttatcaaagaactaatgtatttggagatgatgtggtgatagtagcagcatataggaccgcgctttgcaaatccaagcgagggggtttcaaggatacttatcctgatgatttacttgcacctgttttaagggcagtgatagagaaaacaaatttgaatcctagtgaagttggggatattgttgtgggaacggtcttggcaccaggatctcaacgagctagcgaatgtc

SEQ ID NO: 230649 - DNA, 360 bp, Gossypium hirsutum
cttgattcctttttgtcaaccaagcatcccacccggactgttagttcgccgtttgatcaatttcccaaccttccctttttgtttaatttcctaccccaattttcgccacaaatctaatccaaaatgagctggtggtgggctggtgccattggagctgctaagaagaaatttgaggaagatgaagcaccgagaagcttccagagcgttggtctgatcattggagccaccggcatagtcggcaacagcttggctgaaatcctcccgttatccgacacccccggtggcccatggaaagtatacggggtggctcgtcgggccagacccaactggaacgtcgaccattcaatcgagtacattcag

SEQ ID NO: 230650 - DNA, 287 bp, Gossypium hirsutum
ctcaaaacaatttcccattctctgtcatcctctcttcttaccacacaactccatgcttctccagagagcaaaaagattttttgtgtgttttacaaggccaacaattactttacgaataatcccaacttttttttttgtgtggagggagccttcgtgttgcacccatagctgtaatcacatgggcatcattatatttttacctactacaaagaatgaccttactgcgaactttaaaaacatatccctgatctccatgtgctcatatctaccccattccacctctctta

SEQ ID NO: 230651 - DNA, 424 bp, Gossypium hirsutum
tttcaagctaagaagaagaagcacaaagagaaccctaatggatcttcatttcgtcgccattttagctctcattatcttccttataaccccaaaaggtgtatatggtgcttcgttcacattcatcaaccggtgtgattacactgtatggcctggtatattagcaaatgcaggtactcctagtctgggaaccaccggattcgagctcccaaaagactcttctcgttcattccaagctccgacgggttggtccggtcgtttttggggtcgaacggggtgtaaattcgacggatccggctccggaacttgtgtcactggcgattgcgggtcgggtcaagtagaatgcaacggactcggtgctgttccgccggtgactctagcctgagtcacttcttggaacaaccggtggtcaagatttttacgatgt

SEQ ID NO: 230652 - DNA, 383 bp, Gossypium hirsutum
cggacgcgtgggcgaaggtattacatatgattactaggaattcatgggaaacagagccgttactgtcagaaggtaagtttagttctatggataatgatgagattgtgagttcacagaacctgtcttctactctgaggaaactgtgtatgtgggaaaagaagctctatgatgaagtcaaggctgaggaaaagctgcgcatgattcattcaaagaagcgtagccagatgaggattttggatcacaggggtgctgatgctcaccgagttgactccacacgaacttcaattagggccttatctactaaaatgagagttgcagttcaagttattgacaacatagcaattactataaataaggtgatggatgaagagttggggcacaga

SEQ ID NO: 230653 - DNA, 428 bp, Gossypium hirsutum
  unsure (1)..(428): unsure at all n locations
atttcctccacctccactcctctcctatcccaggttatttctaaatatgtaactggttaattttaattttaattgcagaaaatatttagtactcacaaaattaactacatttaccgcaatttcagcatttcgtcgttaatcctattttcttgtccgatcccatcccatccacactcttcgctctctttcctttaatctgttttcattttctgtcatttgcaaattgaatttttggttcttgaattctaggtttagggttttgagagatggggcaacagacgttgatctacagctttgtggctcgtggcacggtgatcctcgctgagtataccgagttcaccggtaacttcacaagcattgccggtcaatgtctccagaagctccctacttccaacaacanaattacctacaattgcgatggccacacc

SEQ ID NO: 230654 - DNA, 327 bp, Gossypium hirsutum
tcgctcatattttctcatctctcccactttttttcttggcttctaatacccaatggccggggtttctcaaatcttcacaccgagtctggtcttaaagctcttaatgacttcctctctggaaaatcttacatctttgggaataagctgaccaatgatgacataaaagtttatgctgctgttctgaagaaccctggtgattcttttcccaatgttagccagtggtataatttctgttcttctcaacttgcggccagctttcctggcaaagctgttggcgttggggttggtggcaaagctgctccagctgagtctggttaagctgaggct

SEQ ID NO: 230655 - DNA, 428 bp, Gossypium hirsutum
aaagtagcttgctatgtttctgatgatggttcagctatgctgacttttgaagcccgctctgaaactgcagagtttgcaaggaagtgggtgcctttctgcaagaagcacagtatagagcctagagctcctgagttttattttgctcaaaagattgattatctaaaggacaagataaagccttcttttgtcaaggagcgtcgtgcaatgaagagagaatatgaagaattcaaggtgcggatcaatgcccttgttgccaaagctcagaaaatgcctgaagaaggttggacaatgcaggatggaacaccatggcctggaaataacccaagagatcatccaggaatgatacaggtgtttctaggtcatagtggggggcttgatactgatggaaatgagctacctcgccttatctatgtttctcgtgagaagcg

SEQ ID NO: 230656 - DNA, 436 bp, Gossypium hirsutum
ctcaaattttagattctggcggttagggtttggtaattagggacgacgtggctcaatgacaatgagtgagaggcagacaatcgaccttgagcaaggatgggagttcatgcaaaaaggaattacaaagctgaagaatattcttgaaggcttacgagagccgcaatttagctctgaggattatatgatgctttatacaaccatttacaatatgtgtacccaaaagcctcctcacgactactctcaacagttgtatgataagtatcgagaatcttttgaagaatacatcacttcaacggtacttccatctctacgggaaaagcatgatgagtttatgttgagagagctagtgaaaaggtgggctaatcataaagtaatggttaggtggctttctcggttcttctactatcttgaccgctactttatagcccggaggtca

SEQ ID NO: 230657 - DNA, 416 bp, Gossypium hirsutum
tatatctctccctcacgcttctctgctcttcttcaaaaccttgttttcccctttaagtttgattgctattctttgcttttagcaaaactcctattcttttgttcttttttttttttaatatctgataatgttgtttcacttttagctcttcttctgttttttcctcgtacgggttaattttcgaccgctcaagatcaaaccgaacagataagttctaagcatttgaaaaagcaaaaaaacccaacaatggcgccgtcttttgatttatgggcaaaaggcagccataaaggtacaccagttgttgtcaaaatggaaaacccaaactggtcaatgttcgagcttgaaggtccatcccaagacgatttcctcatcggcaacaccccgacccggtttttgagaaaaagcgcgcgggaaaa

SEQ ID NO: 230658 - DNA, 382 bp, Gossypium hirsutum
atataattttgatagtataatatggagaaatggtatggggtttcagggctggtgtgggttttgagtttgttgtttggggttaaaggagaaccccaagtcccatgttacttcatttttggagattcattggtagataatgggaacaataatgaacttcgttcattggctagagctgattacttgccttatgggattgactttgctaatggaccgaccgccggttttcgaacggtcgaactacggtggatgtcatagctgaacttttggggtttgacgattacatccctccatactcaactgcaagtggtagacaaatactgggaggagttaactatgcatctgctgctgctggaatcagagaagaaactggcaacaactggga

SEQ ID NO: 230659 - DNA, 421 bp, Gossypium hirsutum
  unsure (1)..(421): unsure at all n locations
ctttgcttcactaaagtatacaaaccttgttcttctattttagcttctcttcacattgagaagctagctttttggtgcgtttgcttagcttcaacccacattgtctttgttgcgaagatggttgcacacaaatttaccgttgatttgaataaaccccttgtcttccaggttggtcaccttggagaaagttatcaggagtgggttcatcagcctattgtgagcaaggaaggtcctaggttctttgatagtgatttttgggagttcttgactcgcactgcctggtgggcaattccaaccatatggctgcctgttgtttgctggtgcatttcaatgtccgtacgtatggggcatacacttncccanaccgctttaatgggtgcttttggcattnttctgtggacatttgtggaatatgttttac

SEQ ID NO: 230660 - DNA, 331 bp, Gossypium hirsutum
cccacgcgtccgggagtagttgtagtcaaacagcttcctaggcgacctctctggtcactattttaagttgtaagcatggcagatggatcaaagcgtccatcagtgttccataaaatgcatggacagtcctatttcatttccaggcttacgcctagcttgcctgctcagaattataacatgactggtgcctataccaatggaggaattcatgttgctttacagccatcacgtcattccactgggttggcatatatgcccactgtttctcccatatttgtacaagctccatcagagaaaggttttactgggtttatggtggatttcctcatgg

SEQ ID NO: 230661 - DNA, 289 bp, Gossypium hirsutum
ctcgctacttccgtcctaattttcaggaaaaaatcgccgccgtgattcaaaactcagcccactgtctccgatcgtgtcaactcgtaacccaatctctcaaatatggatcgacccagattcgtaatcgacgccgtcgaagccgagcaaatggccaaacaatcaggcaagacggtgctccaactccttccttctttggtcaaatcagcccagtccgttgcccgcccgccgatctcgaagtaccaagttggggcagtcgggatcgggtcatcccgtcggatctttttcggag

SEQ ID NO: 230662 - DNA, 367 bp, Gossypium hirsutum
aaagaagcagcagcaactaaagctttgaggaaagggcgttggctttcgatgagtgcgggagacccttcattatactcaaagagcaagaccagaaaaccaggctgagagggatcgatgcccaaaaagccaacatttccgctggcaaagccgttgcccggatcctccgaacctctctcggacccaagggcatggataagattctccaaagccccgatggcgatgttaccatcacaaatgacggggcaacaatattggagcagatggatgttgacaaccaaattgctaagttgatggttgaactatctcggagtcaggattacgaaattggtgatggaacaactggtgttgttgtcatggctggagcact

SEQ ID NO: 230663 - DNA, 273 bp, Gossypium hirsutum
ataaaatccatatgaaatcacaaaagatcccaaatagccaaagcaataccaagcaaaaggttacatcacactacctgacttcaaggtatattacaaagctatagtaaccaaaacagcatggtcttagtgtgaaaatggacacatcaaccaatggaatttaatggtgaacccacaagatagatcacatatttggaggcatctttcttttgactgggcgccaagagcatacattgggggaagacagtcttttcaataaaccattctgggaaaact

SEQ ID NO: 230664 - DNA, 432 bp, Gossypium hirsutum
agaaaaacaaaaaacactcccgaaatggcacgcaagaagatcagagagtacgattccaagagattgttgaaagaacatttcaagaggctttccggtagagatttgccaatcaaatctgcacaaattacggaatcaactgatttcaatcagctagtagagaaggagccatggctttcgtcacagaaactggttgttaaacctgatatgttgttcggtaagcgtgggaagagtggtttggttggcttaaatctggattttgctcaagttattgctttcgtgaaagagcgccttggcaaagaggtggaaatgagtggatgcaagggacctgttacaactttcattgttgaacctttcatccctcacaatgaagagttctaccttaacgttgtctctgagcgacttggttgcagcattagcttttcagaatgtgga

SEQ ID NO: 230665 - DNA, 388 bp, Gossypium hirsutum
  unsure (1)..(388): unsure at all n locations
tgctcgtccacgtcatcgacggcttctccagcttcaccttgttcaaagcagacaatattggatgccgcagctgctatttccgagggaaaaaacgacgtcgttaacgagatcctgacccgattagctcaagctgctaactcaaaaggtagctcagaacagaggttgatggagtgcatgctatcagctcttaaatctagggttaactcggttgaaaacccaccaccggtggctgagttgttcagcaaagaacacgctgcttcaactcagttgctttatgatctgtctccttgttttaaactcgggttcttggctgctaatcaggctatcctcgatgccactttagacaaaccaagctgtaataangttcatgtttgtgattttgatttcg

SEQ ID NO: 230666 - DNA, 239 bp, Gossypium hirsutum
gtcaccgaaatgggacgtctggtttccgaagggtatgttttaaccggtttagcgcccaaccaccaagcaattgccaatctaaccacggaccaatttaaccaaaccagcccccccgaaccaaatcatatttcacctattaatccacaagtcccacacgggggaaagtattccaatgctgagaggatattttgaaaagtgtcttacgatacattgaggttgccgcataaagtgttggctca

SEQ ID NO: 230667 - DNA, 405 bp, Gossypium hirsutum
gtgaagaaaaaaatggttggtgtgtttaggttagtgagggggtatccgggaccaagtggctttggttcagcctccaccgcccaagaggttaccgaagggattgatggaaccaacttgactgctctagttaccggaggagcaagtggaattgggttggaaacttctagagtattggctcttcgtggagtccacgtcatcatcggtgcaaggaacatgaaagccgcgaatgaagcaaagaacaaaattgttagagagaacacaagagcccgtatagatgttctggagctggatctttgctctactagttcaatcagatcatttgccgacaatttcattgctcttcatcttccttttaatatcttaataaacaatgctggcatcatgttttgtccctttcagctttct

SEQ ID NO: 230668 - DNA, 394 bp, Gossypium hirsutum
gttcttcttgctgtgatcctgggtagcaccaggattttcatactattcctccggccgcgccacctatcatcttccccgaagtctgattccatggctgcccggagctttgttctttggcttcacgggcttggtgactctggtccagccaatgaacccatcaagacactctttaggtcttccgagttccgaaacaccaaatggtctttcccttctgcccctgaaaaccctgtcacctgcaattatggaatgcgaatgccttcttggttcgacattcaggagattcctgtcacagccgattctccaaaagctgaaagtgatgtccttaaagcagttcagaatgtgcatgcgatgatagacaaagaagtagctgctgggacggatcctaataacgtat

SEQ ID NO: 230669 - DNA, 415 bp, Gossypium hirsutum
  unsure (1)..(415): unsure at all n locations
tggaaatatcttatgatggagttcaaacatcaaacatcgacactctcattgatctttcttcttatgatgcctggttttgccctttctgatgtcaatcaagacaaagcagaatgttctaatcagctagtcgggcttgctccatgtctcccatacgtaggcggagaggcaaaaacacccaccatagattgttgcagtgggctcaaacaggtgctggataagagcaagaaatgcctgtgtgtgttgattaaagataaagacgacccgagcctcggcctcaagatcaacggtactcttgcgggaactcttcctagtacttgtcgagccagtgctagcatgacagaatgtatctccctgctgcacttggcacccaaatcccaggaagcanagttatntgaaggatatcaaaagctgatag

SEQ ID NO: 230670 - DNA, 338 bp, Gossypium hirsutum
aatcgatctcccgagagtgaagaagatacagagtacaaactagatcgaggtcttctgataaaagcttcaaattgatattgtctgggtagattgcttcttggtaaccaagatggttgtacttgcggcttcaattgtaagcaagtctggaaaagtgcttatctccaggcagtttgtggacatgactcgcataagaattgaaggacttcttgctgcttttactaaaatggtgggaacaggaaagcaacacacatatgttgagactgagaatgtgcgatatgtttatcaaccaatagaagctctttatttgcttcttgtaacaaacacacagagcaacattc

SEQ ID NO: 230671 - DNA, 344 bp, Gossypium hirsutum
cggacgcgtgggtgcgtcttcgacttcgcttgtctaattttcgagaacactggaatatactgatccttcagttttgtcagagtaaccatgggttgagatgctgatatggaagattatggattcgagtactctgatgaggagcctgaggagcaagacgttgatattgagaatcagtattacaattccaaaggtgtggtagaaacagaccctgaaggagcacttgttggttcttctgaagtagttatgcatggatgctgaaaaggctgagtgggagatgctaacatacatcaaatcagcagtgacacgaaactacagtgaagaatgtatgaacaatattatggact

SEQ ID NO: 230672 - DNA, 399 bp, Gossypium hirsutum
aaaaaatatgggtttccaaagaaacatattgggtttccttttcttgatattggctgcactaacaagcctctcttctagccttcctagtgaatactccatagtggaacatgagattgacgcatttctttcggaggaaagggtgttggagatcttccaacagtggaaagaaaagaatcagaaagtgtaccggcacgccgaggaggctgagaaaaggtttgaaaatttcaaggggaatttgaagtatatcctagagaggaatgcaatgagaaaagcaaacaaatgggaacaccatgtgggattgaacaagtttgctgatatgagcaatgaggagttcagaaaagcttacttgtcaaaggtgaaaaagcccatcaacaaagggataaccctgtcaaggacatg

SEQ ID NO: 230673 - DNA, 394 bp, Gossypium hirsutum
ggaagagcttcctttttttttttctctccttgggcaccgccgtcgatctcgatgcttatcctcgttttcaaacaagctcgaaaaagatggccaacgctgcatcgggaatggctgtgcatgatgattgcaagttgaagttcttggagctcaaggcaaaaagaacccaccgcttcattgttttcaaaattgaggagaagcaaaagcaagttattgtggagaagcttggtgaaccaaccgaaagctatgaggattttactaaatgtctccccgctgatgaatgtcgatatgctgtgtacgattttgattttctaacggccgagaacgtaccgaagagcagaatctttttcatagcatggtctcccgacacgtcaaggatcaggagcaagatgattta

SEQ ID NO: 230674 - DNA, 317 bp, Gossypium hirsutum
gattttccgaaagctgaattggccggaactctgaccaaaatacctcaggtgcaggtgatcaaagagaatgggaagaggaaaaatagagataaagaggatcgaaaacacaacaaatcgtcaggttaccttttgcaaacgcaggaatggcctgctgaagaaagcttacgaactgtcagtcctgtgtgatgctgaagttgctctcattgtcttctccagtcgaggccgtctgtatgagtactccaacaacaacataagatcaacaatagacaggtacaagaaggcttgctcagatacttctaacacaaacactgttactg

SEQ ID NO: 230675 - DNA, 247 bp, Gossypium hirsutum
  unsure (1)..(247): unsure at all n locations
tacaactcctgataattatcttcaaatgttggaatatanaaatggaaggagtgggctccaccatgcttggccgagcttccgctaggtactgtggttcaacggcagtgttcaatggacctgtgaggaagtggaagaagaagttggttcacgtgtcgccttcatccaccgctaaactctctcaatccaactggaacggttccgcctcctccaacatccttctttgtaggtggaccccactcttctttgc

SEQ ID NO: 230676 - DNA, 434 bp, Gossypium hirsutum
ctctccgcaacaatgtttcgatcagtagctcgatcggccgccggaaagcacctcctccgccgaggatatgccactgaatctgttcccgaccggaaggtcgcggttttgggcgctgccggaggtattggccagcccttggctctcctcatgaagcttaaccctcttgtttctcggctggctctctatgatatcgctaacactcccggcgttgcagctgatgtcagccatgtcaacaccagatctgaggttgctggatatgttggtgaagatcaattgaagcaagctttggagggatgtgatgttgtcatcattcctgctggggtgccaagaaagcctggtatgactcgcgacgatcttttcaacatcaatgctggaatcgtcaagggtctatgtgctgctattgccaagtattgccctaatgcacttgtaatatg

SEQ ID NO: 230677 - DNA, 391 bp, Gossypium hirsutum
gcttttccaatctgttgaagaacccagagccagagtacgagcagctgatgttttatggcaaaaacttgaattcacttgatacacagttcaaaactaaggagaacaaagttgagggctgtgtttctcaggtttgggtgagggcttatctcgataaagatacgaatgtcgtttaccaagctgattctgattctgttttaactaaaggactcgctgctttgcttgttaatggattgtctggaaggcctgtccaagaagttttgagggtttctcctgattttgcagtgctccttgggctgcaacagagcttgacaccttcaaagaataatgggttcttgaacatgttgaagttgatgcaaaggaaagcacttgaactgcttattgaagctgaaaa

SEQ ID NO: 230678 - DNA, 239 bp, Gossypium hirsutum
  unsure (1)..(239): unsure at all n locations
tcgttttttccaatctgttgaaaaacccagagccgagtactatcagctgaggggttatggcaaaaactttaattcactttatacacanttcaaaactaangataacaaatttgatggctttgtttctcatgtttgggtgaaggcttatctccataaagatactaatgtcgattaccaagctcattctcattatgatttaactaatttactcactacttttcttattaatttattgtctg

SEQ ID NO: 230679 - DNA, 440 bp, Gossypium hirsutum
  unsure (1)..(440): unsure at all n locations
gtggagagccttttttttgtgtagcgattctgagttagtcttttctttaagctgacagcttctctccagagttttataatgggtaaggagaaggttcacatcaaccttgttgtcattggccatgtcgactctggcaagtcgaccactactggtcatttgatctacaagctaggtggtattgacaagcgtgtgattgagaggttcgagaaggaggctgctgaaatgaacaaaaggtcattcaagtatgcttgggtgcttgacaagcttaaggctgagcgtgaacgtggtatcaccattgatattgccctgtggaagtttgagaccaccaaatactattgcaccgttattgatgcacctggacaccgtgactttatcaagaacatgattaccggtacctcacangctgactgtgctngtctcattattgactcacccactgg

SEQ ID NO: 230680 - DNA, 367 bp, Gossypium hirsutum
  unsure (1)..(367): unsure at all n locations
tcgtttatactgtgacaccttataacattnaggggttgaaataactggtggaatgtgggcctcatcctccacacttaaaaactggtgcaaagtatatcataagatatgatggacaaagactttatcttcgttacctgaacaaaagcatttatcatcacctatagcttggttataaggtggagcgacatttaaatgatggagattatgttctttttaatcgtcaacccagtctccataaaatgtcaatcatgggccatagaatcctaattatgccatactctacctttcgcctaaatttgtcttttacttcaccatacaattctgattttgatcgtgatgaaatgaatatgcattttcctcaatcatt

SEQ ID NO: 230681 - DNA, 333 bp, Gossypium hirsutum
tcgttttactgtgacaccttataacattaaaggggtgaaatatcttatggggtatgggcctcatcctacaccattaaatactctttcaaaatatatcatattatatgattgacaaacactttatcttcgttaccttaataaaatctttcttcatcacctaaatctacattataattcttgacccactattaaatgatgcatattattttcctttttaatcttcaacccaatctccataaaatttcaattattatctatataattccaattattccatactctactttttccctaaatctttacttttacttcaccatacaattcctcattatt

SEQ ID NO: 230682 - DNA, 341 bp, Gossypium hirsutum
atcgcagtgtggagtgtacagggagcgtccaagccatgatttccgcttttggagtgcgtccatgatggttggggtgtttgtgtgctggtgggtgtgccaaagaaagacgatgcattcaaaactcatccaatgaatctactaagtgagaggacccttaagggtgctttttatggcaactataaaccacgcactgatattcctatggttgtcgacaaatatttgaacaaggagctggggctggatatggacaagttcatcacacactctgtgccttttgccgatataaacaaggcattcgactacatgcttccaggtataagtctgagaagcatgattcattt

SEQ ID NO: 230683 - DNA, 412 bp, Gossypium hirsutum
ctgtatcttagttcttgattaattagccaatcgcaggagccatgtctctcctagggatctcatcaacctcaacctcggcgacgccactgaaaagatcatagccgaatacatatggatcggtggatctggaatggatctgagaagcaaagcaaggactttgcctggaccagtggcggacccttcaaaactcccgaagtggaactacgatggttccagtaccaatcaagcacctggagatgacagtgaggtcattctttatcctcaagctatattcaaggatccatttagaaaaggaaacaacatcttggtgatgtgcgatgcttacacaccagccggcgaacccattcctaccaacaagagatttaatgcggccaaaatctttagccaccctgatgttgttgcttgagagcct

SEQ ID NO: 230684 - DNA, 426 bp, Gossypium hirsutum
  unsure (1)..(426): unsure at all n locations
cccacgcgtccgagcaatgggacctactgttggccaaatgtatcctcctggcgctccacattttggacagcaactcttctatggtcaaggccctcctgctatgatttcaccccaacctggatttggatatcagcagcaactagttcctgggatgatgccaaactttttcatgccaatgcttcagcctgggcagcaaaatcagcgccaaggaggcagacgatccggagggggcccaatgcaacaaacacatcaaccacttcccttcatgcagccacagatgattcctaagggccatggctatcgttatcccccaggtcgcaacatgcccgatgttcctggacgtgtgcttcctgttccttacaatgtangaggaatgccattccgagatgctgcattttcacaacccatggcaactggagctctcgc

SEQ ID NO: 230685 - DNA, 294 bp, Gossypium hirsutum
atcgccggggctgtgggaataagatggcggggaagaagaatgttctgtcggctcttgcagtttacgcggaagagtcatagcccgagtctgatggcgagactggaatcgaggcgatgggcagcgcggctgaggagaaaggcggattggtatctgatgcctatggggaggatgacttttctcgtctagggggtgacgaagatggctatgaaaaaaaagaggatgagaacagtggacagtctgaagatgacgattcagagactgaaaaacctgaggcttattacccaaacgagaagc

SEQ ID NO: 230686 - DNA, 382 bp, Gossypium hirsutum
  unsure (1)..(382): unsure at all n locations
tattctttgaaggataccgtgctggaacttgagtttcaaggtgtcaaaaggcagtgcaccatgcttcaaacatggcctgtacgtacacctagacctgttgcgacaaaacttgctgcagatacccctctgcttactggccagcgtgttcttgatgctctattcccctcggttcttggtggaacttgtgctattcctggtgcttttggctgtggcaaaactgtgattagtcaagctctttctaagtactcgaattctgatgctgttgtctatgttgggtgtggggagcgtggaaatgaaatggctgangttcttatggatttccctcaattgacaatgacattgnctgatggtcgtgaaaaatctgtcatgaagcgcacaacac

SEQ ID NO: 230687 - DNA, 286 bp, Gossypium hirsutum
agcatcatgagcttaaggtgaaggactcaaagacccttctctttggtgaaaagcgggtcacagttttcggtatcagaaaccctgaggaaatcccatgggctgaggctggagctgagtatgttgttgagtctactggtgtttttactgacaaggacaaggctgctgctcacttgaagggtggcgcgaagaaggttatcatttctgctcccagtaaggatgctcccatgtttgttgtgggtgtcaatgagaaggaatataagcctgaccttaacattgtctccaatgc

SEQ ID NO: 230688 - DNA, 337 bp, Gossypium hirsutum
cggcctctctgcttcatctatcttttatctaatagctcaagaccagaaaggatatcgaacaatggtgaagatctgttgcatcggagccgggtatgttggtgggccaacaatggctgtcattgcactaaaatgcccagaaattcaagtagctgttgtggatatttcagtgccaagaattagtgcctggaatagtgatactctccccatatacgagccagggctcgacgaggtggtgaagaaatgcagaggaaagaaccttttgtttagcagtgatgtggagaagtatgtttctgaggctgatatagtgtttgtttcggttaacacacccaccaaaact

SEQ ID NO: 230689 - DNA, 394 bp, Gossypium hirsutum
ctcaacgctctccttctgtttctggtcaagccaatctcaaaagactccccttttagctcacagctcctctcttgagtactataatgggtaaggagaaggttcacatcaacattgtggtcattggccatgtcgactctgggaagtctacaaccactggtcatttgatctacaagcttggtggtattgacaagcgtgtgattgagaggtttgagaaggaggctgctgagatgaacaaaaggtcatttaagtatgcatgggtgcttgacaagcttaaagccgagcgtgaacgtggtattaccatcgatattgccctctggaagtttgagactaccaaatactactgtactgtcattgatgcccctggacatcgagacttcatcaaggacatgattac

SEQ ID NO: 230690 - DNA, 316 bp, Gossypium hirsutum
  unsure (1)..(316): unsure at all n locations
cacgccgtcctgatctactagtggaaaccgagtnntaccggtgttgccatgtttnngcgttattcttaattcgaagaggaaaggcatnccggtcccnctctcctgatccccaccgcaggatgagattcgacaaaacccttttcaatgagaccaagctagatctatctagatggaatgtatctgccagtggtgctcgcccgaacccacagggatcgtttagatatggttcgattaatgtgactgaagtttacgtcttgagaaacaagccaccagagactattgatgggaaaagacgagcgacactcaatgggatatc

SEQ ID NO: 230691 - DNA, 441 bp, Gossypium hirsutum
ttctctctctctgggtctcaaattccggggctgcgtgcccctaatacgaaaccgagcaaaacccaactctgatttactcctaattggtactggccgggtattttccatcactttcctgggaaaaaaaagcataaaaggaaaaagtttcaggagaaatgtactcagctattcggtcgttaccgttgaatggaagtgtaggagattatcaagggtcgtttgatggaaccaacttgcctagcgatgcttgtttggttttaacaacggatcccaagcctcgactccgttggacagctgagctccatgaacgtttcgtcgatgctgttactcaacttggtggccctgacaaagcaaccccaaagactattatgagaacaatgggagtaaaaggccttaccctctatcacttaaaatcacaccttcagaaataccggctggggaaac

SEQ ID NO: 230692 - DNA, 378 bp, Gossypium hirsutum
tcttttagaccttcgctcttttaatctccacgggcgatcttcaaacaggagggagagtggcttcattatttaatttgcagagaatctgatgttgatgttaatggatgacccaaatgatagggatagaaaattcaaataacacctttacactattaaggatcgttgctcaaaaaccaacgagatgtttatttatccactgcagccttattggttctggacattttatccccacattactcagctccgttgatatcctcaaattaaccaagtccccctccgctaggatccttattatcaccttcttcaagacatttatgcctcctccaccaaactaaactgagaatccattaacatattgtttagaactttatctacaaa

SEQ ID NO: 230693 - DNA, 348 bp, Gossypium hirsutum
caaatttccaaacactagttttcttttactgcattttgctaagacaagccgagaaacaaagtgaaatattgctgagagtttgtggagatgagtgccttgagtgagggtcttacccaaattgtgatccctttagcttccttggtgggcattggttttgctttgcttcaatggtttttggtctctagggtgaagctattatcacaggattcaagcaatggatataaacaaaaactgattgaatctgatgaagaagaagagggtattaacaatcttgagatttccatcaagtgtactgagattcaacatgccatttctgttggtgcaacctctttcctctttactgaatac

SEQ ID NO: 230694 - DNA, 326 bp, Gossypium hirsutum
  unsure (1)..(326): unsure at all n locations
cttggttcctgtagatcttgttattgatcattcagttcangttgatgtggcaagatcggaaaatgcaatgcaagcaaacatggaacgtgaattccaacggaacaaagaaagatttgctttcctcaagtggggttctaatgcatttgataacatgcttgttgtcccccccggatcaagaatcgtacatcaagtcaatttaaagtatcttggaagagtcgctttcaacacaaatggcgtgctttaccctgatagcgttggttgaacagattctcatacaactatcattgatagtttgggtgttgctagctaacgagcttggggggtag

SEQ ID NO: 230695 - DNA, 424 bp, Gossypium hirsutum
ccaaagtaccctttacattttccctttatttcctttgccgcccctagggttttattacattccccacatggcttctgcagatgtcgagtaccagtgcttcgtcggaggtctcgcatggaccatcaacgaccgtgctctcgaagaagccttcagtgcttacggcgagatcgtcgattcgaagatcattaacgatcgtgagactggaagatccagaggctttggcttcgttactttccgtgatgagaaatctatgaaagatgctattgaaggaatgaacggtcggagtctcgatggaaggaatataaccgtcaacgaagcacaatctcgccgaaacggcggcggcggtggtggtggaggaattggaggaaacggtgggtacaaccgtggaggcggtggatatggtggtcgccgtgaaggtggatat

SEQ ID NO: 230696 - DNA, 326 bp, Gossypium hirsutum
tggcctgagtcaggtgtggggtctctcttcctggagcgtttttcggtgacttttggaagaagtcgaagcttggtttcactggctatccttcacctcaggtttctacgtctgttgtagagccttacaacagtgtgctgtccacacattcactccttgagcacactgatgtttctgtgcttctcgacaatgaagcgatatatgacatctgcaggcgttcccttgacattgaacggcccacttataccaatcttaaccgcctcgtctctcaggttatatcatctcttaccgcctctttgagggttgatggagccctgaatgtggatgtg

SEQ ID NO: 230697 - DNA, 333 bp, Gossypium hirsutum
gagaaagggacgtcactctggatatggtaagcgcaagggtacaagggaggcaaggttgcccacaaagatcttgtggatgagaaggatgcgtgtacttagacgcctactccgcaagtacagggaatcaaagaagattgacaagcacatgtaccatgacatgtacatgaaagtcaagggtaatgtgtttaagaacaagagagtcctcatggagagcatccacaaatccaaggctgagaaggccagagaaaagacattggctgaccagtttgaagctaagagggctaagaataaggcaagcagggaaaggaaacatgctaggagggaagagcgatt

SEQ ID NO: 230698 - DNA, 411 bp, Gossypium hirsutum
cccacgcgtccgattgtgaacaaggatttatatgatagaagagaattatgtttgtttctttgttcatttacagggtggatttcgtaagaaaatgatgaagtttctttccaaagttgttcggttttttataaaatgcatgcattgtgttctatcggttggtccaatcccttcccacatcggcttcgtgatggacggcaatagaagatacgcaaggcaaaataagctgaaacaagtggccggccatgaagctagttacttttctctcatgtccatgcttatttactgctatggactggggatcaaatatatgacggcctacgctttcagcatcgataatttcatgtgcaggcccgaagaagttcaatccatcatggatctcatgaccgagaagtttgagctcttgtgtcgaaa

SEQ ID NO: 230699 - DNA, 270 bp, Gossypium hirsutum
gggcaagggatctcgatttcaatctcgttctctccggcagcaccgtctacttggttccggtgagatctcgacgttgtatccgatctcgacccgttccatagcatctcactgaactagatccgattaaccatggctccagtttcagctctggccaaatacaagctggttttcttgggggatcaatctgttgggaagaccagtatcatcactcgcttcatgtacgataaattcgataacacctaccaggctaccattggaattgacttttta

SEQ ID NO: 230700 - DNA, 463 bp, Gossypium hirsutum
  unsure (1)..(463): unsure at all n locations
ctcatggcaaaactgttactcaggttaccctagcacatttgaaggagaagccagctccatcaactccgacgtcttcatcgtccagctacagtgccagcagtggggtcagatcagcagcagcaaggtggctaggtgctgggaacgggagccgcacgcttggatttgctggggggaatggtgggagtaaaagtattagtagtactagtaggattgggtcattgggtgcttcaagttctagtaattcaatcactaatatgaattttgatgggaaagggacttatttaatctttaacgttggtgatgctatctttataagtgatttgaattctcaggacaaggatccaataaagtctatcaatttcagtaattcgaaccctatctgccacgcatttgatcaaaatgccaaagatggccatgatttgcttatgggggtgaaatctgtgatgtntactctgtgtcactg

SEQ ID NO: 230701 - DNA, 468 bp, Gossypium hirsutum
  unsure (1)..(468): unsure at all n locations
ggcaagtcagagaatgacatgttgcaatgtttcattgaatctaagtataaagatggtcgcccaactaccgaggctgaagtaactggcttactgattgctgcgctctttgccggacagcataccagttctatcacctctacttggactggtgcctatctccttcgtcacaaggagttcctatctgctgtgattgaggagcagaagcaaataatgcaaaagcatggaagcaaggttgatcatgatatcttatctgagatggacaccttgtatcggtgcattaaggaagctctgagacttcaccctccactgattatgcttctacgtagttcacacagtgattttagtgtaaaaacgcgagatgggaaagaatatgacatcccaaagggtcacatcgttgcaacatctncagcatttgccaacaggcttccttacatttacaaggatcctgacacatatgatcctgataga

SEQ ID NO: 230702 - DNA, 393 bp, Gossypium hirsutum
ggatgctacaaccttctatgtgcaggctttgtgcaaacaaatagtagaattgccattggggctgccatttctcctgtctcacaatatgatgctaatcaatatgatattaccatcctcatttggaaggatcctaagctaggaaattggtggatggggtttggtgataataacctggtaggttattggccagcagagctatttactcacctagcagaccatgccaccatggtggaatggggtggtgaagtaatgaactcaagggccaacggcaagcacacgtctacggaaatgggctccggtcactttgctgaagatgggtttggaaaatcgagctatttccggaacttggagcttggtgatgccgataatagcttgagttcggtccatgacata

SEQ ID NO: 230703 - DNA, 390 bp, Gossypium hirsutum
atttctctcaatttcttcacatttcttgattgtatacataaacatcccatctccatcacattctcaagcctattcaatggagtttttaatgaaaatatgtctccttttcctttgtggcctcatttctcactttgttaacatgtttttccagaagagaaatcagcaatgctatatgttgggttatgaatgtttcaaggctgccgatgacaggaagctcgacactgatgcgtgcgtgaaagttgtgttgaggaacaagaatcttggtctggaccaatacaggtttcttttaaaaaccattgttagttctggtcttggtgaagaaacttatggtccaaagaatgttattgatggtagagaagagtttccttcggaaaacgatgcacatgccga

SEQ ID NO: 230704 - DNA, 171 bp, Gossypium hirsutum
ggaacttgaaggtttcagatttcggtctcagcgccgtaactgaacagatccgagccgacggcatgctgcacaccttgtgtgggaccccagcttacgtcgcaccggagatcttgtcaaagaagggttccgatggacctaagggggactggtggtcatgcggggtattccttt

SEQ ID NO: 230705 - DNA, 412 bp, Gossypium hirsutum
atggccaacgccgacctggaggtgaagatccgtgactggcacctgaagcagagcccagctagccctgagcgggactacagcccctaccacaagaccattgaagagctgcgggacaagatcctgaccgccactattgaaaacaaccgggtcatcctggagattgacaatgccaggctggctgcggatgacttcaggctcaagtatgagaacgagctggccctgcgccagagcgtggaggctgacatcaacggcctgcgccgggtgctggatgagctcaccctgtctaagactgacctggagatgcagatcgagagcctgaatgaggagctggcctacatgaagaagaaccacgaggaggagatgaaggaattcagcaaccaggtggtcggccaggtcaacgtggagatggacg

SEQ ID NO: 230706 - DNA, 453 bp, Gossypium hirsutum
  unsure (1)..(453): unsure at all n locations
cggactcgtgggctcccctttctcacctaactcttgtttgattgctttctttgtttcaattaaattatctcccaatttttcttttttagttttctttatttttcctctccttgatcgttgttagctgcaaaaaggttacgtcagaaatggattttttcttcagaggcctaaatgaggaattttcatcttcccaaatggacattcttagatgtccatttttgagaaacattaacgagccaactaacttttccttctcgtctgccttgccttttcccatgccggtacgaggagccaaaggtccaatatttgaagatggacccaatttcgacatggcattcaggcttttccatggacgtgacggagtagttccgctatctgtacaatcatccttgcgtattgagaaagctgagaccgaaacagccccaccaatagtcaatccttntgctgcaaagg

SEQ ID NO: 230707 - DNA, 380 bp, Gossypium hirsutum
cttcttcttctcttcatattggttttttcccttagcactccacgacacagatccgaggagttggggaaaaccctcacacaaattctctctctaaatcttaaccgagaaggtctccaaaaaagactaccctttttgcccatttactctccttattcaacaaattcggcatcacatcccccaaaatagtcgcttttttatctcttgctctcttcatctgcttcaagtcatggctggtgtagcacccgaaggatcccaattcgatgctcgtcaatttgatcagaaaatgagtgatttgctccaaacggatggagatgatgttttcacttcttatgatgaagtttatgacagttttgatgcaatgggacttcaagagaaccttc

SEQ ID NO: 230708 - DNA, 381 bp, Gossypium hirsutum
gcttctggtcaagccaatatcaaaagacttccgttttagctcacagctcctctcttgagtactataatgggtaaggagaaggttcacatcaacattgtggtcattggccatgtcgactccgggaagtctacaaccactggtcatttgatctacaagcttggtggtattgacaagcgtgtgattgagaggtttgagaaggaggctgctgagatgaacaaaaggtcatttaagtatgcatgggtgcttgacaagcttaaggccgaacgtgaacgtggtattactatcgatattgccctctggaagtttgagactaccaaatactactgcactgtcattgatgcccctggacaccgggacttcatcaagaacatgattactggt

SEQ ID NO: 230709 - DNA, 462 bp, Gossypium hirsutum
gcattctccaaatttctaatttcaaggacgattcgagccctattgcatgggattgctctgcgtgggtacgtacatacgcattgtttttggaagaaagactcgagtgctatagtattctgaagtatgacatagagccgagcgtctcccgagacctgtcctggggcaggataaggattacagtagaaccacagagttggacagcgaagaattgttagagcaactacctgctctgcagcaattgctttatcgtctcattggttgccggccagaaggtgctgctgtagcgaactatgtcatacaatatgctttggctctggtattgaaggagagcttcaaaatatattgtgctatcaatggtggaatcatcaatcttgtggacaagttttttgaaatgccgagacatgaagctgtcaaagctcttgatatatacaggcgtagccgtcagcatgttatgatatatgc

SEQ ID NO: 230710 - DNA, 215 bp, Gossypium hirsutum
cttgagtgttgaaggtattgattctttaacttcaaaatatcgtgaagttgctgagcaattcaaaggacagggaattggtttccttttgggtgatcttgaggctagtcaagctgccatccagtattttggagttcaagaaagccaagtacccctaatcatcattcagaataatgataggaagaagtatttgaaaccaaatttgcaggctaatgaca

SEQ ID NO: 230711 - DNA, 467 bp, Gossypium hirsutum
  unsure (1)..(467): unsure at all n locations
cttaattggagagcacattgactatgaaggatactcagtgttgcctatggcaatcaggcaagacacaattgtggcaatccgaaagcacaaagaaggggaggctgaaaagcttctaaaaattgctaatgtcaatgataagtatgctacctgtacttatcctgctgatcctaaccaggaaattgacttgaagaatcataaatggggccattatttcatttgtgggtataagggtttttatgaatatgccaagtcaaaaggagtgaatgtaggtaagccagtgggccttgatgtccttgttgatggaacagttcctacaggttctggtctatcaagctctgcagctttagtttgctcagctacaattgctattatggctgcttttggtgttaacttctcaaagaaagaaattgcccaactaacatgtatttgtgaacaacatatnggaacacagtcaggtggaatggacc

SEQ ID NO: 230712 - DNA, 301 bp, Gossypium hirsutum
tctcttaattggagagcacattgactatgagagtgatactcaatgttgcctatggcggtcagccttaacacaattgtggcattccgtaaccacaatgaagggttggctgaaaagctcctaaaaatggctaaggtccatgatatgtgtcctcctgtgcttatcctgctgattctaacccggaaattgacttgaagaatcataaatggggccacaatttcatttgttggtataagggttattatgaatatgccaagtcaaaaggagtgaatgtaagtaaaccattgggccttgataaccatgt

SEQ ID NO: 230713 - DNA, 462 bp, Gossypium hirsutum
caagtttaaatattattgttttcccattttgtgattaaacaaaatcaaaatctttaagcaaggaatcagttcaaaggtggtggaaaattatattcgacagtagcttttcctgcaaaggtttgattcttatagataagtttcaatgcccaacaacaagtctaaacccggaccaagccgaatgtctgtttacctttacattcccaatattattgggtatataagaattctgttgaattgctatgcttttgctatatgcttttccagcaaaagtctttttgctgctctgtattttctaagctttgtttgtgatgctgtggatggttggtgtgctcgcaaattcaaccaagcttcaacgtttggagctgtcctggacatggtaacggataggattagcactgcttgtctactggttatactttctcaagtgtataggcctagcttggttttcttgtcattgctagc

SEQ ID NO: 230714 - DNA, 398 bp, Gossypium hirsutum
gtcctttgatgcgtacggaatggaaggggaagagattcacgctgctcctaataaccatcctttcgccgtcggcgatgagagctactcgaattacggctcttactccaacttcaccgatgaccagctgtttaccggggacgggggcgaagtggcggtagatgacgtcactacctctgctgatatcttcggattcggatcctctgatccaactcctgcctactcgcaatctccattcgctactgcgattcctgttgagaacggaaatggaaccaatggatttgatcttggaaacgatggcgttttcgcttctgatggaccggtgcttcctcctcctactgagatggagcctgaggaaggcttcgttcttcgcgagtggcggcgtcaaaatgcgattctgc

SEQ ID NO: 230715 - DNA, 454 bp, Gossypium hirsutum
gaaagctcggccgcctgcacgtgcccgtacttactggtcggtcgactcatccggtccttttatgcgtacggaatggaacgggaagagagtcacgctgctcctaataaccatgctttcgccgtcggcgatgagagctactcgaattacggctcttactccaacttcaccgatgaccagctgtttaccggggacgggggcgaagtggcggtagatgacgtcactacctctgctgatatcttcggattcggatcctctgatccaactcctgcctactcgcaatctccattcggtactgcgattcctgttgagaacggaaatggaaccaatggatttgatcttggaaacgatagcatatccccttctgatggaccggtgcttcctcctcctactgagatggagcctgaggaaggcttcgttcttcgcgagtggcggcgtcaaaatgcgattctgctcg

SEQ ID NO: 230716 - DNA, 310 bp, Gossypium hirsutum
tctgaacgtgcgtcaagaaacgccttggatttacctgggtttcgcatcgactgctctgttgctacgtgtatgaataactagtgagcgaaaccgagagagtgcattacagcccacatcagtcaggctgatattcaagtcggtaatgcctgctgggaacactactggcttgatcacggaattcagactgatggccagatgccacgagacatgaccgtcaccagaggtgacgatgctgttaacaccgttttcagtgaaactgctgctaggaagcacgaccctcgtgctgactgatgggatcttgagcctactg

SEQ ID NO: 230717 - DNA, 286 bp, Gossypium hirsutum
ctcaactaaacttataacgttcgatcgtttaacgcaaacccatttttaagtgagggaaaggtttcagttcagagtcataagcaacatcaatggctccttcaactctgacggctcttgcggaagagaaaaccttgcaggcatgcttcgttcgtgatgaagatgagcgtcctaaggttgcttacaaccaattcagtaatgatatccctgtcatctctcttgctggtatcgatgatgttgatggcaagaggggtgagatatgcatgatgattgttgaggcttgtgagga

SEQ ID NO: 230718 - DNA, 376 bp, Gossypium hirsutum
  unsure (1)..(376): unsure at all n locations
ggaaaaaagggtgttaaagaccaaaggccaaagccattttttctttcttttggtttctggggagagaccagtttgggcaaagatggtgaagaagtggaaaaaggctttgattttggtgctgtttacagtctgcattctggggtttaagccaagatgtgtcaatggcgaaacagatcaagcagatgcttctgctctaggggttatgtataccagcttanattcaccacagcagctaacaggttggactgctagcaatggtgatccatgtgggcagtcctggaaaggtgttacttgctcgaacaaacgcgtcactgaaattaaactgtcaaatcttggactttccgggtcggtgggttacaagcttcaaagttgacat

SEQ ID NO: 230719 - DNA, 409 bp, Gossypium hirsutum
  unsure (1)..(409): unsure at all n locations
aagcattagcaaccatagccatggcttcctcaccaaaactcttctctatgtctatcctcttcctttttgccctcttctccatgcaaatccatgctagagagtacttcagcaaattcccaagagttaacatcaatgagaaagagacaacaaccagagagcaaaagcacgagaccttcgttccccagaccacccaaaagccagaagaacaagagccaaggttcattcctgaaacccaaaatggttatggcctttacggccacgagtcaggctcaagccggcccagtttcaccaccaaagaaacctatgaaccctatgtcacccctgttagattccaccctgatgagccctataacagcatccccgaatcctncaacaataaagacacttactactacaacaagaatgccta

SEQ ID NO: 230720 - DNA, 457 bp, Gossypium hirsutum
aagaaactgaactgagcgacaagcaaaagaaagagatcgccaaatggttcctcctcaatgctcccgcaggcgaaatccagtacgttgccaaagatttaaaatccgttttgaataatgatgacgtctacgatgaggcggcatcggaagcatttcctgtttataacaaatctcacatgatttgcctcgaaatgcctggtagattcggagatgtgctggttacatcatatggggagcctcagggtaatgagtatctagaccccaagactgcccaagttgctatagttgaccatgtcaaacaggtttgtacagaggttagacctgccactgatgaggaacttcccactccatatgttgaggaataccgatgtgctctggaagcagaaatgctgaagtatgttagtgaagcttatccaaaaggttcttgttcagtgtactgcattaatggaaaagatgtgga

SEQ ID NO: 230721 - DNA, 428 bp, Gossypium hirsutum
gtgaaagtgaaaatggaggtttacagcagaaggctaatggttctggtgtttgcatgggcactagtaagcatagggtacgcgcaagagtcgaactcgaccactctggttccagcaatactgacttttggtgactcagtggtagatgtgggcaataatgattatctccccaccatcttcagggctaattaccctccttatgggagggacttcgccaaccaaaagcctactggtagagccaattatggctagtcggcctctgacataactgcgctaaactctggagcattctcaccaccaaagaaacctatgaaccctatgtcacccctgttagattccaccctgatgagccctataacagcatccccgaatccttcaacaataaagacacttactactacaacaagaatgcctacgaagtcactaagcag

SEQ ID NO: 230722 - DNA, 365 bp, Gossypium hirsutum
gggttttcttccgccgttctaaatcacagaaagctttgaagaagaagcttttggaggtgcaaaacatggggccgaagaaaggtggaaaggtggctgtgcccgccaagaagaaacaagagaaggttgtcaatccgttatttgagaagcgtccaaagcagttcggcattggaggggctttacctcctaagaaggatttgcatcgattcgtgaagtggcctaaggttgttcgtattcaaaggaagaagaggatcctcaagcagaggttgaaagttccaccagcattgaaccagttcaccaagactcttgacatgaaccttgcaacaagtctgttcaaggtgctcctcatgtacaggccagaggacaaa

SEQ ID NO: 230723 - DNA, 125 bp, Gossypium hirsutum
gagagacagtgtttccttcagcaaaggggaacatcaatgctgtgccttggtgggatggattatctgaatggggaaagggaagactttctgtgagacccaaaattggtgattccttactttttttg

SEQ ID NO: 230724 - DNA, 232 bp, Gossypium hirsutum
cccacgcgtccgggtgcttttgggaacatgtgtcgtggaggccgtatgtttgcggctactaagatctggcgccgttggcaccggaagatcaatgttaaccagaagaggtacgccgttgcctcggcaatcgccgcttctgctgttccttcactcgtgatggcacgtggtcaccgtatcgagtctgttccggagatgcctctggtcatatcggatgctgcggagagtgtggaaa

SEQ ID NO: 230725 - DNA, 402 bp, Gossypium hirsutum
gcacacattacagtgtgtttgtgactgggaggatcgggagaataaatttcttgaagttgaaggcatactcaggagacagattaaggttcatgctcaatctgctacatcagttattcctagcgtgcagcctttccatgcaatagcctatcctatagatccaatgctcgcactagaaattagtcgtaaatatgcggcacacagctctgttgttgcttcccgttattctcttcctcctttcaactatcctgcacccttccctggtgagaatgggaatcgacgccttagggtgggatatgtgagtagtgactttggcaaccatcccctatctcatctcatgggctcagtgtttggcatgcacaacagagaaaatgttgaggtattttgctatgcattgagtccaaa

SEQ ID NO: 230726 - DNA, 403 bp, Gossypium hirsutum
ttcttccggccatttgtttgagctagctagctcttactcaaatggcaaccaaaacgatgatgtgggaaatatttaccttctttctgctttctttcactttctgccactccagtttccttggtgctaatggagatgacaatggtggttggcaaactgcccatgccaccttctacggtggtgctgatgctaccggcacaatggggggagcttgtggttatggaaaccggtgcagtcaaagctatggatcgagcacgcatgagcttagcactgaaattgtcaacaacggctagagctgaggtgcctgctactagctccggtgcaacaatgatcctcaaaggaacattaatcgaaccataaccttgacagccaccaacttttgtccccctactattctttatctagt

SEQ ID NO: 230727 - DNA, 348 bp, Gossypium hirsutum
gtctcatttgatccccccttttctgttgctggtactgagagtcccagagccaggtaaaaaaaatgaaggtgatagataagacccagtctttgtcacaggaccaagggaaaggggtttttcctttgaagtcttcccttcaaagaacggagattgagtggaccacctggttgaaagaatggatcgaatggtggcttattatccatctttttgggacattacatggggtgctggtggttccactgcggatctcactttggacattgctaacaagatgcaaaacatgatatgtgtggaaacaatgatgcatctcacttgcaccaacatgcctgttgagaaaattgaccatgc

SEQ ID NO: 230728 - DNA, 448 bp, Gossypium hirsutum
aggcaacctacggctggtcggaggagatggatgggaaagctcatcttttactgttcttgctcagcagtacgtacgcatgaagaagacacatggtgggaaagttgttccaggagtaatggacacagctagcgcaaagcatttgtctcatgcctatgggaccttagcggaacgagtagccaccatagctcagaatgaaacgctgggtaagaggcttgcccatggttacccatatctggaggccgaggttgcatactgtgctcgaaacgagtactgtgaatctgctattgatttcatcgccaggagatctcgccttgctttccttgacaccgatgcagcaggccgtgcattgccacgaattatcgaaatacttgctaaggagcacaattgggaccggtcgaggcagaagcaagaaatgcagaaggctagagaatttttggaaactttcaag

SEQ ID NO: 230729 - DNA, 378 bp, Gossypium hirsutum
ctgacgcgtgggtgcagggagcagagggaaaaaggataaaagcatcgttgtgtgcttgctgcttcttcaactctgtctctccgtctctgaacctccttctttcgttcttttcttattcactattgtaaaagatggccgatgctgaggatattcaacccctcgtctgtgacaatggaactggaatggtgaaggctggttttgctggtgatgatgctcccagggctgtttttcccagtattgttggtcgaccccgacacactggtgtcatggttgggatgggtcagaaggatgcctatgtaggagatgaagcacaatccaaaagaggtattcttactttgaaatatcccattgagcatgggatcctcagcaactgggatg

SEQ ID NO: 230730 - DNA, 334 bp, Gossypium hirsutum
gcgatggtgttggtcttttgggtattgcttgggcttttggtggcatgattttcatgcttgtttactgcaccgccggtatctcaggtggtcacattaacccggcggtgacatttgggttgtttttggctaggaaggtgtcatttataagggcgggggctaacatggtagctcaatgtttgggtgttatttttggtgttgggttagtaaaggctttcatgaaaagtgaatacacctcctttggcgggggtgctaacacagaggcgactggttataacaaagggactgctttgcgagctgagattattgggacattcttgcttgttaacacttgttt

SEQ ID NO: 230731 - DNA, 456 bp, Gossypium hirsutum
cctcagcttaattcagctgaaaatggcaccttcatctctgccacaaacaccgccgtccgccgtggttattgtcctcttcttactcttctccacggcattgctttgtgaatcaaggttaagcttagattactactccaaaacctgtcccagtttcaccaaaatcatgcaagacaccataaccaacaagcaaatcaccagccccacaaccgccgccggtgcactccgtctatttttccacgactgtcttcccaacggttgcgatggttccatcctcatatcttccaccgcattcaacaaagctgaacgtgatgccgacatcaacttatctctccctggagatccatttgacctcattgttcgagctaaaacagcccttgaactcgcctgtcccaacaccgtctcttgctccgacatcctcgccgtcgctactcgtgacttagtcaccatgcttggtgg

SEQ ID NO: 230732 - DNA, 400 bp, Gossypium hirsutum
ctgggataagatctcccaaggaggcttgaaacgtatcgaggagaagtatacatggaagatttactcggagagactattgaccctgaccggagtgtatggattctggaagcatgtttccaaccttgaacgccgtgagagtcgtcgttaccttgagatgttttatgctcttaagtaccgcaagctggctgaatcagttccattggcagaggagtaaatttaagctgttaaataacattgggccggtttttcttggagaataatattctgttttgtaatttcaattggagaagctcttttgtatttcatcttgtcttttccttttccttttttcgccggcattgtttgaacatggggttgtgcgcccgtcaattccagttaaatatggtgacttttgtttttc

SEQ ID NO: 230733 - DNA, 451 bp, Gossypium hirsutum
ccttagcttaattcagctgaaaatggcaccttcatctgtgccacaaacaccgccgggcggggtggttattgtcctcttcttactcttctccacggcattgctttgtgaatcaaggttaagcttagattactactccaaaacctgtcccagtttcaccaaaatcatgcatgacaccataaccaacaagcaaatcaccagccccacaaccgccgccggtgcactccgtctatttttccacgactgtcttcccaacggttgcgatggttccatcctcatatcttccaccgcattcaacaaagctgaacgtgatgccgacatcaacttatctctccctggagatccatttgacctcattgttcgagctaaaacagccctggaactcgcctgtcccaacaccgtctcttgctccgacatcctcgccgtcgctactcgtgacttagtcaccatgctt

SEQ ID NO: 230734 - DNA, 377 bp, Gossypium hirsutum
aaaaataaaagcattttctcttcctttttgcagagagaaagataaagaaaaaagagcttttttcaaaaaagattttgggttatgggaaattgagagagaaagagaaagatgaagatcacggcgttattggtgttgaagtgcatgccggacggagccgatccgataatactagccaatgcttgcgatgtgagccattacggtttcttccaaaggtcaagcgttcgggagtttatcgtctttgtttctcgaaccgtcgccaaacgaacccctcccggtcagcgccagtccgtccagcacgaagagtacacggtacattcttacaacagaaatggactttgtgtaactggatttatggatgatcactaccctgttcgaag

SEQ ID NO: 230735 - DNA, 439 bp, Gossypium hirsutum
ttcccccgctgctactgctagggtttctttctcttctctctcgcaactcaccagggttctttggagaaaaaaagaaatgtctcgagtttacgtgggtaaccttgacccacgagtttcggagcgagatcttgaagacgagtttcgtgtctttggagttattcgaagtgtgtgggttgctagaaggccaccaggttacgctttcattgactttgatgatcacagagacgccgaggatgcaattcgtgaattagatggcaagaatggctggagagttgagctttctcataattctagaggcagaggaggacgtggaggcggaggcggaggtggaggtggtcggggacggtcgggtggttctgatttgaagtgctacgagtgtggtgaggctggtcattttgctcgagaatgtcgtacacgtggtggttccggaagacgtcgc

SEQ ID NO: 230736 - DNA, 423 bp, Gossypium hirsutum
cccacgcgtccgattgcttttagttgcctcgatgtcaagtgaatcagaatgggtggggaaaagactcacattaacattgtggtcatcggccacgtcgattctgggaaatcaaccaccactggccacctgatttacaagcttggtggtattgacaagcgtgtgattgaaaggttcgagaaagaagctgctgagatgaacaagaggtcattcaagtatgcttgggtgcttgacaagctcaaggctgagcgtgagcgtggtatcaccattgatattgccttgtggaaatttgagaccaccaaatactactgcactgtgattgatgcacctggacaccgtgactttatcaagaatatgattactggtacgtcacaggctgactgtgctggtttgattattgattccaccactggtggttttgaggct

SEQ ID NO: 230737 - DNA, 452 bp, Gossypium hirsutum
tcgaattatgtctacaacacacttgctagtattcctacttggagtggtgactcggaccgctcccacatttggtacctatgagtcaccaaattatgggaaaccccctactcctgtattcaagcctcccaaggtgaaaccaccaccatatgaacctaagccaccagtgtatgaaccaccaaaaaaggagaagcctgaacctaagccaccggtttatgcacctccaaagaaagagaagcatggacccaaaccaccaatgtatgaaccttcaaagaaggagaagcctgagccaaagccaccagtttatacacctccaaagaaagaggagcctaaacctaaaccaccagtatatgaacctccaaagaaggagaaacctgagccaaaaccaccgatttatacacttccaaagaaagagaaacctgaacccaaaccacccgtatatgaacctccaaaga

SEQ ID NO: 230738 - DNA, 362 bp, Gossypium hirsutum
gggacatcccatgggaaacatacatgacaactaagctgatttcaggaacaggcttgcagctgttaaggcgttatgataatagagctgaaagtgtcagggcacagttgttggatgatgatggtccagcctatgttcaagtgtttgttaacatcttacgggatatctttaaagaagaaacagtggaatatgttctggctttaattgatgaaatgcttacagccaatccgaaacgagccagactatttcatgacaagtctcttgctaatgaagatacttatgaacctttcctaaggttgctgtggaaaggcaactggttcatacaagaaaagagctgcaagatactggccttgatagtaagtgca

SEQ ID NO: 230739 - DNA, 449 bp, Gossypium hirsutum
gtttttgatgattcttttaaccctctttatgattcttcgagttgtcccttcgtcggcggtggcttcgattgccgaaaaaatggcagacctgatcggaattacctcaagtatagatggcagcctaatgactgtgcagtccccagcatgctggtgcttgtgatgaaaaaggaaatccaattatcaaggacttctatggcagcccgcttgccgcaaggtttatatgtctgtagccttgtgtttatatcttctataagattcatttacatcattagtttgctgttatcactattcttttaattttatttgcttgcttctaatcatctattaaatccccgttttttaaattgaaatcttaatgtagtggtaagccttacgacgatatgttagtggctaaatttgaatgtgtctatactggttctggtgatcaaggttcctccaagtttgcattt

SEQ ID NO: 230740 - DNA, 414 bp, Gossypium hirsutum
cattatagttgaagaatctgctaaaaagaagaataagaagaaacatatgagagaagagaagagaggatttttttttttttacttttatttttttgagaggcaaaaaaaccccaacaatattcccatggatttgacttcaacaacgacgacaactactacggcagccgtcttgtccggacctgttaacgaaaaagagttagctgtcgatcctttcttggttgaggctcttcaaaattctcgtcatcgtctcaccatcttgcggatggaacttgatatccagaggtttgtgcaaaattcatagcagcatcaatttgagttccaacattttcccacttcttatcttcggcttgctgcacatcgtgttgctcaacattatgggctgttaactatggtttatgataatggtttagatgg

SEQ ID NO: 230741 - DNA, 417 bp, Gossypium hirsutum
atcaaatcgtaaaatccgacgaaattgccgtgaaggaagaatgggaaggtggagtcaattcgtggttgcggtgactattctggcggtgggcctcctttcggcatcagccaccgctagaccctgcaagacattcttcgtcgcctcctattctttctcttttgaaaaccctaacgacccttcttcctccaccggattcgtcaccgtcttcaccgagatcggtcaattgaacgtcgtaccaccaagacccaagccctccgatgtcttgagctctctccgtgagcgcagtaaggacatccttagcgtggtcgtcgctcttctcttcggcgtcggtagcggcgctctcacggcggctaccctctacttggtctggaccctcttctcgcaccgtctgatatcatcgtgcttgttgcagatgat

SEQ ID NO: 230742 - DNA, 366 bp, Gossypium hirsutum
cccacgcgtccgaaaaggttaaacaaccaaattcggccttccgaaagagttaaacccctaaaaacacttccttcttccatctctcttctcccttaaacaacaagcttaaccctagcaacaatggcatccatgctgcaaccccaaatcattcttttgaaagaagggacggacacatcacaggggaaggcgcagctcgtcagcaacataaacgcttgcaccgcagtggctgatgtggttagaacgaccctgggtcccaggggcatggacaagctcatccacgatgacaaaggaaatgtcaccatttccaacgatggcgccaccatcatgaagctcctcgatattgtccatcctgccgccaagatcctt

SEQ ID NO: 230743 - DNA, 437 bp, Gossypium hirsutum
tcggtttaccttcttagaatatatcacatatggtcagatgatagacaatgttggcttgattgttactggaaccttgcatgagagagatgttcaggagctcttggagaagtgccatcctttgggcatgtttgacagtattgcaaccctggcagttgctcagaacatgcgcgaactctacagattggttcttgttgacactcctctggctccatacttctctgagtgtattacctctgaggatcttgatgacatgaacattgaaatcatgaggaacactctctacaaagcataccttgaagacttctacaaattttgccaaaaacttggtggtgcgaccgcagagatcatgtctgaccttcttgcctttgaggctgacagaagggctgtaaatatcaccattaacagcattgtcactgaacttacccgtgatgatcgga

SEQ ID NO: 230744 - DNA, 360 bp, Gossypium hirsutum
cttcgtttaaatctttttgggagcaaataataacaaaaatggctgagttgaaatctgacaatttgcttgagatgatgaagtttcatttgggtactgatgctggtaaagagcttactaagaagattggtcttgtttaccaactcaatattgcccccaagaaattgggggttgatgaggttacttacgttgttgatctcaagaaaggagatgttatcaaaggtgaatatgaagggggaaagcctgatgttatattttcattcaaggatgatgattttcttaagattgccactgggaagattaatccctaggttgcttttatgaggggtttaatgaagattaaggggagtctgagtttagctc

SEQ ID NO: 230745 - DNA, 450 bp, Gossypium hirsutum
cttcaaacaaaagggaattttcttgtcataatgttctgaggaattcatcgatggcaaccaaagtgtatattgtatactattccatgtatggacatgtggaaaaactagcagaggagataaagaaaggggcggcatctgttgaaggtgttgaagcgaaactatggcaggtccctgagactctgtcagatgagattcttggaaagatgagtgcaccaccaaaaagtgatgtaccgatcattacaccacatgaccttcctgaggctgatgggtttatttttggcttcccaacaagatttggcatgatgtctgcccaattcaaagcatttatggatgcaactggtggtctatggagaactcagcaacttgctggaaaacctgctgggatattctatagcactggatctcaaggtggcggacaagaaactacaccgttgactgcaatcactcagc

SEQ ID NO: 230746 - DNA, 177 bp, Gossypium hirsutum
caccctcgtcttgattttttcatcaatggccaagtacggcgaaggcgacaagcgctggatcgtggaggaaagacccgacggtgctaacgtccacaactggcactgggctgaaaccgattgcctcccctggtcgaaaatgttcttcaccaaatcgctttcggatctcaccatccttga

SEQ ID NO: 230747 - DNA, 450 bp, Gossypium hirsutum
ccctactcgcaatttgaagaagaacttaaacagatgtttctgaaatgcaaaactttgaggttacatgggaatatgaagcaggaagatagaagaaccaccttcagtgccttcaaaacagaaaaatcggcacttcttgtctctacagatgttgctgctaggggcttagattttccaaaagttagatgtatcatacagtatgattccccaggggaggcctctgaatatgtgcatagagtaggtaggacggctcgactgggtgaaagaggagaatccttgctatttctacaaccaatagaagtggattacttgcaggatctagagaaacatggtgtgtcattgacagagtatccactcctcaaaataatagattctttcccattgcacagtcaaatgcatcgtgtcaagaagtttgtttctttagaatcacatccatgggttgtatctcttcag

SEQ ID NO: 230748 - DNA, 451 bp, Gossypium hirsutum
cggacgcgtgggcaatggaattctaagtcctgtaccaacatatttggatttttgagttgctgaaagtctcagggaagaacaagtttaccttcttcagcttgtgatgagataatcgcctttgatcctgatggccaaagagtacagtggatcaccaaagcatcatcatcgactcgaagcgaagaggaacccccttacttggattctaggggttagtttcctctgcatattgttttatgtgttgggagcttggcagcgttcttctaaccccaacactactcaatttagtgcatacaatagaggtggctgtgatagtcatgttactacatccgacaatggcaatgctgtagttggtcatccatcatcaaccaacttggactttgcaagccatcatcaagttgtgctaaacagttctaaaacagtcagtcagttcccatcatgtgatatgtcattc

SEQ ID NO: 230749 - DNA, 405 bp, Gossypium hirsutum
cacgcgtcctgattgacgtatacaatgcctaaaataccgggggtgtagctaacatgctgagggaggggaagttaatccttttgatggccaggaggcaaagccgtacaaaaatgaccctgagattttggcgatgacaaaccttgtagcagcctatcaacgaaatgagataatagagtttgaaaaaatccttaagagtaaccgaaggacaatcatggatgatccgttcatccgaaattatattgaagatcttttgaagaatgtcagaactcaagtactacttaagcttataaaaccatatactagaatccggatccctttcatatcaaaggaactcaatgtgccagaataagatgtaaagctattcgttggtgtccttgatcttggataatcgaatcgatgggcata

SEQ ID NO: 230750 - DNA, 442 bp, Gossypium hirsutum
gtacgacagtgttcacggtcaatggaagcatcatgagcttaaggtgaaggactcagagacccttctctttggtgaaaagcctgtcacagttttcggtatcagaaaccctgaggaaatcccatgggctgaggctggagctgagtatgttgttgagtctactggtgtttttactgacaaggacaaggctgctgctcacttgaagggtggcgcgaagaaggttatcatttctgctcccagtaaggatgctcccatgtttgttgtgggtgtcaatgagaaggaatataagcctgaccttaacattgtctccaatgctagttgcaccaccaactgtcttgccccattggctaaggtgatcaacgataaatttggcattgttgagggtcttatgaccaccgtccattctattactgctacacaaaagactgttgatggtccttccatg

SEQ ID NO: 230751 - DNA, 451 bp, Gossypium hirsutum
tcttgctcctccacagcaaaagcgggtcttctctctctagaaaacttctccttcccctttgtaaaaacagtgctcaaaaattcctttatcctgttttcttcaatttgcttcttcaaaaagctctttgtttttgtagtagtagtagtagtagttcagatcttcgtcatcataagtactatatttacgcttttgtttttgcagataaaaaacctacgctgatggctggtcgttacgataaaaatcctttcgacgaggaagaagaagaagttaatcctttcgctgatacaacagcaagagggaaggcatctggccagtctaaatttggaggaggtctattttcaacgagcactgcaagcgttccacctgcctcaaactcaagactttcaccgctacctcctgaacctgctggttttagttatgagcgtgaggcaacagttgatattcctcttga

SEQ ID NO: 230752 - DNA, 449 bp, Gossypium hirsutum
gtccttaccgaggattcatatatacttcgttccaagaaagggcaacttttatttgccatgggaatacaggcaggctggctaaggagtatggggatattaacttggctcaaatttgtggtagcattgcctcagatgagaagcgccacgagacagcctataccaaaatcgttgaaaagctgtttgagattgatcctgatgaaacagtcctggcatttgctgacatgatgaagaagaaaatcgccatgccggctgagttcatctatgatggcagagattataacttatttgaccactactcagctgttgcccaaagaatcggggtttacactgctaaggactatgttgatatagtagagcacctggtggatcgatggaaggtgaaggagctagctgggctttcagccgaggggcgtaaagctcaggactacttgtgttcactttcttcgaga

SEQ ID NO: 230753 - DNA, 394 bp, Gossypium hirsutum
cccacgcgtccgcttcgccattcactccgttcacccttttttttttcattttgcctgatttttcgagttttagatttcttatataatcaactacctaatcctctcgctctctcaaccacaagctaactagcaaacacccacacatactaacatctatggggagttcagggcagcaagtctcctggaaattggcggatcacccaacacttccaaaggggaagacccttgctctcatcgttctcgatggctggggcgagtacaaacccgatgagtacaattgcattcatgttgctcaaactcccaccatggattctctcaaacagggtgcccctgaaaagtggagattaatcagagctcatggtaaggctgtagggctccccacagaggatgacat

SEQ ID NO: 230754 - DNA, 451 bp, Gossypium hirsutum
cactgaaattccaagcaaaatatcatgggcaagggtcctggtctctatcactgagggtcggaaagaaagctagagatcttctttacaaggattatcagactgaccaaaagttcactttgaccactagctctcccactggtgtttcaattacctctgccggaacgaagaaaggtgatcttttcttggctgatgttaatacccagctgaagtctaggaatgttacaactgatatcaaagtggacaccagctccaatctatttaccaccataacagttgatgaacctgcacccgggctaaaggcaatctttggcttcagagtccctgatcagaggtctggcaagattgaactccagtatttgcatgagtatgctgggattagctcaagcattggattgactgccaacccgattgttaacttctcgggtgtgcttggaacaaatgttcttgcact

SEQ ID NO: 230755 - DNA, 450 bp, Gossypium hirsutum
taaaccttcctcatttcttgttcttatgctaagagtacaaggtttatcaaaatgagctgcaatggctgtagaattcttcgaaaaggttgcagtgaaaattgtatgcttagacaaagcttacaatgtatagagaacccacaagctcaagcacacgccaccgtttttgttgctaagttctttggccgtgccggacttatgtcatttctctcctccgtcgccagtcctcaaagacctgctttgtttcagtcgcttttgtttgaagcagtgggacgggcaattaatccggtgagtggagccgtggggttgttatggacagggaactggaacgtctgtcagtcggcggtacatacggtgctccaaggcggcacgttgcagccgttgcctgaatttagtggtggggtttcaggatcggattttgaggatgttggagaaacggtcggtgttggtggc

SEQ ID NO: 230756 - DNA, 448 bp, Gossypium hirsutum
ggaagatctgagctgaaaacatttggcggagaaatgacagcttaggaggtgtcaatgaaaggaaattgtgttaacgtaagaggaggagaaagctgttcttctggttacagtaagtcaatggatgctaggaagaccatggaagggcaaaatggtcattccactcatcaagctgccatcagagaccctgaaacagcgctgtatacggagctatggcatgcatgtgcgggaccgctggtgaccgtccctcgcgaaggagagagcgtgttctactttcctcaaggtcacatagaacaggttgaggcgtctactaatcaggttccagaccagcatatgccagtgtataatcttccatccaagatcctttgtcgggtgattaacgttcaactaaaggctgaaccagataccgatgaggtttttgcacaagtgactctacttcctgaacctactc

SEQ ID NO: 230757 - DNA, 445 bp, Gossypium hirsutum
cagctctctcgctctctctctctctctctctctctcatcttttacatggcatctcaagccagcctccttcttcaaaaacagctcaaagatctttgtaagaatccggttgatgggttctcggctggattggtcgatgagaacaatatctttgaatggagtgtaacaattattggacctcctgatactctttatgaagggggatttttcaatgctatcatgagttttccaccaaattatccaaacagacctccaacagtcaaatttacatcagagatttggcatcctaatgtttatcctgatgggcgtgtttgcatatcaattcttcatcctccgggcgatgatccaaatggctatgagcttgcaagtgagcgctggatgccagtccatacagttgaaagtattgttttgagtatcatatcaatgctttccagccctaacgatgaat

SEQ ID NO: 230758 - DNA, 446 bp, Gossypium hirsutum
gtttagtcgaagcatttgttgtgcaaagtggaatcaactttcaacattggggaccctcttctctaacctaaagctaaggccttatgctacacctctcattggtccattacagacttgtgaatccagaatttacagcagggagaaggctgaatatgcgaatgtgaattgggatgaacttggatttgctctaactaagactgattatatgtacgtcatgaatttcactgaagaggaacaaaagttcttcaatggaaccttaactcgctttggcaacattgagatgtgcccttcatctggaatattaaactatggccaggggttattcgagggactaaaggcgtataggaaggaagacgaggggattctgctctttcgaccccaagagaatgctctgaggatgaagatcggtgcggatctaatgtgcttgccatcaccaaccgttgacc

SEQ ID NO: 230759 - DNA, 448 bp, Gossypium hirsutum
caagagcacgagaccttcgttccccagaccacccaaaagccagaagagcaagagccaaggttcatccctgaaacccaaaatggttatggcctttacggccacgagtcaggctcaggctcaggctcaggctcaagccggcccagtttcaccaccaaagaaacctatgaaccctatgtcacccctgttagattccaccctgatgaaccctataacagcatccccgaatcctccaacaataaagacacttactactacaacaagaatgcctacaagtccactaagcagcaaaacttgggcgaggccattttcaccgagaaaggatggagcaccaaggaaaaccagaacaacaactactacaacggcaacattaatggcgagaagcaaggcatgagcgatactaggtacttggagaatggaaagtactactatgacgtcaagagtgagaaca

SEQ ID NO: 230760 - DNA, 431 bp, Gossypium hirsutum
tcggttctgtcgaagcatttgttgtgcaaagttgagggaactttcaacattggaaaccgggcttctctaacctaaagctaaggccttatgctacacctctcattggtccattacagacttgtgaatccagaatttacagcagggagaaggctgaatatgcgaatgtgaattgggatgaacttggatttgctctaactaagactgattatatgtacgtcatgaatttcactgaagaggaacaaaagttcttcaatggaaccttaactcgctttggcaacattgagatgtgcccttcatctggaatattaaactatggccaggggttattcgagggactaaaggcgtataggaaggaagacgaggggattctgctcttccgaccccaagaaaatgctctgaggatgaagaacggtgcggatcgaatgtgcatg

SEQ ID NO: 230761 - DNA, 326 bp, Gossypium hirsutum
ttgattctggtgggagtggctaaatccagtggggtgtctaaagtatctagttggggaatatcattatgtatagtgcacttcatctttaatcctggcactagttcttttcaagaaactatacccagggcatagagaacaagagattgaaaattgcatcataaaagctgcaaagtacattgaagatatacgatatcccgattgttcttgttatgtaaattggtgaatttgcttcttttatgggacatggtttgcactcttatgtcttaaagcttctgtgaagaacttctaaatttgtttggccattcttaaaggagaatattgtttgc

SEQ ID NO: 230762 - DNA, 440 bp, Gossypium hirsutum
gttcagtcgaagcatttgttgtgcaaagttgaatcaactttcaacatttgaaaccctcttctctaacctaaagctaaggccttatgctacacctctcattggtccattacagacttgtgaatccagaatttacagcagggagaaggctgaatatgcgaatgtgaattgggatgaacttggatttgctctaactaagactgattatatgtacgtcatgaatttcactgaagaggaacaaaagttcttcaatggaaccttaactcgctttggcaacattgagatgtgcccttcatctggaatattaaactatggccaggggttattcgagggactaaaggcgtataggaaggaagacgaggggattctgctcttccgaccccaagagaatgctctgaggatgaagatcggtgcggatcgaatgtgcatgccatcaccaaccg

SEQ ID NO: 230763 - DNA, 449 bp, Gossypium hirsutum
  unsure (1)..(449): unsure at all n locations
gaaaaagatttatttaggaaatattggattctcagaaagatcgagcagtaggaaattgaggaaaaaaaaaatctttggcctttgtttaacaaatctagctcgtagaattgaacggcagccactaaaaaaatacgttcggtgattaatagattttttttactcaagaaatggcgggaagagctcaaattccgacaagtaattcagcactaattgccatgattgctgatgaggatacagtaactggatttttgatggctggagttggaaatgtggatttaaggagaaaaacaaactatctaatcgttgattcaaaaacaacagtgaaagcaattgaagatacattcaaagactacaccacangggaggatattgcaattattttgatcagtcaatatgttgcaaacatgataaggtttctagttgatagctacaataagccggttcctgca

SEQ ID NO: 230764 - DNA, 348 bp, Gossypium hirsutum
gataatataatatggagaaatggtatggggttttagggttggtgttggttttgagtttgttctgtggggttaaaggagaaccccaagttccatgttacttcatttttggagattcattggtagataatgggaacaataatgaacttcgttcattggccagagctgattacttgccttatgggattgactttgctaatggaccgaccggccggttttcaaacggtcgaactacggtggatgtcatagctgaacttttggggtttgacgattacatccctccatactcaactgcaagtggtagacaaatactgggaggagttaactatgcatctgctgctgctggaatca

SEQ ID NO: 230765 - DNA, 441 bp, Gossypium hirsutum
ccttctgcttagcttaaaaaatcttgaatccgtgctctcctacttccctcgttatgggcaatggcttcggacaagaagattaagatcgggattaacggatttggaagaatcggacgtttggttgccagagttgctcttcagaggaacgatgttgaactcgtcgccgttaacgatcccttcatttccaccgattatatgacatacatgttcaaatacgacagcgttcacggtcaatggaagcaccatgatcttaaggtcaaagactctaaaaccctcctcttcggcgaaaaacccgtcactgttttcggaatcaggaaccctgaggagattccatgggctgaagccggcgctgagttcgttgttgagtcaactggagtgttcactgacaaagacaaggctgctgctcacttgaagggtggtgctaagaaagttgtgatatct

SEQ ID NO: 230766 - DNA, 426 bp, Gossypium hirsutum
acctacgcattatgatttatattggaaattttgtattctggggaggaaccatcagcaggagagggagggaaaaaaaaatctttgtccttttttaaacaaatatagctcgctaaattgaacggcagccactaaaaaaatacgttcggtgattaatagattttttttactcaagaaatggcgttaagagctcaaattcctacaagtaattcaacactaattgccatgattgctgatgaggatacagtaactggatttttgatggctggagttggaaatgttgatttaaggagaaaaacaaactatctaatcgttgattcaaaaacaacattgaaagcaattgaagatacatccaaagactacaccacaagggaggatattgcaattattttgatcagtcattatgttgcaaacatgataatgtttcta

SEQ ID NO: 230767 - DNA, 441 bp, Gossypium hirsutum
cttttggtggtttgttccgatgttcaaagattgtgggtattggatctcggtggcttctcaatgttgacgcgtctgcagagtaacaaacttttctccaaggttcttctgagtcgttacaataatgggtttcccaatcttatctctgggtctcaatttttaagaggttttaacgagattacaaagcataggttttctgtaatgtcgggtgaaaatctaagaagcctatctaactgtgcttgcccgaggaattaccgagtcgtaatggctgcaactcgtgaaatggggatagggaaagatggcaagttgccatggagattgccttctgatctcaaattcttcaaggaacttacagtgacaacatcagatcctgagaagaagaatgctgtagtaatgggtagaaaaacctgggagagtattccacttgagtttagacctttaccc

SEQ ID NO: 230768 - DNA, 433 bp, Gossypium hirsutum
  unsure (1)..(433): unsure at all n locations
cccacgcgtccgatcacgagcacagagaagacgatgacgcccccgccgccgatggtgaagacaccggtgctcaagttgcccctatcgtcaggcttgaggaagtcgccgttaccaccggcgaggaagaagaagatgccatactcgatctgaagtcgaaactgtaccgatttgataaagacgggaatcaatggaaagagagaggcgctggtactgtgaagctgttgaagcacaaaaagaccggaaaagttcgccttgttatgaggcaatctaagactctcaagatctgcgccaatcattatgtgttggcaacgatgacggtgcangagcacgcagggaacgacaaatcgtgcctatggcacgcttctgactttgctgatgatgaactgaaagatgaacttttctgcattcgttttgcatcagtggacaattgcaa

SEQ ID NO: 230769 - DNA, 450 bp, Gossypium hirsutum
gtttttggtgtaatctttgataccctttttataaaaaaaccagccctctagctggtcagagtttagtcttcactccctagaataattttctctttctcacttccaccaacgaaaaagtcgtcgatcggatcacgtattagattgatattgtaaagatgtctccaactgaatcatcacgagaggaaaatgtttacatggccaagctggctgagcaggctgaacgctatgaggaaatggtggagttcatggaggaagttgcaaaaactgttgatgttgaggagctgactgttgaggaacggaaccttctctcagtggcttacaaaaatgtgattggggcaaggagggcgtcttggaggatcatctcttccattgagcagaaggaagagagcagaggaaatgaggatcatgttgcacaactaaaggagtataggggtaagattgaagctgagc

SEQ ID NO: 230770 - DNA, 413 bp, Gossypium hirsutum
gagaaaccagagagagaaaaaaaagaaagaaaaaatggttctgctagacaagagaggtgggacgatgtagtagctgggcctcaacctgaacgtggtctcggcaggcttaggaagatcaccacccagcctttgtccatcaaagatgaaggagaaaagaaaaagtaccagaggtcgttgtcgctgccgaatagtccagtgtcaggtccgacacccgtgacaccgacgactccgacggcgcgtaaggagaacgtgtggaggagtgtgttccatccgggtagcaacctagccaccaaaagtataggttctgatgttttcgacaagccacaacccaactctcctaccgtctatgactggtgcgtatacctcgtaccatgcatgcatggattttgtctggctgctacttctttagccac

SEQ ID NO: 230771 - DNA, 444 bp, Gossypium hirsutum
cccacgcgtccgaaaactataccctagcccctgaatctagcaagcaaataaaagccaacatcaaggtgtcatcaactgagaccggagtcatatttggcaacattgtttatgagacttcgaatgtgcttgaaagaactgttgttgttcttaatgacattcatattgatatcatggattatatttctcctgccgtttgtaccgatgctgcattcagaactatgtgggcagaatttgagtgggaaaacaaggttgctgttaacactgtaatccaagatgagaaggaattccttaatcatattatcaagtcaaccaatatgaagtgtctcacaccagtatctgcgctagatgatgagtgcggattcctggcagctaacctttacgcgaaaagtgtgtttggggaggatgccttggtaaatttgagcgttgagaaacaagcagatggga

SEQ ID NO: 230772 - DNA, 443 bp, Gossypium hirsutum
ctttcacctcttcctttgttcctcatcctctgggcgcgtctcttcccggatgcgtggcggccggatttaacaagttttcaaacgaaaaatgagggaaatccttcacgtacaaggcgggcaatgcgggaaccagatcggatccaagttctgggaagtggtttgcgacgagcacggcattgaccctaccggacgctataccggaaactccagtctacaattggagcgcgttaacgtttactacaatgaggcttcttgtggaaggtttgtcccacgcgccgtgctcatggatcttgagcccgggaccatggatagtgtgagaaccgggccttatggtcagatctttaggcccgataactttgtcttcggccaatctggagctggtaataattgggctaaggggcattatactgaaggagccgagcttattgattctgttcttgatg

SEQ ID NO: 230773 - DNA, 338 bp, Gossypium hirsutum
atggggaactgagacacacaacacctggaaaatcgggtaactcccaccccaatactgcgctttaagcaaacaggcacaccaggagatcatatcccacacctggccgggagggtcccacacccacggagcctccctcattgctagcacagcagtctgtgatctaccggcaaggcagcagcgaggctgggggaggggcgcccgccattgctgaggcttaagtaggtaaacaaagctgctgggaagctccaagtgggtggagctcacagcagcccaaggaaacctgcctgtctctgtagactccacctctggggacagggcaataacaaacacagctgaaa

SEQ ID NO: 230774 - DNA, 330 bp, Gossypium hirsutum
atcaacggtgaagttatgcctggtcaatgggaattccaagttggtccatctggtggaatatctgcaggtgatcaaatatggattgcacgatacatactcgagcgaatcactgaaatcgcaggagttgttctttcttttgatcccaaacccattccgggtgactggaatggtgctggtgctcatactaattacagcacaaagtcaatgagaaatgatggtggcatcaatgttatcaagaaggcgattgagaagttgggtctgcgccacaaggagcatattgccgcctacggagagggtaacgagagacgtctaactggtcgtcatgagact

SEQ ID NO: 230775 - DNA, 236 bp, Gossypium hirsutum
gttcaatgacttcttgaggaatgccagttgtgtcgatgaaattaccaagggagaactggctccattttcaactttgaccggtgacgaaagctaccaaagccgggatcttgagaaggcatcccaacaagcttcaaagtccctttacgatgccaaggtgcaaccaactaccttgataccaaagcaagttggcaacatgtatactgcatctctttatgctgcctttgcatcccttattc

SEQ ID NO: 230776 - DNA, 433 bp, Gossypium hirsutum
  unsure (1)..(433): unsure at all n locations
gtggaaattgatattagggaagagtgtggagcatcattgactgcgcgaaaatgagattanagaatgtaaggagaagttagaaaattgtgaagtggagttaaggcacttgcagagtaaaaaggaggagttgcagaaagaagcagatagattgaatgaggttgcagagaaagcacagatggatgcattgaaagctgaggaagaagttgcaaacatcatgcttttagctgagcaagctgttgcttttgaattggaagctacacagcatgtgaatgatgcagagatagctctgcaaaaagctgaaaagtctctttctaatttgattgttgagactgttgagcagcaggtttcggccgaagagactgttattgatgaggagaccagtcccgggggtcctaatgatgnttttgttgaaagagaaagggatgctttgatt

SEQ ID NO: 230777 - DNA, 431 bp, Gossypium hirsutum
atgagaagccccaactggtgctgatggatcgtcaaatcccaatgcaccatcaatgatcacacaggtcactcagcaaatgcaaattccgctatcttatgctgatgctgttattgggacagctggtgctagcattagctatattcgacgtgttagtggggcaactgtcaccattcaagaaactaggggtgttcctggggaaatgacagttgaaataagtggtactgctttcacaagttcaaactgctcagcaactgatacagaattttatggctgaagctgccgcaccagcacaggcacaagttggtggggctgcagaccaagcttataatccgtatgcagctcatggttcttctatacgcatcaccaccatccaatccaggacatgcgggtggctattgctatggtcaaactatgggtactaagcaaagggt

SEQ ID NO: 230778 - DNA, 275 bp, Gossypium hirsutum
ccgacctattccccctttttacttatatcattcaataattttcatgggcaaatataaatgggagagtgtgtttccattcacattggtcaggccggaattcacgtcggaaatgcttgatgggaactttactgtctcgagcatggcattcatcctgatggccaaatgcctactgacaagacttttggtggaagagacgatgctttcaacacctttttcaacgaaaccggtgccggaaaacacgtccctccagctatatttgttgatctggaacctac

SEQ ID NO: 230779 - DNA, 362 bp, Gossypium hirsutum
tttcaatgacttcttgatgaatgccagttcgtgctatgaaattacgaaggaagggctggctacatttttaactttgaccggtgaccaaagctaccaaagccgacatcttgagaaggcatcccaacaagcttcaaagtccctttacgatgccaaggtgcaaccaactaccttgataccaaagcaagctgtcaacatgtatactgcatctctttatgcttcctttgcataccttattcacatcaaacacactgaattggcatgaaagcagctgattttattcctcttacggaagtggtttaacatgacacaatgttttcatttgcattccatgaatgtcaacatccctttagcctatcgaacat

SEQ ID NO: 230780 - DNA, 362 bp, Gossypium hirsutum
tctattaactgcttgaagacaagaaagaagaccagaaagctggcgacgcctctttggtgaagggcattgatggagtcccatacttgaaggcctacctcgccgcaagggtttctttcaagtctggcatgaaaccgcacgagcttgtcttctataaggtattttgcattcccttatgttaaagggattttacttttgaattcttttggtttagattatctatggttttattatggggtgctattgctatatgtccagaacctaaattttggatagtatcttctgttttgcaagaaacttaaagatttccttaatttcgtttgtgttcttggctttaatttaattgaaagctttgttttattttt

SEQ ID NO: 230781 - DNA, 252 bp, Gossypium hirsutum
aaaaaaatggccaaattattgctgttcattgcactatggggggttccatgtcttgttagtgctacacgcatggtgaagaacccgttggtggttcaaggtcaagtttactgtgaccattgccgtgctgggtttgaaacaccaaagactagaaacatggctggtgccaaggttaaggtggtatgttccaaccggaagaccggtgatgtcgtgtacgagaaggaaggacacacggattcaaccggacaatacaag

SEQ ID NO: 230782 - DNA, 436 bp, Gossypium hirsutum
cttcccccttttacactcccccttcagatatcttcattttcatcttcttcctctttctttctgttctttgttttcttcaaatactgccctttcattttccttagttcttgttaaaaagaaaatgtgtgggattttagctgttttgggctgttctgatgattctcaggcaaaaagggttcgggtgctggaactttcccgtaggctcaagcaccgtggtcctgactggagtggcctctaccaacatggagactgttatttggcccatcaacgccttgccatcattgatcctgcttccggtgaccaacctctctttaatgaagacaagtctattggtgtcactgtcaatggagagatttacaaccatgaaaaactaaagaagaagttggcccaccacaagttcaaggcctggcagtgactgcgatgttatttcccatct

SEQ ID NO: 230783 - DNA, 381 bp, Gossypium hirsutum
gaaaagcaaaaaaatggctcatcgtatggcgttttctctgtgtgtcatttcgggttttttattcatcggtttgatatcatcggaggctttctcggtcgtcggatcagaagttgatccgttgatcaggcaagtaacggacggtcaagatgatggagtggagacacagcccttgaccgctgagcatcacttctcgctgttcaaggctcggttcaagaaatcgtacggctcggaggaggagcatgattaccggttcaaggttttccgggcgaacttgagacgagcggagcgtcatcagaagcttgacccgtccgcgactcacggtgtgactcagttctccgatttgactccccgtgagttcaggaagaggtttttggggttaag

SEQ ID NO: 230784 - DNA, 358 bp, Gossypium hirsutum
  unsure (1)..(358): unsure at all n locations
agacgtctttgaaacactgatcgggaagcaggaacagatcttactggcaacgcaggttgtaaagatgattttgaaaattgatgatgtcatttctccatcggactactgaggtataatttctgtactgcttcactctgaaggttaccgtgttttgattgttttgtatggttcactccagaacaattgttcacttgtgaggaacatgttttgcttatgtatttttcaactgccaagctctttgttggttggaaatagaatgataaacccttcgtattgacaacggttgtttatgtttttttttaaaaaaaaaaaananaaaaaaataaaaaaaaaaaaaaaaaaaaaatataatntntat

SEQ ID NO: 230785 - DNA, 447 bp, Gossypium hirsutum
aaaagagggaaggaaggtaggaaggaaggaaggaaagaattaataaaataaaataaaagaaaatcgcagatcagacagagaaaaaccctaacctaaatctaaatgggtaagaagaagaaaagagttccgtcaaaggtatggtgttactattgcgacagggaattcgatgacgagaagatcctggtgcagcaccagaaagccaagcacttcaagtgccatgtctgccacaagaagctctccaccgccggtggtatggccatccacgttcttcaggttcacaaggagtccgtcaccaaggtcctaatgcaaaacctggcagagaatcgactgacattgaaatatacggaatgcaaggaatcccgcctgatgtgctggctgctcactatggagaagaagaagaagaagctccatcaaaagcggccaaactggatatcccatctactcagc

SEQ ID NO: 230786 - DNA, 441 bp, Gossypium hirsutum
gaaccaccgcatttcaaattgttatctctgagggtgtcttaataaacgccttggatttaccttcgatttccatttacttctctattgctacgtttttgaatttttagtgagcgaaaatgagagagtgcatttcagtccacatcggtcaggctggtattcaagtcggaaatgcctgctgggaactttactgccttgaacatggaatccagcctgatggccagatgccaagtgacaagactgtcggaggaggtgatgatgcttttaacacctttttcagtgaaactggtgctggaaagcacgtccctcgtgctgtctttgtggatcttgagcctactgttattgatgaagtgaggactggtacttaccgtcagcttttccaccctgagcaactcatcagcggcaaggaagacgctggcaacaacttcgctcgtggccactaca

SEQ ID NO: 230787 - DNA, 442 bp, Gossypium hirsutum
cattaactcattcatacattttccttcattgtctcggcgaattcgaaaccgaaaacgcaagaaatttttcattttttcttgattcccagcaacttttcaatctgggttttgcttgaatattcatattaactttgttttataccaaaaaaaaaagatgacagaagcgagtaagaaaagcatgaatccagacccagttcatgttcaaagcacagcttcatcaaacgaaacaagatcaaacaacaatctccccaattttcttctttcagtgaggctaaaatacgtgaagctcggctaccattatttaatctccaacgccatgtatctaatgctggtgccgttattagccattgcttcagctcatctctcaacgctcacggtccttgatttggttcaactatgggaccaactcaagttcaatcttgtctctgttactttatgttca

SEQ ID NO: 230788 - DNA, 253 bp, Gossypium hirsutum
tttaggtcagccaattgtttgagctagctagcgtcttactcaaatggcatccagaactattatgttgcaaatattttcacttttcttctttttgttcagtatctgcaactccattttccttggcgctaatggagatgacaatggtggttgtctaactgcccatgccaccttctacggtggtgctgatgctaccggcacaatggggggagcttgtggttattgaaacctgttcagtcaatggtatggaacgagc

SEQ ID NO: 230789 - DNA, 360 bp, Gossypium hirsutum
gtcgattcattcctaagaaaattttcaacgttatttagggagcatagaaaagaacgttggggaggaaagatgttgggaatagtaaggcaaaaaatgttagggcagtcattgctgaagattcgtcctgcaatatcggtgttacgaagctactcatcagcagcaaaacagatgacagtgagagaggcattgaactctgctcttgatgaggaaatgtcagctgatccgaaagtctttttaatgggtgaagaggttggagaatatcagggtgcatacaagatatccaaggggcttttggagaagtatggacctgaaaaggttttttgatactccaattactgagggcttgtttttgctggggat

SEQ ID NO: 230790 - DNA, 435 bp, Gossypium hirsutum
cccacgcgtccggatactcgatacacatgctgatgtgtttgtttgggttggtcagtgcgtagaccccaaagaaaagaaaaatgcttttgaaattggtcagaaatttatagacatggctgcatctctagaaggtttgtctccacatgttccactttacaaagttactgaaggaaatgaaccttgcttcttcacaacattcttctcatgggattccacccaagctactgttcaaggaaactcattccagaagaaggtggctttgctctttggggctagccatgctgtagagggccaggatcgatccaacggaaatcaagggggacctacacaaagagcttcagcgttagctgccttatcatctgcatttaatccatcatcagctagcaaagcctctactccaaagccttccagcactagtcagggatcacaaagagc

SEQ ID NO: 230791 - DNA, 416 bp, Gossypium hirsutum
gggtgtcttaataaacgccttcgatttactgtcggtttccatttacgggttggggtctacgtttttgaatttttagtaagcgaaaatgagagagtgcatttcagttcacatcggtcaggctggtatccaagtcggaaatgcctgctgggagctttactgccttgaacatggaatccagcctgatggccagatgccaagtgacaagactgtcggaggaggtgaataatgcttttaacacctttttcagtgaaactggtgctggaaagcacgtccctcgtgctgtctttgtggatcttgagcctactgttattgatgaagtgaggactggtacttaccgtcagcttttccaccctgagcaactcatcagcgtcaaggaagatgctgccaacaacttctcccgtggccattacactatt

SEQ ID NO: 230792 - DNA, 280 bp, Gossypium hirsutum
ttcgttagacatgtgaatgctgcgagcaggagctggagaactactgccctcggaggagatttacctacaactcttacaatccaaacgggacaaaaaattatggaggttattcggatatgattgtggttgaccagcgctatgtgctacggtttcctgataacttgccactgaatgcgggtgcaccattgttatgtgcaaggatcacagtgtacagccctatgaaagattatggaatgaccgaggcaggcaagcatctatgtgtttctggactcggtgggct

SEQ ID NO: 230793 - DNA, 432 bp, Gossypium hirsutum
cggacgcgtgggctaaaaccctaatttgatctccaaataccttcgagatctccaagcttcgtcaccccaaaatggccacgacacgcagatcccttcctcttctgagaaccctcatagccggaaaaacccaaacccgaaacgtgacgtacatgccccgaccaggagatggagccccaagactcgtaacgttaatccccggagacgggatcggacctttggtgacgaacgcggtggaacaagtgatggaagcgatgcacgctccggtttacttcgagaagtacgatgttcacggtgacatgaaacgggtaccacaagaagtgttggattcgataaagaagaacaagggttgtttgaaaggagggttaagaacacccatgggaggtggagtcagttcattgaatatgcaattgaggaaagaactggatctatacg

SEQ ID NO: 230794 - DNA, 455 bp, Gossypium hirsutum
  unsure (1)..(455): unsure at all n locations
gttccaaccatggataacagagtatcttacttctcagcatcaatcctcacgacacctggaagaaacttcagttagagctcatgacagggttcaagcttcaacaacaaaagccttgctggagaaattttcgaaacttgatagagaagcaggcattggaatatcaagctttatgagtgattctgaatttagtggaaatgtgagggaagcagtttcattatcgagaaatgccccacctggccctcctccattgtgttcaatatgtcagcataaggcccctgtatttgggaaaccgccgaggtggtttacctatgctgaattggagcttgcaactggtggattttcacaagctaatttcttggctgagggtgggtttggatccgttcatagaggacttctcccagatggtcaggcaattgcagtgaagcaacacanattggctagttctcaaggagatc

SEQ ID NO: 230795 - DNA, 416 bp, Gossypium hirsutum
ccttcaccagtttagcttttgaatggcttctacagttaaacccattttcatcctccttgtattcatttcattccatttctcaccgttagcatcgaaacccaatgacccaacaccatcaacatggcctcttcaattccactccgttctcttcatgaacaacagtggcactctccagaaagttgatctctggtacgactggcctaatggccgcaatttcaacattattcagaaccagctcggtaagctcctttacgaccttgaatgggacaatggcacttcgtttatctacactctggattccaacaaagaatgcagaatcttgcactttgatgtcggtattctccgtcctaattggcttgatggagctaattacttgggacaacaacaaaaagatgggttcctttgcaatgtttggg

SEQ ID NO: 230796 - DNA, 375 bp, Gossypium hirsutum
gttcatctaagtccaaggagcggtagctgcaaggttatggggaaaaagctagacgcgttgcttggaaaaaggttcaagccctacaagttgaaatcacttattagtgttgccctttctcgtctttccggtttcaagaatcggcgtcagattcgcagcaaccaagctcgctctgatgttgtggagctccttcagctcggccaccatgatcgtgctcttcttatagcggggcaggtggtgaaggagcaaaacatgttggacgtgtttgttatcctggaagggtattgtaatctcctcattgaaagactccatctcattgaggaagacagagaatgccctgatgagctgaatgaggcaatatgtggcttgctctttgca

SEQ ID NO: 230797 - DNA, 434 bp, Gossypium hirsutum
cggacgcgtgggtccgcttctgcctctattcctctttttgttcttcatttcctttgttttccctctccaaattactagggttttgttaagcgcagctgcgtttgacctgcctgatcggtgaaagttaaattcagcatcaactttcgtgattttaagatatattaggggatggaagttacacaggtgcttttcaatgcacaatcgattgatgggactgttcggaagaatgctgaagaaagcctgaaacagttccaggagcagaaccttcctggtttcttgctttcactttctggagagttggcaaatgaggaaaaacctagtgaaacacgtaaattagctggtttgatacttaaaaatgcattggatgctaaggagcagcacagaaaatttgagcttgttcaaagatggttgtcgttggatgctactgcaaagag

SEQ ID NO: 230798 - DNA, 341 bp, Gossypium hirsutum
  unsure (1)..(341): unsure at all n locations
caagaagctatccaagcacaggttcggctgtattgctaccattgaagaacttgacagccgccactattcaagctgaagttttagtttgtggcggtgctccaaaaggatcatttgtccaagcattacaaggtaagttcgttaaagccttgaacactngcgccaggatctcaataaccgacccgaaaccaaaatgggtcttggaaactatgcctttagctagagtcatgggtgacatggtattgcttccatacggcaaagttctggtcatcaacggagcacgttccgggtcatcatgatgggacttatgatgggacccggtcttatattcagtgttatacatg

SEQ ID NO: 230799 - DNA, 438 bp, Gossypium hirsutum
cccacgcgtccgattttgatagtataatatggagaaatggtatggggtttcagggctggtgttggttttgagtttgttctttggggttaaaggagaaccccaagtcccatgttacttcatttttggagattcattggtagataatgggaacaataatgaacttcgttcattggctagagctgattacttgccttatgggattgactttgctaatggaccgaccggccggttttcgaacggtcgaactacggtggatgtcatagctgaacttttggggtttgacgattacatccctccatactcaactgcaagtggtagacaaatactgggaggagttaactatgcatctgctgctgctggaatcagagaagaaactggacaacaactgggagctcggattagtttcagtgggcaagtcaaaaattaccaacaaacagt

SEQ ID NO: 230800 - DNA, 335 bp, Gossypium hirsutum
gtcgcctcattttcttcactcgttcaggctttggttggttttgttggtattgaaaatgcttgctcggctcgcgtctcgacgttttctcgagatccgtcaagctttccgtcaatcttctgaggcctctcgatctttgtccactgccctgaactatcatcttgataccccagataataatcccgaccttgcatgggaattttccgaggcgaacaaacaaaaggtcaaggagatattatctcattatccatccaactacaagcaatctgcagttattcctttgctagatcttgctcagcagcagcatggaggatggcttccagtttcagcaatgaatg

SEQ ID NO: 230801 - DNA, 362 bp, Gossypium hirsutum
gttctattcttttatattatgcatttccatatgtgtggaattcatcatgttcgaggggagtatacaatggcaggtcggggtaaaactcttggatccggggcctcgaagaaagcgacatctaggagtagcaaggccgggcttcagtttccggtgggtcgtatcgctcggttccttaaggctggaaaatatgctgaacgtgtcggagctggagctcctgtttacctagctgccgttcttgaatatcttgcagctgaagttctcgagcttgctggaaatgcacccatagacaacaagataacccgcattgtgccacattatatgcagctcgctgcgaggaacgacgaataactgaacaaactact

SEQ ID NO: 230802 - DNA, 403 bp, Gossypium hirsutum
gttccattcctttatattttgcattttcgtatttttggaattcatcatcttcgttgcgagtatacaatggcaggtcggggtaaaactcttggatccggggcctcgaagaaggcgacatcgaggagtagcaaggccgggcttcagtttccggtgggtcgtatcgctcggttccttaaggctggaaaatatgctgaacgtgtcggagctggagctcctgtttacctagctgccgttcttgaatatcttgcggctgaggttctcgagcttgctggaaatgcagccagagacaacaagaaaacccgaattgtgccacgtcatatccagcttgctgtgaggaacgacgaagaactgagcaaactacttggagatgtaacgattgccaatggaggtgtgatgcccaaca

SEQ ID NO: 230803 - DNA, 333 bp, Gossypium hirsutum
taataacatccctcttttttattcctaaaggaaacgtatagctgttattattacttatatgactggccaactaatgctgcttaagaagcttttgataaagcctattttaccaaaacccataatactaatgctcgaacttaaacttatataacaatgtttgacaactattattttttttacaaatttgttcaaaaccttcacttttttttttccggatgtgtaaattaaaaccataacatttttgccacaattctccaatgatttttttatgcttattgacctcctcttataagcacttatgacataaagaatcattgttatcctgtatcttat

SEQ ID NO: 230804 - DNA, 438 bp, Gossypium hirsutum
ctgcttgattgcgggggttggaatgagagctacagctgcttatatctacatcaggggtgaatatgtgaatgaacgtaaaaaccttgaaagagctagaaaagaagcttatgaagctggactattgggcaaaaatgcatgtggttctggttatgattttgatgttcacatccattatggtgctggtgcctatatttgtggtgaagaaacagcacttttagagagccttgaaggaaaacaagggaaacctagattgaaacctcctttccctgctaatgctggattatatggttgtcccaccactgtcacaaatgtggagacagtggctgtttcgcccacaatactgagacgtggtcctgagtggtttgccagttttggaaggaagaataattccgggacaaaaattgtttgtgtctcaagtcatgtcaacaagccttgcac

SEQ ID NO: 230805 - DNA, 421 bp, Gossypium hirsutum
  unsure (1)..(421): unsure at all n locations
cattttcaagcaatggcaatccccatgggaccggctgtccgttagttttatctgataatgctcctgcaggcatacagggagccaggcatgctcaatttgggttatctgtatccgacctccatcttaataataaactgcagtccggactttttctgcccggtttccagcggttcgatccccactctagaatttccgatggcatcatgatggcaaggcgccctaatggtactgataatctttcttgcttgttaacaattgggaattctaatgtgaatgagaaatctggcaacacanaaagacaccagtttttactctttggtcagccgatacttactgagcaacagctctctcgtagctgttcaagtgaagttgtctcacaagttattaacgganatagttcgttagatggaagtgccgaaaa

SEQ ID NO: 230806 - DNA, 338 bp, Gossypium hirsutum
agttccgacaaaagaaaacgaaaaaaaagaagaagaaatacaatcgttttctttttgaagtcgggttttagtttttggggtgaaaaaaatgttgggagtatttagcagtgcgatagtgtctccgccggacgagctggtggcggccggttgccgaactccatcacctaagataacggcggacgctctggtgaaacggttccttgagacgaactttcttcgcgtgttcatgcacttcggtgaccatgtccaattcgcttattctcaccattaagagttttctttacagcccagatcatttgctgtgaaagaacaaatcttttgcttggttgagggagccc

SEQ ID NO: 230807 - DNA, 182 bp, Gossypium hirsutum
attttcccgagaaatcttgccaaacaaagaaaaaaaaggaaaaatggagttatgccctacaattaagaacatccttcttttggattccgaagggaaacgtatagcttgtaagtattactcaaatgactggccaacgaatgctgctaaagaagcttttgagaaagctgtgtttaccaaaaccc

SEQ ID NO: 230808 - DNA, 402 bp, Gossypium hirsutum
cggacgcgtggggccatggcaagtatatggcttgctgtttgatgtaccgaggtgatgttgtgcccaaagatgtcaatgctgctgttgccaccatcaagaccaagagaactattcagttcgttgactggtgcccaactggattcaagtgtggtatcaactaccagccacccactgtcgttcctggtggtgatcttgctaaggtccagagagccgtttgcatgatttccaactcaaccagcgttgctgaggtgttctcccgcattgaccacaagtttgatctcatgtatgccaagcgtgcctttgttcactggtacgtgggtgagggtatggaagaaggagaattctcggaagctcgtgaggaccttgctgcactcgagaaggattatgaagaagtcggtgctg

SEQ ID NO: 230809 - DNA, 354 bp, Gossypium hirsutum
cccacgcgtccgatttttagagaactatcttctttatttgccgaaacttcaaacaaagggaggaatatgtttttggattggaggtgctcaaagaacaaagataaaaacttgaatgagatcatgacttggcttgagtggatcttatctcacacgcttttgcgtactgctgagagcaacccacaaggtcttgataatttctggcttaagcaaggggcagcattattgctaagcttaatgcagagctcacaagaggatgttcaagaaagggcagccactggactagcaacttttgttgttattgatgatgaaaacgcaagcatagatcgtggaagggctgaagcagttatgcgagat

SEQ ID NO: 230810 - DNA, 430 bp, Gossypium hirsutum
  unsure (1)..(430): unsure at all n locations
caatttcctcccaagcatcactctgtttggtttcttggtcagtttctgttattaaacaatggaaaagattcagcacagccatgtccaagtgcgaggattaaagcttcacgtagcccagattggaacaggtcctaaggtggtgcttttcctgcatggcttcccggaaatttggtattcatggaggcaccagatgattgctgtggctaatgctggtttccgagcaattgcttttgattccaggggctacggactctccgaccacccaccggagcccgaaaaagcaaatttcaaggaccttgtcgacgatgttgttgcccttcttgacttgttgggaatcaataaggtttttcttggtgggaaggattttggagcagtgcctgcatttatggtagctgntatccaccctgaaagggtgtaggtgtcataacac

SEQ ID NO: 230811 - DNA, 439 bp, Gossypium hirsutum
cccacgcgtccggaacaactctacctcctggaccccttgttgattttcgatctcctcagatctgctgtggaatccacaccatatgcctccggttcttttcattttagttttccactttatctgaatagtcaatatgggaggagggttcagagtactgcatctggttagaccatttctttcatttctgcctgaagttcagagtgctgacaggaaaattccttttagagagaaggtcatctgcactgtcgtctctctcttcatctttttggtgtgcagtcagcttccactatatggaatacactctacgacaggtgctgatcctttctattggatgcgtgttatccttgcatcaaaccgtggaactgttatggaacttggtattacccccattgtgacatctggattggtgatgcaactcctggctggttcaaaaatcatc

SEQ ID NO: 230812 - DNA, 429 bp, Gossypium hirsutum
  unsure (1)..(429): unsure at all n locations
ctcgaaacccaccattacggcaaatggcgacgacggtcaccggcaacctgagccgcgatcagtacgtttacttagcgaagctatccgagcaagctgagcgctatgaggagatgcttcagttcatgcaaaagctggtcctcggctcaaccccagccgctgaattaaccgtcgaggaaaggaaccttctctccgtcgcctacaaaaacgtcatcggatctctacgtgccgcgtggagaatcgtttcttccatcgagcagaaagaagaaggtcgaaagaacgaggaacatgttgtgctggttaaggagtacagatccaagattgaatccgagttgtcggaagtttgcgctagtatcttgactntattggagtcgaatctgatcctctctgctactgctagtgagtccaaggttttctatttgaggatgaaag

SEQ ID NO: 230813 - DNA, 449 bp, Gossypium hirsutum
ccatgcgtactggctagtgtagctagcccagcttcttttccaggcttgaaaagcaaggacccaggcttatgattcactaaaagtacggatcttgtgaggatatgtgatttgagaaggaccaagactggttgaacacgaatctctgtgattcggaatcacaatcccagtcacgatactgctcaacttcatgctggatccaaatgaatccctttgctaatgccgaggcacaagcattgggaatccatacacaaaactgcgaggtgtacaaccacgacccggatgcccaaaaatcgaactcttggtagcgagcatccaataaggattcaaacaatgactacgaccgacactaaggatgtggctgggacagttgaacaggtgatgagaatagcagacaagggagcggatattgtccggataactgttcaagggaagatagaggcagatgcatg

SEQ ID NO: 230814 - DNA, 439 bp, Gossypium hirsutum
  unsure (1)..(439): unsure at all n locations
attttcagaacattgaagatctaaacattttttcttctttctgagttgaatccaaagatgggtttttgtttctgggtttgttttatttgtttgttaaacttctacagcttgagttttgtaagttcacaagctgatgcaagtgctgaagggactgttttcattgatggaaaagctccgattggtagaatagatgatgatttcatttgtgctactttggattggtggcctcctgagaaatgtgattatgggacatgcagttggggccttgctgggcttctcaatctggatcttaataaaaacttattcttgaatgccgttaaagctttttcaccattgaagattangttgggcggcacattacaggacanagtcatatatgacactgatgacaatcaactaccctgcacttcatttgtcaaaaacacttctgagatgtttg

SEQ ID NO: 230815 - DNA, 451 bp, Gossypium hirsutum
  unsure (1)..(451): unsure at all n locations
atcgctctctctctctttcagttcacttctacaggcttctcttgtccaccaatcggaaaaaaccaaagatgcagtacaaaaacctgggcagatcacgcttaaaggtgagtcaactatcgtatggagcatgggttagtttcagtaaccagctcgatgttaaagaagcaaagtcacttctacagtgttgcaaagacaacggagtcaactttttcgacaacgccgacgtttatgccaatggtcgagccgatgagatcatgggtcacgctattagggaacttgggtggaaacgatcggatatcgtggcttctaccaagatcttttggggtggtcctgggccaaatgataagggttcgtctagaaaacatattgtggaaaggaaccaagcgtgcttgaagaggctngatatggattatgttgatgcgctctattgtcatagggcagacacacagac

SEQ ID NO: 230816 - DNA, 384 bp, Gossypium hirsutum
cttggtttggccactttgatgggaaaaaggaaaaaagaggcagaaatttagagaagttgattcaaacagaaagggtgatggaactgagcattcagaaaatagaagccttgattaggctaagtacgatagtgatgttggttttaacagcttgtttaattgggttggattctcaaacaaaggtcatcttctacgttcaaaagaaagcttctttcaaggatttgcgtgctcttgttggattgctgtatatcacttcattggctgctgcttataatctacttcaactatgctgctcttcattctcagcttcttacataggaacctcgctgcatatcttacgcatatctggcttggcttcgttatattttggatcaagcagcaatgtac

SEQ ID NO: 230817 - DNA, 403 bp, Gossypium hirsutum
caccggtcaataccatcacccatgaactcttgagcttcatcgccggcgataatgggaagtctagaaaggattaaaacttcagcatcccaccagaccagcagcgtcttatcttcgccggaaaacagctcgaggacggccgtaccttggccgattacaacattcagatggaatccaccctccaccttgtcttacgtcttcaagggggaatgcagatctcagtgttggtgctaccacaaacttacaggatgtcgaaaatgatatttttcccaataagaacgagtttgacgatggtgatattgatgatgagattgatccgacattgaaggaaaaaattgatagggaggtggaagattttgcccgtagattgaattcagattggccggaaagaatgcaagaaattctc

SEQ ID NO: 230818 - DNA, 434 bp, Gossypium hirsutum
tctaaagtcacacctgctacacgacagatggggcatgaccttccacgaacatggcgcggtcacccttggttggacacaccacatggccatgcagctctccggcgtgtgcttgtggggtattcttttcgtgattctgatgtggggtactgtcaggggttaaactacgtcgcggcattgttattgcttgtaatgaaaacggaggaagatgcattttggatgcttgctgtactccttgaaaatgtcctagttaacgactgctatacaaataacttatccggatgccatgttgagcaaagggtttttaaagatttgctttctaagaagtgtccaaggattgctgctcatttggaatcgttagatttcgatgtcttcctcgttactacagagtggtttctatgcctttttgttaaatgcttgccttccgagacaactct

SEQ ID NO: 230819 - DNA, 449 bp, Gossypium hirsutum
atcgctcatatttctcgcagacgtgaagaatggggctgtctttcacaaagctgttcagccggctttttgccaagaaggagatgcgtatattgatggttggacttgatgctgctggtaaaaccaccattctttacaagctcaagttgggagagattgtcaccacaattccaaccattggtttcaatgtggaaactgtggaatacaagaacatcagctttactgtctgggatgttggtggccaggacaagattcgtccattgtggaggcattacttccaaaacacacaaggactcatttttgtggttgatagcaatgatcgtgatcgtgtggtcgaagccagggatgagttgcacaggatgttgaacgaggatgagttgagggatgctgtgctgctggtatttgcaaacaagcaagatctttcaaatgctatgaatgctggcgagatcact

SEQ ID NO: 230820 - DNA, 433 bp, Gossypium hirsutum
tttcgattttctatttagttttctcttcctcgagttaagatgcagatcttcgttgagaccctgaccggcaagaccatcaccctcgaagtcgagagttccgacacgatcgacaacgttaaggcgaaaatccaagacaaggaagggatcccaccagaccaacaacgtctcatcttcgccggaaaacagctcgaagatggccggaccttggccgattacaacatccagaaggagtccaccctccatctcgtcctccgtctacgtggtggcatgcagatcttcgtcaaaaccctgaccggcaagaccataactttggaagtcgaaagctctgacaccattgacaacgtcaaggccaagatccaagacaaggaaggcatcccaccagaccagcaaaggctcatctttgccgggaaacaactcgaggacggtcgcacct

SEQ ID NO: 230821 - DNA, 401 bp, Gossypium hirsutum
  unsure (1)..(401): unsure at all n locations
cttccattagacccaaaatgccgcttcactcggcggtagcattgttttatgccgccgcttctcttttcgccattgttggcgccgaagatccctataggttctacagctggaatgttacgtacggtgacatttaccctcttggcgttcgtcaaacgggtcttctcataaatgggcaattcccaggccctgatattcactctgttaccaacgacaacctcatcatcaacgtctataacaacttaaacgaatcttttctcctctcctggaatggagtccaacaaaggaggaactcgtatgaagacggcgtgtatggcacaacctgccctattccaccaggaaagaacttcacatacatgcttcangtgaaggatcaaatanggagtttctattactacccatca

SEQ ID NO: 230822 - DNA, 422 bp, Gossypium hirsutum
  unsure (1)..(422): unsure at all n locations
ctaaacggccaatagaaggatctagaaacactactgaagcattttctatataataatgtcgttacgcgctacttattgtctcagtaatttctcttcacctgaatataatcttttgcttacggtttttcctgcgtgctcttgaattggggttttgagttattctcaatggcggacacagagacgtttgcttttcaagctgagattaaccagcttcttagtttaattatcaacactttctacagcaacaaagagatctttcttcgtgagctcatcagcaacgcttctgatgcatnggacaagattagattcgagagtttgacggacaagagcaaacttgatgctcaacccgagctgtttatccacattgtccccgataagacatacaatactctatcgatcattgatagcggtattggcatgac

SEQ ID NO: 230823 - DNA, 393 bp, Gossypium hirsutum
ttctcggtggttatgatagagatggtcctcaattatacatggttgaaccatctggcatctcttatagatactttggtgctgcaattgggaagggaaaacaagctgccaaaacagaaattgaaaagttgaatctgtccgaaatgacatgcagagaaggggttattgaagtagccaaaatcatctacaaggtacatgatgaagcaaaggataaggcctttgaacttgagatgagttgggtctgcgatgaatcaaagcaacaacatcaaaaggttcctgatgacctattagaggaagccaaggttgctgctaggactgcactagaagagatggatgctgattaaattgtcagtgaagccagaatagtctttgctattgatattctcatctacatga

SEQ ID NO: 230824 - DNA, 421 bp, Gossypium hirsutum
  unsure (1)..(421): unsure at all n locations
aaaaaattgactaaaaagcttcaattttttttctttgttttgcttctgtttctctttgaattcccaaatgggtttgtgggaagcttttctcaattggcttcgaagcctgtttttcaagcaggaaatggagctatctttgatcggacttcagaacgcgggaaaaacctcactagtaaatgttgttgcaactggtggatatagcgaagatatgatccctacggtcggattcaacatgaggaaagtgacaaaaggaaatgttactataaaattatgggatctcggaggtcaacctaggtttcgtagcatgtgggaacgatactgccgtgcggtttcggcaattgtttacgtggtggatgccgctgatcccgataacttgagcatctcaagaagtgagcttcatgattngctgagtaaaccctca

SEQ ID NO: 230825 - DNA, 413 bp, Gossypium hirsutum
cttggaaggaaaaaggcgatgttgatgttgccattcggtactatatgattgcaattgagcttcgccctaactttgctgatgcatggtcaaatttagctagtgcttacatgcgaaaaagaagatttaatgaggccgcacagtgttgccgtcaggctctgcaattaaatcctctattggtggatgctcatagtaaccttggaaatctaatgaaggcacaaggtctggctcaagaagcatacagttgttatcttgaggctcttcggatacagccaacttttgccattgcatggtcaaaccttgccggtcttttcatggattcaggtgacttaaatcgagcccttcagtattacaaggaagctgttaaactcaaacctgcgtttcctgaggcttatttaaatcttgggaatatttac

SEQ ID NO: 230826 - DNA, 448 bp, Gossypium hirsutum
  unsure (1)..(448): unsure at all n locations
cttcgattccaatagagataganagagaggaggagatcttcgcttctctgggtcggtctgctccatttgataaccgcttgcagctctctcagtgcttgacagacgtgaaaaatggggttgtctttcacaaagctattcagccggcttttcgccaagaaagagatgcgtatactgatggttgggcttgatgctgctggtaaaaccaccattctttacaagcttaagttgggagagattgtcactaccattcctaccatcggtttcaatgttgagaccgtggaatacaagaacatcagcttcactgtttgcgatgttggcggccaggacaagatccgaccattgtggagacattacttccaaaacacacatggacttatttttgtgggtgatagcaacgatcgtgatcgtgtggttgaagctagatatgaattgcacaggatgttgaatg

SEQ ID NO: 230827 - DNA, 455 bp, Gossypium hirsutum
  unsure (1)..(455): unsure at all n locations
atggccttaactacccaaacttgtttccttcaaaatccattccttccttcgcctgctctttcccagccttctgcatttcctgctccggcggctcttccttctcgaaaactccgccccatttctgtccagtgctccctggcttccgccccctctgtggcggtgacggcgtccaaggagtgcaaggtgaaatcggtcaaggctaggcagatcattgacagcaggggtaatcccacggtcgaggttgatttgatcaccgacggtctttatcgatcagccgttcctagtggcgcatctaccgggatctatgaggcccttgagctcagagatggtgacaagagtgtctatggcggcaaaggtgtgctctttgccgtccaaaacatcaatgaaattttgggtcctaagnctattggcattgatgtcagaaatcaagcggatgtagatgctgtaatgctgga

SEQ ID NO: 230828 - DNA, 397 bp, Gossypium hirsutum
  unsure (1)..(397): unsure at all n locations
gaaaaatggccaccattgatgttcctgagcaggtttcggttcttgcagatgcagaagctgttagaaaggcttgtaaaggatgggggacagatgagaaggcaataatttcagtgttgggtcacagaaatgcagttcaaaggaagcaaatcaggcttgcttatgaagacctttaccaggaagatctcatcaagcgtcttgaatcagagctttctggtgatttcgagaaagcagtgtatcgttggatattggatccagcagaccgagatgccgtgttagctaatgttgccataaagaaattaagccctgatcaccatgtgatcgttgaaatttcatgcaccaaatccnctgaagagctcttggctgtgaagagagcttatcangctcgatacaagcattc

SEQ ID NO: 230829 - DNA, 409 bp, Gossypium hirsutum
aagagactgagatgtgggttccaggccaatgaaccatgctacaagttttggtttccatacaagccctgattctgaatgctaaacccttctttaacgagcctggtttcgagatttcgtatgttggggccgaaggtgaaaagaggtccaggaagtacaatgaggatgcatttgctctatccttgaagacaatgatttacactctaagaaggccgccgctgcatttcgaggactttgtcgccggtcattttcgctcccatgcacgtgacattatcatggcttgtgaagcatataaagagggtgctgctatcggctccgttctggttaaagattgcgtaacagaccctaataaaaccgaaaacagtagctccgagagatttaaaagaacaatgacgaagatgatcgatgcaat

SEQ ID NO: 230830 - DNA, 438 bp, Gossypium hirsutum
  unsure (1)..(438): unsure at all n locations
gcagaatcagagtgtaaaaaaggaaggaaaaaaaggctaaaagaatgtttttgcgaatgatatcgcggccgttgttggctaaggtgaaggagacaacggggatcgtcggattagacgttgtacctaacgcaagggaagtccttatcggtctctacaacaagactctgaaggagatccaggccgtacctgaagacgagggttaccgtaaggccgttgagagcttcacgcgccaccgtctgaaggtttgccaagaggaagaagattgggaaatgattgagaagcgccttggatgtggccaggtcgaggagctcatcgaggaagcgcgtgacgagctcactcttatcggaaaaatgatcgttgcagagtgggatccatgggngtgtcctgatgactatgaatgtgagggtttcgaaaatgatgctcctattcccaagcatg

SEQ ID NO: 230831 - DNA, 432 bp, Gossypium hirsutum
atttaataggctttagaagattcgtcggtgactcttcccggtcggtcaccgaatcgtgatcgctggagacgagtttgagtgtttctttatctttgtttgttagcgtaagaggaaagtgtgcgtgtttggattgataagaggaaaagagaaaatgaatgggaatagcaatggatttgggagtgccggtgcggtggcggcgactgagtttgtaaggacatcatcgacatgagactggagagaatcagtgtagttctgccgtcgtcaagcggatcaaagctcctgttcctctcgtttggtctctggtgaggcgatttgaccaacctcaaaagtataaaccctttgtcagccggtgtgttgcacaaggaaaccttgaaattgggagtcttagagaagttgatgtcaagtcagggctaccagctactacaagcactg

SEQ ID NO: 230832 - DNA, 308 bp, Gossypium hirsutum
agcagctgtaccacaactacagagaagagaggaaaggggaaaaaaagcgtgcggtgggcttgcttcttcttctacttcgctctctctctttctccgaagttcctccttcgttcttttatttattcagtattgtaaaagatggccgacggtgaggatattcaacccctcgtctgtgataatggaactggaatggtgaaggccggttttgctggggatgatgctccaagggcaatttttcccagtattggtggtcggtcccggaacactggtgttaatggtgggatgggtcaaaaagattccctatgtag

SEQ ID NO: 230833 - DNA, 437 bp, Gossypium hirsutum
cttgtttaaaatataagaaaaaaaatcatacgcaatgagcactgctggtcaggttattcgttgcaaagctgcggtggcatgggaggcggggaagccactatcgatagaagaagtggaagtggcaccaccccaaaagcatgaagtccgtattaagattctcttcactgctttatgtcacactgatgtatactactgggagtgtaagggttacactcctctgtttcctcgtatacttggtcatgaagcctcagggatcgtggagagtgtgggtgagggtgtgaatgatttgaaacctggagatcatgtgctccctatcttcaccggagaatgcaaagaatgtcgccactgtctgtcagaagaaagcaataacatgtgcgaactgcttaggatcaactgcgaccgaggtgttatgcttgctgatgggaaaaccagatttt

SEQ ID NO: 230834 - DNA, 333 bp, Gossypium hirsutum
  unsure (1)..(333): unsure at all n locations
tccacgcgtncgattaacaacagattggctcgtggttatgaanagtggtaaataggctttgggttacaaaactgttcttaaatctctcagaaactccaaaggtaagttgattataattgccaacaactgccctcctcttatgaagtcagagattgaatattatgccatgttgtgcaaggttggagttcaccactataatggaaacaatgttgacttgggcactgcctgcggcaaatatttcagagtgtgcttgctcagcattatcgacccgggcgactctgatattattaagatcattgcccgagatcactgagcaacagcggacgacacatc

SEQ ID NO: 230835 - DNA, 447 bp, Gossypium hirsutum
ggaaaataatgttctgtactttgagtttgaatatatggaatgcaatctttaccagcttatgaaagacagagaaaagcatttttcagaagttgaaatcagaaattggtgcttccaagtctttcaaggtcttgcatacatgcaccagtgtggatattttcatcgtgacctaaagccagagaatttgttggtttctagagacataatcaaaattgctgattttggtcttgcacgtgaaatcagttcacatcctccatacacagaatatgtctcaacacgctggtaagtttgatacttctgagagtttattttgttttccttttttttctgttctttttctattactactatctaaactttgacttgtttaggtatcgtgcgcctgaaatacttcttcaatcatacctgtatacttcaaaagttgatatgtgggcgatgggtgctataatg

SEQ ID NO: 230836 - DNA, 427 bp, Gossypium hirsutum
cgagagtagtcatttttctttgcatcattgcatttttctctcgattgagcctctagggttttgaaagatacttaatatctttttttctttctctactacaatcgaatcgactctactagttttatcagatcttgaaatatccaagctgaactccttggctcgatcaaaacttgatcggattagtttcattcttgtctaatttcttttgagtaagaaagggaaaaaaatgccggcagtttacggagccagattgacgacgtttgaggattcagagaaagaaagtgaattcggttatgttcgtaaggtgtcaagaccaagtcgttgtgcagatggaatggctggtgctgccatgtatgaattagtccgtgttgggcatgacaatctgattggggaattattcggttggaaggagactctgctacaatcc

SEQ ID NO: 230837 - DNA, 324 bp, Gossypium hirsutum
tctgaatcttattcttttgtcctctagagttggaatggaaaacccctcaggatgtggcagctgacaactatatgatgtctatgggtccttcaacctataacccttactggactggtatgcagccaggaatggatgggtttatgggtccttatgctggtgcgatgccttatatggggggctatggactaagtccattggacatgccatttggaggtgtaatgcctccagatccttttggcgctcaagggtacatgtttcctcctgtcctgcctcagaaagatcttgccgacttcggaatgggtatgaatgtcgccccaccaatca

SEQ ID NO: 230838 - DNA, 334 bp, Gossypium hirsutum
tagtgctccaacttatcaggtaattgaagaaggggttgttgtgtttgatatcatgggcctctccaatggatattgaccctaaacctgattctgaaaatgccgccctcgttctcgttaagcaaggagctgaagctagagttttcgagtccgtattcgctggaaaaaggtccatcgtcaaagaacgcttctccaagaaatacaggcaccccactcttgattctaaactcactctcaagcgtttaaacgcggaagctaagtgcatgaccaaagctcgacggcttggcgttttaactccggatctttacgccgtcgaccctgtgatccataccctgac

SEQ ID NO: 230839 - DNA, 136 bp, Gossypium hirsutum
gtctgattgaaatggatggaacaattttcctacataaattcagacggatgtgcagggacctccattcccttgcttgtttactgaacccttccagctatatggctccttaccgggaattttatttgtcctgaaattt

SEQ ID NO: 230840 - DNA, 158 bp, Gossypium hirsutum
cccacgcgtccgaaaagacagggcagagtaagctaagctttgatcatcaatggcggagaagagtttcaagtacgtgatccttggcgggggtgtagctgctggatatgcagcgagagagtttgccaagcaaggagtgcaacctggtgaactagcaatta

SEQ ID NO: 230841 - DNA, 353 bp, Gossypium hirsutum
atactctcaaaacactttgctttctttgggattcgtgattttccgaaagctgggttggccggaactcttaccaaaatacctcaggtacaagtgatcaaagagaatgggaagaggaaaaatagagataaagaggatcgaaaacacaacaaatcgtcaggttaccttttgcaaacgcaggaatggcctgctgaagaaagcttacgaactgtcagtcctctgtgatgctgaagttgctctcattgtcttctccagtcgaggccgtctgtatgagtactccaacaacaacataagatcaacaatagacatgtacaaagaaggcttgctcagatacttctaacacaaacactgttact

SEQ ID NO: 230842 - DNA, 384 bp, Gossypium hirsutum
attctgccatgcggacatacaattcacacaaattgtttgaaggaaatgagggaccatttccaatatgcctgccctctgtgctccaaatcggtttgtgacatgtcaaaggtctgggaaaaatttgatgaggagatcgcagctgcgccaatgccggaagagtaccataacaaaattgtttcgatcctttgcaacgattgtgggacaaaatctctagttcggtttcatgtcctggctcagaaatgtccgaattgcaagtcatacaatactaggcaaacacgaggctgaagtggcttaaagtgggatgtagaaaccgacttggatggcatattttccaaatcgatgcatcaagcattgagttctgggtaagcttctgcaacgcgtaat

SEQ ID NO: 230843 - DNA, 299 bp, Gossypium hirsutum
gcacttgccaaggcattggctggtcagaaagatgaggccttcttcacttccaatgcgcaccgctcatgcttcaaggaagtccttcccaagagtgaccaatgaggctgttcaaaaagctgctgctgctttgaagggctctgaccaccgccgtgcaacaaacgttagtgctaggctggatgcccagcaaaaaaagcttaatctgccagtccttcccaccacaaccattggatccttccctcaaaccttggaactcaagaaagttcgtcgtgaattcaaagctaacactatctctgtggacc

SEQ ID NO: 230844 - DNA, 422 bp, Gossypium hirsutum
tcggacgcgtgggtaagctttgagatttatcgatggcggataagagtttcaagtgcgtcatcctcggtggtggtgtcgctgccgggtatgcggcgagggagtttgccaaacagggagttcagcctggtgagctagccattatttccaaggaagcggttgctccatatgaacgttctgctctgagtaaggcgtatctcttccctgagggagctgcaagacttcctggtttccatgtctgtgttggaaggggtggatagagattgcttcctgagtggggcaatgaaaaaggaattcaggtgatccttatcactgaaattatggaaagcaaaatctttctgcctatacctcttgtatgcgcatcttgataaaacgttcatatatcaaaattttgatcattgcaacctggtttccacactttttat

SEQ ID NO: 230845 - DNA, 310 bp, Gossypium hirsutum
cttctttatctttcccacggaaacgaagagcggtcagaaaaccttgtgaagaagggatgagggaaatcttgcatatccaaggaggtcaatgtgggaaccagatcggggctaagttctgggaagtcatatgcgatgagcatggaatcgacaacactggaaagtataacggtgactccgatctccagctggagcgtatcaatgtctactacaatgaagccagtggcggtaggtatgtccctcgcgctgttctcatggatcttgaacctggcactatggactccgtcagatccggtattttcggtcagatctt

SEQ ID NO: 230846 - DNA, 312 bp, Gossypium hirsutum
ttccgaggcagccccttgcctggaaagatgttaccatttgtttatgctggcaatgctagcaatgctaccaacgggaatttgtgtatgatggatactttgataccggaaaaagttgccggcaagattgttctttgtgatcgtgggatgaacgccagggttcaaaaaggagctgtcgttaaagcagccggtggtataggcatggttttgtctaacactgccgcatatggtgaagagctggtagcggatgcccatttgctcccggcaaccgccgtgggtcaaaaatctggtgatgctataagagactactttgtt

SEQ ID NO: 230847 - DNA, 455 bp, Gossypium hirsutum
gtgtatatggagaattgcggccattaatgaggcaggtgggtggaaggatcggaccaccgtggatgacatggacctggcagtcctagccagtttaccaggatagacattactatacctgctaatcccaatagtgccttggactaaatgtagcattgttaagacatgtctactccagatgctttcttcttctttggtttgttgctaatgatttgtatgtacaatctttttgtgttggcccttagttttattgttgactgatttttcttttgattaaattttaatttgatattatttgttttcctattaaattttttttgatcaatatgttttatatatttaatataatttgtttttttttatattttttttttttgttaaaatttttttttatttattatatttttgtttagcgaattattttctttctaagattatttttttatattataattttt

SEQ ID NO: 230848 - DNA, 388 bp, Gossypium hirsutum
ccattttccccgagtaaaacgccaaagaaaacaaaaaatatgagagaaatcttgcacatccaaggtggtcaatgtgggaaccagatcggggctaagttctgggaagtcatatgcgacgagcatggagttgacaacactggaaaatataacggtgactccgaccttcagttggatcgcatcaatgtctactacaatgaagccagtggtggaaggtatgtcccacgcgctgttctcatggatctggagccgggcactatggattccgtcagatctggtccttttggacaaatctttcgccctataacttcgtcttcggacagtctggtgctggcacaactggccatggtcattcacgaggagctgactattgatctgtctgatgttgcag

SEQ ID NO: 230849 - DNA, 281 bp, Gossypium hirsutum
agcagttactgtgtgtcctttgtttgcatttgcagctttcttcttctataaatgcgggctgaaactccagcttctctcattccattctcattcgttttgttaaacccctccctttgttggaaaaatggcagagcgtgtgatcacccgagtacacatcctccgggagcgtctggatgacacccttattgcccatagaaacgaggttttggccttgctcacaaggatcgagggtaagggaaaagggattctgcaacaccatcaaattatcctagagtttgaag

SEQ ID NO: 230850 - DNA, 318 bp, Gossypium hirsutum
ggatttgcatcttttgtttcccattcccatccgcatcccttttataactcacctgccatttctccttttcctcaacattccaatcttcttttctgggtgtattttgctttgttgaattcatcatatcttcttcactaatcatggctatggctgcttccgagactaaattccatgttcttgctgttgatgataccctgattgatagaaagctcattgaaaagcttctcaagacttcttcttatcaagttactgcagtggattctggaaccaacgcattggagtttcttggattgaacaacaatgatcatcaaaatgttg

SEQ ID NO: 230851 - DNA, 302 bp, Gossypium hirsutum
gaagggttgtcttttaaccacttcttcttttgtttccattgctttgaatatactgatagagatgcaagtttctcacatgctaagctccttcatcaccattcttgtactccactgtcttcttctttcaacatttgtttcctgctcatcccatggggagattactgcatccaccaatcacaaaaacattaaaggaaatgcacataagcttagttctcaaatgatatcttatatggctgttcatggccttctgctatggagttccatgggattcttaatgcctgtaggcatacttactgttagaa

SEQ ID NO: 230852 - DNA, 330 bp, Gossypium hirsutum
  unsure (1)..(330): unsure at all n locations
gcgggatgcatttaatatgcggagtgaaggtttccaatcatttccaccaaactatgttgcatccgatgattataatatcggtgggaatacttttatggaaacgagaagaagtgtaccggatgaacaaccgaatgaagaagcggcggagttctacacgttacttggtgaaatgaatgaagaactttatgagggatcaaaattntaaaaaatgtcattctgtattcgccttttccacataaaatgtttgggagggtggaccggaaactctttgacaatgctgttagagcttttgagagaaatgttcccgtttgcaaaaatccctcatcatgt

SEQ ID NO: 230853 - DNA, 342 bp, Gossypium hirsutum
aattattaagaaattctgacggattatctcttcaaattttctcagggcttgtgctgaacggaatggcatcgctatcaagtcagccgcagttccgctacactcaaccaccgtcgaaggtgctgcatttaagaaacttgccatgggagtgtacggaggaagagctgattgagctggggaagccatttggtaaggtcgttaataccaaatgcaatgttggcgccaatcgaaatcaagctttcatcgaatttgctgatttgaatcaagctattgctatgatatcatattatgcttcatcttcggagcctgctcaagttatgggcaaaacggtctacctacaatatt

SEQ ID NO: 230854 - DNA, 285 bp, Gossypium hirsutum
gtgactgggaaggtaaagtggttcactgaccaaaggggatttggtttcataacgccggatgacggcggcgaggagttgttcgttcaccaatcgtcaattcgttccgacggttttcgtatcctcgccgacggcgaagaagtcgagttcgttatcgattcttctgaaggaggtcgtaccaaggctgttgatgtcactggccctaatgggaaccctgttcttggcaccacgagatctggacgcattggtggcgggagtggattcggcggtagaggaagaagaggaggt

SEQ ID NO: 230855 - DNA, 306 bp, Gossypium hirsutum
attttgggttttagttgatgctttgaatgaggtcaaacaagaagagattaatgggatcatgaatgactttgctgaacctgggtcacttgctccaactggattgtaccttgggggcacaaaatatatggtgatccaaggcgaacccggatatttaattctagggaagaaaggatccggatgtattactattaaaaagtccaatatgggcttgctcatcggaatctatgatgaggccaaaactttccggccaatgcaattattgttgaggaaaagcttgggtgattaattttattgaacaaaggtttt

SEQ ID NO: 230856 - DNA, 223 bp, Gossypium hirsutum
ttaacacatcaatgtgctttcaagcattgtggaatacctagcatcaagggatggtgcgatcatgcgaagtcggaatggtcatgctcctcttttccttcggtatactctcaatagaaaaggttatacaggatctcataaagatgttcagaaatgcctcagaattgctcactacttgaaagaccgactgcacgatgccgggatcagtgctatgcttaaggaactt

SEQ ID NO: 230857 - DNA, 253 bp, Gossypium hirsutum
ataaaaaactcctactgtctcactttgctctggtcttgttcctgtgctctttgagcaaactatcgccgacatcctcttcaaaagaatggcatatgaacggattctgttgcggatgggtaatgctctccttgacatttcactagtcgtggacgaagagttcttgtaaaaatatgatctcaagatgaacaatgcaattttagctgtagagaaacaccttcccatgtatcaagatatggcattccaagcccaatgt

SEQ ID NO: 230858 - DNA, 358 bp, Gossypium hirsutum
ggaatccaaaaccagtccaccaccttcattttccttcattttctcactgtttctcactgctgcatgcctctttacaccattgggagctcaacagcagtcacccatcaagaccatagtggcgttggtgatggaaaacagatcctttgatcacatgctcgggtggatgaagcacacacgtcaacccttcaatcaatggagtaactggagatgaatgcaacccggcttcaacaaataacccgaacccggaatccatttgcttcaccgacgatgctgagtttgtggatccggatccaggtcactctatcgaagctgttgaacaacacgttgtttggttcttacaccattccttccatgtctg

SEQ ID NO: 230859 - DNA, 264 bp, Gossypium hirsutum
  unsure (1)..(264): unsure at all n locations
gttctaatgaacattagccatcagctgcatgggggaanaatgcatgttgattagtggcaagatccttcangtctaccggattgctcatgatcaagatttgaagaaatcgcatcctaagcttgccatgaagtggcatcccaacaagaatcctcattccaataaagaagctgaagccaattttaatcaaatcttccaaccttactatgtttccagcgatcctcaaaagcgtgccgttttcgatcatttacgggatataaggattaa

SEQ ID NO: 230860 - DNA, 335 bp, Gossypium hirsutum
ctaacttgatgcagagcttaaagtataatagttagatggttccgaagatgcatgtcatacagtaattttaaggataaacatgcagaaaggaataattatggatgatacttatttacttgcagtttgcaagaagcacagaagagaatgaagataaagaagcctcctcacatcctggttatccatttgaagcggttcaagtacattgagcagcttggacgatacaagaagctctcctatcgtgttgtatttccacttgagctgaagctgaacaataccgtggaagatgcagatttggagtattccttattggctgtagttgttcatgtgggaagtgg

SEQ ID NO: 230861 - DNA, 216 bp, Gossypium hirsutum
cggacgcgtgggaaaaagtttaattgagttctccgatcatggccctctctgctcgtatcctctcaaaatctcgccagctttgtggtagtcaatctattctacaaaaggagaataccattcctgttcgtttttatgccaaagaggctgctgctcccattgctaataagggagatgagatattgaaaaatatctttttggaggttaaggcaaaatatg

SEQ ID NO: 230862 - DNA, 376 bp, Gossypium hirsutum
agacgcgtggggttatcaagtctagaatccgtggcattcacgcccttatgatgggacaattgctcatcttcgaacctaattgagtcgccttggaaagcctattgcagctgatgcgggtgggaagttgtacacaattatggagatttgccgtctttttgatcaaaatttcagagaacatttagatggggtgcgtactggtggtgataaagattacaatgttttcgacaaccaacttcctgctgctttgaaaaggttgcaatttgacaggcaactatcaatggagaatattaggaagctcattaccgaaactgatggctatcaaccacatttaataactcctgaacaaggatacccgcgtttgattgaatctacttta

SEQ ID NO: 230863 - DNA, 382 bp, Gossypium hirsutum
  unsure (1)..(382): unsure at all n locations
aaaccctaagaaaatccagttagattgtcattcaaacctgaaaaatgggagtagagaagcaagtcatcaggcctggaaccggtcccaaacccacccccggtcagaccgtcaccgttcactgcactggctacgggaaaaatggagatttgtctgagaaattctggagcacaaaggatccagggcagcaacctttctctttccaaattggcaagggctctgttataaaaggatgggatgaaggtgtgatgggaatgcaagtggcagaagttgctcgtcttcggtgctccccagactatgcttatggtgctggtgggtttcctgcatggngaatacagccaaactcgggtctcgaattcgagattgaagttctaaatttgaagtg

SEQ ID NO: 230864 - DNA, 408 bp, Gossypium hirsutum
cgtcccctgggccccaactaaaataatcaaaacccattgtatctttctccttggttcactctgcagatcctcccccattcattcaaacaccaaatcaaaagttcattttgttccttttctcattgtcactctccacatcaatacttcccccaattttttttctaaaaacaatgtttcgaattcaactgttggtttcggttttgctttgttgcttcaccttttggttccacatttcatttgggtacttgataacgtgctcggggatagttccgatgaggtaccgcaacgataaggtatcgataacggatttcggcggcgtcggtgatggaaagacactcaatacgaaagctttccgggaagctatataccggattcaacatctgagaaaggagaggggggaccttgctt

SEQ ID NO: 230865 - DNA, 402 bp, Gossypium hirsutum
agaaggtgtcttaataaacgccttctttcttgttcttctccctttctttgcttggtcgaatttttcttaagcgagaatgagagagtgcatttcgattcacatcggtcaggccggtatccaggtcggaaacgcctgctgggagctttactgcctcgagcatggaatccagcctgatggtcagatgccaagtgacaaaactgtcggaggaggtgatgatgcttttaacacctttttcagtgaaactggtgctgggaagcacgtccctcgtgccgtctttgtggatcttgaacccactgttattgatgaagtgagaactggtgcttaccgccagctctttcacccagaacaactcatcagcggcaaggaagacgcagctaacaactttgcccgtggtcactacac

SEQ ID NO: 230866 - DNA, 464 bp, Gossypium hirsutum
caacacccaaaatggcctacgccttgattacaattctactcctagccatttacggagcacacggcccaaagtgcagcaccaccaccagcaaccacagctccaccatcaatgctgccaccagcagccagagacttcctccaagcccacaaccaagcaagagctgcagtaggtgtcgcacctctcaaatggagccaacaactagccaatgcttcaagtctcatcgcaaggtaccaaaggaacaaaatgggttgtcagttcgcaaacctgacaaaccacaagtacggagcaaaccatttatggggtagcggagccgccgtgacgccgctcatggcggtggaaacttgggtaaaagagaaagattattatgatgatgggactaatacttgtgcaccgaatcataaatgtggtgtttatactcaagtggttggaagaatcttcggatttggtttgctacaagctacatg

SEQ ID NO: 230867 - DNA, 426 bp, Gossypium hirsutum
  unsure (1)..(426): unsure at all n locations
gtttttcgttgttttttggggtttcctttatgtgatctcttattggataaatgaggaanagaantantaccaaggatgatgcanctcaatattaagagggttcctactgttgtttcgaattaccaaaaggatgaggcggaagagactgctcgccggagcggtggatttgggaagaattgccttagaagctgttgcattccaagagcaaagcttcctttatatgctttcaagaaggagagtgaaaaaaatgcatttgaaactgaaaacaaagagcctccaattgcttttcttgattctctcgttcttggggagtgggaggatcgcatgcaaagagggctctttcgatatgatgtcactgcctgtgaaaccaaggtgggtccttgtgaatatggctttattgcccagcttaaccagggccgtcacctt

SEQ ID NO: 230868 - DNA, 440 bp, Gossypium hirsutum
cttacgattatattgttcttctagtgggttctaattttctgtcacgggggagacaatgggagcttcattgcctccgaaagaagctaacctcttcaaactcatcgttaaatcatatgaaactaaacagtacaagaaaggactgaaggctgcagatgctatacttaaaaagtttcctgatcatggagaaacattgtcaatgaaggggttgaccttaaattgcatggatcgtaaaactgaagcatatgagctcgttcggttaggtttaaagaatgatttgaaaagtcatgtctgctgggacgtgtatggtctcctctatcgatcagatagagaatacagggaggctatcaaatgctatcgcaatgctttgagaatagatccagacaacattgaaatactacgggacttgtcactcttgcagatctgcagcagattcttcttct

SEQ ID NO: 230869 - DNA, 319 bp, Gossypium hirsutum
  unsure (1)..(319): unsure at all n locations
gtcaaattccgaaaactgtactcagtcnttcaattgaagtcacccagtcggcggtggactccagctctggagaagagtcacatcttantgagtctgagatcaatgaatacaaaaagccatatgaagagattatgtctgggaagtacaaagtaaaggccttaaatggtagcttaagatgccccttttgtgctgggaagaagaaacaagactacaagtacaaggatctgcttcaacatgcttctggggttggtaaaggatctgccaacagaagtgcaaaacagagagcaaaccacctggccttggcaaaatatttggaaat

SEQ ID NO: 230870 - DNA, 429 bp, Gossypium hirsutum
  unsure (1)..(429): unsure at all n locations
cggacgcgtgggctcccattttcttattgatgttgcagatcggttctctaatggtttggtcgggtgtancgttgtttatacgtttggttgttgttgaagaagtgctactaccatggctacaaagaagagcgttggggacttgaaggaagctgatttgaagggaaagaaagtgtttgttagagtcgatctgaacgttccattggatgataacttcaacataactgatgacacaaggatccgtgccgctgttcccaccatcaagtatttgatgggtcatggctctaaagtcatcctctctagtcatttgggacgcccaaagggtgtcactcccaagtacagtttgaagcctcttgtgccaaggttatctgaactccttggagtcgaggttaaaatggcaaatgactgtattggtgaagaaggtgagaaaat

SEQ ID NO: 230871 - DNA, 439 bp, Gossypium hirsutum
  unsure (1)..(439): unsure at all n locations
gaagccgccatgggaaacgcttttctgttacaaggcggagattgtgcgcggagtgtcaaanagttcaacgctaataacatccgtgacactttccggatccttcttcagatgggtgccgttttgatgtttggtggtcaaatgcctgttatcaaggtgggaagaatggctgggcaatttgcgaagccgagatcggacccattcgaggaaaagaatggagtgaagctgccaagttatagaagagataatgtcaacggggattccttcgatgaaaagtctaggatccctgatccccaaagaatgattagagcttactgtcaatcagcagctactttgaatcttttgagagcctttgctacttgaggttatgctgctatgcaaagggttactcagtggaatttggatttcaccgaacacagtgagcagggggataggtaccgtg

SEQ ID NO: 230872 - DNA, 379 bp, Gossypium hirsutum
  unsure (1)..(379): unsure at all n locations
ctccatcagagagatttaatcaatctgagcgagagangaaaatcacgagttcgtgataaagtgacngaaaatatatacaatgcatagatcgcgatctccattgctaatagctttatcatttctcttcacatccttcaccatctctaacgctctttacgggccgtcgtcgccagtggttcagctcactccatctaatttcaagtccaaagttttaaattctaacggagttgttttggttgagttcttcgcgccttggtgtggccattgccaaactttaacacctacatgggagaaagcctccaatgtcttgaaaggtgtcgctacagtggcagccctcgatgctgatgctcataagtctctttcccaagaataccggatt

SEQ ID NO: 230873 - DNA, 399 bp, Gossypium hirsutum
  unsure (1)..(399): unsure at all n locations
ccctaaaccgccgccgccgccgccgcccgtcgaacgccgacnaaaatggctttggagggattagttctccgcggcaccatgcgagcccacactgacatggtcacagccatcgccactcccatcgacaactccgatatgatcgtcacttcctctcgcgacaagtccatcatcctttggcacttgaccaaagacgaaaagacctacggtgtcgctcgccgccgtctcaccggccattcgcactttgttcaagacgttgttctctcttctgactcccagttcgctctctccggttcctgggacggtgagcttcgtctttgggatttgaacgccggaacatccgctcgtcgtttcgtcggccacaccaaagacgtgctctccggtgctttttcaattgataac

SEQ ID NO: 230874 - DNA, 390 bp, Gossypium hirsutum
  unsure (1)..(390): unsure at all n locations
tctatcccccaaaaatggcaanttccagggtctccttcatcatcatcatggtcagcaccntcctttntccatccctctcttcacagctgtccgatctctttccttccaacaaccctccgcccttcctctgcaaacattctcacccaatcaaacaacccaaccaccaccaacaataccattattataacccgtatttttcccaaccgttagaccacttcatcttctttgacctccccaggttcccacaactttaccttattaacacttaacacttggtctgccctttcccttcctgcccaatcttcctttacttcggcaaccaaagttacatccaaatgttcccccttaacacccgttttttatttgacatctctccccccttcggtgcca

SEQ ID NO: 230875 - DNA, 409 bp, Gossypium hirsutum
  unsure (1)..(409): unsure at all n locations
gcagcataggtactggctacnatcggtccgggaccactttgtctccggaggggcgcgttttccaaatcnagtaccccnccaaagccgtcnataacagcggaactgtggttggaattaaatgcaaagatgggatcgttatgggagtggagaagctgatagcatcaaagatgatgttgcctggttctaatcgaagaatccattcagtccatcgtcattccggcatggcagttgctggattagcagctgacggtagacaaattgtggctcgtgctaaatctgaagctaccaattaccaaagtgtgtatggtgaacccatccctgtcaaaaaacttgcttaacgtgtaacaagttatgtgcatttatgtaccctttactggtggctccggcctttttgctgtggcataattct

SEQ ID NO: 230876 - DNA, 425 bp, Gossypium hirsutum
  unsure (1)..(425): unsure at all n locations
gaaaaaaatgaagctcttgtttctaactttggtgcttggttctcttcttctatggtctggagtttttgcaccaacaatggctcancctcgttcacctttttgtgaagggaaatgcaaagggaggtgcaataaagcggcggtttgggatcggtgcttcaaatattgcggcatatgttgcgaggagtgtcaatgcgttccgtccggtacttacgggaacaaacacgagtgtccttgctacagagataaggtgaacaacaagggcaaacccaaatgcccttgaaaatgaaatatattcgagttcgggatttaatcaagcttaaagatcgaggacgaagaggccatatatatatatatatatgcatgttgatgattatgttattataaaaataaacttggtntggtgctgttattttcctttgggtttt

SEQ ID NO: 230877 - DNA, 379 bp, Gossypium hirsutum
  unsure (1)..(379): unsure at all n locations
gttgttgctaaccctgccaacaccaatncattgatcctgaangaatttgcacgggcaatgcctgcaaanaacattacctgtttgacaaggctggatcataacagggcactaggtcaaatctcagagaaactaaatgtccaagtttctgatgttaagaatgtgattatttggggtaatcattcatcatctcaatatcctgatgtcaaccatgcaactgttatgactccatctggagaaaagccggttcgcgagcttgttaaggatgatgcatggttgaatggagaattcataaccactgtccaacaacgtggggctgcaatcatcaaagctaggaaactctcaagtgcactatctgctgctagtgctgcttgtgatcaca

SEQ ID NO: 230878 - DNA, 411 bp, Gossypium hirsutum
  unsure (1)..(411): unsure at all n locations
attggtattttacaaattagagataattgtcgaaggatagagccatgagttgtgttggctgttgtgaanaaaataatatccacaatgccacagacaatggaggccaatacatggttaaaaactcagcaggaaatgttgggggttaccatacatctgaaactgcatcgaagagtgctcaaaccgtgaaggttcagcctattgaagtccctgctattttggcagatgaattgaaggaaatcacagataactatggtaacgatgctttgattggagaaggttcatatggtcgagtttattatggagttcttaaaagtggagaggctgcagcgataaaaaagttagatgccagcaagcaaccagatgatgaattnttagcccaggtttccatggtatcaaggttgaagcatgaaa

SEQ ID NO: 230879 - DNA, 433 bp, Gossypium hirsutum
  unsure (1)..(433): unsure at all n locations
cgattttcgaattgaattttnggcgttgcgtggtaatagctgaggggttaagggatgtctgataatttctcgccgactctcagaatcggagatctcagtgatttcatagcaccgtctcaagcctgcgtcgtttctctcaaaggactcaaagcgacccctaagaaacctgaacctcatgttttagctggtaagagtcagcaaactgaaccagtaaaaatttcactcaaggattgcttggcatgtagtgggtgcataacctcagcggagactgtgatgcttgagaagcaaagcttaaatgaattcctttccaatattaataaagggaaagctgtaattgtatacctgtctccacagtcaagggcctnccttgctgctcactgtggcatacctccactaaaggttttcaagaaactcacaacttttttaaagtctt

SEQ ID NO: 230880 - DNA, 406 bp, Gossypium hirsutum
caactacagagaagagagtaaaggggaaaaagagcgtcggtgttcttgcttcggtgttctacttcactctctctctttctccgaagttcctccttcgttcttttatttattcagtattgtaaaagatggccgacggtgaggatattcaacccctcgtctgtgataatggaactggaatggtgaaggccggttttgctggtgatgatgctccaagggcagtttttcccagtattgttggtcgtccccggcacactggtgttatggttgggatgggtcagaaggatgcctatgtaggagatgaagcacaatctaaaagaggtatccttactttgaaatatcctattgagcatggtattgtgagcaactgggatgatatggaaaagattttgcattatacattctacaa

SEQ ID NO: 230881 - DNA, 346 bp, Gossypium hirsutum
gtgttcaatatgctttgagcctaatcagaaatgctgctagggatcctctcacgtgtgatgagaaaaaccactcacgtattttcaaaggtgaaactcttcttcgtaggatgaacagatatggacttttggatgatagtcaaaacatgctctagtatgtattggctttgactgttgagaacttccttgaacgctcgcttgcaaacactagtgttcaagactggtatggccaagtcaatacaccatgctcgtgtgttgattaggccacgtcacatcatattcggaaggcacgtggctaacattccattctttattgtgaggggtgacttccagaaacatatcgacttct

SEQ ID NO: 230882 - DNA, 384 bp, Gossypium hirsutum
  unsure (1)..(384): unsure at all n locations
aaacactctctcaacttctctctgagtccctgtcttctcttctctggggctcgcctcttcnattctttcctttcctttccctccactttctctccaattttcctttctctttccctctctttctcaggtccttgcaaatggcggaagcttctaaagtcattcatgttcgcaacgttggccatgaaatttctgaaaatgatttgcttcaacttttccagccatttggagtgataacaaagcttgtaatgctccgtgcaaagaatcaggctcttctccaaatgcaagatattccttcagccatcaatgcaatgcagttctacactaatgttcaaccaactatcanggggaggaatgtgtatgttcaattctcatcacatcaagaac

SEQ ID NO: 230883 - DNA, 263 bp, Gossypium hirsutum
ggagaaggtttttttcctgcaggaattattgggtaaaaccaaaatctgagatgggggtttcttggtaacaaccctaatttttgctgggattgggataattgcatctttttgtaccaaaatctgctgcaaccgaggtccttttgttaatctgctccatctaacattggttatcacagcaactgtctgttgttggatgatgtgggcaattgtatatcttgcacaaatgaaacctttcattgtccccattttgagtgaaggggaat

SEQ ID NO: 230884 - DNA, 311 bp, Gossypium hirsutum
cttcgattccaatagagatagagagagaggaggagatcttcgcttgtctccggcgttctgctccatttgataaccgcttgcagttctctcagtgcttgacagacgtgaaaaatggggttgtctttcacaaagctattcagccggcttttcgccaagaaggagatgcgtatactgatggttgggcttgatgctgctggtaaaaccaccattctttacaagcttaagttgggagagattgtcactaccattcctaccatcggtttcaattgtgagaccggggaatacaagaacatcagcttcacggtttggga

SEQ ID NO: 230885 - DNA, 353 bp, Gossypium hirsutum
cttctatctatccaagcccaaacacctcttttttcgcgaaattttctaagttttagccatttagaaaaaaagctttttgttgttgaaggccatgactatgagtaacaatattgggcaatttggtgacacaactttaaccaaagttttcgttggagggttagcttgggaaactcccagagaagccatgagagagcactttgagaagtatggtgagatccttgaagctgtgattatttctgataaagtcactggcagatccaagggttatggattcgttacgtttaaggaagctgaagctgctaagaaagcttgtgaggatgctaaccctatcataaacggccgccgagctaact

SEQ ID NO: 230886 - DNA, 347 bp, Gossypium hirsutum
caaattgttatctctgaaggtgtcttaataggcgcctgcgatttaccttcgatgtccatgtacttctctattgctacgtttttgaatttttagtgagcgaaaatgagagagtgcatttcagtccacatcggtcaggctggtattcaagtcggaaatgcctgctgggaactttactgccttgaacatggaatccagcctgatggccagatgccaagtgacaagactgtcggaggaggtgatgatgcttttaacacctttttcagtgaaactggtgctggaaagcacgtccctcgtgctgtctttgtggatcttgagcctactgttattgatgaagtgaggactggtac

SEQ ID NO: 230887 - DNA, 431 bp, Gossypium hirsutum
  unsure (1)..(431): unsure at all n locations
aaagggctctattttggggggttcctactactctaaagctgggtccagatcaggaggctatantctggcaacaacctggaacttcagcctgtgcagctttcttggccaacaataacacccgtctggcacaacatgtgaatttcaggggccaggacattcgcctgccggctcgttccattagcgtcctccctgattgcaagaccgtggttttcaacactcaactggtcacaactcaacataactcaagaaactttgtaagatcagaaattgcaaacaagaactttaactgggagatgtacagggaagtccctcctgtcggacttggatttaagtttgacgtgccaagggagctttttcatttgaccaaagatacaaccgactatgcttggtacacaactaaccttttgttgggtcggcgagatttaccaatg

SEQ ID NO: 230888 - DNA, 363 bp, Gossypium hirsutum
  unsure (1)..(363): unsure at all n locations
tctaggaattgttgaaatttttagagattatgtccttttaaattgtgggtttgtagattttnnaanacaanggaatgggggacaaggaggaggaagaagagtggaccgggacggaaagcggggatttgacatctgaagacgaatgaacggaagattaccggcggggcggttatcacgctgttagaatcggagacactttcaagaacggtcgttacgttgtacaaagcaagctcggttggggccatttctccaccgtttggctcgcttgggacactcaccgctcctgttatgtagctttgaaaatacaaaaaagtgcccagcattacactgaagcagcgattgattaaataacaatctttcaac

SEQ ID NO: 230889 - DNA, 412 bp, Gossypium hirsutum
  unsure (1)..(412): unsure at all n locations
cttagaaggtgtcttaataaacgccgtctttgttcttcttctcccggggtttggtttttcnaatttttcttaaccgagaatgagagagtgcatttcgattcacatcggtcaggccggtatccaggtcggaaacgcctgctgggagctttactgcctcgagcatggaatccagcctgatggtcagatgccaagtgacaaaactgtctgaggaggtgatgatgcttttaacacctttttcagtgaaactggtgctgggaagcacgtccctcgtgccgtctttgtggatcttgaacccacttttattgatgaagtgagaactggtgcttaccggcaactctttcacccaaaacaactcatcagcggcaaggaagacgcagctaacaacttttcccctggtcactacactatttgc

SEQ ID NO: 230890 - DNA, 404 bp, Gossypium hirsutum
aaaaatataaaataaaataaaaaaagacgctagggatcccgatcccgatcccaatctcattctctccggcgacacctttctctaaccgtttccggtgagatctcgaggttggatccgatctcgacccgattcatagtgtctctttgacctagatccgaaccaccatggctccagtttcggctttggccaaatacaagcttgttttcttgggagatcaatctgtcgggaaaaccagtatcatcactcgctttatgtacgataaattcgataatacttaccaagctaccattggtattgactttctatcgaaaaccatgtacctcgaagatcggacagttcggttgcagctcttggatactgcttgacaagaaagattcaggagtcttattccaagttacattaag

SEQ ID NO: 230891 - DNA, 363 bp, Gossypium hirsutum
ggaaaaagaaaatcaaaacccccaggtgaagagggtgaaaaccagcagcggcagaggcaataaaaggtgaagccaaagagagagagatatatacataataaaaaagacttttcaaaagaacacaactatggctgctcatagagaaggatcagatgcttcagtggaagccatggttgctcaagtcgaaaaacacccaatttcatcgatccttatcatcattgctatgcaaacagaagctttgccggtggtgaataagttccagttgattgaaaaccctcattcttcgtttccaaaaggggtcccttggatccattatcatggtgcatacaaggacatcataatcaatctagtttggcctgaaaa

SEQ ID NO: 230892 - DNA, 342 bp, Gossypium hirsutum
  unsure (1)..(342): unsure at all n locations
gttcatagttgtccctcaacggtgctcntaggagtgagagaantggggatggcgagggagggagaaaagaaaaaaaaatcatctccaatttctcttcaacaattcatctccaatatcacccctttaattgatttggaaaaggaagctgagatatcagcttcaataagttcaggagcaacaagaaatttggatactgctcaaaagaggggctccacgattctaaatttgaagtgtgttcacgctcagacagggcttatggggaaaactctacttgagttccaatcgaccaaaggagatgttcttcctgctcacaagtttggaacccatgatgtagttgtccta

SEQ ID NO: 230893 - DNA, 396 bp, Gossypium hirsutum
cggacgcgtgggcagcctttaaaggttctgctcctatcaatctttcagatcgtctgaaccaagtgcttcgatgggctcttggttctgtggaaattcttttcagtaggcattgccctatctggtatggttatagtggtaggctcaagtggcttgaacgattcgcatatgttaacacaaccatctacccggtcactgctattcctcttctcatgtactgtacactgccagcagtctgtctgctcactaacaagttcattattccacagattagtaaccttgcgagtatatggttcatatccctctttctttccatctttgcaactggtattttagaaatgaggtggagtggtgtgggaattgatgagtggtggagaaatgaacagttttgggttattg

SEQ ID NO: 230894 - DNA, 409 bp, Gossypium hirsutum
ctatttttttcaaaagatcccacagccatctcataatctgagccgagtgtcggaggcctgaaaacgaaccctaaacgatgggtcagggaacaccgggcggtatgaataggcaaggtttcccaggggaccggaaacccgatggctctgataagaaggataagaaatttgagccagcggcgcccccagccagggtggggcgcaagcaacgaaaacagaaaggacctgaggccgcggctcggcttccgactgtaacgccgctgacgaagtgtaaactgcggttgctaaagctggagcgggtcaaggattatttactgatggaagaagagtttgtggctaaccaggaaaggctcaagcctcaggaagagaaagccgaggaggatcgatctaaagtcgatgatttgagagggtc

SEQ ID NO: 230895 - DNA, 402 bp, Gossypium hirsutum
cccacgcgtccggttatctctgagggtgtcttaataaacgccttcgatttactttcggtttccatttacttctttatttctacgtttttgaatttttagtaagcgaaaatgagagagtgcatttcagttcacatcggtcaggctggtatccaagtcggaaatgcctgctgggagctttactgccttgaacatggaatccagcctgatggccagatgccaagtgacaagactgtcggaggaggtgatgatgcttttaacacctttttcagtgaaactggtgctggaaagcacgtccctcgtgctgtctttgtggatcttgagcctactgttattgatgaagtgaggactggtacttaccgtcagcttttccaccctgagcaactcatcagcggcaaggaagac

SEQ ID NO: 230896 - DNA, 170 bp, Gossypium hirsutum
  unsure (1)..(170): unsure at all n locations
gaaggaaaaaaaaacagagccagcggcgcccccagccagggaggggcgcaagcaacgaaaacagaaaggacccgaggccgcggctcggcttccgactggaacgccgctgacgaagngnaaactgcggnngctaaagctggagcgggtcaaggattatttactgatggaag

SEQ ID NO: 230897 - DNA, 396 bp, Gossypium hirsutum
ccgattaggagggttacaagtaggtgaaatggaacgtgattgtctaattgcttatggggccagtatgttgatttttgagcgcctgatggtatccagcgatccttttgaagtccaggtctgcagaaaatgtggattgttaggatactacagccataagctgaaaacagggatttgttcttcatgtaaaaatggagatgatgtttcaaccatgcaactaccatacgcttgcaagcttttaatccaggaactccagtcaatgaatatcgttccgcgtttgaaattatcggaagcgaattaatggtatgttcagattatttggtgttaatggtgtatctgaaaatttggtagctatagagcagatggttgggatgtttttgggaggaagaattctgcacc

SEQ ID NO: 230898 - DNA, 414 bp, Gossypium hirsutum
cggacgcgtggggtgagcaatggctaagaatgtgggaattcttgctatggatatctacttccctcctacctgtattcaacaggaagcattggaggctcatgatggtgctagtaaggggaaatacaccattggacttggacaagattgcatggccttttgtacagaagtggaagatgttatctctatgagtttaacagctgttacttcactccttgcaaagtataagattgaccccaaacaaattggccgtcttgaagttggtagtgagactgtgatcgacaagagcaagtccattaagaccttcttgatgcaaatctttgagaaatctggaaacactgacatcgaaggggttgactcaactaatgcatgctatggagggactgcagctttatttaactgtgtcaattgggttga

SEQ ID NO: 230899 - DNA, 415 bp, Gossypium hirsutum
tcagtctcttctgggatttgcttcaacagacaacccccccccaaaaaaaaccttgaactttttccgcagtcaaaatgggtatttctcgtgattcgatgcacaagaggcgtgccactggaggtaaaaagaaggcttggaggaagaagagaaagtatgagcttggaaggcaaccagcaaacacaaagctttcaagcaacaagacagttagaaggattagggttcgtggtggaaatgtcaagtggcgtgctctcaggctcgacactggaaactactcgtggggaagtgaggctatgactcgtaagacccgaattttggatgtggtgtacaatgcatccaacaatgagttggttcgtactcaaactctggttaagagtgctattgttcaagttgatgctgcaccattcaagcagtggta

SEQ ID NO: 230900 - DNA, 406 bp, Gossypium hirsutum
cttaaagcctgccatataatcatataaccaggctccgtcgtggtactcttcggccaccacaatgccgaaaatcgccttgggaacaagccaagaggctgctcagcctgactgcatcaaagcccttgtggtcgagtttatcaccactttcctcttcgtattcgttggagtaggagctgccatggccgccgatgagtcgggggcaaatgcgctggtgggattgtttgctgtggcggtggctcatgcccttgtcgtcggcgttatgatatcggccggacacatatcaggcggccatcttaacccagccgtcacgcttgggttgctattcggtggtcacatcacggtggtccgtgcgatcctctactggatcgatcagttgttggcatcttcagctgcttgtatacttctc

SEQ ID NO: 230901 - DNA, 400 bp, Gossypium hirsutum
agcctacttcctctccttcagaagatcgcattgttgcaagtcctcttgcacgaaaattggctgaagaacacaaggtacctctctcaagtatcaaaggaacaggtcctgatggacacattgtaaaggctgatattgaagattatttggcttcacgcgggaaggaagtttcagcaccaactcctaagacaaaggatgcaaaacttgcagctttagattatgtggatatccctcattctcagataagaaaggtcacagcatcacgcttattattctcaaaacagactataccacattattatttaacagtggatacatgtgttgacaaacttatggatttgcggagccaactcaactcattacaagaagcttcaggtgggaagcgtatatctgtcaatgatct

SEQ ID NO: 230902 - DNA, 397 bp, Gossypium hirsutum
cggacgcgtgggttttgattgcacaaaaccaagatcatctttgctttgctattgtggttcgttttgctaagaactggctaacgcacagcaaaaaatcgtggaggaaaccaacaagaaccaagcggtggttcttgccctctatgaagccttaaacacacgagacgtcaacaccgttcaccaaatccttgctcccgatctagagtggtggttccacggtccacccactcaccagtttttgatgcgcttactcaccggcgcttcatccgacgatcctttccttttcgaggtcgaccctgttttagtcaccgcctttggatccaccgtcatcgtcgaaggctgtgacaacagccgttcgatctcctgggttcacgcttggactgttcgtgatgggacaatc

SEQ ID NO: 230903 - DNA, 406 bp, Gossypium hirsutum
  unsure (1)..(406): unsure at all n locations
gaaagatcaagatcggaatcaatggatttggaaggatcgggcgtttggttgcgagaggtgctctccaaagcgatgatattgagctcgttgctgttaacgatcctttcatcaccactgaatacatgacgtacatgtttaagtacgacagtgttcacggtcaatggaagcatcatgagcttaaggtgaaggactcaaagacccttctctttggtgaaaagcctgtcacagttttcggtatcagaaaccctgaggaaatcccatgggctgaggctggagctgagtatgttgttgagtctactggtgtttttactgacaaggacaaggctgctgctcacttgaagggtggcgcgaagaangttatcatttctgctcccagtaaggatgctcccatgtttgttgtgggtgt

SEQ ID NO: 230904 - DNA, 405 bp, Gossypium hirsutum
caaacacattttatcaactgttttctcgtcaaacgacatagttcaagccaataaattcattgatcatatgttatcggacgatgtcccgctgatggtttcgaggcagcttttacaaactttcgcacatgaattagagagactgaagccagatgctcaaaaggaaatttcccattatacacttgatcagattcagcctcgtgtcgtttcattcgaagaacaggtattgtttattagagagaaacttgctgagttgtatgaatctgagcagcagtgctcaaaagcagcgcagatactaagtgggattgatttagattctggaatgagggttattgatgacacattcagattgtcaaaatgtgttcaaattgctcgtctatatcttgaggatgatgatgctgttaatgc

SEQ ID NO: 230905 - DNA, 407 bp, Gossypium hirsutum
cttggtttggccactttgatgggaaaaaggaaaaaagaggcagaaatttagagaagttgattcaaacagaaagggtgatggaactgagcattcagaaaatagaagccttgattaggctaagtacgatagtgatgttggttttaacagcttgtttaattgggttggattctcaaacaaaggtcatcttctacgttcaaaagaaagcttctttcaaggatttgcgtgctcttgttggattgctgtatatcacttcattggctgctgcttataatctacttcaactatgctgttcttcattctcagcttcttacaaaggaacctcgctgcaatcttacgcatatctggcttggcttcgttatattttggatcaagcagtagtgtacgcagtgtttgcgggaaacctagcg

SEQ ID NO: 230906 - DNA, 417 bp, Gossypium hirsutum
agaaaatatcacaaatcttcttctccttctcagaaatcttagtatcatcactatggcctcaaatcccaaggtcttctttgacatgacgatcggtggtcagcccgctggtcggattgtgatggagcttttcgcagattgcactcctcgcactgcggagaacttccgtgccctctgtactggcgagaaaggcgtcggccgcagcggtaagcccctccactacaaaagctcttctttccatcgtgtgatccctaactttatgtgccaaggaggtgacttcaccgccggaaacggtaccggaggtgaatccatctacggatcaaagttcgctgacgagaacttcatcaagaagcacactggtcccggtattctctcaatggctaacgctggaccgggaactaacggatctcagttcttcat

SEQ ID NO: 230907 - DNA, 416 bp, Gossypium hirsutum
ctttttcccaatttctcgaatctagggttttacattctccttttcctctccaaatcaaccttatttcattttttttcttctcttagaaataatatcgtcaatgagcaacgaattagttaacttcaacatgtccggtcttggcgatgctcttaatgccgaagcacgagctggtctcgttaacgctctcaagaataaacttcaaagtcttgctggggatcactccgatgtgctggagagcctatcaccgattgtcaggaagcgtgtcgaggttcttagggagatccagagccaacatgatgaattggaggctaggttttttgaggagagggctgcacttgaagctaaatatcaaaaactatatcaacccttgtatgcaaagcgatatgatattgtgaatggccttgctgatgctgaag

SEQ ID NO: 230908 - DNA, 417 bp, Gossypium hirsutum
caggtcttggtgacattggttaattcatattgggtaatcatatcaagtctttatgcggccaggaggctgcacgatgccatgcttacttccatacttagagctccaatgaccttcttccacaccaacccacttggacgaattattaatagatttgcaaaggatttaggtgacattgatcgaaatgtcgctccattcgtcaatatgtttttgggtcaagtgtctcagctcctttctacttttgtcttgataggagttgtgagcactatgtcattgtggtccataatgccacttttggttttgttttatgctgcttatttatactaccagagtactgcacgtgaagtgaagcgcttagattctgtaactagatcacctgtatatgcacaatttggagaagcactgaatggtctgtctact

SEQ ID NO: 230909 - DNA, 418 bp, Gossypium hirsutum
ctcgaacagatgacacatctgccttttacaaggtgcccttttcaaatgttgtatatattgagcgctcagatttccggatgaaagattctaaagattactatggattggctcctggcaagtcagcactgctaagatatgcattcccaataaagtgtacagatgtaatattggcagatgataaagaaactgtgcttgagattcgagctgaatacgatccttccaaaaaaagcaagccgaagggggttctccactgggttgctgaaccgtccccgggttctgatccattgaagattgaagtccgattgtttgacaaactctttaattctgagaatcctgctgaacttgataattggctcactgatctcagcccgaattccaaagtggtggtacctaatgcatatgcagtgccatcacttgg

SEQ ID NO: 230910 - DNA, 351 bp, Gossypium hirsutum
cggacgcgtgggttacaaggcccttcttgatgttggtaataccccttcaaactatgggttcgtagaagcaacgagaggctgctgtggcacagggactgtagagacaactgaattcttatgcaatccgcatacactgggaacttgtcccaatgcctcccagtatgtgttttgggacagtgttcatccatcgcaggctgctaatcaggtccttgcagatacattgattgttcagggcattcccctcctttgattcgccaggacaccgtgtctacttgccctttttaaactgtactaagatctgtcactactcctttttctattatcttaatcaaaaagtgactcgtattgtag

SEQ ID NO: 230911 - DNA, 377 bp, Gossypium hirsutum
gtttctatacagattcagaaagaaataaaggaagaggaagcaatggccactcttacagtgcccacgacagttccttcggtgtctgaagattgtgaacagctaagaaaagccttttcaggatggggaactaatgagggcttaatcatagatatattgggtcacagaaatgccgagcaacgaaacttgattcgaaaaacctacgctgaaacctatggagaggatctcctcaaggcactagacaaggagctctcgaatgactttgagaggctggttttgctttgggctcttgatcctgctgaacgtgatgcccttttggctaatgaagccaccaaaaggtggacttcaagcaatcaggtccttatggaaatagcttgcac

SEQ ID NO: 230912 - DNA, 414 bp, Gossypium hirsutum
gtgaccggtgattcgtgagtattgtaaacaggagcagcagcaatggagctggtgtacttcgtggtgttcggggcattgggagcggtggtggcagcattagagctaagcaagaacagcaaagatcgaatcaacacatcctctgctttcaattccttcaagaacaattatcttgtcgtttattctctcatgatggctggagactggctgcagggtccgtatgtttactatctttacagtacatatgggttcggaaaaggtgaaattggacaactttttattgccggttttgggtcctctatgttgttcgggacaattgtcggatctttagcagacaaacagggccgaaggagggcgtgtgttacttactgcataacttacatacttagttgcataacgaaacattctcctcaatac

SEQ ID NO: 230913 - DNA, 435 bp, Gossypium hirsutum
atcagattcagaaggggctgctcgctctcggcgactacatgaatgtccagtgccatgcctgcattggaggcaccaatgttggggaggacatcaggaagctggattatggacagcatgttgtcgcgggcactccagggcgtgtttttgatatgattcgtcgcagaagcttaaggacacgtgctatcaaaatgttggttttggatgaagctgatgaaatgttgaataaaggtttcaaagagcagatctatgacgtgtacaggtacctgcctccagccacacaggtggtgctcatcagtgccacgctgccacacgagattctggagatgaccaacaagttcatgaccgacccaatccgcatcttggtgaaacgtgatgaattgactctggaaggcatcaagcaattttttgtggcagtggagagggaagagtggaaat

SEQ ID NO: 230914 - DNA, 390 bp, Gossypium hirsutum
caaagtgaaatattgctgagagtttgtggagatgagtgccttgagtgagggtcttacccaaattgtgatccctttagcttccttggtgggcattggttttgctttgcttcaatggtttttggtctctagggtgaagctattatcacaggattcaagcaatggatataaacaaaaactgattgaatctgatgaagaagaagagggtattaacaatcttgagatttccatcaagtgtactgagattcaacatgccatttctgttggtgcaacctctttcctctttactgaatacaagtatcttggtatcttcatgtgtgtatttggtgctatcatattcctcttgcttgggtcagatgagggcttcagcaccaaaagcgaatcatgcacata

SEQ ID NO: 230915 - DNA, 419 bp, Gossypium hirsutum
atggcagaacctggagccgttgttcgagcagtacatcaacaacctcaggaggcagctggacagcatcgttggggaacggggccgcctggactcggagctcagaggcatgcaggacctggtggaggacttcaagaacaaatatgaggatgaaatcaacaagcgcacagcagcagagaatgaatttgtgactctgaagaaggacgtggatgctgcctacatgaacaaggttgaactgcaagccaaggcagacactctcacagacgagatcaatctcctgagagccttgtatgaagcagagctgtcccagatgcagacccacatctcagacacatccgtggtgctgtccatggacaacaaccgcaacctggacctggacagcatcatcgctgaggtcaaggcccaatacgaggagattgctc

SEQ ID NO: 230916 - DNA, 411 bp, Gossypium hirsutum
gttatctctgaaggtgtcttaataaacgccttcgatttaccttcgatttccatttacttctctattgctacgtttttgaatttttagtgagcgaaaatgagagagtgcatttcagtccacatcggtcaggctggtattcaagtcggaaatgcctgctgggaactttactgccttgaacatggaatccagcctgatggccagatgccaagtgacaagactgtcggaggaggtgatgatgcttttaacacctttttcagtgaaactggtgctggaaagcacgtccctcgtgctgtctttgtggatcttgagcctactgttattgatgaagtgaggactggtacttaccgtcagcttttccaccctgagcaactcatcagcggcaaggaagacgctgccaacaacttcgctcgt

SEQ ID NO: 230917 - DNA, 243 bp, Gossypium hirsutum
gctaattttacaagaaacatggagtgatgcgtctggtgcattagtagttggggcacctgttgacatatcatcaatgagtgtggtgatgaatggtggggattcagcatatgtggcactcttgccatccggatttgcaattctttctggtatttcaccaagttatcacggtgggcgaagcgagtgcaatggagcactggtgaaacctgaaattgatgtgaagcatagttaggggatgtctacttt

SEQ ID NO: 230918 - DNA, 395 bp, Gossypium hirsutum
aaattgttatctctgaaggtgtcttaataaacgccttcgatttaccttcgagtggcatttacttctctattgctacgtttttgaatttttagtgagcgaaaatgagagagtgcatttcagtccacatcggtcaggctggtattcaagtcggaaatgcctgctgggaactttactgccttgaacatggaatccagcctgatggccagatgccaagtgacaagactgtcggaggaggtgatgatgcttttaacacctttttcagtgaaactggtgctggaaagcacgtccctcgtgctgtctttgtggatcttgagcctactgttattgatgaagtgaggactggtacttaccgtcagcttttccaccctgagcaactcatcagcggcaaggaagac

SEQ ID NO: 230919 - DNA, 412 bp, Gossypium hirsutum
agcaaaacgaaccaagatggaaggcttagtcgtaaagctcccttcttttccatttctaagccctaatatttcatcatcatcttcttcttcgacttttcggctaggtttccgccgcttatccgcttcgatttcagccgccgttaaagaaggttccgtctcattaggccaattaacccgacccgacttccccatactccatcaggaagtaaacgggtcgaagcttgtttatttagataatgcggcaacctcccagaaaccaacggcagtgttaaaatctctgcagaattattatgaagcttacaattcaaatgttcatagaggaatccattacttgagtgccaaggcaactgatgaatatgagttggcacggaagaaagtggcagcttttattaatgcatcagattctgctgag

SEQ ID NO: 230920 - DNA, 415 bp, Gossypium hirsutum
cggacgcgtgggaaaaaaattagtgaattttgagtggattgttcttggatccaattttttggagattacagagaaaaaaagattgatttgcaaatacacaatacgaataatcgcgatgggtttcaagatatttgtggtggcgatgatggtgggttccatcgcagcggctcagatttcattagcatccaccgtgcctgcttttctatgggctcctggtttctctagcgttgaatcgaaggaatctgtaaattatcagatcaagtctccaaaggatctagctaactctgttctctctcaagggggatggtctgacttactgtgctccgagaggaaaaatgagcgccctgttgatctcgccgttgtttttgttggtagagagttgcactcttcagatgttgcagggaacaaacatgca

SEQ ID NO: 230921 - DNA, 407 bp, Gossypium hirsutum
ggcaaggtgtttgattcattgttgaaaagagatgaggggtgctgcttttgtagccattgctgctacaattggtaactttttgcagggatgggataatgctaccattgctggagcaattgtgtacattaagaatgacctcaatctaggaactagcgttgaaggtctagtggtggctatgtcactgataggagcaacagctattacaacatgctcaggggctatatcagattggcttggtcggcgtccaatgctgataatgtcttcaatgctttattttgtcagtggtttggtaatgttgtggtcacctaatgtctatattttgtgcctagccaggctattagatggatttggaattggtttagccgtgactcttgtcccagtctatatatctgagactgccccatctg

SEQ ID NO: 230922 - DNA, 414 bp, Gossypium hirsutum
gctttctgttctaaatgctattgcttttatatccaagattcaacctttcaaaagtagtgagcttaaaagaaaacaagatttggtaaaagctagaaactgaaaggcaatggagggtagattggcgaattcttggcgattgacagtgaacgacaagaatttcatcaaaactgcgttgctttctgaaattcgaatcgatggtcgaaagccctttgaattccgtaagatttcaatcaagtttggcagagaggatgggtcatcagaggtgcagctaggccagactcgtgttatgggaatggttactgctcaattggttcagccttatagagaccggcctaaggaagggattctttcaatcttcacagaattttctccaatggctgatccttcattcgagccaggccgtccaggagaatt

SEQ ID NO: 230923 - DNA, 412 bp, Gossypium hirsutum
ttctgattggtgagatagggggcactgcagaagaagatgccgctgcactgataaaggaaagtgggactgaaaagcctattgttgctttcattgctggactcactgctcctccaggacggcgtatgggtcatgctggagctatagtatcagggggcaagggcacggcacaggacaaaataaagactctaagagaagctggagtgacagttgttgaatcacctgcaaagattggtgttgcaatgcatgaggttttcaagcaaagaggtctccttaattagtgtgtgtgtgattttccctagaaaaagaaaagcaaaacaatatttcctggattagtttcaggtgacaaacttgttcgaaatgctttcattgtttttgtgaaaaatcaattttatactgaaatgagggaaaaacc

SEQ ID NO: 230924 - DNA, 410 bp, Gossypium hirsutum
ggcctcttctcggttgagaggaaaagatgcaggatgtctaccatcatgctgggggggaccggatattacgacccggtggacgagtatacatccgcgattctcttgatgttatggatgaacttcaagatatcgcaaaagccatgggttggcatcctactctacgcgatacgtccgagggtcctcatgcaagttacaggatcttggtatgtgacaagcgcctactccgcagttgaaccaatagaactaaagactcgaaggccgaaacctcaccccttccgcaaattgaagacagctaaagcaagtcttgcaaatgattgtttccaaataaaatacaagtcgtcaattacaggtgtcttaatatcatgcagtcgtcagaccggatgaggatggaggaggacatgagacacatt

SEQ ID NO: 230925 - DNA, 410 bp, Gossypium hirsutum
aaaaaagataagtgaaagatgtcaactgcttcttcattgtgttcatcaactcagattaatggctttggagggggacttggggttctaagaacccatgtttctcaacccaagacactttctttcacaagaaggagaatttctacggtagtgaaggcaacatctcgagttgataaattctcaaaaagcgatatcattgtttctccatctattctctctgctaatttcgcaaagttgggggagcaggtgaaagcagtagaagttgcaggctgtgattggatccatgttgatgtaatggatggccgatttgttccaaacattacaattgggcctcttgtggttgatgccttacgacctgtgacggatcttccgctggatgtgcatttgatgattgtggaacctgagcaacgagt

SEQ ID NO: 230926 - DNA, 385 bp, Gossypium hirsutum
gaagacggcgtgtatggcacaacctgccctattccaccaggaaagaacttggcatacatgcttcaggtgaaggatcaaatagggagtttctattactacccatcacttggattccacaaggcagctggtggttatggagggatcaggatccttagtcgcccacgaatcccaggccccttgcctgacccagccggggattacactgtgctcattggcgattggtacaagtccaatcacacggttttgcaagctcatctggatggtggtaagaagcttcctttccctgatggagtccttatcaatggtcgtggacctggtggtgcctccttcaatgttgaacaaggcaaaacctacaggcttaggatatcaaatgttggactgcaaa

SEQ ID NO: 230927 - DNA, 408 bp, Gossypium hirsutum
gtggtgtcctccctggcatcaaggtcgacaagggtaccgttgagcttaacggagccaatggctaaactttcacccagggtctagatggccttgcacagcgatgccagaagtactatgaagctggtgcccgctttgctaaatggcgtgctgtccttaagattagtgctaatgagccaaccgagcttgcaatccaagaaaatgccaacgggctagctatgtatgctgccatctgccagcaatgtggccttgtccccattgttgagcctgaaattcttgttgacggatcacatgacattaaaaagtgtgctgcggtgacagagcgtgttcttgctgcttgctacaaggctttgaatgatcaccatgtcatgctagaaggtactcttttgaagcctaacatggtgacccctg

SEQ ID NO: 230928 - DNA, 382 bp, Gossypium hirsutum
gaaaacaaagccatttttagtggtttcgctctctgtccctctctctaaagaagaggcggtcccttcgtcggagtgcgcttctgctgagtgtttctttcgttttcttttgtttaaagttttggagtaaagagtgtttcaagctttttagtcatattggctgcttaacgacccaaggtagcctcgccggatataggtgctcatcataaaaaatgactgtcacgccaggaatttccatcaacgatgggaaccttgtggttcatgggaagaccatcctcactggaattcctgataacatagttttgaccccaggatccggtgtcgggcttgttgctggtgcttttataggtgctactgcttcggattgcaaaagccttcatgtctt

SEQ ID NO: 230929 - DNA, 419 bp, Gossypium hirsutum
gaacattctaggcaccggaggttttggcaatgtctacaagggaaagttaggagatgatactcttgtggcagtgaagcggctaaaagacttgacgggaagttttggggaatcacaattcaggactgagttggagatgatcagcttggcagttcaccgcaatctgcttcgtttaattggatattgtgctacttctaatgagagacttcttgtttacccttacatgtctaatggcagtgtggcatccaggctcagaggaaaaccagctctagactggaatacgaggaagaggattgcaattggagctgcgaggggacttctttatttacatgagcaatgtgatccaaaaataatccacagagatgtgaaggcagctaatgttcttctggatgattattgtgaagccatcgttggtgactttg

SEQ ID NO: 230930 - DNA, 390 bp, Gossypium hirsutum
gagcattggagcccatgcacagatggattctctgcagcagcaaataagatcacgtgagaaacagcttttaccagtatacacccagatagccactaaattcgccgagcttcatgatacttctctgaggatggcagcgaaaggggtaataaaagaagtggttgactgggatcgctcacgatctttcttctatagaagattgcgccggagaattgctgagagttctctggtcaaaattgtaaaagatgctgctggtgatcaactgtcgcataaatctgcaatggacttgatcaagaaatggttcttggattccagtgttgcaaaaggaagagaagatgtttgggttaatgatgaagctttcttttcatggaaggatgatctgggaaattatag

SEQ ID NO: 230931 - DNA, 411 bp, Gossypium hirsutum
acctttctcaactctccatcatggaatggtcatccagtttatagtagtaacagggtcgtacaaggcatcaccattattgctcctatcacatctccaaacacagatggtatcaatccagattcttgcacgaatgttagaattgaggacagttacatagtttcgggagatgactgtatcgcagtgaagagcggttgggatgaatatgggatctcatttgggatgcccaccaaacaattagtcattaggaggctgacatgcatttctccttatagcgcagccattgcgctggggagcgagatgtcgggcggaatcgaggacgtgagggccgaagacatcacggccatccatacggaatccggggtcaggatcaagactgctagaggaagagggggattcgtgaaagacatatac

SEQ ID NO: 230932 - DNA, 310 bp, Gossypium hirsutum
  unsure (1)..(310): unsure at all n locations
atctcaaccttctctgcacagtgggtccagcatcctttgaagcatgagtgcttaccangagaagcagaccgtgaccccaccacctcagcttcaacagcagcaggtgaaacaacccagccagcctccacctcaggaaccatttgttcccataagcaaggagccatgccacccaaaggttccacaacctggaaacacaaagattccagagccagattgcaccaaggtccctaagccaggctacaccaagcaccctgagccaggcagcaccaaggtccctgacaaaggctgcaccaaggtccctgagccaggc

SEQ ID NO: 230933 - DNA, 400 bp, Gossypium hirsutum
ctcaatttccagtatccaaatcagaagaagagaggaagaagaagaagccagagggagaagaaattatgtcttcgcttgcagctgctagagcagataacttttactatcctccagaatgggatccaagtcagggctccttgaacaagtttcatggacaacatgctttgagagagagggcgaggaaaatagatcaaggcattttgattataaggttcgaaatgcctttcaatatatggtgtggggggtgcaattctatgatagcaaaaggtgtacggttcaatgctgagaaaaagcaagtgggaaattattattctacaaaggtatcttctttttactaatagcataatctactcagtaaggttcattttaatctgtcttgggcaagtgttttcctatgatc

SEQ ID NO: 230934 - DNA, 391 bp, Gossypium hirsutum
  unsure (1)..(391): unsure at all n locations
atcaccattgttcaggagaccttttaaccactacatgactgccanaagctcgtgagaccacggagtcaacactgcggcttacttaatccgatactgttagattatcatgctgtttgatattctaataagacaatgagaaactgtggagctctaccaaaaatgcctcgcacattcaattatacagcttaccataagtacctttactggttgatgtgccttgattatttgctcagctcaataactcaactcttatcataatgaacgaccccattctttaacctagaactactacatatctgccaccagtactcttataatatccaatgttaccacctggacgcatcattgtacgatggtgtaaagtggatgacgactttacagcccaacatta

SEQ ID NO: 230935 - DNA, 417 bp, Gossypium hirsutum
  unsure (1)..(417): unsure at all n locations
ctgttttcttttcctttttttcacaaattatgttctaatgcaaattcaaatggagaatggaatanggaaaaatggacatgtataagaaatcttctataaataccaccttctccttcgtttcatttccagactttacctacacattttacaaggcacaggatttctgggatttttctgcaaattggaagaaagataaagatggcaagaacaagaattaccatcttttttatggggctcgtgctttggtgttgcttgacaaaagcggaatacatgaaatataaagatccgaaacatgcggtacatgttcgaacccgggacctgttggatcgaatgacattggaggaaaagatcggacaaatggtccatatcgaacgcagcgttgcttcngccgacgtgatgaacaagtatttcattggg

SEQ ID NO: 230936 - DNA, 397 bp, Gossypium hirsutum
attaaacaaaaaccaactaaaaagatggcgaggagaccggacgaggaatacgagtacttgtttaaggtagtgctaatcggcgattctggtgttggaaaatctaatttgctttctcgatttactcggaacgagttttgcttagaatctaaatctaccatcggcgtcgaattcgccacccgcactctccaagttgaagggaggactgtgaaagctcagatatgggacactgctggtcaggaacggtacagagcaataaccagtgcttactatagaggtgctcttggagctcttctggtgtacgatgttaccaagccaacgacttttgaaaatgtgagccgatggctgaaagaactcagggaccatgcagattctaacattgtaattatgatgattggga

SEQ ID NO: 230937 - DNA, 443 bp, Gossypium hirsutum
ctttttcttgtttgttttatcaagctcctcttatttgtgctaatggagttcggaatacccttattccatatattcatcagctttcttcttgttttgttaattgcaattcgaagcgtgaggaaatctaaagctaggagtttaactcaaaggttgattccagggccacggaaattacctttgatcggaaatctgcaccagctcgctgattctactctaccccatcgcaccctgcgtgacttggctacgaaatatggcgccgtcatgcacctgcaactcagtcaagtttcaactgtggtcatttcttctgcagaaatggctgaagagattatgaaaacacatgatattgtctttgcttctaggcctttacttcttgcggccaagattataacttatgaatgcactgatattgtcttttcaccatatggaaagtattggagaaatct

SEQ ID NO: 230938 - DNA, 371 bp, Gossypium hirsutum
tgttgtgaaaaagtatgacatactttttatcggtgatgaggttatttgtgcaggtggaaggcttgggacgatgtttggatgtgacaagtacaatattaaaccagatcttgtttcactagcaaaggctctttcttcagcatatatgcccattggagcagtcatggtgagccctgaagtttcagaagtcatttattctcaaagcaacaaacttggtagtttctctcatggattcacctactctgggcaccctgtatcctgtgctgttgcaattgaagcactcaagctctacaaggagagaaatattgttgagaaagtgaagaccatttctccgaggtttcaagatggtctaaaatccttttctgacagtccta

SEQ ID NO: 230939 - DNA, 408 bp, Gossypium hirsutum
cttggctccatgttatcttcctttttgtgagagggtattgtaaagatgcgcgtgggtttcaatgagtttggtggggggattttatagagcttattctcttctcttgaaagaaactcaagctggagattgaggcttaattgtcatggatcctgagtttgggaagtccttggatacttcaaagaagaattcttggaggacctcattgcttttagcgtaccaaagtcttggtgtagtttatggggacctgagtacttctcctctttatgtctacaaaagtacatttgctgaagacattcaacattcggagacaaatgaagagatttttggtgttctatcctttgtcttctggacccttactttagtccccttattcaagtatgtgtttgtggttcttcgagcagatgacaa

SEQ ID NO: 230940 - DNA, 446 bp, Gossypium hirsutum
  unsure (1)..(446): unsure at all n locations
cccacgcgtccgcggacgcgtgggtgctagggtgactccttgggcaatatgggcgaagggcttggactgctgaagaaaacaggcatggtgatctacttaataagtatctctacttgtccggaagggtcgacatgaggcaaattgagaagacaatccagtatttgattggatcaggaatggatccacgtactgagaataatccttatctgggattcatctacacatcattccaagaaagggcaactttcatctcccatgggaatacagcccggctcgcaaaggagcatggtgacatcaagttggctcagatatgtggtaacattgcctctgatgaaaagcgccacgagactgcatatactaaaatcgttgaaaaagctctttgagattgatcccgaccgaacagtcctggcttttgctgacatgatgaggaagaaaatctncatgcc

SEQ ID NO: 230941 - DNA, 337 bp, Gossypium hirsutum
  unsure (1)..(337): unsure at all n locations
tcgtttactcgtgggcggacgcatgggaagaagggtcttatatgtttggactgcaggatggttnctccacgggaactggagagggcaaataggactcttttaatgagacacgaatcagaaataaagtgaaatgcatattggctaggattgttggctcacctacaatcttcttctgttcctagaaaggacatatcatgcgtcaaagagcttacttctctatatgaggccggttctattgaggacatctaccttgcttacgaccagctttatgtggacgaagattttttttactcatgttttggaattgcaggtgttaatgccgtgtatagtgctatgg

SEQ ID NO: 230942 - DNA, 439 bp, Gossypium hirsutum
aaattttgtaggcgaaaaatcaatgatcaagaagcgttacatgtatctaacaggggagattttgaaagagaaccccaatgtatgtgaatacatggcaccatcactagatgcaagacaagatatggtggtagttgaggtaccaaggctaggcaaagaagccgccaccaaggctattaaggaatggggtcagcccaaatccaagatcacccacctcgtgttttgcaccaccagtggtgtcgacatgcccggtgccgattaccagctcactaagcttttgggccttcgcccgtcggttaagcgcctcatgatgtatcaacaaggttgtttcgctggtggtactgtgctccgtgtggccaatgacttggccgagaacaacaagggcgctcgcgtgcttgttgtttgctcggaaatcaccgcggttactttccgtgggccgagt

SEQ ID NO: 230943 - DNA, 436 bp, Gossypium hirsutum
ttctttatacacgcccccatttattttattggggggacaaattttccctgcagtgggggtataatttcctacgaaaagaaatatgagagagtgcatttcagttcacatcggtcaggccggtattcaggtcggaaatgcttgctggtaactttactgtctcgagcatagcattcatcctgatggccaaatgccaagtgataaaactgttggtggaggagacgatgctttcaacacctttttcagcgaaactggtgccggaaagcacttacctcgcgccatctttgttgatctggagcctactgttatcgattaactgaggactggtacgtaccgtcagttattccaccctgagcaactcatcagtggcaaacaagatgctgccaacaatttcgctcgtggccattatacaattggcatatagattgctgatctctgc

SEQ ID NO: 230944 - DNA, 451 bp, Gossypium hirsutum
agcaatgcgaacccttatccgtctggggacacttcgaatccctcggaagagaaatgatgatgaagatgcaaaggaggagctttactctctggtaacggttgccgaaatcccagccgaaggactcaaaggtttgggcactaaggtcatcgatgacgatgatgagtaatctccgatctctagtttaagaaaagcattgcattttctttactgaaaagtttaaatccaggttttggctagttttacgattttgttcatcaactgtttttcctttggtattcggtttatcgttgtttagacttttaagctcggtgcaatttatgtttcaatggcggaatcaggttctttttgcaattgagtttcccatacattatgaagcattactttattatattcatgtcatgaataagccgattatgcacgaacttgctgagttttatcaatgacttggaca

SEQ ID NO: 230945 - DNA, 401 bp, Gossypium hirsutum
  unsure (1)..(401): unsure at all n locations
tttcgtccggttttttttctccttctaaagctaaaagaaagtgtgttcctttccatgtgaagggaataagccaaaagctaancataagaagggtttatggtctcctgaagaagattttaagctctaaatctatgtccttaaacatgaccatttttattgtagctctgttcccatcaatgcatggttgcagaggaatgggaagagttgcagattaaggtggattaattacttgagaccgttgctaaaacgatgcacttttacgccgcaagaggaggagacgattctcacccttccatcatttgttaggcaacaagtggtcacaaattgcacaaaatttgcctgggagaacagataatgagataaagaactattggcattcatatctgaaaaaaagaattgct

SEQ ID NO: 230946 - DNA, 440 bp, Gossypium hirsutum
ttttcatttcttgtttaacaccaccacctccgtgcgcaactcagcttgtacacgcgggctactcacttcaacaaattcttttgaattgtttcttacgaatcgagtttgattttcttggaagtcgaaaatacgatggggtcggagctgatttatagaggctctgagacccagccttcttcagattcatattcgcccaaacccgtaaaaccatgggcctccgtaacccgccccatccattacctcctccgtgaacaacgcctcctcttcgtcttcgtcggcattgcgatcgccaccctgattttcaccgtctttccaacttcacccgctccgtacgtcgctcctcatagccgcttcaccaccctgatccccgattccatcacctacttccccatcgagacccaacagaagttctcctccgcgcaccggcttcggttcgggtc

SEQ ID NO: 230947 - DNA, 440 bp, Gossypium hirsutum
gtcgtcttgatacacgccctcatttattttggggttcaaacaaattgtccctggagttttcgtataatttcctaggaaaagaaaaatgagagagtgcatttcagttcacattggtcaggccggtattcaggtcggaaatgcttgctgggaactttactgtctcgagcatggcattcagcctgatggccaaatgccaagtgataagactgttggtggaggagacgatgctttcaacacctttttcagcgaaactggtgccgggaagcacgtccctcgcgccatctttgttgatctggagcctactgttatcgatgaaattgaggactggtacgtaccgccagttgttccaccctgagcaactcatcagtggcaaagaagatgctgccaacaatttcgctcgtggccattatacaattggcaaagagattgttgatctctgc

SEQ ID NO: 230948 - DNA, 334 bp, Gossypium hirsutum
ttcttagagtcctaataaccgaccaagaccgagctctgaaatctgtggtggcggaaatctttccaaatccacttcattgcttcttcctgtggcacgtattaggaaaggtttctgagaaccttggtcatgtaatcaaacagcatggaaacttgatggaaaagtttgagaaatgcatctacaggtcttggacagatgaagagttcggcaaaaggtggtggaaaattcttgatagatttgaactcaaggatgatgaatggattgaaatcgttgtatgaagaccgcaaaaagtgggtgccaacctatataatgaatgttttgttggctgagatgtcta

SEQ ID NO: 230949 - DNA, 438 bp, Gossypium hirsutum
cccattcgtccgcccacgcgtccggatcaaccaaccaaaaaagataaacaagatggtttcagggtcagggatctgcgccaagagagtggttgtggatgcaaggcatcacatgctaggaaggttggcttccattttggccaaagagttgttgaatggccaaaaagtagtggttgttcgatgcgaagagatttgtatgtcgggtggtttaatgaggcagaagatgaagtacatgaggttcttgaggaagcggatgaacactaagccttctcatggccccatccattttcgtgctcctgctaagatcctctggcgtaccattcgtggcatgattccccacaagaccaagcgtggggcagctgctcttgctcgattgaaggcttatgatgggattccagctccatatgataagacaaagaggatggttattcctgatgctct

SEQ ID NO: 230950 - DNA, 378 bp, Gossypium hirsutum
gctttcttcttctcctctatcttttgcctatcagatcatgtaaagctcagtagaggtgtagctgagttttccctctaaaaattttgtaatacaagcccaaaagattccttttttctttgaaaaatggctttgagtaagttcttgggtctgtttcttatccacattgctctgctttcgagctcctgttttgctgcagatccgtttgtcttctatgattttgaggtctcttacatcactgcttctcctttgggtgttcctcaacaagttattgctataaataacaagtttcctggcccaactatcaattcaactactaacaacaacgtcgtcatcaatgttcgaaacaaattggacgaaaggttactcctacattggtct

SEQ ID NO: 230951 - DNA, 288 bp, Gossypium hirsutum
tgtggaaagagagcttctcatcacattttattgtgcttctctctcagatcttgagaaatgtatacatcaatgaagaagatccacaaagataaagatgttgaaccaacagaatttgaagaatcagttgcccaagcattctttgatttggaaaataccaaccaagatctgaaaagtgacctcaaggatctctacattaattcaacaatccaaattgatgtgtcttggaacccgaaagcttttgttattcatgtcccctaccgattgaagaaagcttttcgcaagggtcat

SEQ ID NO: 230952 - DNA, 286 bp, Gossypium hirsutum
ctatccaaggatgatactctagatggggatgtcttgatccttggggggcacattctccctatgaccgaagggtttacatgttggaactattcttgcctgatgaatatcccatggctgctcccatggttcctattcttacaatcatatatcatcctaacatctgtctgctttgtagaacatgcctcgttattctcaaggacaaatgtagtccagctctgcagatccgaactgttcttttaagcatcctgtcactcttgagcgctccatattttttttacccactctc

SEQ ID NO: 230953 - DNA, 433 bp, Gossypium hirsutum
cccacgcgtccgctctaagtgaagaaagatgcgatcttttgctgttgtgtgtttctgagactcgttaactgttacttacttcctaatgaaaggcttctggcgaccctttgctgcaagttaaaggctcttgtgcttcgctgaggcttgggggtgttaggagctattcagtgttaagcaatgatcaactgagaattaacggggttaaagatgtgattgctgttgcttctggtaaaggtggtgtaggcaagtctaccactgcagttaatttggcggttgccttagctaacaagtgcggattgaaggtgggcgtgcttgatgcatatgtgtatggaccatctgttccgaccatgatgaacatccaccaaaagccagaagttaataatgatatgaagatgattcctattgaaaactatggagtgaagtgtatgtcaat

SEQ ID NO: 230954 - DNA, 441 bp, Gossypium hirsutum
gtgatccttaacaacggcaccagaaccagaggacgagatcaatgacgagaaaaatggcgcgcctcttgatgaagacgatattgcgcttctcaaaacctatgggttacggccttattcaacgagcataaagaaagttgagaaggacattaaggaaatggcaaagaaagtaaatgactcatgcggcatcaaggagtcagacacgggattagctgcacccagccaatgggatcttgtctcagataagcaaatgatgcatgaggagcaaccgcttcaggtggcaagatgcacatagataattaatccaaatacagaagatgccaaatacgttatcaatgttaagcaaattgccaagtttgttgttggccttggggacaaagtctcaccaactgatttagaataatgcatgcgggtgggggttgattcgaacaaatatcagataca

SEQ ID NO: 230955 - DNA, 439 bp, Gossypium hirsutum
  unsure (1)..(439): unsure at all n locations
cttttatatacataaaggatgctattgaagctgttctcttgatgattgaggaggcagatagggccaatggccatattttcaatgtgggtaacccgaacaatgaagtcacagttaggcaacttgctgaaatgatgactaaagtctatgccaaggttagtggagaaactgtgctggagtctccaacagttgatgtcagctccaaggaattttatggtgagggttatgatgatagtgacaagagaattccagacatgaccataataaacaaacaactcggttggaaccccaagacatccctttgggacttgctcgaatctaccctaacctaccaacacatgacttatgccgaggctattaagaaatctatagcaaaaccttctgcatcctaaaagaggctagatgnttaaaccacggctaataatagactcattaaatgtgc

SEQ ID NO: 230956 - DNA, 345 bp, Gossypium hirsutum
  unsure (1)..(345): unsure at all n locations
cttaaccttgctggcctccccaccacaaccattggatccttccctcaaactttggagctcaggagagttcgtcgtgaatacaaggctaacaagatctcannnnnngattacgttaaagccattaaagaggaaattaagaaagttgtnnnccttcaagaagagcttgacattgatgtcctggttcatggagagcctgagagaaatgatatggttgagtactttggtgagcaattatctggttttgctnnnacgtgtaacggatgggttcaatcttatgggtctcgctgcgtcaagccaccaatcatctacggtgatgtttggccgcccaaaccaatgaccggtttc

SEQ ID NO: 230957 - DNA, 319 bp, Gossypium hirsutum
  unsure (1)..(319): unsure at all n locations
caaccattggatgnnnccctcaaaccttggagctcaggagagttcgtcgtgaattcaaggctaacaagatctctgaggatgattacattaaagtcattnnngnntaaattaagaaggttgttgaccttcaggaagagcttgacatgnantgctgggttgatggagaggctgagagaaacgatatggttgagtactttggtgagcagttgtctggttttgcattcactgttaatggatgggtgcaannnnacgggtctgcgatgtgcaagccaccaatcatctacggggatgttagccgccccaagccaatgactgtttt

SEQ ID NO: 230958 - DNA, 312 bp, Gossypium hirsutum
  unsure (1)..(312): unsure at all n locations
atcannagttttatccaatcgttcgtctctatggcttttcctctctttctggtgaagaagagagtgaacaaaaatggagatggttaaaggtgttaggagtggggctgattctnnnnctttgccacgtgtccatggttgcaccattggaggagaatgnnttcacagatggacttacgtggtgcacatggctaaatccgagatgcctccgagtttccagcaccatactcactggtatgactcctctttgaaatcagttnnagggtaaagggcaatgctctatacctacgacaacggtatccatggattctctac

SEQ ID NO: 230959 - DNA, 372 bp, Gossypium hirsutum
gccatttcgtggtttaagggatttttttcattcgtttcttctcacgctcgattgccttacaaaaagagaaaatgaccaagtgttacccaactgtgagcgaggaataccagaagtcagttgaaaaggccaagaggaagctcagaggtctcatcgctgagaagaactgtgctccactcatgctccgtttagcgtggcactcagctggaacttttgatgttaagaccaagaccggaggtccattcggaaccatgaagcatcctgctgagctcgcacatgctgctaacaacggcctagatatcgccgtcagacttctcgagccgatcaaggagcagttccctaacctcacctacgctgacttctatcagcttgctg

SEQ ID NO: 230960 - DNA, 419 bp, Gossypium hirsutum
  unsure (1)..(419): unsure at all n locations
caccgactaaagttnaaacccacacctttgaatcttcatgaaactgctcgaactaaccgaacacctacacccagcctatgtgttattgggtgtgtggcttccaanctacaatcatcgatctccgaggctcgaaactaaccaatccgnnntcactgcggcgggtaggtggnagccaatccacaagcatctggcagccatggcagaagatggagtcgtaacactctacaacaacacggacatcaccgnctccaagaaaaagccagtctcgatcaaagtgggcctggcacaaatgctccgtggcggagccattctcgaagtttccaacaccaaccaagccaaaatcgccgaagaagcatgcgcctgggngtaaccntcnctggacccaaccgccacggcatttcacgcatgccggatcctgc

SEQ ID NO: 230961 - DNA, 329 bp, Gossypium hirsutum
  unsure (1)..(329): unsure at all n locations
aacctgaccaactgtaanattcgtancaccttgtccggacactccggttatgtgaatacggtggcggtttcacctgatgggtctttgtgtgctcagtggaggaaaggatnnactnattctgttatgggatttggctgaaggaaagaagctttataggcnngatgcaggttaggtgattagctcgctttgctttagtcctaataggtactggctttgcgccgccaccgagcagggtatcaagatctgggatctggngagtnagagcatttgggaggacttgaaggttgatcttaaggcagaggctgaaaagtctgacgtcacttgacatc

SEQ ID NO: 230962 - DNA, 323 bp, Gossypium hirsutum
  unsure (1)..(323): unsure at all n locations
gtcgtncccatcggcgctgtggagggggtcaggctctggctgggcaattccgcctacatttactggtccgtttccttcatccagatgctggggcagtgggtgggggtcgncgngnattccatcggcgtcctttttaaaaaagaagggtacaggagccctcggtgggggcgtgttggggatctcttttggggtcgccatcgcagcatatggggaagctaaattcgacacttggggagtgattttgcagttgggagctgnagcttttcaggcgtccaggttggtcatgatccaaatcttgcttacttctaaagggatcaccttga

SEQ ID NO: 230963 - DNA, 357 bp, Gossypium hirsutum
  unsure (1)..(357): unsure at all n locations
gaaagaatgagcccttcaatgaaggaaacatcgttagaaacaatggagaaaaagggagaggatgttaatgggataatgaagaaggagcaagataagttgttcgatccaagngaancccctcctttccgtattaatgatatccgagctgctattccaaagcactgctgggtcaagaacccttggaggtctatgagttatgttttcagggacgccattgtcatctctgcactcttagcagctgcactttatttccgtanctggttcttttggcctttctactgggttgcccaagggaccatgttttgggctctctttgtccttggacatgattggggacatggaagcttctctgataat

SEQ ID NO: 230964 - DNA, 361 bp, Gossypium hirsutum
  unsure (1)..(361): unsure at all n locations
ctttttgttccttnnccaagggagagtgtgatctgttcttcttcacttcatttcactaacccatggctctttccgtctagaaaaccgacgtcggccgcnantncntggtcaaggacatgtctcaggctgacttcggtcgtctcgagatcttgttgggcgaggtcgatatgcccggtctcatggcttgccgagccgagttcggccctgcccaacctttcaagggagccaaaatcaccggttctcttcacatgaccanccataccgctgtcctcatcgaaaccctcaccgacctcggagctgaagtccgttggtgctcttgcaatatcttctctacccaagaccatgccgccgtcgccattgc

SEQ ID NO: 230965 - DNA, 357 bp, Gossypium hirsutum
  unsure (1)..(357): unsure at all n locations
aagaaanaaaccatggcaacgaatgtgnnctgggttttgggttcctggccgagtgcatatgcgatgaggccaaggattgcccttaaccttgaggggtgtgatgtgaggaatncattgnagagaagttatgggaaggcaaaagcgagcttcttttccaggcnnttggtgttgagatgaggggggcnagtgcttattcacggcgataacaagccaatctgcgaatctctcatcatcgtacaatacatcgacgaggcttggtnttncaggggggtggtatttccttctgatccctgtgaacgtgctgtcgctcggttttgggctgcatatcttgacgacgaggggttcccagcggtgaaa

SEQ ID NO: 230966 - DNA, 359 bp, Gossypium hirsutum
  unsure (1)..(359): unsure at all n locations
aataccttcttcttctttcttgttggggntcttcaagtgttgctgtcgtaattcaagaaccttaatgaaataggagtataggaaagggaaaggcctatcatgtttttgannnnnctatggcagcaaggtactggtgttatcagtgttctcaagtggggactggtattatggaagctgagtgttaaatgcccattttgtcggggtgggtttattgaagaaatgagcaatggtacgacagacagtgctccagacatggattnccatatncaatctgatcgagcactctcactatgggcacccatcttgttaggtatgctgggtaatccttgtcgccgcagaagacttagacgtatcgagtt

SEQ ID NO: 230967 - DNA, 340 bp, Gossypium hirsutum
  unsure (1)..(340): unsure at all n locations
attaaaagtcagaatgagaaagacaaacttgctgaggcaaagagattggtgtacgtgagaggttttacagagggaactatgattgttggagaatatgctggaagaagagtccaggaagctaagccgctgttgaggaccaaactgattgagacgggccangctataatttatagtgagcctgnnaagaaggtcatgtcaaggtctggtgatgagtgtgttgtggctcttacagatcaatggtacatcacatacggggaaccagaatngaaaaaattggctgaggagtgcttatccaacatgaatctatactctgatgagacacgtcatggctttgaacata

SEQ ID NO: 230968 - DNA, 234 bp, Gossypium hirsutum
  unsure (1)..(234): unsure at all n locations
gcggtgcctgctacgagctccggtgcancaatgatcctcaatggtgcattagtcgaaccataaccgtgacagccaccaacttttgtccacctaactatgctttatgtagtgacnntggcgggtggtgcaatcccccacgagaacactttgatttggccccaccggtattattgtggatagcanaatatcgagctggaatcgtccctgttatgttcagaaaggtgtcatgtgtga

SEQ ID NO: 230969 - DNA, 360 bp, Gossypium hirsutum
  unsure (1)..(360): unsure at all n locations
ccagaaacaggcgctgagaaagaaaccatgtctcaagaagatcaggaggaagaagttgggaaactggccgtccgcctagccaacgccgtggtactttcaatggtcttgaaatcagccttggagctgaacataattgacacaatctcagccgctggtgatggcgcgtttctgtcgccttttcanattgcgagtgcccttccctccaagaatcctgacgcaccggtgctacttgatcgaatgctacgcctgttggccagccattccattctcaaatgctcagtaaaagcaaaggaaaaaggagaaattgaaagactgtacggtgcaggcccactatgcaagttccttgttaagaatcaagat

SEQ ID NO: 230970 - DNA, 343 bp, Gossypium hirsutum
  unsure (1)..(343): unsure at all n locations
cggacgcgtggggttcaagttattccccattttttggtctttctttatgccaacggaaaatcaaatgaaagacatgaaacagaattccataatggggtcgttatgtcaccgaangccagatcgcgtgcgtaacaggcggctctgggttcattgggttcatggctcatcaagctgctcttggaacgcggttatgtcgttcgagccactgtgcgcgaccctgacaactctaagaaggtgaagcatttactggagctacctaaancaganacgcacttgactctttggaaagcagatttagctgaagagggaagctttgatcattcaattcaaggtttgacgggtg

SEQ ID NO: 230971 - DNA, 328 bp, Gossypium hirsutum
  unsure (1)..(328): unsure at all n locations
atactctccacactaaaccaaactacaggaagtactgaatctctgaaacacaaatctcgctttcggaaaagcctcaaatggcagaccaaccgcaggtttatgaactcaacaatggaaccgtggttgttaagattaccaactatggctgcactatcacctcattgtctggtcctgacaaaaacggtaaattagccgatgtcgtcctgggattcgacactgtcgaaccgtacgtgaaaggtgcttcaccttattttggatgcattgtgggaagggttgcaaacaggataaaaaatggcaagtttactcttaatggaacggngtactcttt

SEQ ID NO: 230972 - DNA, 336 bp, Gossypium hirsutum
  unsure (1)..(336): unsure at all n locations
ggagattgcaaaggctgtaatgcatcttgacaagttcaagcagaaacatacgaaagtggaggatccaaaattgaaaatggttcgtggtgatcttgagantngaatagacatcttaagaaatcaagctgatacctatgatgacaaatgncctattatagatgctgttgtatggcatgatggagaagtatggagggttgctctcgatacacagagccttgaggatgatactaaatctgggaaactggctgannttgtgcccttaactaattacaggattgaacgaaaatatggcgtttttagcaaattaaatgcttgtacatttgttgttaatgtgta

SEQ ID NO: 230973 - DNA, 357 bp, Gossypium hirsutum
  unsure (1)..(357): unsure at all n locations
cccacccttncgctcanaaaattatnnnnngtcagtttgaaagtgttcttcagaggtggctatgaaacaagttgctaattctgctatcatggcgtttggcggtgtggggtcatnctgtcttcttaccagacaactgcatgcttctccagggggcaagnnaattgtgggggtgttgtacatggccaatgagtactttacgaagaatcccaactttgttggttgtgtggagggagccttggggttgcgccaatggctcgnnttgcggggtcgtcagtatatcgttaccgacgacaaagaaagaccggactgcggtaagtataacaacccctactgtcttttttgccaatgtcgatgcct

SEQ ID NO: 230974 - DNA, 304 bp, Gossypium hirsutum
  unsure (1)..(304): unsure at all n locations
aatgggaacagtagngaacttcgttcattggccagagctgattacttgccttatgggattgactttgctaatggacctagagggcgggtattaagcggnnnnncnacggcggatgtcatagctgaacttttggggtttggcgattgcnttgggtatactgaagtggtaggtggtagacaaatactgggaggagttaactatgcatctgctgctgctggaatcagagaagaaactggacaacaactgnnaaatcgnatgagcttcaattggcaagttaaaaattaccaacaaacaattcaacaag

SEQ ID NO: 230975 - DNA, 296 bp, Gossypium hirsutum
  unsure (1)..(296): unsure at all n locations
aaacngtgaaattctttttccttttgtctcaagcaattcaaggggaaagagggtggtttgggtttggttctcattgttagggtgtgtgggggtgnnnnnnnnnnntgggaagaggtagggttgaacttaagaggattgatggcgtgggcgcggtggggtggcttttgtgaaagagaagaaatggtcttttgaagaaagcttatgagctttctgttctttgtgatgctgaagttgctctcatcatctnnnncggggagaggaaagttgtacgaattttgcagcagctcaagcatgat

SEQ ID NO: 230976 - DNA, 264 bp, Gossypium hirsutum
atttgtgcaagcgaggaaatgttgggcatgcaatgcagttagtggaaaaaatggaggctcatggttatccaactaatactgttacttataactctttagttagaggtctttgtatgcatggaaacttgaagcaaagcttgcagcttttggataggttaatacaaaaaggactagttcccaatgaattcacttattctttcttgcttgaagctgcttataaggaaaaaggtgtaaatgaagcaacgaagcttttggatgagatca

SEQ ID NO: 230977 - DNA, 347 bp, Gossypium hirsutum
gcctgccgtccggactgatggtggccgaccgtgcgtccggctttcgtagataactacacttttcgcactgatctgtttgagatcaagaaagtaagtgacatctaaccgtcgttaaaacgacaactgcttatctccaccgttctcatgactgccgggattgctgtcgttagcttctttgcattgccgtcagaattcactctcttcaattttggaactgaaaaggaagtgaagaattggcacttgttcttctgtgttgctatcgcattgagggctgtactcattatcggttatactacagaatattatactagcaatgcttacagacctgtgcacgatgtaacagatgc

SEQ ID NO: 230978 - DNA, 328 bp, Gossypium hirsutum
  unsure (1)..(328): unsure at all n locations
ctctaaaatacgtatttaaatacgtacggacgggttactcancagatcgtaacggaggtggtagcggcggcggcggttggatatttgatcagatcgtgatccaaatggctgaggacaagtataacctcaagaatccggcggtgaagaggatattacaagaggtcaaggagatgcaatccaatccctctgatgatttcacgagcctccctcttgaggagaatatatttgaatggcaatttgcaattaggggtcccagggattctgaatttgagggagggatttatcatggaaagatccaattacctgctgagtatccatttaagccccc

SEQ ID NO: 230979 - DNA, 450 bp, Gossypium hirsutum
gtttgctgcgcttgtctgtagtccatgtgactctctgtcctttgctttcgtttcccagtctcttactttttgaatctcagatcaggaaattatcaaatccgagccgccatggaggttaacgacaagcttttgaacacgggtattctcatagtagccaccctagtagtggccaagctcatatctttcctcataatgcctagatctaagaaacgggttccaccagcagtcaaagcctggccggtaatcggtgggctccttcgattcgtgaaagggcctatggtgatgctccgggaggagtacccgaagcttggcagtgttttcacattgaacttgtttaacaagaagataactttcttgattgggcctgaggtttcatcccacttctttaaggcttcagaatcagacctcagccaacaggaggtctatcagttcaatgtgcccaaccttcgt

SEQ ID NO: 230980 - DNA, 448 bp, Gossypium hirsutum
  unsure (1)..(448): unsure at all n locations
cggacgcgtgggggaaaagatctggcatcatacattctacaatgaactccgtgttgctcctgaggagcaccctgtgcttctcacggaggcacctctcaaccccaaggccaatagagaaaagatgactcagatcatgtttgagaccttcaatgtacctgctatgtatgttgccatccaggctgtcctctctttgtatgccagtggtcgtacaacaggtattgtgctggattccggtgatggtgtttctcacaccgtgccaatctatgaaggatatgcccttccacatgccatcctccgtcttgaccttgcaggtcgtgatctaaccgatgccttgatgaagattcttaccgagagaggttacatgttcaccaccactgctgaacgggaaattgtccgtgacatgaaggagaagcttgcttatgttgccctggactatgagcangaactg

SEQ ID NO: 230981 - DNA, 314 bp, Gossypium hirsutum
atatattcttgaccgccatccaaagagaaggctaactgctcatcaagtcttgtgccacccatggattgtagatgacaccattgcacccgataaacctattgattctgcagtattgtcacgcctgaagcagttctcagcaatgaacaaacttaaaaagatggctttacgagttatagcagaaaggctttcggaagaagaaatcggtggtctgaaagagttatttaaaatgatagataccgacaatagtggaacaattacatatgaagaattaaaagacggcctcaaacgagtgggttctgaacttatggaataaa

SEQ ID NO: 230982 - DNA, 352 bp, Gossypium hirsutum
  unsure (1)..(352): unsure at all n locations
aaccagttcattatttggaaaagaacaacanggtattggaaaagtggtgtttctggtaaattcattggccctgatgggatgccttcagccatgccatcagcaatttctttctttttgtcaaattttaccaccgttgtactccacaacgagtccatgccacatcttacctcctcattatacagcgacacaaggatgactatcagtttctccggtcaaattcagtatttcaagtgggattcttggaagatctggtccttgattngngctgagcctagagataaatgcagtatctacaatgcatgtggaaaattcggtagctgcaacagtaacaatgacttgatgtgtaaatgtc

SEQ ID NO: 230983 - DNA, 390 bp, Gossypium hirsutum
tcggtttattatcgaaaacattcaccaccccagatgatatctttttctgcgtggtgtcactctcttcccataactccagctttttggtgaatgaatgagcattgaaaaagcttccatcttttcgagtttctgatatatgttttttttactatttacaaagggggtaaacttttatgatgattacttgctagatatagatgtttgagccctttcctcttttagaattatggattctgggagtaggatttacacggctgatgagttcaaattggatgctaaatggttgattgatccaaagcatctctttgttggtccaagaatcggagaaggagctcatgccaaggtctataagggaaaatataaaaaccagactgttgcaattaaaatact

SEQ ID NO: 230984 - DNA, 433 bp, Gossypium hirsutum
tcgctctctctctctttctctctttgactccgcccttttctcatggatccttttggtgtcttctgtactggggctcttcttgcctgcggtctttactggttcgtctgccttttagggccggccgagcaaaagggcaagcgagccgtcgatctctccggcggctccatctctgccgagaaagttcaggacaactacaaacagtattggtctttcttccgccaaccaaaggagatcgaaaccgccgaaaaggttccagatttcgtcgatactttttacaacttagtcaccgatatttacgaatggggttggggtcagtccttccacttttctccttccattcgagggaaatctcaccgggacgctacgcgcctccacgaagagatggccgtcgatatgatcgaagtcaagcccggagatcgagtcctggacgtcg

SEQ ID NO: 230985 - DNA, 425 bp, Gossypium hirsutum
gaaaacttcatcaaacaaggaaaaaacttgaagtaaaacaattgagagaagatgtcgtggcaagcgtatgtcgatgatcacttgatgtgtgatatcgagggcaaccatctctctgccgccgctatcattggccaagacggcagcgtttgggcccagagctccaatttccctcagttcaagccagaagaaatcactggcatcatgaatgactttgctgaacctggatcgcttgctccgactggattgtaccttggtggcacaaaatacatggtgatccaaggtgaacccggagctgttattcgagggaaaaagggccccggaggtgttactgttaaaaagaccaacctggccttgatcattgggatctatgacgagccaatgactccaggccagtgcaacatgattgtggaaaggctttgtgatta

SEQ ID NO: 230986 - DNA, 274 bp, Gossypium hirsutum
cccacgcgtccgctaagggagagaatccacaagcaaaggcaatagaaaatggcagaaaacgaagacattcagcctcttgtttgtgacaatgggactggaatggtcaaggctggatttgctggagatgatgctccaagagctgtattccctagcattgttggtcgcccacgtcacactggtgtgatggtcggtatgggccaaaaggatgcttatgtgggagatgaagctcaatcgaaaagaggtattttgactttaaagtacccaattgagcatg

SEQ ID NO: 230987 - DNA, 362 bp, Gossypium hirsutum
  unsure (1)..(362): unsure at all n locations
agaatattgaaaagaactcacccggaagtcaaattctcaaaggttacctaatggccacccttttttatgaaccttcaactagaactaggctttcattcgagtcggccatgaaacgattgggtggtgaagttttaacaactgaaaatgctcgagaattttcttcggcagccaaaggagagacccttgaagatactattagaactgttgaagggtattccgatataattgtgatgcgacactttgaaagcggtgctgctaaacgagcggcagctactgcaggcattcccatcattaatgctggtgatggtccgggtcaacatcctactcangcccttttagatgtctacaccatagaaagagag

SEQ ID NO: 230988 - DNA, 297 bp, Gossypium hirsutum
  unsure (1)..(297): unsure at all n locations
cccacgcgtccggaaggtgtcttaataaacgccttctttcttcttcttcttattcctttattgctttttagaatttttcttaatcgaaaatgagagagtgcatttcgatccacatcggtcaggccggtatccaggtcggaaacgcttgctgggagctntactgtctcgagcatggaatccagcctgatggtcagatgccaagtgacaaaactgtncgaggaggtgatgnatgctttaacacctttttcagtgaaactggtgctgggaagcacgtccctcgtgccgtcttcgtggatc

SEQ ID NO: 230989 - DNA, 283 bp, Gossypium hirsutum
agttggaaaaatggcagagcgtgtgatcacccgagtacacagcctccgggagcgtctggatgacacccttattgcccatagaaacgaggttttggccttgctcacaaggatcgagggtaagggaaaagggattctgcaacaccatcaaattatcctagagtttgaagccatccctgaagaaaccagaaagaagctcgctgatggagcattttctgaaatattgagatccagtcaggaagcgatcgtgttgccaccatgggttgcacttgcagttcgtccaagg

SEQ ID NO: 230990 - DNA, 285 bp, Gossypium hirsutum
tttcttgtttaaaatataagaaaaaaaatcaggcgcaatgaccactgctggtcaggttattcgttgcaaagctgcggtggcatgggaggcggggaagccactatcgatagaagaagtggaagtggcaccaccccaaaagcatgaagtccgtattaagattctcttcactgctttatgtcacactgatgtatactactgggagtgtaagggttacactcctctgtttcctcgtatacttggtcatgaagccctcaggatcgtggagagtgtgggtgagggtgtgaa

SEQ ID NO: 230991 - DNA, 213 bp, Gossypium hirsutum
ctcgctcattgctatctttttgttccttttccaagggtgagtgtgatctgttcttattcactccatttctttaacccatggctctttccgtcgagaaaaccgccgccggccgtgagtacaaggtcaaggacatgtctcaggctgacttcggtcgtctcgagatcgagttggccgaggtcgaaatgcccggtctcatggcttgccgagccgagt

SEQ ID NO: 230992 - DNA, 344 bp, Gossypium hirsutum
cttccaacagtggaaagaaaagaatcagaaagtgtaccggcacgccgaggaggctgagaaaaggtttgaaaatttcaaggggaatttgaagtatatcctagagaggaatgcaatgagaaaagcaaacaaatgggaacaccatgtgggattgaacaagtttgctgatatgagcaatgaggagttcagaaaagcttacttgtcaaaggtgaaaaagcccatcaacaaagggataaccctgtcaaggaacatgaggagaaaggtgcagtcttgtgatgcaccctcctccttggattggaggaactatggagttgtgactgctgtcaaggaccaaagttcttgtggaa

SEQ ID NO: 230993 - DNA, 391 bp, Gossypium hirsutum
  unsure (1)..(391): unsure at all n locations
ttacaagggccagacggggagaccaaatgttaatcttttnaaactgatacaattgggtcttactttctctgatgccaaagggaatttgcctacttgaggaactgataaatactgtgttagtcaattcaatttccgcaaattccatcctaatgaggatgtctattctaattactccattgagcttttgtctcaaaatggcattcattttcataagaacaaacaaaaggtcattacttctcatgacttcactgaattggcaatgatatctgggattggctccaatgataatgcgcattggtcgactatccataccgacttctatttttagtatttccttaagttgctcacttgcaataattcttctgaacacagacaggtttctttaatttga

SEQ ID NO: 230994 - DNA, 393 bp, Gossypium hirsutum
tttcatttccgtattatatatacacttggaagggataaaataacagagctttgcttcgtctagaccgatcgaaagggtattcagtgatggccactgaaatcatgaataatgaagttggtgtggaaaaaaatgaggagtcggaggcttcaaatggcattgagaaattagagatttcgaatggcactgatgaggtctccgaaaactcttcatctatgcaaaaagatgaagatggggtgacagaagttgccaaaaagaaaaagaagaaaaataaaagcaaaaaaaagaaagagcccttgaagcagactgatcctccatctattcccgttgttgagctttttccgtccagggagtttcctgagggtgaaattcaacagtacaaggatgataaattgt

SEQ ID NO: 230995 - DNA, 439 bp, Gossypium hirsutum
ctcagaacagctcaaaaaagcttccaacattttgaagaaacaaagaatcaaacatgtcgaaggaagtgagtgaagaagggatgagccgaaaggactatgtggatcctccaccggcaccgctcatcgacgtggctgagatcaagctttggtctttttacagagctctcatcgccgaattcatcgctactctccttttcctatacgtcaccatagccaccgtcatcggccacaagaaacaacacgatgcatgcgatggtgttggtcttttgggtattgcttgggcttttggtggcatgattttcattcttgtttactgcaccgccggtatctcaggtggtcacattaacccggcggtgacatttgggttgtttttggctaggaaggtgtcgcttataagggcggtggcttacatggtagctcaatgtttgggtgctatttg

SEQ ID NO: 230996 - DNA, 309 bp, Gossypium hirsutum
cacctctcttactatcattaacggtctcctgctacgccgtcacgattgcagcttcagatcacttctattccaaagctagccgctcatactgcaaaatgggcaaggaaaacactcacattaacatcggcgacatgggccatgtctactctagaaagtcaaccaccactggccacttgatctacaagcttgtacgtatcgacaagcgtatcattgaaagggttgagaaggaagctgctgatatgaacaagaggtcatacaactatgcatgaccgcttgacaagtagaaggctgagcgtgaacgaggtatta

SEQ ID NO: 230997 - DNA, 266 bp, Gossypium hirsutum
ggtttttctactgtggggaaatctacgcttcttaacaagttgacaggaacattttcagaggttgcttcctatgaatttactacattgacttgtatcccaggtgtgatcatgtatagaggggctaaaatccagttgttggatcttccgggtattatcgagggtgctaaagatggcaagggtagaaggagacaggttatcagcactgccaggacatgtaattgtatattaattgttcttgatgcaataaaaccaataactcacaagcg

SEQ ID NO: 230998 - DNA, 431 bp, Gossypium hirsutum
atcacacttgagcttagtgctcaaagctcccccgactatttcttcggcttcccaattgttactgcaacaacactcaaagccaatggcttcctctctcaatagcgccgcctctttgcgtctcttcgcttcttcatcttcttcctgttcctccgccgccgctagactttctctccgttccacttccctttctttctcttcttctctcaaatccctcgctttctctactctttctcgccacaagaggggatcggctgtcagtgtgtcgagtaccggagggtttagctctgtagccagtccgaaatgcgcttgcttagatcctgatcagttgaagagtgctagagaagatatcaaggagcttctcaaatccaaattctgccatcctattctggttcgtctaaggtggcacgatgctggtacctacaacaagaaca

SEQ ID NO: 230999 - DNA, 458 bp, Gossypium hirsutum
caaacatgaagctcgtgaggtttttaatgaagttaaataacgagactgtctccatcgagctcaagaacggaactgttgtccatggcaccatcacaggggttgatgttagcatgaatacacatttgaagacggtgaaactaacgctcaagggaaaaaaccccgttactcttgaccatctgagtgtccggggtaacaccattcgttattatattctccctgacagcttgaatctggaaactttgcttgtggaggagacaccaagagttaagcctaagaagccagctgcaggacggcctttgggacgtggtcggggtagggggcgtggacgtggtcgtggcagaggtcactaattggctctctgcaattttccttcattgggtaccttactattttagtgtgctcgagcagaatttaagggagcgaagttttgagtatacagtaaagaatctgtctattta

SEQ ID NO: 231000 - DNA, 425 bp, Gossypium hirsutum
cgttaactttgcttctgaagatccagagaatgacatgatcaaaccagcgactcaaggagtggtgaacgttttgaaagcttgtgccaaagcaaaaacagttaaacgagtcgtcttgacatcatctgccgcagctgtgtctatcaacacactggatgggacagatctcgtcatgacagagaaagactggaccgatatcgagttcttatcatcagcaaagccaccaacttgggggtaccctgcatccaagacgttggctgaaaaggcagcttggaaatttgctgaagaaaacaacattgatctcattacagttatcccttctctcatgactggtccttcccttaccccaattgtccccagcagcataggccttgctacatctttgatttcaggcaatgaattccttataaatgctttgaaaggaatgc

SEQ ID NO: 231001 - DNA, 332 bp, Gossypium hirsutum
cccacgcgtccgcggacgcgtggggtgctggaagaacatgaacaacttggttctatcccttgctcctaaatttaccaaattgctaactctcgtactacgccaagaaaatccgcagcttgaggacactgctgttgagactattgcgaaattctgtcatgatctgcaggatctggacctcagcaaaagtttcaagcttggtgatcgctcattttatgctttggcccatggttgccctaatcttacaaaacttaacatcagtggctgcacatcattcagtgatgaaggtcttgaatattttgactaaatttgtcgaaaactaaaaatattaaatc

SEQ ID NO: 231002 - DNA, 432 bp, Gossypium hirsutum
tcgctcacgcgtccgcccacgcgtccgccgcttcgtgcacgattctgaaattttgcctgccgctccatctctacatcacaggaatggcgacagatgttgcagcccccgccaccgccgcacccaaagacccaacccaacctaaccttgaagtaaaacttttaaaccgttgaagcttcaaggaagtcaaggtggctgatatctcctggagagatacacatgggtgtccaaccttaaaagcatgctacctatgtgccacacactgctgggaggtactcagttaagcgtttcaggaaggctcagtgcccaattgttgaaaggcttacaaactcacttatgatgcatggccgacacaatgggaagaagcttatggcagtcaggattgtgaagcatgccatggatattatttatctcttgactgatcagaacccaatt

SEQ ID NO: 231003 - DNA, 352 bp, Gossypium hirsutum
ccgttgaaaaaatatgggtttccaaagaaacatattgggtttccttttcttgatattggcttcactaacaagcctctcttctagccttcctagtgaatactccatagtggaacatgagattgacgcatttctttcggaggaaagggtgttggagatcttccaacagtggaaagaaaagcatcggaaagtgtaccggcacgccgaggaggctgagaaaaggtttgaaaatttcaaggggaatttgaagtatatcctagagaggaatgcaaagagaaaagcaaacaaatgggaacatcatgtgggattgaacaagtttgctgatatgagcaatgaggagttcagaaaagcttac

SEQ ID NO: 231004 - DNA, 329 bp, Gossypium hirsutum
  unsure (1)..(329): unsure at all n locations
gggtccacccacgcctgcttttttgctcaaaaaagcgggcaacattcngccgggacagttaatcaaacgtggggcacgatgtgacttaccaatggttgatccgtaaggactataaggatcctccaccggcaccgctcattgacaaggctgacatcaagcttaggtctttttacagaggtctgatcgccgaattcatcgctactatccttttcctatacgtcaccatagccaccgtcatcggtcacaagaaacaacacgatgcatgccatggtgtctgtcttattggtattgcttggctcttggtgcatgattacattcttgttactgca

SEQ ID NO: 231005 - DNA, 419 bp, Gossypium hirsutum
gctgacttctccccttaggcatgttaatgatgccagtgagaaacccaacatgatggataaatccaatgtccctctgctgcgcccgcaagatcttaggctagctatcatggcttcagaaagattgttgattctgcagccacataattgggcgctgaggagggaccatggcatgatgctgtattataatagggaatatggaaaggcagtgcaagagctgagcatttgcatggcctttgcgccggaagaagaggcagagattcttgaaccatttgttgagaaattgcatttgatgcggctggagtcatcatggaagtctttgggacacacaggtcgactcactgtgccttgaattttgtacataaccttctgtccatctgaaatcctccttgtattaagggatgaattctgcgattgtgatc

SEQ ID NO: 231006 - DNA, 335 bp, Gossypium hirsutum
  unsure (1)..(335): unsure at all n locations
gtatagctcaaaaaagcttgcaacattcngaagaaacaaagaatcaaacatgtggaacgaagtgagtgaagaaaggatgagccgaaaggactatgtggatcctccaccggcaccgatcattgacgtggctgacatcaagctttggtctttttacagagctctcatcgccgaattcatcgctactctccttttcctatacgtcaccatagccaccgtcatcggtcacaagaaacaacacgatgcatgcgatggtgtcggtcttattggtatggctagggctgtggtggcatgattacattcttgttactgcaccgcggtatctcggtggtcacatt

SEQ ID NO: 231007 - DNA, 307 bp, Gossypium hirsutum
gctggattccggtgacggtgtttctcacaccgtgccaatctatgaaggatatgcccttccacatgccatcctccgtcttgaccttgcaggtcgtgatctaaccgatgccttgatgaagattcttaccgagagaggttacatgttcaccaccactgctgaacgggaaattgtccgtgacatgaaggagaagcttgcttatgttgccctggactatgagcaggaactggagactgccaagagcagctcatctgttgagaagaactatgagttgcctgacggacaagtcattactattggagctgagaga

SEQ ID NO: 231008 - DNA, 454 bp, Gossypium hirsutum
  unsure (1)..(454): unsure at all n locations
gctggttaaaccttagccgaagctgtagaactctcgcatcgctccctcttcgccataaaaaatctttaaaaactttcaagttaaaactgaaataccaaaactaaaactaaatctaaattagcttgtaagtaatttgtttcttgaaagttaggggagagaaatgttgtcgacaccgtacgagtccgaagcgacggagcagcacgacgatacctccgcatcaaccatgaaattcggaactcccgaggcagtcgactacgtccgatccctcaccgacgtgggggccatgacgcgcctccttcacgagtgcatcgcctaccaacgcgccctcgatgtggacctagacaccctnctcttccagcgcaccgacctcgacaagagcctaaacaacctccaaagatctgccgacgttctcgacattgtcaaggctgaatctgaccacatgctctctaacgtt

SEQ ID NO: 231009 - DNA, 355 bp, Gossypium hirsutum
gttatctctgagggtgtcttaataaacgccttcgatttactttcggtttccatttacttctttatttctacgtttttgaatttttagtaagcgaaaatgagagagtgcatttcagttcacatcggtcaggctggtatccaagtcggaaatgcctgctgggagctttactgccttgaacatggaatccagcctgatggccagatgccaagtgacaagactgtcggaggaggtgatgatgcttttaacacctttttcagtgaaactggtgctggaaagcacgtccctcgtgctgtctttgtggatcttgagcctactgttattgatgaagtgaggactggtacttaccgtcagcttt

SEQ ID NO: 231010 - DNA, 462 bp, Gossypium hirsutum
cttctttcttttctttcttgttcttctttagtcggtaaaattgtcaaaaagcatggctctttctggggttaaaaatgatagaggggaattgaggattcttgagaatttggatgagctaaggactgatttagctgactatattgctgagttatcagaagctgcagtgaaggagagaggtgtgtttgccatagcactgtctggtggttctctcattggcttaatggggaaactgtgtgaagcaccttataacaagactgtagactgggctaaatggtacatattttgggcagatgaacgcgttgttgcgaaaaaccactcagacagcaattataagcttgcaaaggatggcattctttccaaggtgccgattgttcccagccatgttcattctatcaatgattcggtttcagcagaggaggctgctgacgaatacatgtttgttattcggcagctagttaaaac

SEQ ID NO: 231011 - DNA, 437 bp, Gossypium hirsutum
gccatttctgtattccactgctctgctcactcagcctttgaacaacactcctctagctctctgttctatccctctctatacacatggcaaaggtgaagatcggtatcaacggattcggtaggatcggtaggttggtggctcgagttgctttaaaaagagacgatgttgaactcgtcgctgttaacgatccttttatcactactgattacatgacatatatgttcaagtacgacagtgttcacgggcaatggaagcatcatgaactcaaagtcaaggattcgaagacccttctgtttggcgagaagccagtcactgttttcggtattaggaacccagaggagattccatggggcgagaccggagctgaatacattgttgaatcaactggagtgttcactgacaaaaacaaggcagctgcccactttaaggggggggct

SEQ ID NO: 231012 - DNA, 412 bp, Gossypium hirsutum
cccacgcgtacgggaaaatattatcttgtggattcaggatatccacaaatggtagggtttctacgtccatatagggggaacgatatcatttacctgattttcgtcgaggtaatcatcaagtatctggaaaaaaaaatctttaatcatgcccattattcgctacgctctgtgattgaacgaacatttggagtgtggaaaaaaaatgaccaatattaaaggatattccaagttatttattcaacaagcaagttctaatagttattgcaacaatggttttgcataattacattcgaagacatgattggtcagatgatgatgattttcaaaaagtggagaatatacccgacatgccagtctctttaagctagtttgacagaggtgaatcgagttcttgtacatagaaagtgacctt

SEQ ID NO: 231013 - DNA, 373 bp, Gossypium hirsutum
acggacgcgtgggcggtctccctagccggcgaagtgaatcgacaaacggccgaacttgagtggatcgtggcagcaaggccactctgccgccaattgtttgagctagctagctcttactcaaatggcaaccaaaacgatgacgttgcaaatatttccacttttcttctttttgttcagtgtctgcaactccattttccttggtgctaatggagatgacaatggtggttggcaaactgaccatgccaccttctacagtggtgctgatgctaccggcacaatggggggagcttgtggttatggaaacctgtacagtcaatggtatggaacgagcacagcacctcttagcactgcacttttcaacaatggcttgagc

SEQ ID NO: 231014 - DNA, 279 bp, Gossypium hirsutum
gaaacatcccggaagtttgttagaaggttttacacaaactcaaataagcactctagcagggaaagacaattttatggttgcaggaggcttccaaggagagcttacttttaagcacttggacagaaaaggagtaaccttttgtacccggacaacgtatgacgataatgcaattacaaatgctattgagatatatgacagcttgaggggtggaattaattttatggcctcaaacaatgactgtagtgtgagagaatatgatactgagagatttcaactttt

SEQ ID NO: 231015 - DNA, 363 bp, Gossypium hirsutum
gatcacttgtccaatttttaccttcaatggtgtggatgggatggtcgacagattagcaggggacgttaaacatgtcatacaccaccacccaattgttcagaaaatttcttttgttgatcattcatcgtgaggacttatatcaagatatgccattgcacgactttttgaacaatatcttactcaagaaaattctcaaacaaacggacacagtatagctgatcaattgtaagattcatggcttgaagggatcttcaaatgtcaaatgtgctggactagagcccgtcaatttcataacacttgcaagtccacaccttgtgtctccatcgcattagcaggttccactgtttcttggctcccattttc

SEQ ID NO: 231016 - DNA, 165 bp, Gossypium hirsutum
ctgactcgtggggcaaaatatggtcaaaaatgggtgcgaacaatgacaatcatcgagtagcttttcacccaagtggaatgagcagtatacatgggaggtttttgatccttgtactgtcataactattggggtgtttgataattgtcatttacatggaggagataa

SEQ ID NO: 231017 - DNA, 411 bp, Gossypium hirsutum
ccacgctcgctctctcgaacaagccaagaaatcgtttcccaatacgtatttgctggttgggtgttgcaatgacgaaacaacacacaagtacaagggcaaaactgttatgaccgaatcagaacgttatgaatcccttcgccattgcaagtgggttgatgaagtcattcctgatgctccgtgggtgatcgatcaagaatttctggataaacacaatattgactatgtggctcatgattcacttccctatgctgatgccagtggagctgcgaacgatgtgtacgaatttgttaaagctgctgggaagttcaaggaaacaaaacgaactgatgggatttttacgtcagatatcataatgagaattgttaaagattataaccaatatgtgctgcgtaacttggaccgtgggtattc

SEQ ID NO: 231018 - DNA, 449 bp, Gossypium hirsutum
aacagcttcaaatttgttctcctcttgtttcctgctatagaatagaagtgaagtgaaggagaaagcttcagagaactaaatagcactggaaaatggaggagaagatttcgatgtctttgaagaatcatgattttcgtttctttatttcgtcttgattgctctttttgtttgttattttgatttggaaaaagaaaaagaaaaagtaaagagttaaaagcaatggagtctcgaatggatcattacgagatcatggaacagatcggccgtggtgctttcggcgctgccattctcgttcaccacaaatccgagaataagaagtatgtactgaagaagatcagattggcgcggcaaacggagcgttgcaggagatcggcacatcaagaaatggcacttatatcacgggtccagcatccttacaattgtgaatttaaagaagcttgggttgagaa

SEQ ID NO: 231019 - DNA, 483 bp, Gossypium hirsutum; identical to SEQ ID NO: 199236
  unsure (1)..(483): unsure at all n locations

SEQ ID NO: 231020 - DNA, 441 bp, Gossypium hirsutum
  unsure (1)..(441): unsure at all n locations
cggaagagctttcctttttttctctctatattggctcatctccttttccaccgccgtcgatctcgatccttatccccgttttcaaaaaagctccaaaaagatggccaatgctgcatcgggaatggctgtgcatgatgattgcaagttgaagttcttggaacttaaggcaaaaagaacccaccgctttattgttttcaaaatcgaggagaagcagaagcaagttattgtggagaagcttggtgagccaaccgagagctatgaggattttactaaatgtcttcccgctgatgaatgtcgttatgctgtgtacgattntgattttctaacggccgagaacgtcccaaagagcagaatctttttcattgcatggtctcccgatacatcaaggattcaggagcaaatgatatacgctagctccaaagacagattcaagcgagaact

SEQ ID NO: 231021 - DNA, 404 bp, Gossypium hirsutum
  unsure (1)..(404): unsure at all n locations
ctgatcaagagactgcttctcatatgagcacgattaaagaattatctgaccagcatacgaaggcctcagaacttcgagcagaagccgaatcacgaattgtggaagcagaagctcaattacacgaagctattgagaaatactcaaagaaagaatcagaatccaacaatctgattgaaaagttgaatgcgcttgaagtccaaattaaaacatacgaagaacaagctcatgaagcatccacaattgctgtatcccgacaagtagaggttgaagagactctttccaaattaaagcagcttgaaaggcttgtcgaggaactgcaaaccaagtcggcacactntgaaaaggagagtggaggaactgctgaggcatatttaagcttactcangaactagccgaatacgagt

SEQ ID NO: 231022 - DNA, 297 bp, Gossypium hirsutum
ctggaaaagatcaagaagtatgccactgttgctagggttttggcccacactcagattaagaaaatgaatggattgaagcacaagaaagcacaccttatggagatccaagtttatggtggaactattgcatacaatgttgattttgcatacaagttctttgagaagcaagtcccgattgatgctgttttccataaagatgaaatgattgatatcatcggtgtcactaagggtaaaggttatgaaggtgttgggactcattggggtgtcacacgtctgacccgtaagacccacagaggt

SEQ ID NO: 231023 - DNA, 218 bp, Gossypium hirsutum
tcccacccgccggtgtttgttgttctgaggaaccgacgcactagggaggagtccaatgtggcggaggagccggaggcctaagtactctacaccgagtgcatctagcggaacgggtaggtggggctgtatgtcatggccatagtgttcattaccctcctgattggattccacgccctgcgtgcttacctagataagctgacctccctctctgaccgtta

SEQ ID NO: 231024 - DNA, 398 bp, Gossypium hirsutum
  unsure (1)..(398): unsure at all n locations
ttattattcttcgtcttctgaaaaattttctttgaaagtgcagcttttgactacaatgtgaggaaggggaaagggaggtaaggggctcggaaagggaggagccaagaggcataggaaggtcttaagggacaacattcatggcattaccaagcctgcgattcgccgtctggctcgtangggaggtgtgaaaagaatcagcggtttgatctacgaagaaacccgaggcgtattgaagatcttcttgtagaacgtgattcgtgatgccgtgacatacactgaacacgccaaaaggaagaccgttcccgtcatggatgtttgttaatgccttgaaaaaggcaaggcaggactctctatggttttggagggtaagcttaatacaactattgatttttaggcat

SEQ ID NO: 231025 - DNA, 450 bp, Gossypium hirsutum
ataacaaattaattcatcggccgaccgtttgtgtcggggcggagacgtttcatatgtcatgttcaccagatctcaactcttccttcgccgggtttatttgttcttccttgttttttggctgttttcaataaatttcttctatttttccatggctgctccacctgcaagagctcgagccgattacgactatctcataaagctccttttgatcggcgacagcggtgtgggtaagaagtgccttcttttgcgtttttcggatggctcatttactacaagttttatcacaaccattggaatcgactttaagattaggactttagagcttgttggaaaaagaatcatactgcaaatttgggattctgttgggcatgagcgggttcgactattacaactgcttactaccgtggagccatgggcattttgctcggctatgatgtgactgttgaggca

SEQ ID NO: 231026 - DNA, 283 bp, Gossypium hirsutum
ctttcttaccaaaactctactctatgtctatcggggtgtgctttttgccctgttctggatgcaaatccatgctatatagtacttcaacaaattcccaagagttaacatcaatgagaaagagacaacaaccagagagcatatgctcgagaccttctttccccataccaccctatagccataagatcatgagccaaggttcattcctgaaacccaaaatggttatggcctttacagccacttttcaagctcaagcccgcctcatttcaccaccaaaaaaacctat

SEQ ID NO: 231027 - DNA, 459 bp, Gossypium hirsutum
  unsure (1)..(459): unsure at all n locations
agaacaaaaaaattcaacggccgaccgtttgtgtcgttccggagacgtttcatatctcatttcaccagatctcaactcttccttcgccgggtttatttgttcttccttgttttttggctgttttcaataaatttcttctatttttccatggctgctccacctgcaagagctcgagccgattacgactatctcataaagctccttttgatcggcgacagcggtgtgggtaagagttgccttcttttgcgtttttcggatggctcatttactacaagttttatcacaaccattggaatcgactttaagattaggactatagagcttgatggaaaaagaatcaaactgcaaatttgggatactgctgggcaagagcggtttcggactattacaactgcttactaccgtggagccatgggcattntgctcgtctatgatgtgactgatgagtcatctttcaat

SEQ ID NO: 231028 - DNA, 323 bp, Gossypium hirsutum
caaaaatggatggttattgtagcagaagggtaatcatgtttttggtgtttgcatgtgcagcaataagcagagggtatggacaagaatcaaccactcttgttcctgcaatcatcacctttggtgactctgtggtagatgtgggcaataatgactatctccctaccatcttcaaggctaactatcctccttatggacgggactttgccaacaaaaagcctactgggaggttttgcaatggaaaattagccactgacatcactgctgaaactctggggtttacaacttatccaccagcttaccttagcccagaagcatcagggaag

SEQ ID NO: 231029 - DNA, 264 bp, Gossypium hirsutum
gcaactttttggacttagtgaattccctgatgctgaggatctgctcaaaccagcggccgcagccatgatggattaatcagcggatgttcgcaaagcagcacatagatgcgtcactgaaattttaagagttagcgcgcaagaagcaattgataagaatcttagagatttacaagggccagctttagctcttatccctgagcgggtaaaaccttataggtcttttcaagaattagatgaaccatcaaaaggtggttctattggact

SEQ ID NO: 231030 - DNA, 259 bp, Gossypium hirsutum
  unsure (1)..(259): unsure at all n locations
ctatattttataccagtccctacttttgccaacgcaggagatcatttggagagatgcgtgaggtccctcanaaaacctaccattattatcacccatagtcaaaggatctatattttgcagcaatgattgatgacattaagaatgctccaaatggttcattctttctacttcatgcatttgctcataaccccactggcgtgaatccttcattaaatcagatttttataaatttcacaccacatcaatgcgaaaggtcatt

SEQ ID NO: 231031 - DNA, 421 bp, Gossypium hirsutum
  unsure (1)..(421): unsure at all n locations
gctatgcaagccgttgtcaaagactgtgaggttcaatgttttgaaagtgattcctgctggatcttctggtggagggaagaaagctttcactggaatgtgaggtgtaagtgttttcaatcaggagaagacattaaaatccctgaactgcctctagatatgaagaacctgngactattagatgtttttatgtttttgtttttcctttcctattacttgttatgtttggatttgtctagttatgacaactggaantttgaaggtatcccctattctagtatgatcctgttctcttgagaatcactctgatcacttacttagattatgtatgaaaattctggtgttctctaaaaaaaaaataattttnataatacaaaaacatcttttttttttcttatattatttttgctccccctttttaatt

SEQ ID NO: 231032 - DNA, 390 bp, Gossypium hirsutum
catatctatataccagtccctacttgggccaacgcccgcaacatttggagagatgcgcaggtccctcataaaacctaccattattatcacccagagtcaaagggtctagattttgcagcaatgatagatgacattaagaatgctccaaatggttcattctttctacttcatgcatgtgctcataaccccactggcgtggatccttcagaggagcagtggagagaaatctcacaccacatcaaggcgaaaggtcattttgccttctttgacatggcgtatcaaggctttgctagcggtgacccacagaaagatgcaaacgccatcaggattttttttgaggatggtcatcacatatgaattgcacaatcatatgcaaaaaacatgtgactc

SEQ ID NO: 231033 - DNA, 411 bp, Gossypium hirsutum
gtgagaaggatctttctttctttattctgcacatcttaaccttaaccacatcataagatagagatcttttaaacggtccaattattgaaaactggctttcaacaacaaagaaaaacaattcccaacttattaactttacccctttgcttcttttcttggtttcctgctctactttcacttttactgaaacttattatgcgcttgatccaactggaaatatcactatcaaatgggacctaataagttggaccccacatggctatgttgctgttgttacaatgtacaatttccaacagtatcgccatattcaggcacctggttggacattggggtggacatgggccaaaaaggaagtaatctggagcatgatgggaggccaaaccacggaacaaggggattgttcaaaataca

SEQ ID NO: 231034 - DNA, 419 bp, Gossypium hirsutum
gagaacatttgggtgagggttttagagagagaaagagaaggccggagtgaaagacaagacacagagagagagacagagagagagatgtcgggaggaatagcgcgtggtcgactcgccgaggaacgtaaggcatggaggaagaaccatccccatggttttgttgcgaaaccagagacgttgcctgatggaacggtcaatttgatggtgtggcattgcacgatccctggtaaagcaggaactgattgggagggtggctacttcccgctcacgctccatttcagtgaagattatcccagcaagcctccaaagtgtaaatttccccagggctttttccacccaaatgtttatccatctggtactgtttgcctttcaatcctaaatgaggatagtggttggagaccagccataactgtgaagca

SEQ ID NO: 231035 - DNA, 455 bp, Gossypium hirsutum
  unsure (1)..(455): unsure at all n locations
atctcaacgaccgcctggcctcctacctggacaaggtgcgtgctctggaggaggccaacgccgacctggaggtgaagatccgtgactggtaccagaggcagcggcccgctgagatcaaagactacagtccctacttcaagaccattgaggacctgaggaacaagattctcacggccacagtggacaatgccaacgtccttctgcagattgacaatgcccgtctggccgcggatgacttccgcaccaagtatgagacagagctgaacctgcgcatgagtgtggaggccgacatcaatggcctgcgcagggtgctggatgaactgaccctggccagagctgacctggagatgcagattgagagcctgaaggaggagctggcctacctgaaaaagaaccacgaggaggagatgaatgccctgagaggncanngtggtggagatgtcaacgtggagatg

SEQ ID NO: 231036 - DNA, 434 bp, Gossypium hirsutum
tcggtttttatttaggccgacgcacatggagaataataatagctccgacgaaaggccgacggtgatggtgacgaacgacgacggaattgacgccccaggactccgagctctagttcgcgtcctaatctcctccaatctatttcgcgtccttgtttgcgctcccgtttcggagcaatcagctgttagtcatagtatcacatggcgtaaccttgttcttgtaaagcaaggtaaattaattgaacccattgtttttgttgttttcgaaccccaactctgtggacctctttgggtatatctaaaaaaacatactctcttgtgcctgagctcggcataacaggcataaacatgggcagcaactgtggttatcatgttgtctactctggcacggatgctggtgctcgagaagcctcttcaatggcatacctgctgtttct

SEQ ID NO: 231037 - DNA, 383 bp, Gossypium hirsutum
  unsure (1)..(383): unsure at all n locations
gatttccctatcgacaaatctcttgccaaacactttccagtgcaacgggaaccacaatcatcgttcgacgcgcctctttcccaaccaaccattgagtttcggtctcaaacaccgtagaaacgagaacaaactcttcacgccacggaatccgccggtgctctccgccgtctccggctctaccggactggaatcttctgcagtgagtgaagatactgttgatttgttggatacggtcacagtgtttgatttgaacggcaatggaatccccatctctgatttgtggaaagatcggaaagctgttgtagcatttgctcgccattttggatgtgtcttttgccgcaaacgggctgattatcttgcctncaagaaggatgtaatggata

SEQ ID NO: 231038 - DNA, 391 bp, Gossypium hirsutum
gtctccgaggctgatatctttgtcaccaccactggtaacaaggacatcatcatggttaaccacatgaggaagatgaagaacaatgccattgtttgcaacatcggtcacttcgacaatgaaattgacatgctcggtctcgagaattatcctggtgtcaagcgcattaccatcaagcctcaaaccgataggtgggtcttccctgaaaccaacaccggcatcattgtgttggctgaaggacgtctcatgaacttgggttgtgctactggccaccctagctttgtcatgtcatgctctttcaccaaccaggtgatcgcccagctcgagctgtggaaggagaaggcaaccggcaagtacgagaagaagtgtacgttttgcctaagcaccttgatga

SEQ ID NO: 231039 - DNA, 434 bp, Gossypium hirsutum
tcggatgaccttggctctgttaatcgccacttgagatcttcaaacaggaagaaaatggggttcattatggaatttgcagagaatctggtgttgaggttaatggaggacccaaaagagagggatagaaaattcagagaacacgtttacactatgaaggatcgatgcgcaaaaaccaaggagatgtggagttatccactgcggccttatgggttttggacatttgagcgccacaatgctcagctccgttgggatcctcagattagccaagtccccggccgcagggatccttatgatgaccttcttcaagacagttatgcgtcctccaccaaacgaaactgaggaatcagaagccattagcagatggtttggagcttgatcttacaaatgggaaagtggacattgaaaactttttttacttgtggtttgaattaaaa

SEQ ID NO: 231040 - DNA, 255 bp, Gossypium hirsutum
tcggtttcagaagaaaaggaaagttctaaggccagcgatgaatgtaagaagtggccctggtttccgttttatagtcctagtccagctcactacttgttctccaagaagtctccggcgagatctttggccaattccactccgaaacggttttttagggagccgttccctccgccttctccggccaagcatattatggcagttcttgctcgacggcacgggtctgtgatgccgaatgagtccgccatacctgaagga

SEQ ID NO: 231041 - DNA, 343 bp, Gossypium hirsutum
ctatagcagcagcagcagcagcagcagcagaagcaaggggtttatagacgaaatggcagcgaaaaggaagactcccgtcaagaccagaaacccagatctgatccgtggtgtgggaaagtattccaggtctaagatgtaccacaagcgtggcctttgggcaatcaaggccaaaaatggcggtgctttcccccgccatgatcccaaacctaaggcccccgctgccgctgagaaacctcccaagttttacccggctgaagatgtcaagaagccgcttcttaacaagcgcaaacctaaacccaccaaactcaaagcaagcattacaccagggactgtgttgattttg

SEQ ID NO: 231042 - DNA, 395 bp, Gossypium hirsutum
gaaagaaagaaaacatgtctcttgtgacagaagagataaaagcgagtgcatcagagatttaccatggagatgagatatgccaagagaaatccaagtttttgttggaggaagtaggcatgccaagggggcttttgccacttagagacatcgaagaatgtgggtacgtgaaggacacaggtttcgtgtggctcaaacaaaagaagagcatcacccacaagttcgaaaagatagggaagctggtttcctatgcaactgaagtcacggctgtcgttgagaaaggcaagatcaagaagctgactggggtgaagaccaaagagcttctggtttggatcacactgagtgatatccaagtggatgatcctcccactgggaagatcactttcaagaccccttca

SEQ ID NO: 231043 - DNA, 369 bp, Gossypium hirsutum
cggacgcgtgggtggcaacgagtgatgccggagtgaaagttttgggcacatgggcgagtccattcgtgatgagggtaaggattgccatgaacatcaagtctgtggcctatgaatttcatcaagagaggttatgggaaggcaaaagcgagcttctcctcaaatcaaacccagttcacagaaaggtccctgtcctcattcatggtgatgacaccatctgtgagtctctcattattgtccaatacatcgatgaggtttggccttctgctcccattcttccttctgatccccatgaacgtgccaccgcccgtttttgggctgcttatcttgacgacaagtggttcccttccttgagagctattggtatggctg

SEQ ID NO: 231044 - DNA, 403 bp, Gossypium hirsutum
ccgttttgttcctttggatctgtgaggcagccgccggttcctttgaccaccaccaccgccacctctctgtgatcaaccttcactctctttttcaaggaaattaactgaaatggctggaggattaatccaccaggttttaaggaggaaatttcaatcacagtctgctgttcaagctttatcatggttttcatcaaggaaagttaatgacgatgcgggttctgctggtatgaggactgttgcactccttggagctggtgtttcaggtttactaggttttgcaacagtagcatctgctgatgaggcagaacacggtttaggagttgcaaattatccttggcctcacgcaggcatcctcagttcatatgaccatgcttcgattcgtcgcggtcaccaggtttaccag

SEQ ID NO: 231045 - DNA, 276 bp, Gossypium hirsutum
  unsure (1)..(276): unsure at all n locations
gggtgatggaagaaacaaaggataaaaagaatgctgtagaggcctatgtttatgacatgaggaataagctttgtgataaataccatgattttgtcactacttcggataaggaagagttaatggctaagcttcaggagacagaggattggttatccgaagatggggaggatgaaactaaaggtgtttatattgccaaccttgaaaagcttaagaagcaaggtgatcctattgaagaacgttacaaagagtattccgagaggngaactatcattgatc

SEQ ID NO: 231046 - DNA, 408 bp, Gossypium hirsutum
  unsure (1)..(408): unsure at all n locations
catttttctgtagcaccccccaaaaagcttgtgcttggatatggctgaaaacccagtaaaatggctgtttctcattctagcaagctgcctgtgtttcgctttcgtcctgtcggaaagcaactcattaataaagaagacctacatcgtccaaatgcacaagtctgcaatgccagcatcattctccagtcctctggaatggtactcatcgaaattaaagtcggtaatgtccgatacccagagtgaaggtgaaggagatggtgaaaataggatcatctatagctaccaaaatgcttttcatggtgttgccgctcagttaactgaagaagaagctgagaggctaaaacaagaagatggtgtagttgctatacttncagagaccaatatgaatacacaccacaagagtctatg

SEQ ID NO: 231047 - DNA, 404 bp, Gossypium hirsutum
  unsure (1)..(404): unsure at all n locations
gaaggatgccatggctgcactcaaccaanaagttatgcggctaggccagtcactttacagcaacctggtgccggaggcagcagtgcaggacctgcagctggtggtgaaaccgggccttcagattcatcaaacaagggtcctgaaggggatgtaattgatgcagatttcactgacagcaagtgaaaaagctcggttttgaatcattctgggtattggtgtgaaaggtgggggattgcattacctgtcatttttgatccatggtggtgaaagaaaacaaatggatttaggatttaatagagtatgaagcagcatatatatatatagaatgtccaaatagtaattaatatagggtgttaagcccttcacttgaacattgttttgaattgttcaatatgcatgccatt

SEQ ID NO: 231048 - DNA, 413 bp, Gossypium hirsutum
  unsure (1)..(413): unsure at all n locations
ggaccacttcttcccttccattttactttgttttagttgccataacgtcaccttccaatacaacccacaatgaggcaacaatatgtcttcactactctcacgttgctcatcctgttttccctcagttgttcaacaacattagcccaagctccggcactggctccagcaccttctggtccgacaaacgtcaccaagatcctcgaaaaagccggtcaattcaccctcttcattcgtcttctaaagtccactcaagtggccaaccagctgctcggtcagctcaacaattccaacaatggtatgaccgtttttgcaccaacggacaatgctttctccagccttaaaatcggcacattgaattcactcaccgatgaacaaaaagtggagctggtgcaattncacatcgttccaacata

SEQ ID NO: 231049 - DNA, 419 bp, Gossypium hirsutum
cggacgcgtgggccgttgaaaaaatatgggtttccaaagaaacatattgggtttccttttcttgatattggcttcactaacaagcctctcttctagccttcctagggaatactccatagtggaacatgagattgacgcatttctttcggaggaaagggtgttggagatcttccaacagtggaaagaaaagaatcagaaagtgtaccggcacgccgaggaggctgagaaaaggtttgaaaatttcaaggggaatttgaagtatatcctatagaggaatgcaatgagaaaagcaaacaaatgggaacaccatgtgggattgaacaagtttgctgatatgagcaatgaggagttcagaaaagcctacttgtcaaaggtgaaaaagcccatcaacaaagggataaccctgtcaaggaacatga

SEQ ID NO: 231050 - DNA, 408 bp, Gossypium hirsutum
cggacgcgtgggttccaaagaaacatattgggtttccttttcttgatattggcttcactaacaagcctctcttctagccttcctagtgaatactccatagtggaacatgagattgacgcatttctttcggaggaaagggtgttggagatcttccaacagtggaaagaaaagaatcagaaagtgtaccggcacgccgaggaggctgagaaaaggtttgaaaatttcaaggggaatttgaagtatatcctagagaggaatgcaatgagaaaagcaaacaaatgggaacaccatgtgggattgaacaagtttgctgatatgagcaatgaggagttcagaaaagcttacttgtcaaaggtgaaaaagcccatcaacaaagggataaccctgtcaaggaacatgaggagaaag

SEQ ID NO: 231051 - DNA, 374 bp, Gossypium hirsutum
acgcatgcataatttcttccggtgatctttgatagagattagctttttaatttttcattatgggaaagatcaagatcggaatcaatggatttggaaggatcgggcgtttggttgccaaagttgctctccaaagcgatgatattgagctcgttgctgttaacgatcctttcatcaccactgaatacatgacgtacatgtttaagtacgacagtgttcacggtcaatggaagcatcatgagcttaaggtgaaggactcaaagacccttctctttggtgaaaagcctgtcacagttttcggtatcagaaaccctgaggaaatcccatgggctgaggctggagctgagtatggtgttgagtctactggtgttttactg

SEQ ID NO: 231052 - DNA, 351 bp, Gossypium hirsutum
gttcaatattttctggtcaacaggaaggcattgcactaagaaggacttttgctgctcttaataattataaagtggatggtaacaaggaaatgatggctatcgggctgatgaacatggatggctcctccacttcttgctacattacaactggcgccttttctcgatcaagcgttaatcacaatgctagagcgaaaagggcagtgactaacatattaatggctactacgggtatggagacccttgtctttctcatgcctttattccagtacaccccaaacgtggtgttgagagctatcattgtgtcaactgttgataggcttatatacattccagcagcctgtccaatttgga

SEQ ID NO: 231053 - DNA, 428 bp, Gossypium hirsutum
aaagctttggcaagttcctggaaacttccttatggaattacattccccgggaaacctgctggccgtttctctgatggtcgtgttttgactgatttcatcgctgggtacttggcgattaagacaccagtgccctacagatacaggaaagaactggggggtcgtctcaagtatgggttgaactttgcttatggaggaaccggtgttttcgacacgccagctcctgagccaaacatgacaacccagatcgatttcttgcaacagcttctcaatgactcggtctaccccaagagggccttgaaaacttctgttgcgcttgtcagtcttgcaggcaatgactactctaattacattgccaccaacggctctactgcgggatttccagtcttcattggaaggggtgtgaaccaaatgaaggtgaacttgaaacg

SEQ ID NO: 231054 - DNA, 373 bp, Gossypium hirsutum
atccccttgtctttcgaaatatggcctcgctctctcttttatcctcactttctcagccatcaaagacaccctttttttcttaagggtgtaaaagatggcagatggtgaggatattcagccacttgtttgcgacaatggaactggaatggtgaaggccggatttgccggtgacgatgctccgagagccgtgttccctagcattgttggccggcctcgtcacaccggtgtgatggttggtatgggccaaaaagatgcatatgttggtgatgaggctcaatctaaaagaggtattttgacattgaaataccctattgagcacggtattgtgaacaattgggatgatatggaaaagatttggcatcatacattttac

SEQ ID NO: 231055 - DNA, 392 bp, Gossypium hirsutum
gtcaaacaaagctgaaaacaagctctaacccacactgtagtctcttcttcctttcatctaaccccccatttttctttctcattttttcagaagaaatggcaaatgaaaagaaaacccaaactggggtttggccaaaaatcaaaccttttgttaatggtggtacctctggtatgttagccacatgtgtcattcaacccattgatatgatcaaggtgaggattcaattgggtcagggatcagctgctactgtcaccaagaccatgcttagaaatgagggtattggtgccttttacaaggggctatcagctggattgctccggcaagctacatacactactgcccgactcggatcattcaaaatgttgacaaccaaagcaatcgaagccaacgat

SEQ ID NO: 231056 - DNA, 396 bp, Gossypium hirsutum
gtttgagctagctagctcttactcaaatggcgaccaaaacgatgatgttgcaaatatttccacttttcttctttttgttcagtggctgcaactccattttccttggtgctaatggagatgacaatggtggttggcaaactgcccatgccaccttctacggtggtgctgatgctaccggcacaatggggggagcttgtggttatggaaacctgtacagtcaagggtatggaacgagcacagcagctttgagcactgcgacttttcaacaatggcttgagctgcggtgcctgctacgagctccggtgcaacaatgatcctcaatggtgcattagtcgaaccataaccgtgacagccaccaacttttgtccacctaactatgctttatctagtgacaat

SEQ ID NO: 231057 - DNA, 301 bp, Gossypium hirsutum
cccacgcgtccgattttgatagtataatatggagaaatggtatggggtttcagggctggtgttggttttgagtttgttctttggggttaaaggagaaccccaagtcccatgttacttcatttttggagattcattggtagataatgggaacaataatgaactttgttcattggctagagctgattacttgccttatgggattgactttgctaatggaccgaccggccggttttcgaacggtcgaactacggtggatgtcatagctgaacttttggggtttgacgattacattcctccatac

SEQ ID NO: 231058 - DNA, 282 bp, Gossypium hirsutum
tctaaagctttggaaggtattggtttatatgggaaatttagatccgttttattatacgaagtttaattaagagcgaattggggatgagtttcccgtgcgataatgatgaaagtcgggatctcaagaagccctttttacataccggaagatggtcttggatgacgtctatgcagcccagggttatgagagcttctgttcaagtccttcgcgatggatcaattttcgtagatctttgggtactcatagatgccttgggccctatccaatttggctttacctggg

SEQ ID NO: 231059 - DNA, 363 bp, Gossypium hirsutum
tatatgttcaccaccactgctgaacgggaaatggtccgtgacatggaggagaagcttgcctatgttgccctggactatgagcaggaactggagactgccaaaagcaactcttctggtgagaagaactatgagttgcctgatggacaagtaattactattggagctgagagattccgttgtccaaaagggctgttgcagccatctctcattggaatggaagctgctggaatccatgaaactacctacaactctatcatgaagggtgatgtggatatcacgaaggatctctatggtgacattgtgctcactggcggatcaactatggtccctggtattgcagaccgtatgagcaaggagatcact

SEQ ID NO: 231060 - DNA, 193 bp, Gossypium hirsutum
gccgagtcgaagaggattcaaacccctttccccacagcaaaaatgaagtacaacccacgagtctcctcctctcgtcgcaaggagccgaaggcccatttcacggcaccctcgtcggtccgccgtgtgttgatgagcgccccactctcattcgatttgaggtccaagtacaacgtccggtccatgccaatgcgca

SEQ ID NO: 231061 - DNA, 425 bp, Gossypium hirsutum
cggacgcgtgggcggacgcgtggggaaaatgaagaagaagaaggatatagttgcagtctataaagggaaataagatatatacctttattattatggcaaaagaaggaaaaatatgatatcagccttgttattcatcattttttctttagattttttttgctttatttgttgtgaaatgtacagatgttggagtttgtagctgaactttagtacttggtagctgcttatttggatctgtagaaaaccatttagatttatagctaattgacctaaagatgacaaagataagtcccgatattgacgaaacaatgctgaaagagtcgattgtggctgtttcagctgatgtgagttttgcttcggaccactttccgaagtataaattaggacctgataatcagattttggaggagccaagaggggataac

SEQ ID NO: 231062 - DNA, 380 bp, Gossypium hirsutum
atttaagggctgctgggaaaagaggacattttcaagttcagacatatgtagcttcaaaaaaaccgatgaagggacatggcagagagatgattcaattgggccttccaattgctgatgcccctctggatgatgaaactgctgccaggacctccaaagtagatcggaaaatagaagccattccttccttgttgcaagatgctattgaacgtttggtcgacttgcaagttattaatgcaaagccagactcttgcatcattgatgtctataatgagggggatcattcaccgcctcgaatgtggccaccttggtttggaaaccctactttcgtcttggtcttgactgagtgtgacattacttttggagggttattggggtgatca

SEQ ID NO: 231063 - DNA, 357 bp, Gossypium hirsutum
ctgactcaagagtcactgaacgagtctagttcggactcagattacccaaaatggcattcacattgaggagtgtgaaagtaccgcccaactcaacgagtttggaagaagcaaggagccgggtcttcgatttcttcagaaaagcttgtcgatcaatccccactattatggatatctataacctagacgacgtcgtcaccaaatccgagctccgttcttacatctcctccgagatccgtaagaactctcatgttactaaccctaaggtaattgatttgctgctgtttaagggtatggaagagctgaacaacattgttgaacatgcaaagcaacggcaccacattatcgggcagtatgtgc

SEQ ID NO: 231064 - DNA, 393 bp, Gossypium hirsutum
  unsure (1)..(393): unsure at all n locations
ggtagatcagatctgtcggtgctcctgcattgtccgcccactactcttccaaatcctcatcatgtacggcagagatccgtggggaggtcccctggagataaacgccactgattctgccactgacgacgacaggagcaggaatctgcaggacctggatagggctgcactctctcgccccttggacgagactcagcaaagctggctgcttggccccggggagcaaaagaagaagaagaagtacgtcgatctcggatgtatcattgtgagccgcaagatctttgtatggaccgtggggaccctgctcgtctccgccctcctggccggactcatcaccctcatcgtcaagactgtcccacgtnatcaccaccgccactctccgcccgataactacac

SEQ ID NO: 231065 - DNA, 377 bp, Gossypium hirsutum
cttctctaaaacatttcccgatgtccaccgtaacagtcgtcagatccccctaacgagccgctgagtctcttgactgtttttttttattgaaatcagtgttagatttttgttccgtacatggcggaggaagacgtcgttcccaaaaccttccgagctctcgtcgagagcgcggaccgtaaattcgcacgagtccgggacttaccgtcgtacggacgagcacaaggccaacactatttccagaaagtcttcaaagcctatatgcggttatggaagtaccagcaagagcaccgacccgagcttgtcaaagccggtttgaaccgttgggagattggcgaaatcgccggtcggatcggccagctgtatttcggccagtacat

SEQ ID NO: 231066 - DNA, 413 bp, Gossypium hirsutum
  unsure (1)..(413): unsure at all n locations
atttatcttattcttcttcttcgctttaggcttttacgctgctggcagaaagctacaataaaccatgccgaagaacaagggaaagggaggaaagaacaggaatagaggaaagaatgaagctgacgattagaagcgtgaacttgtgttcaaggaagacgggcaagagtatgcccaagtgcttcgtatgctaggcaatggccggtgtgaagccatgtgcatagatggtactaagcgcctttgccatatccgaggaaagatgcacaanaaggtttggattgcagctggtgatataattcttgtccggcttcccgactatcangatgacaaggctgatgtgatccttaagtacatgcccgatgaagcaaggctcttaaaggcatacggtgagctttcagagaacactcgtcttaatg

SEQ ID NO: 231067 - DNA, 415 bp, Gossypium hirsutum
gagagctggtactacttgaaagatgccgtgctggaaggtggaattcccttcaacaaagcctatggtatgaccgcattcgagtatcatggcacggatcctagattcaacaaggttttcaacaggggaatgtctgatcactctaccattaccatgaagaagattcttgagacctatgatggctttgagggactcaaaacactggtcgatgttggcggcggtactggagctacgcttaacatgcttgtcaccaagcacccttctataaagggcatcaactttgatttgcctcatgtcattgaggatgctcctgcttatcctggggtggagcatgttggtggagacatgtttgaaagtgttccaaaaggagacgccatcttcatgaagtggatatgccacgattggagcgatgagcact

SEQ ID NO: 231068 - DNA, 410 bp, Gossypium hirsutum
  unsure (1)..(410): unsure at all n locations
ccacttcttcccttccattttactttgttttagttgccataacgtcaccttccaatacaacccacaatgaggcaacaatatgtcttcactactctcacgttgctcatcctgttttccctcagttgttcaacaacattagcccaatctccggcactggccccggcaccttctggcccgacaaacgtcaccaagatcctcgaaaaagccggtcaattcaccctcttcattcgtcttctaaagtccactcaagtggccaaccagctgctcggtcagctcaacaattccaacaatggtatgaccgtttttgcaccaacggacaatgctttctccagccttaaatcgggcacattgaattcactcaccgatgaacanaaagtgcagctggtgcaattccacatcgtcccaacata

SEQ ID NO: 231069 - DNA, 351 bp, Gossypium hirsutum
cttccatgaaggactggagaggtggtagagctgcttccttcaatatcattcctagcagcactggagctgccaaggccgtcggcaaagttttgccagcactgaatggcaagctgactggaatggctttccgtgttcccactgttgatgtctctgtggttgacctcactgtgagacttgagaagaaggctacatatgatgaaattaaggctgctatcaaggcggaatctgaaggcaacttgaagggaattcttggttatgtggacgaagatttagtctcaactgacttcatcggagacaacaggtcaagcatttttgatgccaaggctggaattgctttgaatgacaactttg

SEQ ID NO: 231070 - DNA, 419 bp, Gossypium hirsutum
gggaaaggtacaagtgggatgcatggaaggctgttgaagggaaatcaaaggaggaagcaatgggggattatatcaccaaagtaaaacaactgtttgaggctgctggaagttcttgatgtgtgtgtgtatggccaatgaaaatggtgtaatttcaagcccttgtttgttacttggggttttcattactatgaataaattatgtactctttttctattgctatatgttatttatagtagaaactccttgatttacttttattcttgtggttattacaaaggagatttttacacaaggatggtaatggaacggagcgagagcaattgcatgaattgtctcatccatttatatatgttatgttatgaatgtcacattgttaccatgtactctttttcatgttatttccaatggtgatgaaccg

SEQ ID NO: 231071 - DNA, 371 bp, Gossypium hirsutum
gtttcgatgatggatgggaaagtcggtggggaaaatctgactggaagaaagatgacaacatggctggggaatggaattacacttctggaaaatggagtgggaatcttaatgacaaaggtattcaaactagtgaagactacaggttctatgctatttcggctaagttcccagaagttaacaacaagggcaagactctagtcttccaattttctgtcaagcatgagcagcagcttgactgtggtggtggttacatgaaactactcactggtgacattgaccagaagaattttcgtggtgacaccccatacagcattatgtttgggcctgatatctgtggaagcacaaagaaagacatgctattcttcattaca

SEQ ID NO: 231072 - DNA, 248 bp, Gossypium hirsutum
atgtcccagatgcagacgcatgtctctgacacctccggggtcctctccatggacaacaaccgcaacctggacctggaacagcatcatcgccgaggtcaaggcccagtatgaggagatcgccaaccgcagccggaccgaagctgagtcttggtaccagaccaagtatgaagagctgcagcagacagctggccggcatggcgatgaccttcgcaacaccaagcatgagatctctgagatgaaccggatga

SEQ ID NO: 231073 - DNA, 316 bp, Gossypium hirsutum
acggtgaagaaaaaaatggttggtgtgttttaggttagtgaagggggtatccgggaccaagtggctttggttcagcctccaccgcccaagaggttaccgaaaggattgatggaaccaacttgactgctctagttaccggaggagcaagtggaattgggttggaaacttctagagtattggctcttcatggagtccacgtcatcatcggtgcaaggaacatgaaagccgcgaatgaagcaaagaacaaaattgttagagagaacacaagagcccgtatagatgttctggagctggatctgtggtctactagttcaat

SEQ ID NO: 231074 - DNA, 345 bp, Gossypium hirsutum
cttcactcccgtcctcacatttcccaacaaaaagcgaaggaaatcattttcatcaatcccccccatcacccttctttatctttcccacggaaacgaagagcaaatcagaaaaccttgtgaagaaaaaatgagggaaatcttgcatatccaaggaggccaatgtgggaaccagatcggggctaagttctgggaagtcatatgcgatgagcatggaatcgacaacactggaaagtataacggtgactccgatctccagctggagcgtatcaatgtctactacaatgaagccagtggcggtaggtatgtccctcgcgctgttctcatggatcttgaacctggcactat

SEQ ID NO: 231075 - DNA, 374 bp, Gossypium hirsutum
cccacgcgtccgatttatacgttaatggctacttgctttttatcatcatattggttaaagcaacagttcatcattgttgtctttctctttaccgtaatatccagcatcagtttaccggtgaatggatgtttcacatcgattttcagcttcggggattccatgtcggataccggcaactcaattgagatttcagttttggaaaccggcaagctttctgacggtgcttttcctccaaatgggcggaccttcttccaccgtccaactggccgcgcttgcgatggccgcttggttatcgatttccttgctgaagctttgggattgccatttcttccaccatattatcgatataaaaatggaacatcatataaatttga

SEQ ID NO: 231076 - DNA, 303 bp, Gossypium hirsutum
cagcaactaaagctttgaggaaatggcgttggctttcgatgagtacgggagacccttcattatactcaaagagcaagaccagaaaaccaggctgagagggatcgatgcccaaaaagccaacatttccgctggcaaagccgttgcccggatcctccgaacctctctcggacccaagggcatggataagattctccaaagccccgatggcgatgttaccatcacaaatgacggggcaacaatattggagcagatggatgttgacaaccaaattgctaagttgatggttgaactatctcggagtca

SEQ ID NO: 231077 - DNA, 422 bp, Gossypium hirsutum
ggaaaagttctgaattaagcaccgttctacaacattttattcgtgcatgtaacaatatgttgaataaaagggctgatcttgaaacttttgctgaagaactctcatttactttggactggattgtgaactattgcgttactcctaaggaagcttcgagtgcgagggataagatcaaaagacattttggttggaatgattcacaaagtgaaaaagaagttgcttatgcaagccatggtgtggaatcagatgtgacccacatttctaaagaacaaacatcacttgtagactcctttgcttctttgcctgatcagagtcacagtgttatccccccactggaggaagaaaacaagagattaaaagatgatctgaaggatatgaaaacgaggctggagtcagaaacagacaagagtgaggccctgatg

SEQ ID NO: 231078 - DNA, 365 bp, Gossypium hirsutum
cttcatctctctgtatctctttgagtgacttctttttagttctctctccggttccacctccgttcacttcgaaaaatggcctctcacattgttggatatccccgcatgggacctaagagagagcttaaatttgctttggaatctttctgggacaacaagagcagtgccgaggatttgcaaaaggttgcagctgatctcaggtcatccatctggcaacaaatggctgctgctgggatcaagtacatcccgagcaacactttctcttattacgaccaggtgctcgatgcaacatcgatgcttggagctgttccacctagatatggctggaacggtggagagatcggatttgacacttacttctcaat

SEQ ID NO: 231079 - DNA, 426 bp, Gossypium hirsutum
ctattcttcacaaaaaagaaaaaaaaaaatacagtgaaaatggcaacccttaaggttccagctcatgtacctgccccttctgaggatgctgagcaacttcgtaaagcttttgaaggatggggtacaaatgagcaattgattatcgacatattggctcacaggaatgcagctcagcgcaatttgattcgtaaaacttatcgtgaagcttatggggaagatctccttaagtctttggatgaggaactttcaagtgactttgagcgagctgtggtgctgtttactttggaccctgcagagcgtgatgcatttctggctcatgaagctacaaagaggttcacatcaagccattgggttctcatggaaattgcttgcactaggtcttcacatgaactgttcaatgtgaggaaggcgtatcacgatctttac

SEQ ID NO: 231080 - DNA, 425 bp, Gossypium hirsutum
  unsure (1)..(425): unsure at all n locations
ttccagatcaagagattttcaagtgtttggacagttttgagagtgggagggaaaaaaaatggagaggagcactccagttaggaagccacatacttctacagcagatctgctcacttggtctgagactcctcagccggacaccgccaccttcgccgctcgctccgtccgacctcaccagccgtcggatgggatcagaaaagtggtgtttggaggccaagtaactgatgaagaatttgaaagcttaaacaaacggaaacctccttctggatataaaatgaaggagatgactggtagtggtatttttgcagccaatgtagaaaatgatgagtccgaaccaggcagtgccaatcctgcttcaaacaacaagacgggattacgaatgtaccangaagcactagctggaattagtcacatttcttttgctg

SEQ ID NO: 231081 - DNA, 354 bp, Gossypium hirsutum
ccaaaactgaaaacaagcgttcagaacacaggcattatcaatagcttacatcatcattctcttccatttcaattcagtttctcacaaaacccaaaaccttgcctttccctccctcaatcatccaatggcggagctgaaactctccgagagccgagacctgacccgaatcgaacgcattggggctcattcccacatacggggcctaggcctcgactcctctctggagccccgtgacgtctcggaagggatggtgggccaagcacaagctcgtaaagctgccggtgtcatcctccaaatgatcaaagacggtaaaattgctggccgtgctatcttattagcgggccaacctggaac

SEQ ID NO: 231082 - DNA, 429 bp, Gossypium hirsutum
attggtaccatggactatatcattgacacagtgtctgcggtccatcccctacttccactgcttagtctgctgaaggtgaatggaaaattggtcactgtgggattgcctaataagccactcgaattgcctgtttttcctttagtcatgggacggaagcttattggaggaagtgatgttggagggatgaaagaaactcaggagatgctagacttctgtgccaagcacaatatcactgcagatatcgagctgattcggatagaggaaatcaatacggccatggaaaggcttgctaaatctgatgtcagataccgatttgtgattgatgtggcaaattccttgtcacagtagggttcattgtgaaggaactagtccagtaagtttaaagattatgatcttaatggagaagagaaaacagatgaactttgatgg

SEQ ID NO: 231083 - DNA, 400 bp, Gossypium hirsutum
aattgagacagctaagctccatcctccacttttcactcccaccagatcgcgtcttcttcctccactattggtgctgttgttgtttcagagttaagtgtttgctggacaaaagcaggagaataaaaacatgtctaacttttacaatcagacgagagcagcctcgtctctgatgagacgccttaaacgaagcctcatcaatccaactgctgtcagtcgcgctagatgtttcaccaccgccgagggccaccgacctagccttgtccacaagcgcagcctcgatatcctccacgatccatggttcaacaagggaacagcattttccatgacggaacgagatcgtctggatcttcgtggcctgcttcctccaaatgtaatgtcttccgagcagcaaattgaacgc

SEQ ID NO: 231084 - DNA, 425 bp, Gossypium hirsutum
cggacgcgtgggaaaagaaaagaaaaattacagtgaaaatggcaacccttaaagttccagctcatgtacctgccccttctgaggatgctgagcaacttcgtaaagcttttgaaggatggggtacaaatgagcaattgattatcgacattttggctcacaggaatgcagctcagcgcaatttgattcgtaaaacttatcttgaagcttatggggaagatctccttaagtctttggatgaggaactttcaagtgactttgagcgagctgtggtgctgtttactttggaccctgcagagcgtgatgcatttctggctcatgaagctacaaagaggttcacatcaagccattgggttctcatggaaattgcttgcactaggtcttcacatgaactgttcaatgtgaggaaggcgtatcacgatctttac

SEQ ID NO: 231085 - DNA, 348 bp, Gossypium hirsutum
gcggcattagcaaccatagccatggattgctcaccgaaactctggggtatgtctatcctgtggctttttgccctcttctccatgcaaaaccgtgctagagaggactttagcaaattcccaagagttaacatcgctgagaaagagacagcctcccgagagcagaagcgcgagaccttagtttcccagaccacccagaagccccaagaacaagagccaagggtcattcctgaaacccaaaatggttatggtctttacggccacgagtcaaggtcaagccgggccaggttcaccaccaaagaaacctatgaaccctatgtcacccctcgtagattccaccctgatgagccc

SEQ ID NO: 231086 - DNA, 342 bp, Gossypium hirsutum
aacaaagtgaaatattgctgagagtttgtggagatgagtgccttgagtgagggtcttacccaaattctgatccctttagcttccttggtgggcattggttttgcagtgcttcaatggtttttggtctctagggtgaagctctcatcacaggattcaagcaatggatataaacaaaaactgattgaatctgatgaagaagaagagggtattaacaatcttgagatttccatcaagtgtacggagattcaacatgccatttctgttggagcaacctcttttctctttactgaatacaagtatcttggtatcttcatgtgtgtatttggggctatcatattcctc

SEQ ID NO: 231087 - DNA, 371 bp, Gossypium hirsutum
cccacgcgtccggtactttagaaaaaagaatctactgcgtctccaaatggcccttcgatcattagccaccaggaaaaccctaaccttggctctcaagtccaccaggttggctcagtctcgagccttgcagaccttctcgctccccgatcttccgtacgactatggggcactcgagcccgccatcagtggagagatcatgcagctccatcaccagaagcatcaccaaacttacatcactaactataacaaggctttggagcagctccatgacgctatccagaaaggtgattcttccaccgtcgttaagttgcaaagcgccatcaagttcaacggcggaggtcatatcaaccactcaattttttggaagaatc

SEQ ID NO: 231088 - DNA, 433 bp, Gossypium hirsutum
gagaaaccgaaggggaaggagacagagagcggcactgcaaaaaaaaaatgtctgcaacgggaaacgtcggcggcggaggaccagaggaggataagaagccggccgatcaagctaatcacattaatctcaaagtcaagggccaggtttttactttttacgtcatttagatcatctctgttgtttttcttttcgattttttttcttcttttcatttatttgttttttgatctcgtttttgtaggatggaaacgaagtgtttttcaggattaagagaagcactcaaatgaggaaactgatgaacgcatattgcgataggcaatcggtggatctgaactccattgctttcttgtttgacgggcggaggctccgtggagagcagactcccgatgaggtaaatttccttacgtgttctcgatgttccgaaatgatatac

SEQ ID NO: 231089 - DNA, 389 bp, Gossypium hirsutum
cgaaaagacctacggtgtccctcgtcgtcgtctcaccggtcactctcacttcgtccaagacgttgtcctctcttccgattctcagttcgctctctctggttcctgggatggtgagcttcgtctctgggacttatctgccggtatctcagctcgccgttttgtcggccacaccaaagatgttctctccgttgccttttcaattgacaaccgtcaaattgtttctgcttctcgagatcgaactatcaagctatggaatacccttggagaatgtaaatacacaatccaagaaggtgacgctcataccgactgggttagctgcgttcgtttcagcccaatactcttaacccaccattgttcagctcatgggacagactgtaaagttggaacct

SEQ ID NO: 231090 - DNA, 368 bp, Gossypium hirsutum
cccacgcgtccgccctaaagtgcgcctctcccaatttcttcttcactttgaagtttgagcagatcggatggttcgttcatccaaggtggtcaatgtgggaactagatcagggctaatttctgggaagtcatatgcgacgagcatgaagttgacaacactggaaaatataacggtgactccgaccttcagttggagtgcatcaatgtctactacaatgaagccagtggtggaaggtatgtcccacgcgctgttctcatggatctggagcgctattctcatggatctggagccgggcactatggattccgtcagatctggtccttttggacaaacctttctccccgataacttcatcttcggacagtctg

SEQ ID NO: 231091 - DNA, 415 bp, Gossypium hirsutum
  unsure (1)..(415): unsure at all n locations
gtggtcattggtttgtggcacaacaccatgtatgatatgtggttcaggagaaattgaaggagccttattgaaatacttgggggttgagcgcaatgaggtaacaaagacggtttattctctgttggagaaatggaatgtatgggatgttgtgtaaatgctcctatgattgcagttgctgattacaccaatggatttgaaggatataagtataattactatgaagatgttactactcaatgagttgttgagatagttgcagtgggattttgccaagagaactgatgcctcaaagtgttactgcaaggcttccaacctcagaggagctcgatgcctatgcacatgagcaatgggagctttgtaagcaatgtttcttgctgcaacttataagttcangacaagctgaaaaatcaacgag

SEQ ID NO: 231092 - DNA, 411 bp, Gossypium hirsutum
ctcgaagcttccttttccgttttagatctcaaaattcaaaaggctctctttttcatctcatggctgctactattgtctccgtcaaagctaggcagatcttccacagccgtggaaatcctacggttgaggttgatgtggaaatatcgaacggtataaaggctagggccgcagttcctagcggtgcatccactggaatttacgaggctcttgagttgagagatggaggttccgattacctcggtaaaggtgtatcgaaggctgttgctaatgttaacacaatcatcggccctgcattgattggaaaggacccaaccgagcagactgcaattgacaatttcatggttcaacaactggatggaacccaaaatgagtggggttggtgcaaacaaaagctcggtgcaaatgccattc

SEQ ID NO: 231093 - DNA, 427 bp, Gossypium hirsutum
  unsure (1)..(427): unsure at all n locations
ctcaacattgcgtacaatgtttcccctcatggaagataagaagagccttgcttcagcgaatgagctcgctgaggttgaaggtaaggcttctttgatggctgctgttgattattacgtgagccttaaaagtgacatcttcatctctgcttctcctggaaacatgcacaatgctctgcttggacatcgagcttacttgaacttgaaaaccattcgaccgaacatgttactgctgggcccactattcctgaacaaaaccatagagtggtctgagtttcagcatgcggttattaatggacataaaaataggcaaggccaaacgaggttaagaaaggagaagcaatctatatatacatatccagccccagattgcatgtgtagagcttaaacttcgtaaacattatggtatgaagctantttatgtgtcttt

SEQ ID NO: 231094 - DNA, 400 bp, Gossypium hirsutum
atcaccttcactataaaaaaccctttcctttattttgggttctttttccttctaaatttttggttttttttttctctttttaattatgaatccatagcagagagatcatagaaagaaggcttgacctttgattgatctcgcaataaggaagtttatttttttaatttaaaaaaatgctttttctttttaagttaaaaagattttaaaagacccaaaaaaagtataaaaaaaatgtctgttgcagagctgaaagagaagcacgcggcggcgacggagacagttaataatctaagagaacgattaaagcaaagacgtcaacagttgctcgacactgatgttgctacatatgcaagatcacaagggaagagtccagttacttttggtcctacggatctggttt

SEQ ID NO: 231095 - DNA, 343 bp, Gossypium hirsutum
agccgcccaagagagagtcgagaaaggaaaacagagagcaagagaaaatgaagaccatactctcatcagagaccatggatatccccgatggggtcaacatcaaagtgaaggctaaaatgatcgaggttgaaggtcccaggggtaagcttacacgtaacttcaagcacctcaacctcgatttccacctcaccaaggacgaggagacgggcaagcgtaagctcaggatcgaggcctggttcggtactaggaagaccaacgccgacatccgtaccgccctcagccacatcgagaatgtcatcaccggtgtcaccaaaggttaccggtacaagatgaggttcgggta

SEQ ID NO: 231096 - DNA, 425 bp, Gossypium hirsutum
aaaaaaactcctactctctcactttgctctcttcttgttcctgtcctctttcaccaaactatcgccgacaacctctccaaaagaatggcatatgaagggattctgttggggatgggtaatcctctccttgacatttcgttagtcgtggacgaagagttcttgaaaaaatatgatatcaagttgaacaatgcaattttagctgaggagaaacaccttcccatgtatcaagaaatggcatccaagcccaatgtagagtatattgctggaggtgctactcaaaattcaatcaaagttgcacagtggatgcttcaaattcctggtgcaactggttacattggctgcattgggaaggacaagtttggggaggaaatgaagaagaactcaaaagctgctggtgtaatgttcaatatcttgaggatgaaact

SEQ ID NO: 231097 - DNA, 404 bp, Gossypium hirsutum
cccacgcgtccgcttttttttcttttcgactttcggctactgagtcaccaaacgagttaaggaaaagagagacaagtttcaccaaaccatggggtcgatccccgatcctggcgagttgaccgagttaacccagccgagtttcgatgagttccagcgtcaaacgtctctgatgacgagctgtactctcctctggaaagaactgtcggatcacataaattcacttgagcagaacctgataaagcagtcggagaccttgaaacgcaaaatcgaggcactggactcggagaccaaggcttcactcgactcactcaagaagcgggaactcagtatcgaggacagtgtcaagatcgcactcagccgagtcgagttcaacaccaaagctgccatgaggacccttggcgatg

SEQ ID NO: 231098 - DNA, 436 bp, Gossypium hirsutum
cggacgcgtgggcggacgcgtgggcaaaaatggatggttattgtagcagaagggtaatcatgtttttggtgtttgcatttgcagcaataagcagagggtatggacaagaatcaaccactcttgttcctgcaatcatcacctttggtgactctgtggtagatgtgggcaataatgactatctccctaccatcttcaaggctaactatcctccttatggacgggactttgccaacaaaaagcctactgggaggttttgcaatggaaaattagccactgacatcactgctgaaactctggggtttacaacttatccaccagcttaccttagcccagaagcatcagggaagaaccttctgcttggagccaattttgcttcagctggctctggctatgatgacaaagctgccatggtgaatcatgccatcacattgaccca

SEQ ID NO: 231099 - DNA, 445 bp, Gossypium hirsutum
cccacgcgtccgaaaaaagaagaagcagtgagagagtagcgaagcgcctccctccgcctccaggttgaaggtataatgaaggagatagtgtcgccgggatatcattagaagatagcggctgtgatcaatttgttgagcacaaatttacctgctcgacacaagccaatcaccgtaagaatagttgtaaaggctggttatgaagaaataaagtcctgctcattttatagggagttgtcttttgttggaggtgtcatagtgttaggagagagatatagccagaatgttacctggggattcctcgcatcattcgacatctgatagcgggccttctagaaattctcaagataagcaagaggaagtccgtcgttggtatttttcaagaaaagaaatagaagaaaattccccatcaagaatggatggtattgatttgaagaaagagacatac

SEQ ID NO: 231100 - DNA, 454 bp, Gossypium hirsutum
tccggtctttagggctccttccaaagacacggagtcttgatttggatacgctctaacatttgtccgtacagataattcatactaaagatttaaccggaaaccaaagccatggaaatgtccaacgatctcgataggttgctctttttcgagcaagctcgtaaaatttccgaggctacttacgcttccaatcctctcgatgccgataatttgaccagatgggccggagctttactggagttgtctcaattttcaaagcgttccagattctcagaaaatgattcaagatgctatttcgaaactagaggaggctttatctattaaccctagaaagcatgatgctttatggtgcttgggaaatgctcagacttcttttgcgtttctgactaacaaggaggacgaggcaaggccttatttcgaaaaggctgctcaatatttccagcaagcagtcgatgag

SEQ ID NO: 231101 - DNA, 420 bp, Gossypium hirsutum
cggacgcgtgggttgatacacgccctcatttattttatttttcaaacaaattttcccttcagttttcgtataatttcctaggaaaagaaaaatgagagagtgcatttcagttcacattggtcaggccggtattcaggtcggaaatgcttgctgggaactttactgtctcgagcatggcattcagcctgatggccaaatgccaagtgataagactgttggtggaggagacgatgctttcaacacctttttcagcgaaactggtgccgggaagcacgtgcctcgcgccatctttgttgatctggagcctactgttatcgatgaagtgaggactggtacgtaccgccagttgttccaccctgagcaactcatcagtggcaaagaagatgctgccaacaatttcgctcgtggccattatacaat

SEQ ID NO: 231102 - DNA, 407 bp, Gossypium hirsutum
gcggagtcctagctgcagggacagaaaaggaacgtttgatatcaggagaagatgcggcttgttgcatttgcttggcaaactacgtggatgacgatgagctgagagagctgccatgtgaccatgtcttccatgtggagtgtgtagataaatggttgaaaatcaatgcctcttgtccgctgtgtaaaagcgagattggtgagagcagcgctgctttaccattggctagagattcgaattaacaaaagcatgggaagaggatgtgcaaggaaaaccggttggagatgggacaatgtgtttaatgcttttggtgctcgactcctgctgcagtttatgcgtgtgtttaacattacattacatgcaaaatccttgaagagctttactttgttctacaaattcttgcatttttt

SEQ ID NO: 231103 - DNA, 448 bp, Gossypium hirsutum
cggacgcgtgggttcagtttcagcgtctctgtcaacaacaagttgttttttattttcttcctatttttttttttgcttaaacaaggttaacaagagatggcggatgaggatattcaacctcttgtgtgtgacaatggaactggaatggtcaaggctggttttgctggtgatgatgcccctagggcagtcttccctagtattgtcggtcgtccacgccacacaggtgtcatggttgggatgggtcaaaaggatgcttatgtaggtgatgaagcccagtcaaagagaggtatcctcactttaaagtaccctatcgaacatggcattgtcagcaattgggatgacatggagaagatttggcaccatactttctacaatgagcttcgtgttgcccctgaagagcatccagtacttcttacagaagcaccactcaaccctaaggcgaataggg

SEQ ID NO: 231104 - DNA, 445 bp, Gossypium hirsutum
aacagccattgggaatcccctgctttaaatttctatattccacaaaaatagcgtaacagagcaagaaacacagagaaaaggaaaaccccataatcatggctcgattaacattggtctcctccatcatccttatgctatgctgctttgccgcagcatcaactttcgaggattccaaccctattcggatggtatccgacggtctccgtggctacgagtcctctgttcttcgtgtcattggccatacacgtcacgctatctccttcgcccgttttgcttacaagcatggaaggaagtacgagacggtggaggaaatgaagcttcggtttcagattttcaaagagaatttggatttgatccgatccactaacaagaaaggcttatcttacactcttgctgttaatcagtttgctgattggagctgggacgagttccaaaaacacaggct

SEQ ID NO: 231105 - DNA, 447 bp, Gossypium hirsutum
cggacgcgtgggcttgcaagagccgtcgcaaacagaactgatgcttgcttcattcgtgttattggaagtgagctcgttcaaaaatatgttggtgaaggagctagaatggtccgagaactgtttcagatggcacgatcaaagaaagcatgcattgtgttctttgatgaagttgatgcgattgggggtgcacgttttgatgatggtgtaggtggagacaacgaggttcaacgtaccatgcttgaaatcgtgaaccagctcgatggcttcgatgcccgtggaaacatcaaagttctgatggcaacaaacaggccagacacactagaccctgcatcattacgtcccggacgattagatcgtaaggttgagtttggtcttcctgatttagagtctcggacacagatattcaaaatccatacaagaacaatgaattgtgaacgcgatattaga

SEQ ID NO: 231106 - DNA, 431 bp, Gossypium hirsutum
ctcacctttcttctgagatagcgaccggaactcggtgtttgtcttcccttgaatctatcttctcatcctttcttttctaaaaggaagatggcatttagtgggacgatagataaatgcacggtttatgataagactgttcacttcgttgatttattaactgctgatgggattccttatcataagacctgcttcaaatgcacccattgcaatggcttactcgtgatgagcaactattgttcaatggaaggagtgctttattgcaagcctcactttgaacaactcttcaaagaaactggcacttataccaagaatttccaatccaaaaaatccgacaagccaaatgggcagacaaagactccgaacagacttgcagccttcttctcaggcacacaagataaatgcggagtctgtaacaaaaccgcgtacccctt

SEQ ID NO: 231107 - DNA, 429 bp, Gossypium hirsutum
accaacttggtcccttacccaagaatacacttcatgctttcttcatacgctccagtcatctccgctgagaaggcttaccatgagcagctatcagttgctgaaatcaccaatagtgcctttgagccctcatctatgatggccaagtgtgatcctcgccatggcaagtatatggcttgctgtttgatgtaccgtggtgatgttgtgcccaaggatgtcaatgctgctgttgccaccatcaagaccaagagaactattcaattcgttgactggtgcccaactggattcaagtgtggtatcaactaccagccaccgactgtcgttcctggtggtgatcttgctaaggtccagagagccgtttgcatgatttccaactcaaccagcgttgctgaggtgttctcccgcattgaccacaagtttgatctcatgtat

SEQ ID NO: 231108 - DNA, 437 bp, Gossypium hirsutum
ctgactttcacatacatttccatcattcttttttcacactttttttatataattttgatagtataatatggagaaatggtatggggtttcagggctggtgttggttttgagtttgttctttggggttaaaggagaaccccaagtcccatgttacttcatttttggagattcattggtagataatgggaacaataatgaacttcgttcattggctagagctgattacttgccttatgggattgactttgctaatggaccgaccggccggttttcgaacggtcgaactacggtggatgtcatagctgaacttttggggtttgacgattacatccctccatactcaactgcaagtggtagacaaatactgggaggagttaactatgcatctgctgctgctggaatcagagaagaaactggacaacaactgggagctcgga

SEQ ID NO: 231109 - DNA, 187 bp, Gossypium hirsutum
cgtttgtttaaaattttcgaaaatgataccgacccaaggggacagcccataggtggactggtgggaaggctccaaggaagcaacttgctaccaaggctgcccgtaaatctgccccaaccaccggtggtgtgaagaagcctcatcgctaccggcctggaactgttgcttttcgtgaaattcgaaagta

SEQ ID NO: 231110 - DNA, 252 bp, Gossypium hirsutum
gttatttttgagggggtcttaataaacgccttcgattaactttcggtttccattaacttctttatttttacgtttttgaatttttagtaagcgaaaatgaaagagtgcatttcagttcacatcggtcaggctggtttccaagtcggaaatgcctgctgggagcttaactgccttgaacatggaatccaccctgatggccaaatgccaagtgacaaaactgtcggaggaggtgataatgcttttaacaccttt

SEQ ID NO: 231111 - DNA, 447 bp, Gossypium hirsutum
cccacgcgtccggcaaagagtgatgccgaagtgaaagttttgggcacatgggcgagtccattcgtgatgagggtaaggattgccctgaacatcaagtctgtggcctatgaatttcttcaggagaggttatgggaaggcaaaagcgagcttctcctcaaatcaaacccagttcacagaaaggtccctgtcctcattcatggtgatgacaccatctgtgagtctctcattattgtccaatacatcgatgaggtttggccttctgctcccattcttccttctgatccccatgaacgtgccaccgctcgtttttgggctgcttatcttgacgacaagtggttcccttccttgagagctattggtatggctgaaggagaggatgcaattgtctcctttccggtttttctaaataaaagtatggcatttttaccccaaaaaaaaaaacaaaaa

SEQ ID NO: 231112 - DNA, 450 bp, Gossypium hirsutum
  unsure (1)..(450): unsure at all n locations
gttcccgggtattgcggacagaatgagcaaggagctttctgcactcgctcctagcagcatgaagatcaaggttgtcgctccacctgagcgaaagtacagtgtctggatcggaggctcgatcttggcttccctcagcaccttccaacaaatgtggatcgcaaaggctgagtatgatgaatcaggtccagcgatcgtccacaggaaatgcttctaaaatgcccataccatgaaagagagaagtactgtttcattgtttcttgatgcagcttggaactttgctttgttctaatggatttgttatccttctgtgtgttttcatgttggagtgaaacaatgaactttgagaaagccagtgatttgatttttgttccaattctttgaatctcagacaactttttctgatctttntactataatttccatcgcatactgtctccactatgttacatg

SEQ ID NO: 231113 - DNA, 446 bp, Gossypium hirsutum
  unsure (1)..(446): unsure at all n locations
gattaaaagaatatataagaaagaaaagatttccaatctgtaatcagtgctagggttctttggattgatgataatgatggggcgttttgcgcttcttgtcttcttagagttcgcgtcgatgcagcttctctgcattgccgctgatcatgatgctgcgattttttatgattcatttgaagagccattcaatgggcgatggatcgtctctgaaaaagatgattataaaggtatatgggagcattcaaagagtgaagggcacgatgactttgggcttctagtgaccgagaaggcacggaagtacgcaatagtgaaagagctggaggagcctgtgaatctcagggatggaaccactgtgcttcagtacgaggctcgcttccagaatggacttgaatgtggggtgcattacctgaataccttagacctcangaaagctggtggaagcctaa

SEQ ID NO: 231114 - DNA, 376 bp, Gossypium hirsutum
gcaaaagccaacctgcaatgtgccttctttgggttttcgaaattgggcaattgacctttttttttgcctataaaaacccatcaaaaacagatcaatttttcatcatctcttcatcaactcaaagaaaaaattgagtgtcagtttgaaagtgttcttcagatatggctatgaaacaagttgctaattctgctatcaaagcaattgccaattctgggtcatcctctcttcttaccagacaactccatgcttctccagggagcaaaaagattgttggggtgttttacaaggccaacgagtactttacgaagaatcccaacttttgtggttgtgtggagggagccttggggttgcgcccatggctggaatcacaggggca

SEQ ID NO: 231115 - DNA, 415 bp, Gossypium hirsutum
cccacgcgtccggccgagtcagaagaagagtgtgctcggcttgtacggctccttcctccaaccgaagctgctctactggattgggcaataaacttaatggctgatgttgtacaagtggaacatttgaacaagatgaatgcacgcaatgttgccatggtgtttgctccaaacatgacacaaatgtccgatcctttaactgcattgatgtatgcagtccaggtgatgaattttctaaagacccttattattagaacacttaaaggaagagaagattctatggtagactctgctcctgtctctcgcttagagccgtctgataagaatggacagcaaagctcttcacaactactcaaagatgccagtgaggaggttaaaaacgaaagcaaaggagagaaagcttttgtgggtcaagaac

SEQ ID NO: 231116 - DNA, 355 bp, Gossypium hirsutum
gccaagccttataggcttgtataagaaagtaagtaccctccagatttggccagtctttttagatgagaactttattaaaattgtttgtacattgataaatttcagatctgggaggcttctttcagctgtccatcatgattttcatctggtgctaggaatttgattaagcgtattcttgatccaaaccctcttacccgtataactattcctgaaattctacaagatgaatggttcaagaaagggtacaagccaccaaaatttgagcaagatgaggatgtaaatcttgatgataatatcttgtattttacatggttatgatatctttatatttaatctaatttttattatttatttt

SEQ ID NO: 231117 - DNA, 349 bp, Gossypium hirsutum
gggaaagattatgtgggttggaattatgaaaagactggaaatcctgtgtatctgcatattaagcaaacgaaaaagttggtttctgaagataggcctttgaagaaacccactctgttggctattggtgttgatggtggatttgacaacaatgaactagaatatgaagaaactcacaaaattgtcattttgcctagctatgcaactcttccttttccatctgtggagttgcctgagaaggtaaggttggcagttgatgctattttaatggctgagggtgctgaacggaaagagcaagttgcagcctggacagctgataagaagcaaataagtgcatatgcaatggagttgc

SEQ ID NO: 231118 - DNA, 382 bp, Gossypium hirsutum
aacaaaaatggctgagttgaaatctgacaatttgcttgagatgatgaagtttcatttgggtactgatgctggtaaagagcttactaagaagattggtcttgtttaccaactcaatattgcccccaagaaattgggggttgatgaggttacttacgttgttgatctcaagaaaggagatgttatcaaaggtgaatatgaagggggaaagcctgatgttatattttcattcaaggatgatgattttcttaagattgccactgggaagatgaatccccaggttgcttttatgaggggtttaatgaagattaaggggagcttgagtttagctcagaaattcactcctgatattttcccaaagcctgctaagatgtgaactaagatg

SEQ ID NO: 231119 - DNA, 381 bp, Gossypium hirsutum
ggcaaagagtgatgccgaagtgaaagttttgggcacatgggcgagtccattcgtgatgagggtaaggattgccctgaacatcaagtctgtggcctatgaatttcttcaggagaggttatgggaaggcaaaagcgagcttctcctcaaatcaaacccagttcacagaaaggtccctgtcctcattcatggtgatgacaccatctgtgagtctctcattattgtccaatacatcgatgaggtttggccttctgctcccattcttccttctgatccccatgaacgtgccaccgctcgtttttgggctgcttatcttgacgacaaggtatatgcatttgtgctttattcatataaaaagaagttattttttatgtgataattttt

SEQ ID NO: 231120 - DNA, 334 bp, Gossypium hirsutum
  unsure (1)..(334): unsure at all n locations
attttccttatagattgtaaaaagttgggtaaagcaattaacacgtcaaaaagggctacacagatcaaatggtggaagaagcaaatgctgtcattttcacttttggatcttaccggttaagggtgcatggacctggggctgacataaacaccctgtgtgttgggccatcttatgtgaaccgtgaggaagatttcttcatcattttgcgtgatattttggctgaaatggaagaagttactgaacttcaacccgttccagatgctcatgtcccagtaatgaaatttaagttccaagggatatcaatngatcttctttatgctagtatttctctttt

SEQ ID NO: 231121 - DNA, 167 bp, Gossypium hirsutum
gcaaaacttggccaaggccattttcaccgagaaaggagggaccaccaaggaaaaccagagcaacaactactacaacggcaacaatggttacaacaatgccgagaagcagggcatgagcgatactaggtacttggagaatggaaagtactactatgacgtcaagagtg

SEQ ID NO: 231122 - DNA, 425 bp, Gossypium hirsutum
caagatcagaataagaaaaacgctgcttgcaggtatgtcatcatccgataagccagaattagttgaaagggatgttaaggacaaggtggatgacaaagaagacaacagtggatttatagacaaggtcaagggtttcattcatgacattggtgagaagatcgaggaaacaatcggctttggcaagcctactgcagatgtagctgagattcacctcccttgtatcaatcttgagaaagcagaaattgtcgttgatgtcctcataaagaacccaaaccctgttccaatccccctcgtcgacattgactacctcattgaaagtgatggtagaaaactcctttcaggcttgattccagatgctggaaccatccatgctcatggtgaggagactgtcaaaataccagtactttgtatatgatgatatcaaa

SEQ ID NO: 231123 - DNA, 428 bp, Gossypium hirsutum
aacgctctctcatcctgcttctggtcaagccaatctcaaaagactccccttttagctcacagctctctcgagttctgtaatgggtaaggagaaggttcacatcaacattgtggtcatcggccatgtcgactctgggaagtctacaaccactggtcatttgatctacaagcttggtggtattgacaagcgtgtgattgagaggtttgagaaggaggctgctgagatgaacaaaaggtcatttaagtatgcatgggtgcttgacaagcttaaggccgaacgtgaacgtggtattaccatcgatattgccctctggaagtttgaaactaccaaatactactgcactgtcattgatgcccctggacaccgtgacttcatcaagaacatgattactggtacctcacaggctgactgtgctgttctcattatcg

SEQ ID NO: 231124 - DNA, 407 bp, Gossypium hirsutum
cccacgcgtccgtcttcccttccttgtatctttattttctcgcctttgacgaggagccgacgctaccatggttcacgtcagtttctaccgcaactatgggaagacctttaagaagccacgatgtccgtatgagaaggaacgattggatgctgagttgaggcttgtaggagagtatgggctccgatgcaagagggagctgtggagggttcagtatgctttgagccgcatccgtaatgctgctagggaccttctcactcttgatgagaagaaccctcgtcgtatttttgaaggtgaagcccttcttcgtaggatgaacaggtatggacttttggatgagagccagaacaagcttgattatgtcttggctttgactgttgaaaacttccttgagcgtcgtttgcaaactc

SEQ ID NO: 231125 - DNA, 333 bp, Gossypium hirsutum
gctctcttttccttgtcaccaaaaaacatctttctggtcaattcaatcctccttttttctattcaaccataatgtcttgcttcattagcaaatacgccgatgagttggctaaaaacgctgcttacattggcacccctggaaagggtatccttgctgctgatgaatccaccggcaccattggcaagcgtctttcaagcattaatgtagaaaatattgaagaaaacaggcgtgctctccgtgagctcctcttcactgctccaggagctcttcagtacctcagtgggttattctcttcgaggaaaccctttatcaaaaaaccgcttcgggcaagcc

SEQ ID NO: 231126 - DNA, 305 bp, Gossypium hirsutum
aagcaaaggcaatagaaaatggcagaaaacgaagacattcagcctcttgtttgtgacaatgggactggaatggtcaaggctggatttgctggagatgatgctccaagagctgtattccctagcattgttggtcgcccacgtcacactggtgtgatggtcggtatgggccaaaaggatgcttatgtgggagatgaagctcaatcgaaaagaggtattttgactttaaagtacccaaattgagcatggtattgttagcaattgggatgacatggagaaaatctggcatcataccttctacaatgagc

SEQ ID NO: 231127 - DNA, 393 bp, Gossypium hirsutum
catttgatccccccttttctgttgccggaactgagagtcccagatccgattaaaaaaaatgaaggtgatagataagatccagtctttctcacaggaccaagggaaagtggttttttcctttgagttcttccctccaaagactgaggatggagtggacaacctgtttgagagaatggatcgaatggtggctcataatccatctttttgtgacatcacatggggtgctggtggttccactgcggatctcactttggacattgctaacaagatgcaaaacatgatatgtgtggaaacaatgatgcatctcacttgcaccaacatgcctgttgagaaaattgaccatgctcttgagaccattaagtctaatggcattcaaaatgttcttgcccttag

SEQ ID NO: 231128 - DNA, 408 bp, Gossypium hirsutum
gcagggctctatgactagggtttcgaactttccttgattttttttttctgaaatcgctgctttcgaaggcaatatgagacccattttctgtggaaactttgagtatgatgcacgtcagtctgatttggaacgactcttcagaaaatttgggagaatcgaaagagtagatatgaagtctggatttgctttcatctatatggaagatgagagagatgctgaagatgccatccgagcacttgatcgaacagaatttggtcagaaaggacgtaggcttcgtgttgaatggacaaagcatgagcgtggcattagaaggcctgagggtgggggtggtggatcaagaagatctgcagcaaacacaagaccttcaaagactttatttgtcatcaattttgatccttatcacactcg

SEQ ID NO: 231129 - DNA, 350 bp, Gossypium hirsutum
gaccacttcttcccttccattttactttgttttagttgccataacgtcaccttccaatacaacccacaatgaggcaacaatatgtcttcactactctcacgttgctcatcctgttttccctcagttgttcaacaacattagcccaatctccggcactggccccggcaccttctggcccgacaaacgtcaccaagatcctcgaaaaagccggtcaattcaccctcttcattcgtcttctaaagtccactcaagtggccaaccagctgctcggtcagctcaacaattccaacaatggtatgaccgtttttgcaccaacggacaatgctttctccagccttaaatcgggcaca

SEQ ID NO: 231130 - DNA, 401 bp, Gossypium hirsutum
aaaatactttgctgcaaattctcctaattttttcagaaaatctaacacaggggaaaaaatgagagagatccttcatgttcaaggtggacaatgtgggaaccaaatcggttccaagttttgggaggttgtttgcgatgagcacggcatagatccaactggaaggtacattggttcctcggatctgcagttggagcgtgttaatgtttactataacgaggcttcatgtggtcgctttgttcctcgtgctgtgctcatggacttggagcctggtacgatggacagtgtccgaactggtccttacggccagattttcaggccagacaactttgtttttggacaatccggtgctggaaacaattgggccaagggccattacactgaaggagccgagcttatcgatg

SEQ ID NO: 231131 - DNA, 170 bp, Gossypium hirsutum
  unsure (1)..(170): unsure at all n locations
cttaaacaagatctgngcaaaatggcggatgctgaaaactctcttctaggagaaaccacttgtggttctttattgcagaaactgcaggaaatttgggatgaagtgggtgaaagtgatgaaaagagagacaagatgcttcttcaaatagaacaagagtgcttggatgtgta

SEQ ID NO: 231132 - DNA, 410 bp, Gossypium hirsutum
cccacgcgtccgggttcagaaaagaaaaatggccaccattgatgttcctgagcaggtttcggttcttgcagatgcaaaagctcttaaaaaggcttgtaaaggatgggggacagatgagaaggcaataatttcagtgttgggtcacagaaatgcagttcaaaggaagcaaatcaggcttgcttatgaagacctttaccaggaagatctcatcaagcgtcttgaatcagagctttctggtgatttcgagaaagcagtgtatcgttggatattggatccagcagaccgagatgccgtgttagctaatgttgccataaagaaattaagccctgatcaccatgtgatcgttgaaatttcatgcaccagatcccctgaagagctcttggctgtgaggagagcttatcaggctcgat

SEQ ID NO: 231133 - DNA, 401 bp, Gossypium hirsutum
caaatttccaaacactagttttcttttactgcattttgctaagacaagccgagaaacaaagtgaaatattgctgagagtttgtggagatgagtgccttgagtgagggtcttacccaaattgtgatccctttagcttccttggtgggcattggttttgctttgcttcaatggtttttggtctctagggtgaagctattatcacaggattcaagcaatggatataaacaaaaactgattgaatctgatgaagaagaagagggtattaacaatcttgagatttccatcaagtgtactgagattcaacatgccatttctgttggtgcaacctctttcctctttactgaatacaagtatcttggtatcttcatgtgtgtatttggtgctatcatattcctcttcct

SEQ ID NO: 231134 - DNA, 405 bp, Gossypium hirsutum
ccggtgatagagggagacgagaaaggggaaacaacaatggtgtctttgaagcttcagaagcggcttgccgctagcgtcctcaagtgtggtcgtggcaaggtctggttggaccctaatgaaatcaatgaaatctccatggccaattccaggcagaatgttaggaaactggtgaaggacggttttatcatcaggaagcctacaaagattcactcccgttcacgtgcatgtaggatgaaggaggccaagagaaagggccgacactctggatacggtaagaggaagggtacaagagaggcaaggttgccgacaaaaatcctttggatgaagagaatgcgtgtcctgaggcgattgctttgtaagtatagagaatccaagaagatcgacaagcacatgtaccatgacatg

SEQ ID NO: 231135 - DNA, 393 bp, Gossypium hirsutum
cttaacaaagcaaaggagaatctctctaagctggaggagagatctaaattgaaacctgggattcccaagaaggatgggaagattgactacactcaagacttctttgcccgccaagcttttttgacagtttctgggcaactgcaggttgaaacatatgcttgtgctgttagtaacgtgtatacatttgggccaacttttcgggctgaacactctcacacttcaaggcatttggcagaattttggatggtagagcctgaaatagcatttgcagatctacaggatgacataactgtgccgaggcttatgtgaagtatatgtgcaattggttgcttgataaatgccttgacgatatgcaattcatggctaaaagttatgataaaggttgcattgatc

SEQ ID NO: 231136 - DNA, 400 bp, Gossypium hirsutum
gtggccagttctcttggaacatatttcttatctgggatttctttaatatcccgggatatgctcaatgtgtacagaatgtacagtgagcttatatcaagtagtattgcagaaggtgtaccctttgcttcaaaaacatcctatgtgaaacttctacgatctgttaagagggagactcttaagctcattgagacatttttagataaggcagaagatcaaccgcaaattgggaaacaatttgtgcccccaatgatggatccagttcttggtgattatgctaggaatttgccagatgctagagagtctgaagttttatcactttttgctacaataataaacaagtacaaagctgcaatgatagatgatgttccccgtatatttgaagctgttttccagtgcacgc

SEQ ID NO: 231137 - DNA, 406 bp, Gossypium hirsutum
gatagcgatatgaccgagggtcaaactaatgatttctcgagagacatagcggagttgcggaagcggcagaagacggggatcgtgagcgagaggaagaggaaggatagggaggaaggtggtggaggagaggacggggatggaggcggcggagaagaagagctgagtggtgatggtggatcaagcggagtcgatatggacaaggacttgaaaagaatgaaggcgaatttcgatgagttgtgtggtgaagataagattctggtgtttttcaagagattgttgaatgagtggaatcaagagctggatgagatgggtgaggctgagaaaaggacggcgaaaggcaagtccatggtcgccacgtttaagcagtgcgctcgttatttgaatcccttgttcaagttttgtagga

SEQ ID NO: 231138 - DNA, 409 bp, Gossypium hirsutum
ctttcgctttctcgcctccgagaagaagccgacgccgccatggttcacgtcagtttctaccgcaattatgggaagacatttaagaagccaaggcgtccatacgagaaggaacgtttggatgctgagttgaggcttgtaggagaatatggtctccgatgtaagagggagttgtggagggttcaatatgctttgagtcgaatcagaaatgctgctagggatcttcttactcttgatgagaagaaccctcgtcgtattttcgaaggtgaagctcttcttcgtaggatgaacaggtatggacttttggatgagagtcagaacaagctcgattatgtcttggctttgaccgttgagaacttccttggacgccgctttgcaacacttgtgttcaagactggtatggccaagtcaa

SEQ ID NO: 231139 - DNA, 404 bp, Gossypium hirsutum
gttattttgccttttcgctatcgtctttgcctatcaactccacggcgcagatccgaggagtctctatttctcaatccaaacaaccgctctaaacactctcttcttttattgctcctactcttccagtcatggcaggtttggcaccagaaggatcccaatttgatgctcgtcaatatgaccagaaaatgactgagctgctccagaccgatggagatgactttttcacaagttatgatgaagtttatgacagttttgatgcaatgggacttcaagagaaccttctgaggggtatctatgcatatggttttgagaagccttctgctattcagcaaagaggaattgtaccattttgcaagggtcttgatgtgattcaacaggcacaatccggaactgggaaaacagcg

SEQ ID NO: 231140 - DNA, 403 bp, Gossypium hirsutum
gtggtttaagggatttttttcattcgtttggtctcacgctcgattaccttacaaaaagagaaaatgaccaagtgttacccaactgtgagcgaggaataccagaagtcagttgaaaaggccaagaggaagctcagaggtctcatcgctgagaagaactgtgctccactcatgctccgtttagcgtggcactcagctggaacttttgatgttaagaccaagaccggaggtccattcggaaccatgaagcatcctgctgagctcgcacatgctgctaacaacggcctagatatcgccgtcagacttctcgagccgatcaaggagcagttccctaacctcacctacgctgacttctatcagcttgctggtgtcgttgccgttgagattactggtggacctgaaattc

SEQ ID NO: 231141 - DNA, 406 bp, Gossypium hirsutum
ctcatttcaagggagagagtgtatcagtgtttcttcggctctttacttaatttctctccgccatggctctctccgtcgagaaaaccgccgccggccgtgagtacaaggtcaaagacatgtctcaggctgacttcggtcgtctcgagatcgagttagctgaggttgaaatgcctggtttaatggcttgtagaaccgagttcggccctgcccaacctttcaaaggagccaaaattactggttctcttcacatgaccatccaaaccgccgttcttattgaaacccttaccgccctcggagctgaagtccgttggtgttcttgcaacattttctctacccaagaccacgctgccgctgccatcgctcgtgactccgccgctgttttcgcttggaaaggggagaccctcca

SEQ ID NO: 231142 - DNA, 400 bp, Gossypium hirsutum
gtttcacatgcacgttacagtaagagtaacccaatagcaagatggcatgtttgtcaaggttcaattaatagcattgctttctcccatgatggggcatacttagcaactgttggaagagatggctatctgcgagtttttgactattctaaagaacagctcgtatgtggtggcaaaagctattatggtgctctactatgttgcgcttggagtatggatgggaaatatattctgaccggaggtgaagatgacttggttcaagtttggagtatggaagatcgaaaggttgtggcatggggtgaggggcacaactcatgggttagtggagtggcatttgattcgtattggtcatcacctaattctgatggcacaagggagactgtgatgtaccggtttggttctg

SEQ ID NO: 231143 - DNA, 274 bp, Gossypium hirsutum
acgtttaacatgcacgttacagtaatattaacccaatagcaagatggcataattgggaaggttcaattaataacaatgctttatcccatgatggggcatacttagcaactgattaaagacatagccatctgcggagaatagacacattcaaaaaacggctattatggagcaactgcagatatttgggcttgtggagtaattcttcttgaactgcttgctggctacttaccatttgatgatcgtaaaattgtgtgtttatacaaaaaggtttgca

SEQ ID NO: 231144 - DNA, 193 bp, Gossypium hirsutum
gcgtttaacaaagcaaaggagaatctctctaagctggaggagagatctaaattgaaacctgggattcccaagaaggatgggaagattgactaccctcaagacttctttgcccggcaagcttttttgacagattctgggcaactggcggttgaaacatatgcctgtgctgatagtaacgtgtatacatttgggc

SEQ ID NO: 231145 - DNA, 402 bp, Gossypium hirsutum
gattagggttccttcattattctatttaggaaattttaattttcaacttgttttcgtttattctcttcgattttgggttaaaccctagaaggctcctcgcgaaaacgtcagatggcaactttagctgattcattccttgcggaccttgatgaattatcagacaacgaagccgatgttctggaggaagaaaataatgatgtcgcaaacatggaagaagatattgatggtgacctcgcggatatcgaaacgcttaactacgatgatctggacagtgtttccaaattgcaaaaaagtcagagatacattgatattatgcagaaagtggaagatgcgctcgagaagggttctcatatatcaaatcagggcatggtactggaagatgatcctgagtatcagctgatt

SEQ ID NO: 231146 - DNA, 399 bp, Gossypium hirsutum
cggacgcgtggggttctaaactgtttaaattaacaagagaacaaaagttcgtagagaattatagaccaacagctaactgttctttaacaaagcaatcttaccagattaggctctgattcattttttggtaatagctacttgcaaataagggctatgatggagcaactgctgatatttggtcttgtggtgtcatcctttttgaactgcttgctggctacttaccatttgatgatcgtaatcttgttgttttatacaagaaggtttgcatgtgcatatagaagaataaccttcatcaggtacaataaggtacctttcactgatgtttctacttctgtgaagatatctggagcagaatacacatgtccgccatggtttacaggacctcagaggaagctgatt

SEQ ID NO: 231147 - DNA, 405 bp, Gossypium hirsutum
gttggtggtgtggagttggagctcatagcaatagctacgggtggaaggattgtaccaaggttccaggagttgaccccagaaaagttgggaagggctggtttggtcagagagaagtcttttggcaccacaaaagataaaatgttgtacattgaacactgtgcaaattccagggctgtaaccatatttattcgtggaggaaacaagatgatgatagaagagacaaagcgcagtatccatgatgcattgtgtgtggccaggaatctcattcgcaacaattctattgtctatggtggcggctcagctgagatttcttgctcaattgctgtggaggcagctgcagataaatatccaggagttgagcagtatgcagtccgggcatttgctgatgctttagactcagtcccc

SEQ ID NO: 231148 - DNA, 355 bp, Gossypium hirsutum
ggtggattggtttcctagggattgaaaagaaattgaaagaaatacataggagaagagatgaatatcttcagaatttagtagatgggataagattaaatataagtaagaagaatttttcgctgattgaaaggcttctgtctcttcaacaagacgaccctgacttctgtcccgatcaagtcatcaagaccatggttttgatgatgttcattgcaggaactgaatctacggctattacaatggagtggacaatggcactcctgctgagtcatccagaggctttgcagaaggcaagagacgagatcattcgccatgttggacatgagcgcctgctaaatgaatcagatcttcccaaact

SEQ ID NO: 231149 - DNA, 432 bp, Gossypium hirsutum
cggaccggtatttcctggctggacccacccatccggtgggtaaaacagaggagacccacttgaacgggggtgaaaaccagcatacaatggaggaggagtccttgaaaatatctttgccttgtcaggaacctcaaagttaggcgttcaaagaaagtcttgaagtatggcttatcgatcttaaacgaccacatagaacgatctgctcttggccctgaagaatggactctatatgagcagctagctattgctgctatggattgccaatgtctcgatgttgcaaaggattgcataaaggttttgcacaagaaatttccggagagcaaaagggttggcaggctggattgcatgttgcttgaagcaaaaggatcctgggctgaggcagaaaaagcttactcaagccttttagaggacaatccacttgatcaagtaata

SEQ ID NO: 231150 - DNA, 406 bp, Gossypium hirsutum
cggacgcgtgggcgtaatggacaaccaacagaccgggggtgctggtgccgccaccaccggttcttccacaagcagcgacccagcaataaccagcccaatcaacagatgccttttccgaaatttggactctttggttctctcatttatggacgctgctctctctactcacgttcattccattcgtcaagctcaccaccaacaatttttccgtggaaactccgtcgtggactaaagggttcttggcggatattcggatcctattcgctatcaacttaggcttctcaagcaaggctcagggtccaagagaatgtcacgcgctatgctcggaattatgctacactctttatactgttcttctcttgatatctgtatcagctgaaacttgcacttgttgggaagatatcaa

SEQ ID NO: 231151 - DNA, 402 bp, Gossypium hirsutum
aaaagaatgactttgagtaggttctggggttggtttcttatccacattgctctgtttttaagcttgtgttatgctgaggatccatttgttttctatgattttgaggtcacttacatcactgcttctcctttgggtgttccccaacaggttattgctataaataacaagttccctggccctactatcaattcaactaccaacaacaatgttgtcgtcaatgttcgaaacaaattggacgaaagtttacttatgcattggtctgggattcaacagaggcgtagttcatggcaagatggagttcttggcactaattgtccaattcctcctaagtggaattggacttaccagttccaagttaaggaccaaattgggagtttcttttatttcccatcactgcatttt

SEQ ID NO: 231152 - DNA, 399 bp, Gossypium hirsutum
gtctcttcactcttgagtccagtattctaaggtgcatttttccatctactttccgtcactttcccgagaaaatgagagaaatcgttcacgttcaaggtggtcaatgcggcaaccaaattggagccaagttttgggaagttatctgcaccgaacatggaatcgactcaacgggtcgatacaacggcgactcggagcttcagctggagcgtatcaacgtttactataacgaaacaagttccggccgctttgttccacgcgccatcttaatggatctggaacccggtactatggacggcgtaagatccggtccgtttggacaaattttccgacccgataacttcgttttcgggcaatccggagctggaaataattgggctaagggtcattacaccgaaggag

SEQ ID NO: 231153 - DNA, 328 bp, Gossypium hirsutum
caaaaaacatctttctgttcaattcaatcctcctttttctattcaaccataatgtcttgcttcattagcaaatacgccgatgagttggctaaaaacgctgcttacattggcacccctggaaagggtatccttgctgctgatgaatccaccggcaccatcggcaagcgtctttcaagcattaatgtagtaaatattgaagaaaacaggcgtgctctccgtgagctcctcttcactgctccaggagctcttcagtacctcagtgtgttattctcttcgaggaaaccctttatcaaaaaaccgcttcgggcaagcccttcgttgagttttg

SEQ ID NO: 231154 - DNA, 402 bp, Gossypium hirsutum
cggacgcgtgggcaagtttttttttggttgggtagaatcaaatagataatgttcaggaaccaatacgataccgacgtcactacatggagcccggcgggccggttgttccaagtggagtacgcgatggaggccgtgaaacaaggctcggcggcgatcggactccgatctaagacccatgttgttttgggttgcgttaacaaggctaattccgagttgtcttctcaccagaagaagatcttcaaagtcgacgaccatatcggtgtcgccatagccggtctcaccgccgacggacgcgtcctatctcggtatatgcggaacgagtgtatcaactatagcttcacgtacgattcgccgcttcccgtgggccgactcgttgttcaactcgccgataaagcccatgtc

SEQ ID NO: 231155 - DNA, 405 bp, Gossypium hirsutum
gttttggttgccatttgagtaagagctggctagctcaaacaattggctgacctaaacgatgatgttgcaaatattttcacttttcttctttttgttcagtatctgcaactccattttccttggtgctaatggagatgacaatggtggttggcaaactgcccatgccaccttctacggtggtgctgatgctaccggcacaatggggggagcttgtggttatggaaacctgtacagtcaagggtatggaacgagcacagcagctttgagcactgcacttttcaacaatggcttgagctgcggtgccctgctacgagctccggtgcaacaatgatcctcaatggtgcattagtcgaaccataaccgtgacagccaccaacttttgtccccctaactatgctttatcta

SEQ ID NO: 231156 - DNA, 400 bp, Gossypium hirsutum
cccacgcgtccggttcctcaatctctctaatcctcactttcttccccatcaaacacaccttcgattttcccaaggttgtagaagatggcagaaggtgaggatattcagccacttgtttgtgacaatggaactggaatggttaaggctggatttgctggggatgatgctccccgagccgtattccctagcatcgttggtcggccacgtcacaccggtgtgatggttggcatgggccagaaagatgcatatgttggtgatgaagctcaatcaaagagaggtattttgactttgaaataccctattgagcatggtattgggagcaactgggatgatatggaaaagatttggcatcataccttttataatgagcttcgtgttgccccggaagagcacccagttc

SEQ ID NO: 231157 - DNA, 448 bp, Gossypium hirsutum
cgcctggggcaccgccgggcaattatgggcgggacccacgcgtccgcgaagagagatgaaagacaatccagttcgccggggggagcttgctgcctacttcacccactgcaaccttcaactgcctcacctcagacttgctctgctgaatccaatgaccatctgctataaggctaagaaccttgctacagcaggtaactttgcccggcgactactagaaacaaaccccacaaatgagaatcaagcaaagacagcatggacaagtgctccaagctgcagagaggaagatgacagatgcctctcagctgaactatgacttcagaaacccattcgtgacttgtggggcaacttatgtgccaatttaccgaggacagatggatgtatcctgcccatattgcactgctcgcttcgtccctagccgggatgggcaattgtgtgctagatgtgatat

SEQ ID NO: 231158 - DNA, 398 bp, Gossypium hirsutum
ggcgtcttgatacacgcccccatttattttatttttcaaacaaattttcccttcaattttcgtataatttcctaggaaaagaaatatgagagagtgcatttcagttcacatcggtcaggccggtattcaggtcggaaatgcttgctgggaactttactgtctcgagcatggcattcagcctgatggccaaatgccaagtgataagactgttggtggaggagacgatgctttcaacacctttttcagcgaaactggtgccgggaagcacgtccctcgcgccatctttgttgatctggagcctactgttatcgatgaagtgaggactggtacgtaccgccagttattccaccctgagcaactcatcagtggcaaagaagatgctgccaacaatttcgctc

SEQ ID NO: 231159 - DNA, 419 bp, Gossypium hirsutum
atgtggctctgtgtcatcactcacctgggagaggagaatcagtagggagactagaaggtgggtagattgggaagctgcgctcaggtaactccagattgttggctctttccccaggacgtggatgctgcctacatgaacaaggttgaactgcaagccaaggcagacactctcacagacgagatcaacttcctgagagccttgtatgaagcagagctgtcccagatgcagacccacatctcagacacatccgtggtgctgtccatggacaacaaccgcaacctggacctggacagcatcatcgctgaggtcaaggcccaatatgaggagattgctcagaggagccgggctgaggccgagtcttggtaccagagcaagtacgaggagctgcagatcacagcgggcagacatggggacgacct

SEQ ID NO: 231160 - DNA, 398 bp, Gossypium hirsutum
ttaggtcagccaattgtttgagctagctggctcttactcaaatggcaaccaaaacgatgatgttgcaaatatttccacttttcttctttttgttcagtgtctgcaactccattttccttggtgctaatggagatgacaatggtggttggcaaactgcccatgccaccttctacggtggtgctgatgctaccggcacaatggggggagcttgtggttattgaaacctgtacagtcaagggtatggaacgagcacagcagctttgagcactgcacttttcaacaatggcttgagctgcggtgcctgctacaagctccggtgcaacaatgatcctcaatggtgcattagtcgaaccataaccgtgacagccaccaacttttgtccacctaactatgcttta

SEQ ID NO: 231161 - DNA, 298 bp, Gossypium hirsutum
ggggttaaaggaaacttcgaattcttggatagcatataactcgcattaatacatagaaaaacaggaaaacctcgtaaccacactaaaccattatagtttggtcataaacatttattcaccaggaaattgtctcaagatatcaaattcaattctccacatgtcctgcaagtaccagcagcaatttttcatagtctccatgagtgtccttgacaatggcacgagtcactgggacactgttccttcgctggtactcatctgctatgatctttaaatcaacctcagccctagtgcaaacaac

SEQ ID NO: 231162 - DNA, 310 bp, Gossypium hirsutum
aaaaacagtttcatttccattctaagtttgtgtttttgatttgccttttgtgggtttttttttataaaaaagttcagcaaaaatgtttattgagaattttaaggtggagagccccaatgtgaagtacacagagaatgaaattcagtttgtttacaactatgaaactacagagcttgttcatgagaacaaaaatggaacctatcaatgggttgttaaacccaaaactgtcaaatatgaattcaagactgatatccatgtccctaaattgggggtgatgcttgtgggattgggggggaaccaatggttcaac

SEQ ID NO: 231163 - DNA, 206 bp, Gossypium hirsutum
gctttgtcgccgccatgccgcaaggggattacatagagctacacaggaagaggcatggttaccgccatgacttcttcgagaagaagcgcaagaaggaagctcgtcaagtacacgagcgttcagctaaggctcaaaaggcgctgggtattaagggtaagatgattgcgaagaaaaattatgctgaaaaggccctcatgaaaaaaaca

SEQ ID NO: 231164 - DNA, 405 bp, Gossypium hirsutum
aggggctgtattttccagctctacaggaatcagctgatccgccataaagatttcttgttcctttgctgtcatacatagggaaaacatgaccccctccttctttccaagaaaaaacctccttacctcatccatcttctccctcctatttataaattccccagcgcatctcaacattcatacaaacttttaaattcctttgaaaaacatagtatattgtcattaggagtcaatggcagggattggtaaaacggctccagatttcgaggacttattgccggcgatggcggagaagctggggggagacgggctgatgagggagttgtgtaatgggttcaagctgttgatggacgaggagaaaggggtgatcactgcggcgagcttgaagaggaacgctgctgtgctggg

SEQ ID NO: 231165 - DNA, 408 bp, Gossypium hirsutum
caagaacatgcaagtcactattgcctttaatgactggggtgaaggccttgtccaaagaatgccacgatgtagacatgggtatttccacgtggtgaacaatgactatactcattgggaaatgtatgccattggaggaagtgctaacccaacaataaacagccaagggaatagatttactgcacctaacaacagattcagcatagaggtgaccaaacatgaggatgcaccggagagtgaatggaagagctggaattggagatcggaaggtgacctaatggtaaacggtgcattctttatcgcgtcgggtgctggcacctcgtcgagctatgccaaggcttcaagcttgggtgctaggccatcttcactagtggcaacgataactaccaatgctggtgcgcataattgcaa

SEQ ID NO: 231166 - DNA, 354 bp, Gossypium hirsutum
  unsure (1)..(354): unsure at all n locations
tttggatatgttgctcccgagtatgctatgacggggcatctacttgttaagagtgatgtttacagttttggggttgtgcttcttgagcttttaaccggaaggaaacctgtggatatgtcccaacctcagggacaggaaaatctcgtaacttgggcacggccactactaagcagtcgggaaggtgtataacagttggtagatccttccttggctgggacatataactttgacgacatggctaaggtggcagccatatcgtacatgtgtgttcaccctgaggtgactcacagacctnttatgggtgaagttgttcaggctctgaagcttatatacaacgacactgacgaaactggc

SEQ ID NO: 231167 - DNA, 213 bp, Gossypium hirsutum
cccacgcgtccgtgatcttgttaatgaagtcgtgaataaatatcgtttgatatttgtgagtagtgctggtaatagtgggccagcattgagcacagttggtgctccaggtggtacctcttcaagcatcataggagttggtgcatatgtctctcctgcaatggctgcaggtgctcattctgtagttgaacctccacccgaaaggcttgagtacac

SEQ ID NO: 231168 - DNA, 413 bp, Gossypium hirsutum
cgtcatttgacgctaactcaaacagtattgaaaatccaaaatttgaaatttgaaagtacagggtttaggatttcaaatataaaattcataaaattcctttcacggttgatttgaaaagagctcctctgcctttcagttttgggaaaatcccagtagacctcaactcaactcaagtgctcatataaacgaaagaaatgagcactgtagttcatagaactccaaaatcggggagacagtcattgttttaccaagatttggcctcaccgatctctgcccggagagggaaattctctagtcctggtcaagcggctgctgtctcagctttatggcaggagaattttggaggttcagatcttccacctcctccaatgtacaccttggaggaccgttcagatttttctcctgaatctggt

SEQ ID NO: 231169 - DNA, 404 bp, Gossypium hirsutum
aaataaagtcatggcaactgtgataattcaaagcattatgaagaacaaaactcgtatctctactgcagacagggttgaggcgttgtttgaactgataaaaggtcttattaaggatctggatgatgcttttcatgatgaggttgatgaagatgatttcaaggaggagcagaattctgtagcacgtcttattcagttgttgcatagtgatgaccctgaagagatgtttaagataatatgcacggtgaggaagcatatcttgggtggaggaccaaaacgcctacccttcactgtccctccccttgttttctcttcacttaagttggttcggcaattacaaggccaagaggaaaatccttttggagaagaggaatcaactacacccaagaaaatattccaggttttga

SEQ ID NO: 231170 - DNA, 404 bp, Gossypium hirsutum
caaaaatggttactttcaggtttcaccagtgccaagttgttggaagggctcacccaacagagagcgatgagcatcccaagatctataggatgatgctctgggccaccaatgaggttcgggccaaatccaagttctggtacttcttgaggaagctgaagaaggttaagaagagcaatggtcaagtccttgccatcaatgagatatttgagaagaaccctaccaagatcaagaattatggtatatggctccgctaccaaagccgtaccggttatcataacatgtacaaggaataccgtgacactactctaaacggagctgttgaacaaatgtacactgagatggcttctcgccacagagtccggttcccatgtatccagattatcaagactgcaactatcccagcc

SEQ ID NO: 231171 - DNA, 393 bp, Gossypium hirsutum
gtttaagcttttccagtttagcttgaatcaaccaaaactcccaaatcttggaaattgggagaagatggcagcaccaacgctggagatggagccagttgagcgacagtcattgaagaagctcagccttaaatccctaaagcgcgctctcgatctctttagccctatccatggccaattatctgctactgaccccgaaagcaaaaaaattcgcatgagccacaagataaatgttgagtattgtgggattaaaaccgcctcgggtcagacttgtaggcaatctaattccggtgcagctgataccgggaatcaaggttctgtgccatcgaatgcccttgctcttgcaggtccagctgattctagggattcacagaagggaggagctcaaaatgcttt

SEQ ID NO: 231172 - DNA, 411 bp, Gossypium hirsutum
cttttatatttttcctctccaattttccgtcactttcccgagaaaatgagagaaatccttcacatccaaggtggccaatgcggcaatcagataggagccaagttctgggaagtcgtatgtgccgaacatggcatcgattcaacgggtcgatatggtggtgactcggagctccagcttgagcgaatcaatgtttactacaacgaagccagttgtggccgttttgttccccgcgcagttttaatggatctggaacccggtaccatggatagcgtaagatccggtccttacggacaaattttcagacccgataacttcgttttcggacagtcgggcgccggaaacaattgggctaagggacattacactgatagagcggagcttatcgattccgttctcgacgtagttagaaag

SEQ ID NO: 231173 - DNA, 392 bp, Gossypium hirsutum
gcagaagctgctcatggtactgttacacggcatttcagagttcaccaaaagggtggtgagaccagcacgaacagcatagcatctatctttgcttggacgcgtgggcttgcacacagggcaaaattggatgacaatcctaaactcttggatttcactgagaaactagaggcagcttgtattggaactgtggaatctggaaagatgaccaaagatcttgcactaatcattcacggctctaagcttgctagggacaagtacctgaatactgaggagttcattgatgctgttgcagcagatctaaaagcaagactttcttaaagcataaatttgaaaatggtcgaaaatggaaagggggtggttttcgggtttgcaggaaaaataataataaaaag

SEQ ID NO: 231174 - DNA, 394 bp, Gossypium hirsutum
cctaaatctctataatcctcgctttcttccccatgaaacacaccttggattttcccaaggttgtaaaagatggcagaaggtgaggatattcagccacttgtttgtgacaatggaactggaatggttaaggctggatttgctggggatgatgctccccgagccgtattccctatcatcgtcggtcggccacgtcacaccggtgtgatggttggcatgggccagaaagatgcatatgttggtgatgaagctcaatcaaagagaggtattttgactttgaaataccctattgagcatggtattgtgagcaactgggatgatatggaaaagatttggcatcataccttttataacgagcttcgtgttgccccggaagagcacccatttctccttactg

SEQ ID NO: 231175 - DNA, 392 bp, Gossypium hirsutum
gaaggatcaggatgcccatcatttgcgctggtcgtgttttccagttgacccgcgaattgggtcataaatccgatggtcagactatcgagtggctgttgcgtcaggctgagccttctattatagccgccactggtacagggacgactcctgctagtttttccaccgtgtcggtttccctccgcggagctaattctacttctttgtcgtcgaccacttcttcgtcgtctttggatcataagcctcttttgggtcctaccccgtttatacttgggaaacgcgtccggtccgacgacgataacgccggaaaggacgattccggagggctcactgttggaccaggagtgggttccattgtgggaccgaacgggacacatccgggtgggttctgggct

SEQ ID NO: 231176 - DNA, 404 bp, Gossypium hirsutum
gttattttgccttttcgctatcgtctttgcctatcaactccacggcgcagatccgaggagtctctatttttcaatccaaacaacccctctaaacactctcttcttttattgctcctactcttccagtcatggcaggcttggcaccagaaggatcccaatttgatgctcgtcaatatgaccagaaaatgactgagctgctccagactgatggagatgactttttcacaagttatgatgaagtttatgacagttttgatgcaatgggacttcaagagaaccttctgaggggtatctatgcatatggttttgagaagccttctgccattcagcaaagaggaattgtaccattttgcaagggtcttgatgtgattcaacaggcacaatccggaactgggaaaacagcg

SEQ ID NO: 231177 - DNA, 405 bp, Gossypium hirsutum
ggataacaacatgaagagcatacttaaatatgcaatgcttatggaaaaccataagccttacattgcaatgctctttgtacagtttatatatgcaggcatggccttgttttcaaaagcagcaatttccaaaggaatgaacccttatgtgtttgtggtgtatcggcaagcctttgccacgatcacgttagcaccattcgctttcttccttgaaagtaagcagacatctctatcatacaatttaatcatcaagatcttcttgatttcgttatgcgggctcaccttgagtttaaatttctactctgttgcaataaaatacaccactgcaacatttgctgctgccacaaccaacaccattcctgttcttaccttaatcattgctgtttgcttaaggatggaaagcatatc

SEQ ID NO: 231178 - DNA, 413 bp, Gossypium hirsutum
atgtatcgttttgcttcaagccttgcttctaaagctagggctgctaggaacactacatatcagactggtagtaggttgagttggaataggaactatgctgcaaaagatattaaatttggggttgaagctcgagctttgatgcttaaaggtgttgaagagctttctgatgctgttagagtaaccatgggtcctaagggtcggaatgtggttattgaacaaagctacggtgctccaaaagtgactaaagatggtgtcactgttgcaaagagtattgaattcaaagacaaagtgaagaacgttggtgcgagtcttgtgaaacaagttgcaaatgccaccaatgatgtagctggtgatggaactacctgtgcaacggtgcttacacgagcaatttttaccgaaggatgcaagtctgt

SEQ ID NO: 231179 - DNA, 406 bp, Gossypium hirsutum
cggacgcgtgggttagaaagtgctaagcaggctttgcaagaagctgttattttgcctgtcaagtttcctcagttttttactggaaagagaaggccatggagagcttttctgttgtatgggccacctgggactgggaagtcatacttggccaaggctgttgcaactgaagctgactctacattttttagtgtttcttcctcagaccttgtatcaaagtggatgggggaaagtgaaaagctggtctcgaaccttttcgagatggcgcgtgatagtgctccttccatcatattcattgatgaaatagattccttgtgcggccagcgtggagagggcaatgagagtgaagcttcaagacgtatcaaaactgaacttcttgtgcagatgcaaggtgttggacataatgatc

SEQ ID NO: 231180 - DNA, 354 bp, Gossypium hirsutum
taccgggcattttagcaaaaatggcccggcttccgatagccgaagccaacgaggagagcccctttcgcaccttaactccggacgaattctatgcccgccactcagtgagtcactcatccgagttcatcactaacgctcgcggtctcaaactcttcacccagtcttggaccccactcgatactccgatcactggaatcgtcgccgttgtccacgggttcaccggcgagtcgagctggttcctccaacttacctctgttctttttgccaaatcgggattcgccacgtgtgcgatcgatcaccagggccacggattctccgaaggccttgacggactcgatactcatattccgaaca

SEQ ID NO: 231181 - DNA, 416 bp, Gossypium hirsutum
gaattaccagtggacaaacaaaagcttactgctccaataaaatcaactgctgacaagtttcagcttctccctgagtttttaaaggttagagggttaatgaagcagcaattggattcttttgattgtttggttaatactgggattaagaagattgttcgtgtcaatgacaggattgtatctgatattgatccgagtatttacctcaggtactctgcaccgatattcgtcaacggagagtacattcaagttagatatgggcagaaaactagactagaaaaggtatacagcagatgcttctttgatgtgtgtacgatgcagaatgataggtgctttggatgtaatgcaacatctgttcctagcagaataatcttgttattgcaaaaatgcccatcatgttaaagagttaactctgtgtg

SEQ ID NO: 231182 - DNA, 306 bp, Gossypium hirsutum
cagattcagaaagaaataaaggaagaagaagcaatggccactcttacagtgcccacgacagttccttcggtgtctgaagattgtgaacagctaagaaaagccttttcaggatggggaactaatgagggcttaatcatagatatattgggtcacagaaatgccgagcaacgaaacttgattcgaaaaacctacgctgaaacctatggagaggatctcctcaaggcactagacaaggagctctcgaatgactttgagaggctggttttgctttgggctcttgatcctgctgaacgtgatgcccttttg

SEQ ID NO: 231183 - DNA, 424 bp, Gossypium hirsutum
cccacgcgtccgcggacgcgtgggctcatttcaagggagagagtgtatcagtgtttcttcccctcttttacttaatttctctccgccatggctctctccgtcgagaaaaccgccgccggccgtgagtacaaggtcaaagacatgtctcaggctgacttcggtcgtctcgagatcgagttagctgaggttgaaatgcctggtttaatggcttgtagaaccgagttcggccctgcccaacctttcaaaggagccaaaattactggttctcttcacatgaccatccaaaccgccgttcttattgaaacccttaccgccctcggagctgaagtccgttggtgctcttgcaacattttctctacccaagaccacgctgccgctgccatcgctcgtgactccgccgctgttttcgcttggaaaggggaga

SEQ ID NO: 231184 - DNA, 266 bp, Gossypium hirsutum
cgctctgctttttctcgtgtgatcggaaaaaaaatcaacagtcatctaacggagttggaactcgatgggagaccgtggaggaggatgctgccctccgatggatctgttccgttcggaggcgatgcaattggtccagctcattatccccatggagtccgctcacctcaccgtgtcttacctcggcgacctcggtctcattcaattcaaagatctcaattcggataagagtccatttcagcgaacttatgctgctcagattaaaagat

SEQ ID NO: 231185 - DNA, 341 bp, Gossypium hirsutum
caaccacaaacccatttaagttggtgttggtgacaccgagagttcaagatccaattaaagatgaaggtgatagagaagatccaatctttgcaagaagggaaagtggtgttttcctttgagttcttccctccaaagactgaggatggagtagacaacctattcgagagaatggatcgtatggttgctcataacccgtccttctgtgacattacatggggtgcaggtggttccactgctgatctcaccctcgacattgctaacaagatgcagaatatcatctgtgtggagacgatgatgcacctcacttgcaccaatatgcccgtagagaagattgaccatgc

SEQ ID NO: 231186 - DNA, 307 bp, Gossypium hirsutum
  unsure (1)..(307): unsure at all n locations
atcgccccttcaccaagaagttccgcagtgccggccatggccgtgacagtgacaagcggccgtccctggggctggcacccgggggcctggccgtggtcggccgcagtgccgggggggagccagggcctgaggctggccgggcagccgacagtggtgagcggcctctggcagccagcccgccaggcaccgtgaaggctgaggagcaccagcggcagaacatcaacaaattcgaacgccgacaagcccgccctccagatgcctncgcagcccggggaggcgaggacaccaatgacctacagcagaagct

SEQ ID NO: 231187 - DNA, 425 bp, Gossypium hirsutum
cttccggttcgcctgtcattcaacgagagaaaaacaaaaaacactcccgaaatggcacgcaagaagatcagagagtacgattccaagagattgttgaaagaacatttcaagaggctttccggtagagatttgccaatcaaatctgcacaaattacggaatcaactgatttcaatcagctagtagagaaggagccatggctttcgtcacagaaactggttgttaaacctgatatgttgttcggtaagcgtgggaagagtggtttggttggcttaaatctggattttgctcaagttattgctttcgtgaaagagcgccttggcaaagaggtggaaatgagtggatgcaagggacctgttacaactttcattgttgaacctttcatccctcacaatgaagagttctaccttaacgttgtctctgagcg

SEQ ID NO: 231188 - DNA, 409 bp, Gossypium hirsutum
aaagaacgcagtcttttgatctctgccccaaagcaaaaagttgtcatcttttacaatcacaactactggttatttattttcatggctcaaggagattctaacttccagcaagacatggctaaagaggaagaagaacagaggctgaaatacttggagttcgtgcaagtagccgccgttcacgccgctttgtgcttcaccaacctttacctttacgctaaagaaagatcggggccgttgaaacctatcgtcgagaccgttgagggaacggttaaaagtgtggttggaccggtttatgataaataccatgatgtccctgttgaattccttaaattcgttgattccaaggtgggtgaatcagtgaccaagcttgatcgtcgagtccctccagtcatcaaacaggtctcaaccg

SEQ ID NO: 231189 - DNA, 417 bp, Gossypium hirsutum
  unsure (1)..(417): unsure at all n locations
tgatttggttcagttcaacttgctagtataaaaaggtggtttatatgttcatgttcgcattggaccttatatttgtggagaatggaactttgggggttttcctgtttggttgaaatatgttcctggaattagtttcagaacagataatgagccttttaagaaagcaatggctaaattcacccagaaaatagttcatatgatgaaggatgaaaacttgtttgagtctcaaggtggccccatcatcctctctcagattgaaaatgaatatgaaccanaaagccagttatatggaccttcttgtaaagcttatgttaaatgggctgcaaaaattgcttttgggctaaacactggggttccatgggttatgtgcaaggaatatgatgccccagatcctgtgataaacacatgcaatggttt

SEQ ID NO: 231190 - DNA, 423 bp, Gossypium hirsutum
  unsure (1)..(423): unsure at all n locations
caaataaccatgtctaccgctcaatcttgtccacttcccacagtttctctctctaaatacctggaagaagagggccagaataaaaatgcagaaagccagctcctcaaatcctcattaccagctgaaaatgattgccatactcaagctgaagattcagtttctgatgttcccaaatacctgctagaattgggtctcaccccagaatgcaagcagcttatatcctcactgccagccgagaaaggttgggttgccaatctcctccatcaatatcaggggttttggcacaccactcgccagttacaagcagtgcttactttgccaaaccactttcaagctcaggagacagatatcctncttttgtaccactcaaaatcaggaacaacatggntaaaggctatngtttttgccttgatgaaccgagtc

SEQ ID NO: 231191 - DNA, 366 bp, Gossypium hirsutum
cttgaaatgttgcacagaagactcagatgattctacaagtaagattacttattcaggtgcgatactggaagtttgcatgaggaaactagtattctatccggaaattgttggtttcattgaagaagagaaggacaagtttccaacagttaaagttcaatatcttttcaattctcctcccaagttgatcatgttggatgacgagggccaatataaggaaaccataagaattgacaattggaaacgtgaacacatgctgcaattcctgcagaagaaagttcagccctattccgcaagctcatagacagtcgttcacattcctgttatcgcaagataaagtaaaaccgaactcagcaagattgaactatt

SEQ ID NO: 231192 - DNA, 338 bp, Gossypium hirsutum
ggaaaataatgttctgtactttgtgtttgaatatatggaatgcaatctttaccagcttatgaaagacagagaaaagcatttttcaaaaattgaaatcagaaattggtgcttccaagtctttcaaggtcttgcattcatgcccagtgtggtattttcatcgtgacctaaacccgagaatttgtggttctagaacatatcaaattgctgattttgtctgcacgtgaatcagtcacattctcatacacgaatatgtctaacacgcttgtagtttgatacttctgagaagttattttggtttccttttttttctggtttttttctattactactatctaaac

SEQ ID NO: 231193 - DNA, 421 bp, Gossypium hirsutum
ctctgctcgaaatcttcttcattctgattctctctccactgaactcttgctaaacggtatcgttttagtcagtctttcatcaatggcgaaagaaccagttcgcgtcctcgttactggagctgcaggacaaatcgggtatgctcttgtacccatgattgctaggggagtcatgttgggtgctgaccagcccgtgatccttcacatgcttgatatcccacctgctgcggaggctttgaatggtgtcaaaatggagttggtggatgctgcatttcctcttctaaagggtgttgttgctacaactgatgctgttgaggcatgcactggagtcaatgttgctgtcatggttggtggtttcccaaggaaggaaggaatggagaggaaagatgttatgtcaaagaatgtgtctatttacaagtctcag

SEQ ID NO: 231194 - DNA, 351 bp, Gossypium hirsutum
ctttgaacttgaagatgggtgctgaaaagaatttcattgacatggaggagggaactctggagatcggaatggagtatagaaccgtgtccggtgttgctggaccattggttattcttgacaaagttaagggtccaaagtatcaggagattgtcaatattcgtttaggtgatggaacaactcgacgaggtcaggtcttggaagttgatggagagaaagcagttgtgcaggtttttgaaggaacatctggaattgacaacaaatacacaactgtgcaatttacaggagaggttttgaaaactcctgtgtctttagatatgctagggcgcatatttaatggctctggaaaaccca

SEQ ID NO: 231195 - DNA, 385 bp, Gossypium hirsutum
attgttggatttctggccaagtccatttgggatgagatccaggattgctttggctgagaaagggataccatacgagtacagagaagaagatttgaggaacaagagtgatttgttgctgcagatgaaccctgttcacaagaaaatccctgttcttatccataatggtaaacccgtttgtgagtctgtcattcaggttcagtatattgatgaggtctggcatgataaagctcctttgatcccttctgatccttatcaaagagctgttgccagattctgggttgatttcgttgacaagaagatatatgacctggggagcaaaatatggaagacaaagggagaagaacaagcaaatgcaaagaaagaatttattgagtgcctgaagctg

SEQ ID NO: 231196 - DNA, 424 bp, Gossypium hirsutum
aaaagaaataaaaacagtttcatttccattctaagtttgggtttttgatttgccttttgtgggtttttttttataaaaaagttcagcaaaaatgtttattgagaattttaaaggggagagccccaatgtgaagtacacagagaatgaaattcagtctgtttacaactatgaaactacagagcttgttcatgagaacaaaaatggaacctatcaatgggttgttaaacccaaaactgtcaaatatgaattcaagactgatatccatgtccctaaattgggggtgatgcttgtgggatggggaggaaacaatggttcaaccctcaccggtggtgttatagctaacaaagagggtatctcttgggctactaaggacaaggtacaacaggctaattactttggttcattgactcaagcatcaacgatc

SEQ ID NO: 231197 - DNA, 417 bp, Gossypium hirsutum
  unsure (1)..(417): unsure at all n locations
taacaaccaaaagttttagatatagaattacggaagctcatctctctctttctctctctctctctctagatttcaccccttaggtttctctttcctcacagagacagagagagaatcagaggagcttaatcgagatttgatattcctcaccacagatggatcagatattgaacaaggtgggctcctattggctcggccagaaggccaacaaggagatcgattccgtcggcgacgacctcaactcattatccaccagtattgaagggggagccaaatggttggttaataaaatcaaaggaaaaatgcaaaagccgttgccagagctgttaagagagtataacctgccaataggaatcttccctcgtgatgccacaaattatgaattcaatgaagagactgggaagctcnactgtttta

SEQ ID NO: 231198 - DNA, 422 bp, Gossypium hirsutum
ggagagcagtccctaggaacaattaaaaagaaccgaaaaaaaaaacacagattaagacagaagcatggccagccagctcgtaggaacaaagagagcttgtgtcgtgggtggcagcggattcgttgcctcattgctggtcaagttgttgctcgagaagggttacgccgttaacactacagtcagggaccctgacaaccagaagaagatctctcaccttgtaacactacaagagttgggagacttgaagatctttcaggcggatttaactgatgaagggagctttgatgcccctattgctggttgtgaccttgtcttccatgttgcgacacccgttaactttgcttctgaagatccagagaatgacatgatcaaaccagcgactcaaggagtggtgaacgttttgaaagcttgtgccaaagcaa

SEQ ID NO: 231199 - DNA, 422 bp, Gossypium hirsutum
  unsure (1)..(422): unsure at all n locations
ctcaaagaccaagaaaaagcgcgcgaaaggtggtaaaaccctagcgaggcaatgccggagcttccagaggtagaggcagcaagaagagcgatagaagagaactgcttggggaagaagatcaagagagcgattatagccaatgactctaaagtcatcgaaggagtctcctccttggacttcgagtccgctctcttaggcaagaccatcgtctctgctcaccggaagggcaagaacctctggctccaccttgattcccctccttttccctctttccagttcggcatggccggtgctatttatataaaaggcgttgctgttacaaaatataagaggtctgctgtaaaagacaatgatgaatggccttccaaatattcaaagttcctttgttgaactagatgatggttnggagctatctttcactg

SEQ ID NO: 231200 - DNA, 422 bp, Gossypium hirsutum
cccacgcgtccgggatttttttcattcgtttcttctcacgctcgattaccttacaaaaagagaaaatgaccaagtgttacccaactgtgagcgaggaataccagaagtcagttgaaaaggccaagaggaagctcagaggtctcatcgctgagaagaactgtgctccactcatgctccgtttagcgtggcactcagctggaacttttgatgttaagaccaagaccggaggtccattcggaaccatgaagcatcctgctgagctcgcacatgctgctaacaacggcctagatatcgccgtcagacttctcgagccgatcaaggagcagttccctaacctcacctacgctgacttctatcagcttgctggtgtcgttgccgttgagattactggtggacctgaaattcccttccatcccggaaga

SEQ ID NO: 231201 - DNA, 323 bp, Gossypium hirsutum
  unsure (1)..(323): unsure at all n locations
agctgtccctgaggaccgtccgaatcccggtcgccacgcgtcganaaatggtggtattgagcaaagggaatcatgtntttggtgtttgcatttgcagcaataagcagagggtatggacaagaatcaaccactcttgttcctgcaatcatcacctttggtgactctgtggtagatgtgggcaataatgactatctccctaccatcttcaaagctaactatcctccttatggacgggactttgccaacaaaaagcctactgggagggtttgcaatggaaaattagccactgacatcactggtgaaactctggggtttacaactta

SEQ ID NO: 231202 - DNA, 400 bp, Gossypium hirsutum
  unsure (1)..(400): unsure at all n locations
cccacgcgtccggccacgcgtccggctcaggctgtgagggaggcgaanagtgaaggtattcgtggtggaggccgtggtgggcgtggatgtgtaggtgggcgtggtggcagtggtggatacagacgtgattttgccaatgatgagaattcattcagcaacagtgctgaactcggtcaaggtgcacctgaagatggtgagagtagaaggccatctgaaaggcgtggtggctacggtggtcctcgaccttattgtggtggtggtcttcgtcgtggtttcagtaatggggaaattggacatggggtgagacctcgcaaggtgtatgaacgcattagtgggactggacgcggaaatgagctcgaacgtgaaggctttggtcaggggaattgggngaactcaaact

SEQ ID NO: 231203 - DNA, 318 bp, Gossypium hirsutum
cttatttgaaccgcgcctaataaccgttcggatgggggtcagacgtgaaaaaaatggggctgtctttcaccaagctatgcacccggctatttgccaaaaaggagatgcgtatactgatagttgggcttgatgctgatggtaaaaccaccattctttacaagctgaagttgggagagatgggcactaccattcccaccatctggttcaacgtttagaccgctgaatacataaacatcagcttcactgtatgggatgttggtggccaggacatgatccgaccattgtggagacactatttccaaaacatgcaaggactta

SEQ ID NO: 231204 - DNA, 421 bp, Gossypium hirsutum
gcgccaggttacgcatatccaaacaggcaggtatgcggtcttaaaacctaccgacgctcttgccatagcattatatacgacatgagtcctattttcagtcaataccgggaattcaaatggttgcatgctcaaccccttacaatgccaagggattaatgaaagctgctatcagaagtgagaaccctgttatactttttgagcatgttttgctttacaacctcaaggagagaatcccagatgaggattatatctgtaatcttgaggaagctgagatggtaaggcctggagaacatgtcactattctaacctattcaaggatgaggtatcatgtgatgcaggcagcaaaaactttggtgaacaagggttatgatcctgaagtaattgatattaagtcattgaaaccatttgatctttacaccat

SEQ ID NO: 231205 - DNA, 156 bp, Gossypium hirsutum
acggtctagtctaacttccctatatttgcaggccaatcagctgtctgggacgctagatgttctacaagatctttccctaaaagatttgaacataaaaaataatcttttcaatggacccattcctgagaagatgcttagcattccaagctctaaaaa

SEQ ID NO: 231206 - DNA, 418 bp, Gossypium hirsutum
cagtcatcgaacggcttgagaggaagttttccactatggctgctgaacatccttttaaggcagtcctgaccagtcttccaaagccaggtggtggcgagtttggaaagttctatagcttgcctgccctgaatgatccgaggattgataaactgccctactctatcagaatcctgcttgaatctgcggttcgtaactgtgacaacttccaagtcaagaaggaggatgttgagaaaattattgattggcaaaatacatcacccaagcaagtagaaatccccttcaagccagctcgtgtgctcttgcaggatttcactggagtgcctgctgtggtcgaccttgcttgtatgcgtgatgctatgcacaagcttggcagtgatacaaacaagattaatcctttggttccggtagatcttgtcat

SEQ ID NO: 231207 - DNA, 422 bp, Gossypium hirsutum
  unsure (1)..(422): unsure at all n locations
cccacgcgtccgccattttccctctcttcaaagatccttgctttccttttcaatgggtttctttcttttcttcttcctttccttactgtctttagcttcttcagcttccagggatcatcacaaaaccttcatcgttagagtccaaaacgatgccaagccttccattttcaccactcacaagcactggtacgagtcttcccttgcctccgttctttccccttccactcccgcccaagttctccatgtttacgacaccgttttccacggtttctccgctaagctttcccccaccgacgccctcaatctccaaacgcttccccatatcctcgccgttatccccgaacaagtccgccgtctgcacaccacgcgctctcctcacttncttggcctncaaaccactgacagcgccggccttttgaaag

SEQ ID NO: 231208 - DNA, 416 bp, Gossypium hirsutum
ctcgcattttattttttctttttttttttcccacactttttttaaaacccattagctaaaaatgcactgggttctttctgtgttgcttgcagttatcggagttactgcactgctcgttgtaactccggtaagtgggtaccgtccatggccgtacgtaaaacccaacagctccgacttaatgttcggaggctctaagaaatttgagggctcatcggagtttgtacatatgagatatcatatgggtccagtccttactgctcatatcaccatccacccaatctggtacggccggtggcagaaatcacagaagaaaatcatccgtgagttcatcaactcgatctccgccgttgattccaaacacccttcggtggctgggtggtggaagaccgtacagctttacaccgaccaaacgggag

SEQ ID NO: 231209 - DNA, 422 bp, Gossypium hirsutum
cttcttccttcaatttccttctctctttctctctctctgggcaacttctcgttagggtttttgtgggttggtgttttccttcaacaaagagaacatcttttactgcttcgtctttttatttctcggtaccgatgatgatttgcctccttcacagccaactagagttccaataaggggtaatattgctggaaatggaagatctattgtaggttctgcttcatattttaggatgcattctgacatggaatcccaaatacatctacttgagcaagaagcttactgtgctgttctgcgtgcttttaaagctcaatccgatgccattacttgggaaaaggaaggcctgataacagaacttaggaaagaactgagggtgtcagatgatgagcatagagagcttctgactaaggttaatgctgatgata

SEQ ID NO: 231210 - DNA, 396 bp, Gossypium hirsutum
aattgattgagctagctagctcttactcaaatggcaaccaaaacgatgatgctgcaaatattttcacttttcttgtttccgttcactatctgcaactccattttgcttggtgctaatggagacgacaatggtggttggcaaactgcccatgccaccttctacggtggtgctgatgctaccggcacaatggggggagcttgaggttatggaaacctgttcagtcaagggtatggaacgagcacagcaactttgagcactgcacttttgaacaatggcttgagctgcgatgcctgctacgagctacggtgcaacaatgatcctcaatggtgcattagtcgaaccataaccgtgacaggcaccaacttttgtgcccctaactatgctttatctagtgac

SEQ ID NO: 231211 - DNA, 308 bp, Gossypium hirsutum
tgctgtgggcttcaagggcggcttcttacctgaggatctctgtcttccacagaggcttttccactgttctaaaggatctgaaatatgcggattctcatgagtgggtgaaggttgagggtgactctgccactattggtattactgatcatgctcaagatcatttaggtgatgttgtgtatgttgaattacccgaagtgggagctgctgtaaagcaaggtgaaagttttggagcagttgaaagtgtcaaggctacatgtgatgttaattctcctgtttcaggaaaagtggttgaagttaatgatgagctc

SEQ ID NO: 231212 - DNA, 410 bp, Gossypium hirsutum
attaagctgactttcacatacatttccatcattcttttttcacactttttttatataattttgatagtataatatggagaaatggtatggggtttcagggctggtgttggttttgagtttgttctttggggttaaaggagaaccccaagtcccatgttacttcatttttggagattcattggtagataatgggaacaataatgaacttcgttcattggctagagctgattacttgccttatgggattgactttgctaatggaccgaccggccggttttcgaacggtcgaactacggtggatgtcatagctgaacttttggggtttgacgattacatccctccatactcaactgcaagtggtagacaaatactgggaggagttaactatgcatctgctgctgctggaatca

SEQ ID NO: 231213 - DNA, 371 bp, Gossypium hirsutum
cggacgcgtggggacgattccccttaaatggccgcatcttttgactaagcaaaaaattcgccaccaccaatcgctggcgctgtccacaacactgaaaatgttgccgttcgacacaatcgaggaggctgctacattattgggacggaacctaacggtggccgagacgatgtggttcaagtactcggctaaaaagtcggattactatttttactgccacaacatcttgtttttgttcctcatattttctgtggttcctttgccgctcgtttttgttgagatgatgagatctttgggtttcgataaatacaagattcaacccaaagttagcctgtcgttgcctgagatgttcaaatgttacaaggatgttatgc

SEQ ID NO: 231214 - DNA, 411 bp, Gossypium hirsutum
tgaaattcggatacgccatggctcgttcattcttcctgaaccgtagcatggaggcccactccctcctcaagaagcagggtttcgatgtttcctcctacggaaccggggctcacgtgaaactccctggtccttctatcagagaacccaacgtttacgagtttgggaccccttacaagcacatgttcgacgacctccgccgcaaagacccagagctgtataagcggaatgggatattgccgatgcttaaaagaaacttgagtgtcaaattggcgccccagcgttggcaagacaatgctgctgatggttgttttgacattgttttcacttttgaagagaagtttttgatatggttcttgaagatctgcacaaccgggatcaagttctcctgaaaagtgtgctggtgatcaactt

SEQ ID NO: 231215 - DNA, 322 bp, Gossypium hirsutum
ggaaaggcataaagttgtccttcgtggtgggggagcttttctggtgttgcaaacctcaaacgcccataatattacacgtctacttgcaaagcacccctctttgtccacatttaattattacctgaccctcactcacttagctcccgagatcaaccgacgcaccaccatcactgtccttgcctttgacaacgccgccatgtcttccctcttggataaaaacccttccatttacaccatcaagaacatcctttcccttcatgtgctccttgactactttggtgccaagaagctttaccaaataaggaatggtactgcactagct

SEQ ID NO: 231216 - DNA, 415 bp, Gossypium hirsutum
cccacgcgttcgcccacgcgttcgcactcccgtcctcacatttcccaacaaaaagcgaaggaaatcattttcatcaatcccccctatcacccttctttatctttcccacggaaacgaagagcaatcagaaaaccttgtgaagagaaaatgagggaaatcttgcatatccaaggaggtcaatgtgggaaccagatcggggctaagttctgggaagtcatatgcgatgagcatggaatcgacaacactggaaagtataacggtgactccgatctccagctggagcgtatcaatgtctactacaatgaagccagtggcggtaggtatgtccctcgcgctgttctcatggatcttgaacctggcactatggactccgtcagatccggtcttttcggccagatctttcgtcccgataact

SEQ ID NO: 231217 - DNA, 373 bp, Gossypium hirsutum
gaaagctccaggtaaaaagccaactggtcttggtgcttctcctgctggccctccatcaactgttgatgcttatgagaagctgctttcatcaattcccgaatttgcaaactttggcaagcttttcaagtgctctgcacctgtggagctgacagaagcagaaacggaatatgcagttaatgttgtcaaacatatttttgatggtcatgttgtgtttcagtataactgcaccaataccattccagagcaattattggagaacgtcactgttattgtggatgcttcagaggctgaggagtttgctgaagtagcttcaaagcctttaagatcactcccatatgattcacctggacagacctttgttgcatttgagaag

SEQ ID NO: 231218 - DNA, 421 bp, Gossypium hirsutum
cccacgcgtccgacataacctatatcttactttccaacctctttcttccatctccatctccatctccatctcctttctgcaattattcccaactttccatggcttccttcacacccaatctagaacctgcccctgacacctctcttcagttcaagcccaagaaacccaggataacccttcaaaccccttcctcttgtcctcccaatcaacgcatccaaagaattaagcgatggcggacccaacgagaccaacacatctactcctccaagctcttccaggctctccgtcgttctcgtcgtacctccgcctccagggaagtccacgaaacggctgacagggttctcgccgttttggccaagggcaccactcgttggggcagagccattctcaccgctcgcaaggtgaccaaacataagaaagc

SEQ ID NO: 231219 - DNA, 427 bp, Gossypium hirsutum
agagggcatggtgatgagtacaaaacaccagcagcactagctaaacccaataaagaatccagttctgaaccagctcttataaagagatattcatgcccttttgctggttgcaagaggaacaaggatcacaaaaagttccagcctctgaaaaccatcttatgtgtcaaaaaccattacaagagatcccactgtgacaagagctacatctgcagcaggtgccacaccaagaaattctcagtgattgctgatctcaaaactcatgagaagcattgtggtaaagataaatggctatgttcgtgcggcaccacgttttcgaggaaagataagctgtttggtcacatagctcttttccagggtcacactccagcaattcccctggatgaaactaaaggacccattgccccatctgaccctggagatggcagtg

SEQ ID NO: 231220 - DNA, 422 bp, Gossypium hirsutum
gttccagatgcatatgcatcaaatatatctcaatatgttagtgttaaagatcgaagactatattcgctaaaatcacatgactatcacatcttaatgcaatatttactgccagttactctacgatgttgtatttcgaagaaggtgacatcttgtataattgaactatccaatataatgaaagccatttatggcaaagttttggatgttcaagaacttcagaaggtacaggatcgagccgatttgactttatgcaacatggagaaaattttcccaccttccttcttcacaattatggttcacttgataatccatctcccgaatgaagcaattcttggcagacctgttttctatcgatggatgtatcccatagaaatgtgttaattaaaatttttaaaattttccttcattcacctatagtacat

SEQ ID NO: 231221 - DNA, 327 bp, Gossypium hirsutum
ctccactgctgcagggagcagagggaaaaaggatgggagcatcgttgtgttcttgcttcttcttcaactctggctctccgtctctgaacctccttctttcgttcttttcttattcagtattgtaaaagatggccgatgctgaggatattcaacccctcgtctgtgacaatggaactggaatggtgaaggctggttttgctggtgatgatgctcccagggctgtttttcccagtattgttggtcgaccccgtcacactggtgtcatggttgggatgggtcagaaggatgcctatgtatgagatgaagcacaatccaaaagaggttttc

SEQ ID NO: 231222 - DNA, 339 bp, Gossypium hirsutum
gctttggatctatcattgcaatcaagggagaaaaagaaaaaaaaaacaagccatgtttttatttgattggttttatgggattcttgcatctttgggtttgtggcaaaaagaagccaagattttgtttttaggacttgacaatgctggcaagaccactcttcttcacatgttgaaagatgagagattagttcaacatcaaccaacccagcacccaacatctgaggaattgagtataggcaaaatcaagttcaaagcttttgatttgggtggtcaccatatcgctcgccgtgtctggaaggattactatgcttaggttgatgcagtggtatatttggtgga

SEQ ID NO: 231223 - DNA, 412 bp, Gossypium hirsutum
  unsure (1)..(412): unsure at all n locations
gggacatcccatgggaaacatacatgacaactaagctgatttcaggaacaggcttgcagctgttaaggcgttatgataatagagctgaaagtgtcagggcacagttgttggatgatgatggtccagcctatgttcaagtgtttgttaacatcttacgggatatctttaaagaagaaacagtggaatatgttctggctttaattgatgaaatgcttacagccaatccgaaacgagccagactatttcatgacaagtctcttgctaatgaagatacttatgaacctttcctaaggttgctgtggaaaggcaactggttcatacaagaaaagagctgcaagatactggccttgatagtaagtgcaaggccaaaaacccaggatggcgttgntgcaaatggagaaaattcaaagaa

SEQ ID NO: 231224 - DNA, 418 bp, Gossypium hirsutum
aagagattgttgatctctgcttggatcgtatccgaaaacttgctgataactgtactgggctccaaggcttcttggttttcaatgctgttggtggtggtactggttctgttcttggatctcttctcttggagcgtctctctgttgactatggaaagaagtcgaagcttggtttcactgtctatccttcacctcaggtttctacatcagttgtagagccttacaacagtgtgctgtccactcattcgctccttgagcacactgatgtcgctgttcttctggataacgaagcaatatatgacatctgcaggcgttctttggacattgaacgacccacttataccaatcttaaccgccttgtctctcaggttatctcatctcttaccgcatctttgaggtttgatggagccctgaatgtgga

SEQ ID NO: 231225 - DNA, 443 bp, Gossypium hirsutum
gtactcactcaacattcccatttccaatctccagctcccaaggtaaatatgccgatcagaaacatagcagttggccggcccgaagaggcgactcaccccgatgctctcaaggcagctttggctgagttcatctcaaccttgatcttcgttttcgctggatcgggctcaggaatggcttttaacaagttgaccgacaacggagcaacaaccccggccggtctcgtagccgccgctctagctcatggcttcggtcttttcgtcgctgtctccgttggcgccaacatctcaggtggccacgtcaaccccgccgtcaccttcggtgctttcgttggcgggaacatcactctcttgcgcggcattctttactggatcgcccaactcctaggctcaaccgtcgcttgcctgttgcttaagttcgctaccggcgacctggctgtaccagc

SEQ ID NO: 231226 - DNA, 432 bp, Gossypium hirsutum
cggaagagctaccttttttttctccttttccaccgccgtcgatctcgatccttatcctcgttttcaaacaagctcaaaaaagatggccaacgctgcatcgggaatggctgtgcatgatgattgcaagttgaagttcttggagctcaagacaaaaagaacccaccgcttcattgttttcaaaatcgaggagaagcaaaagcaagttattgtggagaagcttggtgaaccaaccgaaagctacgaggattttactaaatgtctccccgctgatgaatgtcgatatgctgtgtacgattttgattttctaacggccgagaacgtcccgaagagcagaatctttttcatcgcatggtctcccgacacgtcaaggatcaggagcaagatgatttacgccagctccaaagacagattcaagcgagaactggacggaat

SEQ ID NO: 231227 - DNA, 413 bp, Gossypium hirsutum
  unsure (1)..(413): unsure at all n locations
caaaaacctgggttcagaccaatacaagttcttgcttcggacaatggttaatgctggcatcggtgaagaaacttacggcccaagaaacgtcattgatggcactgaagaaaccccgaatcttcctggttcgctttcggaggtcgacgatatcgtcttcggaaccctcgataaactctttgataacaacggagtttccccttcggaaatcgatatcctcgtgatcactatctcgatgattacttcggttccgtcgttgccggctcgggttattaaccgatacaagatgagggatgatgttaaagtgtttaatctctcgggaatggngtgcagtgctagtgttattgcggtcgacctcgtacatcatttgttcaaaacgtatacgaactcatttgcagtgattggtagctcggaat

SEQ ID NO: 231228 - DNA, 448 bp, Gossypium hirsutum
caaaaaaagaagaaaagaaaaacaggaaagctttgattctaagccattttctttgctccattccatagaaagatctaaaagctcaagctttcctagcaaaattttctcgccatttttttaagctacgaagagagggaaaggaaaagggactaatttagagaaagaaaaggtaaagatggataaatttaagaatatgttgaaacccaagccgaatccacaacaactactaagagattggcaaagaaagcttcgtcaagagtgccgtaacattgaacgccaaatcagagatgttcagagagaggagaaaggtgtgcagaaggcaattcgagaagccgctaagagaaatgacatgggttctgctaaggcactcgcaaaagaaattgtaatgtcgagaaaagctgtgaaccgtctatatgagaataaagcgcagcttaattcaatatcaatg

SEQ ID NO: 231229 - DNA, 405 bp, Gossypium hirsutum
  unsure (1)..(405): unsure at all n locations
cggacgcgtggggtactggttctggtcttggatctcttcttttggagcgtttttttgttgactatggaaagaagtcgaagcttggtttcaccgtctatccttcacctcaggtttctacatcagttgtagagccttacaacagtgtgctgtccactcattcactccttgagcacactgatgtcgctgntcttctggataacgaagcaatatatgacatctgcaggcgttctttggacattgaacgacccacttatacgaatcttaaccgccttgtctctcaagttatctcatctcttaccgcatctttgaggtttgatggagccctgaatgtggatgtgactgagttccagactaacctggtcccatatcccaggattcactttatgctttcttcttatgcccctg

SEQ ID NO: 231230 - DNA, 423 bp, Gossypium hirsutum
gcgatatgtaatgcagtggctgtggccaaaattctgaatgccacgcttattttgccagtgctgaaacaggatcagatatggaaagatcaaacgaaatttgaagacatttttgatgttgatcatttcattgactacttgaaggacgatgtgcgaattgtccgtgacatacccgggtggtttactgacaaatcagaattatttacaagtataagacgaacagtgaagaatattccaaaatatgcacctgctcaattttatatcgacaatgtgctgcctcgggtcaaagagaagaaaataatggccctaaaaccattcgtcgatagacttgggtacgataatgtccctccagaaatcaacaggctaagatgcagggtcaattatcatgctcttaaatttcttccggaaattgaggaaatggcaaat

SEQ ID NO: 231231 - DNA, 437 bp, Gossypium hirsutum
ctctccctctaaaccaaacccaaccaaagcccctgtctgcatgcaaaacttaaactaggaattaaacctattctttataaattgctacgaagggttgggttttgttcttaagatcatggatttggagttcctgcaatccatggatgttcagattcttgttggtttacgagtagctgttttagccattcttgatgctgctgcttatctcttttcctccaggaaacccataggttgccttgatccggaaaatttcagagagtttaagcttgtctagcgccagcagctgagtcataatgtggcgaagttcacatttgaacttgctactcctacttcagttctgggtctgtccatcggacagcatattagttgcaggggcaaggatagcctaggtgaggaggttattaaaccatatacgcctactacattggattctgatg

SEQ ID NO: 231232 - DNA, 313 bp, Gossypium hirsutum
gcaaaacatagcaaaaaagaaaaatggcaaagtcagcagaggaagagaaccaacaaaaagcttttggttgggctgctactgataattctggaatcctctcccctttcaatttttccagaagggaaaatggtgatgatgatgtcactttaaaaattctttactgtggagtgtgccattcagacctacatactttgagaaatgactggggtttctccttttaccctgttggtcctgggcatgaaatttcaggtgttgtgaccaaagtggggaagaatgtgacaaaattcaatattggtgaccgggttggggttgg

SEQ ID NO: 231233 - DNA, 212 bp, Gossypium hirsutum
acccacccgttcatcattatgagattctaaagtttcccgtggcgactcactatgctttggagaagaatgaagacaacaacactttggtttttattgatgacattcgtgctgttataaaaaagattaaagatgctgtgtaaaagatgtattattttcatgccaagaaagttaacacctttatcaggcctgatggaacaaaaaaagcatacgtt

SEQ ID NO: 231234 - DNA, 437 bp, Gossypium hirsutum
cccacgcgtccggttccttccttcgccgtctattgctttttgttacctcgatttcaagtgaatcagaatgggtaaggaaaagactcacattaacattgtggttatcggccacgtcgattctgggaaatcaaccaccactggccacctgatttacaagcttggtggtattgacaagcgtgtgattgaaaggttcgagaaagaagctgctgagatgaacaagaggtcattcaagtatgcttgggtgcttgacaagctcaaggctgagcgtgagcgtggtatcaccattgatattgccttgtggaaatttgagaccacgaaatactactgcactgtgattgatgcacctggacaccgtgactttatcaagaatatgattactggtacgtcacaggctgactgtgctgttttgattattgattccaccactggtggttttg

SEQ ID NO: 231235 - DNA, 449 bp, Gossypium hirsutum
cttgatcattatcagattctcaagtttcccctcacgactgagtctgcaatgaagaagattgaagacaacaacactttggttttcattgttgacattcgtgctgataagaagaagattaaagatgctgtcaagaagatgtatgatattcaggccaagaaagttaacaccttgatcaggcctgatggaacaaagaaagcatacgttaggttgacacccgaatacgatgccttggacgttgcaaacaaaattggtattatctaagctagttagtagctaccttgttgagcatttattttccttttctttgcaaagagaaattatttcgagacattgagcaggcatttttatttttattagcacttaaaagtttgtaatattgcattgttgttgccaattagccatctctggttcaacttaagacagaaggtgatttttgatttacatgcttt

SEQ ID NO: 231236 - DNA, 425 bp, Gossypium hirsutum
cccacgcgtccggcaaatcctttccacagtcaagtgttgtctgttacttttattagagggggatccgcattcagtgtgatcccatcatatgtcgaatttgggggcactttgaggagtctcaccactgagggcttgcataaactacaacaaaggttgaaagaggtcattaaaggacaagcagccgtacaccgatgcaaagcttttattgacatgaaagaaaaagatcaccctctctatcctgttgttgtaaatgatgatggcttgcatcaacatgttcagaaggttggtagccttttgcttggtcctgagaatgtgaagaggggcaaaaagataatggcaggagaggacttcgccttctatcaagaaaaaatccctggattcatgctaagcattggaattagaaacgaggaactgggttcaattca

SEQ ID NO: 231237 - DNA, 428 bp, Gossypium hirsutum
caaatctcttctcctcgtctatcgaatatgatgcaacaaccaccagcaggaggtgtagctccgccgccgtccatggcagccgatccgtctcaaacccagcagtaccagaaacaacagcagtcgcagccgtggatgatgatgtctcaacaacagcaggcgggtcagccagttcctccacctgcaggttggaatccgcaacccgtccctccgccctctcagatgcagcagtactccgctggttccgcgaccgtcggatccggcgaaattcggtctctctggatcggtgatcttcaaccgtggatggatgagaattacctcattagtatcttcgctcaaactggagaggtggtttcagctaaggtgattagaaataagcaaacggcactgccagagggatatgggtttatcgagtttgtatcacgtgctgc

SEQ ID NO: 231238 - DNA, 444 bp, Gossypium hirsutum
cccacgcgtccggcggcgtcaagatgcagatcttcgtcaaaaccctaacggggaaaaccataacccttgaggtcgagtcttctgacaccatcgacaatgtcaaagccaagatccaagacaaggaaggcatccctcccgatcaacaacgccttatcttcgccgggaagcagcttgaagacggccgcaccttagccgactacaatatccagaaggaatccactcttcacctcgtcctccgcctccgaggtggtgccaagaagaggaagaagaagacctacaccaagcccaagaagatcaagcacaagaagaagaaggtcaagctcgccgtgctccagttttacaaggtggacgagtcgggtaaggttcagaggctgagaaaagagtgtcccaatgccgagtgtggtgctggaaccttcatggctaaccattttgataggcattatt

SEQ ID NO: 231239 - DNA, 399 bp, Gossypium hirsutum
gttaggtcagccaattgtttgagctagctagctcttactcaaatggcaaccaaaacgatgatgttgcaaatatttccacttttcttctttttgttcagtgtctgcaactccattttccttggtgctaatggagatgacaatggtggttggcaaactgcccatgccaccttctacggtggtgctgatgctaccggcacaatggggggagcttgtggttatggaaacctgtacagtcaagggtatggaacgagcacagcagctttgagcactgcacttttcaacaatggcttgagctgcggtgcctgctacgagctccggtgcaacaatgatcctcaatggtgcattagtcgaaccataaccgtgacagccaccaacttttgtccacctaactatgcttta

SEQ ID NO: 231240 - DNA, 432 bp, Gossypium hirsutum
  unsure (1)..(432): unsure at all n locations
gtttgagctagctagctcttactcaaatggcaaccaaaacgatgatgttgcaaatatttccacttttcttctttttgttcagtgtctgcaactccattttccttggtgctaatggagatgacaatggtggttggcaaactgcccatgccaccttctacggtggtgctgatgctaccggcacaatggggggagcttgtggttatggaaacctgtacagtcaagggtatggaacgagcacagcagctttgagcactgcacttttcaacaatggcttgagctgcggtgcctgctacgagctccggtgcaacaatgatcctcaatggtgcattagtcgaaccataaccgtgacagccaccaacttttgtccacctaactatgctttatctagtgacaatggcgggtggtgcaatcccncacgagaacactttgatt

SEQ ID NO: 231241 - DNA, 441 bp, Gossypium hirsutum
atcatccccatgacatagcaaagatttgaaccatcaactaaaaaacatgcatgaatctcatggcacaacctcaaacataccttgatctagatacaagtatggccaaacctcctcctaatccacttccaaatgatcagaaagtagttcaggtttcgtgtggatggaggcatacacttgctattaccgaagagcaaaacatcttctcctggggtaggggtacaaatggacagcttggacatggagaatctatggaccggaattttccaaagatcatagaagccttgagtgttgaaggttccagtgggcaacagatagaatcttcaaagcttgacccattgtcaggtaaatcttgggtttctccagcggagcgatatgcagttgtccctggtgaaagtggacaaacagttaactcagaaaagggcaatggtggtgacgtggacg

SEQ ID NO: 231242 - DNA, 440 bp, Gossypium hirsutum
aaagctttgagggccaaattgaatctccccaaaccctaaccatgacctgatccgaaatccccaaaatctctcatcttcatcctccaccgtccgatcaaagctccatcatagaataaaagcaaaagaaatcaccagaaaaacctgaactgcttgacgatgccgtcccacggggatctggatcgtcagatcgagcacttaatgcagtgcaagccgctatcggaaacggaggtgaagactctgtgcgagcaagcgcgtgcgatccttgtggaggagtggaatgttcagccggtgaagtgtccggtcaccgtctgcggcgatatccacggccaatttcacgatctcgtcgaactgtttcgcatcggtggccacgctcccgacactaattatctctttatgggcgattacgtagatcgaggatattactctgtggagactgtcac

SEQ ID NO: 231243 - DNA, 434 bp, Gossypium hirsutum
atttctcttttcttctcaaattatcattcaccatctttctcgtcggttttgagatctcaagctgatttattacgttttaatataggttgagatggcttcgaccactctaatctgcgatacccagccatggaaggacttgaaggctcatactgaggatatcaagaaaactcatcttcgtgatttgatgaacgacaaagaacgatgcgaatcgatgatggttgagtttgatggaatgtttttggactactcaaggcattgcgccactcttgagaccatggataagctctataaattagcagaggctgcttctctcaaacaacaaattaaccgaatgtatagtggcgagcatataaatagcacagaaaataggtcagtgcttcatgtagctcttcgagcaccaagggatgctgttataaacagtgatggaaagaatg

SEQ ID NO: 231244 - DNA, 411 bp, Gossypium hirsutum
  unsure (1)..(411): unsure at all n locations
gctaatntagcactttcatncttttaaaatattgtaaatttagctnttcatatactnttttggtttcttatctttttcttgcggaaaattatgggattttgcttgtagatggctcctactggtgtaagaacagaggagtggatcgaaagaaactcaaagggattggagattttctttaagcgatggatgcctgaacccggggttaaaattaagggtgtcgtatgcttttgccatggatatggtgatacttgcactttcttctttgaaggcattgctaggttcattgcagcatctggatatggtgtttatgctattgatcatccaggattcggtctttctgaaggattgcatggttacatctatagctttgatgaattggctgacaatgtcattgaacaatatgcaaaaatt

SEQ ID NO: 231245 - DNA, 447 bp, Gossypium hirsutum
tttagattggggattggtccacccgaaatcacacggctttgaaaaaggcacttgatgccggaaaaggtttagggatgccaaatggagttcttattaatggcaaaggcccttaccgatataatgaaactcttgtacctgatggcatcgagtatgaaacgattaacgtgcattcagggaaaacttatcgccttcgagttcacaacgtgggaatatcgacctccttgaatttcaagattcagagccataatttacttcttgcggagagtgagggatcatatacggtgcagcagaactacactagcttagacatacatgtagggcagacatattcgtttctgctaaccacggatcagaatgcaagtagcgattactacattgtagcaagtgccaggtttgtgaatgaatcgcagtggaaacgagttaccggtgttgacattttgcgttatt

SEQ ID NO: 231246 - DNA, 224 bp, Gossypium hirsutum
tgctgatctaagatatagatatctcatgaacagcagtattgctgggcttgagaaggctgacgtattccttttggttggtacccagccaagggttgaagctgctatggtaaatgccagaattcgtaaaacagttcgagcatcaaatgctaaagttgcctatattggtccgccaaccgaattcaactatgattgccagcatcttggtactggcccacaaacactta

SEQ ID NO: 231247 - DNA, 308 bp, Gossypium hirsutum
ggacaaattttcggactattactagccccgactaccgaggagctcatgggatactagtcgcctatgatgttaccgagatggagagcttcaacaatgtcaagcagtggttgaacgaaattgacagatatgctaatgacagtgtatgtaagcttctggttgggaacaaatgtgatttagttgaaaacaaggttgtcgacacgcagacagcgaaagcatttgccgatgaaattgggattcctttcctggagacaagtgctaaagattcaatcaatgtggagcaagctttcttaaccatggctggcgagaat

SEQ ID NO: 231248 - DNA, 364 bp, Gossypium hirsutum
atctctgcggctgccagcaggcagatcatgagccatcagctcctctggggccagctataggacaacagaactctcaccaaaggaccagacgcagcgggtaccatgggacagtgtcggtcagccaacgcagaggatgctcaggaattcagtgacgtggagagggccattaagaccctcatcaagaacttccaccagtactccgtggagggtgggaaggagacgctgaccccctctgagctacgggacctggtcacccagcagctgccccacctcatgccgagcaactgtggcctggaagagaaaattgccaacctgggcagctgcaatgactctaaactggagttcgggagtttctgggagctga

SEQ ID NO: 231249 - DNA, 440 bp, Gossypium hirsutum
gactcttgacatgacttgtttgaactgtggagtttatccttcagatatcctaccttatcagttacagacttctgccactgggaccgaaaatctagcactctcagctgaaattaaagcagcagttgggaaccttagatctggatattcgaggattataaggatctgtaggtgtgtttcccaggtgattcaatcttcaggcaggtgatgagggtttctagcatcttaaagaagacaggagggacatcaacaatttgttggagtcctttcaatatttgcttgtgtgagcatgaagtttctctgtaaattgtattctgcatgttacaacttgccctgacatccttagtaagtcatgattacatttctttctcaaatttgtggaacaattttttgtggttgtgtaaatctttatcctggggcacgttaaagtagcctgtttacct

SEQ ID NO: 231250 - DNA, 396 bp, Gossypium hirsutum
aaacaaagcgttcttcatatggttttcctgtttgtttccatggaaaacctgtaccattaccttgtaatcatcttattcattcttctcaccatcaagcttttgagtcataaaaccaaaaatttacctccgagtcccttttctctgccaattattggccaccttcacctgatcaaaaacccactttaccaatcactggccacgttattatccaaatatggccctgttttatatctcaaattcggatgcagacatgtccttgatctttcttctccttctgctgttgaagaatgcttgaccaagaatgatataatatttgcaaaccggcctcgtactatggccggggatcttatgacgtacaactacactactttcgtttgggctccttacggatcactt

SEQ ID NO: 231251 - DNA, 391 bp, Gossypium hirsutum
ggacaatgtattgatccgtgagttccttgaggagaaaggtaatggcagagttctggttgtagatgggggtggtagtttaaggtgtgccatacttggaggcaaccctgtagttcaagctcaaaacaatgggtgggctggaatagtggttaatggctgcgtaagggatgttgatgagataaacggttgtgacattggggtgagagcgcttcattctcatccaatgaaagccaataagaagggaattggggagaaacatgtccctataaccattgccgggactagaatctgtgatggggagtggctttatgcagacactgatggtatcctcgtctccaaaactgagttatctgtttgagttcccttttctccctaaagattaaaatctgcaaga

SEQ ID NO: 231252 - DNA, 435 bp, Gossypium hirsutum
ggattagctaatcagtcctcttctaccctccaaagccgtgcagcatcttcttctttttttcatttttcttcccatttccttccaaccttctccctccttttcatgcttctatcctgaccaaccctttaacaaaccctaacaaccctcaacaaggccttcaattacgaatcgtatgaggtgacagagtaacagagagtagcagcaatggttcccaagttcgtgctactcctggtcatacaatgggttgtgttacctatgtcacgggagatggacctgatcaacctcagccaaagatggctttcacaggagatgctctgttgataaggggatgtgggaggacagattttcagatttttacattaccgaaagagacattgctatatccagctcatgactacaaaggattctcagtaaccactgtgggagaggagatgc

SEQ ID NO: 231253 - DNA, 318 bp, Gossypium hirsutum
cacaatcttccaaatctctgggcctctccaaagcgaaccctctcttctctagaaaccaccgtcgagccatggctctaatcacccgaaccaccgccaatcgcctacctcacctcctctccctacagcgtgccctcgctatccacaccaccgacccttctatctcctcttctgccaccccaaccacatacgctcgcccttctccgccgtccacctccgggactccctccagtctgtctaagcctgctgagtacgcgatctccaaggtcgatgacctcttgaactgggcccgtcgtgggtccatatggcccatgactttcg

SEQ ID NO: 231254 - DNA, 379 bp, Gossypium hirsutum
aagaagatgatgatgaattcgacagtgatgatagtaatgatgaaggaatggaaataatagcgaaaggatttggagtgaaaaggtatggttggcttgtttatatggataaaaaagcaaaagaggaggaaaaaagacagaaagaagtaatcaaaggcgatcctgcaattaggaaactgagtcgcaaggaaaggagaaaagcttctcaaatagagagggagagagaaagagaagctgcacggataaccggaacacgagtactccggaatctaggcgtagtccaacctatgatgcttatccacgtaggaggtcaagatctagatcgcgttcatattctccatcatactcaaggcgccatgcccgtggaggttattctgatgat

SEQ ID NO: 231255 - DNA, 316 bp, Gossypium hirsutum
tttgtgaattgggtgattgtatttattgcaggattttgtttaaagagagatccaaaaatggcagggaaaatatcggctgcatcagctcgggctcacactagaaaatctaagcaaaacacttccttcaagcttctctcagggatattcacaaagacactattggtcttgtttgtgggagctttggcatgggcttatcaggccattcagccgccgccacccaagacttgtggctctcctgatggtccactcatcacagcgtcgagaataaagctcagggatggacggcatttggcctacaaagagcatggcgttccac

SEQ ID NO: 231256 - DNA, 339 bp, Gossypium hirsutum
tatggctcaaaatatggccaggagaagggttgttttggtgcagattttggcactagccttggccgctgttatgccattgctctcaggaggtgtggatattcaacaagttagggtgctggcagctaaattcaacgtgacttgcgtagtggtattcggagactccagcgtggatccaggcaataacaactatattgctacgccctttaagggtaatttcctaccgtatgggaaagacttcttcagaggccacccgactggacggttcagcaatggaaggctagccactgattttattgctgaagctttgggttacacgaacgaaattcgacctttccttaa

SEQ ID NO: 231257 - DNA, 339 bp, Gossypium hirsutum
cggacgcgtgggtttaaaaactaattacgtgccgactgctccgatctttggagcaaagcacagtttgcgacgcatggccgtcggtaagaacaagaggattttcatgggacagaatggcggaaagaataaggcagcgtatccttttgctacaaaggattgttacgatatcaaggctccttcagttttcactaccagaaatgtggcaaaaactctcgtcacccgtactcagggtaccaagattgcttctgaaggactcaaacaccgagtgaccgaagtttccctggctgatcttcaaggaggtgatgaggatcatgcttacagacagattcgtttgagagc

SEQ ID NO: 231258 - DNA, 371 bp, Gossypium hirsutum
tttgtttccatggaaaacctgtaccattaccttgtaatcatcttattcattcttctcaccatcaagcttttgattcataaaaccaaaaatttacctccgagtcccttttctctgccaattattggccaccttcacctcatcaaaaacccactttaccaatcactggccacgttattatccaaatatggccctgttttatatctcaaattcggttgcagacatgtccttgttctttcttctccttctgctgttgaagaatgcttgaccaagaatgatataatatttgcaaaccggcctcgtactatggccggggatcttatgacgtacaactacactactttcgtttgggctccttacggatcactttggcg

SEQ ID NO: 231259 - DNA, 419 bp, Gossypium hirsutum
cccacgcgtccggcattagcaaccatagccatggcttcctcaccaaaactcttctctatgtctatcctcttcctttttgccctcttctccatgcaaatccatgctagagagtacttcagcaaattcccaagagttaacatcaatgagaaagagacaacaaccagagagcaaaagcacgagaccttcgttccccagaccacccaaaagccagaagaacaagagccaaggttcattcctgaaacccaaaatggttatggcctttacggccacgagtcatgctcaagccggcccactttcaccaccaaagaaacctatgaaccctatgtcacccctgttagattccaccctgatgagccctataacagcatcctcgaatcctccaacaataaagacacttactactacaacaagaatgccta

SEQ ID NO: 231260 - DNA, 336 bp, Gossypium hirsutum
cgcaggagttcaatctgccatgggggcttacaagtacgtgtcagagctatggaggaagaagcaatccgatgtgatgaggttcttgcaaagggtgaggtgctgggagtaccgtcagcacccttccatcgtgcgagttaaccacccaactcgccccgacaaggctcgtcgattggggtacaaagccaagcagggttatgtcgtctatcgtgtccgtgtaaagcgtggtgggaggaagagaccacttcctaagggtattgtatatggaaagcccacaaaccatggtgttacccagctgaaattccaacgtaacaaacgatcagtttcataggaacgagc

SEQ ID NO: 231261 - DNA, 350 bp, Gossypium hirsutum
catagccatggcttcctcaccaaaactcttctctatgtctatcctcttcctttttgccctcttctccatgcaaatccatgctagagagtacttcagcaaattcccaagagttaacatcaatgagaaagagacaacaaccagagagcaaaagcacgagaccttcgttccccagaccacccaaaagccagaagaacaagagccaaggttcattcctgaaacccaaaatggttatggcctttacggccacgagtcaggctcaagccggcccagtttcaccaccaaagaaacctatgaaccctatgtcacccctgttagattccaccctgatgagccctataacagcatccccg

SEQ ID NO: 231262 - DNA, 402 bp, Gossypium hirsutum
tctgctttcgccaaacaaacgcaagatttgtagattcatttctcttgtctatctgcctccgtatcaatggctttgccaaaccagcaaactgtagattatccgagcttcaagctcgttatcgtcggcgatggaggaactggaaaaactaccttcgtgaagaggcatctaactggagagtttgaaaagaaatacgagccaaccattggtgtggaggttcatcccttggacttcttcactaactgtggcaaaatccgtttctactgctgggatactgctggacaggagaagttcggtggtctcagagatggttactacatccatgggcaatgcgccgtaattatgtttgatgtaacttgccggttgacatacaagaatgttccaacatggcatcgggatctttgc

SEQ ID NO: 231263 - DNA, 300 bp, Gossypium hirsutum
aaagagagaagccttaccaccgttgccgtagccaccatgggtcgtatgcacagtcgcggtaagggtatttcagcctcagctctgccttacaagaggaccccgccaagctggctcaagatctcttctcaagatgttgaggaaaacatttgcaagttcgcaaagaaaggcttgaccccatctcagattggtgtcattctccgtgattctcatggtattgctcaagttaggagcgttactggcagcaagatcttgcatatcctcaaggctcacggtctggcccctgaaattcctgaggatttg

SEQ ID NO: 231264 - DNA, 373 bp, Gossypium hirsutum
ggaaattccctttcgttttcccccaaaaagtttccaatttctcctccttcaggatcgacgctagactatccatcgccaccgttcatcatcgtctcagccgcctctcttaaaaccagggataagaaaagatgggagctttcatatcgaagttctggttcatgttatttcccgcaaaggaatataagattgtggtggttgggttagataatgctggcaaaacgacgacgctttacaagcttcaccttggtgaggttgttactacccatcctactgttggcagcaacgtttaagagcttgtttataaaaacatccgtttcgaggtatgggaccttggtgggcaagaccgactacggacatcgtgggcaacatacta

SEQ ID NO: 231265 - DNA, 329 bp, Gossypium hirsutum
tgctatccttctgatcatctctctcttcctgacagcaaaacaatggctgatattccgatcagattcggaatcattgggtgtgccgagatagcccgcaaagtttctcgagctatccagcttgctcctaacgccacagtctccgccgttgccagccgctcctttgacaaagccgccaatttcgccaaggccaatggcttcccacctgacaccaagatctatggctcctacgagtcccttcttgacgaccccgacatcgacgccgcttatttgcctttacccactagcctccacctcaaatgggctagtttgacggctcagaaaaagaagca

SEQ ID NO: 231266 - DNA, 403 bp, Gossypium hirsutum
aaaatggatggttattgtagcagaagggtaatcatgtttttggtgtttgcatttgcagcaataagcagagggtatggacaagaatcaaccactcttgttcctgcaatcatcacctttggtgactctgtggtagatgtgggcaataatgactatctccctaccatcttcaaggctaactatcctccttatggacgggactttgccaacaaaaagcctactgggaggttttgcaatggaaaattagccactgacatcactgctgaaactctggggtttacaacttatccaccagcttaccttagcccagaagcatcagggaagaaccttctgcttggagccaattttgcttcagctggctctggctatgatgacaaagctgccatggtgaatcatgccatcacat

SEQ ID NO: 231267 - DNA, 320 bp, Gossypium hirsutum
gttgttttatgtctctccaattaatatgcagatcttctttaagaccctgaccggtaagaccatcacctttgaagtctagagttccgacacgatcgacaacgttaaggcgaaaatctaagacaaggaagggatccctccagaccaacaatgtattatctttttcggaaaacagttcgaagatggccggaccttggccgattacaacatccaaaaggagtacacctcttatttacgccttcgtctacatggtggcatgcagatgttggtcaaaacccttactggttagaccatagctttggtatgtcaaagctcttacacca

SEQ ID NO: 231268 - DNA, 365 bp, Gossypium hirsutum
cagaggttaaagagacggcgccaatcagctgtccgccttgactgaccgtccggcatcgtcttggccctcgattttgcccttttgtaaaccttttttttcaccaattcccgaaatggcagtgaaaccctccaaggccgataagaaaatcgcgtacgacgcgaaactgtgccagctcttagatgagtacacgcagatcttgatcgccgcagccgacaatgttggctcgaagcagctccagaacattctgaaaggtctccgaggtgactcagttgttttaatgggtaagaacactatgatgaaaaggtctgttaggatgcatgctgagaagactgggaacgaagctttccttaaccttatccctttgc

SEQ ID NO: 231269 - DNA, 332 bp, Gossypium hirsutum
cccacgcgtccgcttagaaggtgtcttaataaacgccttctttcttcttcttcttattcctttattgctttttagaatttttcttaatcgaaaatgagagagtgcatttcgatccacatcggtcaggccggtatccaggtcggaaacgcttgctgggagctttactgtctcgagcatggaatccagcctgatggtcagatgccaagtgacaaaactgtcggaggaggtgatgatgcttttaacacctttttcagtgaaactggtgctgggaagcacgtccctcgtgccgtcttcgtggatcttgaacccactgttattgatgaagtgagaac

SEQ ID NO: 231270 - DNA, 416 bp, Gossypium hirsutum
  unsure (1)..(416): unsure at all n locations
cagcaatctcaagggctttattctggcgatggtctctagcgccttcattggctccagctttatcatcaagaaaaagggtctccgaaaggccggtgtcaacggcccccgtgctagttctggtggatatggctacttgttggagccgctctggtgggttggcatgcttactatgattatcggggagatttccaatttcgttgcttatatctatgcacctgctgttttggtaacgcctcttggtgctttgagtatcatcgttagtgctgttttagcacatttcatgttaaaggagaaactgcagaaaatgggaatgttgggatgccttttgtgcatagtangttcgacaatcattgtgcttcatgctcctgaggagcgttctattagctcagttgaagaaatttgggaatttgctactc

SEQ ID NO: 231271 - DNA, 423 bp, Gossypium hirsutum
cccacgcgtccgcggacgcgtgggttttttttttaaagaaaatgaactataagacctcctcttctgtttccattatcatcatttctcatctctgatcttggtaaactcttcattggtgggatatcgtgggacaccgatgaggaacgtcttaaggagtatttcggaaagtacggggaagtggtggaggcaatgatcatgagagatcgtgtcactggccgtgcccgtggctttggtttcgttgtctttgccgattctgctgttgctgagagggtaattatggataagcatatgatcgatggtcgcaaggttgaggcaaagaaggctgttcctagggatgatcaaattgttctaaaccggaacgtggttggtgtcactggatctaccggttttggacgaacgaaaaagatttttgttggaggtttg

SEQ ID NO: 231272 - DNA, 367 bp, Gossypium hirsutum
ataatttcttccgttgatctttgttagagattagctttttaatttttcattatgggaaagatcaagatcggaatcaatggatttggaaggatcgggcgtttggttgcgagagttgctctccaaagcgatgatattgagctcgttgctgttaacgatcctttcatcaccactgaatacatgacgtacatgtttaagtacgacagtgttcacggtcaatggaagcatcatgagcttaaggtgaaggactcaaagacccttctctttggtgaaaagcctgtcacagttttcggtatcagaaaccctgaggaaatcccatgggctgaggctggagctgagtatgttgttgaatctactggtgtttttactg

SEQ ID NO: 231273 - DNA, 263 bp, Gossypium hirsutum
ataatttcttacgttgatctttgttagagattagcttggtaatttttcattatgggaaagatcatgatcggaatcaatggatttggaaggatcgggcgtttggttgcgagagttgctctccaaagcgatgatattgatctcgaggcgggtaacgatcctttcataaccactgaatacatgacgtacttgtttaaccacgacagtgttcacggtcaatggaagcaatgtgtgcttgaagcgaatgactcaaagacccctctttt

SEQ ID NO: 231274 - DNA, 334 bp, Gossypium hirsutum
cggacgcgtgggttcaccgtcctttatttttccaactaaggttaggctttaaactttaaaacattatgggtttagcagcagccctcctcttcctcctcctagcagctccggcggcttttgccgagcaatacaccgtaggagacagcagcggttggacctcgaccggagattaccaaagttgggttcaagggaaaacattcaccgtaggcgacacacttttgtttacctacggtggcagccactcggtggaggaagtatccaagagcgactacgataattgcaacaccggcaatgctattaaatcctacagcgatgggaacactgtcatcacact

SEQ ID NO: 231275 - DNA, 373 bp, Gossypium hirsutum
cttattccttttatatttttcctctccaattttccgtcactttcccgagaaaatgagagaaatccttcacatccaaggtggccaatgcggcaatcagataggagccaagttctgggaagtcgtatgtgccgaacatggcatcgattcaacgggtcgatatggtggtgactcggagctccagcttgagcgaatcaatgtttactacaacgaagccagttgtggccgttttgttccccgcgcagttttaatggatctggaacccggtaccatggatagcgtaagatccggtccttacggacaaattttcagacccgataacttcgttttcggacagtcgggcgccggaaacaattgggctaagggacattacact

SEQ ID NO: 231276 - DNA, 376 bp, Gossypium hirsutum
atctcatatctctcctttgtttccccttttctctcttttttcaaccctaaccctacctcaccaaccaggattcaacatgaagggaggaaaatctaagtcagatactaagagtgccaagctatccgtgaaatccaaagctggaaagaaatcggggaaggctgccaaggatccaaacaagccaaagaggcctgctagtgccttcttcgttttcatggaggagttccgtgagcaatacaagaaggatcaccctaaaaacaaatccgttgccgctgtcggcaaagctggtggagataaatggaagagcttgtctgaagctgaaaaagcaccttatgtagccaaggcagaaaagcgaaaggtcgagtatgaaaagaacatg

SEQ ID NO: 231277 - DNA, 434 bp, Gossypium hirsutum
  unsure (1)..(434): unsure at all n locations
gccaattgtttgagctagctagctcttactcaaatggcaaccaaaacgatgatgttgcaaatattttcacttttcttctttttgttcagtatctgcaactccattttccttggtgctaatggagatgacaatggtggttggcaaactgcccatgccaccttctacggtggtgctgatgctaccggcacaatggggggagcttgtggttatggaaacctgtacagtcaagggtatggaacgagcacagcagctttgagcactgcacttttcaacaatggcttgagctgcggtgcctgctacgagctccggtgcaacaatgatcctcaatggtgcattagtcgaaccataaccgtgacagccaccaacttttgtccccctaactatgncttatctagtgacaatggcgggtggtgcaatcccccacgagaacactt

SEQ ID NO: 231278 - DNA, 418 bp, Gossypium hirsutum
  unsure (1)..(418): unsure at all n locations
ttcttaattatttctctatctcttgcaatatgcctccagcctcgcccgatttctccagctctgtcaagcttaagtatgttaagcttggctaccaatacgttgtggatcattttcttactctcttgttggttcctgtcatggttggtatccttattgaagttgttcgtttaggccctcaagagattgttaacctatggaactccctccattttgatcttattcagatattgtgctcttctttcttcatcatttttattgccactgtttacttcatgtccaagccacgatgcatctaccttgtggattatgcatgctacaagcctcctgtgacttgcagggttccttttgctactttcatggagcactccaggttgattntgagcaacaatcctaagagcgtggagttccagatgaggat

SEQ ID NO: 231279 - DNA, 419 bp, Gossypium hirsutum
cctccatcacccatcccaaccgccaccggctcacgatccgctgccaacgagatcttaaccgactttctcgagaagtcgttacagatccccgacctaacgctacccgagtgccagacactccgccaccacggcctacccgataaggtcgatttccaatcccttggtttaagggaggtggggtcggtcgagcggtttatgcgatctgcacggaagtatggagtggtggcgatagggctgcatgggatcgatgcgggggaggaggtaagggcgacggtgaaagaggcggcgagagtgttcggtgtgttggaagagagagatacgggatacaggaggaattcggcgggaaagagggagggagatgtgtggattgattgcaaagaccagaggatggagtgggctcgccaatatatcggcgttca

SEQ ID NO: 231280 - DNA, 363 bp, Gossypium hirsutum
ggcaggcaggcctatatttcttggtttcaataggactccttacgagcgttgattctatctactattatctaaaaataatcaagttattaatgactggacgaaaccaagaaataacctctcacgtgcgaaattatagaatatcccctttaagatcaaacaatttcatcgaattgagtatgattgtatgtgtgatagcatctactatacctggaatatcaatgaacccgattattgtaattgctcaagatacccttttttagtttagcttttagttagcttctagaatctatttcttagttcaaggtccctctttactaactggaatcaaagaattagtagatctgttctgcccaaaatgggaat

SEQ ID NO: 231281 - DNA, 390 bp, Gossypium hirsutum
cttcccgtaagaatctcttacatggtgtagttttgtctggtggaatatgtcctattaccaagaagatgatgctgaatacatagcagaagagtatgacatggaggacatagatgacatggatgaagagttctgcggcagagatatgtctggctcggagtctgatgttgatgaatttgattactcgaataataaaatatctgatacttctgctgctgaagctagaagaggaaaagacatccagggaataccttgggatcagctcagcatcactagggaaaaatacaggcaaactaggctagaacagtacaagaactatgagaatatcccccactctggggaagtgtcagggaaggattgcaagattaccaagaagggtgcctcatactatga

SEQ ID NO: 231282 - DNA, 390 bp, Gossypium hirsutum
ttctcaccggaaatcatttccgcttcttgcaagcagccgatcaaaactaacagcttaatacagcagcatttccccctcatttttcaattaaaatcccaaaatggtaataaattttgtctgtgtttttttagtttcagttctggtactgagtttgggagtaagctcggaaccagttgaagacaagcaagctctccttgctttcctttcacagaccaaacacgagaaccgggttcaatggaactcatccacctcagcctgcgactgggtcggtgtcgaatgcgatgccaaccgctctttcgtctacactcttcgtctcccaggtgtgggcctcatcggttctattcctgccaacacagtcggtaggttaaaccaactccgagtttaagtcta

SEQ ID NO: 231283 - DNA, 401 bp, Gossypium hirsutum
ccaaaacaatgggttcaaccggtgaaacccaaatgactcccacccaagtctcggatgaggaagccaacttattcgccatgcaactcaccagtgcctcagtccttcccatggtcctcaagtcggccatagaacttgacctgctggagatcatggccaaagctggcccaggtgctttcctctccccaaaagaattggcttcccagctccccaccagcaaccccgatgcacctgtcatgctagaccgcatcttgcgcctcctggctacctactccatcctcacttgctccttgcgcactcttcctgatggcaaagtggagagactctatggtcttggccctgtctgcaaattcttgaccaagaatgaagatggcgtcactctttccgcccttagtctcatgaat

SEQ ID NO: 231284 - DNA, 393 bp, Gossypium hirsutum
  unsure (1)..(393): unsure at all n locations
cttgtatcatcactctcccaccccgaccgcttgattttgatcagacggtaatcatgccgatcagaaacatagccgttggccggcctgaagaagctactcatccagatgctcttaaagcagctttagctgagttcatatcaacgttaatcttcgtttttgctggatctggttcaggcatggcttttaataagctgaccgacggcggtgcaacaactccggctggtctcgttgccgcctctctagctcacggatttgcgcttttcgtcgctgtctcagtcggtgctaacatctccggtggccatgtgaatcccgccgatacattcggtgctttcgttggcgggaacattactctnttacgtggtatcctttattggattgctcaactccttggct

SEQ ID NO: 231285 - DNA, 367 bp, Gossypium hirsutum
gaaaagaagaggaaaaaccagacaaacggcgagaccccaacttttatttctattttccttttcccttctctgtctcatttctttttccgccgccgattcctccatcacagccgacttacgtctcaccgattccagtttcccgtcggttcatgcgaagaagctgataatggagacgcacacgcttcctaaaggggaagtcaatgtcgttcacgaacaccggctttcgttgccggagggtcccaaactggtggagaagcggttcaagttcccaactttggaagtgcccggtggagtttcctttgaggatatgggtcaccatgctgggtattacaagcttgctaattctcatgatgccagaatggtctac

SEQ ID NO: 231286 - DNA, 416 bp, Gossypium hirsutum
caaggttaccctgcttgttgtcctctcatgtgtggtggctgcctcggggggacttatctttggttatgatcttggagtttcagggggagtaacctctatggaccctttcctcaaaaaattcttcccgaatgtgtatcgaaggatgaaagaaggtaccaagattagcaattactgcaaatttgatagccaactgttgaccttgtttacatcttcactctacctatctggccttgtttcttctttatttgcatctactgtgactcgagtctttggacgaaaggcgtcgatgcttgtagcaggggttgctgtccttattggttcagcccttggtggcgctgcttctaatctctacatgcttgtatttggtcgtctttttcttggaattggacttggatttggcaaccagtcgatcccac

SEQ ID NO: 231287 - DNA, 389 bp, Gossypium hirsutum
gaaacatattgggtttccttttcttgatattggcttcactaacaagcctctcttctagccttcctagtgaatactccatagtggaacatgagattgacgcatttctttcggaggaaagggtgttggagatcttccaacagtggaaagaaaagcatcggaaagtgtaccggcacgccgaggaggctgagaaaaggtttgaaaatttcaaggggaatttgaagtatatcctagagaggaatgcaaagagaaaagcaaactaatgggaacatcatgtgggattgaacaagtttgctgatatgagcaatgaggagttcagaaaagcttacttgtcaaaggtgaaaaagcccatcaacaaagggataaccctgtcaaggaacatgaggagaaag

SEQ ID NO: 231288 - DNA, 285 bp, Gossypium hirsutum
gtttgagattggaagtgaaactaaaataactgagttaatatggcgggccaagttccgagtcgacaattattatcgatggcgagtggagagagcccattctcaagaagcgactcccaaccatcaatcccctactgaagagagcataggtaacattccagcggctacagctgatgacgtggagcttgcggtggcggctgctcggagagctctttctagaaacaaaggtgaggattgggctaccgctcctggcgctgtccgtgccaagtatttacgtgccatcgctgc

SEQ ID NO: 231289 - DNA, 387 bp, Gossypium hirsutum
attttctctcagggaagtaagttatccggtttgactgtttataagcattacaaaatgtttttcgatagatatggttaccatgggacgtcatttgagcagagttatcgatgttaccctgcatctttcattgaaaagccacaaattgaaagcggtgataaaattatcatgcctccatctgcacttgatcgcttggctctctgcatattgattatccaatgttatttgaacttcggaatgatgctgctgagcgtgcctctcattgtggagtgctagagtttatcgcagaagaaggcatgatctatatgccatattggatgatggagaatttgctcctacaggagggagatattgtgagggtgaaaaatgtaactcttccaaaggtaccta

SEQ ID NO: 231290 - DNA, 410 bp, Gossypium hirsutum
ctacaacaaattttacgatgctttttcgaagaatctgaagttgggtattcacgaagacagccaaaaccgggctaagttggctgatttgctccgataccactcgacgaagagcggtgacgagttgacgagcttgaaagactacgtcaccagaatgaaggagggccagaaggatatttattacatcactggtgaaagcaagaaggccgttgagaactctccgttcttggagaaactgaaaaagaggggatacgaagttcttttcatggtggatgccattgatgagtatgcggtcggacagttgaaggaatacgacggtaagaagcttgtctctgccacaaaggaaggtttaaatctcgaggacgagacggaggaggagaaaaagaaaaaggagggaaaaaagaagtcttttg

SEQ ID NO: 231291 - DNA, 408 bp, Gossypium hirsutum
ctcgattctacttaacgcaaatagttcgagtttcgtaatcaatggctttaccgaaccaacagactgttgattatccgagctttaagctcgttatcgtcggcgatggaggcactggaaagaccacatttgtgaagaggcatctgactggagagtttgaaaagaaatatgagccaacgatcggtgtggaggttcaccctttggacttcttcactaactgtgggaaaatccgattctactgctgggatactgctggacaggaaaagtttggtggtcttcgagatggttactatatccatgggcaatgtgctataattatgtttgacgttactgcccgtttgacatacaagaatgttcctacctggcaccgtgatctttgcaaggtgtgcgagaatattcctattgttctat

SEQ ID NO: 231292 - DNA, 339 bp, Gossypium hirsutum
gttcttccattttttaatcaagttccccccaccccgctcaacacctctccctctaacaagccaaaggccccaagcagattctatttgttctaacatggagaaaagccatgaacttgaactgacccagatgaggaaatcagtagagaaacttgggttttcaacagagaaatacggggatccgacactcatgagattcttgattgcaagatcaatggacacagataaagcttcaaagatgtttgtccagtggctgaaatggaggtcttctttagttcctaatgggtgcgttgtagaatctgaagtgcctgaccaattagaagccagaaagatttttttgca

SEQ ID NO: 231293 - DNA, 436 bp, Gossypium hirsutum
cccacgcgtccggatcaatttgactaggaacggatcacagagactgagagtgaagacacccacccaatcaaccttgtgaaaatggcgacaccccaattcctatcatccttccggtactccgacagtctaacagtcgtagctatctccttttgcactgccattgtctgcgaagccatctcatggctcttaatctaccgcaccaactcttacaaatccctcaaatcctctatcgacaaagccgccaagaaactcgaaatcatgaaaaccgaccaaaaccctagcaagttatccaccaaaaaatccaaaaccaagaagatcgaccgtgtcgaaaccagcctcaaagaatccagccgtgacctttccttattcaagttcaaatctggggctgtcgtcgccctcgttttgatcgtcgtttttggcttcttgaattctcttt

SEQ ID NO: 231294 - DNA, 419 bp, Gossypium hirsutum
  unsure (1)..(419): unsure at all n locations
gtggtttaagggatttttttcattcgtttcttctcacgctcgattaccttacaaaaagagaaaatgaccaagtgttacccaactgtgagcgaggaataccagaagtcagttgaaaaggccaagaggaagctcagaggtctcatcgctgagaagaactgtgctccactcatgctccgtttagcgtggcactcagctggaacttttgatgttaagaccaagaccggaggtccattcggaaccatgaagcatcctgctgagctcgcacatgctgctaacaacggcctagatatcgccgtcagacttctcgagccgatcaaggagcagttccctaacctcacctacgctgacttctatcancttgctggtgtcgttgccgttgagattactggtggacctgaaattcccttccatcccggaag

SEQ ID NO: 231295 - DNA, 440 bp, Gossypium hirsutum
ggaagagctgtcctttttctctctctatattttctcatctccttttccaccgccgttgatctcgatccgtatccccgttttcaaaaaagctccaaaaagatggccaatgctgcatcgggaatggctgtgcatgatgattgcaagttgaagttccaagaacttaaggcaaaaagaacccaccgctttattgttttcaaaatcgaggagaagcagaagcaagttatcgtggagaagcttggtgagccaactgagagctatgaagattttactaaatgtcttcccgctgatgaatgtcgttatgctgtgtacgattttgattttctaacagccgagaacgtcccaaagagcagaatctttttcatcgcatggtctcccgatacatcaaggatcaggagcaaaatgatatatgctagctccaaagacagattcaagcgagaact

SEQ ID NO: 231296 - DNA, 424 bp, Gossypium hirsutum
acgctttgtagtagctgttttctctcttttagttattggtttttttttcgttctttatattcttttttgtcgacacaacaaaagaaaatagtgatggccggtaaaggagaaggtccagcgatcggtatcgatctcggaactacttattcatgcgtcggtgtttggcaacatgatcgtgttgaaatcatcgctaacgatcaaggtaacagaacgacgccgtcttatgttggttttaccgacaccgagcgtttgataggtgatgctgccaacaaccaacttgttttgaaccctatcaacaccgtattccttgcacaaagattgattgtacatcaattcaaggatgcttctttataaagtgacactaaattgatggacgtgctggaatagcagcagagattttgatgctgaaaccgcttataattta

SEQ ID NO: 231297 - DNA, 404 bp, Gossypium hirsutum
ctcaggctcaggctcaggctcaagccggcccagtttcaccaccaaagaaacctatgaaccctatgtcacccctgttagattccaccctgatgaaccctataacagcatccccgaatcctccaacaataaagacacttactactacaacaagaatgcctacaagtccactaagcagcaaaacttgggcgaggccattttcaccgagaaaggatggagcaccaaggaaaaccagaacaacaactactacaacggcaacattaatggcgagaagcaaggcatgagcgatactaggtacttggagaatggaaagtactactatgacgtcaagagtgagaacagctattatccaaaccagctcgacaactcaagaggagttgcttccaggaacgagttcgatgagaatc

SEQ ID NO: 231298 - DNA, 414 bp, Gossypium hirsutum
cggacgcgtggggcaagccccaaagtgaagaagtttatgaacatcattatgaccaaactgcaggggagtggcgatgacggtgaagggggtggtttcatggggaaggttgggaatctggcactacagtttcttaaacaaaagctggatgatgacgaaggatacggtaaaccggcacttgagactgaagtgagtagcaagcaagaggcttatgcatgagctggtaagcactctcttcctgacagtggaattcttatcagcggctgccagaccgaccaaacttcagcggatgccagcccatcagggaatgcaagcaaagcttatggagcacttagcaatgctattcaaaccataattgccgactcagatggctcaattactaataaagagcttgttctgaaggccaggcagatgctc

SEQ ID NO: 231299 - DNA, 437 bp, Gossypium hirsutum
gaagagagtgaacaaaaatggagatggttaagtgttttatgattgtcctgattctgggtctttgccacgtgtccatggttgcaccattggaggagaagaagagtcacagaaagacttacatcgtgcacatggctaaatccgagatgcctccgagtttccagcaccatactcactggtatgactcctctttgaaatcagtttccggctcggctgcaatgctctatacctacgacaacgttatccatggattctctactcagttaactgacaaagaagctgagcaactcgagagccaaccagggatcctcgcggttttacccgaagtaagataccaattacacacgactcgtacacctgagttccttggactcagtcaagctgctgctttgttccctgagtctgagtcggcgagtgaagttgttattggtgtgttggat

SEQ ID NO: 231300 - DNA, 421 bp, Gossypium hirsutum
agaaggccttgagaaagcagcaccattcctgaaggcccttattgaaataccgtttattaaatcggttatccaaggttttctacctggtattgttttgaagctctttctcatttttctgccaactattttgatgatcatgtccaagtttgaagggttcacatcaatatcatctttggaaaggagatcagcaactagatactatctctttaatttagtgaacgtattcctcggcagcgtaattgcaggcagtgcactggaccagctaaacacgtttcttaagcaatcagcaaatgagattcctaaaacaattggtgtagctgtaccaatgagagcaactttctttattacttatatcatggttgatggatgggctggaatagcagcagagattttgatgctgaaaccgcttataatttaccac

SEQ ID NO: 231301 - DNA, 438 bp, Gossypium hirsutum
tatcgccaaccactgctattcgataccattgaaacgtcactgctttcagttgggatccaagtttgttgttgttgatatcgagtcaataccatcctcctcggcaacagtggagttcgcttctccttatctgcgcttcttcaagcgcacttcatgaccatgatcctttgtcctcaattttctcttgggtctcgctcgcagatccaccgccaccgccaccgccactacaaccaaaaccgatttcctaccttccgtttctcttctcgatggatcccacttctcgccccgctgtcgtcatcgacaacggcactggatatactaagatgggatttgcgggtaatgtagagccgtgttttattcaacaaacagtagtagcagttaacgaatctcttctaaatcaatctagagcttcttccaaatctaattggttagctcagtatt

SEQ ID NO: 231302 - DNA, 409 bp, Gossypium hirsutum
attcttattccttttatatttttcctctccaattttccgtcactttcccgagaaaatgagagaaatccttcacatccaaggtggccaatgcggcaatcagataggagccaagttctgggaagtcgtatgtgccgaacatggcatcgattcaacgggtcgatatggtggtgactcggagctccagcttgagcgaatcaatgtttactacaacgaagccagttgtggccgttttgttccccgcgcagttttaatggatctggaacccggaaccatggatagcgtaagatccggtccttacggacaaattttccgacccgataacttcgttttcggacagtccggtgcgggaaacaattgggctaagggacattacactgaaggagcggagcttatcgattccgttctcgac

SEQ ID NO: 231303 - DNA, 426 bp, Gossypium hirsutum
gctacatcgttcttggcgtctcttttcttcaccttttgggcgctgcttatttcaccggcgatttccctcacctgttcctcccagaagtttacgaaaaaccaagtttactccaactgcctcgaccttccttctctcgcctcttacctccacttcacttacgacccttctaacactactctctccgtcgccttcatctctactccttccaaacccggcggatggatttcctgggccataaatcccaacgccaccggcatggccggttcccaagcactcgtcgcttacaaaaactccaccaccggcgttgccgtcgtgcatacttttgacatcagctcttattcttcaattgtgccgaaggatttgtcgttcgaagttccagataagacggcggagactagaagcgacgggagcctggccattttcgct

SEQ ID NO: 231304 - DNA, 420 bp, Gossypium hirsutum
tttaagtgtttctatagggttttaattcgttcttctcattacctctcttttaacctttctcttttttgcttgctctctttgtttttcgagatctgtccgttttcttcttttcaattagcttcttgaaagctttattttcttaagaacaggaaaccgctgaagagatggcaccaccaattgagactccaaccaagtcctctggctctcaccacgcttcacatcctcctttgaatgaaaggattctttcatcgatgagcagaaggtctgttgctgctcacccatggcatgatcttgagattggacctggagctccaatggttttcaactgtgtgattgaaatcccaaaaggtagcaaggtgaaatatgaacttgacaagaaaactggtctgatcaaggttgatcgtgtgctttactcatcag

SEQ ID NO: 231305 - DNA, 411 bp, Gossypium hirsutum
aaaaaatggagttttggggagttttaatttctggggttttagtttcttggtgggttttgagtgtaaatggtgctaatttaccaccatgtcaattccctgctatttacaactttggtgactcaaactcagacactggtgggatttcagctgcttttgaacccattagagctccatatggtgtgccctattttcacaaaccatctggtagagactctgatggtcgcctcatcattgacttcatagctgagagacttaagttgccatatcttcatgcatatttgaattccttgggagcaaatttcaagcatggagcgaattttgctaatggtggatcaaccataagaagaccgaatgaaaccatttatgaatatgggataagtccatttggtttagatatgccaattatacaat

SEQ ID NO: 231306 - DNA, 409 bp, Gossypium hirsutum
gtttctcactgttagatgctctctccctctcacctcggacgatgccgccactgggttggcggagaggccatggaaggttgcggatgctaggctggttcttgaagatggttctatttggaaggctaaatcttttggtgtctctggaacccaagttggtgaagtggttttcaacacttctttaacagggtatcaggaaattctaacagatcctagttatgctggtcagtttgtcctgatgaccaatccacatattggcaataccggagtaaattttgatgatgaagaatcgaggcagtgctttcttgccggtctggtgatcagaagtctaagtataactacttcgaattggagatgtgcggaaacccttggtgattatttagcagaaagaaatataatgggaatttacgat

SEQ ID NO: 231307 - DNA, 437 bp, Gossypium hirsutum
tctgtttctggtcaagccaatctcaaaagactccccttttagctcacagctcctctcttgagtactataatgggtaaggagaaggttcacatcaacattgtggtcattggccatgtcgactctgggaagtctacaaccactggtcatttgatctacaagcttggtggtattgacaagcgtgtgattgagaggtttgagaaggaggctgctgagatgaacaaaaggtcatttaagtatgcatgggtgcttgacaagcttaaggccgagcgtgaacgtggtattaccatcgatattgccctctggaagtttgagactaccaaatactactgtactgtcattgatgcccctggacatcgtgacttcatcaagaacatgattactggtacctcacaggctgactgcgctgttctcattatcgactcgaccactggtggttt

SEQ ID NO: 231308 - DNA, 432 bp, Gossypium hirsutum
cggacgcttgggttgggttgtgcgactggccaccctagctttgtcatgtcatgctctttcaccaaccaggtgatcgcccagctcgagctgtggaaggagaaggcaaccggcaagtacgagaagaaggtgtacgttttgcctaagcaccttgatgagaaggtggctgctcttcaccttggaaagcttggggctaacctcaccaagctcaccaaggatcaggctgactacattagcgtccccattgagggtccttacaagcctcctcactacaggtactgaggagagaatacgagagagagagagggagagagttggactagaaaaaggaaccatacaacgggatggtttgattgtttgtttttactaaaatttattgatgatttgtgggtagatggttagattttgattttgataggagtttgcgtgtgggat

SEQ ID NO: 231309 - DNA, 435 bp, Gossypium hirsutum
gcgaagcgagacaaaaatggcgacttcagccatgtcggaaaaacgggtcgtcctgctctgcggcgactatgccgaggactatgaggttatggtccctttccaggctctgttggcttatggtatatcagtggacgctgtttgtcccggcaagaaggccggcgaaacttgccgcaccgctattcatcaactttccggccatcagacctataccgagatccgtggtcacaatttcacactaaatgcatcatttgaagatatagaccatactaaatatgatggtttagttatagccggaggacgagctcctgaatatcttgctatggatgcatttgtattgaacatggttcgcaattttgttaattctggaaagcctgttgcttcaatttgtcatggtcaattgatattagctgctgccggggcaattggtggtctaaa

SEQ ID NO: 231310 - DNA, 411 bp, Gossypium hirsutum
cggacgcgtgggttctgaattgaatctaaagatgggtttttgcttctgggttcgatttatttgtttgataaacttctacagcttgagttttgtaagttcacaagctgatgcaagtgctgaaaggactgttttcattgatggaaaagctcctattggtacaatagatgatgatttcatttgtgctactttggattggtggcctactgagaaatgtgattatgggacatgctatttgcgccttgctgggcttctcaatctggatcttaataaaaacttattcttggatgccgttaaagctttttcaccattgaagattatgttgggcggcacattacaggacaaaggcatatatgacactgatgacaatgaactaccctgcacttcatttgttaaaaacacttctgagatttt

SEQ ID NO: 231311 - DNA, 423 bp, Gossypium hirsutum
cccacgcgtccgctccactgcagcaggagcagagggaaaaaggataaaagcatcgtcgtgttctcgcttcttcaactctgtctctacgtctctgaacctcctcctttcgttcttttcttattcagtattgtaaaagatggccgatgctgaggatattcaacccctcgtctgtgacaatggaactggaatggtgaaggctggttttgctggtgatgatgctcccagggctgtttttcccagtattgttggtcgaccccgacacactggtgtcatggttgggatgggtcagaaggatgcctatgtaggagatgaagcacaatccaaaagaggtattcttactttgaaatatcccattgagcatgggatcgtcagcaactgggatgatatggaaaagatctggcatcatacattctacaatgagct

SEQ ID NO: 231312 - DNA, 426 bp, Gossypium hirsutum
cccacgcgtccgatttcaaattgttatctctgaaggtgtcttaataaacgccttcgatttaccttcgatttccatttacttctctattgctacgtttttgaatttttagtgagcgaaaatgagagagtgcatttcagtccacatcggtcaggctggtattcaagtcggaaatgcctgctgggaactttactgccttgaacatggaatccagcctgatggccagatgccaagtgacaagactgtcggaggaggtgatgatgcttttaacacctttttcagtgaaactggtgctggaaagcacgtccctcgtgctgtctttgtggatcttgagcctactgttattgatgaagtgaggactggtacttaccgtcagcttttccaccctgagcaactcatcagcggcaaggaagacgctgccaacaactt

SEQ ID NO: 231313 - DNA, 407 bp, Gossypium hirsutum
attgctgagtcaggggctaccgagttactgagttcttcatggctgattttcatacatcgactcatagagctaactggatcttctcgcctcaagaactggttgagaaatacaaggctgcaaatcaaagagcaatacaagcactggagaagtatgggacaacacaaatggaagtagacgctgatggttcactatcataccctgaacctattgcaagagataatgctgacaagcattctcgtccaaaacctcttaacattgaagaagaacagttcatgcgagtgttttatgagaacaaacttcgagaagtttgtagtgcattctactttcctaataaaattcaggcaactgctctaatttatttcaaaaggttttacctgcaatggtcggtcatggaacatcatcccaaa

SEQ ID NO: 231314 - DNA, 337 bp, Gossypium hirsutum
aagaaaaaatggctttgaattttaatcccatcgcctcgaaatctcagaagctcccttgctttgctcttccacgaaaggccaccctcagatctcccaagttttccatgatctccaccattccttctggctccaaagaggttgggaatctgaaaaagcctttcacgcctccaaaggaggtgcctgttcagatcacccactccatgccgcctcacaagattgagatctttaaatctttggagggctgggctgagaacaacattctgactcacctcaaaccagttgagaaatgttggcaacccgccgactttcttccagatcctaattctgacggatttca

SEQ ID NO: 231315 - DNA, 419 bp, Gossypium hirsutum
cggacgcgtggggcaactctcatccacccatttctctaaatttcctacatttttttctttagaaaatttcagtttctccttctcttcacaaatcaaaatgcgtgagatccttcatattcaaggtggccagtgcggcaaccagatcggagcgaagttctgggaagtggtttgctcagaacacggcatagatcccaccggtcgttaccaaggagacttggatcttcaactcgagagaatcaatgtctactacaatgaagccagttgtggtagattcgttcctcgtgccgtcctcatggatcttgaacccggtaccatggacagcatcagatctggtcccgtcggccagatcttccgacccgataactttgttttcggtcagtccggtgctggtaacaactgggctaaaggccattacactg

SEQ ID NO: 231316 - DNA, 236 bp, Gossypium hirsutum
gccaaggttcatccctgaaacccaaaatggttatggcctttacggccacgagtcaggctcaggctcaagctcaggctcaagccggcccagtttcaccaccaaagaaacctatgaaccctatgtcacccctgttagattccaccctgatgaaccctataacagcatccccgaatcctccaacaataaagacacttactactacaacaagaatgcctacaagtccactaagcagcaaa

SEQ ID NO: 231317 - DNA, 433 bp, Gossypium hirsutum
ctgaaggtgtcttaataaacgccttcgatttaccttcgatttccatttacttctctattgctacgtttttgaatttttagtgagcgaaaatgagagagtgcatttcagtccacatcggtcaggctggtattcaagtcggaaatgcctgctgggaactttactgccttgaacatggaatccagcctgatggccagatgccaagtgacaagactgtcggaggaggtgatgatgcttttaacacctttttcagtgaaactggtgctggaaagcacgtccctcgtgctgtctttgtggatcttgagcctactgttattgatgaagtgaggactggtacttaccgtcagcttttccaccctgagcaactcatcagcggcaaggaagacgctgccaacaacttcgctcgtggccactacactattggcaaagagatcgg

SEQ ID NO: 231318 - DNA, 417 bp, Gossypium hirsutum
tcggacgccccctcttacttatatcattcaataattttcatcaacaaagaaaaatgagagagtgtatttcgattcacattggtcaggccggaattcaggtcggaaatgcttgttgggaactttactgtctcgagcatggcattcagcctgatggccaaatgcctagtgacaagactgttggtggaagagacgatgctttcaacacctttttcagcgaaaccggtgccggaaaacacgtccctcgagctatatttgttgatctggagcctactgttatcgatgaaatgaggactggaacataccgccaactgttccaccctgagcaactcatcaatggtaaagaagacgctgcaaacaattttgctcgtggccattatacaattggaaaagagattgttgacctctgcttggatcgta

SEQ ID NO: 231319 - DNA, 259 bp, Gossypium hirsutum
ccgggttggggttggggttttggttggttcctgcaagacatgtgaatgctgcgagcaggatctggagaactactgccctcgtataatatttacctacaactcttacaatccagacgggacaaaaaattatggtggttattcggatatgattgtggttgaccagcgctatgtgctacggtttcctgataacttgccactggatgcgggtgcaccattgttatgtgcaaggatcacagtgtacaaccctatgaagtattat

SEQ ID NO: 231320 - DNA, 432 bp, Gossypium hirsutum
cttctttcctcctagcccaaaaaaaaaaaaccctctttcctttctctcgttctttttcccgttcaatcatgtcttgcttcattagcaaatatgccgatgagttggctaaaaacgctgcttacattggaacccctggaaagggtatccttgctgctgatgaatccactggcaccatcggcaagcgtctttcaagcattaatgtagagaatgttgaagataacaggcgtgctctccgtgagctcctattcacaactccaggagctcttcagtacctcagtggtgttattctctttgaggaaaccctttatcaaaaaaccgcttcgggcaagcccttcgttgatgttttgaaggaaggtggtgtcctccctggcatcaaggtcgacaagggtaccgttgagcttaacggaaccaatggcgaaactttcacccagg

SEQ ID NO: 231321 - DNA, 393 bp, Gossypium hirsutum
cggacgcgtgggtttctttccttgttctattatatatatttatcttcatcatcagacatatatacgtgtgttgcgtgaatgctcattacatattttcacaccataggagaggaagatattatatcaagctagaacatctcccttttacatcaactaagtaaagcatgcaaattcccacagagaggaaaacaggcgtctacacatacataggtcaatggccaatttactccgtggcatggtccgtccgcaacgacaaaagatctcgccttgccattggcagtttcctcgaagactacagcaacaaggtggaactggttcagttcaatctctatacatccgatttcacgactgacaatcggttagttttcgatcacccttacgctcccaccaacc

SEQ ID NO: 231322 - DNA, 369 bp, Gossypium hirsutum
ctttttccttttccaaaaacctccgatacttcctctctccctttcctccgattccatatctctctctctttctgctagggtttgggagttagtgaagaaggggttgttatttcatggggcaacaatcgttgatctacgccttcgtggcacgaggcaccgtggtcttagccgactatacggagttcaccggaaacttcaccggcatagcttctcagtgtctccagaaacttccttcttcaaacaacaagttcacttacaactgcgatggccatacctttaactatctcgtcgataacggcttcacttattgtgtggttgctattgaatccgttggcagacaggttcctatggcatttcttgagagaataa

SEQ ID NO: 231323 - DNA, 393 bp, Gossypium hirsutum
gttgggggaggaatatatacgaaagcagccgatgttggtgctgatcttgtcggtaaagtcgagcggaatatccccgaagatgatccacgaaatccagctgttattgccgataatgtgggtgataatgtaggagacattgctggaatgggatctgatctatttggatcttatgctgaatcatcatgtgctgctctttttgttgcatccatatcatcctttggtatcagccatgagtttacagcaatgtcttatcccttgctcattagctcaatgggaattgtggtatgtttgataactacactttttgcaactgatctgtttgagatcaagaaaagtagtgacatcgaaccatcattaaaacgacaactgcttatctccaccggtctcatgaat

SEQ ID NO: 231324 - DNA, 403 bp, Gossypium hirsutum
atttgaagtacactcgacagttccagcttaaagctttgttttcttttgggtgtgtatataaaaccctttcttcaatggcttacgaaggcatcctcttgggcatgggaaacccgcttcttgatatctctgctgttgttgatgaagacttcttaaagaagtatggcatcaagttgaacgatgccattctcgcagaggataagcacttgccgatgtatgaggagatgactaaaaagtatgaagtggagtatattgctggaggtgccactcaaaactctatcagagttgcccagtggatgcttcaaatcccaggcgcaactagctacatgggttgcattggtaaagataagttcggagaagaaatgaagaagaattcaaagcttgctggtgttaatgtgcattacta

SEQ ID NO: 231325 - DNA, 387 bp, Gossypium hirsutum
gctgagtcaatctcggattgcaacaaaacgcttgctgttgatccaactagcatccaggcccttgacaccagggcatcgcttttggaaaccatccgctgtttacccgactgtttgcacgactttgaacacttgaaactgctttacaattccatcttgcgagacaggaagctcccaggtccagcctggaagcgtcacaatgtgagatacagggagattccagggaaactctgtgcattaaccactaaaattcgacaattgaaacaaaggattgcttctggggagaccggaaacgttgattaccatgccttgattggtttaaggcgtggatgctcaatgtctgaattagagagggctcatttgctactctggttaagacacaaaccagat

SEQ ID NO: 231326 - DNA, 417 bp, Gossypium hirsutum
attaaccacagaaattcctatagaatatctgtttctttggttgaggttttcagaaggtaactggtaatggggagaccaccttgctgtgacaaagtcggtgtgaagaaaggtccatggactcctgaagaagatatcgtcttggtgtcttatattcaagaacatggtcctgggaattggagagctgttcctaccaatacagggttgctcagatgtagcaagagttgcaggcttagatggactaattacttgaggcccgggattcgaaggggtaactttacagaacatgaagagaagatgataatccaccttcaagctcttttaggcaacagatgggctgcaatagcatcttacttgcctcaaagaacagacaatgacattaaaaactactggaacactcatctgaagaagaagctgaag

SEQ ID NO: 231327 - DNA, 188 bp, Gossypium hirsutum
gcttctcttctccttctcttgcctttccaggttccaaactctcagtcttcctctagctcctatcctttaacaggaaatggcagtcacattcaacgacttgggttctgctgccggcttgaagaagctcgatgagtatctcctcactcgcagttacatctctgggtaccaagcttcaaaggatgatatca

SEQ ID NO: 231328 - DNA, 392 bp, Gossypium hirsutum
aatttggatacagcagtcagccaaggactacaacaatggtggtgaaggtgtatggcccagcctttgcttctccaaagcgagtgattgcatgtcttattgaaaaggagattgaattcgagactgtccctgttgatttgcttaaaggagagcacaaagaccctgaatttctcaagctccagccttttggaacagttcctgtcactcaagatggagattatgttttatatgaatcccgtgcaatcataagatactatgcagaaaaatacaaatcacaagggactgatctactgggaaagacagtagaggaaaggggtcaagtggaaaattggctagaggttgaggcacacaatttcaacccaccaatttacgccttgaccctacatttgatgttt

SEQ ID NO: 231329 - DNA, 412 bp, Gossypium hirsutum
gaaaaggtgaaattcggaacattcgatattatatcagacaatgaagttcgggaaggtttaaagaagttctcaaagtggccaacttttcctcaactctattgcaaaggtgaacttcttggtggatgtgatatagcaattgccatgcatgaaagtggtgaacttaaagaagttttcagagatcacggagttgatattattgggactgaacaaggaaccggtggcatcttggaaccgaccggattgactgcaaacctaaattctcggcttcaaagcttgattaattcaagcccggttatgctgtttatgaaggggaagcctggtgaacccaagtgtggttttagccacaaggtagttgaaatccttaaacaagaaaaagttgattttgagagtttcgacattctctcaaatgatg

SEQ ID NO: 231330 - DNA, 369 bp, Gossypium hirsutum
ctcgaccttccatcccctctccctgctttgctctgaaaagtccaagtttttctccaatggcgaccgtctctccaactcctctgttgaaagatgagctcgacatcgtgattcccacgattaggaacttggactttttggagatgtggagaccctttttccagccttaccatctcatcattgttcaagatggtgatcctaccaagaccatcaaggtccctgaaggcttcgattatgagctttacaataggaacgacatcaacaggattttgggtcctaaggcttcttgtatctctttcaaggattctgcttgtaggtgctttgggtacatggtttccaagaagaaatacatctataccattgatgatgact

SEQ ID NO: 231331 - DNA, 406 bp, Gossypium hirsutum
caaaaatacaggcaagatatgtcagtgatccatcgtgaaaacaacttaacccaatcaatcctccatttataggagcctcgatctgaattcattttcaagatcaaaaggaaatgatggatgtgagggtgaagcttttaatccttttggcaacctcactcttgatttactcgctcatagttttactcaaagtcctgtatgactactggtgggtgcctctccgtatacaacacttcttgaattcacaaggacttaaagggcctccttacaagttcatccatggatgcaacaaacaaattaacaaaatgagaagtgaagcattaagcaaacctatggggctgacacatgacatacttcccagagttttccctcattattactcctggatcaacttatacggaaagaacta

SEQ ID NO: 231332 - DNA, 338 bp, Gossypium hirsutum
gtttggtcacaccctgaccataaattttgtgtttaggaatctcagttgtgataatctccatgcatcagttcttttcatcatattcaaaggttaaagatgaacaacgcagtggtaattttaaaatggtggaaagcatagacagccagaggtctagggatgcatccttcccaaataagactgatgttagtgaaaatgctagccaccatgttaatgaggaaaaaggaccacttcttccagtttaggtttgcatatattcggtatctatgtgcaatattggcttttcttacaagaaaatttatggagtatacattcttttaggttgactcagactcggagtg

SEQ ID NO: 231333 - DNA, 385 bp, Gossypium hirsutum
ctctgaaggtgtcttaataaacgccttcgatttaccttcgatttccatttacttctctattgctacgtttttgaatttttagtgagcgaaaatgagagagtgcatttcagtccacatcggtcaggctggtattcaagtcggaaatgcctgctgggaactttactgccttgaacatggaatccagcctgatggccagatgccaagtgacaagactgtcggaggagatgatgatgcttttaacacctttttcagtgaaactggtgctggaaagcacgtccctcgtgctgtctttgtggatcttgagcctactgttattgatgaagtgaggactggtacttaccgtcagcttttccaccctgagcaactcatcagcggcaaggaagac

SEQ ID NO: 231334 - DNA, 376 bp, Gossypium hirsutum
caaaacccgaaggaaaaaggaaaatccttttttcctctgtccttccctttcaacgcagaccgaaagagaaggcggagtcctcccacaatttcttgtggccaccaatcacgctctactcttaagggaagtcagcatggatcaggctcaacacccaactgtcatgcagaaggtagcagggcagctcactcgttttagcaattcccaagattttcaagggtatgatgggtctttccgtaggcctgctctctaccaaagaaatgttgcatatcaaaattgctccaatgctgcactgcagtaccctattgtccgagcttgtggagttaccagtgacatgcctatggttccatcaacagcatctgctatttgtattcaagct

SEQ ID NO: 231335 - DNA, 397 bp, Gossypium hirsutum
cgaagaagctgtcaaagcctatggagttcaccttggaacagaaatgtgccgcaagattttagctcatggggttaagacattgcacctttatacattaaacatggagaaatctgcattagctatcctaatgaatcttggattgattgaagagtccaaaatttctaggtccttaccttggagacgccctgcaaatgtttttcgtgttaaagaagatgttcgtccaatattttggtctaaccgtcctaagagttacataaccaggactattggttgggatcagtacccatatgggcgatggggtgattctcgaaatccgtcctatggtgcactaacagaccatcagttcatgaggcctcgagcacgtgacaagaaacttcaagaagaatgggcttcccca

SEQ ID NO: 231336 - DNA, 412 bp, Gossypium hirsutum
aagactttcagatccatcacaatatcaatcaatagttgatgcagaatggaatatcatttatgacaagttggataaatgtgtgaagagtggtgcaaaagttgttctttcacggttggctattggtgatttggcgacacagtattttgcagatagagatattttctgtgctggtcgtgtagctgaggaagatcttaatcgggttgctgctgcaactggtggaaccatacaaacatctgttaacaatataattgatgaggttctaggaacatgtgaggtttttgaggaaaagcaggttggaaatgaaagatttaatatattcagcggttgcccgtcaggacggacagctactatagttctacgcggtggagcagatcagttcattgaagaagctgagaggagcttacatgatgca

SEQ ID NO: 231337 - DNA, 410 bp, Gossypium hirsutum
acagatttcagatcctccttccaagctctgcagaaagaaagtgaagaacaacgatggggctgacatttacaaagctctttagccggctttttgccaagaaagagatgcgtattttaatggtgggtcttgatgcagctggtaaaaccaccattttgtacaagctcaagctcggcgaaatcgtcactacaatccccaccattggattcaatgtggagactgtggaatacaagaacatcagcttcactgtttgggatgttggtggtcaggacaagattcgtcctttatggaggcactatttccagaatactcagggtcttatttttgtggtggatagcaatgacagggaccgtgttgttgaggcaagggatgagttgcacaggatgttgaatgaggatgaattgagagatgct

SEQ ID NO: 231338 - DNA, 397 bp, Gossypium hirsutum
gccagccacagcattcgccgcacggcatcagtctcatcaggcggggaagaatgtctcacaggaagtttgaacacccaaggcatggctcccttggatttcttccgaggaagcgagcttctcgtcacagagggaaagtgaaggcatttcctaaggatgacccaagcaaaccttgcaagctcactgcctttttgggctacaaggcaggcatgacacacattgtccgagaggtcgaaaaacctggatctaagcttcacaagaaagagacatgtgaagctgttacgatcgttgaaacccctcctatggtgattggtgggggttgtgggtatgtcaagacaccacgtggtcttcgcagcttgaacaccgtttgggctcagcatctgagcgaggaagtcaaacg

SEQ ID NO: 231339 - DNA, 408 bp, Gossypium hirsutum
cagaagaacaactacagcattatagtacctacttacaacgagcgcctcaacattgctctcatcgtctatctcatcttcaaacatctccgggatgttgattttgaaataattgttgtggatgatgggagccctgatggtactcaggaagttgtgaaacaattgcagaaactgtatggtgaagatcgtattctattgagacctagacctaagaagcttggattgggaacagcttacattcacggtttgaagcatgcttctggaaattttgttgtaatcatggatgctgatctgtcacatcatccaaaatatttgccaagcttcatcaagaagcagtctgaaactggtgccagcatagttactggaacacgatatgtcagaggtggtggcgtgcatggatggaatctgatg

SEQ ID NO: 231340 - DNA, 428 bp, Gossypium hirsutum
gtgtcttgcgggtttcacttcacagctagcaaaggatctgcaagatggaaagcatgaatagcttttggcagttaggagatgatctccggggacaatctaaagcctcagaggatcacaaatggttgatggttgcctccaaactggctgaacagacgaggataaagggtgagcgaatgaacaatctcgatctttcaaagggtccagctgaagtaaggacaagggataaatttgggttccatgaagacaacaaattcgagaaccttaacttcaatatgttgaacttggactccaagatcggagatagtgtaagcaaaagtaccttccgaaatggtatttacaacaccgatgctgtttaccagaaaaataacagccacaacattgggaacctgtctgccaacaaatatagcggcaacaaccatagcaacaaa

SEQ ID NO: 231341 - DNA, 420 bp, Gossypium hirsutum
gcgggatgttggggttgctctgcttgataggtttggtgctccctgtgttcaagggggtcgcttcttcttcgtcttatagacatcccttttgagcatgctacaagatatcatgtatggttgggacatcttaccatgatgctctttacactacatggattgttctatgtaattggatgggcaatgaatggaactcttgtgaaggaattattggagtggaaaagggttggtattgctaatttaccaggagttatcagcctcttaacctgtttgtttatgtgggttacatcgggttatccaatgaggaaagactacttcgagttgatcttctatacccatcaactatatgggagcttcggcaactttttggcattggacgggagggattttggtattagcataattgccggcgcgatatttatt

SEQ ID NO: 231342 - DNA, 412 bp, Gossypium hirsutum
ggaagggctcacccaacagagagcgatgaggatcccaagatctataggatgaagctctgggccaccaatgaggttcgggccaaatccaagttctggtacttcttgaggaagctgaagaaggttaagaagagcaatggtcaggtccttgccatcaatgagatatttgagaagaaccctaccaagattaagaattatggtatatgggtccgctaccaaagccgtaccggttatcataacatgtacaaggaataccgtgacactactctaaacggagctgttgaacagatgtacactgagatggcttctcgccacagagtccggttcccatgtatccagattatcaagactgcaactatcccagccaagctatgcaagagagatagcaccaagcaattccacaactccaaaatca

SEQ ID NO: 231343 - DNA, 293 bp, Gossypium hirsutum
cttcattttcttccctctgaaaccctaaacgcgccgccgccgccggcggccgtgaaacgccgacgaaaatggctttcgagggattagttctccgcggcaccatgcgagcccacactgacatggtcacagccatcgccactcccatcgacaactccgatatgatcgtcacttcctctcgcgacaagtccatcatcctttggcacttgaccaaagacgaaaagacctacggtgtcgctcgccgccgtctcaccggccattcgcactttgttcaagacgttggtctctcttctgac

SEQ ID NO: 231344 - DNA, 408 bp, Gossypium hirsutum
cttttgctttcttctctttcttcgccataggttcctctgtggagaacccatccccctcctttagggtttagcagttaaaaagagaaaaacaaaagtatggcgaccgccactgtccccgccgccgcaaggcagctttctcctaaagaagccgacatccaaatgatgttggccgccgaagtccatctcggtaccaaaaactgtgacttccaaatggagcgttacgtcttcaagcgtcgcaatgacggaatctacatcatcaaccttggcaagacctgggagaaacttcaacttgctgctcgtgttattgttgctattgagaaccctcaggacatcattgtccaatctgcaaggccctatggtcagagagctgtactgaagtttgcacaggacactggttgtcatgcaatt

SEQ ID NO: 231345 - DNA, 366 bp, Gossypium hirsutum
cggacgcgtgggtttctctttcttctccttttcttccctttctttttttgcttgtgggtttatcaggatttttactttcaactgataatttataacccacatttcacattttcctccaattagactgcattttcttgtcaattttagaaagttaaaaggaaacttgatttttgtgtcctctgataactttgaatatatggggaagttaatgagactcatttcaatggctcctctgtttctgctactttgccttccttttgcatttggtgggcatgattataaccaagctttgagtaagagtattctcttctttgaagctcaaagaactggttacctccctcataaccagagagtcacatggagagc

SEQ ID NO: 231346 - DNA, 417 bp, Gossypium hirsutum
cccacgcgtccgcccgtttcgattgccaaaaaattgaaattagcttcttctcttttaaatgtatagcttttttattttgttcttcttgatttgattcataaacggtgacttgggagaaagggtggaagcaggttagggtttttgggattgttgagaaggagattagcagcgtggtttccaggtgatgggcgatgagaaatcgatgatcgtgatggcgagtagggatagagagagtagagatcgggagcttctgatcccggtcgctgacgccgtccacgatgattcctccaaaccttctccttcctcttcttcccatcacgccggccgcgagaccttttacaaagttttccggagctgggcttcaaagaagttcatgacgggatgtgtcattttgtttcctatagcaatcactttcta

SEQ ID NO: 231347 - DNA, 426 bp, Gossypium hirsutum
caagatcctattatccgttatggtggtatgtatgcattagcattggcctataggggaactgcaaacaataaggctattcgtcagctgctgcactttgctgtatcagatgtgagtgatgatgttaggagaactgctgttttagcactggggtttgtcctttactcagagccagagcagactcctcgaattgtctccttactgtctgagtcttacaaccctcatgttcgatatggtgcggcacttgcagtgggtatttcatgtgctggcactggattgagtgaggccatatcattgttagaacccttgacatcagatgttgttgattttgttcgccaaggtgctcttattgcgatggctatggtcatgattcagatcaatgaagcaagtgattctcgtgtcgggacattcaggcgtcaacttgaaaaa

SEQ ID NO: 231348 - DNA, 340 bp, Gossypium hirsutum
aaaccctgcattttcaaccaaaaaattcaaaaaaaaaattctaaataagtgatggggtttccggcaaatggctcatcggacaaaccattgaagttcctgatctacggtcgaaccggttggatcggtggtttgttaggcaaactctgcgaatcccagggaatcgattacgagtacggctccggccgtttggagaaccggatttcacttgagtccgacatagccaacgtgaaaccgacccatgtattcaatgccgccggtgtcaccggtcgtccgaacgtcgattggtgcgaatcccataaggtcgagaccatcagaaccaatgtggtcgggacccttaccc

SEQ ID NO: 231349 - DNA, 313 bp, Gossypium hirsutum
agcactggctgctggtgctgacgttagtatgattggtcaatttggtgttggtttctactcagcatacttggttgctgagaaggttattgtaaccacaaagcataatgatgatgaacaatatgtgtgggagtcccaagctggtggttcattcactgttaccagggatacttccggggagaaccttggtaggggtacaaagataactctgtttttgaaagaggatcagcttgagtaccttgaggagcgacgtttgaaggatttgattaacaagcattctgaatttattagctacccgacttccctttggattgag

SEQ ID NO: 231350 - DNA, 412 bp, Gossypium hirsutum
ctttgctttctttgtattagcagcttgtgtagggggaaaaaattatgaagagggtttcctttgttgccttgtgtgtggtggcactcgcggtggtgctgttttcgggtgaaagtcgcacggcggaggcagtgacatgtaatcccgtggagcttgccccctgctcgccggcgcttacgtcgtcctcgcctccatcaagcgcttgttgcagcaagctgaaggcgcagcagccatgcctctgtggatacattaagaacccatctcttaaacagtatgtcaacagtcctaacgctaaaaaggttgcttcgacttgtggagtcccatatcctaagtgttaaatgttgcttaatggtgtatctactatctactggcagcaaataagtgattctttttgctgtcaagtactgttctgaat

SEQ ID NO: 231351 - DNA, 377 bp, Gossypium hirsutum
gcctcttttattcctacccatacacctttgcgacggggcggttctcactatggcttatgggaaactacaacatccctatcaaagcactcgaaaagatccggccgttggtttccagaattgcttttccaaaccataatattgaactcgctcgtgataacgatcctttcatcaccactgaatacatgacgtacatgtttaagtacgacagtgttcacgcgcaatggaagcatcatgagcttaaggtgaaggactcaaagacccttctctttggtgaaaagcctgtcacagttttcggtatcagaaaccctaaggaaatcccatggcctgaggctggaacctaaatttttgttgagcttactgtgttttactgacaagga

SEQ ID NO: 231352 - DNA, 350 bp, Gossypium hirsutum
gtcaatggagaagatttggcaagtggggacaggctaatgttccttccatgtggtctaaaagcaggttcttcaattacagtcgttggcactcctcgatatgctcatcaggagtacgtaccccagcttgcaaaaacgaggggtggtaatggcctagtgatggtttcacagtttatggttgagttgcaaggattgcagtctgtggatggggaagctccaccaaagattttacatttgaatcctcgattgaaaggagattggagccgcaagccagtcattgagcataatacatgttatagaatgcattggggtacggctcaaagatgtgatggtttgccatccaaagacgatga

SEQ ID NO: 231353 - DNA, 299 bp, Gossypium hirsutum
cggacgcgtgggttgcactgctctttctttctttagaattactcactcctgttctagatgaaggttctctccccaattcttgcttgcctagcgcttgctgtggtggtaagccatgctgttctctcacctgagcaatattggagctataagctgccaaatattccaatgccaaaggctgtcaaagaaattctacatccagaactgatggaggagaaaagtacctctgtaaatgtaggaaggtggtggtgtaacgtcaatacaggaaaagggaagcctgggggtgaccccccatgtgaacg

SEQ ID NO: 231354 - DNA, 326 bp, Gossypium hirsutum
taatttcttccgttgatctttgttagagattagctttttaatttttcattatgggaaagatcaagatcggaatcaatggatttggaaggatcgggcgtttggttgcgagagttgctctccaaagcgatgatattgagctcgttgctgttaacgatcctttcatcaccactgaatacatgacgtacatgtttaagtacgacagtgttcacggtcaatggaagcatcatgagcttaaggtgaaggactcaaagacccttctctttggtgaaaagcctgtcacagttttcggtatcagaaaccctgaggaaatcccatgggctgaggct

SEQ ID NO: 231355 - DNA, 364 bp, Gossypium hirsutum
ggcaacactgataacaggcagccttccaaagaggttcttgagctgtggagaagtgctgatgcagtgtgctttgatgtggatagcacggtgtgcgtagatgagggcattgatgaacttgcagaattttgtggggctggaaaggctgttgcagaatggactgctagagccatgggtggttctgttccttttgaggaggccttatctgcccgattgtctttattcaagccttcccttacttcaagtccaggattttctcgacaaaaggcccccaaggatttcgcctggcattgaagaattagtcaagaagctgatggcaaggaataccgatgtttatctaatttccgggggcttccgccaaatgatc

SEQ ID NO: 231356 - DNA, 420 bp, Gossypium hirsutum
ggagaatgcaggtccagagactgtgtctaaggttttgttggcttttcctgaccttcaagcccaaaacttggcatatttgatggcttccccgcatgaagccaaagcgaaattcaaagtctctgttgtttctttccctattgatgtcgtcaaaccagaagatatgcctcctggtgtaacattctattcggtatcattgccacagggattaaccgtgggcgctagcttcacttttgatgtcttggctgtatttacccatgccttgcgacctatgcccgagcaaatcggtcaggctgatattcagcttgtactgtaccaggatagtgcatactatctgtctccttatgttgtcaaggtccagtctctaagtcttaagctgcctgattctagaattgaatcctatacaacactggagagcacaaa

SEQ ID NO: 231357 - DNA, 421 bp, Gossypium hirsutum
acgccccactcttgcctctgcgaatcaatttacattcataggtgatatttgtgatggcgggagggaagatgaagaaagataagcaaaaagggccgagagccccctccaatcactaccaaggtggtgtcactttccacaaatccaaaggccagcacatccttaagaaccctttgttggtcgacgctattgtccaaaaggccggcatcaaacccaccgataccatcctcgaaatcggtcccggtactggtaaccttaccaagaagcttcttgaagccggcaaaatggtcatcgccgtcgaactcgatcctcgtatggtcctcgaacttcaacgccgctttcaaggcacccgtttctctagtcgcttaaaggttattcaaggtgatgttctgaagacggatttgccctattttgatatatgtgt

SEQ ID NO: 231358 - DNA, 428 bp, Gossypium hirsutum
gtcattacacggaaggggccgagttgatcgactcagtgctagatgtggtgaggaaagaagccgaaaactgtgactgcttgcaaggatttcaagtatgccattcattgggaggaggaactggatcgggcatgggaacacttttgatttccaagatccgagaagaatacccagaccgaatgatgctcactttctctgtgttcccttcccctaaagtgtctgacactgttgtcgaaccttacaatgctactctctctgttcaccagcttgttgagaatgctgatgaatgtatggttttggacaatgaagctttatatgatatttgcttccgtactctgaagctcactactccaagctttggagacttgaaccacttgatttctgccaccatgagtggtgtgacatgctgccttcggttaccttgtcaatta

SEQ ID NO: 231359 - DNA, 437 bp, Gossypium hirsutum
ccacgcgtacgcgaagatgaagttgacgatggaaagaaaaaagtcagggtcttcttcggtactcaaaccggcaccgccagaagacttggacaaggtgtagcctgctaggcaaaaacccgctatgatgcgcgactttaaagctagaattaaaatgcaaatgccatccatgatgatgaatacgaggagaagatgaagaaagaaagtttggcctttttcttcttggccacatatggagatggtgagccgactgataatgcagattgaccctttcaatgggacacttacgcaaacgaacggggagaacggcttcaaaacatgaaatatggacgttttggccttggtaacagacagtatgaacattttaacaaggttgcgaaagttgttgatgaaatccttactgagcagggagcaaaacgcctagttcctgtgggtcttgg

SEQ ID NO: 231360 - DNA, 170 bp, Gossypium hirsutum
gtgtatttcgattcacattgttcaggccggaattcaagtaggaaatgcttggtgacaactttactgtctcgagcatggaattcagtctgatggccaaatgcctagagacaagactgttggtggaggagacgaatctttcaacagctttattagcgaaaccggtgccggaa

SEQ ID NO: 231361 - DNA, 187 bp, Gossypium hirsutum
  unsure (1)..(187): unsure at all n locations
agcaatttgaatcggtgtcgtacggaaaatgttcaggaaccagtacgataccgacgtcactacatggagcccagctgggcgattgtttcaagtggagtacgcgatggaggccgtgaagcanggttcggcggcgatcggtctccgatccaagacccatgtggtgttgggttgcgtcaacaaagctaat

SEQ ID NO: 231362 - DNA, 401 bp, Gossypium hirsutum
cgcaagccccaactcttttttatttcttgtttcatataatttcgttgctgatctaaaatggcgggtcggggcaaaactctcggatccggagcctcgaagaaggcgacatcgaggagtagcaaagctgggcttcaatttccggtgggtcgtatagctcggttccttaaggctgggaaatatgctgaacgagtcggcgccggagctccggtttaccttgccgctgttcttgaatatcttgccgctgaggttcttgagcttgccggaaatgcagcgagagacaacaagaaaacccgaattgtgccacgccatattcagctagccgtaaggaacgatgaagagctaagcaaattacttggagatgtcacgattgccaacggtggtgtgatgcccaacattcacaa

SEQ ID NO: 231363 - DNA, 438 bp, Gossypium hirsutum
cggacgcgtgggtcattttcccctttcctcgatcaaaatcctcagctctcttaccgccaaaggaggatcatcttttcaggttttacgatggcatcgaagcggatcttgaaggaattgaaggatttacagaaggatcctcctacatcttgcagcgctggtcctgttgctgaagacatgttccattggcaggcaacaatcatgggtccaccagacagtccttatgctgggggtgttttcctggtgaccatccattttcctccagattatcccttcaagcctcccaaggtggcatttagaacgaaagtattccaccctaatattaacagcaatgggagcatttgcttagacatcttaaaggaacagtggagtcctgcgctaacgatatccaaggtactgttatcaatctgttctttactgacggacccaaaccctgatgat

SEQ ID NO: 231364 - DNA, 331 bp, Gossypium hirsutum
gtagatttctctcaatttcttcacatttcttgattttatacataaacatcccatctccatcacattctcaagcctattcaatggagtttttaatgaaaatatgtctccttttcctttgtggcctcatttctcactttgttaacatgtttttccagaagagaaatcagcaatgctatatgttgggttatgaatgtttcaaggctgccgatgacaggaagctcgacactgatgcgtgcgtgaaagttgtgttgaggaacaagaatcttggtctggaccaatacaggtttcttttaaaaaccattgttagttctggtcttggtgaagaaactta

SEQ ID NO: 231365 - DNA, 458 bp, Gossypium hirsutum
gaaagtctcagtgtttttcaagggttttgagagttctcaaatcatacatttacatcctcctccactccctcgatatgatcctctaaaagaaaaaaacaaaatccaaacctaacccagaacttgcagcaaatcaattatggcgaccatgcccgcatccgcatcagatctgttgaagtccttcaaactcaaaaccaagcaacaagaactcttgatccgagtctccatcctctgtctcgtctacatcttggcattcatcactcgtctcttctctgtcctccgttatgaatccatgaaccatgaatttgacccctacttcaattatcgcaccactctttacctcacggagaacggcttctacgatttctggaattggtctgactatgaaagctggtaccctttaggccgaatcgtcggcggcaccctttaccccggtctcatggtgaccgccgttctcattt

SEQ ID NO: 231366 - DNA, 443 bp, Gossypium hirsutum
cagatatttagtatacagttcactcattatcctttgccttcatagttccattccattttccctaacaaatttatttagatctgatcagatttaactcagatccttttgtatcgagtcttctaaattccagatctttacttattttgaccttaggaagaaagaaaaagaagagatgagagagattattagcgtccacattggtcaagctgggattcaagtcgggaattcttgctgggagctctactgtcttgaacatgaaatccatcctgatggaaccatgcccagtgacacctcagtcggtgtagcacacgatgctttcaacactttcttcagcgaaacgggttcaggaaagcatgtaccgagagctgtctttgttgatctggaacccactgttatcgatgaagtgcggactggcccttatcgccacttttccaccctgagca

SEQ ID NO: 231367 - DNA, 438 bp, Gossypium hirsutum
cccacgcgtccgcagaagaacaaaaaaattcaacggccgaccgttggtggcgtacggagacgcttctcatctcatttcagcagatctcaactcttccttcgccgggtttatttgttcttccttcgttttttggctgttttcgataaattttttccatttttccatggctgctccacctgcaagagctcgagccgattacgactatctcataaagctccttttgatcggcgacagcggtgtgggtaagagttgcctccttttgcgtttttcggatggctcatttactacaagttttatcacaaccattggaatcgactttaagattaggactatagagcttgatggaaaaaggatcaaactgcaaatttgggatactgctgggcaagagcggtttcggactattacaacagcttactaccgtggagccatgggcatttt

SEQ ID NO: 231368 - DNA, 360 bp, Gossypium hirsutum
ccggagacgtcggcggaggcctcggggggagttatcttttctgtttaacggcctgcccaccctggaaacggcttatccggaggtagggtccatcggtcggaagagcaccgtacgtctcgttgtgtccggtgcgcccccggcggcccttgaaaatcctgaggaccgagtgccgtccgtgcccggtcgtactcataaccgcatcaggtctctaaggttaacagcctttggtcaatggaacaatgtatgcaagggaagtcggtaaaatgtattcgtaacctctgtaaaaggattggtttttaaggctgttcacggtggtcctaaacattaacccgttcgctgtcggtgcactgatcgagctgc

SEQ ID NO: 231369 - DNA, 365 bp, Gossypium hirsutum
  unsure (1)..(365): unsure at all n locations
cggacgcgtgggttcgacgatcaaatcaaacagtcatggctggagttgcacctgatggatcacaatatgatgctcgtcaatacgacagtaaaatgaatgaattgattgctgatgatggaaatgacttctttactacttacgatgaggtctacgagagctttgataaaatgggtttgcaagaaaacctcttaagaggcatctatgcttatgggtttgagaagccgtcagcaattcaacaaaagggaatcgtgcccttttgtaaaggtttagatgtaatccaacaagcacaatcaggtaccggtaaaacggcgactttctgttcntggatcttacaacagctggattatgggtagtacaatgtcaag

SEQ ID NO: 231370 - DNA, 415 bp, Gossypium hirsutum
ggaaaatctactatggcagattggacccaactccccaaggaactactagaacttatctccaaacgcctaggaacccactatgacgtcatccgtttccgttccgtttgctccacctggcgctccgccgttactgcccccaaccgctgccgcaaccgcttcgctccccgtttcccgcttctccctatttcctcccaattctccctctcaaagcgctccgtattcctcctcggatcacccacaactagtacccaaacaaacgcttggagcccctcctcgtgggtaatcaaaatcgaagaagatccgatgaacggcagagtccagcttttgaaccctctctcaaggtctcgtttcgattctctccctgataatttccccaaacctttaaatttgttggattttagggttcttgaattgg

SEQ ID NO: 231371 - DNA, 221 bp, Gossypium hirsutum
acatcgcctgtgttagactatcaaatgaaagagtgatgggcgtaatcgcacatgggggatcacaatatgaggctcgcatatacaacagctaaatgaacgactcgaatgctgatgatggatatgactactttactacttacgatgaggtctaccagagctatgataaaatgggttagcaagaaaacatgctaagacgcatctatgcttacaggtccgagaag

SEQ ID NO: 231372 - DNA, 456 bp, Gossypium hirsutum
gtcaaaacccttactggcaagacaatcaccctggaagtggaaagctccgacacaattgataatatcaaggccaagatccaagacaaagaaggtatccctcctgaccaacagaggcttatctttgctggtaaacaactggaggatggccgcacccttgctgactacaacatccagaaagagtctaccctccaccttgtccttcgtcttaggggtggcatgcagatctttgtaaaaacgctcactggaaaaaccatcactttagaggtggagagttctgatacaattgataacgttaaggccaagattcaggacaaggagggcatcccacctgaccagcagaggttaatttttgctgggaaacagcttgaagatggcagaacccttgcagactataacattcaaaaggagtctaccctccatttggtgttgcgtcttcgtggtggtatgcaaattttt

SEQ ID NO: 231373 - DNA, 455 bp, Gossypium hirsutum
cggacgcgtgggtggacttgcaagtgaaccgagagattacgaatgcaatggtcttcacaagcattcaaaagcaatttcaactggtaccttgaccttaggtctgcttaccactgtcctgtcagttgtctactctgctgttcgtgctgggtcttcaacaactttactctccccaccaagctcgcctcgtgcaggaaagcctttgcttccaatggacaaggcagatgaacacgaagaaaaagagaagaacaagccggtctcctattcatatgccttcttccacataatcttttctcttgcaagtatgtactcagcaatgcttttaaccggatggtcaacctcggtcggagaaagcggcaagttagtcgacgtaggatggccatcggtgtgggttcggattataactgggtgggcaacagcaggtctctatgtatggtctctagttgctcccattcttt

SEQ ID NO: 231374 - DNA, 418 bp, Gossypium hirsutum
ggaagttatggggttgggtcctctctctgactatgagcaggcaggtttggagagccttaaaccagaacttaaagcatctatagagaagggaatcaagtttgccaaccagaattaaatttatattatttgagatattcttccattagaacaatgaaaattttgcagttacttcggctgctattggtgttttttttcttgcagcaagcagcatcggctttgctgttgttaataggatagccataccataagtttccactaataattcccagtggtatgttgcaggaagtgtgtgattaaaaacccgtttttgtttaggtgggggatgtttaattacaaaccattttaaaattgtgatattacatttaatcttccacgattattccgtctttggtggtgacgaaagcttactttttatcct

SEQ ID NO: 231375 - DNA, 440 bp, Gossypium hirsutum
cggacgcgtggggttcgatcgacatcaactggaaggtgatcaatgtctcttcgtgcagcaccacctgtaccgccgcccaataaaacatcactgaggactgctgtatctctaccttctgagtctccgaaaaaccgacaaccagagaaaagattcacatcagacattgggtttaacttgaaagatacaggagattaccgtgaggcttctgcacttcgagatgaactagatatgctgcaggaagaaaacgagaatgtcatagataagctcagacttgaggaagaaaggtgccaggaagtggaggctaaagtcaaagagcttgagaaacaggttgctgctcttggtgaaggggtatctttggaagccaaactgttaagcagaaaagaggctgcattgcgtcaaagagagggttggccttatggatgcaaaacaaacttaggatg

SEQ ID NO: 231376 - DNA, 451 bp, Gossypium hirsutum
gagaatgcggtttttgtagaaatgtgcagagatcacaggatcaactttattgggcctaaccctgacagtattcgtgttatgggtgacaaatcaactgcacgagaaacaatgaagaacgcgggtgttcctactgttccgggaagtgatggattgttacagagtacagaggaagcaatcaagcttgcccatgagattggctttcctgtgatgatcaaggccacagcaggtggtggaggacgtggaatgcgtctttctaaagagcctgatgagtttgtgaagttactgcagcaagccaaaagtgaagctgcagctgcatttggaaatgatggagtttatttggagaagtacatccaaaatccaaggcacattgagttccaggttcttgcggataaatatggtaatgttgttcactttggtgagcgagactgcagcatccagagacgtaatcaaa

SEQ ID NO: 231377 - DNA, 449 bp, Gossypium hirsutum
cgctcttagggttgttgctcaagttcagcctcgagtgctcccgaaataacaatgagggaaatccttcacgtgcaaggaggccaatgcgggaaccaaatcggatccaagttttgggaagtgatctgcgacgagcacggtgttgatcctaccggaaagtacagtggagatggatcatccgatattcaattggagcggatcgatgtgtattacaacgaggcttccggtggaaggtacgtccctcgtgcggtactcatggatcttgaacccggtaccatggatagtatcagatccggtcccattggccagatctttagacctgataatttcgtgtttggacaatccggtgccggaaacaactgggccaaaggtcattacactgaaggagctgagttgattgatgctgttcttgatgttgttcgtaaagaggccgagaattgtgattgcctgca

SEQ ID NO: 231378 - DNA, 454 bp, Gossypium hirsutum
gcttttaacacctttttcagtgaaactggtgctggaaagcacgtccctcgtgctgtctttgtggatcttgagcctactgttattgatgaagtgaggactggtacttaccgtcagcttttccaccctgagcaactcatcagcggcaaggaagacgctgccaacaacttcgcccgtggccactacactattggcaaagagatcgttgacttgtgcttggaccgtatcaggaagcttgctgataactgtaccggtcttcaaggtttccttgttttcaacgctgttggtggaggcactggatctggtcttggttccctccttttggagcgtttgtctgttgattatggcaagaaatccaagttgggtttcactgtctacccatcaaccccaggtctccacatctgttgttgagccctacaacagtgtcctctcaactcactcccttttggagcacact

SEQ ID NO: 231379 - DNA, 430 bp, Gossypium hirsutum
ccaagatggaggccagcagcagcacctcccatgacccagcattgttccatgctcccttgctacaccaccctcggaggaggagcagcagacccttaaagggtttcgcagtgatatttgggtccgtcgttttcctactctcactggtcatattaatcgttaaccaaagcccggagccattagcaagtaaccccagtagtgtaacggaggcagggtcgtattcaatggcggcgcagccaagagggatagctgaaggagtttcagccaagtcaaacccatcactttttgacaaagttgggtttaattggacaaacgctatgttttactggcaaagaactgcctaccactttcagcctcaaaagaattggatgaatgatcctgacggtccgttatatcacaagggatggtaccatcttttctatcaatacaaccc

SEQ ID NO: 231380 - DNA, 406 bp, Gossypium hirsutum
  unsure (1)..(406): unsure at all n locations
gtcagccaattgtttgagctagctagctcttactcaaatggcaaccaaaacgatgatgttgcaaatatttccacttttcttctttttgttcagtgtctgcaactccattttccttggtgctaatggagatgacaatggtggttggcaaactgcccatgccaccttctacggtggtgctgatgctaccggcacaatggggggagcttgtggttatggaaacctgtacagtcaagggtatggaacgagcacagcagctttgagcactgcacttttcaacaatggcttgagctgcggtgcctgctacgagctccggtgcaacaatgatcctcaatggtgcattagtcgaaccataaccgtgacagccaccaacttttgtccacctaactatgctntatctagtgacaat

SEQ ID NO: 231381 - DNA, 453 bp, Gossypium hirsutum
ggatattcaagagaaaaagaaaaacttagttccagaaagcgagtttgttgatgtactgttcaacgagccgttggagtcttcaactgttgaacagatgtttcttatgggtatgaacacttgtgaaggtgtggatattcttgatataagaccctgctccagtacacaatatagattagagcgtttccagaagcaggtccaaattatgaagaagtatcgggggactgcaaatgttcaacgtgcatggcttgcttcctctagaaaagcattgcctaccatcatgatgcatgggcttgcagactgccgtctttcttcaatcccagacctatatgccgctggtgttcatcttgctgcagcagaatttactaatggcagtgcaaagtattgtgatgttgacgaaaatggagtacagtacatgatattatgtcgcgtaataatgggaaaagatggagcttt

SEQ ID NO: 231382 - DNA, 434 bp, Gossypium hirsutum
gtcgaaggaagtgagtgaagaagggatgagccgaaaggactatgtggatcctccaccggcaccgctcatcgacgtggctgagatcaagctttggtctttttacagagctctcatcgccgaattcatcgctactctccttttcctatacgtcaccatagccaccgtcatcggccacaagaaacaacacgatgcatgcgatggtgttggtcttttgggtattgcttgggcttttggtggcatgattttcattcttgtttactgcaccgccggtatctcaggtggtcacattaacccggcggtgacatttgggttgtttttggctaggaaggtgtcgcttataagggcggtggcttacatggtagctcaatgtttgggtgctatttgtggtgttgggttagttaaggcattcatgaagagtgaatacaactcccttg

SEQ ID NO: 231383 - DNA, 451 bp, Gossypium hirsutum
gttccatttctattagcatgtctttgcatcaaacaagcttttgcttcgtctgtagtcacttaacatccgggcaaaaggagggtgatgagctgcgaagaaactccgatgttatggagatcctaaggaagacaaggtttcccagggttcatggtatgggagacgaaacttctcccgaaacgattctcgagcatgatcgtattatatggcttggggatttgaattatcgtatagctctgtcataccgctctgccaaagctctggttgagatgcgcaaattggaaggcactgttagagaacgaccagcttcggatagagcagaggcaaggccgtgtttttgaggggtggcgtgaaagaaagatatatttcccccctacatacaagtattctaataattcagacagatatgctggggaggacagacatccaaagaagaagagaagaactcctgcat

SEQ ID NO: 231384 - DNA, 436 bp, Gossypium hirsutum
attttctctccctaaacacctcattttcctgagaaaaaaaaaacaaaaaagaagcgtaagtgaagaaggagaagaagaaaaaagaaaatggcggaccagcttaccgatgagcagatctctgagttcaaggaggcctttagcctctttgacaaggatggcgatggttgcattactaccaaggaactgggtactgtaatgcggtcactcggacagaaccctactgaggcagaactccaagatatgattaatgaagttgacgctgacggaaatgggaccatcgatttccctgaatttctcaaccttatggcaaggaaaatgaaagataccgattctgaggaggaacttaaagaagctttcagggtgttcgataaggatcaaaacggtttcatatctgctgccgagcttcgtcacgttatgacaaatcttggcgagaagc

SEQ ID NO: 231385 - DNA, 451 bp, Gossypium hirsutum
gcgaatatcctcctttttgcgcccttcatttccagagagagagaaagagcgttccaacaatcttcgtctctttctctcgcttgccgtttttctctcttaggttttgattcttctttgtagttcgaggtgttttaaagacaagtcaagatggtgaagtttacagctgaggagcttcgtgccattatggacaggaagcacaacatccgtaatatgtctgttattgctcatgtggaccacgggaaatcaactcttaccgattctcttgtggctgctgctggaattattgcacaagaagttgctggtgatgttcgtatgacagatacccgtgctgatgaggctgagcgtggtatcacaatcaagtctactggtatctctctttattatgaaatgtctgatgactctttgaagagctacaaaggagagagacaagggaatgagtacctcatcaatc

SEQ ID NO: 231386 - DNA, 444 bp, Gossypium hirsutum
gcaaaggagatccattactaacccatcaccagcagcgagaatggctaaacaagcctcacgactcctccgatctttgtcattcgaggtttctcatcacaaatccctactcagtcctcaacattcacgggcgttctaaggagatccggcgcctgaaccggcggttttcgtagacaagaacacactcgttatttgccaaggcataaccggaaagaatggtacttttcacaccgagcaagccatcgaatatggcactaacatggttggtggagttacaccgaagaagggtggcacagaacacttatgactttctgttttcaactcagtagctgaagcaaaagctgaaaccaaggccaatgcttctgtcatatatgttcctccccctattgctgcggcggctatcatggaggccatggaagctgagctggaacttgttgtttgtatcac

SEQ ID NO: 231387 - DNA, 457 bp, Gossypium hirsutum
caaaaacttgtttaattaccaaaaagttaagagcaaaagaaagagcagagtaagctaagctttgatcatcaatggcggagaagagtttcaagtacgtgatccttggcggtggtgtagctgctggatatgcggcgagagagtttgccaagcagggagtgcatcctggtgagctagcaattatttccaaggaggcggtggctccatatgaacgacctgccctgagcaaagcatatctcttccctgagggagctgcaagacttcctggtttccatgtctgtgttggaagtggcggagagagattgcttcctgagtggtacaaggaaaaaggaattgaattgatccttagcacagaaatagtgaaagcagatcttcctgccaatactctagtaagcgccactggagaaacattcaagtatcaaatcttgatcattgcaactggttcaacggttatcaaatt

SEQ ID NO: 231388 - DNA, 373 bp, Gossypium hirsutum
ctctgagggtgtcttaataaacgccttcgatttactttcggtttccatttacttctttatttctacgtttttgaatttttagtaagcgaaaatgagagagtgcatttcagttcacatcggtcaggctggtatccaagtcggaaatgcctgctgggagctttactgccttgaacatggaatccagcctgatggccagatgccaagtgacaagactgtcggaggaggtgatgatgcttttaacacctttttcagtgaaactggtgctggaaagcatgtccctcgtgctgtctttgtggatcttgagcctactgttattgatgaagtgaggactggtacttaccgtcagcttttccaccctgagcaactcatcagc

SEQ ID NO: 231389 - DNA, 439 bp, Gossypium hirsutum
gattgtttcatgggcaatacatgccgtggatctttaaaggggaaacttcataagggcgacaatcagcccaaagaccattgttctagccgcaacaacacttcttccggccgttcaaccaccgccaccgattattccccttcaactttaaactctcaacaactgattgctcaagaattctccaaagaaaccaaccaaaaagaaacccatttgcctgtcattaaccctaccaagaaagacaacaacaataacaccatgagacgtggtattgatcaccaggcttactatgttttgggtcataaaacaaccaacatccgtgacctttacactttaggtcgtaagttaggacaaggacagtttgggactacttacttgtgtactgagatctctacaggcactgagtatgcctgtaagctatatccaaaagaaagtgatctcaatg

SEQ ID NO: 231390 - DNA, 441 bp, Gossypium hirsutum
ctggatctggtcttggttccctccttttggagcgtttgtctgttgattatggcaagaaatccaagttgggtttcactgtctacccatcaccccaggtctccacatctgttgttgagccctacaacagtgtcctctcaactcactcccttttggagcacactgatgtggctgttcttcttgacaatgaggctatctatgacatttgcaggcgctctcttgacattgagcgacccacttacaccaatcttaaccgtcttgtctcccaggtgatctcctctttgactgcttcacttaggttcgatggtgccttgaacgtggatgtaacagaattccagaccaacttggtcccttacccaagaatacacttcatgctttcttcatacgctccagtcatctctgctgagaaggcttaccatgagcagctatcagttgctgaaatca

SEQ ID NO: 231391 - DNA, 400 bp, Gossypium hirsutum
ctcttttcttctcaaattatcattcaccatctttctcgtcggttttgagatctcaagctgatttattacgttttaatataggttgagatggcttcgaccactctaatctgcgatacccagccatggaaggacttgaaggctcatactgaggatatcaagaaaactcatcttcgtgatttgatgaacgacaaagaacgatgcgaatcgatgatggttgagtttgatggaatgtttttggactactcaaggcattgcgccactcttgagaccatggataagctctattaaattagcagaggctgcttctctcaaacaacaaattaaccgaatgtatagtggcgagcatataaatagcacagaaaattaggcagtggcttatgtagctcttcgagcacccagg

SEQ ID NO: 231392 - DNA, 448 bp, Gossypium hirsutum
gagaaagacgaagacgaagaagaagaagaagaagagcaaagcaaaaagaaagaaacccttattcaacatctccatccatttctctcccattaaaaccctactctgttgattatagagatataagggagataatatataatgggtggtgggaagagatttgctgttcttctgtgtgctgaggattccgagtacgttaaaaagaggtacggcggctactacggcgttttcgtggaaatgctggcggaggaaggcgagacttgggacgtgttcagggtggccaacggtgagttcccggacgacgaacaagttgaccgctttgatggcttcgttataacggggagttgcaatgacgcgcacggcaatgacgcttggatatgtcggctggtttcgcttttgaaaaagttggattctttgaataaaaaagtcctcgggatttgcttcggtcacc

SEQ ID NO: 231393 - DNA, 454 bp, Gossypium hirsutum
atttcatctgccatcaatttgctttgaagatcatgttggctatttttcacaaggcatttgctaatccaccagaggagctgaatagtccagcttctcataaatctactaagaagcctaaacagcctgaagaaaccctaaatgatttcctatctcatcaccctcacaacactttctccatgagctttggcaacgctgctgttttggcttatgtccgccatgaacgtgctgcttcagttcatcagaggttgttttgtgggtttgatgacatatactgccttttcttagggagcttgaacaatctatttatgctgaatagacagtatggtctttccaaagggagcaatgaggcgatgtttgtgattgaagcatataggacactaagggataggggtccataccctgctgatcaggttgttaaggatcttgaaggaagctttgcctttgtgatctatga

SEQ ID NO: 231394 - DNA, 455 bp, Gossypium hirsutum
aaacggagcagtttacggaagggactcttaaaacccagccaaaccacatacagttcctcctcagaattcacctactctatacgttgaataaaacaagatggggggtgggtttagagtgcttcatcttgtaagaccgtttctttcatttctgcctgaagttcagagtgctgacaagaaagttcccttcagagagaaggtcatatacactgtgatctctcttttcatcttcttggtttgtagccagctccctctgtatggcatacattctactactggtgcagatccattctattggatgcgtgttattcttgcctcaaatcgtgggactgtcatggaacttggaatcactcccattgtgacgtctggactggtgatacaacttcttgctggttctaaaatcattgaagtggacaacaatgtccgcgaagatcgtgcccttctaaatggtgcccaaa

SEQ ID NO: 231395 - DNA, 445 bp, Gossypium hirsutum
cccacgcgtccggaggtttagcatactatgttactgcacctgcaggcttagcggacatggcagcaaatcccttccatgctctattttatcttgtgttcatgctttcagcatgtgcgttgttttcgaaaacttggattgaagtttcaggttcttctgccaaagatgtggctaagcagctcaaggaacaacaaatggtgatgcctggacatagagattcaaatctacagaaggaactgaatcgctacattccaactgcagctgcgtttggaggaatgtgcattggtgcattaactgtcctagccgacttcatgggagcaattggttcgggtactggaatattgcttgccgtaacaatcatatatcaatactttgaaacttttgagaaagagaaagccagtgaactgggtttctttggactctgaagcttctagtcatgaaatttttg

SEQ ID NO: 231396 - DNA, 436 bp, Gossypium hirsutum
gctctttcaattttaagaccaaatcacgagcgactctcagactcagctgagttaagatcgctaaagcgatatggctttgcagctatgggaaacgttgaaggaggcgataacggcgtatacgggtctatctccggccacttttttcacggttctagctctgttatgggctgtttactatgtagcaacgggtctattcgggtcatccgatgaccatatccatcaacggtctacggctttcgaggagcagatggagccgctaccgccaccggttcagctcggcgagattaccgaggaggaacttaagcagtatgatgggtcggattcaaagaaaccactccttatggccatcaagggccagatctatgatgtttctcaaagcagaatgttttatggacctggtggaccttatgcgttgttcgccggaaaagatgcaagc

SEQ ID NO: 231397 - DNA, 449 bp, Gossypium hirsutum
  unsure (1)..(449): unsure at all n locations
gcagcttgatcatttattgttcaagatggctcctactggtgtaagaacagaggagtggatcgaaagaaactcaaagggattggagattttctttagacgatggatgcctgaacccggggttaaaattaagggtgtcgtatgcttttcccatggatatggtgatacttgcactttcttctttgaaggcattgctaggttcattgcagcatctggatatggtgtttatgctattgatcatccaggattcggtctttctgaaggattgcatggttacatctatagctttgatgaattggctgacaatgtcattgaacaatatgcaaaaattaaagaaagacctgaagtgagaggattgccctgcttcatattgngacagtccatgggtggagctgttactctcaaagttcaatttcaaggatccacatggatgggatggaatcatccttgta

SEQ ID NO: 231398 - DNA, 448 bp, Gossypium hirsutum
ggagaaccctaattttgtctctcccaagagacgaaaggaagggaaaaatggtgttttacttcaaagcccggccagaagctggcgattacaccattttcatgggtcttgacaagtacgagaacgaggagctcatcaaatatggcttcatcgaagatatctggttccatgtggataagatgtcttctgcccatgtttatttaagacttaaaaagggtcaaaccattgatgatataagcgaaggcgttctcgaagattgtgttcagcttgttaaagctaattccatccaaggcaacaaggtgaataatattgatgttgtttacactccatggtccaatttgaagaaaactccttcaatggattgttggtcaagttggctttcacaattccaagatggttcggactgtgagagtggagaagcggataaatgagatagttaacaggttgaaca

SEQ ID NO: 231399 - DNA, 451 bp, Gossypium hirsutum
gtcaacttgtatgaaggatgttccctctatgctcttgcagatgttggaggaagagttcaattttctaatcaataaaaaggatcagatgaacattgaaacaaagatcaggaatattaggtttattggagaactttgtaagttcaaaatttcatcacctggccttgtcttcagttgtctgaagacttgtttagatgatttcactcatcataacattgatgtcgcttgcaatcttcttgagacgtgcggtcgttttctgtatcgttctcctgaaactaccataagaatggctaacatgttggagatcttgatgcgcttgaaaaatgtaaaaaatttggatcctcggcacagcacacttgtggaaaatgcttactacctatgcaaaccacctgaaagatctgcacggatctccaaagtccgtcctccattgcaccagtacattacgaaattgcta

SEQ ID NO: 231400 - DNA, 424 bp, Gossypium hirsutum
aacatattgggtttccttttcttgatattggcttcactaacaagcctctcttctagccttcctagtgaatactccatagtggaacatgagattgacgcatttctttcggaggaaagggtgttggagatcttccaacagtggaaagaaaagcatcggaaagtgtaccggcacgccgaggaggctgagaaaaggtttgaaaatttcaaggggaatttgaagtatatcctagagaggaatgcaaagagaaaagcaaacaaatgggaacatcatgtgggattgaacaagtttgctgatatgagcaatgaggagttcagaaaagcttacttgtcaaaggtgaaaaagcccatcaacaaagggataaccctgtcaaggaacatgaggagaaaggtgcagtcttgtgatgcaccctcatccttggattgga

SEQ ID NO: 231401 - DNA, 381 bp, Gossypium hirsutum
cttttatttttccttctctttctcatgctttcttcaattaataaccaatcaaagtgctctctttgcttttccctgttttataagtcatcgaactgttgtttttcttgatctctccatcattcccgtttctgggtttttttgttttttttttttgagtttttagtaggtagccatgaatgctcttgctgcaaccaaccgcaatttccgactggcgtctcgtttacttgggttagactctaagcttgaaaagagtcttctgatcccttttagagaaatcaaggtggagtgcacgattcccaaggacgatggaaccttggcgacttacgttggatttaggatccaacatgataatgctcgtggcccgatgaaaggtggaatcag

SEQ ID NO: 231402 - DNA, 317 bp, Gossypium hirsutum
gcgatttgcaatctcaactcaccgtttctcacgattggattctccttaaaatcatggctgctcagattagcaagaagcgcaagtttgttgcggatggagtgttctacgcggagctaaatgaggttttgacaagggagcttgctgaggatggatactccggagttgaagtcagagttactcctatgcgtactgagatcatcatcagagctactcgtactcaaaatgttcttggtgaagagggtagaagggattagagagttgaactctgttgttcagaaacgaatcaagtttccggagaaacgtgtggagctctatgc

SEQ ID NO: 231403 - DNA, 446 bp, Gossypium hirsutum
cctttcttcgacttttctctgtttgcttccgtcacaactcaaaaaccgtacacaaaatgggcaaggatctgagcgacgagcaagtctcatcaatgaaggaggctttcactctcttcgacaccgacggtgacggcaagatcgctccatcggagctagggatcctaatgaggtctctcggcggtaaccccacccaagctcaactcaaagctattatcgctgaagagaagctcacggcgccctttgacttccctcgcttttttgatctcatgtccaagcatatgaaacctgaaccctttcgataggcagctaccccgatgctttcaaggttctggataaggacaatactggctttgtctccgttgcagatctgagacatatactgactagcatcggagagaagctggagccctccgagttcgatgagtggatcaaggaagtggatgtcg

SEQ ID NO: 231404 - DNA, 406 bp, Gossypium hirsutum
cgacaaagatactctttgggaatttcagccgaaaaaaataggtgagggggaccttttaactggtggcgacctttatgctaccgtctttgagaacagtttgatgcaacatcatgttgcccttcctcctgatgcaatgggaaaaatcacttacatagctccccctggtcaatattcattgaaggatactgtgctggaacttgagtttcaaggtgtcaaaaagcaattcaccatgcttcagacatggcctgtccgtacacctagacctgttgcaacaaagcttgctgcagatactcctctgcttaccggacagcgtgtacttgatgccctattcccttcggttcttggtggaacttgtgccattcctggtgcatttggctgtgggaaaactgtgattagtcaagctctt

SEQ ID NO: 231405 - DNA, 376 bp, Gossypium hirsutum
ttcagtgtctcactctctccgtgcttcactccagtttctcctttccctcttcgaagaaaaaatgcgtgagatccttcatattcaaggtggccaatgcggcaaccaaatcggagccaagttctgggaagttgtttgtgctgagcatggcatagatgcaactgggcgttaccaaggagacttggatcttcaacttgagcgaatcaatgtctactacaatgaacccagttgtggtagattcgttcctcgtgctgttctcatggatcttgaacctggaaccatggacagcatcagatctggccctgtcggtcagatttttagaccagataacttcgtttttggtcaatctggtgctggtaacaaccggggctaagggcca

SEQ ID NO: 231406 - DNA, 378 bp, Gossypium hirsutum
cgaaacttcaaacaaagggaggaatgtgtttttggattggacgtgctcaaagaacaaagataaaaacttgaatgagatcatgacttggcttgagtggatcttatctcacacgcttttgcgtactgctgagagcaacccacaaggtcttgataatttctggcttaagcaaggggcagcattattgctaagcttaatgcagagctcacaagtggatgttcaagaaagggcagccactggactagcaacttttgttgttattgatgatgaaaacgcaagcatagatcgtggaagggctgaagcagttatgcgagatggtggcattcggcttcttctgaacctagcgaagtcttggcatgaaggacttcaatcggaggctgc

SEQ ID NO: 231407 - DNA, 387 bp, Gossypium hirsutum
atggttactaagcatgcagcggaaaatccagggaaatacaacattcttggcacaaatactattatggataaaatgatggtggcaggttttaagaagcaaatggcagatactggaaaactgaacacactgttgcagagagccccacagtgtcttgggaaatttattgagattgctgcccgaaagaagcgaaatttcattctggatcagacaaatgtgtctgctgctgcccagaggagaaaaatgtgcctgttcgcaagcttccaacgaaaaagctgttgagtgtgcccaaaagatgaagactataagcaaagaacacagaagaaagcagaagtagaggggaaagacttaccagaacatgcggtcctcaaaatgaaaggaaactttacc

SEQ ID NO: 231408 - DNA, 391 bp, Gossypium hirsutum
gttgcaatcttcctcttacactcctgctattgatatgtgggctgttggtgctatattagcggagctttttacttcatctcctatttttcctggtgaaagtgaaatagatcaactgtacaagatatgctgtgttttgggtgcgcctgattggacttcctttcctgaagcaacaaacatctctcgtctaatcaatattagttattcagagattttacctaccaacctatcagatatcattcctaatgccggcccggaggctgttgatttaatcatgcaactttgttcatgggatccattaaggaggccaacagcagatcaggcattgcagcatcctttttttaatgtggatgctcgcattcctcatccacgactgcatgatccacttgagctc

SEQ ID NO: 231409 - DNA, 389 bp, Gossypium hirsutum
ggcttctttaagctattaccaataatggagtgccagatatccttattccagctcctcatcagcttcctcctgtttttgtttatggtaatcacaagtgtaaggagatcaaaagctaagaatttaactcaaaagttgattccagggccatggaaattaccattgataggaaatctgcaccagctcgccgcttctggtctaccccatcgcaccttacgtgacttggctacgaaacatggtggcttcatgcatctgcaactcggtcaagtttccaccgtggtcgtttcttctccagaaatggctgaagagattatgaaaacacatgatatcgtctttgctaataggccttttctcgttgggccaagatgacaacttatgagtgcactgatatt

SEQ ID NO: 231410 - DNA, 372 bp, Gossypium hirsutum
attgcttttactttcttgatgattttaacatacagcgagtcttatcacagaggggggtggttattctattttcactttataaagtgaataattttaccggctttatggcctaaggttaatggagtcaccaccaccctggtgggccacttccattactgaacctcgccggtcaagacgccaccgatgctttcatagcttatcatcccggcatagcttggcaatatctcgacaagttcttcactggttattaccttgaaggttacttagtctctgatatatccaaagattatatacagctagctgttgaattgttaaagatggttctttttgacaagaattgctttggtcgctgtattctccattttcaactta

SEQ ID NO: 231411 - DNA, 457 bp, Gossypium hirsutum
acgcccccatttattttatttttcaaacaaattttcccttcaattttcgtataatttcctaggaaaagaaatatgagagagtgcatttcagttcacatcggtcaggccggtattcaggtcggaaatgcttgctgggaactttactgtctcgagcatggcattcagcctgatggccaaatgccaagtgataagactgttggtggaggagacgatgctttcaacacctttttcagcgaaactggtgccgggaagcacgtccctcgcgccatctttgttgatctgggagcctactgttatcgatgaagtgaggactggtacgtaccgccagttattccaccctgagcaactcatcagtggcaaagaagatgctgccaacaatttcgctcgtggccattatacaattggcaaagagattgttgatctctgcttggatcgtatccgaaagcttgctgataac

SEQ ID NO: 231412 - DNA, 453 bp, Gossypium hirsutum
acgcccccatttattttatttttcaaacaaattttccgttcaattttcgtataatttcctaggaaaagaaatatgagagagtgcatttcagttcacatcggtcaggccggtattcaggtcggaaatgcttgctgggaactttactgtctcgagcatggcattcagcctgatggccaaatgccaagtgataagactgttggtggaggagacgatgctttcaacacctttttcagcgaaactggtgccgggaagcacgtccctcgcgccatctttgttgatctggagcctactgttatcgatgaagtgaggactggtacgtaccgccagttattccaccctgagcaactcatcagtggcaaagaagatgctgccaacaatttcgctcgtggccattatacaattggcaaagagattggtgatctctgctttgatcgtatccgaaagcttgctgat

SEQ ID NO: 231413 - DNA, 407 bp, Gossypium hirsutum
cccacgcgtccgagaaaattctatgtcgagcgagagagttcccgttgagttatccaagggcgttaacggccttgaaaaaatcatcctccgcgagactcgaggcagctctgccgaggtgtatttgtatggaggacacgtgacatcttggaagaatgagcatggagaggagttgcttttcgtcagtagtaaggcattgttcaagcctccaaaagcaattcgtggaggaattcctatatgttttccccaattttcaaatcatggtcctcttgagccgcatgggtttgccagaaatagactttggagcattgacactgaccctcctgcttttccgacaaactcatccaacaaagcttacattgatttgatccttaagccttctgaagaagatatgaagatttggcctcaca

SEQ ID NO: 231414 - DNA, 437 bp, Gossypium hirsutum
ccgcttacaagaaattcctccgccaccctatttatcaaattccaaaacccgcgatattcggatttcaaaggctcgcgccaatgagctttcatggcgtccaaatcgtctaagaagaagcctaacagcaagcggtcaagctccaagcccgcctcctccccgatggcatctccgaagcattttcatctcaaaagattcttcattttaatttcgattatgttgcctgtttgtgtaattgttgttttgggagtttcgtcaaacacgtcgtttaagatatcgtcggatcattactccgttaagatttacggatttgaattagtcaatgaattcccccacgatccccgtgctttcactcagggccttgtttatgctggaaatgaatccttatacgagtcaactggactttacaagcagtcaactgttcgcagagtagctattca

SEQ ID NO: 231415 - DNA, 414 bp, Gossypium hirsutum
ggagcatcaatggcggattcaaaggggtacatttccaaaacagagcttgaaacccacaaaaaaccagatgatctttggatctcaatccaaggcaagatctatgatgtaactcaatggagtcaccaccaccctggtgggccacttccattactgaacctcgccggtcaagacgccaccgatgctttcatagcttatcatcccggcatagcttggcaatatctcgacaagttcttcactggttattaccttgaaggttacttagtctctgatatatccaaagattatagaaagctagctgttgagttctcaaagatgggtctttttgacaagaaaggacatgggacatgtattttacttaccatcatagcattgctgtttttcatctgtgtttaatggggtttaatgtgtgacaaa

SEQ ID NO: 231416 - DNA, 382 bp, Gossypium hirsutum
  unsure (1)..(382): unsure at all n locations
cggacgcgtgggaaaaagacaagcgtttcagtgggtctgtgaagcttccacatattcctcgccccaaaaatgaagatttgcatgcttggagatgctcaacatgttgaagaggcagagaagataggtttggattatatggatgtggaagcattgaagaaactaaacaagaataagaagttggtgaagaagcttgccaagaagtatcatgcctttttggcttctgaatctgtcatcaagcaaatccctcgtcttttgggtcctggtctcaacaaagcaggtaaattcccaacccttgtcactcaccaggaatcactagagtcgaaggtgaatgagacaaaggcaatnggtaagttccagctgaaaaaggttctatgcatgggag

SEQ ID NO: 231417 - DNA, 400 bp, Gossypium hirsutum
agtttgcattactctttttggggttccagaaaaggaataacgtttaaagatgctacagttgttgttcacggtgatattcgcagagatggcggtgatcatcgtactatgcttcaagacaccgttaaggaagctggtgttaatggttctggatcgggccaagaggggacgaggtccggtcatagtgaagacggtgggcggaacagtatccgttgtgatgttgtcgtacatattcagcatgatgatgctcaagaaacgctggatcgttgatggaaacgcttctctaacggacgagattctcatggccaaaaacctcctcgaaactactctcatggggggattgctattcctatctctaattatagacaaattacaccattatattaaagaactccgtataaga

SEQ ID NO: 231418 - DNA, 444 bp, Gossypium hirsutum
gtttcagatgaggattctagaaaggtctggtcttggtgaagagacttgtttacctcctgctattcattatattcctccaactccaaccatggaggctgctagaggcgaggctgagattgttatcttctcagctatggattctttgttcaagaaaacggggttaaaacctaaagacattgatattcttattgtcaactgcagtctgttttctcctacgccatctttgtctgctatggtgatcaacaaatataagctgaggagtaatataaagagctttaatctttcaggaatggggtgcagtgcggggcttatctccattgatttagctcgagatcttctccaagtacaccctaattctaatgcagttgttgtcagcactgagatcatcactccaaactactaccaaggaaaagaaagagccatgctccttctcaactgtctttt

SEQ ID NO: 231419 - DNA, 430 bp, Gossypium hirsutum
gcaccttatcagccttcagttgagttcactccttatcctttgctttcatagctgcgttccattttccctaacaaacctgcatcagatccgatcagatttaactcagatccatctgtatcgggtcttctaaattccagatctttacttttctcgagtaaaggaagaaagaggacgggcgagatgagagagattattagcgtccacattggccaagctgggattcaggttgggaattcatgctgggagctttactgtcttgaacatgaaatgcaccctgatggaacaatgccgagcgacacctctatgggcgtggcacacgatgctttcaacactttcttcagcgaaacgggttcgggaaagcatgtgcctacagctgcctttgttgatctggaacccactgttatcgatgaggtccggaccggcccttatc

SEQ ID NO: 231420 - DNA, 435 bp, Gossypium hirsutum
cccacgcgtccgctcaagctgatttattacgtgttaatataggttgagatggcttcgaccactctaatctgcgatacccagccatggaaggacttgaaggctcatactgaggatatcaagaaaactcatcttcgtgatttgatgaacgacaaagaacgatgcgaatcgatgatggttgagtttgatggaatgtttttggactactcaaggcattgcgccactcttgagaccatggataagctctataaattagcagaggctgcttctctcaaacaacaaattaaccgaatgtatagtggcgagcatataaatagcacagaaaataggtcagtgcttcatgtagctcttcgagcaccaagggatgctgttataaacagtgatggaaagaatgtggtgccagatgtttggaatgttttggataagatcaaggatttt

SEQ ID NO: 231421 - DNA, 286 bp, Gossypium hirsutum
gagaaagaaaaaaaagggttgtttgagattttggttttgaaaaaaaaaaaaacagatatgagggaggtgattagtatacatattggtcaagctggaattcaggtcggaaattcctgttgggagctttattgtcttgaacatggaattcaacccgatgggatgatgcctagtgacaccacggtaggtgcttgccacgatgcttttaataccttctttagcgagactgggtcgggcaagcatgtaccaagggctatatttgttgatctagagcccactgtcattgatg

SEQ ID NO: 231422 - DNA, 423 bp, Gossypium hirsutum
cggacgcgtgggtgaaaatggaggtttacaggagaaggctgatgtttctagtgtttgcatttgcattagtaagtatagggtatgcacaagagtcgaactcgaccactctggttccagcaatactgacttttggtgactcagtggtagatgtgggcaataatgattatctccccaccatcttcagggctaattaccctccttatgggagggacttcaccaaccaaaagcctaccgggaggttttgtaatggaaagttggccactgacatcactgctgaaactctggggtttactacttatccaccagcatatttaagccctgaagcatcagggaacaaccttcttattggagccaattttgcttctgctggatctggctatgacgacagagctgcctctttgaatcatgctatcacgttgagtc

SEQ ID NO: 231423 - DNA, 377 bp, Gossypium hirsutum
cccacgcgtccgcttccaaatcatacgctcctcatatcatccgccaacattctaggaatcatcaaaaccaaacctcccccacaccataacacaaaacaccgtttcccttctttcccattctgttatggccacggtggcgcgtgtaattcgctgtgaactactgtccactaaacctggagcgaacactaggagggaacagggtgatcaggttcaggttcagagagtgaaagcgggtgaacccgagaatggaaagatagtgttgcagccgaggttatgtacgttaaggtcgtacggttcggatcgagtaggggtgatgaagaccagaagggaagaaaacgatgacgtttcaccctttttcgagactttatcggagtata

SEQ ID NO: 231424 - DNA, 421 bp, Gossypium hirsutum
attggattgaacataacatcctgttgatatagacttgggtttcagatcaaatggaatattacttaaatggaacacagggaaaaaaattagcgagttcttaaattttattgagggcttaaatagagagttttctttctttatgcagctggactgacatgatcttatgaatgatgcgataagagtgctgatataatgacagatctgatgagtgtaataaaagatactgagaccattattttaactgaaattggaaaaggaaaacaggttcgaaaggttgcgtttgagaatttggaacgtactgcaaacaataaagttaggattggaacttaccaacaacttttctaccttaaacaggttatttttggcaaagaagatgctggcaataattttgccaaaggccgtaatacaattgggaaggaaa

SEQ ID NO: 231425 - DNA, 298 bp, Gossypium hirsutum
cgggctcgtgggtttagttggatcttgaaaatgctggcttggctcatgtgtcgacgatgactcaacatccgataagctatccgttactcttgtaaggcctcttgatattgtgacactgccctgaactataattttgataccccagataataaacccgaccttgcatgggaattttcggaggcgaacaaacatacggtcacggagatagtgaatcatgatccatacaactacaagcatgatgctgctattactgagatagatgtggctcagccaccagatgtacgatggcttacaatgt

SEQ ID NO: 231426 - DNA, 435 bp, Gossypium hirsutum
cggacgcgtgggttttattttcactcacttcacctgagattttgttttcttttgtttttcagtaatggggaagattaagatcggaattaacggatttggaaggatcgggcgtttggttgcgagagttgctctccaaagcgaagatgttgagcttgttgctgttaatgatcctttcatcaccactgattacatgacctatatgtttaagtacgacagtgttcacggtcaatggaagcaccatgagcttaaagtgaaggactcaaagactctcctctttggtgaaaagcctgtcactgtttttggcatcaaaaaccctgaggaaattccatggggtgaggctggtgctgaatatgttgttgagtctactggtgtcttcactgacaaggacaaagctgctgctcacttgaagggtggtgcaaaaaaggtgattatttc

SEQ ID NO: 231427 - DNA, 345 bp, Gossypium hirsutum
atgcgcagctggccgcggcgctccgctttcccagcgcccgcagctgaatcgcagtccgcagcccgcagcccggcgcggactcccatcgccgcagtcgccctccggcgccatgtcgcaaaacggagcgcccgggatgcaggaggagagcctgcagggctcctgggtggaattgcactttagcaataatggaaacggcagcagcgttccagcctcggtttctatttataatggtgacatggaaaaaatactgctggacgcacagcatgagtctggacggagtagctcccagagttctcactgtgacagcccacctcgctcacagacaccacaagatactaacagagc

SEQ ID NO: 231428 - DNA, 332 bp, Gossypium hirsutum
ctcactccttctgatatcaaagcttcaaaatggcatttgtcaaggctcaaaaaaccaaagcttactttaagcggtttaaggctccatacaaaagaaggagagagggaaagactgactaccgggctaggattcggctaatcaatcacgacaagaataagtccaacactctgaaataccgattcgttgtccgatttagcaacaaagatgtcaccgcacaaatagattgtgctaatattgctggtgatatggatgttgcttctgcttactcacatgagcttccacgatatgggcttgaagtggatcttacaaactatgccgcatcttattgcact

SEQ ID NO: 231429 - DNA, 437 bp, Gossypium hirsutum
  unsure (1)..(437): unsure at all n locations
ttcctttgttcctcatcctctgatccgtctcttcccgcattcgtcccgccggatttaacaagttttcaaacgaaaaatgagggaaatccttcacgtacaaggcgggcaatgcgggaaccagatcggatccaagttctgggaagtggtttgcgacgagcacggcattgaccctaccggacgctataccggaaactccagtctacaattggagcgcgttaacgtttactacaatgaggcttcttgtggaaggtttgtcccacgcgccgtgctcatagatcttgagcccgggaccatggatagtgtgagaaccgggccttatggtcagatctttangcccgataactttgtcttcggccaatctggaactggtaataattgggctaaggggcattatactgaaggagccgaacttattgattctgttcttgatgttgtca

SEQ ID NO: 231430 - DNA, 286 bp, Gossypium hirsutum
atataatggcagccgaatgtgctcgtaatgctttgttgcagagggttgtggataacaaagagaatgcagagaaattcaagtcagacttgatgaaaattgcaatgaccactttgagctccaaaattctctctcatgataaggagcattttgcacaactagctgtggatgctgttatgaggttaaaggggagcacaaatttagagggcatgcaaattatcaagaaccctggacgatctttgaaggattcctttttaaatgaaaggaattattttttgacaaaaaaata

SEQ ID NO: 231431 - DNA, 382 bp, Gossypium hirsutum
aaattcgatcagctctagtagtttaataaggtatataaagaagaaagatctccttgaattttatttttgaagtaagaaggtgaatatgggtgcttcggaggagaacagtgccttgttcccaatctttgggttcactataatggctctgccattagtgccatacactataggtaagatattaaacacattctcgaagaaggcaatgactatccattgccagtgttctgggtgttctcggtctgggaagtataggaaatcaattttcaaacggatctcgaacttctcaacttgtagtaatctgacccttgtgcttctctggattgtcatggcggtgctgatatactatatcaagccttacaagtcatgaggttaaagtatttga

SEQ ID NO: 231432 - DNA, 416 bp, Gossypium hirsutum
ataacattcgtctctcagatcctttcctcttagatcatcaaatccattcctttttttcaccaaaacatgagggaaatcataagcattcatataggtcaagctggtattcaagtcggtaactcatgttgggagctttactgccttgaacatgaaatccaacccgatggaatgatgcccagtgacacctctgtaggtgtagcaaatgatgctttcaacactttctttagtgaaactggttcagggaaacatgttcctagagctgtgtttgtggatctggaacctactgtgatcgatgaagttaggactgggacttaccgacaacttttccaccctgaacagcttatttctggcaaagaagatgctgccaataactttgccagaggccattatacaattgggaaggaaatttgggatct

SEQ ID NO: 231433 - DNA, 424 bp, Gossypium hirsutum
ctcacggtaaaaagatctcccttcccctctctttctctccggcggcgatctcaaatcaccggtaaatcgcaccgtaacgcccgattactcgtcacctctgtgatctcctctgacacctcgtggtttcagtttattctaactcgtcgccatcatgaatcccgaatatgattatctgtttaagcttttgcttattggtgattctggtgttgggaaatcatgtctacttttgaggtttgctgatgattcatatctggatagctacatcagtaccattggtgttgactttaaaatccgtactgtggaacaggatggaaaaaccatcaaactccaaatttgggacactgctggccaagaacgctttaggacaatcactagtagctattatcgtggggctcacggtatcatagttgtttatgacgtgaca

SEQ ID NO: 231434 - DNA, 240 bp, Gossypium hirsutum
caaaaaacatctttctgttcaattcaatcctcctttttctattcaaccataatgtcttgcttcattagcaaatacgccgatgagttggctaaaaacgctgcttacattggcacccctggaaagggtatccttgctgctgatgaatccaccggcaccatcggcaagcgtctttcaagcattaatgtagtaaatattgaagaaaacaggcgtgctctccgtgagctcctcttcactgctcca

SEQ ID NO: 231435 - DNA, 447 bp, Gossypium hirsutum
ttcaattcctgcttctattctcgttggtatcataaaagaatctcattcccccggtttcaagaaatggcagagaaatcgtgcgttaagcgccttcagaaagaatacagagcactttgtaaggaaccagtttctcatgttgttgctcgtccatccccaagtgacattcttgaatggcattatgtgctggaagggagtgaaggaacaccttttgcaggtggatattactatggaaagatcaagttccctcctgagtatccctacaaacctcctggaatcaccatgatcacccccaatggacggtttatgacacagaagaaaatatgcttgtccatgagtgattttcatccagaaagttggaatccaatgtggtctgtatcaagcatactcacagggcttctatctttcatgatggataacagtcctaccactggcagtgtaaacactaca

SEQ ID NO: 231436 - DNA, 446 bp, Gossypium hirsutum
cggacgcgtgggtcaagttatttcccattttttgggcgttctttatgccaactgataatcaaatgaaagacatgaaaccgaattccataatgggatcgtcagtcaccgacggcgagatcgtgtgcgtaacaggcggctctgggttcattggttcatggctcatcaagctgctcttggaacgcggttatgtcgtccgagccactgtgcgcgaccctggcaactcgaagaaggtgaagcatttactagagctacctaaagcagagacgcacttgactctttggaaagcagatttagctgaagagggaagctttgatgatgcaattcaagcttgtacgggtgtgttccatgtggccacgcctatggacttcgagtccgaggaccctgagaatgaagtcataaaaccaacaatcaatggagtgctaagcatcatgaaagcttgcgccaaa

SEQ ID NO: 231437 - DNA, 367 bp, Gossypium hirsutum
aacatttaaaatgaggttttccatgaaattgataattttctgatgtgcttatctctattcctgcagaaacatgggttccaagagctatccaatgatgactatttttcaaagaataatgagtttgctacatggctgaaagaagagaaacgtgtgtttttctctgatctttcatccgagtctgctcgggatttatttgcagactttgttaaagactggaataaccagaaactcggatctcaatactatgaacgccttgcaagtgggccacggactgcacataactgggaaaatcaacttgtaggaaggagaaaaaacctttttccacttggacccctactttttttttcttggttggccctcctttatt

SEQ ID NO: 231438 - DNA, 369 bp, Gossypium hirsutum
tttttctcttcttcccagcagaaataataatggcactaatcatggagtccaaacatgggagttggagactctcattaatgttgcttctggttatgcttgggttggcaaaagctgatatcaatcaagacaaaacagaatgtagtaatgagctagtagggctggctccatgtctcccttatgttggtggagacgcaaaaacccctaccatagattgttgcagtgggctgaaacaggtgctggataagagccggaaatgcctgtgtgtactgcttaaagatagagatgaccccagccttggcctcaacatcaacgctactctcgcggcaacacttgctaccacttgtcgtgcccctgtcaacatgaccgact

SEQ ID NO: 231439 - DNA, 370 bp, Gossypium hirsutum
gggaggtttcagaatgggaaatttcatgggaggatcttcaaattggtgaacgcattggtattggatcatatggtgaggtctatcgagcagattggaatggcacagaggttgctgtgaagaagtttctagatcaagacttctctggtgatgcattggttcaatttaaatgtgaagttgaaatcatgttaaggttgagacatccaaatgttgttcttttcatgggagctgttactcactccccgcatttctctatactcacagagtttctccccaggggaagtatgtataagctactgcatagacccaatcaacaacttgatgagaagagacgaatgcgaatggctcttgatgtggctaaaggaatgaatta

SEQ ID NO: 231440 - DNA, 443 bp, Gossypium hirsutum
aatttcatagctatgactgttatgggccctgcgccctatcgatcaacaagaagatgaggaaatgctcgtcccacagtctgatttgaccgacaatcaccagcccatggaagttgtagcgcaacccgaagctgcaaatactgtggaaaatcaaccagttgaggatcctccttcatcaagattcacttggaggattgaaaacttctctaggttaaacgctaagaagcattattctgaagtcttcgttgtcggtggttataaatggcgaatactgctatttccaaagggaaacaatgtggatcatttgtctatgtatttggatgttgctgactcagcaagcttaccctatgggtggagtagatatgcccagttcagtttggcagtagttaatcaaattcataataaatattctatcagaaaagacacacagcaccagttcaatgcac

SEQ ID NO: 231441 - DNA, 439 bp, Gossypium hirsutum
cattttcacattttatctatttactctctacctaagcttatttgtgtgcctatgcaatggcagttgatcctcaaaactcccccatggaagggttcccggccacacctaagatccgggaagtgaggcctgagtccggttttgagaatttcgggttttgcactgacccctgtcgtgtcccgggcggtgaacccaactcgggaataagaagagtgagtttgagggctgagattgacacttcacctcctttcggatcggttaaggaggctgtgacccggtttggtggcaacggacattgggtgccattgaacaagtttggagaatatcatggaattgaagagtttgatttaaagaaagtggaggaacaagcagcggaattggagaaagatctgattgtgaaagaattagagacccttgatgtgcttgaagaactggggactac

SEQ ID NO: 231442 - DNA, 456 bp, Gossypium hirsutum
accacttcttcccttccattttactttgttttagttgccataacgtcaccttccaatacaacccacaatgaggcaacaatatgtcttcactactctcacgttgctcatcctgttttccctcagttgttcaacaacattagcccaatctccggcactggccccggcaccttctggcccgacaaacgtcaccaagatcctcgaaaaagccggtcaattcaccctcttcattcgtcttctaaagtccactcaagtggccaaccagctgctcggtcagctcaacaattccaacaatggtatgaccgtttttgcaccaacggacaatgctttctccagccttaaatcgggcacattgaattcactcaccgatgaacaaaaagtgcagctggtgcaattccacatcgtcccaacatacctcaacctgtctcagttccaaaccattagcaaccctttgagaac

SEQ ID NO: 231443 - DNA, 443 bp, Gossypium hirsutum
gcagctgcaggctcattgcatcccttcctatttctcttccctcaataatcaaaagcttcttctttctttctttgtctgagcgtgcactctcaaaccacaacaaaccaagatgagggaagaagataaaaatgaagctgaggcagttggaaactccacgcaaaccaccccgtctgaacgagaggattctttcgtctatgtcacggagatcagttgctggacatccttggcatgatcttgagattggacctggagctccagcaatgttcaactgtgttggggagataccaaaaggtagtaaagtaaagtatgaacttgacaagaagacaggattgattaaggttgatcgagttttatattcatcaatggtctaccctcataactatgggttcatgcctcggacactgtgagaagacaatgatcccttggattgcttggttatcatg

SEQ ID NO: 231444 - DNA, 394 bp, Gossypium hirsutum
cccacgcgtccgaccggattgaggtggtggacaagtctgccaactattactattacttaaaattcagttcccaagacaatgataaaccctagctagtgagtagccaccaccaagcttaaaaacagacctcacaaaagtcggaattggtttgttggtaggattgattgactactactctgcagatttcgtcccatttgcagagtgaggctgagatttagggtttagcagaagtctgtaaatggaagaaatcacccaaggtgtcaacaacatcaacttggtcgccgattcccacaagaagaatcggattcaagtctcgaataccaagaagcccttgtttttctacgttaatcttgccaagaggtatatgcagcagcacaatgaggtggagttgtct

SEQ ID NO: 231445 - DNA, 449 bp, Gossypium hirsutum
attcaggacaaggaaggcatccccccagaccagcaaaggttgatcttcgctggtaagcaacttgaggatggccgcacgttggctgattacaacatccagaaggagtccacactccacttagtgcttcgcctccgtggaggaatgcaaatttttgttaagactttgactgggaagaccattacattggaggtagagagttcagataccattgataatgttaaggcaaaaattcaggacaaggagggaattcccccagaccaacagaggctgatttttgctggtaagcaactggaggatggccgtaccctggctgactataacatccagaaggagtccaccctccacttggtgctccgtcttcgtggtggtatgcagatttttgtgaagacacttactgggaagaccatcaccctggaagttgagagctctgacacaatcgataatgttaa

SEQ ID NO: 231446 - DNA, 449 bp, Gossypium hirsutum
ctttccaagacaaagcttcatattatcttttttagttccgacaaaagaaaacgaaaaaaaagaagaagaaatacaatcgttttctttttgaagtcgggttttagtttttggggtgaaaaaaatgttgggagtatttagcagtgcgatagtgtctccgccggacgagctggtggcggccggttgccgaactccatcacctaagataacggcggacgctctggtgaaacggttccttgagacgaactcctccggcgtgtccatgcacatcggagaccatgtccaattcgcttattctcaccataaagagtctcctttacagcccagatcatttgctgtgaaagacgaaatcttctgcttgtttgagggagcccttgataacttggggagtttaaagcagcaatatggtctggcaaagtcagcaaatgaagtgatattggtcattgaagctt

SEQ ID NO: 231447 - DNA, 237 bp, Gossypium hirsutum
cccacgcgttcggtaaaagatggccgacggtgagggtagtcaacccctcatgtgggatggtggaactggaatggtgaaggccggttttgctgttgataatgctccaagggcagtttttcccagtatcgttggtcctcctcgacacactggtgttatggttgggatggctcatgatagatgcctatgtatgagataaagcacaatctaaaataggtatccttactttgaaatatctta

SEQ ID NO: 231448 - DNA, 424 bp, Gossypium hirsutum
atagccatggcttcctcaccaaaactcttctctatgtctatcctcttcctttttgccctcttctccatgcaaatccatgctagagagtacttcagcaaattcccaagagttaacatcaatgagaaagagacaacaaccagagagcaaaagcacgagaccttcgttccccagaccacccaaaagccagaagaacaagagccaaggttcattcctgaaacccaaaatggttatggcctttacggccacgagtcaggctcaagccggcccagtttcaccaccaaagaaacctatgaaccctatgtcacccctgttagattccaccctgatgagccctataacagcatccccgaatcctccaacaataaagacacttactactacaacaagaatgcctacgagtccactaagcagcaaaacttgggcg

SEQ ID NO: 231449 - DNA, 453 bp, Gossypium hirsutum
ggaacatcaccaccattaccataaccatgttgaaagtgcagagataggcttgttcaccattgatgaactacatacctttaacgtagggaagaaattacccatctttttcccaataaaaaaccactctctttaccctcctttattgcctaaacaaattgctgacaccatccctttttcatcttcccaagtttctaatattctacgattcttctcagtttctccggactcccccaaaggcaaagctgttcaagatacactcgcaaaatgcgaactcggagcagcgcaaggggagaccaaaatctgtgctacctctttagaatctttacatggttttctaagcaatgcatttggaccccatgttgatttcaagttcataagcacaaggcatcccaccataacaaccccactctttcaaaggtacacagttttagaatcccctgaagagattgaatc

SEQ ID NO: 231450 - DNA, 404 bp, Gossypium hirsutum
  unsure (1)..(404): unsure at all n locations
cggacgcgtgggctgcatctttgtcccttccctttgtcctaaacacagtgtgacttgaaaaccgagttcgttcatattgactcagtgaccacccattttctcccaccatttattttacctgtaagagaatccaatagaccaaaaccaaacaacaatgggttccatgccatctcctctcttcttcttcttttttcttctcttcacaatccaatgttgtttcagttcaaacactagtgagctaagagctttaatggatatcaaagcctctttagaccctgataatcaatacttaacttcatggaccactaaaagtgacccttgttcttttgaaggcttancgtgtaacgaacaaggccaagtagccaacatttccttacaaggcaaaagattgtccggcaaaatct

SEQ ID NO: 231451 - DNA, 427 bp, Gossypium hirsutum
gtttgaatacaaaaagaaagtaagggtaagccttttcattaatcctcaagcttttatttttgcccataagtctactcccagtttcccttaatcctccatgggcaaaggcggaggttgtgtcccaagcaaaaagagacaaccttcctctgccgaaggctctgccactgccactgccactaccgccaccaacaacgcacccatcgaagccgatgaagaaactcacgaaactgccagtgtagctgtgaatcctacgaatgcgcaatcagttaccgccactttaaaaatctttattggttactactccatgtatggtcacgtggagaaactggccaagcggatgaagaaaggggtcgacggcgtggaaggggtagaagcggttctttatcgggttcccgagacgctcccggctgatgtgctggaccatatg

SEQ ID NO: 231452 - DNA, 419 bp, Gossypium hirsutum
  unsure (1)..(419): unsure at all n locations
attctctctttgtcgtttgccgcgaaaccctggtgtctttacacattgtccccttctctcggcacccatggatattgaggccgagatccgtgcattgcagcttgactctgcagaagataataatgatgtgggcaatcctgaagatgcaaaactggaaaaagttgaaaaggaagatgangtggaggtggaggttgaggtggaaggcatgaaggatgaggttcatggaagatctcagccaggacaggcagagccaaaagtgaaaaacaaggaagtagttgctttggaggatgctgaagcacaggaagagatggaaacaaataagaagcgccacttgaatgtggggtttattggtcatggtgatgactggaaagctacaactggaggccagatactcttcctcagtgggcangtcgatgacc

SEQ ID NO: 231453 - DNA, 431 bp, Gossypium hirsutum
aagcaaacaaaggtaaaatggcaaggacaatggcaatggcgatcccttcacttcctcttctcttcctctttacatttctgcttctactcccacttctcatttcctcttcccctgttcaagaccctgagcttgttgtccaagatgttcacagggctatcaatgcgtccaggaggaacctagggtatctctcctgtggaaccggaaaccccattgatgactgctggagatgtgaccccaactgggagactaatcgccagaagctagctgattgtgccattggattcggcaagaacgccattggtggaagagatggtaagatttatgtggtcactgactccggcgatgatgaccccgttaaccccaaaccagggacattacggcatgcggtgattcaagacgaacccgtgtggatcattttcgctcgtgacatg

SEQ ID NO: 231454 - DNA, 438 bp, Gossypium hirsutum
  unsure (1)..(438): unsure at all n locations
aattgtttgagctagctagctcttactcaaatggcaaccaaaacgatgatgttgcaaatatttccacttttcttctttttgttcagtgtctgcaactccattttccttggtgctaatggagatgacaatggtggttggcaaactgcccatgccaccttctacggtggtgctgatgctaccggcacaatggggggagcttgtggttatggaaacctgtacagtcaagggtatggaacgagcacagcagctttgagcactgcacttttcaacaatggcttgagcctgggtgcctgctacgagctccggtgcaacaatgatcctcaatggtgcattagtcgaaccataaccgtgacagccaccaacttttgtccacctaactatgctttaattagtgacaatnggcgggtggtgcaatcccccacgagaacactttgattt

SEQ ID NO: 231455 - DNA, 450 bp, Gossypium hirsutum
ggctttcattggtctcatagttggagccatgctcccttactggttttccgccatgacaatgaaaagtgtcggaagcgcagctctcaaaatggtcgaagaggttcgtcggcaattcaatacaattccaggactaatggaaggcagggtaaagccagactacgcaaactgcgtcaagatatcaaccgatgcctcactccgcgaaatgatcccacccggcgcactcgttatgcttactccacttatagtaggaaccctttttggagtcgaaactctagccggtgtcctagctggtgcactagtttccggtgtccacgttgccatctcagcttcaaacacaggaagagcatgggataatgccaagaaatacattgaggcgggtgttagcgaacatgcaaagtcattgggaccaaaaggttcagaatgtcacacggcagcagtgataggagacac

SEQ ID NO: 231456 - DNA, 365 bp, Gossypium hirsutum
  unsure (1)..(365): unsure at all n locations
cccacgcgtccgagtgaagctgctgaaacgctgaatgagatgcctataaaaaagctttacatgtcgattgagatggcagctcatggagaacaaggtggagcagcggaggcaatcttctctggccgagagaagattaagcttgcgcacttttacgactgcctccaggatgttgtccggtattagtttgaatgccttttattcattctgataatctgctcttctgtttcgtatagttatgtatattatgagtggatgaaattctaattattatttggtttattaatgatttgattgcttgttaatgcattaattgaacttagatcgctcttggngactatggaaggaaacctggatatgagcaattc

SEQ ID NO: 231457 - DNA, 423 bp, Gossypium hirsutum
cccacgcgtccgctcttatcaattttcccccatcttaaaactaaagaaaattaacaatgtccgctgttgctccttctttttccttgagtgtgctctgttttgcttcattgctctcctttttggctgtggtgaatgcaagaatccctggagtttatactggtggagcttgggaaagtgcccatgctacattttatggtggaagcgatgcttctggaacaatgggcggtgcatgtgggtacgggaatctctacagtcaaggctatggcgtgaatacagcagctttaagcactgcactttttaacaatggccttagctgcggtgcttgctttgagattaagtgcgcaaacgaccccaaatggtgtcactccggcagcccttccattattatcactgccactaacttttgccctcctaactatgctc

SEQ ID NO: 231458 - DNA, 448 bp, Gossypium hirsutum
ctctgaaaactaattgaaatcgtcggctgtctctcatggctgttcctctcgggcttccgccgccgtcgacacccaaaatggaggctcaccggctatcttctactaaacctgttcaagctctcaagccaacaaagaagatttctttagaggaagataccggtaaagcctccgacgcactgccgcttcccttgtacctaacgaatgccctgttcttcaccctcttcttctcggtggtttatttccttctttcccgttggcgtgagaagatccgtacctccacacctctccatgtcgtcaccttttcagagatcatcgccattctctcatttttcgcgtcctttatttaccttttgggtttctttgggattgacttcgttcaatctttggttttccaaccatcgcctgacgtttggattgccgaggaaaaagatgatgaagttctgcttgc

SEQ ID NO: 231459 - DNA, 409 bp, Gossypium hirsutum
gttttcttttataatctctctattctctgacgcaaagagcgatataaaatctcacaattttccagcaatcgctaaaaaattataaaaatctcaaatctgatcccatggcttctcgccggcgtatgctgttaaaggttataattctcggtgatagcggggttgggaaaacatctctgatgaatcagtatgttaatcgcaagttcagtaatcagtacaaagctacgattggagccgattttttgacaaaagaggttcagtttgatgatagattgtttacattgcagatatgggatactgccgggcaggaaaggtttcaaagtttacgtgtggctttctatcggggtgctgattgctgtgtacttgtgcatgatgttaatgtcatgaagtcctttgataatcttaacaactg

SEQ ID NO: 231460 - DNA, 440 bp, Gossypium hirsutum
agccaattgtttgagctagctagctcttactcaaatggcaaccaaaacgatgatgttgcaaatattttcacttttcttctttttgttcagtatctgcaactccattttccttggtgctaatggagatgacaatggtggttggcaaactgcccatgccaccttctacggtggtgctgatgctaccggcacaatggggggagcttgtggttatggaaacctgtacagtcaagggtatggaacgagcacagcagctttgagcactgcacttttcaacaatggcttgagctgcggtgcctgctacgagctccggtgcaacaatgatcctcaatggtgcattagtcgaaccataaccgtgacagccaccaacttttgtccccctaactatgctttatttagtgacaatgggggggggtgcaatcccccacgagaacactttgatt

SEQ ID NO: 231461 - DNA, 438 bp, Gossypium hirsutum
ggaacaccatgtgggattgaacaagtttgctgatatgagcaatgaggagttcagaaaagcttacttgtcaaaggtgaaaaagcccatcaacaaagggataaccctgtcaaggaacatgaggagaaaggtgcagtcttgtgatgcaccctcctccttggattggaggaactatggagttgtgactgctgtcaaggaccaaggttcttgtggaagttgttgggcattctcatcaaccggagccatggaaggaatcaatgccttagttactggagacctaattagcctttcagaacaagaacttgtagattgtgataccagcaactatgggtgtgaaggaggatacatggactatgctttcgagtgggttataaacaatggcgggatcgatagcgaaaccgactacccctacactggtgtggatggcacatgtaacaccac

SEQ ID NO: 231462 - DNA, 403 bp, Gossypium hirsutum
aataagcatattccttattcttttctctctttctcaggtttttttgtagcagaagaagattatatagttaaagaggaatgagtcaacctaaaatcaagcgtcgtgtgggtaaatatgaggtgggaaggacaattggggaggggacatttgctaaagtgaagtttgcaagaaattctgagacaggggaagctgtggcacttaagatccttgataaagagaaggttctcaagcacaagatggctgaacagatcaagcgggaaatagcaacaatgaagttgatacagcatccaaatgttgttcgtttatacgaggtgatgggaagcaagacaaaaatatttattgttcctggagtttgttacccgggggagagctctttgataaaattgtaaacaatggacggatg

SEQ ID NO: 231463 - DNA, 452 bp, Gossypium hirsutum
cccacgcgtccggaaagatcaagatcggaatcaatggatttggaaggatcgggcgtttggttgcgagagttgctctccaaagcgatgatattgagctcgttgctgttaacgatcctttcatcaccactgaatacatgacctacatgtttaagtacgacagtgttcacggtcaatggaagcatcatgagcttaaggtgaaggactcaaagacccttctctttggtgaaaagcctgtcacagttttcggtatcagaaaccctgaggaaatcccatgggctgaggctggagctgagtatgttgttgagtctactggtgtttttactgacaaggacaaggctgctgctcacttgaagggtggcgcgaagaaggttatcatttctgctcccagtaaggatgctcccatgtttgttgtgggtgtcaatgagaaggaatataagcctgaccttaacatt

SEQ ID NO: 231464 - DNA, 340 bp, Gossypium hirsutum
cgcaagtaagcgcagtgcacttgagcaattaactgaaatttctgcggctaatgatccctcgatttggagcaagtacttcaatcagattttgacagctatacttgaagttttagatgattctgattcttcaatcacagaacttgcgctgtcattgatagttgaaatgcttaaaaaccagaaagatgctatggaagattctgttgaaatagtaatcgagaagctgcttcatgtaacgaaggatattgtttcaaaagtttcaaatgaaactgtgcactgcttgaacactgtgctgtctcagtatgatccattcagatgtttaagtgtgattcgacacttatta

SEQ ID NO: 231465 - DNA, 433 bp, Gossypium hirsutum
ctcccctctgtcttcgaaaaatatctagggtttttcatcttctcctttccttcgcctctctctcttttgaaactttaatcggaaagaaaaaatgcctaggtatgatgatcgccgtggtggcactcgcctttatgtcggtcacttgtcttcaaggacaagatcacgtgatcttgaggacatgtttagcagatatggaagagtacgtgatgtggatatgaagcgcgactatgccttcgttgaattcagtgaccctagagatgctgatgatgcaagatattcattgaatggtcgagacctagacggatgccgtatcattgtggaatttgccaagggagtgccccgtggccctggtggatcacgtgattatgctggaagaggtctactcctggatctgggcgctgcttcaattgtggaatcgatggccactgggctc

SEQ ID NO: 231466 - DNA, 368 bp, Gossypium hirsutum
gctttagaaacataccaggaagggttgaaacacgatgccaataaccaggagctgctcgatggtgttcgaagatgcgtagaacagatcaacaaagccaatcgaggtgatttgagccccgaagaactgaaggaaagacaggctaaggcaatgcaagatccagaaattcagaacattctctcagatcctgtaatgagacaggttttgattgatttccaggaaaatccaaaggcagcacaagaacacatgaagaaccctatggtgatgaacaagatccaaaagctggtctctgctggaattgtgcaaatgagataaattgtgaaagtgatcaattgtaacttaaattgctttttttccttcataagaaattt

SEQ ID NO: 231467 - DNA, 387 bp, Gossypium hirsutum
gttggagagccttacaacagtgtgctgtccactcattcgctccttgagcacactgatgtcgctgttcttctggataacgaaacaatatatgacatctgcaggcgtgctttggacattgaacgaccgacttataccaatcttaaccgccttgtctctcaggttatctcatctattaccgcatctttgaggttcgatggacccctgaatgtggatgtgactgagttccagactaacctgatgccatatcccaggatccactttatgctttcttcttatgcccatgtcatttgagctgagaaggcttaccatgaacagctatcggtggatgagataaccaacagcgcttgtgaaccctcttcaatgatggccaaatgtgacccacgacac

SEQ ID NO: 231468 - DNA, 298 bp, Gossypium hirsutum
ggactatgttgatatagtagagcacctggtggatcgatggaaggtgaaggagctagctgggctttcagccgaggggcgtaaagctcaagactacttggggtcactttctttgaaaattaaaaaggttaaagaaaaaaccccagaaaaaggccaaggaagcacccagtgtcccattcagttggatatttgatagagaagtgaaactttaggtcatgaaatacagttaaaactcctgcaatgcatttgaggaaacaaacacgaagaagctgaatgccaacttctctttatatatccgatg

SEQ ID NO: 231469 - DNA, 299 bp, Gossypium hirsutum
catttttctgtagcaccccccaaaaagcttgtgcttggatatggctgaaaacccagtaaaatggctgtttctcattctagcaagctgcctgtgtttcgctttcgtcctgtcggaaagcaactcattaataaagaagacctacatcgtccaaatgcacaagtctgcaatgccagcatcattctccagtcctctggaatggtactcatcgaaattaaagtcggtaatgtccgatacccagagtgaaggtgaaggagatggtgaaaataggatcatctatagctaccaaaatgcttttcatg

SEQ ID NO: 231470 - DNA, 386 bp, Gossypium hirsutum
gcgatattgtacgcgctggtcgcgcgtggatcggtgatgctggcggagttcacggcggcgtcgactaacgccagcgcgatcgccaggcaaattctagacaagattccgggtgacaacgacattaacgtttcgtattcacaagatcgatacatcttccacgttaaacgcaccgatggactcaccgttctttgtatggctgatgaaagtgccggaaggcgaattccttttgcgtttcttgaagacattcatcagagattcgttaggacttatggccgagcaatattttcagcccttccttatggcatgaatgatgaattttcgagggttttgaaccagcaaatggaatattactcgagcgatcctaatgctgataggataaatcgact

SEQ ID NO: 231471 - DNA, 403 bp, Gossypium hirsutum
  unsure (1)..(403): unsure at all n locations
aactcttctctatgtctatcctcttcctttttgccctcttctccatgcaaatccatgctagagagtacttcagcaaattcccaagagttaacaccaatgagaaagagacaacaaccagagagcaagagcacgagaccttcgttccccagaccacccaaaagccagaagagcaagagccaaggttcatccctgaaacccaaaatggttatggcctttacggccacgagtcangctcaagctcangctcaggctcaagccggcccagtttcaccaccaaagaaacctatgaaccctatgtcacccctgttagattccaccctgatgaaccctataacagcatccccgaatcctccaacaataaagacacttactactacaacaagaatgcctacaagtccactaa

SEQ ID NO: 231472 - DNA, 414 bp, Gossypium hirsutum
  unsure (1)..(414): unsure at all n locations
ggataacggaagatagattgcagttgttggtcaatgttactggagcatttagaccgggtgtgcttacggctttggtcggtgtcagtggtgctggtaaaactacactcatggatgttttagctggtcgaaaaaccggagggctcatagaagggagcatacatatatcaggttatcccaaaaggcaagaaacttttgcaagaatttcaggttactgtgagcagaatgatatccattctccctgtttgactgttctggaatctcttttattctctgcttggcttcggttaccatcagatgttggcttggagacacanagggcgtttgtcgaggaggtgatggaacttgtggagcttactccattaagtggggcattgattggtctgccangagttgatggcttgtncactgaacaac

SEQ ID NO: 231473 - DNA, 352 bp, Gossypium hirsutum
  unsure (1)..(352): unsure at all n locations
ctgaaaaatttccagctgagcaacaaaattcagaggacagtggcagacttaaggaatattttgggatgaactctccaacaaaagaccaattctttattgaaagaattggcagaccttccattggtgttgcaaaaggagaaaagacaagcaagctaaagggatctgaactaagcatggaatatgagactattgatttttccatgaaaagggtctcgaacatctatatagaggcaaagaaacatctctctgatctgctaacaaacgaggatcaaaatgaggatcttttgagtacacaggttccaaaaaccttangtaggattctttctcttcctgagtataatacatcccctgt

SEQ ID NO: 231474 - DNA, 346 bp, Gossypium hirsutum
acgaaaatggcgtcaactgaaaacaattatgaccgctcttctgctaaatgacattgggattgaggggctggaaaggagtctatgctttgagcttacaaattgaaatcacaaggtttacatgttacggggtacgaatctgactgaatagctggtggaaagttaagaagtgtttcgagggatggtttgatatgggatgaaggagcaaatacaatgactgaaagtgagattgaagtgagaagtttgtttgatgatcttggtattcaagataagcaacaagttccaattgcacagaacaagcgggatattatgaaaaatggcgtgcctgtattgatacccttaaatcctt

SEQ ID NO: 231475 - DNA, 391 bp, Gossypium hirsutum
gaaaaggaagacaacgatggtgtctctgaagttacagaagcggctcgccgctagcgtcctgaagtgtggccgtggcaaggtttggcttgatcctaatgaaatcaatgaaatctccatggccaactccaggcagaatgttaggaaacttgttaaggatggttttatcatccggaagcctaccaagattcactcccgatctcgtgcacgcagaatgaaagaggccaagagaaagggtcgtcattctggctatggtaagaggaagggtaccagggaggcaagattgcctacaaagatcctttggatgaggagaatgcgagtactaaggcgtttgcttcgtaagtacagggaatccaagaagattgacaagcacatgtaccatgacatgtacatg

SEQ ID NO: 231476 - DNA, 302 bp, Gossypium hirsutum
caaaaatggatggttattgtagcagaagggtaatcatgtttttggtgtttgcatttgcagcaataagcagagggtatggacaagaatcaaccactcttgttcctgcaatcatcacctttggtgactctgtggtagatgtgggcaataatgactatctccctaccatcttcaaggctaactatcctccttatggacgggactttgccaacaaaaagcctactgggaggttttgcaatggaaaattagccactgacatcactgctgaaactctggggtttacaacttatccaccagcttacctt

SEQ ID NO: 231477 - DNA, 400 bp, Gossypium hirsutum
gaataattaaggggaaaaatatgcctagattgttatgactttcgttttgttgaaaaatgaccggacatccttggccgcacgatcgagcttccttccgatatcaaccctccatcaatcgtcgtcgcagtaaaaatatattacatctgttagggaagagagaagtctctcctagaacaaaatatgtaccaaagaagctgtggggagaagcacctaaacgaaatgtctattcttcaccttggactgaacccattagagatgccagacgtggtattctgtcatgggctgaggaagagtctttgcatcatttatcaggcatatatgggcctctggttgccttctccaagtcaacatttgcaccagcttttatttctgatggaagaacacttgcttctaccatggt

SEQ ID NO: 231478 - DNA, 379 bp, Gossypium hirsutum
caataatatacaaaattaaagggaaaaagaggaaatttttgtcttcttcaatttccgacaagatttatagggttttagcttaactacgatgcaaagatgcttcatttctagtgtttgtgttttttagggttggattttgattttatgtctgggttttggttgattgattccatggctgactggcaacagcttttgcaatcgattttcttaggtcttatattctcttatcttctagcgaagctaatctccttagtcgtttctttcaaagacgataacctttcgataacccgagcccgaagcagcaatgtccagggctacgagaaaatcgacgattcggtttccggatccgaaccgattggagtactgagcacttgggact

SEQ ID NO: 231479 - DNA, 367 bp, Gossypium hirsutum
gatccatttgaccaagatgattgggagcactactccaaactaaccaatgaaatcggagaaaaagttcagattgtaggagatgatcttttggtcaccaacccaaagagggttgcgaaggctattgctgaaaaaacttgcaatgcccttcttctcaaggtcaatcaaattggatctgttactgaaagtattgaagctgtgaaaatgtccaagcaagctggatggggtgtgatggccagccaccgcagtggtgaaacggaggatacttttattgctgatctttcagtcggtttggccacgggccaaattaagaccggagctccatgcaagtctgagcgtttagccaagtacaatcagcttctgcgaattg

SEQ ID NO: 231480 - DNA, 427 bp, Gossypium hirsutum
attttcttaagaagaacaactttcagctgaaacagccgcttcctccaacatggctagagggttgaagaaacacttgaagaggctcaatgcccccaggcattggatgcttgacaagcttggtggtgcattcgcgccaaagccatcgtctggaccccacaagtcgagggaatgtttgccacttattctcattctgcgaaacagactgaagtatgctttgacatacagagaagtgattgctattcttatgcaaaggcatgttatggtagatgggaaggttaggactgataagacctaccctgctggttttatggatgttgtgtcaattcccaagacaaatgaggacttccgtctcctttatgacactaaaggtcgtttccgccttcatgccatcactggtgatgagactaagtttaagctctaaagttag

SEQ ID NO: 231481 - DNA, 433 bp, Gossypium hirsutum
gttatgcttcccttcgtcttcccgttcgttgtattctcttacattttcgatttgtttggtttgctttctttgcaaggtggtaaataatagcttacgtatcttctcttgtcagttttttttcccagtagccatcataattacttcattaaatatttggagattggttcctataccaggcaaagttactacgagggctgaagtaccttcactcggcaaatatccttcaccgagacttgaagcctgggaacctccttgtcaacgctaactgtgacctaaagatatgtgattttgggcttgcccgaaccagcagaggtaatgaacaattcatgacagagtatgttgtcacccgttggtaccgtgcacctgagctcctactatgctgtgacaattatgggacatccattgatgtttggtcggtaagatgcatctttgc

SEQ ID NO: 231482 - DNA, 378 bp, Gossypium hirsutum
caagttttggtagatctaataagatcaagtcgatccaaacatgtttctcaccagaactgagtatgaccgtggagtgaacacattttctccggaagggagattgttccaggtggaatatgctattgaggccatcaagctgggttcaactgcaattgggttgaagacaaaagaaggtgtcgttctggctgttgagaagcgtattacttcaccactgttggaacccagcagcgttgagaagattatggaaattgatgagcatataggatgtgctatgagtgggttgattgctgatgcccgtacacttgttgaacatgcacgagttgagactcagaaccacagattctcatatggtgagccaatgacagtagatccacaaca

SEQ ID NO: 231483 - DNA, 427 bp, Gossypium hirsutum
tgtaattgttgcaattattttacaaacaaagttagagagtgttccatcatcacagatatatgcgcctgagtctcttagagcaggatatgcaatctttgcttcgggaattattgttggctttgcaaatcttgtttgcggattatgcgtaggaataattggaagcagctgtgcactgtctgatgcacagaactggtcactttttgtgaagattcttgtgattgagatttttggcagtgcacttggattatttggagtgattgtaggtataatcatgtcagctcaagcaacatggcctgcaaagtcagtgtaattttccgctcttagttacaacttagctctgtgagactgcaatctgttgaatgtattagttactgaaaatggcgcctacatatgtaaccatgtatttagaaacatgcttggacatgct

SEQ ID NO: 231484 - DNA, 313 bp, Gossypium hirsutum
tgcctttggaatgatggctgcagttttagtctcattgattgagtcaaccggagcttacaaggccgcctcacgtctagcaagtgcgacaccccctccagctcatgttcttagtcgtggtattggttggcagggcattgggatccttttgaatgggctatttggaacactgagtgggtcaacagtctctgtagaaaacgtggggctccttggaaacactcgtgttggaagccggagggtcattcaaatctcagctggctttatgatatttttttcaatattaggaaaattcggagctctgtttgcatcaatacct

SEQ ID NO: 231485 - DNA, 270 bp, Gossypium hirsutum
  unsure (1)..(270): unsure at all n locations
cccacgcgtccggatgagatatcaaagtttggcgaggtttatgataaattctgcaaagaaaaaattgcccatttgcaagccttgaaaggttatgagcagaatggatttggaaaagaagcaattgagttgttttatttgatgcaagatttgggagttaaaccggattcctcaacatttgttagtttgttatctgcttgtgctcangtaggtgcaattggtttaagctgttgggtgcatgagtatattgctagaaactggtttgatctgaat

SEQ ID NO: 231486 - DNA, 367 bp, Gossypium hirsutum
cggacgcgtgggtgttcaaattgtgtcaaatgattcttctcctatggaagtggaacttgaaacttcctggttcttacaatgtcttcatgcttatttttgcttcttccttatcttcaccttgattacaattcttccacttttgtctctcttgtttagtttggtacccaaaccaaagctgtggtgcacctgtgagatttgtcacacatatctgaatatgagttggtcaaaacaattcgacaatctttgcgattggtacactcacctgctaaagaactcgccagggaacaccatccatatccatgttctgggcaatacaatcacagccaaccctgacaacgtggagtacatgctcaaaaccagatttgag

SEQ ID NO: 231487 - DNA, 319 bp, Gossypium hirsutum
gaaccaaaaatcacacttccttttttctttttaccagggaacaccaaaaatagtcatgacattatacttgtgatcttaatgagttttgtttctcatccaaaaagagaacatcaaaaagctgatgcataagaatagcagtgtcttaccccttgtaccagggaacctcccaaaaaatgacattgaaaatgcgaaccaaaaatcactttgcagtcaagatcttgatcacggatgcagtcccaatccgatgcagagcaacaatcgaatccccattttggcataatccctttgccttggcatgctgaatagcaaactccaatgc

SEQ ID NO: 231488 - DNA, 408 bp, Gossypium hirsutum
cccgttgaaaaaatatgggtttccaaagaaacatattgggtttccttttcttgatattggcttcactaacaagcctctcttctagccttcctagtgaatactccatagtggaacatgagattgacgcatttctttcggaggaaagggtgttggagatcttccaacagtggaaagaaaagcatcggaaagtgtaccggcacgccgaggaggctgagaaaaggtttgaaaatttcaaggggaatttgaagtatatcctagagaggaatgcaaagagaaaagcaaacaaatgggaacatcatgtgggattgaacaagtttgctgatatgagcaatgaggagttcagaaaagcttacttgtcaaaaggtgaaaaagcccattaacaaaaggataaccctgtcaaggaacatg

SEQ ID NO: 231489 - DNA, 333 bp, Gossypium hirsutum
acgcaatccatggctaccctttcttcaactcattcttcctcacaaaacatcctcattacgttcaccataatattcctcgcatcatctcttctgccttcctattctgcaatcactgagactgaccaacgccgcccatttaagaagatatacgccttcggcgactccttcaccgacaccggcaacaccgagtccctcaccggccccaatggctttgtccgcgtttccaacccaccttacggcaccaccttctttcaccaccccaccaaccgctactccgatggccgactcgtcatcgacttcgtggctcagtcactgtctctgccgttcttgccg

SEQ ID NO: 231490 - DNA, 364 bp, Gossypium hirsutum
caaagcctcgttgattcgttactggaacaatcacatttccaacaatcttcccaagccaccatttcttatctccaaagcttccccactaaacgccattgacttggccaagctcactcaacttgccaatcataactctctgtcttcccacattgaatctttttgttccttagccaatcttttctgctcattccaggaggaatcctcgaaactagacgcagttggcaagggtaaaggggatgcaaacttcgcagtgtattccagtaaaaactttaaaggttatggctcgttaagtcgcggagggatcgactccttcaagaactactccgatgggttaaatactcccaatgagtcttttaagaaatac

SEQ ID NO: 231491 - DNA, 373 bp, Gossypium hirsutum
cccacgcgtccgtctgtctgggtttagacaacaaagagcggaagagaaatagcggactcaacttctgcggatcacgcgtggcgtaagtatgagtgcttccaggttcataaaatgcgtcacggtcggtgacggtgccgtcggcaagacttgtctgctcatttcctacactagcaatactttccctaccgattatgtgccaactgtctttgacaactttagtgctaatgtggttgtggatgggaacactgttaatctgggattgtgggatactgctggacaggaagattacaatagattaagaccattgagctatcgtggagcagatgtcttcttgctggcattttctctcattagcaaagctagctatgaaaat

SEQ ID NO: 231492 - DNA, 414 bp, Gossypium hirsutum
cccacgcgtccgctctggtttaaacatgggtatgggtttaaggaatggatttcttttgattttatcttgtgttgttacactttccctctcagttttggggcgacctgccactttccttgaagattttagaatcacttggtctgattctcatattaggcaaatcgatggagggagagccatccaacttgttctcgaccaaaattcaggctgtggatttgcttctaaaaggcagtatttgttcggacgtgtcagcatgaaaatcaagctcatccccggcgactccgccggaacagtcaccgccttttatatgaattctgttacagatgctgtgcgagatgagctagacttcgagttcttgggaaaccgtaccgggcagccatatacggttcaaaccaatatctatgcccatggaaa

SEQ ID NO: 231493 - DNA, 409 bp, Gossypium hirsutum
  unsure (1)..(409): unsure at all n locations
ctctcttttactcattcattctttagtttcaatatcaaagcaaaaatggcttcttcttgtaatgttgtttcaatggctttactggcttgtttggtgttgaactccttggtttttgttgcccatggtggtgacttttaccaggatttcgacctaacatggggtgacaaaagaggcaagattttcaatggtggcaagctcttgtctttgtctttagacagggtttcagggtctggttttaaatccaagaaagagtatttgtttggaaggattgatatgcaactcaagcttgttgctggcaactcagctggcactgtcactgcttattatctgtcatctcaagggccaacccatgatgagatagactnttgattcttagggaatctgagtggtgacccttacattttacaca

SEQ ID NO: 231494 - DNA, 357 bp, Gossypium hirsutum
atcccaaaattccaaatgaaatctcttctccttttttttcccttctttttcccaaaatcgattccccccacctgaaatcttcttttttctccattttatttttccccccaatttccccaaattggcagccctctacatctccgttggatcgtattgtaatgtgttcgacacctgaaatctcttcgtttttcttggatcgtattgtatacgagatagtggataatgctgttgatgaggctcaagcaggttttgcaacacttgggaccgataccacttgggttgggaagaagcctttgaggcgcatcggaggaatgtccgatgctctctccattgccgtcgatcttggtttctctgttc

SEQ ID NO: 231495 - DNA, 295 bp, Gossypium hirsutum
ctcaaagttcactacttgtgtgcagacaaaaatggcttttgctgggtttttcttgctggctttactttcaatggtctcagctgttcatggatatggtggtggatggactaatgctcatgctactttctatggtgggagtgatgcttcacgcacaatgggtggcgcttgtggctatgggaacctgtatagccagggatatgggacaaacaccgcatctttgagccatctctgttaacattgggcctaactgtgggtctttcttttacattaacgatgaaaatgatggcgaggggtt

SEQ ID NO: 231496 - DNA, 385 bp, Gossypium hirsutum
gaaagaatgagcccttcaatgaaggaaacatcggtgagaaacaatggagaaaaagggtgaggatgttaatgggataatgaagaaggagcaagataagttgttcgatccaagtgaagccactcctttccggattaatgatatccgagctgctattaaaaagcattgttgggtcaagaacctttggaggactatgagttatgattttaggaactccattgtcttttctggactcttaggagcttcactttatttacgtatcttgatattattgtctaaatatttgggtgccgaagggaccatgttttggcctgtctttgtccttggacatgattgtgagatgaagcttctttgattatcccatacttaataaacgtgatgggacata

SEQ ID NO: 231497 - DNA, 422 bp, Gossypium hirsutum
ccggaaacgatccgcaaaaatggtgcacagcgcctatgattccttccagctcatcaccgattgtcccactaagatcgacgccatcgaatcctacggctggaagctgctgctgggctgctccgatggttctcttcgaatctacgtttctgattcctccggcgctgaccgatctccaccgtccgacccgcacgcgttgcggaaggagccttacgcgctggagagaaccgttgcagggttttcaaagaagcctctgatttcaatggaagtactggaatcgagagagctactgttatcactctctgaatcgatcgcgtttcatcggctccccaatttagagaccattgctgtgatcaccaaagctaaaggcgctaatgtctactcttgggatgaccgtagaggttttctttgctttgctaggcaaa

SEQ ID NO: 231498 - DNA, 432 bp, Gossypium hirsutum
  unsure (1)..(432): unsure at all n locations
gtttctctctcaagctctttgcaatcccaaaaggagaaataaaaatcttcttggggaaggacatggcagccgaggaggctcttgacttgtcaactttgcagtctcagctaagtgaaactcatgaaatgtggaaccaggagatggaaaaacaccaatgccaggtagattttttacaagacaaaattatggaggtaaaggcttgcttacagggtccggaggaggaatcaaaggaggtagatgttctttggcgtanggtaaaaactactgcaactttgttggctaacttgaaatcaaaagcaagagtgatggctgttcctgatttagcccataagtcatgcggcatcaaaatattagaaggggtagggctcgtggataaggaaggtacaccgttgtctggatggtcaaggagtgctgatctcgcttcatttgact

SEQ ID NO: 231499 - DNA, 310 bp, Gossypium hirsutum
gcgaatgtgggggatcaaatactgtttcacacacaggagcgaatatatgtaattaattaacacagcttgttttcgacgttgatgaaaaagcttatgtatttttttgatagatggagtgagcaatggctaacaatgtgggaattatagctatggaaatctacattaacgtgctaccggtgttaaacaggaaacaacacaagctcatgatggtgcttgattggggaaatacaccattagacttggacaagattgcatagtctttcgtacaaaactggaaaacgtgatatctatgagtttaacacttgttact

SEQ ID NO: 231500 - DNA, 438 bp, Gossypium hirsutum
ggttatacgtttttctcatccactttctcaaaggaaatgggcgcttactgtgatgaaaatctctctttctctccggcttgtaatttgtctccttctcacgacctccggctctccaaacacgtccacgacaacgttcacggcaacatttatctcgatcctctctctttgaagtttattgacaccgagcaatttcaaaggctccgtgagctgaaacaacttggattggcacacctggtttatccaggggctgtacattccaggtttgagcattctcttggtgtgtattggcttgcgggtgaagctatgcaaaagctcaaaacttatcagggtttggagcttggtattgatcgatttgatgttcaagcagtgaaagttgcaggacttctacatgatgtaggccacggaccttttaaccacttggttgaacgggaatttttc

SEQ ID NO: 231501 - DNA, 445 bp, Gossypium hirsutum
tccgcgatttgttcaattacttcaattcagttgttatagcagaccagtgctgtctggtttagttatttcaattggtggcttgcaagattctttgaggaaggcatcactgtcagcttttctggaatatcttaatgtcgatcaagatgttaatgaagaactcaaattgtgcaagttacccacggacatcctttggattctccaacagtataagcgatgtgacagggttattatacccacattgaagacaattgagattcttttcagcaaaaggatattcttggatatggaggcgcatacttcggctttctgttctggtgttttggattctctggcggttgaattgaaagcatcaaaggacttctctaagttatatgcaggcattgcaatacttggttacatttgttcagtttccgatcctatcaacgcccgtgccttttctcatctt

SEQ ID NO: 231502 - DNA, 374 bp, Gossypium hirsutum
cttcatcatctatgtttggagtttgaatacaaaaagaaagtaaggttaagccttttcattaatcctcaagcttttatttttgcccataagtctactcccagtttcccttaatcctccatgggcaaaggcggaggttgtgtcccaagcaaaaagagacaaccttcctctgccgaaggctctgccactgccactgccactaccgccaccaacaacgcacccatcgaagccgatgaagaaactcacgaaactgccagtgtagctgtgaatcctacgaatgcgcaatcagttaccgccactttaaaaatctttattgtttactactccatgtatggtcacgtggagaaactggccaagcggatgaagaaaggggtcga

SEQ ID NO: 231503 - DNA, 458 bp, Gossypium hirsutum
cagaatgatacctaagatgccttttttcgctgataaatttaacttttgcccagttgtctcttcattttgacaatgactataaataattctgtaggtattcagacgtctggcgatgctaaacattttgcaatatccgcaaagatccctgagtttacaaataagaacaggacattggtcatccagtattccataaggtttgagcaggacattgaatgcggtggcggttacatgaagcttctctccggatttgtcaatcaaaagaaatttggaggggacacaccatatagcttaatgtttgggccagatatctgtgggacacaaacaaagaagctccatgttatactttcttaccagggccagaattaccctattaagaaggaattggaatgtgaaacagacaagttgactcatttctacacattcattcttaggccagatgcaagttatagtatcctcat

SEQ ID NO: 231504 - DNA, 415 bp, Gossypium hirsutum
gataaaaaaagaaagttaaaacaaaaagaaaaaagaaaattctcaatccaaaatagggttagggttatccctgatccggataacgatttccacgctcgagtcttccaactgaaaaattaaacatgggcgccaattcgtcaccaacagacttgaccaccgatctcgatgagcagatctcgcagctcatgcagtgtaagccactttcggagcagcaggtcagagcattatgtgataaggcaaaggaaatactgatgaaagaaagcaatgtccagcctgtgagaagcccggtgacaatttgtggtgacatccatgggcagtttcatgatcttgcagaactttttcgaattggagggaagtgccctgatacaaactatttgtttatgggagaatatgtggatcgtggatactattctgt

SEQ ID NO: 231505 - DNA, 341 bp, Gossypium hirsutum
ggatcggcgctgccgttgggaacccagccgacgtggcgatggtgcgaatgcaagctgacggacgcctccccgtatctcaacgtcgtaactataccagcgttgtcgacgccatcactcgcatgaccaaacaagaaggcgtcacctccttgtggcgcggctcatcgctgacggtgaatcgtgcgatgttggtgacggcatcgcagcttgcctcctacgatcagatcaaagagatgattttggaaaacgggctgatgaaagatgggctggggacacacgtggcagcgagcttttcagccggatttgttgcggcacgggcgtctaatcccgttgatgtgataaaa

SEQ ID NO: 231506 - DNA, 322 bp, Gossypium hirsutum
  unsure (1)..(322): unsure at all n locations
cccacgcgtccgtgttattgcccttgatcacctaaaaaattatatttatatcgaagcagacaaggaagcccatgtgagggaggctatcaaaggtatacgcaatatatttggagcaaagataatgcttgttccaataagggaaatgactgatgttttatcagttgaaagcaaagcgattgatctttcaagagatacctgggtcagaatgaagattgggacatataagggtgatcttgctcaagtagttgatgtggataatgttcggcaaaaagtcactgtgaaattgatccctanngatgacttacaagtcctagcgaataaa

SEQ ID NO: 231507 - DNA, 443 bp, Gossypium hirsutum
gccttttctcttctcctctgaaatctcgctctaagatttcgtcgtttatctttctccatctggattttgattgagctctctcttctttcgtcttaattggtttcactatgtcttcttatacccctaagaacatcctcataactggggcagctggttttattgcgtcacatgtcgctaaccggctcataaggaactacccagactacaagattgttgtgcttgacaagcttgattactgctcgaacctgaaaaacctccttccttccaagtcatctccgaactttaagtttgtgaaaggtgacattggtagtgctgaccttgttaactacctccttattaccgagtctatcgacacaataatgcactgtgcagcccagactcatgttgataactcgtttggaaacagctttgagttaccaagaccatatctatggactcatgtc

SEQ ID NO: 231508 - DNA, 435 bp, Gossypium hirsutum
  unsure (1)..(435): unsure at all n locations
aaataaaataaaagacgctagggatctcgatctcgatctcgatcccgatcccaatctcattctctccggcgacacctttctctaaccgtttccggtgagatctcgaggttggatccgatctcgacccgattcatagtgtctctttgacctagatccgaaccaccatggctccagtttctgctttggccaaatacaaacttgttttcttgggagatcaatctgtcgggaaaaccagtatcatcactcgctttatgtacgataaattcgataatacttaccaggctaccattggtattgactttctatcgaaaacaatgtacctcgaagatcggacagttcggttgcagctctgggatactgctggacaggaaagattcaggagtcttattccaagttacattanggattcctccgtggcagtcatcgtctatgatg

SEQ ID NO: 231509 - DNA, 407 bp, Gossypium hirsutum
gaaagcttatctcttttcgtctctgaatctgatcaatcaacacctgaaaaggaaaacttacaaacaacaactactactagtctactacccagcactagaagcagctcgtagccagccatggatgaagagtacgatgtcatagttctaggaactggtctcaaggaatgcatcctcagcggtcttctttctgttgacggactcaaggttctgcatatggataggaatgattactatggaggagagtctacatcactcaacctcattcagctctggaagaagtttagaggaaatgataagcctcctgctcatttgggctctagcagagattataatgtggacatggtccctaagtttatgatggcaaatggcactcttgtgcgtgttcttattcatacggatgttacaaa

SEQ ID NO: 231510 - DNA, 459 bp, Gossypium hirsutum
atcagcctcaaggcctcctcccacaaagactgatggctccgtgactctggacaatggcatcatccgagtgaagctggacccgactggccgcctgacatccttggtcctggtggcctctggcagggaggccattgctgagggtgccgtggggaaccagtttgtgctgtttgatgatgtccccttgtactgggatgcatgggacgtcatggactaccacctggagacacggaagcctgtgctgggccaggcagggaccctggcagtgggcaccgagggtggcctgcggggcagcgcctggttcttgctgcagattagccccaacagtcgacttaaccaggaggtcgtgctggatgttggctgcccctatgtccgcttccacaccgaggtacactggcatgaagcccacaagttcctgaaggtggagttccctgctcgcgtgcggagttcccaggctaccta

SEQ ID NO: 231511 - DNA, 429 bp, Gossypium hirsutum
atgaaatcaaatctttagatttattcatttaattttctctcttttgctctcatttcctgcaactccgatctataaaattccatcgtttgttggaaagagcaagagaggaaaattaaatcaaagataaaacgattattagcaataaaggacgacaatgaagaactgtgaaagactcgctaatttagctttagcagggttgacgttggcaccacttgttgtgaaggtggaccctaacttgaatgttattttgactgcatgcctcgcagtatatgtgggctgctatcgttctgtcaagccaactccaccattggagacaatgtctaaagagcatgctatgcgttttccgttcattgggagtgcgatgctgttatcacttttcttactgttcaagttcttatcaaaagacttggtaatgcagtattgacatgc

SEQ ID NO: 231512 - DNA, 399 bp, Gossypium hirsutum
  unsure (1)..(399): unsure at all n locations
ctgaatccttcatcgatacgacatggagtttccgtacatggaagctgttgttggttttatgatattaatgtacttatttgaaacttatctggacttacggcaacatgctgctctcaaattgccaactcttccaaaaacattggaaggagtaatcagccaagagaaatttgaaaagtctcgagcctatagtctcgataagagccacttccattttgttcatgagtttgtgacaatcctgatagattctgcaattttgttctttggcatattgccttggttttggaagaagtcaggaactttcttgcctttaataagtctaaatgaagagaatgaaatattgcacaccctttcattnttggctggtgttatgatatggtcacaaatcactgacctaccctt

SEQ ID NO: 231513 - DNA, 436 bp, Gossypium hirsutum
  unsure (1)..(436): unsure at all n locations
gcagcgccgatttctaatcccttccaaaagaaaggattagctaatcggtactcttctaccctccaagccgttgcagcatcttcttctttttttcatttttcttcccatttccttccaaccttttccctccttttcatgcttctatcctgaccaaccctttaacaaaccctaacaaccctcaacaaggccttcaattacgaatcgtatgaggtaacagagtaacagagagtagcagcaatggttcccaagttcgtgctactcctggtcatacaatgggttgtgttacctatgtcacgggagatggacctgatcaacctcagccaaggatggctttcacaggagatgctctgttgataaggggatgtgggaggacagattttcangtataatttcttgaaaatgttattngcagctatcgcanaaaaatggacgaata

SEQ ID NO: 231514 - DNA, 355 bp, Gossypium hirsutum
cccacgcgtccgcggacgcgtgggctctggttctgcatttctgtgcctctcactctcgtgggaggattcttagggaccagagctgaagctatacaatatcctgtacgaaccaaccagattccaagggagattcctgcacgcaaatatccatcttggcttcttgttcttggtgctgggacccttccatttggaaccctgttcattgaactcttcttcatcctttctagcatctggcttggcaggttctattatgtatttggcttcttgcttatagttcttctactgcttatcattggttgtgctgaagtttcggtggtccttacctacatgcatctctgcgttgaggactggcgat

SEQ ID NO: 231515 - DNA, 419 bp, Gossypium hirsutum
tgcttcttgaatcagttggcattttccaagatcatgaagaaatatgataagatcacattgcgaaatgcatcgaaagcttacttgcaaatggtggacaaatcatatcttggcagttctgatgaggttagtaagcttatgggaagggttgaggatacttatgttaaacactttgctaatggaaatcgtagaaaaggactgaaaactctaagaccacaagctaaaaaagaaaggcataggattacatttctctatggcttcttctctggttgctccattgcactaatagtggccattattgtgagcatacatgctagaaatcttcttaagagtcaaggaagagatcaatacatggtcaatatatttccactttacagcctatttgttacattgtcttgcatatgctcatgtatgctggaaat

SEQ ID NO: 231516 - DNA, 396 bp, Gossypium hirsutum
gtgaagactacaggttctatgctatttcggctaagttaccagaagttaacaacaagggcaagactctagtcttccaattttctgtcaagcatgagcagcagcttgattgtggtggtggttacatgaagctactcagtggtgacattgaccagaagaattttggtggtgacaccccatacagcattatgtttgggcctgatatctgtggaagcacaaagaaagtacatgctattcttcattacaaggggacaaaccacttgatgaaaaaggaagttccatgtgagactgaccaacttactcatgtttacacatttattctccatccggatgctagttacaaaattcttattgataatgttgagaaacgaactggtagcttgtacactgattgggatc

SEQ ID NO: 231517 - DNA, 448 bp, Gossypium hirsutum
gttagcttaacctttgcctttgccttgacttgatcactcacctaagctttccttctatatcactctttgcttaacttcaccccactgccaattcacactatttactatttagaataaaatactaaattataaatcccctttccaaacccaaaaaagctcgtagtaaacgaaacagcagcaaaaatggtgctcacaaccacgaccccggcgccggagcagtatgttgaatccagtacctttgcttccagatatgtccgccaacctctttccaggttccagatgccaaaaaattcaatgcccaaggaagcagcctatcaagtaataactgatgaactgatgcttgatggaaatcccaggttgaacttagcatcatttgtgaccacatggatggaacccgagtgcgataaactcatgatggcttcataaacaagactacgtcgacatggac

SEQ ID NO: 231518 - DNA, 348 bp, Gossypium hirsutum
  unsure (1)..(348): unsure at all n locations
tttgaagagcggctgctcagattttgcctatttctcagatttttctctcagtttgaaacgatgtctacggctggcgaagctgcttgttcttacgctgctttaattctctatgatgatggcattcccatcaccgctgagaaaattgcaacaattgttaaagctgcaaatgtctcggttgaatcttattggccaagcttgtttgcaaagcttttcgaaaagtgcaacattgaggatcttataaccaatgttggtgctggtggtgctggtgctccagttgccgcagctgcacctgttgctgctggtggtggtggtggtgccgctgctccacctnctgctgaggaaaagaag

SEQ ID NO: 231519 - DNA, 399 bp, Gossypium hirsutum
gcaaacgcggcttcaggaatggctgtgcatgatgattgcaagctgaagtttttagaactgaaggctaaaaggacttaccgcttcatagttttcaagattgaagaaaaacaaaagcaagttgttgtggaaaaggttggtgaacctactgatagctatgaggctttcactgctagccttccagccgatgagtgtcgatacgctgtgtatgactttgattttgtgaccgatgagaactgccagaagagcagaatttttttcattgcctggtctcctgatacatcaaaagtaagaagcaagatgatctatgcgagctcaaaggacaggttcaaaagggaattggatggcatccaagtagagttgcaagctaccgatcctttcgagatggatctcgatgtcata

SEQ ID NO: 231520 - DNA, 416 bp, Gossypium hirsutum
  unsure (1)..(416): unsure at all n locations
aaaggattgctaaactatctggtggtgttgcagtcattaaggttggggctgcaactgagactgaacttgaggatcgcaagctacgtattgaagatgccaagaatgctacctttgttgccatagaggaaggtattgtacctggtggtggtgctgcattagttcatctctcgacttgcgtccctgcaattaaggataagcttgaagaccctgaagagcgcataggagccgacattgtgcagaaggctttggtagcaccggcctcgttgatagctcaaaatgcangaatggaaggtgaggtagtggtggagaaggtaaagaacagcgagtgggagatcggttacaatgcaatgacagacacgtatgagaacttgctggcagctggagttattgacccggcaaaggtgacaagatgtgcg

SEQ ID NO: 231521 - DNA, 360 bp, Gossypium hirsutum
  unsure (1)..(360): unsure at all n locations
ctctgagggtgtcttaataaacgccttcgatttactttcggtttccatttacttctttatttctacgtttttgaatttttagtaagcgaaaatgagagagtgcatttcagttcacatcggtcaggctggtatccaagtcggaaatgcctgctgggagctttactgccttgaacatggaatccagcctgatggccagatgccaagtgacaagactgtcggaggaggtgatgatgcttttaacacctttttcagtgaaactggtgctggaaagcacgtccctcgtgctgtctttgtggatcttgagcctactgttattgatgaagtgaggactggtacttaccgtcagctnttccaccctga

SEQ ID NO: 231522 - DNA, 354 bp, Gossypium hirsutum
attcacaaacacccccaaagtatatcacttttctttctttacaatcttcatttgttcagatttttgaagttctcataccatgggtgacagtcagtattcattttctctcacaactttcagtccttcgggaaagctagttcagatcgagcacgccttgacggctgtcggttcgggtcaaacatctcttggaatcaaagctgctaatggggttgtaattgctaccgagaagaagttgccttcaatcttggttgatgaaacatctgttcagaaaatacagtgtctgactccaaatattggagttgtttacagtggcatgggtcctgattttcgagttttggttcggaaaagtaggaa

SEQ ID NO: 231523 - DNA, 387 bp, Gossypium hirsutum
gagacaacaaccagagagcaagagcacgagaccttcgttccccagaccacccaaaagccagaagagcaagagccaaggttcatccctgaaacccaaaatggttatggcctttacggccacgagtcaggctcaggctcaggctcaggctcaagccggcccagtttcaccaccaaagaaacctatgaaccctatgtcacccctgttagattccaccctgatgaaccctataacagcatccccgaatcctccaacaataaagacacttactactacaacaagaatgcctacaagtccactaagcagcaaaacttgggcgaggccattttcaccgagaaaggatggagcaccaaggaaaaccagacaacaactactacaacggaacattaa

SEQ ID NO: 231524 - DNA, 408 bp, Gossypium hirsutum
  unsure (1)..(408): unsure at all n locations
ttttcactcttttcagtcctacccaaaggcggcccctcaactctcctctcctttagcaatatctttccccttcactgtttcaactcaaagaaatggcggaggagaagaaggctcaatctgctggggtttggcctacggttaaaccttttgtcaatggtggtgcctctggtatgcttgctacctgtgtcatccaacccatcgatatggtcaaggtaagaatccaactgggtcaaggatcggcagcaactgttaccaagaacatgcttanggaggagggtgttggtgccttttacaagggtctatcagcaggactgctcangcaagctacatacactactgctcgattgggatcattcaaaatgttgacaaacaaagcaattgaagccaatgatgggaagcccttacctc

SEQ ID NO: 231525 - DNA, 414 bp, Gossypium hirsutum
gtttgggagtgttgattgttgagagagaaaaaatgtgtgggatattagctgttttgggttgctccgattcgcaggcaaaaagggttcgagttctcgaactttctcgcaggctgaagcaccgtggtccagactggagcgggctctaccagcacggcgattgttatttggctcatcaacgccttgccatcatcgaccctgcctccggcgaccaacctctcttcaatgaagacaagagtgtcgccgtcacggtgaatggagagatttataaccatgaagaactaaggaagaatttggtgaaccacaagttcaggactggcagtgattgtgatgttatagcacatttgtatgaggagtacggggaagactttgtggacatgttggatggaatcttctcatttgtgctattggatactc

SEQ ID NO: 231526 - DNA, 325 bp, Gossypium hirsutum
gagggtgttttattaaacgctgtagactgactttgggtttacattaactattttatgcttacgtggatgaatttgaagtctgcgaacttgaaacaatgcatgttagggtacatcggtcagggtgtattacaagatcgaaatgcgtggttggagctatagtgccttgaacaatggaattcagactgatggccatatgccatgagacatgactggctgaggaagagattatgcttataacacctttttcagtgaaactggtgctggaaagcacgttcgtcgagctgattgtgtggatctagagcctactgatatcgatgaggtgagg

SEQ ID NO: 231527 - DNA, 413 bp, Gossypium hirsutum
gcaatcattagtggaacattctcgatcatcaatcagagccaatcacttagctgttttcctcgagtgaaggttattcacacctccgacaagatacatggccagatttatatccctgaaataaattgggtgctcatgatcctttgcatcactgtgactattggatttagagacacaaaacacatggggaatgcatcagggttggcagtgatgactgtgatgctggtgacaacatgcctcatgtccctcgttattatcctctgttggaacaagcctcccgctgtagctctttcctttcttcttttctttggttctattgagttgctttacttctcagcttcactcactaagttcacagaaggtgcttggcttcctattctgttggcccttttcctcatgacaatcatgtttgtatg

SEQ ID NO: 231528 - DNA, 339 bp, Gossypium hirsutum
gtaaccagagacaatgcattgcaattgatggaagctgaatttcaggttctttcacctttggttcctattcgtcaaattcaattcatccggttctgcaagcagcattccgacagtgtgtgggccatcgctgatgtttctattaatctgagcaatgctgcaaatgcactgatgtttgcaaattgcaggaggcttccttctggatgtgttatccaagatatggacaacaagtactccaaggttacatgggttgaacactcggaatatgatgagagcacagtccaccatctctttcggcccttactcagatctggatttggctttggtgcacaaaggtggatt

SEQ ID NO: 231529 - DNA, 414 bp, Gossypium hirsutum
gctactgctacgaacttatggttacctggggatgtagctggtgtgaaagcgtggagacccggtggtgtgactcgctgaatcgtcaccaactcggtagaaacgggtttgtctttagggaaagttgctttgtaaacgcttatccactggtcttcacttctcctatggaagtatagagttgagtcatcaacccaacacggccacccaccgtgttcaacaaccttgactcggtgagtcccatcacgagtcaagaaaacataaatatcagtactcagttcttccacttccccaccccacccttctttcccatacgaagccacagctgtccaaaccccagacggagatacggcggggctaaagtcggcgattccggaaggagtgagtcgtcgagtcaacccgttcctaaatgagtcgagt

SEQ ID NO: 231530 - DNA, 361 bp, Gossypium hirsutum
cagcaacactactaattttgagtatataaagtagagtgatctcgttttgtcgcgacaaggtggtcaggagagcaaaactgatccttcccggacactgacaaatagcaccagaaatggctgttggaggttttggcggcgtcgatggacctgtcagcagcttcaatggcaagatcacagcttcggtggtgatcacctgcattgttgctgcttcaagcggcctcatatttggttatgacattggaatttcaggaggtgtgacaactatgcaaccatttctccagaaatttttcccatcagttttaagaaaagcagcagaggctaaaaccaacatctattgcgtgtatgatagccaagttttaac

SEQ ID NO: 231531 - DNA, 390 bp, Gossypium hirsutum
ctcactccgccatcttcaataatttcttccgttgatctttgttagagattagctttttaatttttcattatgggaaagatcaagatcggaatcaatggatttggaaggatcgggcgtttggttgcgagagttgctctccaaagcgatgatattgagctcgttgctgttaacgatcctttcatcaccactgaatacatgacctacatgtttaagtacgacagtgttcacggtcaatggaagcatcatgagcttaaggtgaaggactcaaagacccttctctttggtgaaaagcctgtcacagttttcggtatcagaaaccctgaggaaatcccatgggctgaggctggagctgagtatgttgttgagtctactggtgtttttactgacaag

SEQ ID NO: 231532 - DNA, 149 bp, Gossypium hirsutum
aaagctttgaggaaatggcgttggctttcgatgagtacgggagacccttcattatactcaaagagcaagaccagaaaaccaggctgagagggatcgatgcccaaaagccaacatttcgtggcaagcgtgccgatctcgaacctttggac

SEQ ID NO: 231533 - DNA, 417 bp, Gossypium hirsutum
aactcgatgagcttgaagaacagaggaaaagtgttgcatcctacatggaaagtttgaaaaatgcccagatagaagtagagagtgaaagagtgaagcttagggttgtagaggctcgaaacaaggatcttgaacgggatttatctgtagagagggaactaataaaagagttacaagaggagctgaagaaagagaaatattcacttcagctggctatccaggatgcctcttttcttcgaaagcagttagggaagaagcatactgaatttgttgaaatgagcaatgttctgcaaaataaagaagtagagctggtggaggctaaactcgaaatccagcatctgaaatctgagaaaagctctcttcagcttatattggaggagaaagaccaggaactctctgatgccaaaaagaatttagagc

SEQ ID NO: 231534 - DNA, 419 bp, Gossypium hirsutum
aagctagtgtcttgatctcgttacatcctaaacaccaccgtagacccttaagaagactgaaggagcccgaccaaagaacaaggctccaacggattgatgtgcattaagccaacattcacgctggctaagccgttggccggatcctacaaacctatctcggacccaagggcatggattagatactccaaagccccgatggcgatgttaccatcacaaatgacggtgcatcaatattggagcagatggatgttgacaaccaaattgctaagttgatggatgaactgtctcggagtcaggattacgaaattggtgatggaacaactggtgtagttgccatggctggagcacttctagagcaggcagagcgggtatttgaacgtgggatcattccatacgaattgcagagggtgtccaaatgg

SEQ ID NO: 231535 - DNA, 401 bp, Gossypium hirsutum
agaggcagcagtggcttgacgttcccctttgctcccttcttgcagaagccaaaagtttgagttaagaacaatggcttttgctgcaatgaagccgacaaaacctggtttggaggagtcccaggagcagattcacaagatcaggatcactctctcctccaagaatgtgaaaaaccttgagaaagtttgtgctgatttggttcgtggtgccaaggataagagactgagggttaaggggccagtgagaatgcccaccaaggttcttcacatcacaacaaggaagtctccctgtggtgaaggaacaaacacatgggatagatttgagctccgtgttcacaagcgagttattgatcttttcagctcccctgatgtggtcaagcagaacacatctatcaccattgaac

SEQ ID NO: 231536 - DNA, 426 bp, Gossypium hirsutum
aaaaatatgggtttccaaagaaacatattgggtttccttttcttgatattggcttcactaacaagcctctcttctagccttcctagtgaatactccatagtggaacatgagattgacgcatttctttcggaggaaagggtgttggagatcttccaacagtggaaagaaaagaatcagaaagtgtaccggcacgccgaggaggctgagaaaaggtttgaaaatttcaaggggaatttgaagtatatcctagagaggaatgcaatgagaaaagcaaacaaatgggaacaccatgtgggattgaacaagtttgctgatatgagcaatgaggagttcagaaaagcttacttgtcaaaggtgaaaaagcccatcaacaaagggataaccctgtcaaggaacatgaggagaaaggtgcagtcttgtgatgca

SEQ ID NO: 231537 - DNA, 115 bp, Gossypium hirsutum
gctaaagcagatcccaaaatgaagtttaatatcgcaaatccgactactggttgccagaagaagctcgagatcgatgacgaccagaagcttcgggcatttttcgacaagcgggatc

SEQ ID NO: 231538 - DNA, 412 bp, Gossypium hirsutum
  unsure (1)..(412): unsure at all n locations
gtggagtgatctccaagaaattttgcagtttcttcatttaaagctcacatcacatttgctaaacaaaattttagttagtttatcgcaactaaatttcatttcaaatacccccttgattctccgatgtcgatcttcgagtataatgggagtgccctcgtagccatggtaggtaagaactgcttcgctatcgccagtgatcggagactcggagttcaactccaaacaatcgccaccgatttccagaggatttcaaaaatccacgatcgactctttctcggcctctctggcctcgccaccgatgctcaaaccttgtatcagaggcttgtgtttcggcacaagttatatcagctaagagaagagagggacatgaaacctgagactnttgctagccttgtttctgctattctttacg

SEQ ID NO: 231539 - DNA, 429 bp, Gossypium hirsutum
cagccaattgtttgagctagctagctcttactcaaatggcaaccaaaacgatgatgttgcaaatattttcacttttcttctttttgttcagtatctgcaactccattttccttggtgctaatggagatgacaatggtggttggcaaactgcccatgccaccttctacggtggtgctgatgctaccggcacaatggggggagcttgtggttatggaaacctgtacagtcaagggtatggaacgagcacagcagctttgagcactgcacttttcaacaatggcttgagctgcggtgcctgctacgagctccggtgcaacaatgatcctcaatggtgcattagtcgaaccataaccgtgacagccaccaacttttgtccccctaactatgctttatctagtgacaatggcgggtggtgcaatcccccacgag

SEQ ID NO: 231540 - DNA, 418 bp, Gossypium hirsutum
ggcacaatggggggagcttgtggttatggaaacctgtacagtcaagggtatggaacgagcacagcagctttgagcactgcacttttcaacaatggcttgagctgcggtgcctgctacgagctccggtgcaacaatgatcctcaatggtgcattagtcgaaccataaccgtgacagccaccaacttttgtccccctaactatgctttatctagtgacaatggcgggtggtgcaatcccccacgagaacactttgatttggccgaaccggcattcttgcagatcgcggaatatcgagctgggatcgtccctgttatgttcagaagggtgtcatgtgtgaagaaaggaggcatcaggtacaccatgaatggacattcgtacttcaacatggtgttgataaccaacgtgggaggggcagggg

SEQ ID NO: 231541 - DNA, 370 bp, Gossypium hirsutum
tctaggttttacttcatagagaaaaaaggggacgattagctgaaagaaagaaaaaaagcaaaaacaatggcgtcttcaagaggaggaggaagccaacaagtgatcagaacgggggatatggagaagatgagcttagatcagctcaaagcagtcaaagaacaagcagatattgaagtcaatctcttacaagacagtcttaataacattcgcgccgccaccggccgcctcgagaacgcctccgccgctctccacgacctttccctccgccctcaagggaagaaaatgttggttcctctcactgcttccctctatgttcccggcacactcgacgatgccgataaggttctcgttgatattggcactggatact

SEQ ID NO: 231542 - DNA, 283 bp, Gossypium hirsutum
gctacacatcaagctgaggggcaacctaaggagatcgataacgctgctatcattgccacctaccttgctgatctgattgaagaggtgctgctgacttcttcagaagcagcattgtgagcagtaccatctccttgacctgctgaaactcacatgctttaggatagaccaaagagtcattaccatacacgcagattgtttggaggtagtcatatgctaactaaacccaggaatagttagtgttatgctaggcaaacagggttggacatgggtatctgaattacat

SEQ ID NO: 231543 - DNA, 413 bp, Gossypium hirsutum
gagacctgtctatggttccatcaacagcttcagctatttgcgttcaagcccctgctgagaaaggatttgccagctttgccattgatttcctcatgggtggagtttctgctgctgtatcaaaaacagctgctgcaccaattgagcgtgttaagcttttgattcagaaccaagatgaaatgatcaaaagtggaaggctctctgaaccttacaagggtattggtgattgtttcaagcgaacaatcaaggatgaaggatttggttctttgtggagaggaaacactgccaatgttattcgttatttccccactcaggccttgaactttgccttcaaggattacttcaagaggcttttcaacttcaagaaagacagagatggttactggaaatggtttgctgggaacttggcatctggt

SEQ ID NO: 231544 - DNA, 414 bp, Gossypium hirsutum
gtttgagctagctagctcttactcaaatggcaaccaaaacgatgatgttgcaaatatttccacttttcttctttttgttcagtgtctgcaactccattttccttggtgctaatggagatgacaatggtggttggcaaactgcccatgccaccttctacggtggtgctgatgctaccggcacaatggggggagcttgtggttatggaaacctgtacagtcaagggtatggaacgagcacagcagctttgagcactgcacttttcaacaatggcttgagctgcggtgcctgctacgagctccggtgcaacaatgatcctcaatggtgcattagtcgaaccataaccgtgacagccaccaacttttgtccacctaactatgctttatctagtgacaatggcgggtggtgcaatcccc

SEQ ID NO: 231545 - DNA, 409 bp, Gossypium hirsutum
gaattaatgagacttttggtcagcctggttatgaacccattgtcttaattgataggccggtatccctttgtgaaaggtttgcgtattacactatagccgagtgcgttgtagtcacagctgtgagggatggaatgaatcttactccttacgagtacattgtgggccggcagggagtgtctgaatcagagtcttcctcagaatcaagtggaccaaagaagagcatgctagttgtgtcggagttcattggttgttccccttcattgagtggtgcaattcgtgtaaatccttggaataccgaatcaactgcagaggcaatgaatgaggcaatctctatgtctgatgctgagaagcagttgcgccacgagaagcattataggtacgttagctcacatgatgtggcattctggtc

SEQ ID NO: 231546 - DNA, 415 bp, Gossypium hirsutum
ctgcactggttgaaaggatgccagttttggatgaggcaactttcagtggaaggagagctggctcgttgccgacatctgtttcaacttccactgggacagcacgtaatcttccaaatggaattgctaaaccagctgcagctcctgttgcagacttacttgacctaagttcagatgatgcccctgcacctaactcttctggtggtgattttcttcaggatcttcttggtgttgatttatcccctgcttctgcaccaccaggcacaagtcagcctccaaaagctggtacggatgttctgctggatcttttgtcaattggaacatctcctcctgcacaaagcagctcatctgcatctaacatattgtcctccattcaagacgacaaaacatcacttgtcaatttaaatggccttgcatc

SEQ ID NO: 231547 - DNA, 424 bp, Gossypium hirsutum
gaagaaacaacagaacacttgttttctcttctgaaatggatccgacaccgacgtccgataaccgacctgaaatctgttttttcgatttggagaccaccgtccctcagcggcgcggccaaggctactccgttctcgaatttggtgccattttagtttgccccaagaggctccttgagctccacagctactcctctctggtccgacccgacgacctctctcttatttcccctgcctctgtgcgctgcaacggtatcactcgcgaagccgtcatttcggcaccttccttttctgaaatcgccgacgaagttcacgaccttctccatggaagggtttgggcgggtcataatatagtgaggtttgattgcgtgagaataagggaggcgttcgagaagatggtagggcggcgccgagcctaagggaatat

SEQ ID NO: 231548 - DNA, 423 bp, Gossypium hirsutum
aaaaaataccccaaaccatcaagcaaaatcatatagccgcttcttttgttgttttctctctctctcttaaagtttcatctctagagcctctggtttcctcttctccttctttttgcttaccagataatgtaaaagaatataacaaagcttttcccatttataaacccaaaaggagtttttttttcttgtccttgaaaaagaatggctttgagtaggttctggggttggtttcttatccacattgctctgtttttaagcttgtgttatgctgaggatccatttgttttctatgattttgaggtcacttacatcactgcttctcctttgggtgttccccaacaggttattgctataaataacaagttccctggccctactatcaattcaactactaacaacaatgtcgtcatcaatgttcgaaac

SEQ ID NO: 231549 - DNA, 401 bp, Gossypium hirsutum
cccacgcgtccggtaacctttggtccctctggattgaccactgaagttaagtctgttgagatgcaccatgagtctcttcctgaggctctttcaggtgacaatgttggcttcaatgtcaagaatgttgctgtgaaggatctgaagcgaggatatgttgcttcgaactcaaaggatgatcccgccaaggaggcagctaatttcacttcccaagtcataatcatgaaccacccagggcagatgggaaatggatatgcacctgtccttgactgccacacctaccacattgcggtcaagtttgcagagttggagaccaagattgacaggcgatctggtaaggagcttgagaaggaacccaagttcttgaagaatggtgatgcaggatttgttaagatgattcccac

SEQ ID NO: 231550 - DNA, 413 bp, Gossypium hirsutum
ctctctttctatattttttctttctgctaataattacttttgtcaccagcggcgtcggaagacaggaaaacaccggtgttgtttgaaatggcagcttcgagaatggatctggacgggagaccaataaagccaattacgatatgcatgattggagcgggaggcttcattggctctcacctctgcgagaaattaatgtcggaaacgccgcacaaggtgctcgccttggacgtttacaatgacaagattaagcacctcctcgagcctgactctctcccttgggctggccgtatccagttccaccgacttaacatcaagcacgattctaggcttgaaggcctcatcaagatggcagatctcacgataaatcttgcggcgatctgtactccggcagattataatacacgcccgctcga

SEQ ID NO: 231551 - DNA, 425 bp, Gossypium hirsutum
gaaattcaactgttactgagactaaaaagaaacatctgaattcagaattaagagaaccaaaatgagtgccttgacagagcttgtgattcttgtcccattttgtttcttcctcgtagctttaatcaagttcctttatgattacttgtgggtgcctctccgtatacagcgtctcctgaattcacagggaatcaaaggacctgcttacaaattcatccatggcaacaaccatgaagttaccaaaatgaaaaaggaagcattaagcaagcatctgggcctgacagatgatatatttcccaaggtgcagccacatatttacacttggatcaacagatatgggaggaattatctttattggaacggtattcgacctgaactggttatttcagagcctgaactagtcaaagaggttctcaaaaatagtgaaa

SEQ ID NO: 231552 - DNA, 400 bp, Gossypium hirsutum
attcagagaaggatctgactgagcttggggagtgtccatatgatcaaggtgggtatttcattatcaatgggagtgaaaaagttctaattgcccaagagaagatgagcacaaatcatgtctatgtattcaaaaagaggcaaccaaacaaatacgcctatgtagcagaagttcgatccatggcagagacccaaaataggccaccaagtaccatgtttgtgcggatgctttcgcggacgagtgccaaagggggctcttcaggccagtacattcgtgctactcttccatatattcgtactgaaattcctatcataattgtgttccgggctttgggatttgttgctgacaaggatatattaaagcatatatgctatgacttctctgatacccagatgatggagct

SEQ ID NO: 231553 - DNA, 421 bp, Gossypium hirsutum
gtgaaagtgaaaatggaggtttacagcagaaggctaatggttctggtgtttgcatttgcactagtaagcatagggtacgcgcaagagtcgaactcgaccactctggttccagcaatactgacttttggtgactcagtggtagatgtgggcaataatgattatctccccaccatcttcagggctaattaccctccttatgggagggacttcgccaaccaaaagcctactgggaggttttgtaatggcaagttggccactgacatcactgctgaaactctggggtttactacttatccaccagcatatctaagccctgaagcatcagggagcaaccttcttattggagccaattttgcttcagctggatctggctatgacgatagagctgcctctttgaaccatgctatcacgttgagtcagc

SEQ ID NO: 231554 - DNA, 414 bp, Gossypium hirsutum
cttagaaggtgtcttaataaacgccttctttcttcttcttcttattcctttattgctttttagaatttttcttaatcgaaaatgagagagtgcatttcgatccacatcggtcaggccggtatccaggtcggaaacgcttgctgggagctttactgtctcgagcatggaatccagcctgatggtcagatgccaagtgacaaaactgtcggaggaggtgatgatgcttttaacacctttttcagtgaaactggtgctgggaagcacgtccctcgtgccgtcttcgtggatcttgaacccactgttattgatgaagtgagaactggtgcttaccgccagctcttccacccagaacaactcatcagcggcaaggaagacgcagctaacaactttgcccgtggtcactacaccattggc

SEQ ID NO: 231555 - DNA, 411 bp, Gossypium hirsutum
gctctctgtagccgccgcctgcgtctctctcttcatctctctgaaccaaaaagtctttagcttttcgcttcgagagagaccatgttggtttaccaggatctcatctccggtgacgagcttctttctgactcattcccctacaaggaaatcgagaatgggatgctgtgggaagttgagggaaagtgggttgtgcaaggagctgtcgatgttgacattggtgccaatccttcagccgaaggtgctgatgaggatgaaggtgttgatgaccaagctgtgaaggttgttgacattgttgacactttcaggcttcaggagcaaccccctttcgacaagaagcagtttgtcgtgttcatcaagaagttcatcaagaacttgacaccaaaactggatgcggaaaagcaagagtccttc

SEQ ID NO: 231556 - DNA, 427 bp, Gossypium hirsutum
cttattctgttgttttggagagttttacttaaacgccttctgtgttcttcttcttattggtttattgcttttttaaattatttttaattgaggatttattgagtgcatttcgatccacatcggtcaggccggtatccaggtcggaaacgcttgctgggagctttactgtctcgagcatggaatccagcctgatggtcagatgccaagtgacaaaactgtcggaggaggtgatgatgcttttaacacctttttcagtgaaactggtgctgggaagcacgtccctcgtgccgacttggtggatcttgaacccactgtttttgattaatttagaactggtgcttaccgccagctcttccacccagaacaactcatcagcggcaaggaagacgcagctaacaactttgcccgtggtcactacaccattggc

SEQ ID NO: 231557 - DNA, 408 bp, Gossypium hirsutum
cccacgcgtccgatttcaaattgttatctctgaaggtgtcttaataaacgccttcgatttaccttcgatttccatttacttctctattgctacgtttttgaatttttagtgagcgaaaatgagagagtgcatttcagtccacatcggtcaggctggtattcaagtcggaaatgcctgctgggaactttactgccttgaacatggaatccagcctgatggccagatgccaagtgacaagactgtcggaggaggtgatgatgcttttaacacctttttcagtgaaactggtgctggaaagcacgtccctcgtgctgtctttgtggatcttgagcctactgttattgatgaagtgaggactggtacttaccgtcagcttttccaccctgagcaactcatcagcggcaagga

SEQ ID NO: 231558 - DNA, 414 bp, Gossypium hirsutum
aattgtttgagctagctagctcttactcaaatggcaaccaaaacgatgatgttgcaaatattttcacttttcttctttttgttcagtatctgcaactccattttccttggtgctaatggagatgacaatggtggttggcaaactgcccatgccaccttctacggtggtgctgatgctaccggcacaatggggggagcttgtggttatggaaacctgtacagtcaagggtatggaacgagcacagcagctttgagcactgcacttttcaacaatggcttgagctgcggtgcctgctacgagctccggtgcaacaatgatcctcaatggtgcattagtcgaaccataaccgtgacagccaccaacttttgtccccctaactatgctttatctagtgacaatggcgggtggtgcaat

SEQ ID NO: 231559 - DNA, 410 bp, Gossypium hirsutum
  unsure (1)..(410): unsure at all n locations
gtattttgctggtgttatggttcggttgaagcagaaataaagaccagctgggaaaaggaaaagcaggatatggaaatcaaacatgaaagatgaccacgctgttggctgatgctcagagacagatgcaatgatgggaatgtgatccttggcatatgttggatccagcaaagagtaaaaccttcctgtccaaggtgaaatataaccagataccatgcctaatcccaaagcagtaccacccacagcgactgcacaagtcacggtgatcctcaagaaagcttgaaacaattttgtgtcactaagcatgtgcttcacccaatctaaaaagtagaaaacctgcatcaagaagaagacgcccatgacggccatatgttcaccggattgcacatgttgaaacccgacanagcggatct

SEQ ID NO: 231560 - DNA, 380 bp, Gossypium hirsutum
gggattatcaatttgaagccttcttcgaaattcctctttcaagatgcaaattttcgtcaagaccctcactggcaagaccatcacccttgaggtggaaagttctgataccatcgacaatgtaaagaccaagatccaagacaaggaagggatcccaccagaccaacagaggcttatctttgctggtaaacagctggaggatggccgtacccttgctgactacaacatccagaaggaatccacactccatttggtcctccgattgaggggtggtatgcaaatttttgtcaagaccctcaccgggaagaccatcacccttgaggtggaaagttctgataccatcgacaatgtaaaggccaagatccaagacaaagaagggatcc

SEQ ID NO: 231561 - DNA, 378 bp, Gossypium hirsutum
cttgtttaataaataatatggtgctctctaacggcgatctcagctgaagagagcggcgaatcgaaggagtttgtcttgactttggatcaatctaatttcactgacaccgttagtaagcaagatttcatagtcgtcgaattttacgctccttggtgcggacactgtaagaatcttgctccagagtatgagaaagcagcatctatattgagtaaacatgatcctccgatccttctagctaaagttgatgccaatgaggaatcaaataaagattgagcaaatgattatgatttcaggggttatccagactcttaaaattttgagaaatgaacgatggattgtccaagaatacaaaggtccacgtgaagctgatggtattgt

SEQ ID NO: 231562 - DNA, 400 bp, Gossypium hirsutum
gctcaggatgaacgctggcggcatgctaaacacatgcaagaagccctgcaaaggcggcaagaaaatggcctacgatgattaacgctgaagaacctgaccttgggacgcgcacatcttatttgcgggggtcgaaataccccgtacgctgaggagccagaacattcgcaaaggtcttcgaggtgactcagttgttctcatgggtaaaaatacaatgatgaaacggtcggtccgtatgcacgctgagaaaaccggaaaccaggctttccttaaccttatccccttgcttcagggaaatgttggtttgatttttaccaagggtgatttgaaggaagttagtgaggaagttgccaagtacaaagttggagctcctgctcgtgttggtctgggtgcacccattgat

SEQ ID NO: 231563 - DNA, 349 bp, Gossypium hirsutum
cagagaaagaaaagaggaagactgaaaaggaattggaggatgagaatggtggtgctggtgtgtattctgctagtttgaggaagaactatatattggcaaatgatgaatggaaagaggacacaatgcctgaaattcttgatggtcacaatgtgtacgattttattgaccctgatatcttgttaaggcttgaagagttggagcgtgaagagggtcttcgacaagcggaggaggaaggtgatgactttgagatggatggccaagaattatccctggaagagcaagaagcactggctgagatcaggaaaaagaagagcttgcttattcaacagcatatgatgaagaaaagcac

SEQ ID NO: 231564 - DNA, 394 bp, Gossypium hirsutum
cgggattccaggtgaattcaccatgctcgagctggcggaatccttgaaggagctaatcgatcctgaggtgaaaatatctttggtggaaaacactcccgatgatccccgacaaaggaggccggacataaccaaaacaaaagaggtgctcggatgggacccaaaggtaaagttgcgtgacgggcttcgcttatgaggaggatttcgtcagagctcgggtcccaaaaagactgattgaagttttttacagcacagaagttcaatataagactatgcttttttcttctatataaatccaattttatttcatcatataatgcgaatgagtatttgatttgtttatgttttgacatttgataatgacacatttgcttaaaaaaaaaagcgcgttaagtca

SEQ ID NO: 231565 - DNA, 413 bp, Gossypium hirsutum
gaaactcccgccacttccctcccacccaaatccgtaaaacgttccattttcaccaattctcccggaaattcacatctcattttctccatcccaaacaaaacctttaccgttgttattgttctacctagactaccgaaaccctaacatttcaaattcaaaggaagggaaccccaaaccatgccgtctttgacttctccaggaaaaatacttcgcctagagcttgagaacttcaagtcctataagggtcttcaaactatcggtcccttctccgacttcaccgccattattggaccgaatggggcgggcaagtccaatctcatggatgcaatcagcttcgttcttggagtccgaactggtcagctacgtgggggccaactcagagacctaatatatgctttcgacgaccgtgaaaa

SEQ ID NO: 231566 - DNA, 415 bp, Gossypium hirsutum
cccacgcgtccgcaatttcatcctgatggatgtcttgagattatcgataggaaaaaggacattgtcaaacttcaacatggagagtatatatctctcggaaaggttgaggcggcattgatgtcgagcaagtttgtcgacaatttgatggtgcatgctgatcccttccacagctattgtgtggctttgattgttccgtcacgcgacgttcttgagaagtgggcagtagaagctggcataaagtaccaagatttcccagaactgtgtggcaaagctgaaactgttagtgaagtccaaaaatcactttcaaaggtggggaaagatgcaaaactagacaaatttgaaatacctgcaaagattacactgatggcagaaccatggacacctgaatcaggattggtcacagcagcactcaaaa

SEQ ID NO: 231567 - DNA, 461 bp, Gossypium hirsutum
atgcgctgatgcctcgtgtttctgatctattctctacagatgaatcaaatagaaaatccttctggacttcattgtaatcaaaaggcagcaatttcgcattcttctgaggatacccatttgtccaacattcgaaacaacatcttttttttttttgtgggggggggggtgaatggaaccccatgaccatgccttcttatacataacaggaggataacttgatcaaatgctcaatctctatgagagctataggactgtgaatactaataacagctattcttttcctatggactgttcattacagaagaggattggctctcatctctgataacaaagatctcatctttaatgtccatcctgttttaatggtcattggattagtgctcttaaatggtgaagccattctggcatacaagactgtttcttggacaaaaatcttcaaaaagttagttcatcttacagat

SEQ ID NO: 231568 - DNA, 428 bp, Gossypium hirsutum
  unsure (1)..(428): unsure at all n locations
cggacgcgtgggcggacgcgtggggcgagccggccgccaaaacgtgtgcaagtgcatcaaatcggcggtgaacggaattccgtacaccagcaataacctcaatctcgcagccggcctacctgctaaatgtggtctccaactcccttacagcatcagcccctccactgactgcaacaaggtgcagtgaggttgatgatgatgatatggaaggagtggaagaaggttccagctcagctagataaagtagctagctaaggttaaataagctgtgttggtgtgttgttttttagaaaattccatatataatcggggaaagaaaaaaaaatagaaaatgtactttgtaactgtatttcgtatgtgatatatataatgtatcgtaatctttaattttttagtgatgctactacgttntatacgagtctgtaatg

SEQ ID NO: 231569 - DNA, 373 bp, Gossypium hirsutum
tgaaagtgaaaatggaggtttacagcagaaggctaatggttctggtgtttgcatttgcactagtaagcatagggtacgcgcaagagtcgaactcgaccactctggttccagcaatactgacttttggtgactcagtggtagatgtgggcaataatgattatctccccaccatcttcagggctaattaccctccttatgggagggacttcgccaaccaaaagcctactgggaggttttgtaatggcaagttggccactgacatcactgctgaaactctggggtttactacttatccaccagcatatctaagccctgaagcatcaaggagcaaccttcttattggagccaattttgcttcagctggatctggcta

SEQ ID NO: 231570 - DNA, 433 bp, Gossypium hirsutum
  unsure (1)..(433): unsure at all n locations
atttctcttgccaatttacagctgatcttttggcaatgaaccatacagatttcagcatcaccagtactttccaggaaattgcaggaagcaaggacactgttggtcaatacgagagccacactgctttcactcttcctggtctctaccgtgttgtacatggtatcgatgtgtttgatcccaaattcaacattgtttcccctggtgctgatatggagatatacttcccttacaccgaagagaagcggaggttgaagcatttccatactgagatcgaagaccttctttacagcaaagttgagaatgaagaacacttatgtgtgctcaatgaccgcaacaagccaattctgttcacaatggcaaggcttgatcgtgtcaagaacttaaccggactcgtcgagtggtacggcaagaacgcanagtcgcgtgagttggc

SEQ ID NO: 231571 - DNA, 402 bp, Gossypium hirsutum
gtgtttttgaaaagaaatctcgagaacctctcgtcattctctatttcctccgtgaaagctgctgttgtgctgatccaagtgataaaccagtgtaaagatgagcgttgttgggtttgattttggcaatgagagctgcattgttgctgttgcaaggcagagagggattgatgtagtgcttaatgatgaatcaaagcgtgaaactccggctattgtgtgctttggggagaagcagagatttattggtactgcaggggcggcgtcttcaatgatgaaccctaaaaattcaatttctcagattaaacggttgattggccgtcaattctcagatcctgagttgcaaagggatatcaagtcgttacccttcaatgtcactgagggccctgatggataccctctgattca

SEQ ID NO: 231572 - DNA, 265 bp, Gossypium hirsutum
  unsure (1)..(265): unsure at all n locations
caatgatgcaacaacaacagatgatgatgatgtatcctcctcatcattacatggcttataataaccctcattntcattatcaacaacagtatcaacaacaacagttgcataaacaacaacaaggatctaattcagatgaggttaaaacgatctgggttggtgaccttcttcattggatggatgaaacttatcttcatagtttcttctctcaatctggcgaggtttcgtctataaaaatcatacgaaataagcaaaccggacagtc

SEQ ID NO: 231573 - DNA, 374 bp, Gossypium hirsutum
gttcagttcttctcggtttcacctttagcaagctcattgatacattgggttggaggaattgtgtacatgctacaaataagcatctttgtcagccttcttcgaggggtattacgaaacggagttctgtacttcctgcgagatccagccgatccaaactacaacccttttcgtgatttaatcgatgatcctgtacacaagcatgctccgagggtcttgatatctgttgcctgctatgggagtctgatagtgatgctggtatttttgactgtcaagcttgctatgaagatggagccctctattttcccacttgatatatcggtatctgatccatataccgagattccagctgacatgcttgtatttcaaatatgcat

SEQ ID NO: 231574 - DNA, 442 bp, Gossypium hirsutum
cctttttcttcttcgttttcgcttccgtgtggttttctcaggattcaggttttcaagctgagaaggaggaatctgatgggtcaattaaagatctcggccgccgcggcatgattgtttcaaagaactccgagaatggtgtagtagacgagaaggtcggtaccgattccataggtactaatcttggtttcgatccagctggtcttggcgtccttgatgcattcgttgcaagtttttccatgataattgtcagtgagattggagatgaaacttttataatagccgctcttatggctatgcgacacccaaagtcaactgttttatccggcgcattagctgccctgtttgttatgactgtactttccactggactaggtaggattgtgccgaatttgatatcaaggaagcacacaaatagtgcagctaccagtctctattgcatttt

SEQ ID NO: 231575 - DNA, 432 bp, Gossypium hirsutum
gccaattgtttgagctagctagctcttactcgaatggcaaccaaaacgatgatgttgcaaatattttcacttttcttctttttgttcagtatctgcaactccattttccttggtgctaatggagatgacaatggtggttggcaaactgcccatgccaccttctacggtggtgctgatgctaccggcacaatggggggagcttgtggttatggaaacctgtacagtcaagggtatggaacgagcacagcagctttgagcactgcacttttcaacaatggcttgagctgcggtgcctgctacgagctccggtgcaacaatgatcctcaatggtgcattagtcgaaccataaccgtgacagccaccaacttttgtccccctaactatgctttatctagtgacaatggcgggtggtgcaatcccccacgagaacac

SEQ ID NO: 231576 - DNA, 428 bp, Gossypium hirsutum
aagaaacaacacgatgcatgcgatggtgttgggcttttgggtattgcttgggcttttggtggcatgattttcattcttgtttactgcaccgccggtatctcaggtggtcacattaacccggcggtgacatttgggttgtttttggctaggaaggtgtcgcttataagggcggtggcttacatggtagctcaatgtttgggtgctatttgtggtgttgggttagttaaggcattcatgaagagtgaatacaactcccttggcggcggtgctaacacggtggcgactggttataacaaagggactgctttgggagctgagattattgggacattcgtgcttgtttacactgttttttcagctactgaccctaaaagaagtgcccgtgattcacatgtacccgtgttggctccacttcctataggatttgc

SEQ ID NO: 231577 - DNA, 383 bp, Gossypium hirsutum
atttcttccggtgcaaagagcagcagccatgggtctcaagacggagctttgccgattttggtgccaagatataccctgggaaaggcatcagatttgttcgtggtgattcccaggtcttcctcttttccaattcaaaatgcaagaggtacttccacaaccgcctgaagccatcaaaacttacatggacggccatgtacaggaagcaacacaagaaggacattgcccaagaagctgtgaagaagaggagacgtactgcaaagaagccatactccagatccattgtgggtgccaccttagaggttatccagaagaagaggagtgagaaacccgaagttcgtgatgcagccagggaagctgctctccgagaaatcaaggaaaggatc

SEQ ID NO: 231578 - DNA, 436 bp, Gossypium hirsutum
  unsure (1)..(436): unsure at all n locations
gtacaagggccctactcttcttgaggctcttggccagatcaatgagcccaagagggcttcanacaagcctctccgtctcccacttcaggatgtgtacaagattggtggtattggaactgttccagttggtcgtgttgaaaccggtgtcttgaagcctggtatggttgtgacatttggcccttctggtctgacaaccgaagttaagtcagttgagatgcaccatgaagctcttacagaggcacttcctggtgataatgttgggttcaatgttaaaaacgttgctgttaaggatctcaagcgtggttttgttgcatccaactccaaggatgaccctgctaaggaggctgccaacttcacttctcangtcatcattatgaaccaccctggacaaattggaaatggatatgctccagtccttgactgccacacatcacac

SEQ ID NO: 231579 - DNA, 443 bp, Gossypium hirsutum
caatggtgtgcatacgcaaggcgaccatggacgacctactggctatgcaagcttgcaacttgctttgccttcccgagaattaccagatgaaatactatttctaccacatcctctcttggcctcagcttctttacgtcgccgaggactacaacggccgcatcgtcggttacgtcctcgctaagatggaggacgaaagcaacgagtgccacggccacattacctctctcgccgtcctccgcactcaccgcaagcttggcctcgccactaagctcatgaacgccgcccaagccgccatggagcaggtgtttggagcagagtatgtgtcgctgcatgtgaggaagagtaacagggcagcgtttaatttgtatacccagacgttgggatataagattcatgatgtggaggccaagtattatgcagatggggaggatgcatatgacatg

SEQ ID NO: 231580 - DNA, 487 bp, Gossypium hirsutum
ctcttttctcagctccgattcttcaaaccctaggacccccccttctctaatttcatctgatcgatcagttctttaagcttcacaatcccaatcccaatcccatgctcttttcccttttttcctaatatttcttttcccgggaaaaacttgagaaatccgagaacaattcttttgttttggaaagaagtcacattaagaaatcgagggaggagaaaaggaaggagggaggagcctgtaaaataagaagatttgtgaaaaaaatggccctcgaccacaaacgaggttcgggtttacaatcaacgttcatcgaaagacgtcattcaacaaggggttcgcgaagagttcatccaacaacggtgtgacctggcgaagctgtcctcaacgaactccaaagaatttgggaagcgaagatgatgcaagcgggagtaatattgggtccgatagagaggtcttcgcagaagcagcctactcccggtagcgcaattac

SEQ ID NO: 231581 - DNA, 375 bp, Gossypium hirsutum
caaaatcaaaattacaataaaactcgagatacgcacagcgaaattcattcttcgatctttgaacgccggcggcgaaacaccgctctgtttaccggtgacgtcgttttgttcagatatctgaaagatgtccggtcaatcccagcgcttgaatgtggttccaactgttacaatgcttggaatcatgaaagctcggcttgtgggtgctacaagaggtcatgcacttctcaagaaaaagagtgatgcccttactgtacaatttcgtcagatccttaagaagatagtatctacaaaagaatcaatgggagagattatgaaaacctcttcattttccctaactgaggccaagtatgttgctggtgagaacatcaagcatgt

SEQ ID NO: 231582 - DNA, 427 bp, Gossypium hirsutum
  unsure (1)..(427): unsure at all n locations
cccacgcgtccggttaatacttatcgccgaacgtttacaaccaaatccggtaagaaagtcagtaaggctcccaaaattcagaggttggtgactcctttgaccctgcagaggaagcgtggcagaattgcagagaagaagaagagagttgcaaaggccaaggctgatgctgctgagtaccagaagctgcttgcccagaggttgaaggagcagcgtgagcgcangagtgagagcttagccaagaagagatccaggctctctgctgcttctaagccttccattgcagcttaactgtggntngggcattttgtcagtagttgaatgtttgattctgaaacccgttttatattgtgaggtcattttgattatcaaatttctagagtctgccgatggtttttggggtattgttttttagtggatagtttacatg

SEQ ID NO: 231583 - DNA, 411 bp, Gossypium hirsutum
caaaaacccggaaatgtcggacgacgatcatggtttcgaatccaaggctgatgccggcgcatccaaaacctatcctcagcaagccggtactatccgtaagaacggctatatcgtcattaaaggccgtccctgcaaggttgtggaagtttccacctccaagacggggaagcacggtcatgctaagtgtcacttcgttgggatcgatatcttcactggcaagaagttggaagatattgttccctcctcccataactgtgatgttccgcatgtcaatcgtactgactaccaattgattgacatttctgaggatggatttgtgactttgctgactgagagtggtgacactaaggacgatctgaggctcccaactgatgagaacttgttgaaacagatcaaggatgggtttggtga

SEQ ID NO: 231584 - DNA, 456 bp, Gossypium hirsutum
gttgaaataaagagtcaccactcaccatgtccagtatagttggaatctatttgcatctgatctaattgttggtggatacacacacacatacatgtagcttttagctttgaaatgtctactggagttcaacatcaagagagagtaccaatgaacctaaagaaacaacttgctcttgctgtgaggaacattcaatggagttatgcaattttctggtccatttcaactagacaaccagcggtgttagaatggggagatggttattacaatggagatataaagacaaggaaaacagttcaagctgtagaactcaacactgaccaattgagtttacagagaagtgagcaactgagacagctttatgagtctctttcagctggtgaaagcagtcctcaagctaaaagaccttcagcagcattatctcctgaagatcttactgatactgaatggtattacttg

SEQ ID NO: 231585 - DNA, 431 bp, Gossypium hirsutum
aatcatcaaatttctctcaggcttttcatcgagcaggagctatgatacggctgttcaaagtaaaggaaaagcagagagaacttgctgaaaacgcaaatggcggatcacctatcaaaaagcaatctgcaggggagttgcgtttacacaaagacatttctgagctgaacctgcctaaatcatgttccatatcatttccaaatggaaaggaagacctgatgaatttcgaggtttcaattcgacctgatgaaggatattatttcggtggcacatttttgttctccttccaagtttctcccatctatccgcacgaggcaccaaaagttaaatgcaagaccaaggtctaccatccaaatattgacttggaaagaaatgtttgcttaaacatcttgcgtgaagactggaaaccagtgctaaatataaacactgtaatc

SEQ ID NO: 231586 - DNA, 416 bp, Gossypium hirsutum
caacaatggcctctacttcaactctcactctggctgaggctctcctagctcgagccatcttttccgatgggtccatccaatcctccgactactgtgtgtcactttcctatttggaaaaatcagtcaacccgatcagattcttagctatcgatgctgtcgaaaaggctaattccggtcacccttggttacccatgggttgtgctccgatgggtcacattttatacgatgaaatcatgaggtataatcctaagaacccttattggttcaaccgtgatcgtttcgtcttgtctgctggtcatggttgtatgttgcaatatgctctgcttcaccttgctggttatgatagtgttcaggaagatgatttgaagaattttcgtcaatggcaaagcagaacaccaggacattctgagaatttg

SEQ ID NO: 231587 - DNA, 432 bp, Gossypium hirsutum
gtttgagctagctagctcttactcaaatggcggccaaaacgatgatgttgcaaatattttcacttttcttctttttgttcagtatctgcaactccattttccttggtgctaatggagatgacaatggtggttggcaaactgcccatgccaccttctacggtggtgctgatgctaccggcacaatggggggagcttgtggttatggaaacctgtacagtcaagggtatggaacgagcacagcagctttgagcactgcacttttcaacaatggcttgagctgcggtgcctgctacgagctccggtgcaacaatgatcctcaatggtgcattagtcgaaccataaccgtgacagccaccaacttttgtccccctaactatgctttatctagtgacaatggcgggtggtgcaatcccccacgagaacactttgatt

SEQ ID NO: 231588 - DNA, 326 bp, Gossypium hirsutum
gttttgaatctagggatttgcgggtggagaagacgagagctcatctctctgcttcaaagctcctgtccaggtagaattctcttcttcctttgcgttgtgttctttgttgttcagtcgccatggcttcaaagcggattttgaaggaactcaaggatttgcagaaagatccacccacttcttgcagtgctggtccagtagctgaagacatgtttcattggcaagcaacaatcatgggaccctcagatagcccttatgctggaggtgtgtttttagttaccatccatttccctccagattatcctttcaagcctcctaaagtcacgttt

SEQ ID NO: 231589 - DNA, 456 bp, Gossypium hirsutum
gctggtttttgctgtctccaactcttgttcatagtggagagcaatgtaagctatgagctacctgatggacaggttattaccattggggctgaacgattccgttgtccagaagtcctcttccagccatccatgatcgggatggaagctgctggcattcatgaaacgacatacaactcaatcatgaagtgtgatgtggatattaggaaggatctctacggaaacattgtcctcagtggtggcaccactatgttccctggaatcgctgacaggatgagcaaggaaatcacagcattagccccaagcagcatgaagattaaagtggttgcaccaccagagaggaagtatagtgtttggataggaggctccattttggcatccctgagcaccttccagcagatgtggatttcaaaggcagagtacgacgagtctgggccatcaattgtgcacaggaaatgc

SEQ ID NO: 231590 - DNA, 418 bp, Gossypium hirsutum
tctctctcatatggcaatgtggtgcaggtattcggtacaggcagaagcgagggtaaggagaacccatttacagccaaagcctcgttgattcgttactggaacaatcacatttccaacaatcttcccaagccaccatttcttatctccaaagcttccccactaaacgccattgacttggccaagctcactcaacttgccaatcataactctctgtcttcccacattgaatctttttgttccttagccaatcttttctgctcattccaggaggaatcctcgaaactagacgcagttggcaagggtaaaggggatgcaaacttcgcagtgtattccagtaaaaactttaaaggttatggctcgttaagtcgcggagggatcgactccttcaagaactactccgatggggtaaatactccca

SEQ ID NO: 231591 - DNA, 321 bp, Gossypium hirsutum
gtcgtgatctaaccgatgccttgatgaagatggttaccgagagaggttacatgttcaccaccactgctgaacgggaaattgtccgtgacatgaaggagaagcttgcttatgttgccctggactatgagcaggaactggagactgcgaagagcagctcatctgttgagaagaactatgagttgcctgacggacaagtcattactattggagctgagagattccgttgcccggaagtcctcttccagccatctttcatcgggatggaagctgctggaatccatgaaactacctacaactctatcatgaagtgtgatgtggata

SEQ ID NO: 231592 - DNA, 403 bp, Gossypium hirsutum
gctttgatatcgatgctaatggtatcttaagcgtctctgccgaagacaaaaccactggacaaaagaacaaaatcaccatcacaaacgacaagggccgactctccaaagaagaaattgaaaagatggttcaagaagcagagaaatacaaatccgaagatgaagaacataaaaagaaggtcgaggcaaagaatgcattggaaaactatgcatacaatatgaggaacacagttaaggacgaaaagattggtgccaaactcccagcaactgataaaaagaagatcgaagatgctattgaacaagccattcaatggctagacagcaaccaactcgccgaatccgatgaatttgaagacaagatgaaggagttggagagtatttgcaaccccatcattgctaagatgta

SEQ ID NO: 231593 - DNA, 469 bp, Gossypium hirsutum
gaccccgggggacccgaccccgaattccccgtctaaccacacccttccgctcttttctggtcacctcaatttcaagtgaaggcgtattgtttataggaaaagactcacattaacattgtggtcattggccatgtcgattccggaaaatcgaccaccactggccacctgatctacaagcttggtggtattgacaagcgtgtgattgaaaggtttgagaaagaagctgctgagatgaacaagaggtcattcaagtatgcttgggtgcttgacaagctcaaggctgaacgtgagcgtggtatcaccattgatattgccttgtggaaatttgagaccaccaaatactactgcactgtgattgatgcgcctggacaccgtgactttatcaagaacatgattactggtacctcgcaggctgactgtgctgttttgattattgattccaccactggtggttttgaagctggtatct

SEQ ID NO: 231594 - DNA, 344 bp, Gossypium hirsutum
gagaaacttgaggggaagaatcttgctatccggtgcttttctctcgcaaaaaattctcaaacttgtttttaacgttcgctgaatactatcgctcatttcttccctcagaaccctaatcgataactgaagccatttaatcatgtttgggcgtgttccaaaaaaatctgataacactaagttttacgaagtacttggggttcccaaaagtgcaagtcaggatgaattaaagaaggcttataagaaagctgcaattaagaatcatccggataaaagtggagaccccgagaagtttaaagaactggctcatgcttatgaagtacttagtgacccagaaaagaaagaaa

SEQ ID NO: 231595 - DNA, 430 bp, Gossypium hirsutum
attatttttgctctctctttgtttttgagatctgtgtgtttcttcaagcttcttgaaagcgtcattttggttgagaactggaaaccgctgctgtgatggctccaccaattgagactacagtcaagtcctctgactctcactgcgctccacatcctcctttgaatgaaaggatcctttcgtcaatgaccaggaggtccgtcgctgctcacccatggcatgatcttgaaattggacctggagctcctacggttttcaactgcgtgattgaaattgggaaagggagcaaggtgaaatatgaacttgacaagaaaactggtttgatcaaggttgatcgtgtgctttattcatcaattgtgtatcctcacaactatggtttcatccctcgtactctttgtgaagacaatgatcccttggatgtcctgattattat

SEQ ID NO: 231596 - DNA, 413 bp, Gossypium hirsutum
  unsure (1)..(413): unsure at all n locations
cccacgcgtccgtctgtttcgacgatcaaatgtccgaaatttctctgtttgtctgcggatccctctttctacatctcaacatctncaataaccagtttgggaaaagaaaaaaaaaagagagatctttaatctatcttatgagatttcattgaagaaaataaagtacccagaaaaagaaaaaaaaaacgatatgtatagcaatttcaaagaacaagcgatagagtatgtgaagcaagcggtacaagaagataatgcagggaactacagcaaagcctttcctttatacatgaacgcacttgagtatttcaagacccatttgaaatacgagaagaaccccaaaattagggaagctattacccagaaattcaccgagtatttacgccgtgccgaggagatccgtgccgttctcgatg

SEQ ID NO: 231597 - DNA, 417 bp, Gossypium hirsutum
  unsure (1)..(417): unsure at all n locations
cttactcttgggcttttcttcagaaagaaatggcgggggattatccagttgtcatgggccattttacttttgggtgttggaattgcaactgtgactgatatgcagctcaatatcctgggttctatcctttctctgctgggcagtgtttacaactngcatagctcaaattatgactaatacaattcagaagaagttcaaagtatcttcaacccaacttctctaccagtcttgcccttaccaggcattaactctgttcatcattggcccattcctggatgggcttttgactaacaagaatgtttttgctttcaagtatacccctcaagtgctgttcttcattgttctttcctgcctgatttcggtctctgtcaactttagtacatttctggtaattggaaagacatcccctgtgacata

SEQ ID NO: 231598 - DNA, 460 bp, Gossypium hirsutum
ctttcattagcggcaaccatataacttactcggccgggtgtgatgcacttagacaggtgaatttgactggtctttctcatggattaagtttccaagagacgaaagatctgtgggtccaagccgatgctgatggaaatggtgttgtagactatgaagaatttaagagaatttgggatgctacatggttacaacatatggatgaagactgcagcttagaggacttgaatgaaggcattgcagaagacgaagctatcggttttgcggtaaagaaagcagttctcttcccccatgaagtggagaagggaatatggcctgaaaactactccctttctgatcatgcccgactcactgctgtattctcacctgttagattacggtgttcgaagcaaagcttgtagaataaaatggtgatagcttcacagaaaacaagttctgttacacatttaaaaggaaaaataca

SEQ ID NO: 231599 - DNA, 278 bp, Gossypium hirsutum
tcgacccacccactccggttaaaagctgtgggtgtctgcttcgttcagtggttgatttttcttatagagtaaaatggagatcaaaagtgtacatggacctttctattttgaactgaacacaggagctaagatgccatgtattggtttagggacatgtaaagctccttctggtgtcgttggtgaagctgtcgttgctgcagtcgaggctggttataggcacattgattgtgctcatgtttatgataatgaataggagattgggcttgcattgaatggac

SEQ ID NO: 231600 - DNA, 420 bp, Gossypium hirsutum
caattcccttcaatttctccattttctctgaaggccaatggatccagtaagcagttggggcaattcctccctcgactccgtcgatcccgaaatccatgacctcatcgagaaagagaagcgtcgccaatgccgcggcatcgagctcatcgcttccgagaacttcacttccttcgccgtcatcgaagccctcggcagtgccctcaccaacaaatactccgagggcatgcctggtaaccgttactacggtggaaacgaattcattgatgagatcgagaacctctgcagatctcgcgctatccaggctttccacctcgaccctaccaaatggggtgtcaatgtccagccttactccggttccccggccaacttcgctgcttacacggccgttctccagcctcatgataggatcatgggactcga

SEQ ID NO: 231601 - DNA, 326 bp, Gossypium hirsutum
  unsure (1)..(326): unsure at all n locations
ccggtccaaccacaccgtccgttttttcttggccggacccatgggtcctggggtggaaggtatttatcgaggaaatgggcagagatactaaggatcctaataattggacaacatatagcaatataccatcaanttatgttgatcccggcttgtttgagaaggcataaaatgcacttaaaggaattggaaaagaaaaatgcccacagaaatctttctgctttccagtttctaattacattgtatggccgaattggaaatttgcatgaaatttatcgaatatggcgttcattgaggctctcttttcacaaaacagccaatataaacta

SEQ ID NO: 231602 - DNA, 371 bp, Gossypium hirsutum
cggacgcgtggggtagcgggaaagaaagaagcctgagcaccgctgccgcagccaccatgggtcgtatgcacagtcgcgggtaagggtatttcagcctcagctctgccttacaagaggacccccgccaagctggctcaagatctcttctcaagatgttgaggaaaacatttgcaagttcgcaaagaaaggcttgaccccatctcagattggtgtcattctccgtgattctcatggtattgctcaagttaggagcgttactggcagcaagatcttgcgtatcctcaaggctcacggtctggcccctgaaattcctgaggatttgtatcaccttatcaagaaggcagttgccatccgcaagcatttggagagaa

SEQ ID NO: 231603 - DNA, 152 bp, Gossypium hirsutum
cttgtcttggctccctccttttggagcgtttgtgtgtggattattgcaagaaatccaaggtgggtttcactgtctttccattaccccaagtcttcacatttgttggtgagccctacaacagtgttctcttaacttacttcctttttgagcac

SEQ ID NO: 231604 - DNA, 336 bp, Gossypium hirsutum
cggacgcgtgggttttttttccctccgaagggggctttttttgcagatcaaggagagaaagttatggcagaagaagaaactgaactgagcgacaaccaaaagaaagagatcgccaaatggttcctcctcaatgctcccgcaggcgaaatccagtacgtcgccaaagatttaaaatccgttttgaataatgatgacgtctacgatgaggcggcatcggaagcatttcctgtttataacaaatctcacatgatttgcctcgaaatgtctggtagattcggagatgtgctggttacatcatatggggagcttcagggtaatgagtatctagaccccaag

SEQ ID NO: 231605 - DNA, 474 bp, Gossypium hirsutum
atgaggcagtgcggatccggcgttgtccagtgagtttttcaaaggctgcggagagatggcggcggcttttcgaaaggcggctaagtcccggcagcgggaacaccgagagcgaagccagcctggctttcgaaaacatctgggcttgctggagaaaaagaaagattataaacttcgtgcagatgactaccgtaaaaaacaggaatacctcagagctctccgtaagaaggctcttgaaaaaaatccagatgaattctactacaaaatgactcgggttaaactccaggatggagtacatattattaaggagactaaggaagaagtaaccccagaacaactaaagctgatgagaactcaggacatcaaatatatagaaatgaagagggttgcagaagcttagaaaatttgaagactaaaatcagagctccatctgctggatttccaggggaagcaacagaacaagcatgtgttcttttt

SEQ ID NO: 231606 - DNA, 442 bp, Gossypium hirsutum
aaaagaaattttgaagaaaaaaaaatccatcaccgatctaagttccccaaattctgttcaaatcgccggcgaaattttgatctgaaaatctaaaaatgtcgtccacattcagcggcgatgaaactgctcctttttttggcttcctcggtgccgctgctgccctcgttttctcctgtatgggagctgcgtatgggacggctaagagcggtgttggtgtggcgtcgatgggagtgatgaggccggagctggtgatgaaatcgatcgttcccgttgttatggctggcgttttgggtatttatggtttgattattgcggttattatcagtactgggattaacccaaaggctaaatcttattaccttttcgatggctatgctcatctttcctctggccttgcttgtggtcttgctggtctctccgccggcatggctattgggatcgt

SEQ ID NO: 231607 - DNA, 409 bp, Gossypium hirsutum
ctgcatcgcccgctcatgtgttccttggtcgacggcgtatcagcatccgacatggagaaatttctatgcgaccggttgcttgacccgacacaacccatatccgagcgcttccgagctctcttctcccttcgcaacctcaaaggccctgcccctcgcaacgctctcattcaagcgacaagggattcatcaaatttgttggctcatgaagctgcatttgcattgggtcaaatgcaagatgctgaagctattcctgctttggaagtagttctaaatgatctttctttgcatcccatcgttcgtcatgaggcagctgaagcacttggtgccattggtttggagagtaacattcctcttttgaagaatagtttggttctagatcctgctccagaagtccgtgaaacatgcgaac

SEQ ID NO: 231608 - DNA, 336 bp, Gossypium hirsutum
  unsure (1)..(336): unsure at all n locations
aacaataattctctttctgtttctctggtttaaacatgggtatgggtttaaggaatggatttcttttgattntatcttgtgttgttacacttttcctctcagttntggggcgacctgccactttccttgaagatttagaatcacttggtttgattctcatattangcanatcgatggagggagagccatccaacttgttctcgaccaaaattcaagctgtggatttgcttcttaaaagcagtatttgttcggacgtgtcagcatgaaaatcaagctcatccccggcgactccgccggaacagtcaccgncttttatatgaattctgttacaaatgc

SEQ ID NO: 231609 - DNA, 219 bp, Gossypium hirsutum
cccacgcgtacgaagaaaacaggtaacatagagtagcagcgatggttctaaagacggggctttgtcggtttagtggtgccaagatatactccagggaaaggcatcagatttatccgttctgattctcaggtcttctttttttcaaactcaaaatgcaagaggtacttacacaaccgtttgagccatcaaaactacatggcagccattataggagcacat

SEQ ID NO: 231610 - DNA, 337 bp, Gossypium hirsutum
tcaagtttctcctctacgtaatccatggaagcctgcttcttcgacactctcaaggctcaacctttctgggttattgtccttttcactttgggttctttatcactcttgaagttctcatttgtttttctgaaatgggtctggatcaattttcttagacctggtaagaatctcaaaaaatatggctcctggggtcttgttactggaccaactgatggtatcggcaaaggatttgcctttcagctggctaggaaagggctaaatcttgtcttggtgggccgtaatcctgataaactcaaagacgtttccgattcaatcttggccaactatgccaagattc

SEQ ID NO: 231611 - DNA, 341 bp, Gossypium hirsutum
cacataataacatccctattgtgcttagcaaaaaaaagaaaaaccccattgtaaaacagcctcactttgaaagattttaagagcaatggtaaaatttccagtgatcaacatggagaaactcaatggtgaggagagagcagcaaccatggagttaatcaaagatgcatgcgagaattggggcttctttgaggtgctaaatcatgggattccctatgatttcatggacaaaattgaaagcttgacgaaagagcattacaagaaatgcatggagcaaaggtttaaggaattggtggcaagcaaggcccttgagggtctccaagctgaggttactgatatggact

SEQ ID NO: 231612 - DNA, 359 bp, Gossypium hirsutum
cggacgcgtgggctgaatttccgatctccgcagagtgcttagcattcagctgctattagttgggtggttgcaaggaactgatctcaggcatggagaatgacaaggagctagaacaaatagatgtacaggagtctgaaaaatccatgccgtcatctgaagaggaggatgcagctataaggaaaaaatatggtgggattaagcctaagaaaccaccactcatttctaaggaccacgaacgtgcatactttgactctgctgattgggcacttggaaagcaaggtgttgagaagcccaaaggaccacttgaagccctccggcccaaattgcagcccacacaacaacaaacacgatacaggaag

SEQ ID NO: 231613 - DNA, 419 bp, Gossypium hirsutum
acggcagccaccacatccttggctcacattatccccctgaaaatcctcactttcactccctcacaaactgcaaagctgcggcaatagcagcaatggctgcccatattttcatgacaaccccatcccacctcgctctctcttttccatcctcaactaacccttcaaacccaccggttcttctctcctcatttcgtggggtctctcttaagctccctcgtcaatccctctcccttgctgccactattcccaagaagcccttttctgtgtttgctgttaccaagaaagctgtcgctgttcttaaaggcaattcggaagttgaaggcgttgtcacgttgacccatgaaactgatggtcctacaactgtgaatgttcgaattactggtcttactcctgggcctcatggcttccacctgcatgag

SEQ ID NO: 231614 - DNA, 388 bp, Gossypium hirsutum
  unsure (1)..(388): unsure at all n locations
cggacgcgtgggtgaaggtgtcttaataaacgccttcgatttaccttcgatttccattgacttctctattgctacgtttntgaatttttagtgagcgaaaatgagagagtgcatttcagtccacatcggtcaggctggtattcaagtcggaaatgcctgggaactntactgccttgaacatggaatccagccttgatggccagatgccaagtgacaagactgtcggaggaggtgatgatgcttttaacaccttcttcagtgaaactggtgctggaaagcacgtncctcgtgctgtctttgtggatcttgagcctactgttattgatgaagtgaggactggtacttaccgtcagcttttccaccctgagcaactcatcagcggcaggga

SEQ ID NO: 231615 - DNA, 441 bp, Gossypium hirsutum
gcggtttcttttctctctgagagcactctatcctttaggccttttgcttctctgcatgtttctgtcttaactttacataataaagaaaaaaaagaatggtgcccaacagactccttcgatcaactctcaaaacccagcttggttcatatataaaaaatgctgctgcgtacagaagttctatggaccacccacttaagggtgcattactggcaagattatatagtaccgagccatctttgcagagagatgattcatatttaaaggatggcaatgggtttaaggggcatgatatgctggctacattcacagctgggtggcagaccactgacttacatcccctggttattgaaaagtctgagggaagctatgtttatgatacccatgggaaaaagtatctggattctctcgcttggctatggtgtacagcattaggaggaagtg

SEQ ID NO: 231616 - DNA, 417 bp, Gossypium hirsutum
ctcttcttctctctttttctcattcattctttagtttcaatatcaaagcaaaaatgggttcttcttgtaatgttgtttcaatggccttactggcttgtttggtgttgaactccttggtttttgttgcccacggtggtgacttttaccaggatttcgacctaacatggggtgacagaagaggcaagattttcaatggtggcaagctcttgtctttgtctttagacagggtttcagggtctggttttcaatctaagaaagagtatttgtttggaaggatcgatatgcaactcaagcttgttgctggcaactcagctggcactgtcactgcttattatctgtcatctcaagggccaacccatgatgagatagactttgaattcttagggaatctgagcggtgacccttacattttacaca

SEQ ID NO: 231617 - DNA, 382 bp, Gossypium hirsutum
caagctcctcttatttgtgctaatggagttcggaatacccttattccatatattcatcagctttcttcttgttttgttaattgcaattcgaagcgtgaggaaatctaaagctaggagtttaactcaaaggttgattccagggccacggaaattacctttgatcggaaatctgcaccagctcgctgattctactctaccccatcgcaccctgcgtgacttggctacgaaatatggcgccgtcatgcacctgcaactcagtcaagtttcaactgtggtcatttcttctgcagaaatggctgaagagattatgaaaacacatgatattgtctttgcttctaggcctttacttcttgcggccaagattatatcttatgaatgcact

SEQ ID NO: 231618 - DNA, 385 bp, Gossypium hirsutum
gctaataataaggcgtttaactgtgtccgacaagaacaagatgatattgggaaaacaggtgtttcattgtctaaagatttgatgacgattgctggtaatgcacttaagtccaacattactacgttaggtccccttgttcttcctataagtgaacaaatcttgttctttgtcacattagttgccaacaagttgatcaatgctaaaatcaagccttatatcccggatttcaagctcgcatttgaacatttttgtatacacgccggtgggagagccgtgatcgatgagctcgagaagaatttgcaccttctcccggtacatgttgaagcttctcgtatgacgcttcaccggttcggtaacacctcatcgagttcgatctggtacgagc

SEQ ID NO: 231619 - DNA, 355 bp, Gossypium hirsutum
aaaaaaacatggccaaagttctgttgttcattgcactatgtgtgcttccagctttggttagtgctacacgcattctgaataatcaattggtggtagaaggctatgtgtactgtgatacttgccgtgctggttttgaaacccctaagactagaagcctagctgatgccatggttaggttggtatgctccgacaggaagagcggccaagttgtcttcaaaaaggagggatacaccgacaaaaccggaaaataccagattcgtgtatccgaggatcacttggatcatatctgtgatgcagttcttgtgaagagctcccagcttggttgtgccacaatgtccaccggtcgtgaacgtgc

SEQ ID NO: 231620 - DNA, 337 bp, Gossypium hirsutum
ctccgccgtcccagcaaccatggcaaggtgcagcattaaagccattgatagcctcgattgctacaggtgtcattctctggttccttcccgtcccatccggtgtctctcgtaacgcctggcagctactttccattttcctcgccacaatcgtcggcatcatcactcaaccattaccactcggagctgtggctttacttggactaggagcttccgtcctcaccaaaaccctaaccttttccgctgccttctccgcttttggcgatcccattccttggctaatcgctctcggcttctttcttcgctcggggtttcatcaagactggacttggtaatcgaa

SEQ ID NO: 231621 - DNA, 456 bp, Gossypium hirsutum
  unsure (1)..(456): unsure at all n locations
cggacgcgtggggttaaagaagctgtttctaagtttggaggaattgttgattggaaagctcatagaatgcaaactttggagagacgcaagcttgtggaacaagagtttgtaaaagtacaggaagagatgcctgaatataaaaaacggtcagaggatgctgaagaggcaaaaatgaaagtattaaaggagctcgatagcacaaagagactaatagaagagctcaagctaaacctggagagagcacanactgaagaaaatcangcaaaacaagactctgaactagccaagcttanggtggaggagatggaacaagggattgctgatgaggctagtgttgcagcaaagacacagcttgaggttgctaaagccaggcatgcagctgcagtttcggaactgaaaaatcgtaaagaagagttggaaacattaaaaaaagaatatgcttctttgatgaatgac

SEQ ID NO: 231622 - DNA, 376 bp, Gossypium hirsutum
  unsure (1)..(376): unsure at all n locations
atcagcttcaccggccatgggtatcgacttggtcgccggtggcaagagcaagaagacgaagagaactgctcccaagtccgatgatatctacctcaaactcatcgtcaagctntaccgatttctggtaagaaggactggcagcaaattcaatgctgtgattntgaagcgtctntntatgagcaaagtgaacaagcctcctctctctctatccagattgattgaattcatgaagggcaaggaggataagattgcagtggtagttggaactgtcaccgatgacattcgtgtatatgaagttcccgctctgaagggtactgcactaaggttcactgagacagcgagggcgagaattgacaaggctggtggggaatgttta

SEQ ID NO: 231623 - DNA, 431 bp, Gossypium hirsutum
  unsure (1)..(431): unsure at all n locations
gtcgttgaagcgaaagcttatctctttgcgtctctgaatctgatcaatcaacacctgaaaaggaaaacttacaaacaacaactactactagtctactacccagcactagaagcagctcgtagccagccatggatgaagagtacgatgtcatagttctaggaactggtctcaaggaatgcatcctcagcggtcttctttctgttgacggactcaaggttctgcatatggataggaatgattactatggaggagagtctacatcactcaacctcattcagctctggaagaagtttagaggaaatgataagcctcctgctcatttgggctctagcagagattataatgtggacatggtccctaagtttatgatggcaaatggcactcttgtgcgtngtcttattcatacggatgttacaaagtatctttacttt

SEQ ID NO: 231624 - DNA, 420 bp, Gossypium hirsutum
attatttacgttaagttcaaagaaatggctgggcgtgtgatcactcgcgtccacagtctccgtgagcgtttggatgagacccttcttgctcacaggaacgagattttggccttgctctcaaggatcgagggcaaaggaaaaggaattctgcaacaccatcaaattattctagagtttgaagctatccctgaagagaacagaaagaagctcgctaatggtgcattttttgaagtattgaaggctagtcaggaagcgatcgtgttgcctccatgggttgcacttgctgttcgtccaaggcctggtgtttgggagtacattagagtgaatgttcacgcccttgttgttgaggaactcactgttgctgagtatctccacttcaaggaagactttgtgatggaagtcaaatgaaactttgtttgg

SEQ ID NO: 231625 - DNA, 413 bp, Gossypium hirsutum
cattttcttattgattttgcagatcggttctctaatccttttttcgggtgtagcgttgtttatacgtttggttgttgttgaagaagtgctactaccatggctacaaagaagagcgttggggacttgaaggaagctgatttgaagggaaagaaagtgtttgttagagtcgatctgaacgttccattggatgataacttcaacataactgatgacacaaggatccgtgccgctgttcccaccatcaagtatttgatgggtcatggctctaaagtcatcctctctagtcatttgggacgcccaaagggtgtcactcccaagtacagtttgaagcctcttgtgccaaggttatctgaactccttggagtcgaggttaaaatggcaaatgactgtattggtgaagaagttgagaaaat

SEQ ID NO: 231626 - DNA, 338 bp, Gossypium hirsutum
ctctttacaaaatatctgctcctcttactttccctttttgtcccttgtttattcgatactcccccctcatggctgccgctgatgtcgagttacggtgcttcgtcggagggctcgcatggtccaccgacgaccgggcccttgaagaagccttcattgcgtttggtgaaatcgtctaatcgaagatcattaatgatcgtgagactggaagatcccgaggctttggattcgttactttccgtgacgagaaagctatgagggacgcgatcgaacgaatgaacggtcaaaatcttgatggatggaacataactgtcatacgaaccccaatcgcgcagaaatgg

SEQ ID NO: 231627 - DNA, 379 bp, Gossypium hirsutum
  unsure (1)..(379): unsure at all n locations
taaaccttctgcttagcttaaaaaatcttgaatccgtcctctcctacttccttcgttatcgtcaatggcttcggacaagaggattaagatcgggattaacggattgggaaaaatcggacgtttggttgccagagttgctcttcagaggaacgatgttgaactcgtcgccgntaacgatcccttcatttccaccgattatatgacatacatgttcaaatacgacagcgttcacggtcaatggaagcaccatgatctttaggtcaaagactctaaaaccctcctctcggcgaaaaacccgtcactgttttcggaatcaggaaccctgaggagattccatgggctgaagccgngctgagttcgntgtgagtcaactgagtgt

SEQ ID NO: 231628 - DNA, 401 bp, Gossypium hirsutum
  unsure (1)..(401): unsure at all n locations
ctttgctggagttgttgatggaaggaacatttgggccaatgatcttgcttcttcacttaggaccttgcaggctcttgaagctgttgtgggcaaagacaagcttgtggtgtccacctcctgctcgcttctccacactgctgttgatctagtaaacgagaccaagctagatgacgaaatcaaatcctggctggcattcgctgcccagaaagttgtcgaagtcaatgcacttgccgaggcattggctggtcagaaggatgaggccttcttcactgccaatgcatctgctcaggcttcaaggaagtcctccccgagagtgaccaatgaggctgttcaaaaggctgctgctgctttgaagggctctgaccaccgtcgtgctacanatgttactgctagactcgatg

SEQ ID NO: 231629 - DNA, 274 bp, Gossypium hirsutum
ccgagaagtaaacagaaaaaggaagaattttggtgaccggtgattcgtgagtattgtaaacagcaacagcagcaatggagctgttctacttcgtggtgttcggggcattgggagcgggggtggcagcattagagctcagccagaacagccaagatcgaatcaacacattctctgctttcaatttctttaagaacaaatatcttgtcgcttattctctcatgatagctggagactcgctgcaggggccgcatgtttactatctttacagaacata

SEQ ID NO: 231630 - DNA, 220 bp, Gossypium hirsutum
ataaaatggcaactcttaaggaaaaactcattgcaccagttgcggaagaagaggcgacagtcccaaacaataagatcactgtagtgggtgttggacaagttggtatggcgtgtgctgtcagcattctgggaaagtctctggctgatgaacttgctcttgtggatgttttggaagataagcttaaaggagaaatgatggatctgcagcatgggagcttatt

SEQ ID NO: 231631 - DNA, 339 bp, Gossypium hirsutum
gctggctcttgctctaagggtttccatggaagaggagaggtcaaggcaagaagctgctgccaagagagctgctgaggaagccactagacaagaaaaaggagaggaagcacaaccacagtccgattctcagaatgcaacaatgaatgctactgaaaaagcttctgacccaatggatgaggatgacgctttgctaaagcaggcccttgcattgtcgatgaatatccccggatctgattcttctgcaggtgatgctcaaatgtcagaggcaactaatgacgaccaggaattcgccttggcacttcagatgtctatgcaggacggttcaaaagattcgtcagc

SEQ ID NO: 231632 - DNA, 379 bp, Gossypium hirsutum
tccggtaacatggggataagtatggcattcatggcagccatgaaaggttataaaatggttctaaccatgccttcttacacaagcatagagagaagggtcaccatgagagcatttggagctgatttaattctcacggatcccacgaaagggatgggtggaacagtgaaaaaggcttatgacctcttggagtccacaccgaatgctttcatgttgcaacaattttcaaatcctgccaacactcaggtgcattttgaaacaacaggtcctgagatatgggaggatactcttggtaaagttgacatcttcgtaatgggaatagggagtggtggtactgtttctggtgttggacagtacctcaaatcccaaaatcctaatgttc

SEQ ID NO: 231633 - DNA, 288 bp, Gossypium hirsutum
tgtaattactttgagaggaaaatggggaaacaggcggtgaagatgagggcggtggtatacactttgtcaccgtttcaacagaagattatgagtgggctgtggaaggatctgccgggcatgatctattacaaggtttcctgagaattggatcagctgctactcttatacatactcctgtcgttggaacttacgcatatgttcagttcttcatagaaatcgagaaatttgatcatttttattaaaaacctcaagaagcatacgtattttctgagtaacactaagcttttt

SEQ ID NO: 231634 - DNA, 447 bp, Gossypium hirsutum
  unsure (1)..(447): unsure at all n locations
gcgggattcgcggtggtaactatactgcgatgccttgttcttcgatcgagactagcaataatttttgtggtggcggtgacggaggtgatgtgaatgggcgtattcacaatttcaagctgaacgagcacactttcttagcttctctgatgccgaagaaggagattggcgccgatcgcttcattgaagctcatcctcattacgacggtcgcggcgccgtcatcgcaatctttgattctggtgttgaccctgctgcttctggcttgcaactgacatcagatgggaagccaaagatcttagatgttattgactgtactgggagtggagatgttgatacctcaaaagtggtgaaggctgataaagatggtcgaattcaaggagcttcangggcttcattggttgtcaattcttcttggaaaaaccttctggtgagtgcatgtgggctataaa

SEQ ID NO: 231635 - DNA, 420 bp, Gossypium hirsutum
atttgcctgatatcatatcaagaacgaagggcaaagggggcggcggcttcggtcggagtagttgcttatctgtgactgagttttctcgacgcaccaccaacatcacaaagcgccatgggtttactatccctctcatcttctctaaccccttccttcccctctcttcatctcaaacctaaacataaactctctcttactttcccaaacccttcctttgcgtgctccgcacccacatccaaacccctctcctcatctctcaaactgaaacctactgcgaattccctcaaattttcatcccctcagagccccgccaccgccatgcgaggggccgaggccgacgctatggggttgttgctcaaggagcgaatcgtttttctaggtaacaacattgatgactttgcggccgatgccattataagt

SEQ ID NO: 231636 - DNA, 444 bp, Gossypium hirsutum
  unsure (1)..(444): unsure at all n locations
cacgcccgtccgattacctttttatnttttttcagaagccctccttcacgcaaacgtccgctttctgttcagccgcggtgatgcttnnttgatcttnntctctatggnnntaccatttcnncaagctctctannaccccaacccagtcgcnnttctctttcaatcatcttccaaacccagnatcttcttcatncgcttaaatgccttcnngttgggttccctaaccaggcctggtttctgctctaagctggtttcatcttctagcttgtcctcgataaacacccaccctttcaggggctccttggttgtcaggtgttctcttgctgatggaaacggtagttcagtgaagaggactactttgcatgatctgtatgaaaaagaagggcagagtccatggtatgacaacctttgcaggccagtgaccgatttgctgccactgattgc

SEQ ID NO: 231637 - DNA, 458 bp, Gossypium hirsutum
cggacgcgtgggttactatctcaaatttctcgccgtggtggttttgcagttgctaatcaagtctgaagcttaagttcagatgatttgaccgagaagaaacggtaaactcccgcattcagaatcatgggccattgctgtagcaaaaacgtgtccgtcaacaatgaagcaacctccacagtcaatcagtctcagccgcgaccggttccggcctcggcaaccccatccgttgagacaaactcttatgctgttagtccatttgctagtccactacccgctggagtggcgccgtctccatcaccagctagaacaccgggaaggaagttcaggtggcctttgccgccttcctctcctgccaagccgatcatggcagcaataatgagacgaaaggggtcgaaccaggcggctccgatggaagaacaattcccgagatggggaggagcgggctagacaaaaatttg

SEQ ID NO: 231638 - DNA, 466 bp, Gossypium hirsutum
  unsure (1)..(466): unsure at all n locations
atcgccgccggagggtcgtcttaaagggcccgcgcgccgccgccccctcggcccgccatgctgctatccgtgccgctgctgctcggcctcctcggcttggccgccgccgagcccgccgtctacttcaaggagcagtttctggacggagacgggtggacttcccgctggatcgaatccaaacacaagtcagattttggcaaattcgtcctcagttccggcaagttctacggtgacgaggagaaagataaaggtttgcagacaagccaggatgcacgcttttatgctctgtcggccagtttcgagcctttcagcaacaaaggccagacgctggtggtgcagttcacggtgaaacatgagcagaacatcgactgtggnggcggttacgtgaagctgtttcctaatagtttggaccagacggacatgcacggagactcagaatacaacatcatgtttggccctgatatct

SEQ ID NO: 231639 - DNA, 402 bp, Gossypium hirsutum
  unsure (1)..(402): unsure at all n locations
ggttcatacaatgcacctgctggggtcatttattccttcccagtaacttgtcgcagtggagaatggacaattgtccaagggctggcaattgatgaattctcgaggaagaagttggacttgaccggagcggagctgaccgaggagaaggaattgggcatactcctgcctctcatgaatggattgaccatntattcaatgtgtggtatggtatgctntggtaggatagcagcagttttgaataagaaagggattctagatgaactgttaatggtggggaaagccgccttncccgatcttgcatctttaagaatgggttttctgtttttattactgaccccagagttcagatcgattntaaatgggggataagcaaagaactattgtcatncatacgaatgtatg

SEQ ID NO: 231640 - DNA, 379 bp, Gossypium hirsutum
  unsure (1)..(379): unsure at all n locations
gaaaatctcgaagcttccttttccgttttagatctcaaaattcaaaaagctctctttttcatctcatggctgctactatcgtctccgtcaaagctaggcagatcttcgacagccgtggaaatccaacgggtgaggttgatgtggaaacatcgaacggtataaaaggctaggccgcagttcctagcggtgcatccactggaattacgaggctcttgagttgagagatggaggttccgattacctcggtaaaggtgtatcgaagggctgtgctaatgttaacacaatcatcggccctgcattgattggaaaggacccaaccgagcagactgcatttgacaatntcatggttcaacaactggatggaactcannatgagtgg

SEQ ID NO: 231641 - DNA, 456 bp, Gossypium hirsutum
  unsure (1)..(456): unsure at all n locations
gttgaatccccctggaaaagccaccattcatgttgaaaatgttgatgaattcaagtggcttaattcatcctattcccctgtcctacgtcaacttgagactgcttcaatgaaggagtattatttcaaggcggatcatccaactgtatctggatcttcaaacttgaagtatcgaaacccgaagtatctctcaatgcttaatcacttgcggttctatcttccacaggtctaccccaagttagataagatactgtttcttgatgatgacattgttgtccagaaagacttgactggattatggtctgtggatctgcatggaaaagtgaatggtgctgtagaaacttgtggtcaaagctttcatcgttttgacaagtatcttaacttctcaaatcaccatatntcacgaaactntgatcctaatgctngtggatgggcgtatggaatgaatatgtttgatct

SEQ ID NO: 231642 - DNA, 372 bp, Gossypium hirsutum
  unsure (1)..(372): unsure at all n locations
tgaaaattcattttctttggactttctctgaaatccgagtcctaggaaagatgcgtgagattcttcatattcaggcagggcagtgcggcaaccagatcggtgccaagttttgggaggtggtttgcgccgagcacggcatagattcaacgggacgctatcaaggggacaatgatttgcaactggagcgcgttaacgtttactacaatgaagcgagttgcgggaggttcgttccacgagccgtccttatggacttggagcctggcactatggatagtgttagatctcggccgtacgggcagattttcaggcctgacaacttttgtnttcgggcagtccggtgcagggaataactgggccaagggtcattacacg

SEQ ID NO: 231643 - DNA, 403 bp, Gossypium hirsutum
  unsure (1)..(403): unsure at all n locations
cccacgcgtccgaagaaaacaggtaacagagagtagcagcgatggttctcaagacggagctttgtcggtttagtggtgccaagatatacccagggaaaggcatcagatttatccgttctgattctcaggtcttccttttttcaaactcaaaatgcaagaggtacttccacaaccgtttgaagccatcaaaacttacatggacagccatgtataggaagcaacataagaaggacattgctcaaggggccgttaagaagaggagacgtgccacanagaagccatactccagatccatcgtcggtgccaccttagaggttatccaaaagaagaggagcgagaaacctgaagttcgtgacgctgctcgggaagctgcactccgagaaatcaaggaaaggatcaagaa

SEQ ID NO: 231644 - DNA, 435 bp, Gossypium hirsutum
gttggcatattctgtcttggttctggtgctacaattgttcatggagttcaaaacctatggatagcacatcccccggataatattgagtatgcagctttggtgataggcggctcatttataattgaaggtgcttctcttgttgttgccattcaagctgtcaagaaaggtgcagcaacggaggggatgaaagtgaaggactatgtctggcgtggccatgatcctacatctgttgcagtcatgacagaggatggcgctgcagtaactggcctggctatagctgcagcatcactggttgcagtgaagacaactgggaatgccatgtatgatcccataagttccattatagttggcaaccttcttggaatggtcgcaatatttctcatccagcgcaaccggcatgccttgatagggagagcaattgatgaacatgatatg

SEQ ID NO: 231645 - DNA, 380 bp, Gossypium hirsutum
  unsure (1)..(380): unsure at all n locations
tttttgttgtgaaaaaaaaaatggttggtgtgtttaggttagtgaggggggtattccggaaccaagtggcttttggttcagccttccaccgccccaagaggttactcgaagggattgantggaaccaacttgactgctctagttaccggaggagcaagtggaattgggttggaaacttctagagtattggctcttcgtggagtccacgtcatcatcggtgcaaggaacatgaaagccgcgaatgaagcaaagaaccaaaatgttagagagaacacaagagcccgtatagatgttctggagctggatctttgctctactagttcaatcagatcatttgccgacaatttcattgctcttcatcttcctcttaatatcttaat

SEQ ID NO: 231646 - DNA, 420 bp, Gossypium hirsutum
aagaaaaaatggctttgaattttaatcccatcgcctcgaaatctcagaagctcccttgctttgctcttccacgaaaggccaccctcagatctcccaagttttccatgatctccaccattccttctggctccaaagaggttgggaatctgaaaaagcctttcacgcctccaaaggaggtgcctggttagatcacccactccatgccgcctcacaagattgagatctttaaatctttggagggctgggctgagaacaacattctgactcacctcaaaccagttgagaaatgttggcaacccgccgactttcttccagatcctaattctgacggatttcatgagcaagtcaaagagcttagggaaaaggcaaaggaaatcccagatgattactttgtagtttttgttggtgatatgatcactg

SEQ ID NO: 231647 - DNA, 385 bp, Gossypium hirsutum
gcttcgaagatggatgggaaagtcgttgggtaaaatctgactggaagaaagatgagaacatggctggggaatggaattacacttctggaaaatggaatggagatcttaatgacaaaggtattcaaactagtgaagactacaggttttatgctatttcagctgagttcccagaagttaacaacaagggaaagactctagtcttccaattttctgtgaagcacgagcagaagcttgactgtggtggtggctacatgaagttgctcagtggtgatgttgaccagaagaaatttggcggtgacaccccgtacagcatcatgtttggccctgatatttgcggctacagcaccaaaaaagtacatgccattcttacatacaatgggacaaa

SEQ ID NO: 231648 - DNA, 392 bp, Gossypium hirsutum
gctccttgccgcaccacaaagtatcctcgagagattccaccattgccatggtacaggagtgctgttcctcagatggcaatggctggatttcttcctttcagtgccatctacattgagctttactacatattcgccagcgtttggggccacaggatctatactatatacagcattttgtttattgtcttcatcatccttctgattgtcactgcttttataactgtggctttgacatacttccaactcgctgctgaagatcatgaatggtggtggaggtctttcctctgtggtggatcaaccggtgtctttatctacgcctactgcttgtattattactacgctcgatccgacatgtctggatttatgcaaacctcgttcttctttggttatat

SEQ ID NO: 231649 - DNA, 396 bp, Gossypium hirsutum
ctcaaagttcactacttgtgtgcagacaaaaatggcttttgctgggtttttcttgttgggtttactttcaatggtctcagctgttcatggatatggtggtggatggactaatgctcatgctactttctatggtgggagtgatgcttcaggcacaatgggtggtgcttgtggttatgggaacctgtatagccagggatatgggacaaacaccgcagctttgagcacagctctgttcaacaatgggcttagctgtgggtcttgctatgagattaagtgtgtgaatgatggcaagtggtgcctgcctggttccattgtggtcactgctaccaatttctgccctccaaacaatgctctcccaaacaatgcttgtgggtggtgcaacccttccctgcaaca

SEQ ID NO: 231650 - DNA, 447 bp, Gossypium hirsutum
ctctcttcctcctccaccatcatcatataatacacgtctaaagcatctgttcgctgcaaaaagtacacaatctcccacttcctcttttacactcccttcatttttggtctttcaaaccccataagcccttttcactcctttttatactctcattttacgtttatttcttctttctttcatagatccaggccttcttcttcttcttcttcttcttcttcttcttctatcaaagttaatataggcaaatataagagaagaaatcgaattaaagttgatccgtgaaactagataaagaacagtacgatttgttttgaccaaagcacattcgagccatgtcatttattggtacccaacagaaatgcaaggcttgtgagaagactgtttatccagttgaacttttgtctgcagatggagttccttaaccataaatctgcttcaagtgcagtc

SEQ ID NO: 231651 - DNA, 457 bp, Gossypium hirsutum
ctctcttcctcctccaccatcatcatatgatagacgtctaaagcatctgggcgctgcaaaaagtacacaatctcccacttcctcttttacactcccttcatttttggtctttcaaaccccataagcccttttcactcctttttatactctcattttacgtttatttcttctttctttcatagatccaggccttcttcttcttcttcttcttcttcttcttcttctatcaaagttaatataggcaaatataagagaagaaatcgaattaaagttgatccgtgaaactagataaagaacagtacgatttgttttgaccaaagcacattcgagccatgtcatttattggtacccaacaaaaatgcaaggcttgtgagaagactgtttatccagttgaacttttgtctgcagatggagttccttaccataaatcttgcttcaagtgcagtcattgcaaagg

SEQ ID NO: 231652 - DNA, 449 bp, Gossypium hirsutum
gttttcaccgaaataaaaggacctttgcccctccccaccgtttttcaaccctcgtcatcggaagagctgtcctttttctctctctatattttctcatctccttttccaccgccgttgatctcgatccgtatccccgttttcaaaaaagctccaaaaagatggccaatgctgcatcgggaatggctgtgcatgatgattgcaagttgaagttccaagaacttaaggcaaaaagaacccaccgctttattgttttcaaaatcgaggagaagcagaagcaagttatcgtggagaagcttggtgagccaactgagagctatgaagattttactaaatgtcttcccgctgatgaatgtcggtatgctgtgtacgattttgattttctaacagccgagaacgtcccaaagagcagaatctttttcatcgcatggtctcccgatacatcaaggatc

SEQ ID NO: 231653 - DNA, 440 bp, Gossypium hirsutum
gagagagagagagagagagagagagaaacacagagagggagaaatggtttctctgaagctacagaagcggctctccgcgagcgttctaaagtgtggaaaaggaaaggtttggctcgatcctaatgaagtcaacgagatctctatggccaactcccggcagaacataaggaagttggttaaagatggttttatcatcaggaagccaaccaagattcactctcgatctcgtgctcgtcgcatgaaagaaagccaagagaaagggacgtcactctggatatggtaagcgcaagggtacaagggaggcaaggttgcccacaaagatcttatggatgagaaggatgcgtgtacttagacgcctactccgcaagtacagggaatcaaagaagattgacaagcacatgtaccatgacatgtacatgaaagtcaagggtaatgtgttt

SEQ ID NO: 231654 - DNA, 214 bp, Gossypium hirsutum
  unsure (1)..(214): unsure at all n locations
accggttcctcaatctctctaatcctgactttcttccccatcaaacacaccttcgattntcccaaggttgtagaagatggcagaaggtgaggatattcagccacttgtttgtgacaatggaactggaatggttaaggctggatttgctggggatgatgctccccgagccgtattccctagcatcgttgggtcgccacgtcacaccggtgtgatg

SEQ ID NO: 231655 - DNA, 407 bp, Gossypium hirsutum
gtcttcttcattctcactctctctccactgaactcttgctaaacggtatcgttttagtcagtctttcatcaatggcgaaagaaccggttcgcgtcctcgttactggagctgcaggacaaatcgggtatgctcttgtacccatgattgctaggggagtcatgttgggtgctgaccagcccgtgatccttcacatgcttgatatcccacctgctgcggaggctttgaatggtgtcaaaatggagttggtggatgctgcttttcctcttctaaagggtgttgttgctacaactgatgttgttgaggcatgcactggagtcaatgttgctgtcatggttggtggtttcccaaggaaggaaggaatggagaggaaagatgttatgtcaaagaatgtgtctatttacaagtct

SEQ ID NO: 231656 - DNA, 421 bp, Gossypium hirsutum
cctcgtttcgctcctttaacattgcataccgccaccaaacacagtcctacatttttggaacttctcttctcttctctttccaaaaagtaaaaaccagaaagagatccaaaaaataatggtgcacggttttattagtccatggagaagggtgttatcggaaactacatattctctgcgacgggggcaatttggtcgacgacgctgcttctctctggtggctcacaaagctgagcttgataaaaacaatatcgattctgttcctaaattgcctccctttgattactctccgcctccttataccggtccttccgccgttgacatcctttccaaacgcaaggagtatctcagcccttccatgttttacttttaccagaaacccttgacgtagtggatgggaggatgcagtatttgttcgatgaga

SEQ ID NO: 231657 - DNA, 420 bp, Gossypium hirsutum
aaaacccattagctaaaaatgcactgggttctttctgtgttgcttgcagttatcggagttactgcactgctcgttgtaactccggtaagtgggtaccgtccatggccgtacgtaaaacccaacagctccgacttaatgttcggaggctctaagaaatttgagggctcatcggagtttgtacatatgagatatcatatgggtccagtccttactgctcatatcaccatccacccaatctggtacggccggtggcagaaatcacagaagaaaatcatccgtgagttcatcaactcgatctccgccgttgattccaaacacccttcggtggctgggtggtggaagaccgtacagctttacaccgaccaaacgggagccaacatttcccgtacggtgctattaggtgaagagaaaaacgatcgt

SEQ ID NO: 231658 - DNA, 393 bp, Gossypium hirsutum
ccgatatcgtctttctcaaaaccagatccaaaagcctgcagattcatccgctgatggccgacgaagcgaaagccaaaggcaacgccgccttttcctctggtgatttcaacgccgcaatcaaacacttcaccgatgctataaacctttcccccaccaaccacgttctttattctaaccgatccgctgcgtatgcttctctccatcaatacgagtccgcattgtcggacgccaaaaagaccgttgagcttaaacctgactggtctaaaggttacagcaggctcggcgcggctcacctcggtttgcaccaatatcaagatgctgtttcagcgtataagaaaggtctggagattgatcctaataatgaagctttgaagtctggattggctgatgctc

SEQ ID NO: 231659 - DNA, 288 bp, Gossypium hirsutum
  unsure (1)..(288): unsure at all n locations
tttcagtcactctaaaatcctttccgttaaacaaattataaaagattccaaattacaatcatggaaaagaaaaagaacaggaaaggtggaaagcaaaaaaaacaaaactgagcattcccattatcatgatgggttgataagttttttttttttccagtgcagttggaatctcaaaccctgaagcctttgctgttccttcttcctctagccctctcaaatttccttgcttttgaccgcacatatggcttggtgtggctgtgtggcacaccangagcaggtccgaagtgc

SEQ ID NO: 231660 - DNA, 451 bp, Gossypium hirsutum
gggtgtcttaataaacgccttcgatttactttcggtttccatttacttctttatgtctacgtttttgaatttttagtaagcgaaaatgagagagtgcatttcagttcacatcggtcaggctggtatccaagtcggaaatgcctgctgggagctttactgccttgaacatggaatccagcctgatggccagatgccaagtgacaagactgtcggaggaggtgatgatgcttttaacacctttttcagtgaaactggtgctggaaagcacgtccctcgtgctgtctttgtggatcttgagcctactgttattgatgaagtgaggactggtacttaccgtcagcttttccaccctgagcaactcatcagcggcaaggaagacgctgccaacaacttcgcccgtggccactacactattggcaaagagatcgttgacttgtgcttggaccgtatc

SEQ ID NO: 231661 - DNA, 418 bp, Gossypium hirsutum
  unsure (1)..(418): unsure at all n locations
cattacccaaacctccctttcccccccttttttggtttatcataaacaatcgtcatagcattaacatacagctaggatctttcttttgtttttttttgggggaaaaggttgtgtttttaacgaaaatgggttccatttctttcgttaattctcaaaccctgaagctattcccttctttcaattcctttcttcattctaagcaaccctgcattgtctccatataccattattcccataaagtggcactggcacccttcttgtctctccccaaacccaaagatggctcttttcgtcttgctgctgaacttatcaccaactctgttccctcaagaaatggaaattatactgtgggtgattntatgaccaggaaagaggatttacatgttgtcaaaactacaacaagtgtggatgaagcatt

SEQ ID NO: 231662 - DNA, 426 bp, Gossypium hirsutum
attttattatatattctaaatattttatatatttttatatttatatatgagtattatttttatatttatatattattattatatatatatttatttctattttttgtatacattatatacaatacaaaaaaacaaaaaagtaaagtatggatattgatccaattcatctcattaatatttgtagtacaatccttcagtcgatttcgcttcatttagttcagttttaatttcggtttatgaaatttcaataaaattcaaattaataaggagtccttatgtcacgttaccgagggcctcgtttcaaaaaaatacgccgtctgggggctttaccgggactaactagtaaaaggcctagagccggaagcgatcttagaaaccaatcgcgccccggtaaaaaatctcaataccgtattcgtttagaagaaa

SEQ ID NO: 231663 - DNA, 361 bp, Gossypium hirsutum
  unsure (1)..(361): unsure at all n locations
caaggggttgccggtggaatcgacgcgctcgttgagggccaangaaggaaggaggaagagagagaganagataaaaaggagaatctgcttcaaagtttcaaactttcccgtctcatatctaatccccaatttctctcttctgctctaggttccttcctgttctcttaggattcttgtggtctgttcaaagcgtcatggcatcgaagcggattttgaaggaactcaaggatttgcaaaaggatccacccactttttgcagtgcangtcctgtagctgaagacatgtttcattggcaagcaacactcatgggcccttccgatagcccttatgcgggaggtgtatttttagttagtattcattt

SEQ ID NO: 231664 - DNA, 451 bp, Gossypium hirsutum
ctctggttcggagtttggaagcgcaaggcgtgccatcaaaacaagcggaggcaataacatcagcaatcacggaagtattgaacgacagcttggagaatgtgtcccagtcctttgtttcaaaggcagaaatgcagaaatctgagatgcttcaagaagccaatttgtccaaagtttaaatcggaagtaaaaagttcccaggagcatcatttttctatgttgcaacgtgaaactgagaaacttcgaggtgacattgagaagatgcgaagtgaactaaggtatgaaattgataaggtcactgcagggcagcgtctggatttaaatcttgaaagagggcgcatacgtgatgaactggccaatcagaatgcagaaactaccaacctgacaaacaagctagatagggaaattcatgcattaagagcccaattagaagctgcgaaatatgatgtaatta

SEQ ID NO: 231665 - DNA, 444 bp, Gossypium hirsutum
ctctctctctcatatctctctgtttatttttttgggttttccttttgtcggcttcttctcacctgttgttcttccattttttaatcaagtccccccccctctcataacctctccctctaacaagccaaaggccccaagcagattctatttgttctaacatggagaaaagccatgaacttgaactgacccagatgaggaaatcagtagagaaacttgggttttcaacagagaaatacggggatccgacactcatgagattcttgattgcaagatcaatggacacagataaagcttcaaagatgtttgtccagtggctgaaatggaggtcttctttagttcctaatgggttcgttgtagaatctgaagtgcctgaccaattagaagccagaaagatttttttgcaaggtttgtcaaagacaggatatccagtgatgattgtccaag

SEQ ID NO: 231666 - DNA, 417 bp, Gossypium hirsutum
cttacatttaaggcttacaaacatgtttctgcactaagagctactgctctaatgtctaatgaagtgaaacctgagcaattcgcggttctcgttagagacttgccgaatgccacttcaggtcaaactcgaaaacagcaggttgatacatacttcaaatctatatatcctgagacattctacagatcaatggtggtcactaacaacaaagaggttgataaaatctggggagagttggaagggtacaagaagaagcttgcgcgcgcagaagccatatatgcactgtcccagggaaatggtcaaggcacgagaccaaccaacagaaccggcttccttggtctctgtggtaaaaaagtagacagcatagagtactacaatgaaaagattaaggaattgacacaaaaattggaagctgaacaa

SEQ ID NO: 231667 - DNA, 454 bp, Gossypium hirsutum
aaacagttgaaatatctctctcttcactttcttctctgttcaacgcagggtgaaaggcggggaggccgtatacaatctctcttgcgctcttctcgtagaatggatcagattcaacatccaactgtcatgcagaaggtagctggccagctcctttcttctagcatttcccgagattttcaagggtatgatgggtctttcaggaggcctgccctataccaaggacattttgcatatgggaattattccaatgctggaatgcactatcctattgttccatcaacagctaccgccatttgtgttcaagcccctgcagagaaaggatttaccagctttgccattgatttcctcatgggtggagtttctgctgctgtgtcaaaaacagctgctgctccgattgagcgtgttaagcttttgatacaaaccaggatgaaatgatcaaaactggtaggctctc

SEQ ID NO: 231668 - DNA, 456 bp, Gossypium hirsutum
attgtcttctccataacattcgtctctcagatccttgcctcttagatcatcaaatccattcctttttttcaccaaaacatgagggaaatcataagcattcatataggtcaagctggtattcaagtcggtaactcatgttgggagctttactgccttgaacatgaaatccaacccgatggaatgatgcccagtgacacctctgtaggtgtagcaaatgatgctttcaacactttctttagtgaaactggttcagggaaacatgttcctagagctgtgtttgtggatctggaacctactgtgatcgatgaagttaggactgggacttaccgacaacttttccaccctgaacagcttatttctggcaaagaagatgctgccaataactttgccagaggccattatacaattgggaaggaaattgtggatctttgccttgaccgtgttaggaagttagct

SEQ ID NO: 231669 - DNA, 432 bp, Gossypium hirsutum
  unsure (1)..(432): unsure at all n locations
gaggaaaggaattatattttgggtatgattaagaagattaaagccactggctgtaatgttttgttgatccaaaagagtattctgagagatgcagtcacggatttgtcattgcattatttggccaaggctaagattatggttgttaaggatgttgagagggaagatattgagtttattaccaagactttgaatggtttgcctattgctaatattgagcactttcgagtggagaagttggggcacgcagatcttgttgaggaggtttcgctcggngatggaaagattgttaaggttactgggatcaaggatatgggaagaacaactactgttttagttaggggttcgaatcagttggtcctcgacgaagctgagaggagtttacacgatgccttatgtgtggtcaggtgtttagtgagtaaaaggtttttgatt

SEQ ID NO: 231670 - DNA, 464 bp, Gossypium hirsutum
cggacgcgtgggcccaaatcctctgtacctttgttttttcttccaatccagacagcacccaattccatggccacctcttccccacgtgaggataatgtctacatggcgaagctcgccgagcaagccgagcgctacgaggagatggtgaagttcatggagaccgtcgtctccgccgtcccctcctccgacgagctctccgtcgaggaaaggaacctcctctctgtcgcatacaagaacgtcatcggcgcccgacgcgcctcctggaggatcgtttcctccatcgagcagaaggaggaaggacgcggcaacgccgaccacgtctccgtcatccgtgagtacagggccaagatcgaggctgagttgtccgagatttgcgccggaatcttgaagctcctcgacgagaagctcgttccggcagccaagaccggggattccaaggtcttttatctgaaaatgaagggaga

SEQ ID NO: 231671 - DNA, 386 bp, Gossypium hirsutum
cccacgcgtccggagaagccagtttcaatcgtccctcaagagaaactgtcacgaaaaaagacattgggtcttcccaaatcttggctttgcattgatggcggatctcaggtcagcatttctcaatgtgtattcccagctcaaatcggagctccttcaggatccttctttcgagtttaccgatgattctcgtcaatgggttgaacggatgctggactacaatgtgcctggagggaaactgaatcgtggactctctgtgattgatagctaccgcctgttgaaagatggaaaggaattgacccaagatgagatttttcttacaagtgcgctcggttggtgtattgaatggcttcaggcatattttcttgttcttgatgacatcatggaca

SEQ ID NO: 231672 - DNA, 441 bp, Gossypium hirsutum
cttcatttcccagacccttttctctgcttcctctctatatttttcatttgtttgttgtttatatggcatctcaagccagcctcctccttcaaaagcagctcaaagatctttgtaagaatccggtagatgggttctcagccggattggttgatgacagcaatgttttcgaagggagtgttacaattgtcggaccacctgatactttttatgaagggggatttttcaatgccatcatgagctttccacctgattacccaaacagccctccaacaatgaaatttacaacagacgtttggcatcctaatgtttatactgatggcactgtttgcatatcaattcttcatcctccgggtgatgatccaaacggctacgagcttgcaagtgagcgttggatgccaatccatactgtcgaaagtattgttttgagtatcatatcaatgc

SEQ ID NO: 231673 - DNA, 453 bp, Gossypium hirsutum; identical to SEQ ID NO: 197595

SEQ ID NO: 231674 - DNA, 452 bp, Gossypium hirsutum
  unsure (1)..(452): unsure at all n locations
atctccagctcccaaggtaaatatgccgatcagaaacatagcagttggccggcccgaagaggcgactcaccccgatgctctcaaggcagctttggctgagttcatctcaaccttgatcttcgttttcgctggatcgggctcaggaatggcttttaacaagttgaccgacaacggagcaacaaccccggccggtctcgtagccgccgctctagctcatggcttcggtcttttcgtcgctgtctccgttggcgccaacatctcaggtggccacgtcaaccccgccgtcaccttcggtgctttcgttggcgggaacatcactctcttgcgcggcattctttactggatcgcccaactcctaggctcaaccgtcgcttgcctgttgcttaagttcgctaccggcgacctggctgtaccagcttttggatgtcatcangtgtgggcgtgtctaacgc

SEQ ID NO: 231675 - DNA, 412 bp, Gossypium hirsutum
cggacgcgtgggatatctgtagatgtcaggtgaactcctttctacaagtgagtgaccttccaattcgatcacatgttttacacctttcaagttatttaccggtggaagattatcattccatttccgaacaaatttgctagtcccaattttgtatctcagtgtaaaagatgtaatgagtaagcttcaagaatacgtagattacataaacgaaaatctaaacaagctatacacacggagtccggcttcaaaatatatcctccatgacgaaaaccttataggaagccttactttgactttcgacgaggcaacgttcggtgttgcttgtgatctcaattctccgggattccatgtattgtgcaaagcaactgaagaggctgttggacatgtgaaaccttactcaattaccggaagt

SEQ ID NO: 231676 - DNA, 371 bp, Gossypium hirsutum
gattcacatactcagccaaaagggctctgctttggagttctttctttcttgattgcttctggcgtactttgggttcccactctaatcatggtatccaagcacaatccatcggtcaacaaaaaacggagcccactatctatatttgctgttattgggttgagctgtttcttctacattctgggagcatggcagcgaagtggtttcagcaaaggagatagtatagcattggcagtgacaaagcaggcagactgcagtatcttcacaaatttgaactttgaaacacatcacaacgatgtagagattgttgagccttccaaaccaaaagctcacgtgtttaagccgtgtgatgtaaaatacactgattacacccc

SEQ ID NO: 231677 - DNA, 424 bp, Gossypium hirsutum
  unsure (1)..(424): unsure at all n locations
gaggcttgctcgaaaacctatactctctgattatctctcttcttcgagccgctaggtcgtactgttttagcttcaagtctctcttttttgaaagttcctagttaatactggataatgggtaaggagaaggttcacatcaacattgttgtcattggccatgttgactctggaaagtcaaccacaacgggtcacttgatatacaagcttggaggtattgacaagcgtgtgatcgagaggttcgagaaggaagctgctgagatgaacaaaaggtcattcaagtatgcctgggtgctcgacaagttgaaggctgagcgtgagcgtggtatcaccattgatattgccttgtggaaagttgagacaaccaagtactactgcactgtcattgatgctcctggacatcgcgactntattaagaatatgatta

SEQ ID NO: 231678 - DNA, 454 bp, Gossypium hirsutum
cgagagaattctacagaaagtgaaaaagaaagcgttttttttttctctgtaatttatgcaaacgggaaatctgccacaatctctctcgatgaattcgccttttggaggaccgagcgcgtcgaatccaactgttgccggagctccggcgaataaggatcggaaaatggcaacggcagagcatttagttctcgatctcagcaaccctgatctccgagaaaacgcacttctggaactatcgaagaacaaggaattatttcaagatttggctcctttcgtgtggaattcttttggtactatagctgcactcattcaggagatagtttcaatttatcctgttctctcacctccaaatctgactccagctcaatccaatcgagtttgtaatgctcttgctctgcttcagtgtgtagcttctcatccagacacaaggatgttattcctgaatgctcatata

SEQ ID NO: 231679 - DNA, 386 bp, Gossypium hirsutum
cttgaaggctgaagctatggagggtaaaaatgcgaatctggaagcggcgatcgaccagttgcttaatgttgagaagcagatgcggtttgccggcgatgtgattggctccaagaaagcggtctctgacattttgcagctctgctttgaagctaaggattggaagtctctcaatgaacagatcgttaatttgtctaagaaacgtggtcaacttaagcaggcagtgactgcaatggttcaacaagcaatgcaatacattgatgaggcaccagatcttgaaactcgtatagagcttatcaagaccctgaacactgtgtctgctggaaagatttatgttgaaattgagagagcaagattgatcagaagacttgcaaagattaaagaagaac

SEQ ID NO: 231680 - DNA, 352 bp, Gossypium hirsutum
gataaagtctccccggccaaccagggctgaggccactgacgttgccaatgcagttcttgatggtacagactgtgtgatgttaagtggtgaaactgcggctggagcttacccggaacttgcagttcgaaccatggccaaaatatgcgtacaagcagaaagcacacttgattatggagatgtcttcaaaaggattatggaacactcaccggttccaatgagtccattggaaagcctggcttcttcagctgttagaacagcaaattcagcaaaagcagctcttatcttggtcttaaccaggggaggaagtaccgcaaaattggtggctaagtacaggcctggcatacccatttta

SEQ ID NO: 231681 - DNA, 451 bp, Gossypium hirsutum
  unsure (1)..(451): unsure at all n locations
aagggtggtgagaccagcacgaacagcatagcatctatctttgcttggacgcgtgggcttgcacacagggcaaaattggatgacaatcctaaactcttggatttcactgagaaactagaggcagcttgtattggaactgtggaatctggaaagatgaccaaagatcttgcactaatcattcacggctctaagcttgctagggacaagtacctgaatactgaggagttcattgatgctgttgcagcagatctaaaagcaagactttcttaagcataaatttgaaaatggtcgaaaatggaaaggggtggttttgcgggtttgcaggaaaaataataataaaaagcatcagtggaggtggcgtggatgaggtgaggatggcggttgtcaatagatgaatntaatcaccattttatgagatacagagacgagcactctctcacttgattcatct

SEQ ID NO: 231682 - DNA, 456 bp, Gossypium hirsutum
gtcatctctgctgagaaggcttaccacgagcagctctcagttgctgaaatcaccaatagtgcctttgagccctcatctatgatggctaagtgcgatccacgccatggaaagtacatggcttgctgtttgatgtaccgtggtgatgttgttcccaaggacgtcaatgctgcagtcgcctccattaagaccaagcgcaccattcagtttgtcgattggtgtcctactggattcaagtgcggtatcaactaccaaccacccactgttgtccctggtggtgatctcgccaaggtccagagagctgtttgcatgatttctaactccaccagtgttgctgaagtcttctctcgcattgaccataagtttgatcttatgtatgccaaacgtgccttcattcactggtatgttggtgagggtatggaagaaggagaattctcagaggctcgtgaggatcttgct

SEQ ID NO: 231683 - DNA, 457 bp, Gossypium hirsutum
ctctctgtagccgccgcctgcgtctctctcttcatctctctgaaccaaaaagtctttagcttttcgcttcgagagagaccatgttggtttaccaggatctcatctccggtgacgagcttctttctgactcattcccctacaaggaaatcgagaatgggatgctgtgggaagttgagggaaagtgggttgtgcaaggagctgtcgatgttgacattggtgccaatccttcagccgaaggtgctgatgaggatgaaggtgttgatgaccaagctgtgaaggttgttgacattgttgacactttcaggcttcaggagcaaccccctttcgacaagaagcagtttgtcgtgttcatcaagaagttcatcaagaacttgacaccaaaactggatgcggaaaagcaagagtccttcaagaaaaacattgagggagcaaccaagtttttgctttcaaaaatgaa

SEQ ID NO: 231684 - DNA, 428 bp, Gossypium hirsutum
gaacttgacaccaaaactggatgcggaaaagcaagagtccttcaagaaaaacattgagggagcaaccaagtttttgctttcaaaattgaaggaccttcaatttttcgtaggagagagcatgcatgatgatggatgcttggtgtttgcttactacaaggatggtgctgttgacccaacatttttgtactttgcatatgcattgaaggaggtcaagtgctgaggtttgaagcaaagaaaaaaaaagtggttgctgaagaatttagtcctttttattattgcttttgtctcttgttttcagtactctgctaaagacataaattatttgtgggttttgatgtttttggtttaattggttggtggtttatcatggaatggtttctatttttatgggttggctaaacaataatttaactcttttgtctattact

SEQ ID NO: 231685 - DNA, 358 bp, Gossypium hirsutum
tgttcttttcaccaaaactggatgccgaaaatcaagagggcttcattaaaaacattgggggggcaaccaattttttcctttcaaaatttaatgaccttacatttttcgtaggagagagcatgcatgatgatggatgcttggtgtttgcttactacaaggattgtgctgttgacccaacatttttgtactttgcatatacattgaacgatgtcaagttctaatgtttgcatcaaaaaacctaactttttcaactgttaaaacaactaattcatctaatacagctcttatcttggtcttaaccatgggaggaagtaccgcataatttgtggcttagtacaggcctggcatacccatttta

SEQ ID NO: 231686 - DNA, 453 bp, Gossypium hirsutum
catcactctttttattttcactcacttcacctgagattttgttttcttttgtttttcagtaatggggaagattaagatcggaattaacggatttggaaggatcgggcgtttggttgcgagagttgctctccaaagcgaagatgttgagcttgttgctgttaatgatcctttcatcaccactgattacatgacctatatgtttaagtacgacagtgttcacggtcaatggaagcaccatgagcttaaagtgaaggactcaaagactctcctctttggtgaaaagcctgtcactgtttttggcatcaaaaaccctgaggaaattccatggggtgaggctggtgctgaatatgttgttgagtctactggtgtcttcactgacaaggacaaagctgctgctcacttgaagggtggtgcaaagaaggtgattatttctgctcccagtaaggacgcccc

SEQ ID NO: 231687 - DNA, 415 bp, Gossypium hirsutum
  unsure (1)..(415): unsure at all n locations
cttttgctcactaactttgattttgatgtctattttcgctttctcaatcgccattgctaactccaaaactctcaagagagatgtnaaagccttaaatgagataaaggcatcacttggatggagagtggtatatgcatggattggcgaatatcccttgctgagaggagatgaagcaaagtgggttgtgcaaggagctgtcgatgttgacattggtgccaatccttcagccgaaagtgctgatgaggatgaaggtgttgatgaccaagctgtgaaggttgttgacattgttgacactttcaggcttcaggagcaaccccctttcgacaagaagcagtttgtcgtgttcatcaagaagttcatcaagaacttgacaccaaaactggatgcggaaaagcaagagtccctcaagaaaaac

SEQ ID NO: 231688 - DNA, 413 bp, Gossypium hirsutum
ggcaaagcacagccaaaatgtcgtcgtttttgcaatcacttttggatccgaagaagagctggttagcttctctgcatatgaaagcccttaccacacgcctccgcaaatacggccttcgttacgacgatctgtacgatccttactatgacttggatatcaaggaggcgttgaatcggctgccccgtgagattgtcgatgctcgtaaccaacgccttaagcgtgcaatggatctctccatgaagcacgagtatctccccgaagatcttcagaaaatgcagacaccatttaggagctatcttcaagatatgcttgctcttgtgaagaaggagagagcagagcgagaagcattgggagctttgcctctgtatcagcgaaccattccttaagggttttcatgccgtatctcatagtca

SEQ ID NO: 231689 - DNA, 390 bp, Gossypium hirsutum
agcaaatccaaggaatagaagaaaatggcgaggtacgatagagcaatcacagtgttctcgccggacggccatttgttccaagttgaatacgccctcgaagcagtccgtaaaggtaacgccgccgttggtgtccgcggcactgacatcgtcgtcctcggcgtcgagaaaaaatctaccgccaagctccaggactccagatcggttaagaagattgtgaacttggataatcacattgcactggcatgtgctggcctcaaagccgatgctcgagtcctcataaatagggctcggattgaatgtcaaagccacaggctgactgttgaagatccagttactgttgagtatattactcgatacgttgcaggtcttcagcagaagtacactcaaagc

SEQ ID NO: 231690 - DNA, 349 bp, Gossypium hirsutum
acccttccggcaggtgttgcctttgttggaggctttctttaacaattggttcaagggaagtccatggaggattgcttaaaacctggttgctttgcatccaacgttttcatccaaaggtctggctgcccatacccagaaaagcctgaatttaaataaagctagtccactttcctgatctcctctccgctgtggttttcaagtttctgaatggttaagaaccctcttgctagcatttgatctttgaattttgttttattttttcctatttgctggtgtaatttcgatgcctgcatcttgaaatgcatatgagaatacatttatgttattcatgaagagcagtcgttcattc

SEQ ID NO: 231691 - DNA, 361 bp, Gossypium hirsutum
cggacgcgtgggcccgaatattaagaactggcagattgaaagctatggaaaggcacaacagttccgcagaccaaaagttcacttgcgctgtagtcctggacaatccatctctttcattaaattcgccagttttggaactcctttgggaacttgtggaagttaccaacaaggcccttgccatgctcctgctacatatgccatcgtggagaagaaatgtgtagggaagcaaagatgtgtggtcaccatagccaacagtaacttcgggcaagatccatgcccgaacgtgttgaagcgggtgtctgtggaagctgtttgtgctccgatatcttcaacaacagcacaggcaaactggggaggctta

SEQ ID NO: 231692 - DNA, 451 bp, Gossypium hirsutum
gtagctatccaggccgtgctctcactttatgccagtggtcgtacaaccggtattgtgatggactcgggtgatggtgtcagccacacagtgcctatttacgagggttatgccctcccacatgccattcttcgtcttgacttggctggtcgagacctcactgattacttgatgaaaattctgactgagcgtggatattccttcaccaccacagccgaacgggaaattgtgagagatgttaaggaaaagctgtcttacattgcccttgactatgaacaggagcttgagaccctcaaaacaagttcatcagtagagaagagctatgagttacctgatggtcaggttattaccattggtgctgaacgtttcagatgccccgaagtgcttttccaaccatccttgattggtatggaagctgcaggcatccatgagactacatacaattcaataatga

SEQ ID NO: 231693 - DNA, 405 bp, Gossypium hirsutum
cactccttgtgcaccgggttcctatgaagttagtccagagaatgcaccttgcaagtctcctaacttacatatttgtatgccctgcagcattggttgccctgctgaaatgtaccaaaaatcgggatgtactttgaagtcagatcgagtttgtgattacaattgttctagttgtaactcagtggaatgcgtctcaaattgttcttcgaattctgaagctactaatggaagtaagaatgaaaggttttggtcactgcaattgccgatcattgtcgcggagattgcttttgctgtgttactgctgatcatcgtgtccttaactgcagttttatatgtccgatacaggttgcagaactgtcgctgcaaagcaaaagagtcgaagtccaagaaagctaatgagattgcttc

SEQ ID NO: 231694 - DNA, 436 bp, Gossypium hirsutum
aattgtttgagctagctagctcttactcaaatggcaaccaaaacgatgatgttgcaaatattttcacttttcttctttttgttcagtatctgcaactccattttccttggtgctaatggagatgacaatggtggttggcaaactgcccatgccaccttctacggtggtgctgatgctaccggcacaatggggggagcttgtggttatggaaacctgtacagtcaagggtatggaacgagcacagcagctttgagcactgcacttttcaacaatggcttgagctgcggtgcctgctacgagctccggtgcaacaatgatcctcaatggtgcattagtcgaaccataaccgtgacagccaccaacttttgtccccctaactatgctttatctagtgacaatggcgggtggtgcaatcccccacgagaacactttgatt

SEQ ID NO: 231695 - DNA, 434 bp, Gossypium hirsutum
ggcagctccttatccggaaccagagaccgcagggagctcaagcagccatgggagcttacaagtacgtgtcagagctatggaggaagaagcaatccgatgttatgaggttcttgcagagagtgaggtgttgggagtaccgccaacacccgtccattgtgcgagttaaccacccaactcgtcctgacaaggctcgtcgcttgggatacaaagccaagcagggttatgttgtctatcgtgtccgtgtgagacggggtggaaggaagagaccagtacctaagggtattgtgtatgggaaacccacaaaccagggtgtcactcagctgaaatttcagcgcagcaagcgatcagttgcagaggagcgagctggtcgaaagcttggaggccttaaggtcgtaaactcatattggatcaacgaggattcaacatacaaatac

SEQ ID NO: 231696 - DNA, 404 bp, Gossypium hirsutum
  unsure (1)..(404): unsure at all n locations
ctaatattttttttattgtcgtctccggcgttcgaagatcataaaaaaccggagtcgtttcaaatggctacgagaacggatctagatgggaggccaataaagccgatgacgatatgcatgatcggtgccggaggcttcatcggctcccacctttgcgagaaattgatgtcggagacgccgcacaaggtgctcgccttggacgtttacaatgacaagatcaagcaccttctcgagcctgactctctcccttgggctggccgtattcagttccaccgacttaacatcaagcacgattctaggctcgaaggcctcatcaagatggcagatctcgtgataaatcttgctgccatctgtactccggcagattataatacgcgtncactagacacgatttacagcaattt

SEQ ID NO: 231697 - DNA, 523 bp, Gossypium hirsutum
cggtccggaaattcgccgtggtcgatcccacgcccgtccgagacacagtgttacgtgctgtgatctgctatccattcgaagaactgtgagcagccgcgcactattcaagcgcgaagcttttagtgttgtggacggcgtctccaaaatggatcacttttgtccacagcattacaatggtagagttcgttaaagcgcttgaacacattgcgccagtgatctcaataacccgacgccgaaaccaaaattgggtctttggaaactatgacctttagctagagtcatgggtgacatggtattgcttccaaacggcaaagttttggtcatcaacggagcacgttccgggtcagcaggatgggacttaggaagggacccggtcttaaatccagtgttatacatgcctgataatgaaatcgagtcacgattcaagatactaaacccaacaaagatcccttcgatgtaccattccacagcagtattacttcgtgatggaagagttttagtgggtggaagcaatcctgatgcg

SEQ ID NO: 231698 - DNA, 390 bp, Gossypium hirsutum
  unsure (1)..(390): unsure at all n locations
gaagttccagaaagaaccaagaagagccctggaggtccctggacattttgtgggctgttgcctttatttgatcctccaagacatgatagtgccgagaccatccgtagggccttaaaccttggagttgatgtaaagatgattacaggtgaccagttggccatcgcgaaggagacaggaagaagacttggtatggggacaaacatgtatccttcttcatcattgttgggtcgtgaaaaggatgagagtgaagctcttccagcagatgaactcattgagaaggcagatggctttgctggcgtattccctgaacacaagtatgaaatcgtaaagattttacaagaaaagaagcatgttgtgggaatgaaccgagatggngtgaacgatgcacct

SEQ ID NO: 231699 - DNA, 341 bp, Gossypium hirsutum
tgaggttcctcctgctgcaaacccttactgctgattttctgtatcatttggctgccaagatggacttgaaaatggaaattttttcccttggtgatctgtcaaaaacaattgggaagattttgacagacatgtcaagtctctatgatgtagggcgtcgaaaacggacggtggggttattacttgttgaccgtacccttgaccttcttactccatgctgtcatggtgattcacttgtagatcgtatcttttcaactctgcctcgtaaggaaagaacatctgcctgtgcatgtatcaaatgctcacaggcccaacttaaacctggtccttctagcctagcacgt

SEQ ID NO: 231700 - DNA, 391 bp, Gossypium hirsutum
agcgctagatgtcttaaatgaatggcttaatgtgcttcaatcgattcaaatcccttttgctcttatcccactactttgtttggtttctaaggagcaaatcatgggtactttcaagattggctctgtgctcaagacaattgcatggctcgtggctgtactggtgatagtgatcaacgggtaccttttatttgacttcttctctaacgaagtcactggcgtaatgttcacaagtatagtgtttgcatttaccggcgcatatatcgcatttattttctaccttgtttcttggggttttgcttcatccgcttggcgccgcttgtcaccctcgaaataagcagggaatccagtgatcaatcttacccttctcaagccacgagatcagcctatcgag

SEQ ID NO: 231701 - DNA, 437 bp, Gossypium hirsutum
  unsure (1)..(437): unsure at all n locations
cgcgagactccccaccaaccatttcctccccgatggcggctttttcgtttttgccctccgcccatattgcgcctaaacccacgcttcatttcatcaaagcctccacttccgatctccccaaaacccctccatcaccgatcctgcctcctccgatgaatcctactctctcgacgagatcgtttaccgatctcaatctggctccctccttgacgtccagcacgacatgtccgccctcaaacacttcgacggcgcttactggcgaaacctcttcgactcacgtgtcggaaagactacttggccgttcggttccggtgtctggtcgaaaaaagaatgggtattacctgaaatcgacgatgatgatatcatctctgcttttgagggtactctaacctcttctgggctgaaacgtatggcaaagacttcttangaatgaatga

SEQ ID NO: 231702 - DNA, 435 bp, Gossypium hirsutum
gaaactttgaaggacgtgtacaccctttgacaagggctgactatcttgcttctcctccggcttgttgttgcctatgctcttgctggcactgtagatattgattctgaggcagcacccattggtacagggaaagatggaaaaaagatctttgtgagggatatttggccttctagtgaagaagtggctaatgttgttcaatcaagtgtgctgcctgatatgtttaaagctacatatgaagcaatcaccaaaggaaatcccatgtggaatcagttatctgtaccctctggtagcctttatgcgtggagcccaacatcaacttacatccatgagccaccctactttaaggacatgaccatgtcacctccaggtccacatggagtgaaggatgcctactgcttgcttaactgtggagatagtatcacaactgatcacatc

SEQ ID NO: 231703 - DNA, 394 bp, Gossypium hirsutum
  unsure (1)..(394): unsure at all n locations
ctcggggaaagatcgattcatcagtcttcttctctgagtagaggttttggatttgtaagcatttacaatgtcttcgtcctatctcccagcaaccactgactcaattgctctggccttagaagccaaaacaccatctgaagccatctcaatcctttaccgtgtactagaaaatcctgcatctgctcccgatgctctacggattaaagagcaggccataacaaatctatctgatcttcttagacaagagaaccgagcagaggagctcagaagccttctgacccaactgaggcccttttttgcactaattccaaaggcaaaaactgctaaaattgtccgtggtataattgatgatgtagctaagataccaagaacatcagatctncagatttctctt

SEQ ID NO: 231704 - DNA, 354 bp, Gossypium hirsutum
gtctcttcatctcccacttctcaaaaccctaattatatttttttatttcccattttgattcagaaatcgaagcttgccaatggccaacagtaatctccctcgaagaatcatcaaggaaactcagcgtctcctcagtgaacctgctccgggaattagtgcttcaccatcagaggataatatgcgatatttcaatgtgatgatccttggtcccacacagtctccatatgaaggaggggttttcaagttggaactttttttgcctgaagaatatcccatggccgctcccaaggttcgatttcttacaaagatatatcatcctaacattgataagcttgggaagatatgccttgatat

SEQ ID NO: 231705 - DNA, 329 bp, Gossypium hirsutum
acggtactctcttttctctctctctctctctgtctctcgcgtcggtcgtttcttttcttttcatttctttacgagggtggtcaatatggggtcttcgattttgccagatctcggagctgagatcttgatccccgtttgcgccgttattggaattgccttttctcttgtacaatggcttcttgtttccaaggtgaagctctacccgggtcgagactcgggttcccccggtaacaacggtgcgggtgggaaaaacggctattccgattacctcattgaagaagaagaaggtcttaatgaccataatgttgatattaaatgtgctgcaattc

SEQ ID NO: 231706 - DNA, 408 bp, Gossypium hirsutum
ctttgacacggtggatttgagattttcattgggtgaggagaaaacaattgttgcttcaaaaataactgtgttcccccgtgttgaaggttcttctgctccattggttttggatggggtagatctgaagctaatttcaatcaaggttgatggcaaggaactgaaggagggagattatcatttagactcacgacatttgacacttccatcaccaccacaaggcaaatttactttggaaattgatactgagatacaacctcagaacaacacttcattggaggggctctacaagtcatctgggaatttctgtacacaatgtgaagctgaaggcttcaggaaaattacattttatcaagaccgtcctgatataatggcaaaatacacatgccgtatcgaagctgataagttact

SEQ ID NO: 231707 - DNA, 388 bp, Gossypium hirsutum
cccacgcgtccgcggacgcgtgggaaaagactgttgatggtccttccatgaaggactggagaggtggtagagctgcttccttcaatatcattcctagcagcactggagctgccaaggctgtcggcaaagttttgccagcactgaatggcaagctgactggaatggctttccgtttcccactgttgatgtctctgtggttgacctcactgtgagacttgagaagaaggctacatatgatgaaattaaggctgctatcaaggcggaatctgaaggcaacttgaagggaattcttggttatgtagacgaagatttagtctcaactgacttcatcggagacaacaagtcaagcatttttgatgccaaggctggaattgctttgaatgacaac

SEQ ID NO: 231708 - DNA, 436 bp, Gossypium hirsutum
cggacgcgtgggttgaaacacaaaagaccaaagagatggatagatcaaggttgcggtctctcaccttgctttgcactttggttcttcttggatctctagcttctactcaggcaaagaagtccaaggaagatctgaaagaagttactcacaaagtttactttgatgttgaaattgctggaaaacctgctggtcgaattgtcatgggactcttcgggaaggcggttccaaaaacagcagaaaacttccgagcactatgcacaggtgaaaaaggtgttggaaagagtgggaaacctctccacttcaaaggaagtgctttccaccggattattccaaacttcatgattcaaggtggtgattttacacttggtgatggaagaggtggagaatcaatctatggtgagaaaattgctgatgagaatttcaaagctgaacacac

SEQ ID NO: 231709 - DNA, 417 bp, Gossypium hirsutum
  unsure (1)..(417): unsure at all n locations
aactacttcttcagttcagaggagcggctgtcttggcaccatggttctcaagactgaaccatgccgcttcagcggtggcaagatataccctggtaagggtatcagatttattcgctcagattctcaggtgttcctctttgcaaactccaaatgcaagaggtacttccacaaccgtctcaagccatccaagcttacttggactgcaatgtacagaaagcagcataagaaggatattgcagcagaagcagttaagaagaggcgccgcaccacgaaaaagccctactcaaggtccattgttggtgctacactagaggtgattcagaagagaagaagtgagaaacctgaagtccgagatgcttgcgcggaagctgctctgcgtgaaantaaagagaggattaagaaaactaaggatgaaaa

SEQ ID NO: 231710 - DNA, 437 bp, Gossypium hirsutum
  unsure (1)..(437): unsure at all n locations
natcgggtaccctgaaggagaggctttttaatgctgcctacaactctaagaagcaagcaataatgaatggaaagagtccttctcccatatgggacagattggtattcaacaaaataaaagctagacttggaggacgtgttcgttttatggcttccggtgcttcacccttgtctcctgatgtcatggacttcttgaagatatgctttggtggtcatataattgaaggttatggaatgaccgagacatcatgtgtcataagttgcatggatgagggtgatattctttctggccatgttggctctcctaatccagcttgtgaaataaagcttgtggacgtcccagaaatgaactacacatcagatgaccagccttatcctcgtggagaaatctgtgttaggggtccaattgttttccaaggatattacaaagatgaaatg

SEQ ID NO: 231711 - DNA, 385 bp, Gossypium hirsutum
  unsure (1)..(385): unsure at all n locations
aaagaaaagaaaaatggagaggagcacacccgtgcgaaagccccacacctcaaccgccgacctgctgacgtggacggagggttcacaatctgcctcctccaactcagccgcttcctccgcctccgcccagcgttcctctggtcgttacaaccagccatcggatagaatcagtaaagtgctatttggaggtcaggtaactgatgccgaagctcaatctctcttgaacaagaagccatgctcgggttacaaaatgaaagagatgactggtagtggaatttttgctgctgatggtgccaatggggcatttgaaactactgctatgaattccactaacaaaacangattgcggatgtatcagcaagcaatgaatgggatagccaaatat

SEQ ID NO: 231712 - DNA, 392 bp, Gossypium hirsutum
cctcttagcaaagacttcagccacccacgcaggccctttaccgatccaaacaatgggacgcgtccgtacgaagactgtgaagaaatcgtctcgtcaggtaatcgagaggtactactctcgcatgacgcttgatttccacaccaacaaaaaggttatcgaagaagtagctattatcccatccaagaggctccggaacaagattgctgggttctcaacccatttgatgaaacggatccagaagggtccggttcgtggcatttctctgaagcttcaggaagaagagcgtgagcgtcgtatggattttgtccccgatgtatcggctattgctggtgaattcaatagaagttgataaggaaaccattgatatgctttcactttttgaatggccgatc

SEQ ID NO: 231713 - DNA, 329 bp, Gossypium hirsutum
tgactggtctccacacagtggctgatgtctactgctgtgattgccgtgaagtgttgggttggaaatacgagcgggcttatgaggaaactcagaagtacaaggaagggaaattcattcttgagaagtcgaaaattgtcaaagagaactggtagggttatccatgaatgttttctggatgattctcctcattaaccaagtgtatggatgatatctttctgtgtttttcttcccaatcgaaaatattttatgcattgttcttccctgtgcattcttgctatgttccttgattggatgttattcgttttgttaataaaatagtgaatgatttg

SEQ ID NO: 231714 - DNA, 435 bp, Gossypium hirsutum
gttctctcccaactatctcgcccttcactttcacgtccactcctcaaatcaatcgcagccgtccacaacatcttcctccttaccctttctttcatcatggccctgggttgcctcgtttccatcttctcccaggtgcctaacttcaacaccctcgtttgcttccctaggggtacatccccatcgggccctctctttttctgggcatacatcttctacctctccaagattgttgaattcatggacacccttttgatcatcctcagcggatccatgaagaggctatccttccttcacgtctaccatcactccatggtggtcatcatgtgttatatttgcttagacagtgctcagtcctccgtacccatggtgctgatcaccaactgcgtggtgcatgtcgtaatgtactcctattacctgttgtgcaccctggggatg

SEQ ID NO: 231715 - DNA, 417 bp, Gossypium hirsutum
ctctgctcgaaatcttcttcattctcattctctctccactgaactcttgctaaacggtatcgttttagtcagtctttcatcaatggcgaaagaaccagttcgcgtcctcgttactggagctgcaggacaaatcgggtatgctcttgtacccatgattgctaggggagtcatgttgggtgctgaccagcccgtgatccttcacatgcttgatatcccacctgctgcggaggctttgaatggtgtcaaaatggagttggtggatgctgcatttcctcttctaaagggtgttgttgctacaactgatgctgttgaggcatgcactggagtcaatgttgctgtcatggttggtggtttcccaaggaaagaaggaatggagaggaaagatgttatgtcaaagaatgtgtctatttacaagtc

SEQ ID NO: 231716 - DNA, 411 bp, Gossypium hirsutum
cacaacgcgaaggccatcgaagaacgaaacaaggagtgggaagcagcaccgaagatattcgagtacaaggatgctggtgtgaactgcgtggcggtggggagctctcccaggttcaaggtatacgatgtggatttcgggtggggaaaaccggaaggggtgaggagcggatccaacaacaggtttgatgggatggtgtatttgtatcaagggaagagtggtggacggagcattgacgtggagatcgccttggaagctggagcactggagaagctggagaaagataaggagtttgtgttggaagtttagatcaataatcaagaccattgttatcatttgtcttgtctttcgtgattttgatcacaacaaatgttatgtttgttaacatttcttacgctatccccaagttggtac

SEQ ID NO: 231717 - DNA, 429 bp, Gossypium hirsutum
caagttttactcctgttttctggcttacaccattatttgagctttagaagaggctatcttgagaagctttgagttctgatgtctccgctgttgcttggtgtggaggaggaagggcagagtagggtttcttcttcatctgttgaatgtatctcccaaaatggcttggggataagggagtggaattatcttggattatcagatttttgttcagttgacagctccggtgtcctggatgataatgggaataacctgaatttgaaagccacagagctgaggcttggtcttcctggatcccagtcccctgagagagaaactgagctttgctttctaaactcgggaaaacttgatgagaagacactgtttcctctacttccttctaaagatgtaatctgctcatcatcccagaaaagtgttgttactggaaacaaa

SEQ ID NO: 231718 - DNA, 365 bp, Gossypium hirsutum
gaaagtttcaatggcaaccctcaaagttccagttcacgttccttctccttctgaggatgctgagcaacttcggaaagcttttgaaggctggggtacgaacgagcaattgattatcgacatattggctcacaggaatgcagcacagcgcaattcaattcggaaagtttatggtgaagcttatggggaagatcttctcaagtgtttggagaaggaacttacaagtgatttcgagcgggctgtgctgctttttacgttggaccctgcaaagcgagatgctcatctggctaatgaagctacaaagaagttcacatcaagcaattggattctcatggagatagctcgcagtaggtcttcgcatgaactac

SEQ ID NO: 231719 - DNA, 441 bp, Gossypium hirsutum
  unsure (1)..(441): unsure at all n locations
ggcctctcgttggtactgcctcttttttgttctatttgtcctgattggggtctactttgtcacaaatttgatccttgctgttgtatatgatagcttcaaaagcgagaatgttgggttcctaaacaaagagcaatgcattcatctgtttgaagaactgaataagtacaggtctttgccaaaaataacaagggaagaatttgagttaatatttgatgagctggaatgatagtcatgacttcaagatcaacttggatgaatttactgatctttgcaatgccattggtctaagatttcaaaaggaggatgttccatctttgtttgaaagatttcaaatctatcgttcgcctttctctgaaaatttgaaagcctttgttcggngtcccaaatttggatacataatatccttcattctcatattgaatctgtttgcagttatcattg

SEQ ID NO: 231720 - DNA, 422 bp, Gossypium hirsutum
  unsure (1)..(422): unsure at all n locations
atttttattgccactgtttacttcatgtccaagccacgatgcatctaccttgtggattatgcatgctacaagcctcctgtgacttgcagggttccttttgctactttcatggagcactccaggttgattttgagcaacaatcctaagagcgtggagttccagatgaggattctggaacggtctgggctgggtgaagagacttgtttgcctcctgctattcattacatccctccaaagccaaccatggaggccgctagaggcgaggctgaggttgttattttctcagctatggattcgttgttcaagaaaacggngctgaaacctaaagacatagatattcttattgtcaactgcagtctcttctcccccacgccatctttgtctgctatggtgatcaacaaatacaagctgaggagtaacat

SEQ ID NO: 231721 - DNA, 357 bp, Gossypium hirsutum
gttatttgtattaagaatcgccctttagtgatcagtgaggtgaagaaaaatgtcttgctgtggtggaaactgcggttgcggctccggttgcaagtgcggcagcggctgcggcggttgcaagatgtaccctgagatgaactttgctgagcaaaccacaaccgggacacttgttcttggcgtggcaccccggaaaagtgcactttgatggagctgaaatggaaactggggctgaaaatggctgcaaatgtggagataactgcacttgcaacccttgcaattgtaaatgagaaaaaaaagctaagcatattatggaagctgatctaaataatatatgatgtatttgggtttttactatta

SEQ ID NO: 231722 - DNA, 389 bp, Gossypium hirsutum
cggacgcgtgggctcaaatcatacatttacatcctcctccactccctcgatatgatcctctaaaagaaaaaaacaaaatccaaacctaacccagaacttgcagcaaatcaattatggcgaccatgcccgcatccgcatcagatctgttgaagtccttcaaacttcaaaaccaagcaacaagaactcttgatccgagtctccatcctctgtctcgtctacatcttggcattcatcactcgtctcttctctgtcctccgttatgaatccatgatccatgaatttgacccctacttcaattatcgcaccactctgtacctcacggagaacggcttctacgatttctggaattggtttgactatgaaagctggtaccctttaggcccgatcgt

SEQ ID NO: 231723 - DNA, 441 bp, Gossypium hirsutum
  unsure (1)..(441): unsure at all n locations
caactaaaataatcaaaacccattgtatctttctccttgtttcactctgcagatcctcccccgttcattcattttgttccttttctcattgtcactctccacatcaatacttcccccaaatttttttttctaaaaacaatgtttcgaattcaaccgttggtttcggttttgctttgttgcttcaccttttggttccacatttcatttgggtacttgataacgtgctcggggatagttccgatgaggtaccggaacgataaggtatcgataacggatttcggcggcgtcggtgacggaaagacactcaatacaaaggctttccgggaagctatataccggattcaacatctgagaaggagaggtgggaccttgctttatgtgcctnctggggtgtacttaacggagagctttaatcttactagtcatatgactctttatttg

SEQ ID NO: 231724 - DNA, 426 bp, Gossypium hirsutum
agagactgcaagtgctgtatacagaaatagaatcagtccagatccaatatttttaacctctgaagctacatcagcgggagggttttatgccatcaacaggcgagggcaggtgttgctggctactgtaaatgaagcaacaatagtgccatttgttagcggtcaattgaacaatttggagcttgctgtcaatctagctaaaagaggaaaccttcctggtgcagagaacctggttgttcaacgttttcaagaattgtttgctcaaacgaagtataaagaagctgctgagcttgctgcagagtctccacaaaggatccttcgtacacctgatacagttgccaagtttcagagtgttcccgtgcaagctgggcaaactccaccgctgttgcagtactttggtacgcttttaactagagggaagctcaatgc

SEQ ID NO: 231725 - DNA, 437 bp, Gossypium hirsutum
ggtatctctaaagatggtcagactcgtgagcatgctttgcttgcttttaccctcggtgttaggcagatgatttgctgctgcaacaagatggatgcaacaaccccaaagtactcaaaggcaaggtttgatgaaattgtcaaggaagtctcttcttatcttaagaaagttgggtacaaccctgagaagatcccgtttgttccaatctccggttttgagggtgacaacatgattgagagatctacaaacctcgattggtacaagggtcctactctccttgaggctcttgaccagatcaccgagcccaagaggccctcagataagccacttcgtcttccacttcaggatgtctacaagattggtggtattggaactgtccctgttggtcgtgttgaaactggtgtactcaaacccggtatggttgttacttttggtcctac

SEQ ID NO: 231726 - DNA, 389 bp, Gossypium hirsutum
caccattcacgccgtccccccccccccccttttttttcattttgcctgattgttcgagttttagatttcttatataatcaactacctaatcctctcgctctctcaaccacaagctaactagcaaacacacacacattcctaacatctatggggagttcagggcagcaagtctcctggaaattggcggatcacccaacacttccaaaggggaagacccttgctctcatcgttctcgatggctggggcgaggacaaacccgatgagtacaattgcattcatgttgctcaaactcccaccatggattctctcaaacagggtgcccctgaaaagtggagattaatcagagctcatggtaaggctgtagggctccccacagaggatgacatggg

SEQ ID NO: 231727 - DNA, 411 bp, Gossypium hirsutum
aagaaactttggtttttgtttgtgttttaagtttcggatctttgcaaaagaaaggagaaagaagaaatgctagcagttttcgacaaatcggttgccaagagcccagatgctcttaatgctccagataaccctcaggctgtttctgctctcaaaaatggcttcttacctaatcactttgcctctgtttatcccggttctgtctccatcagtctcggctcttctggggttatggcttattctcttgaaaaacagaacccacttctccccagactgtttgcggttgtggatgacatattctgcttgtttcaaggccacattgagaatattgctgttcttaagcaacaatatggcttgaacaaaacagcaaatgaggggatcattgttattgaagcttaccgaaccctcagagac

SEQ ID NO: 231728 - DNA, 427 bp, Gossypium hirsutum
caaaaaagcttccaacattttgaagaaacaaagaatcaaacatgtcgaaggaagtgagtgaagaagggatgagccgaaaggactatgtggatcctccaccggcaccgctcatcgacgtggctgagatcaagctttggtctttttacagagctctcatcgccgaattcatcgctactctccttttcctatacgtcaccatagccaccgtcatcggccacaagaaacaacacgatgcatgcgatggtgttggtcttttgggtattgcttgggcttttggtggcatgattttcattcttgtttactgcaccgccggtatctcaagtggtcacattaacccggcggtgacatttgggttgtttttggctaggaaggtgtcgcttataagggcggtggcttacatggtagctcaatgtttgggtgctatttg

SEQ ID NO: 231729 - DNA, 441 bp, Gossypium hirsutum
  unsure (1)..(441): unsure at all n locations
cggacgcgtgggctttttcaataatttggctctgtctccatggagagtgataatggtgatggcaagtccaaaatggactatgaagttatagaacagattggaagaggagctttcggagctgcttatcttgttcttcataaacttgagaaaaagaagtatgtgttgaagaagattcgcctggccaaacaaacagagaagttcaaacgtacagctcaccaagagatggaattgattgcaaaactaaataatccgtatattgttgagtacaaagatgcttgggttgataagggaaacagcatttgcattggaaccagctactgtgaaggaggggacatggctgagcttattaagaaggcccgaggtatgcacttccccgaggagaaaatctgcaaatggatgactcaattactcttagccgnggactacctacactcgaaccgc

SEQ ID NO: 231730 - DNA, 376 bp, Gossypium hirsutum
atgggccctcttgcttctctgatagctcccagcttactctctgcagccatgattgccagacagcagtgtgtccgaggcgggcctcggggcttcagctgtggctcagccatcgtaggcagtggcaagagaggtgccttcagctcagtctccgtgtctggaggtgctggccgatgctcttctgggggctttggcagcaggagcctctacaacctcggggggaacaagagcatctccatgagtgtggctgggtcacgacaaggcgcctgctttggaggtgctggaggcttcggcactggtggctttggcggtggatttgggggctccttcagcggtaaaggtggccctggctttcctgtctgccctgcttggggaattc

SEQ ID NO: 231731 - DNA, 439 bp, Gossypium hirsutum
cccacgcgtccggcgttttccacctccgaagttgagagatttgtatagcagcttctcctctcaaccgccacgccaaacatgccttcacataagactttcagaatcaagaagaagctggccaagaagatgaggcagaacaggcctatcccttattggatccgcatgcgcaccgataacaccattaggtacaatgcgaagcgtaggcactggcgccgtaccaagctagggttctaagctttatgtgccttttttgtagttttgtactcacgcaaagctctgtttttttgtttatttcatgaaattttgatgtggcccttgaacgtttttatatgatggttattgacgatatttagccattgtttcgactgttgtctatctaatgttttgatttcgagctttgaatttttatgaaactgaatcatgatgttctttggaatta

SEQ ID NO: 231732 - DNA, 344 bp, Gossypium hirsutum
ctcaaatgatatggatttctacttttgtgtttttttcaacttgtattggatcgaagttttttgggattaatttttgtcgtatgcctaggcacaagagggtgttgattctctaataaaatgtaccacacagaatcttggattcagccaagaaaagcctgttgcagcatttacaatatacaaatgccttgttcactggagaacattagaagctgaaaggacaagtgtatttgataatcttattcagatgattggctcttcactagagaaacaagatgacaatgatcacatggcttaattggctgtcgaacacatctgctttgttgtttttgcttcaaagtagtttg

SEQ ID NO: 231733 - DNA, 308 bp, Gossypium hirsutum
ctctgatacggtcgtggagccttacaatgccactttgtctgttcaccaattggttgaaaatgctgatgagtgtatggttcttgacaatgaggccttgtatgacatctgtttccgcacacttaagctaaccactcccagcttcggtgatttgaaccatttgatatctgcaacaatgtctggagttacatgctgcttgcggttccctggtcagctcaacttccgatctcaagaaacttgccgtgaatctcatcccctttcctcgtcttcactttttcatggtgggttttgcttcacttacttttaaggga

SEQ ID NO: 231734 - DNA, 387 bp, Gossypium hirsutum
  unsure (1)..(387): unsure at all n locations
ccgccatcttcaataatttcttccgttgatctttgttagagattagctttttaatttttcattatgggaaagatcaagatcggaatcaatggatttggaaggatcgggcgtttggttgcgagagttgctctccaaagcgatgatattgagctcgttgctgttaacgatcctttcatcaccactgaatacatgacgtacatgtttaagtacgacagtgttcacggtcaatggaagcatcatgagcttaaggtgaaggactcaaagacccttctctttggtgaaaagcctgtcacagttttcggtatcagaaaccctgaggaaatcccatgggctgaagctggagctgagtatgtngttgagtctactgggtgttttactgacaaggac

SEQ ID NO: 231735 - DNA, 315 bp, Gossypium hirsutum
ttttctttttcaataatttattcccatcatcgtggggatatattagctgtggaggtggttataaatacacaaaaatcaatatctcaatcaatggattcttaacgatcggacattacattgatacatttgctctccaaaacaatgatattgatctcgttgctgttaactatcctttcatcaccactgaatacataacttacatgtttaattactactatattaactctcaatttaatcattattatcttaaagtgaaggactcaaatacccttcttttttttaaaaagccttgtcacatttttctctatcataaac

SEQ ID NO: 231736 - DNA, 350 bp, Gossypium hirsutum
ctcagatcctttcctcttagatcatcaaatccattcctttttttcaccaaaacatgagggaaatcataagcattcatataggtcaagctggtattcaagtcggtaactcatgttgggagctttactgccttgaacatgaaatccaacccgatggaatgatgcccagtgacacctctgtaggtgtagcaaatgatgctttcaacactttctttagtgaaactggttcagggaaacatgttcctagagctgtgtttgtggatctggaacctactgtgatcgatgaagttaggactgggacttaccgacaacttttccaccctgaacagcttatttctggcaaagaagatgct

SEQ ID NO: 231737 - DNA, 335 bp, Gossypium hirsutum
gaaaaagaaaagcaaaaaaatggctcatcgtatagcgttttctgtgtgtgtcgtttcgtattttttattcatcggtttgatatcgtcggaggctttctcggtcgtcggatcagaagttgatccgttgatcaggcaagtaacggacggtcaagatgatggagtggagacacagcctttgaccgctgagcatcacttctcgctgttcaaggctcggttcaagaaatcgtacggctcggaggaggagcatgattaccggttcaaggttttccgggcgaacttgagacgagcggcgcgtcatcagaagcttgacccgtccgcgactcacggtgtgactc

SEQ ID NO: 231738 - DNA, 425 bp, Gossypium hirsutum
  unsure (1)..(425): unsure at all n locations
aaggagtcgaccctccatttggtattgaggcttcgtggtgggatgcagattttcgtcaagacgttgactgggaaaaccataactttggaggtggagagttccgatacgatcgacaatgttaaggcgaagattcaggacaaagaagggattccaccagatcagcaaaggttgattttcgctgggaaacagttggaagatggaaggactttggctgattacaatattcagaaggaatccactctccaccttgtcttgcgtcttcgtggtggtttctaagctctcctatgaaaatgaggtttctggattttatgtgaatgattgtgatgtctggccctgttaaggcctcataaataaacctaaactattttatctatgtnttatctgatgtaatgatattatatgaataaaaaatacatggttacctt

SEQ ID NO: 231739 - DNA, 444 bp, Gossypium hirsutum
  unsure (1)..(444): unsure at all n locations
gccaaacaatcccctcaccactatcactgttaagtctcttcttgctctcaagttcccaatagcccaggacattgaataagtattaagtatgaaggtgcgagcatcagtgaaaaagatgtgtgagttctgtagaaccgttaagcgccgcggacgggtatatgtactatgcacttccaaccctaagcataagcaacgacaagggattttcaatttttgcttctgaatgcacactgccccctgcgacggcagagacaaatgtcaagcatccaatcattcccagttacagcatgcggccaggactagcatcccttattcctaaaatgcaagagccatcttcatcgattattgggtggagggctaacctggcatctctcatattcaaacgcggcaattagggaaaccacanaaagagatacatacaatcgcctacttaatattcaactg

SEQ ID NO: 231740 - DNA, 305 bp, Gossypium hirsutum
aaggtgtcttaataaacgccttctttcttctgcttcttattcctttattgctttttagaatttttcttaatcgaaaatgagagagtgcatttcgatccacatcggtcaggccggtatccaggtcggaaacgcttgctgggagctttactgtctcgagcatggaatccagcctgatggtcagatgccaagtgacaaaactgtcggaggaggtgatgatgcttttaacacctttttcagtgaaactggtgctgggaaacacgttcctcgtgccgtcttcgtggatcttgaacccactgttattgatg

SEQ ID NO: 231741 - DNA, 339 bp, Gossypium hirsutum
cccacgcgtccggtttctgtatataggttggacccaaagacctaacagagaaaaaccaaggagtaaattacagggcattaggtgatttgtttgttttagcagaaaaaagaaaggataacttccgctatgatgttgctgttcaaatgattgaaatttataatgagcaagtcagggatctccttgttatctacggaagtaacaaaagatatccttctgttcacttgattttatttcttacaaggttataaaactattgactgatcaaaagttggtcatttggtgtggaacctcttttatatagggttaaatagttgccacttgccggttaattttcgatcg

SEQ ID NO: 231742 - DNA, 169 bp, Gossypium hirsutum
gttaacacggtaacctttgccgataaaagcggcaatttgatatattccgggagtgatgataacctctgcaaggggtgggataggccttgctttttaacaaaaaataaacccgcaggaatcttggggggacacttggaaggttttacattcctccacagccggggggatg

SEQ ID NO: 231743 - DNA, 265 bp, Gossypium hirsutum
  unsure (1)..(265): unsure at all n locations
aagaaccggttcctcaatctctctaatcctcactttcttccccatcaaacacaccttcgattttcccaaggttgtagaagatggcagaaggtgaggatattcagccacttgtttgtgacaatggaactggaatggttaacgctggatttgctggggatgatgctccccgagccgtattccctagcatcgttggtcggccacgtcacaccggtgtgatggttggcatgggccanaaagatgcatatgttggtgatgaagctcaatc

SEQ ID NO: 231744 - DNA, 274 bp, Gossypium hirsutum
ggcgtcttgaacttggagggtcttcacaggcctcttttgtccatacagttgacgaagttgaaagatggtgttgcaatggggtgtgctttcaaccatgctgtcctcgacggaacctccacttggcattttatgagctcttgggctcaaatctgtaacggtacttcgagctccgtcgttgtgccgccgtttcttgatcggaccacagctcgaaacacccgcgtgaagctcgacctcagtccggttgtttcctgcaacggcgacgacgccaccaaac

SEQ ID NO: 231745 - DNA, 370 bp, Gossypium hirsutum
cgacgcctgggggtggtcttaagttgcaaccgaaagccaacagcaaaagagagagggcgaagcggctaccgcattaacgctattccctctaaattagaaaagaaatggagactttcaacatcccggcgacgccgtcattgatgaaggagttcctccgccagatgggaggcaccgctgttatcgacggtggactggcgaccgagctggaactccacggtgctgacctaaacgatcccctctggagtgccaaatgcctcctcacttctcctcaccttattcggttccgtacaccttgattaccttgaagctggtgcagatattattatcacagcatcctatcaggccacaattcatgggtttgaagcaaaag

SEQ ID NO: 231746 - DNA, 421 bp, Gossypium hirsutum
attcactctttggtctttttatctcaaatgcaatatgcccagtttggaaaaaacggtcatattcataaggcacaatgctggttggagatggatcgtcatccccttcagaaatcaaaactaagattggtggttttgtgttagttttagcaagatggtcgaatgctccgcgagcgatttcgagtaatccgtggtctacgaataggatcttagcttctgaatgtgcgagtaggactgaaaccatggccgagtcgagccgggaattaagcgtacaaagaacagctccggccataggaaccgcgaaatgcagctcgtacattgctggaacattgggagccagagttgaaacctgcttaatacaatttattagagaactcaaaatggaaaatttccaatttgattctttaattcaacatggcacctg

SEQ ID NO: 231747 - DNA, 402 bp, Gossypium hirsutum
cgttgaaaaaatatgggtttccaaagaaacatattgggtttccttttcttgatattggcttcactaacaagcctctcttctagccttcctagtgaatactccatagtggaacatgagattgacgcatttctttcggaggaaagggtgttggagatcttccaacagtggaaagaaaagaatcagaaagtgtcccggcacgccgaggaggctgagaaaaggtttgaaaatttcaaggggaatttgaagtatatcctagagaggaatgcaatgagaaaagcaaacaaatgggaacaccatgtgggattgaacaagtttgctgatatgagcaatgaggaatcaagaaaagcttactggtcaaggtgaaaaagcccatcaacaaatggataaccctgtcaaggaaca

SEQ ID NO: 231748 - DNA, 364 bp, Gossypium hirsutum
gggtaatgtagcttttatatctggctatcttggttgttgttaactggagaacctggatagtgcgctgcataccactactcaattcgaggcagtaacaagcaagatggaaaatagttcaaagcaatggcgtttcgaagggaacaaaaggccgaactcggcatcagcaatcagtgtgcgaggagttcttgatctggtaattggaaatctcagcaccgatgatctgagacccaccattcccctaggcaacggcgatccctctcaatttgcatgctttaggacttccacaacagcggaagaagccatatttgatgccgtccattcacccaagtacaatggttatgcacctactgttggagttctctct

SEQ ID NO: 231749 - DNA, 408 bp, Gossypium hirsutum
cccacgcgtccgggatcttctcagtcaggatatgcaccaccaggtcctcaatctgcgtatgcccctcagcagcagtatggcaagccatattcatatgtgcagtcacaaggaccccaaacatatggtcctccagccaatcaacctggagaagttccatatcaaggtccaactggccaatcttacagtccaaatgtgcctcctcagcagcaatacgcatatgcaagtggccccttgcaacaaagctatcctccatatggctctgcaccacccggtgatgggtataatcagcctccaccagtgactggcccagcgtattcccaacaaggtggacagtctgttcctggttacagtcaaccttctgctcagcaagctactccttatgcacaagcgaatactgctgctgggtat

SEQ ID NO: 231750 - DNA, 373 bp, Gossypium hirsutum
  unsure (1)..(373): unsure at all n locations
cgctctctagggttttcgtggtcaantaaaaaaaatgaaggtggtagctgcctacttgcttgccgtcttgggagggaacctttccccttctgccgatgatttgaaggatattctcggatctgttggagctgangctgatgatgataggatagagttgctattgtccgaagtcaaaggcaaagatatcaccgagctaattgcatctggaagggagaagttggcttcagtcccttcaagtgggggtgctgttgctgctgctcctaccgcatgtggcggtggtgccagtgctgcaccagctgctgaggccaagaaagaggagaaggtcgaagagaaaggagagtccgatgatgatatgggtttcagcctcttcgat

SEQ ID NO: 231751 - DNA, 456 bp, Gossypium hirsutum
  unsure (1)..(456): unsure at all n locations
agaaagatgaccaaaatgggttttattgttttggcgttgatggtggtttccgccgcgacggtggttacggcggctgacaatagtgggttatcgaatgagtgcagcaaagatttccagagcgtgatgacttgcttaagctttgctcaaggaaaagcagcgtcgccgtcgaaagagtgctgtaattcagtggcggggattaaagagaataaacccaaatgtttgtgttatattttgcaacatacacaaacctctggtgctcaaaatctcaaaagcttaggtgttcaagaagataagctgtttcagttaccatcggcttgtcaattggaagaacgctagcgtcagtgattgcccaaagcttcttgagttatctccgagctcaccagacgccgncatcttcaccaactcctcctctaaagcaacgacacccagtacttcagcaaccaccgcaacgccgtc

SEQ ID NO: 231752 - DNA, 433 bp, Gossypium hirsutum
gtgtttcttcagaaggaagaaaatcccatccggtatttgctctttatggtcgcatcttacttcttaaggagaaaaacaaacacgatcattgtcggctacactcccaaacactcaactctccttcctctcataaacaatttttgcccaattcttcaagaaaaagaaaccctagctaaacatggctgttcccaaactagaaatgagacctctcggaaacacgggcctcaagctcagcagcgtgggcttcggagcttctcctctcggcagcgtcttcggttccgtttccgaaagcgacgctgtcgcctccgtcctcgaagccttccgcctcggaatcaacttcttcgacacctctccgtattatggagcgacattgtcagagaagatgctgggtaagggacttaaagctcttggagttcctagaagtgaatatata

SEQ ID NO: 231753 - DNA, 450 bp, Gossypium hirsutum
  unsure (1)..(450): unsure at all n locations
aactcttctcaccttgttctcctcgctttcaagctgtctctctattgaagcagtgcaatgggtacgaaaagcaagactcagttcttcgcttttctgctactggtatccactgctcattccttctatctccctggtgttgcacctcgtgatttacaaaggggtgatcctctttatgtaaaagtgaataaattatcctctacgaagacacaacttccatatgactattactacttgaaatattgtaagccatccaagattgtgaacaatgctgagaatttgggggaggtactacgaggtgaccgcatcgagaactccgtctacacctttgaaatgagggaggatcagccttgcanagtagtctgtcgaataaaactcgatgctgattctgccaagaatttcaaggaaaaaaatgatgatgaatactcgagtaatatgatacttgataaccct

SEQ ID NO: 231754 - DNA, 337 bp, Gossypium hirsutum
  unsure (1)..(337): unsure at all n locations
gtttcgccgtcgttgcctaccatcaatttgctaagaaaatagattgacgatgggattaccaaatgcgagcgatgacttgtcaactgaagttgaggagaatcctttaaaacccctttttccctttggtttttttaaaaaccatctttaaaagtctttccgtcctgatgctcgtccgtttggaaaaccaaaaaaaaccacctttggccttggggctgtggattttgctaatggttcncaacttgcaaaaattggttcaactgcaagtttgtcgctttttctaaatacatatactgctttgatttggcaagcaattaaccttgagtttaataattaattc

SEQ ID NO: 231755 - DNA, 349 bp, Gossypium hirsutum
gggatgactggtccaatcgatgttgtggcaacgaatggagtccctcacaggtgtatggctgcacgggaaccacttcactggaacaatcccagagagaattggtaagttaactctcttgaaggatctcaatcttaatagtaacaaacttgttggcctaattcctattagtttagcaaatatgagactgcaaaacttagatttaaacaataatcacttgatgggtccaattccaatgttcaaagcatcaaaggtaacttttgcttcaaacaagttctgtcaagccactcaggggcttctttgctccccagaagttatggcacttatagagtttcttggagtgggaattacc

SEQ ID NO: 231756 - DNA, 269 bp, Gossypium hirsutum
acccttccggccatttaaaaattttattatccaaagtgccaggggtggaccttattaccagggtggccacttctacttgcaagaacattccgatctcatcaatgatattcctaacctgcctgcacctcgagtggatcacacccctgtcggtgacattattaaaaaagcctgtcatcttcgtcttgtgaaacccttcattggtggtggtcaaaacaaccacctgttaaccagtaattagggctttgattagaattattgggggggaaaaa

SEQ ID NO: 231757 - DNA, 526 bp, Gossypium hirsutum
  unsure (1)..(526): unsure at all n locations
gcgcgtcnnttcttcnntttcgtccttataacatgttgtcgctttgaggnngtttttatgtcatggtgtttagtgtcgtcnntctgaatgccttttatgcatatgtgcgtnnttttctttcttcttcttcatgtatccatccgtccgtcctgcctttccgcctcttctcattcgatggcatgccttccgattcgagtctgaccctattctctctcatccctctgatcagcctcaagggtttccaagccttggttttaggtggaaatttcaacctccttttttggtgccctctgtttcaactatgatcttcttcattacagaaatgcaactcaaggagtatccaacccatcaaagctacagctactgaaattcctcctacaattccaaagtcacggagcagtggcaagaccaagattggaatcaatggttttggtcggattggaagggtggttttacgaatagcaacttcaagggatgatattgatgtagtagctgtcaatgatccctttattgatgccaagtacat

SEQ ID NO: 231758 - DNA, 355 bp, Gossypium hirsutum
gaaagatgatcaaaatgggttttattggtttggccttgatggtgggttgcggcgcgacggtggttactgcggctgacgagagtgggttagcgaatgagtgcagcaaagatttccagagcgtgatgacttgcttaagctttgctcaaggaaaagcagcgtcgccgtcgaaagagtgctgtaattcagtggcggggattaaagagaataaacccaaatgtttgtgttatattttgcaacaaacacaaacctctggtgctcaaaatctcaaaagcttaagtgttcaagaagataagctgtttcagttaccatcggcttgtcaattgaagaacgctagcgtcagtgattgcccaaagct

SEQ ID NO: 231759 - DNA, 261 bp, Gossypium hirsutum
atggcgcagcgaacgagcagtgaccgcgctcttacctagctctgctccacgagcgcccacctgtctgcggccctgggccccacgcccggctttgcctaacagccacgatgatgttctcgggcttcaacgcagactacgaggcgtcatcctcgcgctgcagcagcgcgtccccggccggggatagcctctcctactaccactcacccgccgattccttctccagcatgggctcgcctgtcaacgcgcaggacttctgcacgg

SEQ ID NO: 231760 - DNA, 428 bp, Gossypium hirsutum
ctgaaaatgagtatcctgtggaaaacctcagtgattcagaagtcatgtcaccaacttctagacattcatgggattacatcaataggtttgctagcccttattcttccacacccttcagtcgcgtatcatgttctcctgagtcctcggtttgtagggaagcaaagaagcggctctcagagagatgggccatgatgacttcaaatggtagttctcaagaacaaagacatggcaggagaagctcaagcacattgggtgagatgcttgctctttcagatacaaagaaattggtgagatctgaagaagagggaagtagtaaggaacaagaatgtaggggatcaacttcctgtgtagctagtaatttgtatgaagaagaaagtacaagtgattctcccaaaaatattctgaggtcaaaatctgtgcctgggtct

SEQ ID NO: 231761 - DNA, 402 bp, Gossypium hirsutum
cacatgcaccgtcacctccgtcgtccaccgccggtacgtgtttcgattcgtagtgtggtgaatgtaaatcggtacgtgcttggatttgtgaataattgagttagggttttgatttatctgatttatttaaaagaagaaaaaaaaatatggagaagtacgagctggtgaaagacatacgatctgggaactttggtgtagcgaggctgatgcgtaacaaggaaaccaaagaacttgtcgccatgaattatatcgaccgtggccataagattgatgagaatgtggcaagagaagattataaatcatagatcgcttcgtcatccaaatataattcggttcaaagaggttgttttgactcctacacatcttgcaattgtggatgagtatgcttctggtggtgagctc

SEQ ID NO: 231762 - DNA, 300 bp, Gossypium hirsutum
tggagatgagactaaagtggaggaaacacggggtacatctgcgtttgtgggtactcctgagctcgtgtcccggaagcccacattccccgagaatagtagagcattgatggatatcctagtgacgctcatatacaaaagtggagatgagaggaccaaagcccgtgcaatgctttgtgatatttaccatcatgccctttttgatgagttttcaattgctcgtgatttgctactgatgagtcatttacaggataatattcagcatatggatgtttcaacacagatactttttaaccgggcaat

SEQ ID NO: 231763 - DNA, 318 bp, Gossypium hirsutum
cttgtacattaattacgcatttttatgtagatggaattttttataactaatattaattgtacttttaaagaattctttagatttttataataatgggagggggaacgcatcgtccgacgatggatctgctgcgatcggagccaatgcagttggtgcaacttaatcccgattgagtcagctcatcgttccatttcttatctcggtgatctcggcttctttcaattcaaagaccttaattcagagaagagccctttccagagaacgtatgctacacagatcaagagatgcggggaaatggcacgcaagctacgtttcttc

SEQ ID NO: 231764 - DNA, 399 bp, Gossypium hirsutum
gccaattgtttgagctagctagctcttactcaaatggcgaccaaaacgatgatggtgcagatattttcacttttcttctttttgttcagtatctgcaactccattttccttggtgctaatggagatgacaatggtggttggcaaactgcccatgccaccttctacggtggtgctgatgctaccggcacaatggggggagcttgtggctatggaaacctgtacagtcaacggtatggaacgagcacagcagctttgagcactgcactcttcaacaatggcttgagctgcggtgcctgctacgagctccggtgcaacaatgatcctcaatggtgcattattcgaaccataaccgtgacagccaccaactttttgtccccctaactatgctttatctaatga

SEQ ID NO: 231765 - DNA, 366 bp, Gossypium hirsutum
caaagaaataaaaaacaaacaaaggtagcctgagcaaactatgaggaagtgggcgatcccttccgctttggttcttctttgccttctcagtctcctctcagatcatgggagaaaagtacaagcaaatgacgaggaaggagctgtagatcctcctaaagtcgaggaaaagatcggcgctgtgccacatggcttacaaacggattctgatgtagttaaaagggaatcggaatccatctcttcgagatcgcttcgcaataatgcggagaaagttgagttccaagctgaagtgtctcggcttatggatatcattatcaattctctttatagcaacaaagatattttcctcaaggaagtgatctccaatgc

SEQ ID NO: 231766 - DNA, 428 bp, Gossypium hirsutum; identical to SEQ ID NO: 190155

SEQ ID NO: 231767 - DNA, 420 bp, Gossypium hirsutum
cctaatcaaaaaatggggaaattgtggctaatttgcattgcttcgatctcaatccttctcccatttctctgcaatgctttctctcccgaatcgccaacggatcgccgagtccttgttctcctcgacgacttcgccatcaagtcgtcacactccctctacttcaatgccctcaaatcacgtggcttcgacctggaattcaaactcgccgatgatccaaagatcgccttgcaacgctacggccagtatctttacgatgccttgatcctcttctgcccctccgtcgaacgatttggaggatctattgatgttgccgccattgtcaattttgttgattccggtcatgatttaattgttgcggcggatgttaatgcttcggatttgattcgggaagttggtactgaatgtggagttgattttgat

SEQ ID NO: 231768 - DNA, 355 bp, Gossypium hirsutum
gttcaatatttcctggtaaacaggaaggcattgcagtaggaaggacttttgctgctcttaagaattataaagtggatggtaacaaggaaatgatggctattgggctgatgaacatggttggctcctccacttcttgctacattacaactggcgccttctctcgatcagcggttaatcacaatgcaggagcgaaaagtgcagtgtctaacatagtaatgtcgattacggttatggtgacccttctctttctcatgcctttattccagtacaccccaaacgtggtgttgggagctatcattgtgtcagctgtagttggccttatagacattccagcagcctgtcaaatttggaagat

SEQ ID NO: 231769 - DNA, 390 bp, Gossypium hirsutum
cggacgcgtgggctgagtagtttctttgcttcactgatttgttctctcgattcaaacactagggtttgatcgataattttatttataatttcctttacttcaattgcaattattcagatattcaaaatccaagctattttctttcatttaatctgaaattgattggattttccttttaattttgtttaatttaatctaagaaagaagggggaaaaatgccggcagtttacggatccagattgacgactttcgaggattcagaaaaagagagcgaatacggttatgttcgtaaggtgtctggaccagtcgtcgttgctgatggaatggctggtgctgccatgtatgaattagtccgtgttggacatgataatctaattggtgaaattattc

SEQ ID NO: 231770 - DNA, 384 bp, Gossypium hirsutum
gatgtcggcaagggttgtgctgctgccttgaagcaagccggtgctcgcgtcattgtcaccgagattgatcccatctgtgcccttcaggctctcatggaaggacttcaagttttgacccttgaggatgttgtctccgaggctgatatctttgtcaccacgactggtaacaaggacatcatcatggttaaccacatgaggaagatgaagaacaatgccattgtttgcaacatcggtcacttcgacaatgaaattgacatgcttggtctcgagaattatcctggtgtcaagcgcattaccatcaagccttaaaccgataggtgggtcttccctgaaaccaacaccggcatcattgtgttggctgaaagacgtctcatgaactgggtt

SEQ ID NO: 231771 - DNA, 455 bp, Gossypium hirsutum
ccacgcgtccgcaaaattcaaaaagctctctttttcatctcatggctgctactatcgtctccgtcaaagctaggcagatcttcgacagccgtggaaatccaacggttgaggttgatgtggaaacatcgaacggtataaaggctagggccgcagttcctagcggtgcatccactggaatttacgaggctcttgagttgagagatggaggttccgattacctcggtaaaggtgtatcgaaggctgttgctaatgttaacacaatcatcggccctgcattgattggaaaggacccaaccgagcagactgcaattgacaatttcatggttcaacaactggatggaacccaaaatgagtgggggtggtgcaaacaaaagcttggtgcaaatgccatttttgccgtgtcccttgctggttgcaaagctggagctgaagtcaagaaacttcccctttacaag

SEQ ID NO: 231772 - DNA, 337 bp, Gossypium hirsutum
ggattctacaatcatcaaatttctctcaggcttttcatcgagcaggagctatgatacggctgttcaaagtaaaggaaaagcagagagaacttgctgaaaacgcaaatggcggatcacctatcaaaaagcaatctgcaggggagttgcgtttacacaaagacatttctgagctgaacctgcctaaatcatgttccatatcatttccaaatggaaaggaagacctgatgaatttcgaggtttcaattcgacctgatgaaggatattatttcggtggcacatttttgttctccttccaagtttctcccatctatccgcacgaggcaccaaaagttaaatg

SEQ ID NO: 231773 - DNA, 363 bp, Gossypium hirsutum
cccacgcgtccgcggacgcgtgggcaaagaagccggctattgaggttgagatagacagtcaatcttttgtgttagatttcttgcatatgtttcgattggagctgaaaactggcatgagacaccccattgcttggattgatgaagcaggtggctgtttctttcctgagatttttactggtgaggatgaagcatacccgtgctgcaaagatgaatgtgcgaatgaccaagaattcatgtttagtgaatcttatgcccctcgtgagatcaagctacatcttgagattggcattaatggtgttgagcagccaaagttggaatgtagtggggagtcgagttcttttgtgagacattttcaaattgctc

SEQ ID NO: 231774 - DNA, 434 bp, Gossypium hirsutum
agggaacaaaaaagaaaaaaaagtagaaaggatccattggagttgctgtcaatggcgcagattgaggttcagcgtcaaccggcgatttccgtaccaaacgccgtcgctccgcaaaccggaggggtgcagttcataccgacgtcactatatgttggggatcttgatgttaccgttacggatgagcaactgtttcaattgtttggacaagttgctcgggttgcttccgtaaggatttgccgcgacttggctacgggccgttcactcggatacggttacgtcaactatagcaatcctcgtgatgcggctagggctttggatctacttaatttcactccactgaataataagcctattcgtatcatgtattctcaaagggaccctagtcttcgtaagagtggtactgcaaacatatttatcaagaatctggacaagtc

SEQ ID NO: 231775 - DNA, 453 bp, Gossypium hirsutum
ccagaatcaacgtaagaattagggttgtgtctagaaatggcgattgcagcgcgcatcagatccactctccctctctttcacaggcttttgagatccgattccctgccttctcacactcccagagctgctcttcaccgaactctactttgtcccgaactgtcgaggaaatattccacttctccgaagaaggacgagaatgttaaggtgcctttggctttgtttggtggatctggaaactatgcatctgcactgtaccttgcagccgtaaaaggaaatgctctggacaaggttgagtctgaacttcttgaccttgttcaggcatcaaaaaacagtcaattcttttctcaattcactaaggacttgtcagtacctgcagagacacgggtcaaagccattaatgagatatgtggccaagctaaattttcagatcttacaaagaactttttgggtata

SEQ ID NO: 231776 - DNA, 451 bp, Gossypium hirsutum
gtttaaatcataattgcttgctaagatgcaaaattcattcaagtaaaataaaaagaacaagagaaaattctgctggttccatacttggtgttgtgcctgtcattgttttcagaaccggctgctagcaatgaactacataaatgaaggagatgatgataaactttttgaggctcacagggattggggaaggcgatttatgaggttatatccacaatacgattcgtgggacaaccctaaagatccagaacgacctcttgttattggatacatttctccagattattttacacattctgtctcttatttcattgaagcccctcttatttatcatgactatgggaaataccaggtggttgtttattcagcagtagtaaaggctgatgcaaaaactaatagatttagggaaagagtcgttaaaaagggtgggctatggagagatatatatggtatc

SEQ ID NO: 231777 - DNA, 425 bp, Gossypium hirsutum
gccagcttttgcttggttatggtatggacttatggctaaataagtataaaatctctaacagaaactaaaaaaaaaaaaaaattataaagaaagacgaataaggaaaaaagggtgttaaagaccaaaggccaaagccattttttctttcttttggtttctggggagagaccagtttgggcaaagatggtgaagaagtggaaaaaggctttgattttggtgctgtttacagtctgcattctggggtttaagccaagatgtgtcaatggcgaaacagatcaagcagatgcttctgctctaggggttatgtataccagcttaaattcaccacagcagctaacaggttggactgctagcaatggtgatccatgtgggcagtcctggaaaggtgttacttgctcgaacaaacgcgttactgaaattaaact

SEQ ID NO: 231778 - DNA, 423 bp, Gossypium hirsutum
cggacgcgtgggcacgccccctcttacttatatcattcaataattttcatcaacaaagaaaaatgagagagtgtatttcgattcacattggtcaggccggaattcaggtcggaaatgcttgttgggaactttactgtctcgagcatggcattcagcctgatggccaaatgcctagtgacaagactgttggtggaggagacgatgctttcaacacctttttcagcgaaaccggtgccggaaaacacgtccctcgagctatatttgttgatctggagcctactgttatcgatgaagtgaggactggaacataccgccaactgttccaccctgagcaactcatcagtggtaaagaagacgctgcaaacaattttgctcgtggccattatacaattggaaaagagattgttgacctctgcttggatc

SEQ ID NO: 231779 - DNA, 423 bp, Gossypium hirsutum
cccacgcgtccgaaaaaaaggcctctcaaaatgtacaaagtccaaggttgcatggatttctcagctaataattttcattagagaagtagtgcaactttgttctcgagattcatcttgtgttgtattcggtttaggcgcgtaaaagacgtgcttcagataattgatccaagagagttgtgctcttagtcatggattctttgtggaagcttttgtatttgcttgagcctgccccactgactctcatacttacagcagtggctgtgacatttggatctgcatttcgtgctctgaattatgggaaagaaatggagcggaactgtgacttgtcggaagcatcaattactctagatcggtcccaagcattaatgatcccaataatgagctcctgcagcttgcttttgatgtttacctttttcttctgct

SEQ ID NO: 231780 - DNA, 387 bp, Gossypium hirsutum
aaaggaaatgcctgggctaacctgcaacgcctgcaacagagaattccttgacgaggccgagcggaagctccattacaagtccgattggcaccgctacaatctcaagcgcaaggtagctggggttccaggggtgacggaagctttgttcctggcaaggcaagcagcacttgctgaagagaaagataagcagaatgaaacccccatgctttacagttgtggtctttgtgacaagggctatcgaagttccaaggcttactctcagcatcttaagtcacgtgctcatattgcgcaggcttctcaacaccctgaagaggagaaggcagccattatcaagccatttatacgtcgtgctgtaaataagcctccacaaccaagggatacaaatga

SEQ ID NO: 231781 - DNA, 445 bp, Gossypium hirsutum
ctctcacttctgccttgatatccttagatcaagatctcttctgatttaaccttggttgagaaatggaggaaactttgctccatgggactttacatgctacgatctatgaagttgataggcttcatgatggaggtggaaacttctttggcaagcttgtggcaaatgttcaggagactattggcattggcaaaggagttccaaagatttatgcaactattgatcttgaaagggccagagttggacgaaccagaacaatagaaaatgaaacttccaaccctaggtggtatgagtctttccacatttactgtgcccataatgcttccaatgtggtgttcactgtcaaagacgacaatcctattggagcaactctgattggaagagcatatgtccctgttaaggatctcacagaaggggatgaagtggataggtgggttgaatcctggat

SEQ ID NO: 231782 - DNA, 435 bp, Gossypium hirsutum
cggacgcgtgggcacgccccctcttacttatatcattcaataattttcatcaacaaagaaaaatgagagagtgtatttcgattcacattggtcaggccggaattcaggtcggaaatgcttgttgggaactttactgtctcgagcatggcattcagcctgatggccaaatgcctagtgacaagactgttggtggaggagacgatgctttcaacacctttttcagcgaaaccggtgccggaaaacacgtccctcgagctatatttgttgatctggagcctactgttatcgatgaagtgaggactggaacataccgccaactgttccaccctgagcaactcatcagtggtaaagaagacgctgcaaacaattttgctcgtggccattatacaattggaaaagagattgttgacctctgcttggatcgtatccgaaagc

SEQ ID NO: 231783 - DNA, 406 bp, Gossypium hirsutum
cattactctcgattccacttaacgcaaatagttcgagtttcgtaatcaatggctttgccgaaccaacagactgttgattatccgagcttcaagctcgttatcgtcggcgatggaggcactggaaagaccacatttgtgaagaggcatctgactggagagtttgaaaagaaatacgagccaacgatcggtgtggaggttcaccctttggacttcttcactaactgtgggaaaattcgattctactgctgggatactgccggtcaggaaaagtttggtggtcttcgagatggttactacatccatgggcaatgtgctataattatgtttgacgttactgcccgtttgacatacaagaatgttcctacctggcatcgtgatctttgcagggtgtgcgagaatattccta

SEQ ID NO: 231784 - DNA, 371 bp, Gossypium hirsutum
acaacactcctctttctctctgttctatccctctctatacacatggcaaaggtgaagatcggtatcaacggattcggtaggatcggtaggttggtggctcgagttgctttaaaaagagacgatgttgaactcgtcgctgttaacgatccttttatcactactgattacatgacatatatgttcaagtacgacagtgttcacgggcaatggaagcatcatgaactcaaagtcaaggattcgaagacccttctgtttggcgagaagccagtcactgttttcggtattaggaacccagaggagattccatggggcgagaccggagctgaatacattgttgaatcaactggagtgttcactgacaaagacaaggc

SEQ ID NO: 231785 - DNA, 408 bp, Gossypium hirsutum
cttcccattgctcctttcaattctcttcatcatctcccctgttttctgtgacaatgatgaggaagatgatcttcttaaaggcatcaatagttaccgagcttcgttaaacttgacaagcctaacaacaaatgagaacgccgagtgccttgcttatgaactagccgaagaattcaagaaccaaccttgcacaaactccacaggcgccaacacagtcccaggcaccgaaccacagtttgccaactatccaaacattttagccaaatgccatttgaatgtttctgtcacaagggacagagcagtaatgcctgcttgtgttccgaacctggctcctagtcttgtgctcactaattttacgcagtctcaatactctgaaaacctcaatgaaaccaagtatacaggaatcgggat

SEQ ID NO: 231786 - DNA, 426 bp, Gossypium hirsutum
gttaaaggctgtcatgatgtatacgcttcttttgacaagtatgtagaggttgagcgccttgaaggtgataataaatatcatgccgaacaatatggcttgcaggatgctaagaagggtgtcttgtttattgacttccctccggtccttcagcttcagcttaagcgatttgaatatgattttatgcgggacactatggtcaagattaatgatcgctatgagttccctttgcaacttgaccttgaccgagatggtggaaaatacttatcaccagatgctgataggagagtcccgaaatctttatacgcttcacagtttggttacagtgtcctcgttcacagtggtggggtgcatggtggacattattatgcatttatcaggccgactctttctgatcaatggtataaatttgatgatgaaagagtaacg

SEQ ID NO: 231787 - DNA, 445 bp, Gossypium hirsutum
tttcaagctcaattctctgaaaatttttgtgctgaacttcttttttctctttgtaccaccatgtgtggaggtgctattatctccgatttcataccgccgtcgcggtcgcgacgattgacggccgatttcttgtggcccgatctgaaaaaatccgggttgaagaaggggtcgggtaagagatactcgaagcccgtgatcgacttgggcgatgatttcgagactgactttcaggagttcaaagatgaagaatctgatatagatgattatgatgttgatgatgttttggctgatgtaaagccctttgcttttaacgctacaaagaaacctgcttctgctgtatctcatggttcgaactctgaaaaatccatgcaattcaatggtcaagctgagaaatgtgcgaaaagaaagaggaagaaccagtatcgtggaatccggcagcgcccat

SEQ ID NO: 231788 - DNA, 421 bp, Gossypium hirsutum
cccacgcgtccggtcgttggataagcttgttccacgagccgattcgtcaagaagagaggatagtgttggatcatcttcatcctggttcaggaagggtgttgaatagtataaaaggtgaacaggttgcagcagggtggccttcttggcttgttgctgtggctagtgatgctctcaagggatggataccccgacgggccaacaccttcgaaaagttggataaaattggccaaggaacttatagtagtgtgtacaaggcacgtgatgtcgttcataataaactcgtggctttgaaaaaagtgcggtttgataatcatgaccctgagagtgtgaagtttatggcaagggagattaatctcttacgaagactcaatcatccaaatgttataaaattgggaagcttgatcacatcccatacgtcatg

SEQ ID NO: 231789 - DNA, 447 bp, Gossypium hirsutum
caagtagcaatggcgagttctctgctagtgaatggcttaaaagctctcttcttagttctgtggtgcttgatggtaaccactctcatttacaccatctccattgatggcctccctttccgctgggaaattcttactccgtggatggctgcaacgttggttgatttctacattaatgttgtacctttcgcggtttgggtttcctacaaggaatcaagtttgattgctgcaacactttgggtaattctgcttgtatgtcttggaagtattacaacatctggctacctttttattcaatttttcaacttgtctcctcaagaatctctggaagatcccatttatcatgttctattggaaccaagcgagcaaggatggtacaaaacctaaagggaaacattcctctgttgcgattgcaagaatactctttatcgttttgggttgcttgatgct

SEQ ID NO: 231790 - DNA, 429 bp, Gossypium hirsutum
aagctgtcttacattgcccttgactatgaacaggagctagagacctcaaaaacaagttcatcagtagagaagagctatgagttacctgatggtcaggttattaccattggtgctgaacgtttcaaatgccccgaagtgcttttccaaccatccttgattggtatggaagctgctggcatccatgagactacatacaatgcaataatgaagggtgatgtggatatcaggaaggacttgtatggtaacattgtccttagaggtggtacaaccatgttcccgggtattgcggacagaatgagcaaggagctttctgcactcgctcctagcagcatgaagatcaaggttgtcgctccacctgagcgaaagtacagtgtctggatcggaggctcgatcttggcttgcctcagcaccttccaacaaatgtggatc

SEQ ID NO: 231791 - DNA, 332 bp, Gossypium hirsutum
caaaaggacgatgatatgcctccaattgaagcaattcttgcacccttggaggctgagctgaagcttgctcggcaagagattgcaaagcttcaagatgataacaaagctctcgatcgtctaactaaatcaaaagaagcagctttaattgatgctgaaagaactgtagagtttgcattggcgaaagcttccatggtagatgatctccaaaataaaaaccaggaattgatgaagcagatagaaatttgccaggaagaaaacaaaattttggacaaaatgcatcgccaaaaggttgcagaggttgaaaagcttatgcaaacagttagggagctgga

SEQ ID NO: 231792 - DNA, 433 bp, Gossypium hirsutum
  unsure (1)..(433): unsure at all n locations
ttcaaatctgcagcatttcctttctgttttctcctctgtattcaggttaagataataaaaaaaacccatcggtgctttgggattttcggcttggacggtattaacacattggaccaattttctgctttgagatggctggactatttgcttatggcagccttgcaccaaagactaagaatatggtagtcgcggggggtttgacagcatttgtatttggtgtatatttctatactatgagagctgttggaggtacagatgagcttcaggtggctatagataagttcgaggagctgaaaaagcaagaggggaagtgaagcatgggatcaaagccttgatctcattagcctttttttgtgacaatgcagtcaaaaactaggtaaaaggtcatttatatgacagacanaataatgtgttaaaatctgtgttttgaaaa

SEQ ID NO: 231793 - DNA, 452 bp, Gossypium hirsutum
cccacgcgtccgggcactctttcaaactaaccaaaacgaggccgccggattttggtttcagcagcttgtatttagaaggatggtgagggtcagcattttgaatgatgcactgaagagcatgtacaatgcagaaaagaggggcaaacggcaggtcatgatcaggccatcctcaaaagtgatcatcaagttccttttggtcatgcagaagcacggttacattggagagtttgagtacgttgatgatcacagatctggtaaaattgtagttgaactgaacagaaggctgaacaagtgcggggtgatcagtcctcgcttcgacgtaggagtgaaggagatcgagggttggactgccaggctgcttccatcaagacagtttgggtacatagtgctgacaacatcagctggaataatggaccatgaagaagccagaagaaagaatgtaggtggaaaag

SEQ ID NO: 231794 - DNA, 458 bp, Gossypium hirsutum
cagtttttcctttaagaaaaaaagcagtagaactccttcattccaactcagtgctcatggatgcgcaagaaggaactcagcagtcacagcagctaatccttgctcacaaagtcttcctcctcaagcaccgggatgtccctgacatcgagaaggtccgactcaaggatgaggtcctaaacaccgtcaaatccaattatatgactccatattatgaaaacctagtcgcggacaaggtgctggacctggaccacagcgttttggactcgatgcgtgcaaagaatgaggaagagattaaaaagatcgacgaaaagattgctgatgctgaagaaaacttatgtgaaagtgaagttcgagaagcacatttagctaaattcttatatttcattcagattggtgaaaaggagaaagcattggagcaactgaaggtgacagaaaacaagacagttgctgttgggcaa

SEQ ID NO: 231795 - DNA, 452 bp, Gossypium hirsutum
cgatcctgagaatgtgcgttatatattgagttccaacagttctgtttatttgaaaggtcctgaatggctgaaacagtttgatatcttcggcgaagcacttttcaattccgacggtgaggcatggaaatgtcaccgcagagttttccatgctttcttgaatcaccctcagtaccggcaatcactttcaaaggttctccatcaacgtatagaggaagcgcttgttaaagttcttgaatatgtttctggacgagagatggtggtgaacttgcaagatttgttggtagggcatgcgtttgacattggatgcataacgggcgtgggcttcaaccctggcctactctccattgaattccctgagaatcggttccaaaaagccatgagtgatactctggaggcagctttttacagatatgtagtgcctgacagtctttggaagttgcagagttggcttc

SEQ ID NO: 231796 - DNA, 459 bp, Gossypium hirsutum
cccacgcgtccgagccctctctatgtgcttctaaatcctgcaatcaatcctgcccaaaaggatcttcccgtcacaatttatgaaagtgagctgcatgtcatagatggggttccacagcttatttttgtccgttcaagctacacaattgagacagttgaagcagaaaggatctctgtggatcatgttgcccatctaaagccatctggaggttcagcagcaactcaatggaattgtttatgtttgtatgtttttcctgcatccagtggctgctcagcttaccggtatacatagcgccatcaagatgttgaatagcagaatcagggtgcttcatcaatatcttgttggaatgcaaaaaggtgatattccttgcgaaagttcactgttaaggcaagtatcaagccttctccgaaggttacctgcaattgaatcagaaaaatttcaagatgactttctaatgga

SEQ ID NO: 231797 - DNA, 418 bp, Gossypium hirsutum
ctcttacattacctacaaaatctttgctttccctttttttttttttttgccaatggcttcttcaccaaaattcatctcttacttcttccttttagccctcttctccgttgaaatacatggtagggatttttttagcaaaatcccaagtgttaacacaaatgagaaagaggtgaccaacaaagaagaacaaaccactttggggaagaaggagcaagagccaaggtttgtccccgagacccaaaatggctatgggctttacggtcacgagtctggtcagctccctcctagcaccgccagtaccaaagaaacctatgaaccctatgtcacacctgttaaataccaccctgatgaaccctacaatagcatcccagcgtccaaaaccaacaacaaagactcttacttttatagcaagacaaat

SEQ ID NO: 231798 - DNA, 357 bp, Gossypium hirsutum
ttcattggttttcgattatcaactcttgcgtcacagttctccttttgactggtttccttgcaacgattcttctgcgggttttgaaaaatgatttcattaaagtttggccaaaataaaaaaccacctgatgaccaaaaaaaacctggatggaaatatattcacggagatgtattccggttcccaaagtacaaatctttgtttgctgctgctcttggatctggaactcagctgtttactttaaccgttttcatttttatgcttgcattggttggtgtcttttatccgtacaatcgaggagctctattcactgcccttgtggtcatatatgcacttacatcaggaattgcaggatatact

SEQ ID NO: 231799 - DNA, 459 bp, Gossypium hirsutum
tttgcccaccactatcaaatttccagattttccaggaaaaagaaaatcaaaacccccaggtgaagaaggtgaaaaccagcagcggcaaaggcaataaaaggtgaagccaaagagagagagatatatacataataaaaaagacttttcaaaagaacacaactatggctcctcatagagaaggatcagatgcttcagtggaagccatggttgctcaagtcgaaaaacacccaatttcatcgatccttatcatcattgctatgcaaacagaagctttgccggtggtgaataagttccagttgattgaaaaccctcattcttcgtttccaaaaggggtcccttggatccattatcatggtgcatacaaggacatcataatcaatctagtttggcctggaaaagatttaacctttggggttgatagtgttggcacgatttctgcctctcttgtgacctatgcat

SEQ ID NO: 231800 - DNA, 355 bp, Gossypium hirsutum
atatccgcctctctcatcttccgttgtttatacgtttggttgttgttgaagaagtgctactaccatggctacaaagaagagcgttggggacttgaaggaagctgatttgaagggaaagaaagtgtttgttagagtcgatctgaacgttccattggatgataacttcaacataactgatgacacaaggatccgtgccgctgttcccaccatcaagtatttgatgggtcatggctctaaagtcatcctctctagtcatttgggacgcccaaagggtgtcactcccaagtacagtttgaagcctcttgtgccaaggttatctgaactccttggagtcgaggttaaaatggcaaatgac

SEQ ID NO: 231801 - DNA, 393 bp, Gossypium hirsutum
atgtggactcccaggaccccagggtcaacctggtgcagcagggatccctggtgacccgggctccccaggaaaggatggagtgcctggcattcgaggaggaaaaggagatgttggcttcatgggtccccggggcctcaagggtgaacggggagtgaagggagcctgtggccttgatggagagaagggagacaagggagaagctggtcccccaggccgccctgggctggcaggacacaaaggagagatgggggagcctggtgtgccgggccagtcgggggcccctggcaaggagggcctgatcggtcccaagggtgaccgaggctttgatgggcagccaggccccaagggtgaccagggcgagaaaggggaacggggaaccccaggaattggggg

SEQ ID NO: 231802 - DNA, 443 bp, Gossypium hirsutum
cccacgcgtccgcttaaaacccctcaaaaggactgcctcaaacaaggaagtcaatggcgttttctgagttcaggccactagacgagaagtcgctcatcgaatacattaaagcaacgccgtctttgtcatcgaagatcgtcgacaactatgatggtttaaagattaaggaagttggagatggcaatcttaattttgtctacatcatcgttgccccttctggttcttttgtaatcaagcaggcacttccctacatacgatgtattggggaatcttggcccatgactaaggaaagagcatatttcgaagtgttagcgttaaaacaacatggtgcgttatgcccagaacatgttcctgaagtttatcactttgaccgtaccatgtccttgattggaatgcggtatttagagccgccccatataatcctgagaaaaggttaattgctg

SEQ ID NO: 231803 - DNA, 374 bp, Gossypium hirsutum
ctcaacccctacattttactacgctctctgaaatcttagttacatccatggcggcgacatcgctaaatgcccctaacgctcctatccttcaaaagacccatcaaactcatgtctttctcaaacccatcttcaccattccttgtgaaacctctgccaagcgcttatccatctcttgttccgcaactacccaagatcgcctctccgtccaatcccaatctcaagatcgggtctttaacttcgccgccggtcccgccaccttacccgagaacgtcctcctcaaagcccaatccgagctttacaactggcacggatctggcatgagcgttatggaaatgagccaccgtggtaaggatttccgttctattatcgaaaaa

SEQ ID NO: 231804 - DNA, 440 bp, Gossypium hirsutum
cggacgcgtgggaaaaaaaatcgcagtttcaacaatggcagatgcagcaaacaacgttgtcgagacgatcaacggtgattgtcacgattttaagtctcttctctcttcttcagacagggatttcctcgtacgcaacaacggtgatcaggttaaaatcgatagcttgaaggggaagaaacttggattgtatttctcagcatcttggtgcggtccatgccgtagattcaccccaaatttaatcgaggtgtacaccgagctctcaacgaaaggcgatttcgaggtcatttttgtctcggcagatgaagatgaagagtcattcaatggttacttctccaagatgccatggcttgcaatccctttctctgattcagaggcacgcaagcgcttagatgagccggtcagtgtgatgggaatacctcacctcgtgctcttggatgaaa

SEQ ID NO: 231805 - DNA, 433 bp, Gossypium hirsutum
aatccctttctttgtcctaaacatcctccttttcctctccagctccgcggctacaccaaagagcggtgcagatcacgacctggtccgttcatcatgtgtccacgccagctatccaagcctctgttttcgcaccctttcttcctactccggcccagccaacaccccacgtgagttagcccaagccgccgtaaaagtcagactgtcccgtgcccgtaaagtgtcgaactacttgtcgacgagtgtgacggggtacaacaagagggaacgagtcgcactgagtgactgcgtggagcaaatagatgagtcgatggaggagttgagcaagacattaggggagttgaagcacttgagaggggagacgttcgagtttcagatgagtaatgcgcggacatgggtgagtgcggcgctgacgaatgaggacacgtgtcttgat

SEQ ID NO: 231806 - DNA, 376 bp, Gossypium hirsutum
atcagttcaatatttcctggtaaacaggaaggcattgcagtaggaaggacttttgctgctcttaagaattataaagtggatggtaacaaggaaatgatggctattgggctgatgaacatggttggctcctccacttcttgctacattacaactggcgccttctctcgatcagcggttaatcacaatgcaggagcgaaaagtgcagtgtctaacatagtaatgtcgattacggttatggtgacccttctctttctcatgcctttattccagtacaccccaaacgtggtgttgggagctatcattgtgtcagctgtagttggccttatagacattccagcagcctgtcaaatttggaagatcgacaaattcgatttca

SEQ ID NO: 231807 - DNA, 380 bp, Gossypium hirsutum
aagagtcctggtccatgtggccaacgcctatggacttcgagtccgaggaccctgagaatgaagtcataaaaccaacaatcaatggagtgctaagcatcatgaaagcttgcgccaaagccaaaactgttagaaggttagtgttcacatcatcagctggaactattgatgttgcagaacaacaaaagccctgttatgatgaaacctgttggagcgaccttgaattcatccaggccaaaaaaatgactggttggatgtattttgtctccaagacaatggcagagcaagcagcctggaaattcgctaaagaaaataacattgattttgtcagcataataccacctttggtgggtcgtccatttattatgcaatcaatggccgcc

SEQ ID NO: 231808 - DNA, 389 bp, Gossypium hirsutum
gatccttgcacccttgagaagttccttgggagaatccccatggtgttcaatgttgtgattctcactccccacggatacttcgctcaagacaatgttttggggtatcccgacaccggtggccaggttgtttacatcttggatcaagtccgagctttggagaatgagatgctcctccgtataaagcaacaaggactcaacatcacccctcgaatcctcattattactagacttcttcctgatgctgtcggaacaacatgcggtcaacgacttgagaaagtatacggaacagagcactcggatattcttcgagtacccttcagaacagaaaagggaattgttcgtaaatggatctcaagatttgaagtctggccatacttggaaacctacac

SEQ ID NO: 231809 - DNA, 341 bp, Gossypium hirsutum
atgggagctccagcccttctcacactcaacccgcagaaaccacccaccttcaccatgtctgacgaggaagttgaacaggtggaggagcagtacgaagaagaagaggaagcccaggaggaagaggaagttcaagaagaggagaaaccaagacccaaactcactgctcctaagattccagaaggggagaaagtggacttcgatgacatccagaagaagcgtcagaacaaagatctaatggagctccaggccctcatcgacagccactttgaagcccggaagaaggaggaggaggagctggtcgccctcaaggagagaattgagatgcgccgtgcggagagagc

SEQ ID NO: 231810 - DNA, 443 bp, Gossypium hirsutum
cggacgcgtgggctgcaggatttccagcaacctcctttgagtaggtgtgggatacagttgtagctcctcatcttcacaagttccatggaatattaaatggaattgacttagatatttgggatccgtacaatgataagttcattcctgtaccttacacttcagaaaatgttgttgaaggcaaacgagctgccaaggaagccttgcagcaaaagcttggtttgaagaaatctgatcatcctttggttggaatcattactcgcttaactcaccaaaaaggaatccatcttatcaagcatgcaatttggaacaccttaaaacgcaatggacagggtgtattgcttggctcagctcctgatcctcgcatccaaaatgattttgtgaatttggccaatcaactgcattcatctcattcggatcaggctcgcctttgtttgacctatgat

SEQ ID NO: 231811 - DNA, 459 bp, Gossypium hirsutum
cggacgcgtgggtggcgtagccctcgtcctccatcaccctctttggcagctcaacgcttgatacgggaacagcaagatgatgagtattatgcatcattgcaagctgacagagaaaaagagttgaaagcaattgaagaagccaaagctcgccgtttagaggaagaagcagctagaaaagctgctcttgaagaagaacagcgaaaagaggaagagcttcgcaggaaagtggaggaggagcaggaatgtgagagacaattagctgctaaagaagcttctctgcctcaagagccagcagccaatgagcaaaacgcagtaacccttcttgtgcgaatgccagatggcagtcgcaggggccgccggtttctcaagtctgatagactgcagtctctatatgacttcatcgatattggtagaggagtgaagccaggcacttatagactggtgaggccatacccaagg

SEQ ID NO: 231812 - DNA, 224 bp, Gossypium hirsutum
tcgcggacgcgtggggaaacctatgaaccgtatgtcacacctgttaaataccaccctgattaaccctacaatcgcatcccagcgtccaattccaactacaaggactcttacttttatagcaagactaatgcgttcggaaacactgatacttaaagtttagacgggtaaaatgataaaggatggactatcgaggaaaccaacatctacaatggcaacttttacaa

SEQ ID NO: 231813 - DNA, 320 bp, Gossypium hirsutum
cctggaactcaggcgagaagtgcgatcaggttgaagaacactagtaaatctcacgtagctttcaagtttcaaactactgcgccgaagagttgttttatgcgtccacctggtggtattttggcgccaggggaaagcattatcgcaaccgtgtttaaatttgtagagcgtccggagaataatgaggtgcaggtggatttaaagagtaaagttaaatttaagataatgagtttgaaggtaacagctggagtggattacttgcctgagctttttgatgaacaaagggatcaagtgactgtagaaagaattttgcgggttgtatt

SEQ ID NO: 231814 - DNA, 335 bp, Gossypium hirsutum
gggagagagtgtatcagtgtttcttcccctctttacttaatttctctccgccatggctctctccgtcgagaaaaccgccgccggccgtgagtacaaggtcaaagacatgtctcaggctgacttcggtcgtctcgagatcgagttagctgaggttgaaatgcctggtttaatggcttgtagaaccgagttcggccctgcccaacctttcaaaggagccaaaattactggttctcttcacatgaccatccaaaccgccgttcttattgaaacccttaccgccctcggagctgaagtccgttggtgttcttgcaacattttctctacccaagaccacg

SEQ ID NO: 231815 - DNA, 418 bp, Gossypium hirsutum
agaaattacatctttattattattatagtagaaataggttttcttaatttattacataagtacggtacccagcctaagcttacataatattgtatacacggtataaggatcatggacgaggcttgtgtggctcgggatgatgacctggaccacctggtcctggcggtggcgcatgggggcctggcccaggaggaggagcatggcataattattgagtttgttgatgattataattcaaggcgaagtgccacatatttacctgaggtgccggcacatgaaggttggactagagtggaggcaattgactcacttattcggaaggcaggtttcagtggccccataacggagtcgctcaggaagcgtataaaactgacccgttaccaaagcacattatttaccatgcactacagtgactatg

SEQ ID NO: 231816 - DNA, 324 bp, Gossypium hirsutum
agaaggtgtcttaataaacgccttctttcttcttcttctccctttctttgctttttcgaatttttcttaagcgagaatgagagagtgcatttcgattcacatcggtcaggccggtatccaggtcggaaacgcctgctgggagctttactgcctcgagcatggaatccagcctgatggtcagatgccaagtgacaaaactgtcggaggaggtgatgatgcttttaacacctttttcagtgaaactggtgctgggaagcacgtccctcgtgccgtctttgtggatcttgaacccactgttattgatgaagtgagaactggtgctta

SEQ ID NO: 231817 - DNA, 431 bp, Gossypium hirsutum
attggtttgagctggccagaacctccactaaatttgctatctcagcatgttttggacagaccagcttctttcaaatcagtcaaatcttttagagcaaccaagtcttttcgaacatatagttccttcaggtccataaatgacatggcatcaggaatagctttgcttgcagaacttgaccttgaatccctcatgaagcggaaaagaagatcttcatatgtaagaatagttagcaagcaaatggtaggaattttcctcactatttgggtccgtaggagtttgcgcaagcatattcagaatttgaaggtgtctactgttggtgttggtgtaatgggctacattggtaacaagggatctatatcagtcagcatgtccatatatcaaacacttttttgttttatatgcacccacctgacatcaggtgaaaaagatgg

SEQ ID NO: 231818 - DNA, 398 bp, Gossypium hirsutum
gtttgagctagctagctcttactcaaatggcaaccaaaacgatgatgttgcaaatattttcacttttcttctttttgttcagtatctgcaactccattttccttggtgctaatggagatgacaatggtggttggcaaactgcccatgccaccttctacggtggtgctgatgctaccggcacaatggggggagcttgtggttatggaaacctgtacagtcaagggtatggaacgagcacagcagctttgagcactgcacttttcaacaatggcttgagctgcggtgcctgctacgagctccggtgcaacaatgatcctcaatggtgcattagtcgaaccataaccgtgacagccaccaacttttgtccccctaactatgctttatctagtgacaatggc

SEQ ID NO: 231819 - DNA, 407 bp, Gossypium hirsutum
aaagggggggaaatggcgatcacactgaacaatggatttaagatgccagtggttggtttaggtgtttggcgtatggatggaaaagacgttagagacctcatcatcaactccatcaagcttggttatcgtcattttgattgtgctgctgactacaagaatgaagcagaagttggtgaggcattgtctgaagcattcaaaactgggcttgttaagagagaggacctctttattacaaccaagctttggaattctgatcacgggcatgttcttgaggcctgtaaagacagtcttaagaagcttcaattggattatctggatttgtatctagttcactttcccgttgctgtaaagcacactggagtcggtcaaacggacagtcctttggacaaggatggagtcctggacat

SEQ ID NO: 231820 - DNA, 457 bp, Gossypium hirsutum
  unsure (1)..(457): unsure at all n locations
attggtttgagctggccagaacctccactaaatttgctatctcagcatgttttggacagaccagcttctttcaaatcagtcaaatcttttagagcaaccaagtcttttcgaacatatagttccttcaggtccataaatgacatggcatcaggaatagctttgcttgcagaacttgaccttgaatccctcatgaagcggaaaagaagatcttcatatgtaagaatagttagcaagcaaatggtaggaattttcctcactatttgggtccgtaggagtttgcgcaagcatattcagaatttgaaggtgtctactgttggtgttggtgtaatgggctacattggtaacaagggatctatatcagtcagcatgtccatatatcaaacactnttttgttttatatgcacccacctgacatcaggtgaaaaagatggagacgaactgaaaagaanatctgatg

SEQ ID NO: 231821 - DNA, 452 bp, Gossypium hirsutum
cccacgcgtccgcccacgcgtccgtgatttactggggaatggtactcctaggggaaagaaagatgctgctacagccttgtttaatctgtcaatatttcacgaaaataaggcccgaattgtgcaagctggtgctgttagacaccttgtggagttgatggacccagctgctggaatggttgataaggctgttgctgttttagcaaatcttgctacgattcctgaagggaggacttcaattgggcaggagcaagggattcctgtgctggttgaggtcgttgaattgggttcagcaaggggaaaggaaaatgccgcggctgctcttttacagctctgcacaaacagtaataggttttgcagtctggttctccaagaaggtgctgtcccaccgctagttgccttgtcccagtctggtacacccagggctagagagaaggcacagacacttctgagtg

SEQ ID NO: 231822 - DNA, 373 bp, Gossypium hirsutum
ctctcatcattttccttctgctaccttctctcaacccaaacacatatttcccaggaaaaagaaaaagcttgagcgaacaagaaaatggccgatcagcttaccgacgatcagatctctgaattcaaggaggcctttagcctgttcgacaaggatggagatggttgcattactaccaaggagttgggaactgtgatgcgatcacttgggcagaaccccactgaggcagaactgcaagatatgattaatgaagtcgatgctgatggaaatgggaccattgattttcctgaattccttaacctgatggcaagaaaaatgaaggatacagactctgaggaggagcttaaagaggcattcagggttgttgacaaggatc

SEQ ID NO: 231823 - DNA, 353 bp, Gossypium hirsutum
agaggtaccaaaaccaatattgatgccaatttcaggaaaggagcaaaagtgtgttgggaatatatttagttgcagttttaatgcaagagagaagaaactgatatgtgtgaccagtggcaactcttacttgggttctttcattgtcaaagagctattggctcatggttaccttgttcgagtaaccattcaacacccagctgaatttgaagatgtgaaagacctgctaggggtggaagatttaaacctattggaaagtgtagttgtaaccaagatggaagatttacaaagcctttgtgatgcttttagaggttgccatgctgtttttcatacatcttccttcattgatccacatg

SEQ ID NO: 231824 - DNA, 380 bp, Gossypium hirsutum
  unsure (1)..(380): unsure at all n locations
catttgatccccccttttctgttgccggaactgagagtcccagatccgattaaaaaaaatgaaggtgatagataagatccagtctttctcacaggaccaagggaaagtggttttttcctttgagttcttccctccaaagactgaggatggagtggacaacctgtttgagagaatggatcgaatggtggctcataatccatctttttgtgacatcacatggggtgctggtggttccactgcggatctcactttggacattgctaacaagatgcaaaacatgatatgtgtggaaacaatgatgcatctcacttgcaccaacatgcctgttgagaaaatngaccatgctcttgagaccattaagtctaatggcatcaaaatgt

SEQ ID NO: 231825 - DNA, 454 bp, Gossypium hirsutum
gccaaagccatttttttttcttttggtttctgggaagagaccagtttgggcaaagatggtgaagaattggaaaaaggctttgattttggtgctgtttacagtctgcattctggggtttaagccaagatgtgttaatggcgaaacagatcaagcagatgcttctgctctaggggttatgtataccagcttaaattcaccacagcagctaacaggttggactgctagcaatggtgatccatgtgggcagtcctggaaaggtgttacttgctcgaacaaacgcgtcactgaaattaaactgtcaaatcttggactttccgggtcggtgggttacagctttcaaagtttgacatcattgaaagaattggacttgagccacaacaattttgcaggagatataccatattttactcttccgaacttgcagcgattaaatctcgagtataatcaatttact

SEQ ID NO: 231826 - DNA, 395 bp, Gossypium hirsutum
cggacgcgtgggcgccatcttcaataatttcttccgttgatctttgttagagattagctttttaatttttcattatgggaaagatcaagatcggaatcaatggatttggaaggatcgggcgtttggttgcgagagttgctctccaaagcgatgatattgagctcgttgctgttaacgatcctttcatcaccactgaatacatgacgtacatgtttaagtacgacagtgttcacggtcaatggaagcatcatgagcttaaggtgaaggactcaaagacccttctctttggtgaaaagcctgtcacagttttcggtatcagaaaccctgaggaaatcccatgggctgaggctggagctgagtatgttgttgagtctactggtgtttttactgacaag

SEQ ID NO: 231827 - DNA, 321 bp, Gossypium hirsutum
ggaagcgcttgttaaagttcttgaatatgtttctggacgagagatggtggtgaacttgcaagatttgttggtagggcatgcgtttgacattggatgcataacgggcgtgggcttcaaccctggcctactctccattgaattccctgagaatcggttccaaaaagccatgagtgatactctggaggcagctttttacagatatgtagtgcctgacagtctttggaagttgcagagttggcttcagattgggaaagagaagaaacggagtgatgcttggaaggctcttgatgatcttttaacacaatttatatcgacccaacg

SEQ ID NO: 231828 - DNA, 455 bp, Gossypium hirsutum
ttcttctctactcttcgcattttctctcgctttccttcttatacctcaacccaaaatccaaacaagccttaaccatcaagagtagaataaagttttaaaataaagtatctgtctgcagtacctgattcttcaccagaaccaagaacaaccaaaacctaattccatactgcttattcggtgtttacagatccacctttgattcctcagatatatatattttttcaatccttgatccggttttgtggagatggcggacacagaccattgttgctcgacacaattgatcgatggagatggagagttcaatgtggttggacttgacaacttcatgcggactactaaattctctaactgtggcctctcttatgctgtcgtcgccatcatgggccctcaaagtagcgggaagagcaccctgttaaatcatcttttccaaacaaatttcagggagatggatg

SEQ ID NO: 231829 - DNA, 420 bp, Gossypium hirsutum
ctgaaattcagatattttgtgaggtatcaggatgaaagcactcattcttgttggtggatttggaacacgattgagaccgttgactcttagcgtcccaaagcctttggtggattttgctaacaaacccatgatactgcatcagattgaagctctcaaagctattggagttactgaagttgttctggccatcaattaccaaccagaggttatgttaaatttcctaaaagaatttgagaaaaagcttggcattaaaatcacctgctcacaggagactgaaccacttggcacagctggtcctattgctctggctagagacaagttgatcgatggctctggtgagccattttttggcctcaatagtgatggtataagtgaatatccactaaaagaaatggtaaattttcacaagggtcatggagg

SEQ ID NO: 231830 - DNA, 435 bp, Gossypium hirsutum
ttttctttgctcctccttaagtgtttctatagggttttaattcgttcttctcattacctctcttttaacctttctcttttttgcttgctctctttgtttttcgagatctgtgcgttttcttcttttcaattagcttcttgaaagctttattttcttaagaacaggaaaccgctgaagagatggcaccaccaattgagactccaaccaagtcctctggctctcaccacgcttcacatactcctttgaatgaaaggattctttcatccatgagcacaaggtctgttgctgctcacccatggcatgatcttgagattggacctgtagctccaatggttttcaactgtctgattgaaatcccaaaaggacacatggtgatgtttgaactctacatgaaaactggtctgatcaaggttgatcgtgtgctttactcatcag

SEQ ID NO: 231831 - DNA, 403 bp, Gossypium hirsutum
tttgaagctaaggattggaagtctctcaatgaacagatcgttaatttgtctaagaaacgtggtcaacttaagcaggcagtgactgcgatggttcagcaagcaatgcaatacattgatgaggcaccagatcttgaaactcgtatagagcttatcaagaccctgaacagtgtgtctgctggaaagatttatgttgaaattgagagagcaagattgatcaggagacttgcaaagattaaagaagaacagggccttattgctgaagctgcagatttaatgcaggaagttgcagtggaaacttttggtgccatggcaaaaactgagaaaattgccttcattcttgaacaagttcgcctctgcttagatcgccaggattatgtccgtgctcaaattctgtcaaggaaga

SEQ ID NO: 231832 - DNA, 451 bp, Gossypium hirsutum; identical to SEQ ID NO: 192972

SEQ ID NO: 231833 - DNA, 438 bp, Gossypium hirsutum
ggtgaactgaatggcagattaaaaattaagggtgcagttgcccaacaatatctaagtacagaaagaatggaagaaaaagaagaagatgctgacagggccaacaggattacaccatcaagatcaaaagctattatacaaagacaaggagagggattccaaagcttttctagacatggcaggtgtgaaggacaagtccaaaattgttttagttgaagacccaattagtcaagaaaagaggttattggagaccagaaagaatgctaagatagagaaggcttctaaatccatctcccaagaagttgataggcttgctggccaagtgtcagcttttgaaacaataatcaccaaaggtgggaaagtagcggagaaagacttgattaattcgattgagctgctgatgaatcagttgcttaaattagatgggattacagccgatgg

SEQ ID NO: 231834 - DNA, 340 bp, Gossypium hirsutum
cccatcagtcaagaattaaaccatggcaacgaatgaagtcaaagttttgggttcctggccgagtccatttgcgatgaggcctaggattgcccttaacctcaaatccctcacctatgaatacattgaagagaagttatgggaaggcaaaagcgagcttcttctccaatcaaaccctgtttacaagaaaatcccagtcctcattcacggcgataacaagccaatctgcgaatctctcatcatcgtacaatacatcgacgaggcttggtcttccggtccttctattcttccttctgacccctgtgaacgtgctgtcgctcggttttgggctgcatatcttgac

SEQ ID NO: 231835 - DNA, 451 bp, Gossypium hirsutum
  unsure (1)..(451): unsure at all n locations
gtggagagccttttttgtgtagcgattctcagttagtcttttctttaagcttacagcttctctccagagttttataatgggtaaggagaaggttcacatcaaccttgttgtcattggccatgtcgactctggcaagtcgaccactaccggtcatttgatctacaagcttggtggtattgacaagcgtgtgattgagaggttcgagaaggaggctgctgaaatgaacaaaaggtcattcaagtatgcttgggtgcttgacaagcttaaggctgaacgtgaacgtggtatcaccattgatattgccctgtggaagtttgagaccaccaaatactattgcaccgttattgatgcacctggacaccgtgactntatcaagaacatgattaccggtacctcacaggctgactgtgctgttctcattattgactcgaccactggtggttttgaagct

SEQ ID NO: 231836 - DNA, 310 bp, Gossypium hirsutum
cgacaactctagggtttttcatcttggtgggccctcctctctagtttcatcgtaaagaaatatgcctaggtatgatgaccgacgcggtggcactcgttcgtatgttggtcatttgtcttcaaggacaagatcacgtgatctagaggacatgtttagcagatatgggagagtacgtgatgtgccgttaatgggaatctatcttggtccacctatattcttgggttggagatgccgatgatgcaagatatgcattgaatggtcgagacatggatggaagccggatgattgttgaatgtgccaaaggagtgcc

SEQ ID NO: 231837 - DNA, 390 bp, Gossypium hirsutum
cccacgcgtccgggtacactgactacaaatagtatccttctgatcatctctctcttcctgatagccaaacgatggctggtattccgatcagattcggaatcattgggtgtgccgagatagcccgcaaagtttctcgagctatccagcttgctcctaacgccactgtctccgccgttgccagccgctccttcgacaaagccgccaatttcgccaaggctaatggcttcccacctgacaccaagatctacggctcctacgagtcccttcttgacgaccccgacatcgacgccgtttatttgcctttacccactagcctccacctcaaatgggctgttttgacggctcagaaaaagaagcatctgctcacggagaagcccgtcgccttgagcg

SEQ ID NO: 231838 - DNA, 450 bp, Gossypium hirsutum
  unsure (1)..(450): unsure at all n locations
cagccattgggaatcccctgctttaaatttctatattccacaaaaatagcgtaacagagcaagaaacacagagaaaaggaaaaccccataatcatggctcgattaacattggtctcctccatcatccttatgctatgctgctttgccgcagcatcaactttcgaggattccaaccctattcggatggtatccgacggtctccgtggctacgagtcctctgttcttcgtgtcattggccatacacgtcacgctatctccttcgcccgttttgcttacaagcatggaaggaagtacgagacggtggaggaaatgaagcttcggtttcagattttcaaagagaatttggatttgatccgatccactaacaagaaaggcttatcttacactcttgctgntaatcagtttgctgattggagctgggacgagttccaaaaacacaggcttggagct

SEQ ID NO: 231839 - DNA, 458 bp, Gossypium hirsutum
cggacgcgtgggttttcttgttccttccttcgccgtctattgctttttgttacctcgatttcaagtgaatcagaatgggtaaggaaaagactcacattaacattgtggttatcggccacgtcgattctgggaaatcaaccaccactggccacctgatttacaagcttggtggtattgacaagcgtgtgattgaaaggttcgagaaagaagctgctgagatgaacaagaggtcattcaagtatgcttgggtgcttgacaagctcaaggctgagcgtgagcgtggtatcaccattgatattgccttgtggaaatttgagaccacgaaatactactgcactgtgattgatgcacctggacaccgtgactttatcaagaatatgattactggtacgtcacaggctgactgtgctgttttgattattgattccaccactggtggttttgaggctggtatctcc

SEQ ID NO: 231840 - DNA, 459 bp, Gossypium hirsutum
  unsure (1)..(459): unsure at all n locations
cagacgctttaaatgatagtgcaaagcccacgaaggaaaaattcagccatatgttttccaagatgaaatgcacatgcattgatttgaatcagttttcaagattcatcaaagacatgaaagcactcttggttgacaaggtttatgttgtcaatgttttaggttattgtgcatacaactttgttttaggtgcttattcttattggggacctaaggctggttacaaaatttataatatgagtgatgcagacctgatatttggaggaataaccattgtctgtggaatattgggcacactagcaggaggctatgttctggatttgatgaaatccacaatccccaatgctttcaaagtagcttctctctgtaacaaacatttttggggcaatcttttgtttcactgccttttgttttcagaacatgtatgctttcttagcttttttctncagtggtgaactactg

SEQ ID NO: 231841 - DNA, 435 bp, Gossypium hirsutum
cggacgcgtgggctgatatcgcggatgagctgaatattccttgggtggcggtttggttggctggccctagggcactcttccttcatttccagaccgatgttattcgccagcatgtaggaattaacagtccggaagacaaaacacttgattttcttcctgaattttctggcattcgtgttactgacttacctaatggaatagcctctggagacattgatgcccccatcccagcattgttgcataaaatgggagtgtcactgtcacgcgccacggcaattgttgcaaattcatacgaagacttagataatacagtggtgaacatgctgaaattaagattcagaatgttcctcaacgttggtcccttcaatctggtatcagtttctagttctaccgtggatgactcgcatgggtgcttggattgggtgagcaagcatg

SEQ ID NO: 231842 - DNA, 458 bp, Gossypium hirsutum
gtttaattcttctttaattaaccgttaatcaaattgaaaatcatacttattttggatttacgaaaagaagtagctatcttttctttgattttcttgttcttgttaagtgatggaaaacaaagcggcggtgaggtttacattagggaagcaatcgtcgatggctccggagagagacagaggcgaagcggatgggaaagagaacgaggaaggagaggagatagacgaaggagttaggttgatgtacttggccaacgaaggtgatttggacggcattcgcgagctcttggactcggggatcaatgttaatttccgcgacatcgatgatcggacggctctccatattgcagcttgtcaaggacagaccgatgtcgtttccttgctccttcagcgcggcgctgacgtcgaatctacagatcgatggggaagcactcctttggcggatgctgtatattataaga

SEQ ID NO: 231843 - DNA, 430 bp, Gossypium hirsutum
cggacgcgtgggtgacctcaaagctgccaccaataatttcagttcagataacatagtttctgaaagtggggaaaaagctcctaaccttgtttacaaaggtcgtttacagaacaggaaatggatcgctgttaagaagtttactgagatggcttggcctgactccaaacagtttgtggaagaagcatgtggagtgggaaagttgagacacaggaggctggccaatttgatagggtattgctgtgatggagatgaaaggctgcttgttgctgagtatatgatcaatgacactcttgctaagcatttgtttcattgggaaaatcaaaccatcgaatgggcaatgcgtttaagagtagctacgtgcattgctgaagctttagattattgtagtagtgagggccatccattataccatgatctaaatgcttacagg

SEQ ID NO: 231844 - DNA, 456 bp, Gossypium hirsutum
aaaaaaaatcatacgcaatgagcactgctggtcaggttattcgttgcaaagctgcggtggcatgggaggcggggaagccactatcgatagaagaagtggaagtggcaccaccccaaaagcatgaagtccgtattaagattctcttcactgctttatgtcacactgatgtatactactgggagtgtaagggttacactcctctgtttcctcgtatacttggtcatgaagcctcagggatcgtggagagtgtgggtgagggtgtgaatgatttgaaacctggagatcatgtgctccctatcttcaccggagaatgcaaagaatgtcgccactgtctgtcagaagaaagcaataacatgtgcgaactgcttaggatcaactgcgaccgaggtgttatgcttgctgatgggaaaaccagattttccatcaacggcaagcctatctaccactttgttggaa

SEQ ID NO: 231845 - DNA, 424 bp, Gossypium hirsutum
ctcttctctcccacacacaccattcaatatctcccataatctctttcaatttttttcttttttcaattctaaaaagaaaaaaaaacccaatttttgtttttttttctaagctatggatggaactggggttgttgcggtctatggaaatggagcaatgaccgaaactcataacaaatccactttctcagtgaaagtggggttagcccaaatgcttcgaggaggtgttataatggatgttgtcacccctgaacaagctcgtatcgctgaagaagccggagcttgtgccgtaatggctcttgaacgagtcccggctgatatccgggcccagggcggtgtggctcgaatgagtgacccacaactcattaaggaaattaagcaagctgttactatccctgtcatggctaaggctcgtattggtcatttc

SEQ ID NO: 231846 - DNA, 428 bp, Gossypium hirsutum
gcaactgggagctcggatcagtttcagtggccaagttagaaattaccaacgaacaatttcacaagtggtgaacctgcttggggatgaaacttcggcagcaaattatttaagcaaatgcatttactcgatcggactcggcagcaacgattaccttaacaactatttcatgcccctttattactccaccagcaggcagtatacccccgagcaatttgctgatgttcttattcaacaatacactgagcagcttcaggctttgtataactatggggcaaggaagtttgcgttgattggggtgggtcagatcggttgcagtcccaatgaattagctcaatacagtggagatggtaaaacatgtgtggagagaatcaatgctgcaaaccggattttcaatgacaagcttaaagggctcgttgatcaattcaaca

SEQ ID NO: 231847 - DNA, 344 bp, Gossypium hirsutum
cccactcgtagctggactcattttccgggggggaagtaacgactaggctggtattgctctcaatggactgcaccacctgctggaagaaactagtgcgatttaccctgggcaagcattcgttgctggcgccggaccgggaaggttcgattagtgtagccatctatgcggggatagacactagggtgaggctaatgtacatggctaacgagggggatctggaggggatttatgagcttttggactctggcaccaatgttaacttcaatgattttcacggtaggacgggccgttatgtattcgtctgacagggccttactgatgtgaaccggttgctcctttgatcg

SEQ ID NO: 231848 - DNA, 439 bp, Gossypium hirsutum
ctcttctctcccacacacaccattcaatatctcccataatctctttcaatttttttcttttttcaattctaaaaagaaaaaaaaacccaatttttgtttttttttctaagctatggatggaactggggttgttgcggtctatggaaatggagcaatgaccgaaactcataacaaatccactttctcagtgaaagtggggttagcccaaatgcttcgaggaggtgttataatggatgttgtcacccctgaacaagctcgtatcgctgaagaagccggagcttgtgccgtaatggctcttgaacgagtcccggctgatatccgggcccagggcggtgtggctcgaatgagtgacccacaactcattaaggaaattaagcaagctgttactatccctgtcatggctaaggctcgtattggtcatttcgttgaagcccaaatc

SEQ ID NO: 231849 - DNA, 443 bp, Gossypium hirsutum
taggaattctcctctgttgctttataagatgagattgatccagggaatagctaattttaggcgtctttacgctaattctatagacttgaacacaaaatcctacctctccacgacaaagcgtgcattttgcaggccaagtgaacacgcaaaggtcgttaacaccaccatcacttgttctccattttattgcagcaataacttaggatcgagatcccattcaagcagacccgaaatggaggggatagagcatagggtaatcaaagccaatggcataaatatgcacgtcgctgagaaagggaaaggccctgtaatccttttcctccatggattcccagagctctggtatacatggcgccatcagatcactgcttttgcctcgcttgggtaccgagctttggctcctgacctgcgtggatttggggaaacggaggcacccgatgatg

SEQ ID NO: 231850 - DNA, 436 bp, Gossypium hirsutum
cggacgcgtgggctctcttcttaggtctgctgtatcttagttcttgattaattagccaatcacagcagccatgtctctcctcaatgatctcatcaacctcaacctcagcgacaccactgaaaagatcatagccgaatacatatggatcggtggatctggtatggatctgagaagcaaagcaaggactttgcctggaccagtgacggacccttcaaaactcccgaagtggaactacgatggttccagtaccaatcaagcacctggagatgacagtgaggtcattctttatcctcaagctatattcaaggatccatttagaaaaggaaacaacatcttggtgatgtgcgatgcttacacaccagccggcgaacccattcctaccaacaagagatttaatgcggccaagatctttagccaccctgatgttgttgctgag

SEQ ID NO: 231851 - DNA, 313 bp, Gossypium hirsutum
gctcattgctacctttgtgatcctattccaagggggagtgtgatctgttcttattcactccatttctttaacccatggctctttgcgtggagaaaaccgccgccggccgtgagtacaaggtcaaggacatgtctcaggctgacttcggtcgtctcgagatcgagttggccgaggtcgaaatgcccggtctcatggcttgccgagccgagttcggccctgcccaacctttcaagggagccaaaatcaccggttctcttcacatgaccatccagaccgccgtcctcatcgaaaccctcaccgcccttcgagctga

SEQ ID NO: 231852 - DNA, 423 bp, Gossypium hirsutum
cttctacgtagttcacacagtgattttagtgtaaaaacccgagatgggaaagaatacgacatcccaaagggtcacatcgttgcaacatctccagcatttgccaacaggcttccttacatttacaaggatccagacacatatgatcccgatagattctctgttgggagggaagaagacaaggtagctggggctttctcatatatttcctttggaggtggcaggcatggttgccttggtgaaccatttgcttaccttcagataaaggctatatggagccatttgttgaggaactttgaattggagcttgtgtcaccgtttcctgagattgattggaatgctatggtggttggtgtgaaaggaaaggtgatggttcattacaagcggcgacagctttctgttaattagccaaataatatttgcgag

SEQ ID NO: 231853 - DNA, 457 bp, Gossypium hirsutum
cccacgcgtccgcttgggctgtcccttggtgggtgtttctttaggttttcttggtcgcgacgattttcagtggcttgtaaatggcagcgtataggctcctgattttctccctctttttggccctagttttcaccaggattggagccgatgcctcaactgaaccgctgcttgaatcggacgccgccgattcttctgctcttaagatggagttggatcaactgaagtctaagatccgtcttcttgaatcaaatgttgaggagaaaattcgagaattgaaaaccaaggatgagatgataaagcagaaagataaaattatagaagaaaaatctgacaccatggcatcgttgcactctgaattatcatctcttcagaaaaaaggaaccccatatgctgaggaacgggtgggaaaagctcatgcgaaagctctttgattgcagaaacaggttgatagacttaa

SEQ ID NO: 231854 - DNA, 402 bp, Gossypium hirsutum
ccacctacagtgcaaaaattagccaaaactcaaactgctagtcgccaccagccacctttgttttaagatttgctcaattgtcacggcgccttcggcgaggagcggcagcagcttcttccttctccgcctcttcagccttttctccactgcttccttcaccatttgatgtttcagcaacctctggtttcttctctactattggttgtttcttcccaccaaaaatgagcttgaagaaaatcgtgagaataatcaccacaatagagaccaagacaccaatggtgaggttcggctgtgtctcagcatgctcaataagatcgagaatttgatgcttgtatttgcttaaggaaaggaatgtcaggcaccttgtataagacatcaaaaaccttcctctgaaagtctgcg

SEQ ID NO: 231855 - DNA, 366 bp, Gossypium hirsutum
cccacgcgtccgggcaagaaatccaagttgggtttcactgtcttcccatcaccccaggtctccacatctgttgttgagccctacaacagtgtcctctcaactcactcccttttggagcacactgatgtggctgttcttcttgacaatgaggctatctatgacatttgcaggcgctctcttgacattgagcgacccacttacaccaatcttaaccgtcttgtctcccaggtgatctcctctttgactgcttcacttaggttcgatggtgccttgaacgtggatgtaacagaattccagaccaacttggtcccttacccaagaatacacttcatgctttcttcatacgctccagtcatctccgctgag

SEQ ID NO: 231856 - DNA, 391 bp, Gossypium hirsutum
  unsure (1)..(391): unsure at all n locations
gaagaaggttatcatttctgctcccagtaaggatgctcccatgtttgttgtgggtgtcaatgagaaggaatataagcctgaccttaacattgtctccaatgctagttgcaccaccaactgtcttgccccattggctaaggtgatcaacgataaatttggcattgttgagggtcttatgaccaccgtccattctattactgctacacaaaagactgttgatggtccttccatgaaggactggagaggtggtagagctgcttccttcaatatcattcctagcagcactggagctgccaaggctgtcggcaaagttttgccagcactgaatggcaagctgactggaatggctntccgtgttcccactgttgatgtctctgtggttgacctcact

SEQ ID NO: 231857 - DNA, 457 bp, Gossypium hirsutum
ggcaaaaccatttattttggccaggcttctgaagcatacgagttctttgctcaagccggatttccatgccctgccttgagaaatccatctgaccattttcttagatgcatcaattctgactttgatagagttaaggctactctcaaaggatccatgaaattacggtttgaggcaagtgatgatcccctggagaagattaccacaactgaagctatccgaactcttattaacttctaccgtacatcacatcaatgttatgccgcgaaggaaaaggttgatgagatatccaaagttagaggaaccgtgctagattccggaggcagtcaagctagtttcttgatgcagtcttacactttaaccaagcgttcattcgtgaacatgtctcgagacttcggctattattggctaaggctgctcatatatgttgttgtcactgtttgcattggaaccatttatc

SEQ ID NO: 231858 - DNA, 387 bp, Gossypium hirsutum
atttttgtatatattagtccataatctctccatgtgagcaataggaaaattttgagtgttgtttggctttgttttctctgtaggatctgaaaaaaaaaatgtcgtcaaatggaactgacaactcaacttctaagaagcctccaagtccttctcctttgagattttccaagttttttcagcccaacatgagaattcttgttactgggggagctggattcattggctcccatttagtggataaattgatggagaatgaaaagaatgaggttattgtcgtcgataactactttaccggcacaaaggacaatctcaagaaatggatcggacatccgagatttgagctcattcgtcatgatgtcactgagccgttgctcattgaggttgatc

SEQ ID NO: 231859 - DNA, 460 bp, Gossypium hirsutum
gagaaagaggggttacagttaaacccaaaaagaagcaaaaggaagaatggttggtgatggaaagttgttcactttggctcaagtctctgagcacaacacccccaaagattgttggctcatcatcaacggcaaggtttacgatgtggcaaaatttttggaagaccatcctggtggcgacgaagtgttattatcagcaacagggaaggatgccacagatgattttgaggatgttggacacagtgatagtgcacgagacatgatggatcaatactatgtcggagagatcgacatctcaactatccccaagaagacgacatataaacccccgaaccagccacactataatcaagacaagacatccgagttcatcatcaagctccttcagttcttagttccccttgccatcttgtgtttagcccgtggtattcatcactacaccaaatcgtcttaaaaataatcg

SEQ ID NO: 231860 - DNA, 454 bp, Gossypium hirsutum
  unsure (1)..(454): unsure at all n locations
gagagagagggaggaaaagatgcagatattcgtgaaaccgctaaccggcaggaccataactctcgaggtcgagagcagcgataccattgacaacgtcaaagccaagatccaagacanaggaaggaatcccaccggaccaacaacgtctcatcttcgccggaaaacagctcgaagatggccgtaccttggctgactacaacatccagaaagaatcaacacttcatcttgttctgaggttgagaggtggaattattgagccttctttgatggctttggctcgcaaatacaaccaagacaagatgatttgccgcaagtgttatgctcgtctgcatccaagagccgtgaactgccgcaagaagaagtgtggtcacagcaatcagttgaggccgaagaagaagatcaagtagatcccgactggtgttatcctgtctgctttaaaagaaaatgaatgtca

SEQ ID NO: 231861 - DNA, 393 bp, Gossypium hirsutum
attcaacgagagaaaaacaaaaaaacactcccgaaatggcacgcaagaagatcagagagtacgattccaagagattgttgaaagaacatttcaataggctttccggtagagatttgccaatcaaatctgcacaaattacggaatcaactgatttcaatcagctagtagagaaggagccatggctttcgtcacagaaactggttgttaaacctgatatgttgttcggtaagcgtgggaagagtggtttggttggcttaaatctggattttgctcaagttattgctttcgtgaaagagcgccttggcaaagaggtggaaatgagtggatgcaagggacctgttacaactttcattgttgaacctttcatccctcacaatgaagagttctacctta

SEQ ID NO: 231862 - DNA, 407 bp, Gossypium hirsutum
  unsure (1)..(407): unsure at all n locations
cacttggctgctagattcaataagccagacaatgagatcatcgaccactacacatatgttattttgggagatggttgccagatggagggtattgcaaatgaagcttgttcacttgctgggcactggggacttggaaagcttatagctttctatgatgacaaccacatttccattgatggagacactgaaattgcgtttacagagagtgttgataagcgttttgagaatggaaacactggctacgatgaaattcgtgctgctattaaggaagcaaaggctgtcaaagacaagcccactctgatcaaggtgacaaccaccattggttatggatctncaaacaaggcaaactcatacagtgtacatggtagtgcattgggtgccaaggaaagtgacgctactaggaaaaa

SEQ ID NO: 231863 - DNA, 371 bp, Gossypium hirsutum
gtgccttacttcatctcagaaaacaaagaaaagaaaaggtcatttcaaccatggcttccaattcgaagaagcccgctactgctgatgagaaatcggctttggaaacggagagcaaaagttcaaagtctgaaacatcctccactgagaagaaaacttcaacacctgagccttcaactgggggttcacagccagcacaagcaggggccttccctcccaacgctatgcctggtcctgggtttgtcccacccaatccatttgatttctcagccatgagtggccttcttaatgatccaagcatcaaggaactagctgagcagatagccaaagatccttcatttaatcaaatggcagagcagctcactaaaacgttt

SEQ ID NO: 231864 - DNA, 431 bp, Gossypium hirsutum
gccaattgtttgagctagctagctcttactcaaatggcaaccaaaacgatgatgttgcaaatatttccacttttcttctttttgttcagtgtctgcaactccattttccttggtgctaatggagatgacaatggtggttggcaaactgcccatgccaccttctacggtggtgctgatgctaccggcacaatggggggagcttgtggttatggaaacctgtacagtcaagggtatggaacgagcacagcagctttgagcactgcacttttcaacaatggcttgagctgcggtgcctgctacgagctccggtgcaacaatgatcctcaatggtgcattagtcgaaccataaccgtgacagccaccaacttttgtccacctaactatgctttatctagtgacaatggcgggtggtgcaatcccccacgagaaca

SEQ ID NO: 231865 - DNA, 402 bp, Gossypium hirsutum
ggcggacctccgggtattaatccttcatttttctcgcaaccgtgaaaaagggggctgcctttcacaaagctgttcagccggcttttggccaaaaaggaaatgcgtttatggatggtgggacttgatgctgctggtaaaaccaccattctttacaagctcaagtggggagagattgtcaccacaattccaaccattggtttcaatgtggaaactgtggaatacaagaacatcagctttactgtctgggatgttggtggccaggacaagattcgtccattgtggaggcattacttccaaaacacacaaggactcatttttgtggttgatagcaatgatcgtgatcgtgtggtcgaagccagggatgagttgcacaggatgttgaacgaggatgagttgagggat

SEQ ID NO: 231866 - DNA, 305 bp, Gossypium hirsutum
  unsure (1)..(305): unsure at all n locations
gagttggcaaggatgattctcatgagaattcaagtgactgggatagccacactccttgtgttggtggcattaattttgggtcaaaaaggagctgaggccaggaaaggaaggatattggagtcgtttgagtacatagctatgagttgcagagcgcactctgcatcaataactgattttggaggaattggtgatgggaaaacatcaaatactaaagcatttcaagatgcagttaatcatctgagccagtatgcaaatgatggcggngctcagttatatgttcctgctggacaatggctgactgggag

SEQ ID NO: 231867 - DNA, 429 bp, Gossypium hirsutum
gggggaaaattgccccagatggcaatgaagcgagaaagaggagcgagaaaggagactccaaatccctcaatgcctatttcaagcagaggaagtcacgaacagaagacttcaaatgccgggatcttgaaggagaaaatcagaaacaaataagagaatcgggaaatgaaaataagggcaagccgggaaaagggttcttcgcttgctatctgctaacctctctcagccctcgtcataaaggccacacctatatcggatttactgtgaacccactgcgtcgaataagacagcacaatggggaaatagggagtggtgcttggaggacaaagagccgacgcccgtgggaaatggttgtgtgcatatatggttttccaaccaatgtatctgctcttcagggccgatatataaaatatattttatattttatatata

SEQ ID NO: 231868 - DNA, 338 bp, Gossypium hirsutum
ttttcactcttttcagtcctacccaaaggcggcccctcaactctcctctcctttagcaatatctttccccttcactgtttcaactcaaagaaatggcggaggagaagaaggctcaatctgctggggtttggcctacggttaaaccttttgtcaatggtggtgcctctggtatgcttgctacctgtgtcatccaacccatcgatatggtcaaggtaagaatccaactgggtcaaggatcggcagcaactgttaccaagaacatgcttagggaggaaggtgttggtgccttttacaagggtctatcagcaggactgctcaggcaagctacatacactact

SEQ ID NO: 231869 - DNA, 378 bp, Gossypium hirsutum
gtttcaaatatagtaaaaaaattcatacgcaatgagcactgctggtcagggtatgggttgcaaaactgcggtgacatgggaggcggggaagccactattgatagaagaagtggtagtggtaccaccccaaaagcatgaagtccgtattaagattgtcttcactgctttatgtcacactgatggatactactgggagtgtaagggttacactcctatagcttctcgtatacttggccatgaagcctcagggatcgatgacagtgggggtgagggtgttaatgatattgaaccagcagatcatgtgctccctatattcaccggagaaggcaaagaatgtagccacttgctgtcagaagaaatcaataacgtgagccaact

SEQ ID NO: 231870 - DNA, 442 bp, Gossypium hirsutum
caaaaatggcagctccggcagtggagggagtagccgtgacggccctccgatcggtcctactccgagtccgacaggcagctgaacgggcgggtactcaacccgaacgggtccgggttgtggccgtttcgaagactaaacccgtgtcactcatccgccaaatttacgacgccggtcaccgctgtttcggtgaaaattatgtccaagaatttgttcaaaaagcccctcagctgcctgaggatattgagtggcattttattggacatttacagagcaacaaagttaaaacccttctcggtggagtgccaaatctagccttttttcagggtgttgataatgagaagatcgcaaaccatcttgaccgtgcagttttgagccttgagagaaaccctttgaagatttttgtacaagtaaatacaagtggagaaccatcaaaatctgggat

SEQ ID NO: 231871 - DNA, 412 bp, Gossypium hirsutum
ggctttccccaaagatgatcctactaagccatgcagattaactgcgttcttgggttataaagctggaatgacccatattgtgagggaagttgaaaagcctggatcgaagcttcacaagaaggaaacttgcgaagcagttaccattatcgagacaccgcctatggttgttgttggagttgttggatatgtcaaaacaccgcgtggtcttcgtactttaggcactgtatgggctcagcatttgagtgaggaggtgaagcgaaggttctataagcactggtgcaagtctaagaagaaagctttcaccaagtattccaagaagtttgaatccgaagatggtaaaaaagatatccagtcacagcttgaaaaactgaagaaatattgcactgtgattcgtgttttggctcacactcag

SEQ ID NO: 231872 - DNA, 425 bp, Gossypium hirsutum
tcggacacccgtacgatgggttcagcgggcgtaagagtcatctcgtatcgtgcgtggagttcgtgtgcgcatctgtctgcaaatgaaaaagcggtagacctagtgtcgcttgcgcttggtcgaactgataaccttatcatggccctatacgttgaatatcacgcgaggctagaggacaatacatgcgcggctggtgccgattatgcttcatcgcagcctgctacaggtaagaatggcaggacaggtcacagcagtgataagttcaatggcgctggatccatgcgccaggtttgagcaagtgatcgcggccgaggtcgatcgttagattcaatgaaggttggcctccgattatgacggcgcttgaagcgatggaccactcgatccggattgagctggaagtggctcagcacttgggtgaaaacatg

SEQ ID NO: 231873 - DNA, 436 bp, Gossypium hirsutum
  unsure (1)..(436): unsure at all n locations
agcagctgcaccacggagaagagagaaaaactgaaaaaggggaaaaaaagcgtcgtcgnttttgcttcttcttcttctttttcttcttccctctctctctttctcagaagctcctctttcgttcttttgttcactaagtattgtaaaagatggccgacggtgaggatattcaacccctcgtctgtgataatggaactggaatggtgaaggccggttttgctggtgatgatgctccaagggcagtttttcccagtattcgttggtcgtccccgacacactggtgttatggttgggatgggtcagaaggatgcctatgtaggagatgaagcacaatctaaaagaggtatccttactttgaaatatcctattgagcatggtattgtgagcaactgggatgatatggaaaagatctggcatcatacattctacaatgaac

SEQ ID NO: 231874 - DNA, 305 bp, Gossypium hirsutum
gtcaattggaagggggaaacattacacggtgtcaagaatttaacatacagcgacatggacaagctgccaatatcaaatgttccagacggatcaaaaaggatgtgggagcatattgctatcacatatgtatctgcactttggacatcatatgcgctatatgatcaatacacaaaattatctggtatgaaggtacgatatctaacgtcagacaatatgccaacctgatcaatgcactggtatttagagaaatgctgctactgactctgatgaaacagcatgagcgcacatcgaacattgtgttcaag

SEQ ID NO: 231875 - DNA, 442 bp, Gossypium hirsutum
gtcccttcttatctttgcagggagaatagagaaagaatatccaatggaaggctacaagaatgcttctaaacacatagcagggtaggctttccctttcggcacccatgctgtccctcttctcaacattatccgacaactatcaaacacttgccccgacaccatgttttccttccttagcacccaacaatcaaacaactcaacttttcccaaaaaccttgataaaattaagccttttaatgtatgggatggattacctgaggggtatagctttagggggaatcctcatgagcccgtcgattatttccttaaggcagttcctgggaattttataaaggctatagatgctgttgagtctgaaactcggaaaccaattgattgtttgataacagatgcattttatgcaattggggctgatatcgcggatgagctgaatattccttgg

SEQ ID NO: 231876 - DNA, 346 bp, Gossypium hirsutum
cccacgcgtccggtgaaaatcaagaagaaaaaaaaacccttaaaatcaaaaccctaatcctattttttttttttcctttttgattgtagaaaacaaagcaagccctcaactggacaacatggggtctgaacagaatcaaggaaccagctttcccccgtcggagccgaagctttgcgctaacggttgcgggtttttcggaacggcggcgaacatgaacctctgctccaagtgttaccgggacctccgtgctggggaggagcaagcggcgaaggtgaaagctgccatggagaaatcccttagcgtcaaaccgaaagaagatgttgttgtggagacgtttaagcccgtt

SEQ ID NO: 231877 - DNA, 439 bp, Gossypium hirsutum
gtcgtcgtcttaaatgtaagatttgtttgtttgttgttgttattgcttttaagtttggaaagagatgaatcctctgtgctgcattgctccggtttccatcgatcgtgaccgagctaacccggtggttaccaaatcgggtccgcaatgtcagctaagcatcgaaccttccgtcagaacagttaactattcgaaaccgagtttctcctcacaagtctcctcagtcaacgccgacactgacagatcctcgccgtcggtaatgaatcacacctccatggcaatattcgacgaacctattatcagagaggttaacgccgcccacggcgtcgcccggatcctgtacaaatgggtgaattatggaaagggatggaggtcgcggtggttcgttttggaagacggagttctctcgtttataagattcacggacctgataggatttgat

SEQ ID NO: 231878 - DNA, 446 bp, Gossypium hirsutum
ggttaggtcagccaattgtttgagctagctagctcttactcaaatggcaaccaaaacgatgatgttgcaaatattttcacttttcttctttttgttcagtatctgcaactccattttccttggtgctaatggagatgacaatggtggttggcaaactgcccatgccaccttctacggtggtgctgatgctaccggcacaatggggggagcttgtggttatggaaacctgtacagtcaagggtatggaacgagcacagcagctttgagcactgcacttttcaacaatggcttgagctgcggtgcctgctacgagctccggtgcaacaatgatcctcaatggtgcattagtcgaaccataaccgtgacagccaccaacttttgtccccctaactatgctttatctagtgacaatggcgggtggtgcaatcccccacgagaacactttg

SEQ ID NO: 231879 - DNA, 403 bp, Gossypium hirsutum
gctcgtgccatttagtggtttaagggattttttcatttgtttcttcttacgctcgattacctcacgaaaagagaaaatgaccaagtgttacccaactgtgagcgaggaataccagaagtcagttgaaaaggctaagaggaagctcagaggtctcatcgctgagaagaactgtgctccactcatgctccgtctagcgtggcactcagctggaacttttgatgttaagaccaagacaggaggtccattcggaaccatgaagcatcctgctgagctcgcacatgctgctaacaacggccttgatatcgccgtcagacttctcgagccgatcaaggagcagttccctaacctcacctacgctgacttctatcagctcgctggtgtcgtcgccgttgagattactggt

SEQ ID NO: 231880 - DNA, 443 bp, Gossypium hirsutum
gaaggctgattggcatgcatgtcttgataacaatgttggattcaagggttttgctgtgccaaaggaagagcaggataaagttgctaagttcacattccatggcctgcctgccgaacttagacatggaagtgttgtaattgcggctatcaccagctgtacaaacacatcaaaccctagtgtcatgcttggggctgggcttgttgctaagaaggcttatgaactaggtttggaggtcaagccatggattaaaacaagtcttgctcctggatctggagttgttacaaagtatttacttcagagtgggctgcaaaaatacttaaatcaacaaggttttaacattgttggttatggctgcacaacttgtatcggaaattctggagaacttgatgaatcagttgcttcagcaatttcggaaaatgatatcattgctgcagccgttcttt

SEQ ID NO: 231881 - DNA, 406 bp, Gossypium hirsutum
  unsure (1)..(406): unsure at all n locations
aattgctgttggtgaggcagtggcgtacgttctgtctggtatgtacggcagtgttggtcagctcggtgttggaaatgccattcttattattattcaactttgctttgctggaattattgtgatctgcctcgatgaacttctccaaaaggggtatggtttgggctctgggatctcccttttcatagccaccaatatctgtgaaaacataatctggaaagcctttagccctacaacaatcaacagcggtcgtggggctgaattcgaaggtgctgtcattgccatgttccatcttttaataaccaggacggacaaagttcgagcacttcgtgaagctttctaccgacagaatcttccaaacgttacaaatttactcgctacggntttgatcttccttattgttatctac

SEQ ID NO: 231882 - DNA, 444 bp, Gossypium hirsutum
cccacgcgtccggatttgtacaagtttgatccatgggaattgccagcgaaggcaacgtttggtgaacaagaatggtacttttttagtccgagagacaggaagtatccgaatggagcgagaccgaacagggcggctacctcgggttactggaaggcaaccgggacggataagccggtgttgacttcgggagggactcaaaatgttggtgtgaagaaggcactggttttttatggagggaagccccctaaagggatcaaaaccaattggatcatgcatgaatataggcttgctgataataagactaacaacaaaccccctggatgtgacttgggcaacaagaaaaactcactaaggcttgatgattgggtgttatgtcgaatctacaagaaaaacaacgcgaatagacctctggaacatgataaagatgactccatggatgacatg

SEQ ID NO: 231883 - DNA, 441 bp, Gossypium hirsutum
attgaggttcttcgtttaggccctgctgggattgttagtctctggaattcccttcattttgatcttgttcacatcttgtgctcttgtttcttcattatctttgtagccactgtttacttcatgtctaagcctagaagcatttaccttgtggattatgcatgctacaaacctcctgtcacttgtcgtgttccttttgctactttcatggagcactcgaggctgaacttgagcaacaaccctaagagcgttgaatttcagatgaggattctagaaaggtctggtcttggtgaagagacttgtttacctcctgctattcattatattcctccaactccaaccatggaagctgctagaggcgaggctgagattgttatattctcagctatggattctttgttcaagaaaacggggttaaaacctaaagacgttgatattcttatt

SEQ ID NO: 231884 - DNA, 437 bp, Gossypium hirsutum
cccacgcgtccgattcttcttccttttcttgtttctctctttcttcccctttcagctattgagatcgcgtttcactcagttctggaaaaaagatggggattattgagaggattaaagaaatcgaagccgagatggctcgaacccagaaaaataaggccacagagtaccatcttggtcagctcaaagcaaagattgctaagctaaggacacaattactcgagccaccgaaaggttctagtggaggtggagacggttttgaagttacaaaatttggtcatggacgtgttgcactaataggatttccgagtgtggggaaatctacccttttgactatgttaactggaactcattcagaagctgcatcttatgagtttacaacacttacatgcattcctggtatcatacattacaatgatactaagattcaactgctcgat

SEQ ID NO: 231885 - DNA, 375 bp, Gossypium hirsutum
ggcgagcgagccactgtaatcttttcctttcgttacaactttctcttcaggtctctttgagtccaaaccatggccaccggacagatgttttctcgaacaactcaagccttattctataactacaaacaacttcctattcaacgcatgcttgattgagatttcctttgcgggagggatacaccgtacgccgctggtatcattaatcctggggccgagggatttcagaaactcttctttggtcaagaggaaatagcgatcccagtgcattcaaccattgaggcagcatgcgctgcacatacaactgccgatggttttattaactttgcatcatatcgaagtgctgctgcttccgacatgtttgctatgaaacaacct

SEQ ID NO: 231886 - DNA, 445 bp, Gossypium hirsutum
cggacgcgtgggctttttatttttttcagagcctccttcaccaacctccgctctgttcagcccgtgatcttttgatctttctccatggctaccatttccaagctcgctaaccccaacccagtcgcttctctttcattatctttcaaacccagatcttcttcatcgcttaaatgcttcgttgggttccctaccaggcctgctttcagctctaagctggtttcatcttctagcttgtcctcgataaacacccaccctttcaggggctccttggttgtcaggtgttctcttgctgatggaaacggtagttcagtgaagacgactactttgcatgatctgtatgaaaaagaagggcagagtccatggtatgacaacctttgcaggccagtgaccgatttgctgccactgattgcaagtggggttagaggtgtaactagcaacccagcga

SEQ ID NO: 231887 - DNA, 435 bp, Gossypium hirsutum
ctttggaagcatggacttcatagctactatcctgtttctagctcttgtcatctcctccaccaaagctttggacccttgcggccctcagccagatgactcggaccttttggtcatcccaatctatggcaaatgttcaccattcaacccacccaaacctgactcatcgttcaacacagtcatgaacatggcatcaaaagacccagcaagggtcaagtacttgtcgagccttgtagcccaaaagaccactgcggttcccattgcttcaggccaacaagtcctaaacattggcaactatatcgtccgggtaaagattggcactccgggtcagctcatgttcatggtattggacactagcaatgatgtggcttgggtcccatgctccggctgcaacgggtgctcagccaccactttctcacccaacacttcttccaccta

SEQ ID NO: 231888 - DNA, 412 bp, Gossypium hirsutum
ctctctctgggtctcaaattccggggctccgtgcccctaatacgaaaccgagcaaaacccaactctgatttactcctaattggtactggccgggtattttccatcactttcctgggaaaaaaaagcataaaaggaaaaagtttcaggagaaatgtactcagctattcggtcgttaccgttgaatggaagtgtaggagattatcaagggtcgtttgatggaaccaacttgcctagcgatgcttgtttggttttaacaacggatcccaagcctcgactccgttggacagctgagctccatgaacgtttcgtcgatgctgttactcaacttggtggccctgacaaagcaaccccaaagactattatgagaacaatgggagtaaaaggccttaccctctatcacttaaaatcacac

SEQ ID NO: 231889 - DNA, 412 bp, Gossypium hirsutum
ctattatctcgttttgggatgaattaagtgaataaagtttagttctctttgcgcgtgtcccgttctcttctccaatcctccaaaacttgaacttaaaaccccattttagttgatcccaaagttgacccctttttttgtttcagtatagtaatataccaagcctttgcttaaatggaggttaagctatggaacgacaagcgcgagagagaaatgtatgagaattttgcagagctgtatgccattatcaaggcaacagagaagcttgaaaaagcttatgtgagggatattatttcatcatctgaatatgagactgaatgccaaaagcttattgcccatttcaagaccttggcttcaacactcaaagatacggtccctagtattgaacgttttgcagatacatataaaatggact

SEQ ID NO: 231890 - DNA, 341 bp, Gossypium hirsutum
  unsure (1)..(341): unsure at all n locations
aacagttgaaaatatctctctcttcgcgtttcttctcttttcaacgcagggtgaaaggcggggaggccgtanacaatctctcttgcgctcttctcgtagaatggatcagattcaacatccaactgtcatgcagaaggtagctggccagctcctttcttctagcatttcccgagattttcaagggtatgatgggtctttcaggaggcctgccctataccaaggacattttgcatatgggaattattccaatgctggaatgcactatcctattggtccatcaacagctaccggcatttgtgttcaagcccctgctgagaaaggatttaccagctttgccattg

SEQ ID NO: 231891 - DNA, 360 bp, Gossypium hirsutum
cggacgcgtgggttcccactcttcaattcctcatttcaagggagagagtgtatcagtgtttcttcccctcttttacttaatttctctccgccatggctctctccgtcgagaaaaccgccgccggccgtgagtacaaggtcaaagacatgtctcaggctgacttcggtcgtctcgagatcgagttagctgaggttgaaatgcctggtttaatggcttgtagaaccgagttcggccctgcccaacctttcaaaggagccaaaattactggttctcttcacatgaccatccaaaccgccgttcttattgaaacccttaccgccctcggagctgaagtccgttggtgctcttgcaacattttct

SEQ ID NO: 231892 - DNA, 429 bp, Gossypium hirsutum
ggcggttctttggagcttaagaggaagaggcattctttcactcccaaaatgtcagatcttcaagcaccccttcgcccaaagaggaagaagggcttggtggactttttggtccagtttcgttgggtttttgttatattttttggccttcctttttcggctctgtattactttctcatatatcttggagatgtcagatccgagatgaagtcctacaagcagcgtcagaaggaacatgatgaaaatgttaagaaagtagtgaagcgtctcaaacagaggaatccaaaaaaggatggtcttgtatgcacagcccgcaaaccatggattgcggtggggatgcggaatgtagactataagagaactcgccattatgaagttgatttgtctgctttccgtaacattcttgaaattgatagagagagaatgattgca

SEQ ID NO: 231893 - DNA, 443 bp, Gossypium hirsutum
ctcatttcaagggagagagtgtatcaggggtgcttcccctctttacttaatttctctccgccatggctctctccgtcgagaaaaccgccgccggccgtgagtacaaggtcaaagacatgtctcaggctgacttcggtcgtctcgagatcgagttagctgaggttgaaatgcctggtttaatggcttgtagaaccgagttcggccctgcccaacctttcaaaggagccaaaattactggttctcttcacatgaccatccaaaccgccgttcttattgaaacccttaccgccctcggagctgaagtccgttggtgttcttgcaacattttctctacccaagaccacgctgccgctgccatcgctcgtgactccgccgcttgtttcgcttggaaaggggagaccctccaagaatacttgggggtactgagagagcccttgattggg

SEQ ID NO: 231894 - DNA, 450 bp, Gossypium hirsutum
ctcactttagcttctccacaaaaccccaagccaaatctttagcggttgtagtcactactcctctgctctccacgttctctctcaaccagcaatgggtattaagggtttaacgaagcttctagcagacaatgcgccaaaggccatgaaggaacagaaattagagagctatttcggccgcaagattgccatcgacgccagcatgagcatttaccaatttctcattgtcgtgggtcgtatggggactgaaatgctcaccaatgaagccggtgaagttaccagtcatttgcaaggcatgtttactcggacaattcggcttcttgaagctgggcttaaacctgtctatgtttttgatgggcagcctccagatttgaaaaaacaagagcttgctaagcgttactcaaagagggcagatgctactgaggatttgcaagaagccatggagactggaaa

SEQ ID NO: 231895 - DNA, 441 bp, Gossypium hirsutum
  unsure (1)..(441): unsure at all n locations
gcctgaaagcaggcacttacaaggggaagaaattcaatgctatttgccacttctttggctatcaagctcgtggatccttaccatcaaaatttgattgtgactatgcctatgttcttggacatatctgctatcatattcttgcagctggtctaaatggttatatggcaactataaccaacctaaagaatcctgtgaacaagtggcgttgtggtgctgcacctcttccagcaatgatgactgtgaagcgctggtctcaaaatcccaatgccgcgtcaattggaaaacctgctattcatccagctactgtagatttgaaaggcaaagcatatgagatgctgaaacaaaatgcaacaaggtttttgctggatgatatctacagaaatcctggacccctccagtttgatggtccangtgctgatgctaaggctgtgacattatgtg

SEQ ID NO: 231896 - DNA, 367 bp, Gossypium hirsutum
cctaaattgagagagacagagagagatatggggaaagacgaggaggagatgcgtggcgagatcgaggagcgactcatcaacgaagagtacaaaatttggaaaaagaacactcctttcctctacgatctcgtcattacccatgcccttgaatggccttctctcactgtcgaatggctccccgaccgtgacgaacctgctggcaaagattactccgttcaaaagatgatcttgggtacttacacctctgaaaacgaacccaattacctcatgcttgctcaagtccagctccctctccaagattccgagaacgacgctcgtcaatatgaccacgataggtctgacctcggtgggtttgggtgtgctagcg

SEQ ID NO: 231897 - DNA, 417 bp, Gossypium hirsutum
tcagtttcaaacaagggcttgattgcaattgcagagaactgccctaatttgacctctttgagcatcgagtcttgccccaagattggtaacgaaggccttcaagctatcggaaagctttgccctaagttgcaggctgtctgcgtcaaggactgccttcttgttggggatcatggagtttcaagcctgttgtcgtcaacatcttctctcctttcaaaggttaaatttcagggtttgaatatcacagacttttctcttgctgagattggtcactatggcaagtcggtgacaaatctaatgcttagtggcctacaaaacgtgagcgagaagggattatgggtcatggggaatgctcaaggcttacaaaagttggtctctttgacgatcacatactgccggtgggtaacagatgtgagtctt

SEQ ID NO: 231898 - DNA, 427 bp, Gossypium hirsutum
aaactaagggggagaaagagaaatgaagcattggggtctgattttgctcctttttttgttatttcaacaaggaaattttctcctgcgtgtcaaagctgatgacgggtttatcaaaactaaaggactgcagctaatgttgcatggaagtcctttctatgcaaatgggttcaatgcttattggctcatgtacatggccgctgattcatctcagagaagcaaagtctcatctgcgtttcaacaagctaaagagcacggtctcaccatagccagaacttgggctttcagtgatggtggagacaggcctcttcagtactcgcctggctcctacaatgaacaaatgttccagggattggattttgtagtatctgaggccaagagatatgggattaagctggttttaagcttcgcgaataactatgatcaattt

SEQ ID NO: 231899 - DNA, 452 bp, Gossypium hirsutum
cttccactttgtatgctattgcttgtgttcttgaaaatgttcctttcatcaatggcagcccacaaaacacctttgttccagggttgattgatttggctattcaaaggaactgtctgattggaggagatgacttcaagagtggccagaccaagatgaaatctgtcctcgtggatttccttgttggggctggtatcaagccaacatcgatagtgagttacaaccatctgggaaataatgatggcatgaatctgtcagcaccccaaaccttccgttccaaggagatctcaaagagcaatgttgttgatgacatggtttcaagcaatggaatcctctatgagcctggtgaacatcctgatcatgttgtggtcatcaagtatgtgccgtatgtgggagacagcaagagagccatggatgagtacacatcagagatattcatgggaggcaagaacacc

SEQ ID NO: 231900 - DNA, 438 bp, Gossypium hirsutum
aacagaaaacgggttaagccagagtctgagcggcccctcttatcacaccctgtctccgaccttgcgatagccgagcgatcaccaccaacccttctccaagaatgttgcgtcgagcatcgatgctattggcctgtcgatccattttggcagcaagggctcgacccttctccactgatctgccagcggcaccctctgcggatgccacattcacggaggcgtggactaaagtgatccccaacatggaccctcctaaaactcctctctctttcatgcaacctcgtcctcccactccttcctccattacttccaagcttactgtcaatttcggccttccttatgcttctgagttggccaccaaagaggttgacatggttatagtaccagccacaactgggcagatgggttgtcttccaggacatgtagcaacaattgcagaac

SEQ ID NO: 231901 - DNA, 438 bp, Gossypium hirsutum
ttctcttgattcaaacactagggtttgatcgataattttattcatattttcctttacttcgattgcaattattcagatcttcaaaatccgagttattttctttcatttaatctgaaattggttggattttccttttaattttgaaatttaatctaagaaagaaggggaaaaaatgccggcagtttacggatccagattgacaactttcgaggattcagagaaagagagcgaatacggttatgttcgtaaggtgtctggaccagtcgtcgttgctgatggaatggctggtgctgctatgtatgaattagtccgtgttggacatgataatctaattggtgaaattattcggttggaaggagactctgctacaatccaagtttatgaagaaacagctggcctgatggttaatgatccagttctgcggacacacaagcccct

SEQ ID NO: 231902 - DNA, 407 bp, Gossypium hirsutum
agtgagtgccgcagcttctctctactctgtaatggcgaagtcaaagaatcacacggctcacaaccaatcttacaaggctcacaagaatggaatcaagaaacccaagaggcaccgccacacttccaccaaagggatggatcctaagttcttgaggaaccaaaggtatgcaaggaaacacaacaagaagaatggagaatcagccaatgaagaagagtaggcttttagtggggtaaaagaaaattctagcctgggttagggttttctaattatggttgttttgtttgtttcaatggaaattagggttttgtttttttcaacattagcactattttgatgattatctttgttataaaatatttgaagctttgagcttatcaatattgagaacatgtttcgagtttatctac

SEQ ID NO: 231903 - DNA, 408 bp, Gossypium hirsutum
ctaaatctctgcatcatcatcgatcatgtctcttttattctccctactgctgttcttagccatgactggccattcaagtgctacttattgcttatgtaaagatgggttaggggatcaagctcttcaaaaggccctcgattatgcttgtggagctggagctgattgttctgcaattctacaaaaaggtggttgctataaccccaacactgtgaaagatcactgcaactatgctgtcaatagttatttccaaaagaaaggtcaagcacaaggaagctgtgatttttcaggcactgctactgttagtgccaatcctccttcaaatattgcttctacttgcagctttccctctagtagcacaggcatgaccgcaccaactgggacaacaaccgggacaccaaccaccactgg

SEQ ID NO: 231904 - DNA, 453 bp, Gossypium hirsutum
aaagcattagcaaccatagccatggcttcctcaccaaaactcttctctatgtctatcctcttcctttttgccctcttctccatgcaaatccatgctagagagtacttcagcaaattcccaagagttaacatcaatgagaaagagacaacaaccagagagcaaaagcacgagaccttcgttccccagaccacccaaaagccagaagaacaagagccaaggttcattcctgaaacccaaaatggttatggcctttacggccacgagtcaggctcaagccggcccagtttcaccaccaaagaaacctatgaaccctatgtcacccctgttagattccaccctgatgagccctataacagcatccccgaatcctccaacaataaagacacttactactacaacaagaatgcctacgagtccactaagcagcaaaacttgggcgaggccattttcacc

SEQ ID NO: 231905 - DNA, 421 bp, Gossypium hirsutum
  unsure (1)..(421): unsure at all n locations
ctgaacatgttgctctcgagattgcaaaccgcgtanaagctgcaatatatgtatggcgtcnaagatctcattcgaagcctcctattaacccaaaccgatccactgcaaaatcatcatgggaaatggtgaaggaccttatggttgatggagacaagagagaatttctagcagaaagagctgaaactctcttgctttgcttgaagcaacgatttccgggtttgactcaaactacattagataccagcaaaatccaatgcaacaaggatgttggaaagtccattcttgaaagctattcaagagttttggaaagcattgcatacaacatcgttgcacgtattgacgatttgctatatgtagacgacttaacgaagcattctgacaagttatcatcagttcctacggttagtgtaatcgcacacaa

SEQ ID NO: 231906 - DNA, 376 bp, Gossypium hirsutum
caaagaaccagttcctcaatctctctaatcctcgctttcttccccatcaaacacaccttcgattttcccaagcaggttgtagaagatggcagaaggtgaggatattcagccacttgtttgtgacaatggaactggaatggttaaggctggatttgctggggatgatgctccccgagccgtattccctagcatcgtcggtcggccacgtcacaccggtgtgatggttggcatgggccagaaagatgcatatgttggtgatgaagctcaatcaaagagaggtattttgactttgaaataccctattgagcatggtattgtgagcaactgggatgatatggaaaagatttggcatcataccttttataacgagcttcgt

SEQ ID NO: 231907 - DNA, 397 bp, Gossypium hirsutum
tctcacgatactttccccattctcaatcgtcatctactcctcacctcacctttctcctccgcagcatggccacttccgccgctgccggtcccattaacccatccaacactcgccttggatggattgggactggcgtcatgggtcgatccatgtgtgctcatctgatcaacgctggctactctctcaccgtcttcaaccgtaccctttccaaagcccaacccctcgttgacatgggtgcccgcctagcccaaacacctcacgacctcgctgcccaatccgatgtcgttttctccatcgtcggttacccttccgacgtcctccaggtcctactcgatccctttaacggagccctctctggcctccgtcccggcggcatactcgttgacatgacaacatc

SEQ ID NO: 231908 - DNA, 450 bp, Gossypium hirsutum
gttggaacttctcactggacgtaagccatttgacagcacaaggcctagactggagcaatctttggttcgatgggcaacacctcaactccacgatatcgatgctctatccaagatggttgatccggcacttaaagggctttaccccgttaaatctctctcacgttttgccgatgtgatcgctctttgtgtccagccggagcccgagtttcggccacctatgtcagaagtggttgaagcattggttcgactagtgcagcgagctaacatgagtaagagaacaacagggacagaccaaggtgcatctccacgaactggaaaccccgatgatacacacgactacatgtcttaaatggttgcacaattcttgcttgattgttttggtgacgaggactctgaaattgtaatcatgtttgaatgggtttttttttattgtaaaataattatacatcc

SEQ ID NO: 231909 - DNA, 402 bp, Gossypium hirsutum
cccacgcgtccgctcactgcctctctattataaaaaaagaaagcgaagatttagacttttatcatagtgttgaagtaattgaaggggaaaaaatggcaatggtgaatgtaataagcgttttgatctttatctcttcaatgtggatgatgggtgaagctagaatcccaggagtttactctggtggagcatggcaaaatgcccatgccacgttctacggcggtgctgatgcttcgggcaccatgggcggagcttgtggctatgggaacttgtacggccaagggtacggagtcagcacggcggcactgagcacggcattgttcaacaacgggttaagctgcggtgcttgcttcgagataaagtgtgccagtgacccaaagtggtgtcattcggggagcccatcca

SEQ ID NO: 231910 - DNA, 437 bp, Gossypium hirsutum
gtttcaatatcaaagcaaaaatgggttcttcttgtaatgttgtttcaatggccttactggcttgtttggtgttgaactccttggtttttgttgcccacggtggtgacttttaccaggatttcgacctaacatggggtgacagaagaggcaagattttcaatggtggcaagctcttgtctttgtctttagacagggtttcagggtctggttttcaatctaagaaagagtatttgtttggaaggatcgatatgcaactcaagcttgttgctggcaactcagctggcactgtcactgcttattatctgtcatcttaagggccaacccatgattgagatagactttgaattcttagggaatctgagcggtgacccttacattttacacaccaatgtctttacacaaggcaaaggcaacagagaacaacagttctatctttg

SEQ ID NO: 231911 - DNA, 372 bp, Gossypium hirsutum
gaagggatcaacaactccagacaccagaaaaaagtaacaaatactctcacttttttcccttttcatttcgacgggactaactctaaattacaggattttattgttggaactgaagttttaaggtgatggcgaggatcaaaccacaagctttgctacaacagagcaaaaggaagaaaggcccagctcgaataagtcttacaacaattataatgttgactttgattgtcgttttgattctgttttttgtgtatgccacctacagacactggactcaaaagtcaagaattcatattgaaaacaaggaatcagttattgagggtgacaactctttcatggattcaaagaaatctgatcttccaggatatgctattt

SEQ ID NO: 231912 - DNA, 391 bp, Gossypium hirsutum
gtcattcacaagcttgtactgtctgtaggtttgcaattcattttatgggaaaatcggtgcccagcgcaaccaatcttgatcatttggtaaaggttaccgtcgctcgccaccatctgaacacaactgggaaaaacccaaaacccactactctgaaccggcggattatatgtgaagacaacaaaccctattccaagaagaagatggagagctccagtgccagtcaacgcctcccactttgcgaaatcgtctccgattgcgttaagcgttggttcaaagatagtctcaaggaagccaaatccggggacgttaacatgcaggttcttgtcggtcaaatgtattataccggctatggagtttcccgagatgcccaaaagggaagaatttggatgac

SEQ ID NO: 231913 - DNA, 375 bp, Gossypium hirsutum
gactcaccatatgttgatggtgttgctggaggacctccttgtgcctaaaaattatttgatgcaccttttcctattgttaataaaaggcgttatgggcattaagtgcccaaggacgtaaattttataagttatgtaaaaggaaaagttacatgtatggtggatgacattagtgacactgatggaacaataccaaaaggtgcatctcttttatatcaagaggggtctaggaaagtgtatgcgtgcaatacacatgctgatcataggactactgcaataaaaagattgtgaagtggtcttgttcaaaatgtgatcatatcggacacaataccagtgttatagcatgactatgtatctaaccagactgatcgcattgag

SEQ ID NO: 231914 - DNA, 457 bp, Gossypium hirsutum
tccattatgagtactgctggtcaagtcatccgttgcaaagctgcggtagcatgggagtcggggaagccactgtcaatagaggaagtggaagtggcaccaccgcagaaggatgaagtccgtattaagatactcttcacttctttatgtcacaccgatgtctacttctgggatgctaagggacaaaaccctctgtttcctcgcatactaggtcatgaagctggagggattgtggagagtgtaggtgagggggtgactgatctaaagccaggtgatcatgttctccccatcttcacgggggaatgcaaggagtgtccccattgcttgtcagaagaaagtaacatgtgtgatctcctccgaatcaacactgataggggtgaaatgattaatgatggaaaatccaggttttccatcaatgggaagcctatctaccacttcctaggcacctctactttcagtg

SEQ ID NO: 231915 - DNA, 425 bp, Gossypium hirsutum
gcttgcggcaattggctctctctgtgaattgaagatgttacagttggataattctgatatatccgatgtaggaatagcatacttgcaacatggcattattagctcattggtttcgttatctgttaggggatgcaagaaacttacagataaatgtatctctgttctatttgatggctcttctaaactggagttgcaagagctggacctatctaatcttcctaatctctccgacaatggagttttagctcttgcaaaaagtcgggttccaatttcagaactccgaatgcgacaatgtccactcataggtgacacttcgatcatggcactagcctcaatgcaggctgatgacgatagaggacatggcagtaatctgcgattgttggatctttacaattgtggtggcattacacaactttcattccgat

SEQ ID NO: 231916 - DNA, 427 bp, Gossypium hirsutum
cgcgtccgcgcagatccgaggagtttgggaaaccctatctctgtgtaatatcaaccggggaggctctcaaaaaactaccctttcttccccccccctctctctctctcactttctctcattctctttctttccagcctttctacactctttttttccccatcgctcctactgttttcatctgcttcaagtcatggcaggtttggcaccggaaggatcccaatttgatgctcgccaatatgatcagaaaatgactgagttgctccaaactgatggagatgattttttcacgagttatgatgaagtttatgacagttttgatgcaatgggacttcaagagaatcttctgaggggtatctatgcgtatggttttgagaagccttctgcaattcaacaacgaggtattgttcccatttgcaagggtcttgat

SEQ ID NO: 231917 - DNA, 244 bp, Gossypium hirsutum
ccacgcgtccgcgaagaagtgttcaaaaagttcgatgcgaatggagacggtaagatctccgcctccgaactgggttccattatgaaatcactcgggtcaacacccctccgatgaagaactccacaacatgatcaaagaattcgacgccgacggtgatgggttcataaatttcaacgagttcatcgagttgaacaccaaaggagtcgactcggaagaggttttggagaacttgaaggacgctttt

SEQ ID NO: 231918 - DNA, 409 bp, Gossypium hirsutum
  unsure (1)..(409): unsure at all n locations
cgaaactcagttagtttccccacctgttttctcgggtttccccactgaaccttcaactgcaccatttacacctcctcccgagtcagttcacttgactacaccatcctcgcctgaggtgccatttgcccagttccttggccccaacctccagtatggagagcagcgattcccattatcccactatgaatttcagtcttatcatcttcaacctgggagccctgtaggccaattgatctccccaagctcaggaatctccggttctggcacctcatctcctttcctcgatggtgattatactactggtctacgctttcccgagttccaactggtttacccttccaagctcttgaaccttgataagctttccaaccgtgaatggngatcatatcatggttctggtcctttaacc

SEQ ID NO: 231919 - DNA, 416 bp, Gossypium hirsutum; identical to SEQ ID NO: 194907

SEQ ID NO: 231920 - DNA, 371 bp, Gossypium hirsutum
caacaatgtttcgatcagtagctcgatcggccgccggaaagcacctcctccgccgaggatatgccactgaatctgttcccgatcggaaggtcgcggttttgggcgctgccggagggattggccagcccttggctctcctcatgaagcttaaccctcttgtttctcaactgactctctatgatatcgctaacactcccggcgttgcagctgatgtcagccacgtcaacaccagatctaaggttgctggatatgttggtgaagatcaattgaagcaagctttggagggatgtgatgttgtcatcattcctgctggggtgccaagaaagcctggtatgactcgcgacgatcttttcaacatcaatgctggaatc

SEQ ID NO: 231921 - DNA, 423 bp, Gossypium hirsutum
cagtcttccaatgtctccccatctaccttttgggtgcaaaatctgaccaacaataacaccaccaaccactcatcgttatcttgtactcccaggattaatcctgtaatagccaaggcactgcgtactgaagcagctgccacagcacagcccataaaaatggtgaaagctatcagggttcatcaacttggtggacctcacgtccttaaatgggaggatgtggaacttggggaacccaaagagggtgagatacgtattaaaaacaaagctattggactgaatttcatcgatatctattttcggaaaggagtttataaggctgctaccatgcccttcactccaggtatggaagcctgtggagaagtgactgctgggggaccctgactgactggcaagaaagttggagatatcgtagcttatgctggt

SEQ ID NO: 231922 - DNA, 441 bp, Gossypium hirsutum
gaaagatgatggaaaggggttttattgttttggccttgacggtggttttcgccgcgacggtggttacggcggctgacgagagtgggttagcgaatgagtgcagcaaagatttccagagcgtgatgacttgcttaagctttgctcaaggaaaagcagcgtcgccgtcgaaggagtgttgtaattcagtggcggggattaaagagaataaacccaaatgtttgtgttatattttgcaacaaacacaaacttccggtgctcaaaatctcaaaagcttaggtgttcaagaagataagctgtttcagttaccgtcggcttgtcaattgaagaacgctagcgtcagtgattgcccaaagcttcttgggttatctccgagctcaccagacgccgccatcttcaccaactcctcctctaaagcaacgacacccagtacttcaacaacca

SEQ ID NO: 231923 - DNA, 350 bp, Gossypium hirsutum
ctaaaaaatatgaaggaccacgaaccgcagaggcccttgctgagtttgtcaacactgaaggagggaccaatgtgaagatagccacattaccatccagtgttgtagtgctaaatgctgataattttgatgaggttgtccttgatgagacgaaagatgtgttggttgagttttatgcaccttggtgtgggcattgcaaaaaccttgctcctacctatgaaaaggtagcattggcattcaaaatggaagaagacgtagttatagctaatctagatgctgacaagcacaaggatctagctgaaaagtatggagttagtgggtatccaacactgaaattcttcccaaaaaacaac

SEQ ID NO: 231924 - DNA, 218 bp, Gossypium hirsutum
cggacgcgtggggtactcactcaacattcccatttccaatctccagctcccaaggtaaatatgccgatcagaaacatagcagttggccggcccgaagaggcgactcaccccgatgctctcaaggcagctttggctgagttcatctcaaccttgatcttcgttttcgctggatcgggctcaggaatggcttttaacaagttgaccgacaacggagcaac

SEQ ID NO: 231925 - DNA, 436 bp, Gossypium hirsutum
caaagctaaagtgtcatttgaaaatcactcgtcctggtattaacggtacagcgtttcgattttcatagagaaacctcgaaacttctacgtagtgagaggaaagtttgagtacgtgcgatggctcgctcgtggagagcaagcggctctttggtggctctagctatagtcttgtccggatgcttctttgcaatctcaattgccaaggaggaagccgcgaaattgggaacagtcatcggaattgatcttggtacaacttattcttgtgttggtgtgtacaaaaacggtcatgttgaaattatagccaatgaccaaggtaaccgtattactccatcgtgggtggctttcactgacagcgagaggctcatcggtgaggctgcaaagaatcaagcagctgttaacgctgaaagaaccatctttgacgtcaagagacttattg

SEQ ID NO: 231926 - DNA, 435 bp, Gossypium hirsutum
gaattaagcagttttttgtagcagttgaaagggaagagtggaagtttgatacactatgtgatctttacgacacgttgacaatcactcaagctgttattttctgcaatacaaaacgaaaggtcgattggctaactgagaagatgcgtagcaataactttacggtatcctcaatgcatggagatatgcctcagaaggaaagagatgcgattatggctgagtttcgggatggtgcaacccgtgttcttatcactacagatgtttgggccaggggacttgatgttcagcaggtgtctctggtgatcaattacgacctgccaaacaatcgagagctttacatccataggattggacgttctggtcgattcggacgaaagggtgttgctattaatttcgtgaaaagcgacgacatcaagattcttagagacatagagcagt

SEQ ID NO: 231927 - DNA, 407 bp, Gossypium hirsutum
gttcccctttcttcttcttcctccataatcaaaagctctctctcaaattttttaaaaaaacttaaaaggctcccttttttttaaagaaagatttaaatggccgtcgattccgcaatctcgtctcctttgggtccgccggcatgcgagaaagatgcaaaagctttgcgattcatcgaggaaatgactcggaacgccgacccggttcaagaacgagttttgtccgatatcttaactcaaaactcccaaaccgagtaccttcgaaggttcaaactcaatggggcaagcgatcgtgactcgttcaaatccaaacttccggtcattacttacgaagaccttcagcctgaaatccaacgtatcgctaatggcgaccgttccgccattttatcagctcacccaatctcagaatt

SEQ ID NO: 231928 - DNA, 388 bp, Gossypium hirsutum
cggacgcgtgggcggacgcgtgggcggacgcgtgggcggacgcgtggggccaattgtttgagctagctagctcttactcaaatggcaaccaaaacgatgatgttgcaaatatttccacttttcttctttttgttcagtgtctgcaactccattttccttggtgctaatggagatgacaatggtggttggcaaactgcccatgccaccttctacggtggtgctgatgctaccggcacaatggggggagcttgtggttatggaaacctgtacagtcaagggtatggaacgagcacagcagctttgagcactgcacttttcaacaatggcttgagctgcggtgcctgctacgagctccggtgcaacaatgatcctcaatggtgcattagtc

SEQ ID NO: 231929 - DNA, 321 bp, Gossypium hirsutum
aaaagaagaggaaaaaccagaaaaatggcgaaaccccaacttttatttctattttccttttcccttctctgtctcatttctttttccgccgccgattcctccatcacagccgacttacgtctcaccgattccagtttcccgtcggttcatgcgaagaagctgattagggagttgaatttgtttcctaaaggggaagtcaatgtcgttgacgaacaccgggtttcgttgccggagggtcccaaactggtggagaagcggttcaagttcccaactttggaagtgcccggtggagtttccttttgggatttgggtcaccatgct

SEQ ID NO: 231930 - DNA, 305 bp, Gossypium hirsutum
tttctctccatctagccgtctcgcgtgcgccctgtggctctcttcaaccctcgcatatctcttcaagatctgatctgatctgacaaaaaaatgttcgggagagcaccaaaaaaaagcgataatactaaatactatgagatattgggagtgcccaaaaccgcttcccaagatgatttgaagaaggcttatagaaaagctgcaattaagaatcatcctgataaaagcggagatcctgaaaaagttaaagagttggctcaagcttatgaggtgctgagtgacccagagaagcgtgagatatatgatca

SEQ ID NO: 231931 - DNA, 366 bp, Gossypium hirsutum
aactggtccagtgaaactaaatggtttaagtaatggtagcagtattgatctctcctcacagcaatggacgtatcaggttggacttaaaggggaagattcgggtctaccaagtggaagttcatcggaatgggtttcacaacccgcattgccaaagaatcaacccctaatatggtacaagacaaattttgatgcccctactgggaatgaccctgttgctttagacttcatggggatggggaagggtgaagcatggatcaacggacagagcattggacgatattggcctgcctatatcgcttcaaacagtggctgtactgactcttgtgattatagaagaccttatagtgcaaacaaatgccgcaagaa

SEQ ID NO: 231932 - DNA, 352 bp, Gossypium hirsutum
acccacgcgtccggcccgggctcttcttctttgactcgtcgtctgcctgtgctcttctatccgattcagaagcttcgtcgttgccgcctcttctttttctaatgacaaccgagaatttgtgatcgttggaggaggcaatgctgctgggtatgcagccaggactttcgtcgaacacgggatggccgatggcaagctgtgtattgtgtccaaggaggcatatgcaccgtatgagagaccggctttgacaaaaggctacttgtttccactagataagaaaccagctcgattacctggttttcatacttgtgttggatctggtggtgaaaggcaaactcctgaatggtacaaagag

SEQ ID NO: 231933 - DNA, 409 bp, Gossypium hirsutum
gccaaacgagtctttccaaacccaatggattctgtgtttgcctccattgttcaagctcctgaagatcccattcttggggtgacagttgcttataacaaggatccaagcccaaacaagttgaatttaggtgttggtgcttacagaactgaggaaggaaaacctctagttctaaatgttgttcgaaaagcagaacagcttcttgttaatgacctgtcgagagtcaaggagtatcttcctattcttggtctcgcagagttcaataaattgagtgctaagctcattcttggtgatgacagtcctgctattcaagagaacagagtggctactgctcagtgcttgtctggtactggttccttgagggttggagctgagtttttagcaaagcattaccaccaacgtactatataca

SEQ ID NO: 231934 - DNA, 437 bp, Gossypium hirsutum
gtctaattgaatttcacaaacccccaaaatgggtaacctcatgatcatggcgggtctcctggttgcggtgtcgacggcggcaaccgttacggacgcgcaagcaacttgtgcggcaaagctagtgtcttgttctcgttacatcctaaacaccaccatcaaacctcaagatgactgttgtaacccgatcaaggaagaggtaaccaacgatctttcctgcctttgtaacctctacaaagaccctaaagtttttgcttctttgaacatctccaccgcgcaagctctcaatgtcactcgtgaatgcggcgtcactactgatctaaccgcttgcaacagcaacagcacttctacaagctctgctacatccccaccaggaggacgatctgcagatcaaaatggaggtgctgacaggatatcattgactggagtaccatcggatt

SEQ ID NO: 231935 - DNA, 448 bp, Gossypium hirsutum
cagatagagaagaagaaaagaaagaaattttattattaatattatcatttctttttgtgtggaaaattaagggagaaaggggaagatgaagatcacgtcgttattggtgttgaagtgcaacccagaaggatcggatccgatcatattagcgaacgcaactgatgtgagccatttcggttacttccaaaggtcaagcgtgagggagtttattgtctttgttgctcgaaccgtcgccaaacgtacacctcccggccagcgtcagtccgtccagcacgaagagtacaaggtacacgcttacaacagaaatggacttgttgccttgggatttatggatgaccactatcctgttcgaagtgctttttcgcttctcaaccaggtgctagatgaatacctgaaaaattttggggaatcatggagaactgtgcacgctgatagtgctcaatcttgg

SEQ ID NO: 231936 - DNA, 423 bp, Gossypium hirsutum
cttggcggctgctgcttctgctcaggcagcggcagcggcagccgccgtcaccgtcactgtcactaatgacggggcggctgtagaaagttgtattgacaacggtagtgtacagattggaggttcagataattcgacgacaacgtttttgagctccgatgggagcatcactgttcatgctggtgaaagattaggtcgcggtattgttactgatgcaataaccaccccagtggttaatacttctgcttacttctttaagaaaactcaggagcttattgacttcaaggagaaacgtcatcacagttttgaatatgggcgttatggaaatccaaccacagtcgttgcagaggaaaagataagcgcacttgagggggctgaatcgaccctgattatggcatctggtatgtgtgctagcacagtcatgct

SEQ ID NO: 231937 - DNA, 452 bp, Gossypium hirsutum
cgtttttgcgctgaaaatgcttctcgagctggtttgtcatggttttcagccatgccatgagttcagagattctgtagtcgctcttcggacttcagacactgacccactagatccggacctgtcaatggcaatttgtgacatcttggaacatgtggattctttgagagcaagctattggatatggcgcaaaaacaagctttctgtagcagccgtatgattacttgattagtggaaatgaggtgaataatgttcaaaccatcttgctaaatttgaaaagttgaaccataaatgttcgggtcggttcggttagaatgttagaaccagacagtagccctactaggtcaaaaactggttcaacctcctaaaagacccgattttatggacctcttttttttctttcaaatattttggattaatgagatgtggaccctttattacttattttttttggg

SEQ ID NO: 231938 - DNA, 418 bp, Gossypium hirsutum
ggatttggtgctctaatgctcacaactgggagcagttatttatctcatgcacagatatgggcgttgcaagatgggacaacagtaatcgttggagggaagactaaccgagccaaggctgaatttccagatgagatgaatcgcttgcttgatcaggttcctgaaatagtcgagtcatccatttccaagaaaccagataacattggtggctagttttcaaggtgccggaaaggcaaaaatacgagcattcaagctagccacagttttgtagtttctggtacactcaagatattgttcaatctcaattacagtcaaaccaaagaaggcaacaacgcattcaactgagatgttaagaaccctagtcatggacaataccaaatccacaacttggcagcaaaggagcaaaatttgtttatgaaat

SEQ ID NO: 231939 - DNA, 446 bp, Gossypium hirsutum
gttatctctgagggtgtcttaataaacgcctgcgatttactttcggtttccatttacttctttatttctacgtttttgaatttttagtaagcgaaaatgagagagtgcatttcagttcacatcggtcaggctggtatccaagtcggaaatgcctgctgggagctttactgccttgaacatggaatccagcctgatggccagatgccaagtgacaagactgtcggaggaggtgatgatgcttttaacacctttttcagtgaaactggtgctggaaagcacgtccctcgtgctgtctttgtggatcttgagcctactgttattgatgaagtgaggactggtacttaccgtcagcttttccaccctgagcaactcatcagcggcaaggaagacgctgccaacaacttcgcccgtggccactacactattggcaaagagatcgttgactt

SEQ ID NO: 231940 - DNA, 452 bp, Gossypium hirsutum
ctatgcagaggatgccatttcttttgccaatgtggatataatttctccagcacagaaactgttggctaaccagttgacatgtaatgttgtaccaggaaagagcctgcttgttactggtccaaatggtagcggaaaaagttctctcttcagagtacttcgaggtctctggcccattgtgactggaagactttataaacctatccactattttgatgaagaggctggatcgagttgtggcatcttctatgttcctcagcgaccatatacatgtctgggaactttaagggatcaaatcatatatcctctctctcgtgaggaagctgagatgagggaattaaagttttatggaaaagatgccataaacattcttgatgctcgattgaaaactattcttgaaaatgtccggttgaattatcttttgcaagagaggatggtggttgggattcaatctt

SEQ ID NO: 231941 - DNA, 419 bp, Gossypium hirsutum
ggctttggagatctgtgtcaaggctgctgttggtgcccctaatgttcttggagactgtccattctcccagagagctcttcttactttggaggaaaagaagatttcctacaacatgcaccttatcaatatcagtgacaaacctcaatggtttttggagataagtccagaagggaaagtaccagtggtgaagtttgatgacaaatgggtggctgattctgatgtaattgttggaatccttgaagaaaaataccctcagccttgtctcaaaacccctcctcaatttgcctctgttggatcaaacatatttggaacttttgtcacatttttgaagagcaaagacgctaatgatggatctgagcaggctttgcttaatgaactcaaggcattggatgaacatcttaaggcacatggcccattca

SEQ ID NO: 231942 - DNA, 452 bp, Gossypium hirsutum
cgccttcgggtggaaattgtggaactcccccacatgacccttcaactccatcaacaccatcacacactcctcctcatggtactccaccatcatctggaggtggtagtcccccatcgtatggaggaggcagtcccccatcgtatggaggaggcagtcccccatcgtatggaggaggcagtcccccatcatacggaggtggcagtcccccatcatatggaggtggcagtccaccaactactcccattgatccaggaactccaagcattcccttcacctccattctttcctgctccaactccaccaattggtggtacatgcgatttctggaggagtcaccccacactgatatggggtctgcttggttggtggggcactgtacgcaacgcatttggcgtgaccaacgctcctggacttggaacaagcatgaacttgccccaagcactttcaaacac

SEQ ID NO: 231943 - DNA, 442 bp, Gossypium hirsutum
ccttatcagtgtccacagttcaccccttgtgtgaagcagacgacaaagtgtataatctctctcaacagcctcaagccctctttttttttcttttttcttttttcttttttttatgttttgtgcataaatggcatcatcccttctctctagaactcttttgggtcatcgcttaattcgattctcctcgtctctccctcacaaccccttgattttctctaatcttttcaataagagagagttctgtgtacaggctgggtcttaccataccacatataaggcctctggtcagccttctcgtttaatggcttctgcagcaattgagataagaagtaatttttcgacacaatctctttccaccaatgatccggttgtttctgttgattggcttcatgctaatttaagggagcctgatttgaaggtattggatgcatcatggtacatg

SEQ ID NO: 231944 - DNA, 255 bp, Gossypium hirsutum
  unsure (1)..(255): unsure at all n locations
cggacgcgtgggctccctgctttgctctgaaaagtgcaagtttttctccaatggcgaccgtctctccaactcctctgttgaaagatgagctcgacatcgtgattcccacgattaggaacttggactttttggagatgtggagaccctntttccagccttaccatctcatcattgttcaagatggtgatcctaccaagaccatcaaggtccctgaaggcttcgattatgagctttacaataggaacgacatcaaca

SEQ ID NO: 231945 - DNA, 454 bp, Gossypium hirsutum
attccagaagatgacccagttagcccaatcctaaaagtcggtggagaaaaagagattgggaaaaatgggttgaagaagaaactggttaaggaaggtgaaggttgggagaatcctagcagtggtgatgaagttgaagtgcattatactggaactttgcttgatggaaccaagtttgattcaagccgtgatagaggtactccattcaagttcaagcttggccaaggacaagttatcaagggctgggatgagggtatcaaaacaatgaagaaaggtgaaaatgcaattttcaccatacctgctgagttggcgtatggcgaatccgggtcacctccaactattcctcctaatgcaacccttcaattcgatgtggagttgctttcttggacaagcgtcaaggacatatgcaaagatggaggaatcttcaagaaaatacttgttgaaggggagaaatggg

SEQ ID NO: 231946 - DNA, 452 bp, Gossypium hirsutum
cggacgcgtgggtttgctacatgtggaagacgggagagtatggaggacatgcactttcttatgcctttcctatgcaatgagaaggatgttcatgcttttggtatcttcgatgggcatagaggtacacaaaaccatgatacagaacgctgaagatgcagtagagatcatatatgaggacaaattcttgtaaatcttatctgagaaattaattcaaatacttctctgcccccctctccttgtttgaagctactaaatttgtctgcgttgaggttgaatctagttttcttggtcctatatattatataatgtatataaatttctgttctctggaaaacttgcaggtgcagcagcagctgagttttcagttcaagcattgccagaatttctgaaagccttaggttctatgtgcagtcctgctgatgcactggtggaagcatttgttaggacagatg

SEQ ID NO: 231947 - DNA, 425 bp, Gossypium hirsutum
  unsure (1)..(425): unsure at all n locations
cacaaaaggactccaaatttcctctctgtacttttcttcatttttattttctttatatttgttagtttagtatcaaatccatgtcggtttctggtatccatggccatgttctcgaggttactgttgttggatgcaatagattgaaagataccgaatggctttcaaggcaagatccttacgtttgtcttgaatatggcagcactaaataccgtactagaacttgcactgatggtggcaaagcacctgtattccaagagaggttcacattcacattgattgaagggcttagagagatcaatgttgtggtttggaacagcaatacattgacttatgacgattntatcggcagtggaaagattcaattgcagaaggttctttctcagggttttgatgatactgcttggtcacttcaaactaaaaccgga

SEQ ID NO: 231948 - DNA, 447 bp, Gossypium hirsutum
attatctctagtgatggtgtttgggatgctttaacagctgaagaagctcttgattgttgtcgtggaatgcctccagatgcagcagctgcccagattgtgaaagaagctgtaaagccaaagggtcttcgagatgatacaacctgcattgttgttgatatcttaccacaagagaagccagctgctctgccaccaccaaagaagcctgtcaaaggtatgttaaaagccatgtttcgcaagaagaattctggatcatcttctcaagataaagattacatggaaccggatgtggtggaggaattatttgaggagggatctgcttggctttcggaaaggttggacactaaatatccactatgcaacatgtttaagctgttcatgtgtgcagtctgtcaattggagatgaagcccggagagggcatttctattcatgttggcacatctaatccg

SEQ ID NO: 231949 - DNA, 435 bp, Gossypium hirsutum
cccagatgggaaaacaatagaagcagaagctgctcatggtactgttacacggcatttcagagttcaccaaaagggtggtgagaccagcacgaacagcatagcatctatctttgcttggacacgtgggcttgcacacagggcaaaattggatgacaatcctaaactcttagatttcattgagaaactagaggcagcttgtattgcaactgtggaatctggaaagatgaccaaagatcttgcactaatcattcacggctctaagcttgctagggacaagtacctgaatactgaggagttcattgatgctgttgcagcagatctaaaagcaagactttgttaagtataaatttgaacatggttgaaaatggaaggggatggttttgtgggtttgcaggaaaaataataataataaaaagcgtcagtggaggtggcgtg

SEQ ID NO: 231950 - DNA, 463 bp, Gossypium hirsutum
tttctgaagtggagcccaatccagttacaataataaatatcctctcgtcatgcacccatcttgctcatttgcctcagggtcgttgtttgcatgcttacatgatacggagggaatcctctttaggtcacaatttgtctcttcaaaatgcttttataacaatgtatgcaaggtgtggaagcatgagaaatgctgaaaaaatctttgaaaccttaacaaggagaaatattatctcgtggaatgctatcataatgggttacggaatgcacggtcatggttatgatgctattcttgccttctcgcaaatgctagaggatggtttccaaccaaatgaagtaactttcatatctattttatcagcttgcagccattctggtatgatagaggaaagactgcagctttttgattcaatggttcatgattttaacatcacccctcagcttgctcactatggatgtgtagttga

SEQ ID NO: 231951 - DNA, 472 bp, Gossypium hirsutum
ctctacttcactactcaccacccgcccttcctattttagtttatatactccctccaaaaccctagcgctttcactcgccgccgccaatttcaacacaattagatagattcttgataagactcgaaagcgatgtcagacgacgagagagaggagaaggagctggatctcagctcctctgaagttgttacaaaatacaagggcgctgctgagattgttaacaaagctttacaattagttgtaaaagaatgtaagccgaaagctaagattgttgacatttgtgagaagggtgatgcatttataagagagcaaacaggtaacatgtacaagaattctaagaagaagattgagaggggtgttgccttccctacttgtctctctgtaaacaacacagtctgccatttctctccacttgctagtgacacctcggagttggaagaaggtgatatggtcaagattgacatgggttgccaca

SEQ ID NO: 231952 - DNA, 459 bp, Gossypium hirsutum
cacacacacacacacaacaattacaacttttctttgatatccgcatttctttctttttctcttttcttgttcttgttcttgttccccccttgttgatattctctatttacttagagggattaatataagaaggcaatgtgggatggtggggttgtgggctcgatttggcgtttgaagcctgcctccctcccttagttggtttttaggtgctttcgggactaattggttgcctgcttttgacgatgatggcgaaacttaattttgtaaagaacggtgtgcttagattgcctcctgggttccgcttccatcctactgatgaagagtaaacggttcagcacttgagaagaaaggtgctatcttgtaccttacctgcctctatcatacctgaagttgatgtttgcacagctgatccttgggacttgccatgtgacttggaacaagagaggtacttctttagca

SEQ ID NO: 231953 - DNA, 422 bp, Gossypium hirsutum
cttccacagccttctcttctccaccaatccaaaaaaaacaaagatgcagtacaaaaacctgggcagatcaggcttaaaggtgagtcaactatcgtatggagcatgggttagtttcggtaaccagctcgatgttaaagaagcaaagtcacttctccagtgttgtaaagacaacggagtcaactttttcgacaacgccgaggtttatgccaatggtcgagccgaggagatcatgggtcaggctattagggaacttgggtggaaacgatcggatatcgtggtttctaccaagatcttttggggcggtcctgggccaaatgataagggtttgtctagaaaacatattgttgaaagaaccaaggcgtccttgaagaggcttgatatggattatgttgatgtgctctattggcataggccagacacac

SEQ ID NO: 231954 - DNA, 405 bp, Gossypium hirsutum
attcccttctttctcaacgcgacaaaacaagggttttaggagaacatctctggtagtagcttccatggctgatctcagcactgtgctcgtcactggagccgctggcagaacaggtcagatagtttacaagaagctgaaagagaggtcggatcagtttgtcgtgagaggactcgttagaactccagaaagcaaggagacaatcggtggagcagatgatgtgtttgttggggatatcagggataccacctctctggttcctgccatgcaaggaattgatgcactcataattcttactagtgctgttcctagaatgaaacctgggtttgatccgacgaaaggcggaaagcctgagttctattttgaagatggagcatatcctgagcaagttgactggatggtcagaaa

SEQ ID NO: 231955 - DNA, 418 bp, Gossypium hirsutum
cgaagaatagggcatgtttccgcagtctctttatcgtagcagctttggtctgcggtgcttatttcattagtaatgcatttatcactaacgaatacaaagatagattatcgagatgggaagtgattaatatgcttcggaattcaaaatctgttacgtgcaagaatcaatgcaggccacctgggagtgaagcattacctcaaggaatcgtggtcaaaacatcgaacttgcaaatgcaaccattatggagcgacagtgtgaaaaacgtcaatcctgagacatcttcaaacttgttagccattgctgtcgggattaagcaaaaggaaatcgtggaccaaattggtaaaaagtttcccgtaagtgattacgtcgttatgcttttccactacgatggtatcgcggatgaatggaaagattttga

SEQ ID NO: 231956 - DNA, 442 bp, Gossypium hirsutum
ggaacagacgatcgtcctcttcccgcaatggcggatgctcaaactgaaaaacccctttccctttccgagcaatatgcacttcaggagaaagaggaaaaatcagatgtgactacaaaaccagcagaagcaaaagaggttgaaaatcctgtaaatgcagccactggttctggggatgttgtaactgagaaattggaggagacttctgccgatccagttgagggaagcactgaggcccctcctcctgctgctgaagaaagcactgaagcaaatcctgctactgggaacagtggtgaagatgctgcagaggaaaactcgggtgactctgaggaaactccagagataaaagcttgagactgccccagcggatttccgcttcccaactacgaaccaaacaaggcattgcttcacacgatatattgagtaccaccgttgtgtagctgca

SEQ ID NO: 231957 - DNA, 400 bp, Gossypium hirsutum
aactggtccagtgaaactaaatggtttaagtaatggtagcagtattgatctctcctcacagcaatggacgtatcaggttggacttaaaggggaagattcgggtctaccaagtggaagttcatcggaatgggtttcacaacccgcattgccaaagaatcaacccctaatatggtacaagacaaattttgatgcccctactgggaatgaccctgttgctttagacttcatggggatggggaagggtgaagcatggatcaacggacagagcattggacgatattggcctgcctatatcgcttcaaacagtggctgtactgactcttgtgattatagaggaccttatagtgcaaacaaatgccgcaagaattgtgggaagccatcttagcaattgtaccatgta

SEQ ID NO: 231958 - DNA, 443 bp, Gossypium hirsutum
  unsure (1)..(443): unsure at all n locations
acaaaaccctaaaccctgcctttccctccctcaatcatccaatggcggagctgaaactctcggagagccgagacctgacccgaatcgaacgcattggggctcattcccacatacggggcctaggcctcgactcctctctggagccccgtgacgtctcggaagggatggtgggccaagcagaagctcgtaaagccgccggtgtcatgctccaaatgatcaaagacggtaaaattgctggccgtgctatcttattagcgggccaacccggaaccggaaaaaccgccatcgccatgggcatggcgaaatcccttggccttgaaacccctttctctatgctctctggcagcgaaatcttctcccttgagatgtcgaaaaccgaagctttaatgcaagcgtttcgaaagtccatcggngtaagaatcaaggaagaaactgaaataatc

SEQ ID NO: 231959 - DNA, 459 bp, Gossypium hirsutum
ggctacttgtgcttggttactctccctttgctttactctcgttttctgtctgtgtaatgcctctcgtacgccacccatttccccatcccttgatggatttttgaccaatggtaacttcgagcaagcacccaagaaagagaacctcaacaaaacagtgatactggggaaatactcgcttccaggatgggaaatcgatggcacggtggagttcatgtcagggggacctcaacctggtgggttttacttccccattccacgtggtgcccatgctgtgaggctgggcaacgaggcgtccatctctcagaatgtgaatgtcaagcctggcttcatttactccataacatttggtaccacaaggacttgcgcccaaaaagaggtgctcaagatctctgtccctgctcagaccactgacatctccattcagaccctttacagcacggatggtggtgacaccatggc

SEQ ID NO: 231960 - DNA, 395 bp, Gossypium hirsutum
  unsure (1)..(395): unsure at all n locations
gattttatccgtaacaatcgactcatcaatggggggaaagatcttcctcgagagtacttgtctgagcttttcctctctatctgtgagaacgaaattcaaatgatcccagaccaagatgctggtgtcccagtaatgacatcaagccgctggattaatgtggtgaataaatccaaaggaagcaccccttttattgcctgcgattccagagcactccttgaccatgatatgtttactatcctttccggtcccacaattgcagctttgtccgtggttttcgatcaagtggaacaagaagatgtcttaccaaatgtgcattgatggattcttggccattgccaaactttcagcgcactatcactntggtgatgtattggatgattttggtgtgtctcttt

SEQ ID NO: 231961 - DNA, 422 bp, Gossypium hirsutum
ggcgagtaggcagtggcagatgggcggtttctttggttttcaagccaatctccaacgtctaccttcgttatctccgccaacattaacacaaagcgtatttatttaagatagaaaaaatatcaaacaattggcatgcacagtctccgcctagcttcttccgctcattcccagtctctcttcacaatgtccgccgcctccgcttcccttgctctcccttctcccctttcttcgtttcgctccaatggacctcttccttctagatgcttcctccgcctcaacaacccctcaagatctagggttttcatgagtgtctccgttggatcccaaactgtcgtcgatgatgccttgttcgctgattacaagcccaacatccgcctttctctttcccggtcaaggcgctcaagccgttggaatgggaaaag

SEQ ID NO: 231962 - DNA, 469 bp, Gossypium hirsutum
  unsure (1)..(469): unsure at all n locations
gcaaagcattagcaaccatagccatggcttcctcaccaaaactcttctctatgtctatcctcttcctttttgccctcttctccatgcaaatccatgctagagagtacttcagcaaattcccaagagttaacaccaatgagaaagagacaacaaccagagagcaagagcacgagaccttcgttccccagaccacccaaaagccagaagagcaagagccaaggttcatccctgaaacccaaaatggttatggcctttacggccacgagtcaggctcaggctcatgctcaggctcaagccggcccagtttcaccaccaaagaaacctatgaaccctatgtcacccctgttagattccaccctgatgaaccctataacagcatccccgaatccttcaacaattaaagacacttactactacaacaagaatgcctacaagtncactaatcagcaaaacttgggcgaggccattt

SEQ ID NO: 231963 - DNA, 415 bp, Gossypium hirsutum
accggcatcattgtgttggctgaaggacgtctcatgaacttgggttgtgctactggccaccctagctttgtcatgtcatgctctttcaccaaccaggtgatcgcccagctcgagctgtggaaggagaaggcaaccggcaagtacgagaagaaggtgtacgttttgcctaagcaccttgatgagaaggtggctgctcttcaccttggaaagcttggggctaacctcaccaagctcaccaaggatcaggctgactacattagcgtccccattgagggtccttacaagcctcctcactacaggtactgaggagagaatacgagagagagagagggagagagttggactagaaaaagtaaccatacaacgggatggtttgattggttgtttttactaaaatttattgatgatttgtggt

SEQ ID NO: 231964 - DNA, 465 bp, Gossypium hirsutum
caatgcttgaaggaattcgagacagaactcgagacaattgggagtattaagcaccgaaatctggtcagccttcaagggtattctctctccccgtctcggaaccttctcttctatgactatatggaaaatggcagtctctgggatctcctccatgtttctaccaagaggaaagttctcagttgggacattcgattgaagattgcacttggagctgcacaagggttagcgtatttacatcatgactgtagtccacgaatcatccacagggatgtgaagtcatcaaacattttgttggacaaggatttagaggctcatcttactgattttggcattgctaaaagcttatgcatatcaaagtctcacacttctacatacgtaatgggcaccattggttatatagaccctgaatatgctcgcacttctcgcctgactgagaaatctgacgtttacagctatgggattgtt

SEQ ID NO: 231965 - DNA, 374 bp, Gossypium hirsutum
  unsure (1)..(374): unsure at all n locations
ttgttatctctgaaggtgtcttaataaacgccttcgatttaccttcgatttccatttacttctctattgctacgtttttgaatttttagtgagcgaaaatgagagagtgcatttcagtccacatcggtcaggctggtattcaagtcggaaatgcctgctgggaactttactgccttgaacatggaatccagcctgatggccagatgccaagtgacaagactgtcggaggaggtgatgatgcttttaaacaccttttcagtgaaactggtgctggaaagcacgntcctcgtgctgtctttgtggatctttaaccctactgttattgatgaggtgaggactggtacttaccgtcagctttttccaccctgagcaac

SEQ ID NO: 231966 - DNA, 465 bp, Gossypium hirsutum
aaaaaaatcccatctttatagtcgttctctttctcccgggttatttcaatctgctacattgggtacccaagcactaaattttctccctggattcctctttagtaaggaatttggagttggtggtggtaaaaaatggagttttccagggtttctatgattagttgttttgcatttctcttgtgctcctccttggcatatggtgcctctagtcctccagctcctatggcaatgagtcccagtccgacaccgacaccggcaccagcacctgcaccggaatatgtaaacctaacttatttgctctctgtggctggtccatttcacacattcctcaactaccttgaatccactaaagtcctggatactttccaaaaccaagccaacaacactgaccaaggcattacgattttcgtgccaaaagatagtgccttcaaagctcttaagaagccttcattatcaaatctcact

SEQ ID NO: 231967 - DNA, 301 bp, Gossypium hirsutum
gttttcctttttttttgattcctttggctcttgcgcagctagcaaaacaagatggcagatggcgaggatattcaaccactcgtatgcgataatggaactggaatggttaaggctggatttgccggtgatgatgctccaagagctgtgttccctagcattgtaggtcgtccgcgtcatacaggtgtgatggttggcatgggtcaaaaagatgcatatgttggggatgaagctcagtccaagcgtgggattctgactctaaaatatcctattgaacacgggattggcaacaattgggatgata

SEQ ID NO: 231968 - DNA, 334 bp, Gossypium hirsutum
cacaattgccctctcccattcgcagctctctcaagtctcaaccaccaccgaattcccaattcttcatttcttcatttatacacttgctctaatctctcaaacaatggattcttcatcatcatcatcatcttcaggtccctcacctctcgatctcatgtcggctttaatcaaggccaaaatggacccttccaacgcttcctccgattctgctgctcaagtaaccaccgtccttttcgggaacagagagttcattatggttttaactacctccatcgctgtgctcatcggctgcgtcgtcattttgatctggcgtaaatcatcttctcaaaagcct

SEQ ID NO: 231969 - DNA, 331 bp, Gossypium hirsutum
cgcgtccggcgatttatcgtggaaatatagctccgagagacgtggttcgaagagaggtagaggagtttaggacgcgcgatggctggctcgtggagagcatgcggctctttggtggttctagctatagttttgttcggatgtctctttgcaatctcaattgcaaaggaggaagccacgaaattggggacagtcattggaattgatcttggtacaacttattcttgtgttggtgtttacaagaatggtcatgttgaaatcatagccaatgaccaaggtaaccgtattacaccatctttggtggctttcactgacagtgagaagctgattggtg

SEQ ID NO: 231970 - DNA, 329 bp, Gossypium hirsutum
gttaattgacctggcagtgtcacttttgcctggtttagatgagccagcattaaatctcttattcattgcaataaaacctgcattgcaggatgtggatggcttgattcagaagaaagcgtacaaagttctttcaatagttctcaggaaccaaaaaggatttctatctgccaaactggaggaattgcttaaacttatgattgaagtattgccatcattgcacttttctgccaaacgtcacagactcgactgtttgtatgagctgataacccatgcctctaaggtggatccgaacctgaagagacatgagattcttagttcttttctgactg

SEQ ID NO: 231971 - DNA, 355 bp, Gossypium hirsutum
ctgaaggtgtcttaataaacgccttcgatttaccttcgatttccatttacttctctattgctacgtttttgaatttttagtgagcgaaaatgagagagtgcatttcagtccacatcggtcaggctggtattcaagtcggaaatgcctgctgggaactttactgccttgaacatggaatccagcctgatggccagatgccaagtgacaagactgtcggaggaggtgatgatgcttttaacacctttttcagtgaaactggtgctggaaagcacgtccctcgtgctgtctttgtggatcttgagcctactgttattgatgaagtgaggactggtacttaaccgtagcttttccaccc

SEQ ID NO: 231972 - DNA, 371 bp, Gossypium hirsutum
ctgacgggtccttaaaaaacgcctactatctacctcaggccgacacctacgccgacgccgactcggttcaggcgctcactcacctacagcatgtgacttggcgtagtagtccaacaatgtatatatggtattcgagtctgataatgcgatgcttgaactttacggcctcgaccatggtatccagcccgatggccagacgccaatgtgacaagactgtaggacgaggtgatgatgcttataacacctttttcactgaaactggtgctggaaagcacgatcttcttacaatcgttgcggatcttgggcctactgcaatcaatgaaatgaggactgggtcatacagacttctcttacactatgggcaactcatc

SEQ ID NO: 231973 - DNA, 321 bp, Gossypium hirsutum
ctctccttttgaatcaatctccatttttggttcgggggtaaagagaaaggatgttaggcattttcaagaaagaattaatgaatcctccaaaggagctgcatagcccagcttcactcacttcatcaaacaagcccaagcttcccaatcaaatcatcaaccatttcctttcttcaaattccaacaatgctttctcaatggggttcggatcctcagcttgctttgcttatgctcccacagagaatcgtttccccagtcatcaaagggttgttttgttgagtggatgaaatatactgcgtattctttggggatttgaattatttt

SEQ ID NO: 231974 - DNA, 400 bp, Gossypium hirsutum
tgctgatcccaaaaggtggcaggattccaagtggagatgtctcaaagtgcgatgggatgagacgtcttccatacctcgtccggagagagtttctccttggaaaattgaacctcctttagctcctcctgccttaaatcccctaccaatgcccaggaccaaaaggcctcgatcccatgcagtaccttcatcccctgattcctctgtgctgactagggaaggttcatccaaagttactatagacccttcgtcagctagtgggttgtcaagggttttgcaaggccaagaattctcgaccttgagaagcaactttgctgagagtattgagtcggacattgctgaaaagtcagtgatgtggcctccttctgtagatgataacaacaaatgatgtggtttctgcttc

SEQ ID NO: 231975 - DNA, 361 bp, Gossypium hirsutum
gggcactgaccaaatacagctcggtcggcccatgctcatggccgtgtctctttcgtctagtattttcgataatcttccaaaagcatggtttatatatttgtttattggagtaggtgtggttctctttgttatatcttgtttcggatgtattggagcttcgacgcggaatttatgctgtttgagttgttattcactgttggtggtcttgttgatcttggtggagctgggatgtgctgctttcatattcttcgacaaaagctggaaagaaaaactcccgacagataaaacaagatattttgatatgatatatcaatttctggaagaaaattggagtattggcaaatgggtagctcttggaatt

SEQ ID NO: 231976 - DNA, 367 bp, Gossypium hirsutum
agggatcgaaaaatgatgagggtcctttgtaaccgtgggcggatggaaattatgttctctaaatgtgctcccaacagtatcatctgtcggtgtacaaatatcctatgcactaatggtggctccaccattccaaatgatactacgcttttgtctgagctgcactcaagactcaacagttgtgcaggacaagaaacactgcgatgactggctttaacattgaagataatgcccatgggtcatcagacactcttctttgatgatgagaaagatcttacctttattgaacaggttgggatgctagatccaccaccacaggaagtgaggaatgctatgaggtcatgcatgacacgtcggtatacgtgttatt

SEQ ID NO: 231977 - DNA, 303 bp, Gossypium hirsutum
tcgagatattagagatgaatcccgaagacgaggcagaggaagatggtgccaacattgatcttgattcacagaggaagggtaaatgtgttgtactgaaaacctcaactcgtcagaccatctttctacctgtggtcggacttgttgaccctgataaattgaagcctggtgatttggttggcgtcaataaagacagctacttgatattggatactctgccatctgaatacgactctcgagtaaaggctatggaagttgatgagaaaccaaccgaggattacaatgacattggtgggttggaaaagc

SEQ ID NO: 231978 - DNA, 347 bp, Gossypium hirsutum
ggtagtcctgctcctgcccccacgatgtccaattcagagactgctgctactaacggatcgttaatggacccacagagacatcaggcgccggcagccaatggttcacttgccgttaaaaagcctcccaccaaagaccgtcacagcaaagttgatggtcgtgggagaaggatcaggatgcccatcatttgcgccgctcgtgttttccagttgacccgcgaattgggtcataagtccgatggtcagactatcgagtggctgttgcgtcaggctgagccttctattatagccgccactggtacagggacgactcctgctagtttttccaccgtgtcggtttccctccgcgg

SEQ ID NO: 231979 - DNA, 436 bp, Gossypium hirsutum
ccttattccatatattcatcagctttcttcttggtgttgttaattgcaattcgaagcgtgaggaaatctaaagctaggagtttaactcaaaggttgattccagggccacggaaattacctttgatcggaaatctgcaccagctcgctgattctactctaccccatcgcaccctgcgtgacttggctacgaaatatggcgccgtcatgcacctgcaactcagtcaagtttcaactgtggtcatttcttctgcagaaatggctgaagagattatgaaaacacatgatattgtctttgcttctaggcctttacttcttgcggccaagattataacttatgaatgcactgatattgtcttttcaccatatggaaagtattggagaaatctgcggaaaatttgtacatcggaacttctgagtgcgtctcgggtcgcctcct

SEQ ID NO: 231980 - DNA, 435 bp, Gossypium hirsutum
gaaaaacccaatcccaacttgtttcttcatggcgtctccttcgctcttacagtccacatcctcctcgttccacggcccctcccctttccttgcaccaccattctccgcgcgcctgccctacgctaaccccagaaatggatacgccggcgtcgtttcggtgagggcaacgggagagattgtgttggtggataaatcggaagccgaaaaaccctaccgtctcaaaactacttacctagacaaaattattcctttgcttaaagaagagttcaagtacaccaatattcaccaggttccaaagcttgaaaagattgtggtgaattgtgggattggagatgctgcccagaacgcgaaaggcttggaagccgcaatgaacgagatggcattgataacggggcaaagacctgtgaagacgcgagccaggaattctattgctac

SEQ ID NO: 231981 - DNA, 429 bp, Gossypium hirsutum
gaagaaatgccttgttttgccgatcttggttgcgggccgtcgatgaattgaagggaattttgatcattatacacggcttgaatgagcatagtggaaggtatactcaatttgctaagcaactaacttcttgccgctatggtgtatatgccatggactggataggtcatggtggtagcgatggattgcatggatatgttccttcacttgatcatgttgttgcagataccgcgtttttcttggaaaagatcaaaacagagaacccaggtgtaccttgcttcctttttggacactcaactggtggagctgtggttctaaaagcagcttcatattctcatattgaagaaatggtggagggaattgggctgacattttcaaccctgcgtgttaagccagcacatcccattgttagggctgttgctcccctttttt

SEQ ID NO: 231982 - DNA, 433 bp, Gossypium hirsutum
cgcatatcctgagacgacaagtgagtcagatcctttcccatgtgagccctaactctaatcctacctcgtatttctctttagctagacctttctcttcggccaccgacaccattcgagccactctcttccccggcgatggcatcggccccgagatcgctgagtccgtcaaacaggtttttagaactgctgaagtgccaattgaatgggaagaacattatgttggggaccaagttgatccaagaactcaaagttttctaacttgggaaagtctcgaatcagtaagaaagaatcgggtaggcttgaaaggtccaatggctactcctattggtaaagggcatcggtctttgaatcttactctaaggaaagaacttaatctgtatgccaacgtcaggccttgttacagttctccggttataagactcggtatgatgat

SEQ ID NO: 231983 - DNA, 413 bp, Gossypium hirsutum
gtcggccacaaatctccgctccgtttaccgatatctgaaaaatgtccggccaaagccagcgcttgaatgtggttccaactgttacaatgcttggaatcatgaaagctcggcttgtgggcgctacaagaggtcacgcacttctcaagaagaagagtgatgccctaaccgtacaatttcgtcagattcttaagaagatagtgtctacgaaagagtcaatgggagagattatgaaaacctcctcattttccctaacagaggctaagtatgttgctggtgagaacatcaaacacgtcgtgcttgaaagtgttcaaactgcttctcttaaagttcgatcgcgacaagagaatgttgctggagtgaagcttccaaagtttgagtattttactgaaggtgagaccaaaaatgatttgact

SEQ ID NO: 231984 - DNA, 419 bp, Gossypium hirsutum
ctgcattttcaacccaaaattttttttaaaaaaaattctaaataagtgatggggtttccggccaatggctcatcggacaaaccattgaagttcctgatctacggtcgaactggttggatcggtggtttattaggcaaactctgcgaatcccagggaatcgattacgagtacggctccggccgtttagagagccggatttcgcttgagtccgacatagccaacgtgaaaccgacccatgtattcaatgccgccggtgtcaccggtcgtccgaacgtcgattggtgcgaatcccataaggtggagaccatcagaaccaatgtggtcgggacccttaccctcgctgacgtctgcagagacaaaggcctcatcttgattaattatgctacaggttgcatctttgagtacgatgaggctcatca

SEQ ID NO: 231985 - DNA, 361 bp, Gossypium hirsutum
cggacgcgtgggctttcttcttcttcttattcctttattgctttttagaatttttcttaatcgaaaatgagagagtgcatttcgatccacatcggtcaggccggtatccaggtcggaaacgcttgctgggagctttactgtctcgagcatggaatccagcctgatggtcagatgccaagtgacaaaactgtcggaggaggtgatgatgcttttaacacctttttcagtgaaactggtgctgggaagcacgtccctcgtgccgtcttcgtggatcttgaacccactgttattgatgaagtgagaactggtgcttaccgccagctcttccacccagaacaactcatcagcggcaaggaagacg

SEQ ID NO: 231986 - DNA, 437 bp, Gossypium hirsutum
acgcaagcaaaaaatttaaagtttgatagtactttattttgataaaaatacaatgccgatttctcgaattgcagtcgggtctccggccgaagccggccaagcagatgcactcaaggcggctttagccgagttcatttcagtccttatttttgttttcgccggtgaaggctcgggcatggctttcaacaagttgaccgacgatgactcgtcgacaccagcgggtttagtagctgcggcattggctcacgccttggcgttgtttgtggcggtttcggtcggagctaacatttccggcgggcacgtaaaccccgccgtcacgttcggtgctttcgtgggtggccacattacattggtgaggagtattttgtattggatagctcaattgcttggatctgtcgttgcttgcttgcttctcaagttctcaaccggcggaatga

SEQ ID NO: 231987 - DNA, 435 bp, Gossypium hirsutum
gaaacaatggcgaccaatttgatccgtcgagcgatgaacatgacgccacgtttgccgtcatcgaaagtggctccagcatcgcggctggtgttggaccgtccttacgccaccgaaacggaagctcaaaaggtggaaccgaaagcctcctccggcagcggcggcgccaacatgaaaaccttccaaatctatcgatggaacccagataatcctacgaaaccccaacttcaagacttcaaaatcaacttaaaagaatgcggacccatggtgcttgatgccttgatcaagatcaagaacgagatggatccatcgctcaccttccgtcgttcctgccgtgaagggatttgtggctcttgtgcaatgaacatcaacggttgtaacgggttagcatgtcttaccaagatcgaatctggaccatcggaaacgacgatcacgccg

SEQ ID NO: 231988 - DNA, 380 bp, Gossypium hirsutum
gtgccatttcgtggtttaagggatttttttcattcggtgtcttctcacgctcgattaccttacaaaaagagaaaatgaccaagtgttacccaactgtgagcgaggaataccagaagtcagttgaaaaggccaagaggaagctcagaggtctcatcgctgagaagaactgtgctccactcatgctccgtttagcgtggcactcagctggaacttttgatgttaagaccaagaccggaggtccattcggaaccatgaagcatcctgctgagctcgcacatgctgctaacaacggcctagatatcgccgtcagacttctcgagccgatcaaggagcagtttcctaacctcacctacgctgacttctatcagcttgctggtgtc

SEQ ID NO: 231989 - DNA, 406 bp, Gossypium hirsutum
cacactatttagacctaaagccagtaattcggatcaccggcggccaagccttgattcttcgagacggagtatagatgtcggggccactcgatcgattcgctcggccttgctttgaggggttttatggtagtgatgagaggagagagaggaaatctgatttcgagaactcagaggatgaaaggcgcacaagaattggatccttgaaaaagaaagcaataagtgcatctgctagatttaagcattctcttaaaaagaagagtaatagaaggaaaagtgatggccgtgtcagctctgtatccattgaggatgttcgcaatgctgaagagctacgggcttgtgatcaatttcgacaagcattaatcatggaagaactgcttcccgaaaaacacgacgactatcacatgat

SEQ ID NO: 231990 - DNA, 370 bp, Gossypium hirsutum
atcatcactctcccaccccgaccgcttgattgtgatcagacggtaatcatgccgatcagaaacatagccgttggccggcctgaagaagctactcatccagatgctcttaaagcagctttagctgagttcatatcaacgttaatcttcgtttttgctggatctggttcaggcatggcttttaataagctgaccgacggcggtgcaacaactccggctggtctcgttgccgcctctctagctcacggatttgcgcttttcgtcgctgtctcagtcggtgctaacatctccggtggccatgtgaatcccgccgttacattcggtgctttcgttggcgggaacattactcttttaacgggtatcctttattgga

SEQ ID NO: 231991 - DNA, 357 bp, Gossypium hirsutum
ctttcatagttgcgttccattttccctaacaaagctgcgtcagatccgatcaggtttaactcagatccatctgtctcgggtcttctaaataccagatctttactattctcgagtaaaggaagaaagaggaagggagagatgagacagattattagcgtccacattggccacgctgggattcaggctgggaatacatgctgggagctttactgtctggaacatgaaatccaccctgacggaacaatgccgagcgacacctgtatgggcgtggcacacgatgctttcaacactttcttcagcgaaacggtgtcagcaaagcatgtgcctagagctgtctttgttgatctggaacccact

SEQ ID NO: 231992 - DNA, 389 bp, Gossypium hirsutum
gaaaatatctcaaatctcctcctcctcctcggaaatcttagtatcatcaccatggcctcaaatcccaaggtcttctttgacatgactatcggtggtcagcccgctggtcggattgtgatggagcttttcgcagattgcactcctcgcactgctgagaacttccgtgccctctgtaccggcgagaaaggcgtcggccgcagcggtaagcccctccactacaaaggctcctctttccatcgtgtgatccctaactttatgtgccaaggaggtgacttcaccgccggaaacggtaccggaagtgaatccatctacggatccaagttcgctgacgagaacttcatcaagaagcacactggtcccggtattctctcaatggctaacgcttgtcc

SEQ ID NO: 231993 - DNA, 423 bp, Gossypium hirsutum
gtctggtgaaattcagggaactttcaatggcagtgctttacagatgctttggctgaataatcaactgcatggagggatgactggtccaatcgatgttgtggcaacaatggagtccctcacagttttatggctgcacgggaaccacttcactggaacaatcccagagagaattggtaagttaactctcttgaaggatctcaatcttaatagtaacaaacttgttggcctaattcctattagtttagcaaatatgagactgcaaaacttagatttaaacaataatcacttgatgggtccaattccaatgttcaaagcatcaaaggtaacttttgcttcaaacaagttctgtcaagccactcaggggcttctttgctccccagaagttatggcacttaatagagtttcttggagtggtgaattacc

SEQ ID NO: 231994 - DNA, 318 bp, Gossypium hirsutum
gcaatcgttgcgaagagccaaagatgccgaagaacaaaggaaagggaggaaagaaccgtaagaggggaaagaacgaggccgatgacgagaaacgtgagcttatcttcaaagaagatggccaagaatacgcccaagtctcacgcatgttgggtaacggccgctgcgaagctatgtgcatcgacggcaccaagcgcctctgccacatccgggggaagatgcacaagaaggtctggatcgccgccggcgacatcatcctcgtcggccttagggattatcaagatgacaaggctgacgtcatcttgaaatacatgcccgatg

SEQ ID NO: 231995 - DNA, 414 bp, Gossypium hirsutum
cacgttgtgcttccaatagcttccaagtttgctcccgactttactataatatcagctggatttgatgctgctcgtggtgatcctttaggatgctgtgatgtgactcctgctggttatacacagatgacacacatgttgagtaccctctcgggtggaaagttgctagttgtacttgagggcggctacaacctccgttcgatatcatcttctgctactgcagtgattaaggtacttttgggtgaaagttgcgagtgtgaaccagagaacatcgttccttctaaagctggcctgcttacggtgttggaagtcctgaagattcagatgaagtactggccaaatctaagttcaagcttcgaaaaactgcagttgcaacgggcaatgtattctgtggagaagaaacaaaaacaagttaaa

SEQ ID NO: 231996 - DNA, 355 bp, Gossypium hirsutum
  unsure (1)..(355): unsure at all n locations
gaaagaagagagagcctgcacaattgaggatttttaatttggggaatacttcgcctgtacctgtgagtaggctggttagtatattggagaagattttaaaggtgaaggctaagaagaaagtagtgccactaccaagaaatggggatgtggagtttacacacgccaatattaccttagcaatgacggagctcggttacaagccaacgactgatttggaggcagggttgaagaagtttgtgagatggtacctcagtttttattcggggtcaaagaagaagagttcttggtgaaactttctcaatctttttttttattattattatttctctcattttagntcatattgattacttct

SEQ ID NO: 231997 - DNA, 431 bp, Gossypium hirsutum
ctcagcttctctttctctgtttcgactctgtggagtaaatttggaatcgatggcggccttgcagtacctagactctcttcgaaatgagcatccagagctaggcgactggtataattctcttgcagatctgtatcaaaagaagctctggcaccagctcactctcaagcttgagcagttcgttgctctcaccgttttccaggctggagatgcgttgataaagttgtatcataactttatcactgactttgagatgaagattaatcctctcaagcttgcacatttcgctgttatagtttctcagcagtactcagagaaagaggctgctattagtttcctgaaggggtgattgaaaagcttcaggctactaaagagcagcgcatagaagagccaattctttatattaagatgcagatttccaaattcaagcttga

SEQ ID NO: 231998 - DNA, 329 bp, Gossypium hirsutum
ctctgaaaactaattgaaatcgtcggctgtctctcatttctgttcctctcgggcttccgccgccgtcgacacccaaaatggaggctcaccggctatcttctactaaacctgttcaagctctcaagccaacaaagaagatttctttagaggaagataccggtaaagcctccgacgcactgccgcttcccttgtacctaacgaatgccctgttcttcaccctcttcttctcggtggtttatttccttctttcccgttggcgtgagaagatccgtacctccacacctctccatgtcgtcaccttttcagagatcatcgccattctctcattt

SEQ ID NO: 231999 - DNA, 324 bp, Gossypium hirsutum
ccaatctgcagaagcaacaccctgatctcaagattgtggtttttgacatttacaaggcccttcttgatgttgttaataccccttcaaactatggtttcgtagaagcaacgagaggctgctgtggcacatggactgtagagacaactgaattcttatgcaatccggatacactgggaacttgtcccaatgcctcccaatatgtgttttgggacagtgttcattcatcggacgctgctaatcaggttcttgcagatacatagattgttcacggcattcccctgctttgattcgtcaggacaccgtgtttacttgcactttttaaac

SEQ ID NO: 232000 - DNA, 434 bp, Gossypium hirsutum
gaaaaaaattagtgaattttgactggattggtcttggatccaaatttttggagattacagagaaagaaagattgatttgaaaatacacaataggaataatcgcgatgggtttcaagatatttgtggtggcgttgatggtgggtttcatcgcagcggctcagatttcattagcatccaccgtgcctgcttttctatgggctcctggtttctctagcgttgaatcgaaggaatctgtaaattatcagatcatgtctccaaaggatctagctaactctgttctttctcaagggggatggtctgacttactgtgctccgagaggaaaaatgagcgccctgttgatctcgccgttgtttttgttggtagagagttgcactcttcagatgttgcagggaacatacatgcagatccggctcttttgaacttgcttaaggac

SEQ ID NO: 232001 - DNA, 465 bp, Gossypium hirsutum
agctggccgcctgcacggcccggactactggctggacacccatcctgatatctttgtctgctatggtgatcaacaaatacacgctgaggagtaacattaagagctttaatctttcgggaatggggtgcagtgcggggcttatctccattgatttagctcgggatcttctccaagtacacccgaattctaatgcagttgttgtcagcacagagatcatcactcccaactactaccaggggaatgaaagagctatgctccttcccaactgtctcttccgcatgggtggcgcagcaatcctgttgtcgaaccgccgctcatagaggcggagagccaagtaccgacttgtccacgttgttcgaacccacaaaggggccgatgacaaagcctaccgatgcgtgtttgaaagaagaagacaaagacggcaaaagtgggatatcattatctaaagatctcattgctatagct

SEQ ID NO: 232002 - DNA, 439 bp, Gossypium hirsutum
  unsure (1)..(439): unsure at all n locations
cccacgcgtccggaaaaatggccaccattgatgttcctgagcaggtttcagttcttgcagatgcagaagctcttagaaaggcttgtaaaggatgggggacagatgagaaggcaataatttcagtgttgggtcacagaaatgcagttcaaaggaagcaaatcaggcttgcttatgaagatctttaccaggaagatctcatcaagcgtcttgaatcagagctttctggtgatttcgagaaagcagtgtatcgttgggtattggatccagcagatcgagatgctgtgttagctaatgttgccataaagaaattaagccctgatcaccatgtgatcgttgaaatttcatgcaccagatcccctgaagagctcttggctgtgaggagaagcttatcangctcgatacaagcattccctggaagaagatgtggctgctcatacca

SEQ ID NO: 232003 - DNA, 443 bp, Gossypium hirsutum
gcgcttcaattcctcatttcaagggagagagtgtatcagtgtggcttcccctcttttacttaatttctctccgccatggctctctccgtcgagaaaaccgccgccggccgtgagtacaaggtcaaagacatgtctcaggctgacttcggtcgtctcgagatcgagttagctgaggttgaaatgcctggtttaatggcttgtagaaccgagttcggccctgcccaacctttcaaaggagccaaaattactggttctcttcacatgaccatccaaaccgccgttcttattgaaacccttaccgccctcggagctgaagtccgttggtgctcttgcaacattttctctacccaagaccacgctgccgctgccatcgctcgtgactccgccgctgttttcgcttggaaaggggagaccctccaggaatactggtggtgtactgagag

SEQ ID NO: 232004 - DNA, 422 bp, Gossypium hirsutum
ccaaattcagacaagcaaccggaaaaaagtgtcagttgtttcagttttcagacaaggaaacaaagcaggaaaatcgggtcagaaaaaaaaatgagagttaactggaaatcatggtcacttaacaaggaccatcttgtgaagcttgcaattggcattctcttagtgggttttgcttttaagctcttggtttttcgttctaaaggatttggtgttgatttggaattccctgaggtagagaaagagtatgttcaaaaaccagatttgaaatctcctctccctgttcaaatacctgaaaatgatgatcaaatgcctctagatgttgttatagagaaatgtgatctctttacaggggattgggtgcccaatccctcaggtccgacctataccaacgggagctgtcccttgatagaagtcatcagaat

SEQ ID NO: 232005 - DNA, 425 bp, Gossypium hirsutum
cttcaattcctcatttcaagggagagagtgtatcagtgtttcttcccctcttttacttaatttctctccgccatggctctctccgtcgagaaaaccgccgccggccgtgagtacaaggtcaaagacatgtctcatgctgacttcggtcgtctcgagatcgagttagctgaggttgaaatgcctggtttaatggcttgtagaaccgagttcggccctgcccaacctttcaaaggagccaaaattactggttctcttcacatgaccatccaaaccgccgttcttattgaaacccttaccgccctcggagctgaagtccgttggtgctcttgcaacattttctctacccaaaaccacgctgccgctgccatcgctcgtgactccgccgctgttttcgcttggaaaggggagaccctccaggaatactg

SEQ ID NO: 232006 - DNA, 444 bp, Gossypium hirsutum
ggggggaccggcccgcattattgtttgaccaacccgtccgcccactcgtccggaaaagcaaacaaatgggaacacggggtgtgattgaacaagttggctgatatgagcaatgaggagttcagaaaagcttacttgtcaaaggtgaaaaagcccatcaacaaagggatatccctgtcaaggaacatgaggagaaaggtgcagtcttgtgatgcaccctcctccttggattggaggaactatggagttgtgactgctgtcaaggacacaatgttcttgtgaaagttgttgggcattctcattaaccggagccatggaaggaatcaatgccttacttactggagacctaattagcctttcaaaacaagaaccttgtgattgtgataccagcaactatgggtgtgaaagacgatacatggactatcccttcgagtgggttattaacat

SEQ ID NO: 232007 - DNA, 374 bp, Gossypium hirsutum
agcactgtcacaacagatgaggagagctcgaaggagtccatcaatggggggacaagatgagtggcttgatcgttggatgcctgctaaaccatggaatatcagaggaagagcttcactggatcaaagagataatgtcaaaactgtgcgaaatggacacttgacagccttattcatatgtagcaccaaattatagaagagcaacttgaaaccattatcaccaatggcctagttcacctctccatagggctcaacacaatgcacaagctttccacccttctgcacttacaccctgtccatcaaaaacacgtgcggttcaagtacggtctgcgagccctcgatgcgttatggtataccgaacctcgttttgatcatca

SEQ ID NO: 232008 - DNA, 355 bp, Gossypium hirsutum
gcgaaactggtgccgggaagcacgtccctcgcgccatctttgttgatctggagcctactgttatcgatgaagtgaggactggtacgtaccgccagttgttccaccctgagcaactcatcagtggcaaagaagatgctgccaacaatttcgctcgtggccattatacaattggcaaagagattgttgatctctgcttggatcgtatccgaaaacttgctgataactgtactgggctccaaggcttcttggttttcaatgctgttggtggtggtactggttctggtcttggatctcttctcttggagcgtctctctgttgactatggaaagaagtcgaagcttggtttcactgtcta

SEQ ID NO: 232009 - DNA, 297 bp, Gossypium hirsutum
agaaaagctctttctttggcagtgaaaattgaaaatcgacggccaatatgtcgacgctggcgtcaaaacggttgcttgggctaacgtcaagggagatcccgtcacggcccgttcagattctgccacgtctttaccacgaaaaggtcatcgaccactacaacaatccccgtaacgtcggttgcttcgataaaaacgatcccaacgttcgcacccggttggtcgggagctctgcttggggcgaatgtattaaaccttaaaataaaaatcgacgaagaattcggggaagaattgttgatg

SEQ ID NO: 232010 - DNA, 421 bp, Gossypium hirsutum
ctctctcatggaccttcattcgaccaatggttgaaaatctttaaatgataacatcgtccttttgcccaccactatcaaatttccagattttccaggaaaaagaaaatcaaaacccccaggtgaagaaggtgaaaaccagcagcggcaaaggcaataaaaggtgaagccaaagagagagagatatatacataataaaaaagacttttcaaaagaacacaactatggctcctcatagagaaggatcagatgcttcagtggaagccatggttgctcaagtcgaaaaacacccaatttcatcgatccttatcatcattgctatgcaaacagaagctttgccggtggtgaataagttccagttgattgaaaaccctcattcttcgtttccaaaaggggtcccttggatccattatcatggtgcata

SEQ ID NO: 232011 - DNA, 427 bp, Gossypium hirsutum
ggagcttaagaggaagaggcattctttcactcccaaaatgtcagatcttcaagcaccccttcgcccaaagaggaagaagggcttggtggactttttggtccagtttcgttgggtttttgttatattttttgtccttcctttttcggctctgtattactttctcatatatcttggagatgtcagatccgagatgaagtcctacaagcagcgtcagaaggaacatgatgaaaatgttaagaaagtagtgaagcgtctcaaacagaggaatccaaaaaaggatggtcttgtatgcacagcccgcaaaccatggattgcggtggggatgcggaatgtagactataagagagctcgccattatgaagttgatttgtctgctttccgtaacattcttgaaattgatagagagagaatgattgcaagggttgag

SEQ ID NO: 232012 - DNA, 427 bp, Gossypium hirsutum
gcgcattgacactgaaaaggattatccttaccttggcttcaataaccaatgtgatccaacaaaaaaaaacgctaaggttgttagcattgatgggtatgaggatgttccaaataacgagaatgctttaaaaaaggccgtcgcacatcagcctgtgagtatcgccattgaagctggtggtagagctttccaactctatgaatcaggagtttttaatggtgaatgcgggttagctttagaccacggtgtggttgcggtcggctatggcaccgatgataacggtcaagactactggattgtgaggaattcatggggcagcaattggggtgaaaatggatatataagaatggagcgtaacatcaatgctaataccggaaagtgtggtattgcaatggaggcttcctatcctggtaagaatggggcaaatatc

SEQ ID NO: 232013 - DNA, 394 bp, Gossypium hirsutum
tttttattttcactcacttcacctgagattttgttttcttttgtttttcagtaatggggaagattaagatcggaattaacggatttggaaggatcgggcgtttggttgcgagagttgctctccaaagcgaagatgttgagcttgttgctgttaatgatcctttcatcaccactgattacatgacctatatgtttaagtacgacagtgttcacggtcaatggaagcaccatgagcttaaagtgaaggactcaaagactctcctctttggtgaaaagcctgtcactgtttttggcatcaaaaaccctgaggaaattccatggggtgaggctggtgctgaatatgttgttgagtctactggtgtcttcactgacaaggacaaagctgctgctcactt

SEQ ID NO: 232014 - DNA, 428 bp, Gossypium hirsutum
cccacgcgtccgcacaaagattgagtttcggtgaattcccatttactgatcccatcttttacggaatcgatcccctacaagaatatgtggagctcggcatgtctggaagcacaggagaacgttcttttgctgatattattaccagtattcgatactgggtcattcatagtattactataccttccctattcatcgcgggttggttattcgtcagcacaggtttagcttatgatgtgtttggaagccctcgtccaaacgagtattttacagagagccgacaaggaattccattaataactggccgttttgattctttggaacaactcgatgaatttagtagatctttttaggaggacccaatgaccatagatcgaacctatccaattttacagtgcgatggttggctgttcacggactagctgtaccta

SEQ ID NO: 232015 - DNA, 336 bp, Gossypium hirsutum
gtaggtgccgactgctccgttctttgtagcaaagcaaagtttgtgaagcatggccgtcgggaagaacaagaggatttccaagggaaagaagggaggaaagaagaaggcagcggatccttttgctaagaaggattggtacgatatcaaggctccttcagttttcactaccagaaatgtggggaaaactctcgtctcccgtactcagggtaccaagattgcttctgaaggactcaaacaccgtgtgtttgaggttttcccttgctgatcttcaaggtggtgatgaggatcatgcttacagaaagattcgtttgagagctgaagatgttcaaggaaaaa

SEQ ID NO: 232016 - DNA, 431 bp, Gossypium hirsutum
gtcagccaattgtttgagctagctagctcttactcaaatggcaaccaaaacgatgatgttgcaaatattttcacttttcttctttttgttcagtatctgcaactccattttccttggtgctaatggagatgacaatggtggttggcaaactgcccatgccaccttctacggtggtgctgatgctaccggcacaatggggggagcttgtggttatggaaacctgtacagtcaagggtatggaacgagcacagcagctttgagcactgcacttttcaacaatggcttgagctgcggtgcctgctacgagctccggtgcaacaatgatcctcaatggtgcattagtcgaaccataaccgtgacagccaccaacttttgtccccctaactatgctttatctagtgacaatggcgggtggtgcaatcccccacgag

SEQ ID NO: 232017 - DNA, 328 bp, Gossypium hirsutum
gctgtgtggatttttcttttccaagggaggactatgaactctcttggaagttgaaatatctgtcattcagtatacaccggcaattgatatttggagcattggctgcatctttgccgaggtattgatagggaagcctctatttcctggaaaaagtgtcgttcatcaattggatttgatcactgatcttttggggacgccttcacctgaaactatttctggagtccgaaatgataaagcacgaaaacacttgacagaaatgcggataaaacaacctgtgcctttctcacagaagttcccaaatgcagacccgttagcagtgcggctattg

SEQ ID NO: 232018 - DNA, 428 bp, Gossypium hirsutum
cgaaagctaagcaaggaaatggcgatcccttccagttctgcttatctcttcttactctcctttttcaccctttctctattccttgctatttccactgctgaatctgaatctgaattagaactggtagccgatctccgcgcccttcagtccgaatccaaatcaggagtcatccacttagatgaccgaaccattgccaaattcctaacctcccccaaaatccctcgcccttactctatcctcatcttcttcgacgccacccaactccacgacaaaaccgaactccacctccgcgagctccgccaagaattcgccctcgtcgcctcttccttcatcaccaaccacaacaactccaacaccaagctcttcttcgccgacatcgagtttcgcgaatctcaatcttctttccacctcttcggcgtcaactccct

SEQ ID NO: 232019 - DNA, 371 bp, Gossypium hirsutum
gttcttacagccgtccaaatgggtcgtgtcatccgagctcagcgtaagggtgcgggttccgtcttcaaggcccacacccaccaccgcaagggtcccgcccgttttcgcagcctcgacttcggtgaacgaaacggctacctcaaaggcgtcgtcaccgatgttatccacgacccaggccgcggtgcgcccttagctcgcgtcgtgttccgtcacccgttccgttacaagaagcagaaggaactgttcgtcgctgctgagggtatgtacaccggacagttcgtgtactgtggtaagaaggccacccttatggtcggaaacgtgttgcctcttagatctatccccgaaggagctgtcgtttgcaacgtggaaca

SEQ ID NO: 232020 - DNA, 431 bp, Gossypium hirsutum
gagaccaccaaatactattgcactgtcattgatgctcccggacatcgtgactttatcaaaaacatgatcactggtacctctcaggctgactgtgctgtccttatcattgactccaccactggaggtttcgaggctggtatttcaaaggatgggcagacacgtgaacatgctttgcttgcctttactcttggtgtgaagcaaatgatttgttgttgcaacaagatggatgccacaactcccaaatactcaaaggcaaggtacgatgaaatcgtgaaggaggtttcttcatacttgaagaaggttggttacaaccctgagaagattccattcgtccctatctctggttttgagggtgacaacatgattgagagatcgaccaaccttgattggtacaagggtccaactctgctcgaggctcttgaccagatcaa

SEQ ID NO: 232021 - DNA, 406 bp, Gossypium hirsutum
  unsure (1)..(406): unsure at all n locations
ttcagatttcatcaaatcctatatgaaagaatactttctgcgaaaacaaactcaacaggtgttgagttaaagcggaaaaactcaaaagaatcgtgttcttcagatttttatgccagatttatgagtgcactgtacagtctacttgatggatcttctgacaatatgaagtttgaagatgaatgtcgggcaataataggaaaccagtcatacgtattattcacattggacaagttaatatataaattggttaagcagcttcaagcttgtgcaacagatgagatggataataagcttcttcaactgtttgagtatgaaaaatcccggaaacatgcaaggacaatggattcagtgtattatgaaaatgcgcgtgtcctncttcatgaggagaatatttatcgattgaaat

SEQ ID NO: 232022 - DNA, 326 bp, Gossypium hirsutum
cgcatcttcgcccatcgccaagatgcagatcttcgtcaaaaccctaacggggaagactataaccctagaggtcgagtcttcggacaccattgacaatgtcaaagctaagatccaagacaaggaaggcattccacctgaccaacaacgtcttatcttcgccggcaagcaactcgaagatggccgcaccttagccgactacaacatccagaaggaatccactctacaccttgtcctccgtctcaggggaggtgcgaagaagagaaagaagaagacctacaccaagcccaagaagatcaagcacatgaagaagaatgtcaagctcgctg

SEQ ID NO: 232023 - DNA, 372 bp, Gossypium hirsutum
cggacgcgtgggcggacgcgtgggataggagtagccgatggtgtaggtggctgggctgaagtcggtattgatgctggtgaatttgctcgtgaacttatgtctaattcggtgaaagcaattcgagatgaacccaaaggttcagtcgacccggccagagtattagagaaggcccattcaagcacaaaatcacaaggatcctcaactgcgtgcgtcattgcccttcacaaggagggactacatgcaataaatttgggggacagcggtttcatagttgttagagatggttcaactgttttccattccccagtgcagcaacacgggttcaattttacttatcagttggagagcggtaataatggtgatctaccgagc

SEQ ID NO: 232024 - DNA, 412 bp, Gossypium hirsutum
gagctctgtcaagttctctctcaaattcttcaacatttattttttctttctatacttgttttgtattttgttttgagttgatatggctggcaaaggcgaaggtccggcgattggtattgatctcggcaccacgtactcgtgcgttggtgtttggcaacatgatcgtgtggagatcatagctaacgatcagggaaacagaaccacgccgtcttacgtgggttttacagacactgagcgtttgatcggtgacgctgctaagaatcaggttgctatgaaccctaccaatactgttttcgatgctaagcgtttgatcggtagaagattcagcgactcttctgtccaaagcgacatgaaattgtggccatttaaggtcattcctgggcctggagacaagccaatgatcgtcgtcaca

SEQ ID NO: 232025 - DNA, 388 bp, Gossypium hirsutum
aaatggtgcagctgctgtgcttgactctgcaatcaaatggtggaaaactgctatgaccgaggacgaccagcttagtgttattatgcgagaggctgcatccttcaaactcaggcatggcaaggaggaggaagctgcccacctatacgaggagcttgtaaaaggtaacggaaatatagaagcattggttgggctgataactacagttgctcatgcaaatgttgagaaggctgaagcctatgagaagcaattgaagccattaccaggtttgaagggggctgatgtggatgctttggagaaaacttcaggagcaaaacctgttgatggtgcttctcgtgccgggcttgctgaagctcaagaggatggtaagaccaaagagaaaccgaagaaa

SEQ ID NO: 232026 - DNA, 321 bp, Gossypium hirsutum
cctgtcgtcccacgcctcctcataaaggttagcagctgagttgggagatgatgtccctcctgtggcagtggataaaaatccttccctattgatacctccaacccctgttatgtgtggtggtgattggccccttctgagagtcatgaaaggcatatttgatggtggatttgatggtggcaggggtgctgtggatgaagaggaggagggtgcataaggtgactggggtgaagatcttgatgtggttgatggcttgcggattgtggacgttagtgccattttggaggatggggaagtggccgcaaaaaatgaagaggggtggat

SEQ ID NO: 232027 - DNA, 426 bp, Gossypium hirsutum
gaatgtataaaaccctattttgggggccacgggtattctcctcagataagtaatcccccagagtctcttccctcatctacccccaaatctcctcacattatgtctttggtggccaacgaagattttcagcacattttacgtgtgctgaacaccaacgttgatgggaagcagaagattatgtttgcattgacctccatcaagggtatcggaaggcgattcgctaacatcgtttgcaagaaggctgatgtcgacatgaacaagagggctggtgaattgactgcacaggagttggacaatctcatgaccattgttgcaaaccccaggcagtttaaaatccctgactggtttttaaataggcagaaggattacatggacgggaagtattcccaagtcgtgtctaatgctcttgacatgaaattgagggat

SEQ ID NO: 232028 - DNA, 434 bp, Gossypium hirsutum
cacgcgtccgaattgtttgagctagctagctggtgactaaagggcaaccaaaacgatgatgttgcaaatatttccacttttcttatttttgttcagtgtctgcaactccattttccttggtgctaatggagatgacaatggtggttggcaaactgcccatgccaccttctacggtggtgctgatgctaccggcacaatggggggagcttgtggttatggaaacctgtacagtcaagggtatggaacgagcacagcagctttgagcactgcacttttcaacaatggcttgagctgcggtgcctgctacgagctccggtgcaacaatgatcctcaatggtgcattagtcgaaccataaccgtgacagccaccaacttttgtccacctaactatgctttatctagtgacaatggcgggtggtgcaatcccccacgag

SEQ ID NO: 232029 - DNA, 428 bp, Gossypium hirsutum
  unsure (1)..(428): unsure at all n locations
cgaaacttctctgaagaggttgctgttcttgataactatttcgggaagcttggcgctggtagcaaggcttgtgtaatgggtgggctggataaacagaaatggcatgtgtactctgcatctgcagaacctgtgaccgccactggcccggtttacactctagaaatgtgcttgactggtttggacagggataaggcgtcggttttctacaaagaccaattcaggctccgcagctgtgatgaccattaattctggcataaggaagatccttccagagtctgagatatgtgattntgagtttggaccctgtggttactcgatgaatgcgattgaaggtgctgcaatttctactattcatgttaccccagaagatggatttagctatgcaagctttgaagctgtgggatataatctgaaagataagaatctga

SEQ ID NO: 232030 - DNA, 262 bp, Gossypium hirsutum
  unsure (1)..(262): unsure at all n locations
gcacaattacagatgaagacattgatagaatcattgccaaaggagaagcagcaacagctgaacttgatgccaagatgaagaaatttacagaggatgctattaaatttaagatggatgatactgctgaattgtatgattttgatgatgaaaaggatgaaaacaagtttgacttcaagaaaattgcaactgaaaattggattgagcctccaaaaagagagcgaaagcggaattactcanaatctgagtactttaaacaaaccct

SEQ ID NO: 232031 - DNA, 343 bp, Gossypium hirsutum
gaatgtataaaaccctagtttggctcccacgggtattctcctcagataagtagtcccccagagtctcttccctcatctacccccaaatctcctcacattatgtctttggtggccaacgaagattttcagcacattttacgtgtgctgaacaccaacgttgatgggaagcagaagattatgtttgcattgacctccatcaagggtatcggaaggcgattcgctaacatcgtttgcaagaaggctgatgtcgacatgaacaagagggctggtgaattgactgcacaggagttggacaatctcatgaccattgttgcaaaccccatgcaggttaaaatccctgact

SEQ ID NO: 232032 - DNA, 398 bp, Gossypium hirsutum
atcagtctcttaaaagagcaatacgaaaccaaaagcaaagaagcaaagtctcacacttaggcagagaaaaaacaaaaccaaaaacctaaaaacccaaaattcaaaatggatgtaattaaaacccagcaaatttcatctcgacccatagagaaggtaatagttcatcctttggttcttttaagtatcgtcgataactacaatcgcgtcgcgaaagacacgcgcaagcgcgtcgtcggagtcctccttggttcttccttcaaaggcaccgtcgatgtctccaacagctacgcagtgcctttcgaggaagatgagaaggacccgagcatatggtttctcgaccacaactaccatgaatcaatgttttcgatgttcaagaagataaatgcccaagaacatgt

SEQ ID NO: 232033 - DNA, 437 bp, Gossypium hirsutum
ctttctttgaggttgttttcaccggaggccgcacacaaccaggcacaatcaaacctgatgagggggagcgtcacccttactctgtaatagagtgtgaggctaaacgtgaaaccattttgccatctgtgatctacatacagaaaatcttgcgtcgaaggccttttctgataaagaatcttgaaaatgttatgcgaagattcttgcagtccttggagctgtttgaggacaatgaaaggaagaagcttgcaattttcacagcacttgctttttcccagaagctatcagggctgccacctgagactgtgttccagccactgctcaaggacaatcttgtggtcaaagggctagttctttcattcataacagacttcttcaaggagtatctggtggataatagccttgacgaattattttcaattctgaagcgagggaaaatg

SEQ ID NO: 232034 - DNA, 426 bp, Gossypium hirsutum
  unsure (1)..(426): unsure at all n locations
ataaggtcccgttcatattgggtgtcgaggtggaccctaacggtgggccaaggattcaagaagcagctatgaggttgtactcggagcaaaaggagggcaataaggtctctctagtacaagcattgcaagccatcgaagcggccttgaaacggttcttttttgggtacaagcaagtgttgatgatcgttatggggagtttggaagcgaaagggaacagagtcgtggcgtgttccgactcgggtgactcgttgagtcagatattcttggagcctacttatttccccagtttggatgctgctaagacgtttttgggcgagttntggagtcgtgaacagggtgagtctcggtccaagaagtgatgatgactcggacccgtcggttggttaatcataaaaagaaaaaaaaaggggttaattattcttttta

SEQ ID NO: 232035 - DNA, 309 bp, Gossypium hirsutum
cggacgcgtgggttgcaagcttttatcgctgcttatgctgaattggaaaccactctctctggcttgaatgttttgattgagacctactttgctgatctcactgctgaggcgtacaagaccctcactgaattgaagggtgtcactgcttatggtttggatttggctcgtggaacccataccattgacttgatcaagagtaacttccctaatggcaagtacctctttgctggagttgttgatggaaggaacatttgggccaatgatcttgcttcttcacttacgaccttgcaggctcttgaagctgttgtg

SEQ ID NO: 232036 - DNA, 428 bp, Gossypium hirsutum
gctgctacatttttctacagggcacctgagtgccgggacatccggaaatcatcgactcaaccggctgatgtttacagcctcggtgttcttctcttggagctcttaacaggcaaaactccattccaagaccttgttcaggagcacggttcggacatccctagatgggtaaaatcagtccgggaagaagaaaccgagtctggcgatgatcctaattcgggtaatgaagcatccgaagggaagcttcaagctcttttgaacattgcaatggcttgtgttgcaatcgcaccggataaccggcctgcaatgagagaagttttgaagatgattagagatgtgagggccgaggctcaagtatcgtcaaacagtagcgatcattcgccagggcgatggtctgacacggttcagagtttgcctagagaagaacatct

SEQ ID NO: 232037 - DNA, 378 bp, Gossypium hirsutum
ccggatatccgcagccaatccggaagggactcgttggaccggcaagtgttggtacgtccataaccttctcaaatacgaattcgatctccagtttgatatccccgttacttatccggccactgctcccgagctcgagttgcccgaactcgatggcaagactcagaagatgtacagaggaaggaagatttgtctgaccgtgcatttcaagccactttgggcaaaaaattgtcctaggtttggaatagcacatgcactgtgtttgggacttgccccatggcttgctgcagagattccgattctcgtcgattccgggatgatcaagcataaagatgatgcagccacatcaaatgagtcttagcatgccgatgctgggatgat

SEQ ID NO: 232038 - DNA, 357 bp, Gossypium hirsutum
  unsure (1)..(357): unsure at all n locations
gttgcttgcaatgcagatccgctttgtcgggtgttaacatgtgcaatccggtgaacatatggccgccatgggcgtcttcttcttgatgcaagttttctactttttagattgggtgaagcacatgcttagtgacacaaaattgtttcaagctttcttgaggatcaccgtgacttctgcagtcgctgtggggtggtattgcttttgggattaggcatggtatccggttatatttcaccttggacaggaaggtttactctttgctggatccaacatatgccaaggatcacatccncatcattgcttctgtatctgagcatcagccaacagcgtggtcatctttcatgtttgatttccata

SEQ ID NO: 232039 - DNA, 426 bp, Gossypium hirsutum
attgatccttaccatggtgatcaagctgctgacatactggtcgatttctttgaaaagtgtaagaaagatccatctcactgggataagatctcccaaggaggcttgaaacgtatcgaggagaagtatacatggaagatttactcggagagactattgaccctgaccggagtgtatggattctggaagcatgtttccaaccttgaacgccgtgaggtcgtcgttaccttgagatgttttatgctcttaagtaccgcaagctggctgaatcagttccattggcagaggagtaaatttaagctgttaaataacattgggccggtttttcttggagaataatattctgttttgtaatttcaattggagaagctcttttgtatttcatcttgtcttttccttttccttttttcgccggcattgtttgaacat

SEQ ID NO: 232040 - DNA, 347 bp, Gossypium hirsutum
cgtcttcaaacacttcgaatcgttttccaattactctgacaagatgcaaatctttgttaaaaccctcactggcaagaccatcaccctcgaggtggagagttcagacaccattgataatgtgaaggctaagatccaagataaggaagggatcccaccggatcagcagaggcttatatttgctggcaaacaacttgaggatggccgcacgctagccgactacaacattcagaaagaatccacccttcacttggttcttcgacttcgtggcggcatgcaaatctttgtcaagactctcactggaaagacaattaccttggaggttgaaagctctgacacaattgataatg

SEQ ID NO: 232041 - DNA, 402 bp, Gossypium hirsutum
aaaaaaagcatttattttgttctcgcaagatcgaaaaagtgaagaaaataaaatttattattttattaaagttttgtttgggggaaattgagagaaaaatttgaaaaaaaaaaaaatccaagatgaagatcacatcgttagtagtactgaagtgcaacccggaaggatccgatccgataatactagcgaacactaccgatgtgagccattttggttactttcaaaggtcaagcgtcaaggagttcatcgtcttcgtttctcgaactgttgctaaacgtactccttctggtcagcgccagtccgttcagcacgaagagtacaaggtacatgcttacaacagaaatggactttgtgccttgggatttatggatgatcattatccaattcgaagtgctttttcgc

SEQ ID NO: 232042 - DNA, 372 bp, Gossypium hirsutum
atttttcagagtagaagcttcactaagcttactccctccctgcttcccgctctctgtttctgtcgcttccatggctgtctcgtttaaaatgcctgtcgttttgggtttctttgtggggcttatgatgctgggtttggctagctcagctgagtttgatgagctgttgcaacctgggtgggcaaacgatcatttcatctatgaaggagagcttcttaagctcaaacttgataacttttctggtgctgggtttgcatcaaaaagcaggtatttgcttggaaaagtatccatgcagatcacacttgtggagggtgactctgctgggactgtcactgctgactatatgtcatcgggagggtccataccacagtgagt

SEQ ID NO: 232043 - DNA, 386 bp, Gossypium hirsutum
cggacgcgtgggcttccttccttttctttctttttgctatggcaggaactggggtggtcgctgtttatgggaacggcgcaatagctgaaacccacaaatcccctttctccgtcaaggttggcctagcccaaatgctccgtggtggggtgattatggatgtcgtcacccctgaacaagctcgcatcgctgaagaagctggagccctgcgccgtcatggctcttgaacgagtccccgccgacatacgagcccaatgtggcgtggcgcggatgagtgacccacaactcatcaaagaaattaagcaagctgtcaccattcccgtcatggccaaggctcgtattggccatttcgttgaggcccagatccttgaagccattggcatcgacta

SEQ ID NO: 232044 - DNA, 432 bp, Gossypium hirsutum
aaaccaccttgttctccccccttctacgtctttctggcaacatgggttcaccaccactttgggttctgcttctgggtgtgttgtttatggcttccggaacaatcgcagctccccctaagaagcctgtagatgtaccattctccagaaactatatgcctacttgggcttttgatcacattaagtatttcaatggtggctctgagattcagctccaccttgacaaatacactggtactggtttccagtccaaaggatcatacttgttctgacacttcaatatgcaaataaagctagtccctggagattctgctgggactgtcactgccttttatttgtcttctcaaaactcagagcatgatgagatagattgtgagttcttgggcaacagaacagggcaaccatacattcttcagaccaatgtgttcactggtg

SEQ ID NO: 232045 - DNA, 420 bp, Gossypium hirsutum
gcttcttggccgaaaacccatcttccctggtacagagtgtctcaaccaacttaagctgatcatcaacataccttggcagccagaaggatcttgaatttatagataaccccaaggcaaggaactacattaaatcactcccatattcccatggaatccccttttcttgtctttatccaaatgcccatcctttggcaattgatttactgcaaaaaatgctagtttttgacccttcaaaaaggattggtgtaactgaagcactccaacacccttacgtggcacccttgtacgatcccaactgcaatcctccagcccaagtgccaattgatcttgacatagatgaggatttgggggaagaaatgatcagggagataatgtggaaggaaatgctttattaccatcctgaagctgctaatgctaatg

SEQ ID NO: 232046 - DNA, 324 bp, Gossypium hirsutum
atttctacttcactctctccacttaactcttccatctgtacgggatcgttttgttgttcttcgatctccatcaatggcgaaagaaccagttcgcgtcctcgttactggagctgcaggacaaattgggtatgcccttgtacccatgattgctaggggagtcatgttgggtgctgatcagcctgtaatccttcacatgcttgatatcccacctgctgcagaggctttgaatggagtcaaaatggagttggtggatgctgcttttccccttctaaaaagtgttgttgctactactgatgttgttgaagcgtgcactggaatcaacat

SEQ ID NO: 232047 - DNA, 410 bp, Gossypium hirsutum
cccacgcgtccggggagaagccttgaatcttgtttcgctaagtggtagttcatccgtggagtgggcacagaggtcttttgtctcacaaagacaaccactgacatggtacaaaacaactttcaatgctccagctggaaattctccattggctttagatatgggtagtatgggcaaaggccagatttggataaatggaaagagcattggacgccactggcctgcatataaagcatctggaaattgtggtatctgtagttatgccggaacatttaacgagaagaaatgtggaactaattgtggaggggcctctcaaagatggtaccacgttcctcgttcatggctcaacccaacagggaatttgttggttgtgtttgaggaatggggtggagatccgaatggaattactttgg

SEQ ID NO: 232048 - DNA, 408 bp, Gossypium hirsutum
ccacgcgtccgactgaatctgttcccgaccggaaggtcgcggttttgggcgctgccggaggtattggccagcccttggctctcctcatgaagcttaaccctcttgtttctcggctggctctctatgatatcgctaacactcccggcgttgcagctgatgtcagccatgtcaacaccagatctgaggttgctggatatgttggtgaagatcaattgaagcaagctttggagggatgtgatgttgtcatcattcctgctggggtgccaagaaagcctggtatgactcgcgacgatcttttcaacatcaatgctggaatcgtcaagggtctatgtgctgctattgccaagtattgccctaatgcacttgttaatatgatcagcaaccctgtcaattcaactgtcccattgc

SEQ ID NO: 232049 - DNA, 418 bp, Gossypium hirsutum
atttactgatgtttacattgcgactgagctcatggataccgatcttcaccaaatcattcgctctaatcagagtttatcggaggagcattgccagtatttcttgtatcaaattcttcgaggactgaagtacatacattctgccaatgtcattcatagagatttgaaacccagcaacctcttgctgaatgctaattgtgatcttaagatttgcgactttggtctcgctcggcctactgctgagaatgagtttatgactgaatatgttgtcacgaggtggtatcgggcaccggagatattgctaaactcttcagactacaccgctgccatagatgtctggtctgttggttgcatcttcatggagctcatgaataggaagcctctgtttccaggcaaaaatcatgtacatcaaatgcgttta

SEQ ID NO: 232050 - DNA, 401 bp, Gossypium hirsutum
  unsure (1)..(401): unsure at all n locations
cccacgcgtccgcatggttggactttgccatttctccgagcttgcagatgatcacattgagaacatccaaactaactatgctgcaggggagaaggttaaagcaaagatattaaagttggacgaggaaagacaccggatttcccttggcatgaaaaattcatattttaccgatgatattgacttccaaataactgaacaagaagagtctgatgaagacattgaagagactggtgtagcagatgatgaggcacgatcaatactgttgacagacagaactgggatggatatcgagtacagaagtggagtgagcgatgttcttgctcaagcagaatctagagcttcaattcctncacttgatgtcactcttgatgacatttgacactctgacatggaaaatttta

SEQ ID NO: 232051 - DNA, 433 bp, Gossypium hirsutum
cagattcagaaagaaataaaggaagaagaagcaatggccactcttacagtgcccacgacagttccttcggtgtctgaagattgtgaacagctaagaaaagccttttcaggatggggaactaatgagggcttaatcatagatatattgggtcacagaaatgccgagcaacgaaacttgattcgaaaaacctacgctgaaacctatggagaggatctcctcaaggcactagacaaggagctctcgaatgactttgagaggctggttttgctttgggctcttgatcctgctgaacgtgatgcccttttggctaatgaaaccaccaaaaggtggacttcaagcaatcaggtccttatggaaatagcttgcacaaggtctgccaaccaactgcttcacgcaaggcaggcttatcatgctcgttataagaagtcgcttg

SEQ ID NO: 232052 - DNA, 421 bp, Gossypium hirsutum
ctgaacctgatacagatgaagtttatgcccaaataactctggtacctgaagtagatcaaagtgaggttatgagcccagatgatccacttcaagaacctgaaaggtgcatagtccattcattttgcaagactcttactgcttctgacactagcacccatggtggattctcagttttgcgccggcatgcagatgattgtctgcccccgctggacatgacacagcagccaccatggcaggaactgattgcaactgatctgcatggaaatgagtggcattttcggcatatttttcgaggacaacctaggcgccacttgctcactactgggtggagtgtctttgttagttccaaaaagctagtagctggagatgctttcatattcctgaggggtgctaatggggatctgcgtgttggagtgaggag

SEQ ID NO: 232053 - DNA, 429 bp, Gossypium hirsutum
cggacgcgtgggtctaaaccttcttcccatttcttcattacattgttcaagaacaaacaaaaaaaaaaaagaagcaaaaaaacatggccaaagttctgttgttcattgctctatgtgtgcttccagctttggttagtgctacacgcattctgaataaccaattggtggttgaaggctatgtgtactgtgatacttgccgtgctggttttgaaacccctaagactagaaggctagctgatgccatggttaagctggtatgctccgacaggaagaccggcggagttgttttcgagaaggagggatataccgacaaaaccggaaaataccagattcgtgtatccgaggatcacttggatcagatctgtgatgcagttcttgtgaagagcccccagcttggatgtgccacaatggcccccggtcgtgaacgtg

SEQ ID NO: 232054 - DNA, 376 bp, Gossypium hirsutum
  unsure (1)..(376): unsure at all n locations
cggacgcgtgggctctctctcaacgcagagcgaataggcggagacttccaagaatctatcgcatcagctaatcacgctccaaagaatggatcaggttcaacacccatctgtcatgcagaaggtagcaggccagctccttcgttctagccattctcaagattttcaaggttataatgggtctttcaggagtcctgctctataccaaaggcgtgctgcatatggcaattactccaatgctgcactgcagtatcctgtccgggcttgtggagacctgtctatggttccatcaacagcttcagctatttgcgttcaagcccctgctgagaaaggatttgccagcttntgccatgatttcctcatgggtggagtttctgct

SEQ ID NO: 232055 - DNA, 420 bp, Gossypium hirsutum
gccttcgcttccatagggtacttaatttagtgctcattgttgtggggatctgtgaaaatgaatggagctgtgcttgtagctcttgcagcagccattggtaatatgttgcaaggatgggataatgccaccattgcaggtgctgttttgtacataaagaaagagtttaaattggaaagtgcaccaactatagaaggcctgattgtagccatgtctcttatcggagccacctgcattactacatgctcaggaggcatatcggattggctaggtcgtcgccccatgctaataatctcgtccgtcctttattttcttagtggtcttgtgatggtatggtctcctaatgtttatatcttacttttggcaagacttttggatggatttgggatcggtttggccgtaactttggtcccggtttacata

SEQ ID NO: 232056 - DNA, 421 bp, Gossypium hirsutum
ggcattttctgtttttctcaatgggaatggatgcttcactgactatgtgcaaatcggtcacatcacctcctggcttattcttggggagaagtagagttattaggagttcccagtgtacctttatggtgggaagcaggatcaactttgctaggcagaaagctcattcaacccaagttaaatgtaaatctagcaggtgtggagtagctcttggtgctaaatgccgtgctgagaaaattttggtggcaaatagaggagaaattgctgttcgtgttatccgaacagctcatgagatgggaataccatgagttgctgtttactttacaattgataaagatgcacttcatgtgaatctggctgatgaatcagtttgcatatgctaagcaccaaacagtcaatcgtatttattgtttccaaattgtgc

SEQ ID NO: 232057 - DNA, 384 bp, Gossypium hirsutum
acagtacaagccgaaagaaatattgcatgatattcacgaccagcatggaatcgctgtttcttatatgcaagcttggcctgggtaggaacggagtatggctgcacttcatgggacttttgaggaagggtatcgtcttcttcctgcatactgtgagcaaataacgaaaaccaatccaggaagtgttgcatcagttgttgctactcgacaagaaaattgtttccagtgcctctttatttcttaccgcgcatctatctacgggtttataagtgcttgcagaccacttctggaacttgataaggtggatctgaaaggaaaatacttgggttcatggctttgtgctgcaccagttgatgcttatgaatgtctgtttcccttggcaattgc

SEQ ID NO: 232058 - DNA, 382 bp, Gossypium hirsutum
actaggctaataagggagctcaatctatgaggctttgcgaggcaaagaaccaaacagtgctgacctattatcttacatgcacattctttatgaggtttgcccctacttaaagttaggctacctgtctgcgaatggagccattgcaaaggccatgaaagatgaagatagagttcatattatcgattaccaaatagctcaggggagtcagtggatcactctcatccaagcatttgcagctaggcctggtggaccaccccatatccaaataactggtattgatgattccacatctgcatatgcccgtggaggaagcctaaacattgtgggaaagaggctgtctaagcttgcaaggtattttaaagtgccatttgaattccatgct

SEQ ID NO: 232059 - DNA, 432 bp, Gossypium hirsutum
atcggagctaatatacagaggccatgagactcagcttgcttcagattcctattcacctaaaccggttaaaccatgggcctctgtcacgcgcgtggtccggtacatgctccgggagcagcgcctcctctttgtgctcgtaggcattgccatagccactctggtcttcaacatcttcccggcctcgcgtgctgcgcacggcccccacctccactccaccaccccgctccttgattctatcccctacttccccatcgagacccaaaacaagttctcctatgcacaccggctcgggttcgggtcgggcaatccaaccggttagaattccgttggggctgaagcggaaggggttgaaaatcgtcgtaacgggtggagctgggttcgtggggtcgcacctcgtggaccgtctgatagcgagaggagacagcgtgatcg

SEQ ID NO: 232060 - DNA, 428 bp, Gossypium hirsutum
attttccttctgaagtacgaaaaaaaaaagagtacgaaatacgcttcaattttgacgatctctccaaatttctttcttgttttcctgatccatacgctatgttttcctccactatataaaagcagacgggttttgaactgggaagtgagaagttggtaataataggccaggaacgattgaaaatggaagcgaaaacgaacggaccgagtgtgaatgcgggtcgggttatggacgggccgacgaatccgatggtcactcctcttttaaccgatctttatcagttcaccatggcttacgcttattggaaagctggcaaacacaacgaccgagccgtgttcgatctatattttcgaaagaatccatttggtggtgaatttacagtgtttgctggtttggaagaatgcataaagctcattgctaatttcgag

SEQ ID NO: 232061 - DNA, 427 bp, Gossypium hirsutum
  unsure (1)..(427): unsure at all n locations
cttgtttaaaatataagaaaaaaaatcatacgcaatgagcactgctggtcaggttattcgttgcaaagctgcggtggcatgggaggcggggaagccactatcgatagaagaagtggaagtggcaccaccccaaaagcatgaagtccgtattaagattctcttcactgctttatgtcacactgatgtatactactgggagtgtaagggttacactcctctgtttcctcgtatacttggtcatgaagcctcanggatcgtggagagtgtgggtgagggtgtgaatgatttgaaacctggagatcatgtgctccctatcttcaccggagaatgcaaagaatgtcgccactgtctgtcagaagaaagcaataacatgtgcgaactgcttangatcaactgcgaccgangtgttatgcttgctgatgggaaa

SEQ ID NO: 232062 - DNA, 429 bp, Gossypium hirsutum
taaacccctccattcattatttacgttaagttcaaagaaatggctaatcctgtgatcactcgcgtccacagtctccgtgagcgtttagatgagacccttcttgcccacaggaacgagattttggccttgctctcaaggatcgagggcaaaggaaaaggaattctgcaacaccatcaaattattctagagtttgaagctatccctgaagagaacagaaagaagctcgctgatggtgcattttttgaagtattgaaggctagtcaggaagcgatcgtgttgcctccatgggttgcacttgctgttcgtccaaagcctggtgtttgggagtacattaaagtgaatgttcacgcccttgttgttgaggaacttactgttgctgagtatctccacttcaaggaagagcttgttgatggaagttcaaatggaaac

SEQ ID NO: 232063 - DNA, 430 bp, Gossypium hirsutum
ggcggctattcctttggggttgcaacaaagggatgtaattgggattgcagagacaggatcaggtaagactgctgcttttgttttgcctatgttagcttatatatctagattacctcctatgagtgaagagaatgaagctgaggggccttatgctgttgtaatggctccgactcgtgaacttgctcaacaaattgaggatgaaaccatgaagtttgcacattatttaggtattaaagttgtttcaattgttggtggtcagtcaatagaggaacaagggtttaggattagacaaggttgtgaggtcgttattgcgacccccggtcgtttgctcgattgtttagagaggcggtatgctgtgttgaatcagtgtaattatgtggttcttgatgaagctgataggatgatagatatgggttttgaaccccaagtt

SEQ ID NO: 232064 - DNA, 434 bp, Gossypium hirsutum
ctaaagatcaaagactcaaagagaaagaaagcggccatggagaaggaaagagagcaacaagtttacttggcaaggcttgctgagcaagctgaaagatacgatgagatggttgaggccatgaagagtgttgctaagttggatgttgagctgactgtggaggagaggaatctgttatctgtgggatataagaatgtgattggagcaagaagggcatcctggcggatactgtcttcaattgaacagaaggaggaggccaaaggtaacgaacaaaatgtgaagaggataaaggattataggcaaagggtcgaagatgaactctcaaagatatgcaatgacatactctcagtcattgataagcacctcattccatcttcctccaccggggaatcaactgttttctactataagatgaaaggagattattttcgttattt

SEQ ID NO: 232065 - DNA, 436 bp, Gossypium hirsutum
ctttgttcctcatcctctgatccgtctcttcccgcattcgtcccgccggatttaacaagttttcaaacgaaaaatgagggaaatccttcacgtacaaggcgggcaatgcgggaaccagatcggatccaagttctgggaagtggtttgcgacgagcacggcattgaccctaccggacgctataccggaaactccagtctacaattggagcgcgttaacgtttactacaatgaggcttcttgtggaaggtttgtcccacgcgccgtgctcatggatcttgagcccgggaccatggatagtgtgagaaccgggccttatggtcagatctttaggcccgataactttgtcttcggccaatctggagctggtaataattgggcctaagggcattatactgaaggacccagcctaatggatctggtcctgaaggtggcaaaa

SEQ ID NO: 232066 - DNA, 369 bp, Gossypium hirsutum
gtgaggttctacaaggaggaagagaagaatgatcctgaattcgcaaagaagctagcttctctcgctgatctctatgttaatgatgcatttggcactgcgcacagagcccatgcttccacagagggagtggctaagtacttaaagccttctgttgctggttttcttatgcagaaggaactcgattatcttgttggagctgtggcaaattccaagaagccatttgctgcaattgtcggtggttctaaggtatcaaccaagattggagtgattgaatcactcttggccaaggttgatattctcatactgggtggaggaatgatgtttaccttctacaaggcccaaggatatgcgggtggatccttaacttgt

SEQ ID NO: 232067 - DNA, 385 bp, Gossypium hirsutum
ccctcgtcttgattttttcatcaatggccaagtacggcgaaggcgacaagcgctggatcgtggaggaaagacccgacggtgctaacgtccacaactggcactgggctgaaaccgattgcctcccctggtcgaaaatgttcttcaccaaatcgctttcggatctcaccatccttgacggccaaggcaatctccgcatcaagaccaagaaggtcgaaaaggtcgacggcgaagcctatgttaatattcgcaagggtaaagtcattcccggatatgaaatcagtttgagtgtatcctgggaaggcgaagccaaagatggggaagggaagacgctgttgaaaagctgaggtaacctcgagaatccgtacatttcggatgaaaatgctga

SEQ ID NO: 232068 - DNA, 398 bp, Gossypium hirsutum
cgttgttcgatctcccaaacactactgactttgacgggtttcacaacgaacctatccatcatggtaaaacctgctaacggtaccaccacgctcgctttcatctttaatgaaagcgtcagggctgccggtgattctatagctagcatgggaggctatatctatccacagacactggacaaacttatcgatatccatccttacatgcttggagcaatggctggaggagctgctgactgccaaatatggcacagaaatttaggcatcaagtgccggctacatgaattagcgaacacgcgtaaaactatacctacaagggcttcagaactactcgcgaacattctgtatgcttaccgaagaatgggaccttttggtgggaccatgattgctaggatgcatga

SEQ ID NO: 232069 - DNA, 218 bp, Gossypium hirsutum
gtccggtgcgcccccggcgggccttgaaaatgcggaggaccgagtgccgttcgcgcccggtcgtactcataaccggattaagggttcaaggggaacaacctttggtcaatggaacaatgttagccagggaaggtcgcaaaatggatcccgaaccttcggaaaaggattgggttttaaggcctggcaccgggggtccaatccccaaccccgtgggtggc

SEQ ID NO: 232070 - DNA, 417 bp, Gossypium hirsutum
gcggggacacctgggcttctttacatgcaccatgagtattcaccaggggcagggaaatctatacttcattcgaacagacaccatactgagtggaaaggttcgatgcaagctttgtttttgatgtgccattactttgcagcgaaagagatctataatgctatccaagttttcattgcggattatgtgtggatgactggatctgggaacttctcatattatcatgtaggcgaagattccatgcttgctaggtttcgcacagatgatatgaccactaaatttcttttttttgctgtgccagaactcaataatacttatatgttgtgctatatatgcccaatgcatactctggtctgttatggtttttggagcactcggtatataaaatgacgacaactagaaagggtcagtcatggctct

SEQ ID NO: 232071 - DNA, 389 bp, Gossypium hirsutum
cggacgcgtgggtttacgttgacaaatctgcctttttcttctcaataccaaaagttttctagcagatcgccacaaagggaattttgaaccttgtggggggttgtttttaatagaaaaggtgaaccatggggaccccggaaacgtcacgggagccatgccctgatcgaattctcgacgacattggtggtgcttttggcatgggtgctgttggaggtgcagccttccacttcttgaaaggcacatataactcccctagtggttctcggttgctcggaggaactcaagcagtgcgtatgaatgcccctcgtgttggcggtagttttgctgtttggggtggtctgttttccacctttgattgcactatggtctacgtccgacagaaagaagat

SEQ ID NO: 232072 - DNA, 432 bp, Gossypium hirsutum
cggacgcgtgggaaagtgggttgtgcaaggagctattgatgttgacattggtgccaatccttcagccgaagatgctgatgaggatgaaggtgttgatgaccaatctgtgaaggttgttgacattgttgacactttcaggcttcaggagcaaccccctttcgacaagaagcagtttgtcgtgttcatgaagaagttcatcaagaacttgacaccgaaactggatgcggaaaagcaagagtccttcaagaaaaacattgagggagcaaccaagtttttgctttcaaaattgaaggaccttcaatttttcatcggagagagcatgcacgatgatggatgtttggtatttgcttaatacaaggaatggggctgttgacccgacatttttgtactttgcgtatgcattgaaggaggtcaagtgctgaggtttgaagc

SEQ ID NO: 232073 - DNA, 272 bp, Gossypium hirsutum
aacgtgtgcaagtgcatcaaatcggcggtgaacggaattccgtacaccagcaataacctcaatctcgcagccggcctacctgctaaatgtggtctccaactcccttacagcatcagcccctccactgactgcaacaaggtgcagtgaggttgatgatgatgatatggaaggagtggaaaaaggttccagctcagctagataaagtagctagctaagggtaaataagctgggttggtgtgttggtttttaaaaaattccatatataatcgggg

SEQ ID NO: 232074 - DNA, 459 bp, Gossypium hirsutum
  unsure (1)..(459): unsure at all n locations
cccacgcgtccgggtgtgcatacgcaaggcgaccatggacgacctactggctatgcaagcttgcaacttgctttgccttcccgagaattaccagatgaaatactatttctaccacatcctctcttggcctcagcttctttacgtcgccgaggactacaacggccgcatcgtcggttacgtgctcgctaagatggaggacgaaagcaacgagtgccacggccacattacctntgtcgccgtcctccgcactcaccgcaagcttggcctcgccactaagctcatgaacgccgcccaagccgncatggagcaggtgtttggagcagagtatgtgtcgctgcatgtgaggaagagtaacagggcagcgtttaatttgtatacccagacgttgggatataagaattaatgatgtggaaggccaagtattatgcagatggggaggatgcatatgacatgagggag

SEQ ID NO: 232075 - DNA, 362 bp, Gossypium hirsutum
  unsure (1)..(362): unsure at all n locations
aaagaattgaagaaattatggcagagaaaccacaaccagtgaaagttttatattgtcccatatgttctcttccagcggagtactgtgaattcggccctgatttcgaaaagtgtaaaccttggttgatcagcaacgcccctgacctttacccacatctcctcaaagaggctaatgaaaaggagggtgagaaggtttctgaacagctgcaatcagttggtatttcctctgctgctgaaggggcagcatcttcagctccaccagggagcacagtgtcatctaaacaagaagatgtaaaacgtcttcctgggggaaaattaaggaggaaagagaaacangaagttgtcattgaaaaggttgtacgt

SEQ ID NO: 232076 - DNA, 380 bp, Gossypium hirsutum
attttattgttccttccttcgccgtctactgcacttgtgacatcgatttcaagtgaatcagaatgggtaaggaaaagagtcacattaacattgtggtcattggccacgtcgattccggaaaatcgaccaccactggccacctgatctacaagcttggtggtattgacaagcgtgtgattgaaaggtttgagaaagaagctgcggagatgaacaagaggtcattcaagtatgcttgggtgcttgacaagctcaaggctgaacgtgagcgtggtatcaccattgatattgccttgtggaaatttgagacgaccaaatactactgcactgtgattgatgcgcctggacaccgtgactttatcaagaacatgattactggtacc

SEQ ID NO: 232077 - DNA, 458 bp, Gossypium hirsutum
acaaaagccaatggcctccttatccttcctccacctctcctccgccacccgttttaccccccgcgccacccctattaaccaccgggctcgaacccagaaatcattctccatcaggtcccaatctgccccagtcctttcccaagatgagctcaaaaagcttgcagctgacaaagcggttgagtcagtcaagtcaggtatggtcctaggcctaggaacaggctcaacagctgcctttgtggttgacaaactgggtcaactcctttccaccggtcaactttctaacatcgtcggaatcccaacctcaaaaagaacccaagagcaagctgcatcgcttaatatccctttatccacccttgacttgcatccccatattgatctcgccattgatggtgctgatgaagttgaccctaacctcgacttatttaaaggccgtgggggtgcacttttgcgagagaaaa

SEQ ID NO: 232078 - DNA, 366 bp, Gossypium hirsutum
cttcagtgtctcactctctccgtgcttcactccagtttctcctttccctcttcgaagaaaaaatgcgtgagatccttcatattcaaggtggccaatgcggcaaccaaatcggagccaagttctgggaagttgtttgtgctgagcatggcatagatgcaactgggcgttaccaaggagacttggatcttcaacttgagcgaatcaatgtctactacaatgaagccagttgtggtagattcgttcctcgtgctgttctcatggatcttgaacctggaaccatggacagcatcagatctggccctgtcggtcagatttttagaccagataacttcgtttttggtcaatctggggctgtaacaactgggc

SEQ ID NO: 232079 - DNA, 426 bp, Gossypium hirsutum
gttttggctattgatgatgagactaaggagagaatcgggtcttcttcccatgttgggttggccggacctgatggagacttgatcgccattcttaggagcattgaaatctacaagcataacatagaagaaagaattgctagaacatggggaacaactgcaccaggtttgccatacgtggaggaagtcattattcctgctggaaactgtctcattggaggtgacctagaagttttgaaacctgtaaaatataatgatgggcttgatcactacagactttcccccaagcaactcagaaaggaattcgataggcgtaatgctgatgctgtttttgcttttcagctaaggaatcctgtgcataatggacatgcactattgatgaatgattcctcggagacgacttctagaaatgggtttcaagaatccaat

SEQ ID NO: 232080 - DNA, 377 bp, Gossypium hirsutum
cgccgccaccaccaccaccgccaccaccaccaccaccaccaacccattttctctttcatctccaccgctcaaaatgtctcttcaccatttgctctttcccattctaatactcgcattctccactgcttcttcattagctgccactgcaaaagaccaaactttaaacactcatcaagctgagttctttaaccccaagcttccacccagaatcctttcctcttccaaaaagttcgaaggctcatcggacattgtccacctccgttaccacatgggtcccgtcctttcctcgtcgccaatcaatatctacctcatttggtacggtcgttggtctgtttcccaaaaactcctcataaaaacttcataaactcaattttccc

SEQ ID NO: 232081 - DNA, 393 bp, Gossypium hirsutum
gttgccgctcagttaactgaagaagaagctgagaggctaaaacaagaagatggtgtagttgctatacttccagagaccaagtatgaattacacaccacaaggagtcctatgttccttggattagaaccagaagaaagtactagcatctggtctcaaaaacttgcagatcatgatgtcatagttggggtacttgacactggaatttggccggaaagtgctagctttaatgatacagggatgacaccggttcctgctcactggaaaggaacatgtgaaactggacgaggctttcaaaagtatcactgcaacaagaaaattgtgggtgcaagagtgttctaccggggatatgaaactggcactgggaaaatcaatgagaaaaacgaatattaatca

SEQ ID NO: 232082 - DNA, 453 bp, Gossypium hirsutum
gaaggatgcctatgtaggagatgaagcacaatccaaaagaggtattcttactttgaaatatcccattgagcatgggatcgtcagcaactgggatgatatggaaaagatctggcatcatacattctacaatgagctccgtgttgctcctgaggagcaccctgttcttctcacggaagcacctctcaaccccaaggccaacagagaaaagatgactcagatcatgtttgagaccttcaatgtacctgccatgtatgttgccatccaggcagttctttctttgtatgccagtggtcgtacaacaggtattgtgctggattctggggatgggtgtttctcacactgtgcccatctatgaagggtatgcccttcctcatgccatcctccgtctagaccttgcctgtcgtgatctcactgattctctgatgaagattcttactgaaagaggttatatgt

SEQ ID NO: 232083 - DNA, 386 bp, Gossypium hirsutum
cgcagtctctcccgctccttctcgctgcgatggcgtcttcaagatctcagttctcaaatcgtagcgctcttttctatcaagccatggctctggtcttgcatgcaggaaaaacaaacaaaaatgcctttaaggcactcattgctgcagaatatagtggtgtgcaggtcaaaatggttgagaattttgagatgggtgtgtcaaataagactcctgagttcatcaagatgaaccctttggggaaggttcctgtgttggaaacacctgagggtcctgtatttgagagcaatgccattgctcgttatgttgctcgctcaaaggttaacaaccctatatgtggttctacattgattgattatggtcatatcgagcaatggattgattttgca

SEQ ID NO: 232084 - DNA, 397 bp, Gossypium hirsutum
caacgaaaatatccacaggtatttccacggatttctactttctccaaatccacagatccattttcacctatggctccagtagcagcagcatcttcagattctataaagcctagagatgtttgtgttgttggtgttgcacgtactccaatgggtggatttcttggctctctgtcatctttatctgccaccaagcttggttcgatagccatagaagctgctcttaaaagggcaaatgttgatccatcacttgtgcaagaagttttctttggcaatgtactcagcgcgaatttgggacaggctccagctagacaggctgcgctaggtgcaggaattcctaactcggtcatatgcaccactgttaacaaaagttgtgcatctgggatgaaagcaacaatgc

SEQ ID NO: 232085 - DNA, 385 bp, Gossypium hirsutum
cggacgcgtggggccgaaactgtcgtttacatctaacacaaaaatagaaaaaaagttatttcgctttaaaataatataaataaataattgtttttatttttattttttaatttcaccgctactaagaactaatccttttcattctggtttttcgacactccaaattttcagatttcctttcctttctcaccggaaaatgaaaaacatgggcgactttccgacgtttctagtcgtcgcacttttgatcttcagttgtctttcctatgttagatccgacgcttccgatcaccgttacaaggacggtgacgctgtacctctttacgccaataaggttggcccctttcacaaccccagtgaaacctatcgctacttcgatctacccttc

SEQ ID NO: 232086 - DNA, 360 bp, Gossypium hirsutum
cccacgcgtccggccttaccatttgaatctgaagccctccagaatctcaatccattttcatttcttcactacaacccaagatccaacccaagatttaaacaatgcgccacctcaacagcaagaacaacatgttcccaacaatcgcagaaccccgcgaggtaagactcggaaccctgagaaagttgaggatatcatttgtagaatgatggagaaccgggcttggaccacccgcttacagaactccatccgtgctttagtccctgaatttgaccatgctttagtttataacgttctccatggtgctaagaactccgatcatgccctccagttcttccggggggttgaacgggctggattgat

SEQ ID NO: 232087 - DNA, 407 bp, Gossypium hirsutum
ctcggttggctctttcttttttgtttctgtttcctctctttttattgaaaaattagggtttccgtcagcggtattgagaatcaatggcgtcgacttcgaggaagataatgttgaggagctccgacggagagacttttgaggtggaggaagcggtggcggttgagtcgcagacgatcaagcacatgatcgaggacgattgcgccgacaacgagatccctctcccaaacgtcaccagcaagatcttgtccaaagtccttgagtactgcaagaagcatgtcgatgctgctgccgacaaggaaaagactcccgatgacgaactcaaggcttgggatgctgattttgtcaaggttgaccaaaataccctctttgacctcatcctggcagcgaactatctgaatatcaagagc

SEQ ID NO: 232088 - DNA, 392 bp, Gossypium hirsutum
attctcattctctctccactgaactcttgctaaacggtatcgttttagtcagtctttcatcaatggcgaaagaaccagttcgcgtcctcgttactggagctgcaggacaaatcgggtatgctcttgtacccatgattgctaggggagtcatgttgggtgctgaccagcccgtgatccttcacatgcttgatatcccacctgctgcggaggctttgaatggtgtcaaaatggagttggtggatgctgcatttcctcttctaaagggtgttgttgctacaactgatgctgttgaggcatgcactggagtcaatgttgctgtcatgggtggtggtttcccaaggaaggaaggaatggagaggaaagatgttatgtcaaaaaatgtgtctatttac

SEQ ID NO: 232089 - DNA, 426 bp, Gossypium hirsutum
gcctttccagaattccacacaaatatggcactggtgttcatcttgccacagtagaatttactaataccagtgcaaactattgtgatgttgacgaaaatggaataaagtacatgatactatgtcgtgtaataatgggaaaaatggagcttcttcgtcctggaagtggacagtgttatcctagcaatgaagattttgatagtggagtggatgatcttcagcatccaaagtactatattatctggaacatgaatatcagcactcacatttatccagagtttgttgttagtttcaagatctccaatgctgaagggcatttgattggaagtgagactaatcatgctgtttcaggcgtcactgcatctactccaggacttcaaggtcgtttaccagtattatcatcttgcggtgaattggggagtattaatc

SEQ ID NO: 232090 - DNA, 413 bp, Gossypium hirsutum
  unsure (1)..(413): unsure at all n locations
gtggaagctactacgcatggtgccccaatgaactccctatgttgcgtcaaggcaacattggtgcagccaagttggcccttgagaagaatggctttgccctccctcgttactctgattcttccaaggttgcttacgtccttcaaggggctggtgttgctgggattattctccctgaatcagaggagaaagtgattgcaatcaagaagggtgatgcaattgctcttccatttggtgtcatcacctggtggtccaacaaggaggacactgaattggtggtccttttcatgggggatacctcaaaaggccacaaaccaggccagttcactgatttcttcttgacaggcgccaacggcatctttactggcttcacaaccgattntgtgaagagggcatgggatgtggatgatgacact

SEQ ID NO: 232091 - DNA, 429 bp, Gossypium hirsutum
cagcaatcagtatgtgtcttgctctgacttttattattcttgaagtacctatgtttgacattcgtatttgcacattttcagacatgtatataggaatatgactcctaatcagtactcacacctaaagtccgagtagcataggatttgttttctgtccatcattacattcaataattatatgatggagtgccatgatttggcagcctccatatacacatgcaaataggcagaagcttcagcaaagaattatccaagagaaactcaaacttccaccatttcttactacagaagctcactctttactgaaagggttgctgcagaaggagccaccaagaaggttaggtagtggtcctggtggaggggatgagataaagaaacataaatggtttcggtcaatcaattggaagaaattagaagctagagaaattc

SEQ ID NO: 232092 - DNA, 386 bp, Gossypium hirsutum
cggacgcgtgggcgaagttctaccgccatggggagaagacctgcaaggtgttatcgtcagataaaaaacaaaccttacccgaagtcacgttattgtcgtggtgttcctgatcccaagattaggatttatgatgtgggaatgaaaaagaagggtgtggatgagttccctttctgtgttcacttggtctcttgggagaaggaaaatgtctctagtgaagctctggaagctgctcgtattgcttgcaacaagtatatggctaagtatgctggaaaggatgccttccacttgcgagtccgtgttcacccattccatgtcttgcgtatcaacaaaatgctttcatgtgctggagctgataggctccaaactggtatgcgaggtgcttttgg

SEQ ID NO: 232093 - DNA, 268 bp, Gossypium hirsutum
  unsure (1)..(268): unsure at all n locations
gaggacttggtcttggttgcgtgtatcactgcatagcaatggaagaaataagccgtgcttcggggtcggttggtctttcctatggtgctcattctaatctgtgcatcaatcagttggtgaggaatggaaaccctgcccagaaagagaaatacttaccaaagctcatcantggagagcatgtatgagcccttgctatgagtgaacccaatgctggctctgatgttgttagcatgaaatgcaaagctgatcgggttgatggggggttatc

SEQ ID NO: 232094 - DNA, 333 bp, Gossypium hirsutum
tcggaggctctaagaaatttgagggctcatcggagtttatccatatgagatatcatatgggtccagtccttactgctaatatcaccatccacccaatctggtacggccggtggcagaaatcccagaagaaaatcatccgtgagttcatcaactcgatctccgccgttgattccaaacacccttcggtggctgggtggtggaagaccgtacagctttacaccgaccaaacgggagccaacatttcccgtacggtgctattaggtgaagagaaaaacgatcgtttttactcccacgggaaatccctcacgcgcttatcgataccagtccgttatc

SEQ ID NO: 232095 - DNA, 187 bp, Gossypium hirsutum
gctttcactgacagtgagaggctgattggtgaggctgcaaagaaccaggcagctgttaacgcagagagaaccatctttgatgttaagagactcattggaagaaagtttgatgataaggaggtccagaaggacatgaaacttgttccctacaagattgtgaacagggatggaaagccttatattcaag

SEQ ID NO: 232096 - DNA, 360 bp, Gossypium hirsutum
gattctacttacattaaaaggctaattggtgaggctgcaattaaccaggcagttgtcaacgcaaacagaaccatctgtgatgttaagagactcattggcagaaagtctgatgatacagttgtccatgttgacattaaacttgttccctacattattgttaacagttatatgtagccttatattcaagtgaagattaaagatgaggagacctaggtttttagtcctgaagagataatttctatggctctaatgaagaccaactaaacagatgtagcttaactcgtgacgaaattaaatgatgcagtactgactatgtctgcttacttcaatgtttctcatagacaagcctcctttgatgct

SEQ ID NO: 232097 - DNA, 436 bp, Gossypium hirsutum
ggtaatagcgttgatgtcagaaatcatgagatgaggcttcatgagattaatacacttgaatgggatgagcttctggtgacatatgatagcaatgactcatctatatctataagagacaataattcttggtttcatcaactgaaccaaacaacaggaaatggcttcttaaattatggtggccctatcttagctgataatttatcaacggaaatctgtatgcttggtaatctagttgagccagctgctcagagtaataatacttacttcaacagcccaacgactgtctgtaatacgatatctagtacccaaatgaatcctaatgtgcaacagaaagactctattgccacacgggccggtgatgcattggacctgtcgatcaatgatggctgaaatagtcagggcagtttttgaaacggggtgaactacactatcactg

SEQ ID NO: 232098 - DNA, 348 bp, Gossypium hirsutum
ggtgggttcatcaggaattttaaactgataaaattctacccacattgtgtgtttaatccaaaatggggtcctcttattagttttagaaagttgaaggaaatcccatttttgcagtatagaaacagatttggttttcactctcttgaaatttgatttttagtgtctttctgattactgtgaatacatggagaaatcaatgtcaatggctcctctgcttttaatggtactctgtcttccttttgcattgggttggcatgactataaccaagctctcagtaagagcattctcttctttgaagctcagagatctggttatcttcctcataaccagagagtcacatggcgagc

SEQ ID NO: 232099 - DNA, 374 bp, Gossypium hirsutum
ggaaaaaccagaaaaatggcgaaaccccaacttttatttctattttccttttcccttctctgtctcatttctttttccgccgccgattcctccatcacagccgacttacgtctcaccgattccagtttcccgtcggttcatgcgaagaagctgattagggagttgaatttgtttcctaaaggggaagtcaatgtcgttgacgaacaccgggtttcgttgccggagggtcccaaactggtggagaagcggttcaagttcccaactttggaagtgcccggtggagtttcctttgaggatttgggtcaccatgctgggtattacaagcttcctaattctcatgatgccagaatgttctacttcttcttcgaatcacg

SEQ ID NO: 232100 - DNA, 367 bp, Gossypium hirsutum
atctctgaaggtgtcttaataaacgccttcgatttaccttcgatttccatttacttctctattgctacgtttttgaatttttagtgagcgaaaatgagagagtgcatttcagtccacatcggtcaggctggtattcaagtcggaaatgcctgctgggaactttactgccttgaacatggaatccagcctgatggccagatgccaagtgacaagactgtcggaggaggtgatgatgcttttaacacctttttcagtgaaactggtgctggaaagcacgtccctcgtgctgtctttgtggatcttgagcctactgttattgatgaagtgaggactggtacttaccgtcagcttttccaccctgagcaac

SEQ ID NO: 232101 - DNA, 380 bp, Gossypium hirsutum
gtcttggcagctccttatccggaaccagagaccgcagggagctcaagcagccatgggagcttacaagtacgtgtcagagctatggaggaagaagcaatccgatgttatgaggttcttgcagagagtgaggtgttgggagtaccgccaacacccgtccattgtgcgagttaaccacccaactcgtcctgacaaggctcgtcgcttgggatacaaagccaagcagggttatgttgtctatcgtgtccgtgtgagacggggtggaaggaagagaccagtacctaagggtattgtgtatgggaaacccacaaaccaaggtgtcactcagcttaaatttcagcgcagcaagcgatcagttgcaaaggagcgagctggtcgaaagc

SEQ ID NO: 232102 - DNA, 363 bp, Gossypium hirsutum
tacactatctccctcaaatttggaactccgcctcaaacccttcctttcgtcatggacaccgggagcagcctctcctggttcccttgcacctctcgttacctttgttcccaatgcgcattccccaatgttgaccctgcaaaaatccccacttttgcccctaaactttcatcttccagtaagctcgtaggttgtagaaaccccaagtgtagttggctttttggccccgacgttgagtctcgttgccaagactgtgaacccacttccgaaaactgcactcaaacctgccctccttacataattcaatacggtttaggttccactgctgggcttctattagtagaaaaccttgctttcccccaaaaa

SEQ ID NO: 232103 - DNA, 372 bp, Gossypium hirsutum
ctcactcccactctcactctatttttctctagtaattgctgcaatcggatttgttgaaagatggctgagggttcagctgcagttcccagcactgagttgttggaatggccgaagaaagataagcgtcggttccttcacgccgtgtaccgtgttggcgatcttgatcgtaccatcaagttctacactgagtgttttgggatgaaattgttgaggaaaagagatattcctgaagagaaatactccaatgcctttcttgggtttggcccagaggagtctcaatttcgtgttgagttaacttacaattatggagtattatcgtatgatattggaaactggtttttgggcattttgcaattgcaacaacctgatgtc

SEQ ID NO: 232104 - DNA, 362 bp, Gossypium hirsutum
cccacgcgtccggggaaagatcgattcatcagtcttcttctctgagtagaggttttggatttgtaagcatttacaatgtcttcgtcctatctcccagcaaccactgactcaattgctctggccttagaagccaaaacaccatctgaagccatctcaatcctttaccgtgtactagaaaatcctgcatctgctcccgatgctctacggattaaagagcaggccataacaaatctatctgatcttcttagacaagagaaccgagcagaggagctcagaagccttctgacccaactgaggcccttttttgcactaattccaaaggcaaaaactgctaaaattgtcccgggtataattggtgatgt

SEQ ID NO: 232105 - DNA, 345 bp, Gossypium hirsutum
  unsure (1)..(345): unsure at all n locations
aggtgtcttaataaacgccttctttcttcttcttctccctttctttgctttttcgaatttttcttaagcgagaatgagagagtgcatttcgattcacatcggtcaggccggtatccaggtcggaaacgcctgctgggagctttactgcctcgagcatggaatccagcctgatggtcagatgccaagtgacaaaactgtcggcaggtgatgatgcttttaacacctttttcagtgaaactggtgctgggaagcacgtccctcgtgccgtcttttgggatcttgaacccactgttattgatgaagtgagaactggtgcttaccgncagctctttcacccagaacaac

SEQ ID NO: 232106 - DNA, 404 bp, Gossypium hirsutum
attccctgtacgagggtatcgacttctactcaaccattacccgtgccagatttgaggaacttaacatggatctattcagaaaatgtatggaaccagttgagaagtgtttgagggatgccaagatggacaaaagcagcgtccacgatgtcgtgcttgttggtggttctactagaattcccaaggttcagcaacttttgcaagatttcttcaacgggaaggagctctgcaagagcatcaacccagatgaagctgttgcttatggtgctgcagttcaagccgctatcttgagtggcgagggaaatgagaaggtgcaggatctgttgctcttggatgtcacccgctgtctctcggtttggaaaccgcttgcggtgtgatgactgttttgattccgaggaacaccacca

SEQ ID NO: 232107 - DNA, 309 bp, Gossypium hirsutum
caaataccagccaaacatcgtcgtcttctacactcttctctggtgagttcatcgaaagatcaaatcaagatccctgccaaaatgaacgacgctgatgtatccaagcagatccagcagatggtgagattcatccgccaggaagcggaggaaaaggctaacgagatctctgtttccgctgaagaggagttcaacatcgagaagcttcaattggtggaagcggagaagaagaagattatgcaggagtacgagaagaatgagaaacaagttgaaatccgaaagaaaaatgagtattcgatgcagcttaatgca

SEQ ID NO: 232108 - DNA, 369 bp, Gossypium hirsutum
cccacgcgtccgtttcttttcatctcaaaaattgaaatttcaccgtcaaagctttttcccctcaggttcgagctctgaaatggcaaccgagaataacagttccagggtcggatctggatccggatctcatactgtcaacggcgacgcggctcctgaccgcaagatcgcgttgatcactggcatcaccggtcaagatggttcctacctgaccgaattcctcctcaacaaaggctatgaagtccatggcttgatccgccgctcttccaacttcaatacgcagcgtatcaaccacatctacattgatccacataacgcccacaaggctcggatgaagctccattacgctgacctcaccgacgctttctcgct

SEQ ID NO: 232109 - DNA, 354 bp, Gossypium hirsutum
gaaggatgcctatgtaggagatgaagcacaatccaaaagaggtattcttactttgaaatatcccattgagcatgggatcgtcagcaactgggatgatatggaaaagatctggcatcatacattctacaatgagctccgtgttgctcctgaggagcaccctgttcttctcacggaagcacctctcaaccccaatgccaacagagaaaagatgactcagatcatgtttgagaccttcaatgtacctggcatgtatgttgccatccaagcaggtctttctttgtatgccagtgggtcgtacaacaagtattgtgctggatttctggtgatggtgtttcttcacactgggccaaatct

SEQ ID NO: 232110 - DNA, 431 bp, Gossypium hirsutum
gcttctcatcaccaattgcgaaggaatcgattcacctggactcattttcctcgttcaagctctgctctctgacgctcgcttcactctccatgtctgcgctcctcaatcggacaaatcggttgccggtcattccctgacggtgcaagagacggttgcagtatgtttagttgaaatgagcagtgccactgcttttgaagtttcaggaactcctgtggactgtgtctccttagctctgtctggagcattgttttcatggtcaaagcctgttttggtgattagtggaattaacagaggatcaagctgtggtcgcaacatgttctactcaagagctgttgctgcaactagagaggcactaatttgtggtgtgccatcactttgtctatcattcgactggaagaaagatgttagcggtgaaagtgatttgaaaaatg

SEQ ID NO: 232111 - DNA, 396 bp, Gossypium hirsutum
cacgattctgaaattttgcctgccgctccatctctacatcacaggaatggcgacagatgttgcagcccccgccaccgccgcacccaaagacccaacccaacctcaccttgaagtaaaactcttcaaccgctggagcttcgaggaagttcaggttgctgatatctccttgagtgattacattggtgtccaagcttcgaagcatgctacctatgtgccacacactgctgggaggtactcagttaagcgtttcaggaaggctcagtgcccaattgttgaaaggcttacaaactcacttatgatgcatggccgaaaccaatgggaagaagctaatggcagtcaggattgtgaagcatgccatggatattaattatctcttgactgatcagaacccaattc

SEQ ID NO: 232112 - DNA, 366 bp, Gossypium hirsutum
ctgattggaaattcaccgggaaccttcctcccctatctgatgacgagtggcagcaagagtttgagaaatacaagcagtcaccagagtacaagcgagtaaacaaagggatgagtattgaagattttaaatttatatactggatggaatatgcccatcgaatgtgggggagagccctaggcatgatgtttgcattgccgttctcgtattttcttcgtaagggatatattaccatgcgccttggactaagactctctgctctatttgctcttggtgctggtcagggtttaattggttggtggatggttaaaagtggattagaggaaccagcttcggaatatgttgagccccgagtgagcccttatagac

SEQ ID NO: 232113 - DNA, 351 bp, Gossypium hirsutum
ctggcattgctgcataagttcttaaatgcatgggaatcaatcttaaagatgcacgtgtataagtggagaagataattggaaggggaagtggatttgtcgctgtggagattccttttactcctcgcgcaaaacgtgttctggaactctcgttggaagaagctcgccagcttggccataattatattggatcagagcatcttcttcttgggttgcttcgtgaaggtgaatgtgtagcatcccgtgtttttgagaatttaagtgctgacccaagttatatccgctcccatgttatccgtatggatggtgagggcaataaactttagattgttactggaggatcaagtggaaaca

SEQ ID NO: 232114 - DNA, 390 bp, Gossypium hirsutum
aaaaacacttgcagttttctgaatggggacgatagttcaaactaccgttgtcactgtttttctttgtcttctttttcctattgtcttttccacatccaatgacggattgttcagaattggactgaagaagagaaagtttgatcgcaacaatctgttagctgcccaacttgattccaaggaaggagaagcgttgagaggttcttttagaaagtatcttcatggcaacttacaggagtcaaaggatattgatatagtggcactaaagaactacatggatgctcagtactttggtgaaattggtattggcacgcctccacagaacttcactgtaatttttgacactgggagttctaatttgtgggtgccttcatctaagtgttatttctcaat

SEQ ID NO: 232115 - DNA, 470 bp, Gossypium hirsutum
cagaaaatgaaaaacatcaaagtcccagaatttagtttctatttttgtagtgttttgttgattttgttggtgaataatggatgttgtgactggggctcctccattcatgttggtcacgagataagccttgcggtgccattggaatatagtgatgggttcattgggagagctttcttgatggatgatggtaatggtcaggtggaaccaaattttagagttgcattgagtgctgaagctaacaaagggggatattcatgctccttggaagtttttttaggggatgcgtgcttgagcttactgaagatggggatttactgttgaagggtgccgaagatcaagtcggatggcggaccggcacttctggacaaggtgtggagagattaagaatcctgaagacaggtaatctcgtacttgtggatgttttcgaccaaataaaatggcagagtttcaatttcccaactgatgtaatg

SEQ ID NO: 232116 - DNA, 478 bp, Gossypium hirsutum
  unsure (1)..(478): unsure at all n locations
agaaaatggaaggttcatcttcatcttcacgccacgtactggcaatccttctcattatccttcaattcacgccctccatagccaaaaccttctcccacaaaccataccacaccaaaagaaacaccgaatacatcagatcttcatgcaccaccactacctaccccagattatgttaccgctccctctccatctacgcctccaaaatcaacaccagcccccgactgattgcccacaccgccctgctcgtcaccttcagagccagcaaatccacgtccaggttcatgcgaaaaatcgccagaacccatcgtttgaaacctcaggtcgctgccgccatggcggatngcatcgaaatgatcgacgactctatcgacgagnctcaaaatctataggtgaaatngctcgtatcagacgctccaactttgtgcttattatgagtgatcttcaaacctgggttagtgctgcactgacagatgaagat

SEQ ID NO: 232117 - DNA, 456 bp, Gossypium hirsutum
gtttctctttgaattcccaaatgggtttgtgggaagcttttctcaattggctgcgaagcctgtttttcaagcaggaaatggagctatctttgatcggacttcagaacgcgggaaaaacctcactagtaaatgttgttgcaactggtggatatagcgaagatatgatccctacggtcggattcaacatgaggaaagtgacaaaaggatatgttacgataaagttatgggatctcggaggtcaacctatgtttcgtatcatgtgggaacgatactgccgtgcggtttcggctatagtttacgtggtggatgccgctgatcccgattacttgaacatcttaagatgagagctttatgatttgttgagtaaaccctctcttattggtatccctcttctgctgttaggcacataatcgacaagccagaagcttgtcaaaacatgctttaacttaagatttg

SEQ ID NO: 232118 - DNA, 347 bp, Gossypium hirsutum
gccacacgtgctgcttggtactgtggggcctacagtaccaaatgcggatgtacgcctagaatctgatgctgaaatgggatatgatgcccttgcacgcacaccacgaggtgaaattggtctcaagggatcaacattgttctcaggggactccaaacgtgaatacctgaccatggaggtcatgattgaagggtgggttcacacaggcgatatcggcgagaggcgaccatatggagagatgaaagtcaatgatcgaaagaagaacatctttaagctgtcacaaagagaatatgttgctggcgacaacctgtacaatgtttatgggtgagattctgaccttgaatcgacat

SEQ ID NO: 232119 - DNA, 385 bp, Gossypium hirsutum
cttcaataatttcttccgtcgatctttgttagagattagctctgtaatttttcattatgggaaagatcaagatcgctatctatggatttggaaagatcgggcgtttggttgcaagagttgctctccaaagcgatgatattgagctcgttgctgttaacgatcctttcatcaccactgaatacatgacgtacatgttgaagtacgacagtgttcacggtcaatggaagcatcatgagcttaatgtgaaagactcaaagaccctcttctttcgcgaaaagcctgtcacacttttcggtatcagaaaccctgatgaaatcccatgggctgaggctggagctgagtatgttgctgagtctactggtgcttttactgacaaggacaaggc

SEQ ID NO: 232120 - DNA, 461 bp, Gossypium hirsutum
cccacgcgtccgctgacatactggtcgattggtttgaaaagtgtaagaaagatccatctcactgggataagatctcccaaggaggcttgaaacgtatcgaggagaagtatacatggaagatttactcggagagactattgaccctgaccggagtgtatggattctggaagcatgtttccaaccttgaacgccgtgagagtcgtcgttaccttgagatgttttatgctcttaagtaccgcaagctggctgaatcagttccattggcagaggagtaaatttaagctgttaaataacattgggccggtttttcttggagaataatattctgttttgtaatttcaattggagaagctcttttgtatttcatcttggcttttccttttccttttttcgccggcattgtttgaacatggggtggtgcgcccggcaattccaattaaatatggggactttttgttttc

SEQ ID NO: 232121 - DNA, 468 bp, Gossypium hirsutum
ctctatttccccatctccctgtctcactacattgctctgattcttgttcacgtctagcttggcattttctgtttttctcaatggcaatggatgcttcactgactatgtgcaagtcggtcacatcacctcctggcttattcttggggagaagtagagttattaggagttcccagtgtacctttatggtgggaagcaggatcaactttcctcggcagaaagctcagtcaacccaagttagatgtaaatctagcaggtgtggaggagctcttggtgctaaatgccgtgctgagaaaattttggtggcaaatagaggagaaattgctgttcgtgtaatccgaacagctcatgagatgggaataccatgtgttgctgtctactctacaattgataaggatgcacttcatgtgaagctggctgatgaatcagtttgcataggcgaagcaccaagcagtcaatcgtatttattga

SEQ ID NO: 232122 - DNA, 435 bp, Gossypium hirsutum
  unsure (1)..(435): unsure at all n locations
atcatcttcctttcagtagaatttaaggggaatttttttttgaaaataacttaaaagaagagtgaagttttcgaaggatatgaacggcagtattgcgagctatctgcgaatctttccaagaagtgtacggctgctgttgctcttactggagagcagaagaaacanaaactntctgatgtaagagctggagtggaagatgcagaagctctgattcgaaagatggacctcgaagcaagaagtttgcagccaaatgttaaggctgtacttcttgctaagttaagggaatataaatcagatctaaacaatctgaaaagtgaagttaaaagaatcgcatctgggaaatttgaatgcggctgctcgagacgagttgttagagtccggcatggctgatactctcacggcatcagctgatcaaagatcaagattaatgatgac

SEQ ID NO: 232123 - DNA, 434 bp, Gossypium hirsutum
ctcatgtgttggaattattgtttaccgtggacttgagtttggaatgtatgattgtttgaagcctgttgttttggttggtggattgcaggatagtttcttggcaagtttcttgctgggttggggcatcacattctgtgctatacttgcatagtagtaaagttattaggaagttccagtgtacctttatggtgggaagcaagatcaactttcctcgacagaaagctcagtcaacccaagttagatgtaaatctatcaggtgtggaggagctcttggtgctaaatgccgtgctgagaaaattttggtggcaaatagaggagaaattgctgttcgtgtaatccgaacagctcatgagatgggaataccatgtgttgctgtctactctacaattgataaggatgcacttcatgtgaaactggctgatgaatcagtttgc

SEQ ID NO: 232124 - DNA, 430 bp, Gossypium hirsutum
  unsure (1)..(430): unsure at all n locations
ctttactttatttgtcgtttactgtttcaatttttgatttttacacattcttctcccctcctatcctctgctcaatcgatctgttcacatcaactttgctatatcttctcatttttggatcaatttctcctttcgcgctttgaagttgatttcttgaagatgggagcggaaaagaacttcattgacatggaggagggaactctggagatcgggatggagtatagaactgtgtctggtgttgcgggaccattggtcattcttgacaaagttaagggtccaaagtatcaggagattgtcaatattcggttgggggatggaacaactcgacgtggtcaagtcctggaagttgatggggagaaagcagttgtgcangtctttgaaggaacatctggaatngacaacaaatacacaactgtgcaatttacagggg

SEQ ID NO: 232125 - DNA, 330 bp, Gossypium hirsutum
gaaaaattctcttttcatcgatcgccaaaaagcaaccgcgaacccccgtcgatcgcaggagagagggaatcgggataaatggggaagaaaaggaagtcgatagcgacgagcctcgatgaggttgatcggactatgtacgcctccttttgcagcgccgctaactccttgtctcacctttatactcagaccatgaatcagcaaaaactcttcttccaagctggcaaacgccatgggcttggaaaaatctatcaatggatttggagaccacaagagggaggatcaagagttacaacaatggatatcctcagttaccttcagaatgaactggac

SEQ ID NO: 232126 - DNA, 447 bp, Gossypium hirsutum
cggacgcgtggggtttacatttgctgaggctgagaagttgtgttttttttttggggggtatagagaaatagatcatggcaaaagtagatgaaccacagccacatccaccaaaggagcagctgcccaacatttcttactgcattacaagtccacctccatggcccgaggccatccttcttggtttccaacattatcttgtgatgcttggaacgacagtgatcattccaacttcacttgttccccagatgggaggtggaaatgaggagaaagcaaaggttatccagactctactctttgttgctggtttgaacacattattgcagtcactgtttgggtctagattgcctgctgtgatcggagggtcttatacctttgtcccaacaacaatctcaattattcttgctggtcggttcaatgacagttcagatcctattgagagatttaaaa

SEQ ID NO: 232127 - DNA, 480 bp, Gossypium hirsutum
gttcggagaggcaaggaaaagtgtcaaagttggccaagggagagatcctaatgttgaatattgggtctatgtcgaccggtgctcgagtcatagctgtaaagaatgatttggcaaagctgcaactcacgtcccctgtttgcaccaccaagggagagaaaattgcacttagtcggcgtgttgaaaagcattggcgtctaatcggttggggccaaatccaagttggaacaaccattgaagtcccaccctgccctgtttaagaactgataaacaggtaaacagaaagcaaaaacatctataagaaaaaaaagagggcagaagaatcaaattttttgtgttgaaaatgtgggaaggtagacaatatcttggtactatttttgtgaggtggagaagataacattgtttgatagagaaattgattggttccttgctgaaaacatggagctttttctaggatatatgataacttgaatttttaattgg

SEQ ID NO: 232128 - DNA, 433 bp, Gossypium hirsutum
  unsure (1)..(433): unsure at all n locations
gatgaatatggttgcttgtggatggcggcataccatatcagtctctgatactggtagattatacactaacgggtggagcaagtttggtcaactaggacatggggactttgaggatcaccttgttccgcataaaggggaatctttagctgacagttttattaagcagatagcaggtggatggagacatacaatggcactcacatctgatggaaaactctatgggctgggatggaacaagtttggacaggtgggggttgatgacaacgctgatcattgctctccagtgctaggtaaatttcctcatgagcagaaagtagttcaggtttcatgcggctggaggcacacacttgcaattactgaagagaaaaatggcttctcttggggaaggggtacaaatggacagctcgggcatggagaatncacggaccggaat

SEQ ID NO: 232129 - DNA, 474 bp, Gossypium hirsutum
aaaaggttaagagcaaaagacagggcagagtaggcgtaagctttgatcatcaatggcggagaaaagtttcaagtacgtgatccttggcggtggtgtagctgctggatatgcagcgagagagtttgccaagcagggagtgcagcctggtgagctagcaattatttccaaggaggcggtggctccatatgaacgacctgccctgagcaaagcatatctcttccctgagggagctgctagacttcctggtttccatgtctgtgttggaagtggcggagagagattgcttcctgagtggtacaaggaaaaaggaattgaattgatccttagcacagaaatagtgaaagcagatcttcctgccaatactctagtaagtgccgctggagaaacattcaagtatcaaatcttgatcattgcaactggttcaacggttataaaattgacagattttggagtgcaaggagctgatgctaaaaa

SEQ ID NO: 232130 - DNA, 377 bp, Gossypium hirsutum
gggaaatgctgtgtcatcagagcagaaaccggccggaggatggaaagcaatgcctttcattttagggaatgaaacgtttgagagatttgcaacgattgggttgctgtcaaatttcatggtgtatttgatgaaaaagtttaacatggaccaagtttcagcttccaatgtactcaatatctggtctggtgtatctaacttcgcaccactcatcggggctttcatctctgatgcctacgtcggtagattcgccaccattgctgtcgcatccgtcgctttatttatgggaaatgctgacgataacttttactgcttgtttcccacatctccagcctcctaattgcccatctgagcaccatttacattgtcactgcattagt

SEQ ID NO: 232131 - DNA, 441 bp, Gossypium hirsutum
cttgatacacgccctcatttattttatttttcaaacaaattttcccttcagttttcgtataatttcctaggaaaagaaaaatgagagagtgcatttcagttcacattggtcaggccggtattcaggtcggaaatgcttgctgggaactttactgtctcgagcatggcattcagcctgatggccaaatgccaagtgataagactgttggtggaggagacgatgctttcaacacctttttcagcgaaactggtgccgggaagcacgtccctcgcgccatctttgttgatctggagcctactgttatcgatgaagtgaggactggtacgtaccgccagttgttccaccctgagcaactcatcagtggcaaagaagatgctgccaacaatttcgctcgtggccattatacaattggcaaagagattgttgatctctgcttggatc

SEQ ID NO: 232132 - DNA, 333 bp, Gossypium hirsutum
caaagacttcagccacccacgcagcccgtgtggcgatccaaacaatgggacgcgtccgtacgaagactgtgaagaaatcgtctcgtcaggtaatcgagaggtactactctcgcatgacgcttgatttccacaccaacaaaaaggttatcgaagaagtagctattatcccatccaagaggctccggaacaagattgctgggttctcaacccatttgatgaaacggatccagaatggtccggttcgtggcatttctctgaagcttcaggaagaagagcgtgagcgtcgtatggattttgtccccgatgtatcagctattgctgttgattcaatag

SEQ ID NO: 232133 - DNA, 419 bp, Gossypium hirsutum
cggacgcgtgggctgagcaggaatgtggatgagggtcatctaagagaaatattcggtaatttcggtgaagttgtaaatgtggatcttgcaatggaccgtgctcttaatcttccaagaggatttggatatgttgaattcaagacaagagcagatgctgaaaaagctctactttacatggatggtgcccagattgatggcaatgtagtaagagcgaaattcacacttcctccacgaccaaaagcttctccgccaccatagccaattccttctgctactactaaaagagatgctcccaaatctgataatgtcaatgctgataccgagaaggatgggccaaaacgaccacgggaaccttctcctcaacggaagcccccaccttcaccacgaaagagatctcctgtgggccgaagaggtggatc

SEQ ID NO: 232134 - DNA, 456 bp, Gossypium hirsutum
gcgttggtcacaacattcaatgttgagatagggattactggtgccattttgacaaagctagatggggattctcgaggtggtgcagccttgagtgttaaagaggtgtctgggaagccaatcaagcttgtaggacgtggagagcgcatggaggacctagagcctttctatccagaccgcatggctggacgtattttaggaatgggtgacgttctctcatttgttgagaaagcacaagaagtcatgcgccaagaagatgctgaagagttgcaaaagaagataatgagtgcgaagtttgatttcaatgatttcctaaagcagacccgtgctgttgcgcggatgggttccatgacccgtgttattggaatgatccctggaatggggaaggttacgccagcccaagttcgagaggcagagaagaatttaaagttaatggaggcaatgattgaagccatgaca

SEQ ID NO: 232135 - DNA, 471 bp, Gossypium hirsutum
cttcaataatttcttccgttgatctttgttagagattagctttttaatttttcattatgggaaagatcaagatcggaatcaatggatttggaaggatcgggcgtttggttgcgagagttgctctccaaagcgatgatattgagctcgttgctgttaacgatcctttcatcaccactgaatacatgacgtacatgtttaagtacgacagtgttcacggtcaatggaagcatcatgagcttaaggtgaaggactcaaagacccttctctttggtgaaaagcctgtcacagttttcggtatcagaaaccctgaggaaatcccatgggctgaggctggagctgagtatgttgttgagtctactggtgtttttactgacaaggacaaggctgctgctcacttgaagggtggcgcgaagaaggttatcatttctgctcccagtaaggatgctcccatgtttgttgtgggtgtcaatg

SEQ ID NO: 232136 - DNA, 470 bp, Gossypium hirsutum
cccacgcgtccgctctttccttgtttttcatcgccgcttggcggacttctccacgttctttctttccctatttatactgtttccctcactttctttccttccaaacactcttctttccttaatctaacatggccttaactacccaaacttgtttccttcaaaatccattccttccttcgccttctctttcccagccttctgcatttcctgctccggcggctcttccttctcgaaaactccgccccatttctgtccagtgctccctggcttccgccccctctgtggcggtgacggcgtccaaggagtgcaaggtgaaatcggtcaaggctaggcagatcattgacagcaggggtaatcccacggtcgaggttgatttgatcaccgacggtctttatcgatcagccgttcctagtggcgcatctaccgggatctatgaggcccttgagctcagagatggtgacaagagtgtc

SEQ ID NO: 232137 - DNA, 364 bp, Gossypium hirsutum
  unsure (1)..(364): unsure at all n locations
cggacgcgtgggttctcgactcactcttcccacttgttcgaagtctttctactgctgcaaatccctgtcttcccctacttcaccttctcccctcaaatcccgatctagggtttcgccgccaattcttttttcgcatttcgatcgctcttttttcttaccttaaatggcgattgcagcccaagctccagatattctcggcgagcgtcaatctggtcaggatgttcgcactcaaaacgtgatggcgtgtcaagcagttgccaacattgttaaatcctcactcggcccggttggactcgacaagatgctngttgatgacattggtgatgtaacgattactaatgatggtgctacgatcctgaagatg

SEQ ID NO: 232138 - DNA, 457 bp, Gossypium hirsutum
  unsure (1)..(457): unsure at all n locations
aatttccttaggtggaaatactattgttcctgtaggatctgagcaattttcaactaatttagctgctcctgagtggcaaaagcatcatgctgcgttgattgcccttgcacagattgccgagggttgttccaaggttatggttaaaaatctggaacaagtggtttctatggttttgaactcctttaaccattctcatccccgtgtgaggtgggcagctattaatgcaatcgggcaattgtctaccgacttgggtcctgttttgcagaaccaatatcaccaaagagtattgcctgccttagcagcggctatggatgacttncataatcctagagtacatgcccatgctgcttcagctgtgctcaacttcagtgagaattgcacttcagaaatttaacaccttacttaaatgaattagtagcaaattggcttgactttacagaaggggaaacaatggtgc

SEQ ID NO: 232139 - DNA, 402 bp, Gossypium hirsutum
gtgattaagaagaagtatggtcaagatgcaggcaatgtcggtgatgaaggtggctttgctcctaatatccaggagaacaaggaaggacttgaattgttgaatactgccattgctaaagctggttacactggcaaagttgttattggaatggatgttgctgcatctgaattttacggaacagataaaacttacgacctgaacttcaaagaagagaacaatgacggtaaacaaaagatctcaggagatgctttgaaagatttatacaagtcattcgtagccgagtatccgattgtgtcaattgaagatccatttgaccaagatgattgggagcactactccatactaaccaatgaaatcggagaaaaagttcagattggaggagatgatcttttggtcaccaac

SEQ ID NO: 232140 - DNA, 451 bp, Gossypium hirsutum
  unsure (1)..(451): unsure at all n locations
ctttattttgataaaaataaaatgccgatttctcgaatcgcagtcgggtctccggccgaagccggccaagctgatgcactcaaggctgctttagccgagttcatttcagtgcttatttttgttttcgccggtgaaggctcgggcatggctttcaacaagttgaccgacgatggctcctcgacaccggcgggtttagtagctgcggcattggctcacgccttggcgttgtttgtggcggtttcgatcggagctaacatttccggcggacacgtaaaccccgccgtcacgttcggtgctttcgtgggtggccatattacattggtgaggagtattttgtattggatagctcagttgctaggatcttgtcgtgcttgcttgcttctcaagttctcaaccggtggaatgacaacatcggcattttccttatcatccggngtaggagcatggaacg

SEQ ID NO: 232141 - DNA, 439 bp, Gossypium hirsutum
ctggaggaggcacttatgaagtcatggtgacaaggccacggttggatttgtatatgaaccttccggcccttaagaagcttgatgcaattttgattaccatgcttgatggttttagtgagacagagttttggtatgttgatcggggtatagttgtgggtgatggtggtgcttattcatcgtctgtttctggagggagaccctcaattaggcaggaagagaagtggtggttgccgtgtccgaaagttccaccgaatggtttgtctgaagatgcaaggaagaagctgcaacaatgtagggatagcacaaaccaagtactaaaggctgccatggcgatcaataacagcgtgctcgctgaaatggagattcctactgcttacttggagacattaccaaagaatggaaaagattgtttgggtgatatcatttaccgctacattac

SEQ ID NO: 232142 - DNA, 451 bp, Gossypium hirsutum
  unsure (1)..(451): unsure at all n locations
cccacgcgtccgcggacgcgtggggaaaggttttcttcaatggccgaccggtgctgacgtaccagaggcgcttccctcctcattcctctcatctnctttcacccgatccgggtttgttttcgataaatttcttctatttccatggctgctccacctgcaagagctcgagctgattacgactacctcatcatagctcctttaatcggcgacagcggtgtgggtaagagttgcctccttttgcgtttctcagatggctcatttactactagttntatcacgacaattggaattgactttaagataaggactatagagctngatggaaaaaggatcaaactgcanatttgggatactgctgggcaagagcggtttcgaacaattaccaccgcttactatcgtggagccatgggtattctgctcgtgtatgatgtgactgatgagtcatctttca

SEQ ID NO: 232143 - DNA, 383 bp, Gossypium hirsutum
agaccgtctcgctgggaaagcatctggaggatcaagtgagaaatctgagtctagtgcatctgtagaattgaattcccacaactttgatgaatgggtgctcaaaagtaaagaactttggattgtggagtttttcgctccttggtgtggacactgtaaaagacttgctcctgagtggaagaaggctgctaataacttgaaagggaaggtgaagcttgtcatgttgactgcgattctgagaagtctctcatgagcaggttcaacgttcaagggttccctaccatcttagtatttggtgctgacaaagacagcccagttccttacgagggtgctagaaaccgctctgctattgaatcatttgctctagagcaactagaaactaatgt

SEQ ID NO: 232144 - DNA, 370 bp, Gossypium hirsutum
  unsure (1)..(370): unsure at all n locations
cttcttcttctcttcatattggttttttcccttagaactccacgacacagatccaaggagttggggaaaaccctcacacaaattctctctctaaatcttaaccgaaaaggtctccaaaaaagactaccctttttgcccatttactctccttattcaacaaattcagcatcacatccccaaaatagtcgcttttttatctcttgctttcttcatctgcttcaagtcatggctggtttagcacctgaaggatcccaattcgatgctcgtcaatatgatcagaaaatgagtgatttgctccaaacagacggagatgattttttcacttcttatgatgaagtntatgacagttttcgatgcaatgggacttcaa

SEQ ID NO: 232145 - DNA, 451 bp, Gossypium hirsutum
gagagaaacaaaatccgaagggaatcccaatttcttcgcttttcatcttctctcgcttccatttctccgtttttccccctccggcaatggctatcgattctgattctttcaaacaatcacttctccctagcttcctttactcttctgctcccaactcattctctctggatcgactcctcaacgccaacagccctgctttctctgcttcacgctccactatacccggtgcccccgcggcctcttcctcgccgtcgatcaaggcgagaactttcatgatcccctcccccaatgagcccgggaagaagattgagatgtattcgcctcagttctacgctgcttgtacctttggcggtatccttagcttgggtctcactcacatggcccgtactcctcttgacctcgtcaagtgtaatatgcagattgacccttgcaagtacaaaagtatctcatc

SEQ ID NO: 232146 - DNA, 347 bp, Gossypium hirsutum
atccttcacatccaaggtggccaatgcggcaggcagataggagccaagttctgggaagtcgtatgtgccgaacatggcatcgattcaacgggtcgatatggtggtgactcggagctccagcttgagcgaatcaatgtttactacaacgaagccagttgtggccgttttgttccccgcgcagttttaatggatctggaacccggtaccatggatagcgtaagatccggtccttacggacaaattttcagacccgataacttcgttttcggacagtcgggcgccggaaacaattgggctaagggacattacactgaaggagcggagcttatcgattccgttctcgacgt

SEQ ID NO: 232147 - DNA, 394 bp, Gossypium hirsutum
cttgctttcagaaaggtgttcgaagtccctgatttcgcctctcagaaaagatgtcttcagccggcgaagctgcttgctcttacgccgcattgattctctatgatgatggcatccccatcactgctgagaagattgcaactctagtcaaagctgcaaatgtctctgttgaatcttattggccaagcttgtttgctaagctttttgaaaagtgtaacattgaggatctcataaccaatgttggtgctgccggtgctggtgccgcagttgctgcaactgcacctgttgcagctggtgctggtgggggaactggtgcttcacctcctggcgaggggaaaaaagattgaagaaccataggaagagagcgatgatgatatgggattcagcttatttgatt

SEQ ID NO: 232148 - DNA, 449 bp, Gossypium hirsutum
cggacgcgtggggtcagccaattgtttgagctagctagctcttactcaaatggcaaccaaaacgatgatgttgcaaatatttccacttttcttctttttgttcagtgtctgcaactccattttccttggtgctaatggagatgacaatggtggttggcaaactgcccatgccaccttctacggtggtgctgatgctaccggcacaatggggggagcttgtggttatggaaacctgtacagtcaagggtatggaacgagcacagcatctttgagcactgcacttttcaacaatggctagagctgcggtgcctgctacgagctccggtgcaacaatgatcctcaatggtgcattagtcgaaccataaccgtgacagccaccaacttttgtccacctaactatgctttatctagtgacaatggcgggtggtgcaatcccccacgagaacact

SEQ ID NO: 232149 - DNA, 385 bp, Gossypium hirsutum
agatgcgagaactgaagtactggggcctcctccactgggtccgaatgagggggagaccccgcccctggattctggaagacctcaccatgggacgcccccgacctcgtgcagccaatacgtggatgttcctgctcttgctgggggaagcctgggcaggacactccattgcacaggaagacaaggtgctggggggtcaagagtgccgaccccattcgcagccttggcaagcagccttgttccatggcaagcaactactctgtggcggagtccttataggtggcaactggatccttacagctgcccactgtaaaaaaccgaaatacacagtacgcctgggagaccaacacctacataaaaaagattggccagagcaagatatacctgt

SEQ ID NO: 232150 - DNA, 410 bp, Gossypium hirsutum
ctttctccagtttcctcattcatttccatttctcaacacaaattttcatcacccatcaagcttttcatcaatggcttcccttcaacaagcttcaatctctcttcaacccaagcttctttcatcttctcaacaccccagatcccttccctctctcaacctctctttttcagccactttcccttccctcaaactctgcaccactcgccctcttcatggcggtgccaaaatgtcagcctccgccgcttccagctacgccaccgctttagccgatgtagccaagtccaacaacacccttgatgccaccagctccgacgttgaaaaggtcgagaaaatcttctccgacccacaagtcctccagttcttcaccaaccccaccattgatgtcctcaaaaaacgtcaggttttggatg

SEQ ID NO: 232151 - DNA, 435 bp, Gossypium hirsutum
  unsure (1)..(435): unsure at all n locations
cggacgcgtgggctaaaatatacaaaccttgttcttctattttagctgctcttcacattgagaagctagctttttggtgtgtttgcttagcttcaatccacattttctttgttgcgaagatggttgcacacaaattcaccgttgatttgaataaaccccttgtcttccaggttggtcaccttggagaaagttatcaggagtgggttcatcagcctattgtgagcaaggaaggtcctaggttctttgagagtgatttttgggagttcttgactcgcactgcctggtgggcaattccaaccatatggctgcctgttgtttgctggtgcatttcaatgtccgtacgtatggggcatacactttcccnaatcgctntaatggttgcttttggcatttttgtgtggacatttgtggaatatgttttacaccgattccctt

SEQ ID NO: 232152 - DNA, 344 bp, Gossypium hirsutum
caaggaagaaagtgtgagattgacttgtttataatgcaatccgatgggaagaagatagttgatcctagcaagcaaactgcattgtcgtcgcgtctgaaaatggaactgctccaaccactaagagtaactgtagtgagccggggtcctgacactgagcttctagttgcaaatcccgtagagttatcatgcaagtgccggccttttgttttttatgacatcacccttgctctaaagatgcttaatacttgcatcttctcggcagagatggggagacacatgatcagaaatcgagagtgtgaagtcttcaggattctactatatgaacgggctagttcatccattct

SEQ ID NO: 232153 - DNA, 370 bp, Gossypium hirsutum
ggccaacgtacaaggagggtgtcgggtcggctgccaagagttttggtcttggctccgactcgggagttagccaaacaagtggagaaagaaattaaggagtcggcgtcttatttgaacacggttagcgtttatggaggggtttcttataatttgcagcgaaatgctctttcccgtggggttgatgtagtggtcggaactcctggtcgaatcattgatctgatcgaaagtaaagacctcagattgggggaagttgaatatctggtccttgatgaagctgatcagatgcttgctgttggatttgaggaggctgttgaagagattttagaaaatctaccatcaaagaggcagagcatgcttttctctgcaacca

SEQ ID NO: 232154 - DNA, 411 bp, Gossypium hirsutum
gcttgggaacatattctggcgcttcatagaaggagggtggcaaaagaagagagtgggtggtgctgatctattatcattggtttcagatgaagtttttcaaccagacgtggtttggaagcttctcgatctacaagttacttgcggaactcttggtctttctactgcaacagttaaactcatcgatgctgatgggagaaagcatgttgcctgctcagttggaactggacctgtagattcagcttataaagctgttgatctcattatcaaggaatcggtttcacttcttgagtactcaatgaatgccgttacggaaggaattgttgctatagccactacccgcgttcttaattcgtgtagagaaaagtcacttatctactcatgcgttgactggtgaactctgtcatcgtacat

SEQ ID NO: 232155 - DNA, 371 bp, Gossypium hirsutum
cggacgcgtgggcccatctctcctctcatactgcactctaacgttccctttgaggttttaggaaaacagcagagaaattaaggaatggagaccttcctatttacctcggagtctgtgaacgagggacatcccgacaagctgtgtgatcagatctctgatgcagtcctcgatgcctgtttggcacaggatcctgagagcaaggtggcttgcgagacctgcagcaagacaaacatggtgatggtgtttggtgagatcactaccaaagccgacgtagactacgagaagattgtgcgggacacctgccggggcatcggtttcacatctgacgatgtgggtctggatgccgacaactgcaaagtgctggttaacat

SEQ ID NO: 232156 - DNA, 467 bp, Gossypium hirsutum
ctctctcatggaccttcattcgaccaatgggggaaaatctttaaatgatgacatcgtccttttgcccaccactatcaaatttccagattttccaggaaaaagaaaatcaaaacccccaggtgaagaaggtgaaaaccagcagcggcaaaggcaataaaaggtgaagccaaagagagagagatatatacataataaaaaagacttttcaaaagaacacaactatggctcctcataaagaaggatcagatgcttcagtggaagccatggttgctcaagtcgaaaaacacccaatttcatcgatccttatcatcattgctatgcaaacagaaactttgccggtggtgaataaattccaattgattgaaaaccctcattcttcgtttccaaaaggggtcccttggatccattatcatggtgcattacaagacatcataatcaatctatttgggcttgaaaagattaacctt

SEQ ID NO: 232157 - DNA, 286 bp, Gossypium hirsutum
gtacgaggctcaggaaaaagagttgattcaattgaagcgggaggcaaagttgaaaggaggattctatgttgatccaaaagctaagcttttgttaattgttagaatccgcggtatcaatgccatgcacccaaggaccaaaaagatcttgcagctcctacgtttgagacagattttcaatggtgtttttcttaaagtgaacaaggcaacaatgaacatgcttcaccttgttgaaccttatgtgacttatggatacccgaatctcaagagtgttaggggactcgtttac

SEQ ID NO: 232158 - DNA, 388 bp, Gossypium hirsutum
atctgggttgtcgtttctatagctgaagaaactcttcaatggctgaaaagagcaaggttttgatcatcggaggaactggatatctgggaaagttcattgtggaagccagtgcaaaagagggtcatcccactttcgtttttgtaagggagtccaccgtctccgaccctgttaagggaaaacttgtcgacaacttcaagaacttatgggtccatttgttgttaggggatatgtacgaccatgagagtttggtcaaagcaataaaacaagttgatgtggtgatttcggttgtgggtcaaatgcagttagcagatcaaggtaagatcattgctgctattaaaaaaactgggaatgtcaaaaaatttttcccatccgaatttggaatggacgt

SEQ ID NO: 232159 - DNA, 454 bp, Gossypium hirsutum
  unsure (1)..(454): unsure at all n locations
gtttcatcggcaagaatacgacgccgtatcccactactcggtgcgttttgcgtcctgggtttggggttccccagtctctgctcaatactcccttcttcctcttacctcaagacgagttgtcctcagtctccccattttgttcatatagaaaggtcgaaattagtacccaatcagcagataagactgttcaagctgtgaaaatggaggtgaatagcaacattgttccaagcatcgtcgtctatgttactgttcctaacagagaagcangtaggaagttggctggaagcatcgtgaaagagaaactgcagcttgtgtaaatatagtacccagtcttgaatcggtgtatctatgggagggaaagataaactcagatcctgaagagatgctcataatcaaacaaggcatccctcttgtagctctacagagcatgtgatggcaatcacgatatgatgtg

SEQ ID NO: 232160 - DNA, 325 bp, Gossypium hirsutum
  unsure (1)..(325): unsure at all n locations
gcttgtggttatggaaacctgtacagtcaagggtatggaacgagcacagcagctttgagcactgcacttttcaacaaatgggcttgaggctgcggtgcctgctacgagctccggtgcacaatgatccctcaatggtgcattagtcgaaaccataaccgtgacagccaccaacttttgtccacctaactatgctntatctagtgacaatggcggtggtgcaatccccacgagaacatcttgatttggccgaaaccgcattctttgcggatagcagaatatcgagctggaatcgtcccttgtatgttcagaaaggtgtcatgtgtga

SEQ ID NO: 232161 - DNA, 433 bp, Gossypium hirsutum
gtttatggggacctgagtacttctcctctttatgtctacaaaagtacatttgctgaagacattcaacattcagagacaaatgaagagatttttggtgttctatcctttgtcttctggacccttactttagtccccttattcaagtatgtgtttgtggttcttcgagcagatgacaacggagagggaggtacttttgcattatattctctgatatgccgacatgcaagagttagtcttctgcccaacagacaggtcgccgatgaagcactctctacgtataaacttgagcaccatcccgagaaaaagagtagttcaagagtaaaactgtaccttgagaagcataaggtcttgcacactgctttgttaatcctggttcttcttggtacttgtatgggaattggagatggagttctcactccaaccaattctgttt

SEQ ID NO: 232162 - DNA, 354 bp, Gossypium hirsutum
  unsure (1)..(354): unsure at all n locations
aagagattaaaggtggactttcagctttgcgaaatgtgggaaaacctacaaacaatggtgccctaggaactgctagtgctcctatccacatggtgtcttcagaatcagggaattttaaagatcaattgtggcgtatttttcgcagtcttgcacttggcttcttgttgatttctggtattggtgcacttattgaagatagagggattagtaaaggacttggtctacacgaagaggtgcaagtggtggaatctaacacanaatttaatgatgtcaaaagcgttgatgacgcgaacgcagaattaaaagaaaatgttcactaccttcgagatcctaaagcgtttactcgtcttggag

SEQ ID NO: 232163 - DNA, 374 bp, Gossypium hirsutum
acctcccgccaattgtttgagctagctagctcttactcaaatggcggccaaaacgatgagggtgcaaatattttcactcttattctttctgttcagtatctgcaactacattttccttggtgctaatggagatgacaatggtggttggcaaactgcccatgccaccttgtacggtggtgctgatgctaccggctcaatgaggggagtttgtggttattgaaacctgcacagtcaagggtgttgaaacgagctcagcacctcccagcactgcactgtttaacaatagcttgaacctcagtgcctgctacgaacttcaatgcaacaatgattcgcaatggtgcatttttctgaccataaccgtgacagctacctac

SEQ ID NO: 232164 - DNA, 445 bp, Gossypium hirsutum
cccacgcgtccgaaattgttatctctgaaggtgtcttaataaacgccttcgatttaccttcgatttccatttacttctctattgctacgtttttgaatttttagtgagcgaaaatgagagagtgcatttcagtccacatcggtcaggctggtattcaagtcggaaatgcctgctgggaactttactgccttgaacatggaatccagcctgatggccagatgccaagtgacaagactgtcggaggaggtgatgatgcttttaacacctttttcagtgaaactggtgctggaaagcacgtccctcgtgctgtctttgtggatcttgagcctactgttattgatgaagtgaggactggtacttaccgtcagcttttccaccctgagcaactcatcagcggcaaggaagacgctgccaacaacttcgctcgtggccactacactattgg

SEQ ID NO: 232165 - DNA, 397 bp, Gossypium hirsutum
ctgattgaatgcagttggagacttgaaccacttgatttctgccaccatgagtggtgtgacatgctgccttcgtttccctggtcaattaaactcagatctacgcaagcttgccgtcaatctcattccattccctcgcctgcatttctttatggttggctttgctccacttacttctcgagggtcacagcaatacagggctcttactgttcccgagctcactcaacaaatgtgggatgccaaaaacatgatgtgtgctgctgatcctcgccatgggcgatacttgactgcttcagccatgttccgtggcaagatgagcaccaaggaagtcgatgaacatatgattaatgtgcagaataagaactcatcatactttgtggagtggatccccaataatgtg

SEQ ID NO: 232166 - DNA, 412 bp, Gossypium hirsutum
aaaaaaatggaataccgcaatgtttttcccatttttgttattttttcctttttcatcgttggcgtgatttgtacggagactttctcggcggagggatttgaagttgatccgttgatcgaacaagtaacggacggtcacgaaggagccgagccgcagctgctgacggcggagcatcacttctcgctgttcaagaagcggttcaagaagtcgtacggatcacaaaaggagcacgattataggttcaagatttttcaggttaacctgagacgagcggcgcgtcatcagaatcttgacccgtctgcgactcacggggtgactcagttctccgatttgactccaggcgagttcagaaaggcatatttgggattaaggagattgagattgcctaaagatgcaactgaggctccgattt

SEQ ID NO: 232167 - DNA, 406 bp, Gossypium hirsutum
cagtgggttatgtgtccaaaatcaaaaactggctgaagaagcttcatatgcgaaagaattggcatctgcagctgctgttgagttaaagaatttagctggtgaggtgaccaggctttcagtgcaagaatgcaaaattggagaacgaattattggctgctagaggatctgctaatcaaactataaatggtgctaaccggaagtatagtgacagcacaagacctgggaggaaagggctgcactcttgcccatctcatgacttttctggaacaggtggtgaagactttgaattgtggaaatctgatctagatgatctaaagatggaatcgcatgcgttgaaacaaccggaggcagctcttgtagctacactagcccagaaagaattcatagaagttgaatacagggaaaa

SEQ ID NO: 232168 - DNA, 391 bp, Gossypium hirsutum
tttggctctcaaccaagcttgcaaatttgcagcctcttcttcaatccgttcaagccgattaatcctcagctttctgttttcggaagttactactttacctagtgatggcagacggtcacgagagtgacaagaatattgagatatggaagatcaagaagcttattaaagcacttgaagccgctagaggcaacggcaccagcatgatatctctcataatgcctccacgtgatcagatttcaagggttaccaagatgctgggagatgaatttggaacagcttcaaacatcaaaagcagagtcaaccgtcaatctgtgttaggtgcaatcacatctgctcagcagaggctcaaactttatagtaaggttcctcccaacggacttgtgctctacac

SEQ ID NO: 232169 - DNA, 460 bp, Gossypium hirsutum
ggagctttgtcggtttagtggtgccaagatatacccagggaaaggcatcagatttatccgttctgattctcaggtcttccttttttcaaactcaaaatgcaagaggtacttccacaaccgtttgaagccatcaaaacttacatggacagccatgtataggaagcaacataagaaggacattgctcaaggggccgttaagaagaggagacgtgccacaaagaagccatactccagatccatcgtcggtgccaccttagaggttatccaaaagaagaggagcgagaaacctgaagttcgtgacgctgctcgggaagctgcactccgagaaatcaaggaaaggatcaagaaaaccaaggatgaaaagaaagcaaagaaagccgaagtagcggcgaagcaacaaaagacgcagggcaaaggtaacattccctagggtggtgcaccaaaaggtgccaagctcggc

SEQ ID NO: 232170 - DNA, 342 bp, Gossypium hirsutum
cacaagttcattggggaagaaaccactgctgcttggggggcatcaaagctgactggtgagcctacctggataggtgatccccttgatgggaccaccaattttggtcatggggtcccccttggggggggctcccatgggcctaccattgggaaaggttctaccaatgggggtggttaccaatccattatgggagaaccctttactgtgttgaccttgaaaaagggcctttcttaaccgggcccccattagaagtttattttcaaaccgaccttgggaggcttttccttccaccaaaggtgggaccaaaccaaattaggttaccgggggtggttcctccaaccc

SEQ ID NO: 232171 - DNA, 429 bp, Gossypium hirsutum
  unsure (1)..(429): unsure at all n locations
agaacgtcatgcaccatttcgggaaccccaacttcgagcttatccgccacgacgtcgttgaacctttactcttggaagttgaccagatctaccatctcgcttgtcctgcttctccagtccattacaaatttaaccccgtcaaaactatcaagacaaatgtggtgggaacactgaacatgttagggctggcaaaaagagttggtgccaggttcttattaaccagtaccagtgaagtatatggagatcctctacaacatcctcagaaagaaacttactggggcaacgttaatcccatcggtgtccgaagctgctacgatgagggaaagcgtacntgccgaacgttgacaatggactatcacagaggggcccggagttgggttaggatcgccagaattttcaatacttacggaacctcgatgtgcatcgatg

SEQ ID NO: 232172 - DNA, 507 bp, Gossypium hirsutum
tggaacgctgaagcacgctggtgcccctccgcaatttccgggatcggatccactcttgcatcgccagcgcatccctgagacaccatgggggaggtgaaggtcggagtcaacggatttgctcctattgggcgcctgttcaccagggctgcttttaactctggtgaagtggatattgtatgccatcaatgaccccttcattgacctcaactacatggattacatgttccagtttgattccacccatggcaagttccatggcacctctaaggctgacaactggaagctcgtgactaatggaagccccatcaccatcttacaggagcgagatccctccaaaatcaagtcgggcgatgctggcgctgagtacgttgaggagtgcactggcgtattcaccaacaccgataaggctggagctcatttgcagggaggagccaaatgggtcatgatctctgccacctctgctgacgcccacatgttcgttatgcgtgtgaaacatgagtagtatga

SEQ ID NO: 232173 - DNA, 422 bp, Gossypium hirsutum
gcgttcgccagtcgagagtgacacacatggcattgggatggagcctgtgcatgccgatgaaagaagagttagatctgccatcgatgatgacttcgaatctgatgtgaggaccaacatggagttgcagttgccagaggagctacacgatctgtcagcagcccaataagccgggactgcattcatactagggcactcacatgttccagcaaagcatggatcatctgattttaagagattggccattaactttgggtactatcacttgagagagaattgccgaagaccagatgtggcacttaacgctccacacagtatctatgctagatgctggcatgagttatgtggtgaaagcctctgatgtaagtaggtttggtcgatatgcgtgatgcatatggccgacctggcaagaaatatctttttct

SEQ ID NO: 232174 - DNA, 384 bp, Gossypium hirsutum
gcaagatctcaattctcaaattgtagcgcccttttatatcaagcaatggctctggtcttgcatgctggaaaaacaaacaaaaatgcctttaaggcactcattgctgcagaatatagtggtgtgcaggtcaaaatggttgagaattttgagatgggtgtgtcaaataagactcctgagttcatcaagatgaaccctttggggaaggttcctgtgttggaaacacctgagggtcctgtatttgagagcaatgccattgctcattatgttgctcgctcaaaggttaacaaccctatatgtggttctacattgattgattatggtcatatcgagcaatggattgatttcgcagccatggaaattgatgctaatattgcaaaatggttg

SEQ ID NO: 232175 - DNA, 397 bp, Gossypium hirsutum
tcttttgttgtgaagaaaaaaatggttggtgtgtttaggttagtgagggggtatcctggaccaagtggctttggttcagcctccaccgcccaagaggttaccgaaaggattgatggaaccaacttgactgctctagttaccggaggagcaagtggaattgggttggaaacttctagagtattggctcttcgtggagtccacgtcatcatcggtgcaaggaacatgaaagccgcgaatgaatcaaagaacaaaattgttagagagaacacaagagcccgtatagatgttctggagctggatctttgctctactagttcaatcagatcatttgccgacaatttcattgctcttcatcttcctcttaatatcttaataaacaatgctggcatcatgtttt

SEQ ID NO: 232176 - DNA, 433 bp, Gossypium hirsutum
cccacgcgtgcgcctatatctgcaaaaattcaatacctgcttcagattggcggtaagctgcacggaattgttgtgaaatacagtccagatggaaagctgttgcaggttttggaggatagtgaagggaaggttgtgaaagcggttagtgaagtcgaagagagggatggcaagctctggctagggagtgttcttatgccctttgtggcagtttacaacttggcttgagttgggaggcaaaaggaaaaataaagagttagcaatggtgttttatgaatgtggcaaatcttctcttagccatcgttttcactatgaagaaaaacacaagaatgttttctaagtctatacatgttattggcagtggggctgtattacttggattgcaagtatttggataaaattctgctgaaaagaaagtatttgggtttttccattt

SEQ ID NO: 232177 - DNA, 385 bp, Gossypium hirsutum
cttccatatccaacaagagcatttgatatggctcagtgttctcgatgcctaataccatggactgcaaatgatggaatgtacttaatggaagttgatagagtcctgaggcctggtggatactgggtgttgtctggccctccaattaattggaagacctactaccaaatttggaagcgaactaaggaagatcttaaggctgagcaaaaaaagattgaagagttagctgaacaactttgctgggagaaaaaatatgagaagggagatattgctatttttaggaaaaaagttaatgacaaatcctgccgcaggaattctgccaatatgtgtaaacctaggggttcagatgatgtttggtacaagaaaatggaaacatgcataacccctt

SEQ ID NO: 232178 - DNA, 469 bp, Gossypium hirsutum
  unsure (1)..(469): unsure at all n locations
ggcgattcctaaacgaaaccctattttcctatctgtaatctttgtttcgctcctcgccatcgcctccgctaaagtattcttcgaagaacgttttgatgagggatgggaaagtcggtgggtaaaatctgactggaaaaaggatgagaacatggctggggagtggaattacacttctggaaaatggaatggagatcctaacgacaaaggtattcaaactagtgaagactacaggttctatgctatttcagctgagttcccagaagtcaacaacaaagataagactctagtcttccaattttctgtcaagcatgagcaaaagcttgattgtggtggtggctacatgaagttgctcagcggtgacattgaccagaagaaaattggtggtgaaaccccatacagcatcatgnttgggcctgatatctgcngctatagcactaagaaagtgcatactattctcacctacaatggg

SEQ ID NO: 232179 - DNA, 325 bp, Gossypium hirsutum
ctttgtgaccattaaggttgtgatctaaattagccctatgaatatagcagttcattgttaaccttgatacatgttccttcttcacccaatgatcgtctctcaattttagatcaggcatggcaattgtggacctactgaatctctagaaatccaaagacaacttggtgctcgatcacctgttttttatcggttggaacaagttagtaacagccccagttctgttgggtatatgaggctaaaggagttcaatgcattggctagaaaagatctggtcatgggtaattttatttttattttagtggatctcacctgatggctatttatg

SEQ ID NO: 232180 - DNA, 445 bp, Gossypium hirsutum
aaaataccattcaatcaaatgaaatctcttagggaatcatgctacaagatgttaaacctaaatgttgaatagctagaaggtttccagggtctcaccctgtttcactcaacagggataatttgcaacttttgaggcaacattactattatgctacatggaaagctgatgggactcggtatatgatgctaataactgtcgatggatgttatttgatcgatagacattttaatttccgaagagttcagataaggttcccatgcagttacggaaatagtactcaccattataccttgcttgatggagagatggtgattggtactttgccatgttctcaaaacaaggaaagaagattcttggttttcgatatcattgcttgtaatggaaataatctgatggagaaaccattctctgaaagatggaatatggtggagaaagaaatgatcga

SEQ ID NO: 232181 - DNA, 405 bp, Gossypium hirsutum
gcttccactaccaattccccatcaaccggcctcacccttcctaatttctccattcaaacttcaacattccttcccaaaacatctcaacgttccatatttaagaagaaaaagcctttcaactttaactccaaaagagtagtgtcatgcaaagccagcaatgggaaacaaaacgatgcagacacttcttttctcaataggttcgatagaagggatatccttcttggccttggaggaagtctctatggtgcaaccagccttgttagagacccatttgcattggcagacccaatcgagcctgacctgtccagctgtggggaatcaaccgtagataccagtaaagcctgcatgaatgtcccttgctgcccaccaaagttaaaagattcaaagatcataaacttcgaacca

SEQ ID NO: 232182 - DNA, 399 bp, Gossypium hirsutum
taagaaattcaatgaaatcatgagtcggcctgagataaatgagaagcttgaagcattgaaggctgaggttcaaaattcaggttcatccagctttgctgatttagatcaagggcttaaggacaaagttctgaatacgaggaaagaagtagaactggaaatgattagcgctctcaagtccattggtttggttgttgagggtgtaaaatctaatgaaaaagtcctaagtgagaaagattcaccctcagtcttcaaaaataaggtggatcatttgaatgaagaaattaacaagaaaattgaaaacgttgtcagttcatcggaattgaaaaatatgattgagttgttgaagctggagatagcaagggcaggaaacaaacctgatactgagtcaaaaagtaagat

SEQ ID NO: 232183 - DNA, 430 bp, Gossypium hirsutum
aaagataagaaagtaaaacatggaattcgaatagctggcagtgtaatcacagcaggacttgctcttgctgcaaggggtaagaatcctatgagtcgatctgaagatccattctccgctttgtctgcgtggacaccatctctatgtgtaaatcctgcagaccacctatgctccgagtacattggttattttgagcaccgaaaaaagatggaagagattggagctggggctattgagaggttagcaacccaccattcattgggaggcctatttatgagtgtcggacgaaagggtgtggaagccgcggaaccactgcatctgcttccttctgcaaatctgacagggaatctgagtccttccaatgatttcaagcacgcccatgggatccacccatggtggagacctgacctgagcttgaagtgcagtctttaca

SEQ ID NO: 232184 - DNA, 235 bp, Gossypium hirsutum
gggagctggtgcttggggaagtgtgttcgcagctttgctgcaagatagctacgggcagtttcgagacaaggttcaaatcagaatatggaggaggcctggaagagcagttgatagagctaccgcagaacatctctttgaagtgatcaattccagggaagatgtattgaggaggttgatacgacgttgtgcctatttgaagtatgttgaagctagactaagcgatcgaacactattt

SEQ ID NO: 232185 - DNA, 317 bp, Gossypium hirsutum
cccacgcgtccgaacggcttaaagatcaaagtaagggaaaggacggggttgatacatccaaacaacgccagtcgcaagaacaagcaaggaggaagaagatgtcgagggcgcaagacgggatattgaagtacatgttgaagatgatggaagtgtgtaaggctcaaggttttgtttatgggattattccggaaaagggaaagccggtaactggggcatcagacaatcttcgagaatggtggaaggataaagtgaggtttgatcgtaatggtcctgctgctatcgcgaagtaccaagcggataatgcgatttccgggaac

SEQ ID NO: 232186 - DNA, 262 bp, Gossypium hirsutum
aaatcgcctgaagtcatctctctcaaacgatggaaaatttcaaggggcaacctcgtcttccaaaattcgcggtacctaagcgctacgatctccagctgaagcctgacctctcggcctgcaaattcgccggttccatctcgatcgacgttgacatcgtcgccgaaactcgcttcatcgtcctcaatgccgccgaactctctatcaaccctggatctgtctctttctcccctcgtaactcttctaaagtatttgatccgaaaaa

SEQ ID NO: 232187 - DNA, 456 bp, Gossypium hirsutum
cccacgcgtccgatgctatccttttttctttaatttccaagtacatttcttcattctttttttattgcccataaacatgccaaaattttcctcaccctcttcctatttcttgctcttctcgcttgctctttgtttctactccagttccaatgccggtagcagccatgaatttccggtaaatgtgccacctgctgagtttgcaggctctctaaggaccaccattgatgctataagaaaagtgatccccatcgtttcccagtttggcagcttttttggtgattttcgactttctaatgccatttctgattgccttgatctcttggatttttctgctgatcagctaagctggtctctgtctgcttcccagaatccaaatggtaaacacaacagcaccggtgatgtagcttctgatttaaggacatggttgagtgctgcaatggcaaatcaggagacatg

SEQ ID NO: 232188 - DNA, 460 bp, Gossypium hirsutum
attcggatcaccggcggccaagccttgattcttcgagacggagtatagatgtcggggccactcgatcgattcgctcggccttgctttgaggggttttatggtagtgatgagaggagagagaggaaatctgatttcgagaactcagaggatgaaaggcgcacaagaattggatccttgaaaaagaaagcaataagtgcatctgctagatttaagcattctcttaaaaagaagagtaatagaaggaaaagtgatggccgtgtcagctctgtatccattgaggatgttcgcaatgctgaagagctacgggctgttgatcaatttcgacaagcattaatcatggaagaactgcttccagaaaaacacgacgactatcacatgatgttgaagtttttgaaagcaagaaagtttgatatcgataaagctaagcacatgtgggcagatatgctccaatggaggaatg

SEQ ID NO: 232189 - DNA, 404 bp, Gossypium hirsutum
gcagtcttgcattttgttttcccttttttttccccacacctttttttaaacccatttgctaaaaatgcactgggttcttccagtgttgcttgccgttatcggagttactgcactgctcgttgtaactccggtaagtgggtaccgtccatggccgtacttaaaacccaacagctccgacttaatgttcggaggctctaagaaatttgagggctcatcggagtttatccatatgagatatcatatgggtccagtccttactgctaatatcaccatccacccaatctggtacggccggtggcagaaatcccagaagaaaatcatccgtgagttcatcaactcgatctccgccgttgattccaaacacccttcggtggctgggtggtggaagaccgtacagctttaca

SEQ ID NO: 232190 - DNA, 469 bp, Gossypium hirsutum
agctgatctactttctattcagtagtatatacaaactaaattagcttggcttctctccaacagaaatggctcccgcttccttccatcacgagaaagtttgcgtgatggacgcctccggtcgccttggctctaccctggttgaacgcttgttggaaagaggctacactgtccatgctgctgttcaaggccatgttgatgatttgaaactgaatggggtagctactgaaagggaaaagaagctcaagattttccgggcagaccctttcgattatcagagcattaccgacgccctgaaaggctgctctggtttgttttacgcctttgagcccccacaagaccaccctgcctatgatgaatatatggtagaagtggaggtacgagcagcacataatatggtagaggcatgcgctcggacggagacaatagacaaggtggtcttcacatccttcgccactgctgttctttggag

SEQ ID NO: 232191 - DNA, 427 bp, Gossypium hirsutum
gttcccgtgggtgaagacatagcgacatttgaactggatctggctgacaaacaatgtgaggttgatggagatacaggctcactttggcatattgctaaagccattcacaagcttgagtctacttttggagttataccaaatgatgcgtgcaaaatgcaaagcatctgatcttggatcatatattatggatcgcatgcacacagaggagcccatgaattcatgtgatatggctatatcagagattaacactctcatcctcatagatagggaggtggatattggtactcctatgagttcacagctgacatatgaagggctacttgatgagttcttgcgcatcaataatgggtctgtggagcttgattcatctataatgggtgttcaacatgatggaaaaaagatgaacgtcccacttaattcaagtgac

SEQ ID NO: 232192 - DNA, 343 bp, Gossypium hirsutum
ttaataaacgccttctttcttcttcttctccctttctttgctttttcgaatttttcttaagcgagaatgagagagtgcatttcgattcacatcggtcaggccggtatccaggtcggaaacgcctgctgggagctttactgcctcgagcatggaatccagcctgatggtcagatgccaagtgacaaaactgtcggaggaggtgatgatgcttttaacacctttttcagtgaaactggtgctgggaagcacgtccctcgtgccgtctttgtggatcttgaacccactggtattgatgaaaggagaactggtgcttaccggcagcttttccacccagaacaactta

SEQ ID NO: 232193 - DNA, 282 bp, Gossypium hirsutum
atcccagagggcttctcccacagcagtgatgccataaccaaagaggagattcagagcatctctgagaagatctacagggcagacaccaacaaagcccagaaggaagatatcattctcaatagccaaaactgcatctccccgtcagagaccagagaccaaagggatcgctgcccaaagccactcttcacttatgtcaatgagaagctgttctccaagcccacctatgcagccttcatcaacctcctcaacaactaccagcgggcgacaggtcatggggagcac

SEQ ID NO: 232194 - DNA, 405 bp, Gossypium hirsutum
agaaggtgtcttaataaacgccttctttcttcttcttcttattcctttattgctttttagaatttttcttaatcgaaaatgagagagtgcatttcgatccacatcggtcaggccggtatccaggtcggaaacgcttgctgggagctttactgtctcgagcatggaatccagcctgatggtcagatgccaagtgacaaaactgtcggaggaggtgatgatgcttttaacacctttttcagtgaaactggtgctgggaagcacgtccctcgtgccgtcttcgtggatcttgaacccactgttattgatgaagtgagaactggtgcttaccgccagctcttccacccagaacaactcatcagcggcaaggaagacgcatctaacaactttgcccgtggtcactacacc

SEQ ID NO: 232195 - DNA, 458 bp, Gossypium hirsutum
cggacgcgtgggtggagagccttttttttgtgtagcgattctcagttagtcttttctttaagcttacagcttctctccagagttttataatgggtaaggagaaggttcacatcaaccttgttgtcattggccatgtcgactctggcaagtcgaccactactggtcatttgatctacaagctaggtggtattgacaagcgtgtgattgagaggttcgagaaggaggctgctgaaatgaacaaaaggtcattcaagtatgcttgggtgcttgacaagcttaaggctgagcgtgaacgtggtatcaccattgatattgccctgtggaagtttgagaccaccaaatactattgcaccgttattgatgcacctggacaccgtgactttatcaagaacatgattaccggtacctcacatgctgactgtgctgttctcattattgactcaaccactggtggtttt

SEQ ID NO: 232196 - DNA, 462 bp, Gossypium hirsutum
  unsure (1)..(462): unsure at all n locations
atttttagtaagcgaaaatgagagagtgcatttcagttcacatcggtcaggctggtatccaagtcggaaatgcctgctgggagctttactgccttgaacatggaatccagcctgatggccagatgccaagtgacaagactgtcggaggaggtgatgatgcttttaacacctttttcagtgaaactggtgctggaaagcacgtccctcgtgctgtctttgtggatcttgagcctactgttattgatgaagtgaggactggtacttaccgtcagcttttccaccctgagcaactcatcagcggcaaggaagacgctgccaacaacttcgcccgtggccactacactattggcaaagagatcgttgacttgtgcttggaccgtatcangaagcttgctgataactgtaccggtcttcaaagtttccttggtttcaacgcttgtggtggaggcactggatctggtc

SEQ ID NO: 232197 - DNA, 301 bp, Gossypium hirsutum
  unsure (1)..(301): unsure at all n locations
attggacaaacgctatgttttactggcaaagaactgcctaccactttcagcctcaaaagaattggatgaatgatcctgacggtccgttatatcacaagggatggtaccatcttttctatcaatacaaccctgattcagccatatggggcaacatcacttggggccacgctgtatcaaaggacctcattcactggttctatctcccactcgccatggttcctgatcaatggtacgatatcaatggttgctggacggggtcggccactctccttncagatgggcgaatcgtaatgctttacac

SEQ ID NO: 232198 - DNA, 260 bp, Gossypium hirsutum
aaaatacccatttttattttcattagcaaaacaataaaaaaatgccgatttctcgcattgcagtaagatctgcagctgaagctggccaagctgatgccctcaaagcagctttagctgagtttatttcaatgctcatttttgtttttgctggtgaaggctcgggcatggcttttaacaagctcactgacaatggctctacaacaccggctggccttgtagcttgatcggtggcccatgctttcgctctttttgggggccgt

SEQ ID NO: 232199 - DNA, 456 bp, Gossypium hirsutum
cggacgcgtgggttttccaggaaaaagaaatcaaaaccacaaggtgaagaaggtaaaaaccagcagcggcaaaggcaataaaaggtgaagccaaagagagagagatatatacataataaaaaagattcttcaaaagaacacagctatggctcctcatggagaaggatcagatgcttcagtggaagccatggttgctcaagtcgaaaaacacccaatttcatcaatccttatcatcattgctatgcaaacagaagctttgccggtggtgaataagttccagttgattgaaaaccctcattcttcgtttccaaaaggggtcccttggatccattatcatggtgcatacaaggacatcataatcaatctagtgtggcccggaaaagatttaacctttggggttgatagtgttggcacaatttctgcctctcttgtgacctatgcatctatccaagcatt

SEQ ID NO: 232200 - DNA, 422 bp, Gossypium hirsutum
tgtagatgctgataatggctccaagaatactgaggaagaaacaatacagtttaaaactatgacagttgagacatgtgaccaagcaataaaaatccatttatcagtacattcagagtctaatgagattgaggatgataaagttcttgatacaccaacctctctggatggtatccaccagttgcacaagaagttgctattgctcgaaaaaagagaaccgggaacggaagattcattggatggaagtgtttttagtgacattgagtgtggtgatggactactgactgttgagaagttgaaatcagcattaaaagctgaaaggaaggctttaaatgatttgtataccgaactcgaggaagagaggagtgcttctgctgtagcagcacaccagacgatggcaatgataaataggcttcaagaagaaa

SEQ ID NO: 232201 - DNA, 394 bp, Gossypium hirsutum
ataataataacaataattctctttctgtttctctggtttaaacatgggtatgggtttaaggaatggatttcttttgattttatcttgtgttgttacactttccctctcagttttggggcgacctgccactttccttgaagattttagaatcacttggtctgattctcatattaggcaaatcgatggagggagagccatccaacttgttctcgaccaaaattcaggctgtggatttgcttctaaaaggcagtatttgttcggacgtgtcagcatgaaaatcaagctcatccccggcgactccgccggaacagtcaccgccttttatatgaattctgttacagatgctgtgcgagatgagctagacttcgagttcttgggaaaccgtaccgggcag

SEQ ID NO: 232202 - DNA, 368 bp, Gossypium hirsutum
  unsure (1)..(368): unsure at all n locations
ctccctgtctcactacattgctctgattcttgttcacgtcaagcttggcattttctgtttttctcaatggcaatggatgcttcactgactatgtgcaaatcggtcacatcacctcctggcttattcttggggagaagtagagttattaggagttcccagtgtacctttatggtgggaagcaggatcaactttcctaggcagaaagctcagtcaacccaagttaaatgtaaatctagcaggtgtggagtagctcttggtgctaaatgccgtgctgagaaaattttggtggcaaatagaggagaaatttgctgtcgtgttatccgaacagctcatgagatgggaataccatgtgttgctgnntactctac

SEQ ID NO: 232203 - DNA, 359 bp, Gossypium hirsutum
gtttccaaagaaacatattgggtttccttttcttgatattggcttcactaacaagcctctcttctagccttcctagtgaatactccatagtggaacatgagattgacgcatttctttcggaggaaagggtgttggagatcttccaacagtggaaagaaaagcatcggaaagtgtaccggcacgccgaggaggctgagaaaaggtttgaaaatttcaaggggaatttgaagtatatcctagagaggaatgcaaagagaaaagcaaacaaatgggaacatcatgtgggattgaacaagtttgctgatatgagcaatgaggagttcagaaaagcttacttgtcaaaggtgaaaaagcccatc

SEQ ID NO: 232204 - DNA, 298 bp, Gossypium hirsutum
gttggcattttccagagcttactaagatcatacaagacaatatcatgtatgccaaggcagtaaaactaatgggtgaccgtgctaatgctgctaagctcgacttctcagaggtattaccagaagaggttgagactgaattaaaggaggcagcagtcatatccatggggactgaaattagtgaccttgatctgatgaatatcaaagatttatgtgatcaggttctcaatctttctgaataccgagctcagctatatgattatttaaagagcaggatgaacactgttgcaccaaacttgac

SEQ ID NO: 232205 - DNA, 432 bp, Gossypium hirsutum
attcctgcaaattcccttcttttcccctccacccaagcctaaaaaatcatggcgacagctcaaatcagcaaaaagcgaaagttcgtcgctgatggagttttcttcgcggaactcaacgaggtattgaccagggaactggctgaggatggatactctggagtcgaagtcagagttactcctatgcgtacggagatcatcatcagagccacccgcacccaaaacgttctcggtgagaaaggtaggaggattagggagcttacctcagtggttcagaagcgattcaagttcccagaaaacagcgtcgagctttacgctgagaaggtcaacaacagaggtctttgcgctattgctcaagccgagtctcttcgctacaagctactcggaggtcttgccgttcgcagggcctgctatggtgtattgagattcatcatg

SEQ ID NO: 232206 - DNA, 381 bp, Gossypium hirsutum
cttcttcccttccattttactttgttttagttgccataacgtcaccttccaatacaacccacaatgaggcaacaatatgtcttcactactctcacgttgctcatcctgttttccctcagttgttcaacaacattagcccaagctccggcactggctccagcaccttctggtccgacaaacgtcaccaagatcctcgaaaaagccggtcaattcaccctcttcattcgtcttctaaagtccactcaagtggccaaccagctgctcggtcagctcaacaattccaacaatggtatgaccgtttttgcaccaacggacaatgctttctccagccttaaatcgggcacattgaattcactcaccgatgaacaaaaagtggagctg

SEQ ID NO: 232207 - DNA, 453 bp, Gossypium hirsutum
cccacgcgtccgaaaacaagcaaacaaaggtaaaatggcatggacaatggcaatggcgatcccttcacttcctcttctcttcctctttacatttctgcttctactcccacttctcatttcctcttcccctgttcaagaccctgagcttgttgtccaagatgttcacagtgctatcaatgcgtccaggaggaacctattgtttctctcctgttgtaccggaaaccccattgatgactgctggagatgtgacccctactgtgagacttatctgccgaagctttctttttgttcaattttttttccaagtcttcttttagttaattttttgttcaaatttattttttaataatttttttttttataactttttttacatttaattttttcttttccgtcttttttttatatattaaattttttttggaacattttttgtttttctttcttcttttt

SEQ ID NO: 232208 - DNA, 342 bp, Gossypium hirsutum
cggagagcagtccctaggaacaattaaaaagaaccgaaaaaaaaaacacagattaagacagaagcatggccagccagctcgtaggaacaaagagagcttgtgtcgtgggtggcagcggattcgttgcctcattgctggtcaagttgttgctcgagaagggttacgccgttaacactacagtcagggaccctgacaaccagaagaagatctctcaccttgtaacactacaagagttgggagacttgaagatctttcaggcggatttaactgatgaagggagctttgattgccctattgctggttgtgaccttgtcttccatgttgcgacaacccgtaaacttt

SEQ ID NO: 232209 - DNA, 369 bp, Gossypium hirsutum
atttggtagtgttcatgaaaagcttcccgagacagggagcacgcgtagtatgctttttccgaattttggaagcatgtttagtacagcagagcctcatgctagaaatgaacaatgggatgaggagagcttgcagagagaaggtgaggactatgcatcagatgctgcaggaggagactcggatgacaatttgcatagcccattaatctcacgtcaaacaacaagcttggaaaaggacatggttcccccagcttcccatatcagttctctaagcatgagacgccatagcactcttgtgcaagatgttacagaatcagttggtggtacagggattggaggtggttggcaagttgcattgaaatggtctgagcg

SEQ ID NO: 232210 - DNA, 308 bp, Gossypium hirsutum
  unsure (1)..(308): unsure at all n locations
ccgctctgtttctatctcggctctgacgagaagccggcgccgacatggttcacgtcagcttctaccgcaattatgggaagacctttaagaagcctaggcgtccatatgaaaaggaacgattggatgcagagttgagacttgtaggagagtatggactccgatgtaagagggagttgtggagagttcagtatgctttgagccgtatccgtaatgctgctagggatcttctcactcttgatgagaagaaccctcggcgtatttttgaaagtgaagcacttcttcgtaggatgaatangtatgggactttg

SEQ ID NO: 232211 - DNA, 339 bp, Gossypium hirsutum
  unsure (1)..(339): unsure at all n locations
gttaaaaacgttgctgttaaggatcttaaacgtggttttgttgcttcaaactccaaggatgatccggccaaggaagctgccaacttcacctctcaggttatcatcatgaaccaccctggccaaattggaaatggttatgccccagtcctcgactgccacacctctcacattgctgtcaaattttccgaactgttgaccaagattgacagacgatctggcaaggaactcgagaaggaacccaagttcttgaagaacggtgatgcangtatggtaaagatgattcccaccaaacccatgggtggtgagactttctcttgatacccaccacttggacgtttt

SEQ ID NO: 232212 - DNA, 210 bp, Gossypium hirsutum
gttaaaaacgttgctgttaaggatcttaaacgtggttttgttgcttcaaactccaaggatgatccggccaaggtagctgccaacttcacctctcaagttatcatcatgaaccaccctggccaaattggaaatggttatgccccagtcctcgactgccacacctttcacattgctgtcaaattttccgtactgttgaccaagattgacaga

SEQ ID NO: 232213 - DNA, 313 bp, Gossypium hirsutum
aaataatacacaagtcattttgaagctttcgcttgaaaattcccaatagctttaccagtacaaagtcagatctgtggagaatttttgtttctgcttggtttaatcggtcgtttggtttaaggatataaactttagtaaatacatcaaaatgagccatcctcaagaaccacaacgctctttcttccattttggaaatcctttccgttcaccaaagggttctcatttgccttctgggactctttctttattgggataagttgagaaaaccttgtcagagaggctgcagaaacttgtgcctaaagacaagagtgac

SEQ ID NO: 232214 - DNA, 416 bp, Gossypium hirsutum
  unsure (1)..(416): unsure at all n locations
cggacgcgtggggccaaaaacgggggcaaattgaagaatgggtgttgattattacaagattcttcaggtcgaccgcaatgcaaaagatgaagatttgaagaaagcgtatcgtaaactagccatgaagtggcatcctgataagaaccctaacaacaagaaagatgctgaagcgaaatttaagcaaatctctgaagcttatgatgttctgagtgatccccaaaaacgggcggtttatgatcaatacggagaagaagggttaaaaggccagatgccgcctccaggggcgggaggttttggaggcggtgacagtggtggtccaacgacgttccggttcaatactcgcaaccctgacgatattttctcggagtttttagagtttcgagntcgttgggatgggtgatatgggtgggccacgt

SEQ ID NO: 232215 - DNA, 404 bp, Gossypium hirsutum
  unsure (1)..(404): unsure at all n locations
cggacgcgtgggctcgttaatctgatcggttattgtgccgatggggatcaacggcttcttgtatatgaattcatgccattgggatccttggaagatcatcttcatgatcttccacctggtaaggaaccgttggactggaacacgagaatgaagatagcagccggtgcagccaagggtttggagtacctccatgataaagcaaaccctcctgttatttacagggacttcaagtcctccaacatattactggaagaaggatttcacccgaagttatccgattttgggctcgcgaaacttggtcccgttggagataaatcgcatgtttccacccaggttatgggcacatatgggtattgtgctnctgagtatgccatgactggtccattgacggtgaaatctgatgt

SEQ ID NO: 232216 - DNA, 439 bp, Gossypium hirsutum
  unsure (1)..(439): unsure at all n locations
cggacgcgtgggatactaggtacttggagaatggaaagtactactatgacgtcaagagtgagaacagctattatccaaaccagctcgacaactcaagaggagttgcttccaggaacgagttcgatgagaatcgttacaacaacatgggaaggtaccaccagaaccaagaggagttcgaggaaagcgaggaagagttcgaaccctgatcacctgtcgtacagtatttctacatttgatgtgtgatttgtgaagaacatcaaacaaaacaagcactggctntaatatgatgataagtattatggtaattaattaattggccaaaaccacaatgaagctaaattttattattgagcctgcggtacttttttggatgatctttttatttctattaattataagttcctcgctttgaatgctaaaggttgagagagtattgtct

SEQ ID NO: 232217 - DNA, 447 bp, Gossypium hirsutum
  unsure (1)..(447): unsure at all n locations
agatagttgaattctgtatccatgtgaaaactcctgctgaaaagatcggtctcatgaagcagaggataatgagctacattgagcacaagagtgaccactggtatcaagatacgatgattatattcaaggagcttgaagagttgaatcgagtaaggatagcaatatgggtgacacatagaatgaaccaccaagacatgggagagaggtatataagaagggctctcttgatcgaagagctagttaagattttcaacgatttggatattaaataccgtctgtaccctatcaacatcaacgtctgtagcatgccccccgcaacatcggaccgacttcctncgaattggagtggacctgccagcttgacaaagtcnttttggtattgggatatggttaggctacagggagaggatgtttcaantagatgattagatgccaattagtatatat

SEQ ID NO: 232218 - DNA, 331 bp, Gossypium hirsutum
cggacgcgtgggggaaaatttccattttagcagactatcttcgccgccttctcttcctcctatctcatagcagccatgatcattccagagaagaaccgccgcgagatctccaagtacctctttcaagagggtgtttgctatgcaaagaaagattacaacttggcgaagcacccagaaattgatgttcccaatcttcaagtaataaagctgatgcaaagcttcaagtcaaaagaatacgtgcgtgaaacttttgcatggatgcattattactggtaccttaccaatgatggcattgagttccttaggacatatctgaatcttccttctgaga

SEQ ID NO: 232219 - DNA, 275 bp, Gossypium hirsutum
aagaggaagaggcattctttcactcccaaaatgtcagatcttcaagcaccccttcgcccaaagaggaagaagggcttggtggactttttggtccagtttcgttgggtttttgttatattttttgtccttcctttttcggctctgtattactttctcatatatcttggagatgtcagatccgagatgaagtcctacaagcagcgtcagaaggaacatgatgaaaatgttaagaaagtagtgaagcgtctcatacagaggaatcccaaaaaaggatg

SEQ ID NO: 232220 - DNA, 276 bp, Gossypium hirsutum
attgttatctctgaaggtgtcttaataaacgccttcgatttaccttcgatttccatttacttctctattgctacgtttttgaatttttagtgagcgaaaatgagagagtgcatttcagtccacatcggtcaggctggtattcaagtcggaaatgcctgctgggaactttactgccttgaacatggaatccagcctgatggccagatgccaagtgacaagactgtcggaggaggtgatgatgcttttaaacaccttttcagtgaaactggtgctgga

SEQ ID NO: 232221 - DNA, 368 bp, Gossypium hirsutum
gcccactatctgtctctctctctctctctttcacttcacttccacagccttctcttctccaccaatccaaaaaaacaaagatgcagtacaaaaacctgggcagatcaggcttaaaggtgagtcaactatcgtatggagcatgggttagtttcggtaaccagctcgatgttaaagaagcaaagtcacttctccagtgttgtaaagacaacggagtcaactttttcgacaacgccgaggtttatgccaatggtcgagccgaggagatcatgggtcaggctattagggaacttgggtggaaacgatcggatatcgtggtttctaccaagatcttttggggctgtcctgggccaaatgataaggtttgtcta

SEQ ID NO: 232222 - DNA, 451 bp, Gossypium hirsutum
  unsure (1)..(451): unsure at all n locations
cggacgcgtgggttccggaccgaaagcgtcgctgctcttttttctggcgtctctgctaccgtcctccgccagaccctctattccaccacccgcatgggactctacgacatcctgaaacagaagtggactgataaagagaccaaaaccatgcctctctcgcggaaaatcaccgccgggctaatcgccggagggatcggcgctgccgttgggaacccagccgacgtggcgatggtgcgaatgcaagctgacggacgccttcccgtatctcaacgtcgtaactataccagcgttgtcgacgccatcacacgcatgaccaaacaagaaggcgttgacctccttgtgcgcggctcgtcgctgacggtgaatcgtgcgatgttggtgacggcatcgcagctggcctnctacgatcagatcaaagagatgattttggaaacgggctgatgaaagatgg

SEQ ID NO: 232223 - DNA, 347 bp, Gossypium hirsutum
  unsure (1)..(347): unsure at all n locations
cccacgcgtccgtttttttcttaatcaaatctggttcagttcgcataatagtaacgcataaaagtatggttgggaggattttattactagttctttttatgaatgctgcctttttaatagtgaatgctgtaccagaaacatgccctgctgatctcggtggaaaatgtggtgaagatagtgaatgggaaggggaatttttccctggagttactaaaattaagtatgagggtccttctagcaagaatccactttcatacaaatggtacaatgcagaagaagtgattcttgggaagaaaatgaaggactggttgagatttagtgttgcattntggcatacatttcgtgga

SEQ ID NO: 232224 - DNA, 401 bp, Gossypium hirsutum
gcggcggtttgggatcgatgcttcaaatattgcggcatatgttgcgaggagtgtaaatgtgttccttccggtacttttgggaacaaacacgagtgtccttgctacagagacaaggtgaataacaagggcaaacccaaatgcccttgaaaatgaaatatattcgagttcgggatttcatcaagcttaaagatcgaggacgaagaggctatatatatatatgcatgctgatggtgttattataaaaatgaactgttttattgctgttgttttccttcgggtttttgttttggtagtgttgaataaaatttcccttatattttcccatcaccgccgtgttcaccgccatgcacacatgttttgttgtcttttgatcatgggtggcggtggtggtggtgaaaatg

SEQ ID NO: 232225 - DNA, 272 bp, Gossypium hirsutum
cgcttacgggaaagacgatcactctcgaggtcgagagctctgacacgatcgacaacgtgaaagccaaaatccaagacaaggaaggcatcccgccagaccagcaacgtctcatcttcgccggaaagcaactcgaggacgggcggactttagccgattacaatatccagaaggaatcgactcttcatctggtcctgcgtcttcgaggtgggatgcagatcttcgtcaagactttgaccggtaagacgattactttagaagtggagagctcggat

SEQ ID NO: 232226 - DNA, 392 bp, Gossypium hirsutum
ggatccgccaagcttcaaatggcaacccagttgcctgatttcatgctgatcttcgtcatcagttgcctaggtttcatctccctttgtaaaccaatcctcggtttcatcaaatgggtgtgggtcatgttcctcaggccgccaaagaatctcaagcaccactacggttcatgggccatagtcaccggctgcaccgatgggatcgggacagccctggcgttccaactggcatccaagggtcttaacttggtcttggtggggcgaaaccctttgaaacttgtagcaaccgccgatgccatacgtgaaaatttcggcgcacaagttgggaccagaaacgtcgtcattgacttggcgaaaaccagcggagaagagatatcaaagacgatggaggatgc

SEQ ID NO: 232227 - DNA, 374 bp, Gossypium hirsutum
tcccgggatccaagaaacaagtggccttggagaaacgcagagcagcccagaaccagtggcaactacaacaggagaagcatctgcagcatctggcaaaagtttctgcagaggtgagggagcgtaagacagggactcagcaggagcttgagggggtgtttcagaaacttggaaacctgaagcagcaggcagaacaggagcaggacaagctgcagaggtaccagaccttcctccagcttctgtataccctgcagggtaagctgttgttccctgaggctgaagctgaggcagagaatcttccagatgataaaccccagcagctgactcgaccccaggagcagagtacaggagacactatggggagagatgctggtgtg

SEQ ID NO: 232228 - DNA, 355 bp, Gossypium hirsutum
agaaaaacaagtcccttcttatctttgcagggagaatagagaaagaatatccaatggaaggctacaagaatgcttctaaacacatagcagtgttggctttccctttcggcacccatgctgttccttttctcaacattatccgtcaactatcagacgcttgccccgacaccatgttttacttccttagcacccaacaatcaaacaactgaacttttcccaaaaaccttgataaaattaacccttttaatgtatgggatggattacctgaggggtatagctctaaggggaatcctcatgagcccgtcgattatttacttaaggcagatcctgggaattttataaaggctatcgatgc

SEQ ID NO: 232229 - DNA, 432 bp, Gossypium hirsutum
attcccatttccaatctccagctcccaaggtaaatatgccgatcagaaacatagcagttggccggcccgaagaggcgactcaccccgatgctctcaaggcagctttggctgagttcatctcaaccttgatcttcgttttcgctggatcgggctcaggaatggcttttaacaagttgaccgacaacggagcaacaaccccggccggtctcgtagccgccgctctagctcatggcttcggtcttttcgtcgctgtctccgttggcgccaacatctcatgtggccacgtcaaccccgccgtcaccttcggtgctttcgttggcgggaacatcactctcttgcgcggcattctttactggatcgcccaactcctaggctcaaccgtcgcttgcctgttgcttaagttcgctaccggcgacctggctgtaccagctt

SEQ ID NO: 232230 - DNA, 424 bp, Gossypium hirsutum
attgctctgattcttgttcacgtcaagcttgacaggtagcactgaagctttggcttaaatgggtatttgctattgtaggcattttctgtttttctcaatggcaatggatgcttcactgactatgtgcaaatcggtcacatcacctcctggcttattcttggggagaagtagagttattaggagttcccagtgtacctttatggtgggaagcaggatcaactttcctaggcagaaagctcagtcaacccaagttaaatgtaaatctagcaggtgtggagtagctcttggtgctaaatgccgtgctgagaaaattttggtggcaaatagaggagaaattgctgttcgtgttatccgaacagctcatgagatgggaataccatgtgttgctgtttactctacaattgataaggatgcacttcatgtg

SEQ ID NO: 232231 - DNA, 425 bp, Gossypium hirsutum
atcgccccgcgagcacagagcctcgcctttgccgctccgccgcccgttcacacccgccgccagctcgccatggatgatgatatcgccgcgctcgttgtcgacaacggctccggcatgtgcaaggccggcttcgcgggcgacgatgccccccgggccgtcttcccctccatcgtggggcgccccaggcaccagggcgtgatggtgggcatgggtcagaaggattcatatgtgggcgacgaggcccagagcaagagaggcattctcaccctgaagtaccccatcgagcacggcatcgtcaccaactgggacgacatggagaagatctggcaccacaccttctacaatgagctgcgtgtggctcctgaggagcaccccgtgctgctgaccgaggcccccctgaaccccaaggccaaccgcgagaagat

SEQ ID NO: 232232 - DNA, 422 bp, Gossypium hirsutum
gggattccaaatgttagatggtttggagttgagggagactataatgttatggttatggatttacttggacctagtcttgaagatctatttaatttctgcagtaggaaactctcattgaagtcagttctcatgcttgctgatcaaatgatcaatcgtgtcgaatttgttcattcaaaatcatttctacatcgggatatcaagccagacaattttattatgggcttgggaaggcgtgcaaatcaggtctatatgatcgactttggtcttgctaagaaatatagagacagttcacatcaacacattccttacagggagaataagaatctgactggaactgcaagatatgcaagcatgaacacacacttgggcattgagcaaagccgtagggatgatttggagtctcttggatacgtgcttatgta

SEQ ID NO: 232233 - DNA, 427 bp, Gossypium hirsutum
cgaaaaagaacgcagtcttttgatctctgccccaaagcaaaaagttgtcatcttttacaatcacaactactggttatttattttcatggctcaaggagattctaacttccagcaagacatggctaaagaggaagaagaacagaggctgaaatacttggagttcgtgcaagtagccgccgttcacgccgctttgtgcttcaccaacctttacctttacgctaaggaaagatcggggccgttgaaacctagcgtcgagaccgttgagggaacggttaagagtgtggttggaccggtttatgataaataccatgatgtccctgttgaattccttaaattcgttgattccaaggtgggtgaatcagtgaccaagcttgatcgtcgagtccctccagtcatcaaacaggtctcaaccgaagccatcttggca

SEQ ID NO: 232234 - DNA, 438 bp, Gossypium hirsutum
ggaagttcaacttaaggatggcagagttctggaagctgacattgttgtggttggtgttggtggaaggcctcttacagcactatttaaagggcaggttgaagaggagacgggcggaataaagactgatgctttttttcaaaacaagtgttcccacagtatatgctgtgggtgatgtggccactttccctctgaagttatacaatgagttgagaagggttgaacatgttgaccatgcccggaaatctgccgaacaggctgtaaaggccatcaaggggcttgagaaggggcaatcagtcgacgaatatgactacttaccgtacttctattcccgttcctttgacctagcatggcaattctatggcgacaatgttggggatactgtgctttttggagacaacaacccacaatcaccgaagccaaagttcggatcttattgga

SEQ ID NO: 232235 - DNA, 413 bp, Gossypium hirsutum
cagaatttgatattaaggttctagttgctgctgctgtagccttcaagggtgttgggggtatcctttttatctttggcagcactatcggtgcttatcttctggctctgcaacaggtaattgttactaccatattgtacgacttctacaactatgacacggaaaagaaagaatttgggctactcttttcaaagttctcacagaacttggcattgctgggggcattactcttcttcatcggcatgaagaactcaatccccagcagacaactcaagaaaaaggctcctaaaaccaaaacagtttgaaggaggaacatctggtaaaccaagggtctattgctcaatctctacgttttccttagtcaacccagatttattttttgtatgctttgtatcaaagctttgttcttcaatatt

SEQ ID NO: 232236 - DNA, 434 bp, Gossypium hirsutum
ctttgacgtcaggtcattaccactccttcttccagctgtagaagatggcatctttaacgacaattggcgaattagacaaagctctgtggagctattaggagatctcctgtttaaggttgccggaacttccgggaaagctttacttgagggtggcagtgatgatgaaggtgctagtactgaagcacatggacgtgctattatagaggttctgggaagggataagcgcaatgaagttcttgctgcattatatatggttcgaactgatgtcagcattactgtacgccaggctgcattacatgtatggaagactattgtagcaaatactccgaagacgctcaaggaaataatgcctgttttaatgaatactctaattacttctcttgcatcagcatcctctgaaaggcggcaggttgctggaagagcactgggagaac

SEQ ID NO: 232237 - DNA, 426 bp, Gossypium hirsutum
gaaaaatggagttgatggaccttttcattatcggtttggcacttattttcatccgtctatggtggcggtactcgtcggtcactggcggtggccctaagaacctccctccaggaccgcctcgttggccattcgttggaaacctgatccaaatcattctccaacgtcgacatttcgtctttatagtaggtgagctacgtaaactatacggtccaattttcaccttgcgaatggggcaacggaccatggtgattgttacagattcgagtctcatccatgaagctttggttcaaaaaggccacactttcgcttcccgtccaccggactccccgatccggctcgtgtttagcgtcggaaaatgcgctatcaactccgccgagtacggacctctctggcgaaccctgcgcaagaacctcgtcaccgagctta

SEQ ID NO: 232238 - DNA, 426 bp, Gossypium hirsutum
gtgtttctctccttctcgccgtctcgcgtgcgctcctgtggctctcttcaaccctcgcatatctcttcaagatctgatctgatctgacaaaaaaatgttcgggagagcaccaaagaaaagcgataatactaaatactatgagatattgggagtgcccaaaaccgcttcccaagatgatttgaagaaggcttacagaaaagctgcaattaagaatcatccagataaaggcggtgatcctgaaaagtttaaagagttggctcaagcttatgaggtgctgagtgacccagagaagcgtgagatatatgatcagtatggtgaggacgcccttaaagaaggaatgggtggaggtggtggtgcccatgatccatttgatatcttccaatccttctttggtggcaatccttttggtggtggtggtagcagccg

SEQ ID NO: 232239 - DNA, 430 bp, Gossypium hirsutum
tacctcactgcccctaaaatttaatcgaggagatctcgttgttctttagctccgttttgcagccatggctactctagattccgatgtgccgatggtgcccgccggtgaagcttccggtagctccgccgcgtcttcctctactaagaagcccaagcgcttcgagatcaagaagtggagtgccgttgccctctgggcctgggatattgtggtggataattgtgcaatttgcaggaatcacattatggatctctgtatcgagtgccaagctaaccaagccagcgccaccagtgaggaatgcactgttgcttggggggtctgcaaccatgcatttcacttccattgtatcagccgatggctcaagactcgtcaagtttgcccattggataacagtgagtgggagttccaaaagtatgggcactagagagctttc

SEQ ID NO: 232240 - DNA, 432 bp, Gossypium hirsutum
atcaaaggaaatcaattttccgtatcccctggggttgactctgcttcacatggtcttctcgtctgttttatgtttcttactcactaaagtcttcaagattttgaaagttgaagaaggaatgacgttagaaatatacacgacatctgtgatcccaattggtgccatgtttgcaatgactctttggctgggaaacactgcctacttgtatatatcagtggcatttgcacaaatgctgaaggcaattatgccagtagctgtattcatccttggagtagcagcaggactggaggtaatgagctgcaggatgcttttaataatgtcagtgattagctttggtgttctggtggcttcttatggagaaataaatattagctggattggagttgtttaccaaatgggtggtgttgtcggagaatctttaagacttatatt

SEQ ID NO: 232241 - DNA, 430 bp, Gossypium hirsutum
cggaaggcgtcttgatacacgccctcatttattttatttttcaaacaaattttcccttcagttttcgtataatttcctaggaaaagaaaaatgagagagtgcatttcagttcacattggtcaggccggtattcaggtcggaaatgcttgctgggaactttactgtctcgagcatggcattcagcctgatggccaaatgccaagtgataagactgttggtggaggagacgatgctttcaacacctttttcagcgaaactggtgccgggaagcacgtccctcgcgccatctttgttgatctggagcctactgttatcgatgaagtgaggactggtacgtaccgccagttgttccaccctgagcaactcatcagtggcaaagaagatgctgccaacaatttcgctcgtggccattatacaattggcaaagaga

SEQ ID NO: 232242 - DNA, 419 bp, Gossypium hirsutum
gtcttgatacacgcccccatttattttatttttcaaacaaattttcccttcaattttcgtataatttcctaggaaaagaaatatgagagagtgcatttcagttcacatcggtcaggccggtattcaggtcggaaatgcttgctgggaactttactgtctcgagcatggcattcagcctgatggccaaatgccaagtgataagactgttggtggaggagacgatgctttcaacacctttttcagcgaaactggtgccgggaagcacgtccctcgcgccatctttgttgatctggagcctactgttatcgatgaagtgaggactggtacgtaccgccagttattccaccctgagcaactcatcagtggcaaagaagatgctgccaacaatttcgctcgtggccattatacaattggcaaag

SEQ ID NO: 232243 - DNA, 425 bp, Gossypium hirsutum
ctctctcttattatctttttctttctttggtttataaaagaaaaaaaaaagaaaatcccaataccataacaatgagagaaatcctccatgttcaagccggccagtgtggtaatcaaattggtggcaagttttgggaggtagtatgtgatgaacatggcattgatgccactggtaactatgtcggcacttcgcctgttcagcttgaaaggcttaatgtttactataatgaagccagaggtggcagatatgtgcctagagctgtgttaatggatcttgagccaggaactatggacagtttacgaacaggtccttatggaaaattgtttagaccagataactttgtgttcggccaaaatggagctggcaataactgggctaagggacattatactgaaggagctgaattgattgattcagttcttgat

SEQ ID NO: 232244 - DNA, 400 bp, Gossypium hirsutum
ggaaaagaaaaaaatacaaagaaaaaaaaatcagaggagaactcagaaatcaaaagaaacaaagcaagagttgaatcgatctacactctgttatcaaagctgcgaaatttttgtgttaaaggaaaaagacttgaaagtcataagagaagctaagatccgagaagagatgttagaccgggaagcttcacttagacaagcaagagcagaagcatctctttctgatggtatctcatgggtaagctttgaccagaaaaaggcaaagccaattagggattttagaaaagttgccctccacaaggtataaagatgaaccaagtattatgaagtacataaagtttgcagctaccttgcctgataaaactgtacgtgatgttgcattgaggtgttggtggatgcaaca

SEQ ID NO: 232245 - DNA, 436 bp, Gossypium hirsutum
  unsure (1)..(436): unsure at all n locations
cggcgcgtggggaagcagccagccacagcattcgccgcacggcatcagtctcatcaggcggggaagaatgtctcacaggaagtttgaacacccaaggcatggctcccttggatttcttccgaggaagcgagcttctcgtcacagagggaaagtgaaggcatttcctaaggatgacccaagcaaaccttgcaagctcactgcctttttgggctacaaggcaggcatgacacacattgtccgagaggtcgaaaaacctggatctaagcttcacaagaaagagacatgtgaagctgttacgatcgttgaaacccctcctatggtgattgttgnggttgttggttatgtcaagacaccacgtggtcttcgcagcttgaacaccgtttgggctcagcatctgagcgaggaagtcaaacgtaggttctacaagcattggtgc

SEQ ID NO: 232246 - DNA, 434 bp, Gossypium hirsutum
gccaattgtttgagctagctagctcttactcaaatggcaaccaaaacgatgatgttgcaaatattttcacttttcttctttttgttcagtatctgcaactccattttccttggtgctaatggagatgacaatggtggttggcaaactgcccatgccaccttctacggtggtgctgatgctaccggcacaatggggggagcttgtggttatggaaacctgtacagtcaagggtatggaacgagcacagcagctttgagcactgcacttttcaacaatggcttgagctgcggtgcctgctacgagctccggtgcaacaatgatcctcaatggtgcattagtcgaaccataaccgtgacagccaccaacttttgtccccctaactatgctttatctagtgacaatggcgggtggtgcaatcccccacgagaacactt

SEQ ID NO: 232247 - DNA, 433 bp, Gossypium hirsutum
ttggcatttcatgagctcatgggcccaaatctgtagcgggtccaactccgtctcagtctcgccgtttctcgagcggaccaaagtccgaaacacccgcgtgaagctggatctctcgctcccacctaaccctgtcaacggtgacgccaaccaaggcccccagctgagggagaaactcttcaggttttctgaagctgccatcgacaagatcaagtcaaaagtcaactctaccccaccatccgactcctctaaaccattctcaactttccaatctctagcttatcacgtttggcaccacgtaaccctagcacgtgaactcaaacctcaagattacacagttttcactctcttcgcagattgtcgtaaaagggttgatccacccatgccagaaagttacttcggaaacctgattcatgccatcttcaccgtcacggca

SEQ ID NO: 232248 - DNA, 343 bp, Gossypium hirsutum
gtgcttggattcgaattgggttactcgatggagaatccaaattcattggttatgtgggaagctcagtttggtgactttgctaatggtgctcaagtgatatttgatcagtttataagtagcggggaggcaaagtggctgcgtcaaactggtctcgtagtgctgcttccccatggttatgatggacaaggtccagaacattcaagtgcacgactagagcgttatcttcagatgagtgatgacaatccttttgtgatacctgagatggatacaactcttcgtaaacacattcatgagtgcaactggcaggtggttaacgttacaacacctgctaattacttccatg

SEQ ID NO: 232249 - DNA, 412 bp, Gossypium hirsutum
ctaccggtcctcgccaacgctctcccgaggaactcgatcgcaaccgtcttggcggcggatttaaatcctatggttcgaaccgatacaattccaacggcgatgattcctcaagtaatagtagatggggatcttctagggtttcaaatagagattccaataaagaaatggctccctcacgcgccgatgagatggataattgggcgtcggctaagaaatcgactcgtgctgggaacggatttggggttggatttgagaggagagagagaggagggggagggttttttgattcgcaatcgaaagccgatgaagtagataactgggcatctaataagagtagtaaaagcgtgaatgctgctgcaccgccacggaaatttggtggggggtttgagagaagaagcagtttcgattcact

SEQ ID NO: 232250 - DNA, 431 bp, Gossypium hirsutum
attttctgccacaatgccacctgaagcccttgagatcactaggaagttcatgaacaaaccagtgagaattttggttaagcgtgatgagctcaccctcgagggtatcaagcagttttatgtgaatgttgaaaaggaggaatggaagcttgaaactctttgtgatctctatgagacccttgccatcacccagagtgtcattttcgtgaacacaaggcgcaaggttgactggctaactgacaagatgcgaagccgtgaccacacggtttctgccacccatggagacatggaccagaacactcgtgacatcatcatgcgtgaattccgctctggttcttctcgtgttctcatcacaactgatctccttgctcgtggtattgatgtgcagcaagtgtctctagtcataaactatgatctgccgactcaaccagaaa

SEQ ID NO: 232251 - DNA, 429 bp, Gossypium hirsutum
atttttattccgctattttctctctccccaaacacccttttaagccaaaaagaagacaatggccgatcagctcaccgatgatcagatctctgagttcaaggaggcctttagcctattcgacaaggacggcgatggctgcattactaccaaggagctcgggactgtgatgcgatcacttgggcagaaccctactgaggcagaacttcaagatatgattaatgaagttgatgctgatggaaatgggaccatcgattttcctgaattccttaacctgatggcgaggaagatgaaggatactgattctgaggaggaacttaaagaggctttcagggtttttgacaaggatcagaatggtttcatatcagctgctgagctgcgccatgtcatgacaaatcttggtgagaagcttacagatgaggaggttgatga

SEQ ID NO: 232252 - DNA, 434 bp, Gossypium hirsutum
ggttaagccttttcattaatcctcaagcttttatttttgcccataagtctactcccagtttcccttaatcctccatgggcaaaggcggaggttgtgtcccaagcaaaaagagacaaccttcctctgccgaaggctctgccactgccactgccactaccgccaccaacaacgcacccatcgaagccgatgaagaaactcacgaaactgccagtgtagctgtgaatcctacgaatgcgcaatcagttaccgccactttaaaaatctttattgtttactactccatgtatggtcacgtggagaaactggccaagcggatgaagaaaggggtcgacggcgtggaaggggtagaagcggttctttatcgggttcccgagacgctcccggctgatgtgctggaccatatgaaggtgccgtcgaaaaaccccgaggttcca

SEQ ID NO: 232253 - DNA, 433 bp, Gossypium hirsutum
gttttccttgcccaagtagaagaaacccttcggatcacttcctccgatgtataaattcggactttgacgccataactgccacattgaagggttctcaaagactacgcgataaaccaacatcctcggatcctttcatggagatggcaacagcacagatcaagtctgcccttgtcgaaaagcaccgggactcaaagtacgcgaaaatggctcgagctaggagtcaagaaatatctaaaattgaaggacttgaggtagaaacaaaaagtggaagtcaagcaacatggtggaagcaacttacaacattgacaaaacgatcatttgtcaacatgtgtagagatgtaggatattactgggcaaggattgtgatatacatacttgtatctatttgtgtgggaaccgtcttctatgatgtcggatatggcaatactgcaat

SEQ ID NO: 232254 - DNA, 436 bp, Gossypium hirsutum
cccacgcgtccggggattttttcatttgtttcttcttacgctcgattacctcacgaaaagagaaaatgaccaagtgttacccaactgtgagcgaggaataccagaagtcagttgaaaaggctaagaggaagctcagaggtctcatcgctgagaagaactgtgctccactcatgctccgtctagcgtggcactcagctggaacttttgatgttaagaccaagacaggaggtccattcggaaccatgaagcatcctgctgagctcgcacatgctgctaacaacggccttgatatcgccgtcagacttctcgagccgatcaaggagcagttccctaacctcacctacgctgacttctatcagctcgctggtgtcgtcgccgttgagattactggtggacctgaaattcccttccatcccggaagagaggacaagcctca

SEQ ID NO: 232255 - DNA, 370 bp, Gossypium hirsutum
ccaggtagtgttaagctagggagtgggagaaccatatctggagtttcactctacaaagggcggatgttactgcaggcaaacaagcaataccctcttgtttatatgggtagtaactcaagcagccctaatccacgttcattatgcttagagggaactttggatccacatgtcgtttatgggaaaatcacgatatgtgatcgaggaataaatcctagagtgcataagggtcaagtagtgaaagatgctggaggagtagggatgattttgacaaacactgcggcggatggggaggagcttgttgcaaattgtcacctactttcagcagttgcagtgcgagagatggaaggcaaagccatcaaacattatgctt

SEQ ID NO: 232256 - DNA, 410 bp, Gossypium hirsutum
cttaggcaattctatcgggaatgtgacatatacgggacagtggactttatattcggaaacgcagctgttgttttccagggctgcaatttatatgctcgtaaacccaatccaaaccagaagaacattttcaccgctcaaggaagagaagaccctaaccagaacactgggatttcaattctgaactgcaagatcgctgcagctgcggatttagtccccgtaaaatcatctttcaagacgtttttggggcgtccttggaaagagtattccaggacagttattatgcgttcgtacattgatgattcagtggatcctgccggatggttagaatggaatgggacgtttgctttgagtaccctctattatggggagtacctgaaccgagggccaaggtccaatacgagtgcaagagt

SEQ ID NO: 232257 - DNA, 423 bp, Gossypium hirsutum
cttctccataacattcgtctctcagatcctttcctcttagatcatcaaatccattcctttttttcaccaaaacatgagggaaatcataagcattcatataggtcaagctggtattcaagtcggtaactcatgttgggagctttactgccttgaacatgaaatccaacccgatggaatgatgcccagtgacacctctgtaggtgtagcaaatgatgctttcaacactttctttagtgaaactggttcagggaaacatgttcctagagctgtgtttgtggatctggaacctactgtgatcgatgaagttaggactgggacttaccgacaacttttccaccctgaacagcttatttctggcaaagaagatgctgccaataactttgccagaggccattatacaattgggaaggaaattgtggatct

SEQ ID NO: 232258 - DNA, 392 bp, Gossypium hirsutum
cttctccataacattcgtctctcagatcctttgctcttagatcatcaaatccattcctttttttcaccaaaacatgagggaaatcataagcattcatataggtcaagctggtattcaagtcggtgactcatgttgggagctttactgccttgaacatgaaatccaacccgatggaatgatgcccagtgacacctctgtaggtgtagcaaatgatgctttcaacactttctttagtgaaactggttcatggaaacatgttcctagagctgtgtttgtggatctggaacctactgtgatcgatgaagttatgactgggacttaccgacaactttttcaccctgaacaggttatttctggcaaagaagatgctgccaataactgtgacagaggcc

SEQ ID NO: 232259 - DNA, 428 bp, Gossypium hirsutum
cttcattctcactctctctccactgaactcttgctaaacggtatcgttttagtcagtctttcatcaatggcgaaagaaccggttcgcgtcctcgttactggagctgcaggacaaatcgggtatgctcttgtacccatgattgctaggggagtcatgttgggtgctgaccagcccgtgatccttcacatgcttgatatcccacctgctgcggaggctttgaatggtgtcaaaatggagttggtggatgctgcttttcctcttctaaagggtgttgttgctacaactgatgttgttgaggcatgcactggagtcaatgttgctgtcatggttggtggtttcccaaggaaggaaggaatggagaggaaagatgttatgtcaaagaatgtgtctatttacaagtctcaggcttctgccttggaacagcatgc

SEQ ID NO: 232260 - DNA, 433 bp, Gossypium hirsutum
tgaccatttctttcttcttgttatctcatccactcccatgggaatttgttggcctaaacctgctaagtgcggtcatgcttcttccactaacttttcaggtggttcaaagactcatacaccagtttccagcaatctcaatgttgatacatctgtttctagcaatctcaaggcttttagctattctgatcttaaaactgccgccaaaagcttccggtcggagactcttctcggagagggaggattcggatgcgttttcaaaggttggcttgatgagaacactttggctcctaccaagcccggaactggaattgttgtagctatcaaaagacttgcggcagaaagctttcaaggccacaaggaatggcttgcagaagttaactatttgggtcagcttcaccatgaaaatcttgtgaagctcattggctattgtgca

SEQ ID NO: 232261 - DNA, 209 bp, Gossypium hirsutum
ccaggtagtgttaagctagggagtgggagaaccatatctggagtttcactctacaaagggcggaggttactgcaagcaaacaagcaatacccttttggttatatgggtagtaaactaagccaccctaattcaagttcattatgcttagagggaactttggatccacatgttgtttctgggaaaatcgtgatatgtgatcgaagaataaa

SEQ ID NO: 232262 - DNA, 433 bp, Gossypium hirsutum
cgcgtccgcggacgcgtgggggcttcctctctcaacagcgccgcctctttgcgtctcttcgtttcttcatcttcttcctcttcctccgccgccgctagactttgtctccgttccacttccctttctttctcttcttctctcaaatccctcgctttctctcctctttctcgccacaagaggggatcggctgtcagtatgtcgagtaccggagggtttagctctgtagccagtccgaaatgcgctgcttcggatcctgatcagttgaagagtgctagagaagatatcaaggagcttctcaaatccaaattctgccatcctattctggttcgtctaggggggcacgatgctgggacctacaacaagaacattgtggaatggccacgaagggggggggccaatggaagtcttaagttttgagtcgagctgaaacatg

SEQ ID NO: 232263 - DNA, 409 bp, Gossypium hirsutum
  unsure (1)..(409): unsure at all n locations
cccacgcgtccgctctgatgctgtgctcgatgcctgccttgcccaggaccctgacagcaaggttgcctgtgaaacatgcaccaagactaacatggtcatggtctttggagagattaccaccaaagccaacgtagactatgagaagattgttcgtgatacatgccgctccattggatttgtttctgatgatgttggtcttgatgctgacaattgcaaggtcttggttaacattgagcagcagagccctgatattgcccaaggtgtccacggacactttacaaagcgttncggaagagattggagccggtgaccagggtcatatgtttggttattgccactgttgaaacccctgaattcatgcctcttatccatgtccttgcaactaagctcggtgcacgtcttactgatg

SEQ ID NO: 232264 - DNA, 377 bp, Gossypium hirsutum
gaaaattcattttctttggactttctctgggatccgagtcctaggaaagatgcgtgagattcttcatattcaggcggggcagtgcggcaaccaaatcggtgccaagttttgggaggtggtttgcgccgagcacggcatatattcaacgggacgctatcaaggggacaatgatttgcaactggagcgcgttaacgtttactacaatgaaacgagttgcgggaggttcgttccacgagccgtccttattgacttggagcctggcactatggataggtgtaaatccggggccgacaggcagaatttcaagcctgacaactctgttttcggcagtccggtgcagggaataactggggcaaagggcatttcaccgaaggggc

SEQ ID NO: 232265 - DNA, 394 bp, Gossypium hirsutum
caaagctttccattcacactcggttcttcgtttttgacgagctaactcactcagtcagttactcgttctctctttggctcactcgctcgatctctctctagatttttccgattacaaatggaggatttcgatatcccggcggcggaagacatgatgaacgaagatatggatcttcccgacgacagtcccattctgaaagtcggagaagagaaggagatcggaaatcaaggcttgaagaagaagcttgttaaggaaggtgaaggttgggagtatcctgaaatcggagacgaagttgaagttcattataccggggacggtggtggatggaacacaagttgattcaagccgtgatagaggcactccttttaagtcactctcgggcaagacaagttat

SEQ ID NO: 232266 - DNA, 327 bp, Gossypium hirsutum
aaaagacatcaggactgataatcttggagccgggtggataaccgctatggctcacataggtcttcgggttaacttattgattgatttcccattgatgacgaatcacgtatgtgacatcgaacagaggcaatttgtaggatggaggcactgaatgtggatgagatagctgctggttttgatagctagcttgaccgcttagatactcacaaactttgccgaatccttgtccttgatcggaagacaagtgcgctgtacgtaggagtttgtattggctactatattgcatttgttggtgttcaagggagaagtggatgggaaaggatggac

SEQ ID NO: 232267 - DNA, 399 bp, Gossypium hirsutum
atccttttgaaactagggtttgggttggggcagtgctgtattttatatagtatataaggacatttgttctcttatttcgacaagcgccgagacagagcagagcagacagactagaaaagaagagaagatggagcaaacattcatcatgatcaagcctgatggggtccaaagaggcctggttggtgaaatcattggcagatttgagaagaaaggcttctatttgaaagggttgaagctcatcagtgtggatcgatcttttgccgagaagcactatgctgacctgtctgcaaagcccttctttaatgggctcgtagagtacattatcttcggtccggtccgtgctatgatttgggaaggtaagaatgttgttaccacaggtcgcaagattatcggagccac

SEQ ID NO: 232268 - DNA, 422 bp, Gossypium hirsutum
ccgcacttccctcggccccgaaggcatgaataagatggtaattaatcatttagacaagctctttgttaccaatgatgctgctactattgtcaatgagctcgaggttcaacatcctgcggccaagattttagttctagctggtaaggctcagcaagaggagatcggagatggcgctaacttgacgatttcttttgccggtgagcttctccaaaatgcagaggagcttattaggatgggcttgcaccccagtgagatcatcagtggatatactaaatccattagcaaggcaattgaggtgttgggggaacttgtggagaaagggtctgaaactatggatgttaagaataaagagcaagtgttactcgaatgaaagctgtgttgtagtaaacacatggacaggagacatattatgtcccttatag

SEQ ID NO: 232269 - DNA, 426 bp, Gossypium hirsutum
gttatctctgagggtgtcttaataaacgccttcgatttactttcggtttccatttacttctttatttctacgtttttgaatttttagtaagcgaaaatgagagagtgcatttcagttcacatcggtcaggctggtatccaagtcggaaatgcctgctgggagctttactgccttgaacatggaatccagcctgatggccagatgccaagtgacaagactgtcggaggaggtgatgatgcttttaacacctttttcagtgaaactggtgctggaaagcacgtccctcgtgctgtctttgtggatcttgagcctactgttattgatgaagtgaggactggtacttaccgtcagcttttccaccctgagcaactcatcagcggcaaggaagacgctgccaacaacttcgcccgtggccactacactatt

SEQ ID NO: 232270 - DNA, 346 bp, Gossypium hirsutum
gatttttctttcctttaaaaaaaaaacacctcggtttattaattggtcgtgtaaatatatcttgatacctacactgttaacaatctggtactcagagaatgcagaggcagacgcggtatacgacgaggactgccagtatggtaagagggaaacggagtttggaaggagatgaacaccagcacgcggagccaaaacgtgctgctttagctagtgagaatgatgaagctcttaaggtggacagcttgcacaaactttgttcatctttggaacccattcttcgtagagttgtaagtgaagaggtggaaagagctttggcaaaattagccccccctaggcttaatggaag

SEQ ID NO: 232271 - DNA, 348 bp, Gossypium hirsutum
cccacgcgtccggttttatgattttgaatatctgcatttaccttcgcttacttccccttttctactgggaacaagggtggttgaatattcgtgaatcccaagccacctaggtaactaccacctgtcacaaattctggcatcataaccggaaaattcgatgggaaacacttcctccatgctcactcagtatgacatcgaagaagtacaacaacactgtaacaacgccttttcgcagcaggagatcgtctctctatacgaaagattctgtcagttggatcgaaacggcggcggtttcgtctccggcgaggagtttttgtccgtgcctgagttcgctgttaatcctctctc

SEQ ID NO: 232272 - DNA, 419 bp, Gossypium hirsutum
gtttaggcttgtttaactgagcttttccagaaggtctgtgcacttaaaggaatagagcaggataaggttcgcatttgggattacttcaacaagagaaagtatgcacagttgtctgtttcaaacaaaaccctagaagaatcaaacttgcagatggatcaagatattcttctggagctagttgatggacatctatcgtcaaaaattggcatggattctacaggaaatgacctagctttggtttccttggaaccttcaagatcacccttgacaattgctgggggcccaaccttgtccaatggccactcaggttacagatcaaatctgtatccaggaagttccttaggctcaggattaacagatatggatgatggttttgatgcatgtaactctgctagaaaaagagagaaggggggcttggc

SEQ ID NO: 232273 - DNA, 381 bp, Gossypium hirsutum
cgttgaagcgaaagcttatctcttttcgtctctgaatctgatcaatcaacacctgaaaaggaaaacttacaaacaacaactactactagtctactacccagcactagaagcagctcgtagccagccatggatgaagagtacgatgtcatagttctaggaactggtctcaaggaatgcatcctcagcggtcttctttctgttgacggactcaaggttctgcatatggataggaatgattactatggaggagagtctacatcactcaacctcattcagctctggaagaagtttagaggaaatgataagcctcctgctcatttgggctctaacagagattataatgtggacatggtccctaagtttatgatggcaaatggcact

SEQ ID NO: 232274 - DNA, 318 bp, Gossypium hirsutum
attgttatctctgaaggtgtcttaataaacgccttcgatttaccttcgatttccatttacttctctattgctacgtttttgaatttttagtgagcgaaaatgagagagtgcatttcagtccacatcggtcaggctggtattcaagtcggaaatgcctgctgggaactttactgccttgaacatggaatccagcctgatggccagatgccaagtgacaagactgtcggaggaggtgatgatgcttttaacacctttttcagtgaaactggtgctggaaagcacgtccctcgtgctgtctttgtggatcttgagcctact

SEQ ID NO: 232275 - DNA, 321 bp, Gossypium hirsutum
gtgtactgtcttccccttttccatttctcgtaaacaaagtccataacattcgtctctcaaatcctttcctcttagatcatcaaatccattcctttttttcaccaaaacatgagggaaatcataagcattcatataggtcaagctggtattcaagtcggtaactcatgttgggagctttactgccttgaacatgaaatacaacccgatggaatgatgcccagtgacacctctgtaagtgtagcaaatgatgctttcaacactttctttagtgaaaactgttcaaggaaaacatgttcctaaaactgcgtttggggatctgga

SEQ ID NO: 232276 - DNA, 437 bp, Gossypium hirsutum
  unsure (1)..(437): unsure at all n locations
cccacgcgtccgtaaagttcttatttttatgtttttggtcattttctgtctgggatttccagcttttaagtgcagtctcggtttaattatgaaaactcaaacgaagaaaggaaaaatagggactttgattaattagaaaacgcatcttcttccccttcgctttcgactttcttttaggggttttaaacaaagaacacgagaatccacacggcaaattatggttgacagaagctatcaatgcaaaggtgtgctaatcttagcttatcagagttttggtgtactctttggtgacctaagtatttcaccactttatgtctttaaaagcacattctctggngaattgaagtattatcaatctgaagatgtcatctttggggccctatctttgattntttggactttgacacttcttttctttgtcaaacatgtcattattt

SEQ ID NO: 232277 - DNA, 373 bp, Gossypium hirsutum
cggacgcgtgggctcctctaaatatgttttgacggtgtccgcgatctcctcctctgctcagattatagagccttcgatttttctttgcttccttctgacttttaacgattcgcttcactgcctttcggatctatctataagcaccaatatgcgcttcagatcgcatagaaaattggcctgattaatacaatcacatgatctccaatcccatgcggatgccaagacttgcgtatattgccctcaagctaatcctgactgggcgtcgaattcctaccgaatcttcatgtgcctggagtgttactgtgaacaccttggtgtaggcgtacacatctcgatctaacgagctgctcctatggattcatggactgggatc

SEQ ID NO: 232278 - DNA, 463 bp, Gossypium hirsutum
cgccacgcgtcgaggatactgattccgaggaagaactaaagaggctttcagggtgtttgacaaggaccagaatggtttcatatctgctgctgagcttcgccatgtcatgacaaatctcggtgagaagcttacagatgaggaagttgatgagatgatccgtgaagctgatgttgatggtgatgggcagatcaactatgaggagttcgtcaaagtcatgatggccaagtaaggataaaaaatgggtaaaaaggggaacagggcagataagttggctaagatctctatttatatcaatagggcatctatgtttttatgttactaccttttgttggattgttgactgtttctttgtacgcattatttcggggactagaccctaataattacctggttgctctggtttttggtcattaggtctgggttggtagtgtcttaattatctttcttaaatttgggggttttc

SEQ ID NO: 232279 - DNA, 400 bp, Gossypium hirsutum
cgattttctatttagttttctcttcctccaattaagatgcagatcttcgttaagaccctgaccggcaagaccatcaccctcgaagtcgagagttccgacacgatcgacaacgttaaggcgaaaatccaagacaaggaagggatcccaccagaccaacaacgtctcatcttcgccggaaaacagctcgaagatggccggaccttggccgattacaacatccagaaggagtccaccctccatctcgtcctccgtctacgcggtggcatgcagatcttcgtcaaaaccctgaccggcaagaccataactttggaagtcgaaagctctgacaccattgacaacgtcaaggccaagaaccaagacaaggaatgcattccaccaaaccagcaaaggctcatctttg

SEQ ID NO: 232280 - DNA, 380 bp, Gossypium hirsutum
ctttttgttacctcgatttcaagtgaatcagaatgggtaaggaaaagactcacattaacattgtggttatcggccacgtcgattctgggaaatcaaccaccactggccacctgatttacaagcttggtggtattgacaagcgtgtgattgaaaggttcgagaaagaagctgctgagatgaacaagaggtcattcaagtatgcttgggtgcttgacaagctcaaggctgagcgtgagcgtggtatcaccattgatattgccttgtggaaatttgagaccacgaaatactactgcactgtgattgatgcacctggacaccgtgactttatcaagaatatgattactggtacgtcacaggctgactgtgctgtttgattattg

SEQ ID NO: 232281 - DNA, 336 bp, Gossypium hirsutum
gttaaacccctccattcattatttacgttaagttcaaagaaatggctgatcgtgtgatcactcgcgtccacagtctccgtgagcgtttggatgagacccttcttgcacaggaacgagattttggccttgctctcaaggatcgagggcaaaggaaaaggaattctgcaacaccatcaaattattctagagtttgaagctatccctgaagagaacagaaagaagctcgctaatggtgcattttttgaagtattgaaggctagtcaagaagcgatcgtgttgcctccatgggttgcacttgctgttcgtccaaggcctggtgttttggagtacattaga

SEQ ID NO: 232282 - DNA, 431 bp, Gossypium hirsutum
cttttattatttttgctctttttttgagatctgtgtgtttcttcaagcttcttgaaagcgtcattttggttgagaactggaaaccgctgctgtgatggctccaccaattgagactacagtcaagtcctctgactctcactgcgctccacatcctcctttgaatgaaaggatcctttcgtcaatgaccaggaggtccgtcgctgctcacccatggcatgatcttgaaattggacctggagctcctacggttttcaactgcgtgattgaaattgggaaagggagcaaggtgaaatatgaacttgacaagaaaactggtttgatcaaggttgatcgtgtgctttattcatcagttgtgtatcctcacaactatggtttcatccctcgtactctttgtgaagacaatgatcccttggatgtcctgaatattatgc

SEQ ID NO: 232283 - DNA, 323 bp, Gossypium hirsutum
cggacgcgtgggcccattaccaattcccttcaatttctccattttctctgaaatccaatggatccagtaagcagttggggcaattcctccctcgactccgtcgatcccgaaatccatgacctcatcgagaaagagaagcgtcgccaatgccgcggcatcgagctcatcgcttccgagaacttcacttccttcgccgtcatcgaagccctcggcagtgccctcaccaacaaatactccgagggcatgcctggtaaccgttactacggtggaaacgaattcattgatgagatcgagaacctctgcagatctcgcgctatccaggc

SEQ ID NO: 232284 - DNA, 343 bp, Gossypium hirsutum
atcaaaagatgatgcttgaagaaactcgtcaactcaatccgacggtcctcgttccgccttggccttatctaggcgatgatctagcagcggagaacaacttcagtgataacggcaaccccttttacctccaggaagcgttagcagcgctgcaatgttacttgccgtccgacgagccgggtttcgagtcggattccgagatttcgggcctttacaatccgggttctccagtcgatgcttactcgtgcgatcattttcggatgtttgagttcaaagtcccgcggtgcgggcgtggcccgtcgcatgattggaccgagtgtccatacgctcatcccggcgagaaagc

SEQ ID NO: 232285 - DNA, 474 bp, Gossypium hirsutum
ctgcactaaacgactgactagctggaacgcctgcacgcccggggtccgggtccgggatcgacgcgcacgcgctccaggcgccacttggatactgaccttcgaaccttgaagctcatgtgagtctgtcgtgaattcaaggctaacaagatctctgacgatgattatcattaaagccattaaggtggaaattagcactgttgctgaccttcaagaagagctggacattgatctcttggttcatggagagcctgagagaaacgatatggttgagtacttaggtgagcagttgtctgcccttgcatccactgttaatggatgggtgcaatcttactgatctcgatgcgtcaagccagcaatcatttactgggatgtcagccgccccaagccaatgactgtggaacggtcatctaccgcactaagcatgactgcacgcccaatgaaggtaatgcatactgcgcctgataccatgcttaa

SEQ ID NO: 232286 - DNA, 255 bp, Gossypium hirsutum
tgaactttgccttcaaggattacttcaagaggcttttcaacttcaagaaagacagagatggttactggaaatggtttgctgtgaacttggcatcaggtggtgcagctggtgccttttccttgctctttgtctactccgtggattatgctcgaactctgtctggcaaatgatgctaaggctgcaaagaagggaggagagagacaattcaacgggcttgttgatgtctacaggaaaactcctatatccgatggtatt

SEQ ID NO: 232287 - DNA, 330 bp, Gossypium hirsutum
gataatggaactggaatggtgaaggccggttttgctggtgatgatgctccaagggcagtttttcccagtattgttggtcgtccccggcacactggtgttatggttgggatgggtcagaaggatgcctatgtaggagatgaagcacaatctaaaagaggtatccttactttgaaatatcctattgagcatggtattgtgagcaactgggatgatatggaaaagatttggcatcatacattctacaacgaactccgtgttgctcctgaggagcacccttgtgcttctcacggaagcacctcttaaccccaaggccaatagagaaaagatgac

SEQ ID NO: 232288 - DNA, 453 bp, Gossypium hirsutum
ggaaaggggacatgcttgctgttggtgtcactgagaaagacatgaccaaggatgaaaactccaagtttcaaaactcaattttgaagaacttagacaggctgttaggtggtcttttagctgaggtctcctccgaggaggatttcacagggaaatctggccaatcaacagttcttagacttcctggccttggctcgaaacgggttggtttgattggtcttggacaatcagcttcatcaccatctgctttccgtggactcggcgaggctgttgctgcagcagcaaagactgctcaagccaatagcgtggctgtggtccttgcctcatcagaaggcctctcaaatgagtccaagcttgggtttgcttcagcaatagcatctggaacggtgttgggattacacgaagataatagatacaagtcagagtcaaagaaaccacagcttaaatctttggata

SEQ ID NO: 232289 - DNA, 313 bp, Gossypium hirsutum
  unsure (1)..(313): unsure at all n locations
cttagcaagaacattgtttggttaccatgagaagggatgtgtgagcaggttcaataccgacgctcagcaattcaacaaaaagctcaacgcagcagcaaccaatctccagaagcaacaccctgatctcaagattgtggtttttgacatttacaaggcccttcttgatgttgttaataccccttcaaactatggtttcgtagaagcgacgagaggctgctgtggcacagggactgtatagacaactgaattcttatgcaatccgcatacactgngaacttgtcccaatgcctcccagtatgtgttttgggacagt

SEQ ID NO: 232290 - DNA, 296 bp, Gossypium hirsutum
  unsure (1)..(296): unsure at all n locations
cccacgcgtccgggagagatccctggggagggccgctggagataaacgcggctgattccgccactgatgatgacaggagtaggaatctgcaagacctggacagggctgcgctctctcgccctttggacgagacgcagcagagctggctgctnggccccagcgagcagaagaagaagaagaagtacgttgatctcgggtgcatcattgtcagccgcaagatctttgtctggacggttgggaccttgggtcgctcagccgtccttgccggataatcacctaatccgcaagaccgtcca

SEQ ID NO: 232291 - DNA, 432 bp, Gossypium hirsutum
gagagaacgaatcaaattcaaacggagacagtagcagaataagaacaacacagctgaactgaaagaattttgaaagaaagaaaaagaataaaaaataggttcgtgtgattctccttctcttcgacgactgaaaatgtccggtcgccacgaaaaagagaaaggcgtcaacgtgcaagtcctccttcgttgcaggccgtttagcgaagaggagttacggaataatgcgccgcaagtggtgaagtgtaatgagtaccaacgagaagtcgccgtttctcagaacatcgccggaaaacattttgatagagttttcactttcgataaggtatttgggccattagcacatcaaaaagatctatatgagcaagcagtggtttcaattgtaaatgaagttttagaagggtttaactgtactaattttgctatggttaaact

SEQ ID NO: 232292 - DNA, 400 bp, Gossypium hirsutum
cactagtagaaggtttagttttacaaacatggctagttccggtgtccttaagttggtttccatgattctcatggtgtgcatgacgatgatgagtgcacccaaggcagccaaagccgccatcacgtgcagcgacgtggtgaaccacttgatcccgtgcttgtcctacgtacaaaacggcggtacacccgctgctgcatgctgcagtggggtaaaagcactctacggcgaggttcagacctccccggaccgccaaaacgtgtgcaagtgcatcaaatcggcggtgaacggaattccgtacaccagcaataacctcaatctcgcagccggcctacctgctaaatgtggtctccaactcccttacagcatcagcccctccactgactgcaacaaggtgcagtga

SEQ ID NO: 232293 - DNA, 323 bp, Gossypium hirsutum
gaaatatcaagagaaagagattgcatttgagtccgaattatccttcttatcaaggcttcaccacaagcatttggttagacttgttggatattgtgaagaaatggatgaaaggcttttagtttacgaatacatgaagaatggagcactttacgaccacttacatgataagaacaacatcgagaaatccagcagtttacttaattcctggaaaatgaggatcaaaatcgcactcgacgcggctcgagggatcgaataccttcacaactatgcagttccccctataattcatagagatataaagtcttcaacatatactcgatgcg

SEQ ID NO: 232294 - DNA, 454 bp, Gossypium hirsutum
aacgccttctttcttcttcttcttattcctttattgctttttagaatttttcttaatcgaaaatgagagagtgcatttcgatccacatcggtcaggccggtatccaggtcggaaacgcttgctgggagctttactgtctcgagcatggaatccagcctgatggtcagatgccaagtgacaaaactgtcggaggaggtgatgatgcttttaacacctttttcagtgaaactggtgctgggaagcacgtccttcgtgccgtcttcgtggatcttgaacccactgttattgatgaagtgagaactggtgcttaccgccagctcttccacccagaacaactcatcagcggcaaggaagacgcagctaacaactttgcccgtggtcactacaccattggcaaggagattgtcgacctctgtttggaccgcatcaggaaacttgctgataactgcactgg

SEQ ID NO: 232295 - DNA, 449 bp, Gossypium hirsutum
gtttcgccattggttcagcagcccttgtgtcccttgccctctttggtgcctttgtgagccgtgctgctatttcaacagttgatgtattgacccctaaagtttttattgggttgcttgtcggggcaatgcttccttactggttctctgctatgaccatgaagagtgtgggaagtgctgctttgaagatggttgaggaagtgcgtcggcaatttaacacgatcccaggtctcatggagggcactgctaagccagactatgctacctgtgttaagatctctactgatgcttccatcaaagaaatgatcccacctggtgcgctagttatgctcacaccccttattgttgggatcttttttggtgttgaaactctctctggtgtcctcgctggatccctcgtctctggcgtccagattgctatctccgcatcgaacacagggggtgcttgggat

SEQ ID NO: 232296 - DNA, 396 bp, Gossypium hirsutum
gagggcatgggatgtggatgatgacactgccacggccctaattggtaaccaaaagggcaaaggcattgtcaagcttgatgccaatttcaagatgcctgaacccaagcccgatcaccgcaaaggaatggccttgaactgtgaagaagctccgttggacaccgacatcaagaatgccggcaacgtcgtgctcttgaacactaaaaacctccctttggtcggccaggtgggtatgggggccgatctcgtcaggctggaaggtaatgcaatgtgctcccctggcttttcttgtgattcagccttgcaggttacgtacatagtcaacggcagtggtcgtctccaagtggtgggcgtcgacggcaaaagggtcctggaaaccattgtgaaagccggcaatct

SEQ ID NO: 232297 - DNA, 435 bp, Gossypium hirsutum
ctcaacgctctccttctgtttctggtcaagccaatctcaaaagactccccttttagctcacagctcctctcttgagtactataatgggtaaggagaaggttcacatcaacattgtggtcattggccatgtcgactctgggaagtctacaaccactggtcatttgatctacaagcttggtggtattgacaagcgtgtgattgagaggtttgagaaggaggctgctgagatgaacaaaaggtcatttaagtatgcatgggtgcttgacaagcttaaggccgagcgtgaacgtggtattaccatcgatattgccctctggaagtttgagactaccaaatactactgtactgtcattgatgcccctggacatcgtgacttcatcaagaacatgattactggtacctcacaggctgactgcgctgttctcattatcgact

SEQ ID NO: 232298 - DNA, 208 bp, Gossypium hirsutum
ctggaacttttgatgttaagaccaataccggaggggcattcggaaccatgaagcatcctgctgagctcgcacatgctgctaacaacggcctagatatagtcgtcagacttctcgagccgatcaaggagcattaccctaaccttacctactctgacttctattagcttgctggtgtcgttgtcgtagagattactgttggacctgatat

SEQ ID NO: 232299 - DNA, 403 bp, Gossypium hirsutum
  unsure (1)..(403): unsure at all n locations
ctgtttttcacattgataatcttctcttctcgatctatccgcttcgggtttgagagagaagggataaagaatatagagaaaaagagggtaaaatggcgcatagagtagatcacgagtacgattaccttttcaagatcgtgttgatcggcgattctggagttggaaaaacgaatattctctctaggttcaccagaaacgagttttgtttggaatctaaatccactatcggcgtcgagttcgctactagaaccctccaggtagagggaaagactgtcaaggcacagatttgggatacggcaggtcaggagagatatcgagccatcaccagtgcgtactacagnaggggctgtggtgcacttatggtctatgacataacgaagaggcanacctttgataatgttca

SEQ ID NO: 232300 - DNA, 418 bp, Gossypium hirsutum
cccacgcgtccgctagttacaacagccatcccttcctctgtctcacaataatttaagtaaaagttttctttttcaaactctctctctctaatatatagatttccatcttctgtactttaaattctgtctcaaaagataagttccaggcaaggtgtttgattcattgttgaaaagagatgaggggtgatgctcttgtagccattgctgctacaattggtaactttttgcagggatgggataatgctaccattgctggagcaattgtgtacattaagaatgacctcgatctaggaactagcgttgaaggtctagtggtggctatgtcactgataggagcaacagctattacaacatgctcaggagctatatcagattggcttggtcggcgtccaatgctgataatgtcttcaatgcttta

SEQ ID NO: 232301 - DNA, 416 bp, Gossypium hirsutum
gaccaacaccatcatcaacgacaaggacgaccaagaaactgttcccaagatcataactttcttgtcttctttgctgcaaagagtggcagagtcgaatgatcattgccggttgtttcagtcgcagaagatctcagtttttcatggtcttaccagacctactatttccatcaaaagctatctcgagaggatctttaagtatgcaaattgcagcccatcatgtttcgtggttgcctatgtttatctcgatcgcttcgtgcagatgcaaccgtctttgcctatcaattcttacaatgtgcataggttgctaataaccagtgttttggtttctgccaaattcatggatgacatgtattacaacaatgcctactatgccaaagtgggaggaatcagcacggtagagatgaacctttttgaag

SEQ ID NO: 232302 - DNA, 445 bp, Gossypium hirsutum
gatcaataaagattgcagattttggagttgcacgtattgaggtgcagactgagggcatgactccagagactgggacataccgttggatggctccagagatgatacagcatagaccctacacgcaaaaagtagacgtgtatagttttggaatagtcctttgggagctcatcactggcttgcttcctttccagaacatgactgcagttcaggcagcatttgctgtggtgaacaagggtgtaaggccagttattccaaacgattgcctcccagtgctgcgtgagatcatgacacgttgctgggacacaaacccagaagttcgtcctcccttcactgacattgtgaagatgcttgaaattgctgaaacggatatactgacaaccgtgcgtaaagcccggttcaggtgttgcatgactcaaccaatgacaattgactgatccagaatgga

SEQ ID NO: 232303 - DNA, 445 bp, Gossypium hirsutum
  unsure (1)..(445): unsure at all n locations
cggacgcgtgggcggacgcgtgggctcctccttttgtaccaccaccgccaatttcttctccaagtgggaatagtgtcactggtgcaatagctggaggagttgcagcaggtgctgccttactgtttgctgctcctgcaattgcatttgcgtggtggcgtcggcggaaacctcaagaattnttctctgatgtacctgcggaagaggacccagaagttcatcttggacagctgaagaggttttcattacgagaactacaagttgccactgacagttttagccataaaaatattctgggtagaggtggatttgtaaggtttacaaaggaaggttagctgacggttcactggtggctgttaaaagattgaaagaagagcgtacacctggtggngagttacagtttcaacagaggtagagatgatcagcatggctgttcatcgaaatctcc

SEQ ID NO: 232304 - DNA, 340 bp, Gossypium hirsutum
gacgggaggcgtccaggcgacgcgaccgaccgcattatttattattattatgacttactttgttttttcaagatcataattatcttggattgtttgattgcattagtgattacatcgaatgatcattgatgcatgtcgaaaccgcctgctgctagctttactgtgttgagcatggacttaatactgatgttcagatgtctagtgacaggattgttaaatgtgctgattatgcttcatacacctttttcagtgaaactggtgctgggaagcacgtccctcgtgccgtttttggggatcttgaacccactggtattgttgaagtgagaacttgtgcttaccg

SEQ ID NO: 232305 - DNA, 331 bp, Gossypium hirsutum
tccacgcgttcggatatctctgagggtgtcttaataaacgccttcgatttactttcggtttctatttacttattatatttctactgttttaaaatattagtaatcgtaatagtgagagtgcattttagatcacatatggcatgctggtatacaagatagaaatgcctgctgagagctttaccgtcttgaacatggaatccagtctgatggtcatatgccaagtgacatgactgttcgaggtggagatgatgcttttaacaaccttttcagtgtaactggtgctggaagtacgatcttattgctgtctttgaggatctaagcctattgttat

SEQ ID NO: 232306 - DNA, 355 bp, Gossypium hirsutum
atcgatctcccgagagtgaagaagatacagagtacaaactagatcgagggcttctgataaaagcttcaaattgatattggctgggtagattgctttttggtaaccaaaaatggtgtacttgggggttcaattgtaagcaaatatggaaaagggcttttattcaagccagttgcggacatgactcgcataagaaatgaagggtttcttggttctttttctaagatggggggaacaggaaagccacacacatattttgagactgaaaaagtgccattttgttattaacccataaaagctctttatttgcttcttggtacaaacaaacagagccacattcttggagaattggagactt

SEQ ID NO: 232307 - DNA, 353 bp, Gossypium hirsutum
ccacaacccccaagtactcaaaggcaaggtatgatgaaattgttaaggaagtttcttcctacctgaagaaggttggttacaaccctgagaagattccattcgtccccatctctggttttgagggtgacaacatgattgagaggtccaccaacctcgattggtacaagggtccaaccctccttgaggctcttgaccagatcaatgagcccaagagaccctctgacaagccccttcgtctcccacttcaggatgtctacaagatcgggggtattggaactgtccctgtgggtcgtgttgaaaccggtacccttaagcctggaatggttgttacaattcggaccttctgggattga

SEQ ID NO: 232308 - DNA, 365 bp, Gossypium hirsutum
  unsure (1)..(365): unsure at all n locations
caccgttcttcggcttcctcggcgccgctgctgctctcgtcttctcctgtatgggagctgcatatgggacggctaagagcggtgttggtgtggcttcaatgggtgtgatgaggcctgaattggtgatgaaatctattgtaccagttgttatggctggtgttttgggtatttatggcttgattatcgctgtcattattagtactgggatcaatcctaaggccaaatcgtattaccttttcgatggttacgcncatctttcttctggtcttgcttgtggccttgctgggctttctgcttggatggcaatttggaatcgtcggcgatgctggtgtcagaagccaacgcacagcaactccaagcttttt

SEQ ID NO: 232309 - DNA, 329 bp, Gossypium hirsutum
  unsure (1)..(329): unsure at all n locations
caaccatcaaggatcatccgcgaaatttcactctatggcacccataaagggcattctttccttgcaaagggcatctttgttaagagcttgcggtgaaaggtggaaactaggcactagatcatttagtactcaaggagcaacaactgctgatgctccacaggcacctnctnctcctccaccgccttgaaaaacccatnttggtggtctaaaagatgaagaccgtattttcaccaacttatatgggttgcatgacccttttctcaaaggtgccatgaaacgtggtgactggtatagaaccaaagatttaatactcaagggtgctgattgga

SEQ ID NO: 232310 - DNA, 355 bp, Gossypium hirsutum
  unsure (1)..(355): unsure at all n locations
atcgatctcccgagagtgaagaagatacagagtacaaactagatcgaggtcttctgataaaagcttcaaattgatattgtctgggtagattgcttcttggtaaccaagatggttgtacttgcggcttcaattgtaagcaagtctggaaaagtgcttctctccaggcagtttgtggacatgactcgcataagaattgaaggtcttcttgctngctttcctaagttggtgggaacagganagcaacacacatatgttgagactgagaatgtgcgatatgtttatcaaccaatagaagctctttatttgcttttggtacaaacaaacagagcaacattctttgaaaatttggagactt

SEQ ID NO: 232311 - DNA, 381 bp, Gossypium hirsutum
gtatcgatttttactttaccattacccgtgccaggtttgaagaacttaacatggatctattcaggaagtgtatggaaccagttgagaaatgtttgagggatgctaagatggacaagagcactgtccatgatgatgttcttgttggtggttccactagaattccaaaggtccaacaacttttacaagatttcttcaatgggaaggagctctgctagagcatcaaccctgatgaggcctgtgcatacggtgctgcagtccaagcttgctatattgagtggtgaaagtaatgagaaagtgcaagattctttgctcttggatgtcaccccattgtctcttcggtttggaaaccgcttgttggtgttaatgaccgtttttgatttc

SEQ ID NO: 232312 - DNA, 368 bp, Gossypium hirsutum
ggaaaaccctagaaaccagcggctctttcttcaattttcgcttctttaggcggcggtaactcagaggtcgttttcttcttcttcacaagacacaatggcagatggtcatgaaactgacaagaacatcgagatttggaaaataaaaaagctaatcaaggcactagaatctgccaggggaaatgggaccagcatgatatctctcattatgcctcctcgtgatcaaatatcccgtgtcacaaagatgttaggtgatgaatttggaactgcatcgaacatcaaaagtagggtcaaccggcagtctgtgttggctgccattacttctgctcaacagagggtgaagctctataataagggtccccccaacgggc

SEQ ID NO: 232313 - DNA, 413 bp, Gossypium hirsutum
tttcgatccacatcggtcaggccggtatccaggtcggaaacgcttgctgggagctttactgtctcgagcatggaatccagcctgatggtcagatgccaagtgacaaaactgtcggaggaggtgatgatgcttttaacacctttttcagtgaaactggtgctgggaagcacgtccctcgtgccgtcttcgtggatcttgaacccactgttattgatgaagtgagaactggtgcttaccgccagctcttccacccagaacaactcatcagcggcaaggaagacgcagctaacaactttgcccgtggtcactacaccattggcaaggagattgtcgacctctgtttggaccgcatcaggaaacttgctgataactgcactggtcttcaaggattccttggtttcaacgctgttggt

SEQ ID NO: 232314 - DNA, 413 bp, Gossypium hirsutum
  unsure (1)..(413): unsure at all n locations
cccacgcgtccgccgtgagcatgctctccttgccttcacccttggtgtcaagcaaatgatttgctgctgcaacaagatggatgccacaacccccaagtactcaaaggcaaggtatgatgaaattgttaaggaagtttcttcttacctgaagaaggttggttacaaccctgagaagattccattcgtccccatctctggttttgagggtgacaacatgattgagaggtccaccaacctcgattggtacaagggtccaaccctccttgaggctcttgaccagatcaatgagcccaagagaccctctgacaagcccctccgtctcccacttcangatgtctacaagattggtggtattggaactgtcccagtgggtcgtgttgaaactggaatcctcaagcctggaatggttgtac

SEQ ID NO: 232315 - DNA, 433 bp, Gossypium hirsutum
  unsure (1)..(433): unsure at all n locations
ctattcttcacaaaaaagaaaagaaaaattacagtgaaaatggcaacccttaaagttccagctcatgtacctgccccttctgaggatgctgagcaacttcgtaaagcttttgaaggatggggtacaaatgagcaattgattatcgacattttggctcacaggaatgcagctcagcgcaatttgattcgtaaaacttatcgtgaagcttatggggaagatctccttaagtctttggatgaggaactttcaagtgactttgagcgagctgtggtgctgtttactttggaccctgcagagcgtgatgcatttctggctcatgaagctacaaagaggttcacatcaagccattgggttctcatggaaatngcttgcactaggtcttcacatgaactgttcaatgtgaggaaggcgtatcacgatctttacaagaaat

SEQ ID NO: 232316 - DNA, 428 bp, Gossypium hirsutum
ctgataactgcactggtcttcaaggattccttgttttcaacgctgttggtggaggtaccggatcaggtcttggttctctccttttggagcgtttgtctgtcgattatggcaagaaatccaagttgggtttcactgtctacccatctcctcaggtctccacttctgttgttgagccttacaacagtgttctctcaactcactcccttttggagcacactgatgtggctgttctccttgacaatgaagctatctacgacatttgcaggcgttctcttgacattgagcggcccacctacaccaatcttaaccgtcttgtctcccaggtcatttcctccttgactgcctcactgaggtttgatggtgccttgaatgtcgatgtgactgaattccaaaccaacttggttccctacccaagaatccacttcatg

SEQ ID NO: 232317 - DNA, 353 bp, Gossypium hirsutum
atttggctactattcccatcaccggaactggtattaaccctgctagaagcttcggcgccgccgttatttacaacaacgacaaggcttgggatgaccaatggatattctgggttggaccaatggtgggagcacttgcggcggcagcatatcaccagtacatccttagagcggcggctattaaggctttgggatctttccggagcaaccccagcaattaaaagctaaaaagagaagaaaaccacaatatgtttgtctcattgtgtttataatgtttcttcattgttggttcctgtgtttgtattgtattatgattgatgattattaattcagaccttcttatttataattcttta

SEQ ID NO: 232318 - DNA, 349 bp, Gossypium hirsutum
ggaaaaccctagaaaccagcggctctttcttcaattttcgcttctttaggcggcggtaactcagaggtcgttttcttcttcttcacaagacacaatggcagatggtcatgaaactgacaagaacatcgagatttggaaaataaaaaagctaatcaaggcactagaatctgccaggggaaatgggaccagcatgatatctctcattatgcctcctcgtgatcaaatatcccgtgtcacaaagatgttaggtgatgaatttggaactgcatcgaacatcaaaagtagggtcaaccgtcagtctgtgttggctgccattacttctgctcaacagaggttgaagctctataat

SEQ ID NO: 232319 - DNA, 383 bp, Gossypium hirsutum
gttcctcaatctctctaatcctcgctttcttccccatcaaacacaccttcgattttcccaaggttgtagaagatggcagaaggtgaggatattcagccacttgtttgtgacaatggaactggaatggttaaggctggatttgctggggatgatgctccccgagccgtattccctagcatcgttggtcggccacgtcacaccggtgtgatggttggcatgggccagaaagatgcatatgttggtgatgaagctcaatcaaagagaggtattttgactttgaaataccctattgagcatggtattgtgagcaactgtgatgatatggaaaagatttggcatcataccttttataatgagcttcgtgttgccccggaagagcaccc

SEQ ID NO: 232320 - DNA, 426 bp, Gossypium hirsutum
cggacgcgtgggttgtcgtacacgttataatggtgatgcagaccagcatcaacgtcgcaaaaagttcacttttcctgcccgtctattatgtggggattgttttgaggtgcgtcttgataaagttttggcaaatgatgctccttttgatatctgcagttgccagtttgcaatgcattattcctggtctacagaggcacgtgcacgtctggcgctggctaatatatcagctttacttcgtccgggaggcacattcatcgggacgatgccagatgccaatgtgataatcaaaaagcttcgagaagctgaaggaatgacttttggcaacagcgtttactggatacaatttgatgaagaattttccgataaaaaaattaaatcttcaagccccttggtatcaagtacaagtttcacttaaaagatggctgt

SEQ ID NO: 232321 - DNA, 399 bp, Gossypium hirsutum
gaggaatttaggtgatgaaaagccagcaggagaagaggatgctagagatgctaacaaggagagtgcttcaaacgagcctgaagaaaaagagcccgaggataaggagatgactcttgaggagtatgagaaggtgctggaagagaagagaaaggctctgcaggctctcaagatcgaggaaagaaaagtagatgccaaggagtttgaatctatgcagcagctttcaaacaagaagagtaatgatgaggtcttcatcaaattgggatctgataaagataagagaaaagaggcttatgagaaagaagagagagcaaaaaagtctgtcagcattaatgaatttctgaagccagctgaaggggagaggtactataatccaagtggacgtgggcgcggtcgtgggcg

SEQ ID NO: 232322 - DNA, 418 bp, Gossypium hirsutum
ccctgcttatacactacttggaaagctggacgcctgctgaccgcccggtttcgcgggacgccaccgacgcgcgcttacgaatgcacagatcaaaacgctgactgggatacgaacatggtgtccttcgttcagatccggctcacagaattcattctgagccgatcgatcacttcaaccgtcttaccgattctcttatccctttagtcttgaacaagatcggtgacgttactgctctcggccgatgctgcgacggatagcgtcgataccgcaccctagctcctcaagtcatgaacgtcctacatcggatcaactgtgttatctctgacgacgattgttccccttcttcgtgttcctacgatgagatacgcgcgcgcggtccgatttctaacatcgttacgatccttcttggaggcattgt

SEQ ID NO: 232323 - DNA, 450 bp, Gossypium hirsutum
  unsure (1)..(450): unsure at all n locations
cctgtatcatgctctgattatgcatgcatgtttagcatatggggttccgagaaacgttaacaagctattttccttaatgcagaaggcttcctatactgttggaggacaatcagtgagtgcagtagacattgaatgcactgttctaaaaatgaaccctgctacttatcatccacaaattgctgcagctgttgcacttcaaaaattcaactcttctaacgagcagaaaaagtatacaattgatcatgctgagcctcttctatattttgctttaagttgtgggctacattcttcgccggcggtgaggattttcagccctcaaaatgtgaatgagttgctaaaaaggtcaatgaaagattacattcaggcaactgttggtataagtaacaaagggaaactactggtacctaaatngctgcattgtttgccaaaggagttatcgaagactcactt

SEQ ID NO: 232324 - DNA, 449 bp, Gossypium hirsutum
ctgaaacacaaatctcgctttcggaaaagcctcaaatggcagaccaaccgcagatttatgaactcaacaatggaaccgtggttgttaagattaccaactatggctgcactatcacctcattgtctgttcctgacaaaaacggtaaattagccgatgtcgtcctgggattcgacactgtcgaaccgtacgtgaaaggtgcttcaccttattttggatgcattgtgggaagggttgcaaacaggataaaaaatggcaagtttactcttaatggaacggggtactctttgccaatcaacaagcctccaaacagtctccacggtggattcaagggttttgacaagagaatatgggaggtagcagaatataagaaaggcgacaaaccctccattacttttaaatatcgcagcagcgatggtgaggagggttaccccggtgatgtttctgtgact

SEQ ID NO: 232325 - DNA, 405 bp, Gossypium hirsutum
ctgattttgctctgtcatgatttgaatttttgttcaatattccttttactttccttcaaatctctccaatctccaccgctacttacaccacttcggccaccgccgcgaatttccgatttataatgtgtatgtattaattggtacatagaacgatttgggaatatttaagataaggttttcgatttatcttgatttatttgtaaaggaaaagggaaaaaggaaaagaaaataaaagatggacaagtacgagctggtgaaagacataggatctgggaactcctgcgtagcgaggttgatgcgtaacaaagaaaccaaagaactcgtcaccatgtaatatatcgaccgtggacaaaagattgatgagaatgtggcaagggagattataaatcatatatcactacgtca

SEQ ID NO: 232326 - DNA, 387 bp, Gossypium hirsutum
gaaggagaggaaggtgaaactgctactgaggaagtgaagaagagcaaccatgtcttgaggaagctggagaaacggcagcagagtcgcacacttgactcccatattgaggagcaatttggtagtggtcgtttactggcttgcatctcttcacggcctggtcaatgtggccgtgctgatggatatatcttggagggcaaagagctggagttttacatgaagaagatacagagaaagaaggggaagggagctgcctaaaattttgttgcttttaagtatttcattattgagatcaaaatgtcctttttttttttgccttactttcaccatttgagaacatttgaaattgtgttagttttgagatttttttttgtttgaatgttaattagt

SEQ ID NO: 232327 - DNA, 437 bp, Gossypium hirsutum
  unsure (1)..(437): unsure at all n locations
gcgttcaattcctcatttcaagggagagagtgtatcagtgtttcttgccctcttttacttaatttctctccgccatggctctctccgtcgagaaaaccgccgccggccgtgagtacaaggtcaaagacatgtctcaggctgacttcggtcgtctcgagatcgagttagctgaggttgaaatgcctggtttaatggcttgtagaaccgagttcggccctgcccaacctttcaaaggagccaaaattactggttctcttcacatgaccatccaaaccgccgttcttattgaaacccttaccgccctcggagctgaagtccgttggtgctcttgcaacattatctctacccaagaccacgctgccgctgccatcgctcgtgactccgccgctgntttcgctcggaaggggagaccctccagaatactggggtgtactgag

SEQ ID NO: 232328 - DNA, 378 bp, Gossypium hirsutum
attgttatctctgaaggtgtattaataaacgccttcaatttaccttcaatttccatttacttctctattgctacgtctttgaatttctagtgagcgaaaatgagagagtgcatttcaggccacatcggtcaggctggtattcaagtcggaaatgcctgctgggaactctactgccttgaacatggaatccagcctgatggccagatgccaagtgacaagactgtccgaggaggtgatgacgcttttaacacctttttcagagaaactggtgctggaaagcacgtgcctcgtgctgactttgtagatcttgagcctactgttattgatgaactgaggactggtacttaccgacagcttttccaccctgagcaactcatc

SEQ ID NO: 232329 - DNA, 419 bp, Gossypium hirsutum
atttgacaaacaatggccggaatcggacctttaacccaagactgggaacccgttgttattcgtaaaaaagccccaaccgccgccgccaagaaggatgagaaagtcgtaaacgccgctcgtcgtgctggtgccgagatcgaatccgtcaaaaaatcaaatgctgggacgaacagggccgcatcaagtagtacatctctgaacacaaggaagcttgatgaagaaactgaaaatcttgctcatgatcgagtgccaaccgaactgaagaaagccatcatgcatgctcgaatggaaaagaaacttacccaagcacaacttgctcagttgatcaatgagaaacctcagatcatacaagagtacgaatctggaaaagccattcctaaccaacagataatcggtaaactcgagagggctcttggtgc

SEQ ID NO: 232330 - DNA, 446 bp, Gossypium hirsutum
  unsure (1)..(446): unsure at all n locations
agctgctgttctctctctctctctttcccatagtttcacccatcttttaatccatcgctcacaaaattatgggtttgaaggaggaattcgaggagcatgccgagaaagttaagaccctcccggccgccccttcgaatgatgacatgctcattctctatggactgtacaagcaagctactgttggaccagtgaataccagccgtcctggaatgttcaacatgagggaaaagtacaagtgggatgcatggaaggctgttgaagggaaatcaaaggaggaagcaatgggggattatatcaccaaagtaaaacaactgtttgaggctgctggaagttcttgatgtgtgtgtgtatgaccaatgaaactggtgtaatttcaagcccttgtcggttacttggggttntcattactatgaaataaatatgtactcnttttctattgctattat

SEQ ID NO: 232331 - DNA, 446 bp, Gossypium hirsutum
cttcttcagtctgctcagcttaagccagatgtaactattacatctgcagattcagataatgacatagaggactctgatgatgaaagtatggaaaccattacgcttggggacaaaagaattgggatcaagacaagtgttctggaggagaaggctacagcatgtaacatgctatgttgctatgccgatgagttgaaggaagggttttttccatggattgatcaggttgctccaactttagttcctcttcttaaattttatttccacgaggaagttagaaaagctgctgtttcagccatgccggagttattgcgttctgcaaaattagctgtggagaagggaatggctcaagggcgtaatgagacctgtgtgaagcaattgtctgattacattattccggctcttgtggaggcattacataaggaacctgatacagaaatatgtgcaag

SEQ ID NO: 232332 - DNA, 443 bp, Gossypium hirsutum
cttcatcagaaatcaaaaggagtaaacctcagattccaaatcggaaaaagaaaaatggtgaagggacgccaaggggagcgagtcagactctatgtaagaggaaccatcttgggttacaagaggtcgaagtcaaaccagtatcctaacacttcattaatccaaattgagggagttaacaccaaagaggaagtagcttggtatgccggcaagcgtatggcttatatttacaaggctaaggtgaagaagaatggttcgcattatcgctgcatttggggcaaggtaactagaccgcatggtaacagtggtgtcgttcgtgctaagttcaagtctaaccttccccctaaatctatgggagatagagtcagagtcttcatgtaccccagcaacatttgagttgtctaaatgcctgacggcattcgatcgatgactcaagtgactgtgcc

SEQ ID NO: 232333 - DNA, 393 bp, Gossypium hirsutum
  unsure (1)..(393): unsure at all n locations
cccacgcgtccgtaacaatcgctgttgtgaacaaacaaacgcagacttgagcttcaatggcggtgaaaatcttgatagcgtcaatcttagtaattgcagcatctctttgctgggtatcgtcggctgattcgtctgaagctgctttcgtcaaaaagaccatctctgcccacaagatcgtcatcttctcaaagtcctattgcccgtactgcaggaaggcaaaatctgtgttcaaggagttgaaacaagttccattcgttgtggagcttgatgagcgagatgatggatggaatattcaggatgccttgagtgagattgttagtaggcgtactgtaccacaggttttcattaatgggaaacacatcngggggtcagacgatactgttgaagcatatc

SEQ ID NO: 232334 - DNA, 427 bp, Gossypium hirsutum
caaaaatggatggttattgtagcagaagggtaatcatgtttttggtgtttgcatttgcagcaataagcagagggtatggacaagaatcaaccactcttgttcctgcaatcatcacctttggtgactctgtggtagatgtgggcaataatgactatctccctaccatcttcaaggctaactatcctccttatggacgggactttgccaacaaaaagcctactgggaggttttgcaatggaaaattagccactgacatcactgctgaaactctggggtttacaacttatccaccagcttaccttagcccagaagcatcagggaagaaccttctgcttggagccaattttgcttcagctggctctggctatgatgacaaagctgccatggtgaatcatgccatcacattgacccaacaattagagtattt

SEQ ID NO: 232335 - DNA, 421 bp, Gossypium hirsutum
ctttctacaagcatatattggatgttaaagttacttaccatgacattgaagcgattgaccctgattacttcaaaaacctgaagtggatgcttgagaatgatattagtgatgtcctagaccttacttttagcattgatgctgacgaggagaagttgatattgtatgaaaggacacaggtgactgactatgagctgattcccggtgggcggaacattaaagttactgaggagaataaacaccaatatgttgatttagttgctgagcatcgtatgacaactgctattcgtccacaaatcaatgcatttttggaaggattcaatgaattaattgccagggaagtaataactattgttaatgacaaggagctggaattactgataagtggtcttacagatattgatatggatgatatgagggcaaa

SEQ ID NO: 232336 - DNA, 407 bp, Gossypium hirsutum
gtgcgcacccagtgggcttcacctggttgccttcattctccacgtttctcgacaaggtcagttaagattgcagtttgcgtgaaatttcctgcaactataaaaactctcttactcaaacaaagctttgccttaactcgccttctcaacccgccccactcgctttcaatgtctttctctagctccagctgcatggatggatcttatgctgagattgtggtggtgcgacatggagaaaccgagtggaatgctgatggaagaattcaggggcacctggatgtggaattaaatgaagctgggaaacagcaagcagctttagtggctgatcgtttatcaaaagagcctaagatatccgctgtatattcatctgatttaaagcgagcccttgtgacagctgagacaattgcagc

SEQ ID NO: 232337 - DNA, 436 bp, Gossypium hirsutum
  unsure (1)..(436): unsure at all n locations
gcaaaatcataaagctctcacaagtttcgaattttgctctttagtccctcaatttatatttgaaattcaccaaggttctaaaatgggcactgctcaaagcagggaagatcggatcacggattcagaatccgatgaagactatgaagaagaagaagaggaggaggagcaatacgacgacgctttaagcgatcatcaaaacactcaatcttcatcttcaacttcaacttcttcaggtactcaaaaaagcctcgacgatatcgatgctaagctcaaatccttgaaattgaaatacaattctcagcaatcaagccctaatctcaaaaacccagtgaagctttaccttcatataggcgggaacacacccaaagcgaaatgggtaatctctgaaaagctcacttcttatagtttcactaanggaaatgggtgatatgatgag

SEQ ID NO: 232338 - DNA, 448 bp, Gossypium hirsutum
ataaatcttcagagaagaatttccccttagttctttgcaagaaggtagagataaagacactttttcaaaaatggcaatggtatcagaattcctcaagcaggcctggtttattgaaaatgaagagcaggaatatgttcaaactgtgaaatcatccaaaggtggtcctggatcagcagtgagcccctatcctaccttcaatccatcctcggatgtcgctgccttgcacaaggccataatggttaaaggtgtggatgaagcaaccatcattgacattctaactaagcgaaacaatgcacagcgtcaacagatcaaagcagcatatctccaggaaacaggaaagcccctggatgaaacactgatgaaagcccttatgggtcaccttgaggaggttgtttagctctgctaaaactccacgcattttatgctgatgaactttggctgcatgaag

SEQ ID NO: 232339 - DNA, 424 bp, Gossypium hirsutum
caaaatatggccaggagaagggttgttttggtgcagattttggcactagccttggccgctgttatgccattgctctcaggaggtgtggatattcaacaagttagggtgctggcagctaaattcaacgtgacttgcgtagtggtattcggagactccagcgtggatccaggcaataacaactatattgctacgccctttaagggtaatttcctaccgtatgggaaagacttcttcagaggccacccgactggacggttcagcaatggaaggctagccactgattttattgctgaagctttgggttacacgaacgaaattcgacctttccttaacaagagattgagaccagttgatatcttgcatggtgttagtttcgcatcagctgcttctggttatgatgagctcactgccaatctctcacatg

SEQ ID NO: 232340 - DNA, 407 bp, Gossypium hirsutum
ctcgggtaccaaaaatcggggaatcaaatcatcggccattggcaatgctgcgaccaaatgcctctcttggtgctgccctgtcattgttagtgcaagccgaggtaagttcaataccaatagtggatgagaatgacgcgttgattgatatatatgcaagaagcgatataaccactttggcaaaggataaagcttacgcacagattcgtctcgatgacatgagtattcatcaggccttgcagttggagcaatatgcaaactctttcaatggacaaagatgtcaaatgtgtctacaatcggatactttgcacaaagtgatggagcggttggcaaatccagggactaggagacttgtgattgtggaggctggcagcaagcgagttgaagggattatttcattaagtgatgtc

SEQ ID NO: 232341 - DNA, 430 bp, Gossypium hirsutum
attgttatctctgaaggtgtcttaataaacgccttcgatttaccttcgatttccatttacttctctattgctacgtttttgaatttttagtgagcgaaaatgagagagtgcatttcagtccacatcggtcaggctggtattcaagtcggaaatgcctgctgggaactttactgccttgaacatggaatccagcctgatggccagatgccaagtgacaagactgtcggaggaggtgatgatgcttttaacacctttttcagtgaaactggtgctggaaagcacgtccctcgtgctgtctttgtggatcttgagcctactgttattgatgaagtgaggactggtacttaccgtcagcttttccaccctgagcaactcatcagcggcaaggaagacgctgccaacaacttcgctcgtggccactacactattg

SEQ ID NO: 232342 - DNA, 444 bp, Gossypium hirsutum
cttttcttttcaatttctttctttatatttatatatttttttgcttgtttagctgcaccaatggcgaccgatgctaaagcagatccagagccgcactgcagagaagacgatgacaacgctcccgccaccgccgcagacgatgaggacaccggtgctcaagtagctcctatcgtcaagctcgaggaagtcgctgtcactactggtgaagaagacgaggatccgattctcgatctgaaggcaaagctgtatcgattcgataaggaagggaatcaatggaaggagagaggagttggaaatgtgaagctcttgaagcacaaagtcaatggcaaagtccgtctagtcatgcgccaatctaaaacccttaagatctgtgctaaccatttcgttattccaacaatgacggtgcaagaacattctggaaatgattaatcatgcgtttggcac

SEQ ID NO: 232343 - DNA, 443 bp, Gossypium hirsutum
cgggaagggattgtcggaagatgccaaagcacaaaaattggcttttcaacattggattgaagctattgatccacgccatcgttacgggcataatttgcatatttactatgaagagtggtgtaaagctgatgctggtcaaccatttttctactggttggatttaggtgatggcaaagatattaatcttaacgagtgcccgagatcgaagcttcgacaacaatgcatcaagtatctcggaccccaagagagggtaaattatgagtacattgttgttgaaggaaagattatccataaacaaaccagaaacgtactcgatacaatcgaaggattgaaagaagggaaatggatattcgttatgagcacctcgaagaaattgtatgccggcaagaagaagaaaggaatgtttcatcattcgagtttcttagccgggagagtgacgttag

SEQ ID NO: 232344 - DNA, 421 bp, Gossypium hirsutum
taaagatcaaagactcaaagagaaagaaagcggccatggagaaggaaagagagcaacaagtttacttggcaaggctcgctgagcaagctgaaagatacgatgagatggttgaggccatgaagagtgttgctaagttggatgttgagctgactgtggaggagaggaatctgttatctgtgggatataagaatgtgattggagcaagaagggcatcctggcggatactgtcttcaattgaacagaaggaggaggccaaaggtaacgaacaaaatgtgaagaggataaaggattataggcaaagggtcgaagatgaactctcaaagatatgcaatgacatactctcagtcattgataagcacctcattccatcttcctccaccggggaatcaactgttttctactataagatgaaaggagatta

SEQ ID NO: 232345 - DNA, 445 bp, Gossypium hirsutum
  unsure (1)..(445): unsure at all n locations
ataaatcttcagagaagaatttccccttagttctttgcaagaaggtagagataaagacactttttcaaaaatggcaatggtatcagaattcctcaagcaggcctggtttattgaaaatgaagagcaggaatatgttcaaactgtgaaatcatccaaaggtggtcctggatcagcagtgagcccctatcctaccttcaatccatcctcggatgtcgctgccttgcacaaggccataatggttaaaggtgtggatgaagcaaccatcattgacattctaactaagcgaaacaatgcacagcgtcaacagatcaaagcagcatatctccaggaaacaggaaagcccctggatgaaacactgaagaaagcccttatgggtcaccttgaggaggttgttttagctctgctaanaactccagcgcaattngatgctgatgaacttcgggct

SEQ ID NO: 232346 - DNA, 448 bp, Gossypium hirsutum
cggacgcgtgggcctccctttttttttctctaatttagttctctctccgttttcatctccgttcactacgaaaatggcttcccacattgttggatatccccgtatggggcccaagagagagcttaaatttactttggaatctttctgggataagaagagcagtgctgaggatttgaaaaaagttgcagctgatctcaggtcatccatctggaaacagatgtctggtgctgggatcaagtacatccccagcaacactttctcttactacgaccaggttcttgatactacatccatgctcggagctgttccacctagatataactggactggtggtgagatcggatatgacacttacttctccatggctagaggaaatgcctctgtgcctgccatggaaatgaccaagtggttcgacaccaactatcacttcattggtcctgaactcgga

SEQ ID NO: 232347 - DNA, 359 bp, Gossypium hirsutum
agatgatggaaaggggttttattgttttggccttgacggtggttttcgccgcgacggtggttacggcggctgacgagagtgggttagcgaatgagtgcagcaaagatttccagagcgtgatgacttgcttaagctttgctcaaggaaaagcagcgtcgccgtcgaaggagtgttgtaattcagtggcggggattaaagagaataaacccaaatgtttgtgttatattttgcaacaaacacaaacttccggtgctcaaaatctcaaaagcttaggtgttcaagaagataagctgtttcagttaccgtcggcttgtcaattgaagaacgctagcgtcagtgattgcccaaagcttcttggg

SEQ ID NO: 232348 - DNA, 449 bp, Gossypium hirsutum
cggacgcgtgggctcttctttcctcctagcccaaaaaaaaaaaaccctctttcctttctctcgttctttttcccgttcaatcatgtcttgcttcattagcaaatatgccgatgagttggctaaaaacgctgcttacattggaacccctggaaagggtatccttgctgctgatgaatccactggcaccatcggcaagcgtctttcaagcattaatgtagagaatgttgaagataacaggcgtgctctccgtgagctcctattcacaactccaggagctcttcagtacctcagtggtgttattctctttgaggaaaccctttatcaaaaaaccgcttcgggcaagcccttcgttgatgttttgaaggaaggtggtgtcctccctggcatcaaggtcgacaagggtacccgtgagcttaacggaaccaatggcgaaactttcacccagggtc

SEQ ID NO: 232349 - DNA, 357 bp, Gossypium hirsutum
cagacacatggactattctttcctcctagccgagaaaaaaaaaaccctgtttcctttctctcgttcttcctcccgttcaatcatgtcttgcttcattagcaaacactgcgatgagttggctaagaacgctggttacattggaacccctggaaagggtatccttgctgctgatgaatccactggcaccatcggcaagcgtctttcaagcattaatgtagagaatgttcaatataacaggcgtgctctccgtgagctcctattcacaacttcagtagctagtgaggacctcaggggtgttattctctttgaggaaaccctttatcaaaaaaccggtttgggcaagcccttcgttgatgt

SEQ ID NO: 232350 - DNA, 445 bp, Gossypium hirsutum
atctgctactccttctcgttggcagactttaagcggggaagcacccgttgtcatagctcgtggtggattttcaggaatattttcagactccagttttggagcttatagtttggctttagtaacgggtccttctgatgtgatcttgtggtgtgatgtgcaattaacaaaagatggagccgggatttgctttcctgatcttaagctagataataattctaacattgcaactgtttttacagataagccgaagacttaccttgttaatggggtctctaccaagggacttttttccattgattatactctcaacgatcttggaagtgtttatttaagtcaaggtatctactctcggacgaataagtttgatggaaataattacccaattatgaccgttcaggatacctatactcaactgaaaccgcttggattttggtgaatattcaac

SEQ ID NO: 232351 - DNA, 451 bp, Gossypium hirsutum
ctaagcaatcgattcaaccagacaagctctcttaaaaatccctttattttccctgtataattcttgtttcttgtctaacgcataagaatggcggccaaagctgaaggcaaggcaattgggattgatctcgggacgacatacagttgtgttggtgtatggcagaatgatcgagtggagattattgccaacgatcaaggcaaccgaacgacaccgtcttacgttgctttcaccgacaccgagcgtctcatcggtgatgctgctaaaaaccaagtcgctatgaacccacagaacactgttttcgacgctaaacgtctgatcggtcgtcgattctctgacccagcggtgcaagccgatatgaagcattggcctttcaaggttgttgccggccctggtgataagccgatgatcgtcgttaattacaagggtgaggagaagcagttcgctcctgaaa

SEQ ID NO: 232352 - DNA, 402 bp, Gossypium hirsutum
ctcaaatatccgatatcgtctttcccaaaaccagatccaaaagccagtttatttattcaccgatggtcgacgaagccatagtcaaatgcttcgccgccttttcctctggtgatttcaacgccgcaatcaaacacttcaccgatgctataaacctttcccccaccaaccacgtcctttactctaaccgatccgctgcgtatgcttctctccatcaatacgaggccgcattgtcggacgccaaaaggaccgttgagcttaaacctgactggtctaaaggttacagcaggctaggcgcggctcacctcggtttgcaccaatatcaagatgctgtttcggcgtataagaagggtctggagattgatcctaataatgaagctttgaagtctggattggctgatgctc

SEQ ID NO: 232353 - DNA, 389 bp, Gossypium hirsutum
cccatcgccaagatgcagatcttcgtcaaaaccctaacggggaagactataaccctagaggtcgagtcttccgacaccattgacaatgtcaaagctaagatccaagacaaggaaggcattccacctgaccaacaacgtcttatcttcgccggcaagcaactcgaagatggccgcaccttagccgactacaacatccagaaggaatccactctccaccttgtcctccgtctcaggggaggtgcgaagaagagaaagaagaagacctacaccaagcccaagaagatcaagcacaagaagaagaaggtcaagctcgccgtcctccagttttacaaggtggatgagtccggtaaggttcagagactgagaaaagagtgccctaatgcggaatg

SEQ ID NO: 232354 - DNA, 449 bp, Gossypium hirsutum
tatacgctcacgatctctctttatttgatttcaccaacttctctgataatcctatcatcgatcacccttcatctttcgcttcctttatcactacacctcccagtgattctgatgatgttgatgctggaaataaaccaacttccaccgctactcctaggagtccaccaaagcaccgccatgaccggacctcgccgttgcctttggggatggattggtctttacctcctcgcagatgggatgggcgggacactgtttggcctcacaatcctcagacagggtggagttactgtgttacaattccttcttggattattctgccaacatctggaggttcagatattgtcgtgttttaccgggttcaagttggcattcaatcaccagaaggcgtcactaccacccgggaaatattacgaagaattagtgatttcttgaagctactatctgaactt

SEQ ID NO: 232355 - DNA, 321 bp, Gossypium hirsutum
cccacgcgtccgcaatcctcgctttgtttaaaagcaatctgaagaaaaactcgaaaactttcctacaattttcaaccaaaaaaaagccactctctcgttcggtctttgatggcggaaatactttctgctttgaggtctttaatggcctctcactctcctcctctccatgccttaatcgtcccttctgaagattatcatcaaagcgaatatgtttctgatcgtgataaaaggcgcgaatttgtttctggattcactggaagtgcaggtttggcacttattacaaaagatgaagcaaggctatggacggacggccgatatttc

SEQ ID NO: 232356 - DNA, 371 bp, Gossypium hirsutum
gctctgtgaaggtatatgatgtggtcaactatgacatgatggttatgattcgcctaccttatgttcctggtgctgttgaatgggtctacaagcaaggcgatgtcaaagctaagcttgccattagtgatagaaattcatcattggtccatatatatgatgcacgagctggttcaaatgaacccatcatctctagagagatacacctgggcccagtgaaagtaatgaggtacaattctgcattcgacattgtaatatctggtgatgagcaaggaattattgagtactggagccctgccacacttcagtttccagaaagcgaggtccattttagattgaaaagtgatactaatctctttgaaattgcaaaatgc

SEQ ID NO: 232357 - DNA, 436 bp, Gossypium hirsutum
aaatattactcgtgggaagagtgtgtgaatctgagagaagttaagtctctgaggagaatgaatcatcccaatattgtgaagcttaaggaagtcatcagggaaaataacgttctgtactttgtgtttgaatatatggaatgcaatctttaccagcttatgaaagacagagaaaagcatttttcagaagtagaaatcagaaattggtgcttccaagtctttcaaggtcttgcatacatgcaccagtgtggatattttcatcgtgacctaaagccagagaatttattggtttctagagacataatcaaaattgctgattttggtcttgcacgtgaaatcagttcacatcctccatacacagaatatgtctcaacacgctggtatcgtgcgcctgaaatacttcttcaatcatacctgtatacttcaaaagttgatatgt

SEQ ID NO: 232358 - DNA, 434 bp, Gossypium hirsutum
cagccaattgtttgagctagctagctcttactcaaatggcaaccaaaacgatgatgttgcaaatattttcacttttcttctttttgttcagtatctgcaactccattttccttggtgctaatggagatgacaatggtggttggcaaactgcccatgccaccttctacggtggtgctgatgctaccggcacaatggggggagcttgtggttatggaaacctgtacagtcaagggtatggaacgagcacagcagctttgagcactgcacttttcaacaatggcttgagctgcggtgcctgctacgagctccggtgcaacaatgatcctcaatggtgcattagtcgaaccataaccgtgacagccaccaacttttgtccccctaactatgctttatctagtgacaatggcgggtggtgcaatcccccacgagaacac

SEQ ID NO: 232359 - DNA, 443 bp, Gossypium hirsutum
  unsure (1)..(443): unsure at all n locations
atataacaagatcagaataagaaaaacgctgcttgcaggtatgtcatcatccgataagccagaattagttgaaagggatgttaaggacaaggtggatgacaaagaagacaacagtggatttatagacaaggtcaagggtttcattcatgacattggtgagaagatcgaggaaacaatcggctttggcaagcctactgcagatgtagctgagattcacctcccttgtatcaatcttgagaaagcaaaattgtcgttgatgtcctcataaagaacccaaaccctgttccaatccccctcgtcgacattgactacctcattgaaagtgatggtagaaaactcctttcaggcttgattccagatgctggaaccatncatgctcatggtgaggagactgtcaaaataccaattactttgattatgatgatatcaaagtcatatgatga

SEQ ID NO: 232360 - DNA, 399 bp, Gossypium hirsutum
gggaaatctactcttactgattcacttgtggctgctgctggtatcattgcacaagaagttgctggtgatgttcgtatgacagatacccgtgccgatgaggctgagcgtgggatcacaattaagtctactggtatctctctgtattatgaaatgagtgatgattctttgaagagctacaaaggagataggcaagggaatgagtacctcatcaatcttattgattcccctgggcacgttgacttttcatctgaggtcacagctgcacttcgtattactgatggtgcccttgtggtcgttgactgtattgaaggtgtctgtgtccaaacagagactgtcctccgtcaggctcttggagaaaggatcaggcctgtcttgactgttaacaagatggacaggtgc

SEQ ID NO: 232361 - DNA, 333 bp, Gossypium hirsutum
gggattcaacatctatgttggtggtggtatgggaagaactcatagaatggaggccacttttcctcggctgggagaaccgttaggttatgttccaaaagaggacattttgtatgctattaaagccattgttgctactcaacgagatcatggcagaagggatgaccgtagatatagtagaatgaaatatttgatcagctcttgggggattgaaaagtttaaaactgttgttgagcaatattatggaaagaaatttgagcctttccgtgagttgcctgaatgggagtctaagagttacttgggatggcacgagcagggagatggtgctttgttttg

SEQ ID NO: 232362 - DNA, 443 bp, Gossypium hirsutum
ctgcaacaatgccacatttctctaattctgtcaagcttaagtatgtcaagcttggctaccaatatctcgtcaatcatattcttacacttactcttatacctgtcatggctggtgttcttattgaggttcttcgtttaagccctgctgagattgttaatctctggaattcccttcattttgatcttgttcaaatcttgggctcttgtttctttattatctttgtagccactgtttacttcatgtctaagcctagaagcatttaccttgtggattatgcatgctacaaacctcctgtcacttgtcgtgttccttttgctactttcatggagcactcgaggctgaacttgagcaacaaccctaagagccgtgagtttcagatgaggattctagaaaggtctggtcttggtgaagagacttgtttacctcctgctattcattatatt

SEQ ID NO: 232363 - DNA, 403 bp, Gossypium hirsutum
acgcgaagatgaagaacaatgccattgtttgcaacattggtcactttgacaatgaaatcgatatgctcggtcttgagacctatcctggtgttaaacgcatcaccattaagcctcaaaccgataggtgggtcttccctgaaaccaaaactggcatcattgtgctggctgaaggacgtctgatgaacttgggatgtgccactggacacccaacgattgcatgtcctgctcgttcactaaccacgagaatgcccagctcgagctatggaaggagaaggcaactgcaaaatatgaaaagaaggattacgtattggcaaagcacctcgacgagaaagaagctgcacttcaccttcgcaagctcggagctaaactcactaagctcactaaagatcaagctgattacatt

SEQ ID NO: 232364 - DNA, 481 bp, Gossypium hirsutum
gtttcgggctagacgtacgtttttctctttcagatttgctttaattataccatcactttagacccataaaagaagaaaacaggacggaaacaacgaaagaacccatctgtggtgctgcagaaatctcagaagggcatggcctcaaccgagagttccagatcttcaactgctggctctcccgattcatacataggcagcttgataagcttgacgtccaagtctgaaatcagatatgaaggtgttctgtttaatatcaacactgaagaatccagcatcggcttgagaaatgtaaggtcatttggaacggaagggcggaaaaaagatggtccacaagtgccagcaagtgataaaatttatgaatatatactggttccgtgaagtgacatcaaggacttgcaggttaaatcttcaccaccaccagttcagactccggcacctatacacaatgatcctgctattatacaggctcactatccccaat

SEQ ID NO: 232365 - DNA, 467 bp, Gossypium hirsutum
  unsure (1)..(467): unsure at all n locations
ctgttttccttcaaaaccctaatagctgtcctctcctcctgaacgtgttcgaaaatggttggttctgagggattgattctacgtggcaccatgcgtgcccacaccgacatggtgacagccattgctactcccatcgataactccgacatgatcgtcacttcctcccgcgacaaatccatcatcctttggcacttaaccaaggacgaaaagacctacggtgtccctcgtcgtcgtctcaccggtcactctcacttcgtgcaagacgttgtcctctcttccgattctcagttcgctctctctggttcctgagatggtgagcttcgtctctgggacttatctgccggtacctcagctcgccgttttgtcggccacaccaaagatggtctctctggtgccttttcaattgacaaccgncanattggttcggcttctcgagatcgaactatcaggctttgggaatacccttg

SEQ ID NO: 232366 - DNA, 464 bp, Gossypium hirsutum
  unsure (1)..(464): unsure at all n locations
agaggcttcgctccatattcggaacaagtgaaagacaatgggtagaagcccaggttgagaatgccaagcagcaagccattctcatggcgcttaaatctcaaatatcatcagatgaagctcatattcatcttgatcttcattcccttagaagaaagcacgctgaattggtgggagaggtttcaaacctttatcacaaagaagagaagtttttaactgagactattccagatctttgctgggagctggcgcaactccaggacacatacattttgcaaggtgattatgatctaaaggttatgcggcaagagttctatattagcagacaaaaggcgtttatcaatcatctgatcaatcatcttgcaaggcatcagctcttaaaaatagcttgtcaattggaaaagaagaatatgcttggagcatattcattgcttanagttatcgagtcagagcttcaggcatacctg

SEQ ID NO: 232367 - DNA, 350 bp, Gossypium hirsutum
cccacgcgtccgaaaaaatcctaaatttgtttgaattttctggcgatactatggatgaatctttcttcgatctaatggaattcttgaagaaacctacgataactgaaacattcgtcgacattttgttatgtgcggtgcccatatggttagccgtgatgatcgggctcttcatcggttgggcttggcgtcctaggtggaccagcttggtttttctaggtctccgatctaagttccggttcgtctggactgctcctcctgggttcggagctcgccgactctggctcgcctttactgctctttccgctttctctgtttgccgtacggttttctccaactttattaaagggaga

SEQ ID NO: 232368 - DNA, 458 bp, Gossypium hirsutum
cacctctttcaaaatggaaattgaaagagaaaccaatgaaggcaactcaaggaggattcaagtccgatttataacgaaattaaaagcaccatataaagttccaacaacagccattgccatcccttcagacctctctcgtttaggcctttcctccattgttaacaagcttcttcaagctgtggattctgagtggaaaaccgagccctttgatttcctgatcgatggggagctggttcggatgtcacttgagcagtttcttcttgtcaagggcatctctgcggaaaaaattttggaaattgaatacataagagctgttgcccctcgaaaagaggaagagccttctccgcatgatgattgggtcagtgctggtgacggttctagtcctaggttcattttgactggttgctatgatagtttgggaaagatatggaaacaagcttgatggtgtacgcatatac

SEQ ID NO: 232369 - DNA, 356 bp, Gossypium hirsutum
attggtttgagctggccagaacctccactaaagttgctatctcagcatgttttggacagaccaccttctttcaaatcagtcaaatcttttagagcaaccaagtcttttcgaacatatagttccttcaggtccataaatgacatggcatcaggaatagctttgcttgcagaacttgaccttgaatccctcatgaagcggaaaagaagatctttatatgtaagagtagttagcaagcaaatggcaggaattttcctcactatttgggtccgtaggagtttgcgcaagcatattcagaatttgaaggtgtctactgttggagttggtgtaatgggctacattggtaacaagggatctat

SEQ ID NO: 232370 - DNA, 430 bp, Gossypium hirsutum
caaggaagaaagtgtgagattgacttgtttataatgcaatccgatgggaagaagatagttgatcctagcaagcaaactgcattgtcgtcgcgtctgaaaatggaactgctccaaccactaagagtaactgtagtgagccggggtcctgacactgagcttctagttgcaaatcccgtagagttatcaagcaagggccggccttttgttttttatgacattacccttgctctaaagatgcttaatacttgcatcttctcggcagagattgggagacacatgatcggagatcgagagtgggaagtttacaggattctactagatgaaggggctagttcatccattctgagacgaaaggttgaggaagaagtttggaagcgcttgatgggttgggaataactatgattggtcacaacattgccccctccacaat

SEQ ID NO: 232371 - DNA, 432 bp, Gossypium hirsutum
attttcaaatacgtcttgctgggtaaaacatataggtaccatgtgttgctgtggttgaaaatatgagtcactttgatgcggatggcaaacgctactacccgtttggtcgaggttcaggctctcaggttgtccagcagtttgggatccctcatctttttgatcttcccattagaccaaccctttctgcttctggtgatagtggaacacctgaagtggtggctgatcctcaaggtgaagttgcccagacgtttcagaaccttggagtatgtgttgtgcaacagtgtgccaagattcgccagcaagtatcaacagcagttacatatgacaaatccatcaaggccataagagttaaggtaccggattcagaggaagaattccttctgcatcctgcaacagtaagacggaatgaccactcttgccaaagtgtggatg

SEQ ID NO: 232372 - DNA, 289 bp, Gossypium hirsutum
cccacgcgtccgaaggcttgcttgaggaagtcaccacttgcaaaagaagtcgacctccgtgctcttgccaaatatactcaaggctttagcggtgctgatattaccgaaatttgccaacgtgcatgtaaatatgccatcagagaaaacattgagaaggacattgagagagaacggagaaaaagggagaaccccgaagctatggaaaaagatgttgatgactaaatggcacaaatccagccggcgcatttcgaggaatcgatgaaatttgctctgaggaatgtgagtgatg

SEQ ID NO: 232373 - DNA, 269 bp, Gossypium hirsutum
ttgctcttgctccaagcagcatgaaaatcaaggtggtggcacccccaaagagaaagtacagggtctgaattggaggacctatcttggcatcactcagcaccttccagcagatgtggatttccaagggtgagtatgataagtccgatccatccattgtccacaggaagtgcttctaaatttacaagtcatttattgagatgatgggtctttggagctggtgggcggaatacaaatgggggcttatttccatccttcccatgcatctttca

SEQ ID NO: 232374 - DNA, 366 bp, Gossypium hirsutum
  unsure (1)..(366): unsure at all n locations
cccacgcgtccggttcctctgcaagcatttctcggctgaagaatttgaacaggaggactctcgatgttctagctgctaggctgtacttttattactctctttgctatgaactcactggtactctntctgaaattaggagtaaccttctagccctgcaccggattgcaacattgcgccatgacgagctgggtcaggagactcttcttaacctgctacttcgcaattacctccattacaatttgtatgaccaagctgagaaactgagatcaaaggcacctagatttgaagctcactcaaaccaacagttttgccgctacctcttttacttggggaagattaggacaattcaatttggagtacacagat

SEQ ID NO: 232375 - DNA, 306 bp, Gossypium hirsutum
agttggagaaggttatgcgtgttaccgagtccgacagagttccaaatctttatattaagtgtcttgttatgttggaagatttcttggctgaagctttggctaataaggaagccaaaaagaaaatgagtagcagtaatcacaaggctttgaacgcaatgaaacagaagctcaagaagaataataagcagtatgaggaattgattaacaagtatagggagaatcctgagagtgaagaggagaagcttgaagacgaggacgaagacgaggatgaagatgaatctggctctgagttggaggacccgcaca

SEQ ID NO: 232376 - DNA, 438 bp, Gossypium hirsutum
aacagaggagacgattcaaaaagaagcggcagtcatgatctcacagttcttcgtgctttctcagcgaggcgataacatagtgtttcgcgattattgcggcgaattagcaaaggcgtagtgcatagatattctttcgtaaagctaagttttggaaagaggatggtcaagaggaggcgccctctgactttaatgtggatggtgtgaactacttccatgtgaaggttcgttgggctgctgtttgttgcatccacacgagttaatgtgtccccgtctataggcctgtaacttttgcaaaggatagctcgcgtaattaaggattatttatgggttttaagatgaagattcacttacgtaaaaactttgtacttggatattaagtcgctggatgaaatcatttgtcttttggttattttgctgacgtcattcttacttatagat

SEQ ID NO: 232377 - DNA, 406 bp, Gossypium hirsutum
ggggatcctaattgctgttggtgaggcagtggcgtacgttctgtctggtatgtacggaagtgttggtcagctcggtgttggaaatgccattcttattattattcaactttgctttgctggaattattgtgatctgcctcgatgaacttctccaaaaggggtatggtttgggctctgggatctcccttttcatagccaccaatatctgtgaaaacataatctggaaagcctttagccctacaacaatcaacagcggtcgtggggctgaattcgaagtgctgtcattgcatgttcatcttttataaccagacagacaaagtcgagcgctcgtgagcttctacgcagatcttcaacgtacaattactcgtacgttgatctctatgtatctactcaggttcggtgttgct

SEQ ID NO: 232378 - DNA, 390 bp, Gossypium hirsutum
ctttatccctctctcccccgtcggtcataactttgcatttcgtggtatttgagaatgggggcttctattttatcagatctcggaaccgagatcttaattccagtttgcgccgtgattggaattgccttttctctcctacaatgggttctcgtttccaaggtgaagctctctcctggtcgagacccgggttctcctagaaacaacggtgcgggtggaaaaaatgactgcgccgattacctcattgaagaagaggaaggacttaatgatcataatgttggtcttaaatgtgctgaaattcaaagcgccatttctgaaggtgcaacctcgtttcttttcactgaggaccagtatggtggcatttttatgggtgcttttgccaacctggatttt

SEQ ID NO: 232379 - DNA, 188 bp, Gossypium hirsutum
gaaagaaccagctaacccatactttgccaattgcaagcttcatctccatgtccctgctggcgccacccctaaggatggacccagtgctggttgcaccatgatcacttccatgctatcccttgccatgaagaagcctgttaggaaggatctagcaatgactggggaagtgactctgacacggaaaattc

SEQ ID NO: 232380 - DNA, 386 bp, Gossypium hirsutum
  unsure (1)..(386): unsure at all n locations
cggacgcgtgggctcttgtgacctcgatttcaagtgaaacagaatgggtaaggaaaagactcacattaacattgtggtcattggccatgtcgattccggaaaatcgaccaccactggccacctgatctacaagcttggtggtattgacaagcgtgtgattgaaaggtttgagaaagaagctgctgagatgaacaagaggtcattcaagtatgctngggtgcttgacaagctcaaggctgaacgtgagcgtggtatcaccattgatattgccttgtggaaatttgagaccaccaaatactactgcactgtgattgatgcgcctggacaccgtgactttatcaagaacatgattactggtacctcncaagcttactgagctggtttga

SEQ ID NO: 232381 - DNA, 446 bp, Gossypium hirsutum
attggcagtaatgaggaacataaagtcagaagttgatgcaggaagcataagaccttactgttttgtggaggttaatggtctaaagttggctgcaccagagaatatttacacagtcatatatgaagccttaactggacatagggttagttggaaaaaggctctgcaattactgaatgaacggttttcagatggaaagaaaattgctaagggggatgaccgaccttgtattctacttattgatgaactcgatcttcttgtaaccagaaaccaatcggtactatacaacattcttgactggcctactaagcctcattccaagttaattgtgataggaatagcaaatacaatggatcttccagagaagttacttcctcgcatttcaagccgaatgggtattcaaagactctggtttggtccctacaattatcagcagctacaggaaatta

SEQ ID NO: 232382 - DNA, 290 bp, Gossypium hirsutum
cggttacgaacactaggagttccaaaaaggggcacacccgatattcacctccttcaaaagttttggcattttcattttcgtctccactaaaaaaagccctgcgtccttcgaatcgattccattcgatttcaccatcttttaaatcctatcaatttctcagatctttcccagtcttttctgcaaccatgagtaagggaccaggactcttcgtcgatatcggcaagaaagccaaagatctgttgactaaagattatacctcggatcagaagttcactgtttctacttacact

SEQ ID NO: 232383 - DNA, 457 bp, Gossypium hirsutum
ggcaaatgactgtattggtgaagaagttgagaaaatggtggctgcattaccagatggcggtgtattgctgcttgagaatgtgaggttctacaaggaggaagagaagaatgatcctgaattcgcaaagaagctagcttctctcgctgatctctatgttaatgatgcatttggcactgcgcacagagcccatgcttccacagagggagtggctaagtacttaaagccttctgttgctggttttcttatgcagaaggaactcgattatcttgttggagctgtggcaaatcccaagaagccatttgctgcaattgtcggtggttctaaggtatcaaccaagattggagtgattgaatcactcttggccaaggttgatattctcatactgggtggaggaatgatgtttaccttctacaaggcccaaggatatgcggttggatcttcacttgtggaagaagac

SEQ ID NO: 232384 - DNA, 396 bp, Gossypium hirsutum
  unsure (1)..(396): unsure at all n locations
cggacgcgtgggttcgaaggcaaaacagtagtggagctaagatacgaagcatacgtaccgatggcgatcaagaacctcaagtctatttgttccgctgctagaccatcctgggatctccattctattgcggttgcacaccgtttaggcatagttccagtaggagaaacgagtgtgtttgttgccgtatcggctactcaccgtgctgattccctggacgcgtgtaagtttttgattgatgagttaaaggcatctgttccaatatggaagaaagaggtttattctgatggagaggtttggaaggagaatccggaatttctggagcggaggttggaactcngcaaggatggtggctgttgccgaaggaagatcgagactgcggcacattgataaaaagag

SEQ ID NO: 232385 - DNA, 474 bp, Gossypium hirsutum
atctcttcaacgttcacaatgggcgcatttcaccgactcaacttgctccatttcacgctctctttagttgtcattgccgtcaatggccacaatataacggccattctcgaaggttttccagattactctgtttacaatagtttcctcacccaaacaaagctggccgatgagattaacacccgagagaccatcacttgccttgtcctcaacaatggggctatgtctgccctcacatccaaacaccccctttccgtcgtcaaaaacatcctcagccttcacgttcttctggactactatgacccccaaaagctccacaaaatctctgatggcactaaccttaacaccacgctttaccaaactactggtaatgcccctggaaaccttggtttcgtcaacatcaccgacctccaaggtggcaaagtcggcttcggctccgcaattcctggctccaaactcgactcatcttacaccaag

SEQ ID NO: 232386 - DNA, 173 bp, Gossypium hirsutum
ccaacacccatttgacattgtggaaagctgatttatctgaagaaggaagctttgatgcagccattaatggctgttgtggtgtcttccatgttgccactccaatggattttgagtccaaagaccctgagaatgaagtgataaaagccacaatcaatggagtactggatataatg

SEQ ID NO: 232387 - DNA, 469 bp, Gossypium hirsutum
ccctctcttcttaggtctgctgtatcttagttggtgattaattagccaatcacagcagccatgtctctcctcaatgatctcatcaacctcaacctcagcgacaccactgaaaagatcatagccgaatacatatggatcggtggatctggtatggatctgagaagcaaagcaaggactttgcctggaccagtgacggacccttcaaaactcccgaagtggaactacgatggttccagtaccaatcaagcacctggagatgacagtgaggtcattctttatcctcaagctatattcaaggatccatttagaaaaggaaacaacatcttggtgatgtgcgatgcttacacaccagccggcgaacccattcctaccaacaagagatttaatgcggccaagatctttagccaccctgatgttgttgctgaggagccttggtatggtattgagcaagagtacactcttctttaaa

SEQ ID NO: 232388 - DNA, 408 bp, Gossypium hirsutum
cttgcctaacaattccactaggtgaaatcttaaaagagcagccaatggggaattggacgatcccttccgctcttattcttctttgccttctcagtctcctctcagaccaaggtaggaaactacaagcaaatgccaaggaaggagccgtggatcctccaaaagttgaggataatatcggcgctgtgcctcacggcttacaaactgattctgatgttgttaaaagggaatcggattcgatctcttcgagatcgcttcgcaacaatgcggagaaatttgagttccaagctgaggtgtctcggcttatggatattattatcaattctctttatagcaataaggacattttcctcccagagttgatctccaatgcttctggatcgttggacaagaataggtttctttcactca

SEQ ID NO: 232389 - DNA, 380 bp, Gossypium hirsutum
gtttgatcttggaaagttgatggaggttcatggtgatgactccgaagatgttggtgtgaaaatatagaggcctgctgatgaaacaatggctgaggctgccccggaggtcattggagcttgaatgaaacactctttgaatttgcgtgtgtggttctctttctgattccaactgatttgatgattttgtttaaaactacgagaaatttttcatggttttgatttgatctctaggatatggttttgcagattgatattgagctagacaatctgatgtattataaagcccctactctatatatgaaatttattatatattggatgctttatagcaataaggacattttcctccgagagttgatctccaatgcttctgatgcgtt

SEQ ID NO: 232390 - DNA, 375 bp, Gossypium hirsutum
cccacgcgtccgctctccttctgtttctggtcagagccaatctcaaaagactccccttttagctcacagctcctctcttgagtactataatgggtaaggagaaggttcacatcaacattgtggtcattggccatgtcgactctgggaagtctacaaccactggtcatttgatctacaagcttggtggtattgacaagcgtgtgattgagaggtttgagaaggaggctgctgagatgaacaaaaggtcatttaagtatgcatgggtgcttgacaagcttaaagccgagcgtgaacgtggtattaccatcgatattgcccttctgaagtttgagactaccaaatactactgtactgtcattgatgcccctggacatc

SEQ ID NO: 232391 - DNA, 392 bp, Gossypium hirsutum
cccacgcgtgcgctttttggcaatcaattttgtgagcgagtatggctaacgacgttgaggttggtggtgagttccaagccaaggactaccatgatcctccaccagctccattggtggacggagaggagttgacaaagaggtcattttataaggctgtaatagccgagtatattgccacgctcttatttttatacatcactgtgttgacagtgatcagatacaagagtcacgttgaccctgataagggcagtgacaaatgtggtggtgttggcattcttggcattgcttgggcttttggtgggatgatctttatccttgattactgcactggtgggatctctggaagacacatcaacccagcagtgacctttgggcttttcttggcttggaag

SEQ ID NO: 232392 - DNA, 460 bp, Gossypium hirsutum
cccacgcgtccgtaaaggaagaagaagcaatggccactcttacagtgcccacgacagttccttcggtgtctgaagattgtgaacagctaagaaaagccttttcaggatggggaactaatgagggcttaatcatagatatattgggtcacagaaatgccgagcaacgaaacttgattcgaaaaacctacgctgaaacctatggagaggatctcctcaaggcactagacaaggagctctcgaatgactttgagaggctggttttgctttgggctcttgatcctgctgaacgtgatgcccttttggctaatgaagccaccaaaaggtggacttcaagcaatcaggtccttatggaaatagcttgcacaaggtctgccaaccaactgcttcacgcaaggcaggcttatcatgctcgttataagaagtcgcttgaagaggatgttgctcatcacacgactggcga

SEQ ID NO: 232393 - DNA, 466 bp, Gossypium hirsutum
cccacgcgtccggggaatgaccggagatggggtgaacgatgcacctgctttgaagaaagcagacattggaatagcagtggcagatgctacagatgctgcaaggagtgctgcagatatagtcttaactgagcctggcttaagtgtgataatcagtgctgtgttgacaagcagagctatattccaaaggatgaaaaactatacgatatatgctgtttccataaccattcgtattggtcttggttttgtgcttctagctctgatatgggaatatgatttcccacctttcatggttttgataattgcaatccttaatgatggaactatcatgaccatttccaaagaccgagtcaagccatcttcgaccccaaacagttggaagcttaatgagatatttgcaaccggcgttgttattggaacctatcttgctttggttactggcctgttttactggattgaattgatactg

SEQ ID NO: 232394 - DNA, 443 bp, Gossypium hirsutum
gggattcgcttgaacagacaacccctccccaaaaaaaaccttgcactttttccggagtcaaaatgggtatttctcgtgattcgatgcacatgaggcgtgccactgtaggtaaaaagaatgcttggaggaagaagagaaagtatgagcttggaaggcaaccagcatacacaaagctttcaagcaacaagacagttagaaggattagggatcgtggtggaaatgataagcggcgtgctctcaggctcgacactggaaactactcgtggggaagtgaggctatgactcgtaagacccgaattttggatgatgtgtacaatgcatacaacaatgagttggctcgtactcaaactctggctaagagagctattgctcaagttgatgctgcaccattcaagcagtggtatctccagcactatggggtagacattggtcgcaagaagaaa

SEQ ID NO: 232395 - DNA, 439 bp, Gossypium hirsutum
gcgaaacgggttcaggaaagcatgtaccgagagctgtctttgttgatctggagcccactgttatcgatgaagtgcggactggcccttatcgtcaacttttccaccctgagcagcttatttctggcaaggaagatgctgctaataactttgccagaggccactatacaattggaaaggaaattgttgatctctgccttgatcgagttaggaagttagctgataactgcactggtctgcaaggttttatggtgtttaacgctgtcggcggtggaactggttctggtttgggatctttgttgttggagcgcttgtcggtagattatggaaagaagtcaaagcttgggttcaccatctatccttcgcctcaggtctcaactgcagttgtggagccttacaatagcgttctgtccactcattcgcttcttgaacacacagatgt

SEQ ID NO: 232396 - DNA, 471 bp, Gossypium hirsutum
gttcggtctgctcacgattgcaaccagcttccattctgatattttcccctttttttactcacagtcatgcctcggtattactgtgattattgcgacacttatttgacccacgactctccatcagttagaaaacaacacaatgcagggtacaaacacaaggcaaatgttaggacgtactaccagcaatttgaggagcaacaaacccagagcttaatcgaccaaagaatcaaggaacatcttggccaagctgcagctttccatcaggttggagctgcttttaatcaacatctaatggctcagagacctcgacttcctattcttccgaatcctgttatgcctattccgaggggtgcacctttacctataaatcaaccaatggtccctgggattaggccccctgtactgccaagaccagttccaggtgctccaggttatgttcctgttccaggcatgccaccaacggtagcacca

SEQ ID NO: 232397 - DNA, 477 bp, Gossypium hirsutum
  unsure (1)..(477): unsure at all n locations
gtccggccgacatgtatggacccaaaactaacgaaatgcttagtgcctttccaccagaatttcgttagttatggttggaaaggcattgaagcatttgccacgagagaaggtacagttggctacaaaattcggtgttgaaagcatgggtccaggtggtccggttatcaatggcactcctgaatttgttcgttcttcacttgaggctagccttcaacgccttgatgtggattatattgatctttactatataatcagagttgaccacaagactcctatagaagataccatggaatgaactgaataagttggtggaagagggaaaaataaagtacattggtatatctgaagctagccccgaaactataaggagggcacacgctgttcatcctcttactgcagtacaacctgagtggtcgctctggactcgtgatgttgaggaagaaataattcccctctgcagggaacttgnaatcggga

SEQ ID NO: 232398 - DNA, 362 bp, Gossypium hirsutum
cttattcttgctctcttttataaataaacagaagggtcaaaattgccggatctgtttccaccgaactttacacaccatggatattgtttattattgaatgatcaacaaacttgcctcttcttgcaaagaaaaggccttcaggatgaacaaaaagtatgatctaggaaggcaatctgataacacaaagctgttacacaactaaacaagtatgaggaatatggattgaggtgggaatgagaaattgagtactctgaggctcaacaccggaaactaactcatggtgaagtaaggctgtgactcgtaagaccaagattttggaatgtgtgtacaaagcattcaacaataaactggttctcactcaa

SEQ ID NO: 232399 - DNA, 446 bp, Gossypium hirsutum
gatcaacaatagacaggtacaagaaggcttgctcagatacttctaacacaaacactgttactgaaatcaatgctcagtattatcaacaagaatcagccaagttgagacagcagattcaaatgttacagaattctaacaggcacctaatgggagattccttgagttccttaactgtgaaagagttaaagcaggtagaaaacaggcttgaaagaggaattactaggatcaggtccaagaagcacgaaatgctactagctgaaatagagtttttgcagaaaagggaaatcgaattggaaaatgaaagtgtttgtctccgaaccaagattgcagaaattgagaggcttcagcaggcaaacatggtgactggacctgagcttaatgctattcaagctttagcttctcgcaatttctttagccccaatgtcattgagcatccatctgcttac

SEQ ID NO: 232400 - DNA, 300 bp, Gossypium hirsutum
cgaaattcagaaagaaatttcccagtgtcatcttaaatcgtgcgctccatttattctccttaatttcccgatcgtttgatctgaaagtgatggcggacgtgcatatgggatcagagtcggagaccttcgcattccaggcggagatcaaccagctcttgagcttgatcatcaacactttctacagtaacaaagagatcttccttcgcgagctcatcagcaatgctcctgatgcattggataagattagacttgagggcttaacatacaagagcaagcttgatgctcagtcggaacttttta

SEQ ID NO: 232401 - DNA, 450 bp, Gossypium hirsutum
cgcgtccgcccacgcgtccgcccaccatgactctagaaatcgaagctcgagacgttattaagattgtgctccaattttgcaaagaaaattccttgcatcaaacgtttcaaacgttacagaacgagtgtcaggtttctctgaatactgtagatagcatcgagacgtttgttgctgatattaacagtggaagatgggatgccattttgcctcaagtggctcaactgaagctcccaaggaataaactggaggacttatatgagcagattgtattagaaatgattgaactaagagagttggacaccgcacgtgctattttgaggcaaacccaggcaatgggtggtatgaagcaggagcaacctgaaagatacttgaggcttgaacatcttcttgtcagaacttattttgatccaaatgaggcttaccaggattcaacaaaatagaaacgccgtg

SEQ ID NO: 232402 - DNA, 367 bp, Gossypium hirsutum
ctgatatccagggcttgcttcacttggtttatgtcacttggttgtcagtccgggccgattacattgcaccaccaattcaagctttgtctaaattttgtgtagctttattccttatccaatctgtagatcgtatgatacttagtttaggctgcttttggattaaatacaagaagattaaacccagaattgagggggatcctttcaagtcagatgatgttgagggatcagcctatgagtatcccatggttcttgttcaaatcccaatgtgtaacgagagagaggtttatgagcagtctatctctgctgtctgccaacttgattgggcaaaggaccgattattggttcaggttcttgatgattctaatga

SEQ ID NO: 232403 - DNA, 423 bp, Gossypium hirsutum
  unsure (1)..(423): unsure at all n locations
gcgatggcaagttccctctcaatatcaccacttcggggaactccgtgaatataacaacagggttgacaaacaccagtgtttccggcactatttacactgatggtcagcttgctgtttatcaaatcgatcaagttcttcaaccattgcaaatatttgcacctaggcctccagctccagcaccggcaccggcaaagtcgaagaataagaaggctaccaccgttgctgatagccccgatgttaccccagctgataactccaaagcggccaccttgcaaaatgttggtttgtttggagttgctgctctagttattgcactttctttgtgaccatgaaaatggagaaaagaagaagacagtgattttgatggtgatcaagatggcgagtgttttttattttttcaataattatcatttanaaaattat

SEQ ID NO: 232404 - DNA, 403 bp, Gossypium hirsutum
cgagtgtttacgtcggcccgccgaacgggaatgattggttcgagaaacaaaccgacgggacgcttaatatattgtgttcgtcttggatggattggttctatggtgggttgcaattccaagttgagcatcatttgttcccgaggttgcctaggtgccatttacggacaatttcaccatttgttaaggagttgtgtaagaaacacaatttggcttacaattgtgcttctttttggaaagctaatgcaatgacaattgagacacttaaatcagctgcattacaagctagggttcttaccaatgctgttccaaagaacttggtgtgggaagctgtcaacacacatgggtgacaactattttatgaatatgcttattattattattattatcgccataaatttttatg

SEQ ID NO: 232405 - DNA, 431 bp, Gossypium hirsutum
cggacgcgtgggtcatgatgttaccttgtttatgtcgtttaaacagcctgggggtatgttggaaatcgcagttcgggattcagagactttctgctgaaaccggagctgcttcgatctattgtggattctggttttgaacatccttctgaagacaattgagattcttttcagcaaaaggatattcttagatatggaggtgcataatttggctttctgttctggtgttttggattctctggtggttgaattgaaagcatcaaaggacttctctaagttatatgcaggctttgcaatactttggcttcatctaagcttgaaccagccctctgatgtatatagatttttcttcttttctgatcttttttctttgattaatgagaggtgatggataatttggctttcttctcttactaggatgaaatttgttttag

SEQ ID NO: 232406 - DNA, 427 bp, Gossypium hirsutum
aattcttggttgtttcgttcgttttaagaacagagattcgaagatgagtaagcttcagagtgatgcccttagagaagctatttcaaccattgtggctaattccaaggagaaaagtcgcaagttcaccgagaccattgaactccagattgggctgaaaaactatgatccccaaaaagacaagcgtttcagtggttccgtgaagctgccacacattcctcgtcccaagatgaagatttgcatgcttggagatgctcaacatgttgaagaggctgagaagattggtttggattatatggatgttgaagcattgaagaagctaaacaagaacaagaagttggtcaagaagcttgctaagaaatatcatgcatttttggcctctgaatctgtcatcaagcaaatcccccgtctcttgggtcctggtctcaac

SEQ ID NO: 232407 - DNA, 442 bp, Gossypium hirsutum
  unsure (1)..(442): unsure at all n locations
cccacgcgtccgcagggagcagagggaaaaaggataaaagcatcgttgtgttcttgcttcttcttcaactctgtctctccgtctctgaacctccttctttcgttcttttcttattcagtattgtaaaagatggccgatgctgaggatattcaacccctcgtctgtgacaatggaactggaatggtgaaggctggttttgctggtgatgatgctcccagggctgtttttcccagtattgttggtcgaccccgacacactggtgtcatggttgggatgggtcagaaggatgcctatgtaggagatgaagcacaatccaaaagaggtattcttactttgaaatatcccattgagcatgggatcgtcagcaactgggatgatatggaaaagatctggcatcatacattctacaatgagctccgtgttgctcctgangagcaccctg

SEQ ID NO: 232408 - DNA, 431 bp, Gossypium hirsutum
attcttattccttttatatttttcctctccaattttccgtcactttcccgagaaaatgagagaaatccttcacatccaaggtggccaatgcggcaatcagataggagccaagttctgggaagtcgtatgtgccgaacatggcatcgattcaacgggtcgatatggtggtgactcggagctccagcttgagcgaatcaatgtttactacaacgaagccagttgtggccgttttgttccccgcgcagttttaatggatctggaacccggtaccatggatagcgtaagatccggtccttacggacaaattttcagacccgataacttcgttttcggacagtcgggcgccggaaacaattgggctaagggacattacactgaaggagcggagcttatcgattccgttctcgacgtagttagaaaggaagccgaga

SEQ ID NO: 232409 - DNA, 444 bp, Gossypium hirsutum
caaaactctcaaaggcactcacttcgatatcgaagtcaaaccagaagatgcggttgcggatgtaaagaagaacatagaaactgttcaaggggcagatgtttatcctgctgcacaacaaatgcttatctataagggaaaagttcttaaagatgacacgacactggctgaaagcagtgtcactgaaaatagctttattgtgatcatgttgacaaagaataaggttgcatctggggagggttcaactgcttcagctgctcctacaatgaaagctcctgaggcaagtaggccaccaactgctccagctccagcttctactgcacctgttgcaatgtcagctacggctgcacttactgctgaatctgctcctgttgcttcaagtactcctctgtcagattctgatgtttatggccaagcagcatctaatctggttgcagggagtaactt

SEQ ID NO: 232410 - DNA, 443 bp, Gossypium hirsutum
cccacgcgtccggtccactgcaagctcggctctcgattcccccaaaatccagctcttcctttcgtgaatcaaagattctcaaagatgactcaagatgtggagatgaaagagcaaccagctccgtccaattccgttccttcctcttctccatccactttgcaccatttgaaggaaattgcgtctctgattgagaccggtgcttatgaccgagaagctcgccgtattttgagggctatacgacttacaatggctttaagacggaagttgaaggcatccgtgctttcctctttccttagtttcgctcttacccctggatccgaggccttcactcgtctttcttcttatcttcctaaggtaatcttttgatggaacatcgtaatattcaattattaatgtggaagtgttttcccccttgggtgaagtgattgccattccatcctctt

SEQ ID NO: 232411 - DNA, 435 bp, Gossypium hirsutum
gaaccctccatttctctctgcaaccagcggcacccaaagatgcaaatcttcgtcaaaaccctaacggggaagaccataaccctagaggttgagtcttccgacaccatcgacaatgtcaaagccaagatccaagacaaggaaggcatcccacccgaccaacagcgcttcatctttgccggcaagcagctcgaggacggccgcaccttagccgactacaacatccagaaggaatccaccctccatctcgtgctccgtcttaggggaggtgctaagaagagaaagaagaagacctacaccaagcccaagaagatcaagcacaagaagaagaaggtcaagctcgctgtgctacagttctacaaggtggatgaatcgggtaaggttcaaaagctgaggaaagagtgccctaatgctgagtgtggtgctggaactttcatg

SEQ ID NO: 232412 - DNA, 434 bp, Gossypium hirsutum
cgagaatctgcccatgattgtcattggtacccgtgatgcatgcttgaccgagcggcgttcaaccattcaccaacttcatgccagatggtctcttaacatatctcacatttatcaagacattcgcctctggaatcattgtaccaaaatcttatatatggcctgtatatggagctctttacttgcaaccttctacctctattgtcttggatgctcacaaagaaaggctataacatattgcgtcggacttttataacgatgttccatacagcctcctgcactaatatgaacaagaagctatttttcgtcacagtgtttatataccaaagatctgtgtgtatgtggtgatagacctacttctaattactccagcagcagctatagattgttttgctcacatacgaaaaaatgcttcataacaagcggaccttttggtc

SEQ ID NO: 232413 - DNA, 439 bp, Gossypium hirsutum
ggaatcgggtaggcttgaaaggtccaatggctactccaattggtaaaggtcatcggtctttgaatcttacactaaggaaagaacttaatctgtatgccaacgtcaggccttgttacagtctcccgggttataagactcggtacgatgatgtgaatcttatcactattcgtgaaaacactgaaggggagtacagtggactcgagcatcaagtagtgagaggtgtggttgaaagtctcaagattattactcgtcaggcaagcttaagggtggctgaatatgcttttcattatgctaagacccatggaagagagagagtttctgcaattcataaggccaatattatgcagaaaacagatggtctttttcttaagtgctgtcgtgaagttgcagagaaatatcctgagataacttacgaggaagtagtcattgacaattgctg

SEQ ID NO: 232414 - DNA, 376 bp, Gossypium hirsutum
cgcgtccgcccacgcgtccgcaacaggcaagtacgagaagaaggtgtacgttttgcctaagcaccttgatgagaaggtggctgctcttcaccttggaaagcttggggctaacctcaccaagctcaccaaggatcaagctgactacattagcgtccccattgagggtccttacaagccccctcactacaggtactgaggagagaatacgagagagggagagagagtgagagagagagagggagagagttggactagaaaaaggaaccatacaacgggatggtttgtttttactaaaatttattgatgatttgtggttagatggttagattttgattttggtaggagtttgtgtgtggggtggatggtaagatttggt

SEQ ID NO: 232415 - DNA, 444 bp, Gossypium hirsutum
gtttttctcgtccttaaaactctcttctaatttggtgccatctttggatctctcacttttctacctttcagatttcgtgaaacggagaggagatatctttattcttctgaacttgcaactggaagaggaaaatttcattacagcaactggtccaggccttttcgttcgtctttacggtacttccctccgtttgaacacttccagatctgaagaaaaatgcctcccgccgctcctcgatccggagatgcgatcttcgccagcgtagaacgcgtgaatgcagaactattcactttgacttatggagcaatagtgcgtcaattgcttactgacttggaggaggttgaggaggttaacaaacagcttgatcaaatgggctataatataggaattagactaattgatgagtttctagcaaaatcaaatgtgtccagatgtgttgacttt

SEQ ID NO: 232416 - DNA, 419 bp, Gossypium hirsutum
gtgtccacagttcactccttcttgaagcagacgacaaaatatataatctctctcaacagcctcaagcccctctcttttttatgttttgtgcgtaaatggcatcatcccttctctctagaactcttttgggtcaccgcttaattcgattttcctcgtctctccctcagaaccccttgattttctctaatcttttcaataagagagagttccgtgtacaggctgagtcttaccataccacatataaggcctctggtcagcattctcgtttaatggcttctgcagcaattgagacaagaagtaatttttcgacacagtctctttctaccaatgatccggttgtttctgttgattggcttcatgctaatttaagggagcctgatttgaaggtattggatgcatcatggtacatgccagatgag

SEQ ID NO: 232417 - DNA, 448 bp, Gossypium hirsutum
gaaacacagtgagggagaaatggtttctctgaagctacagaagcggctctccgcgagcgttctaaagtgtggaaaaggaaaggtttggctcgatcctaatgaagtcaacgagatctctatggcaaactcccgccagaacataaggaagttggttaaagatggttttatcatcaggaagccaaccaagattcactctcgatctcgtgctcgtcgcatgaaggaagccaagagaaagggacgtcactctggatatggtaagcgcaagggtacaagggaggcaaggttgcccacaaagatcttgtggatgagaaggatgcgtgtacttagacgcctactccgcaagtacagggaatcaaagaagattgacaagcacatgtaccatgacatgtacatgaaagtcaagggtaatgtgtttaagaacaagagagtcctcatggagagcatccac

SEQ ID NO: 232418 - DNA, 443 bp, Gossypium hirsutum
cagaaaacaaccataacatggaggagggaacgctagagatcggcatggaatatagaactgtttccggagtggctgggccattggtaatccttgataaagtgaagggacccaagtatcaagaaattgttaatattcgtttaggggatggaacaaccagacgtggtcaagtcctagaagttgatggagaaaaggccgttgttcaggtatttgaaggaacatctggaattgacaacaaatatacgactgtgcaatttacaggagaggttttgaaaactcctgtttctttggatatgcttgggcgcattttcaatggctctggaaagccaatcgataacgggccacctatcttgcctgaagcatatttggatatttctgggagttctattaatcctagtgagagaacctatcctgaagaaatgatacagacagggatttcaacaatt

SEQ ID NO: 232419 - DNA, 451 bp, Gossypium hirsutum
cccacgcgtccgcccacgcgtccgcccacgcgtccgcccacgcgtccggagcaaacaagttctcagagagacaacctattgggacatcagcccagacagacaaggactacaaggagccaccagcagcacccttctttgagcctggtgaactcaaatcatggtctttttacagagctggtattgccgagtttgtagccaccttcttgttcctttacatcaccgtcttgactgtcatgggtgtgtctcagtctaaaaccaaatgtgcaaccgttggtattcaaggcattgcttgggcttttggtggcatgatctttgcccttgtttactgtactgccggcatttcaggtggtcatattaaccctgctgtgacctttggattgtttctagcaaggaaactgtcacttacaagggcattgttctatatgatcatgcagtgcctgggtgctatctg

SEQ ID NO: 232420 - DNA, 450 bp, Gossypium hirsutum
gtttcgacaaaatcaaacggttacgaacactaggagttccaaaaaggggcacacccgatattcacctccttcaaaagttttggcattttcattttcgtctccactaaaaaaagccctgcgtccttcgaatcgattccattcgatttcaccatcttttaaatcctatcaatttctcagatctttcccagtcttttctgcaaccatgagtaagggaccaggactcttcgtcgatatcggcaagaaagccaaagatctgttgactaaagattatacctcggatcagaagttcactgtttctacttacactggcgctggagttgcccttacatcaactgctctaaagaaaggaggactttctactggggatgttgctgcattatacaagtacaagaatactcaattcgatgtcaaagttgataccaactctaacatctccacaacacttacatt

SEQ ID NO: 232421 - DNA, 440 bp, Gossypium hirsutum
  unsure (1)..(440): unsure at all n locations
gaaaatagatgttgtcttttttggggcaaaattggcacggagaagggctggagcttgcgtctaaaggcgtgtacgagtacgagtgctgcaactgcaagcaatcctttcatcctctgcaaccttctactattctacgagaatggcgagaacagaaaatttgaataacttcattgttggggatttgccaacattgttctacatccctgacttcatcacagattctgagcaagctcggctcctaaataatatttaccaagcacctatatcaaagtggaaatctttgaagaataggagactccagaattggggcggtgttgttcatgaaaagggtcttctgtcacaagatttgccaccttggctagctaagattacaaaaagaatatgtgaagaatcaggactttntccttcagcaatcaaccatgttcttatcaatgaatacc

SEQ ID NO: 232422 - DNA, 431 bp, Gossypium hirsutum
aaaaaggaaagaaaaaaatgaagctcttgtttctaactttgctgctttgttctcttcttctatgttcttcagtttttgcaccaacaatggctcagcctcgttcacgtaagcaaacatatttttttcataatctaagccttgggtgtgtgtgtgtgtgttttaatctttgatgtaattttttttggggggggggaatggcagctttttgtgaagggaaatgcaaagggaggtgcaataaagcggcggtttgggatcggtgcttcaaatattgcggcatatgttgcgaggagtgtcaatgcgttccgtccggtacttacgggaacaaacacgagtgtccttgctacagagataaggtgaacaacaagggcaaacccaaatgcccttgaaaatgaaatatattcgagttcgggatttaatcaagcttaaagatc

SEQ ID NO: 232423 - DNA, 349 bp, Gossypium hirsutum
cgttgatattgcaactcatcagcatggctgttgcgttttgcaacgatgcattagccattcaaatggtgagtatcgagataagttggttgaagaaatatccaccaatgggcttatactagcacaggatgcatatggaaattatgttgttcagtttatcttggagttaaaaatcccatctgacacttcaactttggtttttaaatttcaagggaactatgtacacctctcatcttaaaagtttagcagtcatgtggttgaaaagtgtattgtggtattaaatgacgagagccggtcaataatcatccgtgaattgctctctgtaacacaattctaacggttgttacaagat

SEQ ID NO: 232424 - DNA, 453 bp, Gossypium hirsutum
aaaaaaaatggtttagatataaatttgtatatatgcgttatattttcatttcacttgacgagcttaggtaatttgttttgaaggtgacaaacaacagcacaccacacagcagcgcattttcttgttcttgttcttcttctagttgtttccaatggaaaagctggaacacctcaaatctgccgtcgctgctctttctgaaatcagtgaaaatgagaaaaacggattcatcaaccttgtctcccgctatctcagtggagaagctcagcacatagagtggagtaagatccagactccaactgatgaagtggttgttccttatgacaccttgtctccctctcctgatgatcctgctgaaaccaagaagctcttggacaaacttgttgtcttaaagcttaatggaggtcttggaaccactatgggatgtactggtcccaaatccgtcattgaagttcg

SEQ ID NO: 232425 - DNA, 438 bp, Gossypium hirsutum
acgccccttcttacttttatcattcaataattttcatcaacgaagaaaaatgagagagtgtatttcgattcacattggccaggccggaattcaggtcggaaatgcttgttgggaactttactgtctcgagcatggcattcagcctgatggacaaatgcctagtgacaagactgttggtggaggagacgatgctttcaacacctttttcagcgaaaccggtgccggaaaacacgtccctcgagctatatttgttgatctggagcctactgttatcgatgaagtgaggactggaacataccgccaactgttccaccctgagcaactcatcagcggtaaagaagacgctgcaaacaattttgctcgtggccattatacaattggaaaagagattgttgacctctgcttggatcgtatccgaaagcttgctgataattgtac

SEQ ID NO: 232426 - DNA, 386 bp, Gossypium hirsutum
atctagctgctaggctgtacttctattactctctttgctatgagctcacgggtgatcttgctgaaattaggggtaaccttctatccctgcatcggattgcaacattgcgccatgacgagctgggtcaggagacacttctcaacctgctacttcgcaattacctccattacaatttgtatgatcaagctgagaaactgagatcaaaggcacctagatttgaagctcactcaaatcagcagttttgctcggtacctttcttacttggggaagattaggacaatccaattggagtacactgatgccaaagagtgtcttcttacaagctgctcggaaagcccctattgcagtctctggttttcgggttcaatgcaacaaatgggcaatca

SEQ ID NO: 232427 - DNA, 444 bp, Gossypium hirsutum
aaatagagaaaaaaaagtatcattaaacaccttcaccaacaagaacaaaaaaaacaggtgaaaccccgttttcttttggtctcaaaacgattcaaaagggcaagattcttggttttagggtttgggttttcattgatttttagtgaaaaaattataaaaaaattatgggaagaggtagggttgaacttaagaggattgaaaacaagatcaacaggcaagtcacttttgcaaagagaagaaatggtcttttgaagaaagcttatgagctttccgttctttgtgatgctgaagttgctctcatcatcttctccaatagaagaaagttgtacgaattttgcagcagctcaagcatgatcaaaacattggagaggtaccaaaaatgcaactatggagctcctgagccaaatgtgtcatcgagggaggctgctttggaattaagcagtc

SEQ ID NO: 232428 - DNA, 442 bp, Gossypium hirsutum
catttgcgtcgaccccatttcgcatgaggatgtttctgctaccgttttggccacttacgtttatcataatgctagtgatgtggggttggtctaagaccttcctcttctctttctacaatcttcgttgccgtttgcaccagacatgggtcgttcctaggttcggctttcagtatttcttaccatttgcaacaaagggcatcaacaagcacatagaggaagccatattaagggcggacagattgggggtcaaggttattagcctcgccgctttaaataagaacgaggctctgaacggaggagggacactgtttgttaacaagcatccagagcttaaagtgagagtggttcatggcaataccttgacggctgcggttatccttaatgaattttccaaggatgttaaagaagtgtttctaacaggagccacctcaaagctcggtag

SEQ ID NO: 232429 - DNA, 444 bp, Gossypium hirsutum
attctcgactcactcttcccacttcttcgaagtctttctactgctgcaaatccctgtcttcccctacttcaccttctcccctcagatcccgatctagggtttcgccgccaattcttttttcgcatttcgatcgctcttttttcttaccttaaatggcgattgcagcccaagctccagatattctcggcgagcgtcaatctggtcaggatgttcgcactcaaaacgtgatggcgtgtcaagcagttgccaacattgttaaatcctcactcggcccggttggactcgacaagatgcttgttgatgacattggtgatgtaacgattactaatgatggtgctacgatcctgaagatgttggaagtagagcatccagctgccaaggtacttgtagagttggctgagcttcaagatcgagaaagtggtgatggaacaacctctgttgtta

SEQ ID NO: 232430 - DNA, 447 bp, Gossypium hirsutum
gtgaaactaaaaagacaaggctaggaaagcaatctctaagcaaacgaactgagaaacagcttttcggcttccccgccgatctctccaaattctattttcaaatcgaagtcaacaatcaattgtaaagcactttctcctctctttcctaaggaaaggagatgaagcgagtcttcggcgttaagaaagacaaggaaccgccgccttcgattcaagatgcctccgataggataaataaaagaggggacaatgtggaggagaagttgaagaaactggatgctgagcttagtaggtacaaggaacagataaagaagacaaggcctggccctgctcaagaggccattaaagctcgagccatgagggttctcaagcaaaaacgaatgtatgaagggcaacgtgatatgctttacagtcagacgttcaacctcgatcaagttgcttttgcttctg

SEQ ID NO: 232431 - DNA, 447 bp, Gossypium hirsutum
ttcaaatcgcagggcttttttaacctctccctctctctctagaaccctcactattcttttcttttgtttgtttatatggcatctcaagccagcctcctccttcaaaaacagctcaaagatctttgtaagaatccggttgatgggttctcggccggattggttgatgaaaacaatatctttgaatggagtgttacaattatcggaccacctgatactctttatgaagggggatttttcaatgccatcatgagctttccgcccaattatccaaacagccctccaacagtgaaatttacatcagagatttggcatcctaatgtttatcctgatgggcgtgtttgcatatcaattcttcatcctccaggtgatgatccaaatggttacgagcttgcaagtgagcgctggatgccagtccatacagttgaaagtattgtattgagtatcata

SEQ ID NO: 232432 - DNA, 436 bp, Gossypium hirsutum
ggcgattcctaaacgaaaccctattttcctatctgtaatctttgtttcgctcctcgccatcgcctccgctaaagtattcttcgaagaacgttttgatgagggatgggaaagtcggtgggtaaaatctgactggaaaaaggatgagaacatggctggggagtggaattacacttctggaaaatggaatggagatcctaacgacaaaggtattcaaactagtgaagactacaggttctatgctatttcagctgagttcccagaagtcaacaacaaagataagactctagtcttccaattttctgtcaagcatgagcaaaagcttgattgtggtggtggctacatgaagttgctcagcggtgacattgaccagaaaaaatttggtggtgaaaccccatacagcatcatgtttgggcctgatatctgcggctatagcact

SEQ ID NO: 232433 - DNA, 443 bp, Gossypium hirsutum
cttttataagcaatcctttcctttacactctaccctcactatcatccctcctttcttatttttccctttttggttcctctctttctgtccttactttgtgatggaattaggaagtgctcttcagttccttgataacaaatccattctagtcactggtggaactgggtttttggcaaagatatttgtggagaaaatattaagagttcaacccaatgtcaagaaattatatcttctcgtaagagcagccgaccataaatccgccatccatcgtttgcaccatgagatcgtagggaaggatctgttcagaaatctgaaaaagaaatgtgggaccaatttcagctcttttatatcacaaaaaattacagttataccaggtgacttaacccatcaagatttgggtctccatgattctgatttgcttcaactcctttgcaaggaactcg

SEQ ID NO: 232434 - DNA, 448 bp, Gossypium hirsutum
tttctctcttttattattgtccgttgacaccgcaaatagaagagaagagtaatggccggcaaaggagaaggtccagcgattgggattgatctcggaacaacttattcttgcgttggcgtttggcaacatgatcgtgttgagatcatcgccaacgatcaaggtaacaggaccacgccgtcttatgttggctttactgataccgagcgtttgatcggtgacgcggcaaagaaccaggtcgccatgaaccccttgaacaccgtatttgatgcaaagaggttgattggtcgtagattcagcgatgccgctgttcagagtgatattaaattgtggccattcaaggtcataccaggatctggtgataaaccgatgattgtagtttcttacaaaggtgaggagaagcaatttgccgctgaagagatctcgtctatggtcctcaataagatgcgtg

SEQ ID NO: 232435 - DNA, 443 bp, Gossypium hirsutum
gaaaagaagaggaaaaaccagaaaaatggcgaaaccccaacttttatttctattttccttttcccttctctgtctcatttctttttccgccgccgattcctccatcacagccgacttacgtctcaccgattccagtttcccgtcggttcatgcgaagaagctgattatggagttgaatttgtttcctaaaggggaagtcaatgtcgttgacgaacaccgggtttcgttgccggagggtcccaaactggtggagaagcggttcaagttcccaactttggaagtgcccggtggagtttcctttgaggatttgggtcaccatgctgggtattacaagctttctaattctcatgatgccagaatgttctacttcttcttctaatcacgcaatagcaaaatggaccctgttgtaatctggttgactggagggccaggttgtatcattg

SEQ ID NO: 232436 - DNA, 427 bp, Gossypium hirsutum
actaccctcaaggaatctacagatctctgtccctctttctctacgtctcaaaccctaattccttaatttttacagaagatcgggggtttaatcgcggagaatcaaccatgtttaacaggcttttcgggaaacccaagcaggaagcaaatgctctaaccacgttagacaaattaaatgagacccttgaaatgcttgagaagaaggagaaagtacttgcgaaaaaggctgctgctgaggttgaaaaggccaaggaatttgccaaagggagaaacaagagagcggctatacagtgcttgaagaggaagagactatatgaacagcaaatagagcagcttggaaacttccagcttcgtattcatgatcaaatgataatgttataaggtgcttaagccacaactgtaactgaaaattcattgagaactggagc

SEQ ID NO: 232437 - DNA, 445 bp, Gossypium hirsutum
gacaggaagtgttcgcgttgaaagagatcggcgtggagaactccatcggtattttcaagaaagcggccaagcctttggtggttaaaggtgaggggcatcagataccgttcgatgataattcttttgacttcatattctccggaggagctcgcctcgacgcatctgctcgcccggcggatttcgcgttggaaatagctcggaccctgaaacccgaagggtttgtggtggtccacgtcaaggctaatgatacatacagtttcaattcattacttgatttgttcagttctttcaatttagttaaaacgatcgacatggctggtttcgattcatcaatgccttatattagagagattgtgttgagaaaagatactgtaattcgtaaccatgggggtagaaagattcccgatggtgtttccggtaataagtgctcggttccggggcacaa

SEQ ID NO: 232438 - DNA, 335 bp, Gossypium hirsutum
acgcatgtgtctcaaattatagtccggttacaccgcaaagcgaagagaagagtaatgaccgtcgaaggagaaggtccagcgactgggatagatctcggagacaacttattcttgcgttggcagaaggcatcatgatcgtgttgagatcatcgccaatgatcaatgtaacgaaataatgccgatttatgttgactgcactgatactgagcgatagatcggtgacattgcataaaaccttgttgacatgaacacacttgaacaccttatttgatgcatagaaagtgattgtctcgattatatcagcgattgctgcttgttccacagtgaatattaaa

SEQ ID NO: 232439 - DNA, 436 bp, Gossypium hirsutum
gccatggagaaagttggcaaagaaggtgttattaccattgctgatgggaaaaccttgtacaatgaattagaggttgttgagggaatgaagcttgatagaggctacatatccccttactttatcaccaaccagaagaaccagaaatgtgaattggagaacccacttattttgatccatgagaaaaagatctctaacttgcctgctttggtgaaatttttggaattgtccttgacgaagcaaaggcctttactaattgttgctgaagatcttgaaagtgaagcacttgcaactctcattctgaacaagcttcgtgccggaatcaaggtgtgtgccattaaggccccaggttttggggaaaataggaaagctggcttgcaggaccttgctgctcttaccgggggcgaggtaataactgaagaaacttgtcttgacattg

SEQ ID NO: 232440 - DNA, 379 bp, Gossypium hirsutum
cccccatagattcaaaatcttcctagtgttcatattactctaaatgagtatacctgtttttaaacactagttttcgatccgatgctggaatcctatactccctcgaaaacgtttctcggcagttcgtatttgactttactgcttttgatcccgttaacgaacaaaatagtcgagtaaagctaattatcggtggcagctttggtgtctgtcagaatagtcagagttgcactcatgtaattgttgataagattgtctacgatgatcactgatggttagctgctcgaaacgattgcttaacattagttactgggttatgggtttgatcatagttttgatattggaatgcctgttgatgctacttcgattatgtacagaccta

SEQ ID NO: 232441 - DNA, 426 bp, Gossypium hirsutum
gtcagataagcagagaaaatggaggctgccagaactgttaaggacgtttcccctcatgacttcgtcaaggcttacgccgcccatctcaagcgttccggcaagatcgagcttccttcatggactgatattgtgaagactggtaaactcaaggaacttcctccctacgatccagattggtactatatcagagctgcttccatggcaaggaagatatacttgaggggaggtcttggtgttggtgcctttaggaggatttatggaggggctaagagaaatggaagtcgccctcgccatttctgcaagagtagtggatctgttgcccgtcacattcttcagcaattgcagaatgtgaacatcattgatattgatcctaaaggtggaaggagaatcacatcaaacggtcagcgtgatctggaccaagtagct

SEQ ID NO: 232442 - DNA, 447 bp, Gossypium hirsutum
agcaaacaagcgtcaatactgctgtgaagccgcagaggcgtgaagtgaagtgaagtgcattctggctggtcgacaatggggatttcgaggtttgttttactcgtgtttacgatctcaatgctggcatctccggcactctccgatctggttctctccaaagtcgatcgacgtatttatttgacatcccacattgttcgaatttcttcaactttagaggtggagaatgcaggtccagagactgtgtctaaggttttgttggcttttcctgaccttcaagcccaaaacttggcatatttgatggcttccccgcatgaagccaaagcgaaattcaaagtctctgttgtttctttccctattgatgtcgtcaaaccagaagatatgcctcctggtgtgacattctattcggtatcattgccacagggattaaccgtgggcgcttgcttgact

SEQ ID NO: 232443 - DNA, 394 bp, Gossypium hirsutum
gaaagatcggggccgttgaaacctagcgtcgagaccgttgagggaacggttaagagtgtggttggaccggtttatgataaataccatgatgtccctgttgaattccttaaattcgttgattccaaggtgggtgaatcagtgaccaagcttgatcgtcgagtccctccagtcatcaaacaggtctcaaccgaagccatcttggcagcccaaaaggctcccgaggttgctcgtggcgtggcttccgaagtccaccgtgctggagtggtgaacaccgcctcaggattagcaaaatcagtgtacaccaagtatgaacccacagcaaaagagctttatgcgaagtatgaacccaaagctgaacaatgtgcggtttcagcttggcgtaaactcaacatgc

SEQ ID NO: 232444 - DNA, 415 bp, Gossypium hirsutum
gaagaatcaccctatgtggtgcatctaacgcacctaaccacacccgagtctatttatcatctccgccttggatttgcctctttcgcctctaaaccatacacaccacaacttggcacatgtggctcctttggcctgtcacactgtgttccatgatgcttacctggatatattgttccacttttgttgtcgaaagcaatcggtttcataatatcatactacagacctgggctatacccaagtacaacatacagtaccgctcgaaatcgcaaaaacaatccatcaataacttgattgaagaagccatattagaggcagaggaaaaaggtgctagagtgttgagtctaggcctcatgaaccagggtgaagagctgaacatgtatggtggggtgtacatgcaaaagcatccccagcttaa

SEQ ID NO: 232445 - DNA, 453 bp, Gossypium hirsutum
cccacgcgtccgcggacgcgtgggttggaatggacagtggttttcagaagaaatcaagctcaaattcctcaaaagtgcagatccaggaaaccgatgaagctaggaaaaaattctcaaatgctaaatctatttcatcagcccaattttttggtgaccaaaccagagcagctgacaatgaagctcaagttactttgcagaaattctcaagctcaacagccatctccagctctgatctatttggtcaaggtgcagataatgctcttgaccttactgctagtgacctcatcaaccgactctctttccaggcacagcaggatatctcgagccttaagaacatagcaggagagaccggaaagaagctgagctcctttgcgtccacttttatgagtgatttccaggacagaatcctgtaatggagtgttctggccttgaaaatctatatatatgatatat

SEQ ID NO: 232446 - DNA, 410 bp, Gossypium hirsutum
cttcctcttctccctcttcttaggtgaggagcaacatgttgttgaagggtcaagggtgtggacctttggtttcagacccaagatgttgtttgtgttcggggattcctacgctgatacagggaacaacaggaaagctttggcaagttcctggaaacttccttatggaattacattccccgggaaacctgctggccgtttctctgatggtcgtgttttgactgatttcatcgctgggtacttggcgattaagacaccagtgccctacagatacaggaaagaactggggggtcgtctcaagtatgggttgaactttgcttatggaggaaccggtgttttcgacacgccagctcctgagccaaacatgacaacccagatcgatttcttgcaacagcttctcaatgactcggtct

SEQ ID NO: 232447 - DNA, 443 bp, Gossypium hirsutum
  unsure (1)..(443): unsure at all n locations
gtcagccaattgtttgagctagctagctcttactcaaatggcaaccaaaacgatgatgttgcaaatatttccacttttcttctttttgttcagtgtctgcaactccattttccttggtgctaatggagatgacaatggtggttggcaaactgcccatgccaccttctacggtggtgctgatgctaccggcacaatggggggagcttgtggttatggaaacctgtacagtcaagggtatggaacgagcacagcagctttgagcactgcacttttcaacaatggcttgagctgcggtgcctgctacgagctccggtgcaacaatgatcctcaatggtgcattagtcgaaccataaccgtgacagccaccaacttttgtccacctaactatgctntatctagtgacaatggcgggtggtgcaatcccccacgagaacactttgatt

SEQ ID NO: 232448 - DNA, 450 bp, Gossypium hirsutum
acggaaattaagagtagcattgcagtttcctcaatattgtgttggcaacatcgccaaactttttcgtttactttcatcttcggtccctccgaagatctttaccaaacacaaaaaaaaaccctgaaattgaacttttgttttagctcaagttttgcatgaacttatcgatacttatctgaaatctgctttacttggattttattctttttcattctttaggcaaacgcagatgccaaaatttttcctttctgctgttttaaagagtgtttattggttacttcattttaattttttggtattgttgagtgtaaatggccaatgcatctgggtttttcacgccttcagttccaaggctgaggagcaagattcagccttcaataggcgtttctcgatctgggttttgcttctctggtggaatctcgaggagggtagtgtgctcaagtgccattg

SEQ ID NO: 232449 - DNA, 441 bp, Gossypium hirsutum
cggacgcgtgggcaccaaaccaaaaatcgaacacgaaattcctctttttcgccagatctgggcacgtcgccggtcttagcaacctccgatccaatcatttcacctattcatttcaattcattaaacgtgtgacgcgacccactggatcgaagatgccggtggccgcttctgccatctacttcttgaatcttcgcggcgatgtcctcatcaatcgtctctaccgagacgatgtcgggggaaacatggtggatgccttccggatgcacattatgcaaacaaaagaactcggaacttggtccgtcagacagattggaggttgctctttcttttacatgagaatcagcaacgtatacatcgtaattgttgtcagcagtaatgctaatgtagcttgtgctttcaagtttgtcgttgaggctgttgctttgtttaaatcatattttg

SEQ ID NO: 232450 - DNA, 428 bp, Gossypium hirsutum
  unsure (1)..(428): unsure at all n locations
gtgggaaccccagagcattgaggaggttgaggactgcttgtgagagagcaaagaggactctttcatcgacagctcaaactaccatcgagatcgattcattgtacgagggtattgacttttacaccacgataactcgtgcaaggtttgaggagctcaacatggatctttttaggaagtgtatggagccagttgagaagtgtttgaggatgctaagatggataagagcagtgtccatgatgttgttcttgttggtggttccactcgtattcctaaagtgcagcagttgttgcaagacttcttcaacgggaaggagctctgcaagagcattaatcctgatgaggccgttgcttatggtgctgcggttcaggctgctatcttgagtggtgaaagaaatgagaaggtcangatctattgctttttgatgtcac

SEQ ID NO: 232451 - DNA, 277 bp, Gossypium hirsutum
gtctaatttcattagaataagaaaggtacaagactaattccgacagtatacggagcactatttactacgtatgatgatttatagtaagagagtgaactttgatctattctaaaggttttaagaccagtattagttgcacatggaatggctagttcaaccttgtatgtattagtacgtgttggtcatcacattataattgttgaaagattctgggaggaatgagactatttttcattacatttttactaataaacgtccgatttgattgttctaaaat

SEQ ID NO: 232452 - DNA, 391 bp, Gossypium hirsutum
cccacgcgtccaaaaactcttctctatgtctatcctcttcctttttgccctcttctccatgcaaatccatgctagagagtacttcagcaaattcccaagagttaacatcaatgagaaagagacaacaaccagagagcaaaagcacgagaccttcgttccccagaccacccaaaagccagaagaacaagagccaaggttcattcctgaaacccaaaatggttatggcctttacggccacgagtcaggctcaagccggcccagtttcaccaccaaagaaacctatgaaccctatgtcacccctgttagattccaccctgatgagccctataacagcatccccgaatcctccaacaataaagacacttactactacaacaagaatgcctacgag

SEQ ID NO: 232453 - DNA, 347 bp, Gossypium hirsutum
cacagttttcggtatcagaaaccctgaggaaatcccatgggctgaggctggagctgagtatgttgttgagtctactggtgtttttactgacaaggacaaggctgctgctcacttgaagggtggcgcgaagaaggttatcatttctgctcccagtaaggatgctcccatgtttgttgtgggtgtcaatgagaaggaatataagcctgaccttaacattgtctccaatgctagctgcaccaccaactgtcttgctccattggctaaggtgatcaacgataaatttggcattgttgagggtcttatgaccactgttcattctattactgctacacaaaagacttgtgatg

SEQ ID NO: 232454 - DNA, 425 bp, Gossypium hirsutum
cagaaaatgaaggtttccgtcaaaactctcaaaggcactcacttcgatatcgaagtcaaaccagaagatgcggttgcggatgtaaagaagaacatagaaactgttcaaggggcagatgtttatcctgctgcacaacaaatgcttatctataagggaaaagttcttaaagatgacacgacactggctgaaagcagtgtcactgaaaatagctttattgtgatcatgttgacaaagaataaggttgcatctggggagggttcaactgcttcagctgctcctacaatgaaagctcctgaggcaagtaggccaccaactgctccagctccagcttctactgcacctgttgcaatgtcagctacggctgcacttactgctgaatctgctcctgttgcttcaagtactcctctgtcagattctgatgttta

SEQ ID NO: 232455 - DNA, 373 bp, Gossypium hirsutum
gaaaaataaaaactggttcagcgacagagttggcttcatttctcttacctctatcaaataccacccaaacatcgtcgtcttctacactcttctctggtaagttcatcgaaagatcaaatcaagatccctgccaaaatgaacgacgctgatgtatccaagcagatccagcagatggtgagattcatccgccaggaagcggaggaaaaggctaacgagatctctgtttccgctgaaaaggagttcaacatcgaaaagcttcaattggtggaagcggagaagaagaagattatgcaggagtacgagaaggaagagaagcaagtttgaaatccgaaagaaaattgagtattcgatgcagcttaatgcatctaggatc

SEQ ID NO: 232456 - DNA, 392 bp, Gossypium hirsutum
aaaagatctggcatcatacattctacaatgaactccgtgttgctcctgaggagcaccctgtgcttctcacggaagcacctctcaaccccaaggccaatagagaaaagatgactcagatcatgtttgagaccttcaacgtacctgctatgtatgttgccatccaggccgtcctctctttgtatgccagtggtcgtacaacaggtattgggctggattccggtgatggtgtttctcacactgtgccaatctatgaaggatatgcccttccacatgccatccttcgtcttgaccttgcaggtcgtgatctaaccgatgccttgatgaagattcttaccgagagaggttacatgttcaccaccactgctgaacgggaaattgtccggacatgaaag

SEQ ID NO: 232457 - DNA, 419 bp, Gossypium hirsutum
gtccagagagctgtttgcatgatttctaactccaccagtgttgctgaagtcttctctcgcattgaccataagtttgatcttatgtatgccaaacgtgccttcattcactggtatgttggtgagggtatggaagaaggagaattctcagaggctcgtgaggatcttgctgcattggagaaggattatgaagaagttggtgctgagtcggctgagggtgatgagggtgaagatgatgagtactaagaagtacctgtgattgagtgtgcgtatgatgtcttttattacctgttgcttccgtgttatgcaagcttctattctttgaagcttgttaaagacttgaaatggtttactgtatgttatgctttttcatggtttatttgtgtttggagtgaaacttgatatttttgtgtctgtattgg

SEQ ID NO: 232458 - DNA, 423 bp, Gossypium hirsutum
ctcaaaatatggccaggagaagggttgttttggtgcagattttggcactagccttggccgctgttatgccattgctctcaggaggtgtggatattcaacaagttagggtgctggcagctaaattcaacgtgacttgcgtagtggtattcggagactccagcgtggatccaggcaataacaactatattgctacgccctttaagggtaatttcctaccgtatgggaaagacttcttcagaggccacccgactggacggttcagcaatggaaggctagccactgattttattgctgaagctttgggttacacgaacgaaattcgacctttccttaacaagagattgagaccagttgatatcttgcatggtgttagtttcgcatcagctgcttctggttatgatgagctcactgccaatctctcac

SEQ ID NO: 232459 - DNA, 419 bp, Gossypium hirsutum
gttccgtagcatacggaccgtctccatccgccatggcaccaacaccggactgcatgacaaacttgtttaacttgtcggattgtttgccgtacgtgacggtcgaaagcaaccaaacgaagccggacaaaccttgttgcccggagttggccgggctcgtggaaagcagccctcagaggttatgtttattgtttgataagaacgcgacctcgagttatggagtcgacattgacatggatagagctcttaagctacctaatgtttgccatgtataaaacccctcccgttagactctgctccactatctatggtgccgcttcaatggggttccaacttcaggcactgaagtatatttatcaccaggatcagctccaagcgcttcaaatggaaacagcagtggtgcttcaaacatggcattattt

SEQ ID NO: 232460 - DNA, 429 bp, Gossypium hirsutum
cccacgcgtccgatttgtctgtattttgaataaagcatcgcagatttttctcagattgagattccttagaatctcacccatccctttaacgccctggcctaatttccgtttctggttagggtttatatcacgatttatccgttccttttctcagaaagccggcccacctccttccttcacacctgcataatccaaatcctcagaaaaagaacaacaaatcgaagaaaatggtggtcaaaggcgaagaatctgacagaatcttagagctcttcttaaagattggtttagacgaacgaactgctcgcaacaccatcgctaacaacaaggtcactgctaatctcactgccgtcgttcacgaggctgctttggctaacggatgtgaccgtgcaattggaaatcttttatatacggttgccacgaagtaccctg

SEQ ID NO: 232461 - DNA, 426 bp, Gossypium hirsutum
cccacgcgtccgctcttaaccaaccacaaacccatttaagttggtgttggtgacaccgagagttcaagatccaattaaagatgaaggtgatagagaagatccaatctttgcaagaagggaaagtggtgttttcctttgagttcttccctccaaagactgaggatggagtagacaacctattcgagagaatggatcgtatggttgctcataacccgtccttctgtgacattacatggggtgcaggtggttccactgctgatctcaccctcgacattgctaacaagatgcagaatatcatctgtgtggagacgatgatgcacctcacttgcaccaatatgcccgtagagaagattgaccatgctcttcagaccatcaagtccaacggtattcagaatgttctcgccctccgaggtgatccccctcacg

SEQ ID NO: 232462 - DNA, 329 bp, Gossypium hirsutum
tcgatcgggaaaggcatcttggtagaacatgccaccggtgaggtgatcggagaaaccgcggttgttggcaacaacgtgtcaattttgcatcacggtaccctcggagggactgggaaggcatgtggagatcggcatccgaagattggagaaggagtctaaatcggagccggtgcaaccatattagggaaagtgaagataggggaaggagcaaaaatcggggcagggtcagtaaggctgatcgatgtgccacctcagaccacggctggaagcaaccctgcaaggctcagcggagggaaggagaaaaccgcaaggcatgaggaatgccccgg

SEQ ID NO: 232463 - DNA, 423 bp, Gossypium hirsutum
gtgactctcctcgcagttattcccaagtattcacagaaggattggctttcaagctacgaaacattgactacctatgtggtccctaggtcctccaagaagttgtatgaagataatgaatatgctctttacactgtcacgttatttggtcgcgtcgctgacaatttcagaactagtgcacgggaacgaggcttccaaattcgtgattttgaatatagtccagaagcacaagaaagtcgtaagcaggaactagagaaattggtacaagaccaagatagcttgcgaagctcacttttgcaatggtgttacactagttatggggaggttttcaactcctggatgcatttttgtgctttacgtatctttgcagagagcattctaagatatggtctgccgccgtctttcctggcatgcgttttgtcccca

SEQ ID NO: 232464 - DNA, 419 bp, Gossypium hirsutum
ccagtgttttactctctcgtcaacttcaatggaggctccgatcagagccagagaagccctaagtttcattctcttctctcttctattttcgatctgcagatcctcttccttaaaccatctcctgatctccaacgccgagcgtagaattgacttgagctcccacattgtcaaagtttacttgactttgaaggtcgagaatgctggtagtacgcctacttcagaggtgtttctttctttcccacccactcaagttgatcatctcgcaacggttgaagcattagtaactaaaggaaagaggaagaagactacgttagtccgtcttgatgtaaaaccaactgaactgcctgatgcacctaatgacgctaaatattttgcgatttatttggaaaatccattaaagtctggtgaaagcacaaccc

SEQ ID NO: 232465 - DNA, 408 bp, Gossypium hirsutum
aagcgtccggttcgaccggctattgtgccaaagaaagctcgagccacaagcttacattctcaaattccatgctgtctagtttatggttgcaacaaggaccttagctctttgaacgatttccacaagaggcacaaagtttgtgaggctcactctaagactgccaaggtaatggtcattggaattgaacaagggttttgtaagcatcgcagcatgtttcatttactgcctgaatgtgttgagggtaagcgcagttgtcgtaaacgcctagcagggcataatgagcgcagaaggaagcttcatttcaataccttttctggaaaatcacatatggaggcctcattcatttcaaggtaccaaatttactggaacctccataccgaaacaaatgcctttgtgtatacctaacat

SEQ ID NO: 232466 - DNA, 393 bp, Gossypium hirsutum
ctcgatttgccttcaggcggtcatttgactcatgggtattatacctccggtgggaagaagatttctgctacttctatttacttcgagagtttgccttacaaggtgaactccactacggggtacattgactacgataagttggaagagaaggcgttggatttcaggcctaagcttatcatttgcggtggaagtgcgtatcctagggactgggattacgctaggttcagggccgttgctgacaagtgtggtgctctgttgttgtgtgatatggctcacattagtggccttgttgctgctcaagaggcaaacaatccgtttgagttctgtgacattgtcacaaccaccacccacaagagcttgaggggtcctagggctggtatgattttctatcgc

SEQ ID NO: 232467 - DNA, 413 bp, Gossypium hirsutum
aatatacaaaccttgttcttctattttagctgctcttcacattgagaagctagctttttggtgtgtttgcttagcttcaatccacattttctttgttgcgaagatggttgcacacaaattcaccgttgatttgaataaaccccttgtcttccaggttggtcaccttggagaaagttatcaggagtgggttcatcagcctattgtgagcaaggaaggtcctaggttctttgagagtgatttttgggagttcttgactcgcactgcctggtgggcaattccaaccatatggctgcctgttgtttgctggtgcatttcaatgtccgtacgtatggggcatacactttcccaaatcgctttaatggttgcttttggcatttttgtgtggacatttgtggaatatgttttacaccgat

SEQ ID NO: 232468 - DNA, 420 bp, Gossypium hirsutum
tctgattcttgttcacgtcaagcttggcattttctgtttttctcaatggcaatggatgcttcactgactatgtgcaaatcggtcacatcacctcctggcttattcttggggagaagtagagttattaggagttcccagtgtacctttatggtgggaagcaggatcaactttcctaggcagaaagctcagtcaacccaagttaaatgtaaatctagcaggtgtggagtagctcttggtgctaaatgccgtgctgagaaaattttggtggcaaatagaggagaaattgctgttcgtgttatccgaacagctcatgagatgggaataccatgtgttgctgtttactctacaattgataaggatgcacttcatgtgaagctggctgatgaatcagtttgcataagcgaagcaccaagcagtcaa

SEQ ID NO: 232469 - DNA, 417 bp, Gossypium hirsutum
gtggtacggattaccatatacctgttgttggaggaatcgtgaaagagccaccaatgcacgttgtgcatattgctgttgagatggcccctattgcaaaggttggaggccttggagatatcgttactagtctctcccgtgctgttcaagatctgaaccacaatgtgaatatcgtttttccgaaatatgactgcttgaaatttgaacatgtgacagactttcattaccaaagatgttattcttggggtggcactgaaattgaagtttggttcggtaaagtggaggggctttcagtttactttctcgatccataaaatggattcttctcgacagggtgtgtttatggttgcggaaatgatgcacagcggtttggtttcttttgccatgctgctctcgaatttctacatcaaagcggatttc

SEQ ID NO: 232470 - DNA, 425 bp, Gossypium hirsutum
ctaggtttacttttcagggaatccaggctcgtcctacgtctttgaaaaactcttatataagacctttcctggattgggtgcaatgatcaccaagaaaatagcaacaccggaaagaagaaagatctagtttcaattaggagctagaatggcggacatgcaactagttagggccagcaagagagtagagccgcagtacgtggagatgatggtgcctttgtattcttacgggtgcgaaaggaaagtcaaaaagactttgtcccatctcaaaggtatacctaattattttcttagctaagacccttgtcacttaattcaatgttatccctatgttttctgctactccattcttagattattggcccaaagcccagtgatattgtcaaaggacttggaattgtaaatctattgagtgaatttgggccatt

SEQ ID NO: 232471 - DNA, 416 bp, Gossypium hirsutum
gcgatttatagtggaaatatagctccgagagacttcttcgaagagaggtagaggagtttaggacgcgcgatggctggctcgtggagagcatgcggctctttggtggttctagctatagttttgttcggatgtctctttgcaatctcaattgcaaaggaggaagccacgaaattggggacagtcattggaattgatcttggtacaacttattcttgtgttggtgtttacaagaatggtcatgttgaaatcatagccaatgaccaaggtaaccgtattacaccatcttgggtggctttcactgacagtgagaggctgattggtgaggctgcaaagaaccaggcagctgttaacgcagagagaaccatctttgatgttaagagacttatcggaagaaagtttgatgataaggaggtcca

SEQ ID NO: 232472 - DNA, 418 bp, Gossypium hirsutum
ccacgcgtccgagctgcaataacaccagccttttcgactcaattcccgggtgttaacggactcggcatttcaatagctcgtttggatttagctgttggtggagtgatacctatgcatacacaccctagggcttctgaactcattcttgttatggatggcacactttttgctggtttcatatcctcagataacaaagtttactccaaatctctgaatgaaggagacattatgattttcccacaaggtttattacatttccaaatcaatacaggcaaaactcaatccgtggcatttgtatccttcaacagtgcagaccctggtgtccaaatcctggactttgccttgtttacaaatgacttgccgactgacattattgaaggataccactttctggatgctgctcagattaagaagctga

SEQ ID NO: 232473 - DNA, 408 bp, Gossypium hirsutum
ggaaggtaggaaggaaggaaggaaagaattaataaaataaaataaaagaaaatcgcagatcagacagagaaaaaccctaacctaaatctaaatgggtaagaagaagaaaagagttccgtcaaaggtatggtgttactattgcgacagggaattcgatgacgagaagatcctggtgcagcaccagaaagccaagcacttcaagtgccatgtctgccacaagaagctctccaccgccggtggtatggccatccacgttcttcaggttcacaaggagtccgtcaccaaggttcctaatgcaaaacctggcagagaatcgactgacattgaaatatacggaatgcaaggaatcccgcctgatgtgctggctgctcactatggagaagaagaagaagaagctccatcaaaagc

SEQ ID NO: 232474 - DNA, 422 bp, Gossypium hirsutum
cttttcaacctttacttctgtgtgaggagaaaaaggaaaaacctttccacaaatctgtatctgcgtctgctttgaaactaaaaaatggaaatcaataaccaccatgaaggaggtttcgaaatggagaagaagcccaagacgaagatcgtatgcactctgggtcctgcatccaggtccgttcctatgctcgagaagctgttgagggccggcatgaacgtcgctcgtttcaacttctctcatggatctcatgcctaccatcaggaaacccttgacaatctcagggcagctatgctcaacaccggcattctctgcgccgtcatgctcgataccaagggtcccgagatccgaactggttttctcaaggatggaaaaattcagcttaaacagggtcaagaaatcaccataacaactgactatagcat

SEQ ID NO: 232475 - DNA, 424 bp, Gossypium hirsutum
catcaggggactcaatgtgtatggaggtacaaaagaatcagaagcctcaaatttgtgaaacctgcgaacagtgtgactacgagattgaatatgctgatcgtagctcctccctgggggttcttgcaaaagataagcttcacttggtgactgcaaatggatcaattaccaacttagatgttgttttcgggtgcgcatatgatcaacaaggcatacttttgaacacactatcaaagacagatggaattcttggactaagcaaggctaaagttagcttgccttctcaattggcaagcaaagggattattaacaatgtggttggtcattgccttgcaacagatgtcgcttccggcggatatatgttcttaggtgatgattttgtaccaaaccggggcatgtcatgggttcctatgcttggaagcccttc

SEQ ID NO: 232476 - DNA, 413 bp, Gossypium hirsutum
accacttcttcccttccattttactttgttttagttgccataacgtcaccttccaatacaacccacaatgaggcaacaatatgtcttcactactctcacgttgctcatcctgtttttcctcagttgttcaacaacattagcccaagctccggcactggctccagcaccttctggtccgacaaacgtcaccaagatcctcgaaaaagccggtcaattcaccttcttcattcgtcttctaaagtccactcaagtggccaaccatctgctcggtcagctcaacaattccaacaatggtatgaccgtttttgcaccaacggacaatgctttttccagccttaaatcggtcacattgaatttactcaccgatgaacaaaaaggggagctggtgcaatttcacatcgtgccaacatacc

SEQ ID NO: 232477 - DNA, 400 bp, Gossypium hirsutum
cttccttcgccgtctactgcacttgtgacatcgatttcaagtgaatcagaatgggtaaggaaaagagtcacattaacattgtggtcattggccacgtcgattccggaaaatcgaccaccactggccacctgatctacaagcttggtggtattgacaagcgtgtgattgaaaggtttgagaaagaagctgcggagatgaacaagaggtcattcaagtatgcttgggtgcttgacaagctcaaggctgaacgtgagcgtggtatcaccattgatattgccttgtggaaatttgagacgaccaaatactactgcactgtgattgatgcgcctggacaccgtgactttatcaagaacatgattactggtacctcgcaagctgattgtgctggtttgattattga

SEQ ID NO: 232478 - DNA, 412 bp, Gossypium hirsutum
taatttttcacttcactcccacactgcttcaacaatggcgacgcccacatttcgccggctagaccttacccttttaaccctttctttactcgccgtcgccgtcaatgctcacaacatcaccgccatactcgaaggtttccctgattactccgtttacaacgatttcctcactaaaaccaagctcgccgatgagatcaatactcgacaaaccatcacttgccttgttcttaataatggagctatgtctgctctcactgctaaacacccactttccgtcgttaaaaacatccttagccttcatgttcttttagattattatgacccacaaaaactccataaaatttccgatggtactacacttactactactctttaccaaaccaccggaaatgcctccgggaaattggggttc

SEQ ID NO: 232479 - DNA, 389 bp, Gossypium hirsutum
cggacgcgtgggttatcttagaaggtgtcttaataaacgccttctttcttcttcttctccctttctttgctttttcgaatttttcttaagcgagaatgagagagtgcatttcgattcacatcggtcaggccggtatccaggtcggaaacgcctgctgggagctttactgcctcgagcatggaatccagcctgatggtcagatgccaagtgacaaaactgtcggaggaggtgatgatgcttttaacacctttttcagtgaaactggtgctgggaagcacgtccctcgtgccgtctttgtggatcttgaacccactgttattgatgaagtgagaactggtgcttaccgccagctcttccacccagaacaactcatcagcggcaaggaagac

SEQ ID NO: 232480 - DNA, 411 bp, Gossypium hirsutum
cggacgcgtgggcaagtatagcctttttcttttgcctttttgtcatttcccttaattaattgtctcttatggagtcgttctcttttttgttgataatttcaattttctatcttctcttcaaaatatggaattggatcaataacgtgagagaccaacaatgttacattttggattaccaatgctacaagcccagtgatgataggatggtggggactgagttctgcggggaagtgataaagaggaacaagaatctcggactcaacgagtacaagttcttgctgaaagccattgtcagttcaagcatcggagaacaaacctacgccccgaggatcatgttttccgggagagaagagagcccgaaactggaagattggatcttgggaaatggaagagtttttcacgatagcatcg

SEQ ID NO: 232481 - DNA, 416 bp, Gossypium hirsutum
cgatcaaccaaccaaaaaagataaacaagatggtttcagggtcagggatctgcgccaagagagtggttgtggatgcaaggcatcacatgctaggaaggttggcttccattttggccaaagagttgttgaatggccaaaaagtagtggttgttcgatgcgaagagatttgtatgtcgggtggtttagtgaggcagaagatgaagtacatgaggttcttgaggaagcggatgaacactaagccttctcatggccccatccattttcgtgctcctgctaagatcctctggcgtaccattcgtggcatgattccccacaagaccaagcgtggggcagctgctcttgctcgattgaaggcttatgaggggattccagctccatatgataagacaaagaggatggttattcctgatgctctc

SEQ ID NO: 232482 - DNA, 422 bp, Gossypium hirsutum
atttgatcaaatttctgcgaaaaataaagctatatatataaaaagcagctattgaaagaagtggagctgatgggttcgtctttcggtgaagcttttccagcaatgcaggaaactttgctggagtttcgtgctggtaaaatgatgttggaaggaaaaagggttgtccctgatacacgtaaagggctcattcgcatagctaggggtgaggagggactggttcattttcagtggcttgatcggactcaaaatgttattgaagatgatcagattattttccccgatgaggctgtttttgagaaggttaatcaagcatcaggcagggtttacatattaaagttcaataccgacgaccggaagttctttttctggatgcaggagccgaaagctgaagatgactcacaattatgttgcgcggtcaataa

SEQ ID NO: 232483 - DNA, 367 bp, Gossypium hirsutum
gagaagtaaacagaaaagggaagaattttggtgaccggtgattcgtgagtattgtaaacagcagcagcagcaatggagctgttctacttcgtggtgttcggggcattgggagcggtggtggcagcattagagctaagcaagaacagcaaagatcgaatcaacacatcctctgctttcaattccttcaagaacaattatcttgtcgtttattctctcatgatggctggagactggctgcagggtccgtatgtttactatctttacagtacatatgggttcggaaaaggtgaaattggacaactttttattgccggttttgggtcctctatgttgttcgggacaattgtcggatctttagcagacaaac

SEQ ID NO: 232484 - DNA, 420 bp, Gossypium hirsutum
aatgactacactcactgggaaatgtatgctattggtggaagtgcaaaccccaccatcaacagccagggtaacagatatgcagctccaacaaacccatttgcaaaggaggttaccaagagagtagatacagctgaagggcagtggaagagctggaattggaggtccgaaggagacttgttactgaacggtgcctacttcacaccatctggagctggagcctcagccagctatgccagggccttaagcttgggagccaagtcctcttccatggttggagccatgacttccaatgctggtgctcttccttgccgcagaggcaagcaatgctagtattatccatcttttccccaatcaattaaattggctgaaaatcagcctttttacaatctggttgattttccccctctttccatgattctt

SEQ ID NO: 232485 - DNA, 380 bp, Gossypium hirsutum
taaaccctaagaacactgtcggcggcaatggcaacttacgatctaaccccgcgtatcggcccgaacctagacaggcacttagtgtttccattgctggagttcttgcaagagcgacaactatacccagatgaacagatcttgaaagcaaagatcgagcttttgaacaagacaaatatggtcgattacgctatggatatccataagagcctttaccgcaccgatgatgtccctcaggacatggtcgataggagagtcgaggttgtcgctcgtctcaaagctttggaagatgccgccgctcctcttgtcactttcttgcaaaaccctaacgctgttcaggaactgcgtgctgataaacagtataatctccagatgcttaatga

SEQ ID NO: 232486 - DNA, 365 bp, Gossypium hirsutum
caaaaatggatggttattagtagaagagggatcatgttgtttgtggtggcattttccgcaataatcagcaggagttgtcgacaattaaccactctttttggtgcaagcattaaccaccttgactgactctgagatatatgcgggcattaatgactatcctccctacctttttgaaggctatcctttcttatggacgggactttgcctacaaaaaacctactgggaggtgttgctatggaaaattaaccactgacatcactgctgaaactctgggggttacaactaatacaccaccttaccttatcccagaagcattatggaagaaccttctgcttggagccaatattgcttcatctggctctggc

SEQ ID NO: 232487 - DNA, 378 bp, Gossypium hirsutum
aaggatgcagatgtcatattgacaacttggactggtgcattttctcgcaaactggacaacactacatttgatttgattattatcgatgaagctgcacaggctcttgaaatagcatgctggatggctctactaaagggctcaagatgtatacttgcaggggaccatctgcagcttcctccaactatccagagtgttgaagctgagaggaaagggttaggaagaaccctttttgaacgccttgcagatctgtatggagatgaggtcatgtccatgctcactgtccagtaccgcatgcatgagcttattatgaactggtcatctaaagagctttacagcagcaagatcaaagcgcattctagtgttgctacgcacatgctt

SEQ ID NO: 232488 - DNA, 416 bp, Gossypium hirsutum
cacaaacaaaacattttcagtcctccaccaacccactctaaacactcttttgtttttttcccttggaacagctgagccaagacgcgagtaatggcggtggcaatgagctttcgtagattgtcttgctccatcaagtccccaaccagacctctcttcagtggcagctccctctattatatgtcaacagctgcggcagagaaagagaaagctcgtgctaatcggatacatcagttgaatgctccgctagaggaaatcgatcctgaaattgctaccataatcgaactcgagaaagctaggcaatggaagggactagaacttataccatcagagaattttacatccctatcagtcatgcaagcagtgggctctgtcatgatcaacaagtacaagtgatggtatcctggtgctagatacta

SEQ ID NO: 232489 - DNA, 403 bp, Gossypium hirsutum
ccagatcaatgagcccaagagaccctctgacaagcccctccgtctcccacttcaggatgtctacaagatcggtggtattggaactgtcccggtgggtcgtgttgaaaccggtacccttaagcctggaatggttgttacattcggaccttctggattgaccactgaagttaagtctgttgagatgcatcatgaagctcttcaagaggctcttcctggtgacaatgttgggttcaatgtgaagaatgttgctgtcaaggatctcaagcgtggatatgttgcctccaactccaaggatgatcctgccaaggaggcagccaacttcacctcccaagttatcattatgaaccatccaggacagataggaaatggttatgcacctgtcctcgattgccacacctcccac

SEQ ID NO: 232490 - DNA, 294 bp, Gossypium hirsutum
agcaggttaaggctgaacatcaggtatcttcggggttgcttcagccaatcactataccggaatggaaatgggaaagaatcactatggattttgtatctgggttaccgttatctccgaggaagaaagatgccatttgggtaattgtcgaccgattgacaaagtccgcgcactttatcccagtatgtatggattattctttagataaattggctggattgtatatatctgagattgttagactacatggagtgcctgtctgcattatatcagacagagatccccgatttacgtctc

SEQ ID NO: 232491 - DNA, 417 bp, Gossypium hirsutum
ggtcaatctaaaatatggcagacgaagacattcagcctcttgttgttgataatggtactggaatggttaaggctgggtttgctggagatgatgctcctagggctgtcttccctagtattgttggacggcctagacacacaggtgtcatggtggggatgggacagaaagatgcctatgtgggggatgaggctcagtctaaaagaggtattctcacattgaaataccctattgaacatggtattgttagcaactgggatgacatggaaaagatctggcatcacactttctacaatgaacttcgtgttgctcctgaagaacaccctgtgcttcttactgaagcacctctcaatcctaaggccaacagggagaaaatgacgcagataatgtttgaaacgtttaatgttcctgccatgtatg

SEQ ID NO: 232492 - DNA, 300 bp, Gossypium hirsutum
gaaatctcttctatttttccccactctactgcaaaaatgtttcgatccgatgctagatcggccgccggtaagagcctccttcgacgaggatatgcaaccgccgtacctgaacggaaagtcgctgtcttgggcgcagcttgagggatcggccaacccttggctcttctcatgaagcttaaccctcttggttctcaactggctctctatgatatcgctaacactcccggtgttgccgctgatgtcagccacatcaactctagatctgaggttgccggatatgtaggtgaagagcagttgggg

SEQ ID NO: 232493 - DNA, 391 bp, Gossypium hirsutum
gtttgagctagctagctcttactcaaatggcaaccaaaacgatgatgttgcaaatattttcacttttcttctttttgttcagtatctgcaactccattttccttggtgctaatggagatgacaatggtggttggcaaactgcccatgccaccttctacggtggtgctgatgctaccggcacaatggggggagcttgtggttatggaaacctgtacagtcaagggtatggaacgagcacagcagctttgagcactgcacttttcaacaatggcttgagctgcggtgcctgctacgagctccggtgcaacaatgatcctcaatggtgcattagtcgaaccataaccgtgacaagcaccaacttttgtcccctaactatgctttatctagtgac

SEQ ID NO: 232494 - DNA, 269 bp, Gossypium hirsutum
  unsure (1)..(269): unsure at all n locations
gggacacagtgattcctatactcaagacaagaacatgcaagtcactattgcctttaatcactttggtgaaggccttgtccaaagaatgccacgatgtagacatgggtatttccacgtggtgaacaatgactatactcattgggaaatgtatgccattggaggaagtgctaacccaacaataaacagccaagggaatagatttactgcacctgacaacagattcagcaaagaggtgaccaagcatgnaggatgcaccgagagtgaatgga

SEQ ID NO: 232495 - DNA, 425 bp, Gossypium hirsutum
gccaattgtttgagctagctagctcttactcaaatggcaaccaaaacgatgatgttgcaaatatttccacttttcttctttttgttcagtgtctgcaactccattttccttggtgctaatggagatgacaatggtggttggcaaactgcccatgccaccttctacggtggtgctgatgctaccggcacaatggggggagcttgtggttatggaaacctgtacagtcaagggtatggaacgagcacagcagctttgagcactgcacttttcaacaatggcttgagctgcggtgcctgctacgagctccggtgcaacaatgatcctcaatggtgcattagtcgaaccataaccgggacagccaccaacttttgtccacctaactatgctttatctagtgacaatggcgggtggtgcaatcccccacg

SEQ ID NO: 232496 - DNA, 321 bp, Gossypium hirsutum
ggcttttggaatcagatcatggattgtatggtgatcccagaacaaaaccatttgtggaattgtatgcaagggatcaaaacaagttctttcaagatttcgctaaagctatgcagaagctaagtgtttatgggatcaaaactgggagaagaggagagattagacacaggtgtgatgctgtaaactgagagcttttttttactttgttaattttggtttgttcttttgagatatatttattatacccttgtctttatttgtatcaattgtcacatcaggcttaaaatttatacatatttacatattctgtgttctgggtttcaa

SEQ ID NO: 232497 - DNA, 343 bp, Gossypium hirsutum
cggacgcgtgggggagagcatggccaactgatccatcagaaagatataattgtagttggagaatctgggctatttactccagatcatgttgggtatgtgcaagaagctggtgttaaagcagttttggttggggaatcgatagtgaagcaaagcgaccctggaaaaggaataaccggactttttggtaaagacatttctttgtgagttgtaacaataagtcggatcgagtatgggtgtgcttcttgtatcagttacttttcggtattggaacagttgtattatatgaaaaacaatgctcaacatgagttattactaaattaatgacataaatttcatgtatcct

SEQ ID NO: 232498 - DNA, 424 bp, Gossypium hirsutum
ggtttcgttcggttcggtgatgaaaatgaaaggtcgagggccatgactgaaatgaatggagtgtattgctcaagtagaccaatgagaattagtgttgccactcccaagaaagcatttggatatcagcaacagtattattcgcaaggtagacaagcatcgaatggtgctgtggaacaaggtcttcgttctcataatgactcaaacaatgctaccatttttgttggaggacttgactcggatgttagcgatgatgatcttagacaacccttttcccagtttggtgagatcatctctgtgaaaataccacctggaaaaggatgtggatttgtgctatttgcaaacaggaaggacgctgaggaagcaatccagagcttgaacggaacaaccataggcaagcagactgtccgactttcttggggtcgaa

SEQ ID NO: 232499 - DNA, 427 bp, Gossypium hirsutum
agcagtagctgcagcagcatctattggttacattggtgtaggaactgttgagttcctattggatgaaagaggttccttctacttcatggaaatgaacactagaatccaggtggagcatcctgtaactgaaatgatttcctctgttgacttgattgaagaacaaattcgtgtagctatgggggaaaaactgcgctacaaacaggaagatattgtgctcagagggcattccattgaatgtcgtatcaatgcagaagatgcatttaaagggttcagacccggaccagggagaataacatcgtacttgccatctggaggcccatttgttcgaatggatagccatgtttattctgattatgtagttcctccaagctatgattcattacttggaaagcttattgtatgggctccaacaagggaaaaagcaatt

SEQ ID NO: 232500 - DNA, 420 bp, Gossypium hirsutum
aacgatgttcggagctcaagcttccacttctgccttcggcactccttcttccacccctgcctttggcactccttcttccacccctgcctttggcactccttcttccaccccggcctttggaactcctccttcaactccggcttttggggctacttcttccacaccggcatttggcactccgtcttcgacaccggcgtttggcactccatcttcgacaccggcgtttggcactccgtcttcgacaccttcgtttggggctccgtcttcgacaccggcatttggaactccgtcctcgacaccggcttttggaactccatcaacgccgtctttcgctacgggctttggcggctcctctcttttctccaccccattctcttctcaaacgcaacagcaacagacttcattgtttcagcaaccaca

SEQ ID NO: 232501 - DNA, 425 bp, Gossypium hirsutum
gtggtgacaccccgtacagcatcatgtttggacctgatatctgtggctacagcaccaagaaagtacatgccattcttacgtacaatgggacaaatcacttgatcaaaaaggaagttccttgtgagactgatcaactcactcatgtttatacattcattctccgtccagatgctacctacagcatccttatcgataatgttgagaaacaaactggtagcttatacactgattgggatattctcccaccacagaagatcaaggatcctgaggccaagaagcctgaagattgggatgacaaggaatacatccctgctcctgaagacaaaaagccagagggttatgatgacattccaaaagagattcctgatcctgatgctaagaagcctgaagattgggatgatgaagaagatggtgaatggacaccc

SEQ ID NO: 232502 - DNA, 339 bp, Gossypium hirsutum
aagtgatccacgatgctattaccaagctagaggaggctttgtcgattaaccctaccaagcatgatgcttcatggcgtacgggaaatgctcaaacttattttgcctttttgactagcacggaagatgaggccaggccttacttcgaaaaggcagctcaatatttccagcaagcagctgatgaggatcccagcaatgaaatttacctgaaatctttggaaatatctgctaaggctccagagctacaccacgaaataattaagcaaggtttaggtcaacagatgcttggtgctggaccctctagttctacttctacctccagctcaacaagactgctacaaa

SEQ ID NO: 232503 - DNA, 417 bp, Gossypium hirsutum
atcaaacaagcccaagcttcccaatcaaatcatcaaccatttcctttcttcaaatcccaacaatgctttctcaatggggttcggatcctcagcttgctttgcttatgctcccacagagaatcgcttccccagtcatcaaaggttgttttgtggagtggatgaaatatactgcatattcttgggggatttgaataatttgagcagcctgctaaagcagtatgggctgtcaaagggcaccaatgaagccatgtttatcatcgaagcatatcggaccctccgagaccgtggtccgtacccggctgaccaggtccttaaggatcttgaaagcagctatggatttgtggtgtatgatagcaaagctggaagtgtatttgctgcattgggtgcagatgaaagggttaatctctattggggtgt

SEQ ID NO: 232504 - DNA, 382 bp, Gossypium hirsutum
cccactctcactctatttttctctagtaattgctgcaatcggatttgttgaaagatggctgagggttcagctgcagttcccagcactgagttgttggaatggccgaagaaagataagcgtcggttccttcacgccgtgtaccgtgttggcgatcttgatcgtaccatcaagttctacactgagtgttttgggatgaaattgttgaggaaaagagatattcctgaagagaaatactccaatgcctttcttgggtttggcccagaggagtctcatttcgttgttgagttaacttacaattatggagtatcatcgtatgatattggaactggttttgggcattttgcaattgcaacacctgatgtctaacaaatggttgaagaca

SEQ ID NO: 232505 - DNA, 324 bp, Gossypium hirsutum
accaatctaactctatttttctatagaaattgcggcaatcgcatatggtgacagatgtctcgaggtacatctgaattttacagaaattagtacaaatcacttgatcaaaaagataagcgtcggttccttaacaccgtgtaccgtgttggcgaacttgatcataccatcaagttctacactgagtgttttaggatgaaattgttgaggaaaatagatattcttgaagagaaatactccaattcctccttgataagatctagatgactctcatttcgttgatgagttaacttacaatcatggagtatgatcatatgaatttggaac

SEQ ID NO: 232506 - DNA, 428 bp, Gossypium hirsutum
cggacgcgtgggagaagagatctccacgcaaaaaatttacttttaatttcttcttgttcttcttctctagatctactgttttatttctaaaaacttaatttttcttgttattattattaatattatttattcatgattgacaagtaaaaaacgctgattcctttacacgtaattcgattatagccgtctgattcttttcccccagaatcaaaagccatttatctgagaaaaagaggactgacatctccgtatttattttaggaatttgaagaccagaagcctgaagattgggatgacaagggatacatacctgctcctgaagacagaaagcctgatggttatgatgacatttcaaaagacattcctgatcctgatgcgaataagcctgaataatgggatgatgaagaagatggtgaatggacaccctc

SEQ ID NO: 232507 - DNA, 385 bp, Gossypium hirsutum
gttcgtcgctgattatcagttttagttatttttcttctttggtctttacattctttacgtgtacacaacagatagttagtaatggccgatcaaggagaacgtccagctatcggtatcgatctcggtacaacttattcttgcgttggtgtttggcaacatgaccgtgttgaaatcatcgctaacgatcaaggtaacagaacgacgccgtcttatgttggttttactgataccgagcgtttgatcggagatgcatgcaaagaaccaggttgcaatgaacccgattaacaccgtcttcgatgctaaaaggatgattggtagtagattcactgatttttcagtgcaaaagagatatcaaattgggggcattcaaggtcatagcaggacc

SEQ ID NO: 232508 - DNA, 378 bp, Gossypium hirsutum
cactttcccgagaaaatgagagaaatccttcacatccaaggtggccaatgcggcaatcagataggagccaagttctgggaagtcgtatgtgccgaacatggcatcgattcaacgggtcgatatggtggtgactcggagctccagcttgagcgaatcaatgtttactacaacgaagccagttgtggccgttttgttccccgcgcagttttaatggatctggaacccggtaccatggatagcgtaagatccggtccttacggacaaattttcagacccgataacttcgttttcggacagtcgggcgccggaaacaattgggctaagggacattacactgaaagagcggagcttatcgattccgttcttgacgtaattaga

SEQ ID NO: 232509 - DNA, 329 bp, Gossypium hirsutum
gatgaacacgagcattccataggtgggtcgtcgaaatcctctcaatgacagtcacgatctattcaagaggggactgtaaactgcagcagtgattgccggatacgctgatattatgaaaaatacagagaatgcagacggttggagatcgctaggaataacccatgctgaaaatgatgatgaccatcacgttggagagcaaagctcgacctgctagaatgttgtgaatgggttaagatacggatggatgacataccgaccaaacctggactgatttctcaaacaggtccaccttacaaacgctatgattcttactttactttggaaataaa

SEQ ID NO: 232510 - DNA, 387 bp, Gossypium hirsutum
catttttgttcaaggaccacttcttcccttccattttactttgttttagttgccataacgtcaccttccaatacaacccacaatgaggcaacaatatgtcttcactactctcacgttgctcatcctgttttccctcagttgttcaacaacattagcccaatctccggcactggccccggcaccttctggcccgacaaacgtcaccaagatcctcgaaaaagccggtcaattcaccctcttcattcgtcttctaaagtccactcaagtggccaaccagctgctcggtcagctcaacaattccaacaatggtatgaccgtttttgcaccaacggacaatgctttctccagccttaaatcgggcacattgaattcactcaccgatgaaca

SEQ ID NO: 232511 - DNA, 420 bp, Gossypium hirsutum
gtgccataaacatgtttctcccaatctttttcattttctctttcctattttcctccaccaacgcagccgacttctgtgttggggacttgaatggccctgtaggccctgcaggctattcttgcaagaagacagccaccgaagatgacttctctttctccggcctcctccgtaccgcaggcaacacttcgaacctcgtaaaagctgcaataacaccagccttttcgactcaattcccgggtgttaacggactcggcatttcaatagctcgtttggatttagctgttggtggagtgatacctatgcatacacaccctagggcttctgaactcattcttgttatggatggcacactttttgctggtttcatatcctcagataacaaagtttactccaaatctctgaatgaaggagacattatga

SEQ ID NO: 232512 - DNA, 429 bp, Gossypium hirsutum
acatcatcgaaggtcagtagcagccagtttggttgagggtgtgtatatcttggagcgagaccgtcaggaaaaacgtgaaggttctcaagcattggctcctccctggtgggagttctttcattttaagttggttcgtaagctgatagatgatgttgatttttgcatctttggtgctatttacgagtataagcctccatcgtctcattgtaatgactcaatagtctcaattgatggaaatccccgctatgtgattgcgttccgaggtaccataactaaaccagactccttcacaagagactttgagttggatatccacataatgcgaaatggactccaccagacatctcgctttgagattggcatgcaagctgttcgaaacatggttgctactgtaagtgcttcgaatgtctggttagctggccattccct

SEQ ID NO: 232513 - DNA, 390 bp, Gossypium hirsutum
tagaaaagagcatgcatgcttcatatcccagatctctatttgtgtttctccttgaaacccaaattttgccaaataagaaaagcttctgagaaaatggtgcccagatcattgatctatgcattagtatctcgtggaggagttatattagctgagtatactgaatacagtgggaatttcaattccatagctcttcaatgcctacaaaagcttccttcttcaaacaacaggttcacttacaactgcgatggccataccttcaattatcttgctgacaatggatacacttattgcgttgctgcagatgagtcagctggaacgcaagtgccgattgcttttttggagcgtatcaaagatgatttcgtgtcgaaatatgataacgggaaggctgct

SEQ ID NO: 232514 - DNA, 427 bp, Gossypium hirsutum
cccacgcgtccgaagaaaaaaatgaagctcttgtttctaactttgctgctttgttctcttcttctatgttcttcagtttttgcaccaacaatggctcagcctcgttcacctttttgtgaagggaaatgcaaagggaggtgcaataaagcggcggtttgggatcggtgcttcaaatattgcggcatatgttgcgaggagtgtcaatgcgttccgtccggtacttacgggaacaaacacgagtgtccttgctacagagataaggtgaacaacaagggcaaacccaaatgcccttgaaaatgaaatatattcgagttcgggatttaatcaaacttaaagatcgaggacgaacaggccatatatatatatatatatgcatgttgatgatgatgttattataaaaataaacctggtttggtgcttgtatttt

SEQ ID NO: 232515 - DNA, 420 bp, Gossypium hirsutum
attttctgatatgaatccatatgttggtcatcaaaatcctttaaaagaaggtcaagagctattcaggaaaggacttttgagtgaagcagtgcttgccctagaggctgaaattatgaaaaatcctgagaatgctgaaggttggagattgctaggaataacccatgctgaaaatgatgatgaccagcaggtaggagaacaaagctcgacatgcaagattgtcgtcaatgggttaagagaaggatggaagacagaggagccaaaccttgtgggttttctcaaacagctccacctcacaaaccctttgattcttactttttctggtaaataataggttctccccgtaaccctcagattgtatcttttttggaattactagatcttccttatgtttttgataatgcatcggactcaagggatagt

SEQ ID NO: 232516 - DNA, 425 bp, Gossypium hirsutum
ggtcagcaaattgtttgagctagctagctcttactcaaatggcaaccaaaacgatgatgttgcaaatattttcacttttcttctttttgttcagtatctgcaactccattttccttggtgctaatggagatgacaatggtggttggcaaactgcccatgccaccttctacggtggtgctgatgctaccggcacaatggggggagcttgtggttatggaaacctgtacagtcaagggtatggaacgagcacagcagctttgagcactgcacttttcaacaatggcttgagctgcggtgcctgctacgagctccggtgcaacaatgatcctcaatggtgcattagtcgaaccataaccgtgacagccaccaacttttgtccccctaactatgctttatctagtgacaatggcgggtggtgcaatccc

SEQ ID NO: 232517 - DNA, 428 bp, Gossypium hirsutum
gaaaacatgggacaatgggtggattattggcttaactatggtgctgaacccaaggaacctcaaacttgggaagctcagaatcagaaccagaatgtgtttgcttcaaactttgttcccttgtggattgatttgttcaactcagatactcctctggtggaaaaggtaacaagaagtcttcaaagttcaggcctgctttgtgctgctgggattgcaacctctttgacaaattcgggacaccaatgggacttcccaaatggttgggctccaattcagcacatgatagttgaaggcttgtggagatctgcatcgatagaagcaaggaaagtagcgagagacataactgaaagatggatcagaggcaactacgtggcctacaagaaaacagggacaatgcatgagaaatataacgtggaaaagtgtggcgaata

SEQ ID NO: 232518 - DNA, 356 bp, Gossypium hirsutum
gggaaacaatgggtcgcattactggtggcatgaaggtgaaagctgatagggatgagtcttccccttatgcagccatgcttgcagcccaagatgtttctcaacgctgcaaggagttgggtattactgcccttcatataaagctaagagctactggagggaataagaccaagacaccaggtcctggcgcacagtcagcacttagagcccttgctcgttcaagcatgaaaattggacgcatagaggatgttactcccattcccactgacagtacccgtagaaagggaggcagacttgggagaatgctgcgattctttgcttcgcatctgttgctcactggtgctgctcctccaatatgc

SEQ ID NO: 232519 - DNA, 395 bp, Gossypium hirsutum
ctggagactgccaagagcagctcatctgttgagaagaactatgagttgcctgacggacaagtcattactattggagctgagagattccgttgcccggaagtcctcttccagccatctttcattgggatggaagctgctggaatccatgaaactacctacaactctatcatgaagtgcgatgtggatatcaggaaggatctctatggtaacattgtgctcagtgggggttcaactatgttccctggtattgcggaccgcatgagcaaggagatcactgctcttgctccaagcagcatgaagattaaggtcgttgcgccaccagagagaaagtacagtgtctggattggaggatctatcttggcatcactcagcaccttccagcagatgtggatttc

SEQ ID NO: 232520 - DNA, 372 bp, Gossypium hirsutum
ggggaaatggcgatcacactgaacaatggatttaagatgccagtggttggtttaggtgtttggcgtatggatggaaaagacgttagagacctcatcatcaactccatcaagcttggttatcgtcattttgattgtgctgctgactacaagaatgaagcagaagttggtgaggcattgtctgaagcattcaaaactgggcttgttaagagagaggacctctttattacaaccaagctttggaattctgatcacgggcatgttcttgaggcctgtaaagacagtcttaagaagcttcaattggattatctggatttgtatctaggtcactctcccggtgctgtaaagcacaactgaatcggtcaaacggacagt

SEQ ID NO: 232521 - DNA, 418 bp, Gossypium hirsutum
cgtttagctcctttaacattgcataccgccaccaaacacagtcctacatttttggaacttctcttctcttctctttccaaaaagtaaaaaccagagagagatccaaaaaataatggtgcacggatttattaatccatggagaagggtgttatcggaaactacatattctctgcgacgggggcaatttggtcgacgacgctgcttctctctggtggctcacaaagctgagcttgataaaaacaatatcgattctgttcctaaattgccgtactttgattactctacgcctccttatacacggtcttccgccgttgacattctttacaaacgcaaggagtatctcagccctttcatgttgtactgttaccacagaccctttgaacgtatggatgggaggatgcagtatttgttcgatgag

SEQ ID NO: 232522 - DNA, 428 bp, Gossypium hirsutum
ctgaatataatcttttgcttacggtttttcctgcgtgcttttgaattggggttttgagttattctcaatggcggacacagagacgtttgcttttcaagctgagattaaccagcttcttagtttaattatcaacactttctacagcaacaaggagatctttcttcgtgagctcatcagcaacgcttctgatgcattggacaagattagattcgagagtttgacggacaagagcaaacttgatgctcaacccgagctgtttatccacattgtccccgataagataaacaatactctatcgatcattgatagcggtattggcatgactaaggccgatttggtgaacaatcttggtaccattgctaggtccgggactaaggaattcatggaggcattggcttgtggtgctgatgttagtatgattggacaat

SEQ ID NO: 232523 - DNA, 434 bp, Gossypium hirsutum
cagattcaaaaagaaataaaggtagaagaagcaatggccactcttacagtgcccacgacagttccttcagtgtctgaagattgtgaacaactaagaaaagccttttcaggatggggaactaatgagggcttaatcatagatatattgggtcacagaaatgcggagcaacgaaacttgattcgaaaaacctacgctgaaacctatggagaggatctcctcaaggcactagacaaggaactctcgaatgactttgagaggctggttctgctttgggctcttgatcctgctgaacgtgatgcccttttggctaatgaagccaccaaaaggtggacttcaagcaatcaagtccttatggaaatagcctgcacaaggtctgccaaccaactgcttcacgcaaggcaagcttatcatgctcgttataagaagtcgcttgg

SEQ ID NO: 232524 - DNA, 418 bp, Gossypium hirsutum
cttgtatcctgttttgattctaagctttgtttgcttacttgtgtgtctgttcatcacatcatctacatttccctccactgtttctctcttctatattttcccaagattattttctctttccgttttttcctccctattttttttttctcgggagacttttttttaggtatacccagatcttgtttagttccaagctttaggttgtcatcgttttctcgaggttttaaactatgggctcttgaatttgtgaaacaaagggagatatattggttaaaaactagtagcagtgtattgaatcaagttttacaaaaaaagaagttaaaaagaaagatgaaaatccagtgtgatgtttgtgagagagctccagcaacagtgatatgttgtgcagatgaggctgcactttgtgctaaatgtgata

SEQ ID NO: 232525 - DNA, 409 bp, Gossypium hirsutum
catacctgaagaggctattccgggaccttttcattcgagaaggttatcagtttgactgcgtatttgattggaccatgctgagatatccacaggctgcctctagctcaagagtacggccaagcccaaagccgggtttaaatcctcaaggagtatctgctgaaagaaccggaaggccttcagttggtcaagagattcgagaaaggttctctggtgctgttgaggcatttgcaagacggaatggatcagggcatggtgatcagtctagacacagatctcccgacaatgcgctatcatccaaagacacgcaacctggttctgatagggctcactcttcctcaagaaatggtagtacttcaaagaggcctgttgtatcaggcagccgacctaactcctctggtgagcctagtga

SEQ ID NO: 232526 - DNA, 432 bp, Gossypium hirsutum
  unsure (1)..(432): unsure at all n locations
atttgcaaaccggcctcgtactatggccggggatcttatgacgtacaactacactactttcgtttgggctccttacggatcactttggcggaaccatcgccgtctcagcgctgttgagatcttctgttctaacagcgttgaaaagttttcttccatacgtgaagaagaagttgcggactttgttcgtcgcttgtttgaggtctcatcaggcaacggcacccaaaaggtggacttgaagtacttgttttgtctcttgacggcgaatgtcatgtggaggacggtggccggaaaacgtggggtcgaggatcctaaggacgtggaggcagaaaagatgttcttcacggaatttaagagcttgttttttccgagcctagggaccaacatatgtgatntcttcccagttttgaggtggattggtttcctagggattgg

SEQ ID NO: 232527 - DNA, 432 bp, Gossypium hirsutum
cccacgcgtccggaaatttcgaaggctttgaaaaaaaaaaaatcgaacgaagaagaatttgttaagcgatcgatctgtggattacgatggaagtgcctgtctcatgggatgctctacgcaaacaggcaaggaaactcgaagctcagttggatgagcaaatgaattcatatcgtaagttggtctccagtaaggcttcgataaaaaatgacttggaagagaatggtattgaatctggtatcgaccgactactaaaacagctacaagaagtaaatatgaaaatgcaagactgggtctcatctggtggatctgaaatggtttctcataccttgactaggcatcaggaaattcttcaagatctcactcaggagttctatcgtcttcgctctagccttagagctaaacaagaacacgcttctctactgaggattttag

SEQ ID NO: 232528 - DNA, 420 bp, Gossypium hirsutum
ctccttgccgattcattcctaagaaaattttcaacgttatttcaaaaagcagagaaaagaacgttaaggaggaaagatgttgggaatagtaaggcaaaaaatgttagggcagtcattgctgaagattcgtcctgcaatatcggtgttacgaagctactcatcagcagcaaaacagatgacagtgagagaggcattgaactctgctcttgatgaggaaatgtcagctgatccgaaagtctttttaatgggtgaagaggttggagaatatcagggtgcatacaagatatccaaggggcttttggagaagtatggacctgagagggttcttgatactccaattactgaggctggttttgctgggaattgggttggtgcggcttactatggtctgaaacccgtaattgagtttatgacatttaa

SEQ ID NO: 232529 - DNA, 410 bp, Gossypium hirsutum
gggtgagtgaacaattcactgccatgttccgtaggaaagctttcttgcattggtatactggagaagggatggatgagatggagttcacagaagcggagagtaacatgaatgacttggtttctgagtaccaacaataccaggatgcaactgcagatgatgaagagtacgaggaagaggaggaatacgaggcagaggcttaaaatctaatggaataatttggatgttttttgttgtgttttggattgggcttgtggagtgtgttggtgcaatttctcactgcctgttttgggtctttggatcactgtgttgttgattgtgtcgactttagttctgtcctcacagcttacagagtatatgttgttgtattgcttggtgattcatcttataagtaatttcagttcaccttaggt

SEQ ID NO: 232530 - DNA, 417 bp, Gossypium hirsutum
cccacgcgtccggatttgctctgctttcgccaaacaaacgcgagatttgtagatttatttcccttgtctatctgcctccgaatcaatggctttgccgaaccagcaaactgttgattatccgagcttcaagctcgttatcgtcggtgatggaggaactggaaaaactaccttcgtgaagaggcatctaactggagagtttgaaaagaaatacgagccaaccattggtgtggaggttcatcccttggacttcttcactaactgtggcaaaatccgtttctactgctgggatactgctggacaggagaagtttggtggtctcagagatggttactacatccatgggcaatgcgccataattatgtttgatgttactgcccggttgacatacaagaatgtccaacttggcattcggatctt

SEQ ID NO: 232531 - DNA, 398 bp, Gossypium hirsutum
cggacgcgtgggaaattgttatctctgagggtgtcttaataaacgccttcgatttactttcggtttccatttacttctttatttctacgtttttgaatttttagtaagcgaaaatgagagagtgcatttcagttcacatcggtcaggctggtatccaagtcggaaatgcctgctgggagctttactgccttgaacatggaatccagcctgatggccagatgccaagtgacaagactgtcggaggaggtgatgatgcttttaacacctttttcagtgaaactggtgctggaaagcacgtccctcgtgctgtctttgtggatcttgagcctactgttattgatgaagtgaggactggtacttaccgtcagcttttccaccctgagcaactcatcagcggc

SEQ ID NO: 232532 - DNA, 312 bp, Gossypium hirsutum
cattttactacgctctctgaaatcttagttacatccatggcagcaacatctctaaatgcccctaacgctcctctccttcaaaagacccatcaaactcatgtctttctcaaacccatctccaccattccttgtcaaacctctgccaagcgcttctgcatctcttgttccgcaactacccaagatcgcctctccgtgcaatcccaatctcaagttcgggtctttaactgtcccgccggtcctgccaccttacccgagaacgatctcctcaaagcccaatacgagctttacaactggcacggatctggcatgagc

SEQ ID NO: 232533 - DNA, 367 bp, Gossypium hirsutum
cggacgcgtggggttatctctgagggtgtcttaataaacgccttcgatttactttcggtttccatttacttctttatttctacgtttttgaatttttagtaagcgaaaatgagagagtgcatttcagttcacatcggtcaggctggtatccaagtcggaaatgcctgctgggagctttactgccttgaacatggaatccagcctgatggccagatgccaagtgacaagactgtcggaggaggtgatgatgcttttaacacctttttcagtgaaactggtgctgggaagcacgtccctcgtgctgtctttgtggatcttggacctactgttattggtgaagtgagggactgtacttaccgtcagcttt

SEQ ID NO: 232534 - DNA, 396 bp, Gossypium hirsutum
  unsure (1)..(396): unsure at all n locations
cggacgcgtgggcggacgcgtgggtgactgtgggctcaagactcgcaagtacgctgaggtgaaaccagccctgagcaacatggttgctgctgccaagctgctccgcacccaactcgccagcgccaagtgataggctcccgagatattggaaatccgaatcccataccattccagagagattaaaaagaaaaatggcaaagaagtttcttctatcttatcatttgaataactctgttgttgatgaaatatttgttacatgcccttggcgtccctttgatttccttatttttgggtgttcttttctctaagtatcatgtactttcttgggaatatcacatatatgctgtcttcagttnnaaaaaaaaaaaancaaaaaataaanaaannnncaanaac

SEQ ID NO: 232535 - DNA, 370 bp, Gossypium hirsutum
cacgcccccatttattttatttttcaaacaaattttcccttcaattttcgtataatttcctaggaaaagaaatatgagagagtgcatttcagttcacatcggtcaggccggtattcaggtcggaaatgcttgctgggaactttactgtctcgagcatggcattcagcctgatggccaaatgccaagtgataagactgttggtggaggagacgatgctttcaacacctttttcagcgaaactggtgccgggaagcacgtccctcgcgccatctttgttgatctggagcctactgttatcgatgaagtgaggacttgtacgtaccgccagttattccaccctgagcaactcatcagtggcaaagaagatgct

SEQ ID NO: 232536 - DNA, 263 bp, Gossypium hirsutum
ggaacacacaccctgcaaacgacctattcttccatcgaccttcacctaggccaatcgtgctccgttttattcacagctgatcagcctgcacaagactattacattgttgcctctactcgcttcaccaaccccgttctcaccactactgcgacccttcgttacagtaattctgctggtcctgtctctggtcctcctcctggtggacccaccatccaaatcgactggtctttgaaccaagcacgctctatcaagactaaccttac

SEQ ID NO: 232537 - DNA, 366 bp, Gossypium hirsutum
aaagaaactcattgagacgaatgagttacctgctcctgctcctatagaacaacgatggacagctcgcagccagagcccgatgagtcctgcatcaagctcagcagaagatgatatattctcatgggttggtataatcatgtaccttcctacaatggatgcccgccaaagaaaggaaataacagaagaattcttccactacaggcatcttacgcagtcacagttgtgggataaatattctgcctatgaacattgggctaagattgaggtcccaaaggacaaggaagaacttgaagctcttcaagcgagactcaaaagcccgtttccagtcgatgcatataacaaagcaaggagggaattggattccaa

SEQ ID NO: 232538 - DNA, 343 bp, Gossypium hirsutum
aaatcggtatcagctgaagaatagcactactggtgaaattaccataaaacatttaaacaaggagcaggaagccaatgagagcaacttccgcgatccagtcagctctgcagatctggaggttgttgagaagatgccactgttagagtggtttgctaatgaatacaggcagtttggctgtagccttgagttcgttaccaacaaatcccaggaaggttctcagttctgccgtgggtttggcggtattggaggcatccttcgataccaactagacatgcgatcatttgatgaattttctgatgaaaaaatgtatgatgattctgaataagcaataatcaaactaacc

SEQ ID NO: 232539 - DNA, 308 bp, Gossypium hirsutum
ttctggtcagagatttgcagctaaaatgagaaacaaagagaagtaaataaaaaacccttctctttctttttctgcctttaattatcatacttgcctttttcttttcttttcctttcaagttaggaagcatggtgtaccccaatgaatcccttgaagactctccccagaagaaaatggggagaggaaagatcgagatcaagcggatcgaaaacacgacgaaccgccaagttaccttttgtcagatgcgcaatggtttgctcaaaaaggcttatgaactattaactctttgggacgctgacggtgctttg

SEQ ID NO: 232540 - DNA, 349 bp, Gossypium hirsutum
gaaacagttgactgttggttttgaggtttttgcaaatgtcgactttaagccttccgccggttcttacctctcctagagacgatgctattcagctttaccgtgctttcaaggggctgggatgcgatactgcagcagtagtcaatattcttgcccatcgagatgcaactcagcgttctttaattcaacatgagtatagagcaatgtattctgaagaccttctcaaacgacttgtttcggagcttcgtggaaaattggagacggctgtcttgctatggatgcatgatcctgcaagacgtgatgcaatagtcattaggcaggcacttttaccagatttgacaaatcttgatgc

SEQ ID NO: 232541 - DNA, 455 bp, Gossypium hirsutum
  unsure (1)..(455): unsure at all n locations
cactagggctaagcagtatgcaaaggagtacgaggctcatgaaaaagagctgattcaattgaagcgggaggcaaagttgaaaggaggattctatgtagatccagaagctaaactcttgttcatcatccgaatccgtggtatcaatgccatgcacccgagaacaagaaagatcttgcagctattgcgtttgagacagattttcaatggtgtttttcttaaagtgaacaaggcaacaatgaacatgcttgacctggtcgagccttatgtgacttacggataccctaatctcaagagtgtgagggaattgatttacaaaagagggttttgggaagttgaacaaacagagaactgctttgacagacaatgcaatcgtggagcaggctctgggcaagtntggcatcatctgtgtggaagatctcatncatgagatcatgactgtgggacctcattttaag

SEQ ID NO: 232542 - DNA, 408 bp, Gossypium hirsutum
gtggaatcctctctcatgggttatggaagctgctgctatcatggccattgctcttgcaaatggaggaggaaagccaccagattggcaagactttgttggtatcataactctgcttgtcatcaactccaccatcagttttatcgaggaaaataatgctggtaatgctgccgccgcattaatggctcgtcttgcccctaaagcaaaggttcttcgagatggaaggtggaacgagcaagatgctgctattttggttcccggagacataataagtatcaaactaggtgatattattcctgctgatgcccgattacttgagggtgatccgcttaaaattgatcagtctgcactaacgggagagtcccttcctgtaactaaaagacctggtgatgggatttactctgtttctac

SEQ ID NO: 232543 - DNA, 353 bp, Gossypium hirsutum
ctgaagtgcaacccggaaggatccgatccgataatactagcgaacgctaccgatttgagccattttggttacttccaaaggtcaagcgtcaaggagttcatcgttttcgtttctcgaactgttgctaaacgtactccttctggtcagcgccaatccgttcagcacgaagagtataaggtacatgcttacaacagaaatggactttgtgccttgggatttatggatgatcattatccagttcgaagtgctttttcgcttctcaaccagatgctagatgaatatcagaaacattttggggagtcttggagaaatgcacaagctgatagcactcaaccttggccgtatctgaatga

SEQ ID NO: 232544 - DNA, 381 bp, Gossypium hirsutum
cacaatcaatgagtgcataggaccctctgacacgactcattggacttccattgtaggatgtctacaagaccggtggtctaggaactgagccggggggtcggcattgaacctgtaccgataggcctggaacgtgaggtacattacgacaccttggattgaccactgatgttaagattagatggaagcatcttgaacctatatagaaagcgctttctgttgacagagtcttgtttaatgtgctagaactggaggtaataaggtatttaaatcgttgatatgttgcctccaactacaaggatgatctctgacagggctgcggcctatttcacctgccaagttttcattattaaccatccaggacggagtggacattgttatgca

SEQ ID NO: 232545 - DNA, 405 bp, Gossypium hirsutum
aatgctcaactctactcatcagctgtcacaggagcggttcttgcaggatctacattcatttccattgcggcaggcgatcgattgggtcgaagagttttacttatcagcggcggaatacaaatgattatatgtcaggctatagttgccataatcttgggggtgaaatttggggacaaccaagaactatcaaaagggtactcaatattggctgtgatagtgatatgtctgtttgatttggcattaggatggtcatggggtccattagggtggactggaccaagtgagatattcccactggaaatcagggctgcaggccatagcattacggatgctgtaaatctcctcttcacattcatcattggtcagtgttttgtagccatgctttggcatttcaagttcgggatc

SEQ ID NO: 232546 - DNA, 442 bp, Gossypium hirsutum
cctggtcctttttttttttgttcaaaagcgaagccctaactcgcatgctgttcggatcttaatcgtagaagatccgattcatatctatctctgatctgatccaaaacgaaaccacccggcctctgagaaatgacgcgtcgctgctcgcattgcagccacaacgggcacaactccagaacctgcccgaatcgtggtgtcaagttgttcggagttcggttgactgacgggttggttcggaagagtgccagtatgagtaacttatcccaattcgccgggtccaattctgccgggcataacgggaatgggtcgggttcgcccggtgaaggtccggatcacgccgatggttatgcttccgaggattttgtccctggatcgtcttcgagtcgtgataagaaaaaaggtgttccatggactgaagaggagcatcgtatgtatctacttg

SEQ ID NO: 232547 - DNA, 424 bp, Gossypium hirsutum
gacttctttagtgtggaggtcactgctttatcaagctatgaagacaaagaggagttattcaaagagcaggttgctcaactaaggcagcgttttttcaattctatttctccaggaggacttgctggtgacagacggggtgttgtccctgcctctggattttcttttagcgcacaacagatatggagagttataaaagagaacaaggatctggatcttcctgctcacaaggtaatggatgccacagttcgttgtgaaaagattgcaaatgagaagtactgtcgcttatcatctgatgaggattggttagcattggaagaagctgttcaatctgggtcagcatctggttttgggagaaggctgagctctatcctagaaacctactcttcagaatatgactcggaggcaacctacttcgatgaagatg

SEQ ID NO: 232548 - DNA, 393 bp, Gossypium hirsutum
  unsure (1)..(393): unsure at all n locations
cccacgcgtccgcggacgcgtgggtttggagcttaagaggaagaggcattctttcactcccaaaatgtcagatcttcaagcaccccttcgcccaaagaggaagaagggcttggtggactttttggtccagtttcgttgggtttttgttatattttttgtccttcctttttcggctctgtattactttctcatatatcttggagatgtcagatccgagatgaagtcctacaagcagcgtcagaaggaacatgatgaaaatgttaagaaagtagtgaagcgtctcaaacagaggaatccaaaaaaggatggtcttgtatgcacagcccgcanaccatggattgcggtggggatgcggaatgtagactataagagagctcgccattatgaagttga

SEQ ID NO: 232549 - DNA, 334 bp, Gossypium hirsutum
cactgatgtatacaacacactttctattattcgtacttggagcggagactctcaccacttccatatttggtacctatgaaccaccaaattattttaaacctcctactgcttttaccaaaccagacaaggtgaaaccaccactatatgaacctaagccaactcagtttgtaactctctgaaaagaataagcctgggcccattcatgttgaatatgctcatttaaagaagactaacttggactgttactcatggttagtaaaacgttcagttaacggttgcctaagttggaatcacttagatcggaactcgctgatatagaagagagagaagctta

SEQ ID NO: 232550 - DNA, 417 bp, Gossypium hirsutum
cttgactgccacacatcacacattgctgttaagtttgctgagcttttgaccaagattgacaggcgatctggtaaggagcttgagaaggaacccaagttcttgaagaatggtgatgctggtatgattaagatgattcctaccaagcccatggttgtggagaccttctctgagtacccacccctgggtcgttttgctgtgagggacatgcgtcagaccgtggctgtgggtgttatcaagagtgtcgagaagaaggacccaaccggtgccaaggtcaccaagtctgctgctaagaagaagtgaagaggccaaaaggttttagccgtgaagcagattgagtgttttatctttggttatatgtggtttgaagtttttgcctgttgtatgtacgacttttaaaggtttgagatgctttggttt

SEQ ID NO: 232551 - DNA, 455 bp, Gossypium hirsutum
ccacgcgtccgccctaacccctcttccttttcccctcgctctcttttccttgccaccaaaaaacatctttctgttcaattcaatcctcctttttctattcaaccataatgtcttgcttcattagcaaatacgccgatgagttggctaaaaacgctgcttacattggcacccctggaaagggtatccttgctgctgatgaatccaccggcaccatcggcaagcgtctttcaagcattaatgtagtaaatattgaagaaaacaggcgtgctctccgtgagctcctcttcactgctccaggagctcttcagtacctcagtggtgttattctcttcgaggaaaccctttatcaaaaaaccgcttcgggcaagcccttcgttgatgttttgaaggaaggtggtgtcctccctggcatcaaggtcgacaagggtaccgttgagcttaacggaaccaaccgc

SEQ ID NO: 232552 - DNA, 322 bp, Gossypium hirsutum
cccacgcgtccgcaactaaatacaccacagccattgacatttgttctagcctctgtttgctggtgagagtggagtaaaccagacttcaacaactacaaaatggataggacttggatggaatttctcaagggcaagcaacgagtatcaaaatggagtgcaatcttttttagattttgcatttcacaattaaagccaagagaatatgattctttgcctgtgtaagaggtgtggcaatatctattggcattatcgtgaaagtgtctacgaacatctaattgttgatggcttcatttcggggtataaaaaatggattttccataga

SEQ ID NO: 232553 - DNA, 387 bp, Gossypium hirsutum
cggacgcgtgggcggacgcgtgggtgaaagggaaatgtgtaccaggacggtctattgtacaaatattgacaagaaggtttctcaaactgaaatgaagagtttctttgaatcaacctgtggtgaggtctctcgcttgaggcttttaggggatcaagtccattcaactcgtattgcttttgttgaatttgccatggcggaaagtgccataattgcactgaattgtagtggcttggtgctaggaactcaggcaatcagggtaagtccttcaaagacaccagtgaggcctcgagttacccgtccgacattgcgttaactgatcaaccaatcattttaagatcgatggatgaaactgggtgacttccaaatgcttgtaatttcattttcgac

SEQ ID NO: 232554 - DNA, 406 bp, Gossypium hirsutum
gttttgtgctttatacgagataaggtttttcctcttaaaactgatctcttgagacccccagaggaaatggaaaggcacataactgatttaattaaaaagagtttaggagatgtaactggagctgaattcaggatgtttatggactttttaaaaagtttgagcatatttggggagaaagctcctcctgagcgcttgaaggaacttattggaataattgaagggcaggctgatttagatgcacaatttgacgtctctgatgcagatcatattgataggttgatatcgtgtctgttcatggctattccattttttgggaagggtgcacctggcagcaagtttctcaactacttaaacaaacacattatacctgtttttgataagcttcccgaggaacggaagctggatt

SEQ ID NO: 232555 - DNA, 372 bp, Gossypium hirsutum
aaaagtctttagcttttcgcttcgagagagaccatgttggtttaccaggatctcatctccggtgacgagcttctttctgactcattcccctacaaggaaatcgagaatgggatgctgtgggaagttgagggaaagtgggttgtgcaaggagctgtcgatgttgacattggtgccaatccttcagccgaaggtgctgatgaggatgaaggtgttgatgaccaagctgtgaaggttgttgacattgttgacactttcaggcttcaggagcaaccccctttcgacaagaagcaagttgtcgtgttcatcaagaagttcatcaagaacttgacaccaaaactggatgcggaaaagcaagagtccttcaagaaaaac

SEQ ID NO: 232556 - DNA, 452 bp, Gossypium hirsutum
aatttctgtttcttccatcaatttttgcctcaaacgctgattcggtctctccttcactggaagtgctattgcccacattgatattggcttcttagggtttttgtttgtttttgaaggataaaccagtgaagttaatctcatgttgaagatcttcaagaagaaaacatctcccaaaggtattttagatttgattccatcgttgctttcttgctctcttttttctttttcctgcattttgcggtcattctctaattgctcacttcctctgttatgtggtcattggtttgtggcacaacaccatgtatgatatgtggttcaggagaaattgaaggagccttattgaaatacttgggggttgagcgcaatgaggtaacaaagacggtttattctcttgtggagaaatggaatgtatgggatgttgtgtaaatgctcctatgattgcagttgctgat

SEQ ID NO: 232557 - DNA, 347 bp, Gossypium hirsutum
  unsure (1)..(347): unsure at all n locations
catcaactcagaacagctctaaaaagcttccaacattttgaagaaacaaagaatcaaacatgtcgaaggaagtgagtgaagaagggatgagccgaaaggactatgtggatcctccaccggcaccgctcatcgacgtggctgagatcaagctttggtctttttacagagctctcatcgccgaattcatcgctactctccttttcctatacgtcaccatagccaccgtcatcggccacaagaaacaacacgatgcatgcgatggtgttggtcttttgggtattgcttgggcttttggtggcatgattttcattcttgttactggcaccgccgtatctcangtggtcaca

SEQ ID NO: 232558 - DNA, 443 bp, Gossypium hirsutum
ctctctttctatacgaaattgaataattaaaaaaaataaaattttgatggaaaagggaaaatctgctcgacaagccgtagaaatctcgttgaagaagctcaatctgaacgctgatcgaaactttaaatcctctcgtttgatatcttctcttcactcatcaaagttacgcattgagaagacgaaacctcctagtttagtgagcttgtgccttggagttattggtcggcatctggaggaaattatcgaggatttaagtgaaattgctgttaattttcccgcggatattaagataccattggcagcaatagcaaggagaagaaaattactgaatgatgatgtcatcatctccttggccgatagttcttgggaaattcttgacctttctggttcagatgtttccgattttggcttagctaaagtagctgaaatgtgcaaatctcttc

SEQ ID NO: 232559 - DNA, 430 bp, Gossypium hirsutum
gagaaaaaaaaatacggaattcggtctcagaaatgggtgatttagtgcctatttacctcgtcatcctcgcttttttttgtactgctggagccattgcgttggccgttcttcatatctacaggcatcttttgaattacaccgaacctatttttcagagatacatcgtccgcatcatcttcatggttccgatttatgccttgatgtctttcttgtcccttgttctaccacggagttcaatctatttcaattccatccgggaaggatatgaagcttgggtcatttataattttctttctctctgcttagcatgggttggaggtccaggagcagttgtgctcagcttgagtggtcgagttttaaagccatcttggtatctgatgacatgctgcttgcctcctatgcctttagatgggcgatttatacggagatg

SEQ ID NO: 232560 - DNA, 435 bp, Gossypium hirsutum
caaaaaaattcatgagagtgtggttatggatctttgccaagtcttagatcaggagttggatgctttagaaattgaaactgttcagaaggagacaatccatccaaggaagagttacaagatgaacagctcttgtgcggatattcttctctttgcagctcataggtggcctatgtcaaagcctagtcttgtggcagagtccaaggacatgtttgatcaaaaagcaagcaataaatattggatagatgtacagctccggtggggtgattatgactcgcatgatattgagcgttacactcgagccaaatttatggactatacaacagataacatgtctatttatccatctcccactggggtaatgattggccttgatctggcttacaacttgcattctgcatttggtaattggttccctggttcaaagccactgctcgc

SEQ ID NO: 232561 - DNA, 445 bp, Gossypium hirsutum
tttctctcaatttcttcacatttcttgattttatacataaacatcccatctccatcacattctcaagcctattcaatggagtttttaatgaaaatatgtctccttttcctttgtggcctcatttctcactgtgttaacatgattttccagaagagaaatcagcaatgctatatgttgggttatgaatgtttcaaggctgccgatgacaggaagctcgacactgatgcgtgcgtgaaagttgtgttgaggaacaagaatcttggtctggaccaatacaggtttcttttaaaaaccattgttagttctggtcttggtgaagaaacttatggtccaaggaatgttattgatggtagagaagaggttccttcggaaaacgatgcacatgccgagatggatgagatcatgttcagcactctaaacactctgttcgagaaaacaagagttt

SEQ ID NO: 232562 - DNA, 351 bp, Gossypium hirsutum
gttggccaacaagaattatctgctgttaactcctactcatgcttgtgcaaaagggtatactaacaactttagagtttcgaatttaccttccattgttgtaagaaaagagggttctgttcgatcgcaaggttttgtagcaatgcaggagaagggtggttcaacattgagcgatgattcgaggacgaaaaccccacatgttttgactgttgctggctctgattcgggtgctggggctggaattcaagctgatctcaaggcttgcgctgctcgtggagtctattgttctactgttatcactgcgctcactgctcagaacactgttggggttcagggtgcaagtaacgtaccgga

SEQ ID NO: 232563 - DNA, 430 bp, Gossypium hirsutum
cggacgcgtgggcaaaaatggatggttattgcagcagaaggggaatcatgtttttggtgtttgcatttgcagcaataagcagagggtgtggacaagaatcaaccactcttgttcctgcaatcatcacctttggtgactctgtggtagatgtgggcaataatgactatctccctaccatgttcaaggctaactatcctacttatggacgggactttgccaacacaaagcctactgggaggttatgcaatggataaatagccactgacatcactgctgaaactctggggtttacaacttatccaccagcttaccttagcccagaagcatcagggcagaaccttctgcttggagccaattttgcttcagctggctctggctatgatgacaaaggtgccatggtgaatcatgccatcacattgacccagcaatt

SEQ ID NO: 232564 - DNA, 438 bp, Gossypium hirsutum
ggcacggggtctggtcatggctgatggggcggatgcttatcctattactgaggagaggttgaaggagattgaagcacagattgaggagatggcaaaagggtggccggagaaactgaaagatgaacggcatgaggagcatgagctggtgctcactcgtcgcagtaattatgtctgtaatgtatgcgacgaaatgggacaagtctggtcattctactgtgaggaatgtgactttgatctacataccaaatgtgcccaggagaaagaaaccaaagctgatgcaaaagaaggttgggtctgtgatggggaggtttgcactagagcttcatgaatgatgaccacgtatacaccaacacactagttggctgtgctggtgatgcatctaggatcatgtgtgtgctatgtaataaaatcatgagatcacttatgaaagactgtgtt

SEQ ID NO: 232565 - DNA, 434 bp, Gossypium hirsutum
ccgatttgtaatcccttccaaaagaaaggattagctaatcggtcctcttctaccctccaagccgttgcagcatcttcttctttttttcatttttcttcccatttccttccaaccttctccctccttttcatgcttctatcctgaccagccctttaacaaaccctaacaatcctcaacaaccctcaacaaggccttcaattacgaatcgtatgaggtaacagagtaacagagagtagcagcaatggttcccaagttcgtgctactcctggtcatacaatgggttgtgttacctatgtcacgggagatggacctgatcaacctcagccaaggatggctttcacaggagatgctctgttgataaggggatgtgggaggacagattttcagatttttacattaccgaaagagacattgctatatccagctcatgacta

SEQ ID NO: 232566 - DNA, 435 bp, Gossypium hirsutum
ggaaaactgtgactgaagtaactgatgacaagaaggttataaagaagatcttgaaggaaggagagggatatgagcgcccaaatgagggggctgctgtccaagtgaaattgattgggcaactgcaagatggtaccatattcttgaagaagggccacaatgaaggagaagaattgtttgagttcaagacagatgaagaacaagtcattgaaggtcttgatagagctgtgttgaatatgaaaaaaggcgaagtagcactgttgactattgcacctgagtatgcatttgggtcatccgagtcaaagcaggagttggctgtggtaccgccaaactctactgtttactatgaagttgagttggtatcatttgtcaaggaaaaagaatcatgggatctgaacacccaagaaaaaattgaagctgctggtaaaaagaaggaag

SEQ ID NO: 232567 - DNA, 441 bp, Gossypium hirsutum
gtgatttaatgcacctcattaataaggaagaaaaaacagtctcaagtgatcacagaaaagttgactttgtagagcagcaatatgtggaagctggagatagctgaaggcaatggtccatggctgcttagcactaacaatttcgtcggcagacagatttggaagttcgacaatgaagcttccccagtatcaaatggacaaggagcccaaacccaatattttcatcccaatttcaactcacatcggcatcatgttagaccaagcagcgacggacttaagaattttcagctgattaaagaaaacaacgtagatttaagcattggaccagtgagatttgaagaagatgaagaagtgaaaaatgaaaaagtcgaaattgctttaaggaaagcatttcgattcctttcagctacccaagcttcggatggacattggccttcagaaaat

SEQ ID NO: 232568 - DNA, 371 bp, Gossypium hirsutum
cggacgcgtgggcggacgcgtgggcgatgatgagtgcacccaaggcagccaaagccgccatcacgtgcagcgacgtggtgaaccacttgatcccgtgcttgtcctacgtacaaaacggcggtacacccgctgctgcatgctgcagtggggtaaaagcactctacggcgaggttcagacctccccggaccgccaaaacgtgtgcaagtgcatcaaatcggcggtgaacggaattccgtacaccagcaataacctcaatctcgcagccggcctacctgctaaatgtggtctccaactcccttacagcatcagcccctccactgactgcaacaaggtgcagtgaggttgatgatgatgatatggaaggagtgga

SEQ ID NO: 232569 - DNA, 410 bp, Gossypium hirsutum
gaaaaaccaaaaaaatggcgaaaccccaacttttatttctattttccttttcccttctctgtctcatatctttttccgccgccgattcctccatcatagacgacttacgtctagccggttccagtttcccgtcggttcatgcaaagaagctgattagggagttgaatttgtttcctaaaggggaagtcaatgtcgttgacgaacatcgggtttcgttgccggagggtcccaaactggtggagaagcggttcaagttcccaactttggaagtgcccggtggagtttccgttgaggatttgggtcactatgctgggtattacaagcttcctaactctcatgatgccagaatgttctacttcttcttcgaatcacgcaatagcaaaaaggaccctgttgtaatctggttgact

SEQ ID NO: 232570 - DNA, 443 bp, Gossypium hirsutum
gtttaagggatttttttcattcgtttcttctcacgctcgattaccttacaaaaagagaaaatgaccaagtgttacccaactgtgagcgaggaataccagaagtcagttgaaaaggccaagaggaagctcagaggtctcatcgctgagaagaactgtgctccactcatgctccgtttagcgtggcactcagctggaacttttgatgttaagaccaagaccggaggtccattcggaaccatgaagcatcctgctgagctcgcacatgctgctaacaacggcctagatatcgccgtcagacttctcgagccgatcaaggagcagttccctaacctcacctacgctgacttctatcagcttgctggtgtcgttgccgttgagattactggtggacctgaaattcccttccatcccggaagagaggacaagcctcacccccctcctga

SEQ ID NO: 232571 - DNA, 399 bp, Gossypium hirsutum
gtcaataagctttaaccgacaaaaaaaatggttgcggatcgtacgacgatcctagatgccgccatccttgtaacggctatttacggcggcgcggtgacatctgcgcacgcaccggcagctgatccagcgatggccatgtcgccgtccgccatggcaccgacaccggactgtatgacgaacttgctcaacttatcggattgatcgacgtacggggaggccggaagcaacttgacgaagccggacaagctttgctgtccggaattggctgggctaggggaaagtagccctcaatgcttgtgctatttgatggataaaaatgcgacggctaactatgggatcaacattgacatggacagagctcttaagctgcctaatgttagccatgtcaaaacccctgct

SEQ ID NO: 232572 - DNA, 424 bp, Gossypium hirsutum
gatcaaagactcaaaacacgtgccctccaaccatttttcctgtttcaccgatcaaagtcccaatccacctacaccgatcaaagtccctatcagaggatagaggtaaaatggtctacctacaatattctaacaggcaagagattgtaaacaacaaaacctcgggggatatagccggaaatgttcatttggtaacaatcaaaggtcaagatgcgtggcttgattccattgatgatatgaatctggtattttcagcttaaggatttgtgcataatattactacctttgagaagacagctggattttagtcagggatatatatattgaatgggaactgatgctattgaagcaggggagactccatttaactcctatcctagattctttgagattcgagaataccctaagaatgccatgtgcaacatca

SEQ ID NO: 232573 - DNA, 439 bp, Gossypium hirsutum
gtctaatttcatttgagtaagaaagggacaaaaaaaatgccggcagtttacggagccagattgacgacgtttgaggattcagagaaagagagtgaattcggttatgttcgtaaggtgtcaggaccagtcgttgttgcagatggaatggctggtgctgccatgtatgaattagtccgtgttggtcatgacaatctgattggtgaaattattcggttggaaggagactctgctacaatccaagtttacgaagaaacggctggtctgatggtgaatgatccagttctgcggacacacaagcctctgtcagttgagttgggaccaggaatattgggaaatatttttgatggaattcagaggcctttgaaaactattgctaaaagatcaggtgatgtatatatccctcgtggagtctctgtcccggctctcgacaaagatactc

SEQ ID NO: 232574 - DNA, 410 bp, Gossypium hirsutum
gtcttaataaacgccttctttcttcttcttcttattcctttattgctttttagaatttttcttaatcgaaaatgagagagtgcatttcgatccacatcggtcaggccggtatccaggtcggaaacgcttgctgggagctttactgtctcgagcatggaatccagcctgatggtcagatgccaagtgacaaaactgtcggaggaggtgatgatgcttttaacacctttttcagtgaaactggtgctgggaagcacgtccctcgtgccgtcttcgtggatcttgaacccactgttattgatgaagtgagaactggtgcttaccgccagctcttccacccagaacaactcatcagcggcaaggaagacgcagctaacaactttgcccgtggtcactacaccattggcaaggag

SEQ ID NO: 232575 - DNA, 427 bp, Gossypium hirsutum
gatggcatcaaagcaatcatattggaggacttaaagaatgcaaagtcgattgtgaactggatagcttgggcagaaccacaatatgactttaatccaatgatagatgaatggtgcaaagaagcccctaaagagcttgattttgatcatgaagctgagaatactagaactgtggctgcaaatcttggctgcaaaaagtcacctggtgagagctactcttccaaccgcgtgaatgttttgattccagaagttattcagtcaaccaaaagtgtgctcatcttagagtacatggatggaattcgtctgaatgacactgcatctttggaagcttttggtattgacaaacaaaagataggtgaagaaataactcgtgcatatgcccaccaaatatatgttgatggattctttaatggtgatccccatcctggaa

SEQ ID NO: 232576 - DNA, 284 bp, Gossypium hirsutum
aaacaatcaatcaatagttagaaaagaaaagacaacagcggccgttttacttcaattcttctgccggcgactttgagtgacgatttctaggcggctgttggttttatcttccaagtgcggtttaaggcttcagtgtgtgcggagaatgggagggagtcggggttattcggcgaatcctagcgactacaagcttctagaagagattggttatggcgccagtgctactgtatatagagcgatctatcttccttttaacgacgttgtagctatcaagtgtttggatc

SEQ ID NO: 232577 - DNA, 434 bp, Gossypium hirsutum
atttgttccccggaaaagttctcatttccacccaaatgcaaaaccccagatttctgttctcccttttgttttctatattgatctcaattctgttcttcaacaatataatcgctgaatcaaccttcggccctgaaacaatggcgacaaccactactttgggcggagtccacccttcccaaggctcccaaaacagcgtcgagctcgaaaacctagcacgctttgccgtcgacgagcacaacaagaaagaaaatgcaatggtggagtttgtgagggttgtgaaagcaagcgagcaagttgtggcggggacacttcaccatttgacggtggaagctgtcgacgccggcaaaaagaagctttatgaagccaaagtttgggttaaaccttggatgaattttaaagaattgcaggagtttaaacatgctggtgatgctgat

SEQ ID NO: 232578 - DNA, 439 bp, Gossypium hirsutum
cggacgcgtgggaaaaaaaatttctctggaaacaaagcaactatcaactacgtttacctcagatctaaaacacctcgtctcagatccactaaattcaccatgtctactactttcagcggcgatgaaacggctcccttcttcggcttcctcggcgccgccgccgctctcgtcttctcctgtatgggagctgcatacgggacggctaagagcggtgtgggtgtggcttcaatgggtgtgatgaggcctgagttggtgatgaaatccattgttccagttgttatggctggtgttttgggtatttatgggttgattattgctgttattattagtactggcatcaatccaaaggccaaatcgtattatctttttgatggttatgcccatctttcctctggtcttgcttggggacttgctgggctttcagctggaatggcaatcg

SEQ ID NO: 232579 - DNA, 435 bp, Gossypium hirsutum
tcttgagcattttccctagtaaaagtttctggcacttgcatggtgggtttcctggatgaattataatcgttacagctaggggaggtggtgtgatggcggccaagaaggcgtgtgagtctttttccaagagcttaattgaggatgtgcataaatggggttgcatgaagcagacaggggtgagcttgaggcacatgatggagtttgggtccaaacccactgaccggaacttgttgatttcgggtcagttcctccacaaggagctccccattaggattgctcgtagagccattgagcttgataccctcccttatggcctttctgaaaagcctgctactttgaaggtccgagactggtacttggattccttccgtgacctaaagtctttccctgagatcaaagatataaatgatgagaaggaatttacacaaatgatca

SEQ ID NO: 232580 - DNA, 401 bp, Gossypium hirsutum
gcttacgagaaaagagaagaaaacaatgtcaggtcctcagtgctgttcgaatccaccaacattggattctgcaagtggggctggtcacgttgagaatcttgctggtctcaacacttatgtttctgggtctcttcaatctaagcttgctgtttttcttatctctgatattttcggatatgaggctccaaactttagaaagctcgcggacaaggttgcagccgctgggttctatgtggtggctcctgacttcttttatggagaaccctatgaccctaataaccctgatagacctctatctgtttggataaaggatcatggaccggataaaggttactaggatgcaaagctcgtaattgacgctttgaaaagtaaaggggtttcatccattggagctgctgggt

SEQ ID NO: 232581 - DNA, 431 bp, Gossypium hirsutum
gaaatccctaaaacccaataactcgaaaagcaaccctaattacgatgtcggatcagaaaaacgacgccggaacttctcaggcgaatgctccggcgaatgatccaaagaagaaagaggaccaaaagaagaaagatgatgaggatctgtcggaggaggatttggctttgaaacaacagttggagttatatgtagagagagttcaggattccgatcctgggttacagaaagtagctcttgagagcatgaggcatgaaatccggacttcaacaagctctatgacttctgttccgaagccattgaagtttctccgtcctcattatggaaccctaaaagctttttacgagacaatgccagaatctgatttaaagaaatacttggccgatatcctgtctgtgttggcactgaccatgtctgcaaagggagagcgggag

SEQ ID NO: 232582 - DNA, 358 bp, Gossypium hirsutum
ctagaacagcctatccgagtcaggctttcggctttcggcaaacctcggggaatatttcatcggcccagagctcgagcaattgatccaatagttagccgaaaatgatccgaaccggtacgggaccccaccagcatcgaagtcggccatcgattcgctaccatcggtgaagataacaaaggatcacttgagttcaaagtccaagcagtgcgcagtttgcatggatgatttcgaggaagggattcaagcgaagcggatgccctgcaggcatctttatcataagaattgcatattgccgtggctggagcttcataattcgtgccctgtgtgccgtcacgagttgcctacggatgaccctgat

SEQ ID NO: 232583 - DNA, 335 bp, Gossypium hirsutum
gtccttcgtccgaaatgagcaaccctgattcggcgcttgctaccagattgccttgtccatcaccgatgagctcgcggatcttgagcaggctggtgtcgatggtatcccaatccatcacggtgctttgccagaatggttgcctctcatgaagtccgtgcatgccttctaccaaacgatggatgagcactgcttaaggatcacgcactgtggcgttcactacattaagcagatgcagacggccctaggctactacaagtacaagggtgctgtgcactctatcaaacacatggttgccgccctcgtaacccattgcgactgccctatatatgagaaag

SEQ ID NO: 232584 - DNA, 377 bp, Gossypium hirsutum
tgcaatttctcatccaccaattgaatcaggttgtgaagtattgagggtgtttattatttgttgtttttttataattactgatgtctccgccgctgcttggcgtggaggaggaagggattcagagcaatgttactttactcggttcttcaggctcaatggaaagtgtgtgccagaatagtgctgacttgaaggaacggaactacatgggcttgtctgattgttcttcagtggatagctctgttttttcccctccgtccgaggaaagaaaggctagtttgaatctaaaggcgactgagcttaggctcggactttctggattgcagtcgcctgaaagaaatccagagctttgcttgttaagttcttctcagcttgatgag

SEQ ID NO: 232585 - DNA, 429 bp, Gossypium hirsutum
cccacgcgtccgcttgggctgtcccttggtgggtgtttctttaggttttcttggtcgcgacgattttcagtggcttgtaaatggcagcgtataggctcctgattttctccctctttttggccctagttttcaccaggattggagccgatgcctcaactgaaccgctgcttgaatcggacgccgccgattcttctgctcttaagatggagttggatcaactgaagtctaagatccgtcttcttgaatcaaatgttgaggagaaaattcgagaattgaaaaccaaggatgagatgataaagcagaaagataaaattatagaagaaaaatctgacaccatggcatcgttgcactctgaattatcatctcttcagaaaaaaggaaccccagatgctgaagaacgggtgggaaaagctcatgcgaaagctcttg

SEQ ID NO: 232586 - DNA, 380 bp, Gossypium hirsutum
catagccatggcttcctcaccaaaactcttctctatgtctatcctcttcctttttgccctcttctccatgcaaatccatgctagagagtacttcagcaaattcccaagagttaacatcaatgagaaagagacaacaaccagagagcaaaagcacgagaccttcgttccccagaccacccaaaagccagaagaacaagagccaaggttcattcctgaaacccaaaatggttatggcctttacggccacgagtcaggctcaagccggcccagtttcaccaccaaagaaacctatgaaccctatgtcacccctgttagattccaccctgatgagccctataacagcattcccgaatccttcaacaataaagacacttactact

SEQ ID NO: 232587 - DNA, 308 bp, Gossypium hirsutum
ctggacagtgaggccttgaatgacatctgtttccgcacacttaagctaaccactcccagctttggtgatttgaaccatttgatatctgcaacattgtctggagttacatgctgcttgcgattacctggtcagctcaactccgatctcaggaaacttgccgtgaatctcatcccctttcctcgtcttcactttttcatggtgggttttgctccactcacttctatggggtctcaacagtaccgagctctaacagtacctgagctcacccagcaaatgtgggacgcaaagaaccaatgagtgtgcttctg

SEQ ID NO: 232588 - DNA, 367 bp, Gossypium hirsutum
ctattcttttcaacagatcccacagtcatgtaataatctgagccgagtgtttgaggcctgaaaacgaaccctaaaccatgggtcagggaacaccgggcggaatgaataggcaaggtttcccaggggaccggaaacccgatggctctgattagaaggataagaaatttgagccagttgcgcccccagccagggtggggcgcaagcaacgaaaacagaaaggacctgacgccgcgggtcggctttcgactgttacgccgctgacgaagagtaaactgcggctgataaagctggagcgggtcaaggattatttactgactgaagaatagactgtggctaaccaggaaagggtcatgcctaatgaagagaa

SEQ ID NO: 232589 - DNA, 411 bp, Gossypium hirsutum
cggacgcgtgggcctcactcggcccggttggactcgacaagatgcttgttgatgacattggtgatgtaacgattactaatgatggtgctacgatcctgaagatgttggaagtagagcattcagctgccaaggtacttgtagagttggctgagcttcaagatcgggaagttggtgatggaacaacctctgttgttattgtggcggcagaatttctcaagagagcaaacgatctggttaggaataaaattcacccaacatctataattagcggcttcagactagcaatgagggaagcatgcaaatatgtagaagaaaagttggccgtgaaagttgagaagcttgggaaagattctctagtaaactgtgccaagacgagtatgtcctcaaagctcataactggtgacagtgact

SEQ ID NO: 232590 - DNA, 350 bp, Gossypium hirsutum
gccccacacatttcctgctaaatgctgagaactaccattggcagtggacattattttcctttgctgcctcaactgcaatctatgtctatttgtactccgtctactactaccatgtgaaaaccaagatgtcaggcttattccagaccagcttctacttcggctatactttgatgttttgtcttgcatcgggaattctctgtggagccgctggatatctcaggtctaatctcgatgtaaggaggatctacagaaacatcacttgctactaaatgcttataatgtttgaaagtataaccatcaccgcttctgtgagcatttttatttgtcgtctgaggcaataaatgatgatg

SEQ ID NO: 232591 - DNA, 316 bp, Gossypium hirsutum
aaaaaagaaaaaatgatgcttggagaaactcatcgtccaaatccaaccgtccacgtaccaccttggcctgatcttgacgatgatcagacggatgtagtttactctcctatccattacaatgcaaccgacaacaacttgagcagtaacggcaacccgttttacctccatgaagcgttatcagctttacaacgttatttgccatcgaacggcccggatgttgagttggattccgagtttccgggtttggatagtccggattcaccggtcgatgcttattcctgtggacattttaagatgtacgaagtcaaaattccga

SEQ ID NO: 232592 - DNA, 390 bp, Gossypium hirsutum
  unsure (1)..(390): unsure at all n locations
attggaaatggatggaaaacaaatcccagataatgaaaacgttgaaaaaaatgaattagagcaattattaccatctccagaggagttggcatatcaaattgaagcagaactctttaaattatttggaggtgtgaataaaaagtataaggagaagggtaggtctctattgtttaatttaaaggatcgtaacaaccctgaactcanggaaagagttgtgtctggcgaaattcccccagagcgattatgttcaatgagtgctgaggagctggcttctaaagagctttcacagtggcgacaagccaaagctgaagaacttgctcaaatggtaattttgccctgtggtaaagttgatattagacggcctggtgaggaaaacacataagggtgaat

SEQ ID NO: 232593 - DNA, 430 bp, Gossypium hirsutum
  unsure (1)..(430): unsure at all n locations
gtctttgtactgaagtcctccttcgatcttagcctaaagccgaggacagtgttacaagtctctcgtcaacagcaatggaggcttggatcagagctagagtaaccttagctctcactttattcgctcttttattcttcgtctccagatcttctcctccacgtcaatttgtaatctccaacgccgagcgtagaattgacttgagctcccacattattaatgttcacttgactttgaaggtcgagaatactggtactagacctgcttcagaagttgttcttgctttgacccccactgaagttgaccatctagcaatggttgatgcattagcaattaaaggaaagcggaagaagactacttcagttcatcttgagtaaaaccaactgaactgcctgatgcaccacctattgacgcntaaatatttactatttat

SEQ ID NO: 232594 - DNA, 428 bp, Gossypium hirsutum
gatggcatcgaaacaatcatattgaatgacttaaagaatgcaaagtcgattgcgaactggatagcttgggcagaaccacaatatgactttaatccaatgatagatgaatggtgcaaacaaacccctaaagagcttgattttgatcatgaagctgaaaatactagaactgcggctgcaaatcttggctgcaaaaagtcacctggtgagagctactcttacaaccgcgtgaatgttttgattccagaagttattcagtcaaccaaaagtgtcctcatgttacagtacatggatggaattcgtctgaatgacactgcatctttggaagcttttggtattgacaaacaaaagatagttgaagaaataactcgtgcatatgcccaccaaatatatgttgatggattttgtaatggtgatccccatgctggaaa

SEQ ID NO: 232595 - DNA, 421 bp, Gossypium hirsutum
ggagatgtcttcccgggatccaccttatccgaccatattttgagatttaacaacattccacaggtcaagatgatggttgtccttggagaacttggtggaagagatgagtattccttagttgaagccctgaaacagggaaaagtgaacaagccagtggttgcttgggtcagtggaacttgtgcacgcctcttcaaatcagaagtacagtttggtcatgctggagctaagagtggtggtgagatggagtctgcacagggaaagaatcaagcgctaaaggaagctggagctgttgttcccacttcatatgaagctctggaagctacaatcaaggaaacatttgagaaactggttgaagaaaggaagattacaccggtcaaggaagttaagcctccacaaatcccgagagatcttaacagtgcta

SEQ ID NO: 232596 - DNA, 360 bp, Gossypium hirsutum
  unsure (1)..(360): unsure at all n locations
aagatttgtattgaagtcttggagctatgtgtcaaatgcaatactcacctttcagaaggccagtttttcttggcattgaaaactgtagatttgattgacacaaactacttgcagaatatccctgtaaatacaatcaaaataatgatagggaagaatattcctataataaaagctcatatcgaaaagaaagtgactgcagactttaacgagtggcttcttcacattaggagttctgccaaggatattgggcagactgcaataggtcatgctgcatcggtacgccagagagatgaagagatgcttgaacggcagagaaaagccgaggagctgaacgtttctggcttaangagatgtggtata

SEQ ID NO: 232597 - DNA, 412 bp, Gossypium hirsutum
  unsure (1)..(412): unsure at all n locations
caagatgatgcttttctatagtaaacaaagcacgtcaattcgaggggctaatgttatatataggcgtgtcctttcccaagttgataaacctgctatttatgaagtatttagcttggagaagacattcaggatgacgttttcactgcttgtacttcatatgtggctctgcttacgccggttgaaagctgaaggaaaagatggtgttgaattaggacaatacgtctatgagatttataatcatgatgttgagctcagagtatctaaagctggggttaacttacttttgacgaaatggatgaaagaattggagaagatattctatggaaatattggtgcttatgatgctgncttgcttccggaggctacacacgaggagctaacagaggttatatggaggaatatcttttctgat

SEQ ID NO: 232598 - DNA, 420 bp, Gossypium hirsutum
gcaacacatccccctttcgactacagtatcagagacgattacttctctcataagcctttgccatttttaatatatatatttctctttgggaaactacaactacagctatttcatcttctaaagcacactttcctttctctgtttcaacatttcctactctattaatcttacccaccttgcttacacacacacatatattgttgcttaggtgaaggaagtagttggaagtttaagaagatgagtgcttcaaagttcattaaatgtgttacagttggagatggagctgttggaaaaacatgtatgctcatttgttacaccagcaacaagttccccactgattatataccaacagtgtttgacaatttcagtgccaatgtggctgtagatgggagcattggtaaattgggtttatgggacact

SEQ ID NO: 232599 - DNA, 421 bp, Gossypium hirsutum
ctcctcagtactttgaaagaaaattttgtgccacaagttcttatccagaagatatttactcaaacattttcgtacataaatgtacaattgtttaatagccttcttttacgccgtgagtgttgtacgtttagcaacggagaatatgttaaagctgggttagcggagttagagctctggagttgccaagtgaaagaagagtatgcagggtcgtcatgggatgaacttaagcacattagacaggctgttggttttttggttatacatcagaagtacagaatttcatatgatgacattgcaaatgatctctgccctattcttagtgtccagcaattgtacagaatatgtaccctgtattgggacgataactataatactcgaagtgtttctccagatgttatttccaacatgagggtattaatga

SEQ ID NO: 232600 - DNA, 377 bp, Gossypium hirsutum
cggacgcgtgggtttgtttctaaggatttaatctccaaaccttcttcccatttcttcattacattgttcaagaaaaaagaagcaaaaaaacatggccaaagttctgttgttcattgcactatgtgtgcttccagctttggttagtgctacacgcattctgaataatcaattggtggtagaaggctatgtgtactgtgatacttgccgggctggttttgaaacccctaagactagaagcctagctgatgccatggttaggttggtatgctccgacaggaagaagcggccaagttgtcttcaaaaaggagggatacaccgacaaaaccggaaaataccagattcgtgtatccgaagatcacttggatcagatctgtgat

SEQ ID NO: 232601 - DNA, 423 bp, Gossypium hirsutum
aacgccttctttcttcttcttcttattcctttattgctttttagaatttttcttaatcgaaaatgagagagtgcatttcgatccacatcggtcaggccggtatccaggtcggaaacgcttgctgggagctttactgtctcgagcatggaatccagcctgatggtcagatgccaagtgacaaaactgtcggaggaggtgatgatgcttttaacacctttttcagtgaaactggtgctgggaagcacgtccctcgtgccgtcttcgtggatcttgaacccactgttattgatgaagtgagaactggtgcttaccgccagctcttccacccaggaacaactcatcagcggcaaggaagacgcagctaacaactttgccctggtcactacaccattggcaaggagattgtcgacctctgtttggacc

SEQ ID NO: 232602 - DNA, 395 bp, Gossypium hirsutum
acaaaggttacagaaagaaagaaaacatgtctcttgtgacagaagagataaaagcgagtgcatcagagatttaccatggagatgagatatgccaggagaaatccaagtttttgttggaggaagtaggcatgccaagggggcttttgccacttagagacatcgaagaatgtgggtacgtgaaggacacaggtttcgtgtggctcaaacaaaagaagagcatcacccacaggttcgaaaagatagggaagctggtttcctatgcaactgaagtcacggctgtcgttgagaaaggcaagatcaagaagctgactggggtgaagaccaaagagcttttggtttggatcacactgagtgatatccaagtggatgatcctcccactgggaagatcactttc

SEQ ID NO: 232603 - DNA, 383 bp, Gossypium hirsutum
aaaaaataaataaagattgaacctttaatatagctgaatcagaatcttgtctcttctataaataaaatttatttttcttcagtccttctcacaatcccccccttctctttgatccacagtttcagtttttctcattagcagtttttaagaaaaaggctaaagttccaatctttacgtgagatatggcgagtactagtaattcaaacaagatgcaaaaattagcttccattgatgcacagttacgactattggttccttctaaagtaagtgaagatgataaattagttgaatacgatgctttgcttttaagatcgattccttgatattcttcaagatttacatggcgaagatcttaaagaaactgttcaagactgttatgaact

SEQ ID NO: 232604 - DNA, 422 bp, Gossypium hirsutum
cggacgcgtgggttccgttattaaacaatggaaaagattcagcacagccatgtccaagcgcgaggattaaagcttcacgtagcccaaagtggaacaggtcctaaggtggtgcttttcctgcatggcttcccggagatttggtattcatggaggcaccagatgattgctgtggctaatgctggtttccgagcaattgcttttgatttcaggggctacggactctccgaccacccacccggagcccgaaaaagctagtttcaaggaccttgtcgacgatgttgttgcccttcttgatttgttgggaatcaataaggtttttcttgttgggaaggattttggagcaatgccttgcttttatggtagcttgtatccaccctgaaagggtgttaggtgtcataacactaggcattcctttccttata

SEQ ID NO: 232605 - DNA, 391 bp, Gossypium hirsutum
tcttctttgagattttgcttcagcactctaaagcccctgccaagccaaaatgggtatttctcgtgattccatgcacaagaggcgtgccactggtggcaaaaagaaggcttggaggaagaagagaaagtatgagcttggaaggcaacctgcaaacacaaagctatccagcaacaagacggtcaggaggattagggtccgaggtggcaatgtgaagtggcgtgccttgaggcttgacacaggaaactactcctggggaagtgaggctgtgactcgtaagaccagaattttggatgtggtgtacaatgcgtctaacaatgagttggttcgtacacaaactctggtgaagagtgctattgttcaagtcgatgctgctccattcaaagcaatggta

SEQ ID NO: 232606 - DNA, 410 bp, Gossypium hirsutum
  unsure (1)..(410): unsure at all n locations
ctcttttcagtcctaaccaaaggcggcccctcaactctcttctcctttagcaatatctttccccttcactgtttcaactcaaagaaatggcggaggagaagaaggctcaatctgctggggtttggcctacggttaaaccttttgtcaatggtggtgcctctggtatgcttgctacctgtgtcatccaacccatcgatatggtcaaggtaagaatccaactgggtcaaggatcggcagcaactgttaccaagaacatgcttagggaggagggtgttggtgccttttacaagggtctatcagcaggactgctcangcaagctacatacactactgctcgattgggatcattcaaaatggtggacaaacaaagcaattgaagccaatggatgggaagcccttacctctatatc

SEQ ID NO: 232607 - DNA, 434 bp, Gossypium hirsutum
gaagaaagatgatggaaaggggttttattgttttggccttgacggtggttttcgccgcgacggtggttacggcggctgacgagagtgggttagcgaatgagtgcagcaaagatttccagagcgtgatgacttgcttaagctttgctcaaggaaaagcaccgtcgccgtcgaaggagtgttgtaattcagtggcggggattaaagagaataaacccaaatgtttgtgttatattttgcaacaaacacaaacttccggtgctcaaaatctcaaaagcttaggtgttcaagaagataagctgtttcagttaccgtcggcttgtcaattgaagaacgctagcgtcagtgattgcccaaagcttcttgggttattttccgagctcaccagacgccgccatcttgaccaactgctgctctaaagcaacgacacccagtac

SEQ ID NO: 232608 - DNA, 375 bp, Gossypium hirsutum
cggacgcgtgggctggtgatggcaccacttgtgcaacagtccttacccgcgcaatatttgttgaaggatgtaaatcagtggcggctggaatgaatgccatggacctcagacgaggaatcacaatggcagttgatgcagttgtgaccaacttgaagagtagagcgcggatgatcagcacgtccgaggaaattgcacaggttggaacaatatctgctaatggagaaagggagattggcgagctcattgccaaggccatggagaaagttggcaaagaaggtgttattaccattgctgatgggaaaaccttgtacaatgaattagaggttgttgagggaatgaagcttgatagaggctacatatcccccttactttatc

SEQ ID NO: 232609 - DNA, 399 bp, Gossypium hirsutum
gttgtaattattcgatactcatcctttgtcgtgcttgaacccaaccgtaaggaacatgagaaacacgatgagtatgcacgatctttaaacggggttcgatacgccacaccctaataataacttgaattctttacaccataagctgaggcgagaaatatgagacacttgtgcttatcagtgtagaaggggtcgggattttgaaatataaaactgctcttttggtctatgatcggctcgttaattctcttgctacccctaaagacacctttgaattacgcgatgagtggcacacgacacggctacatattgggcagctggtgatagagacttcagctaaactaacggtagcaagtgaaactgatcaaaatgcacaacacttaaagaagatcgctgatgcta

SEQ ID NO: 232610 - DNA, 265 bp, Gossypium hirsutum
aattgtttgagctagctagctcttactcaaatggcaaccaaaacgatgatgttgcaaatatttccacttttcttctttttgttcagtgtctgcaactccattttccttggtgctaatggagatgacaatggtggttggcaaactgcccatgccaccttctacggtggtgctgatgctaccggcacaatggggggagcttgtggttatggaaacctgtacagtcaagggtatggaacgagcacagcagctttgaacactgcacttt

SEQ ID NO: 232611 - DNA, 422 bp, Gossypium hirsutum
gggagattcaaacagaggaagaagaagaagagaaaaaaaaatgaagtctcagatctgtttagcctttggaactttggccttgttattagcttcagctttggccgatgacgtcgtcgtactgaccgaagcgaacttcgataaggaagttggtcaagatagaggagttctcatcgagttctatgctccttggtgtggacactgtaagaagctagctcctgagtacgagaagctcggggcaacttttaagaaggctaaatccgtcttgattggaaaggtggattgtgatgaacataagagtttatgcagcaaatatggtgttcaaggctacccaactgttcagtggtttcctaaaggctctttggaacctaaaaagtgtgaaggaccaccccccagttgaggcacttgctgaaattgtaacactg

SEQ ID NO: 232612 - DNA, 394 bp, Gossypium hirsutum
gttccatgtggccacgcctatggacttcgagtccgaggaccctgagaatgaagtcataaaaccaacaatcaatggagtgctaagcatcatgaaagcttgcgccaaagccaaaactgttagaaggttagtgttcacatcatcagctggaactattgatgttgcagaacaacaaaagccctgttatgatgaaacctgttggagcgaccttgaattcatccaggccaaaaaaatgactggttggatgtattttgtctccaagacaatggcagagcaagcagcctggaaattcgctaaagaaaataacattgattttgtcagcataataccacctttggtggtcggtccatttattatgcaatcaatgccgccaagcctcataactgcactttctcct

SEQ ID NO: 232613 - DNA, 402 bp, Gossypium hirsutum
gccgcaagcaagacggtgctagacgagctgcaaaagaacttggaactcagcgaaaacaacatggaagcatcgaggatgaccttacaccgattcggcaacacatcgagcagcagcatatggtacgaattggcttatttggaagctaaagaaagggttaaaagaggggataggatctggcaaatagcattcggttctgggtttaaatgcaacagtgtggtttggcgatccatgcgtcgtgtgaggaagccttcaagggataacccatggcttgattgcattgatagataccctgtgagagcttagaattacttgaatggccggtggttgataataaatatgatccttttggggttatcaatctctaagtgggttatattttcaaaaaaaaagggggcgggagaa

SEQ ID NO: 232614 - DNA, 363 bp, Gossypium hirsutum
accatttcaaatccatttttttttagaatttcccaacgatggcttcgacgattccaacgaaccgatcctcctctgatgacattaccgacacgacgccctttctgtcaccaacaagcaacgtttcaaacgacgactcctccacgcgtcggaccgttcgtcgccagagtctccgcgatgcggctaggttcttgcgccgagccagcagccgaaggatgatgcgtgagccgtccatgctggttcgagaaaccgccgccgagcagctcgaggagcgtcagagcgattgggcgtattctaagcccgtagttgttctcgatattatctggaaattagccgtcgtggtggtggcaagtggtattttgattt

SEQ ID NO: 232615 - DNA, 436 bp, Gossypium hirsutum
cagggatggcatcgcatgcaagagtgcttgcgaggccttccgccagcctcagtactgttgcagcggcgcgtatgccacacccgatacttgcaagccttcttcctactcccaagtctttaagacagcttgcccacgcgcctacagctatgcctatgatgataaaaccagcaccttcacatgtgccaatgctgccgattactccattactttctgtccttcacctaacaccagccagaaatcatcgcaagaggcgacaacgccagggcagaacacagaaacaacaacaacggcgatgccaacgtcacctcttgtcgacaacactatcatgtcaggtgtgggatgtgctgggtctcatggtgacatggaatccagtcatgacattgaaagctcacctgtcaattgaattgtattgagcccccccccctccccgcgccct

SEQ ID NO: 232616 - DNA, 433 bp, Gossypium hirsutum
  unsure (1)..(433): unsure at all n locations
gaggccttgagaggaaatgggctcttggacttcagtctcgagcccatcctcgtgaaattatgactgaagttctcaaagctctgcaagaactcaatgtctgttggaagaagatagggcattacaacatgaagtgcaggtggctgcctagcattcctggtcttaatgaaggcatgcttaacaataatcactattttggtgatgaatcaaccattgtggaaaatgatggtgttaccaaattgccgaatgttgtcaaattcgaagtgcagctttacaaaactcgcgaggagaagtatctgctggatcttcanagggttcagggacctcagtttctcttcttggatctttgtgccgcattccttgcacagcttcgggtcctctaaaataagcaagctgtatttctaaggacccttactccatgaatctcctatgatgc

SEQ ID NO: 232617 - DNA, 436 bp, Gossypium hirsutum
  unsure (1)..(436): unsure at all n locations
aagatcttgaaagtgaagcacttgcaactctcattctgaacaagcttcgtgccggaatcaaggtgtgtgccattaaggccccaggttttggggaaaataggaaagctggcttgcaggaccttgctgctcttaccgggggcgaggtaataactgaagaacttggtcttgacattgagaaagttggagcggaagtgcttggctcttgcaaaaaggttacagtatcaaaggatgacacaattatccttgatggcgctggagacaaggctaccattgaagaaagatgcgatcagataagatcagcaattgaatcaagcacttctgattacgacaaggacaaattacaagagaggcttgcaaagctctctggtggcgttgcagttntgaagattggaggagcaagtgaagcagaattggtgaaaaagaagatagagtactg

SEQ ID NO: 232618 - DNA, 372 bp, Gossypium hirsutum
gaaaaaaatgggagatcagttagcgaaaggagaagaattcgtgaagaaagcagagaaaaagctaaatggttggggcttgtttagttctaaatacgaagacgccgccgatttatttgataaagctgctaattgcttcaagcttgccaaatcatgggacaaagctggatcaacttatgtaaagttggcgaattgccatttgaaatcagacagcaagcatgaaacagctcaagcttatgttgatgctgctcattgttataagaaaacagctacaaaggaggctatatcttgcttgcagcaagcagtgaacttgttttgtgatattggaaggctaagcatggctgcaaggtattataaggaaattgctgaattata

SEQ ID NO: 232619 - DNA, 424 bp, Gossypium hirsutum
ccgccctcggagctgaagtccgttggtgttcttgcaacattttctctacccaagaccacgctgccgctgccatcgctcgtgactccgccgctgttttcgcttggaaaggggagaccctccaggaatactggtggtgtactgagagagcccttgattggggtcctactggtggacctgatctgatcgtcgatgatggtggtgatgctactttgttgatccacgaaggtgttaaagctgaggaagtttatgagaaaactgggcaactcccagatccggcttcgactgataacgctgagtttcagattgttctaaccattatcagagatgggttgaaagcagatcccaagaagtatagaaggatgaaggagagattggtagggtttctgaagaaactacaactggagtaaagaggctttatcagatg

SEQ ID NO: 232620 - DNA, 441 bp, Gossypium hirsutum
ccaattgatcttctttatgcaagcatctctcatttggttgtccctcatgatctgggcatctcagacatttcagtactgtacagtgtagatgagcctactgttcgaagtcttaatggctgcagggttgcagatcaaattctgaaactggtgccaaatgttgagcattttcgcacaacactccgatgtctgaagttttgggctaaaaggcgtggtgtttattccaatgtgactggatttctcgggagtgttaattgggcacttcttgtagctcgaatttgccaactttatcctaatgcagctccaagtatgcttgtttcacgattttttagggtctttacccagtggcgttggccaaacccagttatgctttgtgcaattgatgaagatagactcggattttctgtttgggatcctcgtaaaaaccctcgtgataggactcat

SEQ ID NO: 232621 - DNA, 434 bp, Gossypium hirsutum
cccacgcgtccgctctcaaaaaaaatctgaggaacagtgacactgaaaaaacagcaaaactaacgtcataatgttatgtttcagagcaaaccctcctacattgtttcttctttttcttctctctttgtttcttttccgacctgaagtagtttctgaagcctcaattttcccaacttcacacatccaagggtatcataaaagcttagtttctggggagaaagagcagggtgaagtgttgccatggaggaagatagaaaggaggaaccttgtagagggaaatgaaggagccaacaactcttctttgattttggctgaaaagaggactcagaggaaagaccctcttaatgattttaagaagtacactggtggctggaacatcagcaatcagcactattgggcttctgtgggttttacagcggctccattctttggca

SEQ ID NO: 232622 - DNA, 378 bp, Gossypium hirsutum
ctattgccgtgcttgacaagattgcaatgtctattgatgtcaaagaccgtgccacaatgttgggacttgtgaagagctgtatagggacaaagttcactagccagtttggtgatctgattgccgatttggcaattgatgcaactcaaacagttggagttgaccttgggcaagggctgcgagaagttgatattaagaagtacattaaagtagagaaagtaccaggtggtcagttggaagattctaaggtcctcaagggagtgatgatcaataaagatgtagttgcgcctggccaaatgaaacgaaagatcgtcaacccacgtattattcttcttgactgtgcccttgagtataagaaaggggagaaccaaacaaatgccg

SEQ ID NO: 232623 - DNA, 378 bp, Gossypium hirsutum
ctgttcttcaaccaaaagggaaaaagctggttcccccatttgctcccaaaggtgcttatgggagattattgtttttgtgggcatctgaccttttaaatcaattacaagagagaatacagatatgggcaccatacaccgcagtggagtttttaagaaaacaaatgataaagccaggctcgttatcgcaacaattcttggaattgtgattggattctttattggtgtttcatttccgtcagtttccttttacaagattcacttaccttcaaaccttagatcggcttttgatgcatccatagctaatgaccaagactttatggtcaggtcacctgagagaactgcagacaatcttcctaagatatatgttcctacaaatcc

SEQ ID NO: 232624 - DNA, 406 bp, Gossypium hirsutum
gcaatgtagttggatccgcaaatgggcggtcgaaaaccatatgaaaaggaggagaggtgaggcttttgagaatgggttcgtggaggtaatgagcaattgcaggctcactatatgtagcatcttgatctgtttatgttttggtgcaaagatctccgaagaacggattaagaaaatcgaaagcatactcaaagatgtaatgctggtaacatcgccgcagctaccggatttcttgccgatcctcactccgttgtttcgtcagctaatgaaagaggccaaagcactaagaaagaggcaattggattgctaggctccattaataaagaaccggagagcttttgttgagaaaagtgaaaaccctaacccagaaaatgtgaggtccatcggtgcaggctatatagactcactc

SEQ ID NO: 232625 - DNA, 438 bp, Gossypium hirsutum
cggacgcgtgggcgacaatggagagtttcggggggtggttccttatgcttacaatggcaagtttggcatcacccgcactttccgatctggtcctttccaaagtcgatcgacgcatatatttgacatcacatattgttcggatttcttcaactatgaaggtggagaatgcaggttccgaaaaggagtccaaggttttgctggcttttcctgagcaacaagccaaaaatatggcatatttgattgctactccacatgaagggaaagggaaaggaaaaaaccctgttgttgttctccctgttgaggctgccaacccaaaagacatgcctgctgctttgacattctattcagtatctttgcctaagggattagctgagggtgatagcttcacttttgatgtcttggccgtatttacccatgccttgcgacctattcctgagc

SEQ ID NO: 232626 - DNA, 436 bp, Gossypium hirsutum
gctatcctccgtggctaagaattttactccttcttcaatacaagagctctcacaggttgctcagaaatgcaacgccattaaccttgctgagggcttccctgatttccctgctcctccttgtatcaaagaagctgctgtttcagccattaataacgatttcaaccagtataggcgtgtgcaaggaatttgcgatcaattggctcttaaaatgaaaaaaacgcatggtttaaacgttaaccctttgactgatatagctatatgctgtggacaatctgaagcatttgctgccgcaattttctccattataaaccaaggagatgaagtgttgttgtttgatccttgttatgaaacttatgaaggatgtataaccctggcaggaggaattcctgtatatgtggcgcttgaaccgcctcaatggaccttggaccctgaaaaa

SEQ ID NO: 232627 - DNA, 437 bp, Gossypium hirsutum
cttcctcaaatcttcttcttctttttgtcttctgtggtgttttttagtccccaaatggatgctccctttcccttcaaatggcaacccctcccctttcatcccctacttatctcaccaccaatttaggcgtcggctacgccatcgtcgtcgccctcggcttcctcctcctcctctccactctcctcctcgcttcctacatttgcttccgctcttcctcgccccttccacctcgtgccatttcccccaaccccatttcaacacccaccgcctccaactccaacggtatcgtcctccccaggattgttttcatcggcgaagaagaccatgaacacgaccaataaaacgtcgtcgtctttgggcttgatcgtgccgtcataaactcttaccccaagttcccgttcaacaaagaagaggtgtctactgcggttgaggtgacg

SEQ ID NO: 232628 - DNA, 438 bp, Gossypium hirsutum
ctcttcaattcctcatttcaagggagagagtgtatcagtgtttcttcccctcttttacttaatttctctccgccatggctctctccgtcgagaaaaccgccgccggccgtgagtacaaggtcaaagacatgtctcaggctgacttcggtcgtctcgagatcgagttagctgaggttgaaatgcctggtttaatggcttgtagaaccgagttcggccctgcccaacctttcaaaggagccaaaattactggttctcttcacatgaccatccaaaccgccgttcttattgaaacccttaccgccctcggagctgaaatccgttggtgctcttgcaacattttctctacccaagaccacgctgccgctgccatcgctcgtgactccgccgctgttttcgcttggaaaggggagaccctccaggaatactggtggtgtactg

SEQ ID NO: 232629 - DNA, 428 bp, Gossypium hirsutum
ctttgttcctcatcctctgatccgtctcttcccgcattcgtcccgccggatttaacaagttttcaaacgaaaaatgagggaaatccttcacgtacaaggcgggcaatgcgggaaccagatcggatccaagttctgggaagtggtttgcgacgagcacggcattgaccctaccggacgctataccggaaactccagtctacaattggagcgcgttaacgtttactacaatgaggcttcttgtggaaggtttgtcccacgcgccgtgctcatggatcttgagcccgggaccatggatagtgtgagaaccgggccttatggtcagatctttaggcccgataactttgtcttcggccaatctggagctggtaataattgggctaaggggcattatactgaaggagccgagcttattgattctgttcttgatg

SEQ ID NO: 232630 - DNA, 438 bp, Gossypium hirsutum
ggataacctgaaaacagagagtactccagaagaacacaaattggttattacagacgttcgttttagaccaaattcatctcagttggcaacagcttcttttgataaatctgtgcggttatgggatgcagccaatgtaatcatcttcttcttcttacaacttggatctttgtaaaagttttgcggatatctctggttatgactttagctattctatactctctttgctgacagttttctggtattgtagacatttaggaagcatgcatgataaatatttctatgctactgtggttaacaagctaagttcattgttacagccaggctattgcgtgaaagcatacaatagccatccttcacctgtgatgtcccctgatttccaccccaaaaagacggacttgttctgcttttgtgataatgacaatgaaattcgctatttta

SEQ ID NO: 232631 - DNA, 439 bp, Gossypium hirsutum
ataacccaataattttctctctttttttcctccaaaaacttgggttttctttcatttacatgcaagtcctaaaataccccaaaaatttcataaaaaaagtgttcctaaaagctcaaaagaattcataaaaatagaaatggaaactgggttttattcagcatgggagaatggttctttattagaagaagatggtgatgatgaactgatccctcagccattaacaccaacggagccaatggagtttttatcaagatcatggagtttatctacatcagaaatctctaaagctcttgcccagaaacacaatcactttgaatttgatcatcataataatgataataagaatcaaagttcattgatttcagaatcctttgatgcaccacaaattgcagggaaagtgatgaactccattaatggtcgaagaacaggcacaatcagc

SEQ ID NO: 232632 - DNA, 434 bp, Gossypium hirsutum
tcgctctgcttcccactctctatgctatgcagcaaccttcctcaggtgataagaatcataccttacagtgctgtccaactctttgcatatgaaacttacaagaaacttttcaagggaaaagacggcgagttatccgttgttggaagacttgctgctggagcttgtgctggcatgacatctacttttataacatatccgttagatgtcctcagactacgcttagctgtggaaccagggtaccggaaaatgtctgaggttgctttgaacatgttgcgagaggaaggttttgcatccttttattatggtcttggaccttctctcattggcatagctccatatattgctgtgaacttttgcatatttgacctcgtgaagagggctttgccagaaaaatatcgtcagaagactcaagcatctctactaacagctgtagt

SEQ ID NO: 232633 - DNA, 435 bp, Gossypium hirsutum
caaaatcaaaccagtatccaaacacttcattgatccagattgagggagttaacactaaggaggaagtagcttggtatgccggcaagcgaatggcgtatatttacaaagctaaggtgaagaagaatggctcgcactatcgctgcatttggggaaaggttactagacctaacggaaatagtggtgttgttcgtgctaagttcaagtctaatcttccccccaaatctatgggagatagagtccgagtcttcatgtaccccagcaatatataagttgtctaaatgcccgttgttcgatcgatgactcgagtgattctatcttttctctccgtctatctcaaaatgttgtgtgtttttgaggccatttttttcttcattaggatgacagtggattagactttagtgttatcaaagattttccagtaattaattttgacga

SEQ ID NO: 232634 - DNA, 319 bp, Gossypium hirsutum
gtggagagccttttttgtgtagcgattctcagttagtcttttctttaagcttacagcttctctccagagttttataatgggtaaggagaaggttcacatcaaccttgttgtcattggccatgtcgactctggcaagtcgaccactaccggtcatttgatctacaagcttggtggtattgacaagcgtgtgattgagaggttcgagaaggaggctgctgaaatgaacaaaaggtcattcaagtatgcttgggtgcttgacaagcttaaggctgagcgtgaacgtggtatcaccattgatattgccctgtggaagtttgag

SEQ ID NO: 232635 - DNA, 398 bp, Gossypium hirsutum
cggacgcgtgggttcggcagcctctcggtttctgagtaatataaaaaaggatggggctggcttttgctaagctgtttagtcggctgtttgccaagaaagagatgcgaattcttatggtgggtcttgatgctgctggtaagactaccattttgtataagctcaagctcggtgagattgtcactaccattcccaccattggctttaacgtggagaccgtagaatataagaacattagcttcactgtttgggatgttggtggtcaggacaagattcgacctttgtggaggcactacttccaaaacactcagggtctaatctttgttgttgatagcaatgacccggaccgtgtggttgaggccagggatgagcttcatcgtatgctaaatgaggacgagctg

SEQ ID NO: 232636 - DNA, 429 bp, Gossypium hirsutum
  unsure (1)..(429): unsure at all n locations
gaacgacggtggtggtgagttcgaggacaaggttgaaaagctcaaggaagggctgagggtggtgttagaggagttttatcagctaggaggtaagctcgggaaagatgacgatggggttcttagagttgattatgacgatgatatggatggtgttgaagtggtggaagccgtggcagaggggattaccgtcgatgaattgaccggtgatgatggtacgagctcatttaaggaattgataccttttaatggcgtcttgaacttggagggtcttcacaggcctcttttgtccatacagttgacgaagttgaaagatggtgttgcaatggggtgtgctttcaaccatgctgtcctcgacggaacctccacttggcattntatgagctcttgggctcaaatctgtaacggtacttcgagctccgtcgttgtgcc

SEQ ID NO: 232637 - DNA, 439 bp, Gossypium hirsutum
aattttgggagctctcattcttctaattcagctcagcatcagtcagtctctgtgaatgagcagttggaagagaagtggtatgctagtccagaggatatcaatgaaggtgtttgcacaattttatctaatatatacagtttgggtgtgctgctttttgagttgctttgtcaatttgaatctgagagaggacatgctgctgcaatgttggatctacgccataggatttttcctccaacttttctgtcagaaaatctcaaggaagctggattttgtcttagactacttcacccagaaccttctttgcgcccaacaaccagggatatcctacaatctgaagtacttaatggattccaggaagtatttgcagaagaattgtcgtcatccattaaccaagatgatactgaatcagaattattattgcatttccttggtttatcaa

SEQ ID NO: 232638 - DNA, 401 bp, Gossypium hirsutum
cccacgcgtccggggagaagccttgaatcttctttcgctaagtggtagttcatccgtggagtgggcacacaggtcttttgtctcacaaagacaaccactgacatggtacaaaacaactttcaatgctccagctggaaattctccattggctttagatatgggtagtatgggcaaaggccagatttggataaatggaaagagcattggacgccactggcctgcatataaagcatctggaaattgtggtatctgtagttatgccggaacatttaacgagaagaaatgtggaactaattgtggaggggcctctcaaagatggtaccacgttcctcgttcatggctcaacccaacagggaaatttgtgttgtgtttgagaatggggggagatccgaatggaatac

SEQ ID NO: 232639 - DNA, 438 bp, Gossypium hirsutum
ccagtcgaagctggactgacatgggccatagggaagaggagaagagcagaaggtggattcttaggagctgaggtaatcctgaaacaactggcagagggtccgtcgatcaggagagtcggcttcacctccaccggcccacctccaagatctcacagtgagattcaggacgagaaagggaacaacattggagaaatcaccagcggaggatttagcccctgcctgaagaagaacatagcaatgggatatgtgaaatctggattacacaaggcaggcaccaaagctaagattttggtaagaggaaaggcctatgatggagtagtcacaaaaatgccttttatacccacaaaatattacaagccatcctaagatggaatttacgctttcagctcctcagttttcctgcgttgtttcatctgcaatcaaatgccaatgccctgt

SEQ ID NO: 232640 - DNA, 437 bp, Gossypium hirsutum
cccctttcaatgcccacttttctctttcggattttcttgctatacaatctccttctcgactatttggtccccagaaagctcaaatctttcctctctccttcttgtactaccaccaccccctttgtttctgtcggaggtgaaaccgaaaagaacccatctccggcagttgcattggcatcggtctcccctcgctgtcctctaaaaagaatggacgctgctgagttgaagagggtgttccaactgttcgacaagaacggagatgggaccatctccaagaaagagttgaacgattcgttggagaatatgggtatctgcatccctgatcctgaattaacccaaatgatcgaaaagattgatgtcaacggcgataagtgcatcgatatcgacgagttcagtgagctgtaccgatccattatggataataaggatgaagaaga

SEQ ID NO: 232641 - DNA, 393 bp, Gossypium hirsutum
gtctttttcggggttttctcttttttttttcgtcggatcttcaacacttttttcaaaaatggctgagcacgaagagaagaagcacgaggaatcgttgatggaaaggatagccgagaagatccaaggtcatgattcgtcgtcatcggattccgataatgacaagccatcggaatcatcgatcaaggccaaggtcttccgtctttttggaagagaaaagcccgttcaccacgttctcggtggaggcaaaccggctgacattttcctttggaggaacaaaaagatatcggcaggagcgctcggtgtcgcaactgtgatatggattttgtttgaaatgctcgaataccaccttctcacactagtgtgtcatttgttgatacttgctcttgcagtact

SEQ ID NO: 232642 - DNA, 435 bp, Gossypium hirsutum
cggacgcgtgggatcattgcccttcttaacaattttgcactctctccgatcaatttgaaacattcctgtattctctgcagaacctccccattcttcttcttctctctattgtaaagtaggcattagttaaggtgttactgtacaggccgcccgaatccgtatgatggagttgtacagtcgcatccagccacggaatgggtctcaatcgggttaccagtccgaatggagccccgctggtcctgagactggcctggaagagtcaatgtggccattgtcgttggggggcactgaatcctacccggaaccggcccgggtacctgactgtgtttactacatgcgaaccgggttctgtggatatggtaataggtgccgctacaatcattctcgtaaccctgccctggttgaggctgctgtaagagctacaggggtgtatcc

SEQ ID NO: 232643 - DNA, 434 bp, Gossypium hirsutum
cggacgcgtgggcgatgaagtgcggactggcccttatcgtcaacttttccaccctgagcagcttatttctggcaaggaagatgctgctaataactttgccagaggccactatacaattggaaaggaaattgttgatctctgccttgatcgagctaggaagttagctgataactgcactggtctgcaaggttttatggtgtttaacgctgtcggcggtggaactggttctggtttgggatctttgttgttggagcgcttgtcggtagattatggaaagaagtcaaagcttgggttcaccatctatccttcgcctcaggtctcaactgcagttgtggagccttacaatagcgttctgtccactcattcgcttcttgaacacacagatgtggctgtgctcttggacaatgaagcaatttatgacatatgccggagat

SEQ ID NO: 232644 - DNA, 435 bp, Gossypium hirsutum
cccacgcgtccgcccgtacaccattgtttgcatggattgtgggttattcatctggatgtgtagcaaccctccctcttctgtattggcgttatcgtcatcgtaaccaggcttctgagcaagactcagctcaaaatcgccatgcttcacacaataatgcccctgccagatccttttctctctctgttactaggacttctgatgggggtgatcatcgaactgcaactacatcacctagaggtggccaaaacatggcaataacaagtgccataataaaagctctagtggaatacttcagaacgatcttagattgcttctttgctgtttggtttgtggttggcaacgtctggatctttggtgggcactcatctgccagtgaggctcctaacttgtacaggttgtgtatagtttttcttacaattagttgtatcggatatg

SEQ ID NO: 232645 - DNA, 394 bp, Gossypium hirsutum
cttcacctccactgcagcaggagcagagggaaaaaggataaaagcatcgtcgtgttctcgcttcttcaactctgtctctacgtctctgaacctcctcctttcgttcttttcttattcagtattgtaaaagatggccgatgctgaggatattcaacccctcgtctgtgacaatggaactggaatggtgaaggctggttttgctggtgatgatgctcccagggctgtttttcccagtattgttggtcgaccccgacacactggtgtcatggttgggatgggtcagaaggatgcctatgtaggagatgaagcacaatccaaaagaggtattcttactttgaaatatcccattgagcatgggatcgtcagcaactgggatgatatggaaaagatctgg

SEQ ID NO: 232646 - DNA, 366 bp, Gossypium hirsutum
cccacgcgtccggaaatctcgagaacctctcttcattctctatttcctccgtgaaagctgctgttgtgctgatccaagtgataaaccagtgtaaagatgagcgttgttgggtttgattttggcaatgagagctgcattgttgctgttgcaaggcagagagggattgatgtagtgcttaatgatgaatcaaagcgtgaaactccggctattgtgtgctttggggagaagcagagatttattggtactgcagggggcgtcttcaatgatgaaccctaaaaattcaatttctcagattaaacgggtgattggccgtcaattctcagatcctgagttgcaaagggatatcaagtcgttacccttcaatgt

SEQ ID NO: 232647 - DNA, 396 bp, Gossypium hirsutum
agagaacatttgggtgagggttttagagagagaaagagaaggccggagtgaaagacaagacacagagagagagacagagagagagatgtcgggaggaatagcgcgtggtcgactcgccgaggaacgtaaggcatggaggaagaaccatccccatggttttgttgcgaaaccagagacgttgcctgatggaacggtcaatttgatggtgtggcattgcacgatccctggtaaagcaggagtaagtcgaagaacttctatttaatttctgtatttttctttttcattatcgtcggtaaagtttaatggattctgcttgttgagtttggttcgtcaattattttctcttatttctttggacgtggatgctgttgtgctgtttatagattttaagatttt

SEQ ID NO: 232648 - DNA, 343 bp, Gossypium hirsutum
tcctgctctgcttaaatgggctaacagattctgcaatgatgccgccgtgaaagatgtcatgcctgagaccgaaaagcttgcggagtttgctaagatgcttacgggcagagtgagagccactcccacatcttgaattgccaaagggagccatatttcttggctcttgaccatattttacatgcaagtgtctcctttccggcttttctaaataaaagtatggcatttttaccccagtccctacttttggagcgtttgactgtagattatggcaaagaaatccaagttggatttcactgaattaaagggcggccgatttatagaaatcaggtttacagaccctacc

SEQ ID NO: 232649 - DNA, 435 bp, Gossypium hirsutum
gcctactgttattgatgaagtgaggactggtacttaccgtcagcttttccaccctgagcaactcatcagcggcaaggaagacgctgccaacaacttcgctcgtggccactacactattggcaaagagatcgttgacttgtgcttggaccgtatcaggaagcttgctgataactgtaccggccttcaaggtttccttgttttcaacgctgttggtggaggcactggatctggtcttggctccctccttttggagcgtttgtctgttgattatggcaagaaatccaagttgggtttcactgtcttcccatcaccccaggtctccacatctgttgttgagccctacaacagtgtcctctcaactcactcccttttggagcacactgatgtggctgttcttcttgacaatgaggctatctatgacatttgcaggcgctc

SEQ ID NO: 232650 - DNA, 358 bp, Gossypium hirsutum
cgaaagcgcttgagttaattttaagtgtaggtcagccttaacaaaaaaatgtctcggagatatgatagccgcacaacaatcttttcccctgaaggccgtctctaccaagtagagtatgcaatggaagccattgggaatgctggctctgcgattggaatactatcgaaggatggtgttgtcttggttggtgaaaagaaagttacttccaagcttcttcaaacctccacatctacggaaaagatgtacacgattgatgatcatggtgccttgtgccgtggcgggaataatgactgatgcaaatatcctaatcaacactgctagggtgcaagctcaacgatacacatatgcttaccaagag

SEQ ID NO: 232651 - DNA, 436 bp, Gossypium hirsutum
gaagcaaagcaatggcaaggatcaaggttcatgagttgcgacagaaatcaaaaaccgatcttttggctcagttgaaagatctcaaagctgaacttgctcttcttcgcgttgctaaagttaccggtggtgcacctaacaagctttctaagataaaggtggtgaggctgtccattgctcaagttctgactgtaatctcacagaagcagaagtctgcattgagggaaggcatacaagaagaagaaattcttgcctctcgatctccgtcccaagaagacccgagctatccgcagaaggcttaccaagcaccaggcatctttgaagaccgaaagggagaagaagaaggaaatgtacttcccaatgaggaagtatgccattaaggtgtagggtaggatctctcacattctatttacatatcgattcgctctttactttctag

SEQ ID NO: 232652 - DNA, 423 bp, Gossypium hirsutum; identical to SEQ ID NO: 199563

SEQ ID NO: 232653 - DNA, 437 bp, Gossypium hirsutum
cttgatacacgcccccatttattttatttttcaaacaaattttcccttcaattttcgtataatttcctaggaaaagaaatatgagagagtgcatttcagttcacatcggtcaggccggtattcaggtcggaaatgcttgctgggaactttactgtctcgagcatggcattcagcctgatggccaaatgccaagtgataagactgttggtggaggagacgatgctttcaacacctttttcagcgaaactggtgccgggaagcacgtccctcgcgccatctttgttgatctggagcctactgttatcgatgaagtgaggactggtacgtaccgccagttattccaccctgagcaactcatcagtggcaaagaagatgctgccaacaatttcgctcgtggccattatacaattggcaaagagattgttgatctctgcttg

SEQ ID NO: 232654 - DNA, 391 bp, Gossypium hirsutum
gagaaatgaatcaataatattatggactttgtgtctgggtcagctagtcaaaattttgggctcctgcaagaattctatcagaccactctaaaggcccttgaagaggcaaagaatgagagactttggtttaagacaaatcttaagctatgcaagatctggtttgatatgggtgagtatgggcgaatgagcaagattttgaaggaacttcataaatcttggcaaaaggaagatggaacagacgatcaaaagaagggaagtcagcttctggaagtatatgcaattgaaattcaaatgtataccgagacaaagaacaacaaaaagctcaagcaattataccagaaagcacttgctgtcaagtctgcaataccacatcctaggatcatgggaataa

SEQ ID NO: 232655 - DNA, 395 bp, Gossypium hirsutum
ctttgttcctcatcctctgatccgtctcttcccgcattcgtcccgccggatttaacaagttttcaaacgaaaaatgagggaaatccttcacgtacaaggcgggcaatgcgggaaccagatcggatccaagttctgggaagtggtttgcgacgagcacggcattgaccctaccggacgctataccggaaactccagtctacaattggagcgcgttaacgtttactacaatgaggcttcttgtggaaggtttgtcccacgcgccgtgctcatggatcttgagcccgggaccatggatagtgtgagaaccgggccttatggtcagatctttaggcccgataactttgtcttcggccaatctggagctggtaataattgggctaaggggcattatactg

SEQ ID NO: 232656 - DNA, 398 bp, Gossypium hirsutum
cggacgcgtgggtccgagagtagtcatttttctttgcatcattgcatttttctctcgattgagcctctagggttttgaaagatacttaatatctttttttctttctctactacaatcgaatcgactctactagttttatcagatcttgaaatatccaagctgaactccttggctcgatcaaaacttgatcggattagtttcattcttgtctaatttcttttgagtaagaaagggaaaaaaatgccggcagtttacggagccagattgacgacgtttgaggattcacagaaagaaagtgaattctgttatgttcagaaggcgtcaggaccagtcggtgttgcagatggaatggctggtgctgccatgtatgaattagtacgcgttggtcatgacaatct

SEQ ID NO: 232657 - DNA, 424 bp, Gossypium hirsutum
cccacgcgtccggcaaaaaatggctcatcgtatagcgttttctgtgtgtgtcgtttcgtattttttattcatcggtttgatatcgtcggaggctttctcggtcgtcggatcagaagttgatccgttgatcaggcaagtaacggacggtcaagatgatggagtggagacacagcctttgaccgctgagcatcacttctcgctgttcaaggctcggttcaagaaatcgtacggctcggaggaggagcatgattaccggttcaaggttttccgggcgaacttgagacgagcggcgcgtcatcagaagcttgacccgtccgcgactcacggtgtgactcagttctccgatttgactcccggtgagttcaggaagaggtttttggggttaaggaggttgagactgcctaaagatgcgaaccaggcaccg

SEQ ID NO: 232658 - DNA, 444 bp, Gossypium hirsutum
attgattggacgtagattcagtgatgcttctgtgtcagagtgacactaaattgtggccgttcaaggtcattcctgggcctggtgacaagccaatgatttgtgttacatacaagggtgaagagaagcaatttgctgctgaggagatctcttcaatggtgctcattaagatgcgtgaaattgctgaggcttaccttgggtctacaattaaaaacgccgtagttaccgtccctgcttacttcaatgactctcagcgtcaagcaacaaaggatgctggtgtcattgctggacttaatgtcatgcgtattatcaacgagcccacggctgctgccattgcttatggtctcgacaagaaagctaccagtgtcggcgaaaagaatgtcttgatctttgatcttggtggtggtacttttgatgtctctcttcttaccattgaagagggtatat

SEQ ID NO: 232659 - DNA, 394 bp, Gossypium hirsutum
cccacgcgtccgctcttcagtccagtattctaaggtgcatttttttcccttcaactttccgtcactttcccgagaaaatgagagaaatcgttcacgttcaaggtggtcaatgcggcaaccaaattggagccaagttttgggaagttatctgcaccgaacatggaatcgactcaacgggtcgatacaacggcgactcggagcttcagctggagcgtatcaacgtttactataacgaaacaagttccagccgctttgttccccgcgccatcttaatggatctggaacccggtactatggacggcgtaagatccggcccgtttggacaaattttccgacccgataacttcgttttcgggcaatccggtgctggaaataattgggccaagggtcatta

SEQ ID NO: 232660 - DNA, 370 bp, Gossypium hirsutum
caagacaaccaaggaataccgcagggtgtttttgatgtttggcattgtttcctttttcatcgttggcgtgatttgtacggagactttctcggcggagggatttgaagttgatccgttgatcgaacaagtaacggacggtcacgaaggagccgagccgcagctgctgacggcggagcatcacttctcgctgttcaagaagcggttcaagaattcgtacggatcacaagaggagcccgattttgggttcaagatttttcaggttaacctgagacgagcggcgcgtcattagaagcttgtcccttattggacttacggggtgactcagttctccgatttgactccaggcgagttcagaaaggcatatttggga

SEQ ID NO: 232661 - DNA, 448 bp, Gossypium hirsutum
gtttccaatggatctgcccctgtagagaacaaacaaaaggaattgctggaggttgttattactgaagtattgaatggtggaaaattttacgtccaaacagttggagatcagagagtatcttctattcagaaacagcttgcatctttaaatatccaagaggctcctgtgattggtgcttttaatcctaagaagggcgacattgtccttgctcagtttagcatggataactcatggaatcgtgcactgattgtcaatgcacctcgaggaggagttcagtcttcaaatgacaggtttgaagtgttttatctcgattatggaaaccaagagttggttccctacagtcaattacggcctattgatgcttcattatcagcaacacctgggcttgctcagttatgcagtcttgcatttgtgaaagttccaagcctcgatgatgaaattggtactg

SEQ ID NO: 232662 - DNA, 283 bp, Gossypium hirsutum
cttgttataaatctgtcgcctagaaaatgaataatcatcacggatttacggagaagaagcccaacactaaaatcgtatgcaccttgggaccagcatcaataccggtccctatgatcgagaagctgttgatggccggcatgaacgtcgctcggtttaacttctctcatggatctcatgcctatcatcaggagactcttgataatctcaagtacgacatggtcaataccggtgttctgtgcgctgtcatgctcgataccaacggtgctgagatccgtactggctt

SEQ ID NO: 232663 - DNA, 434 bp, Gossypium hirsutum
ctttggtccctttgggggtggattctttctttcaacaacagagatatcatcttctttgtttttctaaccaaaaaagaaacaccatgaaatgctatctgttctgtaaagatttgatcttgtttgtgtttcaactgtttgctttcttctacttagcttcagggaacttggcttctgagaaaagaatcctgttggagttcaaaagctctgtttttgatccttccggggttctttcaagctggaactcttcaaacaaccctaatcactgctcctggtttggagtttcatgcaattcaaggtctcaggtcatctccatcaccattcctggtggttgtcgtgaagtttctgaaggtaactttgctcaaccttgttcttgttcttcaaagctgtctaagttcccgttttatggttttggattgagaagaagtgcatgttct

SEQ ID NO: 232664 - DNA, 441 bp, Gossypium hirsutum
aaaagaaaaacagaatccatgaagaaacagcgacgaatatcagaagaaggtgttggtggcaagaatccagtggccatcgcgccattcaagatgatgtctcaatcgagaaacggggtaagcaatctcgtctctggtagtttcaaaataaacccaatatttagatccctgtctcccagtgatcttccccacccaccaaccatcgttgtcgaaagcatccaccgagtccagataatggaaaacctgagtagcttttgtgaaggttactggaggtggcactggtcggacctcgtcggctgaaactatctcaaccagaggccgagtctgatcttcttcttcaaccaggttcttgtactgcactctataaagagtattgtcgttcaacggggataatatcttagcttggtagtaagaacccaagaacccttcttccttgctgcatac

SEQ ID NO: 232665 - DNA, 418 bp, Gossypium hirsutum
aaaaaggaaagaaaaaaatgaagctcttgtttctaactttgctgctttgttctcttcttctatgttcttcagtttttgcaccaacaatggctcagcctcgttcacgtaagcaaacatatttttttcataatctaagccttgggtgtgtgtgtgtgtgttttaatctttgatgtaattttttttggggggggggaatggcagctttttgtgaagggaaatgcaaagggaggtgcaataaagcggcggtttgggatcggtgcttcaaatattgcggcatatgttgcgaggagtgtcaatgcgttccgtccggtacttacgggaacaaacacgagtgtccttgctacagagataaggtgaacaacaagggcaaacccaaatgcccttgaaaatgaaatatattcgagttcgggatttaatc

SEQ ID NO: 232666 - DNA, 450 bp, Gossypium hirsutum
  unsure (1)..(450): unsure at all n locations
gtgagatggcctgtgctcataatagcaattcttgcttctgtcgtgggaagccaagcaatcattagtggaacattctccataatcaatcagagccagtcacttagttgtttccctagagtgaaggtcattcacacctctgacaagatacatggccagatttatatccctgaaatcaattgggtgctcatgatcctctgcattgctgtgactattggctttagagacacaaaacacatggggaatgcatcangattggcagtgatgactgtgatgttggtgacgacatgtctcacatccctggttattatcctctgttggcacaaaccccctattagggctcttttctttcttcttttcttcggctctatagagatgctatacttctcaacttgactcaccaagttcactgaaggggcttggctccctattctcttggcccttttccttatg

SEQ ID NO: 232667 - DNA, 432 bp, Gossypium hirsutum
caaaaagggggaaaaaatcactgaacccaacagaaagctaaaacttattactaataatttcaaagaaaaaggagcgtcatcatcgaagcggaagcgggattcgcggtggtaactatactgcgatgccttgttctttgatcgagactagcaataatttttgtggtggcggtgacggaggtgatgtgaatgggcgtattcacaatttcaagctgaacgagcacactttcttagcttctctgatgccgaagaaggagattggcgccgatcgcttcattgaagctcatcctcattacgacggtcgcggcgccgtcatcgcaatctttgattctggtgttgaccctgctgcttctggcttgcaactgacatcagatgggaagccaaagatcttagatgttattgactgtacccggagtggagatgttgatacctcaa

SEQ ID NO: 232668 - DNA, 439 bp, Gossypium hirsutum
  unsure (1)..(439): unsure at all n locations
agcattagccttccactaatatcttccatctctctttgagttctccaacacatcagatcatggtgttatctaagacagcatctgaaactgatgtctcagttcactccacttttgcctctcgttatgtccgaacctcactgcccaggttcaaaatgccagaaaactccataccaaaagaggctgcgtatcagatcatcaatgatgaactgatgcttgatggcaacccaaggttgaaccttgcctcttttgttactacatggatggagcctgaatgtgataagcttataatggactccattaacaagaactacgttgacatggatgaataccctgtcaccactgagcttcagaatcgttgtgtgaacattatagcacatcttttcaacgcaccattgngagagtcagaggcagcagttggtgtgggaacagttgggtcatc

SEQ ID NO: 232669 - DNA, 440 bp, Gossypium hirsutum
gctgactttcacatacatttggatcattctttggtcacactttggttatataattgtgatagtataatatggagaaatggtatggggtttcagggctggtgttggttttgagtttgttctttggggttaaaggagaaccccaagtcccatgttacttcatttttggagattcattggtagataatgggaacaataatgaacttcgttcattggctagagctgattacttgccttatgggattgactttgctaatggaccgaccggccggttttcgaacggtcgaactacggtggatgtcatagctgaacttttggggtttgacgattacatccctccatactcaactgcaagtggtagacaaatactgtgaggagttaactatgcatctgctgctgctggaatcagagaagaaactggacaacaactgggagctcggatt

SEQ ID NO: 232670 - DNA, 422 bp, Gossypium hirsutum
gcaagttctgcaaatcaggtaagactaacctatgcggcaaagttaggacagccactggagctggagtcatgatgaatgatcgcaagagccgcttctcaattaatgggaaacctatctaccacttcatgggcacctcaacatttagccagtacacggttgtacatgatgttagtgttgcaaagattgatccacaggctcctttggacaaagtgtgccttcttggttgtggtgttccaactggacttggagcagtttggaacacagccaaagttgaaccaggggccattgttgctatttttggccttgggactgttggtcttgctgtcgcagagggtgcaaagtcagctggtgcttcaagaataattggcgttgatattgatagcaaaaagtttgatgtagcaaagaattttggagttacagag

SEQ ID NO: 232671 - DNA, 439 bp, Gossypium hirsutum
  unsure (1)..(439): unsure at all n locations
aagcctctcgtctcctctccataaatctctcactcaacgcanagcgaataggcggagacttccaagaatctatcgcatcagctaatcacgctctaaagaatggatcaggttcaacacccatctatcatgcagaaggtagcaggccagctccttcgttctagccattctcaagattttcaagggtataatgggtctttcaggagtcctgctctataccaaaggcgtgctgcatatggcaattactccaatgctgctctgcagcatcctgtccgggcttttggagacctgtctatggttccatcaacagcttctgctatttgcgttcaggctcctgctgagaaaggatttagcggctttgctattgatttcctcatgggtggagtttctgctgctgtatcaaaaacagctgctgcaccaattgagcgtgtaagcttttgat

SEQ ID NO: 232672 - DNA, 396 bp, Gossypium hirsutum
taatcttcagtttttgccttcccaccggcttaacaccgcctttcagttttcatttcctctaagaaaaggattaaaatggcgaagaatatgatgcgagccgttcaatacagtaaatataacggaggcgccgctgatctcaagcatgttgaagttccggttcccagtccaaaaaaggatgaagttttgatcaaagtagaggcagctagtattaacccaatcgactggaaaatacaggagggggtagcgcgcccatttttacctcgcaaattcccccacattcctggtaccgatgtagcaggagaaatcgtacaagttggatcaggtgtccagagtttcaaagtcggggatacagttgttgccgtacttggtaatggaggtgcactagctgaatatgct

SEQ ID NO: 232673 - DNA, 450 bp, Gossypium hirsutum
cggacgcgtgggggtcaaccaaaaacctttgtcttctgtgccgatgaatccacaacaacccaatccatcggaacccgaccttcaggttccatccctcgcttccctccgaatccagccctcttccccacgtttccctttctctacccccatcgccggttctcagcgtcgcatcgccatcgccgttgacttaagcgacgagagtgcttatgccgtccgctgggctgtccagaattaccttcgtccgggagacgccgtcgtcctcctccacgtacgtccgacttccgtcctttacggagccgactggggctctatcaaactccaaattacccccaactccacgaataatcacgaaaacgccaccgccatcagcggcgatcactccgacgaagagtcgcagcagaaactcgagaacgacttcgacgttttcacgacaaccaaaagcgaacacgc

SEQ ID NO: 232674 - DNA, 391 bp, Gossypium hirsutum
cacccctggtgcaaccacatcaggtttgagaatctcaagtgtgaggaaatttggtcctctagatgaaaatgctgccaccactggtgatggcctaacacccaatctggtacctaaaaaggctagagttgcggttggtttcccatttgttaaagcataatgtttgattgctttcccttccatctctcccactgcaactgctggaagtaggtgacaatctgcaacaagctcctacccatttgctgcagtgtttgtcaaaatcatccctactcctccagcatctttcactacttgacccttttgcactctatgatttattcctcgatcacatatcacgattttcccagaaacaacatgtggatccaaagttccctctaagcataatgaacttgga

SEQ ID NO: 232675 - DNA, 432 bp, Gossypium hirsutum
cattagtgacatgaacctagctgatgcaatggcgtagggccaaggttttcgacattgatctgcaaaagcaactgagaccctacatggaatccatggtcccactccctggaatctacgatcctgatttcattgctgctaaccaaggtgaacgtgccaataatgtcatgaaggggaccaagaaagaacaagttcagcaggtcatcaaagacatcagggagttcaaagagaaaaacaaggtggacaaggttgttgtactctggactgcaaacactgagaggtacagcaatgtcattgtggggctaaatgacaccgtggaaagccttatggcttctttggagaagaatgaatcagagatttctccttccactttgtatgctattgcttgtgttcttgaaaatgttcctttcatcaatggcagcccacaaaacacct

SEQ ID NO: 232676 - DNA, 429 bp, Gossypium hirsutum
cccacgcgtccggtaccttggccgactacaacatccagaaggagtcaactctccaccttgtccttcgtttgcgcggcgggatgcaaatcttcgttaagacgcttaccggaaagacgatcactctcgaggtcgagagctctgacacgatcgacaacgtgaaagccaaaatccaagacaaggaaggcatcccgccagaccagcaacgtctcatcttcgccggaaagcaactcgaggacgggcggactttagccgattacaatatccagaaggaatcgactcttcatctggttctacgtcttcgaggtgggatgcagatcttcgtcaagactttgaccggtaagaccattactttagaagtggagagctcggatacgattgataacgtgaaagcgaagattcaggacaaagaaggaattccaccagatcagc

SEQ ID NO: 232677 - DNA, 384 bp, Gossypium hirsutum
gcggaggagtggatcgcagtgtggagtgtacagggagcgtccaagccatgatttccgcttttgaatgcgtccatgatggttggggtgtttgtgtgctggtgggtgtgccaaagaaagacgatgcattcaaaactcatccaatgaatctactaagtgagaggacccttaagggtgctttttatggcaactataaaccacgcactgatattcctatggttgtcgacaaatatttgaacaaggagctggggctggatatggacaagttcatcacacactctgtgccttttgccgatataaacaaggcattcgactacatgctccagggtataggtctgagatgcatgattcatttggatgcttaagagagtgttgctgctgtatatt

SEQ ID NO: 232678 - DNA, 144 bp, Gossypium hirsutum
agacaatgtcatggctatattccaagacaaaggagggatccattctgaccaggaagggctcatctttgcctgtaaacacctcgcggatgggcgtactctttccgactaccatactcaaaatgagttcacccttcacctagtact

SEQ ID NO: 232679 - DNA, 430 bp, Gossypium hirsutum
ggtcaaccaacttgggagtcaggaacatcgggagttggcaagggaagctgtgaggagaagtcttgtcctactgaagaatggcgagtctgccgacaagccattgttaccccttccaaagaaagcaactaagatactagttgctggaactcatgccgataacttgggctatcagtgtggaggctggaccattacatggcagggtcttggtggcaacgatctcacaactggtacgactatcctccaggctgtcaaaaatacagttgattcaagtactcaagttgtatacagtgagaacccggatgcagggtttgtcaagtctggcgaattctcttattccattgtggttgtgggagaacccccgtacgcagaaacatatggtgacagcctgaatcttacaatatcagagcccggtcccatgactatttacaat

SEQ ID NO: 232680 - DNA, 334 bp, Gossypium hirsutum
ttttattttttctttttttttttcccacactttgtttaaaacccattagctaaaaatgcactgggttctttctgtgttgcttgcagttatcggagttactgcactgctcgttgtaactccggtaagtgggtaccgtccatggccgtacgtaaaacccaacagctccgacttaatgttcggaggctctaagaaatttgagggctcatcggagtttgtacatatgagatatcatatgggtccagtccttactggtcatatcaccatccacccaatctggtacggccggtggcagaaatcacagaagaaaatcatccgtgagttcatcaactcgatc

SEQ ID NO: 232681 - DNA, 451 bp, Gossypium hirsutum
acgcgataaaaactagtgtcggggattttagggtttcgtaagaaataatatcgtcgatgagcaacgaaggagttaacttcaacatgtccggtcttggcgatgctcttaacgccgaagcacgagctggtctcgttaacgctctcaagaataaacttcaaagtcttgctggggatcactccgatgtgctggagagtctatcaccgattgtcaggaagcgtgtcgaggttcttagggagatccagagccaacatgatgaattggaggctaagttttttgaggagagggcagcacttgaagctaaatatcaaaaactatatcaacccttgtatgctaagcgatatgatattgtgaatggccttgctgatgctgaaggaacagcaaatgaagctgccaaggaccaaggagaggaaaaggatgctgaagagaaaggggtgcctgattttggcttact

SEQ ID NO: 232682 - DNA, 455 bp, Gossypium hirsutum
cccacgcgtccgcggacgcgtgggtttttttttccccttcggagtttgcttttttgcagatcaaggaagaaagttatggcagaagaagaaactgaactgagcgacaagcaaaagaaagagatcgccaaatggttcctcctcaatgctcccgcaggcgaaatccagtacgttgccaaagatttaaaatccgttttgaataatgatgacgtctacgatgaggcggcatcggaagcatttcctgtttataacaaatctcacatgatttgcctcgaaatgcctggtagattcggagatgtgctggttacatcatatggggagcttcagggtaatgagtatctagaccccaagactgcccaagttgctatagttgaccatgtcaaacaggtttgtacagaggttagacctgccactgatgaggaacttcccactccatatgttgaggaataccgatgtgc

SEQ ID NO: 232683 - DNA, 338 bp, Gossypium hirsutum
gttgaaaaaatatgggtttccaaagaaacatattgggtttccttttcttgatattggcttcactaacaagcctctcttctagccttcctagtgaatactccatagtggaacatgagattgacgcatttctttcggaggaaagggtgttggagatcttccaacagtggaaagaaaagcatcggaaagtgtaccggcacgccgaggaggctgagaaaaggtttgaaaatttcaaggggaatttgaagtatatcctagagaggaatgcaaagagaaaagcaaacaaatgggaacatcatgtgggattgaacaagtttgctgatatgagcaatgaggagttc

SEQ ID NO: 232684 - DNA, 435 bp, Gossypium hirsutum
gttgggaaaatttcagaaatctgaaaaagcgaaggagagaaatggcgagcggagggaaagtgtcttttaaagtcactcttacctctgatcctaagctccctttcaaagtgtttagcgtgcctgaagcagccccttttacagccgtcttgaaattcgcagccgaggaattcaaagtccctcctcaaaccagtgctatcatcaccaatgatggcgtgggaatcaatcctcagcaaagtgcaggaaatgtgttcctcaaacatggatcggaacttcgcttgattccccgtgacagggtgggagccttttgaaataacaaaaacttcatttgttatctctgagtgagaagactggttatgactttgtttggttatggatcctttgtttggtatgtatgtttaaacttttacttgatgtagaacatgacggatagcaact

SEQ ID NO: 232685 - DNA, 416 bp, Gossypium hirsutum
caataattctctttctgtttctctggtttaaacatgggtatgggtttaaggaatggatttcttttgattttatcttgtgttgttacactttccctctcagttttggggcgacctgccactttccttgaagattttagaatcacttggtctgattctcatattaggcaaatcgatggagggagagccatccaacttgttctcgaccaaaattcaggctgtggatttgcttctaaaaggcagtatttgttcggacgtgtcagcatgaaaatcaagctcatccccggcgactccgccggaacagtcaccgccttttatatgaattctgttacagatgctgtgcgagatgagctagacttcgagttcttgggaaaccgtaccgggcagccatatacggttcaaaccaatatctatgccca

SEQ ID NO: 232686 - DNA, 350 bp, Gossypium hirsutum
gtcataaccattgagaactcacgttcagatgagaagctcctgtcagtcttccgtgaaggagtgaagtacggtgctggaattggacccggtgtctatgacatccactctcccagaataccatcaaccgaagagattgctgacagaattaacaagatgcttgccgtgctcgagaccaacatcttgtgggttaaccctgactgtgggctcaagactcgcaagtacgctgaggtgaaaccagccctgagcaacatggttgctgctgccaagctgctccgcacccaactcgccagcgccaagtgataggctcccgagatattggaaatccgaatcccataccattccagagagat

SEQ ID NO: 232687 - DNA, 387 bp, Gossypium hirsutum
cccacgcgtccgcgagggcgtggaggttcagctggtaacaagtttaggatgtcactgggtctgccagtggcggctacagtgaactgtgctgataacactggcgctaagaacttatacatcatttcggtgaagggaatcaagggccgtcttaaccgattgccatcagcttgtgttggagatatggtaatggctactgtcaagaaagggaagcctgatcttaggaagaaggtcttgccttctgtcattgtgagacagcgcaagccctggcgcagaaaggatggtgtttacatgtactttgaagataatgctggtgtcattgtgaacccaaagggagaaatgaaaggttctgctataactggtccaattggaaaagagtgtgctgatcta

SEQ ID NO: 232688 - DNA, 443 bp, Gossypium hirsutum
cgcacactgaaacacagcgttttccatttccgttcacggcatgatcttcgagaaccattcccaaaatttagaccccaaaatgcgaaaacccaaaccctgaactcactgttttttttcccctttatagtactactgtcttgatctcttatatatatatattttctctcatggcggaggaggtcatctctggtagtggatcttcgggaagagaaggagagatcgatataagagtaggattaacctcgagggattcgttagattctcggtgggtgttcccaggtgaagacgactctgagatcgaagaaaatggcgacggcgacgatgatttaccgcatcgagctgcggtggactccgaagacgaggataatcaggaacaccatttgatccgcactgaaccacgcgtggattcctttgacgtcgaagcactcgaagtccatggcgca

SEQ ID NO: 232689 - DNA, 444 bp, Gossypium hirsutum
gcaatcctttcctttacactctaccctcactatcatccctcctttcttatttttccctttttggttcctctctttctgtccttactttgtgatggaattaggaagtgctcttcagttccttgataacaaatccattctagtcactggtggaactgggtttttggcaaagatatttgtggagaaaatattaagagttcaacccaatgtcaagaaattatatcttctcgtaagagcagccgaccataaatccgccatccatcgtttgcaccatgagatcgtagggaaggatctgttcagaaatctgaaaaagaaatgtgggaccaatttcagctcttttatatcacaaaaaattacagttataccaggtgacttaacccatcaagatttgggtctccatgattctgatttgcttcaactcctttgcaaggaactcgatgttcttct

SEQ ID NO: 232690 - DNA, 448 bp, Gossypium hirsutum
ataccaaacactcttgctccatatatctgcctctctttctttctttacaattctcaggtttctgttctttgaatcctgctttcaagatcataatagaaacaaagaaaggcaaagcttagaagatgggatcaggtgaatggtgccttcaaaaacgagatagtttcaagagtgaaacgcttgtaggcaatgagactgtgccagaaattgggtgcctttcgattattgttcttggtgcctctggtgatcttgccaagaagaagactttccctgctctctttcatctttattgccagggatttctgccaccaaatgaggtgcacattttcggctatgcaaggactaagatttcagatgacgaattgagaaatcgcatacgtggatatcttgtgagtgaaaggagtgcttcaccatcaaaagatgtatcaaagttcttacagctgattaaata

SEQ ID NO: 232691 - DNA, 383 bp, Gossypium hirsutum
tcgaccacgcgtccgatggcgaagggttttgcttaaggtaagtggagaagcactagcgggagatcactcgcaaaatattgacccaaaggttacgacagctattgctatggacgattcatcaatgacacccctgggcatgtaaggtgcaattgaagctgtgggggtaatattattcgcggatcctctcgggcatgatgtagtggacttgaccgttcatctgctgattacatcggaatgttagcaactgtaatgaatgctatatttcttcaagcaacaatggagagtatcggcatcccaacacgtgtccagactgcatttcgtatgtcagaggttgcagaaccatatatacgtagaagggcagtgaggcatttgagaaagggagg

SEQ ID NO: 232692 - DNA, 365 bp, Gossypium hirsutum
  unsure (1)..(365): unsure at all n locations
cctccccctccccctccccctcggccccgttcgactctcatcacctctgccccaacacgttggggactcaggctcacggcgtttcagagaattcttttgaatttctcctttttattgatcttataattttttgtttagtttttgaagccgaagagggatgggatcggagctaatatacagaggccatgagactcagcttgcttcagattcctattcacctaaaccggttaaaccatgggcctctgtcacgcgcgtggtccggtacatgctccgggagcagcgcctnctctttgtgctcgtaggcattgccatagccactctggtcttcaacatcttcccggcctcgcgtgctgcgcacgggcccc

SEQ ID NO: 232693 - DNA, 439 bp, Gossypium hirsutum
caagactcttgccaatttctgttactctgtacatctctctgtctctgtttcttactaaatccttcttcacaaaatcgaaaaaatagaaaaagaaaaaactaacaacaaattctagaacagaaggagtgctgatttttcaacaattaaaaagttagagagaagaaaagccagggacaggcacctcctcctggctactttgttcgactagaaaattccgacaatttgtatttgaagaaacgaacaagaatgcgtcgatggctttgctgttcgtgtctggttgaggatacttaccaatcacatgaaaatgagcacttgaggagccccaactataatacagaagggaatcaaaagaactcaaaggcggcagcccctcccaaggccgaagtgcaaaaatcagcaccacctatcgaagtgcctgcattatcattggaagaattga

SEQ ID NO: 232694 - DNA, 408 bp, Gossypium hirsutum
tgccgaatgtctttgcttgggatttgttaaaatgcactagcgggtgctcgctaggtattgatatccccagatgttacaacagctgctgatatttactaggggaggattaatcctctggacatgtaaagaacttgggaatgctcttaaaggatcaccaattgacaccttgatccggtcttgtcttttggaggaacgctctggtgcagcatcatataactatgatgccccaggtgcttcttataccctcaagtggaccttccataatgagcttggccttgtatttgttgctgtttatcagcgtattctccatcttttgtatgtggatgatcttcttgcactggtcaggcgtgagttctctgagatttatgatccgaaaggactgtttataatgattttgacgaaactttt

SEQ ID NO: 232695 - DNA, 426 bp, Gossypium hirsutum
attgcttcctgagtggtacaatgaaaaaggaattcagttgatccttagcactgaaatagtgaaagcagatcttcctgccaagactctagtaagcgcagctggagaaacgttcaaatatcaaattttgatcattgcaactggttccacagttataaggttgacagattttggcgtggaaggagctgatgccaaaaacatcttttacctgagagaaattgatgatgctgataagttgctggaagcaatcaaagcaaagaagaatggaaaggctgttattgttggaggaggctatattggtcttgagcttgctgcagtgatgaaaattaaccattttgatgtcaccatggtgtaccctgagccttggtgcatgccccggctttttactccggacattgctgcgttctacgaggagtattatgctaataa

SEQ ID NO: 232696 - DNA, 444 bp, Gossypium hirsutum
  unsure (1)..(444): unsure at all n locations
aacccccaaaaatccatcgccaccaggaggaaaaaagcaaaagaaccctaccgacgatgttccggcaagcgtcacgcctcttggctcgaactaccaccccatggaggggaagtcgagcattttcgtcagatgtaccagccacacccgctcaagattcgagcttcatcgaatcatggtccaaagtcatacccaacttagaccctcccaagacaccatcttctttcatgacccctcgccccgccaccccttctgctatcccttctaaactcaccgttaactttgttcttccttatgcatctgagctctccgctaaagaggttgacatggtaatagttccagcaacaactggacagatgggtattttgcctggacatgtccctacaattgctgaactgaaacctgngatcttgtcggtgcatgaaggaaatgatgtcacaaaatatt

SEQ ID NO: 232697 - DNA, 451 bp, Gossypium hirsutum
cccacgcgtccggtggcgatgatggtgggttcgatcgcatcggctgagatttcattagcatccaccgggcctgcttttctatgggctcctggtttctctagcgttgaatcgaaggaatctgtaaattatcagatcaagtctccaaaggatctagctaactctgttctctctcaagggggatggtctgacttactgtgctccgagaggaaaaatgagcgccctgttgatctcgccgttgtttttgttggtagagagttgcactcttcagatgttgcagggaacaaacatgcagatccggctcttttgaacttgcttaaggactcttttaccaagtccaacttctcaatggcatttccatatgtagctacttctgaggaggaaacaatggagaatttgtgggttcagttttaaggagcctgtgccacggtttgggagttgctaatgtgcaatt

SEQ ID NO: 232698 - DNA, 380 bp, Gossypium hirsutum
gtttctatacagattcaaaaagaaataaaggtagaagaagcaatggccactcttacagtgcccacgacagttccttcagtgtctgaagattgtgaacaactaagaaaagccttttcaggatggggaactaatgagggcttaatcatagatatattgggtcacagaaatgcggagcaacgaaacttgattcgaaaaacctacgctgaaacctatggagaggatctcctcaaggcactagacaaggaactctcgaatgactttgagaggctggttctgctttgggctcttgatcctgctgaacgtgatgcccttttggctaatgaagccaccaaaaggtggacttcaagcaatcaagtccttatggaaatagcctgcacaag

SEQ ID NO: 232699 - DNA, 330 bp, Gossypium hirsutum
ggaaaccttctccgaataccctccacttggacgtgttgccgttagggacatgagacagaccgttgctgttggtgtgatcaagagtgtggagaagaaggacccatctggagccaaggtgaccaagtctgccgccaagaagggtggcaagtgaactttggtttagtcagtttttgttttgtgagatccgtaattaattccttgagtatttggtttttgctttttagacgatgaggttttcagacaacatggttgtgtgttgaagtttttacttgagagttaacttgcaactgatctttcactactgataagaaaatgagtggacttcaagct

SEQ ID NO: 232700 - DNA, 437 bp, Gossypium hirsutum
  unsure (1)..(437): unsure at all n locations
cccacgcgtccgattcccaccatcggtttcaatggtgagaccggtgaatacaagaacatcagctttactgtttgggatgttggtggccaggacaagatccgaccattgtggagacactacttccaaaacacccaaggacttatttttgtggttgatagcaacgatcgtgatcgtgtggttgaagctagagatgagttgcacaggatgttgaatgaggatgagctgagggatgctgtgctgctagtattcgcaaacaagcaagatcttccaaatgctatgaatgctgctgagattactgacaagcttggccttcattcactccgccagcgccattggtatatccagagcacatgtgctacttccggtgaaggactgtacgaggggctggactggctctcaaacaacattgcaaacaaggcatangtgtgacatgactg

SEQ ID NO: 232701 - DNA, 432 bp, Gossypium hirsutum
cggacgcgtggggaagaagagatgaaggaaaaggaatggtagatcgcaagcgctggaagttaccgagaagactttatagatccctattatcggaaagagggaatttcagcggataacagaagttcattttaatttataaaatcatggttgccactgctgctacatcctcattctttccaatcacttcttccccggactccattgactcaaaaaacaagaagcttggaaatggatctactaaccttggaggtataaagttgaaaccatctgcttcttctggaagtttgcaagttatggcaaatgcacaagcccccccaaagataaatggtaccacggttgtgatgactccagtagaaggtttcacgagcgaagatgctgcaagttccacacctcccaggacgtttatcaatcagctccctgattggagcatgc

SEQ ID NO: 232702 - DNA, 428 bp, Gossypium hirsutum
aagaatgatcttcaacatcgtattgcaaaagaggctagaggaaatgcaatcttacaagctagcttggaaagaagaaaacaagcattgcatgaacgtcgcttggcacttgagcaagatgtctgtagattgcaagagcagctgcaagctgaaagggatcttagagctgcccttgaagttggattgagcatgtcagcaggacaatttcctaactcccgcggaatagattccaagacgagggctgagcttgaggagattgctcttgccgaagctgatgtggctagattgaagcagaaagttgcagaactccaccagcagctgaatcagcaacggcagcatcattatggttccatatctgatgcatgtgaccattaccaacatgtccaaaatcataattctcaacagagatttcttcagcaagattttgatac

SEQ ID NO: 232703 - DNA, 449 bp, Gossypium hirsutum
gccaaaagggctctgctttggagttctttctttcttcctttcttctggcgtacttggggttcccactctaatcatggtatccaagcacaatccatcgggcaacaaaaaacggagcccactatctatatttgctgttattggtttgtgttgtttcttctacattctgggagcatggcagcgaagtggttttggcaaaggagatagcatagcattggaagtaacaaagcaggcagactgcagtatcttaacaaatttgaactttgaaacacatcacaacgatgtagagattgttgagccttccaaaccaaaagctcaggtgtttaagccgtgtgatgtaaaatacactgattacaccccttgccaagagcaagaccgagccatgaagtttcccagggataacatgatttaaccggaaagacactgtccccccgaggaagaataactacact

SEQ ID NO: 232704 - DNA, 413 bp, Gossypium hirsutum
gttctgtttgaaccatttctcttcaagtgtttatgttggaccacctagtggaaacaattggtttgagaagcaaactgatgggacacttgatatagtatgttcatcatggatggattggttccatggtggtttacagttccagattgagcaccatttgtttccaaggttgccaaggtgccatctcaggaaagtttccccattcgttcaggagctgtgcaagaaacacaacttacagtacgataccgcttcgttttggaaggctaatgtaatgacgatcgagacccttcgatcagccggcttgcaggcaaggattctcagcaacccagttccaaagaacttagtgttggaagtagtaaaaactcatggttgagatggaacttcatgtgaatgaatcagcttatgttgttatgact

SEQ ID NO: 232705 - DNA, 432 bp, Gossypium hirsutum
  unsure (1)..(432): unsure at all n locations
attctctgtatcatctatcagggccttatttcgactggttcctggctttccggctgcacatccttctcaggtgaacggagatggcaggaaaaggtggaaaggggcttttggcggcaaaaacaaccgccgctaacaaggacaaggacaaagataaggacaagaagcgcccggtttctcgttcatctcgtgccggaattcagttcccagtgggccgaatccaccgtcacctaaagactaggacttccgcaaatgggagagttggtgccacagctgctgtttacttggcctccatccttgagtacctaactgcagaggttcttgaattggctgggaatgcaagcaaggatctgaaagtgaagagaatcaccccgagacatctgcagcttgctattangggtgatgaagagcttgacactcttatcaagggtacta

SEQ ID NO: 232706 - DNA, 436 bp, Gossypium hirsutum
tatctctgagggtgtcttaagaaacgccttcgagttactttcgggttccatttacgtctttatttctacgtttttgaatttttagtaagcgaaaatgagagagtgcatttcagttcacatcggtcaggctggtatccaagtcggaaatgcctgctgggagctttactgccttgaacatggaatccagcctgatggccagatgccaagtgacaagactgtcggaggaggtgatgatgcttttaacacctttttcagtgaaactggtgctggaaagcacgtccctcgtgctgtctttgtggatcttgagcctactgttattgatgaagtgaggactggtacttaccgtcagcttttccaccctgagcaactcatcagcggcaaggaagacgctgccaacaacttcgcccgtggccactacactattggcaaagagatc

SEQ ID NO: 232707 - DNA, 446 bp, Gossypium hirsutum
ctcaaacagacaaagaggtcgaagagatcctcgccgctcatctcgatcaacagaaaatccattctgagcaacccgaacaacctgtagttgaagatgacgacgacaacgatgacgacgacgatgatgacgatgacaaggatgaagatgatgccgaaggccttcatgacgtagacggaactggtaggtcaaagcaaagcagaagtgaaaagaagagtcgtaaagcaatgttgaagcttgggatgaaaccgattcccggtgttagcagggtcacaatcaagaagagcaagaatatcttattcgtcatctcgaatccagatgtcttcaagagccctgcatcggatacatatatagtgtttggagaggctaagattgaggacttgagctcacaactgcagactcaagctgctgagcagtttaaggctccggatctcagccatgtgatctcc

SEQ ID NO: 232708 - DNA, 416 bp, Gossypium hirsutum
gaggaggcagtcccccatcgtatggaggaggcagtcccccatcgtatggaggaggcagtcccccatcatacggaggtggcagtcccccatcatatggaggtggcagtccaccaactactcccattgatccaggaactccaagcattccctcacctccattctttcctgctccaactccaccaattggtggtacatgcgatttctggaggagtcaccccacactgatatggggtctgcttggttggtggggcactgtaggcaacgcatttggcgtgaccaacgctcctggacttggaacaagcatgagcttgccccaagcactttcaaacacacgtactgatggacttggggcgctttaccgggaaggaacagcctcatttctcaactccatggtgaataataggttcccattctcg

SEQ ID NO: 232709 - DNA, 441 bp, Gossypium hirsutum
tcggccttttgtagaggatggagtccaccctcaaaatcttattcgcagttatcgaactgcttgcaatttggcaattgtgaagatcaaagaactagctgttagtatagaggggaaaagtctagaagagaagaaaagcttattagctaaatgtgctgctacaacactttcttcaaaactcattggtggagaaaaggagttctttgcatcaatggttgtggatgctgttattgctattggcagtgaagataggttgaatatgattgggattaagaaggttcctggtggtaacatgagggattcctttttggttaatggtgttgcctttaaaaagacattttcatatgctggttttgagcagcagccaaagaagtttacgaatcccagaatacttctgttaaacatcgagttggaactgaaatctgagaaagaaaatgctgagat

SEQ ID NO: 232710 - DNA, 426 bp, Gossypium hirsutum
  unsure (1)..(426): unsure at all n locations
gcgattgaagtctgtgtgtaactggatctctatctagtacacttggctcagatctaaaggacctcntctcaaatccactaaattcaccatgtctactactttcagcggcgatgaaacggctcccttcttcggcttcctcggcgccgccgccgctctcgtcttctcctgtatgggagctgcatacgggacggctaaaagcggtgtgggtgtggcttcaatgggtgtgatgaggcctgagttggtgatgaaatccattgttccagttgttatggctggtgttttgggtatttatgggttgattattgctgttattattagtactggcatcaatccaaaggccaaatcgtattatctttttgatggttatgcccatctttcctctggtcttgcttgtggacttgctgggctttcagctggaatggcaat

SEQ ID NO: 232711 - DNA, 433 bp, Gossypium hirsutum
gctgcagtcgccaccattaagaccaagcgcaccattcagtttggcgattggtgtcctactggattcaagtgcggtatcaactaccaaccacccactgttgtccctggtggtgatctcgccaaggtccagagagctgtttgcatgatttctaactccaccagtgttgctgaagtcttctctcgcattgaccataagtttgatcttatgtacgccaaacgtgccttcgttcactggtatgttggtgagggtatggaagaaggagaattctcagaggctcgtgaggatcttgctgcattggagaaggattatgaagaagttggtgctgagtcagctgagggtgatgagggtgaagatgatgagtactaagaagtacgtgtgattgagtgtgcttacgatgtcttttattacctgttgcttccgtgttatgcaagct

SEQ ID NO: 232712 - DNA, 428 bp, Gossypium hirsutum
cccacgcgtccgggtgattcagttaacgcatcttactaccatattgtgaatccatcaaccaacactgctgttggtgctgaggtgactcatagcttctctaccaatgtgaacaccatcaccgtgggtacacaacatgcattggatccattaaccacaatcaaggcacgggtgaacaatgctggcaaggcaagtgcactcatccagcacgagtggcgcccgaaatcgctctttaccatttctggagaggtggataccaagtccatcgataagagccccaaggtcggacttgctttggcactcaagccttgagagcttaaaaaaaaaaaaggagctcattttggtaagggtatggtagacttgaaaagagttttgaagttttagtctgttattgacattcatggggttgccatcttacctttcatgtcaat

SEQ ID NO: 232713 - DNA, 411 bp, Gossypium hirsutum
attactacgacatatacaatttagccaactcttgtgtatttcatccacgatgaatcccttcaaaaccttgccaaccctttctttcctcttcttaacccttttcagcttagcccatgcagccacatttgatataagaaacaactgcccttacaccgtttgggctgccgcatctccgggtggtggcaagagacttgaccaaggtcaagcatggcaaatcactgcagcctctggaaccacacaagcccgaatttgggctcgaaccaaatgcaatttcgatgcctccgggaaaggctcatgcgagacaggcgactgcggtggagtcctcgaatgcaagggatacggtaaagctcccaacacactagccgaatacgcaatcgaccaatttgagcaccaagacttcattgacatctt

SEQ ID NO: 232714 - DNA, 405 bp, Gossypium hirsutum
cacagttcttaaacctaagatacgctttttctcaggaggttgaggtaaagactggaaatcatagagatgctgagagaaattagaatttggctcttccagaaatttgaggaataactctctattggaactcaaaacttctagtgcatcttgaaattctttggtttggcgaagcttttcctctgtcaccaggtgttttgcttccataaacttctgacgaactagagccatttttttctcattcagattatccttatacctccctttttgtggagagctatctcttgaataagttgccctcggggactgttgccagatttcataaacatctttgtatttgtccagctcttgacaggggtttacttcggatagcatttccttgcccgcaaagccctgatcttgctccca

SEQ ID NO: 232715 - DNA, 410 bp, Gossypium hirsutum
  unsure (1)..(410): unsure at all n locations
gagcaaaccaaaaaaaggctgcaaattcagcttttcaatatttgcttttgatcaatcgaaatggcttcacaagtttctcaaatgccttcttcatcacccctttcttccaataaggatgaaatgcgtcccaaagccgattttcagcctagcatttggggagatctcttcctcaattgtcccgacaagaatattgatgctgaaactgaaaagcgccaccaacaattgaaagaagaagtgaggaagatgattgtggcaccaatggctaattcaacccaaaagttagccttcattgattcagtccaaagactgggtgtgagttaccatttcaccaaggagatcgaagatgaactagagaatatctaccataacaacaatgatgccgagaacgacctctacaccacatncattcg

SEQ ID NO: 232716 - DNA, 415 bp, Gossypium hirsutum
gttcttccttgcatggaagtcagctaaacaacaaacgacaaagaggagatggttatactacaagtttgaatggcaatggcttgaatgctgttcacattggtaaagatgatctccgatttaaactcatgcaaaagaatgtgtttagacgggctcagagtgatgaaaacaggaaggacatggaccttcgtgaaaagttgtcaagaatgggacagccttacgagacacatcaaacatctgagtcaagggagcgaatacctgaaccaagggagcgagtgctggagtctagggaaactagcatcttgggcagatttccttccacaagaagtgtggatgatttgcctcgtgttaccacttcaagaagttcttattctccttggactttagatcatttaaggcaacgatctccagacagagt

SEQ ID NO: 232717 - DNA, 404 bp, Gossypium hirsutum
aaaacagtccactcactccataaatctgttctttattgccactttctcgaacaagagaggaatctgtgaaatttttataggttatgggtaagatatggcgatgatgttacagagaaaattgatgaggagaacctttggagaaggcaaagcaatactcaacttcaattctaaccctgtactttctccctgcacttccttctctaccgttacttccgctgccgctacaccattccacaatgcgccacgtcagcttccaccgttcgattaccagccgacaccgtacaacggaccgtgcgccgatcaaatgcttgagaagcggaagaagttcttgggcccctctctcttctactactaccaaaagcctatgaatattgttgaaggaaaaatgcaatatttgtatgatg

SEQ ID NO: 232718 - DNA, 401 bp, Gossypium hirsutum
ctctctctctctctcttcaacaagccggcgagggaaggaaaaccagagagggtgaaaaatgccagctggtcacggtctccgatctcggaccagggatctgttttccagacccttcagaaagaagggttacatcccattgtccacttatctcaggacctacaagattggtgactatgtggacgtcaaggtaaatggcgccgttcacaagggcatgccccacaaattctaccatggccgcactggtcgtgtctggaacgtcaccaagcgcgccatcggcgttgaggtcaacaagcaggtgggtaaccggattatcaggaagaggattcatgtcagagtggagcatgttcagccttcaaggtgcactgaggaattcaaactgaggaagataaagaatgatcagc

SEQ ID NO: 232719 - DNA, 412 bp, Gossypium hirsutum
cgaaatttgaaacacaaaagaccaaagagatggatagatcaaggttgcggtctctcaccttgctttgcactttggttcttcttggatctctagcttctactcaggcaaagaagtccaaggaagatctgaaagaagttactcacaaagtttactttgatgttgaaattgctggaaaacctgctggtcgaattgtcatgggactcttcgggaaggcggttccaaaaacagcagaaaacttccgagcactatgcacaggtgaaaaaggtgttggaaagagtgggaaacctctccacttcaaaggaagtgctttccaccggattattccaaacttcatgattcaaggtggtgattttacacttggtgatggaagaggtggagaatcaatctatggtgagaaatttgctgatgagaa

SEQ ID NO: 232720 - DNA, 405 bp, Gossypium hirsutum
agttgacccactttctaatcttcacatcaacaacaacatgcctagtcgctgcgaaattctgtgtgaacttttgatcgcgattttgatccctcctttgggagtttgcttcaggcacggttgttgcagcgttgagttctggatttgtgtgctgttaactattctgggttacgttcctgggattatttatgctctctacgctattgtttttgtggatcgtgatgagtacttcgacgagtacaggcgtccactttattactctgcttagttctcttttatgatctctctctttttctgtaaagtggtgatcctgaaactgtttgcatttgtttttaattgaactcgatattgatgtgcttctactctttaattgatcttgacattgtgcgattgtaaatttgtaatgtt

SEQ ID NO: 232721 - DNA, 409 bp, Gossypium hirsutum
ctcgctaaaagacttttcagatgtctaacccaaggttggaaggtaaggtggctcttatcactggtggagccagcggtatcggtgaggagacggcgaggttctttgtacaacatggggctttggttgttattgttgatgtccaggatgatctggggaatcaagtcgctgcatcgatcggccttgacaaggttagttaccggcactgcgatgtacgagaggagaagcaggttgaggaagcagtaagtttcacagtggagaaatatgggaagctggatatcttattcagcaatgcgggtaccctaggctcgttaaccggaatcttagaaattgacctggatgactttgacaacaccatagccacgaacgttcgaggggtggccgccacgatcaagcatgccgctcgagctat

SEQ ID NO: 232722 - DNA, 411 bp, Gossypium hirsutum
ctgaaacagataaacatcaaaatgggttcccaaaaacacgtctttcttttgttatcagtgcttttgattctcaattcccttctcttttccggtgccgatgaagatcactattacgaatttattttgcaagaaacagagattacgaagctatgcagcacaaaaaccatattgacagtgaacggcagttttccagggcctcaaattcgggttcgaagaggcgacactgtttatgtcaatgtgcacaatcaaggaagatctgctgtttcctttgattggcaaggggttgaggatccggttgatggttcaaacgagttgatccagcctggtaaaaacttcacttacgagatcgaattagacgatgaaatcggaactttatggtggcatgcaaggagtgcttgggctaaagctacc

SEQ ID NO: 232723 - DNA, 383 bp, Gossypium hirsutum
cccacgcgtctcgggtttttgttacctcgatttcaagtgaatcagaatgggtaaggaaaagactcacattaacattgtggttatcggccacgtcgattctgggaaatcaaccaccactggccacctgatttacaagcttggtggtattgacacgcgtgtgattgaaaggtacgcgcaagaacctgctgagatgaacaagaggtcattcaagtatgcttgggtgcttgacaagctcaaggctgagcgtgagcgtggtatcaccattgatattgccttgtggaaatttgagaccacgaaatactactgcactgtgattgatgcacctggacaccgtgactttatcaagaatatgattactggtacgtcacaggctgactgtgctg

SEQ ID NO: 232724 - DNA, 412 bp, Gossypium hirsutum
cgtaaattcagttatctactccccaaaatgagttgaagaatactactattgtgggagtggagatggcgtggagatctcccaactttttcctaaggaagcaccgaaaatggccgcttatttcctctcacaaaactaaatggcgccaagctttcacccaaaatcaacccatggtatccttcaaacaactcgttgcccggcataaccctcttcaacctgactttgtcccctctctcttacagtctcttagcctctacaaccttcaccaatcccctcaagcctatcattttctcatcaaaaccttgctccataatagacaattccaccacattccttccctgctccatcacctccaactccaacactttcaaacacccgagtacatttttacccacctcgtcaaattctatggcaa

SEQ ID NO: 232725 - DNA, 415 bp, Gossypium hirsutum
cgaaaaggttaagagcaaaagacagggcagagtaagctaagctttgatcatcaatggcggagaagagtttcaagtacgtgatccttggcggtggtgtagctgctggatatgcagcgagagagtttgccaagcagggagtgcagcctggtgagctagcaattatttccaaggaggcggtggctccatatgaacgacctgccctgagcaaagcatatctcttccctgagggagctgctagacttcctggtttccatgtctgtgttggaagtggcggagagagattgcttcctgagtggtacaaggaaaaaggaattgaattgatccttagcacagaaatagtgaaagcagatcttcctgccaatactctagtaagtgccgctggagaaacattcaagtatcaaatcttgatcattgc

SEQ ID NO: 232726 - DNA, 410 bp, Gossypium hirsutum
ggactgggtacccagtctggagggcgtgcctcaccagtagtcaataagtcgacttcaatgaatcaaaggctattacctcaaggtagtggtggcctaatgagtggtaggacaagtgccctgttgcagggtagttcaacccctcctgctaagccacccaactcaattttaggtgctgagtctgttgcacaagcttctctttcccctaaacctgctccggtggagaaaccaccaactcaggctgccaggcttaatacagatgatcttcagagaaaaacacgggcattgttagaggaatatttcagcgttaggctactagatgaagcattacagtgcgtggaggaactaaaatctccagcataccacccttgggttgttaaagaagcaatctccgttgctttggagaaaagccc

SEQ ID NO: 232727 - DNA, 402 bp, Gossypium hirsutum
cggacgcgtgggaatattccactttattcgacgccatagcttccgtcaacccaaaggctcctttaaactccggtaagaaccatacgccgccgtccggttcacgtggttcctcaaccagctgcgaggtatgggacgtggcctgctctgaagcggttttgagcctggcccggaaacccgagaacgtggagtggattaaagggttgaggaggaagatacatgagaaccctgagcttgcttttgaagaatacgaaaccagtaagctggttcgaactgagttggatcgtatggaaattgaatatagataccctttggccaaaacgggtattcgggcttggattggaaccggtagcccgccctttgtagccatccgagctgacatggatgctctgcccatacaggaag

SEQ ID NO: 232728 - DNA, 383 bp, Gossypium hirsutum
ctctcttcctgtcttcgtctacttcgcctctttctctatggatccctacaagcaccgtccatcaagtgctttcaattcaccattctggactaccaattctggcgctccagtttggaataacaattcatcacttactgttggacccagaggtccgattctccttgaggactatcatctggtggaaaagcttgccaactttgacagggagcggattccagaacgtgttgtccatgctaggggagcaagcgcaaagggtttcttcgaggttacccatgacatttctcacgttacatgtgctgattttctgcgagcacctggagttcaaacccctgttatcttgagattttcaactgtcatccatgagcgtggaagccctgaaaccc

SEQ ID NO: 232729 - DNA, 405 bp, Gossypium hirsutum
aaaacaagaaaagcagagccgcatcactttttgctagctaagctactgtgggagttattgttcttcagaacagcttctgcagtagctaataataacgttatatattatataaattttatacatcctttttaccctacgactccatatataagcaagtaaaaataaatatggctcgctctgtttcttcctttaagttccttggtgcttctgtttttgatgctctttatgtctccatatcaaggagaggttactcaggtgcaccgccggcggcagtgacggctagctttggtaggcctggagcgatggggaaagtggaacgaagatatgcgatgaaagagtcgtcgtcgtcggagacaagggcttattcttcagcttgggcgcctgaccctgttacggggtattacc

SEQ ID NO: 232730 - DNA, 409 bp, Gossypium hirsutum
cagatttaaaaaaaaaaaaaccagtggaggagattttctccttagtctttgggctttctacactcagatttattcttggaaatataaggttagaccaatggattcccagaccaaaacagagaattgccttggatgggctgctacagatccaactggtgttctatcaccatacaaattcagtcgcaggcctctaggaagtgatgatgtttccataaaaattactcattgtggagtttgttatgctgatgttatttggtcgaggaatatgttaggagattcaatatatcctttggtgcctggtcatgagattgctggtattgtgaaggaggtcggttccaatgttcaaggcatcaaggtcggcgatcatgtcggagtgggaacttatgtcaactcatgtagaaattgcgag

SEQ ID NO: 232731 - DNA, 410 bp, Gossypium hirsutum
caagaactccaccaccggcaccgtccaggttcatacctatgacatcagctcctacagttcaattgttgccaaggatctgtccttcgaggtctgggataagacggctgagagtagaagggacgggagtttggcgattttcgctaaaattaaggttccggcggatttagcggcgagtgggaagattaatcaggtttggcaagtgggtcccagcgtcggaactgatggcaggttggacaaacatgccttcgccgtctctaatttgcaatctaaaggaaccttggatttgaaaagtggacagagtagcactagttctggaggagacgacaggctcaagaagaaaaatattcatgggattttgaatgctgtgagttggggaatattgtttccacttggagccatgattgcacgct

SEQ ID NO: 232732 - DNA, 410 bp, Gossypium hirsutum
tcgctttgaggggaagaatcttgctatcccttgcttttctctcgcaaaaaattctcaaacttgtttttaacgttcgctgaatactatcgctcatttcttccctcagaaccctaatcgataactgaagccatttaatcatgtttgggcgtgttccaaaaaaatctgataacactaagttttacgaagtacttggggttcccaaaagtgcaagtcaggatgaattaaagaaggcttataagaaagctgcaattaagaatcatccggataaaggtggagaccccgagaagtttaaggaactggctcatgcttatgaagtacttagtgacccagagaagagagaaatatatgatcaatatggtgaagatgctcttaaagagggaatgggaggaggcggttcttctcacaaccca

SEQ ID NO: 232733 - DNA, 414 bp, Gossypium hirsutum
ggaagtcctccgtgccacacaattaactttcctcgatataaggttcaaccgaatcaaaggcgtcgttccggcgacagttttcaaattagacctcgacgttctcttcatcaacaacaacaatttcaggcaacgtctaccggaaaatttaggtgatacaccggcgttatacataacatttgcaaacaacaagttcaccggtcggatcccgccaagtattggcaaagctaaaaacctcctcgaagtactattcctcaacaacgaactcactggttgtttaccgtacgagatcggctacttacaaaacgccaccgtttttgacgtcggaatgaataaactaaccgggccgataccacattcgttcggttgtttgaaaaagatggagcaactcaatttagccggcaatgaaatttacgg

SEQ ID NO: 232734 - DNA, 406 bp, Gossypium hirsutum
aacgctctctcatcctgcttctggtcaagccaatctcaaaagactccccttttagctcacagctctctcgagttctgtaatgggtaaggagaaggttcacatcaacattgtggtcatcggccatgtcgactctgggaagtctacaaccactggtcatttgatctacaagcttggtggtattgacaagcgtgtgattgagaggtttgagaaggaggctgctgagatgaacaaaaggtcatttaagtatgcatgggtgcttgacaagcttaaggccgaacgtgaacgtggtattaccatcgatattgccctctggaagtttgaaactaccaaatactactgcactgtcattgatgcccctggacaccgtgacttcatcaagaacatgattactggtacctcacaggct

SEQ ID NO: 232735 - DNA, 413 bp, Gossypium hirsutum
  unsure (1)..(413): unsure at all n locations
ctctctggaacatcaccaaagccgactttcagatcttggaacaactaggaacaagtttgggcagtcatggctaagcaccatcctgatttgatcatgtgccggaaacagccggggattgcaataggacgattatgtgagaagtgtgatggcaagtgtgtaatctgtgactcttatgtccgcccttgcacgcttgtgcgagtttgcgatgaatgcaactatgggtcgtttcaaggtaggtgtgttatctgtggaggggtggggatatccgatgcatattactgtaaggagtgtactcagcaagagaaagatcgcgatggttgtccaaaaattgttaatctcgggagtgctaaaacagacttattctatgaacgtaaaanatatggttttaaagaaaagatgattgatgtttacct

SEQ ID NO: 232736 - DNA, 412 bp, Gossypium hirsutum
ctttgtcatctcaaaccctagatcagggtttaaagaattttttccttttttttttcaactaaaattcccctcttgatcttcttcgattattatctttttattgtggctgaaaattacggaaaaatggcagcccaagcagcagcaaccactttcaatgggaacttaaagaaagcacttgctggtctgaggcgaattaatctggaaggtctgagatggagagttttcgatgctaaaggccaggttctcggaagattagcatctcaaatttctactgttattcaaggaaaggacaagcctacttacgctccaaatcgtgatgatggggatatgtgcattgtgatcaatgccaaggatgtatgtgttacagggagaaaacttacagacaaggtttattactggcatacaggctatg

SEQ ID NO: 232737 - DNA, 408 bp, Gossypium hirsutum
ttcatctgccatcaatttgctctgaagatcatgttggctatttttcacaaggcatttgctaatccaccagaggagctgaatagtccagcttctcataaatctaccaagaagcctaaacagcctgaagaaaccctaaatgatttcctatctcatcaccctcacaacactttctccatgagctttggcaacgctgctgttttggcttatgtccgccatgaacgtgctgcttcagttcatcagaggttgttttgtgggtttgatgacatatactgcctcttcttagggagcttgaacaatctatttatgctgaatagacaatatggtctttccaaagggagcaatgaggcgatgtttgtgattgaagcatataggacgctgagggataggggtccataccctgctgatcag

SEQ ID NO: 232738 - DNA, 409 bp, Gossypium hirsutum
cggccaccggcggcaaccagcacccaatgctggtttctgttttattagccctttttctcccatgcgctggcatgagtgctgttttcattgtttatatctgtcttttatggtacgccacgaatcaccgggctgataattcagggtcgttatcggttaagcaggctggtgagaaagggttgtccgtttcggagcttgagaagctgcccaaagttaccgggaaggatcttgtgttggggactgagtgtgcggtttgtctcgatgagatagaggcagagcaatcggctagaatggttcccggttgtaatcacggctttcatttacaatgtgctgatacttggctttcaaagaactcggtctgtcctgtttgtagggccaagcttgagcctaagttgttcgatccacctggtga

SEQ ID NO: 232739 - DNA, 408 bp, Gossypium hirsutum
gatgagtcttccccttatgcggccatgcttgcggcacaagatgtttctcaacgctgcaaggagttgggtattactgcccttcatataaagctccgagctactggaggaaacaagacgaagacccctggtcctggtgctcagtcagcacttagagcccttgctcgttcaggcatgaaaattggtcgaatagaggatgttactcccattcccactgatagtacccgtagaaagggtggcagacgtggaagaaggctctgattctttgctttatatcaattactcactcagctactactgctgtggtgcttggagttttctttgttaaacagttttctttatattcaagtgtgttttgctcggttctcttgctgcacatttagttttttggaaatggatttagatctttta

SEQ ID NO: 232740 - DNA, 412 bp, Gossypium hirsutum
aatggatctcaagatttgaagtctggccatacttggaaacctacacagaggatgttgctcatgaaatctccaaagagttgcaaggcaagccagatctgatcatcggaaactacagtgatggcaatatcgtcgcctccttgctcgcacataaattgggtgtcacacagtgcaccatcgcccatgctttggagaagacaaaatatcctgattcagatatctactggaagaagcttgaagacaaataccatttctcttgccaatttacagctgatctttttgcaatgaaccatacagatttcatcatcaccagtactttccaggaaattgcaggaagcaaggacactgttggtcaatacgagagccacactgctttcactcttcctggtctctaccgtgttgtacatggtatcgg

SEQ ID NO: 232741 - DNA, 410 bp, Gossypium hirsutum
aaaatatctcaaatctcctcctcctcctcggaaatcttagtatcatcaccatggcctcaaatcccaaggtcttctttgacatgactatcggtggtcagcccgctggtcggattgtgatggagcttttcgcagattgcactcctcgcactgctgagaacttccgtgccctctgtaccggcgagaaaggcgtcggccgcagcggtaagcccctccactacaaaggctcctctttccatcgtgtgatccctaactttatgtgccaaggaggtgacttcaccgccggaaacggtaccggaggtgaatccatctacggatccaagttcgctgacgagaacttcatcaagaagcacactggtcccggtattctctcaatggctaacgctggtccccgaactaacggatctcagttc

SEQ ID NO: 232742 - DNA, 391 bp, Gossypium hirsutum
cgaggatggccgaactcttgccgactacaacatccaaaaggagtccaccctccacctagtccttcgtctaaggggtggcatgcagatatttgtgaaaacccttacgggcaagaccatcaccctcgaggtggaaagttctgatacgattgataatgtcaaggccaagatccaagacaaggaagggatccctccagaccaacagaggcttatctttgcaggtaaacaacttgaagatggccgaaccctcgctgattacaacatccagaaagagtctaccctccaccttgtccttcgtcttcggggtgggatgcagatatttgtaaaaaccctcaccggaaaaaccatcactttggaggtggagagttctgataccattgataatgttaaggcg

SEQ ID NO: 232743 - DNA, 409 bp, Gossypium hirsutum
gaaggttgttgacattgttgacactttcaggcttcaggagcaaccccctttcgacaagaagcagtttgtcgtgttcatcaagaagttcatcaagaacttgacaccaaaactggatgcggaaaagcaagagtccttcaagaaaaacattgagggagcaaccaagtttttgctttcaaaattgaaggaccttcaatttttcgtaggagagagcatgcatgatgatggatgcttggtgtttgcttactacaaggatggtgctgttgacccaacatttttgtactttgcatatgcattgaaggaggtcaagtgctgaggtttgaagcaaagaaaaaaaaaagtggttgctgaagaatttagtcctttttattattgcttttgtctcttgttttcagtactctgctaaagacat

SEQ ID NO: 232744 - DNA, 410 bp, Gossypium hirsutum
ggaaaatctccactgtcccctaaagggatactgtctcaactacaaaatatttgtggccaacttgttcaagggaaggaggaggatgcacatgaatttttaaggtatgttattgatgtgatgcaatttgattgtcttaaagaagctggggtgcgttcatcaaggtgttcagaagaagaaacgactttaataggcctaacatttggaggttttctccggtcaaagataatgtgtgtgaaatgtcaaggcaagtctgaacgtcatgaaagaatgatggatcttacggttgagattgaaggagacatagagaccctggaagaggctcttcatcgctttacgaggactgagattttagatggagaaaataagtaccaatgtggcagatgcaactcttacgagaaggccaaaaagaa

SEQ ID NO: 232745 - DNA, 407 bp, Gossypium hirsutum
gaccgagggatctctttgtcttctcagattttctctttccatctctcaattctcaaaaccctaatttctctgcttttccttttgcttaatcaatcgatcctcgtcaatggccaacagtaatctccctcgaagaatcatcaaggaaactcaacgtctcctcagtgaacctgcacctggaattagtgcttcaccatcagaggataacatgcggtatttcaatgtgatgatccttggtccaacacagtcaccatatgaaggtggggttttcaagttggaactatttttgcctgaagaatatcccatggctgctcccaaggttcgatttcttacaaagatatatcatcctaacattgacaagcttggaagaatatgccttgatattctcaaagacaaatggagtccagctc

SEQ ID NO: 232746 - DNA, 384 bp, Gossypium hirsutum
cacaaacccaaatctccaattgatctgtttcatttttcagcaaagctagaaaaacaatgactaaggatatcgagactgcagagcaacatggaggggagttctcggccaaggactaccatgatccaccacctgctccattgattgatgctgaagagttaaccaaatggtcgttttacagggcagtgattgccgagttcattgctacacttctcttcctgtatgtcactgtgttgaccgtgattggttacaaggtccaaaccgaccctgctaagaacactgttgaccccgattgcggtggcgttggtattcttggtattgcttgggctttcggtggcatgatctttattcttgtttactgcaccgctggtatctttggagggcata

SEQ ID NO: 232747 - DNA, 410 bp, Gossypium hirsutum
ataatatattcttcaacggactcgttggttggcaccggccgcctctttgtctcgcttcacgacaagtcccagtttcatttttaattattgttttcacatccattttcactaagctatatatatcgttagttttctggaaatttgagctattgatctttgcgttgaatatggattgtgaaatggagaaaaattcccacgatggggttgtcgttaacggcggaaacgagggcgttttgggcctacatgccaagaggaagaagctcattatcgataccgatccaggaattgatgatagcatggcaatcttaatggcattccaaaatccggaggtggatatcttaggtttgacgactgtatttggaaatgttaggacggaagatgccactcgtaatgccttacttttgtgtgag

SEQ ID NO: 232748 - DNA, 402 bp, Gossypium hirsutum
ctctcccgctccttctcgctgcgatttcgtcttcaagatctcagttctcaaatcgtagcgctcttttctatcaagccatggctctgatcttgcatgcaggaaaaacaaacaaaaatgcctttaaggcactcattgctgcagaatatagtggtgtgcaggtcaaaatggttgagaattttgagatgggtgtgtcaaataagactcctgagttcatcaagatgaaccctttggggaaggttcctgtgttggaaacacctgagggtccggtatttgagagcaatgccattgctcgttatgttgctcgctcaaaggttaacaaccctatatgtggttctacattgattgattatggtcatatcgagcaatggattgattttgcagccttggaaattgatgctaata

SEQ ID NO: 232749 - DNA, 407 bp, Gossypium hirsutum
gtatatggcttgctgtttgatgtaccgtggtgatgttgtgcccaaggatgtcaatgctgctgttgccaccatcaagaccaagagaactattcaattcgttgactggtgcccaactggattcaagtgtggtatcaactaccagccaccgactgtcgttcctggtggtgatcttgctaaggtccagagagccgtttgcatgatttccaactcaaccagcgttgctgaggtgttctcccgcattgaccacaagtttgatctcatgtatgccaagcgtgcctttgttcactggtacgtgggtgagggtatggaagaaggagaattctcggaagctcgtgaggaccttgctgcacttgagaaggattatgaagaagtcggtgctgagtcaggcgagggtgatgaggaaggtg

SEQ ID NO: 232750 - DNA, 399 bp, Gossypium hirsutum
tttacttttaatttctctctttagtcaccggagctgttaaaggatggagtccaacggcggtggcgcgtcacctatccgtcgagaaatcgaaactttgaaggaggaaagagcccggattgagcaaaggatttcgttccttgaagctcagctccaagaagaagcttcattagcacctcagcagcagcaaaacgacggcgtctgcaatggtttttgtccttcggaaacatccaccgtcgatgccaatctggctcacgggttatctgcggatagtatttaccgttacagccgtcatcttttgcttccttcttttggagtcaaagcacaatcaaatctcttgaagtcttcaatattggttgttggagctggaggtttgggttcgccggctatattatatcttgc

SEQ ID NO: 232751 - DNA, 393 bp, Gossypium hirsutum
gatgcataagtacctgttatctttcacttctaacacattgcatttacgcctccagcagctgcaccacggagaagagagaaaaactgaaaaaggggaaaaaaagcgtcgtcgtttttgcttcttcttcttctttttcttcttccctctctctctttctcagaagctcctctttcgttcttttgttcactaagtattgtaaaagatggccgacggtgaggatattcaacccctcgtctgtgataatggaactggaatggtgaaggccggttttgctggtgatgatgctccaagggcagtttttcccagtatcgttggtcgtccccgacacactggtgttatggttgggatgggtcagaaggatgcctatgtaggagatgaagcacaatctaaaag

SEQ ID NO: 232752 - DNA, 407 bp, Gossypium hirsutum
gaaggtcgtgaagttgcctggacttggttcaaggaaaactgggatctcattttaaaaacctacggtagtggattcctgataacacgttttgtcagtgcagttgtctcaccgtttgcatcatttgagaaactgaaagaagtggaggagttctttgccaaccggtcaataccttcgattgcaaggacattgaagcagagcctggagcgcgttaacattaatgccaactgggttaagagcattcaggcagaggaaaatctgggtgaggccatacaggagttagcttacaggaaatactaagggatttgtctttgttttttactagagatctagtatggaaagtagttgcggtggctttttactgttgttatacttttttactaaactgaatactctctagtaatatcatg

SEQ ID NO: 232753 - DNA, 411 bp, Gossypium hirsutum
catatctctcctttgtttccccttttctctctcttttttcaaccctaaccctacctcaccaaccaggattcaacatgaagggaggaaaatctaagtcagatactaagagtgccaagctatccgtgaaatccaaagctggaaagaaatcggggaaggctgccaaggatccaaacaagccaaagaggcctgctagtgccttcttcgttttcatggaggagttccgtgagcaatacaagaaggatcaccctaaaaacaaatccgttgccgctgtcggcaaagctggtggagataaatggaagagcttgtctgaagctgaaaaagcaccttatgtagccaaggcagaaaagcgaaaggtcgagtatgaaaagaacatgaaggcctacaataagagacaggctgagggtcctaaag

SEQ ID NO: 232754 - DNA, 417 bp, Gossypium hirsutum
gtcaaatatcacaggtgatggaggagggagtttctcttcagaaactcatcaccaagaacaacaagtaggaaactttcatggaggctcaaactctttgctttcaactaacagtaatggcggctccactgctcctccaccagctaagaagaaaagaaaccttccaggaactcctgatcccaatgcagaagtgattgctttatcaccaaagacccttttggcgacaaaccgattcgtgtgtgaaatatgcaacaaagggttccaaagagaccaaaaccttcaactccatcgacgaggccataacctaccatggaagctaaagcaaagaaccagcaccgagatccgtaaaagggtttacgtctgccctgaaccatcatgcgttcaccataacccagctcgagccctaggtgatctcaccgg

SEQ ID NO: 232755 - DNA, 411 bp, Gossypium hirsutum
cgtcacttgaaggctgaagctatggagggtaaaaatgcgaatctggaagcggcgatcgaccagttgcttaatgttgagaagcagatgcggtttgccggcgatgtgattggcaccaagaaagcggtctctgacattttgcagctctgctttgaagctaaggattggaagtctctcaatgaacagatcgttaatttgtctaagaaacgtggtcaacttaagcaggcagtgactgcaatggttcagcaagcaatgcaatacattgatgaggcaccagatcttgaaactcgtatagagcttatcaagaccctgaacactgtgtctgctggaaagatttatgttgaaattgagagagcaagattgatcagaagacttgcaaagattaaagaagaacagggccttattgctgaagct

SEQ ID NO: 232756 - DNA, 412 bp, Gossypium hirsutum
gtttgtacccagaggttgaccctgccctcaaccccgaccatgttccacacatactccataaatgccctgatcagatcccagaccccaaggccgtccagtatgtgagaaacgaccgtgggacacccatggttttggataacaactactacaggaacatactggacaacaagggtttgttgattgtggatcaccaactggcgtacgacaaaaggaccagaccttatgtgaagaaaatggccaagagccaagactatttcttcaaggagttctcaagggccattactctcctctctgagaacaatcctctcactggtagcaagggtgagatcaggaagcaatgcaatcttgcaaacaagcttcactaaaatgcctcgccaaagagaaagccgagtgtggccgaataaaatgtttg

SEQ ID NO: 232757 - DNA, 410 bp, Gossypium hirsutum
ggatgatgcatggttgaatggagaattcataaccactgtccaacaacgtggtgctgcaatcatcaaagctaggaaactctcaagtgcactatctgctgctagtgctgcttgtgatcacattcgtgattgggtccttggaactcccgagggcacatgggtttccatgggggtttactctgatggttcatacaatgcaccagctggggtcatctattccttccctgtaacttgtaagaatggagaatggacaattgtccaagggctggcaattgatgaattctcgaggaagaagttggacttgaccggagtggagctgaccgaggagaaggaattggcatactcgtgcctctcatgaatgcattcatcatttccataatctgtttggaagaggagtggtttgccttaatagg

SEQ ID NO: 232758 - DNA, 414 bp, Gossypium hirsutum
ggggaaacaaaaaggaagcatcattttcttaatccaagaaaaaatatcccttttcgttttaatctttgttgtagctaatccatcatcgttcgcgtgagagaaaaatggctaagaatgtgggaattattgctatggatatttacttccctcctacctttgttcaacaggaagccttggaggctcatgatggcgtgagcaaaggaaaatacaccattggacttggacaagattgtttggccttctgtactgaggtcgaagatgttatctcaatgagtttgacagttgttacttcactccttgagaagtataagattgaccctaaacaaattggccgtcttgaagttggcagcgagactgtgatagacaagagcaagtccattaagactttcctaatgcaaatttttgagaaatgtg

SEQ ID NO: 232759 - DNA, 408 bp, Gossypium hirsutum
ctttctctgaaacttacaacttcaccatgaacaaaagcaagctccagctgcaactttgtgcagggatatttactttaagcatcctctccaatggtgcttatggtagtgacaaaatctttgacataactcacaaaatcacttctcagttgccaacttttggatcacagaagggtcttggtcaattcatttggcttctttccagcatcaaaaatgggtccacagtgaatgtgtcggagttcaaattgggaacccacactggcactcacgttgatgctcctagtcacttctttcagaagtactatgaacaaggatttgatgtttcaacccttagccttcaaactcttaatggtcctgttctagtagttgatgttcaaagaaataagaacattactgctgaagttatgaagt

SEQ ID NO: 232760 - DNA, 403 bp, Gossypium hirsutum
tgcccttttcttctcttcaactccacctgctaaaatgcaccaatttccggtgcttctcagcctcatcgcagtgtctgtactgctgatggtaactccagtcattggataccgtccatggcctcacttaaaacccaacagctccgatttaacgtttggaagctccaagaaattcgagggctcatcagagttcgtccaaatgagataccatatgggaccagttctcaccgccaacatcaccgtacacatagtttggtacggccgatggcaaaaatctcagaagaagatcatccgtgagttcatcaactcaatctccgccgttgatgccaagcgcccttctgttgccggctggtggaagaccgtacaactttatacggaccaaacgggcgccaacatttcccatact

SEQ ID NO: 232761 - DNA, 411 bp, Gossypium hirsutum
ctaaatcctcctttgttctaacgcaaatttgaatcatgacagacacctcctccgatctccaaaaatacggcgtgccgttttacggagccggatgggttccttacaaccacatcaaatccaagctcgcctcacaagaaaagattgaagaggataagaaagaagaaaaagatccaactccatccaacgatgacgagatcactacacccctaaactacgttgttctcgctggcggtggcggtgaaggccgtagtggcattcccaatgcaatcgttgtttcccacgttaatttcacctccaattctctctccgatcaacctgtggttaagcatgaaactggttctgatttgccttatcgaatgactgttcatccgcatggagatggcattatctgtgcatttcaacagagctgca

SEQ ID NO: 232762 - DNA, 410 bp, Gossypium hirsutum
caattatcttaaagcctgccatataatcatataaccaggctccgtcgtggtactcttcggccaccacaatgccgaaaatcgccttgggaacaagccaagaggctgctcagcctgactgcatcaaagcccttgtggtcgagtttatcaccactttcctcttcgtattcgttggagtaggagctgccatggccgccgatgagtcgggggcaaatgcgctggtgggattgtttgctgtggcggtggctcatgcccttgtcgtcggcgttatgatatcggccggacacatatcaggcggccatcttaacccagccgtcacgcttgggttgctattcggtggtcacatcacggtggtccgtgcgatcctctactggatcgatcagttgttggcatcttcagctgcttgtatactt

SEQ ID NO: 232763 - DNA, 408 bp, Gossypium hirsutum
gaaaattcattttctttggactttactctccgaaatccgagtcctaggaaagatgcgtgagattcttcatattcagggagggcagtgcggcaaccagatcggtgccaagttttgggaggtggtttgcgccgagcacggcatagattcaacgggacgctatcaaggagacaatgatttgcagctggagcgcgttaacgtttactacaatgaagcgagttgcgggaggctcgttccacgagccgtccttatggacttggagcctggcactatggatagtgttagatccgggccgtacgggcagattttcaggcctgacaacttcgttttcggccagtccggtgcagggaataactgggccaagggtcattacacggaaggggctgagttgatcgactcagtgctagatgt

SEQ ID NO: 232764 - DNA, 409 bp, Gossypium hirsutum
aaaaatgacaacggattggaaaactgttcgattgttccccattccctctgtcatttacttaatccataataatgtccagtttgctactcttatgtatctcgatacttcgacgtatcagattatgggcaatttgaagattgtcactactggaattctattcagatgagtttgttgcttgatttaggttatttcttaagaagaagctatctaatctgcagtggatggcgatcattctattggcggttggaacaaccatgagccaggtcaaaggttgtggagaggcttcatgtgattccctcttctcagcaccaattcaaggatacatgttaggaattttatctgcttgtctttccgcattggctggcgtgtatacggagttcttgatgaagcaaaacaatgatagcttata

SEQ ID NO: 232765 - DNA, 410 bp, Gossypium hirsutum
ggtcaatcgatctgttcacatcaactttactatatcttctcatttttggatcaatttctcctttcgcgctttgaagttgatttcttgaagatgggagcggaaaagaacttcattgacatggaggagggaactctggagatcgggatggagtatagaactgtatctggtgttgcgggaccattggtcattcttgacaaagttaagggtccaaagtatcaggagattgtcaatattcggttgggggatggaacaactcgacgtggtcaagtcctggaagttgatggggagaaagcagttgtgcaggtctttgaaggaacatctggaattgacaacaaatacacaactgtgcaatttacaggggaggtattgaaaactcctgtgtcgttggatatgctagggcgcatatttaa

SEQ ID NO: 232766 - DNA, 412 bp, Gossypium hirsutum
tttgtatttcatactcatttagcccctttcattagcatcgaaatcactccagttttctttatcactgaaaaatgtcttgctgtggtggaaactgtggctgcggttctggctgcaagtgcggcagtggctgtggaggatgcaagatgtacccagacctgaacgttgccgagatgaccacaactgagactctggttcttggtgtagcaccccagaaagcacactttgagggagctgagatggaattcggggctgagaacggctgcaagtgtggagacaactgcacctgcaacccttgcaattgtaaatgattagagaccaaagccaaagctccctggaagcagagacgcctttgtctttaagaaataatatgttttggtggttatgtggttttagaataaagtagccatggctt

SEQ ID NO: 232767 - DNA, 383 bp, Gossypium hirsutum
cctaaaccctgcctttcccttcctcaatcatccaatgacggagctgaaactctccgagagccgagacctgacccgaatcgaacgcattggggctcattcccacatacggggcctaggcctcgactcctctctggagccccgtgacgtctcggaaggaatggtgggccaagcacaagctcgtaaagccgccggtgtcatcctccaaatgatcaaagacggtaaaattgctggccgtgctatcttattagcgggacaacctggaactggcaaaactgccattgccatgggcatggccaaatctcttggccttgaaacccctttctctatgctctctggcagcgaaatcttctcccttgagatgtcgaaaaccgaagctttaatgc

SEQ ID NO: 232768 - DNA, 431 bp, Gossypium hirsutum
gaatcgcagtttcggcctcgacctacgcgtgcgctcaaactccaacacccccactcctactccatctgcacgaggcacgtgccctacggatgccctcaaattaggtgtatgtgccaatgtgcttaacctagtcaatgtcaccgttggttcacccccagtgatgccatgctgttcccttcatcaatggtcttggcgacctcgaagctgctgcatgcctttgcaccgctatcagagcaaacattttaggcatcaacctcaacatcccaatttaccttagcttgctcctcaacgtttgttcaaggaacgttcctactggcttccaatgctaaatcatcactgttccctacattttttatcgtctttcttatggtgtttgtgtttgattttagaaagttatgatttctattatttactgtgtgttttcatttgta

SEQ ID NO: 232769 - DNA, 393 bp, Gossypium hirsutum
ataccagatctgttacactctgaattatttaagcagcacgtcacaagggatctagagcaaggttagtgaccttgggttgagtgtagagatgaggaaaatcatgggtgccaaagttcttttcttctttgctttgctttccttttcagctgtctcggcatttgcacaggatgaggaagaccaaggtcttgttatgaacttctacaaggattcttgtcctcaggctgaagacattatcaaggagcaagttaagctactgtacaagcgacacaaaaacactgctttttcttggctgagaaacattttccatgactgtgctgtccagtcatgtgatgcttcactgctgctggactccacaagaaggagcttgtctgagaaggagacagacaggagctt

SEQ ID NO: 232770 - DNA, 414 bp, Gossypium hirsutum
acgctccccgctgcttttctttatgcattcgtgatggtgaaagcatatgcgcaagagcacatttacaaacattcgtgggagcgagtaacttctgcatcttggcgtaagttcgctgaccctgaaaacaagcgtaccttgtctcatattctagaagttgacacattgaatcgcaaactcgatcctctctccggtaagctttacactactcgggctcttaccatccatgctccagggccatggtttgttcgcaaaatcattggccaggacatctgccactgtgttgaatcaacagtggttgatgcccaatcaaagtcaatgcaacttgcaacccgtaatgtcagtcttcagaagtttatagaggtagaggagaagataaggtatgatcctcacccagataatccaacaggatggacc

SEQ ID NO: 232771 - DNA, 409 bp, Gossypium hirsutum
caaagcctgtgtctagccgttggataaaacacggtgcggtgacttgaggctcttgtaatcggcggtgagacttcaaacttcagccttcaacgacaagtcatcgtgttaagatgaagggactcttcaaatctaagccgcgaactcctgttgatatcgtgcggcaaacgcgcgatctcctcatgtatgttggccgttcctccgacagtcgtgaagccaagcgggaagagaagatggcggagttatttaaaaatataagggagttgaagtgtattctttacggtaatagtgaatctgagccggtttcagaagcttgtgcacaactgactcacgagttcttcagagagaacacgctacgactcttgatcacttgtcttcctaaattgaacttagaggcgaggaaagatgcaac

SEQ ID NO: 232772 - DNA, 405 bp, Gossypium hirsutum
cgacgttctcgataaagggatgtatttttatactccattgtagaaaatgcttgattgtggttataaagctcagtatatgagtgggcggagggagaaatttgtcaggttggatgacttggactctagattatcatcatcctctgatacaggattgaaaaaatgtgggtttaacattgatggattaggtcgctctggccatgcaaacaatacaacatcaagatcttttaagagagggatcagaaagggatctgaaggacttaagtcaattggtcgctcccttggatttggggtttcacgagttgtatttccagaggatcttaaagtttcagagaagaagatttctgatcctcaggataaattcctcttgctatgcaataaattatttttcatatcttgtattctggc

SEQ ID NO: 232773 - DNA, 402 bp, Gossypium hirsutum
gatgaatataggcaatgcaaatggggaggatgctattgaggcactccaagcacaagctcacatttggagacatgctttcaacttcgtaagcttcatgtctctaaaatgtgcacttgatttaggcatccttgatatcattcatgatcatggcaagcccatgactattaccgagctggttgctgcgctacagatgctcaaccctgctaaagcatgcgacatttataggctcatgcgcattctagttcactcggacttctttgcacgccaaaagctagacactgatgctcaagaagaaggatatgttcttaccaactcttctcgtattttgctcaagaataatcccttctgcgtaacgcctacattgaaggctacaatggatcctattataacaaagccttggag

SEQ ID NO: 232774 - DNA, 420 bp, Gossypium hirsutum
  unsure (1)..(420): unsure at all n locations
attntttctctgattaccttctcttttcttctatcattctagagtttaaacaatggaatagaattgtctaaccatgtgtattgctgctttcatttggcaagctcatccactctaccctcttctgcttttacaaaacagagatgaataccacaacaggcctacgaaggcacttgcatggtgggatgttgatggttgtgagatattaggaggaagagatgaagtagcaggagggacatggttggcttgttcaagacaaggcagagttgcttttctcaccaatgtcttggagcttcatccccgtcccgacgccaagacccgcggtgatcttccacttcttttcctggagagcacaaagagccccatggaatttgcggagcaactggccaccgatgctcatcagtacaatggatttaacctcat

SEQ ID NO: 232775 - DNA, 413 bp, Gossypium hirsutum
ctttacgataccgacgcgacggttttgacagcgttagcggattccggtataacgcgtggtcgtcgcacttcctaatgaactactttcatccaccgccgctgatcagtcgtttgccgacaactgggttgaagcaaacataacaaagttttacccaaagacaaaaatcgaagccatagctgtcggtaacgaactgtttgtcgatccggccaacacgaccaaataccttgtaccggcgatgaagaacatccacgcttcgttagttaaatccaagcttgattccgccattaaaatcttttctccaatagctttcaatgctttgaaaacctcgtacccttcatcggccggttcgtttaagccggaattgattgaaccggtgattaaacccatgttggatttttttgaaacaaaccggg

SEQ ID NO: 232776 - DNA, 413 bp, Gossypium hirsutum
aaaagagttcaaatcattttgaatttgttttgagattgaaaaaatgggtgatgaagatgtagtattgttggatttctggccaagtccttttgggatgagagtgaggattgctctggcggagaaagagataaaatacgagtacaaggaagaagatttgaggaacaagagtgatttgcttctgaagatgaaccctgttcataagaaaatccctgttctaatctataatggaaaacctgtttgtgagtccctcattcaggttcaatacattgatgagatttggccgcataaatctcccctactccctactgatccttaccaaagagccatcgctaggttttggggtgattttgttgacaacaagatatatgatctaggaaggaaattatggaccacaaaggggagaagacaagaag

SEQ ID NO: 232777 - DNA, 403 bp, Gossypium hirsutum
gtgtttttttgcctattgaaaaattttccagtgttgatttcagtagccatcgaaaccctaattcctctttcaccatgaactgttcaatctccggtgaggtgccggaggagcccgttgtctccacgaaatccggcttgctctacgagaaacgcttaatcgagcgtcatatttcggattatgggaagtgtccagttactggggaggcacttactatggacgacattgtcccggtcaaaaccggcaagattgtgaagcccagatctttaacagcagctagcattcctgggatgcttggaatgtttcagaatgaatgggatgctttaatgctatccaattttgcattggagcagcagcttcataccgccaggcaagagttaagtcatgcactctaccagcatgatgc

SEQ ID NO: 232778 - DNA, 421 bp, Gossypium hirsutum
catatctctcctttgtttccccttttctctctcttttttcaaccctaaccctacctcaccaaccaggattcaacatgaagggaggaaaatctaagtcagatactaagagtgccaagctatccgtgaaatccaaagctggaaagaaatcggggaaggctgccaaggatccaaacaagccaaagaggcctgctagtgccttcttcgttttcatggaggagttccgtgagcaatacaagaaggatcaccctaaaaacaaatccgttgccgctgtcggcaaagctggtggagataaatggaagagcttgtctgaagctgaaaaagcaccttatgtagccaaggcagaaaagcgaaaggtcgagtatgaaaagaacatgaaggcctacaataagagacaggctgagggtcctaaagacgaagatgt

SEQ ID NO: 232779 - DNA, 410 bp, Gossypium hirsutum
cactcattcactccttcacagttgaaaaaccctttaattttaaaaaggatattttggttatatactgagaaatccaacttcttttgtatctttatccttttggtacttcaattatcaaaagaaagaaaagcatcaacaacaacaaaaaaaagcccatacacttaagtgaaaaaccagacaagagagaaaacaagaaaaatgggtgttctggatcatgtttcagatctgtttgactgttctcacagttccaagcacaagaaacgtaagcagttgcagacggtggaaatcaaggtgaaaatggactgcgaaggatgcgaacggaaagtgaaaaaatcagtggaagggatgaaaggggtgacacaagtggacgtggagcggaaggccaacaagttgacggtcgtcggatatgt

SEQ ID NO: 232780 - DNA, 408 bp, Gossypium hirsutum
ccgatttagtttaagaaaaaatttccttagagcataaaagaaaagttacgaacatgccgggtgtcaatcctgaaattgagttcccagccattgagttccgtccatcggatttgaagcgaggaaccgaaggatggaaccggttgtgcaagagggttcaagaggcttgtgagactttcggttgtttcgaggtggtatatgaaagggtatcgacgaaactccgagaggatgcgtttgggttgatgaaagaaatggttgagctcccagtggagacgaaacagaagaataatagtcccatgccttaccatggttgggttggaccatgcaagcaggtttctgtgttgtatgaaggctttggagttggagatgcctccaactatgactctgttaaaagttttgctcaacttatgt

SEQ ID NO: 232781 - DNA, 378 bp, Gossypium hirsutum
gttcttccttttggtttctatttggatctcaattttggtcctcaaacagggtaggggctgattaaactttgggcctgaacaaaggggaccaccacttctttgggcggggtgcaccctttccaaagcttccaaaacagagttgggctcgaaaacctaacacgctttggcgtcggcgagcacaacaagaaagaaaatgcgatggtggagtttgtgagggttgtgaaaacaagcgagcaagttgtggcggggacacttcaccatttgacggtggaagctgtcgacacccgcaaaaaaaagctttatgaagccaaagtttgggttaaaccttgtgtgaattttaaagaattgcaggagtgtaaacatgctggtgatgctgat

SEQ ID NO: 232782 - DNA, 365 bp, Gossypium hirsutum
tctctctctcccatttccctccatggccgtctcttttaaaatgtgcgcgagtttcggtctatttgtgggtcttatgatgctgggtctggtaagctcagctaagttcgatgagcttttccaacctggttgggctatggatcatttcatctatgaaggagagctccttaagctcaaactcgacaactattcgggtgctggctttgcatcaaaaagcaagtatctatttggaaaagtgaccatgcagattaagcttgtagaaggcgactctgctgggactgtaactgcttattatatgtcatcggacggtccaaatcacaacgagttcgatttcgagtttctaggcaataccacaagtgaaccttacc

SEQ ID NO: 232783 - DNA, 413 bp, Gossypium hirsutum
  unsure (1)..(413): unsure at all n locations
gcgaacatggcgataggagttaaggccttgcacttgtcctttgtgcctcatgccctcgcgattgccggcgctgttatggtattggtttggtgcattcacttcaggggtggattagcttgggaatcttctaacaaaaatctcatctttaatctccatcctgtattgatgttgattggcttcattatcttaggaggtgaagccattatgagctacaagtcattgccactgaagaaggaagttaagaaagtcatacatcttgtgctccatgccactgctctgattctaggcattattggaatctatacggcattcaagaatcataatgagagttcaatacctaatctctacagcgtgcattcttggcttgggattggaatcattaccctntatggcattcaatggatatatgggtt

SEQ ID NO: 232784 - DNA, 405 bp, Gossypium hirsutum
cggacgcgtgggtaccgctaccagtgaaagccgcactattcagtcttcggtcgccgctccccctttctatctattcaatctgaggtatgtcgacggccgtggcagccaccgagaccagcaaagacccaacccaacctacctccgaagtcaagcttttcaatcgctggtcttttgaggatgttcaggttactgatatctctttgagtgactacattggtgtccaagcttcgaagcatgcaacctatgtgccgcacactgctggaaggtactcagtgaagcgtttccggaaggctcaatgcccaattgttgagaggcttacgaactcactgatgatgcacggccgaaacaatgggaagaaacttatggcagttaggattgtgaagcatgccatggaaattatttatc

SEQ ID NO: 232785 - DNA, 419 bp, Gossypium hirsutum
attttcttaagaaagaacaactttcagcggaaacagccgcttcctccaacatgggtagagggttgaagaaacacttgaagaggctcaatgcccccaggcattggatgctcgacaagcttggtggtgcattcgcgcccaagccatcgtctggaccccacaagtcgagggaatgtttgccacttattcttattctgcgaaacagactgaagtatgctttgacatacagagaagtgattgctattcttatgcaaaggcatgttatggtagatgggaaggttaggactgataagacctaccctgcaggttttatggatgttgtgtcaattcccaagacaaatgaggacttccgtctcctttatgacactaaaggtcgtttccgccttcatgccatcactggtgatgagactaagtttaagctc

SEQ ID NO: 232786 - DNA, 406 bp, Gossypium hirsutum
tagcaatgatgtggcttgggtcccatgctccggctgcaacgggtgctcagccaccactttctcacccaacacttcttccacctatggttcgttagattgcggtttgccccaatgcgcccaggtccgtgggctgtcgtgcccggctacggggtctgcggcttgctcttttaaccaatcctacggtggagattcattattttcggccaacttggttcgagattccttaggattagccaatgacattgtcccagattttgctttcggatgtataaacgtcatctctggtggatcagtaccaccgcaaggactgttgggtttgggtcggggacccatgtcacttatttcacaatccggggccctctactctggtgttttctcatattgtctacccagtttcaagtcctac

SEQ ID NO: 232787 - DNA, 404 bp, Gossypium hirsutum
gttgttttccccttattttcctaacagagccttctcaaaaacgacattcaacagtggcgaattcaatggcgaagtctttccttcaagttgcagctactgaagaggttgtttctcctctcagagttgtccagatcgaaggcctggtgatattgaaaataatcaagcactgcaaggaattttcacctgctctggttaccggccaacttcttggattagatgttggcattgttcttgaagttactaactgtttccctttcccgatccgcgaggaagatgaggagattgaagctgatggagctaattatcagcttgagatgatgagatgtctaaaggaggttaatgttgataacaacacttgtggatggtaccaatcaacgattttgggttcatatcaaacaagtgag

SEQ ID NO: 232788 - DNA, 345 bp, Gossypium hirsutum
tctaggtcttctctccccaattacaatcgaaatcagggtttttccctatccaaattctgatttaacccagtatgcctcaacgtcactcgaagaacaacaacgatttagccttcttcacgtacgatgagaagaggaagctaggttacggtactcaaaaggagagattaggaaaagattccattaagcctttcgatgcttgctgcctttgcttgaaacctttcatcgatcccatgtcttgccaaaaaggtcatgttttttgcaaagagtgcattctcgaatgccttttagcccagaaaaaggatatccaaaggaaacttgctgctcatgctgctcagcagaaacaag

SEQ ID NO: 232789 - DNA, 406 bp, Gossypium hirsutum
cactaatcatgttccttctgaagacttggcgggcatctgcatttggagtttatggttacttgaatttcaccagaaatggcttcttgggacactccaagaaattcaaacccgaagatatggaaatacgaatagaggggaagaactgcgtggtcacaggagcaaatgctggcattggttttgctactgctgaggctcttgcatcatgtggagcaactgtctatatggtgtgtcgtaacaaggagaagggagaaaccgctctttctaaaattcagtcttcaactggcaatccaaatgttcatttggaagtttgtgatctttcgtccatcagcgagatcaagtcatttgcatccaggttctcttcaaaggatgttccggttcatgttcttgtcaacaatgctggactgat

SEQ ID NO: 232790 - DNA, 419 bp, Gossypium hirsutum
gaaccccaataacatgttctcaaagctccaccaccaccagcaccaccgtcatcaacatcaacatcaaccccaacaccaaactcaccctttctctcatcacttccaactctctcgtgattctcagactcccgactctgatgacactacccacacccctcccaaagatcttaccaccaaccacagcccttctctccccagtggtggtagcaaaggcggtgcttctcgtggtggtgccaacagtggcgacggtgctagcatcgaaatcgttcgtagacccagaggtcgtcctccgggctcgaagaataagccgaagccgcccgtcatcatcactcacgagcccgaccctgcgatgagtccttacattctcgaaatccccggagggaacgacatcgtcgaagctatctgccggttctctcgtc

SEQ ID NO: 232791 - DNA, 407 bp, Gossypium hirsutum
catcttcttcctccatctccgctctttccctgttttacaagcagcaaagctacacttcaacaatggaagatactaaaatggaggactcatcaaatcaaagggaaatgtctcacgaagaaatgcctgaaacacacagcaagggtggcctcattaccatgcctttcataatagcgaatgaatcatttgagaaggtggcgagctatgggctggttcccaacatgatactgtacctgattaaagattatcacatgggagttgctaaaggcaccaatattctctttttctggcaagctgctaccaattttacccccatattgggtgctttcgtcgctgattcatatctgggtcgattcctaaccatcggcttgggctccatttgcagtctcttggggatgatacttttatgg

SEQ ID NO: 232792 - DNA, 412 bp, Gossypium hirsutum
gagcaaagcttcctttatatgctttcaagaaggagagtgaaaaagatgcatttgaaactgaaaacaaagagcctccagttgcttttcttgattctctcgttcttggggagtgggaggatcgcatgcaaagagggctctttcgatatgatgtcactgcctgtgaaaccaaggtggttcctggtgaatatggctttattgcccagctgaacgagggccgccaccttaagaagaggccaactgagttccgtgtagataaggttctccagcccttcgatgggaacaaattcaacttcaccaaagtcggacaagaagaggtgctcttccagtttgaagcaagtgaagatggcgaagttcagttcttcccaaatgctcccattgatgttgagaatcacccaagtgttgttgccataaa

SEQ ID NO: 232793 - DNA, 387 bp, Gossypium hirsutum
ggaactcctgatcccaatgcagaagtgattgctttatcaccaaagacccttttggccacaaaccgattcgtgtgtgaaatatgcaacaaagggttccaaagagaccaaaaccttcaactccatcgacgaggccataacctaccatggaagctaaagcaaagaaccagcaccgagatccgtaaaagggtttacgtctgccctgaaccatcatgcgtccaccataacccagctcgagccctaggtgatctcaccgggatcaagaaacatttttgtcgtaaacatggtgagaagaaatggaaatgcgataaatgctccaagaaatacgctgttcaatctgattggaaagctcattcaaaaacctgtggcacaaaagaatataaatgtgac

SEQ ID NO: 232794 - DNA, 389 bp, Gossypium hirsutum
ctttattgtcagggatttttaccaccagatgaggtgcacatatttggctatgcaaggactaagatttcggatgatgatttaaggaaccgtattcgtgggtatcttgtcaatgatagaagtgcttcaccctcagaagacgtgtcaaagttcttacagctgattcaatatgtaagtgggtcatatgacggagctcagggctttcagctattagacaaggaaatcacaaagcatgaaatctcaaaaagtagccaagaagggtcatctcggagactcttttatcttgcacttccaccatcagtgtatccatctgtttgtaggatgatcaggaaatattgcatgaataaatctgatcttggcggctggactcggatagttgttgagaaaccatt

SEQ ID NO: 232795 - DNA, 408 bp, Gossypium hirsutum
  unsure (1)..(408): unsure at all n locations
aaaaaaaatggcttcttggaattcaattccactggaaatcacgtacgacacttttggttggctagcctttttttcgtggtccattagtttctaccctcaagtcatcttaaattttcgaagaaaaagcgttgttgggttgaactttgatttcgtgctgctgaatttgacaaaacactcctcttatatgatctacaacgtttgcctttacttcagccctgttattcagaggcaatactttgagaaatatggctctggagagatgatcccagtagctgctaatgatgtcgcgttctcaatacatgctgttntgttgacggctattactttgtttcaaattgtgatttttgatcgtgggacgcaaaaggtttataagatttctgtgggaatcatcattgctgtgtggttaat

SEQ ID NO: 232796 - DNA, 412 bp, Gossypium hirsutum
cgtggctttcctatcttcatttcatcgcactctccgacgaaagaaacgagagaaaaatgaccaagtgttacccaaccgttagcgaggagtaccaaaacgccgttcaaaaggctaagaggaagctaagaggtctcatcgctgagaagaactgtgctccactcatgctccgtctagcgtggcactcagctggaacttttgatgtcaagaccaagaccggaggtccattcggaaccatgaagcaacctgctgagctcgctcatgctgctaacaacggtctcgatattgcagtcaggcttctcgagccgatcaaggagcagttccctatcctttcatacgctgacttctatcagcttgctggtgttgttgctgttgagatcaccggtgggcctgaagttcctttccatcctggaag

SEQ ID NO: 232797 - DNA, 416 bp, Gossypium hirsutum
tggcgatggattatttccattcagtcacagcaattccaactgttggggtgattggctttccactactggggcttttctcttttctatggatctcaagaagaaacaaaaactcgaagaaaacagcaccagaagctggtggagcatggcctattattggtcatctgcgcctcttaggagggccacaaccacctcacataagcttggctaacatggctgacaaatatggaagaatgttcgctatcaagttgggtgtgcatagagctttggtggtgagcgattgggagattgctaaagaatgtctcaccacaaatgataaagcgtttgcctctcgtccaaaacttgcaagctcggaacttttggcttacaacagagccatgtttggctttgcaccgtatggaccttattggcgtcatatg

SEQ ID NO: 232798 - DNA, 408 bp, Gossypium hirsutum
gcttgagcgtatggccttcaagagcacgacaaaccgcagccatttgcggattgttcgggaagtagaggcaattggtggcaatgtacaagctgcagtttctcgggagcagattggatatacctttgatgctttgaagacttatgttcctgaaatggtagagctgcttattgactgtgtgagaaacccagctttcttggattgggaggtgaatgaacagcttcaaaaaatgaaagaggaaattgctgaagctgcaaagaatcctcagggcttgctcttagaggccattcactcagctggttattttggtgctttggcgaattctcttttagcccctgagtctgctgtaaatacattgaatggtacagttttggaggattttatcctggaaaactttactgcttctcggat

SEQ ID NO: 232799 - DNA, 405 bp, Gossypium hirsutum
ggttaagagcaaaagacagggcagagtaagctaagctttgatcatcaatggcggagaagagtttcaagtacgtgatccttggcggtggtgtagctgctggatatgcagcgagagagtttgccaagcagggagtgcagcctggtgagctagcaattatttccaaggaggcggtggctccatatgaacgacctgccctgagcaaagcatatctcttccctgagggagctgctagacttcctggtttccatgtctgtgttggaagtggcggagagagattgcttcctgagtggtacaaggaaaaaggaattgaattgatccttagcacagaaatagtgaaagcagatcttcctgccaatactctagtaagtgccgctggagaaacattcaaatatcaaatcttgatca

SEQ ID NO: 232800 - DNA, 359 bp, Gossypium hirsutum
aaagggttcatggggaagacaaggtatggtgctttgggtggtggagctaactctgtgaatcatggctacaccaagggagatgggcttggtgctgaaattgttggtacctttgttcttgtttacactgtgttctcagccactgatgccaagcgcagtgccagagactctcacgtccctattttggcaccattgccaattgggttcgcagtgttcttggtacacttagccaccatcccaatcacaggaactggtattaacccagctcgtagccttggtgcggccatcattttcaacaaggacaagggatgggatgaccattggattttctgggtgggtccattcattggtgcaacactagc

SEQ ID NO: 232801 - DNA, 420 bp, Gossypium hirsutum
ggtggtggaaatccttcttcgcttctggttcagtcgccatctacatcttcttatgactccgtaaactacctcatattcgatctcaagagtttgagtggaccggtctctgcaactctctacttggggtattctctcttcatggtcctcgcaatcatgttggccactggcacgatcgggttcctttcatctttctggttcgtgcattacttgttctcttccgtaaagctggattgaagaggtaaatcggtaacccgagaggcaggggaggaaagaattggaccttttacattacttgatcatatattacatgtgttatattgagctcatttactctgttaggggaactttagtaaaatgcaataacaataatatggcgcagtttcatttaaattctttattaagtggtactatgatgcatgg

SEQ ID NO: 232802 - DNA, 408 bp, Gossypium hirsutum
acttcagctgccattttcttaccctttgtactgttcgaattcaagacataataccccatgaattttaaagaaacccaacaagcgacaacatggaccgatgaagaagacaaacaagcccagcaatatgccatgcaactggttagctcatcggtggtgcccatggtgttgaaagcagctattgagcttggtgtgtttgagattatacaaagagctggtcctagtgcgcttctgtcaccttcccagattgcatcccaacttccatctcagactaatccaaaagcccctttggtccttgatcgaatcctccgccttctagctacccactccatcctcacttactctcttgtaacaaaccaagcagatggccaggtttacaggctctatggtttggcaactgttgccaaatac

SEQ ID NO: 232803 - DNA, 409 bp, Gossypium hirsutum
cttctctccttccttctccactccctcggtcaattcttcctccagagcccacagggggggaaccaaccctaatctaggctttttggcctcagtttcgagatccttgaggtctctcaaagcaaccaggctgactactgataatgcttgtggctcagctatggcctctcgtatggtctccgttcctgccgtccagacacacatatctctcgattttgagacctttgtcttcaagaaggagaaagtctccctcgctggtcaggacgagtacattgtgagaggaggaagagatttgtttaagttgctgcctgacgctttcaaagggattaagcagattggtgttattggttggggttcgcagggacccgctcaagctcaaaatgtaagggattctcttgctgatgcaaaatct

SEQ ID NO: 232804 - DNA, 387 bp, Gossypium hirsutum
  unsure (1)..(387): unsure at all n locations
cggacgcgtgggttcagattctgggttatggccatagctctgccatctacagtgtggcacgcaacaaagtttcagccgcaacgtccgcttcttcagcgtcggcgccccttattagtccaatcctttaggcggagcgacttcgacaccttcactcgccgcatggcttctggtgaggccttgaaggaggcctggcgaaccgccaacgacggcttcgagcaattcgtcttcgaagctaaaaagaccgctgaacgcttagaccgccagtattccgtttcccgccggctctcctccgccgcccaatccgctgcggaccgtgctcgtgagattgaccgggagttcgagattggactccgttggcggactttntctatggattttagtagaaat

SEQ ID NO: 232805 - DNA, 413 bp, Gossypium hirsutum
  unsure (1)..(413): unsure at all n locations
caaaaatgatgatcggagaatcaatccaaccaaatcccaccatcaaaatgcccgtgaggggacccattcaacgatccgacggctagctttcactccgttaactttaactacaacaatgcagtcagtagtccttgccccgtcgattacctcgggtctctccaccgttacctaccgtcaaacgactacgagtccgattcgctgagtgatgattcggacttacctgttgatgcattctcatgcgaccatttccggatgtacgagttcaaggtgaggaggtgtgctcgtggaaggtcacatgactggactgagtgtccgtacgctcaccctggtgagaaggcccgaagaagggacccgagaaagttccattactctggaactgcttgccccgattntcgcaagggaagctgtaagaa

SEQ ID NO: 232806 - DNA, 402 bp, Gossypium hirsutum
gaaaaacgctgattaaggaaggatttctagggttttttttttccgtatgggtaagcgatggcaatggctgctctcagacgcgaagggaggcgtttcgcccctctgatctctccccgtccaatttctgctgtccgatcctctcctatcgttcccactcacgaatatgagggtccgattggtgttcgttatatttcaactcaagtcgttagaaaccggatgaagagtgttaagaatattcagaaaattacaaaggctatgaagatggttgctgcctcaaagttgagagcagttcaaactaaagctgagaattcccgaggcctctggcagccatttactgcacttcttggtgatcttcccagtgttgatgtcaagaagaacgttgttgtaaccatctcttctgac

SEQ ID NO: 232807 - DNA, 374 bp, Gossypium hirsutum
ggctgccttttgtccaattaactccatttctcctcccccaataatccctctctcatttcccgatctgctttagctttagggttctccacaatattcaattttcccttttttttaaagaaagaaagatatactttgttttctaattttcttacatttattcgtcgacgaacaagcgatttatctgtgctttgattctgatctctctagggtgttaattcatcgatcatgacgattccagattcgggatgcgtgatggagaacggcgcgagttgcttgccgtgcacgcccgaagaagagaaaaagatcgttactgatttaagaaacgaatccgaacgtaatttgaaagaaagcaacttgtatttcgttatttctag

SEQ ID NO: 232808 - DNA, 398 bp, Gossypium hirsutum
gtagccgccgcctgcgtctctctcttcatctctctgaaccaaaaagtctgtagcttttcgcttcgagagagaccatgttggtttaccaggatctcatctccggtgacgagcttctttctgactcattcccctacaaggaaatcgagaatgggatgctgtgggaagttgagggaaagtgggttgtgcaaggagctgtcgatgttgacattggtgccaatccttcagccgaaggtgctgatgaggatgaaggtgttgatgaccaagctgtgaaggttgttgacattgttgacactttcaggcttcaggagcaaccccctttcgacaagaagcagtttgtcgtgttcatcaagaagttcatcaagaacttgacaccaaaactggatgcggaaaagcaagag

SEQ ID NO: 232809 - DNA, 409 bp, Gossypium hirsutum
cttcgctgcaaacttggatcctactgctgcacagattggtgtttgctatgggatgcttggcaataatctcccaaattcatgggaagtcattcaactttacaaatcaaacaacatccggcgattgaggctctacgatccaaatcaacaagcattacaagctcttagaggctccaacattgaagtaatgttaggtgttccaaatgatcaacttcaaaacctcgctgacccttccaaagcacgatcatgggttcaatcaaatgttgtagcttactggccgagtgttcggttccgatacattgctgtcgggaatgaagtccctcattcatcttggttagctcaattcgttttgcccgccttagtgaatgtattcaacgcggttcgatcggccggtttggagagtcaaatcaag

SEQ ID NO: 232810 - DNA, 388 bp, Gossypium hirsutum
caccgatccaatcaatcgcttcaactatctcaccaaacacatatccaatggctgcgatcgctgtcggcgacgtgttaccggacggtactctctcctacttcgacgccgatgataagctccagcaggtgtccgtacattccctggctgccggtaaaaaggttatcatctttggcgttcccggtgcctttacccctacttgcagcttgaagcatgttcctggattcatcgagaaagcaggggagctgaaatccaagggctttgatgaaattatttgcattagcgtgaatgatccctttgcgatgaaggcatggaccaaaacttaccctgagaacaaagatgtcaagtttctagctgatggttcagcaacatacacccatgcccttggtct

SEQ ID NO: 232811 - DNA, 397 bp, Gossypium hirsutum
gtacctcagtttcttcttttactgcttctctctttgtcccttcaaaaagttcatgttttgccaatcataagcgcagattcatccaatgttctcttggtggggctgtggtagaaccaaaagctttagcagaacccctgttgctcaatgctgttcgagggcaagatgttgaaagaccaccagtttggcttatgaggcaagcagggaggtacatgaagagctatcaaataatatgtgaaaaatatccttcctttcgtgaaagatcggaaaatgttggtcttgtcgttgagatttccctgcagccatggaatgttttcaagccagatggggtcattttattctccgatattctcactcctctctcagggatgaacatacctttcgacattatcaagggtaa

SEQ ID NO: 232812 - DNA, 403 bp, Gossypium hirsutum
gtggtcggacatattactgtgttacaaagggagtaccatatccctctattcctagaaaaaccaaacctaggcgtgttgatttatactattcaagttggtgcattcgtgcagctgaatcaaggaaaggggatggccagctgactgcgtgcgaggtattactttttcaccatgaaaatatgggtataccatgggaaattgcaaagcttggggtcaagctaggcatgtggggaactgtcaggaagattgaccctggcttacgtgcatatcaaaccgaaagagcatcgggagcgcccctttctcattcagcttccatggctcaaataaacaccaaagtaactcaagactatctgacatccttggaaagcaatagtaatgattcatcagagcttgaaacacacaattc

SEQ ID NO: 232813 - DNA, 407 bp, Gossypium hirsutum
cggacgcgtgggtctgaacctaaaagtctttagcttttcgcttcgagagagacgatgtgggtttaccaggatctcatctccggtgacgagcttctttctgactcattcccctacaaggaaatcgagaatgggatgctgtgggaagttgagggaaagtgggttgtgcaaggagctattgatgttgacattggtgccaatccttcagccgaagatgctgatgaggatgaaggtgttgatgaccaatctgtgaaggttgttgacattgttgacactttcaggcttcaggagcaaccccctttcgacaagaagcagtttgtcgtgttcatgaagaagttcatcaagaacttgacaccgaaactggatgcggaaaagcaagagtccttcaagaaaaacattgagggagcaac

SEQ ID NO: 232814 - DNA, 401 bp, Gossypium hirsutum
ctgccatcaatttgctttgaagatcatgttggctatttttcacaaggcatttgctaatccaccagaggagctgaatagtccagcttctcataaatctactaagaagcctaaacagcctgaagaaaccctaaatgatttcctatctcatcaccctcacaacactttctccatgagctttggcaacgctgctgttttggcttatgtccgccatgaacgtgctgcttcagttcatcagaggttgttttgtgggtttgatgacatatactgccttttcttagggagcttgaacaatctatttatgctgaatagacagtatggtctttccaaagggagcaatgaggcgatgtttgtgattgaagcatataggacactaagggataggggtccataccctgctgatc

SEQ ID NO: 232815 - DNA, 403 bp, Gossypium hirsutum
tgatttgagcagcagcagctaaagcagatcccaaaatgaagaaaaagggcgcatgtacaacttctggttgccagaagaagctcgagatcgatgacgaccagaagcttcgggcatttttcgacaagcggatctcgcaggaggttgctggagatgctttaggcgaggaattcaagggctatgttttcaagatcatgggaggttgcgacaagcaaggattcccgatgaagcagggtgttctgactcctggtcgtgttcggctcttgcttcatagaggtaccccatgcttccgtggatatggaagacgtaatggtgagcgtagaatgaagtctgttcgtggatgcattgatagccaagacctttctgttttgaacttggttattgagaaaaacggtgagaatgattt

SEQ ID NO: 232816 - DNA, 367 bp, Gossypium hirsutum
ggtaagtccagggtatgcgttacaggagccgctggtttcattgcctctgactggtcaagaagctactggagaaaggatataccgtccacgctaccctcagaaatttgggcgatgcttcaaaggttcaactccttaagagctttcctcatgcggacacagaattagttttgtttgaagctgatataaacaggccaaatgagtttgagcaagctattcatggctgtacgttcgttttccatgttgcgactcccttgcaaccctctgatgcttctcagtttaaaaacacgagtgaggctgcagtttctgcaataaaaagtattgcaaagtgttgtataaaatcaggtagtgtgaaacgattaatatacac

SEQ ID NO: 232817 - DNA, 410 bp, Gossypium hirsutum
attttctcctttttatctttaaaacacgcacccaaaaaataaaaccctttgaaaaccaaagaaggaagaagaagatgtcgtggcaagcttacgtagatgatcacttgatgtgtgaaatcgaaggaaaccatctctctgccgccgctatcatcgcccacgacggcagcgtttgggcccaaagcgccaatttccctcagttcaagcccgaagaaattaatgccatcatgaatgactttaatgaaccgggtacgctcgctcccaccgggttgcacctcggtggcacgaaatacatggtgatccaaggcgaaccgggagctgttatccgagggaagaagggacccggaggtgttactgttaagaagaccaatatggccttgatcatcggaatctatgatgaaccaatgacaccc

SEQ ID NO: 232818 - DNA, 403 bp, Gossypium hirsutum
gcattttgttttcccttttttttccccacacctttttttaaacccatttgctaaaaatgcactgggttcttccagtgttgcttgccgttatcggagttactgcactgctcgttgtaactccggtaagtgggtaccgtccatggccgtacttaaaacccaacagctccgacttaatgttcggaggctctaagaaatttgagggctcatcggagtttatccatatgagatatcatatgggtccagtccttactgctaatatcaccatccacccaatctggtacggccggtggcagaaatcccagaagaaaatcatccgtgagttcatcaactcgatctccgccgttgattccaaacacccttcggtggctgggtggtggaagaccgtacagctttacaccgacca

SEQ ID NO: 232819 - DNA, 406 bp, Gossypium hirsutum
  unsure (1)..(406): unsure at all n locations
gttccttccttcgccgtctactgcacttgtgacatcgatttcaagtgaatcagaatgggtaaggaaaagagtcacattaacattgtggtcattggccacgtcgattccggaaaatcgaccaccactggccacctgatctacaagcttggtggtattgacaagcgtgtgattgaaaggtttgagaaagaagctgcggagatgaacaagaggtcattcaagtatgcttgggtgcttgacaagctcaaggctgaacgtgagcgtggtatcaccattgatattgccttgtggaaatttgagacgaccaaatactactgcactgtgattgatgcgcctggacaccgtgactntatcaagaacatgattactggtacctcgcaggctgattgtgctgttttgattattgatt

SEQ ID NO: 232820 - DNA, 408 bp, Gossypium hirsutum
aaaaattgagtgtcagtttgaaagtgttcttcagatatggctatgaaacaagttgctaattctgctatcaaagcaattgccaattctgggtcatcctctcttcttaccagacaactccatgcttctccagggagcaaaaagattgttggggtgttttacaaggccaacgagtactttacgaagaatcccaactttgttggttgtgtggagggagccttggggttgcgcccatggctggaatcacaggggcatcagtatattgttaccgacgacaaagaaggaccggactgcgaacttgaaaagcatatccctgatctccatgtgctcatatcgaccccattccacccggcttacgttacggctgagaggatcaagaaagccaaaaacttgcaactgcttctcacagca

SEQ ID NO: 232821 - DNA, 404 bp, Gossypium hirsutum
  unsure (1)..(404): unsure at all n locations
ctcttttgaagcctaacatggtgacccctggttcggactccccgaaggttgccccagatgttattgctgagtatactgtccgtgccttgcagcgaactgtccctgctgcagtcccagctattgtattcttgtctggtgggcaaagtgaggaggaggctaccctaaaccttaatgccatgaacaagctccagaccaagaaaccatggtcactctcattctcattcggacgcgcccttcagcagagcactctcaagacctgggcaggaaaagaggagaatgtgaagaaggcacaagatgctttgctcgttaggtgcaaggctaactcagaagccactttgggtacatacaagggtgatgcanaactttgtgagggtgccgcaaagagccttcatgtcaaggactac

SEQ ID NO: 232822 - DNA, 411 bp, Gossypium hirsutum
atcggatacaagagtcaggttgaccctgataagggcagtgacgaatgcggtggtgttggcattcttggcattgcttgggcttttggtgggatgatctttatccttgtttactgcactgctggtatctctggaggacacatcaacccagcagtgacctttgggcttttcttggctaggaaggtgtccttagttcgagccatattttatatggctgctcaatgtttgggagccatatgtggatgtgggctagtgaaggcattccaaaagtcatattacaacaagtatggaggattggattaagttttatcaatgtggtcaagaggctttttcagaccactcaatttgtaaattataatggaggatgtcatgcttttatgtatgtggcacttattttcaatgtgccccatcatt

SEQ ID NO: 232823 - DNA, 397 bp, Gossypium hirsutum
ctccaaagctagaatggtttcaaaatcacatgatgtgtactcctcttgggatgatgaattcaaaaaactggtgcaaagcttccccaaagagaaaggctgggcaggatccaatctttatttctatcaaggtttttggtgcccctctcttgttctaaaagcttttatttctttccagaaacattttcaagcatttaattctgatatcatcgttgctacttttccaaaatgtggtactacttggctcaaggccttgactttctccactttgtaccgcaatcagttcccatgggatgaaaatccattgctcacctttggccctcaccaacttgttcgtttcttcgagtatgatctttacttgaacaacccttttcctgatcttcgaaatgtttgtgcttat

SEQ ID NO: 232824 - DNA, 415 bp, Gossypium hirsutum
ggcttctaatcccaaggtcttcttcgacatgaccgtcggtggccaaccagctggtcggattgtgatggagctctttgccgattgcactccccggactgctgagaacttccgtgctctctgcaccggcgagaaaggggtaggccgtagcggcaaacctctccactacaaaggctcatccttccaccgggtgatccccaatttcatgtgtcaaggaggcgactttaccgccggaaacggtaccggaggtgaatccatctatggagccaagttcgcggacgagaacttcatcaagaagcacacgggacctggcatcctttccatggcgaacgctggacccggaacaaacggatctcaattcttcatctgcacgaccaagacggagtggctggacggaaagcacgtggtgttcggacag

SEQ ID NO: 232825 - DNA, 407 bp, Gossypium hirsutum
gcatatttcaatcgagaaatgtccaccatgtttttgagatctctgctattgcctctcatctgtgtcttcgccctggccacacggtcacacgggctgagcccagggcaacagcgaccttcctctttagacgctgcatccaacacactccaataccatggaggccctctcttgaccaagccgaatggcattaacgtttacctcatatggtatggagggttctctctgaaagacagaaactccataactgatttcttcgcttccttcgcgagccctggtcgtcgccaaggaccctcggtttcgacatggtggagaacgatcagtacatacaaggataaaactgggaaacctgtttccgacactgttagacttgtcaaacaagttggtgatgtatattcttcggggaaaac

SEQ ID NO: 232826 - DNA, 375 bp, Gossypium hirsutum
gagtggttggggacaagaagattatgatcgggattaacggatttggaagagtcggacgtttagttgctagagttgctcttcacaggaacgatgttgaacttgatgcagctaacgatcccttcattcccatcgattacatgacatacatgttgaaatacgacagcaatcacgggcaatggaagcactatgatcttaaagtaaaagactgtaaaactctgctgtttgaaaaaaaacccgtcactgatttcggaatcaggaaccatgaggagatttcatgggctgaacacggagctgctttcgatgttgagtcaactggagtgtgcactgacaaagacaaggctgctgctcacttgaagggtggtgctaactaaagtg

SEQ ID NO: 232827 - DNA, 405 bp, Gossypium hirsutum
ttgcattaagtctcaaagatatcactgcaagaaaaaaaaaaaaccagacatggcttccaacactgttgcatccgctgctcttcttcttaccttgaacttgttgttcttcactttggttagctctacctacgtgccttgcccaccaccaccaaagagccacaagcctacccacaaaagcccaccctcggcacctgaacagccaggcacttgccccagagatgcactgaaactaggcgtttgtgctgatttgttgggctcagtgcgcgttgttgttggaccgtcgaggaccaaatgctgctctctcatttcgggtttggctgatctcgatgctgctgtttgcctttgcactgctattaaagctaatgtgttgggggttaacctaaacgttcctgtttcattgtcttt

SEQ ID NO: 232828 - DNA, 386 bp, Gossypium hirsutum
ctaaaccagttcataaacagataaaccctagccttaaaatccctaaaattgctacatcgtttcgtttctagttctttttcgcaatggatggcgaagacgacgccccgaaatcattgatggaggagatgtacgcgaacggcatcgagggcgttgacgatgcgccgtcatcctcaacttcgacaacgatccggaagaaccggcccatcattagcggcgagcagctagacatcgaggcctacgctgcgctttactcgggccgtaccaagatcgtgcggctcatattcttagctgaccactgcgacaattcaaggatgcaattggaggccctaaggatggcttacgatgagctcaagaagggggagaacactcagctattccgtgaagtg

SEQ ID NO: 232829 - DNA, 394 bp, Gossypium hirsutum
aaagagcaggaaaacaagaaaagcagagccgcatcactttttgctagctaagctgctgtgggagttattgttcttcagaacagcttctgcagtagctaataataacgttatatattatataaattttatacatcctttttaccctacgactccatatataagcaagtaaaaataaatatggctcgctctgtttcttcctttaagttccttggtgcttctgtttttgatgctctttatgtctccatatcaaggagaggttactcaggtgcaccgccggcggcagtgacggctagctttggtaggcctggagcgatggggaaagtggaacgaagatatgcgatgaaagagtcgtcgtcgtcggagacaagggcttattcttcagcttgggcgcctg

SEQ ID NO: 232830 - DNA, 387 bp, Gossypium hirsutum
gcaactatatcgtccgggtaaagattggcactccgggtcagctcatgttcatggtattggacactagcaatgatgtggcttgggtcccatgctccggctgcaacgggtgctcagccaccactttctcacccaacacttattccacctatggttcgttagattgcggtttgccccaatgcgcccaggtccgtgggctgtcgtgcccggctacggggtctgcggcttgctcttttaaccaatcctacggtggagattcatcattttcggccaacttggttcgagattccttaagattagccaatgacattgtcccagattttgctttcggatgtataaacgtcatctctggtggatcagtaccaccgcaaggactgttgggtttgggtc

SEQ ID NO: 232831 - DNA, 406 bp, Gossypium hirsutum
tgatgatcggagaaccaacacgaccaaatcccaccgttaaaatcccggcgtgggacccactcaatgatccgacgtctaattattcttccgttaattataactgcaatgcgccgtccagtccttgtcccgtcgattacctctcatcgctccaccgttacctcccgtcaaacgatttcgagtcgtccgactctctgagtgaggattcggattttcctgttgacgcgttctcgtgtgaccatttccgtatgtatgagttcaaagtgaggaggtgtgctcgtggcaggtcacatgactggactgagtgtccgtacgctcaccccggggagaaagcccggaggagagacccgaggaagtttcattactcgggtacagcttgccctgatttccgtaaaggaatctgcaaaaa

SEQ ID NO: 232832 - DNA, 392 bp, Gossypium hirsutum
acggagatgggtgtgggacgctaaccggaacgatccggttcatgaaaatgccaccctcaaatttggcgaggacgggaatttcgtgttggcggatgcggatggtcgtgttgtgtggcaaaccaatacggctaacaaaggtgtcactgggattaggttactaccaaatggtaacttggtactgtttgataaaaatgggaaattcatttggcaaagctttgattaccctactgatactttgttggtgggtcaatcggttaaaatcaacggtcggaacaagctcgttagccggaaatctgacatggacggctctgatggaccgtatagtctgatactagaccataatgggttcattatgtatctaaataatttgggccaacaacttatttatgggg

SEQ ID NO: 232833 - DNA, 413 bp, Gossypium hirsutum
ggatctcctcttcttggagaaggccctcctgggccttttcgtggcggtggtactagccatcaccatctctaaacttcgtggcaagcggttcaagctccctcctggaccattacccgtgccggtgttcggcaactggctccaagtgggtgatgacttgaaccaccgcaacttgacagatttggccaagaaattcggtgacatatttttacttcgaatgggacagcgtaatctggtggtggtgtcttcacctgagctagccaaagaggtgctccacacgcagggagtggagttcggctcaagaactaggaacgtagtgtttgatatattcacgggtaagggtcaagacatggttttcacggtgtacggagagcactggaggaaaatgaagcggatcatgacggtaccatttttta

SEQ ID NO: 232834 - DNA, 419 bp, Gossypium hirsutum
ctttttgttgcctttttacctgaaaatatactccaattttaccataatcagtttctttatactctgaagaagcctatctcccgggattgtttctataatttacaaaagaaaaataataatatctggttaatttcgtcaggggctaagcttatttgcttccataaattgttctatttagttcttctttcaatttattggttctgggtattcttggttcttgttcgatcgtttattttcaatttgtttgaggatggtttgcatggtttctcgcactggaaggcacttgcagcgatacgataacctaggccgacgccaagttgttgggtgcattccctatagatacaaatctagcagtgatggaaccatgactgatgacttggaggtacttgtgatctcctcccagaaatgtcaaaaaatga

SEQ ID NO: 232835 - DNA, 397 bp, Gossypium hirsutum
ccgttagagatattcctagggtttgcatttgcggtttggggtatagggttggggacaacgccaaatcttggatttgaggaatggcgactgcgacgggacaggtgaacgcgaagagaaagccggtgttcgtgaaagtggaggatttgaagcccggtactagtgggcacactttgatcgtcaaagtggtggagatgaccccagtcaagacttccgccaggcccaacaggtcccgtgctctcctttctcgacctgtccctccggtccggatcgctgagtgcgtcgttggggacgagactggcaccatcatcttcaccgcacgcaacgaaaaaagttgatcttatgacaaaaggtgcaacccggaatttacgtaatgctaagattgttatgttcaagcaac

SEQ ID NO: 232836 - DNA, 400 bp, Gossypium hirsutum
  unsure (1)..(400): unsure at all n locations
gaagatcactcccgtccagaaacaaacacgtgccggccagcgcactcgtttcaaggcattcgttgtcgtcggcgacggaaacgggcacgttgggttgggggtgaagtgcagcaaagaagtagcgacggcaataagaggggcgataatattggccaagttgtcggtgataccagtaaggagaggctactgggggaataagatcgggaagcctcatacagtgccgtgtaaggttaccggaaaatgtggttcggtcactgttaggatggtgccagctcctagaggtgcggngattgtggctgctagggtgcccaagaaggtgcttcagtttgctgggattgaagatgttttcactttttcaaggggttctaccaagactctgggtaactttgtaaaggccacc

SEQ ID NO: 232837 - DNA, 396 bp, Gossypium hirsutum
ctttcatcccatagctttctttctggtaaaaggccatggatgggaatggaagagttcacccagattgtcctaatgctgcaaatccctaccatgaatgtggtggactctgcttagagaagattgctgaaggcaaaggaccaaaggcaaaagaaactaaaaagtcattaagttcaaaatttcttgatgcttccagaagctttggccggagaaagaagggatccgactctctgccgagatcccctaaagctctcgagacaacccctgcagtaggtgcagtttatcctggtggccctaggtcacctcgttctcatttttctagaaagaaaatggaagcagaaaacggtgattcgtattcatcttccgagcaccactctggcgagatatattcccaagatc

SEQ ID NO: 232838 - DNA, 419 bp, Gossypium hirsutum
tttttatctttaaaacacgcacccaaaaaataaaaccctttgaaaaccaaagaaggaagaagaagatgtcgtggcaagcttacgtagatgatcacttgatgtgtgaaatcgaaggaaaccatctctctgccgccgctatcatcgcccacgacggcagcgtttgggcccaaagcgccaatttccctcagttcaagcccgaagaaattaatgccatcatgaatgactttaatgaaccgggtacgctcgctcccaccgggttgcacctcggtggcacgaaatacatggtgatccaaggcgaaccgggagctgttatccgagggaagaagggacccggaggtgttactgttaagaagaccaatatggccttgatcatcggaatctatgatgaaccaatgacacccggccaatgcaacatgatc

SEQ ID NO: 232839 - DNA, 417 bp, Gossypium hirsutum
cttcaaagctcatctgtcaacccagagccccttctctccgccgaatctcctttttctcccgtaaaaatgtctctggtggccaacgaagattttcagcacattttgcgtgtcctgaacaccaacgttgatggaaagcagaagattatgtttgctttgacctccatcaagggtatcggaaggcgtttcgccaacattgtttgcaagaaagccgatgtagacatgaacaagagggctggtgaactgactgcacaggaattggacaatctcatgacgattgtggcgaacccgaggcagtttaaaatcccagattggtttttgaacaggcagaaggattacaaggatggaaagtattcccaagttgtgtccaatgctctcgacatgaagttgagagatgacttggagcgcttgaagaagatc

SEQ ID NO: 232840 - DNA, 413 bp, Gossypium hirsutum
gaaaaaaaaaaaaaaaaccagacatggcttccaacactgttgcatccgctgctcttcttcttaccttgaacttgttgttcttcactttggttagctctacctacgtgccttgcccaccaccaccaaagagccacaagcctacccacaagagcccaccctcggcacctaaacagccagccacttgccccaaagatacactgaaactaggtgtttgtgctgatttgttgggctcggtgcgcgttgttgttggaccgtcgaggaccaaatgctgctcactcatttcgggtttggctgatctcgatgctgctgtttgcctttgcactgctattaaagctaatgtgttgggggttaacctaaacgttcctgtttcattgtctttgctcctcaattcctgcgaaaagcaaatgcctgct

SEQ ID NO: 232841 - DNA, 424 bp, Gossypium hirsutum
  unsure (1)..(424): unsure at all n locations
cgccacgcgnccttttatggncatagtatagtcttgttcaatgnggcacacaaacttccggtggtgcagtaagagttaaaggctgaggctgttaaggaggaaaaagcagagaaaggtcccatgaccgggcctgtttggagagcaaccttgtggaatatagtaggaacagtcaagtggtatggatttgggatcgtcctcatatatgttgtgactttatcaatattttcaggatacatcacggaggatgtgcactcattggttctcaaggactggtatccggtcctccttataacaggctacaatgtgtttgacctggttggcaaatcgttgactgcagtctatctccttgaaaatgcaaaggttgctatttccgcttgtgttgtgaggttacctgtctttcctctcttcataggttgtttgcacg

SEQ ID NO: 232842 - DNA, 352 bp, Gossypium hirsutum
atcgtattaaggaacttccatcctcacttggaaactgctcagatttatcagagttaaaggtatcgaataattagataacaagcttgcctgaagatcttacaaactgtttgaaattgacaaaactagatgaggaggggaacaagttaacagcttaatctgagaatttgtttgcatcatgtacaatgcttacggaattcaatcaaagaacttgctgagtggtataccagagaacattggatgccttacacgtgtcatccgtcttgatattcaccagaacaccgagtgaaatacagagttatgctagaaatcatccttttgtactgcatgataagtcattctggtactgtatgat

SEQ ID NO: 232843 - DNA, 417 bp, Gossypium hirsutum
gttgtttggctttgttttccttgtaggatctgaaaaagaatgtcggcaaatggaactgacaactcaacttctaagaagcctccaagtccttctcctttgagattttccaagttttttcagtccaacatgagaattcttgttactggtggagctggattcattggctcccatttagtggataaattgatggagaatgaaaagaatgaggttattgtcgtcgacaactactttaccggcacaaaggacaatctcaagaaatggattggacatccgagattcgagcttattcgtcacgatgtcaccgagccgttgctcattgaggttgatcagatctaccatcttgcttgcccggcttcgccaatcttttacaaatacaatcctgttaagacaataaagacgaatgtgatcggtacattg

SEQ ID NO: 232844 - DNA, 413 bp, Gossypium hirsutum
gttctgcctccgcaagtgtgccttcttatctgataatgggttggtgtcttttgctaaagcagcaggttcactagagagcttggaactggaggagtgccactgggtcacccaatttgggttttttggttgtcttattaactgtggtgcaaagttcaaatctatctctcttgtgaactgcttggcgatcaaggacctaaatgtaggattgcctcctctaccaccttgtgagtcccttcgatcgctgtctatccgtaactgccgggggtttggtgatgctagcttggctgcgttggggaagttgtgccctcaactgcagaatgtggagttgagtgggcttcatggaataacagatgttgggtttttcccattgctcgagagttgtgaggccggtttggtgaaggttaatctcagcg

SEQ ID NO: 232845 - DNA, 387 bp, Gossypium hirsutum
tgtttaaacccttttatggttttgcataaactaatttgggaatgtattgaatcactttctcccttatttggtttatttcttgtttgtagtaactttgaagaacaattttaatggaggaggtaccgtttttgactaagttacagtggatgaaaacagagtaagatttggggtaagttgtttgatgctagaaaaagacagggattgagccaacgatcatgcaattgaagacggaccggcaggtgaagctgtcgcctctgggttggagacaaaaatcaaaatctaaaaatttctggagaatgatggaggtttcgttggaacaaagctgctggtgcaatctctaattttattccatcaacttgaagtttattactcttggagcgagagatg

SEQ ID NO: 232846 - DNA, 416 bp, Gossypium hirsutum
  unsure (1)..(416): unsure at all n locations
gttttaactctaaagccaagaaagtaagccactaaggttttgagagaagatcaaaatggcttctaaaagatcagcttccatggtcctccttttggcactcaacattctctttttttccctagtcagtgcttgtggctcttgctcttcacccacccctaaaccaaggccaaacccaaaccccaacacccccactcctactccatctgcacgaggcaggtgccctagggatgccctcaaattaggtgtatgtgccaatgtgcttaacctagtcaatgtcaccattggttcacccccagtgatgccatgctgttcccttctcaatggccttgtcgacctcgaagccgctgcatgcctttgcaccgctatcagagctaacattntaggcatcaaccttaacatcccagtttcccttagct

SEQ ID NO: 232847 - DNA, 395 bp, Gossypium hirsutum
atcgtcgtctccgacgttcgaagattataaaaaaccggcgtcgtttcaaatggctacaagaacggatcttgatgggaggccaataaagccgttgacgatatgcatgatcggcgccggaggcttgatcggctcccacctttgcgagaaattgatgtcggagacgccgcacaaggtgctcgccttggacgtttacaatgacaagatcaagcatctcctcgagcctgactctatgccttgggctggccgtattcagttccaccgacttaacattaagcacgattctaggctcgaaggcctcatcaagatggcagatctcacgataaatcttgctgccatatgtactccggcagattataatacgcgtccactagacacgatttacagcaattttattg

SEQ ID NO: 232848 - DNA, 378 bp, Gossypium hirsutum
ctttttgttgcctttttacctgaaaatatactccaattttaccataatcagtttctttatactctgaagaagcctatctcccgggattgtttctataatttacaaaagaaaaataataatatctggttaatttcgtcaggggctaagcttatttgcttccataaattgttctatttagttcttctttcaatttattggttctgggtattcttggttcttgttcgatcgtttattttcaatttgtttgaggatggtttgcatggtttctcgcactggaaggcacttgcagcgatacgataacctaggccgacgccaagttgttgggtgcattccctatagatacaaatctagcagtgatggaaccatgactgatgactt

SEQ ID NO: 232849 - DNA, 420 bp, Gossypium hirsutum
ctccagcagctgcaccacaactacagagaagagagtaaaggggaaaaaaagcgtcgtcgtttttgcttcttcttctacttcgctctctctccttctccgaagttcctctttcgttctttcatttattcagtattgtaaaagatggccgacggtgaggatattcaacccctcgtctgtgataatggaactggaatggtgaaggctggttttgctggtgatgatgctccaagggcagtttttcccagtattgttggtcgtccccggcacactggtgttatggttgggatgggtcagaaggatgcctatgtaggagatgaagcacaatctaaaagaggtatccttactttgaaatatcctattgagcatggtattgtgagcaactgggatgatatggaaaagatctggcatcatacattctac

SEQ ID NO: 232850 - DNA, 419 bp, Gossypium hirsutum
gccaaaacacccatcaaatactatgtggttgatgcattcaccaactccgccttcaagggaaacccagctgcggtttgtttgttggaggaagaaagagatgagaaatggatgcaatcagtggctgctgagtttaatatctccgagacttgttacttgactcggatcaccaattccacctctccaaacaccaggtttcgtcttagatggtttacccccgttgccgaggtaaatctatgtggtcatgcaaccttagcatctgctcatactctctttacaactggtttggtaaattcaaacattattgaatttgatacattatctggaatcctaactgccacaaaggttccagatgtttgtccaaccaatgtctctgaggttcagaacggcggagtgagcgactgctctctgatcgaactgaa

SEQ ID NO: 232851 - DNA, 416 bp, Gossypium hirsutum
ctctagactcttcccttgtaactgttaaaatctttgtcactgtgatcattaatggccaccgctgaacctgaagttccagtcactgagcagcagccggcggcagcagaggagccaaagccggcggaaaagcctgtgaaggagaagagacccaaagctccaaaggagaaaaagcctaaacaacccaaatccacagcacgtcctccttattttcagatgatcaaggaggcgcttttggctttgaaagagaagagtggttcaagtccgtacgctatagccaaatacatggaagagaagcacaaggcggtgcttccagcgaatttcaggaaaatcttaggtcttcagcttaaaaactcagctgccagaggcaagctgataaagatcaaggcctcttacaagctctccgaagccggcaaaaa

SEQ ID NO: 232852 - DNA, 410 bp, Gossypium hirsutum
  unsure (1)..(410): unsure at all n locations
gttttatgaaattggcattggagctgggttggaatctatgaccactaatccaatggcatgggaaggttcagttaacccaagggtgaagcaaatggagcaagctcagaattgtctccttcctatgggtattacgtcagagaacgttgctcatcgctttggtgtgacaaggcaggagcaggatcaggctgcggttgaatctcacaggaaagcagctgctgctacagcttctggtaaattcaaagatgaaatagtccctgtggccaccaagattgttgatccaaagactggtgatgagaaacctgtcacaatctctgttgatgatgggatccgagctaacacatcaatgccagatcntgggaaaatgaaacctgtattcaagaaaatgggaccactactgctgaaattctagt

SEQ ID NO: 232853 - DNA, 380 bp, Gossypium hirsutum
attcccatttccaatctccagctcccaaggtaaatatgccgatcagaaacatagcagttggccggcccgaagaggcgactcaccccgatgctctcaaggcagctttggctgagttcatctcaaccttgatcttcgttttcgctggatcgggctcaggaatggcttttaacaagttgaccgacaacggagcaacaaccccggccggtctcgtagccgccgctctagctcatggcttcggtcttttcgtcgctgtctccgttggcgccaacatctcaggtggccacgtcaaccccgccgtcaccttcggtgctttcgttggcgggaacatcactctcttgcgcggcattctttactggatcgcccaactcctaggctcaacc

SEQ ID NO: 232854 - DNA, 417 bp, Gossypium hirsutum
gcccgtttccatgtctcgagagctttatctctcctccgttgtccccatcggtgctctttactctctcagcctctggctctctaactccgcttacatttacttgtctgtttcctttattcagatgctcaaagccctgatgcctgttgccgtttattccattggggttctttttaaaaaagagggctttaagactgacactatggccaacatgttgtcgatctctttaggggtcgctattgctgcttatggtgaagctaaatttgatacctggggagtgatgttgcagcttgggagccgttgcttttgaggctaccaggttggttatgatccagatcttgcttacttctaaagggatcaccttgaatccgattacttctctgtattatgttgcgccatgctgtttcgttttcttggtgg

SEQ ID NO: 232855 - DNA, 417 bp, Gossypium hirsutum
gtacctttttaactctaaagccaagaaagtaagccactaaggttttgagagaagatcaaaatggcttctaaaagatcagcttccatggtcctccttttggcactcaacattctctttttttccctagtcagtgcttgtggctcttgctcttcacccacccctaaaccaaggccaaacccaaaccccaacacccccactcctactccatctgcacgaggcaggtgccctagggatgccctcaaattaggtgtatgtgccaatgtgcttaacctagtcaatgtcaccattggttcacccccagtgatgccatgctgttcccttctcaatggccttgtcgacctcgaagccgctgcatgcctttgcaccgctatcagagctaacattttaggcatcaaccttaacatcccagtttccctt

SEQ ID NO: 232856 - DNA, 410 bp, Gossypium hirsutum
ctcggaaacaagtctgctatcaccgggggtagcgggaaggttgtcgatagtggccccgatgatcatatcttcttatactacactgaccatgggggtcccggtgtccttgggatgcctacctttccttatctttatgctgatgacttgattgaggttttaaagaaaaagcatgcttcagggaattataaaagcatggtattctatcttgaagcttgtgagtcaggtagtatctttgagggtcttcttcctcaggggttgaatatctatgcaaccacagcatcaaatgcggaagagagtagctggggaacctattgtcccggagagtacccaagtcctcccccagaatatgaaacctgcttgggagacttgtacagtgtcgcttggatggaggacagtgacatgcataatct

SEQ ID NO: 232857 - DNA, 413 bp, Gossypium hirsutum
ttcaaaaacatagcagccatggcagtccgtatgcttcttgggttaggtgtcctgctactctgccttgcaaaggtttcatctgatctgaaggcagaagaagttataaccaatgtcggtgaggtgggttctttggttaccagaggcggaaacagaagactgatgctagagattgattgtggaggattatgcaagaaaagatgcagtcaacactcgaggccaaacagatgcaacagggcgtgtgggacttgctgcttgaggtgcaagtgcgtgccaccggggacttcagggaacagggaggtctgcgggacctgctatactggcatgaccacccatggaaacgttgccaagtgcccttaacctttacgtcgcccaatatgtgttgcagccatcaaggcgaaaaatgaaatgtttgt

SEQ ID NO: 232858 - DNA, 367 bp, Gossypium hirsutum
aaaaatctttccttccttcaaaaagccaaactctctcccttcctacctgccatccttcctttaaaaattaaccaaatatctctcaccaaaccctcccccatttcccttctcccttcatatatctaacatccttttttccccctcccatttcctccctcatttccatctccccccaaaatggaagcatcccctgctctttctcgcataggccttgccggcttggcggtcatgggccaaaacctcgctctaaacgtcgccgaaaaaggcttccctatctctgtctacaatcgtactacctccaaagtcgatgaaaccattcagcgagcccaagacgaaggccaactcccactcttcggtcactacactc

SEQ ID NO: 232859 - DNA, 411 bp, Gossypium hirsutum
aagaaaagcagtttccgaatcttttacgactcgtaaaatagttgaattgactcatggcttccgccgttgcttccgttgcgaagaagaaaactgctggctctaagaagtctaaatcagctccttcacatcctccatttcttgagatgatttcagatgcaatcgtttcgttgaaagagaggacagggtcgagccaatatgcgatcgcgaaattcatcgaagagaagtataagcaattaccggcgaatttccgcaaagtcttacttgttcagacgaagaagtttgttgcttctggaaagcttgtcaaagtaaaagcctcttttaagctgccttcggcttctgccgcagctaagaaaccggccgccgtagctaagaagcctgccgccgcgaagcctaaatcttgcagctaccact

SEQ ID NO: 232860 - DNA, 417 bp, Gossypium hirsutum
tttcttaagaagaacaactttcagctgaaacagccgcttcctccaacatgggtggagggttgaagaaacacttgaagaggctcaatgcccccaggcattggatgcttgacaagcttggtggtgcattcgcgccaaagccatcgtctggaccccacaagtcgagggaatgtttgccacttattctcattctgcgaaacagactgaagtatgctttgacatacagagaagtgattgctattcttatgcaaaggcatgttatggtagatgggaaggttaggactgataagacctaccctgctggttttatggatgttgtgtcaattcccaagacaaatgaggacttccgtctcctttatgacactaaaggtcgtttccgccttcatgccatcactggtgatgagactaagtttaagctct

SEQ ID NO: 232861 - DNA, 418 bp, Gossypium hirsutum
cttcgaagtcgtagctttggaagcatggacttcatagctactatcctgtttctagctcttgtcatctcctccaccaaagctttggacccttgcggccctcagccagatgactcggaccttttggtcatcccaatctatggcaaatgttcaccattcaacccacccaaacctgactcatcgttcaacacagtcatgaacatggcatcaaaagacccagcaagggtcaagtacttgtcgagccttgtagcccaaaagaccactgcggttcccattgcttcaggccaacaagtcctaaacattggcaactatatcgtccgggtaaagattggcactccgggtcagctcatgttcatggtattggacactagcaatgatgtggcttgggtcccatgctccggctgcaacgggtgctcagcca

SEQ ID NO: 232862 - DNA, 396 bp, Gossypium hirsutum
gggaactacaaccaatctctgggacagtttttcgttcggctaaggttcgcattgctgtgttcagtcaacaccatgttgatgggctagacctgtcttcaaatcccctgctatatatgatgcgctgctatccaggagtgcctgaacaaaaacttcgtggacacttgggttcttttggtgtgactggaaatcttgcactgcagccaatgtatactttgtctggcggtcaaaaaagtagagttgcttttgcaaagataactttcaagaaaccacacataatattgcttgatgagccatccaatcatcttgatttggatgctgtggaggcactaattcaaggccttgtcttgttccaaggagggattctgatggttagtcatgatgaacatctgatatctg

SEQ ID NO: 232863 - DNA, 416 bp, Gossypium hirsutum
cccacgcgtccgactcgcccgctgcgcaatcaccgatcaaagctgaagatgggaagccttggaaaagcaatatacaccgtcggattctggattcgggagaccggtcaggctctcgatcgcctaggctgccgcctacaaggcaactattttttccaggagcaactttctaggcatcggactctgatgaacgtatttgataaatctcctctggtggacaaggatgcatttgtagcccctagcgcatctgtcattggcgatgttcaggtgggaagaggatcatctatttggtatggatgtgttttaaggggggatgtcaacagcattagtgttggatctggaactaatatacaagacaactcccttgtgcatgttgcaaagtctaatctaagtgggaaagtgctaccaactaacattgg

SEQ ID NO: 232864 - DNA, 412 bp, Gossypium hirsutum
ggatttgcagaaagatccacccacttcttgcagtgctggtccagtagctgaagacatgtttcattggcaagcaacaatcatgggaccctcagatagcccttatgctggaggtgtgtttttagttactatccatttccctccagattatcctttcaagcctcctaaggttgcatttaggaccaaggtcttccatcccaacatcaacagcaatggaagcatttgtcttgatatcctcaaagaacaatggagccctgcactaaccatttccaaggttctgctctcaatctgctcactgctgaccgatccaaaccctgatgaccctcttgttccggagattgctcacatgtataagaccgatcgggccaagtatgaagccactgctcgtagctggacccagaagtatgcgatggga

SEQ ID NO: 232865 - DNA, 418 bp, Gossypium hirsutum
cttttctgattattttttgataatccggagttcaatcatctaaaagaagccctaaaatccttgaatcaggtctgagcttgtggtttgttaggcctctttgatcaaactaagtttcatgtctgatcttgacgttcaaattcctactgcctttgatccctttgctgatgcaaatgctgaggactcaggtgcgggtgcaaaggagtatgtgcatattcgtattcagcaaaggaatggtcgcaaaagcctgacaactgtccaggggttgaagaaagaattcagctataacaagatacttaaagacctgaagaaggagttttgctgcaatgggaccgtggtccaggaccctgaattaggacaggtgattcaacttcaaggtgaccagcgtaagaatgtatcaaccttccttgttcaggctggc

SEQ ID NO: 232866 - DNA, 419 bp, Gossypium hirsutum
tctctgtcaacaacttgccgttgttttttattttcttgcttaaacaaggttaacaagagatggcggatgaggatattcaacctcttgtgtgtgacaatggaactggaatggtcaaggctggttttgctggtgatgatgcccctagggcagtcttccctagtattgttggtcgcccacgccacacaggtgtcatggttgggatgggtcaaaaggatgcttatgtaggtgatgaagcccagtcaaagagaggtatcctcactttaaagtaccctatcgaacatggcattgtcagcaattgggatgacatggagaagatttggcaccatactttctacaatgagcttcgtgttgcccctgaagagcatccagtgcttcttacagaagcaccactcaaccctaaggcgaatagggagaagatg

SEQ ID NO: 232867 - DNA, 418 bp, Gossypium hirsutum
gatcaaacaaagctatccactcctttttctcagatccgaaacgccgtcgtcttagtcggaaccacttcgatccacaatgtcttctactttcagcggcgatgaaacggcaccgttcttcggcttcctcggcgccgctgctgctctcgtcttctcctgtatgggagctgcatatgggacggctaagagcggtgttggtgtggcttcaatgggtgtgatgaggcctgaattggtgatgaaatctattgtaccagttgttatggctggtgttttgggtatttatggcttgattatcgctgtcattattagtactgggatcaatcctaaggccaaatcgtattaccttttcgatggttacgcccatctttcttctggtcttgcttgtggccttgctgggctttctgctggaatggcaattgga

SEQ ID NO: 232868 - DNA, 418 bp, Gossypium hirsutum
agatccacaaagataatgatgctgaattaacagaatttgaggagtctatggcgcaggcattcttcgatttggagaataccaatcaagatctgaaaagtgaccttaaagatctctatattaattcagcagtccaaattgatgtttctgggagccggaaagctgttgttatccatgtcccgtatagattgaggaaagctttccgcaaggttcatgttaagcttgtgagggaacttgaaaagaagttcagtggcaaggatgtgattcttattgccaccagtaggatattaaggcctccaaagaaaggttctgcagttcataggccacgcattcgcacattgactgcttgacatgaggcaatgctagaagatgttgtcttacctgctgagattgttgggaagctcactagatatagaattga

SEQ ID NO: 232869 - DNA, 420 bp, Gossypium hirsutum
ttatctttaaaacacgcacccaaaaaataaaaccctttgaaaaccaaagaaggaagaagaagatgtcgtggcaagcttacgtagatgatcacttgatgtgtgaaatcgaaggaaaccatctctctgccgccgctatcatcgcccacgacggcagcgtttgggcccaaagcgccaatttccctcagttcaagcccgaagaaattaatgccatcatgaatgactttaatgaaccgggtacgctcgctcccaccgggttgcacctcggtggcacgaaatacatggtgatccaaggcgaaccgggagctgttatccgagggaagaagggacccggaggtgttactgttaagaagaccaatatggccttgatcatcggaatctatgatgaaccaatgacacccggccaatgcaacatgatcgtcg

SEQ ID NO: 232870 - DNA, 412 bp, Gossypium hirsutum
cccaaatctcctccctcctcttctttagcgtccttttcatttccgctcatgcagcgcgctttgaaatccgcaatgagtgctcctacaccgtctgggcagcagcctctcctggtggtggccgtcgcctagaccctcggcaaagttggaccatcgatgtgcctgctggcactgctatggctcgtatttggggtcgaaccaattgcaatttcgatgccagtggtaggggtcattgccaaaccggtgattgtggtggactccttcaatgcaaaagttggggtgtacctccaaacaccctggcttgatattgcacttaaccaatttggaaacattgatttctaacaccatttcttaagtggagggtttaacatccccatggtgtttggtccaactaatggcgggtgtcacaacattc

SEQ ID NO: 232871 - DNA, 422 bp, Gossypium hirsutum
ccttaacataatcatatcctctgctaaagcgttttttcttcactccatttctatattctgcaaatttccgcaccttgctatggatgagaggatgataggtgctgcacaaacaggagacataaacatcttgtacgagttaattctgaatgatccatatgttttacagcgtatcgatgatgtaccttttttccatactcctttgcatgtagcagcctctgcagggcatattgattttatgatggagatgatcaacttaaagccatcgtttgcaagaaagctaaaccaagctgggtttagccccatgcacttggctctgcaaaatcaaaaaactctagcagtgcttcgactcctcaggtttgatgaaggccttgttcgtgtcaaagggcgggagggcttcactcctttgcatcatgtggttcaaa

SEQ ID NO: 232872 - DNA, 423 bp, Gossypium hirsutum
atcgattcctgctcctcagatcgttaagaaatctgaagacccatatgctataacagacaatgattggagttgggaagataaagcaatactcaaacatccttgagaagccccttagcaagggcaaacaagaggttagcttgagtgcctttacatttttgttctctgagcttgttcagtacaatcaaactcgggttgacaacattgctgaattagaaagaaggctggaggatgcagggtatgctgttggggctcgagttcttgaacttttatgccatagggataaggggaatagaagggagacacgattgttgggtattttatcctttgtgcacagcactgtctggaaggtgttatttggaaaggtggctgactctcttgagaagggcactgaacatgaagacgaatacatgatcagtgagaaag

SEQ ID NO: 232873 - DNA, 416 bp, Gossypium hirsutum
atcgtattaaggaacttccatcctcacttggaaactgctcagatttatcagatttaaaggtatcgaataatttgataacaagcttgcctgaagatcttacaaactgtttgaaattgacaaaactagatgaggaggggaacaagttaacagcttaatctgagaatttgtttgcatcatgtacaatgcttacggaattcaatcaaagaacttgctgagtggtataccagagaacattggatgccttacacgtctcatccgtcttgatattcaccagaacaccgagtgaaatacagagttatgctagaaatcatccttttgtactgcatgataagtcattctggtactgtatgatgcaagaatttcaacaatcccaccatcagtatcgagttgctcttctcaaattttcaggaataatg

SEQ ID NO: 232874 - DNA, 415 bp, Gossypium hirsutum
tgaaaaccgaggtttctggaatggaagaaagaaaagtaaagggagaggttatgtgcggcactctcgacctgactgctctcccactagattgtgtcaccctcattatttccttgacctcccctcgagatgcctgtagattgtcgcttgtttcaactgcttttaattcggctgctgaatccgatgctgttgggaaagcttcttgccatcccaataccaggaattaattccctcatcgctctctttctcgtccaagaaacaactttatcttagcctctgtgaaaatccccttctcattgaagctggacgaaagagtttttggctcgaaagagtgagtgggaagaaatgttacatgctgtcacccagggacctctccattatatggagtgacaccccagattattggagatgggtgtct

SEQ ID NO: 232875 - DNA, 355 bp, Gossypium hirsutum
gacgcatctgttgttcatctacgaaccaaatggcctgctttcgatatcgaaacagcgcgctctcttactgctaacaatagtgctgggtgcatcaaaagctcaactcagtgccaacttttatgccaaaaccttccctagtgtgtccacccttgctagtcatgtgctctagcacgctcaagggaaggatcttaggctctcgactaataccggtccgcttcattaagatgcttgctccgatcatgggtgggacgcttcggtactgttaaaccccacggatggagcgaaaccggccaccccaaacctcacaactgggggatatgaacttatctacaatatcaaaccggcgttgccgaaa

SEQ ID NO: 232876 - DNA, 409 bp, Gossypium hirsutum
caccctgctcgttaccgtactcagccttgcaaagacggtaccagttgtcaaagaagggtttgttttttcgctcacacaccggagcagcttcgggtgttgccgcagcagagtccgagaggaaatgggtccgcttcagctgatttggattatgttgtttcgcccatgcgccatcgtgtagagtttgtttcttcaccaacttctattctggcttcacctacgatatgcccaccttctgagtcacctcctatgtcacccagtggctcatttaactcggagagtgaacttgctgcttctatgcgaagtttgcagctgggtaagactaaaatgaatggtgcttgttcctggggcctgcaaatgggatcgggtttcagttctgcacgtgggtccacactccgacccggtttttgca

SEQ ID NO: 232877 - DNA, 422 bp, Gossypium hirsutum
gtctctctctctcatagttgtctgcttctctctcttaccattataacagctcatgctctgcatcagcttttctttaacaatgcagacaagaactgtacaagtcaagaacctgtcagatctagctactgagagggagattcacgagttcttttctttctctggtgaaattgagcacattgatatcataagtgaagctagtcaatcaaagactgcatatgttacattcaaggatccgaaagctcttgaaatcgccttgttattatcgggggcaacaatcgttgacaagattgtgacgataatttctgttgaaaattatgtaccaaaacttgagattcatgaatcaagagcggcggacaacattgtgtctattgctcctgctgggcatagtgcatcaaatgatgagggcagaacgagtccacctg

SEQ ID NO: 232878 - DNA, 414 bp, Gossypium hirsutum
ctcaaagaaaaaattgagtgtcagtttgaaagtgttcttcagatatggctatgaaacaagttgctaattctgctatcaaagcaattgccaattctgggtcatcctctcttcttaccagacaactccatgcttctccagggagcaaaaagattgttggggtgttttacaaggccaacgagtactttacgaagaatcccaactttgttggttgtgtggagggagccttggggttgcgcccatggctggaatcacaggggcatcagtatattgttaccgacgacaaagaaggaccggactgcgaacttgaaaagcatatccctgatctccatgtgctcatatcgaccccattccacccggcttacgttacggctgagaggatcaagaaagccaaaaacttgcaactgcttctcacag

SEQ ID NO: 232879 - DNA, 420 bp, Gossypium hirsutum
gaaattgtgtttcgtcgagagagaataacagagggaaagcttaagcaatggcggccgaggaggacagcggagagttttacctccgctactacgtgggccacaaagggaaattcgggcacgagtttttggagttcgagttcaggccagatgggaagctccgatacgctaacaactccaactacaaaaacgacaccatgatccgcaaagaggtcttcctcactccttccgttcttaaggaatgccgccgcatcatcgccgacagcgagataatgaaggaagatgataacaattggccagaaccagaccgtgttgggcggcaagagcttgagatagtgatggggaatgagcacatctcttttcacaacttcaaagattgggtcccttgttgatgttcagagcagtaaggatcctgaaggtctt

SEQ ID NO: 232880 - DNA, 395 bp, Gossypium hirsutum
accaccgtcactagcggcgccgtcacaaaatgtcgtcaacggagtctgtgatgctccaactccatgaaatctctgccgttaaattcggtaacttcaagctgaaatctgggatcttctcccctatctacatagacctccgtctcatcgtctcttacccttccctcctccaccaaatctcccactccctcctctcctctctccctccccaaacacactttaacctcatatgcggtgtcccttacactgccctccctatagccaccttcatctctctcgacacctccatccccatgctcatgcgccgcaaagaagtgaaagactacggaactgccaagttcatcgaaggtgtttacgaaaagggtcaagctttgttggtggtgggagacctcgtaacg

SEQ ID NO: 232881 - DNA, 409 bp, Gossypium hirsutum
tatcctcccattttcttaatctagggtttctttcgcgcaaacagatatggcagacgaagcacagtactcttcaggtctcgatgccggcagcaacaagcgtaaatacgatgaccaaccccctctcccctccggcgctaggaggcctactggtttctcttccccagattcagctcctccttactacaacagcgttccgccgccgctcgatggcatcgagatggccaagcagcgagctcaggagattgctgctcgcctgactgcctacgtcgcctccgctggggccgagcccaagcgccctcgttatgaaaacggctccggcggtggttttgatcacgacaaggggtttagctccgctccttctgatgtaaaacctctttcgaattctgctccttcagctattaccggtttc

SEQ ID NO: 232882 - DNA, 418 bp, Gossypium hirsutum
cctcttcacaagactaacaaacctggaatcacttcaattgatatcaatttttcaaaggatattgttgccactggaggggttgattcaagtgctgtactctttgatcgaacatctggagagatcttatctacactcagtgggcattctaagaaggttactagtgtaaaatttgtagcccagaatgatgtatttttaagtggttcagcagataagactgttcggatttggcaagggtctgaagatggaaagtatgattgcaggcatattttgaaagatcatacagctgaggtgcaagctgtcacggtccatgccactaacaactactttgtaactgcttcacttgacatgacgtggtgtttttatgatctttcgtctggtttatgcttgacccaggttgaagacccatcaaattctatgg

SEQ ID NO: 232883 - DNA, 390 bp, Gossypium hirsutum
atataataaaacgtttttttgttcattcgccctttcgctgttgtatttggtttttgtttaatagcttaactgactctctgaaatatcgcggatctttggttttctacacgcattttcgcttttaattatagcctgattttactcggaagatgaggctggaggaagagttctctcattgcgacaactacgacgaagaggaggaacccaaaacgatgtcgcaatgttccatcggagctttacaacaacaacagcagcagcaaaagtttgtcgttgtcggttatgcccttacctctaaaaaaatcaagagctttttacaaccaaagttcgaaggtttagccaggaataaggggatattatttgttgcaattgatcaaaatagacctctctcag

SEQ ID NO: 232884 - DNA, 415 bp, Gossypium hirsutum
cttcaaggtaagagtcgattgattcttcgaaaaccataaacgaaaccaaatatggcggagaaagcaatcgagtcggttcaatgctttggccggaagaagacggcggtagccgtaacacactgcaagagaggccgtggtttgatcaagatcaatggttgtcccattgagcttgtcgagcccgagatcctccgtttcaaggccgtcgagccaatccttctcctcggccgtcagcgttttgccggcgttgacatgaggatccgagtcaaaggtggaggtcacacttctcagatctacgctatccgtcaaagcatcgctaaagcccttgtcgctttttaccagaagtacgttgatgagcagagcaagaaggagattaaggatattttggtcgggtacgataggactttgctggtcgctg

SEQ ID NO: 232885 - DNA, 396 bp, Gossypium hirsutum
aaaaaggctttattttggttttgccaggaccgaaaaggggagaaaattaaaggtattattttattaaaggtttgtttgggggaaattgagagaaaaatttgaaaaaaaaaaaaatccacgatgaagatcacatcgttagtggtactgaagtgcaacccgcaaggagccgctccgataatactagcgaacactaccgatgtgagccattttggttactttcaaaggtcaagcgtcaaggagttcatcgtcttcgtttctcgaactgttgctaaacgtactccttctggtcagcgccagtccgttcagcacgaagagtacaaggtacatgcttacaacaaaaatggactttgtgccttgggatttatggatgatcattatccagttcgaagtgctttt

SEQ ID NO: 232886 - DNA, 419 bp, Gossypium hirsutum
ctaaatattttcagaaacttagatccaaataatatttttcccctaaaattttacccaaaataattccgtattgaaacaaaaaaatgggaattttatgcaaggtagttgatatgctgctgttggtggcgtttatggtgatgcttgtagccggacctttaatcgatgcgcagctggttttgccggaggccactttcccggaggtgctcgtccgtttgaagcagcaatatgcggaggagtaccaagattatttgatggtggagaagcctcatttcttcgtggccttggtctggttggagcttattttccagtggccttttgttttgcttaacatttatgggattttggcatccaagcattggttccacaccacttgtctcatctatggtgcctctgttattactgccatgactgctttatta

SEQ ID NO: 232887 - DNA, 418 bp, Gossypium hirsutum
ctctgctcgaaatcttcttcattctcattctctctccactgaactcttgctaaacggtatcgttttagtcagtctttcatcaatggcgaaagaaccagttcgcgtcctcgttactggagctgcaggacaaatcgggtatgctcttgtacccatgattgctaggggagtcatgttgggtgctgaccagcccgtgatccttcacatgcttgatatcccacctgctgcggaggctttgaatggtgtcaaaatggagttggtggatgctgcatttcctcttctaaagggtgttgttgctacaactgatgctgttgaggcatgcactggagtcaatgttgctgtcatggttggtggtttcccaaggaaggaaggaatggagaggaaagatgttatgtcaaagaatgtgtctatttacaagtct

SEQ ID NO: 232888 - DNA, 423 bp, Gossypium hirsutum
  unsure (1)..(423): unsure at all n locations
ggtgttgtcacttataactatgagtctacctctccagtcgcccctgccaggcttttcaaggctttttctcttgaagctgacaaggtttggcccaaggctgctcctcaggcagtcaagagtgttgaggttgaagctaatcctggccctggaagtatcgtaaagatcaactttgctgaaggccttccattccaatatatgaagcaccagattggaggacatgacgacaagaatttgtcatacagttatagtttgatcgaaggtggacctttgggggacaagcttgagaaaatcagctatgacaacaagtttgaggcagctgcaggtggaggaagcctttgcaagagctcgatgaaattttacactgttggcgactatgtgatcactgaagatgagatcaaggctcanatcaaagggagtgaagga

SEQ ID NO: 232889 - DNA, 429 bp, Gossypium hirsutum
gtctgaaacaacacacaccaagaacgagagaaggccttcaaaaaacaaaaaaacaaaaaagaaaaacaattagaacatcaaacatgattggtccaggcagacctctcttcgtcctctttggatcttccatcgttcagtttagttacagcaacgaaggttggggtgcaattcttgctcatgcatatgctcgcaaggcagacataatactgcgaggatacgcagggtggaactcgaggcgtgctttggaagttctagataaagttttccccaaggatgctgctgtacaaccttcattagtgatagtttattttggtggcaatgactcaattaaaccccacgcatctggccttggtccccatgtacctcttccagaatatgttgagaacatgaagaagattgctatgcatctcaagggcctatcggagaaca

SEQ ID NO: 232890 - DNA, 420 bp, Gossypium hirsutum
cttcggtatcccctcttcttccaagccaacaagcgtaaaggttgaatcttttcccccatttctccactcctaaagtcagggtttcgagcaacaatagaacaaaaatggggttctcaatgcagccttatggcatacaatccatgctgaaggaaggtcacaagcatctctcaggtctcgacgaagctgttctcaaaaacattgatgcttgcaagcaactatccaccatcacccgcacttccctcggccccgaaggcatgaataagatggtaattaatcatttagacaagctctttgttaccaatgatgctgctactattgtcaatgagctcgaggttcaacatcctgcggccaagattttagttctagctggtaaggctcagcaagaggagatcggagatggcgctaacttgacgatttctt

SEQ ID NO: 232891 - DNA, 421 bp, Gossypium hirsutum
gatatactcaaacaagtaagcagattgatctttctctgaaacttacaacttcaccatgaacaaaagcaagctccagctgcaactttgtgcagggatatttactttaagcatcctctccaatggtgcttatggtagtgacaaaatctttgacataactcacaaaatcacttctcagttgccaacttttggatcacagaagggtcttggtcaattcatttggcttctttccagcatcaaaaatgggcccacagtgaatgtgtcggagttcaaattgggaacccacactggcactcacgttgatgctcctagtcacttctttcagaagtactatgaacaaggatttgatgttgcaacccttagccttgaaactcttaatggtcctgtcctagtagttgatgttcaaagaaataagaacattact

SEQ ID NO: 232892 - DNA, 260 bp, Gossypium hirsutum
agagttttacctcggagttccctcatgttgagaggtacttttggaccttggttaatcagccaaaaatcaagaagattcttggtgaagtgaagcaggcagtctctctaccacctgttccttcaaagaagcctgctgcccagccaaaagaaactaaaccaaaggctgaaccaaagaaagaagccaaaaaggaggttgagaaacaggcagcaaaggcagaggccgctgaggaggaggaggcaccaaaggccaaaccaaagaat

SEQ ID NO: 232893 - DNA, 275 bp, Gossypium hirsutum
tctttcttctctaattattgaggaaatccaccgatcaaagttgttcaaatcgtgggtgaaagttttgagaaactaaaatggcgtccacattcagcggcgatgaaactgctccattctttggcttccttggggccgctgctgctctcgttttctcctgtatgggagcggcgtacggaacggccaagagcggtgtcggagtggcgtcgatgggagtgatgaggccagagctggtattgaaatctatcgtccccgttgatttcgcttgtgtttcaggc

SEQ ID NO: 232894 - DNA, 421 bp, Gossypium hirsutum
cacacggacgggagggagacgagaaaaggaagacatcgatggtgtctttgaagttacagaagcggctcgccgctagcgtactgaagtgtggccgtggcaaggtttggcttgatcctaatgaaatcaatgaaatctccatggtcaactccaggcagaatgttaggaaacttgttaaggatggttttgtgatccggaagcctaccaagattcacttccgatctcgtgcacgcataatgaaagaggccaagagaaagggtcgtcattctggctatggtaagaggaagggtaccagtgaggcaagattgcctacaaagatcctttgtatgaggagaatgcgagttctaaggcgtttgcttggtaagtacagggtatctcagatgattgacacgcacatgtaccatgacatgtacatgaaggtgaa

SEQ ID NO: 232895 - DNA, 395 bp, Gossypium hirsutum
cttctgatcaaagcataaacaaccagaattcaatggggaagaaagctgcgttgattggaatcaactatgcaggcacaaaggctctactgaaaggctgcatacacgatgtgaacagaatgtacaaatgccttatacgaacgctatggattctgtgaagaagacatgacgggattgatagacaccgataattcttatgatcagcccacagggaagaacatcagaagggctttaaatgatcttgagagatcgggtgagcctggggattttatgttagtgcactacaggggccatgggactaggcttgctgctgagactgaggacgatgatgatactggctacgatgatgtgcattgtccactgcgatatgaatctcatcactgacgatgactgcagag

SEQ ID NO: 232896 - DNA, 423 bp, Gossypium hirsutum
gtcatcctcctgcctgaagggcttatagagagcattcctgaagtgtatgcgctattgaaggaaattcacagtttgctcaggcaaaatgtatctgctgataaaatttcttcccaattatcaccttgggcatctgctttgtttgaatttttgccacatttcataaggaaacagcttcttctccaacctgagtcagacgattctgcacagctatcacagattgagacagagaaactactggcgcaccttgtagagaatgaaattaataagcgcctgaaagcaggcacttacaaggggaagaaattcaatgctatttgccacttctttggctatcaagctcgtggatccttaccatcaaaatttgattgtgactatgcctatgttcttggacatatctgctatcatattcttgcagctggtctaaat

SEQ ID NO: 232897 - DNA, 419 bp, Gossypium hirsutum
cccttggcttacaagttccattgtttatcagagcaagaaaaaaaagggaaaatggaagggaaagaagaagatgttagactgggagctaacaagttctcagaaaggcaacctattgggacagcagctcagtcccaagatgataaggattacactgagccacccccagcacccttctttgagcctagtgagttgacttcatggtcgttttaccgagctggaatcgctgagttcgttgctactttcctattcttgtacatctcggtgttgaccgtgatgggagttgttaaggacaaaaccaagtgtacaactgttgggattcaagggattgcttgggcttttggtggtatgatctttgcccttgtttactgcactgctggtatctcaggtggtcatatcaatccggcggtgacatttgggct

SEQ ID NO: 232898 - DNA, 421 bp, Gossypium hirsutum
gtacaacccgcgtgtctcctcctctcgccgcaagagccgcaaggctcatttcacagcaccttcttccgtccgccgcgtcttaatgagcgcacccctctcatccgatctgaagtccaagtacaacgtccggtctatgccggtgcgcaaggatgacgaggtccaagtggttcgtgggacctacaagggacgcgaagggaaagtggttcaagtgtaccgccgcaaatgggtgatccacatcgagcgcatcacgcgcgagaaagtgaacggttccaccgtcaacgttgggatcaacccatccaaggttgtcatcaccaagctgaggctggacaaggataggaagtctttgctggatcgcaaggctaagggacgcgccgctgctgataaagataatgcgactaagttctcagctgatgatataatg

SEQ ID NO: 232899 - DNA, 430 bp, Gossypium hirsutum
gtttctttatactccgaagaagcctctctcccaggattgtttctataatttacaaaagaaaaaataataataactggttaatttcgtcaggggctaagcttgtttgcttccataaattgttctatttacttctttcaatttattggttctgggtattcttggttcttgttcgatcgtttattttcaatttgtttgaggatggtttgcatggtttctcgcactggaaggcacttgcagcgatacgataacctaggccgccgccaagttgtcggttgcattccctatagatacaaatctagcagtgatggaaccatgactgatgacttggaggtacttgtgatctcctcccagaaatgtcaaaaaatgatgtttcccaagggtggctgggagcttgatgaatctagagaagaagctgcattaagagagtcac

SEQ ID NO: 232900 - DNA, 420 bp, Gossypium hirsutum
gggtcccgagatccgaactggttttcttaaggatggaaaaattcaactcaaacagggtcaagaaatcaccataacaactgactatagcataaagggtgatgagacactgataagtatgagttacaaaaagttggccgaggatgtcaaaccagggatggtcatactttgtgcagatgggacaatctcttttacagtcttatcttgtgacaaacaaaagggtttggttcactgtcgctgtgagaattctgcagttcttggtgagaggaagaacgttaatcttccaggggtcgttgttgacctcccaaccttgactgaaaaggacaaggaagatatcttggaatggggagttccgaaccaaattgacatgattgctctttcttttgttcgaaaaggatcagacctcgtggaggttcggaagct

SEQ ID NO: 232901 - DNA, 411 bp, Gossypium hirsutum
gagatgaggaaaatcatgggtgccaaagttcttttcttctttgctttgctttccttgtcagctgtctcggcatttgcacaggatgaggaagaccaaggtcttgttatgaacttctacaaggattcttgtcctcacgctgaagacattatcaaggagcaagttaagctactgtacaagcgacacaaaaacactgctttttcttggctgagaaacattttccatgactgtgctgtccagtcatgtgatgcttcactgctgctggactccacaagaaggagcttgtctgagaaggagacagacaggagctttggcctaaggaatttcaggtacattgagaccatcaaagaagctgtagaaagggaatgtcctggagttgtttcttgtgctgatatccttgccctgtctgctagg

SEQ ID NO: 232902 - DNA, 413 bp, Gossypium hirsutum
gcggcttctgcttctatttacaatcttctcactctcctgctcctttctggcatcccttttaccttctccgagctcgttaaagagcagcctctggtgttgaaataccacaatgggccactcttgaaggggaagatcactgttaatctcatttggtacgggaagttctccccaacccaacgctccataatcgtcgatttcatcaactctttgagctccgccgtcaaacccaaggttccgtcggcgtcgttttggtggaaaacgacggagaaatacaagtccggttcctccactttggtcgtgggcaaacaaatcctcctcgaaaattacccgctcggtaaaatccttaagaacccacacttgccggcgttggccgtgaaattcaacggcgtatgtacggtcagcgttatcctcac

SEQ ID NO: 232903 - DNA, 428 bp, Gossypium hirsutum
tggaccgtcgaggaccaaatgctgctctctcatttcgggtttggctgatctcgatgctgctgtttgcctttgcactgctattaaagctaatgtgttggaggttgactgtccctgtgtgacacctgaggttgtccttaaggcatctggtcatgtggataaatttactgaccttatggttaaggatgagaaaactggaacctgctatcgagctgatcacttgctgaaggatttctgcaacgagaagcttcaaaaagacctcaccataagtgcagagaaggctgctgagcttaagcatgtacttgctacattggatgatctatcagctgaagcactaggtgcaaagatcaaagagtatggtattactgctccagatacaaagaatcctctctccgatccttatccattcaacttaatgttccaaagcaaag

SEQ ID NO: 232904 - DNA, 422 bp, Gossypium hirsutum
gtggagagccttttttgtgtagcgattctcagttagtcttttctttaagcttacagcttctctccagagttttataatgggtaaggagaaggttcacatcaaccttgttgtcattggccatgtcgactctggcaagtcgaccactaccggtcatttgatctacaagcttggtggtatagacaagcgtgtgattgagaggttcgagaaggaggctgctgaaatgaacaaaaggtcattcaagtatgcttgggtgctcgacaagcttaaggctgagcgtgaacgtggtctcaccattgatcttgccctgtggaagtttgagaccaccaaatactattgcaccgttattgatgcacctggacaccgcgactttatcaagaacatgattacccttacctcacaggctgactgcgctgatctcatta

SEQ ID NO: 232905 - DNA, 411 bp, Gossypium hirsutum
ctctgctcgaaatcttcttcattctcattctctctccactgaactcttgctaaacggtatcgttttagtcagtctttcatcaatggcgaaagaaccagttcgcgtcctcgttactggagctgcaggacaaatcgggtatgctcttgtacccatgattgctaggggagtcatgttgggtgctgaccagcccgtgatccttcacatgcttgatatcccacctgctgcggaggctttgaatggtgtcaaaatggagttggtggatgctgcatttcctcttctaaagggtgttgttgctacaactgatgctgttgaggcatgcactggagtcaatgttgctgtcatggttggtggtttcccaaggaaggaaggaatggagaggaaagatgttatgtcaaagaatgtgtctattta

SEQ ID NO: 232906 - DNA, 415 bp, Gossypium hirsutum
gtagccgccgcctgcgtctctctcttcatctctctgaaccaaaaagtctttagcttttcgcttcgagagagaccatgttggtttaccaggatctcatctccggtgacgagcttctttctgactcattcccctacaaggaaatcgagaatgggatgctgtgggaagttgagggaaagtgggttgtgcaaggagctgtcgatgttgacattggtgccaatccttcagccgaaggtgctgatgaggatgaaggtgttgatgaccaagctgtgaaggttgttgacattgttgacactttcaggcttcaggagcaaccccctttcgacaagaagcagtttgtcgtgttcatcaagaagttcatcaagaacttgacaccaaaactggatgcggaaaaagcagagtccttcaagaaaacatt

SEQ ID NO: 232907 - DNA, 432 bp, Gossypium hirsutum
  unsure (1)..(432): unsure at all n locations
ggaaaaagcagctcactttctccttcatcaaaccccaaaaacctagctttgcctcctttttaatttcttggattttggtgaactttatgaatccaagatcagagtataaaggattcgagttttaaccccagaattaagtacatctgctctttttgatctttgggttgaaattgtctacacaaagagggtgatttagaaatggatgctgatccatggactctttgtctttcttcaactgctaggagatatcaatcagctcttcagtcacgatctgatatgtttatggggtttgaagaaatggatggagaagacgatgtaagagaggagtttccatgccctttntgttcagagtatttcgatatcgtgggcttgtgctgtcacattgatgatgaacatcctgtggaggctaacaatggggtatgtcctgtctgt

SEQ ID NO: 232908 - DNA, 429 bp, Gossypium hirsutum
cgaaaaagagggggaaaaaaagagcggtcgagattttcacagccatggcgagcaccaaagtacagaggattatgacccaacccatcaacctgatcttcaggtttctccaaagtaaagctcgcattcagatttggcttttcgaacagaaagatttgaggattgaaggccgaatcattggttttgacgagtacatgaatttggttctggatgatgctgaagaagttaacgtcaagaagaaaagccgaaagtcattaggaaggattcttcttaaaggagacaacattactcttatgatgaatagtggaaaatgattgtagatccagcagttatttggactcgtgaatgcaaaatcttcttgtcatcgtataggtcaatctactatgactatatcgtactatctttaaaaacatgccttcgtgttaggacatt

SEQ ID NO: 232909 - DNA, 418 bp, Gossypium hirsutum
cttttctcttcactccacatctcatattccttcatttctctctaaatccttccattttttgatattttttttgtaagtaaaggaacagtgaaaagcaacaggaaatggcaaatatagatatcgatgggatcttgaaggagcttcccaatgatgggcgtatccctaaaaccaagatcgtttgtactttgggtccggcttcacggtccgtacctatgatagagaagctgttgagggccgggatgaacgttgctcgcttcaatttctctcatggcagtcatgagtatcatcaagagaccttggataatcttaggtctgctatgcacaacaccggcatcctttgcgctgtcatgcttgacaccaagggccctgagattcgaactggattcctgaaggatggaaaagctgttcagctgaagga

SEQ ID NO: 232910 - DNA, 430 bp, Gossypium hirsutum
ctctcaccatgtcattgctgtctttttccttcttgttgctgtttgcttttagtgccaaagctgttgttcctccatctgaaacttttaggtttgtcaacgaaggggaatttgggccttttattgttgaatatggtgcagattaccgtgtcataagcatagctaatgcccccttccagcttgcgttttataacaccacgcctaatgccttcacccttgcgttacgcatggctacaacacgttccgagtcgctcttccgatgggtttgggaggccaacagggggaaccctgttcgcgagaacgccacgttctctctcgggactgacgggaaccttgtcttggctgatgccgatggtcggattgcttggcaaagtaacactgccaacaaagctgtggtagggttccaattgttgcctaatggtaacatggtgtt

SEQ ID NO: 232911 - DNA, 419 bp, Gossypium hirsutum
gctttcctctcctgccgatccaaagttccttcaggcatcaaaaaggacccccccgatcaaatttatcttttctggtttcgctatggcatcgaagcgaatcttgaaggaattgaaggatttacaaaaggatcctccaacatcttgcagtgctggtcctgttgctgaagacatgtttcattggcaggcaactatcatgggtccaccagacagtccgtatgctgggggtgttttccaagtgaccattcattttcctccagactatccttttaagccacccaaggtggcatttagaacaaaggtattccaccctaatattaacagcaatggaagcatttgcctagacatcttgaaagagcagtggagtcctgcactaactatttccaaggtattgctatcaatatgttcattgctgaccgatc

SEQ ID NO: 232912 - DNA, 421 bp, Gossypium hirsutum
ctagactgagatcgctccaagctccctttgattcccatcatcacaatcatgatttggacccataaatctaaaatctcccaatttcccaattctttatctgtagggttccgttcttagcttcaaatttgcaaatttagatctcaatcactcaaatcactgaaaaaacaacccagcaaaatgtacggattcgaagctatgacgttcaacatccacggcggttacctagaagcgatcgtgagaggtcaccgggccggtctcttaaccgtcgccgattacaacaatctctgccaatgcgagacccttgacgatatcaagatgcacctctccgccaccgaatacggtccttacctacaaaatgaaccttcaccattgcatacgactactattgtggagaaatgcactcttaaactcgttgatgagt

SEQ ID NO: 232913 - DNA, 396 bp, Gossypium hirsutum
attttcagtcgtcttctcttttagtcctctcgatcccaaagcaagctctcgattccgaatctctcccagaagatgcagatctttgtgaaaacccttactggtaaaaccatcacccttgaggtggaaagctccgatactattgataatgtcaaggccaaaatccaagacaaagaaggcattcctccagaccaacagaggcttatttttgccggaaaacaactcgaggatggccgaactcttgccgactacaacatccaaaaggagtccaccctccacctagtccttcgtctaaggggtggcatgcagatatttgtgaaaacccttacgggcaagaccatcaccctcgaggtggaaagttctgatacgattgataatgtcaaggccaagatccaagac

SEQ ID NO: 232914 - DNA, 429 bp, Gossypium hirsutum
  unsure (1)..(429): unsure at all n locations
gctcgatctccttacagctaccgtacacactcacacacacattcactgaatgggtcgagtcatccgagctcaacgtaagggtgctggttccgtcttcaaggcccacacccaccaccgcaagggtcctgctcgtttccgcagcctcgacttcggtgaacgaaatggctacctcaagggtgttgtcaccgatgtcatccacgaccctggtcgtggcgctcctttagcccgtgttgtcttccgtcaccctttccgttacaagaagcagaaggaacttttcgttgccgcagagggtatgtacactggacagttcgtctattgtggtaagaaggctactcttgtggtcggaaatgtattgcctcttagatctatccctgaaggagctgtcgtttgcaacgtcgagcatcatgtcngtgatcgtggggttttcgc

SEQ ID NO: 232915 - DNA, 314 bp, Gossypium hirsutum
taatatttgttcaaagctttcgattacaaatccctcgcgaaagatgcagatctttgtgaaaactcttactggtaagaccatcaccctcgaggtggaaagctccgacacaattgataatgtcaaggccaagatccaagacaaggaagggatcccccctgaccaacagaggcttatcttcgccgggaaacagcttgaggatggccgtacccttgctgactacaacatccaaaaggagtccaccctccaccttgtccttcgtctcaggggtggcatgcagatcttcgtaaaaacccttactggcaagacaatcaccc

SEQ ID NO: 232916 - DNA, 414 bp, Gossypium hirsutum
cgaactctgaaaaatccatgcaattcaatggtcaagctgagaaatgtgcgaaaagaaagaggaagaaccagtatcgtggaatccggcagcgcccatggggtaaatgggctgctgagatccgtgacccaaggaaaggggttagggtctggttaggaactttcaatactgctgaagaagctgcgagagcttatgatgctgaggcgcggagaattcgtggtaagaaagcgaaggtgaacttccctaacgagactccgcgtacctctccaaagtgtgcggtcaagacaaattctcagaaaccactttccaagtcgaatttgagccctgttcagctaaatctcaaccagaattacaattacttgagccagcctgagcaggaatacttcgataccatgggtttcgtagaagagaagccac

SEQ ID NO: 232917 - DNA, 428 bp, Gossypium hirsutum
ccatgagctacttaaccatttcccaaatctcctccctcctcttctttagcgtccttttcatttccgctcatgcagcgcgctttgaaatccgcaatgagtgctcctacaccgtctgggcagcagcctctcctggtggtggccgtcgcctagaccctcggcaaagttggaccatcgatgtgcctgctggcactgctatggctcgtatttggggtcgaaccaattgcaatttcgatgccagtggtaggggtcattgccaaaccggtgattgtggtggactccttcaatgcaaaggttggggtgtacctccaaacaccctggctgaatatgcacttaaccaatttggaaacatggatttctacgacatttccttagttgatgggtttaacatccccatggtgtttggtccaactaatggcggttgtcacaac

SEQ ID NO: 232918 - DNA, 430 bp, Gossypium hirsutum
gaattatttaagcagcacgtcacaagggatctagagcaaggttagtgaccttgggttgagtgtagagatgaggaaaatcatgggtgccaaagttcttttcttctttgctttgctttccttttcagctgtctcggcatttgcacaggatgaggaagaccaaggtcttgttatgaacttctacaaggattcttgtcctcaggctgaagacattatcaaggagcaagttaagctactgtacaagcgacacaaaaacactgctttttcttggctgagaaacattttccatgactgtgctgtccagtcatgtgatgcttcactgctgctggactccacaagaaggagcttgtctgagaaggagacagacaggagctttggcctaagggaattcaggtacattgagaccatcaaagaagctgtagaaagggaatgt

SEQ ID NO: 232919 - DNA, 422 bp, Gossypium hirsutum
ggcggtttgatcggagaatttaaccatgttcaaccggctttttggaaaacccaagcaagaaatcaatgctctaaccacgttagacaaattaaatgagacccttgaaatgctagagaagaaggagaaggtacttctcaaaaaggctgctgcagaggttgaaaaggccaaggaattcgccaaagcgagaaacaagagagcggctatacagtgcttgaagaggaagagactatatgaacaacaaatagagcagcttggcaacttccagcttcgtgttcatgatcaaatgataatgttagaaggtgctaaagccacaaccgaaaccgtagatgctttgagaaccggagctgctgcaatgaaggcaatgcagaaagcaacgaatatagatgatgttgacaaaacaatggacgagatcaatgaacaaa

SEQ ID NO: 232920 - DNA, 419 bp, Gossypium hirsutum; identical to SEQ ID NO: 199595

SEQ ID NO: 232921 - DNA, 424 bp, Gossypium hirsutum
  unsure (1)..(424): unsure at all n locations
cagaaaataggatccagcgatggcggaagatctggttctcgatacggcgatcagagattgggtgttgatacccctttcagtggtgatggttctgatcggcatcctccgctacttcgtctccaagctcatgcgctcctttcaagttcctgatcctaagatcgtcaaagaagggcaagtaatcgttagggctcggaatttacgaggtgctgcaaattttatccctcccaagtcttttcgatctcggagggtttatttcagcaatgaggaaaatggattactgtttgtccccaagggccaggctcaaaatgcgcaagcacaaatgttctctgaccctaacatggctatggacatgatgaagaaaaacctctctatgattatacctcagactctcacttttgcctgagtcaactntntcttctctgga

SEQ ID NO: 232922 - DNA, 429 bp, Gossypium hirsutum
gtcaaatgtctaatgcagctttagtcaccattgctcagaactgtccaaacttcactcgttttcgtctttgtcttcttgatccaaaaatagccgactaccggacccttcagccacttgatgtaggttttggagccattgttgagcactgcaaggatctgagacgcctttccctctctggtctcctcacagatcgtgtatttgaatatatcgggatgcatgcgaaaaagctagagatgctgtctgtggcttttgcaggagaaagcgatttggcacttcatcatgtgctttctgggtgtgaaagtctccggaaactggagattatgaactgccccttcggggacaaggctctattagcgaacgctgcaaagctggagacaatgcgatccctttggatgtcttcttgctctgtgagtctcggagcatgtaaga

SEQ ID NO: 232923 - DNA, 423 bp, Gossypium hirsutum
gagaagcagccgctcctccttccatctcctaaacaagaatggattcgcaaattaagtttgctgtggtggtgaaaataatgggaaggaccggttcaagaggtcaagtgacgcaggtgagagtgaagttcttggacgatcagaaccggttcattatgaggaacgtgaagggaccggttcgtgagggagatatcctcacattgctggagtctgagagagaagctaggaggcttcgttgaagggttatttttatactttttggggtttatgcttgttttgaattgtctaccgtattgcttttgaattacgtttagtaggtattcgtatatcgagacttgcgatttgggagaatggttgttgcttaaacctggattttatgatgattatgttgaaatgaactgaattggttttgagttttggttaaaa

SEQ ID NO: 232924 - DNA, 411 bp, Gossypium hirsutum
gtcgtatattgctggatggcattgtccctaagcatgatgcacaaatacacagagatagacccaaacgccggctattttatggcatttcggagtgtaggaatgaaacgggccaggtatcttgtagcgcttggagctcttaaggggatgaccactgtgcttctggtaggagcccttgggcaggcacgatatactactacatattgcacgagcacacatgatcccaccatggttcgcgcttgtccacccaaagactggaacaccatataaatgcgacgcttttgatgaccatttcaagtggcctgattgcatttttgtgaagcttggatgtcttagcaagcttgctatctgtgagcactctattcatattcatgatgatggctgtagcactacttgtgaggagatactatgtga

SEQ ID NO: 232925 - DNA, 310 bp, Gossypium hirsutum
gttcttgagattatttctgtttactgcaaggcctggcaacattgtatgcagccgtggactgcaaaaagagcatatcgccttgtttgtctttggggattcacagtgtgatcctggacataataactacatcgacacgattgctcggacatattattatccatatggagaaaccttattaaaatacccgactgggaggttttctgatggacgtttaattccagactacattgccgggtctgcacttgtacctctagttgcaccatatcttcaacctgggaatcatgagcttactactgatgtcaactttgct

SEQ ID NO: 232926 - DNA, 424 bp, Gossypium hirsutum
cgaacattttcacagcttaaaacacaatatgactaaggatattgagaccacggcggagcaaggcggcggagcggagttctcagcgaaggactaccaggacccaccaccggcaccgttgattgacttggaagaactcaccaaatggtcgctttatagggcggcgatcgctgagttcattgccacccttcttttcttgtatgtcacggtgttgactgtgatcgggtataaagtccaaaccgacccggtaaagaatactgttgacccggattgtggtggtgttgttatacttggtattgcttgggcttttggtggcatgatctttatccttgtttactgcactgctggtatctctggaggacacatcaacccggcggtgacgtttggactgttcgtggggcggaaggtgtcactgatccgagccctg

SEQ ID NO: 232927 - DNA, 422 bp, Gossypium hirsutum
aatttcttccgttgatctttgttagagattagctttttaatttttcattatgggaaagatcaagatcggaatcaatggatttggaaggatcgggcgtttggttgcgagagttgctctccaaagcgatgatattgagctcgttgctgttaacgatcctttcatcaccactgaatacatgacgtacatgtttaagtacgacagtgttcacggtcaatggaagcatcatgagcttaaggtgaaggactcaaagacccttctctttggtgaaaagcctgtcacagttttcggtatcagaaaccctgaggaaatcccatgggctgaggctggagctgagtatgttgttgagtctactggtgtttttactgacaaggacaaggctgctgctcacttgaagggtggcgcgaagaaggttatcatttctg

SEQ ID NO: 232928 - DNA, 424 bp, Gossypium hirsutum
tttcaaactgaaacaggcgctgatgcttcaatttttcatcttctatcaagaataaaatctagggttagggttagctaaagagggtaaacccggaaaatggaaggctgggacccgaatacgaagtcgacgctgacccagatcccgctattgacgacgaaggcgggccccagagacggagcggcatggactcagaggcttaaagaggaatacagagctctaatagcctacacccagatgaacaagtccaacgataacgattggttccgtatatcggcagccaatcccgaaggtacccgttggacaggcaagtgttggtacgtccataatctccttaagtacgagtttgatctccagtttgatatccccgttacttatcccgccactgctcccgagcttgagttgcccgaactcgatggcaagactc

SEQ ID NO: 232929 - DNA, 424 bp, Gossypium hirsutum
ctctgcagtattttgctggaaagaagagagcgaacatggcgataggagttaaggccttgcacttgtcgtttgtgcctcatgccctcgcgattgccggcgctgttatggtattggtttggtgcattcacttcaggggtggattagcttgggaatcttctaacaaaaatctcatctttaatctccatcctgtattgatgttgattggcttcattatcttaggaggtgaagccattatgagctacaagtctttgccactgaagaaggaagttaagaaagtcatacatcttgtgctccatgccactgctctgattctaggcattattggaatctatacggcattcaagaatcataatgagagttcaatacctaatctctacagcgtgcattcttggctggggattggaatcattaccctttatggcat

SEQ ID NO: 232930 - DNA, 413 bp, Gossypium hirsutum
aaaagaaaagaaaaaatacagtgaaaatggcaacccttaaggttccagctcatgtacctgccccttctgaggatgctgagcaacttcgtaaagcttttgaaggatggggtacaaatgagcaattgattatcgacatattggctcacaggaatgcagctcagcgcaatttgattcgtaaaacttatcgtgaagcttatggggaagatctccttaagtctttggatgaggaactttcaagtgactttgagcgagctgtggtgctgtttactttggaccctgcagagcgtgatgcatttctggctcatgaagctacaaagaggttcacatcaagccattgggttctcatggaaattgcttgcactaggtcttcacatgaactgttcaatgtgagggaagcgtatcacgatctttac

SEQ ID NO: 232931 - DNA, 424 bp, Gossypium hirsutum
aaaaaaaagagataatcaacttgtcagaaggaagaagatatgggaagcgagtcatacgaggaagccattgcagctttgtcgaagcttctcagtgacaaagctgatctcgggagtgtcgccgccgcaaaaatcaagcagataacagccgagttagaggcagctgccgattccactcagttcgacccggtcaagcggctcgagaccggtttccttcacttcaagaaagaaaaatttgacaaaaatcctgatctgtacggtgcacttgccaaagggcaaagtcctaagttcttggtatttgcatgctccgactctcgggtgtgcccctcccacatcctgaatttccaaccaggggaggcttttatcgtccgtaacattgccagcatggtcccgccctatgacaagaaaaaatactctggagctgggg

SEQ ID NO: 232932 - DNA, 416 bp, Gossypium hirsutum
tttcggttgaaaatttgtttaaaaaagagggtgatttagaaacaatggatgctgattcatggagtgctcgtctttcttcagcttctaagagatatcaatcggctcttcaattacgatctgatatgcttatggggtttgaagaaattgatggagaagatgaaataagagaggagtttcgatgccctttttgttcagagtatttcgacatcgttggcttgtgttgtcacattgatgatgagcatccagtggaggctaaaaatggggtttgtccagtctgtgcaatgagggtgggcgttgatatggttgcgcatttaaccctacaacatggaaatatatttaagatgcagcgcaagaggaaatcacgtaaaggtggatctcattccacgctttctcttctgaggaaagagctgcgagaa

SEQ ID NO: 232933 - DNA, 418 bp, Gossypium hirsutum
aacataccacacaacagccttttgattagcctctttctatttgtcaaaaatggcaacatcagcagtttctgcaacttctcttctgcttttcatcttcggtttttgcttgcgaggcgcctttggtgattatgggggaggatggcaaggtggccatgctacattctatgggggcggtgatgcatctggcacaatgggaggcgcttgtggatatggtaacttatatagccaaggttatgggaccaacactgcagcacttagcactgctttgttcaacaatggcctcagctgtggttcttgttatgaaatgaggtgtgatagcgaccccaaatggtgcctgcctggatccattaccgtcactgcaaccaacttctgtccccctaacttggccttgtccaatgataatggtggctggtgcaat

SEQ ID NO: 232934 - DNA, 428 bp, Gossypium hirsutum
gagaagcagtactccttccattccaactcagcgctcactcaatccaactcaccaatgggcgcgcaagacggaaatcagcaatcacagcaactcatccttggtcacaacgtcttgctgctgaagcatacagatgtccctgacatcgagaaggtccgtctcaaggatgaagtcctgaactcggttaaatccaatgaaatggctccgtattatgaaaccctaggtgccgattaagtggttgagctggatcagaacgttttggacgcgatgcgtgccaagaatgaggaggagattaagaagctcgacgagaagattgctgatgctgaagaaaacttgggtgaaagtgaaggtcgagaagcacatttagctaaatccttatattacattcggataggtgataaggagaaagcatcggagcaacttaagttgac

SEQ ID NO: 232935 - DNA, 399 bp, Gossypium hirsutum
cttaaccatttaccaaatctcctccctcctattctttagcgtccttttcatttccgctcatgcagcgcgctttgaaatccgcaatgagtgctcctacaccgtctgggcagcagcctctcctggtggtggccgtcgcctagaccctcggcaaagttggaccatcgatgtgcctgctggcactgctatggctcgtatttggggtcgaaccaattgcaatttcgatgccagtggtaggggtcattgccaaaccggtgattgtggtggactccttcaatgcaaaggtgggggtgtacctccaaacaccctggctgaatatgcacttaaccaatttggaaacatggatttctacgacatttacttagttgatgggtttaacatccgcatggtgtttgacacaac

SEQ ID NO: 232936 - DNA, 423 bp, Gossypium hirsutum
gaagatgctttgcaaggatgtgctaccactgtttgccctcccatcttcatctgcatctgtatctgtttcggttcctatttcagtaacatactacaaggatgcttccacatctgtctcatcttaccagactcacgaacacgggtttatagattatatttctttccaaatccccggtgactcttcctcaaatattgctaattgtataggcatatcaaggagattcatgcacagtttgagcaatagtagtattgaggaatctgcttctttggaagctgttttgctttctgttcctgatggttatcactgtgtggatctatctttatataaggaaggccaaattgttttgctattaaatgaaacaacttctgcttctgaatgctccggtgaatcttgtatgatgatcgtccaagctgatgatctccc

SEQ ID NO: 232937 - DNA, 426 bp, Gossypium hirsutum
tatcactagatgaagcttttgacaagttctaccatggaatctctgcgcatggaccattttttgatcatgtattgggatattggaaggcaagccaagaaaaccccaacaaaatattgtttttgaactttgaagatctcaaggaagatatggattcccacttgaaaaatttggccatgttcttaggagttcctttcaccgatgatgaagagacacaaggagttgttgaaaaaatatcgaaaatttgtagctttgagaacttgaaagaattggaagtgaacaagaagggcgtacatactactggaattccacacacacatttttttaggaaaggagaagtgggagattggagcaattatctcacacccttcatgattgaatgtttggagaagcttattcaagagaaattgaatggctcgggtttaacat

SEQ ID NO: 232938 - DNA, 426 bp, Gossypium hirsutum
gtcagttttccttttgtttttgtcgtatgtagtcgtaggatcagctgagcagtgtggaaggcaagcaggtggtgctctttgccccggtggtctatgttgtagccaatttggctggtgtggcagtactgctgactactgcacagttcctggttgccaaagtcagtgcagcggtagtggccctgcccctgggcctggtgggctaaccaatcttatatcaagagagacgtttaatcggatgcttttgcataggaacgatggggcttgtcctgcccgtggcttctatacatatgatgctttcattgctgctgcccgttcctttcctgcatttgctacaactggtgaccaagctactcgcaagagggaaatagctgccttcttagcccaaacttcccatgaaactactggtggggcagggtgggctgcacc

SEQ ID NO: 232939 - DNA, 425 bp, Gossypium hirsutum
ctttccagcaagcaagcaagcatgtattccacaccttgcctggaatcccaaatcctataaaccctaaattcacaatcacaaccccactttcacaatataccttactagagaaaaagagcccctattacgttcattgattcactatcattcctttgaacatcttagattatcttgactccaagtcattcacacaaccttaattagattcttaagttttcttacctgggtattatgcatagatctggagcaacgatggcctggaacgtcttcaagttttgtacagctctgaggggtctgggatcgatcatgatcctgttggttttaggggtcgtgggtgtctcatactactctgtcgttttgaccaattttggccctgctttgtacgatggtggccttgattcccttactgctgttgtcgtcttgat

SEQ ID NO: 232940 - DNA, 428 bp, Gossypium hirsutum
ttttcctcgttcatttttgtctcgctcaaaaaatccaatggcggaaacagatcaggcgccgccgccgtcggaccaactcgccgcgctgaacttgactgacaccgttgagaaacacgcattttctgaccgtgtcctgatccgttccatcgtgggccggccagatggcggggctggccttgctgggcaacgagtccgggccggtggttgggtaaagacagggagagagcaagggaaaggaactttcgccttcttggaattgaatgatgggtcgagcccggcgaacttgcaggtgattgtggacgccggactggctgttctgagcaagctggtggcgaccggcacctgcgtgatggtggatgggatattgaaggtgccacctgaaggcacgaggcagaagattgagcttcgggtcgaaaaagtgtttcttt

SEQ ID NO: 232941 - DNA, 379 bp, Gossypium hirsutum
cttttagtcctctcgatcccaaagcaagctctcgattccgaatctctcccagaagatgcagatctttgtgaaaacccttactggtaaaaccatcacccttgaggtggaaagctccgatactattgataatgtcaaggccaaaatccaagacaaagaaggcattcctccagaccaacagaggcttatttttgccggaaaacaactcgaggatggccgcactcttgtcgactacaacatccaaaaggagtccaccctccacctagtccttcgtctaaggggtggcatgcagatatttgtgaaaacccttacgggcaagaccatcaccctcgaggtggaaagttctgatacgattgataatgtcaaggccaagatccaagac

SEQ ID NO: 232942 - DNA, 401 bp, Gossypium hirsutum
actacttcaatcttagagcgcacagatatgagatgtccgtgattgaaatttatgaccagtctcgggctgacaacaaagacgtttggaagcttgttcttggaaagcacaaccttacttcaccaatttctttattttctcgacctgaggtcataacaaaatcacagtcctacttttttactcattctttgaaagctatagctgtgacatctacggcaaagggtataacttccaagcagcttctccttggtacaattggtgatcaggttttggcacttgataagcgtttcctagatcctcgtcgaacagttaatcctacacaagcagaaaaggaagaagggattataccactaacagattcattacccatcattcctcagtcctacgttacacatgcgctgaga

SEQ ID NO: 232943 - DNA, 413 bp, Gossypium hirsutum
tgagctttggcaacgctgctgttttggcttatgtccgccatgaacgtgctgcttcagttcatcagaggttgttttgtgggtttgatgacatatactgccttttcttagggagcttgaacaatctatttatgctgaatagacagtatggtctttccaaagggagcaatgaggcgatgtttgtgattgaagcatataggacactaagggataggggtccataccctgctgatcaggttgttaaggatcttgaaggaagctttgcctttgtgatctatgacagcaagactggaaccgtgtttgctgcactggggtctgatggtggagtgaagctgtattgggggattgcagctgatggctctgtggtcatatctgatgatttagatgtcattaaagaagggtgtgccaaatccttt

SEQ ID NO: 232944 - DNA, 426 bp, Gossypium hirsutum
aggcaataaagtgaaggaaatggagtcaccattcagagcaaatatactgaaacgcaaagtagctttggtaacaggaggaggctcaggaattggattcgagatctcagtgcagctggggaaacatggagcctcagttgccatcatggggcggcgcaaacatgttctcgactctgctgttgatgttcttcgttcccatggcatccctgccataggacttgagggagatgttagaagagaagatgatgcagctagaactgtggaatcaacttttaagcattttggcaggcttgacatccttgtcaatgccgcagctggcaatttccttgtgcctgctcaggatttatctcccaatggctttcgaacagtcattgatatagattctattggaacttttataatgtgtcatgaggctcccaaatatcttaa

SEQ ID NO: 232945 - DNA, 371 bp, Gossypium hirsutum
gattgaaatttatatatatatatatttgatccaagaacattaaaaaccaatagtgtatactaatgtcaaagcctaaaaatgaaaagggggagaaacggtaataactaatccatagtgtgggggagtgaaatctacacattctttggaacatggtttcatttgctcatttagatacctccattaaagtaatgagcttcttggacgaatcgggaccaataccagtgagatctacagactcggttcatctattctattggaataccctcggactcaggcaagaagttgtccacacagatcgacatttccaccacaaagattgcgaagaacaggaatagcccgaatttgaagtggcaaagcatggataagaacac

SEQ ID NO: 232946 - DNA, 424 bp, Gossypium hirsutum
cacaaattgcagctgttggatcctgctgcctggttggtgtcatatgtggtggaaccctctatgttgccaaccttggtgattcacgtgctgttttggggagagctgtgaaggcaacaggagaggttctagccattcagctgtcggctgagcataatgtgtgcatagaatctgtaagacaagagctgcagtcattgcaccctgatgactcacagattgttgttttgaagcacaatgtatggcgtgtaaaaggtcttatacaggtttccagatcaattggtgatgtatatttgaaaaaggccgagttcaacagggagcctttatattcaaaattccgccttcgggaacctttgaaaaggccaatattaagtgcagacccatcaatatcagttcaccaactgcagccacatgatcagtttgtgatatt

SEQ ID NO: 232947 - DNA, 414 bp, Gossypium hirsutum
ctttgatcgcccaggacagggttttcatgccctttatgcaggcggatagctcaacctctagaaattatggtgggactggcataggcctgagcattactaagtgtttggttgagctaatgggtggtcacataagcttcatcagcagaccacaagttggaagcacattctcattcaccacggtctttgggaggtgtaaaagagcttcatttagtgatacaaaaaaacccaatgctgaagatcttccatctggtttcagaggattgaaagctgtggtagttgatggaaaaccagttagagctgctgtaactcgataccacttgaagaggcttggcatgctggttgaatttgcaaatagtgtcaaaatagctgcttctgcttgtggtaaaaatggttcttcatgcggaagtaaaactc

SEQ ID NO: 232948 - DNA, 425 bp, Gossypium hirsutum
gcctaaagcactactccttccagtctcaaaagatgcttcaactctccaatatctcactcaaatcaagcaaagaacccctttagtgcctatcaagttgacccttgatcttggtggtgaatatctctgggtcgattgtgaccaaggctatgtctcatcttcctacaagcctgcccgttgtaactcggctcaatgcaacttggctaggtctaaggcttgcggaagttgcttcgatggtcccaagccaggctgcaacaataatacttgtagtctcctcccatccaacagcgtcaaaaacagtggcaccattggcgaggttgcccaagatgttgtatccatccaatctaccaatggaaagaatcctgggaaagaagttacagtgtctaagtttctcttcacttgcggttcttcttttctcttggacggtc

SEQ ID NO: 232949 - DNA, 406 bp, Gossypium hirsutum
aaccaccccactactaaaaagcccacaccgaccttcactttactatgttaacctaaccggaataagtgtaggccgggttcaagtccccattgccccggaatacctagcgtttaaccccaacaccggggcagggaccataatagattcgggtacggttgtaacccgattcgtccagcccatttacaaggcaatccgagatgagtttgtgaagcatgtgaaaggtccatttactgccattggagtatttgacacatgctttgatgctacagcagaagctgaggcacctttaataacattacatttcgaagccttgtcgatgccattgccaatggaaaacagcttcttacacaccagtgccgggtctcgggcatgcttggccatagcaccggtccccaacaatgtgaac

SEQ ID NO: 232950 - DNA, 419 bp, Gossypium hirsutum
ccgtcttcaaacacttcgaatcgttttccaattactctgacaagatgcaaatgtttgttaaaaccctcactggcaagaccatcaccctcgaggtggagagttcagacaccattgataatgtgaaggctaagatccaagataaggaagggatcccaccggatcagcagaggcttatatttgctggcaaacaacttgaggatggccgcacgctagccgactacaacattcaaaaagaatccacccttcacttggttcttcgacttcgtggcggcatgcaaatctttgtcaagactctcactggaaagacaattaccttggaggttgaaagctctgacacaattgataatgtaaaggcaaagatccaagacaaggaagggatcccaccagatcagcagaggcttatctgtgctggaaagcag

SEQ ID NO: 232951 - DNA, 441 bp, Gossypium hirsutum
gcgccacgcgtccgacctggccaagcggatgaagaaaggggtcgacggcgtggaaggggtagaagcggttctttatcgggttcccgagacgctcccggctgatgtgctggaccatatgaaggtgccgtcgaaaaaccccgaggttccagagattaaagcggcggaattggcgcaggcggatggggttctgtttgggtttccgacgaggtttgggtgtatggcggctcagatgaaggcgtttttcgattccagtggacagttttggaaggagcagactctggccgggaagccagctgggttctttgttagtactggaactcaaggaggcggccaagaggccaccgcttggacggcaataacgcagttggcacaccatggaatgctgtttgttcctattggctacacttttggagctggtatgttcaagatggattccatacg

SEQ ID NO: 232952 - DNA, 418 bp, Gossypium hirsutum
accggaactgtgaaatccctcatgaaggcccattctgcgatctcatgtggagtgatcctgaagatattgaaacatgggcagtcagtccacgtggagcaggttggctatttgggtccagggtcacatctgagttcaaccacataaacaagcttgatcttgtttgtcgagctcaccaacttgtgcaagaaggtcttaagtatatgtttcaagataaaggcctagtaacagtgtggtctgctccgaattattgttaccgttgtgggaatgtagcttctatattgagcttcaatgagaacatggagagagaagtaaagttcttcaccgaaacagaagagaataaccagatgcgagggccgaggactggagttccttacttcttgtaatccaaatgagttgcatactgcagtgcctgtaaaat

SEQ ID NO: 232953 - DNA, 419 bp, Gossypium hirsutum
caattattggagaacgtaactgttattgtggatgcttcagaggctgaggaatttgctgaagtagcttcaaagcctttaagacaacttccatatgattcacccggacagaccttcgtggcatttgaaaagccagagggggtctcagctgttggaaagttttcaaatatgctgaggttcattgtaaaagaggttgatccaagtactggcgaggctgaggatgacggagtagaggacgagtaccaactggaggaccttgaacttgttgcagccgattacatgttgaaggtgggtgtctctaatttcaggaatgcatgggaaagcatgggtgtggactttgaacgtgtaaaatgaatatggccttggcccaagggatagcctagccgaagctgtaaatgctgtcattaatcttctcggcatgc

SEQ ID NO: 232954 - DNA, 430 bp, Gossypium hirsutum
aaactatgacactgttaacaagctctttgaagaaggccgaaccaagatatggcctcctgcatcactagaagagaaggtccagaaccttgtgaagacatgggaaatggaaatgttcaataaaatatccttccctgactacaaatcagtgaaactacagaattatacagtcagcgtgaatgggaggaaacctttgagtttagaagagaagaggaagctgggaggaggctataattcctttatgcaaacctccttaccagaggacctgaggggctataatccagcacaagaaactgaacactcctcacatcttgccttcacaacagctttcccaagaggatttgctttggaagttatccaagtctactctggcccgccatcgattgtgtataagttcaggcactgggggtataaggaaggtcctttcaaaggc

SEQ ID NO: 232955 - DNA, 406 bp, Gossypium hirsutum
tccaaatctctcaaaaccttcattacattccactcactccgaacaacctccctccaccaacatggggaaaacacgtggtatgggagctgggcgcaagctgaggacccaccgcaggcggcagaggtgggctgataaggcatacaagaagtctaaccttggaaatgaatggaagaagccatttgccggttcttcccatgctaaaggaattgtccttgagaagataggtatcgaggctaagcagccaaactctgccatccgaaagtgtgctagagttcaattgatcaaaaacggcaagaagattgctgcttttgttccaaatgatggttgcttaaactacattgaagagaatgatgaggtgttgattgctggatttggacgaaagggtcatgcgggtggtgatattcct

SEQ ID NO: 232956 - DNA, 411 bp, Gossypium hirsutum
acttgctcaaatagaactgtccaactcaaactagagatatcttgtcattttgggtaattttctctcattcgcattttccaaaacataatcgagctttgaacttgaagatgggtgctgaaaagaatttcattgacatggaggagggaactctggagatcggaatggagtatagaactgtgtccggtgttgctggaccattggtcattcttgacaaagttaagggtccaaagtatcaggagattgtcaatattcgtttgggtgatggaacaactcgacgaggtcaagtcttggaagttgatggagagaaagcagttgtgcaggtttttgaaggaacatctggaattgacaacaaatacacaactgtgcaatttacaggagaggttttgaaaacctctgtgtcattagatatgc

SEQ ID NO: 232957 - DNA, 409 bp, Gossypium hirsutum
ctcgcctgcgagaagaagccgacgccgccatggttcacgtcagtttctaccgcagttatgggaagacatttaagaagccaaggcgtccatacgagaaggaacgtttggatgctgagttgaggcttgtaggagaatatggtctacgatgtaagagggagttgtggagggttcaatatgcttagagtcgaatcagaaatgctgctagggatcttcttactgttgatgagaagaaccctcgtagcattttcgaaggtgaagctcttcttcggaggatgaacaggtttggacttttggatgagagtcacaacaagctcgattatgtcttggcttttaccgttgagaacttccttgaacgccgtttgcaaacacttgtgttcaagactggtatggccaagtcaattcaccatgc

SEQ ID NO: 232958 - DNA, 406 bp, Gossypium hirsutum
  unsure (1)..(406): unsure at all n locations
gaaatgattcttgtttacgagtatatggctaatggaccccttagaagtcatctttatggaacaaatctacctcctctgtcatggaagcaacgacttgaaatatgtattggtgctgctaggggacttcattatcttcacactggtgcagcccaaagcattattcaccgtgatgtgaagacaacaaatattctcttggatgagaattttgtagccaaagtagcagattttggtctttcaaaaactggtccagctttagatcagacacatgtgagtactgctgttaagggtagcttcggttaccttgaccctgaatatttccggaggcagcaacttacagagaagtctgatgtgtattcatttggngttgttctgatggaagttctctgcactaggccagctttaaatc

SEQ ID NO: 232959 - DNA, 427 bp, Gossypium hirsutum
gctttcttcaggccttgtcaattttccttttgcttttgttgtatgtagtcgtaggatcagctgagcagtgtggaaggcaagcaggcggtgctctttgccccggtggtctatgttgtagccaatttggctggtgtggcagtactgctgactactgcacagttcctggttgccaaagtcagtgcagcggtagtggccctgcccctgggcctggtgggctaaccaatcttatatcaagagagacctttaatcagatgcttttgcataggaacgatggggcttgtcctgcccgtggcttctatacatatgatgctttcattgctgctgcccgttcttttcctgcatttgctacaactggtgaccaagctactcgcaagagggaaatagctgccttcttagcccaaacttcccatgaaactactggtggggc

SEQ ID NO: 232960 - DNA, 406 bp, Gossypium hirsutum
ccaaattaaaagcttaaaccaacaaaaaaaaaattgaagcttgcacactccaacaatggctaccgaaacagtagagtctttgcctcctacattggaagctaatgctgagcaacctccattgtttgatggaactaccaggttgtatacttcttatccttgcccttttgcacaacgtgtgtggatcaccaggaattataagggattgcaagatgagattaaacttgttcctttgaaccttcaaaatagacctgcttggtacaaggaaaaagtttaccctgtaaacaaggtgccatccttggaacataatggcaaaatcattggggagagtcttgatctgattaaatatgttgatagcaactttgaaggaccttctcttgtaccaaatgatcctgacaagaaaaggacc

SEQ ID NO: 232961 - DNA, 430 bp, Gossypium hirsutum
ctcgtgtgttcctccccaggcagaagccgcttgatacgaacaagttccctctcatagtttattaccatgcaggaggcttcatccactgcagtgcggcatccacgatcttccatgttttttgctcaaacatggcgttggaactccaagccatcgtcgtgtccgtcgactatcgtcttgctcctgagcataggcttcctgctgcttacgacgacgctattgaagcgttgctctggatcaaaaccacccaagaagagtggttgacacaatacgcatatttcaccacttgtttcgttatggggtcgagttcaggtgctaacatagcctaccatgcaggaatacgtgtggcggaagaagccgactgtcttcgaccctggaagatccgagggctaatattgcaccaaccattcttcggcgggtccgtaaaggttga

SEQ ID NO: 232962 - DNA, 415 bp, Gossypium hirsutum
agaaaagcagcgtaatgggtgaagaagtgaaggtttttggatactgggcaagcccttacagctacagggcagagcttgctttgaagttgaaaggtgtttcttatgagtacataaatgaggatatctttggcaacaagagcgatttgcttttgaaatacaatccggttcataagaaagtcccggttcttcttcacaacgggaaaccaattgtagagtctcttgttatacttgaatacattgaggaaacttggaagcataatccctatttgccacaagatccttatgacaaagctaccgctcgattctggatcaagttcatcgacgaaaagtgctttcctaccctttggctagctgcatggagcgccgagaatgagcgagaaaaagtgacgaatgaagcttgcgagtatctgaaaac

SEQ ID NO: 232963 - DNA, 423 bp, Gossypium hirsutum
ctcactcaacattcccatttccaatctccagctcccaaggtaaatatgccgatcagaaacatagcagttggccggcccgaagaggcgactcaccccgatgctctcaaggcagctttggctgagttcatctcaaccttgatcttcgttttcgctggatcgggctcaggaatggcttttaacaagttgaccgacaacggagcaacaaccccggccggtctcgtagccgccgctctagctcatggcttcggtcttttcgtcgctgtctccgttggcgccaacatctcaggtggccacgtcaaccccgccgtcaccttcggtgctttcgttggcgggaacatcactctcttgcgcggcattctttactggatcgcccaactcctaggctcaaccgtcgcttgcctgttgcttaagttcgctaccggc

SEQ ID NO: 232964 - DNA, 422 bp, Gossypium hirsutum
ggaacatgggcagctcatccaggtctcatcaaaacatgcatggaagttttcaccaacaccatggggaactctccgaaccaaatcgaaactgtcaagcgcgaagacgcttccaacttaactgaagacgatttattacaaaggcctcgaggtgttcgtacgatggaaggccttcgtttgaacactcgtgtcgggatccaatacttagcagcttggttaaccggttcgggttcggtcccgctttataacctaatggaagatgctgcgacagccgagatcagtagggttcaaatctggcagtggttgaaatatggtgttgaattagacggtgatggacttggggttcgagtgaaccatgtgttccgggcgagtggttgaagaagaaatggctcggatcgaacgtgaggtcggaaaagagaagttta

SEQ ID NO: 232965 - DNA, 424 bp, Gossypium hirsutum
ggagcaaaaagattgtgggggtgttttacaaggccaatgagtactttacgaagaatcccaactttgttggttgtgtggagggagccttggggttgcgccaatggctcgaatcacaggggcatcagtatatcgttaccgacgacaaagaaggaccggactgcgaacttgaaaagcatatccctgatctccatgtgctcatatcgaccccattccacccggcttacgttacggctgagaggatcaagaaagccaaaaacttgcaactgcttctcacagcagggattggctccgatcatgttgatcttaaggcagctgcagaagctggtttgactgttgctgaagttactgggagcaatgttgtctcggttgctgaggatgagctaatgagaattcttattcttgttcggaattttgtacctggtta

SEQ ID NO: 232966 - DNA, 425 bp, Gossypium hirsutum
ctcgaaggctaggtatgatgaaattgtgaaggaagtctcttcctacttgaagaaggtgggatacaaccctgacaagattccatttgttcccatttctggttttgagggtgacaacatgattgagaggtctaccaacttggactggtacaagggccctactcttcttgaggctcttgaccagatcaacgagcccaagaggccttcagacaagcctctccgtctcccacttcaggatgtgtacaagattggtggtattggaactgttccagtcggccgtgttgaaaccggtgtcttgaagcctggtatggttgtgacctttggcccgtctggtctgacaactgaagttaagtcagttgagatgcaccatgaagctcttacagaagcactttccggtgataatgttgggttcaatgttaaaaacgttg

SEQ ID NO: 232967 - DNA, 228 bp, Gossypium hirsutum
gatatgatcaatgaagttgatgctgatggaaatgggaccattgattttcctgaattccttaacctaatggcaaggaagatgaaggatactgattccgaggaagaacttaaagaggctttcagggtgtttgacaaggaccagaatggtttcatatctgctgctgagcttcgccatgtcatgacaaatctcggtgagaagcttacagatgaagaagttgatgagatgatc

SEQ ID NO: 232968 - DNA, 420 bp, Gossypium hirsutum
acggatctcatgagcaccattcaacgcgaccctccttattgctgcttggctttttggtgtggcccatgtgtatcctacatgctccggaaacgagctctttataatgacatgtcaaggtatacatgttgtgctggttatatgccatgcagtggtaggtgtggtgaaagtaaatgtcccgagttttgcctttgcactgaggttttcctctgctgttgtaactccgtggcttcaacccggtttctgctgcaagatgaattcaacattcaaacaacaaaatgtgacaactgcatcattggtttcatgttttgcctgcaacaagttgcctgcatattttccatagttgcaatgattgttggaagtgatgagcttcaagatgctgcacaggtgctgaactgtttggctgatatggtttattgcacg

SEQ ID NO: 232969 - DNA, 259 bp, Gossypium hirsutum
ggaatgaattatttgcatgagaataaaccaccaataattcatcgtgatcttgagccttcaaacattttgcgggatgactctggacatctgaaagtcgcagattttggtgttagcaagctgctcacagttaaagaagttaaacctctaacatgtccagtgacatcttgtcgatatgttgccccagaggttttcaaaaattatgactatgataccaaagcggatgtgttttcatttgccctgattctacaggagatgattg

SEQ ID NO: 232970 - DNA, 426 bp, Gossypium hirsutum
aagagatataattgaaagaaaagaaaaatggttctgctagagaaactttgggatgatgtagtggccggacctcaaccggaacgtggccttggccggctgaggaagatcacaaccaccccacccttgtccaccaaagatgaggcttcatcaatggcgatgccgacgagtccgacgacacctgggacaccgtcgacgccggtgtcggctcgtagggacaacgtgtggaggagcgtgttcaatccaggtagcaaccttgcaaccaaaggtattggcgctgaagttttcgacaagcctcaacctaactctcctactgtttatgactggctttacagcggtgagacccggagcaagcatcaccgctgattgggcgatggctgacggcggcggagggtagcataaccactagcagagggtgctgctactgaa

SEQ ID NO: 232971 - DNA, 421 bp, Gossypium hirsutum
gaaagatccacccacttcttgcagtgctggtccagtagctgaagacatgtttcattggcaagcaacaatcatgggaccctcagatagcccttatgctggaggtctgtttttagttactatccatttccctccagattatcctttcaagcctcctaaggtcgcgtttaggaccaaggtcttccatcccaacatcaacagcaatggaagcatttgtcttgatatcctcaaagaacaatggagccctgcactaaccatttccaaggttctgctctcaatctgctcgttgctgaccgatccaaaccctgatgaccctcttgttccgtagattgctcacatgtataagactgatcgggcaaagtatgaagccactgctcgtagctggacccagaagtatgccatgggatgacaagtgttggtgtgt

SEQ ID NO: 232972 - DNA, 180 bp, Gossypium hirsutum
ctccagcttgtgcttcgtctcaggggtggcatgcaaatatttgtcaaaaccctgactggcaagacaatcacccttgaagtggaaagctccgacacaattgataatatcaaggccaatatccaagacatagaaggtatccctccagaccaacaaaggcttatctttgctggtattcaactg

SEQ ID NO: 232973 - DNA, 422 bp, Gossypium hirsutum
gggacaacaacaggcagctcttcttccttttctgcgtctcatcatcaaaccccaaactcttaactagcctcttcctcctcctctttactttaatttcattttgctttcacaaatctaagaccagagctccaaaagattgaatttttaacccctcaaattaaaatccttcctttttcgcgttttcggttgaaaatttgtataaaaaagagggtgatttagaaacaatggatgctgattcatggagtgctcgtctttcttcagcttctaagagatatcaatcggctcttcaattacgatctgatatgcttatggggtttgaagaaattgatggagaagatgaaataagagaggagtttcgatgccctttttgttcagagtatttcgacatcgttggcttgtgttgtcacattgatgatgagcat

SEQ ID NO: 232974 - DNA, 424 bp, Gossypium hirsutum
tcttggtgggttttgagtgtaaatggtgctaatttaccaccatgtcaattccctgctatttacaactttggtgactcaaactcagacactggtgggatttcagctgcttttgaacccattagagctccatatggtgtgccctattttcacaaaccatctggtagagactctgatggtcgcctcatcattgacttcatagctgagagacttaagttgccatatcttcatgcatatttgaattccttgggagcaaatttcaggcatggagcaaatttcgctactggtggatcaaccataagaagaccgaatgaaaccatttatgaatatgggataagtccatttggtttagatatgcagattatacaattcgaacagttcaaggcaagggctactgaaatgtataatcaagctaaagatccttctg

SEQ ID NO: 232975 - DNA, 426 bp, Gossypium hirsutum
aaagttttcttttataatctttctattctctgaccaaagatcatataaaatctcacaattttccagcaatcgctaaaaaataataaaaatctcaaatccgatcccatggcttctcgtcggcgtatgctgttaaaggttataattctcggtgatagcggggttgggaaaacatctctcatgaatcagtatgttaatcgtaagttcagtaatcagtacaaagctacgattggagccgattttttgacaaaagaggttcagtttgatgatagattgtttacattgcagatatgggatactgctgggcaggaaaggtttcaaagtttaggtgtggctttctatcggggtgctgattgctgtgtacttgtgcatgatgttaatgtcatgaagtcctttgataatcttaacaactggcgagaagagtttctg

SEQ ID NO: 232976 - DNA, 424 bp, Gossypium hirsutum
agcaaaccctaaccctaaactttcttttcttcatctttttttttcctctcaatcgcgataatgtctcacttcggaaggtcaggcccgcccgacatcaccgacacctactcccttctcgtcctcaacattaccttccgcacgactgctgatgatttgtttccgctcttcgacaagtacgggaaggtcgtcgacatcttcattcccaaagatcgaaggactggtgattctcgaggctttgcatttgtgcgctacaagtatgccgatgaggctcagaaagctgtagataggctcgatgggagagttgttgatggtcgggagataactgttcagtttgcaaaatatgggcctaatgcagagagaattcagaaaggaaggattattgaatcatttccaaagtcaaggagccgcagtcctcgcagaaggc

SEQ ID NO: 232977 - DNA, 412 bp, Gossypium hirsutum
  unsure (1)..(412): unsure at all n locations
agtgtatgggttttatgatgagtgcctaaggaagtacggcagtgccaacgtttggaagatcttcactgatctgtttgattattttccactaacagcattggttgaatctgaaattttctgtctccatggtgggttatctccatccattgaaacactggataacatacgtaactttgaccgtgttcaagaagttcctcatgagggtcctatgtgcgatcttttgtggtctgaccctgatgatcggtgtggatggggcatttcacctaggggtgccggatatacctttggccaagacatatccgagcaatttaaccatacaaacagtttgaagctgattgctagggctcatcagctggtcatggaaggatacaattggggtcatgaacatnaagttgttactatattcagtgcg

SEQ ID NO: 232978 - DNA, 403 bp, Gossypium hirsutum
atttgaagccacctgcctgcccctttctcaattcgccggaatgaagctcatcatcaaaaccctaaaaggcagtcactttgaattagggttcagcccaatgataccgttatggctgtgaagaaaaacatagaggatatacaagggaaagacaattatccatgtgggcaacagctgttgattcataatgggaaggttttgaaagatgaaactactttagctgaaaataaagtatctgaggatggttttctggttgtcatgcttagcaagagcaagtctctgggttcaactggagcctgttctgctcagcctgcttcatcaactccatctaccactgttgctgcttctgcgccttcttcaaattctacacctgccacaggagctcctgcacaagcatctcaacaaa

SEQ ID NO: 232979 - DNA, 424 bp, Gossypium hirsutum
ttaacacattggaggatggtttcggcagaacatgactccagcagtaattgccagcgttgaaacaatgctagacaagtggcaagagaaagaaggagaagagatcgaagcgttccaaggatttagattgttgacttcagaagtcatatcaagaacagcttttggtagcagttacttggaaggagagaagatcttttacatgttgcagaagctcgcagatattgtgagccgcaatacaaacaagtctaggattccaatcctcagcaagttttggaaaactgacgatgacatagagtcagaaaaacttgctagagaaatacaagatttggtgatagagattgtgaagaaaagagaaaacaaagttgcgagtggaggagcagagagcttcggctgtgattttctgggattattagtaaaagcgtttaat

SEQ ID NO: 232980 - DNA, 420 bp, Gossypium hirsutum
tattcttcacaaaaaagaaaagaaaaaatacagtgaaaatggcaacccttaaagttccagctcatgtacctgccccttctgaggatgctgagcaacttcgtaaagcttttgaaggatggggtacaaatgagcaattgattatcgacatattggctcacaggaatgcagctcagcgcaatttgattcgtaaaacttatcgtgaagcttatggggaagatctccttaagtctttggatgaggaactttcaagtgactttgagcgagctgtggtgctgtttactttggaccctgcagagcgtgatgcatttctggctcatgaagctacaaagaggttcacatcaagccattgggttctcatggaaattgcttgcactaagtcttcacatgaactgttcaatgtgaggaaggcgtatcacgatc

SEQ ID NO: 232981 - DNA, 416 bp, Gossypium hirsutum
ctgtaatccaagcttctattcagttttgtaagagctatggctaaggacattgaggttggtggtgagttccaggccaaggactaccatgatcctccacccgctccattggtcgacgctcaggagttagccaagtggtctttttacagggctgtcatagctgagttcattgccactctcctctttctctacatcactgtcttgactgtgatcggttacaagacccagaccgaccctgctaagggcggtgaagattgtggcggcgttggcattctcggcattgcttgggcttttggtggcatgatctttatccttgtttactgcactgccggtatctctgggggacacatcaacccagcagtaacctttggacttttcttggctaggaaggtgtcgttggttcgagccatattttacat

SEQ ID NO: 232982 - DNA, 402 bp, Gossypium hirsutum
aaaaaaaacactacttgtctgagatatttaggccaactcaaaacaaaatgtcacatccactgctgcaaaggatgcttataaaccaaggaaataaacactctgcctgacaacatatatgaaacattcaacgcttcttagagacacctacagtctttcctctgcgaccagtggtcttggtgtgctgaccacggacacgaagaccccaatagtgcctcagcccacggtggttcctgatcttcttcaatcgctccaagtcatctctcaacttcatgtcgagagcattagacacaacttggcctccgctgtttattcggttcaactcatcactttccataaacctttcctgctccctcaccaaatcaaaatgtctctgggggcgaacgaagactttcagcacatttt

SEQ ID NO: 232983 - DNA, 421 bp, Gossypium hirsutum
cactctcccaccccgaccgcttgattttgatcagacggtaatcatgccgatcagaaacatagccgttggccggcctgaagaagctactcatccagatgctcttaaagcagctttagctgagttcatatcaacgttaatcttcgtttttgctggatctggttcaggcatggcttttaataagctgaccgacggcggtgcaacaactccggctggtctcgttgccgcctctctagctcacggatttgcgcttttcgtcgctgtctcagtcggtgctaacatctccggtggccatgtgaatcccgccgttacattcggtgctttcgttggcgggaacattactcttttacgtggtatcctttattggattgctcaactccttggctcaaccgtcgcttgcctgttacttaagttcgccactagt

SEQ ID NO: 232984 - DNA, 325 bp, Gossypium hirsutum
ctttaaggtatgagacgattgttccttcaaaaaccatatacggatccatatatggacgagaaagcaatcgagtcctttcaatgctgagctcagaagaagacggcggtcgccgcaacgcactgcaagaggggccgagctttgatcaaaaccaacgcctgccccattgagctagtcgagcccagaatactccattttaaggccggcgagccaattattctaatctgtcgatagcgtaccaactgcgttgacacgaggatccgtgtcaaaggtggaggtgacactttttcagatcttcactctccgccaaagcatgtatgaagccctt

SEQ ID NO: 232985 - DNA, 418 bp, Gossypium hirsutum
  unsure (1)..(418): unsure at all n locations
gagaatttgaagaacaagaatggattctgccatagctcagaaaacatgggaattagaaaacaatatacttaccgtcgagacacctgacccttcatcggattctatattctactacgacgaggcggctcaagccaagttccagcaagagaagccttgggccaatgatcctcactacttcaagcgcgttaagatctctgcgctcgctcttcttaagatggttgtccacgcccgatctggtggtaccatagaggtgatggggctgatgcaaggcaagactgacggcgatgctatcattgtcatggacgcctttgctttgcctgttgaaggcactgagactagggttaacgctcaggcggatgcctatgagtatatggtcgattattcccagaccaacaagcangctgggcgattggaaaat

SEQ ID NO: 232986 - DNA, 418 bp, Gossypium hirsutum
gccacgagaagcgacttttggacctcaatctctgtctttgtgtttctctgttttgtattattttttcctttgtgtcatcaatggcgagcagatactgggtggtgtctcttccggttcagaactcagcctccacttggaataacttacaggatcaaatctccaagcattccttcgacactcctctctaccgattcaatatacccaatctccgtgttggaactcttgattccctacttgctctcagtgatgatctcttgaaatccaatacctttatcgaaggagtttcccacaagatcaggaggcagatcgaggaactggagagggcatctggcttggaaaccaatgctctcactgttgatggagtgcccgttgattcttatctaaccaggtttgtttgggatgaagcaaagtacccaac

SEQ ID NO: 232987 - DNA, 417 bp, Gossypium hirsutum
aaagatgctaaggaacgtacagcctctatgcgtaaacttttgatggcagtagtgctttgtgttgtctttatgagcgtagaagtggttggaggcattaaagccaacagccttgcaatcctaactgatgcagctcatctcttgtcagatgttgcagcatttgcaatctccttgttctccctttgggcatcggggtgggaggcaactccgcgtcaatcttatggattcttcaggattgaaattcttggtgcccttgtgtccatccagatgatatggcttctagctggcatccttgtttatgaagccatagctagacttatccatgatactggtgaagttcgaggctttctcatgtttgcagtttctgcatttggtctagttgttaatattgctatggctctcctgttgggtcacgaccat

SEQ ID NO: 232988 - DNA, 424 bp, Gossypium hirsutum
gttcgtgcatttttcgcctgcaatttttgaaagcagtaatcggtcttcttctctttgttccctaaactaaacttttcttcgttggctgttttgagaagttttggtttctgatgtctccaccactgctgggcgtggaggaggaagtgcagagtagtgtttcttctccctctgttgaatgtatctccgagaatggcatggggttaaaggagcgtaattatcttggattatcagattgttcttcagttgacagcctccggtgtctcgaggtaatctgaatttgaaggctacggagcttaggcttggtcttcctggatcacaatcccctgagagagaaacagagctttgcttgttgaacttgggaaaacttgacgagaagccactatttcctctactcccttccaaagatggaatctgctcatcatct

SEQ ID NO: 232989 - DNA, 421 bp, Gossypium hirsutum
gtaatgttgagcaaaggcttggcacaaagggcgctaatgaaattaaggctcacccatggtttaaaggtattgaatgggacaaattgtatcaaatgaaagctgcatttattcctgaagtcaatgacgagttggacacgcaaaatttcgagaagtttgaggaggctgacaaccaaattccatctgccacaaaatcaggtccttggagaaagatgctttcatccaaggatgtaaactttgtcggttacacatacaagaactttgaaattgtagatgacaatcaattacctggcattgcggagttgaagaagaagagctcaaagcccaagagaccctccatcaaatccctttttgaggacgagtccgctgcagctgccagtcaacctgttcaagggagtttcataaacctcttgccaccgcaaca

SEQ ID NO: 232990 - DNA, 408 bp, Gossypium hirsutum
  unsure (1)..(408): unsure at all n locations
gacactactagacttgtagaaatgcaagggctcgtcttgttgccggtcctcctttgcgccacctaccatatcgctctttccgcgaccaacgttacggtggcggacgggctgttagataatggtaactttgagcaagccccgaatgcctcatacatgaagggcacggttgttgtggtgcgttatgcaataccaggatgggtaaacgaagggtttgtggaatacataatagtccggcaaaagcaagggacatgttgctggtggtgcctgagggagcctatgcagtcaggttggggaacgaggcttcaatcaagcangagataaaggtggccgaaagggatgtattactccatcaccttcagtgctgcccgtacttgtgctcaagaggagcgtttgaacgtgacggtagca

SEQ ID NO: 232991 - DNA, 422 bp, Gossypium hirsutum
  unsure (1)..(422): unsure at all n locations
ataaaggatgagtacactggatgcaactagagcagaacttgctcttgtagttttgtatttgaataaggctgaagcaagggataagatatgcagggctatacaatatggctcgaaattcctaagtgatgggcagcctggcacagcacaaaatgttgacaaatcaaccagcttggcacggaaagttttccgtctttttaagtttgtgaacgatttgcatggtcttattagcccagttcctcaaggaactccccttccacttgttctgctaggaaagtcaaagaatgcactgttgtcaactttcttatttctcgatcaatttgtgtggctnggcagaacaggcatctataaaaacaaagaacgtgctgagttgattggacgaatatcccttttcttgtggatgggatcatcaatatgtaccacat

SEQ ID NO: 232992 - DNA, 309 bp, Gossypium hirsutum
  unsure (1)..(309): unsure at all n locations
ttccttttgcacgcgctctgttgatatatcggctctggacgagaagccgccgccgacatggttcacgtgagcttgtaccgcagttatgggaagacctttaagaagcctaggcgtncatatgaaaaggaacgattggatgcatagttgagacttggaggagagtatggactcctatgtaagagggagttgtggagggttcaacatgctgagagccgtatccgaaatgctgctagggatcttctcactcttgatgagaagaaccctcggcgtattgccgaaggcgaagcactctttcgtaggatgaatagg

SEQ ID NO: 232993 - DNA, 420 bp, Gossypium hirsutum
caaatagacttgagaaagaaaaacagtctcaaaatgcagcagaagtcaggcttcctcatcctcttcctctccctcattttccttcctctcatcttctccgacgccagaaaggaggctcccctcggaggttggaggccgatcaaagacaccaaggacccacacgtgatggagatcgcggaattcgccgtcgaggagtataacaagcagtcaaatgggagtttaaagttggataaggtggtgaaaggcgagactcaggtggtggccgggacaaattaccggctgattttgcaggcgaagaaaggggcagtcgataacacgtatcaggctgtggtgtgggagaagttgtggctgaatctcaggaatctcacctcctttaacctcgtcaagggttagattggattataatgtaatttatgttca

SEQ ID NO: 232994 - DNA, 413 bp, Gossypium hirsutum
ggaaaatcatgggtgccaaagttcttttcttctttgctttgctttccttttcagctgtctcggcatttgcacaggatgaggaagaccaaggtcttgttatgaacttctacaaggattcttgtcctcaggctgaagacattatcaaggagcaagttaagctactgtacaagcgacacaaaaacactgctttttcttggctgagaaacattttccatgactgtgctgtccagtcatgtgatgcttcactgctgctggactccacaagaaggagcttgtctgagaaggagacagacaggagctttggcctaaggaatttcaggtacattgagaccatcaaagaagctgtagaaagggaatgtcctggagttgtttcttgtgctgatatccttgttctgtctgctagggaaggcatc

SEQ ID NO: 232995 - DNA, 417 bp, Gossypium hirsutum
ggagtggggagtattttacccgggtcggagtcggtaacccggctaaacaattctacatggttcttgataccgggagtgatgttaattggatccaatgtgaaccatgtacggattgttaccaacaatccgacccgatttttgacccgtcggcgtcgtcgacttacagtccggttacttgcgagtcaaggcaatgttctcttctacgacaatcggcttgtcgtggcgggaaatgtctttaccaggtgtcctacggtgatggatcttacacagtaggggatttcgtgactgaaacggtgtcgtttgggaactccggtgatatcaaaggcgttgctatgggttgtggccataccaacgaaggcttatttgttgcagctgccggtttggttggactcggtggtggtcccttgtctttaacat

SEQ ID NO: 232996 - DNA, 392 bp, Gossypium hirsutum
gctgtccaagacaaagcttgatattatcttttttagttccgacacaagaaaagggaaaaaaagaagaagaaatacaatcgttttctttttgaagacgggttttagttttcggggtgaaaaaaatgttgggagtattcagcagtgcgatagtgtctgcgccagacgagctgttggcggccgtttgccgaactccatcacctaagataacggcggacgctctggtgaaacggttccttgagacgaactcctccggcgtgttcatgcacatgggataccatgtgcaattcgcttattctcaccataaagagtcttctttacagaccagatcatgtgctgtgaaagacgaaatcttttgcttgtttgacggagcccttgatatcttggggagttta

SEQ ID NO: 232997 - DNA, 418 bp, Gossypium hirsutum
ctagaataccgactcatcatctgcccttcaatggcggaccaaccacaaccacccccccaagtcctcttagtaacattcgcttctcaaggccacattaacccttcccttcaatttgccaataaactcatcaacaatggcgtccacgtcacgttgatgtcggcttcttccatgattcaccaattcaacaaagcttcacctgtccatggcttgtcctacgcctattactccgacggctatgaccatgcctttcaactttccggtgacacgaatcattacctttccgagacaaagcgtcacggtactcaatccttgagagagtttcttgctgatcaaggcactaggttcacttccattgtttactgtactcttctcccttgggtggcaacggtggctcgtgagtttcacatcccagccaccc

SEQ ID NO: 232998 - DNA, 336 bp, Gossypium hirsutum
cgaagttctaccgtcatggggtgaagacctgcaaggtgtgatcgtcagataaaaaacaaaccttacccgaagtcacgttattgacgaagcgcacctgatcccaagatgaggattgatgatgcgggaatgaaaaagaggggtgtggatgagttgcgtatctgagttcacttgtacttttgtgagaaggaaaacgtctgtagctaatctctggaatctgctcgtattagtcgccacaagtctatggctaaatatgctggacaggatgccttacacttgcgagttcgtgttcaaccaattccatggcttgcacttcaacaaaatgctttcatgtgcttg

SEQ ID NO: 232999 - DNA, 426 bp, Gossypium hirsutum
ctctcgccgccgcctgcgtctctctcttcatctctctgaaccaaaaagtctttagcttttcgcttcgagagagaccatgttggtttaccaggatctcatctccggtgacgagcttctttctgactcattcccctacaaggaaatcgagaatgggatgctgtgggaagttgagggaaagtgggttgtgcaaggagctattgatgttgacattggtgccaatccttcagccgaagatgctgatgaggatgaaggtgttgatgaccaatctgtgaaggttgttgacattgttgacactttcaggcttcaggagcaaccccctttcgacatgaagcagtttgtcgtgttcatgaagaagttcatcaagaacttgacaccgaaactggatgcggaaaagcaagagtccttcaagaaaaacattgagggagc

SEQ ID NO: 233000 - DNA, 441 bp, Gossypium hirsutum
cgagaaaaggaagacaacgatggtgtctttgaagttacagaagcggctcgccgctagcgtcctgaagtgtggccgtggcaaggtttggcttgatcctaatgaaatcaatgaaatctccatggccaactccaggcagaatgttaggaaacttgttaaggatggttttgtcatccggaagcctaccaagattcactcccgatctcgtgcacgcagaatgaaagaggccaagagaaagggtcgtcattctggctatggtaagaggaagggtaccagggaggcaagattgcctacaaagatcctttggatgaggagaatgcgagtactaaggcgtttgcttcgtaagtacagggaatccaagaagattgacaagcacatgtaccatgacatgtacatgaaggtgaagggtaatgtatttaagaacaagcgtgtcttgatggaaag

SEQ ID NO: 233001 - DNA, 449 bp, Gossypium hirsutum
tcgcccacgcgtccgttttgccttttctttgctttgggtttatttggacatttcaatcccacatgggttactttgcttgatttcaataagctaagctagcttcgagtttggggactttgagagatttcatataagttaaaacatatatacaaacttgagctagctggttgaggagggtcttttttttttctttgtcgagagtttttaagttttaagcatggaaggtcaaaagtttgttgtaaatggagggatcaaaatgcccattggttacaggttccgtcctacagatgaagagcttgtggttcattacttgaagagaaaggctttgaaccttcctttacctgcttctgtcattcctgagtttgatgtttttcagactgatccttggagtctaccaggtgatgtggaagaaaaaaggtgtttctttagcaacagatattgtaatgaga

SEQ ID NO: 233002 - DNA, 416 bp, Gossypium hirsutum
ctaaatacaggagtcatttgttttgggggaatgcctgagaaaatggcttgttttcaatatatagtagctgctctatgctttgcagttttacttgagggatcgttatcaaaagctcaactgaccccgacattttacgatgaaacatgcccaaacgtgacagccattatccgacatgtgctcgtgaatgcttcgttttcagatccaaggattggtgccagtctcatcaggcttcacttccatgattgttttgttcaaggatgtgatgcgtcgattttattggacgatcctgtgaatggtgagaaagaagctattccaaataataattcagctaggggttatgaagttattgatgccatgaaggctgccttagagagtgcttgccccaacactgtttcctgcgctgatattctcgctat

SEQ ID NO: 233003 - DNA, 417 bp, Gossypium hirsutum
gaagacaaggcggtaaagatgtgcttcttcagctgagggaacttgaagatgttatcattcccccatctccagttgcatttcctgatgaccatgaaacttggaatgtacagttatttagatcaattgatggtggggctgcttttggtttccctgagacacctgaagatgctgccagggctgggcttgtgagtggaaaggacaatatcattgaccgaagtattcaggatgcctatattaatgctatacgacgagcaaagaattttatctatattgaaaatcagtatttcctcggaagctcatttggctggagtcctgatgacatcaagcctgaggatattaatgctttgcatctgattcccaaagaactttcacttaaaattgttagcaagatcgaggcaagagaacggtttacagttt

SEQ ID NO: 233004 - DNA, 419 bp, Gossypium hirsutum
ctccatgttgtgagaaagctcatacaaacaaaggtgcatggaccaaagaagaagatgatcgcctcatcgcttatatccgagcccacggcgaaggttgttggcgttcccttcctaaagccgctggcctccttcgttgcggaaaaagctgtcggcttcggtggatcaactatttaagacctgaccttaaacgaggcaatttcactgaggatgaagatgaagtcattatcaagcttcatagccttcttggtaataagtggtcacttatagccgcgagattaccaggaagaacagataacgagataaagaactactggaacacacatataagaaggaagctattgaaccgaggggtcgatcccttgactcataagcaactcaatgaaagcactgcacgtcatgttgcaaatgcaatatgttgc

SEQ ID NO: 233005 - DNA, 352 bp, Gossypium hirsutum
agaaattaaaaatcatgcgtggttcttgagaaatctccctgctgacttgatggatgagaacacaatgggttatcactttgaagagcccgatcaacctatgcagagtattgatacgatcatgcagataattgctgaggccactattccagccgctggagcccatggcttaaaccatttaatggtagacaaccttgatgatgaggacatggatgacttttattctgaatctgagcttgatgtttatagcagcggtgagatcatctatgcaatgtaatatgaagaagaaaacttctctccaatgttgtagttgattcaggcatgtcacagctgcagagggtggtaagatgctggt

SEQ ID NO: 233006 - DNA, 375 bp, Gossypium hirsutum
attgaagtgaactttctcgattttgtatttagccaaacaagatgcagatcttggtgaagactctaaccggcaagacgatcactctcgaggtcgagagctacgatacaatcgacaacgtgaaggccaaaatccaagataaggaaggcatccctccagaccagcagcgtctgatcttggccggaaaacaactcgaagacaggcggaccttggccgattacaacatccaaaaggagtcaactctccacctcgtcctccctctgcgcggggggatgcaaatcttcgtcaaaaccctgactggcaagacaatcactctcgaggtcgagagctccgacacgatcgacaacattaaagcgaagatccaagacaaggaaggca

SEQ ID NO: 233007 - DNA, 401 bp, Gossypium hirsutum
attctgccattcggcgggtgcattctgtggaaattatgctcggttcttgataggaaatctagtgttgataaaagcttttatttttggattttccagatttttaatacatacagcctcggcacttaacggcagatttctcagaacttttggctctgttttctttgttctattttcaccttttttaaaaaaaattattattatttcatttccttaaatttctaaaccggggactgagataatgggaggggcttcactgccaccaggttttcggttccatcccactgacgaagaactgataggttattacttgaaaagaaaaactgaaggccttgaaattgagcttgaagtgattcctgtgatcgatttgtacaagtttgatccttgggacttaccaaagaagt

SEQ ID NO: 233008 - DNA, 298 bp, Gossypium hirsutum
ggaaaacaagaaaagcagagccgcatcactttttgctagctaagctactgtgggagttattgttcttcagaacagcttctgcagtagctaataataacgttatatattatataaattttatacatcctttttaccctacgactccatatataagcaagtaaaaataaatatggctcgctctgtttcttcctttaagttccttggtgcttctgtttttgatgctctttatgtctccatatcaaggagaggttactcaagtgcaccgcctgcggcagtgaccgctagctttggtaggcct

SEQ ID NO: 233009 - DNA, 385 bp, Gossypium hirsutum
gtgacttcttcagatactatctttccctcaaaaatggttactttcaggtttgagcagtaccaagttgtttgaagggctcacccaacagagagcgatgagcatcccaagatctataggatgatgctctgggccaccaatgaggttcgggccaaatccaagttctggtacttcttgaggaagctgaagaaggttaagaagagcaatggtcaagtccttgccatcaatgagatatttgagaagaaccctaccaagatcaagaattatggtatatggctccgctaccaaagccgtaccggttatcataacatgtacaaggaataccgtgacactactctaaacggagctgttgaacaaatgtacactgagatggcttctcgccacagag

SEQ ID NO: 233010 - DNA, 393 bp, Gossypium hirsutum
gtcaccggaaaaagtcgtggaactattgaaatcacaaggaataaacaaagtggaggtttacgacaccgacgcgacggttttgacggcgttagcggattccggtataaccgtggtcgtcgcacttcctaatgaactactttcatccaccgctgctgatcagtcgtttgcagacaactgggttgaagcaaacataacaaagttttacccaaagacaaaaatcgaagccatagctgtcggtaacgaagtgtttgtcgatccggccaacacgaccaaatacctcgtaccggcgatgaagaacatccacgcttcgttagttaaatccaagcttgattccgccattaaaatctcttctgcgatagctttcagtgctttaaaaacctcgtatccttcatc

SEQ ID NO: 233011 - DNA, 405 bp, Gossypium hirsutum
gctcctcgctgtggaaagaaaaaaaaaagttctctatcagatcaagtattagggtgatatagtaaagatgtcgccaaccgaatcatcacgagaggaaaatgtttacatggccaagctggctgagcaggccgagcgctatgaggaaatggttgagttcatggaaaatgtagcaaaaactgtagatgttggtgagctgactgtggaggaaaggaaccttctttctgtagcttacaaaaatgtgattggggctaggagggcttcttggaggattatctcttctattgagcagaaggaagagagcagaggaaatgaggatcatgttgcaaccatcaaggagtataggagcaagattgaagctgagctcagcaagatatgtgatgggattttgagcctccttgagtctca

SEQ ID NO: 233012 - DNA, 408 bp, Gossypium hirsutum
cttgcattgagtctctaagatatcactgcaaggaaaaaaaaaaaaaaccaggcgtggcttccaacactgttgcatccgctgctcttcttcttaccttgaacttgttgttcttcactttggttagctctacctacgtgccttgcccaccaccaccaaagagccacaagcctacccacaagagcccaccctcggcacctaaacagccagccacttgccccaaagatacactgaaactaggtgtttgtgctgatttgttgggctcggtgcgcgttgttgttggaccgtcgaggaccaaatgctgctcactcatttcgggtttggctgatctcgatgctgctgtttgcctttgcactgctattaaagctaatgtgttgggggttaacctaaacgttcctgtttcattgtctt

SEQ ID NO: 233013 - DNA, 404 bp, Gossypium hirsutum
gtagagatgaggaaaatcatgggtgccaaagttcttttcttctttgctttgcgttgcttttcagctgtctcggcatttgcacaggatgaggaagaccaaggtcttgttatgaacttctacaaggattcttgtcctcaggctgaagacattatcaaggagcaagttaagctactgtacaagcgacacaaaaacactgctttttcttggctgagaaacattttccatgactgtgctgtccagtcatgtgatgcttcactgctgctggactccacaagaaggagcttgtctgagaaggagacagacaggagctttggcctaaggaatttcaggtacattgagaccatcaaagaagctgtagaaagggaatgtcctggagttgtttcttgtgctgatatccttgttct

SEQ ID NO: 233014 - DNA, 404 bp, Gossypium hirsutum
cttcaatgcaaaggttggggtgtacctccaaacaccctggctgaatatgcactgtggcaatttggaaacatggatttctacgacatttccttagttgatgggtttaacatccccatggtgtttggtccaactaatggcggttgtcacaacattcggtgcactgcagacatcaacggacaatgcccgaatgagttaagagctcctggtgggtgcaataacccatgcacggtgtttaagaccaatgaatattgttgcactcaagggtacgggacctgtggtccgacccgttattcaaggtttttcaaggaccggtgccgtgattcatacagttatcctcaagatgatccttcgagcacctttacttgccctgctggttccaattacagggtcgtgttttgcccccg

SEQ ID NO: 233015 - DNA, 406 bp, Gossypium hirsutum
cggacgcgtggtttgcatatcactttgaaagcagttttttgaggtaaaaatccgtggataagaaggggaaaagaaacacttagctgctccggaaatggcggacgcgttttgttcggactgcaagcggaacacggaggtcgttttcgacacattccggcggcgacaccgtctgttcggagtgcggcttggtcttagagtcacattctatcgatgagacatcggagtggagaaccttcgccaacgagtccggcgataatgatcccgtccgtgtcggcggtcccaccaatcctattttggcggatggcggtttatcgaccgtaatcgctaaacctaacggtgctttcggggagttcctttcgtccctcgtgggtcggtggcagaatcgcgggtcgaatccggatcgggg

SEQ ID NO: 233016 - DNA, 365 bp, Gossypium hirsutum
atttcatactcatttagcccctctcattagcatccaaatcactccagttgtgggtatcactgaaaaatgtcttgctgcagaggaaactggggctgccgtactggctgcaagtagcgcaaaggctgaggaggatgcaagatctacccaaacctgaacgtcgcctggatgaccacatctgaaactctggttcttggtgtagcaccccagaaagcacactttgcgggagctgggatggaattcgaagctgctaaccgctgccagtgtggatacaactgcccctgcaaccctcgcaatcgtaaatgattagcgaccaaagccaaagctcccttgaagcacagacgcctttgtctttaagaaataatatg

SEQ ID NO: 233017 - DNA, 404 bp, Gossypium hirsutum
cgcaggctctcccgctccttatcgctgcgatttctgattcaagatctcagttgtgagatcgtaacgctcttttctatcaagccatggctctgatcttgcatgcaggaaaaacaaacaaaaatgcctttaaggcactcattgctgcaaaatatagtggtgtgcacgtcaaaatggaagagaattttgagatgggtgtgtcaaataagactcctgagttcatcaagatgaaccctttgtggaaggttcccgtgttcgaaacacctgtgggtccgccatatgagagcaaggccagtggtcgatacttaactcgctcaaaggttaacaaccgtatatgaaggtctacaaggattgattatgatcatatcaagcaatggattgggtatgcagccttggaaagtgatgct

SEQ ID NO: 233018 - DNA, 400 bp, Gossypium hirsutum
cgccttttccccttaaccctcaaccgcaaaaaagaaaaaaaaagagtagcagtgccggtttcaccagctatgggtatcgacttggtcgccggcggcaagagcaagaagacgaagagaactgctcccaagtctgatgatatatatctcaagcttcttgtcaagctttaccggtttctggtaagaaggactggcagcaaattcaatgccgtgattctggaagcggttatttatgaccaaaaccaacaggcctcctttatctctttctaggttgattcaattcatgaagggcaaggaggataagattgctgtggtagtcggggctgtcaccgatgacattcgtgtgtatgaagttcctgcgctgaaggttactgcgttaaggttcactgaaacggccagggca

SEQ ID NO: 233019 - DNA, 398 bp, Gossypium hirsutum
ctgatgagttcactggtgctggagccatcggtcaggtttgtcaagtaatcggggccgtcgtcgatgttagattcgatgaaggcttgcctccgattttgactgcgcttgaagtgatggaccactcgatccggcttgtgttggaagtggctcaacacttgggtgaaaacatggttaggaccattgctatggatggaacggagggactcgtcagagggcagccggttctcaacaccggatctcctatcactgtgcctgtcggtagagctactcttggtcgtatcataaatgtcattggagagcctattgacgagaaaggcgaactcaaaaccgaccatttcttgcccatacacagagaagcaccagcctttgtcgatcaagctactgaacaacagatcctt

SEQ ID NO: 233020 - DNA, 400 bp, Gossypium hirsutum
cttaaccatttcccaaatctccttcctcctcttctttagcgtccttttcatttgcggtcatgcagcgcgctttgaaatccgcaatgagtgctcctacaccgtctgggcagcaacctctcctggtggtggccgtcgcctagaccctctgcaaagttggaccatcgatgtgcctgctggcactgctatggctcgtatttggggtcgaaccaattgcaatttcgatgccagtggtaggggtcattgccaaaccggtgattgtggtggactccttcaatgcaaaggttggggtgtacctccaaacaccctggctgaatatgcacttaaccaatttggaaacatggatttctacgacattttcttagttgatgggtttaacatccccatggtgtttggtccaact

SEQ ID NO: 233021 - DNA, 390 bp, Gossypium hirsutum
ccgccagggtttccaggcctttgggggagtccaatcggcccgtccgtaccgtccgtacacaaaacttattagatcccgaaccctcaaaaaagtttacccggcattctatccagaaaaaagaattgaagtttcatatgaaccaaatcaagctaaagaatttttcccccgatcccgcgatgatctatctgctttattttgaggtccccgtgttcaggtcatttacccacaacaccatattctctttgtacagattttttcgtgacgcggaacataacacactcaatttcataaccgcagtatgtactccttggaatttttgggaatataggaagaaacatatgcacgtctcaatgaaggcgttgaagaagaggtcaaagcagatttttaaag

SEQ ID NO: 233022 - DNA, 394 bp, Gossypium hirsutum
ggcgatgcagacatgggacttttgggtattgttcacatcgttcctttgtggggtgggaacaggtatggcggtgataaacaacatggcacagatcgggttagccttgggtcacgccgacgtttctatattcatttcattgaccagtatttggggcttttttggacgaatcattttcggctctgtttccgagtactttctcaagaaagcaggaactcctaggccactttggaatgcagcatctcagatcttgatggcgggtgggcctcctttaaatggcatgggcatggcctggttgccttaacatgggtccaattgttgttggcttgtgttacggagtccgtatagcattgactgtcccggttgcctcagaactattcggtctcaaatactacgg

SEQ ID NO: 233023 - DNA, 402 bp, Gossypium hirsutum
aaaacacccaggtacagaagcactaacattttctctttggcttaccaaccttgggtgctgaaatggcaaagtcacccgaagaagaacaccctgtcaagacctttggctgggctgcaagggacccatctggtcatctctctcctttcaccttctccagaagggtaactggtgaagaagatgtgaggtttaaggtgctgtattgtgggatttgtcattctgaccttcacagtatcaagagtgaatggggctcctccaactaccccatggttcctgggcatgaaatagtaggggaagtgacagaagtaggcagcaaagtggaaaaggttaaggtgggagataaagtgggcgtgggatgcatggtcggagcttgccacagctgcgacagttgtgcaaacgaccttg

SEQ ID NO: 233024 - DNA, 399 bp, Gossypium hirsutum
ctttcctagcaagcacctctcttcttaactgtaaatttcaaatctctcttgtgccttaaacatggctactatttaccgccttgccactctcatgctcttctgctttatccaactcagcttctccgagttggttcaagagcaacccttggttttgaagtaccacaacggtccactcttgaaaggcaagatcaccgttaatctcatctggtacggcaagtttacacccatccaacgctccataatcgttgatttcatcaactctttgagttccgataaggccacaatggttccttccacgtcgtcgtggtggaaaattactgaaaagtacaagggtggttcttctaccttagctgtaggcaaacaaatccttctcgaaaattacccgctcggtaaattcct

SEQ ID NO: 233025 - DNA, 398 bp, Gossypium hirsutum
atatcctctaattctaaagctaagagttttaagttaacgaagcatttgggtgggttcgaagtaatggaaacttcaggaaaagtaaagaagggagccggaggaaggaaaggtggtggcccgaagaagaagcccgtttcaaggtctgtcaaagctggtctccagttccccgttggtaggatcggccgttacttgaagaaaggaaggtattcacagcgtgttggaaccggagccccggtttacttggctgctgttcttgagtacttggctgctgaggtcctggaattggctgggaacgctgcacgtgacaacaagaaaaacaggatcatcccaaggcacgttctacttgccgtgaggaacgacgaaaaattagggaagcttctcgccggcgtaacaatcgc

SEQ ID NO: 233026 - DNA, 404 bp, Gossypium hirsutum
cccatttccaatctccagctcccaaggtaaatatgccgatcagaaacatagcaggtggccggcccgaagaggcgactcaccccgatgctctcaaggcagctttggctgagttcatctcaaccttgatcttcgttttcgctggatcgggctcaggaatggcttttaacaagttgaccgacaacggagcaacaaccccggccggtctcgtagccgccgctctagctcatggcttcggtcttttcgtcgctgtctccgttggcgccaacatctcaggtggccacgtcaaccccgccgtcaccttcggtgctttcgttggcgggaacatcactctcttgcgcggcattctttactggatcgcccaactcctaggctcaaccgtcgcttgcctgttgcttaagttcgct

SEQ ID NO: 233027 - DNA, 402 bp, Gossypium hirsutum
gtaattttctttttatttatcgttgcccatttgttttcagtacacctcttttgtttttcttcttctttttctagtttcagatctttgcttttcttagggtttttgtttctgcttgcgttttaattccaaaaaaaaatagagatttaggggtttcttttggaattttcctgagaaaatggagaaggacaaatccccaggcttgccaccgccgtctggtcggtatactgggtttgcggccgtcgggaatgttttgaactcaactggatgttttggtcaaagttctgatgcgaatctttttagtcaggatattatcaaaatgcctgataatccaccaaagaacttgggtcatcgccgcgctcattcttaaatccttactcttcctgatgatattagctttgatag

SEQ ID NO: 233028 - DNA, 313 bp, Gossypium hirsutum
tgagaaatcaaaattcaaaaccctagttagggtttttatcttcctcaatctcccgttgtcacactgcaaatcggccacaatgtcgatgtccaagagttccaaaatgcttcaattcatcaactaccgtatgcgggtcactatccaagacggccgtcagttggtgggtaagtttatggctttcgatcgtcacatgaatctcgtactcggtgactgcgaggagttccgtaagttgccgccggctaaagggaagaaaaaccccagtaccaatgaggagcgtgaagatcgtagaacgcttggtcttgttcttcttcgt

SEQ ID NO: 233029 - DNA, 402 bp, Gossypium hirsutum
attcagtagcttcattatccatgggtgcaccatctcctgcattgcatccatggatgcaaccatcttcatcagcctcaagacgaggtcctatgccaggagcaaatagcaagaagtcaaaatctttgatgcagcatccttccagaggccttcctggaaagccccaggctcctaatcgtacctcaacaggagcatttgctgcaaatgtacgtgctgaagctgcaccatatgatccattaattggaaggaaagtttggacaaggtggcctgaagacaatcatttctatgaggctgttataacagactataactcagttgaggggcggcatgctttggtttatgatataaatactgcagatgaaacctgggaatgggtcaatctcaaagagatatctcctgaagata

SEQ ID NO: 233030 - DNA, 327 bp, Gossypium hirsutum
gaaacacagtgagggagaaatggtttctctgaagctacagaagcggctctgcgggagcgttctaaagtgtggaaaaggaaaggtttggctcgatcctaatgaagtcaacgagatctctatggcaaactcccgccagaacataaggaagttggttaaagatggttttatcatcaggaagccaaccaagattcactctcgatctcgtgctcgtcgcatgaaggaagccaagagaaagggacgtcactctggatatggtaagcgcaagggtacaagggaggcaaggttgcccacaaagatcttgtggatgagaaggatgcgtgtacttag

SEQ ID NO: 233031 - DNA, 402 bp, Gossypium hirsutum
caggaaaacaagaaaagcagagccgcatcactttttgctagctaagctactgggggagttattgttcttcagaacagcttctgcagtagctaataataacgttatatattatataaattttatacatcctttttaccctacgactccatatataagcaagtaaaaataaatatggctcgctctgtttcttcctttaagttccttggtgcttctgtttttgatgctctttatgtctccatatcaaggagaggttactcaggtgcaccgccggcggcagtgacggctagctttggtaggcctggagcgatggggaaagtggaacgaaaatatgcgatgaaagagtcgtcgtcgtcggagacaagggcttattcttcagcttgggcgcctgaccctgttacgggg

SEQ ID NO: 233032 - DNA, 403 bp, Gossypium hirsutum
ggttcctttttttttttgttcaaaagcgaagccctaactcgcatgctgttcggatcttaatcgtcgaagatccgattcatatctatctctgatctgatccaaaacgaaaccacccggcctctgagaaatgacgcgtcgctgctcgcattgcagccacaacgggcacaactccagaacctgcccgaatcgtggtgtcaagttgttcggagttcggttgactgacgggttggttcggaagagtgccagtatgagtaacttatcccaattcgccgggtccaattctgccgggcataacgggaatgggtcgggttcgcccggtgaaggtccggatcacgccgatggttatgcttccgaggattttgtccctggatcgtcttcgagtcgtgataggaaaaaaggtgtt

SEQ ID NO: 233033 - DNA, 391 bp, Gossypium hirsutum
gaaatagataaaccaatacactgagagaaaatattgcccacatcacccaaaaagtgtgtgtgacacgagcccgcggctaccttggctcttgcgatgtcaagcatgttttctacaacaactacacagttcacggcactcatagacaacctgggggtgccaaatatgcccatttgaatcaatttcagagagcatcccacaacctacaactcttgaaggctgatgttctggattacgattctgtttgatccgtcattacaggtttaaccggtttcttctttattccctttcccgttccttcaacataatttctaatccccaggaagaacttattgaaccggctgtctaaggcacacttaatgtgcttaaagcatgtgttcaatccaatgttaaa

SEQ ID NO: 233034 - DNA, 405 bp, Gossypium hirsutum
caagaatgaggacgcctcatcatcttttcactctagctctcttcttcaccttcatgtgtgtttctgttgaagcccttaatgttggaatccaggccgctgataccgccatctctgtgagcaaagaatgcagtaggacatgtgagtcagagttctgttcagtgcctccatttttgaggtatggcaagtattgcggcctattgtacagtggatgccctggagagaaaccttgcgatggacttgatgcttgctgtatgaagcacgatgcctgcgttcaagctatgaacaatgactatctgagtcaaaagtgcagccaaagcttcataaagtgcatgaaggatttccagaaaggaggaggaaggagtttcaagggtaataaatgccaagtcgatcaagtcgttgatgtca

SEQ ID NO: 233035 - DNA, 392 bp, Gossypium hirsutum
ccgccgcctgcgtctctctcttcatctctctgaaccaaaaagtctttacctttgggcttcgagagagaccatgttggtttaccaggatctcatctccggtgacgagcttctttctgactcattcccctacaaggaaatcgagaatgggatgctgtgggaagttgagggaaagtgggttgtgcaaggagctattgatgttgacattggtgccaatccttcagccgaagatgctgatgaggatgaaggtgttgatgaccaatctgtgaaggttgttgacattgttgacactttcaggcttcaggagcaaccccctttcgacaagaagcagtttgtcgtgttcatgaagaagttcatcaagaacttgacaccgaaactggatgcggaaaagcaag

SEQ ID NO: 233036 - DNA, 382 bp, Gossypium hirsutum
cccacgcgtgcgcccacgcgttcgtattgggaaataaccgccaccggtgtggggcctttggttgtaattccgaaattcttaaaggggccctgggccaaatcttttcttttttttcttaaggctgtttctacttcacagcagtagggggattaagaagctatgagaattcttagaaccagatcacttccatgccttgttaaaaagaggagatattgggtgctaaattcaaggtggaagggccaacagttgttgctgccacagagtaatcctttgctttcttcttctaaatctatggatccatgggaatataggagcttcaaatgcatagcatatgggtcactcttccatgtgaataactgagttccagtacttgtagaatggg

SEQ ID NO: 233037 - DNA, 399 bp, Gossypium hirsutum
aaataaggtaagaatggaaggcggaggaccaccacaggcggcggacaccgagggggcagaagcagcccagcaacagccacaacaccaccagcaacgtccgcctcaggtggccgctggcctggaaaatattccggccactctaagccacggcggtaggtttattcagtataacatctttggtaacattttcgaggtcactgctaaatataaaccacctattatgcctatcggtaaaggcgcttacggcatcgtttgttccgcattgaattccgagacaaatgaacacgttgcgttaaagaagatagcgaacgcatttgataacaagattgatgcgaagagaactcttcgtgagatcaagctgcttcgtcacatggatcatgaaaacgttgttgcaatcag

SEQ ID NO: 233038 - DNA, 400 bp, Gossypium hirsutum
cgcagctttggctaatttcttgagttacgatgtttacgacattgatttgtccgaagtttccgatgactccgaccttaaacttctcttgttacaaagctcggccaaatccgtgattgtcatcgaggatcttgaccggtatttgtcggagaaatcaacggccgtcagtttgtcgggaattttaaactttatggacgggatgttaacctccagctgcggcgaagaaagggtcatggtcttcacaatgaacggcaaggatcacgtcgaccaggcggttctcagaccgggaaggattgatgttcatatacatttccccctatgcgatttcacggcatttaaaacgctggccaatagttacctggggctcaaggatcataagctgtttccgcaagtagaggagatt

SEQ ID NO: 233039 - DNA, 404 bp, Gossypium hirsutum
  unsure (1)..(404): unsure at all n locations
ctcggagatcggacccttgagtcgccggataatcatcgacgactgaccnagactgcgtcggagccaccagaaaagtacttcttaccgtttctacggcgagagagtggatttgaatatattggccgtgttttgagtttcgatggcttcggaggatgtgaagactagtgaatcacctgtatcgacgatcgtgaatctagctgaagaagcgaagctcggttgagaaggcgttaaagctcccagttcttctgttcttagtatctgcaagtctctcgttgccggccgcattgctggtggagtgtcacgaactgtcgttgcttctttggaacgtttaaaaatcttactttaggtttcagaatccacatagtttaaaatacaatggaacaattcaaggcttgaagttcatt

SEQ ID NO: 233040 - DNA, 404 bp, Gossypium hirsutum
attttaactgctaagaataatcaattagaaatccctctcttattcgttctcgggcgctcttcaccgttcggattctacaataaaagaaaccctagcctaggcgtttccgatcaaatcaggggagtaatggatggatcgggtggaagaggaggaagtggagtggataatgtattacctaattacaagcttggaaaaacgcttggaattggttcttttggaaaggtcaaaattgctgagcacattttgactggtcacaaagttgccattaagattcttaaccgaaggaagattaagaatatggagatggaggaaaaagttagaagagagattaaaattttgaggttgtttatgcatcctcacatcattcgactctatgaggtgatagagacagcaactgacatttt

SEQ ID NO: 233041 - DNA, 395 bp, Gossypium hirsutum
ttgaaattttctttctcgattttctctttagccaaaaaagatgcagatcgggggcaagactctaaccggcaagacgatcactctcgaggtcgagagctccgacacgatcgacaacgtgaagaccaaaatccaagataaggaaggcatccctccagaccagcagcgtctgatcttcgccggaaaacagcttgaggacggccggaccttggccgattacaacatccaaaaggagtcaactctccacctcgtcctccgtttgcgcggtgggatgcaaatcttcgtgaaaaccttgaccggcaagacaatcactctcgaggtcgagagctccgacacgatcgacaacgttaaggcgaagatccaagacaaggaaggcatccccccagaccagcaacgtc

SEQ ID NO: 233042 - DNA, 387 bp, Gossypium hirsutum
aaaacggagcagacagtcagataagcagagaaaatggaggctgccagaactggggaggacgtttcccctcatgacttcgtcaaggcttacgccgcccatctcaagcgttccggcaagatcgagcttccttcatggactgatattgtgaagactggtaaactcaaggaacttcctccctacgatccagattggtactatatcagagctgcttccatggcaaggaagatatacttgaggggaggtcttggtgttggtgcctttaggaggatttatggaggggctaagagaaatggaagtcgccctcgccatttctgcaagagtagtggatctgttgcccgtcacattcttcaacaattgcagaatgtgaacatcattgatattgatcct

SEQ ID NO: 233043 - DNA, 410 bp, Gossypium hirsutum
  unsure (1)..(410): unsure at all n locations
ntccggaaaaaggaaacaaaagatggcaattgagattcctagagtgaaacttggaactggaggatttgaggtttcaaagctgggatttgggtgcatgagtcttacaggtcacgatcattcagtgtcagatgaagatggcatatccatcattaagcatgcagtcgaaagaggagtcactcacatcgatacagccgacctctatggacccaaaactaacgaaattctggtcggaaaggcattgaagcatctgccacgagagaaggtacagttggctacaaaattcggtgttgaaagcatgggtccagatggtccggttatcaatggcactcctgaatttgttcgttcttcacttgaggctagccttcaacgcctcgatgtggattatattgatctttactatataatcagag

SEQ ID NO: 233044 - DNA, 401 bp, Gossypium hirsutum
gcgttcttcatatggttttcctgtttgtttccatggaaaacctgtaccattaccgtggtaatcatcttattcattcttctcaccatcaaacttttgactcataaaaccaaaaatttgcctcccagtcccttttctctgccaattattggccaccttcacctcatcaaaaacccactttaccaatcactgaccacgttattatccaaatatggccctgttttatatctcaaattcggttgcagacatgtccttgttctttcttctccttctgctgttgaagaatgcttgaacaagaatgatataatatttgcaaaccggcctcggactatggctggggatcttatgacgtacaactacactactttcgtttggactccttacggatcactttggcggaacca

SEQ ID NO: 233045 - DNA, 404 bp, Gossypium hirsutum
aaattttcgtcaagaccctcaccggcaagaccatcacccttgaggtggaaaggtccgacaccatcgtataatgtcaaggccaaaatccaagataaagaaggaatcccaccagatcaacagaggcttatctttgctggtaagcagctagaggatggtcctacacttgctgactacaacattcagaaggagtccaccctccacttggtccttcgtttgaggggtggtatgcaaatctttgttaagaccctcaccggcaagactatcaccctcgaggtggaaagctcggacaccattgataatgtcaaggccaagatccaagacaaagaaaggatcccttcagaccagcatagacttatctttgccggtaagcaactagaagatggccgtaccctggctgattacaa

SEQ ID NO: 233046 - DNA, 401 bp, Gossypium hirsutum
atcggtttcagttcagctgctccgtattatatagtcaactactatggcagcgggaatgtctgttagatacgtttctcgtaggttctcgagtgggagtgggaagatactcagtgaggaagaaaaggctgctgaaaatatttacatccagaaaactgagcgagagaaattggagaaacttgcacgcaagggacccaagccagaggagaaaccggatgctggttcagggggtgctgcaccgatggtagcactacctttacatcgggaacatctgctgagaaagtatcaaccgataagtaccgaaactaccgggttcttgctggtgttgcaacccttggtgctgctgtgggatggtatctcaactcttaagacaagaagcaagaggcctgaaatgggggttaatg

SEQ ID NO: 233047 - DNA, 403 bp, Gossypium hirsutum
gagaactatgatgatgggttcagagaaaatgaataaccccatggaaatagagggcaagaacattgagaagacaaagataagtcttatgagaatcttggttgaaaaacaagatccatcttccaaggaagttgaagatgggacattgagaagatttctaagagctcgtgatttagatgtagagaaagcatcaaacatgttccttaaatacctcaactggaaacgaaactttgttcccaatggttccatttcaccatccgaaatcaggcatgaaatccaacagaataagatgttcttgcaaggttgggacaagaaaggacgaccgatagcccttcttcttgctgcaagacatttccaacatgaaggcggtgtggatgaattcaagcgttttatagtctaccttttc

SEQ ID NO: 233048 - DNA, 263 bp, Gossypium hirsutum
gtgactaaataaaatactatctttccctaaaaaaaggttacctctcaccattagggtggggccaacctgttggaagggctcacccaccagagagccaggagcataccaagatctatatgatgatgctctgggccaccaatgagggtcgggccaaatccaaatactggtacttcttgaggaagctgcaaaagggtatcaagagcaatggtcaagtccttgccattaaagagatatttttgaaaatctctaccaagatcaaaaat

SEQ ID NO: 233049 - DNA, 276 bp, Gossypium hirsutum
caaaacacacggtcttgtgcaacatgtaagtgactgggaacacttcactctggggttaatcaactttttatgggaaccgtcccaaatttacttctcacagcataactgtggtcagtgggtttatgctttcgacctggaatatatttaacgtaataagccaattgtttactcatccagacatggacatgctagttttccgcatccccgaacttaccttcaaaggtcagttaaactcgggataaggattaggaacgatgcttcacgaaacaagtattt

SEQ ID NO: 233050 - DNA, 292 bp, Gossypium hirsutum
attttctaacacctttgcatttgcatctttctttttcacaccagatctgggggtccaagctatggctgaaaaggtgaccataatggtgctgaaggtcgaccttcagtgtagtaaatgttacaagaaggtcaagaaagtgctctgtaaataccctcaaatacgagaccagatgtacgatgaaaaggctaatacggtgaccatcacggtggtatgctgtagccctgagaagatcagggacaagttatgttacaaaggtggtggatccatcaagagcattgaactcaagtcggcg

SEQ ID NO: 233051 - DNA, 317 bp, Gossypium hirsutum
gtaagagtgacacacacactactatttgctgaaggggtaaatacactaatacaagcgctgttcgtaactcggttgcctaccgcgaaaggaaggtcttatgccaagaaggctcccattatatcaataatgcacgacacttccattgtgagcctagaacacaatcacgcgagattattaaacactatgaaagctttccaaggtccattaatacatgcatcaaccatacaaaacctgctgggatacacacatatgaggtccatttactccaggtatttaaaacccctaagaaatgatccagccatttcacaaaccctctt

SEQ ID NO: 233052 - DNA, 398 bp, Gossypium hirsutum
  unsure (1)..(398): unsure at all n locations
gtactcactcaacattcccattttcaatctccagctcccaaggtaaatatcccgatgagaaacatatcttttttccgtccccaanaagctactcacccctatgctctcaaggctgctttagctaacttcatctcaaccttgatcttcgttttcgctgcatccggctcaggaatggcctataacaagttgactgacaacggagcaaccaccccggctggtctcgtagccaccactctagctcatagcttccttcttttcgtcactctctccgttagcgccaacatctcaggtggccacgtcaaccctgccgtcaccttcagtgctttttttggcggaaacatcactctcttgcgcggcattctatactggatcgcccaactcctaagctcaacctactc

SEQ ID NO: 233053 - DNA, 400 bp, Gossypium hirsutum
aaccataccgttttggtaattcccttatccaacacaaggcgcatgttattggctgtcgtggaactctttccaaaacttagccaaacaaggcatcaaaatcagctttgttaacacagtgtttaatcacaagagggtcctagatgcattctgcgagaaggtggatgaaaatggcttacttcatctactttcagtccccgatggactggaagatggggaagataggaatcagttagggaagttaactgaaagattatgccaggttatgcctactcaactcaaggagctcattcataaggttaatggatcagatgatgataagatttcatgtgttttagctgatattaacattgggttggctcttgatgttgcggcggagttggggattcctacggtgggcttg

SEQ ID NO: 233054 - DNA, 326 bp, Gossypium hirsutum
cttccatcttcactccacatttcacactctttttcaactttctcttcttctgggtgttttaaagaggggctggagttttagccaaagaaaactccatggctaaacttgttgctactttcttcttggctctcattgccatctccatggttcaaactttggttatggcatcacatggacatggtggtcaccattatgataacaaacgttattgacctggaagtctcaaaccttaccaatgtccatcttaatgcacaaggaggtgtagccagacacaataccataaaccatgcgtgttcttctgtcaaaaatgttgcaagacatgcctt

SEQ ID NO: 233055 - DNA, 278 bp, Gossypium hirsutum
gacacatgttacttatttcacaatccgtggacatctactctggtgttttatcatagtgcctacccaggttgaagttctactacatttagggttctatgaaactaagagcagttggactacccaagaacataataaccaccccgcttctataaagcctacacgcgcccttcactgtactatgttcacctaacattaataagcgtaggccgttttcaaggccaacattgccctggactacctatcgtttaaccccaacaccgctgcacaaaccataatat

SEQ ID NO: 233056 - DNA, 311 bp, Gossypium hirsutum
  unsure (1)..(311): unsure at all n locations
ctgccatcaatttgctctgaagatcatgttggctatttttcacaaggcatttgctaatccaccagaggagctgaatagtccagcttctcataaatctaccaagaagcctaaacagcctgaagaaaccctaaatgatttcctatctcatcaccctcacaacactttctccatgagctttggcaacgctgctgttttggcttatgtccgccatgaacgtgctgcttcagttcatcagaggttgttttgtgggtttgatgacatatactgcctcttcttagggagctngaacaatctatntatgctgaatagac

SEQ ID NO: 233057 - DNA, 404 bp, Gossypium hirsutum
ggaggagttggactttcaggcactataaagtataaatctctctctctatctaatcattccccttttactgttttactctttacaaattttcctctcctttttcgtgtttttactcttaattttgctttttgttttggattgtctcttctgaatcagagaaaaccctacctttttttttctcttttatttctttgaattggaacgatcaaaagaaggaatgggttctgaaggatcgagggttgttgtgccaaggaatttcagattgcttgaagagcttgagagaggtgaaaagggaattggggatggaactgttagttatggaatggatgatgctgatgatatttacatgcagtcatggactgggactattattggcccgcctaacacttgtcatgagggacgca

SEQ ID NO: 233058 - DNA, 358 bp, Gossypium hirsutum
tatttaaaccctaactttcccttaactttgaaaccctgattttcgtctcctctttcaaaatggaaattgaaagagaaaccaatgaaggcaactcaaggaggattcaagtccgatttataacgaaattaaaagcaccatataaagttccgacaacagccattgccatcccttctgacctctctcgtataggcctttcctccattgttaacaagcttcttcaagctgcagtggattctgagtggaaaaccgagccctttgatttcctgatcgatggggagctggttcggatgtcacttgagcagtttcttcttgtcaaaggcatttctgcggagaaaattttggaaattgaatacataag

SEQ ID NO: 233059 - DNA, 321 bp, Gossypium hirsutum
ggcggaatcacccgctgagtgtaatctttttaataatccgaaaaaaaaaagggggccatgattcccctggggacggtcaccccaccccgaaaagctcttcgttggaaaatcgccatggcttcaaagcggattttgaaggaactcaaggatttgcagaaagatccacccacttcttgtagtgctggtccagtagctgaagacatgtttcattggcaagcaacaatcatgggaccctcagatagcccttatgctggaggtgtgtttttagttactatccatttccctccagattatcctttcaagccttctaaggttgcgttt

SEQ ID NO: 233060 - DNA, 409 bp, Gossypium hirsutum
ctggaatctcttgaaaagatcaagtttaaaaaaattgttctgttacatggagaaggctttggagcttggtgttggtataaaacgattgctcagttggaggaagtaggccttcagcctactgcactggatctcacaggctctggtattgatctgacggatacaaacacagtcaccacattggctgaatattcgaaaccattgattaagtatctagagaaccttcccgtagatgagacggttatcttggtaggtcatagcagccgaggtgcttgcctttcatatgcatcggagcatttcccggaaaagatctccaaagcaattttcctttgtgctacaatggtgtccaacggtcagagaccttttgatgtgtttgccgaagagcttggatctgctgaacgtttcatgaaag

SEQ ID NO: 233061 - DNA, 405 bp, Gossypium hirsutum
gaaagtacccgtgcctaaggttgagaaagtgaggattaagtgtttggggtatcaagaaagggctaagatttctaagaatccaactgggaaaaagctgtttgagattatggttaagaaagagagtaatctctgtttggcggctgatgttgccactgctgctgagttgcttgatattgctgagaaggttggacctgaaatttgcctattgaagacccatgttgacatattccctgatttcactccagagttcggttctaagcttcgcgcgattgcagaaaaacataacttcatgatatttgaagaccgtaaatttgcagacatcggtaacacagtaacaatgcagtatgaagggggtatcttccatatattggattgggctgatattgttaatgctcacataatctc

SEQ ID NO: 233062 - DNA, 395 bp, Gossypium hirsutum
agcacttgttcttctttttcttttcgttggagatctcggcggagatggggaaacgacgctgtgttgtggcggcattagcagcgataatgttgatgatggagttagcggcgttgacagtagcagaacacagaagaagtatgttgagtaatggtcttggaatgactcctcccatgggttggaacagctggaatcactttggatgcaatattgatgaaaaaatgatcaaagaaactgctgatgctctagtttcaaccgggctctccaagcttggatatgaatatgttaatatagatgattgctgggctgaaatttcccgtgatgacaagggtaatctagtgcctaagaagtcaacatttccatctggaataaaggctcttgcagattatgttaacaag

SEQ ID NO: 233063 - DNA, 307 bp, Gossypium hirsutum
ctcggctctcgattcccccaaaatccagctcttcctttcgtgaatcaaagattctcaaagatgactcaagatgtggagatgaaagagcaaccagctccgtccaattccgttccttcctcttctcctttcactttgcaccatttgaaggaaattgcgtctctgattgagaccggtgcttatgaccgtgaagctcgccgtattttgagggctatacgacttacaatggctttaagacggaagttgaaagcatccgtgctatcctctttcctcagttacgctcttacccctggatccgaggccttcactc

SEQ ID NO: 233064 - DNA, 299 bp, Gossypium hirsutum
  unsure (1)..(299): unsure at all n locations
cacaaagggtgcctttgtgcaacccgcattatatgaagcctttgggttgactgtcgttgaggccatgacttgtggtttgccgacattcgcaacttgcaatggtggacctgccgagattatcgttcatggtaaatccggcttcaacattgatccttaccacggcgaccaagctgctgagatccttgtcgacttctttgagaaatgcaagacagatccatcttactggaccaagatctccgagggaggtttgaaacgtatcgaagagaagtacacatgggaaaatntactctgagagacta

SEQ ID NO: 233065 - DNA, 306 bp, Gossypium hirsutum
gccaaagagaaagccgagtgtggccgaataaaatgtttgcaagattgcattgcttcctgatctcacccttgctaccagtgagaggattgttctcagagaggagagtaatggcccttgagaactccttgaagaaatagtcttggctcttggccattttcttcacataaggtctggtccttttgtcgtacgccagttggtgatccacaatcaacaaacccttgttgtccagtatgatcctggagtagttgtatccaaaaccatggagtgtccacggtcgtttctcacatacttgaccggcttggggtc

SEQ ID NO: 233066 - DNA, 370 bp, Gossypium hirsutum
ctcacatccttgtgtcatggcagcaccttccagcattccccttaagttcactgtccgacgttgtgaaccagaacttgttgctcctgctaagcctacgccatatgaacaaaaactgttatcagacattgatgatcaggcgagtttgcagtttcaagttccggtaatcaacttttatcaatatgaaccttccatggaaggaaaagatccagctgaggttattagggaggcaattgcacaaaccctagtgtgttattatccatttgcaggtagattaagagaaggggccactggtaagcttatagtggattgcaccggtgagtgtgtgatatttataaaagccgatgctgatgttacacttgaacagtttggt

SEQ ID NO: 233067 - DNA, 366 bp, Gossypium hirsutum
gcaggatatatattttccggcgatatgatccgagccttggaggcctatggcaatgacctggtgaattcagtgatgggtcgagctgaagatatatgtggcaaatttagcagcaatataaaagtggaccgaattgttggaagtggagatgcaagggacgttatatgtaatatagtggataaaatcaaagcagatacgttggtgatgggaagccatggttacggtttcttcaaaagggcgatattaggaagcgtgagtgatcattgtgccaaacatgttaaatgtccagtggtgatcgtgaaacatccagagaagatataaagcttattcttcattgacggagatatggcttttactaccatgtacacc

SEQ ID NO: 233068 - DNA, 364 bp, Gossypium hirsutum
gaaaaaaatccctaatcaaaaaatggggaaattgtggctaatttgcattgcttcgatctcaatccttctcccatttctctgcaatgctttctctcccgaatcgccaacggatcgccgagtccttgttctcctcgacgacttcgccatcaagtcgtcacactccctctacttcaatgccctcaaatcacgtggcttcgacctggaattcaaactcgccgatgatccaaagatcgccttgcaacgctacggccagtatctttacgatgccttgatcctcttcttgccctccgtcgaacgatttggaggatctattgatggtgcccgcattggcaattttggtgattcccgtcatgaattaattggt

SEQ ID NO: 233069 - DNA, 412 bp, Gossypium hirsutum
aaaaaaaaaacgaagaaaatggcgtccctctctgcccaaatccctccctgcttggccttaatgatggctgcctgtttgatgataggcatcaatggaagcatagatggagctcagagggagttcgattactttgctttgtctcttcaatggcccggcaccatctgccacaagactcgccattgctgctcctccaatgcctgctgccgaggctcaaactctccaactgaatttaccattcatggtttgtggccggattataatgatggaacctggccctcctgttgttaccgatctcagtttgatgtcaaagagatttcaacattgcttgatgcacttgagaagtactggccatcgttatattgtggcaaatcatcaacttgcttcagtggaaaagggttattttgggctcatg

SEQ ID NO: 233070 - DNA, 315 bp, Gossypium hirsutum
ctttgaagcttttcatggaagctgggattgatgaactcgctaagatgtcgttcgaggatcttgataaagctaaggctacaaaggacgacattgatgttagacttaaatggctcggcttgttccataggagaaaacatcaatatgggagatttatgatgagactaaaactaccaaatggtgtaacaacaagtgcacaaacactgtacttagccagtgtgataaggaaatacggcaaagaagggtgtgccgatgttacgacaaggcaaaactgtcaaatccgtggagcggagttgcctgatgtgcctgaaatactta

SEQ ID NO: 233071 - DNA, 324 bp, Gossypium hirsutum
ctcgccgtctcgcctctcgcttattggttcaagatctggttttgatctgatcagatcggataaaaatatcaaaacatgtttgggagagcaccgaagaaaagcgataataccaaatactatgagattttgggagtatcgaaaaacgcttctcaagatgatctaaagaaagcttatagaaaagccgctattaagaatcatcccgataaaggcggcgatcctgaaaagtttaaagagttggctcaagcttatgaggtgctgagtgacccggagaagcgtgagatttatgatcagtatggggaggacgcccttaaagaaaggatgggc

SEQ ID NO: 233072 - DNA, 296 bp, Gossypium hirsutum
ttgtaatgtaagcaccttctttcagtatacaagaaacgcaaaaaggaaaccccagaaaaatgagaactagcaaccatttgatagggttactaaacttcttaacatttttgttgtcaatagtaatattgggtggtggaatatggctaagcagccgagccaacagcacagattgtctcaagttcttacagtggccattgatagtcataggagcttcaatcatggtggtttccttagcaggtttcgcaggcgcgtgttataagaacaccttcctgatgtggctttacctcttcgtcatg

SEQ ID NO: 233073 - DNA, 416 bp, Gossypium hirsutum
atacctcactgcccctaaaatttaatcgaggagatctcgttgttctttagctccggtttgcagccatggctactctagattccgatgtgccgatggtgcccgccggtgaagcttccggtagctccgccgcgtcttcctctactaagaagcccaagcgcttcgagatcaagaagtggagtgccgctgccctctgggcctgggatattgtggtggataattgtgcaatttgcaggaatcacattatggatctctgtatcgagtgccaagctaaccaagccagcgccaccagtgaggaatgcactgttgcttggggggtctgcaaccatgcatttcacttccattgtatcagccgatggctcaagactcgtcaagtttgcccattggataacagtgagtgggagttccaaaagtatggg

SEQ ID NO: 233074 - DNA, 399 bp, Gossypium hirsutum
gactcgtgatgttgaggaagaactaattcccctttgcagggaactcggaattgggattgttgcatatagtccccttggtcatggtttctttgccggtaaagcaaaggaggatacctctaatagttctctgggagtgttcccaaggtttcaaggagaaaacttggagcaaaataggatcctatattcgaaagtagagaagttggctggaaagcatggatgtacaccggcacaacttgcacttgcctgggttcttcatcaaggggatgatgtttctcctatacccggaacaaccaagattaaaaatctagacagcaacattgaatcagtgaaagtaaagctgacaaaagaagatttgaaagaaattacagatgcgatcccaatccatgaggttgcaggggg

SEQ ID NO: 233075 - DNA, 384 bp, Gossypium hirsutum
ctttaagacgttgttatcacacatggacgaatttccagggatggtgtatgctacatttaaaggagactcaacaaaggatgctgatgctgcttttgatctcttggaaactgctcttgcaaaatatgatggtccattcctcctaggcaacgagtttactctggcggacattgccttcattccttttgtcgaaaggttccagatctacttatcagaggtgtttaattatgacctcacagcaggcaggcctaaagtggccgcatggattgaggcggcggacaagatcgatgcctataagcagacaaagaaaactgatccaaaagaattagtggaaatttataagaagatattctcaccccagaagtgaagatgaaattggcaccatgt

SEQ ID NO: 233076 - DNA, 298 bp, Gossypium hirsutum
ggagaatagcggcattcactaggccaacccaggagcatgaatcataatctggtgtggatgctttggccaatgctgctacccttggagacaatgcagataattcaggcacaacgtcagtggcaactactactaaacatccaaggcatcgtcctggttgttcttgcatcgtatgcatccagcctccaagtggaaagggaaaacacaagccgacatgcacatgcgttgtgtgcatgacagttaaacgtcgttttaaaaccctcacaatgcgcaagaagaagcgtcaatcggagcgtgaagc

SEQ ID NO: 233077 - DNA, 264 bp, Gossypium hirsutum
  unsure (1)..(264): unsure at all n locations
aaaaccccaacccctcttccttttccactcgctctcttttccttgtcaccaaaaaacatctttctggtcaattcaatcctccttttttctattcaaccataatgtcttgcttcattagcaaatacgccgatgagttggctaaaaacgctgcttacattggcacccctggaaagggtatccttgctgctgatgaatccaccggcaccattggcaagcgtctntcaagcattaatgtagaaaatattgaagaaaacaggcgtgctc

SEQ ID NO: 233078 - DNA, 293 bp, Gossypium hirsutum
taaaaattgaaatcataaacaaaaacacttgcagttttctgaatggggacgatagttcaaactaccgttgtcactgtttttctttgtcttctttttcctattgtcttttccacatccaatgacggattgttcagaattggactgaagaagagaaagtttgatcgcaacaatctgttagctgcccaacttgattccaaggaaggagaagcgttgagaggttcttttagaaagtatcttcatggcaacttacaggagtcaaaggatattgatatagtggcactaaaagaactaca

SEQ ID NO: 233079 - DNA, 262 bp, Gossypium hirsutum
cggacgcgtgggcttctttcctcctagcccaaaaaaaaaaaaccctctttcctttctctcgttctttttcccgttcaatcatgtcttgcttcattagcaaatatgccgatgagttggctaaaaacgctgcttacattggaacccctggaaagggtatccttgctgctgatgaatccactggcaccatcggcaagcgtctttcaagcattaatgtagagaatgttgaagataacaggcgtgctctccgtgagctcctattcac

SEQ ID NO: 233080 - DNA, 270 bp, Gossypium hirsutum
ctactcgtctgttgcacaaagaattggggtttacactgcccgggactatgctgatatagttgaatatctggttgaccgatggaagttgaaggaactcattggactttcacctgagggccgtgaagctcaggaatttgtgtgtggacttgcaccgagaattagaaagttagaggagagagctcaattgagggccaaggaatcacccagtgttccattcagttgggtttctggtagagaagtgacgctctaaattggctatcctccaagtga

SEQ ID NO: 233081 - DNA, 380 bp, Gossypium hirsutum
gtcaatgaatagcgtccccaaaaaggtcattgcacatcttctgaagcctcgtggttggaaaccaccagtttgtcgacagtttttcttagactgcaacgaaatagcagatctgtgcgaaagtgctgaacgaatatttgctgttgaaccaactgttctacagctgacagctcctattaagacttttggtgatctacatggacaattcggggatcttatgcgtctttgcgatgaatatggtgcaccttcaacagctggagacattgcgtatatcgattatctattcttaggagattatgtggaccgtgggcgacacagcttggagaccattactcttctgcttgcattgaaggatgagcatcccaattatgtacatttaattc

SEQ ID NO: 233082 - DNA, 301 bp, Gossypium hirsutum
tctcctttctatcgacacacgacccttccgttacgtctcaagctctctcttcctgtcttcgtctacttcgcctctttctctatggatccctacaagcaccgtccatcaagtgctttcaattcaccattctggactaccaattctggcgctccagtttggaataacaattcatctctcactgttggacccagaggtccaattctccttgaggactatcatctggtggaaaagcttgccaactttgacagggagcggattccagaacgtgttgtccatgctaggggagcaagcgcaaagggtt

SEQ ID NO: 233083 - DNA, 325 bp, Gossypium hirsutum
cttcctcctccactttcagatcaccaaaaccttcaacaatgggctttgttaaggctcaaaaaaaccaaagcttactttaagcgttttcaggttccattcaagagaaggagagagggaaagactgattacagggctaggattcgcttaaccaatcaagacaagaacaaatacaacacgcctaaataccgattcgttgttcgatttagcaacaaagatatcaccgcacaaataatttctgccaatattactggtgatatggttcttgcttcggcttactcacatgagcttcctcgttatggacttgaagtcggtcttacaaactatg

SEQ ID NO: 233084 - DNA, 310 bp, Gossypium hirsutum
ttcaaaattaagggtttttagtaaccaaatatgattggccttgggagttacggttacactgcaccatcttccaaaaaaatcaacgcctacgatgttcctcaaggcgtcgatattcgtggtcgattcgatgaagaattcgctaagattttaacaaaggatgccttacaattcgtcgctgatttgcagagagagttcaggaaccatattaagtacgcgatggaatgtcgcaaagaggcgaaaagacgacacaatgaaggggcgttgcctggtttcgatcctgcaacgaggtatattagaagaggggaatgga

SEQ ID NO: 233085 - DNA, 299 bp, Gossypium hirsutum
gctctctcatcctgcttctggtcaagccaatctcaaaagactccccttttagctcacagctctctcgagttctgtaatgggtaaggagaaggttcacatcaacattgtggtcatcggccatgtcgactctgggaagtctacaaccactggtcatttgatctacacgcttggtggtattgacaagcgtgtgattgagaggtttgagaaggaggctgctgagatgaacaaaaggtcatttaagtatgcatgggtgcttgacaagcttaaggccgaacgtgaacgtggtattaccatcgata

SEQ ID NO: 233086 - DNA, 355 bp, Gossypium hirsutum
  unsure (1)..(355): unsure at all n locations
aacaagacaagtggactggttgcttccctgtgaagtggcacatcattaaggacgtcccaaacactttgctgaggcacataacacttgagaacaacgagaacaagcctgtcactaatagtagggacacccaagaggttaattttgagcaggggatccacattcttaaaatttttaaagatcatcccagtaagacgtgcattcttgatgattttgaattttatgaagctcgtcaaaagacaatccaagagaaaaaggctaagcatcagctgttacaagaaaaggttttgagtggagagcctaatgatngctgtatggagaagaaagaaatgtggaatagcaaagacgctcggaaaat

SEQ ID NO: 233087 - DNA, 304 bp, Gossypium hirsutum
  unsure (1)..(304): unsure at all n locations
tttagcttttcgcttcgagagagaccatgttggtttaccaggatctcatctccggtgacgagcttctttctgactcattcccctacaaggaaatcgagaatgggatgctgtgggaagttgagggaaagtgggttgtgcaaggagctattgatgttgacattggtgccaatccttcagccgaagatgctgatgaggatgaaggtgttgatgaccaatctgtgaaggttgttgacattgttgacactttcaggcttcaggagcanacccctttcgacaagaagcagtttgtcgtgttcatgaagaa

SEQ ID NO: 233088 - DNA, 399 bp, Gossypium hirsutum
attaaaacagagaaaggaaagcagcgaaatgggtgaagaagtgaaggtttttggatattgggcaagcccttacagctacagggcagagcttgctttgaagttgaaaggtgtttcttatgagtacataaatgaggatatctttggcaacaagagcgatttacttttgaaatacaatccggttcataagaaagtcccagttcttcttcacaacggaaaatcaattgtagagtctgttgttattcttgaatacattgaggaaacttggaagcataatctttatttgccacaagatccttatgacaaagctaccgctcgattctggatcaagttcatcgacgaaaagtgctttcctaccctttggctagctgcatggagccccgagaatgagcgagaaaaagt

SEQ ID NO: 233089 - DNA, 256 bp, Gossypium hirsutum
  unsure (1)..(256): unsure at all n locations
ccgaccggcnncggaaaaacgggnggacccacgcgtgcgtctgtctcccctatcgctcttttgtattgatcagatctcttcaaacccatcaattcaaacagccgtccactcattccatgcatgacgcttggctcatgaggatccagtgttgtggtgcctcggaacttcagattgctggacgagcttgagcgtggagaaaaaggtattggagacggtactgtcagctatggaatggatgacggagatgacatttaca

SEQ ID NO: 233090 - DNA, 264 bp, Gossypium hirsutum
gacaccacataccgtagccgtagtaccttcaattttctgcctgctttaggtgagtgcaaagataaatggtagaaacaggggacaactatgcttacgaggaggagctttttgattacgaggaagaagaagagaaagcccctgactctgtcactgctaaagtcaacggcgagggcggcaagaagggctatgttggcatacacagttcacgattcagagacttccttctgaaaccagagcttcttcgggccatggtctactctagat

SEQ ID NO: 233091 - DNA, 342 bp, Gossypium hirsutum
cttcttctcttatttgaactcaaagtcccagctaatattagaatcatgggtgttgtcacttatgactatgagaatacctccccagtcgcccctgccaggcttttcaaggcctttactgttgaagctccgaaagtttggcccacggctgcacctaatgcagtaaagagccttgaggttgaagctaatcctagctctggaagtatcgtaaaaatcaactttgttgaaggccttccattccaatatatgaagcaccagatcggaggacatgatgaaagtaatttttcatacagttacgatttaatcgaaagtgggcctttggggggataagcttgaaaaaatagc

SEQ ID NO: 233092 - DNA, 250 bp, Gossypium hirsutum
  unsure (1)..(250): unsure at all n locations
ccgcccggaacgncngggncgggcacgcgtgcgtnnttctcttgcgacactgctaatattttttttattgtcgtctccggcgttcgaagatcataaaaaaccggagtcgtttcaaatggctacgagaacggatctagatgggaggccaataaagccgatgacgatatgcatgatcggggccggaggcttcatcggctcccacctttgcgagaaattgatgtcggagacgccgcacaaggtgctcggcttg

SEQ ID NO: 233093 - DNA, 310 bp, Gossypium hirsutum
ctccacttcctcttcaataggctttaggaaggggaaagtagaaacaaagaaaacatatggcaagtgaggcggcggaggaagctaacgtccctgcagcggctgcggcggaagcacccacaacagggaccgagaagcaaccacataagcttgaaagaaagtggaccttttggtttgataaccaatcaaagcctaaacaaggcgctgcttggggttcctctttacgcaaagtttacacttttgacactgtagaagaattttggtgtttgtatgatcaaatattcaagcctagcaagttgccttgaaatgctga

SEQ ID NO: 233094 - DNA, 290 bp, Gossypium hirsutum
tctgtctcccctatcgctctttttcatcgatcagatctcttcaaacccatcaattcaaacaaccctgcactcattccatgcatgacgcttggctcaggaggatccagtgttgtggtgcctcggaacttcagattgctggaggagcttgagcgtggaaaaaaaggtattggagatggtactgtcagctatggaatggatgacggagatgacatttacatgcgctcttggactggcaccattattggtcctcataatacttgtcatgaaggtcgaatttatcaactggagct

SEQ ID NO: 233095 - DNA, 417 bp, Gossypium hirsutum
aattttaaagattattcctcttgttctgttttctgctcaaagctcttttatctgtcccttttttttagtttctgacatggcatcctctggcactggctccccttgtggtgcatgcaagtttctgagacgaaaatgcgcctctgactgtatatttgcgccttatttctgctcggaacaaggtcctgcaaggtttgcagccatccacaaagtttttggtgctagcaatgcctccaaattgctgttgcatatcccagctcatgatcgctgtgaggcggttgtcaccattgcttatgaggcccaagcaaggattagagacccctgctatggttgtgttgctcatattttccgcttgcaacaacaggtggcataccttcaaggtcaattaatgcaagtgaaagcacaactagctcaaaatgc

SEQ ID NO: 233096 - DNA, 381 bp, Gossypium hirsutum
ccggaccacaatgagaccatctctggcgttcttgacaggtttgccgccatgggtattgacacccctggagtcgttgccctcctaggagctcacagtgtcggcagaactcactgtgtgaagctggtgcatcgtttgtacccagaggttgaccctgccctcaaccccgaccatgttccacacatactccataaatgccctgatcagatcccagaccccaaggccgtccagtatgtgagaaacgaccgtgggacacccatggttttggataacaactactacaggaacatactggacaacaagggtttgttgattgtggatcaccaactggcgtacgacaaaaggaccagaccttatgtgaagaaaatggccaagagccaagac

SEQ ID NO: 233097 - DNA, 408 bp, Gossypium hirsutum
ccgatttcttcttcttcactttgaggtttgagcagatcgtatggcaccaaagaaagacaaggcccctccaccttcttccaagccagcaaagtctggtggtggcaagcaaaagaagaagaagtggagcaagggaaagcaaaaggagaaggtgaacaacatggtgttgtttgaccaggctacttatgataagcttttatctgaggctcctaaatataagctcatcactccctcaattttgtctgatcgtatgaggattaatgggtcccttgctaggaaagctataagggagttgatggcaagaagatcgattcgtttggtgtctgcccattcgagccagcagatttacactagggcaaccaacaactagatccctttgtatatttttgcttaaattaattctatgtagta

SEQ ID NO: 233098 - DNA, 435 bp, Gossypium hirsutum
ggcccggaggcggtggaggaattagtcgagtgttgcaagacggtgacgttttcgaaaaggctggtgtcaatatctctgttgtttacggagttatgccccctgaagcttatcgagctgccaaggctaatgtcactgatcagatgcccggtcccgttccctttttcgctgctgggatcagctcggttttgcatcccaagaacccctttgctcctacgctgcattttaactacagatatttcgaaacagatgctcccaaagatgctcctggagctccaaggcaatggtggtttgggggtggaactgatttgactccatcctacatctttggggaggatgtcaagcacttccattcaatacaaaaaaaggcatgtgacaaatttgatccatccttctatcctcgattcaaaaaattgtgcgacgacttcttttacatta

SEQ ID NO: 233099 - DNA, 269 bp, Gossypium hirsutum
cacgttttcaaagggccaaatggaagctgggaaaccccatgctgtctgtattcctctaccagctcaagggcacattaaccctatcttattatttgccaaactcctccacttccatggcttccatatcactttcatccataccgagttcaactactatcgcttgattcagtcgagaggactcgactcgctcaggggctcacccgatttccggttcgaaacgataaccgatggtttgccatcgaccaacatgcgggggatacaagatttac

SEQ ID NO: 233100 - DNA, 420 bp, Gossypium hirsutum
ggcgacttcagccatgtcggaaaaacgggtcgtcctgctctgcggcgactatgccgaggactatgaggttatggtccctttccaggctctgttggcttatggtatatcagtggacgctgtttgtcccggcaagaaggccggcgaaacttgccgcaccgctattcatcaactttccggccatcagacctataccgagatccgtggtcacaatttcacactaaatgcatcatttgaagatatagaccatactaaatatgatggtttagttatagccggaggacgagctcctgaatatcttgctatggatgcatttgtattgaacatggttcgcaattttgttaattctggaaagcctgttgcttcaatttgtcatggtcaattgatattaactgctgccggggcagttggtggtctaaaatg

SEQ ID NO: 233101 - DNA, 425 bp, Gossypium hirsutum
ggacctactctagcctctcttaaaacacctccgtcgccgccagacaagcctctcggcaccacttccgacagtccgttttttggattttttgatttctgggtgaagtgcggaaagagttgctttcctaaagggtacagaaatcttaacacacaggtgccagaactacctacaatatgtcaggcaggaaggaaacagtgttggatttggctaagtttgttgacaaaggtgttcaggtcaaactcaccggtggtagacaagtcacggggaccctaaaaggatacgaccagctactgaatcttgtcctggatgaagctgtagagtttcttcgagatatacaacttgttcatgtgtctgaactactggatgacaagattcatttgctgtttatggatactctacagaccaggatgatccgttgaagacta

SEQ ID NO: 233102 - DNA, 372 bp, Gossypium hirsutum
gtgaaattgataattggcgaacagcagaactcttgcttaattggatcaataagcaaataggcagttcatatggcttggatgatgaaaagtttgaaaacgagcaacttccatccaatatatcagatcctggacagactgctcaagccatttttgatgtggaggaggcaaccgcaattgcatttgacatcattttagaacagaagatgattaaatcaaaaactcgagcttcacttataaaatttcttcagcttttagtcgctcatcatccttcccagaggtgccgaaaaggaagtgcagaagtacttgtgaactttgatgagttctgcccgttagatatgtggtcttctgataaacatgatggttccaccagta

SEQ ID NO: 233103 - DNA, 385 bp, Gossypium hirsutum
tctggattcaacccgccaccgttttcgacatctattatttttacttcaacggatacgaatccgccattaaagctcaagctgatgaaacaaaccccaagtgttcgataaaattaccaggtctaccgccactcttcccccgcgaccttccatcgttcgttatcgcttcgaacgtttaccaatcggcactgtcgttgttccaagaacaaatggacgtcctcgcagaagaacccaacgctaaaatccttattaacaccttcgatgctttggaacacgaagcattaaacgccattgaaaagttcaagacagttggtattggacctttagtcccatcttcattccttaacctaaaagacgcattagataattccttaagagtcgatctttt

SEQ ID NO: 233104 - DNA, 425 bp, Gossypium hirsutum
cttaaaacccagccaaaccacatacagctcctcctcagaattcacctactctatacgttgaataaaacaagatggggggtgggtttagagtgcttcatcttgtaagaccgtttctttcatttctgcctgaagttcagagtgctgacaagaaagttcccttcagagagaaggtcatatacactgtgatctctattttcatcttcttggtttgtagccagctccctctgtatggcatacattctactactggtgcagatccattctattggatgcgtgttattcttgcctcaaatcgtgggactgtcatggaacttgtaatcactcccattgtgacgtctggactgccgatacaacttattgctggttctaaaatcattgaagtggacaacaatgtccgcgaagatcgtgctcttgtaaatggtgcc

SEQ ID NO: 233105 - DNA, 375 bp, Gossypium hirsutum
gtgagtttgggtggaaacaaatagcagagcctgttatgaaattgtacacggagtccactgatggctcctctattgaaaccaaggagagtgctttggtctggcaccatcgagatgcatacccgggttttggatctagccaagcgaaggagatgttagaccatctagagagtgtattagcaaatgaacctgtggctgcgaagagtggccagtttatcgttgaagagaaaccgcagggagtgagtaaaggtatggctgccgaaacgatcttcacaaccatgtctgagaagggaaagcaagccgatttcgctctctgcattggtgatgacagatctgatgaggaaatgttcgagatcatcagcaatgcaatgtctagtg

SEQ ID NO: 233106 - DNA, 419 bp, Gossypium hirsutum
aaagcacccaaagcttggcgccattcaaatgctatatattcttctcttttcttcttaaccaatccttcctaaaaaaacccaacctatatcaattacacatgactgatcagagaagaagtaaccaaaaacaggggagactctgtgattattgcaaccaatccaaagctcttttatattgcagagctgactccgccaagctatgtttttcgtgtgacagggaagttcactcggctaaccaactattctctaagcactctcggtcacagctctgtgacgcttgtgatggttcccctgcttccatcttttgcgaaacagagcaatcggtgttttgctccaactgtgattgggaaagccacaagttttcgtcgtcttcgttgcataataggaggccaatagaagggtttactgggtgtccttcg

SEQ ID NO: 233107 - DNA, 415 bp, Gossypium hirsutum
ggttcttatggaatgcttgccagaaggattgtggagactgaaatgccaatcatgggtcagatacagcaattgatccgaggagcgaaaaatgctgtgtcactcgctcagggagtggtttactggaaaccacccaaacaggcattggataaggttaaagcacttgtagaggagtcttcagttagttgttatggtgctgatgaaggtcttcctgaacttagagaagcattgataagaaagttacgtcaggagaacaatttgcagaggtcttcagtgatggtcactgcaggagcaaatcaagcatttgtgaatcttgttctaacactgtgtgatgcgggggactccgttgtcatgttagctccatactatgtcaattcctacatgtccttccagatgacaggtgtcactaagatattag

SEQ ID NO: 233108 - DNA, 424 bp, Gossypium hirsutum
gggacgccaaggagagcgagtgagactctatgtaagaggaaccatcttgggttacaagaggtcaaagtcgaaccagtatccaaacacttcattgatccagattgagggagttaacaccaaggaggaagtagcttggtatgctggcaagcgtatggcttatatctacaaggccaaagtgaagaagaatggctcacactatcgctgcatttggggaaaagttactagacctcatggtaacagtggggttgttcgtgctaagttcaagtctaaccttcccccgaagtctatgggagatagagtcagagtcttcatgtaccccagcaatatatgagtagtgtagatcgacgactcgaatgacgctctaccatttcacttttgtttttatgaacttagtcaagattttgtgtgctttgaatcagtcatt

SEQ ID NO: 233109 - DNA, 427 bp, Gossypium hirsutum
  unsure (1)..(427): unsure at all n locations
ggagcattattaggagttgggattgtcaattgtggtgttaagaatgattgcgaccctgcactggctctattgagtgattatattagtaaagaggattcttcagtccgtattggtgcaattatgggtttgggaattgcatatgctggtgcccagaatgagcagattcgtagcagcttgactctgatacttaatgatgcaaaggctccccttgatgtgatagcatttactgcaatttcgttgggtttgatatacgtgggttcctgcaatgaggaggttgcacaggctattatatttgctttaatggaccgaagtgagtcagagttgggggagcccctcactcgtcttctgccacttgctcttggtcttttataccttgngaagcaggaaagagtggaggcgactgcagaggtctcaaagacgttcaatg

SEQ ID NO: 233110 - DNA, 424 bp, Gossypium hirsutum
tgtgtcttgaactctcatggcttcaagtgctgcaacccttccatctaaaatgaaagcatggacttaccctgagtacggaaaatcatctgatgttctgaaactacaatccgatgttgttgttccccaacccagggatgatcaagttcttctccaagtcgtagctgctgggattaaccccattgatttcaaaagaatgcttggaatgttcaaaaacattgattcccctttacccatcattccagggtatgatgtagcaggcgtggtggtgaaagtggggagccaagttaagaaattcaaggaaggggatcaggtgtatggagatataaatgaaaaggccgtggatcacccaacacaatttggcactatagctgaattcactgttgttgcagagaagctgttggctttaaaacccaaaaatctcagc

SEQ ID NO: 233111 - DNA, 418 bp, Gossypium hirsutum
ctctacgtgtgttagtaggtctgctgaatcttaattcttgattaattagccaatcacagcagccatgtctctgctcaatgatctcatcaacctcaacctcagggacaccactgaaaagatcatagccgaatacatatggatcagaggatctggtatggatctgagaagcaaagcacggactttgcctggaccagtgacggaccctgcaaaactcccgaagtggaactacgatcgtgtccagtaccaatcaagcacctggagatgacagtgaggtcattctttatcctcaagctatattcagggatccattgagaaaaggaaacaacatcttggcgatgtgcgatgcttacacaccagtcggcgaacccattcctaccaacaagagagctaatgcggccaagatctttagccaccctga

SEQ ID NO: 233112 - DNA, 423 bp, Gossypium hirsutum
ctttcctcctagccaaaaaaaaaaaaaaagcctctttcctgtctctcgttctttttcctgttcaatcatgtcttgcttcattagcaaatatgctgatgagttggctaaaaacgctgcttacattggaacccctggaaagggtatccttgctgctgatgaatccactggcaccatcggcaagcgtctttcaagtattaatgtagagaatgttgaagacaacaggcgtgctctccgtgagctcctattcacaactcctggagctcttcagcacctcagtggtgttattctctttgaggaaaccctttatcaaaaaaccgcttcgggcaagcccttcgttgatgttttgaaggaaggtggtgtcctccctggcatcaaggttgacaagggtacggttgagcttaatggaacccatggcgaaacttt

SEQ ID NO: 233113 - DNA, 423 bp, Gossypium hirsutum
cgaagttcaaccccaaaacccaccatgggtctttcaaaagattgtcgactttgatagcaaggtcttacaaagttgtattggagcatgaaggcaactctaccgagctagaggtggaagacgatgagaccatactatcaaaggcattggacttgggcataaccgtgccatatgattgtcagcttggggtttgcatgacttgccctgctaagctcttaagtggaaccgttgatcaaagtgaaggtatgcttagtgatgatgttatagaccgtgggtttgcattactttgtgtagcttatccaacttcagattgccatatcaggactatccctgaagaagaactgctttctttgcagttaaaaacagctaatgattgacactgaaactgtttttgtgtgtgtctgtatgttggatgctgagttttta

SEQ ID NO: 233114 - DNA, 422 bp, Gossypium hirsutum
atttttatttaagttcattgcttgatccatttccatcccagcaaaagcctgaaacagtattaatcgtcgataaaatggaaggacaaggtgaagatgttaggctgggagcaaataagtacagggaaaggcagcctataggaacagctgctcaaacccaagataccaaggactacaaggaaccacctgctgcaccactgtttgagcctgccgagttatcctcatggtccttttacagggctggcattgccgaattcgttgccactttcttgtttctttacatcaccgttttaactgtaatgggtgtcgctaaatcttcaaccaagtgttctactgtagggattcagggcattgcttgggcttttggtggcatgatctttgctcttgtctactgcactgctggcatttcagggggtcatattaac

SEQ ID NO: 233115 - DNA, 428 bp, Gossypium hirsutum
gggaaaaggaggaaagaacagaaagagaggaaagaacgaagcagacgatgagaagcgtgagcttgtcttcaaggaagacgggcaagagtatgcccaagtgcttcgtatgctcggcaacggcaggtgtgaagcaatgtgcatcgatggtactaaacgcctttgccacatccgcgggaagatgcataagaaggtatggattgctgctggtgatataattcttgtcggccttcgcgactatcaagatgacaaggccgatgtgatccttaagtacatgcctgacgaagcaaggctattgaaggcctatggtgagcttccggagaacacccgtctcaatgaaggcattgttgatgaggaagacgaaggcggtgtagatgattatgtcgagttcgaagatgaagatatagataaaatctaaggtaactataatg

SEQ ID NO: 233116 - DNA, 423 bp, Gossypium hirsutum
gcaaagctcctctcttcttgctcttcattttcctctgaattctttgtctctatttaaaaaaagcaatttttttgaggtggtaagtgtacaaaaacaaaatgaagatctgttgcattggagctggttatgttggtgggcctacaatggctgtgatcgcgcttaaatgtccggatattgaagtggctgtcgttgatatctctgtacctaggatcgctgcctggaacagtgaccagctccctatctatgagcctggtcttgatggtgttgtgaaggagtgtcgtggcagaaaccttttcttcagcactgatgtagagaaacatgtgcgtgaggctgatatagtctttgtttctgtcaacactcccaccaagactcgggggctcggagctggcaaagctgcagaccttacatattgagaaagtgctg

SEQ ID NO: 233117 - DNA, 311 bp, Gossypium hirsutum
gcgaggggcttgaaactcgctcacctcaccattcggtcctacaagcttaatcttataagctgccattaatgttttgtgattggaggaacatttcaagccaaaagatttggagatgttcttaaaagatccaagagaagtcggggccttgacaatggcactcgtgaatcggttcgggattgaagcttgaacgatactagaggaggtaacccgcacagttgccatctttgctgttgaacagaaggggtatggggatttggggtatgagcggagaatacgaaggggtctaagtttctttgagacttatacaaaaa

SEQ ID NO: 233118 - DNA, 422 bp, Gossypium hirsutum
gaaccatccatgctcatggtgaggagactgtcaaaataccagttactttgatatatgatgatatcaaaagtacatatgatgacattaagcctggcagcatcattccatataggctgaaagttgatctcattgttgatgttcctgtttttgggaggttaactttacctcttgagaaaactggagagatccctataccttacaagccagatatcgatatggagaagatacactttgagagattctcttgggaggaaactatagcagttcttcatttgaaattggagaatatgaatgactttgacttgggactcaatgcccttgactatgaggtctggctatctgaggtcagcattggatctgcagaacttgaaaaatctgcaaagataggcaaaaatggaatcagttatattgagattcctatc

SEQ ID NO: 233119 - DNA, 390 bp, Gossypium hirsutum
gaaaaccctaaacgtccgttcacgtgcgttgcgtgtgctctacgctcacgttatgtccgggctgatcgtagcacacgccttctacctgttttttttctttagccataagctaaacaacacgcagaattggtcttaaaatgcctacacgtaatagatgcataggatttggttgggtaaatacggcggaaaggtggtggatcagatcgacgcgtgtcgcgattgtcagtttcgaccgttgcaagcccaagaagtgccgtatggaatgcaaggcgagctgccctgttgctaaagctgggaaacttggcattgaggttacaccggacttagagattgctatcatctttgaggaggagcgcattggttgaggtatctgtgtcgagagatgcccat

SEQ ID NO: 233120 - DNA, 427 bp, Gossypium hirsutum
ggaaaagccctaatttgacagctctctcagtctctcattttgcctgaaaaccatgtcgaggagaaaggttagggagcccaaggaggagaatactacccttgggccggctgtacgagacggcgaacatgttttcggggtggctcacatttttgcttcatttaatgacacatttattcatgtaacagatttgtctggaagggaaacaatggttcgcattacgggtggtatgaaggtgaaagctgatagggatgagtcttccccttatgccgccatgcttgcagcacaagatgtttctcaacgctgcaaggagttgggtattacagcctttcatataaagcttcgagctactggagggaacaaaaccaagacacctggtcctggtgcccagtcagcacttagagccctcgctcgttctggcatgaaaatt

SEQ ID NO: 233121 - DNA, 418 bp, Gossypium hirsutum
ctcagctactttttctctcaaaatttctccaattagctctggtttaggcgatggcttcaaagcggatcttgaaggagctcaaggatctacagaaagatcctcctacctcttgcagtgcaggccctgttgctgaagacatgtttcattggcaagcgactcttatgggtccacctgacagtccatatgccggtggagtgtttctagtcaccattcatttccctccggactatccatttaagccacccaaggttgcattcaggacaaaggtctttcaccctaatattaacagcaatggcagcatttgcctcgatattttgaaggagcagtggagccctgccctcaccatatccaaggtattgctctcaatctgctcacttttgacggacccaaatcccgatgatcccttggtgccagagat

SEQ ID NO: 233122 - DNA, 395 bp, Gossypium hirsutum
caaaaagtctttagcttttcgcttcgagagagaccatgttggtttaccaggatctcatctccggtgacgagcttctttctgactcattcccctacaaggaaatcgagaatgggatgctgtgggaagttgagggaaagtgggttgtgcaaggagctgtcgatgttgacattggtgccaatccttcagccgaaggtgctgatgaggatgaaggtgttgatgaccaagctgtgtacgttgctgttatttatgacatattaaggcttgatgtgtatcttttgtttttcatttttctatttttctgtttatttttattttttgtatttctttttttcttaataatgttttctttttgtttatatttctctcttgttatttaattttttttcctattttag

SEQ ID NO: 233123 - DNA, 425 bp, Gossypium hirsutum
gagaatgcgattaggaaagcgtatcgtttaacggatacaaatatattggaacaagccattgatttgggcaaagggggttcaacggcagtgacagcaatattgatcaactgccagaagctggtaatagcaaatgttggcgattcccgggctgtgatttctaagaacggcgtggctaagcagctttcagttgatcatgagcccgcttctgaaagggagagcattgaaaatagaggcggttttgtttcgaactttccaggggatgtcgcgcgtgttgacggccagcttgcggtggcgagagcatttggtgacaagagtttaaagaaacatcttacttcggagccagatgtgagcattgaaacaatcgatgatgatactgacctcataatattggctagtgatggtttatggaaggtaatgtcaaacca

SEQ ID NO: 233124 - DNA, 425 bp, Gossypium hirsutum
attttaatgtggaagctctagagaagtttgttgaagaatctagcattcctcttgtgactctctttaacaatgacccaagcaatcaccccttcgttatcaaattctataacagtccccttgtgaaggctatgttgttcgcaaatttgagcaatgaaggagttgattccttaaaatataaatttcgtgaagttgctgagcaatacaaaggacagggtattggtttccttttgggagatcttgaggctagtcaagctgccttccagtattttggagttcaagaaagccaggtacctctcatcatcattctggagaatgatgggaagaagtatttgaagccaaacttggaggctgatcacattgcaccatgggtaaaggattacaaggaaggaaaagttccaccatatgtaaaatctgaacctattccg

SEQ ID NO: 233125 - DNA, 424 bp, Gossypium hirsutum
aaagatatcactgcaagaaaaaaaaaaaaaccagacatggcttccaacactgttgcatccgctgctcttcttcttaccttgaacttgttgttcttcactttggttagctctacctacgtgccttgcccaccaccaccaaagagccacaagcctacccacaaaagcccaccctcggcacctgaacagccaggcacttgccccagagatgcactgaaactaggcgtttgtgctgatttgttgggctcagtgcgcgttgttgttggaccgtcgaggaccaaatgctgctctctcatttcgggtttggctgatctcgatgctgctgtttgcctttgcactgctattaaagctaatgtgttgggggttaacctaaacgttcctgtttcattgtctttgctcctcaattcctgcgaaaagcaaatgcctg

SEQ ID NO: 233126 - DNA, 425 bp, Gossypium hirsutum
attggtagtcgctgcagatatggcagagggggagaacaaactcaagctctattcttactggaggagctcctgctccttccgtatcagaattgcccttaacctcaaaggtctggaataccagtacatacccgtgaacttgcttaagggggagcaattcagtcctgaattccaaaagctgaaccctattgggtatgtaccggtgctggtggacggtgacatgatcatttcagactcttttgcgattttcatgtatctggaggagaaataccctcaacaccctttattgccatctgatcttgcaaagaaggcactcaatttccaggctgcaaatattgtttcctctagcattcagcctcttcagaatctagctgtactgaagtacattgaggagaaagtaagtccagatgagaaaattccttggacaa

SEQ ID NO: 233127 - DNA, 417 bp, Gossypium hirsutum
tcagatccttggtatgggagttgtaactatattgtttgctgctcttggattcatgtctccggcatcccgtgggactctcattacaggtatgctattcttctacatgattctcggaattgcagctggctatgttgcagttcggctttggaggactatcggctgtggtgatcacaagggatgggcttcggttgcatggaaagccgcttgctttttccccggtatcgccttttttaattctcaccattttgaatttcctgttgtggggaagtcacagcactggagctatcccattttcgctctttgtcattctactcctattatggtactgcatctctgttccactcaccttagtcggaggatacttcggagccaaggcacctcacattgaataccctgtccgaaccaaccagatccctc

SEQ ID NO: 233128 - DNA, 425 bp, Gossypium hirsutum
gaagaaaagagttccgtcaaaggtatggtgttactattgcgacagggaattcgatgacgagaagatcctggtgcagcaccagaaagccaagcacttcaagtgccatgtctgccacaagaagctctccaccgccggtggtatggccatccacgttcttcaggttcacaaggagtccgtcaccaaggttcctaatgcaaaacctggcagagaatcgactgacattgaaatatacggaatgcaaggaatcccgcctgatgtgctggctgctcactatggagaagaagaagaagaagctccatcaaaagcggccaaactggatatcccatctactcagcttgtgggaggattgatgccagggccacttggtgttggatatcctcctcagtcaactttaggagcagtgcagccaatgtataatgctgcag

SEQ ID NO: 233129 - DNA, 426 bp, Gossypium hirsutum
caggggctaagcttgtttgcttccataaattgttctatttacttctttcaatttattggttctgggtattcttggttcttgttcgatcgtttattttcaatttgtttgaggatggtttgcatggtttctcgcactggaaggcacttgcagcgatacgataacctaggccgccgccaagttgtcggttgcattccctatagatacaaatctagcagtgatggaaccatgactgatgacttggaggtacttgtgatctcctcccagaaatgtcaaaaaatgatgtttcccaagggtggctgggagcttgatgaatctagagaagaagctgcattaagagagtcacttgaagaagctggtgttctaggcaatgttgagtgtgaactggggaagtgggacttcataagcaaaagccatggcacattttat

SEQ ID NO: 233130 - DNA, 426 bp, Gossypium hirsutum
caataatctaaaactcaacgttaccaactgtgtccttcggctcttagctatatttcaggccgaaacaaaacaaaacaaaaccaaatcaagtgaaataaacaagacttagaagtagaattagaagggaaaatggctagtggaggagggtatggggacccaagccagaagattgactacgttttcaaagtagtcttgattggtgactctgccgtcggtaagtctcagattcttgctcggttttccagaaatgagtttagtttagattccaaggccaccattggagttgagtttcagactagaactcttgttattgaacacaagagtgtcaaggctcagatctgggacactgctggtcaagaacgatacagagctgttacgagtgcatactataggggtgctgtcggagcaatgctggtgtatgacata

SEQ ID NO: 233131 - DNA, 421 bp, Gossypium hirsutum
cggacgcgtgggtgactctggaaagtcaaccacaacgggtcacttgatatacaagcttggaggtattgacaagcgtgtgatcgagaggttcgagaaggaagctgctgagatgaacaaaaggtcattcaagtatgcctgggtgctcgacaagttgaaggctgagcgtgagcgtggtatcaccattgatattgccttgtggaagtttgagacaaccaagtactactgcactgtcattgatgctcctggacatcgcgactttattaagaatatgattacgggtacttctcaagctgactgtgctgtccttatcattgactccacaactggaggttttgaagctggtatttccaaggatgggcagacccgtgagcatgctcttcttgccttcacccttggtgtcaagcaaatgatttgctgctgc

SEQ ID NO: 233132 - DNA, 424 bp, Gossypium hirsutum
caggcttttcaaggcttttgttcttgaggctgccaagatttggcccacggctgcccctcatgcagtcaagagtgttgagctcgaaggtgatgctagtcctggaagtattgtaaagatcacctttgttgaaggccttccataccaatatatgaagcaccagattggaggacatgacgaaaacaatttttcatacagttacagtatgattgaaggtgggcctttaggggacaagcttgagaaaatcagctatgagaaccagtttgtggcagctgcagacggaggaagcatttgcaagagctcaataaaatattacaccgttggcgactatgtaatcaccgaggatgaaatcaagactctcattaaagggagtgaggtagtttacaaggctattgaagcttatcttttggctaaccccgatgcctgc

SEQ ID NO: 233133 - DNA, 423 bp, Gossypium hirsutum
tagggtttctatcattgttttctctgtaaatttcagctgtcttcaagaatacgcttattttgctgcagatcgtctaatttctaggacatggactcgtttgagcaggatggaaatggggcggcacctgactctctgcctccacccccacctgtgcctcctgatgtggtgcctatcaaagcagaacctgaacctgcaaagaagaaggttgtgcgagtcccaatggccaggcgtggtcttggatctaaagggcagaagataactcttctcaccaatcacttcaaagtgaatgttggaagctctgatggacacttcttccattactgtgtttctctttattatgaagatggccgtccagttgatggcaagggtgttggaagaaaagtgatagagagggtgcaagagacctatggcaatgaattggct

SEQ ID NO: 233134 - DNA, 409 bp, Gossypium hirsutum
ttctgtaatagttgaattaaaggcatggtgctaaagggcattgctttgcccattattacattgatactagctttgggaatccaggctgggttttctcagaatattagcaaagccagttttccaaagggcttcatttttgggactgcctcttctgctttccagtatgaaggagcagtgaaggaggatggaaggggaccaactatttgggacacattctcgcatgcttttgggaagatacttgatggtagcaatgcggatgttgctgtggatcagtaccaccgttatcctgaagatatacaactcatgaaagacatggggatggatgcttataggttttcaatagcttggtctcggatattccctaatggtacgggcgaaataaaccaggccggtgttgatcattacaaca

SEQ ID NO: 233135 - DNA, 419 bp, Gossypium hirsutum
agaagatcaaaatggcttctaaaagatcagcttccatggtcctccttttggcactcaacattctctttttttccctagtcagtgcttgtggctcttgctcttcacccacccctaaaccaaggccaaacccaaaccccaacacccccactcctactccatctgcacgaggcaggtgccctagggatgccctcaaattaggtgtatgtgccaatgtgcttaacctagtcaatgtcaccattggttcacccccagtgatgccatgctgttcctttctcaatggccttgtcgacctcgaagccgctgcatgcctttgcaccgctatcagagctaacattttaggcatcaaccttaacatcccagtttcccttagcttgctcctcaacgtttgttcaaggaacgttcctactggcttccaatgc

SEQ ID NO: 233136 - DNA, 422 bp, Gossypium hirsutum
cggacgcgtgggcggacgcgtgggtggaagtttaagaagatgagtgcttcaaagttcattaaatgtgttacagttggagatggagctgttggaaaaacatgtatgctcatttgttacaccagcaacaagttccccactgattatataccaacagggttggacaatttcagtgccaatgtgcctgtagatgggagcattgttaatttgggtttatgggacactgcaggtcaagaggattatagcagattaaggccattgagttaccgaggtgcagacatatttggcttagcttgctcattaattagcagagcaggctatgaaaatgttctgaagaagtggatgccagaactacgtgactttgtaccaaatgttcccgttgtgctggctggaacaaagctagatctctgaagagatagagctta

SEQ ID NO: 233137 - DNA, 343 bp, Gossypium hirsutum
ggaatagacagtttggtcttttcaaagggagcaatgaggcgatgtttgtgattgaagcatataagacacttagggattggggttcataccctgctgaacaggttggttaggatcttgaaggaagctttgtctttgtgatctatgacagcaagactggaaccgtgtttgctgtactggggtctgattggggagtgaaactctattgggggatagcagatcttggctctgtggtcatatatgaggatttagatgtgattaaagaaaggtgtgccaaatacttttctcatatacccacacgagacatgtgacacagagaatgggggctgatgagcttttagcatac

SEQ ID NO: 233138 - DNA, 410 bp, Gossypium hirsutum
aaatcaagggattgccggtggagacgacgcgctcgttgagggccaaggaaggaaggaagaagagagagagagagataaaaaggagaatctgcttcaaagtttcaaactttcccgtctcatatctaatccccaatttctctcttctgctctaggttccttcctgtcctcttaggattcttgtggtctgttcaaagcgtcatggcctcgaagcggattttgaaggaactcaaggatttgcaaaaggatccacccacttcttgcagtgcaggacctgtagctgaagacatgtttcattggcaagcaacaatcatgggcccttccgatagcccttatgcgggaggtgtatttttagttagtattcattttcctccagattatcctttcaagccccctaaggttgcatttaggac

SEQ ID NO: 233139 - DNA, 413 bp, Gossypium hirsutum
gtcggtaaaaactcgcatgatcaccgatcgtatttgtatcccgcagatgaaagacgaggcgcaccattaccaatctatggcacgcgctgtctcctataaaagctatgctcatcctgccggtactatctcgatgatcgtgtatataccacataaaaaacacgccgatgcaggggtgagggagtgtccatcttctagactgcaaagcatggacaggctaagcggcactatgcaggaacatacattttaattggcgagatactggaagatattgcacgatcctaccacagctgagacgctacacatgtaaacacgcactgattacaagttgattgacatagctgaggacggatccgtgagtttgctgactgaaagtggagacaccaggggtgatttgaggctgacaactgatgaca

SEQ ID NO: 233140 - DNA, 430 bp, Gossypium hirsutum
gttccccatcgacgcctctgcttatcgcatcatcagccatgtcaaggagaaaggttagggagccaaaggaagagactacgacccttgggcctgctgtacgagacggagagcatgttttcggtgttgcccacatttttgcatcttttaatgacactttcattcatgtgactgatttgtctggaagagagactatggttcgtattacaggtggtatgaaggtgaaagccgacagggatgaatcttcaccttatgctgcgatgcttgcagcacaagatgtttcccagagatgcaaggaacttggaatcacggccctccacatcaaattacgtgctacaggaggtaacaaaaccaagacccctggtccgggtgctcagtcagctctcagggctcttgctcgctccgggatgaaaattggccgtatcgaggatgt

SEQ ID NO: 233141 - DNA, 426 bp, Gossypium hirsutum
ctaaaattgaaatgccctcgaatatggccgccaccgccacaagcaccgccacattccgtcttggcaatcccctttcctcttcctcttcctcatccgtttactcctccaagaaattgcctgtcaatttcagaaaatttgcgcttcatgtcgcctgtgaaaagcttttctgtttcttgtactctaactagaaaaccagtcccagctgctccggtttccatggattcggacccgaacggatggcaacgacccgactcgtttggtcggtttggcaaatttggcggcaaatacgttcccgagaccctaatgtctgccctctctgagctggatgcggcttttcattccctctccaaagatgaaaaattccaggaagaattagctgggattttgaaagactatgttggtagggaaagtccactttattttgca

SEQ ID NO: 233142 - DNA, 424 bp, Gossypium hirsutum
atagaagtactttttcatttccccgtaacttatccgaagagagataaagagaaaagaggtagataaatcgagaaaaaaaatgatcacaattccgtatttgaccgctttaaccacgtatttcagctatggccttctcttcgcgtttggccaattccgtgatttcttcaggaacatcttcgattggtggcacgccagcaatcttgagggatatgcgccgatctgtttaggacttgaagatttctatattcggcgcttgtatcttcgtattcaggattgtttcggaagaccgatagcaagtgctccagatgcttggtttgatgtagtggagcgctactccaatgacaataataaaacattgaagcgaactgacaagataagtaggtgtcttaacttgggatcatacaattatcttggcttcgcagca

SEQ ID NO: 233143 - DNA, 385 bp, Gossypium hirsutum
tacaaaatggccgccgccgcgcgccctcttgtctccgtccaaaccatagagtccgacatggctactgatgccactccaaccgttcctctcgctgatgtgatgaaagcctcgattcgacccgacatcgtcaccttcgttcacgacaatatatccaaaaacagccgtcaaccctatgccgtctccaaacgcgctggtcaccaaacttcagctgaatcctggggtaccggtcgtgccgtctcacgtatccctcgtgttcctggtgggggtactcaccgtgcaggccaaggtgctttcggaaacatgtgtcgcggtggacgcatgtttgctcctaccaagatctggcgccgctggcaccggaaaatcaacgttaaccagaagcgttacg

SEQ ID NO: 233144 - DNA, 426 bp, Gossypium hirsutum
gggacgccaaggagagcgagtgagactctatgtaagaggaaccatcttgggttacaagaggtcaaagtcgaaccagtatccaaacacttcattgatccagattgagggagttaacaccaaggaggaagtagcttggtatgctggcaagcgtatggcttatatctacaaggccaaagtgaagaagaatggctcacactatcgctgcatttggggaaaagttactagacctcatggtaacagtggggttgttcgtgctaagttcaagtctaaccttcccccgaagtctatgggagatagagtcagagtcttcatgtaccccagcaatatatgagtagtgtagatcgacgacttgaatgacgctctaccatttcacttttgtttttatgaacttagtcaaagattttgtgtgctttgaatcaatcattt

SEQ ID NO: 233145 - DNA, 409 bp, Gossypium hirsutum
gaaagtacccgtgcctaaggttgagaaagtgaggattaagtgtttggggtatcaagaaagggctaagatttctaagaatccaactgggaaaaagctgtttgagattatggttaagaaagagagtaatctctgtttggcggctgatgttgccactgctgctgagttgcttgatattgctgagaaggttggacctgaaatttgcctattgaagacccatgttgacatattccctgatttcactccagagttcggttctaagcttcgcgcgattgcagaaaaacataacttcatgatatttgaagaccgtaaatttgcagacatcggtaacacagtaacaatgcagtatgaagggggtatcttccatatattggattgggctgatattgttaatgctcacataatctctggt

SEQ ID NO: 233146 - DNA, 428 bp, Gossypium hirsutum
ggagcaaaaagattgtgggggtgttttacaaggccaatgagtactttacgaagaatcccaactttgttggttgtgtggagggagccttggggttgcgccaatggctcgaatcacaggggcatcagtatatcgttaccgacgacaaagaaggaccggactgcgaacttgaaaagcatatccctgatctccatgtgctcatatcgaccccattccacccggcttacgttacggctgagaggatcaagaaagccaaaaacttgcaactgcttctcacagcagggattggctccgatcatgttgatcttaaggcagctgcagaagctggtttgactgttgctgaagttactgggagcaatgttgtctcggttgctgaggatgagctaatgagaattcttattcttgttcggaattttgtacctggttatcat

SEQ ID NO: 233147 - DNA, 421 bp, Gossypium hirsutum
ggaaaacaagaaaagcagagccgcatcactttttgctagctaagctactgtgggagttattgttcttcagaacagcttctgcagtagctaataataacgttatatattatataaattttatacatcctttttaccctacgactccatatataagcaagtaaaaataaatatggctcgctctgtttcttcctttaagttccttggtgcttctgtttttgatgctctttatgtctccatatcaaggagaggttactcaggtgcaccgtcggcggcagtgacggctagctttggtaggcctggagcgatggggaaagtggaacgaagatatgcgatgaaagagtcgtcgtcgtcggagacaagggcttattcttcagcttgggcgcctgaccctgttacggtgtattaccggccggagaactgt

SEQ ID NO: 233148 - DNA, 352 bp, Gossypium hirsutum
accatactcattattatctataacaacgcgcacttcaaagaaaaaactggagcttaaacctgcttgattacttttaatcaccgccgcagcttacggcatcggctaagcgttgtgcttagctttggcggaccaaggattatttgagtctatcgcagatttgtctgaagacaagggaggggtaggttctggtttagctgtgaaacagaattgtagatccactgcaaagaacgagattccatttactatttgtgttaaatgcgatgctccgactccatgagatatcacaatggcgtttgagaagcatctgtccacatacggaggattggatggttgtatgaacagctccggcatc

SEQ ID NO: 233149 - DNA, 361 bp, Gossypium hirsutum
ggcatttgagagagagtcgttggctgagatccgagttttgcgagaaaattaaagggaagggaagtactagtagttgaggcgaagctgaagctaatacaaaaccgcggctatttctgatttcagccctccgactcttcatccagattctgctcaatttctccgtttgattgaggattgggccaatcaaaacatcctataggtatctaaatcttctttatttacatttttggatctgcgccattgctattgcaatgtcccttttatccagattgcgatgtatcactgtggatgttactgggactctcatagcttataaaggggagcttggtgattactactgcatggcagccaaatctgttgg

SEQ ID NO: 233150 - DNA, 417 bp, Gossypium hirsutum
gcttgtgtctatatatatatatagatatggagtgaccatggtctaaccaaattcctcgacttctcttctgcttattagctctagtctacgccaagaggttcaaagattttatggctgtttccaagtcttcctcgggcaagcaacaaaacgaccgtgatcaagaatatcacaagaaatcggagccgttgattccagggctacccgacgagatcgcagagctttgtcttcttcatcttccatatccataccaatcgttggcacgttcagtatgttgctcatggaacaggaccataaccgaccctggcttccttctctccaggagatccttatcgctttctctgccttatctgttcgttttcgcttttcataactcaacggccaggatacaatggcaagcttttgacccgcgatcaggcc

SEQ ID NO: 233151 - DNA, 401 bp, Gossypium hirsutum
aaaaaaactctcttcttcacttttagaaaaaaagaagaagagatatatagctgtgttttagttgatattcagatagaaatcatgccggcgggtggattctcatcggttacaccggcgggggtggaattcgaagcaaagatcactcctatagtcatcatttcttgtataatggccgccaccggaggccttatgttcggttacgacgtcggcgtttctggtggcgttacgtccatgcccgacttcttgaaaaaattctttccggttgtttaccggaaaaccagaaaccctggaatcgatggaaattactgcaaatacgacaatcaaggccttcaattgttcacttcatcgctttatttggctggtttaactgccactttcttcgcatcctacaccactaggag

SEQ ID NO: 233152 - DNA, 406 bp, Gossypium hirsutum
ctcctccaccaaatctcccactccctcctctcctctctccctccccaaacacactttaacctcatatgcggtgtcccttacactgccctccctatagccacctccatctctctcgacacctccatccccatgctcatgcgccgcaaagaagtgaaagactacggaactgccaagtccatcgaaggtgtttacgaaaagggtcaagcttgtttggtggtggaagacctcgtaacgtccggtgcatcggttctcgaaacggcggcaccgcttcggtctttgggtatcaacgtaacggatgccgtcgtggttatagatagggagcaaggcgggagggaaacgctggaggagaatgggattaaacttcatgcactttttactttaactgagatggtcaaggttttaagag

SEQ ID NO: 233153 - DNA, 404 bp, Gossypium hirsutum
tttgagctttcgtgtttgtctattgaattctttccttcactttctcgagaaaaaaaaaacgtcttcaggttgcaattgcggatctagctgcacctgctgatctggctgcaattgccgtgagaactgctcaatgaaccttaaccttggatactcggagaagacaaccagcactcagaccatcatctccggagttgcgccagtgaagatgacctttgagggaccagagatgggcactactgaatcaggacatggatgcagctgtggatcaagcttcaaatgttatccatgcacctgttgaaaagctcgatgaaagccatagatcatgaaaaaagaaagcagcacaataacaggcctctgtaatgatttattttcaaggatggatgcctgcaaggtctataactatg

SEQ ID NO: 233154 - DNA, 413 bp, Gossypium hirsutum
cgtatttcaggttgaagaaatcctccttttgggttcgatctctggcttcaccaccaatgctagagatcggacatgccccaggtaatgcccttttcggcaaatacgagatcggccggctcctcggttgcggtgctttcgccaaggtttatcatgccagaaacctccgcaccggcctcagcgtcgctgttaaggtcatcaacaaaaagaagctacccaacctcaccatgatgtccaacgtcaagcgcgagatctccatcatgagtcgcttgaaccacccttatatcgtcaaactttacgaggttctggccaccaaaaccaagatctatgtcgtcatggaattcgtcaaaggtggagaattgttcgctaaggttgctaaaggaaggttcaccgaagatttcagccgtaagtatttc

SEQ ID NO: 233155 - DNA, 390 bp, Gossypium hirsutum
gaagacaaggcggtaaagatgtgcttcttcagctgagggaacttgaagatgttatcattcccccatctccagttgcatttcctgatgaccatgaaacttggaatgtacagttatttagatcaattgatggtggggctgcttttggtttccctgagacacctgaagatgctgccagggctgggcttgtgagtggaaaggacaatatcattgaccgaagtattcaggatgcctatattaatgctatacgacgagcaaagaattttatctatattgaaaatcagtatttcctcggaagctcatttggctggagtcctgatgacatcaagcctgaggatattaatgctttgcatctgattcccaaagaaacttcacttaaaattgtttgcaaga

SEQ ID NO: 233156 - DNA, 391 bp, Gossypium hirsutum
  unsure (1)..(391): unsure at all n locations
ctggtttcttttagcttacagcttccattgtttttcagtagtgaagagctaaaaaagaagggaaaccaatggaggggaaagaagaagatgttagattgggagcgaacaagttctcagagaggcaacctattggtacagcagcccagtcccaagatgatatggattacacttagccaccctcagcacccttgtttgagcccagtgagttgacttcatggtcgttttaccgagctggaatcgatgatttcgcttctacttttctattattgtacatattttttttagcgtgaacgtggtattaccattgattttgccctgtggaagtttgagaccaccaaatttttttngtgttgtttttttctttattttgcatctcttttttattattaaa

SEQ ID NO: 233157 - DNA, 407 bp, Gossypium hirsutum
gccgcacgccagcctagcgtttccataaggaagaaatggcggtccctttgctgtcgaagaagattgtgaagaagcgtgttaagaagttcaagaggccccaaagtgatcgcaagatctccgtcaagacaagaaaacacgccactatcttcccgatggatttaagaaattcgtggtgcacaatgtccaagagctagagcttctcatgatgcacaacaggacatactgtgctgagatagcacatgatgtttcaacgaagaagaggaaggaaatcgttgagcgagcagctcagttggatgttgtcgttaccaacaaattggctaggctgcgcagccaggagaacgagtaaaggtcggttcttgaatgttgattttgctctttttagtatgatattctcttgtttaggaagg

SEQ ID NO: 233158 - DNA, 401 bp, Gossypium hirsutum
gtttaagaaaaaaatttccttagagcataaaagaaaagttacgaacatgccgggtgtcaatcctgaaattgagttcccagccattgagttccgtccatcggatttgaagcgaggaaccgaaggatggaaccggttgtgcaagagggttcaagaggcttgtgagactttcggttgtttcgaggtggtatatgaaagggtatcgacgaaactccgagaggatgcgtttgggttgatgaaagaaatggttgagctcccagtggagacgaaacagaagaataatagtcccatgccttaccatggttgggttggaccatgcaagcaggtttctgtgttgtatgaaggctttggagttggagatgcctccaactatgactctgttaaaagttttgctcaacttatgt

SEQ ID NO: 233159 - DNA, 370 bp, Gossypium hirsutum
cggaaaccggccatggctgccgccgctaatccccgctctttctactcgggttccaatcctcctcaccccaaccgctttgttttctcagccgatcctcctcccaaaatctcactcactcccgatcaattcaactactgctctgaggctctcaaattgttctcccaaaagctccagatgcccgacgaaatcaaccgcgagttctcgcacttacaggcaaataggattacaccttcggagatgatgaggagatgcacagtgggttttaacggtgctaatttggacaagaatcgatactctgatgtcataccatgtactttaaaaagtttattttttttccaaatcgacacgaacagggtagttcttaattcat

SEQ ID NO: 233160 - DNA, 349 bp, Gossypium hirsutum
ggagcattattaggagttgggattgtcaattgtggtggtaagaatgattgcgacgctgcactggctctattgagtgattatattagtaaagaggattctaacatccgaattgatgcataaattaggcgtggaaaattgcatatgctggtgcccagaatgagcagattcgtagcagcttgactctgatacttaatgatgcaaaggctccccttgatgtgatagcattcactgaaatgtgctcgggtttgacatacgtaggtgcaccaactgatgagggtgcacatcttccatgagtactctaatggaccgatattagtcagagtttgtggagccccctatttcgatcttt

SEQ ID NO: 233161 - DNA, 400 bp, Gossypium hirsutum
attacgtggagagcctttttttgtgtagcgattctcaattagtcttttttttaaacctaacagtttttttcaaaagtttataatggggtaaggggagggtcacatcaaccctggtgtcattggccatttccacttttgcaaggcgaccaattccggtcatttgatctacaagcctggtggtattgacaagcgtgtgattgagaggttcgagaaggaggctgctgaaatgaacaaaaggtcattcaagtatgcttgggtgcttgacaagcttaaggctgagcgtgaacgtggtatcaccattgatattgccctgtggaagtttgagaccaccaaatactattgcaccgttattgatgcacctggacaccgtgactttatcaagaacatgattaccggtacc

SEQ ID NO: 233162 - DNA, 380 bp, Gossypium hirsutum
gaggaatccaaattgttcatcgtgtaattaaggtccatgaaaggcaagatactggtgaagttgatgccctcaccaaaggagacatcaattatggcgatgacaggcttttatatgctcaaggtcagcaatggcttgatcggcaccatatcatgtgcagagctgtgcggttcttgccttatgttggctggattaccataatcatgactgaaaaaccaattatcaagtatattctgattgcagcattgaggttgcttgtgataacttctaaagactgagcagcatttatgaagggtgggccaaatctacaaggaaatcctcctacaattgccaacgcttctaccctctccttggcatcggtcatttcttgcttttttatacac

SEQ ID NO: 233163 - DNA, 404 bp, Gossypium hirsutum
ccgacactccacagcgcagcaatgggtgaggaagtaaaggctttggttcctgagtcactgttgaagaagaacaagaggaatgaagaatgggagcttgccaaaaagcaggagctcgaagccgcgaagaataagaaagtcgagaaccggaagttgattttcaacagggctaagcaatatgcaaaggagtacgaggctcaggaaaaagagttgattcaattgaagcgggaggcgaagttgaaaggaggattctatgttgatccagaagctaagcttttgttcattgttagaatccgcggtatcaatgccatgcacccaaggaccagaaagatcttgcagctcctacgtttgagacagattttcaatggtgtttttcttaaagtgaacaaggcaacaatgaacatgct

SEQ ID NO: 233164 - DNA, 333 bp, Gossypium hirsutum
cggacgcgtgggctcatgtcctttatttccgccgttcctgaatctcaacgccctgctttattccagtcgctgttgctcgaagcttgtgggagaacagtgaaccctgtgaacggagccgtggggcttttgtggaccggaaactggcacgtttgccaagcggcggtggaaaccgtcctgcgaggaggatctctacgttccatgcctgaactcatgtctccgacgccagcatccgacaaaacgttcgaagcccacttccccggccttgtggaattggcgggggccatcaccgattttaacctccacctgtggattttaaaattcaggatccagggt

SEQ ID NO: 233165 - DNA, 411 bp, Gossypium hirsutum
caacgctctccttctgtttctggtcaagccaatctcaaaagactccccttttagctcacagctcctctcttgagtactataatgggtaaggagaaggttcacatcaacattgtggtcattggccatgtcgactctgggaagtctacaaccactggtcattgatctacaaacttggggggattgacaagcgcgtgatttagagggttgagaaagaggctgctgagataaacaaaaggtcatttaagtatgcatgggtgctcgacaagctttaggccgagcgtgaacgtggtattaccatcgatattgccctctggaagtttgagactaccaaatactactgtactgtcattgatgcccctggacatcgtgacttcatcaagaacatgattactggtacctcacaggctgact

SEQ ID NO: 233166 - DNA, 404 bp, Gossypium hirsutum
gagaaaaggaaaatggaagggataaagcaccaaatggttaaagtgaatggcataaacattcacatagctgaaaaaggtgaaggtccagtcatccttttcctccatggcttccctgagctttggtattcatggcgtcaccaaatcctcgctttatcttccatgggttaccgagccgttgctcccgatttgagaggctacggcgactcggatgctcccgactcagtcgagagttacacttgtttccacataatcggcgatttagtggagctgatagacgtactggatccggatgtaggcaaggtgtttgttgttgggcatgactggggagcttacatggcttggttattgtgtctgtttaggcctgataaagtgaaagcattggtgaatttgagtgtgccgttttt

SEQ ID NO: 233167 - DNA, 411 bp, Gossypium hirsutum
ctttactttaaaaggcatgacgggcaagcagtaacttgcgaagacttctttgctgccatgaaagatgcaaatggtgtggattttgctaacttcttgctatgtcaagaagtacccccaactcctgggcaacctgttaaagaaccgatgttcattccagtagctgttggtctactggactcaagtggaaaggacatgattctatcttctgtgtatcacaatgggacattgcagtctgttgcaagcaacaatcaaccagtcctcagcactgttcttcgagtaactaagaaagaagaagaatttgtgttttgtgatatattcgagcggccaattccatctctactgcgaggttatagtgctcctgtccgtcttgaatctgatctctccgacagtgacctatttttccttctcgct

SEQ ID NO: 233168 - DNA, 412 bp, Gossypium hirsutum
gggacacacagctgaaacagataaacatcaaaatgggttcccaaaaacacgtctttcttttgttatcagtgcttttgattctcaattcccttctcttttccggtgccgatgaagatcactattacgaatttattttgcaagaaacagagattacgaagctatgcagcacaaaaaccatattgacagtgaacggcagttttccagggcctcaaattcgggttcgaagaggcgacactgtttatgtcaatgtgcacaatcaaggaagatctgctgtttccttcgattggcaaggggttgaggatccggttgatggttcaaacgagttgatccagcctggtaaaaacttcacttacgagatcgaattagacgatgaaatcggaactttatggtggcatgcaaggagtgcttgggc

SEQ ID NO: 233169 - DNA, 410 bp, Gossypium hirsutum
aaaatatctcaaatctcctcctcctcctcagaaatcttagtatcatcaccatggcctcaaatcccaaggtcttctttgacatgactatcggtggtcagcccgctggtcggattgtgatggagcttttcgcagattgcactcctcgcactgctgagaacttccgtgccctctgtaccggcgagaaaggcgtcggccgcagcggtaagcccctccactacaaaggctcctctttccatcgtgtgatccctaactttatgtgccaaggaggtgacttcacggccggaaacggtaccggaggtgaatccatctacggatccaagttcgctgacgagaacttcatcaagaagcacactggtcccggtattctctcaatggctaacgctggtcccggaactaacggatctcagttc

SEQ ID NO: 233170 - DNA, 400 bp, Gossypium hirsutum
tctttagacagggtttcagggtctggttttcaatctaagaaagagtatttgtttggaaggatcgatatgcaactcaagcttgttgctggcaactcagctggcactgtcactgcttattatctgtcatctcaagggccaacccatgatgagatagactttgaattcttagggaatctgagcggtgacccttacattttacacaccaatgtctttacacaaggcaaaggcaacagagaacaacagttctatctttggtttgaccctacaagaaacttccacacctattccatcatttggaaaccccaacacatcattttcttggtggataacacccccattagagtcttcaaaaatgctgaatccattggtgtaccattccccaagagccaacccatgagga

SEQ ID NO: 233171 - DNA, 400 bp, Gossypium hirsutum
cagaaacgaccggcagagaaataaaaatgggaggctgggcaatcgcagtgcatggtggtgctggtgtagacccaaatctccctaatgaaaggcaagaggaagctaaaagactcctcaatcgttgccttgatattggaatctctgctcttcgttctaacctctccgccattgacgtcgttgaacttgtcgtgagggaattggaaacggatcctttgtttaattccgggcgtggatcggcacttacggagaaagggacggtggaaatggaagctagtattatggatggaccgaagagacgatgcggtgctgtttcgggtttaacgacagtgaagaatccgatatctcttgctcgacttgttatggataaaacaccacattcgtatttgggttttgccggcgc

SEQ ID NO: 233172 - DNA, 400 bp, Gossypium hirsutum
ttgaagaggaaaaggcaggaataaagactgatgcttttttcgaaacatgtgggcccaatgtatatgctgtggatgatctaaccactttttctctgaagacatacaatgaattgagaagggtggaacacgttcaccatgcccggaaatgagctgaacaggcgggaaaggctatcaaggcaagagcggaagggacatcagttgacgaatatgactacctaccgtacttctattcacgttcctttgatctatcatggcgattctatgatgacaatgtaggagatacagcacttttcagagacagcatccctaaatcaccaaaggcgaagttcggatcttactggatcaaagatgggaaggtggctggagctttattagaaggcggcactggcaaagaaaacca

SEQ ID NO: 233173 - DNA, 398 bp, Gossypium hirsutum
cttcttttttatacagggttttaggttctgtttttcaatctaagaaagctcgggggggggtttctaaattcctacacctcttcttttcacaaatcacttggcacctttcaccgcttattatccgtcatctcaagggccaacccatgatgagatagactttgaattcttagggaatctgagcggtgacccttacattttacacaccaatgtctttacacaaggcaaaggcaacagagaacaacagttctatctttggtttgaccctacaagaaacttccacacctattccatcatttggaaaccccaacacatcattttcttggtggataacacccccattagagtcttcaaaaatgctgaatccattggtgtaccattccccaagagccaacccatga

SEQ ID NO: 233174 - DNA, 405 bp, Gossypium hirsutum
gaaaatatcacaaatcttcttctccttctcagaaatcttagtatcatcactatggcctcaaatcccaaggtcttctttgacatgacgatcggtggtcagcccgctggtcggattgtgatggagcttttcgcagattgcactcctcgcactgcggagaacttccgtgccctctgtactggcgagaaaggcgtcggccgcagcggtaagcccctccactacaaaagctcttctttccatcgtgtgatccctaactttatgtgccaaggaggtgacttcaccgccggaaacggtaccggaggtgaatccatctacggatcaaagttcgctgacgagaacttcatcaagaagcacactggtcccggtattctctcaatggctaacgctggaccgggaactaacggatct

SEQ ID NO: 233175 - DNA, 405 bp, Gossypium hirsutum
aattggatgcattatacaaatcgcttgcagaacagtacacttggtcatctgcagttaagaggataccgcttgattttctgcaaggagacaagttccgtgaagcaccaattagttatattaagcctcttctaacgaagggggttccatctttattctcagatctttctcctttgtatgatcaccctggcaaggcagatatgttggagcaacttattcttgagttggagcattcaattaggattaatgggagatatcctgataggacagagaaggagcccccttcaacacttttgtggattttgttctttttggctcaacattatgacagaagaggacagtatgatgttgctatttcaaagattgatgaggctatacagcacactccaaccgtaattgatttgtact

SEQ ID NO: 233176 - DNA, 390 bp, Gossypium hirsutum
aaatattataacatcggggatattgaaaccagacatgaatgctgcaggggtgaacatttcagctgggcggtccgatgcactaggcccaacagtgtatggtacttataccagccaagtatactctaacatcattgcaaggacttgaatgtcttgagcacatggtcgcggccttcgacggttaatgaaggccgctaacccagattggactccagcagctatcaaatcagctgttatgactacagcttatacggaatacaaaaacgcgcagaaaatgcaagatattgtaacggcgaaaccatccaccccgttcgaccatggtgctagacatgtggatcctgtttcagcgcttaatccagggcttgtgtatgatttgacagcggaagattatct

SEQ ID NO: 233177 - DNA, 411 bp, Gossypium hirsutum
gtctctctcttcatctctctgaaccaaaaagtctttagcttttcgcttcgagagagaccatgttggtttaccaggatctcatctccggtgacgagcttctttctgactcattcccctacaaggaaatcgagaatgggatgctgtgggaagttgagggaaagtgggttgtgcaaggagctgtcgatgttgacattggtgccaatccttcagccgaaggtgctgatgaggatgaaggtgttgatgaccaagctgtgaaggttgttgacattgttgacactttcaggcttcaggagcaaccccctttcgacaagaagcagtttgtcgtgttcatcaagaagttcatcaagaacttgacaccaaaactggatgcgaaaaagcaagagtccttcaagaaaaacattgagggagcat

SEQ ID NO: 233178 - DNA, 411 bp, Gossypium hirsutum
gaaaaaagaaaaaaagtcatttctttcatcttaaaaagacagcgaggaagccacgaagataatagagtgattttcaatctccattttaagggtgtggaacaatgggtgctggaggcagaatgtcggttccaacgagtccaaaaaaacccgaattcaactcactgaagcgagttccatactcaaagccacccttcactctgagtgaaatcaagaaagccatcccaccacactgtttccagcgctccgttttacgctcattctcatatctcctttacgactttatattggcctctcttttctaccatgtggccaccaattacttccctaaccttcctcaggctctctccaacgtggcttggcctctttattgggccatgcaaggttgcattttgaccggcgtttgggtcatag

SEQ ID NO: 233179 - DNA, 401 bp, Gossypium hirsutum
gtcagctcatgttcatggtattggacactagcaatgatgtggcttgggtcccatgctccggctgcaacgggtgctcagccaccactttctcacccaacacttcttccacctatggttcgttagattgcggtttgccccaatgcgcccaggtccgtgggctgtcgtgcccggctacggggtctgcggcttgctcttttaaccaatcctacggtggagattcatcattttcggccaacttggttcgagattccttaggattagccaatgacattgtcccagattttgctttcggatgtataaacgtcatctctggtggatcagtaccaccgcaaggactgttgggtttgggtcggggacccatgtcacttatttcacaatccggggccctctactctggtgtt

SEQ ID NO: 233180 - DNA, 404 bp, Gossypium hirsutum
attcctgcaaattcccttcttttcccctccacccaagcctaaaaaatcatggcgacagctcaaatcagcaaaaaacgaaagttcgtcgctgatggagttttcttcgcggaactcaacgaggtattgaccagggaactggctgaggatggatactctggagtcgaagtcagagttactcctatgcgtaccgagatcatcatcagagccacccgcacccaaaacgttctcggtgaaaaaggtaggaggattagggagcttacctcagtggttcagaagcgattcaagttcccagaaaacagcgtcgagctttacgctgagaaggtcaacaacagaggcctttgcgctattgcccaggccgagtctcttcgctacaagctactcggaggtcttgccgttcgcagggc

SEQ ID NO: 233181 - DNA, 405 bp, Gossypium hirsutum
attctattttgtttctatcaggataataaagaaacttgtcagtccatcaccatgatacttccatccaagtttcaagatgaaactgaaaaaagtgacaaatcttcaccacctttggatgtttcggttgcattccctcaagcaactccagcatctgtttttcctccgtctgtttctgattattatcgatttgatgatctattgagtcctgaggagaagactctccgaatgaaagtaagagagtttatggaaaaagaagtagctcctataatggcggagtattgggagaaggcagagtttccattccaaattcttccaaagcttgctgatcttggaattgcaggctttaataccgagggttatggatcccctggtctctccatcactactagtgctattgcaaatgca

SEQ ID NO: 233182 - DNA, 400 bp, Gossypium hirsutum
tgctcctccacgctcctctctacgcttctctacgaccttttcctcaacactttctcttccgatccttcgcttcgagccgccgccgtcgccgatctccgtgcggctcgcgttcgggatcccgcttgcgtttccttctctcattgcctacttaattataaaggattcttggcatgccaggctcatcgagttgcacacaagttatggactcagtcacgtaggccgctagcattggcattacattctcgaatctccgatgttttcgccgttgatatacatccggcagcaaagatcgggaaagggatcttgttgatcatgccaccggtgtggtgatcggagaaaccgcggttgttggcaacaatgtgtcaattttgcatcacgttaccctcggtgggaccgggaa

SEQ ID NO: 233183 - DNA, 392 bp, Gossypium hirsutum
gtttgctctgtatattgaaattttctttctcgattttctctttagccaaaaaagatgcagatcttcgtcaagactctaaccggcaagacgatcactctcgaggtcgagagctccgacacgatcgacaacgtgaagaccaaaatccaagataaggaaggcatccctccagaccagcagcgtctgatcttcgccggaaaacagcttgaggacggccggaccttggccgattacaacatccaaaaggagtcaactctccacctcgtcctccgtttgcgcggtgggatgcaaatcttcgtgaaaaccttgaccggcaagacaatcactctcgaggtcgagagctccgacacgatcgacaacgttaaggcgaagatccaagacaaggaaggcatccc

SEQ ID NO: 233184 - DNA, 407 bp, Gossypium hirsutum
cggcatatcagcacttgtctgaaggttttggatatgactggcttgaagctttcagcattgaatcaaataaagatactgaccactatatcaacaatcgatgacttgaattatcctgagaagacacagacatattatattgtcaatgcgccatatatattttcggcatgttggaaggctgtaaaacctctcttgcaagaaaggacaaagaggaaaattcaggtgcttcaaggttctggaaaggatgagttgctgaaaataatggattattcatcccttccacatttttgtagaaaagaaggttctggatcaacacgtcacagcagcaatggaactggagataattgtttctcgttggatcacacctaccatcaacagctttacacttacataaagcatcaagctacaca

SEQ ID NO: 233185 - DNA, 402 bp, Gossypium hirsutum
atcaaaagaaaaggcaaaggcgagggtctattttcttcacaaactacaatggcttccgagtctttagtaaccaagaggctagatggtaaggtggcactgataactggtggtgccagtggtttaggagagtgttcagccaggctatttctcaaacatggagccaaggttctgattgctgatattcaagacgaattgggccactccctttgcaaagagcttggaactgaaaacttcagctatgtccattgtgatgtaacatgcgaatctgatgtcgaaaatgccgtaaacttagcggtctccaagtatggaaaactcgatatcatgttcaacaatgcaggccttattggtgatggtgaagtcagagtgacagacgccagcactgacaacttcaagagagtgttc

SEQ ID NO: 233186 - DNA, 408 bp, Gossypium hirsutum
tgagaggccaaaacaacggtggtgtaagggaatttgcttcgccagataggggtgcgcacgataagagagttggtggtaacaaccataacaataacaaccaccaccaccaccatcaccaccatcaccacaacaacaaatcagcggcatcttcggatatgacccatgacagcaaaaaaggaggctcatcttcaggaagcggtgaggcagctccacccatcgtttggccaccaaaatttgtgattgctttaactaataaagagaaagaagaagatttcatggccattaaaggatctaagctgccgcagagacccaaaaaacgagcgaaatttattcaacgtaccctcaacctggtaagtccgggggcatggctatgcgatttaacacttgaacgatacgaggtcagggagt

SEQ ID NO: 233187 - DNA, 407 bp, Gossypium hirsutum
acaatgtcggtctcacttcaagctgcagctaccctgatgcaaccaatcaaggttgctgcaccatcaaggaccaatgtgctgctcaggtcctcccagagcgtttctaaggccttcggtttggagcctgttggtgctaggctcacctgctctttgcaaactgacctcaaggacttggctcagacgtgtgttgatgctaccaagctcgctggtttcgctcttgctacatctgctcttgttgtctcgggagcaagcgctgaaggagttccaaagcggctaacctacgatgaaatccaaagcaagacatacatggaagtcaaaggaacaggaactgctaaccagtgcccaaccatcgatggtggtgtcgactcttttgccttcaagcctggcaaatactacgccaagaagtt

SEQ ID NO: 233188 - DNA, 395 bp, Gossypium hirsutum
gcaactctgacgcaactgctatttattttttgtggttttgagcagcagcttggatttggaagaatggtgagggtgagcgttttgaatgatgcactcaagagcatgtacaatgcagagaagaggggcaaacgacaggtcatgatccgaccgtcctcgaaggtgatcattaagttccttttggtcatgcagaaacatggttatattggggagttcgagtatgttgatgatcatagatctggtaaaattgtggttgaattgaatggtaggctgaacaagtgtggtgtgatcagtcctcgttatgatgtctgtgataaggagattgaagtgtgtactgctcgcgtgctttcttcaagacagttggcttatattgtgctcacaacatcatctggaattat

SEQ ID NO: 233189 - DNA, 408 bp, Gossypium hirsutum
cgattttctattttgttttctctccctccaattaagatgcagatcttcgttaagaccctgaccggcaagaccatcaccctcgaagtcgagagttccgacacgatcgacaacgttaaggcgaaaatccaagacaaggaagggatcccaccagaccaacaacgtctcatcttcgccggaaaacagctcgaagatggccggaccttggccgattacaacatccagaaggagtccaccctccatctcgtcctccgtctacgtggtggcatgcagatcttcgtcaaaaccctgaccggcaagaccataactttggaagtcgaaagctctgacaccattgacaacgtcaaggcaaagatccaagacaaggaaggcatcccaccagaccagcaaaggctcatatttgccgggaaa

SEQ ID NO: 233190 - DNA, 395 bp, Gossypium hirsutum
ctcctccatcaaagaagaagcccaacaatgccgccgaagttcgacccaacccaagtcgtcgacgtcttcgtccgcgtcaccggtggtgaggtcggagcagccagttccctcgctccaaagattggtccgttgggcctctctcccaaaaagatcggtgaagacatcgccaaagaaactgccaaagaatggaagggtctccgcgtaactgtcaaactcaccgtccagaaccgtcaggcgaaagtcactgtggtcccgtcggcggcggctcttgtaatcaaggcgttaaaggagccagagagggataggaaaaagaccaagaacatcaagcacaacgggaacattaacctcgacgacgtcatcgaaattgccaaggtaatgaggccgaggtcgatggc

SEQ ID NO: 233191 - DNA, 402 bp, Gossypium hirsutum
gtagctttggaagcatggacttcatagctactatcctgtttctagctcttgtcatctcctccaccaaagctttggacccttgcggccctcagccagatgactcggaccttttggtcatcccaatctatggcaaatgttcaccattcaacccacccaaacctgactcatcgttcaacacagtcatgaacatggcatcaaaagacccagcaagggtcaagtacttgtcgagccttgtagcccaaaagaccactgcggttcccattgcttcaggccaacaagtcctaaacattggcaactatatcgtccgggtaaagattggcactccgggtcagctcatgttcatggtattggacactagcaatgatgtggcttgggtcccatgctccggctgcaacgggtgct

SEQ ID NO: 233192 - DNA, 405 bp, Gossypium hirsutum
tccaaatcgaaatttaaggccaaaaagacacaagggttactaattaaattaatcttcagcgaatatgttggtttatcaggatcttctcacaggtgatgagctcctctcggactctttcccatacaaagaaatcgagaatggaatgctatgggaagtcgagggaaagtgggttgttcaaggagctgtcaatgtagatattggggcgaacccttctgcagaaggtgctgatgatgatgaaggtgttgacgatcaagccgtcaaggttgtggacatcgtcgacactttcagacttcaggagcaacctgcttttgacaagaagcagtttgtgaccttcatgaagaggtacatcaagaacttgacacccaaattagagcctgaaaagcaagagtctttcaagaagaacat

SEQ ID NO: 233193 - DNA, 405 bp, Gossypium hirsutum
atcttatctaatacacccactgtagaaaaaaagagagaagtttgatcagacggtgaaaatgggtggccttgaaactgatagaacaacaacaggatgggctgccagagatccttgaggagtattgtctaattacacttacactcttaggagcactggtcctgaggatgttttcgttgagggtatgtgctgtggaatctgccacaccgatcttcataaagccaaaaatgatcttggtatgtcaaactacccaatgggtcctgggcatgaagcgattggtgaggtgctgcaagttgcatcacatttaagcaggttcacagttgttgatattgatgacgttgcttgtcttgttcggcgcgggatatacttctgaccatgcgacttagcaaatgaacaatactgtccaaa

SEQ ID NO: 233194 - DNA, 392 bp, Gossypium hirsutum
aaagcacgctcttcttccttgtgtaagcggcgccggcaagaagctaaggccagtccacctcggatctctcgtctctgccttccatcgacaacaatctatcttacatgtttcacttcttctttcatcaaagattttgatggcgtcaaaattgcagcagttgcaatctcaggcgtgccaagcttcaaagtttgtggcgaagcacggaactgcttactacaagcagttgttggagcagaacaagcaatacattcaagagccgccgacagtggagaagtgcaacgagttggctaagcaactcttttacactcgccttgctagtatcccaggtcgtacagagtcattctggaaggagctcgattatgtcaagcaactattgaagaacaggaaagagc

SEQ ID NO: 233195 - DNA, 402 bp, Gossypium hirsutum
aaattttataacttggaacctagacacccatggctactgtttctcaattgaataactttccatgcaagaccttcttaataaccccacaaaacagtaactttacctcaaaacttccggttctgcctctaaactctacaaaaccaactcagaattcgatcaagaaatctcaatttttgacccagaaatcagtccagccaaggcctgttttccaggtccgtgcttcggacgccgacgacgaatggggcccggacaaggaggagccagttgtaatcgagagtcctggagtggccgtggcggaagagaagaagcctgacgatgcgggggaaatagagagcttgaagaaagctttggtggattcgttttatgggacggatcgtggcttgaaagctagcagtgagacca

SEQ ID NO: 233196 - DNA, 350 bp, Gossypium hirsutum
gatggatcaatgcaatgctactgtttattgagcaaatctatcagcactctctgcgagagatgaaatcgccctgcttggacgacctacatggcaagtgcccgtaggccgaacagatgcactatcatgcagtctaagcgctctctgcatcgaaattccatcaccatatgctaacctgacagctctaacctacttggtcgctgccaaaggcctaagcacacgagacctgaccgccctatccggtgccacacaatcggcctggctcgatgcaccactttccgcggtcgtatctacaacgacaccaatatcgaagcgtattgagcagacaccatgacggtccaactgccctgctt

SEQ ID NO: 233197 - DNA, 194 bp, Gossypium hirsutum
gtttcttttagcttacagcttccattgtttttcagtagtgaagagctaaaaaagaagggaaaccaatggaggggaaagaagaagatgttagattgggagcgaacaagttctcagagaggcaacctattgggacagcagcccagtcccaagatgataaggattacactgggccacccccagcacctttgtttgag

SEQ ID NO: 233198 - DNA, 405 bp, Gossypium hirsutum
gggagcccaaggaggagaatactaaccttggacctgctgttcgagagggtgagcatgtttttggggtggctcacatttttgcttcattcaatgatacatttattcacgtgactgatttgtctggaagggaaacaatggttcgaatcactggcggtatgaaggtgaaagctgatagggatgagtcttccccttatgcagccatgcttgcagcacaagatgtttctcaacgctgcaaggagttgggtattactgcccttcatataaagctccgagctactggaggaaacaagacgaagacccctggtcctggtgctcagtctgcacttagagcccttgctcgttcaggcatgaaaattggtcgaatagaggatgttactcccattcccactgatagtactcgtagaa

SEQ ID NO: 233199 - DNA, 407 bp, Gossypium hirsutum
atagctttccttccaatcaaatactaatccctttgtttttttgttctccctctctttaaaatttgatttttacatagcacgaaaattaaaaagttatggcggaagaagaagaaacagagctgagcgatgatcaaaagaaaggaatcgccaaatggttcctcgtaaacgctcccgctggagaaatccaatatgtctccagagatttaaaattggttttgaatgatgatgatgtgtataatgaggcagcatcggaggcgtttcccgtttacaacaaatgtcacctcatttccctcaaaatgcctggtggattcggtgatgtgttggttacatcatatggggagcttcaggataacgagtacctagaccccaagactgcccaagttgccatagtcgatcatgtcaaacag

SEQ ID NO: 233200 - DNA, 406 bp, Gossypium hirsutum
ttataatccttctttttaaatactcgtctttaaaaacaaaaattgtgaaacatgcataatccactttttcttgtgcttactgtaatattctccagcctggtggttcagccagtaatgggagcaaagggtttcagtgtggagcttattcatcgtgattcgccaatatctcctttctataatgcttctctcacctcatcacagatcctaagaaaaaatgccctccattccctggaccgtctcagacacttccaatccatgattgatcaaagcgccatccaatctgcagtgactccaaatgggggtatttatctgatgaaactctgctttggaaccccgccagttgactacatggccgttgcagacactggaagcgaccttatatggatacaatgtgttccatgtcttc

SEQ ID NO: 233201 - DNA, 397 bp, Gossypium hirsutum
cggacgcgtgggctgagctccatggtgacaaaaggagcaaaacaatgacttctcttcatgaagcttgtgagaaatggggcttctttcaggttgataaccatggagttgataagaagttaatggagaaggtgaaagagatggtgaatgattactatgatgagaatttgaaagaaaagttttatgaatcggagatgactaaaagtttgaacaagaatgagaaaatctccgacatggattgggaaagtactttcttcatttgccaccatccaaattctaacatcaatcaaatcccaaacataactaagcaactatgtgaaacaatggaggaatacatagcacaactgattaaactagctgaaaccctatcggagctgatatgcgaaaatctaggactaga

SEQ ID NO: 233202 - DNA, 296 bp, Gossypium hirsutum
aaggtgtcctggagttcattgattatgcttacactgtgtttgggtttacttatgacctaaaattatctacgaggccagagaaataccttggagatttggaaacatggaacagagctgaagctgctcttacagaggctttgaaccagtctgggaagccatggcagataaatgaaggagatggggcattttatggtccgaagatcgatattagtgtatctgatgcattgaacaggaaatttcagtgcgcaacattgcagtttgactttcaacttcctgagcgctttaagttggagtac

SEQ ID NO: 233203 - DNA, 392 bp, Gossypium hirsutum
tcgatattatctattttagttccgacaaaagaaaacgaaaaaaaagaagaagaaatacaatcgttttctttttgaagtcgggttttagtttttggggtgaaaaaaatgttgggagtatttagcagtgcgatagtgtctccgccggacgagctggtggcggccggttgccgaactccatcacctaagataacggcggacgctctggtgaaacggttccttgagacgaactcctccggcgtgtccatgcacatcggagaccatgtccaattcgcttattctcaccataaagagtcttctttacagcccagatcatttgctgtgaaagacgaaatcttctgcttgtttgagggagcccttgataacttggggagtttaaagcagcaatatggtct

SEQ ID NO: 233204 - DNA, 387 bp, Gossypium hirsutum
tttcatctttcaatcatggcttgtattcagtatctactctccattccattcttagttttctttgttgctcctggtttagcccaacagtctttccgccccaaggccctggtctttccagtctctaaagacccctcctcacttcaatacctcaccactattaaccaaaggccaccctttgttcctatacgcgttgtggtcgatctctgaggcgcctacttgtgggttgattgtgaacgggcttatgtttcatcgactcacctgcctgtcaggtgcggttcagcccactgctcgctggctggagccactgtgtgcggagattgtgacgagggaccaaggtcagggtgcagcaacagtacatgtgctgaccgaccctgcaacaccggcact

SEQ ID NO: 233205 - DNA, 320 bp, Gossypium hirsutum
ttctattcagttttgtaagagctatggctaaggacattgaggttggtggtgagttccaggccaagtactaccatgatcctccacccgctccattggtagacgctcaggagttagccaagtggtctttttacagggctgtcatagctgagttcattgccactctcctctttctctacatcactgtcttgactgtgatcggttacaagacccagaccgaccttgctaagggcggtgaagattgtggaggcgttgtcattctcggcattgcttgggcttttggtggcatgatttttatccttgtctactgcactgccagtttt

SEQ ID NO: 233206 - DNA, 398 bp, Gossypium hirsutum
caaacatggaaactctcctcttaaaccaaacactatgccgtctcgacctttcccctaaaccaaaacgcccactgtgtattgctcctcagatcttccacttcaaacccaacaaaagctttgccctctttgctgtccaaaatcaagaaagggacttccaagaaacagggaacacactccaagcggacgtcagcgatgaatccttcggtgaagtcagtaaaatcatcggcagcagagcagtccccggcgggaaagccatggagtatttaatagaatggaaagatagtcacgctccttcatgggttccacaagattttatagctaaagatgtggtggcggaatacgaaaccccatggtggacagcggccaaaaaagccgacgacaaggcgttggctgaactt

SEQ ID NO: 233207 - DNA, 385 bp, Gossypium hirsutum
cagccaaggactacaacaatggtggtgaaggtgtatggcccatcctttgcttctccaaagcgagtgattgcatgtcttattgaaaaggagattgaattcgagactgtccctgttgatttgcttaaaggagagcacaaagaccctgaatttctcaagctccagccttttggaacaggtcctgtcactcaagatggagattatgttttatatgaatcccgtgcgatcataagatactatgcaccaaaataccgatcacaagggactgatctactgggaaagacagtagaggaaaggggtcaagaggaaaattggctagaggttgaggcacacaatttcaacccaccaatttacgccttgaccctacatttgatgcatgcttccaaga

SEQ ID NO: 233208 - DNA, 439 bp, Gossypium hirsutum
agcgcccgcaccgcagttccggaatcgccggacgccgcccacgcgttcgattcaacagacccctccccaaaaaaaaacccttgaactttttccgcagtcaaaatgggtatctctcgtggttcgatgcacaagaggcgtgccactggaggtaaaaagaaggcttggaggaagaagagaaagtatgagcttggaaggcaaccagcaaacacaaagctatcaagcaacaagacagttaggaggattagggttcgtggtggaaatgtcaagtggcgtgctctgaggctcgacactggaaactactcgtggggaagtgaggccgtgactcgtaagaccagaattttggatgtggtgtacaatgcatccaacaatgagttggttcgtactcaaactctggttaagagtgctattgttcaagttgatgctgcaccattcaagcagt

SEQ ID NO: 233209 - DNA, 431 bp, Gossypium hirsutum
ccgcaccgcattccggttcgaccgcgagcgtccggccgattctactttagaaattttgatacaagtaaagtaatagaatcttaaagaagaaaaaaaagtgctaaaaaagctagcttttttttttctattgttccttctttactctgggttcttttttcaaagcataaaaacctaatttgtaacagagcagctgcaactatcatcacccatggcggcaccgatctgggtatgggctttttacgtagccctaactctatttccttccgttttgggaaactcagaaggcgatgctctttatactttgagaagaagcctatcggatccggataacgtgctgcagagctgggatcccacccttgttaacccttgtacttggttccacatcacttgcaatcaagataatcgagtcactagagtggatttaggtaatt

SEQ ID NO: 233210 - DNA, 390 bp, Gossypium hirsutum
aaagaacaagactggattctgccatagcctataaaacatgggatcttgaaaacaatatacattaccgcatagacacctgtcccttcatcgtattctatattctactacgactatggcggctcaagccaagttccagcaagagaagcctcggaccaaagatcctcactacttcaagcgcgttaagatctctgtgctcgctctacttaagatggatggccacacccgatcttgtggtaccatagaggtgatggggctgattcaaggcaagaccgaccgctatgctatcattgacatggacgcctttgctttgtctgttgaaggcacttagactagggttaacgctcacgcagatgcctatgagcatatgggcgaacattgccagagcaacaa

SEQ ID NO: 233211 - DNA, 393 bp, Gossypium hirsutum
caccaccattgttgttaaacataatgcagcaccctctaaaacaccaccttaccctaacccttttagcattaacctcactttctcacttcccaccagcttcccccctcaccccatgccgcaccttatgtggcaccaccgccataaactaccctttcagcatcgacgatggctgtggcgccccacaataccgctcaatgctgaactgcacaggtaccgacctgtttttcatgaccacttcggggcggtacaaagtccaatcaatcgactacaacaaacaaaccatggtggtttacgaccctgccatgtcgacatgttccattcttcaaccccaccatgatttcgttatgaccgacgttgaatccgtcgtgataccgccaagttccgacaccattt

SEQ ID NO: 233212 - DNA, 391 bp, Gossypium hirsutum
aatgcatccaacaatgagttggttcgtactcaaactctggttaagagtgctattgttcaagttgatgctgcaccattcaagcagtggtatctccagcactatggtgtcgacattggtcgcaagaaaaaaacagcagccaagaaagaaggagaggaaggtgaaactggcactgaggaggtgaagaagagcaaccatgtcttgaggaagatggagaaacgtcaacagaatcgcaagctagatccacatatcgaggatcaattcgcaagtggtcgtttgttggcttgtatctcttcaaggcctggtcagtgtggccgtgctgatgggtatatcttggaaggcaaagagctggaattctacatgaagaagatccagagaaagaaggggaagggag

SEQ ID NO: 233213 - DNA, 367 bp, Gossypium hirsutum
gtttcaattatgaaaattcatttattacttaccctttttctagttctatttgcttctttcctttcttcatctaattgctatactttctatgttgactgggttttgcaccctaaagagaagtacaatgagtgggctggtaaaatgaggtttcaagtgaatgacactatcatttttaaatatgaaaaaggatcagactcggttctcttggttcaaaaagattattatgataagtgtgaaagggaggaacccttgattgaaatgaacaatggaagctccgagtttaagtatcctcattccggtccattttatttcattagtgggaaagaggggcattgccaaaagggtcagaaaatgatcactggtgtta

SEQ ID NO: 233214 - DNA, 296 bp, Gossypium hirsutum
cacctccactgcagcaggagcagagggaaaaaggataaaagcatcgtcgtgttctcgcttcttcaactctgtctctacgtctctgaacctcctcctttcgttcttttcttattcagtattgtaaaagatggccgatgctgaggatattcaacccctcgtctgtgacaatggaactggaatggtgaaggctggttttgctggtgatgatgctcccagggctgtttttcccagtattgttggtcgaccccgacacactggtgtcatggttgggatgggtcagaaggatgcctatgtag

SEQ ID NO: 233215 - DNA, 373 bp, Gossypium hirsutum
  unsure (1)..(373): unsure at all n locations
cgaagtcgtagctttggaagcatggacttcatagctactatcctgtttctagctcttgtcatctcctccaccaaagctttggacccttgcggccctcagccagatgactcggaccttttggtcatcccaatctatggcaaatgttcaccattcaacccacccaaacctgactcatcgttcaacacagtcatgaacatggcatcaaaagacccagcaagggtcaagtacttgtcgagccttgtagcccaaaagaccactgcggttcccattgcttcaggccaacaagtcctaaacattggcaactatatcgtccgggtaaagattggcactccgggtcagctcatgttcatggtattggacactagncatgatg

SEQ ID NO: 233216 - DNA, 398 bp, Gossypium hirsutum
gcacctcttcctttgttcctcatcctctgatccgtctcttcccgcattcgtcccgccggatttaacaagttttcaaacgaaaaatgagggaaatccttcacgtacaaggcgggcaatgcgggaaccagatcggatccaagttctgggaagtggtttgcgacgagcacggcattgaccctaccggacgctataccggaaactccagtctacaattggagcgcgttaacgtttactacaatgaggcttcttgtggaaggtttgtcccacgcgccgtgctcatggatcttgagcccgggaccatggatagtgtgagaaccgggccttatggtcagatctttaggcccgataactttgtcttcggccaatctggagcttgtaataattgggctaaggggcat

SEQ ID NO: 233217 - DNA, 388 bp, Gossypium hirsutum
ggaaaacaagaaaagcagagccgcatcactttttgctagctaagctactgtgggagttattgttcttcagaacagcttctgcagtagctaataataacgttatatattatataaattttatacatcctttttaccctacgactccatatataagcaagtaaaaataaatatggctcgctctgtttcttcctttaagttccttggtgcttctgtttttgatgctctttatgtctccatatcaaggagaggttactcaggtgcaccgccggcggcagtgacggctagctttggtaggcctggagcgatggggaaagtggaacgaagatatgcgatgaaagagtcgtcgtcgtcggagacaagggcttattcttcagcttgggcgcctgac

SEQ ID NO: 233218 - DNA, 386 bp, Gossypium hirsutum
ctcctttgagctaacaacgctcttcacgctgtgtagaaatgccgttcaaaaggtacgttgagatcgggagagtcgctctcgttaactacagcaaagactacggcaagctcgtcgtcatcgtcgatgttgttgaccagaacagagctctagttgatgccccagatatggtgaggggccaaatgaactttaagaggcttcaattgactgatttcaaaattgacattcctcgtgttccaaagaagaagacactgattgaagcaatggaaaaagctgatgttaaaaacaagtgggagaatagctcatggggtaaaaagctgattgttcaaaagaagagagcatctctcaatgacttcgacagattcaagatcatgttggccaagatcaag

SEQ ID NO: 233219 - DNA, 386 bp, Gossypium hirsutum
acaaattttggttaaaactttgactgggaagaccattacattggaggtagagggttcagataccattgacaatgttaaggcaaaaattcaggacagggagggaatccccccagaccaacagaggctgatttttgctggtaagcaactggaggatggccgtaccctggctgactataacatccagaaggagtccaccctccacttggtgcttcgtcttcgtggtggtatgcagatttttgtgaagacacttaccgggaagaccatcaccctggaagttgagagctctgacacaatcgataatgttaaggccaaaattcaagataaggaaggtatccctccagaccagcagaggctgatatttgctggaaagcagctagaggatggga

SEQ ID NO: 233220 - DNA, 396 bp, Gossypium hirsutum
aaaggtattcgggagccgaaacactgctcggaaacgccgcatgcgcaggcctggccgtgatgataataattttatccaccggacacatctctggggctcatcttaacccttccctcaccattgcatttgccgcctgccgtcatttcccctggactcaggttccagcctacatagcagctcaagtttcggcctcaatttgcgcttctttcgctctaaagggagtcttccatcccttcatgtctggtggcgttactgtcccctccgtcagccatggacaagctttcgcactcgagttcctcattacttttaatcttctcttcgtcgtcaccgccgttgccaccgacacccgtgccgtgggagagctggctggaatagctgttggggcgactgtaatgc

SEQ ID NO: 233221 - DNA, 269 bp, Gossypium hirsutum
gagctttttctcagctctctctctctctctctcatcttttacatggcatctgaagccagcctcctccttcaaaaacagctcaaagatctttgtaagaatccggttgatgggttctcggctggattggtcgatgagaacaatatctttgaatggagtgtaacaattattggacctcctgatactctttatgaagggggatttttcaatgctatcatgagttttccaccaaattatccaaacagccctccaacagtcaaatttacatcaga

SEQ ID NO: 233222 - DNA, 399 bp, Gossypium hirsutum
gtttttctttgtcatcagcacagggactttgatggcagtcacagtgcttgtttacatccaagatgaagttggtcgaagttggggttatggaatctgttcagcttcaatgttcattgcactcttgatattcttttcgggaacaaaacgataccgatacaagaaatgttcgggaagccccattgtacatatttgccaagttgtttctgctgcatctgggaaaaagacggctaaactcccttctgatatttccttgttgtatgaagatctccctgaggcatcacgaatccatcacacggatcagtttcgcttcctggacaaggcatctgttgtgacagaagatgattacagacaaggttccttcatgatgaacccttggaagctttgttcagttacaagggt

SEQ ID NO: 233223 - DNA, 390 bp, Gossypium hirsutum
aacatagcagccatggcagtccgtatgcttcttgggttaggtgtcctgctactctgccttgcaaaggtttcatctgatctgaaggcagaagaagttataaccaatgtcggtgaggtgggttctttggttaccagaggcggaaacagaagactgatgctagagattgattgtggaggattatgcaagaaaagatgcagtcaacactcgaggccaaacagatgcaacagggcgtgtgggacttgctgcttgaggtgcaagtgcgtgccaccggggacttcagggaacagggaggtctgcgggacctgctatactggcatgaccacccatggaaacgttgccaagtgcccttaacctttacgtcgcccaatatgtgttgcagccatcaagggg

SEQ ID NO: 233224 - DNA, 388 bp, Gossypium hirsutum
ctcaattccctttcacttaaaaccaacatcaactcttcttcttcttatgctttcaagactctcagtttctccagtaacctctctcacaatctcttctccaaagggaatctgtcttttagtacagtgactccgaaaccaatacccgatggtgctgatgcagttgtccaagttgaggacactgaacaggttaaagctccttctgaaacaaagtatgtaaagatattggtgcaaactagtaaaggtgttgatattcgtcaagtgggatgtgacattcagaaagatgcagtagttctaaaatctggagaaagattaggtgcttcagaagtgggactacttgctacagttggtgttactatggtgaaggtgcagcctacaccaacaattgctg

SEQ ID NO: 233225 - DNA, 392 bp, Gossypium hirsutum
ttgttataaactttgatccaatccgtactagggaacgagatattctaaggcactttgagccatatgggaaggttcttcatgttcgcattaggcgaaactttgcgtttgtacagattgcaacacaagacgatgctaccaaagctcttgaggctacacaaaggagcacagtactacacagagtcgggtctgttgaatatgctttaagggatgatgatgagagggataacagattctatagtcctaaaagaggaggttacgatagacgtagagatagtccatatggggaggcctcaagtcctgtataccataagcgacaaagtgctgattatggtagagctcgtagtcctgtttatgaacgttataatggctctgcttatgacagacgcaaaagt

SEQ ID NO: 233226 - DNA, 349 bp, Gossypium hirsutum
ggaccgtcgaggaccaaatgctgctcactcattgcgggtttggctgatctcgatgctgctgtttgcctttgcactgatattaaagctaatgtgaagggggacaacctaaacgttcctgattacattgcctgatgctcctcaattcctagcagaaaagcaaatgcctgctggttacaaatgtgcttaagcaaagggtgcgagcatcttttacgtgatcatttcttttctggacgaaataaatttggtgcatagatatgtcagggcttagataaaacgtgttaggacttttaccttaaccaatactgaaattttatgtatttatacaatacttgtcatgtacagaagaaag

SEQ ID NO: 233227 - DNA, 392 bp, Gossypium hirsutum
tttcttgttccttccttcgccgtctattgcttttagttgcctcgatttcaagtgaatcagaatgggtaaggaaaagactcacattaacattgtggtcatcggccacgtcgattctgggaaatcaaccaccactggccacctgatttacaagcttggtggtattgacaagcgtgtgattgaaaggttcgagaaagaagctgctgagatgaacaagaggtcattcaagtatgcttgggtgcttgacaagctcaaggctgagcgtgagcgtggtatcaccattgatattgccttgtggaaatttgagaccaccaaatactactgcactgtgattgatgcacctggacaccgtgactttatcaagaatatgattactggtacgtcacaggctgact

SEQ ID NO: 233228 - DNA, 357 bp, Gossypium hirsutum
gcttgtggctgtcagaataactcaactgaatctgggagttgtgtaagcgaaaggtcttcacttttagcttcagctgttccgggcaaatctaccaatgcaccacctttgcttcagtgtacgagccatatgtgtccagttcgaattcactggcatgttaagctcaactacaaggaatactggcgtgtgaagatcacgatcaccaatttcaattacgcattgaactacagtgagtggaatctagttgtgcaacaccccaactttgacaatcttacacaacttttcagcttcaattacaaaccattaactccttatgctggcttaaatgatactgccatgttatggggacttaagttttat

SEQ ID NO: 233229 - DNA, 389 bp, Gossypium hirsutum
tgaagatggtggctttgttcctgacatatccagtgtaagagaaggattggatattgtccgagaagctattggcagaacagggtataatgacaaaataaagataggaattggtgttgcagctactgaattttgcataggtacaaagtatgatttagaattcaaatctccaaataaatctgggcaaaatttcaagtcaggagaggatgattcagatgtacaaagacctttgcattgattacccaattgcttctattgaagatccctttgacaaggaagattgggaacacagcaaacgtttttgcagtcttggactatgtcaggtggtgggggatgacttattgatgtcaaatccaaagcgcattgagagagcaatacatgaatctgcttgc

SEQ ID NO: 233230 - DNA, 390 bp, Gossypium hirsutum
acggcagctggtactctctccttgcgtgtgcagcaactggatgttcgatgtgaaacaaaaaccaaggataacgtgtttgttaacgtggttgcttcaattcaataccgagccttagctgaaaaggcacaagatgctttctataaactcagcaacactagagcccagattcaatcctatgtctttgatgttattagggcaagtgttccgaagttggagctggatgcagtatttgaacagaagaatgatatagcgagagctgtggaagaggaacttgaaaaggccatgtcacattatgggtacgagattgttcagactcttattgtggatattgaaccagatgagcatgtgaagagggcaatgaatgagattaatgcagcggcaagaatgagg

SEQ ID NO: 233231 - DNA, 393 bp, Gossypium hirsutum
gctcttcgtagtctcccaaatatctttcctttgtcttatcgaatatgatgcaacaaccagcagctggaggcgtggctccgccaccttccatggcggccgatcagtctcagactcatcagtaccagcaacaaccgcagtcgcagccctggatgatgatgtctcaacaacagcagggtggtcaaccggttcctccacctaccggttggacgccgcaacctgttcctccgcccactcagatgcagcagtactccgccggttctgctgctgctggctccggtgagattcgatctctttggatcggtgatcttcagccgtggatggatgagaattacctcatcaatatctttgctcaaactggagaggtggtttcggctaaggtgattaggaataagc

SEQ ID NO: 233232 - DNA, 302 bp, Gossypium hirsutum
caaaaagtctttagcttttcgcttcgagagagaccatgttggtttaccaggatctcatctccggtgacgagcttctttctgactcattcccctacaaggaaatcgagaatgggatgctgtgggaagttgagggaaagtgggttgtgcaaggagctattgatgttgacattggtgccaatccttcaaccgaagatgctgatgaggattaaggtgttgctgaccaatcttggaaggttgcccacatttgttgactctatgaagctttttgagcaggctttttgttgacacgaatacaatttttt

SEQ ID NO: 233233 - DNA, 387 bp, Gossypium hirsutum
atttgataccggtggactcatcgggaacgtattgcttggcgtttgcccccacgacgtacactttgtctataattgggaacgtacaacagcaagggacacgtgtgagcttcgatttggctaataataaggtcgtgttctctgctcataaatgttaagacagtaaataaatagcttattggtgataatttactaatttacctatccatttcttctctggctaaagaaggtgaagaatataccgaagttggtttgtttgtaatatgtatggcaattttatatttaggttgaatttgtaccatttagccgtacttttttacattgtggaaataaattccaaagaatggagaagcagtgcggaccttggcggttaatgaatttaacccgcct

SEQ ID NO: 233234 - DNA, 385 bp, Gossypium hirsutum
caaaaagaagggctaataaacgcagctttgatctcattccctcccctccacaaaaagaaaaagaaattcatcaaaatcgattgaaaatctgagggaatgagaaccaattgctgccatgtttcgtttgcttttgttctcaagttattgaattctctccaaggtttcgttggagtatccattattctctattcaatatggatgttggatcagtggagccatcacgtcccaatatctcctcctcctcctccttcagcgccgtctccggtttcttctgtttccaattcgatcctcttcaattcgggaccggagatgggagaacaagcagctagggttttcgacgattttgctgtcggtttggtttccgggttggacaatgatgtccggt

SEQ ID NO: 233235 - DNA, 397 bp, Gossypium hirsutum
gtttctctttgcgcctttcttctctcagccgcagcactgatattgcaggtaagtcatggttaagcataacaatgtcgtgccaaatgggcacttcaagaaacactggcagaactatgtgaagacttggttcaatcagccagcacgaaaggctagaagacgaattgccaggcaaaagaaggctgtgaggatctttccaaggccaactgctggaccccttcgccctattgtccatggccagactttgaagtataacatgaagttgagagctggaaagggtttcaccctcgaagagcttaaggctgctggtatttcaaagaaacttgcaccgaccattggtatcgctgttgatcaccgccgtaagaacaaatcacttgaaggtcttcaagccaatgttcag

SEQ ID NO: 233236 - DNA, 392 bp, Gossypium hirsutum
atccaaaaaaaaacactcatccctttctataccgctcaaccctgaaccgtacaaaagaaaaaaaaagagtagcagtaccggtttcaccagctatgggtatcgacttggtcgccggcggcaggagcaagaagacgaagagaactgctcccaagtctgatgatatatatctcaagctccttgtcaagctttaccgttttctggtaagaaggactggcagcaaattcaatgcggtgatcttgaagcggctatttatgagcaaaaccaacaagcctcctttatctctttctaggttgattcaattcatgaagggcaaggaggataagattgctgtggtagtcggggctgtcaccgatgacattcgtgtgtatgaagttcctgcgctgaaggttact

SEQ ID NO: 233237 - DNA, 386 bp, Gossypium hirsutum
aaataaacaagttgccatcttgtcctgcacccctactgctttcccactcccccaaaaaaggcaaggggagcgtaaccaaacctcccccaacaatgttggtctcaacctcaggcctgctcctccccgtgtgcttgttgtttcttctaatatttggcactgtcaccgctactgaccacatcgtgggtgctaacaaaggctggaaccctggcatcaactacaccctttgggccaacaatcagaccttctacgtcggagacctcatctcgtttaggtaccaaaagacacaatacaatgtgtttgaagtgaaccaaactgggtatgactcctgcacaacggaaggagcagtagggaactggagcagcggcaaggattttatacctctcaac

SEQ ID NO: 233238 - DNA, 394 bp, Gossypium hirsutum
ggaaaaaagggtgttaaagaccaaaggccaaagccatttttttttcttttggtttctgggaagagaccagtttgggcaaagatggtgaagaattggaaaaaggctttgattttggtgctgtttacagtctgcattctggggtttaagccaagatgtgttaatggcgaaacagatcaagcagatgcttctgctctaggggttatgtataccagcttaaattcaccacagcagctaacaggttggactgctagcaatggtgatccatgtgggcagtcctggaaaggtgttacttgctcgaacaaacgcgtcactgaaattaaactgtcaaatcttggactttccgggtcggtgggttacagctttcaaagtttgacatcattgaaagaattggact

SEQ ID NO: 233239 - DNA, 261 bp, Gossypium hirsutum
ctcagaaaaaaattgagtgtcagtttgaaagtgttcttcagatatggctatgaaacaagttgctaattctgctatcaaagcaattgccaattctgggtcatcctctcttcttaccagacaactgcatgcttctccagggagcaaaaagattgtgggggtgttttacaaggccaatgagtactttacgaagaatcccaactttgttggttgtgtggagggagccttggggttgcgccaatggctcgaatcacaggggcatca

SEQ ID NO: 233240 - DNA, 391 bp, Gossypium hirsutum
atttttcctgcattttctccctcgccaaacagaaatcttagttcatttctagacgcagggaacgatggagaaagcgatcaaccgacagcaagttttgcttcaacaccttaatccttcagcttcttctttttcgtcgcaccaaaacaactctgccctctctgcatcggcttgtttagctggagatagcgctgcttatcaaagaactaatgtatttggagatgatgtggtgatagtagcagcatataggaccgcgctttgcaaatccaagcgagggggtttcaaggatacttatcctgatgatttacttgcacctgttttaagggcagtgatagagaaaacaaatttgaatcctagtgaagttggggatattgttgtgggaacggtcttggca

SEQ ID NO: 233241 - DNA, 389 bp, Gossypium hirsutum
ggaaaacaagaaaagcagagccgcatcactttttgctagctaagctactgtgggagttattgttcttcagaacagcttctgcagtagctaataataacgttatatattatataaattttatacatcctttttaccctacgactccatatataagcaagtaaaaataaatatggctcgctctgtttcttcctttaagttccttggtgcttctgtttttgatgctctttatgtctccatatcaaggagaggttactcaggtgcaccgccggcggcagtgacggctagctttggtaggcctggagcgatggggaaagtggaacgaagatatgcgatgaaagagtcgtcgtcgtcggagacaagggcttattcttcagcttgggcgcctgacc

SEQ ID NO: 233242 - DNA, 378 bp, Gossypium hirsutum
tctcccgctccttctcgctgcgatttcgtcttcaagatctcagttctcaaatcgtagcgctcttttctatcaagccatggctctgatcttgcatgcaggaaaaacaaacaaaaatgcctttaaggcactcattgctgcaaaatataggggggtgcaggtcaaaatggttgagaattttgagatgggtgtgtcaaataagactcctgagttcatcaagatgaaccctttggggaaggttcctgtgttggaaacactgagggtcccgtatttgagagccatgccaatgctcggtatggtgctcgctcaaagggtaacaaccctatatgtggttctacattgattgattatggtcatatcgagcaatggattgattttgca

SEQ ID NO: 233243 - DNA, 391 bp, Gossypium hirsutum
tttcccttttttttccccacacctttttttaaacccatttgctaaaaatgcactgggttcttccagtgttgcttgccgttatcggagttactgcactgctcgttgtaactccggtaagtgggtaccgtccatggccgtacttaaaacccaacagctccgacttaatgttcggaggctctaagaaatttgagggctcatcggagtttatccatatgagatatcatatgggtccagtccttactgctaatatcaccatccacccaatctggtacggccggtggcagaaatcccagaagaaaatcatccgtgagttcatcaactcgatctccgccgttgattccaaacacccttcggtggctgggtggtggaagaccgtacagctttacaccga

SEQ ID NO: 233244 - DNA, 395 bp, Gossypium hirsutum
caaagctgttgttcctccatctgaaacttttaggtttgtcaacgaaggggaatttgggccttttattgttgaatatggtgcagattaccgtgtcataagcatagctaatgcccccttccagcttgcgttttataacaccacgcctaatgccttcacccttgcgttacgcatggctacaacacgttccgagtcgctcttccgatgggtttgggaggccaacagggggaaccctgttcgcgagaacgccacgttctctctcgggactgacgggaaccttgtcttggctgatgccgatggtcggattgcttggcaaagtaacactgccaacaaagctgtggtagggttccaattgttggctaatggtaacatggtgttacacgattccaatggcgagt

SEQ ID NO: 233245 - DNA, 370 bp, Gossypium hirsutum
gtttcacttgaattccaaaggagcaacagctttgacaagttttcttcaatgggaaggagctttgcaagagcatcaaccgtgattaggacgttgcatgtgttgctgtaaaaaaagttgttatattgagtggtgaaagttattataaagggcaagatcttttgattttgaatgtcactacatcgtattaccttttgtaaacccatcacggagaggtgaccgattttgatacgcagaacatcactattcacccccaatactacagagctttatcatgttattaccacaaccaagctgttgtgttgatccacggttaccaatgtgaaacaacatggtccatagacaacaactggctctgttgatctaagctatt

SEQ ID NO: 233246 - DNA, 391 bp, Gossypium hirsutum
cagactctatctggtttttagggcttttctaacttttctgattattttttgataatccagagttcaatcatctaaaagaagccctaaaatctttgaatcaggtctgagcttgtggtttgttaggcctctttgatcaaactaagtttcatgtctgatcttgacgttcaaattcctactgccttcgatccctttgctgatgcaaatgctgaggactcaggtgcgggtgcaaaggagtatgtgcatattcgtattcagcagaggaatggtcgcaaaagcctgacaactgtccaggggttgaataaagaattcagctataacaagatacttaaagacctgaagaaggagttttgctgcaatgggaccgtggtccaggaccctgaattaggacagg

SEQ ID NO: 233247 - DNA, 419 bp, Gossypium hirsutum
  unsure (1)..(419): unsure at all n locations
cgcaggtaccggtaccccgggcgcgccccgcgcccccgcaaattcctttttttccccccccacccaggcctaaaaaatcatggcgacggctcaaatcagcaaaaaacgaaggttcgtcgctnatgganttttcttcgcggaactcaacgaggtattgaccagggaactggctgaggatggatactctggagtcgaagtcagagttactcctatgcgtaccgagatcatcatcagagccacccgcacccaaaacgttctcggtgaaaaaggtgggaggattagggagcttacctcagtggttcagaagcgattcaagttcccagaaaacagcgtctagctttacgctgagaaggtcaacaacagaggcctttgcgctattgcccaggccgagtctcttcgctacaagctactcggaggtc

SEQ ID NO: 233248 - DNA, 385 bp, Gossypium hirsutum
gatctttgctgcaaccttgggtgtctcaccatgttgtctctggcacttctatcatccttaagatccagaaacatcagcataaattcttggatgctctcttttctgggttgtcttgtatagtttctgtgcccttttacactgcgtttcttcctttgcttttctggagtgggcatgggaaactggctaggcagatgaccctgttgatggctctctgcgattatttagggaactgcataaaggatgtggtatcagctcctagaccaaattgcccacctgttagaaggataacagctaccaaagatgaagaagaaaatgctttggagtatgggttgccttcttctcatactctgaatacagtgtgcttatcaggattccttgtatgcta

SEQ ID NO: 233249 - DNA, 395 bp, Gossypium hirsutum
aaaaaacctctccacattgcttttgagaccagcttcatctttgcgtgtgcaagccaagcaaggggataatctaatttgctcccttaagggctcccctgtaacatcatcatcatcatctgctctgagttttcttcccagaaaacatggaagggctttgggtgtttatgcatccataggaaccaacaatcatgcacttacaggggtagtgttccagccttttgaagaggtgaaaaaggaggaacttgatatcccaatcgctcctcatctttcgctggctcgccagaaatttgctgatgcctgtgaagccgccatcaatgagcaaatcaatgtggaatacaacgtttcctatgtgtaccactcgttgtatgcttacttcgacagagacaacgttgcgc

SEQ ID NO: 233250 - DNA, 396 bp, Gossypium hirsutum
gtctctcccgctccttctcgctgcgatttcgtcttcaagatctcagttctcaaatcgtagcgctcttttctatcaagccatggctctggtcttgcatgcaggaaaaacaaacaaaaatgcctttaaggcactcattgctgcagaatatagtggtgtgcaggtcaaaatggttgagaattttgagatgggtgtgtcaaataagactcctgagttcatcaagatgaaccctttggggaaggttcctgtgttggaaacacctgagggtcctgtatttgagagcaatgccattgctcgttatgttgctcgctcaaaggttaacaaccctatatgtggttctacattgattgattatggtcatatcgagcaatggattgattttgcagccatggaaattga

SEQ ID NO: 233251 - DNA, 397 bp, Gossypium hirsutum
aggatatcactgcagggaaaaaaaaaaaaacccagacatggcttccaacactgttgcatccgctgctcttcttcttaccttgaacttgttgttcttcactttggttagctctacctacgtgccttgcccaccaccaccaaagagccacaagcctacccacaagagcccaccctcggcacctaaacagccagccacttgccccaaagatacactgaaactaggtgtttgtgctgatttgttgggctcggtgcgcgttgttgttggaccgtcgaggaccaaatgctgctcactcatttcgggtttggctgatctcgatgctgctgtttgcctttgcactgctattaaagctaatgtgttgggggttaacctaaacgttcctgtttcattgtctttgctc

SEQ ID NO: 233252 - DNA, 407 bp, Gossypium hirsutum
tattgttccttccttcgccgtctactgctcttgtgacctcgatttcaagtgaaacagaatgggtaaggaaaagactcacattaacattgtggtcattggccatgtcgattccggaaaatcgaccaccactggccacctgatctacaagcttggtggtattgacaagcgtgtgattgaaaggtttgagaaagaagctgctgagatgaacaagaggtcattcaagtatgcttgggtgcttgacaagctcaaggctgaacgtgagcgtggtatcaccattgatattgccttgtggaaatttgagaccaccaaatactactgcactgtgattgatgcgcctggacaccgtgactttatcaagaacatgattactggtacctcgcaggctgactgtgctgttttgattattg

SEQ ID NO: 233253 - DNA, 415 bp, Gossypium hirsutum
gtctattgctttttgttacctcgatttcaagtgaatcagaatgggtaaggaaaagactcacattaacattgtggttatcggccacgtcgattctgggaaatcaaccaccactggccacctgatttacaagcttggtggtattgacaagcgtgtgattgaaaggttcgagaaagaagctgctgagatgaacaagaggtcattcaagtatgcttgggtgcttgacaagctcaaggctgagcgtgagcgtggtatcaccattgatattgccttgtggaaatttgagaccacgaaatactactgcactgtgattgatgcacctggacaccgtgactttatcaagaatatgattactggtacgtcacaggctgactgtgctgttttgattattgattccaccactggtggttttgaggct

SEQ ID NO: 233254 - DNA, 412 bp, Gossypium hirsutum
ccacaaacaaaaaaagtgtctcatttttagcaaagttacagtcgtcctcatcgaacaactatggcagccatcaaagtccacggaagccctatgtccactgctacacagagggttcttgcatgccttcacgagaaaggtactgattttcagtttgttcccataaacatggctgccggtgaacataaatccgaaaactacctttccctcaatccattcggtcaagttccagcttttgaagacggggacttaaagctcttcgagtcaagagcaatcacccattacattgctcatgaatacagcgacaaagggacccaactcttaatccctggctctaacaaggatatggctgtcttagaattatggaaggaagtggaagcccaccagttcgattctccatcttcaaaaatagcct

SEQ ID NO: 233255 - DNA, 412 bp, Gossypium hirsutum
acaagaaaaaaaaacaagtgatctgataaattgaagactttatttctgttaacatccattatgagtactgctggtcaagtcatccgttgcaaagctgcggtagcatgggagtcggggaagccactgtcaatagaggaagtggaagtggcaccaccgcagaaggatgaagtccgtattaagatactcttcacttctttatgtcacaccgatgtctacttctgggatgctaagggacaaaaccctctgtttcctcgcatactaggtcatgaagctggagggattgtggagagtgtaggtgagggggtgactgatctaaagccaggtgatcatgttctccccatcttcacgggggaatgcaaggagtgtccccatttgcttgtcaaaagaaagtaacatgtgtgatcttctcaga

SEQ ID NO: 233256 - DNA, 264 bp, Gossypium hirsutum
aataatttctttcggtgatctttggtagagattagctttttaatttttcattatgggaaagatcaagatcggtatcaatggatttggaaggatcgggcgtttggttgcgagagttgctctacaaagcgatgatattgagctcgctggtgttaacgatcctttcatcaccactggatacatgacctacatgtttaagtacgacagggttcacggtcaatgggagcattattagctctaagtgaaggactcaaagacccttctttt

SEQ ID NO: 233257 - DNA, 407 bp, Gossypium hirsutum
gaaaacaagaaaagcagagccgcatcactttttgctagctaagctactgtgggagttattgttcttcagaacagcttctgcagtagctaataataacgttatatattatataaattttatacatcctttttaccctacgactccatatataagcaagtaaaaataaatatggctcgctctgtttcttcctttaagttccttggtgcttctgtttttgatgctctttatgtctccatatcaaggagaggttactcaggtgcaccgccggcggcagtgacggctagctttggtaggcctggagcgatggggaaagtggaacgaagatatgcgatgaaagagtcgtcgtcgtcggagacaagggcttattcttcagcttgggcgcctgaccctgttacggggtattaccg

SEQ ID NO: 233258 - DNA, 403 bp, Gossypium hirsutum
gcaaagttgatttcttgcctgaagaatcattccaaaattggaacacctacctatctgcactctcacaaatatattcccgattcaatgaccgccttctaagccgctcggatgatgcaaacgagataacacaacttcgtaaacaaagtgaaaatgacatgaaacgttgcctcacttggtgggatcttacctggtttggatttgggtcggttattggagcaggcatcttcgtgctcactggccaagaagctcatcatcatgctgggcccggcattgtcttgtcctatgttgcctcaagtatttcagcaatgctttctgtattttgctatactgagtttgcagtagagaaccctggggcaggggggtcatttgcttatttaagaattgagttaggagattttggtgc

SEQ ID NO: 233259 - DNA, 413 bp, Gossypium hirsutum
aaagcattcgactttgcaaacagaaggggcgtcaaagaaatgtcttctctgcctctacggtaacgctatattactcatacaaattgcgaagcaaaaccaagaaatccctcacatacaaaaatgggtgattcaaaggtcgaaaccatctccagattagctcaatggaggatcgacaactttagtccttgttcttacaaaaaatccgaccccttcaaggtcggtctttggaactggcacttgtctatagagaagaatcgatatatgtatattcgattatttcctgagccatctcgtgtgtctaaggagcagcctccttatgctaaattcatactcaggatctctaatgttggtgctaatcgtagactttatatctccccagttcatgatagaccgctgcgaacgtgtgatgactt

SEQ ID NO: 233260 - DNA, 410 bp, Gossypium hirsutum
gtttcgagtttttttctttttaagactttcccaattctgatctcagccgttgagacatggctactgctgtcccagccgttagagctgtcaacagactgccgctgaagtcgaatggccgtggtccaactccaagctcaatattcttggggaaaagtgtgaagaagggtacctcaaaggtcaaccagaacaaggtttttcccaagaatttcaaggttgttagtgaatatgatgagtcaaagcaaacctcaaaagacaggtgggtgggactcgtctatgatgaatctgatgaccaacaggatattaccagaggaaagggaatggtggacactctcttccaggctcctgtgggaactggaactcaccatgctatcatgagctcctatgactacatcagtcaaggtcttcgcacg

SEQ ID NO: 233261 - DNA, 281 bp, Gossypium hirsutum
acaagttccattgtttatcagagcaagaaaaaaaagggaaaatggaagggaaagaagaagatgttagactggaagctaacaagttctcagaaaggcaacctattgggacagcagctcagtcccaagatgataaggattacactgagccacccccagcacctttttttgagccaagagagtagactacatggtcgttacaccgagctgaaatcgctgagttcgttgctacttccctattcttgaacatctacgtgtcgaccgtgatggattttttaagacaa

SEQ ID NO: 233262 - DNA, 410 bp, Gossypium hirsutum
cgaagtcgtagctttggaagcatggacttcatagctactatcctgtttctagctcttgtcatctcctccaccaaagctttggacccttgcggccctcagccagatgactcggaccttttggtcatcccaatctatggcaaatgttcaccattcaacccacccaaacctgactcatcgttcaacacagtcatgaacatggcatcaaaagacccagcaagggtcaagtacttgtcgagccttgtagcccaaaagaccactgcggttcccattgcttcaggccaacaagtcctaaacattggcaactatatcgtccgggtaaagattggcactccgggtcagctcatgttcatggtattggacactagcaatgatgtggcttgggtcccatgctccggctgcaacgggtgctc

SEQ ID NO: 233263 - DNA, 207 bp, Gossypium hirsutum
ctcaacattcccattttcaatctccagctcccaaggtaaatatgccgatcagaaacatagcggttggccggcccgaagaggctactcaccccgatgctctcaaggctgctttggctgagttcatctcaaccttgatcttcgttttcgctggatcgggctcaggaatggcctttaacaagttgactgacaacggagcaaccaccccgg

SEQ ID NO: 233264 - DNA, 409 bp, Gossypium hirsutum
atttcttttcgatggaatcgattagatcgccctattggtgctacagatgtaatcgattcatccggatccgggttcgatctccccatgattcgctcaactgccccgactgtggcggaggattcatcgaagaaattgaaacaccctcgcgatctcccatccaccaccgtttccctgtcgctgccatgtattccgacacgccaagccctgcgctcagcccaagccccaccgccactcctcattttcgccgaactcgtcggaacgctggcgatcgctcccctttcaatcccgttgtggtcctccgtggacccacctccgaatccgacggcatagttaccgaaagagggaacagaaatttcgagctttattacgatgatggctctggctcgggtcttcgtcccttacctgctag

SEQ ID NO: 233265 - DNA, 409 bp, Gossypium hirsutum
cacaagaaccaaacacggtttctctattattttcttgtcttacttatggccgtcgttaaggctttcattgcttcacttctcatctctcttctccttctccaacttgttgctgctgatcaactggtgacaagtgccagcaagcgcaagggaactgccccccctgcgaaaattgactgcggcggggcttgtgcggcgaggtgccgattatcatcgaggccacacctatgcaagagggcatgcgggacatgttgcgcacgctgcaactgtgttccaccggggacagccggtaaccaagaaatgtgtccttgctatgctagcttgaccacccacggtggccgacgcaagtgcccttgagtgttaatcgacaatcggaacgaatctttctcttttgatgttgttatgaaattaa

SEQ ID NO: 233266 - DNA, 419 bp, Gossypium hirsutum
gaattctttccctcactttctcgaaaaaaaaaatgtcttcaggttgcaattgcggatctaactgcagctgcggtgacaactgctcatgcagcaggaaccttaaccttggatattcggagaagacaaccagcactcagaccatcatctccggagttgcgccagtgaagatgacctttgagggaccagagatgagcactactgaatcaggacatggatgcaagtgtggatcaaactgctcttgtgatccatgcaactgttgaaaagcttgatgaaagccatagattatgaaaaaaagaaagcagcaaaaataacaggcctctgtaatgatatattgtcaaggatggatgcctgcaaggtctataattatgtctctgtctgtgtcttgtgtaatagaagctttgtttgtggtgaaaataatg

SEQ ID NO: 233267 - DNA, 411 bp, Gossypium hirsutum
  unsure (1)..(411): unsure at all n locations
cgccatcctcggatcttattgaaatccctgcggtatcattcgacatcagcatcggtaatgctgatagttacattaaagagttccggagcaggatgccatcgacccggtacgatgcggtatgtagcggcagtcaaccggagcatgactgttcagtttgcctgactaggttcgagccagaatcagagattaaccgcttgtcctgcggtcatctgtttcacaaggtatgcttggaaaagtggttgaactattggaatgtcacatgccctctttgcaggaacgctctgctgcccgaagacgatccggcctacttttggtgagcgtgcggagattttcgaattttccatgtacagcgcgtttattgtacaggtattttaaatgaaacgatgccgncctcggattagcgttaagcgg

SEQ ID NO: 233268 - DNA, 411 bp, Gossypium hirsutum
gaagacagagaggtctcctcacaaccaccgtaatgggtcgtgtcattcgagctcaacgtaagggtgccggttcggtcttcaaggcccatacccaccaccggaagggtcccgcccgtttccgcagcctcgacttcggtgaacggaacggttaccttaaaggtgtcgtcaccgacgtcattcacgaccctggacgtggggctccgttagcccgcgtcgttttccgccaccctttccgttacaagaaacagaaggaattgttcgtcgccgccgagggtatgtacaccggacagttcgtgtattgtggtaagaaagctacccttgtggttggaaatgtgttgccccttagatctatccctgaaggagctgtcgtttgcaacgttgagcaccatgttggtgaccgtggggttttcg

SEQ ID NO: 233269 - DNA, 382 bp, Gossypium hirsutum
ctaagatatcactgcaaggaaaaaaaaaaaaaaccagacatggcttccaacactgttgcatccgctgctcttcttcttaccttgaacttgttgttcttcactttggttagctctacctacgtgccttgcccaccaccaccaaagagccacaagcctacccacaagagcccaccctcggcacctaaacagccagccacttgccccaaagatacactgaaactaggtgtttgtgctgatttgttgggctcggtgcgcgttgttgttggaccgtcgaggaccaaatgctgctcactcatttcgggtttggctgatctcgatgctgcttgttgcctttgcactgctattaaagctaatgtgttgggggttaacctaaacgttcctg

SEQ ID NO: 233270 - DNA, 408 bp, Gossypium hirsutum
caaaaatgatgatcggagaaccaacacgaccaaatcccaccgttaaaatcccggcgtgggacccactcaatgatccgacgtctaattattcttccgttaattataactgcaatgcgccgtccagtccttgtcccgtcgattacctctcatcgctccaccgttacctcccgtcaaacgatttcgagtcgtccgactctctgagtgaggattcggattttcctgttgacgcgttctcgtgtgaccatttccgtatgtatgagttcaaagtgaggaggtgtgctcgtggcaggtcacatgactggactgagtgtccgtacgctcaccccggggagaaagcccggaggagagacccgaggaagtttcattactcgggtacagcttgccctgatttccgtaaaggaatctgca

SEQ ID NO: 233271 - DNA, 405 bp, Gossypium hirsutum
attttctgtcagatttcttttttctctctcaaaaatctctcaaatccaatactctccgctcctctgatcttttcttcgacttggtttatgagctcgaaggagaaacccactcttggcggtacgcggattaagacccgcaaacggaatattgctgcacccctggacccttcagcatttgctgatgcagtagtccagatctatttggataatgctggtgacctggaacttgttgccaggagcattgaatcttcagatcttaacttctcaagatacggtgacaccttctttgaggttgtttttgctggaggccgcacacaacctggcacacttaaacctgatgaaggggagtgccacccttactctatcatagagtgtgaggctaaacgtgatgccattttactatct

SEQ ID NO: 233272 - DNA, 415 bp, Gossypium hirsutum
tccatctcaaagttcaaggatcttgaagaggtggtacaaagggcaaatgcatcttcatatggattggctgccggagttttcactcagaatatcgaaaccgccaacaccttgactcgagcattgcgagtcgggacggtatggattaactgctacgacatatttgatgctgcagtcccatttggcgggttcaagatgagtggtcaaggaagagagaaagggatttatggcctttcaagttacttgcaagtcaaggcagttgtcactcctttgaagaacccagcatggttgtaatgtttgtttgtttgttttcttacaaattgccatgaatctaaacttgaactaataagctgccagttttttaaattttgaatgatcagcgtatggtaggatcattcctgaactgataatttgctca

SEQ ID NO: 233273 - DNA, 408 bp, Gossypium hirsutum
ggcgccgtcacaaaatgtcgtcaacggagtctctcatcctccaactccatgaaatctctgccgttaaattcggtaacttcaagctgaaatctgggatcttctcccctatctacatagacctgcgtctcatcgtctcttacccttccctcctccaccaaatctcccactccctcctctcctctctccctccccaaacacactgtaacctgatatgcggtgtcccttacactgccctccctatagccacctgcatctctctcgacacctgcatccccatgctcatgcgccgcatagaagtgaaagactactgaactgccaagttcatcgaatgtgtttacgaaaagggtcaagcttgtttggtggtggaagacctcgttacgtccggtgcatcggttctcgaaacggcgg

SEQ ID NO: 233274 - DNA, 408 bp, Gossypium hirsutum
cttgttttactcaaaaagatccctctccaacaatggcttctaatcccaaggtcttcttcgacatgaccgtcggtggccaaccagctggtcggattgtgatggagctctttgccgattgcactccccggactgctgagaacttccgtgctctctgcaccggcgagaaaggggtaggccgtagcggcaaacctctccactacaaaggctcatccttccaccgggtgatccccaatttcatgtgtcaaggaggcgactttaccgccggaaacggtaccggaggtgaatccatctatggagccaagttcgcggacgagaacttcatcaagaagcacacgggacctggcatcctttccatggcgaacgctggacccggaacaaacggatctcaattcttcatctgcacgacca

SEQ ID NO: 233275 - DNA, 406 bp, Gossypium hirsutum
catctgccatcaatttgctttgaagatcatgttggctatttttcacaaggcatttgctaatccaccagaggagctgaatagtccagcttctcataaatctactaagaagcctaaacagcctgaagaaaccctaaatgatttcctatctcatcaccctcacaacactttctccatgagctttggcaacgctgctgttttggcttatgtccgccatgaacgtgctgcttcagttcatcagaggttgttttgtgggtttgatgacatatactgccttttcttagggagcttgaacaatctatttatgctgaatagacagtatggtctttccaaagggagcaatgaggcgatgtttgtgattgaagcatataggacactaagggattgcagctgatggctctgtggtcat

SEQ ID NO: 233276 - DNA, 414 bp, Gossypium hirsutum
ctttcttctctctgagtagtttctttgcttcactgaattgttctcttgattcaaacactagggtttgatcgataattttattcatattttcctttacttcgattgcaattattcagatcttcaaaatccgagttattttctttcatttaatctgaaattggttggattttccttttaattttgaaatttaatctaagaaagaaggggaaaaaatgccggcagtttacggatccagattgacaactttcgaggattcagagaaagagagcgaatacggttatgttcgtaaggtgtctggaccagtcgtcgttgctgatggaatggctggtgctgctatgtatgaattagtccgtgttggacatgataatctaattggtgaaattattcggttggaaggagactctgctacaatct

SEQ ID NO: 233277 - DNA, 396 bp, Gossypium hirsutum
gtcaacaatggacattgcaatcataagagaagtattctctgaaattgtttctgcagctgaggttctgggaagaaaggatgatgctcttattggaaaagtccgcgaagctctggcgaagttaccaccaacaaaaattgctagagatggttccattatggaatgggcagtagattttcaggacccggaggtgcattaccggcatgtatcacacctttttggcctgattgcagggcacacgattactgttgaaaagacttcagacctttgtgaaggtgttgattttaccctctttaaaagaggggtggagggtccaggatggtcaacaacatggaaaactgctttgtgggcacgtcttcataatagtgaacatgcttatcgcatggtcaagcatttaat

SEQ ID NO: 233278 - DNA, 364 bp, Gossypium hirsutum
ccttccttcgccgtctattgctttttgttacctcgatttcaagtgaatcagaatgggtaaggaaaagactcacattaacattgtggttatcggccacgtcgattctgggaaatcaaccaccactggccacctgatttacaagcttggtggtattgacaagcgtgtgattgaaaggttcgagaaagaagctgctgagatgaacaagaggtcattcaagtatgcttgggtgcttgacaagctcaaggctgagcgtgagcgtggtatcaccattgatattgccttggggaaatttgagaccacgaaatactactgcactgtgattgatgcacctggacaccgcgactttatcaagaatatgattact

SEQ ID NO: 233279 - DNA, 412 bp, Gossypium hirsutum
atggatagttgagagacacacctcaaaaaggatctagaaaagagaatatctcatccttttattttcatttcgtcttcttttcagctcaaattcatcatcgaaattacttgtagttatcaaaatggggacaataggcaaaactactacggccgctctttttctttgtcttcttctgtttcctattgtcttttccacgcctaatgacagattggttagaattggactcaaaaagagaaagattgaccgaaacaatcggatggctgcacaccttgaatccaaggagggaaaggcatctgaagcttttcttagaaagtatcgtcttcatgggaacttgggggaatcagaggacattgatattgtggcactaaagaactacatggatgctcagtactttggtgaggatggtattggc

SEQ ID NO: 233280 - DNA, 286 bp, Gossypium hirsutum
aaaatatctcaaatctcctcctcctcctcggaaatcttagtatcatcaccatggcctcaaatcccaagggcttctttgacatgactatcggtggtcagcccgctggtcggattgtgatggagcttttcgcagattgcactcctcgcactgctgagaacttccgtgccctctgtaccggcgagaaaggcgtctgccgcagcggtaagccccttcactacaaaagctcctctttccatcgggtgatccctaactttatgtgccaaggaggtgacttcaccgccggaaa

SEQ ID NO: 233281 - DNA, 409 bp, Gossypium hirsutum
gcggattaggactttcgttcttcttgctctttaatgtttacgccaccagtttctactctggatctcgacttgttgagagtggcgatgccacattctcggatgtttttcaagttttctttgctttgacaatggcaactgttggcatttctcaatcaagcacccttgctcctgactccagcaaagccagggccgctgctgcttcaatattcgcaattatcgaccgtgagtctaagatagacccgagtgaccagtccgggacaacattagaaaacatgaagggtgatatcgaactttctcatgtcagtttcaagtatccattaagaccagacattcaaaatttccaagacttgagtttatctatcccagcttgcaagactgttgcattggtaggagaaagcgggagtgggaa

SEQ ID NO: 233282 - DNA, 389 bp, Gossypium hirsutum
caagaaccaaacacggtttctctattattttcttgtcttacttatggccgtcgttaaggctttcattgcttcacttctcatctctcttccttctccaacttgttgctgctgatcaactggtgacaagtgccagcaagcgcaagggaactgccccccctgcgaaaattgactgcggcggggcttgtgcggcgaggtgccgattatcatcgaggccacacctatgcaagagggcatgcgggacatgttgcgcacgctgcaactgtgttccacccgggacagcccgtaaccaaaaaatgtgtccttgctatgctagcttgaccacccacgggggccgacgcaagtgcccttgagtgttaatcgacaatcggaacgaatctttctcttttgat

SEQ ID NO: 233283 - DNA, 409 bp, Gossypium hirsutum
cttcttcttcttcttcttcttcaaacaagcaaaaaaacaagaggaaaaaaatgggtggagaaagaaaggtctacactttggctgaggtttctcaacacaaccatgctaaagactgttggcttgtcattgagggcaaggtatttgatgtgactaaattcttggaggaccaccctggtggtgatgatgtcttgctgtcttccacagggaaggatgcaactgatgattttgaagatgttggtcatagtagcagtgctcgagcaatgatggatgagttttatgtgggtgacatcgatacatcgaccatcccctctaagaggaagtacactcctccaaagcagcctcactacgaacaagacaagacctcagaatttgtcataaagcttctccaattccttgttcccctgctaat

SEQ ID NO: 233284 - DNA, 301 bp, Gossypium hirsutum
ctgagtttgaagcttcaagtgctaaaatctagggatttgcgggtggagaagacgagagcccatctctctgcttcaaagctcctgtccaggtagaattctcttcttcccttgcgttgtgttctttgctgttcaatcgccatggcttcaaagcggattttgaaagaactcaaggatttgcagaaagatccacccacttcttgcagggctgctccagtacctgaagacatgtttaattggcaagcaacaatcatgggaccttcagatagcccttatgctggaggtctgtttttagttactatcc

SEQ ID NO: 233285 - DNA, 400 bp, Gossypium hirsutum
gcagaaacgaccggcagagaaataaaaatgggaggctgggcaatcgcagtgcatggtggtgctggtgtagacccaaatctccctaatgaaaggcaagaggaagctaaaagactcctcaatcgttgccttgatattggaatctctgctcttcgttctaacctctccgccattgacgtcgttgaacttgtcgtgagggaattggaaacggatcctttgtttaattccgggcgtggatcggcacttacagagaaagggacggtggaaatggaagctagtattatggatggaccgaagagacgatgcggtgctgttttgggtttaactacagtgaagaatccgatattttttgctcgacttgttatggataaaacaccatatttctttttggtttttgccggct

SEQ ID NO: 233286 - DNA, 372 bp, Gossypium hirsutum
gaataaaaaatccttgaataaaattatcaagtaataagttttaagtataacaaaatttgagaaacaccaaaggaaaattcataaaagagcatccagcataagttcattttaggtgccaaacttaaaaactacaaaatctaagacacttgacatgctccaaatatcaaatagatgactatcataacagtcatcatcggctttaagccactggcggaagttcaatctcggtcggcacgggtgcttccaccttgataacttcatcatccttgggagggtggatggtgacaagatccggaagtggagttgttgggccttgcttaccctttggatcccagtcaagcatgatcttcaccttgatgcccagtactccct

SEQ ID NO: 233287 - DNA, 311 bp, Gossypium hirsutum
tcgcgcgatgctgagtactctacatctgcggctgctggcgcttctgctccatcgcagccttctgccgctaagaagggcggaaaaggtaagatcactgatgagttcactggtgctggagccatcggtcaggtttgtcaagtaatcggtgccggcgtcgatgttagattctatgaaggcttgccttcgattttgactgcgcttgaagtgatggaccactcgatccggcttgtgttggaagtggctcaccacttgggtgaaaacatggttaggaccattgcttttgatggaacggtgggactcttcagagggca

SEQ ID NO: 233288 - DNA, 405 bp, Gossypium hirsutum
caaaatccccgtaggggacccattcaacgatccgacggctagctttcactccgttaactttaactacaacaatgcagtcagtagtccttgccccgtcgattacctcgggtctctccaccgttacctaccgtcaaacgactacgagtccgattcgctgagtgatgattcggacttacctgttgatgcattctcatgcgaccatttccggatgtacgagttcaaggtgaggaggtgtgctcgtggaaggtcacatgactggactgagtgtccgtacgctcaccctggtgagaaggcccgaagaagggacccgagaaaggtccattactctggaactggttggcccgatttttgcaagggaagctgtaagaaaggcgattcatgtgaattcgctcacggcgtttttga

SEQ ID NO: 233289 - DNA, 410 bp, Gossypium hirsutum
ctaaaaacaaaactgaaaatgtcttgctgcggaggaaactgtggctgcagctctggttgcaagtgtggcaatggctgtggaggatgcaagatgttccctgacataatagagaagactacaactgagactattgttcttggtgtgacaactcagaaaatgcactttgagggatctgagatgggagttggggttgagaatggatgcaagtgtggagacaactgcacttgcaacccttgcaattgtaaataagagggggggaaaatgaacaacaaagagaagcagagaggcctttgtctttttaactaaataaattctattactttagtatgtatcagcaaatcttcatgaggatttggttcttaattatgtgtaatgtgggcttttctgctatgtcagaatgtattatgata

SEQ ID NO: 233290 - DNA, 386 bp, Gossypium hirsutum
  unsure (1)..(386): unsure at all n locations
gcacgaggtaggtgccctagggatgccctcaaattaggtgtatgtgccaatgtgcttaacttagtcaatgtcaccgttggttcacccccggtgatgccatgttgttcccttcttaatggtcttgtggacctcgaagccgctgcttgcctttgcaccgctatcagagctaacatcttaggcatcaaccttaacatcccagtttcccttagcttgcttctcaacgtttgctcaaggaatgttcctactggtttccaatgctaagtcaacattgttcctacattctttctcatctttcttatggngtttgtgtttgtatttgtgtttgtgtttggattttaaaaattatgattcagtatttacggtacatcaatgttatcattagttac

SEQ ID NO: 233291 - DNA, 411 bp, Gossypium hirsutum
cgaaaatttcttaatttcctcgcaagccaaacagattttacctcttatctccgaatcatctcatctatggctcgtaccaagcaaacagctaggaaatcaaccggaggaaaagctccgaggaagcagctagctacaaaggccgcgcgtaagtccgctccggcgaccggtggagtgaagaagcctcaccgtttcaggccaggaactgttgctttgagagagatccgtaagtatcagaagagcactgaactgttgatcaggaagcttcctttccagaggttggtgagggaaatcgcgcaagatttcaagaccgatctgaggttccaaagcagcgccgtcgctgctctttaagaagcggcggaggcttatcttgtcggactgtgtgaagacactaatttgtgtgcaattcatgct

SEQ ID NO: 233292 - DNA, 416 bp, Gossypium hirsutum
ccttctgcttagcttaaaaaatcttgaatccgtactctcctacttccctcgttatcgtcaatggcttcggacaagaagattaagatcgggattaacggatttggaagaatcggacgtttggttgccagagttgctcttcagaggaacgatgttgaactcgtcgccgttaacgatcccttcatttccaccgattatatgacatacatgttcaaatacgacagcgttcacggtcaatggaagcaccatgatcttaaggtcaaagactctaaaaccctcctcttcggcgaaaaacccgtcactgttttcggaatcaggaaccctgaggagattccatgggctgaagccggggctgagttcgttgttgagtcaactggagtgttcactgacaaagacaaggctgctgctcacttgaaggg

SEQ ID NO: 233293 - DNA, 416 bp, Gossypium hirsutum
gcggcttctgcttctatttactattttctcactctcctactcctttgtgccatcccttttaccttctccgagctcgttaaagagcagcctctggtgttgaagtaccacaatgggccactcttgaaggggaagatcaccgttaatctcatctggtacgggaagttctccccaacccagcgctccataatcgtcgatttcatcaactctttgagctctgccgtcaaacccaagattccgtcggcgtcgttttggtggaaaacgacggagaaatacaagtccggttcctccactttggtcgtgggcaaacaaatcctcctcgaaaattacccgctcggtaaaatccttaagaacccacacttgccagcgttggccgggaaattcaacggcgtaggtacggttagcgttatcctcacggc

SEQ ID NO: 233294 - DNA, 415 bp, Gossypium hirsutum
cttttcactgctcttaacggaaatagggaaacggtggaaaccctttttttttaattgtcctccaaacaaaccctaagtcggattcggataaaccgaagagagcaagatagagccagtcgttgatggggtattgaatcgctgagttgaaccggtcggaagaagatccaagttagagttgtagacgaactcaattctatatctaatagatgggcgcggcgggttcgaagctcgagaaagctttgggtgaccagttcccggaaggcgaacgatattttggtctcgaaaactttggcaacacttgctattgtaacagcgttttgcaggcactttatttttgtgtaccatttcgcgaacagctgctagaatattattcaagtaataaaaatggtgttgatgctgaagataatctgctgac

SEQ ID NO: 233295 - DNA, 408 bp, Gossypium hirsutum
ccgttatccgtctccgcctctcttcccaagtatattacataaaatattatgaattaaagcaaatccccaatttccccctcatcccaatcctcaccaaaccctacaacgaaaaccctaattcagattttgctttaattctgatttgctggtccgtaattctattcaaaagaaagacccctatatattgcatttccccaatttattacgttttaatttttaagagaaattgagaagggaatggaaggtataccacacccaataccgagaacggtggaagaggtcttcaacgacttcaagggtagacgctctggcttgattaaggctctcacaactgatgttgacaagttctaccaacagtgtgatcctgagaaggagaacttatgcctatatggacttccaaatgaaacc

SEQ ID NO: 233296 - DNA, 407 bp, Gossypium hirsutum
ggaaaacaagaaaagcagagccgcatcactttttgctagctaagctactgtgggagttattgttcttcagaacagcttctgcagtagctaataatatcgttatatattatataaattttatacatcctttttaccctacaactccatatataagcaagtaaaaataaatatggctcgctctgtttcttcctttaagctccttggtgcttctatttttgatggtctttatgtctccatatcaaggagaggttactcgggtgcaccgccggcggcagtgacggctagctttggtaggcctggggcgatggggaaagtggaacgaagagatgcgatgaaagagtcgtcgtcgtcggagacaagggcttattcttcagcttgggcgcctgaccctgttacggggtattacc

SEQ ID NO: 233297 - DNA, 376 bp, Gossypium hirsutum
gcaaggaaaaaaaaaaaaaaaaaccagacatggcttccaacactgttgcatccgctgctcttcttcttaccttgaacttgttgttcttcactttggttagctctacctacgtgccttgcccaccaccaccaaagagccacaagcctacccacaagagcccaccctcggcacctaaacagccagccacttgccccaaagatacactgaaactaggtgtttgtgctgatttgttgggctcggtgcgcgttgttgttggaccgtcgaggaccaaatgctgctcactcatttcgggtttggctgatctcgatgctgctgtttgcctttgcactgctattaaagctaatgtgttgggggttaacctaaacgttcctggttc

SEQ ID NO: 233298 - DNA, 408 bp, Gossypium hirsutum
aaaaaaggcagatagataggttgaactccctttttcttcccttagaaccaaactgtgaccgaccttcactttctggctaccatgacggccaaggattgcggcaaccatggaaaaggccggcggcagcgcatacgaaggctctttggatgccttctagtgttcctccttatcggtctcatcacaatctttatcatatgggcaatcctccgccccgcaaaaccccgcttcatcctccaagacaccaccgtctatgctttcaacgcctgcactcccaatttcctcacttctaatttccaagtcaccgtatccacgcgaaaccccaatgacagaatcgggatttactacgacaggctcgtcatctacgccacctacaggaaccaacaaaccacccttaggacagcttttcct

SEQ ID NO: 233299 - DNA, 400 bp, Gossypium hirsutum
cttctttcctcctagcccaaaaaaaaaaaaccctctttcctttctctcgttctttttcccgttcaatcatgtcttgcttcattagcaaatatgccgatgagttggctaaaaacgctgcttacattggaacccctggaaagggtatccttgctgctgatgaatccactggcaccatcggcaagcgtctttcaagcattaatgtagagaatgttgaagataacaggcgtgctctccgtgagctcctattcacaactccaggagctcttcagtacctcagtggtgttattctctttgaggaaaccctttatcaaaaaaccgcttcgggcaagcccttcgttgatgttttgaaggaaggtggtgtcctccctggcatcaaggacgacaagggtaccgttgagct

SEQ ID NO: 233300 - DNA, 414 bp, Gossypium hirsutum
ataaccttgagattatcaatttgaagccttcttcgaatttcctcattcaagatgcaaattttcgtcaagaccctcaccggaaagaccatcacattggaggtggagagttctgatactattgacaatgtaaaggccaagattcaggacaaggaaggcatccccccagaccagcaaaggttgatcttcgctggtaagcaacttgaggatggccgcacgttggctgattacaacatccagaaggagtccacactccacttagtgcttcgcctccgtggaggaatgcaaatttttgttaagactttgactgggaagaccattacattggagggtgggaggttcagataccattgataatgttaaggcaaaaattcaggacaaggagggaattcccccagaccaacagaggctgatttt

SEQ ID NO: 233301 - DNA, 380 bp, Gossypium hirsutum
gaaaaaaacaattatggcaagcaaagaacccgaacacgagcacagagaagatgaagaagctcctgccgccgaggatgaagacactggagctcaagtcgcccctattgtcaagttagaggaagtcgctgtcagtacaggcgaggaaaatgaagatccgatcctcgatctgaagtcgaagctgtatcgatttgataaagaagggaatcaatggaaagagagaggtgctggtactgtgaagctgttgaagcacaaagagacaggaaaagttcgccttgttatgaggcaatctaagactctcaagatctgcgccaatcatctagtgttgccgacaatgacggtgcaggagcacgctgggaatgataaatcgtgctttatgcacg

SEQ ID NO: 233302 - DNA, 415 bp, Gossypium hirsutum
attgttaatgctatttgtgatgatgatgatatcagagctatatcatttgttggttctaatactgctggcatgcacatatatggaagagcttctgctaaaggaaaacgtgtgcagtccaatatgggggccaaaaatcatggcattgtcatgcctgatgcaaacaaggatgctacactaaatgctctacttgctgctggttttggtgctgcgggacaaaggtgcatggcacttagcacaatagtctttgttggtgactctgaatcatggttgaatgacctggttgaacgtgccaaaggtcttaaagttaatgctggaattgaacccaatgcagaccttggtccagtgattagcaaacaggctaaagaacgaatatgcaggttagttcaatctggagttgagcgtggtgcaaaactac

SEQ ID NO: 233303 - DNA, 414 bp, Gossypium hirsutum
gtactcactcaacattcccatttccaatctccagctcccaaggtaaatatgccgatcagaaacatagcggttggccggcccgaagaggctactcaccccgatgctctcaaggctgctttggctgagttcatctcaaccttgatcttcgttttcgctggatcgggctcaggaatggcctttaacaagttgactgacaacggagcaaccaccccggctggtctcgtagccgccgctctagctcatggcttcggtcttttcgtcgctgtctccgttggcgccaacatctcaggtggccacgtcaaccctgccgtcaccttcggtgcttttgttggcgggaacatcactctcttgcgcggcattctttactggatcgcccaactcctaggctcaaccgtcgcttgcctgttgcttaag

SEQ ID NO: 233304 - DNA, 400 bp, Gossypium hirsutum
gcaaagttgaaagaaaagagtgataagcatggtgcctgacaacaataggaatgaggttgaggattataagttaactgttcaagtccctgaaactgcccatcaagttagcactgattcatggctccaggccggttttgtcttgacaactggtgttaacagtgtatttgtgttgggatattctgggacaatcatggtccctcttggttggataggaggcatagtcggtttgcttttagccaccgtgctgtcgctgaacgccaacatgcttgttgccaagctccatgaacatgggggaaagaggcatatcagatacagagatcttgcagcacaaatatacggtaggagagcctatactattacatgggcaatgcaatatatcaatctggtcatgattaacatt

SEQ ID NO: 233305 - DNA, 409 bp, Gossypium hirsutum
agctgcaccacggagaagagagaaaaactgaaaaaggggaaaaaaagcgtcgtcgatattgcttcttcttcttatttttcttcttccctctctctctttctcagaagctcctctttcgttcttttgttcactaagtattgcaaaagatggccgacagcgaggatattcaacccctcgtctgtgataatggaactggaatggagaaggccggcttacgctggagatgatgctccaagggcagtttttcccagtatcgttggtcgtccccgacacactgctgttatcggtgtgatgggtcagaacgatgcctatgtaggagatgcagcacactctaaaagaggtatccttacttcgaaatatcctattgcgcatggtattgtcagcaactgtgatgatatggaaaagatct

SEQ ID NO: 233306 - DNA, 412 bp, Gossypium hirsutum
ctgaaaaagaaaaagaagggatgggagttttaggcaaagtggtggatgggattctattgctaacattcgtgtccatgtcggtggtgccagcgtgcttggacgcccaggtacttttgcctaaagcgcttttccccgatgtgctgggtcgtgtatattcatggtatacgaccacataccaagattatttgctgttggatgagcctcattttttcatggcacttatgaaattggagcttgttttagtattgccgcttgctatacttaacacttatggcttgttgacctccaagccctggttcaacaccacctgcctcatcttcggttctgctcttgttacctccacgacagctatggtgggagacatgctgggatccgacaaaccatcagcaggtaaactggcgtcgatgtactc

SEQ ID NO: 233307 - DNA, 409 bp, Gossypium hirsutum
cgaaagctcatctctctctctctctctctctctagatttcaccccttaggtttctctttccacacagagacagagagagaatcagaggagcttaatcgagatttgatattcctcaccacagatggatcagatattgaacaaggtgggctcctattggctcggccagaaggccaacaaggagatcgattccgtcggcgacgacctcaactcattatccaccagtattgaagggggagccaaatggttggttaataaaatcaaaggaaaaatgcaaaagccgttgccagagctgttaagagagtataacctgccaataggaatcttccctcgtgatgccacaaattatgaattcaatgaagagactgggaagctcactgtttttattccagcaatatgtgaagtgggatac

SEQ ID NO: 233308 - DNA, 404 bp, Gossypium hirsutum
cacagcttctatcaacaccgctgacgtcgcgtcgttatattctacctcaccgccatcggccgacgtcctcccttcttctttcataattcatatcacatctcaaatcctgattattttccctttaatttatacccttttcgtgtttatatacttgcaagttcgtatttgggtaaattcaatttcaagctaattctttttaaataaaaggaggaaaaacagattttatagtgaaaatcatgaaggtcgtacaccgagacctagttcccaatggccctggcagcgtcaagatgataccagtggattcagaggatctctggtttgcttacaatttgatagctactggggattgggttatggctcgaactgtcaggaaagttctaagggagacagccggtggaagagat

SEQ ID NO: 233309 - DNA, 412 bp, Gossypium hirsutum
gttttgaaaaacaccatctttcttgtgaattctgcaacctttggagtaacttaagaagaaatgggggaaaagagtttaattgccaaggatgtcaccgaattgatcggtaacacgccactggtatatctcaacaatgttgtagatggatgtgtggctaaaattgctgccaagttggaggcaatggaaccctgctccagtgtcaaggacaggattggatatagtatgattgcagatgcagaggagaagggtctcattgtaccaggcgagagtgtgctgatcgagccaactagtggtaataccggaatagggttggcattcatggcagctgctaagggttacagactcataattacgatgccttcttcaatgagtttagaaagaagaatggtcctccgagcttttggagctgagc

SEQ ID NO: 233310 - DNA, 400 bp, Gossypium hirsutum
ggaaaatggacccaactgcaccctccgcgtcggtcgtcggcggcggtggcggcggcggaggagggccggcacctttccttatgaaaacattcgacatggtggacgactcatcgaccgacgacattgtttcatggagctctaacaaaaagagctttgtggtttggaaccctcctgattttgctcgccttttgcttcccacttatttcaagcacaataatttctccagcttcatcaggcagcttaatacctatgggttccggaagattgatcccgaacgatgggaatttgccaatgaagatttcgtgaaagatcaaaggcatcttcttaagaatattcatcgaagaaaacctattcacagccatagtaatccacagggttctttgatagatcatgaaagagc

SEQ ID NO: 233311 - DNA, 409 bp, Gossypium hirsutum
gcgaacatggcgataggagttaaggccttgcacttgtcctttgtgcctcatgccctcgcgattgccggcgctgttatggtattggtttggtgcattcacttcaggggtggattagcttgggaatcttctaacaaaaatctcatctttaatctccatcctgtattgatgttgattggcttcattatcttaggaggtgaagccattatgagctacaagtcattgccactgaagaaggaagttaagaaagtcatacatcttgtgctccatgccactgctctgattctaggcattattggaatctatacggcattcaagaatcataatgagagttcaatacctaatctctacagcgtgcattcttggcttgggattggaatcattaccctttatggcattcagtggatatatg

SEQ ID NO: 233312 - DNA, 407 bp, Gossypium hirsutum
ggagtttgccgaggaactgttcgaagctttggctcgcagaagagggataacatcatcggcagtaaacaaagctcagctaagggaattttgggaacaaattactgatcaagctttgatgctagattgcaaactttctttgacatggttgacaaagatgctgatggaaggatcacagaagaagaggtgaaagagattatcacattgagtgctagtgctaacaagctgtcaaaaatccaagaatgtgctgaggagtatgcagccttaatcatggaagaactggataaagacaaccttgggtacattgagatatacaatttggaaacactactactgcaagctccaagccaatcaaccaacttagtgacgggcagccgcattttaagcaagttattgagtgaaaaattggt

SEQ ID NO: 233313 - DNA, 404 bp, Gossypium hirsutum
ggaatttgcatatttacctaaaaaaaaaaaccatacatagatgcacccggtaaacaaagactagaaattatttaaaaggccatcaaagggcacaatccttcacgtaaaaccagaaaacccacattaaggaagacctcaaggcttagaacccaccacgaagacgaagaacaaggtgaagaggggactccttttgaatattgtaatcagccaaagtccttccattttccagctgtttcccagcaaaaatcaacctttgctgatctggtggaattccttctttgtcctgaatcttcgctttcacgttatcaatcgtatccgagctctccacttttaaagtaatggtcttaccggtcaaagtcttgacgaagatctgcatccccccagaccagcaacgtattattttt

SEQ ID NO: 233314 - DNA, 413 bp, Gossypium hirsutum
tgggaactttgtactctgtgaggagaaccaatgcgttgcttgcccgtcaccaaacggattactcgggtggagccggaattgtcagccgaagaaggtgaattgtgggccgaatggtttcagctacttcaagctagaacgagtgtaccatttcatgagccagtacaatgaaagagacgggataaaggagagtgattgtgggaggaaatgcacctctcattgcaagtgtttggggtacttttaccacagggaaacatacaaatgttggaccgctcatgagttgaaaacccttgctcaagcctctaactcttcccatgttggttacataaaggcacccaacaagtgatgggaatcctatgaagtatttgtactttttcctctgattttgcagattctttgatgtctgctaataagta

SEQ ID NO: 233315 - DNA, 391 bp, Gossypium hirsutum
tttctttcaatgcgtcaaggatttggtgccgcttcccgatcagccgtgttcggtggcatcttgcttgctttgatcgaaggagctggtatcatgttgaataaagttctcagtcaaccgcagatgcctattatgatagatgagccagcacccaatgtagcaggaatgcctggatatccgatgggacaattgccaaaccaagcgcctgcatcaattgagagtttgagacgcgactcgccaccgccgcctccacaacagtcctcatctaactcttcctcttcatggtttggaggactttttggtggaaagaagcaggaaccggcaacaggtagtggaagtaaaactgaggttttggagagcttcgatgctcctccggtgccgtctttcgaataca

SEQ ID NO: 233316 - DNA, 413 bp, Gossypium hirsutum
tttccaatccaatatttcaaatccctttaatcttcttgatcaataaaaccaccccacccagattgttggttagctatcccatcaaatcatctatcatcaatttcctaacgtttcctttttggtttattgccgtctcccacaaatctaatctaagttgttttaaagaaagaaaatgagctggtggtgggctggtgctatcggagctgctaagaagaaatttgaggaagatgaagcaccgaaaagcctcaagagcgttgggctgatcattggagtcaccggcatagttggcaatagcttggctgaaatcctccctttatccgacactcccggcggcccatggaaagtatacggggtggctcgtcggcccagacccaactggaacgccaaccatccaatccagtacattcaatgcg

SEQ ID NO: 233317 - DNA, 410 bp, Gossypium hirsutum
cttaaatcccctcgcttctcctgctcagcctctgcttcaaccacaatggctaaacaagttttggtgccgatcgccaacgggacggagccgatggaagcggtgattacgatcgacgtgattaggagatcgggagctgacgttacggtggcttccgtcgagaaagagcttcgcgttgacgcttgccacggtgttaaaattgttgctgatgctctcgtcgctgattgtaagaacaccgttttcgatcttatcgcgcttcctggaggcatgcctggtgctagcaactttaaagattgtggagttcttgaaagtcttgtgaaaaagcaggctgcagatgggcggctttatgctgccgtgtgtgcttcacctgctgttgcgcttggttcatggggtctattgaagggactgaaagc

SEQ ID NO: 233318 - DNA, 413 bp, Gossypium hirsutum
ttgaaatatagtatttgcactcattagcctgtccctcatggaatcccatcttgagaaacaaaatggagatgtgcttcaacaatctttcaaagagatgatatctactctccctaaagagaatcgttggggttttcttgaagattattatcaatatcaaggtttttggatctccccgtcttttctacaaggagcgttgtcagctcaacaacaattccaagctcaacccactgatgtcatcctttgtagctctctaagaacaggcacaggctggttaaaatccctcactttcgccactattacaagaacttcatacaatgattccaccacccctttacttcacacgctgcctcatgatgttgtgcctttcttggagttcgatcattcccagttttctgctaatctacatcttggaa

SEQ ID NO: 233319 - DNA, 391 bp, Gossypium hirsutum
gtgtgaatctcaatgtgaacaatggagtaatgtatgtgaaggtgatgacagatgagcagttggagactctccggaagcaaattgctgtttatgcctctatctgtgagcaacttgttgagatgcacaagaatctcactgcccagcaagatcttacaggtgggagactgggaaatctgtattgtgacccattaatgacatcgggcgggcacaaaataagtgcgagacaacggtggacaccaaccgctgtgcaacttcaaatactggaacgtatatttgatgaaggaactggaactccaagcaagcaaaagatcaaagagataacctcagaactaagtcagcatggccccatttctgaaaccaatgtgtataactggtttcaaaacagacgagc

SEQ ID NO: 233320 - DNA, 412 bp, Gossypium hirsutum
cggttctggtcttggatctttgttgttggagcgcttgtcggtggattatggaaagaaatcaaagctcgggttcaccatctatccttctcctcaggtctcaactgcagttgtggagccttacaatagtgttctgtccactcattcccttcttgagcacacagatgtggccgtgctcttggacaatgaagcaatttacgacatatgccggagatccctcgatatcgagaggccaacttacaccaatttgaacaggctgatttctcaaaccatatcgtccttgacgacttctttaaggtttgatggagccattaatgtagacattacagagttccaaaccaatcttgtgccatatcctcggatccatttcatgctctcttcttatgcgcctgttatctcagctgagaaagcatac

SEQ ID NO: 233321 - DNA, 414 bp, Gossypium hirsutum
aaatttctcgcatctttgtttgttcataaaataatagtatagttttcttagaaaaaccagagtgaaagaaaaaaaaaagaagtaaaagaaaaatggctttggcaagcttggtgagaagaaaggcataccttttgtctagaaacctgtcgaattcgcccgcagatgcgttgaaatactctttttcactcagcaatttctcgaggggtttcgcttcaggatctgaagagaacgacgtcgtcgtcatcggcggcggacccggcggctacgtggcagctatcaaggctgcacagctaggtctcaaaacaacctgtatcgagaagcgtggtaccctcggtggtacttgccttaacgttggttgcatcccatctaaggcgcttcttcattcatcccacatgtaccatgaagctacgcatt

SEQ ID NO: 233322 - DNA, 411 bp, Gossypium hirsutum
atttccccctcatggccgccgctgatgtcgagttccggtgcttcgtcggagggctcgcatgggccaccgacgaccgggccctcgaagaagccttcagtgcgtttggtgaaatcgtcgaatcgaagatcattaatgatcgtgagactggaagatcccgaggctttggattcgttactttccgtgacgagaaagctatgagggacgcgatcgaaggaatgaacggtcaaaatcttgatggaaggaacatcaccgtcaacgaagcccaatcgcgcagaagtggaggcggtggcggaggatttggaggaggaaacggtggttacagccgcggtggaggcggcggcggatatggtggtcgccaaggaggatatggtggcggacgccgtgaaggtggatacggaaatggtggagggt

SEQ ID NO: 233323 - DNA, 410 bp, Gossypium hirsutum
gcgaaggagaaatctttaagctaagcttattcgtgagtgaaagcaatagaaaacaaaagaaagaatctcaagtttcctcttcctccacgactctctctctgtgtttttttctttatttgggtgcttctctccatcaaagttggagctttggataattggatatattgaaaatggcaagtttgaatcttggtcctgttttgcctgcaaagtcaaggctctctctgtttgaacataatggatctctttttgtttctagaagaaaacccaagaagaagaaccaagctattgtccctgtagcgaggttatttgggccagcaatattcgaagcatcgaagctaaaggttttgtttttaggagttgatgaaaagaagcacccaaggaagctacccagagcttatacccttacacac

SEQ ID NO: 233324 - DNA, 392 bp, Gossypium hirsutum
cttaacgttaactattccctcgtcatggaaccaccgccgccgccactgcctccgcccaactccacctctaatcaaatgtgaaagcggaggagtgccactaacaaagcaagctcaccgcttcttctcttcattaacatccacggctgccgtcgacgaccccgccaccgctaaccggttgataaagaaattcgtagcgtcatctccaaagtcaatagctttgaacgccctctctcatcttctctctccccgtaattctcaccctcacctctccgccattgccttccctgtaagtccgccttgtatactaaaataagtgaagcatcatggtacaattggaacccaaagctagttgcagatttagttccattgcttgatatacaaggtaagcacga

SEQ ID NO: 233325 - DNA, 413 bp, Gossypium hirsutum
caaagagcaggaaaacaagaaaagcagagccgcatcactttttgctagctaagctactgtgggagttattgttcttcagaacagcttctgcagtagctaataataacgttatatattatataaattttatacatcctttttaccctacgactccatatataagcaagtaaaaataaatatggctcgctctgtttcttcctttaagttccttggtgcttctgtttttgatgctctttatgtctccatatcaaggagaggttactcaggtgcaccgccggcggcagtgacggctagctttggtaggcctggagcgatggggaaagtggaacgaagatatgcgatgaaagagtcgtcgtcgtcggagacaagggcttattcttcagcttgggcgcctgaccctgttacggggtatt

SEQ ID NO: 233326 - DNA, 308 bp, Gossypium hirsutum
caaagagcaggaaaacaagaaaagcagatccgcatcactttttgctagctaagctactgtgggagttattgttcttcagaacagcttctgcagtagctaataataacgttatatattatataaattttatacatcctttttaccctacgacttcatatataagcaagtaaaaataaatatggctcgctctgtttcttcctttaagtgccttggtgcttctgtttttgatgctctttatgtctccatatcaaggagaggttacttaggtgcaccgtcggctgcagtgacggctagcttttggtaggcct

SEQ ID NO: 233327 - DNA, 409 bp, Gossypium hirsutum
cttcgaagtcgtagctttggaagcatggacttcatagctactatcctgtttctagctcttgtcatctcctccaccaaagctttggacccttgcggccctcagccagatgactcggaccttttggtcatcccaatctatggcaaatgttcaccattcaacccacccaaacctgactcatcgttcaacacagtcatgaacatggcatcaaaagacccagcaagggtcaagtacttgtcgagccttgtagcccaaaagaccactgcggttcccattgcttcaggccaacaagtcctaaacattggcaactatatcgtccgggtaaagattggcactccgggtcagctcatgttcatggtattggacactagcaatgatgtggcttgggtcccatgctccggctgcaacgggt

SEQ ID NO: 233328 - DNA, 357 bp, Gossypium hirsutum
gacactactagacttgtagaaatgcaagggctcgtcttgttgccggtactcctttgcgccacctaccatatcgctctttccgcgaccaacgttacggtggcggacgggctgttagataatggtaactttgagcaagccccgaatgcctcaaacatgaagggcacggttgttgtggggcgttatgcaataccaggatgggtaaacgaagggtttgtggaatacataaagtccgggcaaaagcaaggggacatgttgctggtggtgcctgagggagcctatgcagtcaggttggggaacgaggcttcaatcaagcaggagataaaggtggcgaaagggatgtattactccatcaccttc

SEQ ID NO: 233329 - DNA, 408 bp, Gossypium hirsutum
ctctcactcaattatccatttattcttttctttcaactcaaagtcccaagtagtattagaatcatgggtgttgtcacttataactatgactctacctcccctgtcgctcccgccaggcttttcaaggccttcgttcttgaagctgacaaggtctggcccatagctgcccctcatgcaatcaagagtattgaggttgaagctaatcctggccctggaagtatcgtaaagatcaactttgttgaaggccttccattccaatatatgaagcaccagattggaggacatgatgaaaacaaattttcatacagttacagtttgattgaaggtgggcctttgggggacaagcttgagaaaatcaactacgagaataagtttgaggcagctgtaggtggaggaagtgtgtgcaag

SEQ ID NO: 233330 - DNA, 408 bp, Gossypium hirsutum
ggagccggaaagctgttgttgtccatgtcccatatagattgaggaaagctttccgcaaggttcatgttaagcttgtgagggaacttgaaaagaagttcagtggcaaggatgtgattcttattgccacccggaggatattaaggcctccaaagaaaggttctgcagttcagaggccacgcagccgcacattgactgctgtacatgaggcaatgctagaagatgttgtcttacctgctgagattgttgggaagcgcactagatatagaattgatggatcaaagataatgaaggtgtatttggaccccaaggaacgaaataacacagagtacaagcttgagacgttttctgcagtttaccggaagcttgctggaaaggatgtcgtgtttgagttcccagtgatggaggcat

SEQ ID NO: 233331 - DNA, 410 bp, Gossypium hirsutum
cttctttcaaccgcgcctaataaccgctcggatttttctcagacgtgaaaaaaatggggctgtctttcaccaagctattcagccggctatttgccaaaaaggagatgcgtatactgatggttgggcttgatgctgctggtaaaaccaccattctttacaagctgaagttgggagagattgtcactaccattcccaccatcggtttcaatgttgagaccgttgaatacaagaacatcagcttcactgtttgggatgttggtggccaggacaagatccgaccattgtggagacactatttccaaaacatgcaaggacttattttcgtggttgatagcaatgatcgtgaccgtgtggttgaagctagagatgagttgcacaggatgttgaatgaggatgagttgagggatgct

SEQ ID NO: 233332 - DNA, 288 bp, Gossypium hirsutum
aactatctcaaatctcctccttctactcagaaagcttagtattatcaccatggcctcaaattccaaggtcttctttgacatgactatcggggcgtagcccgctggtcggattgagatggatcttttcgcagattgcactactagcactgctgataacttacgtgccctctgtaccggcaagaaaggcagtaggcgcagcggtaagccactccactacaaaggctgctgtctacattgagtgatccctaactttatgtagccacggaggtgacttcacggacggaaacg

SEQ ID NO: 233333 - DNA, 374 bp, Gossypium hirsutum
caagaatggattctgccatagcccagaaaacatgggaactagaaaacaatatacttaccgtcgagacacctgacccttcatcggattctatattctactacgacgaggcggctcaagccaagttccagcaagagaagccttgggccaatgatcctcactacttcaagcgcgttaagatctctgcgctcgctctccttaagatggttgtccacgcccgatctggtggtaccatagaggtgatggggctgatgcaaggcaagaccgacggcgatgctatcattgtcatggacgcctttgctttgcctgttgaaggcactgagactagggttaacgctcaggcggatgcctatgagtatatggtcgattattcccag

SEQ ID NO: 233334 - DNA, 412 bp, Gossypium hirsutum
gggagtttaaagcagcaatatggtctggcaaagtcggcaaatgaagtgattttggtcattgaagcttacaaggcccttcgtgaccgagcaccttatcctccaaaccatgtggttggccatctaattgggagctttgctttcattgtctttgacaaatccacctccactttgtttgtggcttctgatcaatttggtaaggttcctctctattggggaatcaccgccgacggatatgtggcctttgctgataatgctgaattgctgaaaggtgcctgtggcaaatctcttgcttcttttcctcaaggctgtttctactccacagcagtaggaggattaagaagctatgagaatcctaagaacaagatcactgcagtgcctgctgaagaagaggagatatggggtgctaaattca

SEQ ID NO: 233335 - DNA, 400 bp, Gossypium hirsutum
cccagaattacttaaacaacaatggctacctatgaaggtaaagttttcactgaagaacaagaagctttggtggtcaagtcatggactgtaatgaagaagaatgcagctgaattgggtcttaaattcttcttgaagatatttgagattgcaccatcagccaagaaactattctcattcttgagagactcaaatgttccattggagcaaaacacaaagctgaagccccatgccatgtctgtctttgtcatgacatgtgaatctgcagttcaactgcgtaaagcaggcaaagttacagtgagggaatcaaatttgaagaaattagggagctaccccattttaagtattgggtaagttgatgaacattttgaggtaacaaaatttgctcttttggagaccataa

SEQ ID NO: 233336 - DNA, 350 bp, Gossypium hirsutum
cgaagaactacaaagttcttatggatgagtttcatcatgtatctactgcttttttggaactcgaaaaaggttatcaggaggcaattgaggatattacgaaaagaatgggtgcaggaatggcaaaatttatttgcaaagaggttgaaacagtcggtgattatgatgaatattgtcactatgtagcaggactcgtggggttaggtctttccaaacttttccatgcatgcggtacagaagatttggctcctgatactctctccaattcaatgggtttatttcttcagaaaacagatataattccgagattattctcgggatatcaatgagataccacaagtcgcgtatgtttt

SEQ ID NO: 233337 - DNA, 411 bp, Gossypium hirsutum
cgcctccaagagaagacagagaggtctcctcacaaccaccgtaatgggtcgtgtcattcgagctcaacgtaagggtgccggttcggtcttcaaggcccataccaaccaccggaagggtcccgcccgtttccgcagcctcgacttcggtgaacggaacggttacctcaaaggtgtcgtcaccgacgtcattcacgaccctggccgtggcgctccgttagcccgcgtcgttttccgccaccctttccgttacaagaaacagaaggaattgtttcgtcgccgccgagggtatgtacaccggacagttcgtgtattgtggtaagaaagctacccttatggtttgaaatgtgttgccccttagatctatccctgaaagagctgtcggttgcaacgttgagcaccatgttggtgacc

SEQ ID NO: 233338 - DNA, 410 bp, Gossypium hirsutum
ccgcattttcgtaagtgagcgacgctgttcaagcttaaagagagaagggcatcatggtagactcgctgaagaagaacagcatggaagagaatttgattcccaaattgggagaacgaggagaaaagtaatcggcggctaagttgggctgctctcgttgaagatataaaaagggtgggttaccttgcagggcctatggtagccgtgactttatcacagtacctattgcaagttatatcaacgatgatggtgggtcatctgggtgagcttgctctctctagctctgccattgccatatctctcgccggagtcaccggttttagtcttcttctaggaatggcatgtgcattggaaacgctgtgtggacaagcttatggtgcacaacaataccgaaaattgggaatccataccta

SEQ ID NO: 233339 - DNA, 398 bp, Gossypium hirsutum
ccaaatcgttcgtctcttaattctggttggatatcgaagatgtcaggaagaggaaagggtggcaagggtcttggcaagggaggagctaagcgccaccgtaaggtcctccgcgacaacatccagggcatcacaaagccggcaattcgacgccttgcccgtaggggaggagtgaagcgtatcagcggcttaatctacgaggaaacccgtggagttctcaagatcttcttggagaacgtcattcgcgatgcggtaacatacaccgaacacgccaggagaaagacggtgactgccatggatgtggtttatgcactgaagaggcagggtaggactttgtatggatttggcggttagatgatttagggtctagattttaaaatagaggaaaaattgtaggactc

SEQ ID NO: 233340 - DNA, 362 bp, Gossypium hirsutum
gaagcattttataactgtccaaaacctgtcttttctttttcttttgtttatggtggcttttaaaattgctagagtgatacttcaaacttaaggatttgttagtgcaaagctgggatttgggtggatgggtctttcaagtcacaataattgagtgtgagatgaagctggcatagccatcattaatcacgcattcgaaagaggaatcactcatttagatacacccgacatgtgtggacccaaaactaaccaaattttggttggaaaggcattgaagcatttgccacgagagaaggtacagttggctacaaaattcagtgttgaaagcatgggtccaggtggtccagttatcaatggcactcctg

SEQ ID NO: 233341 - DNA, 387 bp, Gossypium hirsutum
tcttgttactggtggtgctgggttcattggcactcatacagtggtacagctactcaatgaaggttttaaagtgtcaattattgacaatcttgataactctgttattgaggctgttgatagggttaaggaattagtgggtcctgagctctctaagaaactccagttcaacttgggtgatttgaggaacagggatgacttggataagcttttctctaagacaaagtttgatgctgtcatccattttgctggccttaaggctgttggggagagtgtcggtaaccctcgtcggtattttgacaataatttgattggcactatcaatctgtatgagatcatggccaaatataattgcaaaaagatggtattctcatcttccgcaactgtgta

SEQ ID NO: 233342 - DNA, 398 bp, Gossypium hirsutum
tgagaatccaatatacttgttcacttatcagaggatgggagctcatttcttctcgccggagcattttccttcattcactgagtattgtccgaagcctgcgtcaaccagaattacatccagacgatttaccctccgatgaggcacaatctactgaatcggtacaaacgagttcggatccaaacatccacttgcagacagcttagcatgagagtgagagaacatagttacgtgtatattgtattcttgtcagctctaaattattgaatggggagaagattgtactattggactttctgtatacatctaagcaaatatttcctttttgctaaaggaccttataatagattggtgttcatgggtttttgaccccaataattaggggtctctttctagggatt

SEQ ID NO: 233343 - DNA, 394 bp, Gossypium hirsutum
gcgtcgcgtgggttcatcgttggagtccaaaccaaggccatgccttcattcgcacatcaaagcactgggcgagtcttcccttgcctgcgttctttccccttccactcccgcccaagttcttcatgtttacgacactgttttacacggtttctccggtaagctttcccccacggacgccctcaatctccaaacgcttccccatattctcgccgttatgcccgaacaagtccggcgcctgcacaccacgcgctcttcttacttgcttggactgcaaaccactgacagcgccggccttttgaaagaatccgactttgggtcggatcttgtcatcggagtacttgacacgggtgtctggcccgaacgtcaaagcttcaacgaccgtgatttggggcct

SEQ ID NO: 233344 - DNA, 387 bp, Gossypium hirsutum
cttgcattaagtctcaaagatatcactgcaagaaaaaaaaaaaaccagacatggcttccaacactgttgcatccgctgctcttcttcttaccttgaacttgttgttcttcactttggttagctctacctacgtgccttgcccaccaccaccaaagagccacaagcctacccacaaaagcccaccctcggcacctgaacagccaggcacttgccccagagatgcactgaaactaggcgtttgtgctgatttgttgggctcagtgcgcgttgttgttggaccgtcgaggaccaaatgctgctctctcatttcgggtttggctgatctcgatgctgctgtttgcctttgcactgctattaaagctaatgtgttgggggttaacctaaacg

SEQ ID NO: 233345 - DNA, 379 bp, Gossypium hirsutum
gaagcattttataactgtccaaaacctgtcttttctttttcttttttttttgtcaagttcaaaatgtgtagggttaattcgacaagtatagcatttcttagtgttttgctgttttgtttttcgagctttgaggtgacgtatagtgctagggaaggcaaacagtggaggaagcagagcatagctggtggtttccgccgtctaatggcgaagggaggaagctctgacgtcgtagccgacgccactaccacctttaatgtgttggactacggtgccaaaggtgatggacgcacagatgactccaaggcattcgaagcagcatgggctgatgcttgtaaagttgaggcatcaacagtgatggttccatcgggttcaatattcc

SEQ ID NO: 233346 - DNA, 372 bp, Gossypium hirsutum
gccccacgcgtgcgggataaaacccagaggattccaaccctatggctttcatatttttcagcacagtatgagaaactaaggcgagcatcttatgaacggggttgtttcagggtagacatccacaacattccttttggattgatgcacgaaatgaagcatgttgtgcgatcattgcttgaccttcccatccaaatcatatcaaacaactgtcctataatttgccggagatggtattgggctcccagtactaaaaaccctctctatgaagctttgggtgtgtattatatagcactgctcccatgctgttcatacattaagctctcagttggatgcctcttcttcacaaagagacacagttgcgatgtatgctaa

SEQ ID NO: 233347 - DNA, 379 bp, Gossypium hirsutum; identical to SEQ ID NO: 199636

SEQ ID NO: 233348 - DNA, 396 bp, Gossypium hirsutum
acgcgcccactcgtacggatctctttgacactctattttaatttatgtcacctgtcacgggggctagtgatgctggcgctgatgatgatgatgacaaggcaggctataggaatgaaccttatgacctacgatccaaattcctgattttggtcaaggttctgcagcttgattctagtgcttgtagggacggccgttggcggtgtgtcaccctatactataaagtggaaccggcgtttcttggtgctgggaacacaactcgccggtggggttattttttggacagccacgatacatgtcttgagcgatgcgaatgaaacttttgctgacttgacgagtagagaacaccctttcggctttatggtggcatgcgctggatatatgtggactatgctagct

SEQ ID NO: 233349 - DNA, 318 bp, Gossypium hirsutum
caactgtcctgtcgcttgttcttcttttgcaacttctcgttgcgttgagttgagttgggtttttttttttcttgattaaatgaaccaatgaaggggtaaaaagaggggccaaaccatgttttgcttaattcttaaaggtggttcttttttggttttggttacctcattgggttcggctcttaattctgatgggctttctcttcttgctctcaaggcagctggggaatctgatccaactcgatgtcttgaaaggtggtcccagtctgatgccaccccatgtcactggttaggaatcggttgtactcggaaaccagtcac

SEQ ID NO: 233350 - DNA, 391 bp, Gossypium hirsutum
cactgctgttggatatggcacagagaaaggtaaagactattggattgtaaagaactcatggggaagcagctggggagaagcaggctatctcaggatggcaaggaatgtggccaataccgtaactggcaaatgtgggatcgcgatggaagcctcttatccgatcaaaacaggtgaaaatccccccaatcccggaccgtctccaccatctcctataaaacctccgaccgtgtgcgatagttattattcctgtcccgagagcaatacctgctgctgcatatacgagtactataactactgctttgcttggggatgctgcccactcgaggctgccacttgctgcgaagatcgctacagctgctgccctcatgactaccctgtgtgcaacatacat

SEQ ID NO: 233351 - DNA, 369 bp, Gossypium hirsutum
acggcatatacaatttagacaacagttgtgtctcacatcctcgatgaatgcggtcaaatccttgccaagcctttcttttatcttactaaccctttctagctgaccccatgcagccacatttgatataagaatcaactgcccttacaccgcttggtctgacgtatcttcgtgtggtgtcttgagacttgaccaacgtgaagcatgatatatcactgtaacctctgggaccacacaagcccgcatttgtgctcgaaccaaatgcggtttcgttgcctacgataaaggcttatgctagacaagctaccgcggtggagctctcgtatggtggggatacggttcaattcccaacacactagtcgaatacgcagt

SEQ ID NO: 233352 - DNA, 383 bp, Gossypium hirsutum
gcagtctctcccgctccttctcgctgcgatttcgtcttcaagatctcagttctcaaatcgtagcgctcttttctatcaagccatggctctgatcttgcatgcaggaaaaacaaacaaaaatgcctttaaggcactcattgctgcagaatatagtggtgtgcaggtcaaaatggttgagaattttgagatgggtgtgtcaaataagactcctgagttcatcaagatgaaccctttggggaaggttcctgtgttggaaacacctgagggtccggtatttgagagcaatgccattgctcgttatgttgctcgctcaaaggttaacaaccctatatgtggctctacattgattgattatggtcatatcgagcaatggattgattttg

SEQ ID NO: 233353 - DNA, 383 bp, Gossypium hirsutum
gacggggaacaaaaacaaacaaactatgaccatgggtgctgcagacaagagggaggaagtgattcaagcatggtacatggatgatagtgatgaagatcagaggcttccccatcaccgtgaacctaaggaatatgtatccttggataaactttctgagcttggagtactcagctggcgattggatgctgataactatgaaaatgatgaagagttgaagaaaattcgtgaagaacgaggttactcctacatggacttctgtgaggtttgccctgagaagcttccaaattatgaggagaagataaaaaatttctttgaagaacatcttcatactgatgaggagatccgttactgtgtggcaggaagtggttattttgatgtacggg

SEQ ID NO: 233354 - DNA, 396 bp, Gossypium hirsutum
cagctagaaaaattagagaaactaaaagaaagaaagaaatgggaagctcgtcgaaggaggagacggcgaccgacggcgatacgtcgagcggagatacccctccttccaattccaatctcttctctgagggtgaacgtgtcctcgcctatcacggccctcgtatctacgaagccaaggttcaaaaagcggagcttcggaagaaagaatggaaatactttgttcattaccttggttggaataaaaattgggacgaatgggtaggtgccgatcggctgatgaagctgactgaagagaatgtcatgaagcagcaagcccttgacaaaaaacagggtgttgataaaagttcaaagtctggacgatcaagtcagtccaagccaaaaagctctgctgatgcaa

SEQ ID NO: 233355 - DNA, 392 bp, Gossypium hirsutum
ctcttttccttgtcaccaaaaaacatctttctggtcaattcaatcctccttttttctattcaaccataatgtcttgcttcattagcaaatacgccgatgagttggctaaaaacgctgcttacattggcacccctggaaagggtatccttgctgctgatgaatccaccggcaccattggcaagcgtctttcaagcattaatgtagaaaatattgaagaaaacaggcgtgctctccgtgagctcctcttcactgctccaggagctcttcagtacctcagtggtgttattctcttcgaggaaaccctttatcaaaaaaccgcttcgggcaagcccttcgttgatgttttgaatgaaggtggtgtcctccctggcatcaaggtcgacaagggtacc

SEQ ID NO: 233356 - DNA, 387 bp, Gossypium hirsutum
catagatataataagcacctccccgtaagcaaaccacaaaggaaagcttggagagagacccaaaaacaatgtctaaggaagttagtgaagaaggacagggtcgtaaggactatgtggaccctccaccggcacctctgattgacatggctgaactcaagtcatggtctttttacagagccctcatagctgagttcatagccactctcctcttcctctatgtcactgttgctactgtaattggtcacaagaaacaacaagatgcatgtgatggtgttggtctcttgggtattgcatgggctttcggtggcatgatctttatccttgtttactgcactgccggtatctcaggtggacacattaaccctgcggtgacttttgggttgtttt

SEQ ID NO: 233357 - DNA, 385 bp, Gossypium hirsutum
ttttgctctcagatatggaaactcaaccttcttccgataatggttatgccgggaacaacactagttctgaagaaaatttaaaaaggcagaaagaaattgatgcatggctgccaattacatcatcaaggaatgcgaaatggtggtattcagctttccacaatgtgacagcaatggttggagctggtgtcctcagtctcccctatgcattatcagaacttgggtggggacctggtgtggctatcctagtcctatcatggatcataactctctatactctatggcaaatggtcgagatgcacgagatggttcccggaaaacgtttcgaccgataccatgaactcggccaatacgcctttggcgaaaaactcggtctctacattgtggt

SEQ ID NO: 233358 - DNA, 380 bp, Gossypium hirsutum
aaactgaagctgccaaagctcgagaattcaaaccgaaacaaaaaagaaaaagagctcttaaacccccaaaatacctaaaaagaaatggctctgaaattcaaccccatcacttttcaatctcagaaactcccttcatttgctcttccaccaatggctggccttaggtctcccaagtttttcatggcctctactcttcgttctggttccaaagaggtcgatctcaagaagcctttcatgcctcctagcgaggtgcatgttcaggtcacacactcgatgccccctcagaagattgagatcttcaaatctttggaggactgggctgagaacaacattctaacttacctcaaaccagttgagaaatgttggcaaccccaagattt

SEQ ID NO: 233359 - DNA, 435 bp, Gossypium hirsutum
gctggcacgcaccgggccccagattcccggttcgacgccacgccccccgcgggcgtgggcgtatacatgaggaaaatcatgggtgccaaagttctcttcttgtttgctttgctttccttttcagctgtgtcggcatttgcacaggatgaggaagaccaaggtcttgttatgaacttctacaaggattcttgtcctcaggctgaagacattatcaaggagcaagttaggctactgtacaagcgacacaaaaacactgttttttcttggctgagaaacattgtccatgactgtgctgtccagtcatgtgatgcttcactgctgctggactccacatgaaggatcttgtctgagaaggagacagacaggagctctggcctaaggaatttcaggtacattgagaccatcatagaagctgtacaaagggaatgtcctgga

SEQ ID NO: 233360 - DNA, 392 bp, Gossypium hirsutum
cggacgcgtgggttcgagggttataggattggctaccgcagaaccaaattgatcaatcgaagtttcatctctctttcttctatcctgcaaaccctatagaaatttcctcaaggtgtgcagtgattttacgagaatgtctcgggtctatgttgggaatttggatcctcgggtcactgagagggatctcgaagacgagtttaggatttttggcgttctccgcagtgtatgggtagctcgaaggcctcctgggtatgcgtttattgagtttgatgatcgcagggatgctattgatgcaattcgtgaactggatggaaaaaatggttggcgtgtggaactttctcataattcaaaaggtggtggaggccgtggtgggcgccgtggtgggggtgagg

SEQ ID NO: 233361 - DNA, 364 bp, Gossypium hirsutum
cagaatcagagtgtaaaaaaggaaggaaaaaaaggctaaaagaatgtttttgcgaatgatatcgcggccgttgttggctaaggtgaaggagacaacggggatcgtcggattagacgttgtacctaacgcaagggaagtccttatcggtctctacaacaagactctgaaggagatccaggccgtacctgaagacgagggttaccgtaaggccgttgagagcttcacgcgccaccgtctgaaggtttgccaagaggaagaagattgggaaatgattgagaagcgccttggatgtggccaggtcgaggagctcatcgaggaagcgcgtgacgagctcactcttatcggaaaaatgatcgagtgggat

SEQ ID NO: 233362 - DNA, 392 bp, Gossypium hirsutum
ttcactaatggcgattcccaaacgaaaccctattttcctgtctgtaatctttgtttcgctcctcgcaatcgcctccgctaaagtattcttcgaagaacgttttgatgagggatgggaaagtcggtgggtaaaatctgactggaaaaaggatgagaacatggctggggagtggaattacacttctggaaaatggaatggagatcctaatgacaaaggtattcaaactagtgaagactacaggttctatgctatttcagctgagttcccagaagtcaacaacaaagataagactctagtcttccaattttctgtcaagcatgagcaaaagcttgattgtggtggtggctacatgaagttgctcagcggtgacattgaccagaaaaaatttggtg

SEQ ID NO: 233363 - DNA, 399 bp, Gossypium hirsutum
cacggtttctctattattttcttgtcttacttatggccgtcgttaaggctttcattgcttcacttctcatctctcttctccttctccaacttgttgctgctgatcaactggtgacaagtgccagcaagcgcatgggaactgccccccctgcgaaaattgactgcggcggggcttgtgcggcgaggtgccgattatcatcgaggccacacctatgcaagagggcatgcgggtcatgttgcgcacgctgcatctgtgttccaccggggacagccggtaaccaagaaatgtgtccttgctatgctagcttgaccacccacggtggccgacgcaagtgcccttgagtgttaatcgacaatcgggacgaatctttctcttttgatgctgatatgaaattaataa

SEQ ID NO: 233364 - DNA, 389 bp, Gossypium hirsutum
cccacgcgtccgcccacgcgtccgcccaaattcccattttgaccatgcctaatgatgatataacacatcctacaccagatcttactggttatattactgaagggcagatctacattgatagacaacttcacaatcgacagatatacccaccaattaatgtactcccttcactctctcgattaatgaagagtgctattggtgaggggatgactcgtagagatcatgctgatgtgtccaaccagctctatgcaaattatgctatcggaaaagatgttcaagcaatgaaagctgtggttggagaggaagcactttcttctgaggatctgctttatctggagttcctagacaaatttgagagaaaattcgtgactcaaggtgcttatgatact

SEQ ID NO: 233365 - DNA, 374 bp, Gossypium hirsutum
acccgttctccaagggtttctggtagtgatctatgtctgctgaatcttcctaatggcctgtaacgatgaaaacgagcctttgctatcaggattagcgactccaagaactcaaaagactaatggggatggaccaaagaagagaaggtttcgacgtgttaggagtgctccttttgcagattttgttccgactgatggtaatagagaagctgcagttccacgttccgggtccattttcgggagacttaatccgagtcttaagaaggtagctctatttttgacgttatacatgggtttaggcaccatttgcttttatacaaccaggacccaaatcaaaggggacaaaacaaatggaattcttgatgctctttattttt

SEQ ID NO: 233366 - DNA, 396 bp, Gossypium hirsutum
gtgaagcctataccaaacttatcaaaagatggcttgggtgctgcatttcctttcttttatatagaacctaaaaagtatgagtcagttctgagaaagtacttccctgaggaaaagggtccaataaccaacattgaccccataggaaattctcctgttattgttgggaaagattctctcaaaaaaattgctccgacttggatgaatgtgtcattggcaatgaagaaagatcctgaaacagataaagcttttggttgggtgctagaaatgtatgcttatgctgtttcctctgccttgcatggtgtgggtaacatcctgtacaaagatttcatgatccaacctccttgggatacagaaataggtaacaagttcatcattcattacacatatggatgcgac

SEQ ID NO: 233367 - DNA, 395 bp, Gossypium hirsutum
gaaacttacaacttcaccatgaacaaaagcaagctccagctgcaactttgtgcagggatatttactttaagcatcctctccaatggtgcttatggtagtgacaaaatctttgacataactcacaaaatcacttctcagttgccaacttttggatcacagaagggtcttggtcaattcatttggcttctttccagcatcaaaaatgggtccacagtgaatgtgtcggagttcaaattgggaacccacactggcactcacgttgatgctcctagtcacttctttcagaagtactatgaacaaggatttgatgtttcaacccttagccttcaaactcttaatggtcctgttctagtagttgatgttcaaagaaataagaacattactgctgaagttat

SEQ ID NO: 233368 - DNA, 357 bp, Gossypium hirsutum
attttattgtgcttctctctcagatcttgaaaatgtatacatcaatgaagaagatccacaaagataaggatgttgaaccaacagaatttgaggaatcagttgcccaggcattctttgatttggagaataccaaccaggatctgaaaagtgacctcaaggatctttacattaattcagcagtccaaattgatgtgtctgggagccggaaagctgttgttatccatgtcccctaccgattgaggaaagctttccgcatggttcatgttcagcttgtgagggagcttgaaaagaagttcagtggaaaggatgtgattcttattgccacccggaggatattgaggcccccaaagaaaggtt

SEQ ID NO: 233369 - DNA, 389 bp, Gossypium hirsutum
attttcctctcctttttcgtgtttttactcttaattttgctttttgttttggattgtctgttctgaatcagagaaaaccctacctttttttttctcttttatttctttgaattggaacgatcaaaagaaggaatgggttctgaaggatcgagggttgttgtgccaaggaatttcagattgcttgaagagcttgagagaggtgaaaagggaattggggatggaactgttagttatggaatggatgatgctgatgatatttacatgcagtcatggactgggactattattggcccgcctaacactgttcatgagggacgcatctaccagttgaaactattctgtggcctggattatccagataatccaccaagtgtgaggtttcaaacccg

SEQ ID NO: 233370 - DNA, 390 bp, Gossypium hirsutum
aagaagctcaagtatgctgaagatgtttcttctgccatagtatttggaagagagcttgtgaactcaccagccaatgtacttacccccgctgcactagcagaagaggcttcgaaaattgcttcctcgtacagcgatgttatatctgcaaacatcttgaccgcagagcaatgcaaggagctgaagatgggatcttacctgggagttgctgcagcatctgataatcccccttatttcatccatttgtgctacaaacccctgagtggacctattaaagccaagttagcattagttggaaaaggattgacttttgacagtggtggctacaatatcaagactggacctggttgctcaattgatgttatgaagatagacatgggaggttctgcagca

SEQ ID NO: 233371 - DNA, 389 bp, Gossypium hirsutum
atcacctggtccgataccaatggttgggttacaggactcttcagctgtctttccagttgaaactgatgattcgttaactacggtgggtgaggaaatatgggatccaaagctgaatagttgcagagtttcatcccaagcagaccaattggcttcattcactcagcaagatccatgcagtcttaattctggtggggtaagggatttgtctgatgacagcaacaatcaaagtgggatatatagtagctgtcttaacattgatgttagcaatggttgcagcactgtgattgatccttttgtttccagtgccattctagatgagttttgctcattgaaagatgctgattttcaaaacccttcatattgtttggtcgggaactttggttcttgtc

SEQ ID NO: 233372 - DNA, 371 bp, Gossypium hirsutum
tgcaattaaaatcccagaattacttaaacaacaatggctacctatgaaggtaaagttttcactgaacaacaagaagctttggtggtcaagtcatggactgttatgaagaagaatgcacctgaattgggtcttaaattcttcttgaagatatttgagattgcaccatcagccaagaaactattctcattcttgagagactcaaatgttccattggagcaaaacacatagctgaagccccctgccctgtctgtctttgtcatgacatgtgaatctgcagtacaactgcgtaaagcacagcaaagttacagtgagggaatgagatttgaagaaattaggagctacccatcttaagtatggagcaggtgatgaac

SEQ ID NO: 233373 - DNA, 396 bp, Gossypium hirsutum
gcaagccattaaggttttgagaaaagatcaaaatggattcaaaaagatcagcttccacagccctccttttagccctcaacattctcttcttttccctagtcagtgctaattgtggatcttgttcttcttctggctctaacccaaggccaactcccacccctactccatctgcacgaggtaggtgccctagggatgccctcaaattaggtgtatgtgccaatgtgcttaacttagtcaatgtcaccgttggttcacccccggtgatgccatgttgttcccttctcaacggtcttgtggacctcgaagccgctgcttgcctttgcaccgctatcagagctaacatcttaggcatcaaccttaacatcccagtttcccttagcttgcttctcaacgttt

SEQ ID NO: 233374 - DNA, 372 bp, Gossypium hirsutum
gagagactgatgcatttatgggtgcccgcaaagaccttgaaatggaaattggcgctgagaagaccttgctagcacaaaagatgatgatatacaagtgctatcgttgcagcaagcgtggtgatacggccactaacatgcttgaattgatgataaaatctccgaggccaacccgagctaaaccgacccttgttgcttacgctgtgctggacgggaccgattgtgtcatgctcactgctgagagtgctgctggagcctctccagagctcgccgtgaagatcatggctcgtatttgtattgagagccaatcttgcattggctatcgagcattgctcatagaactgatccgatcgactgcacttgaaatgagttcac

SEQ ID NO: 233375 - DNA, 397 bp, Gossypium hirsutum
agcgagagtttcttcttcttcttcttcttcttcttcgctcctgtagaaagtttatttgctcttcaacaataaaaaaaataaaaaaagctttcctacagcagcgctcaagtttttatcaatccagagtttgaatttgaattgaacaaatcaatattaagataagagaaatggctcgctctctctccaacgctaagcttttctctacttttgttgtcgatggaatctctaacgttatctccagacgaggatatgcggcggcatcacaaggaattgtgtcgagtggaataagaggaggagcgggaaggagcgctgctacggtggccaagaaaacaggggaagagatgtctcgcggagctaaagagaaggtttcgtgggttcccgaccctgttaccggatg

SEQ ID NO: 233376 - DNA, 370 bp, Gossypium hirsutum
gctcagtgctcacattttctcgcattttatttaattgtctggtctgccctcaaagcccaaaaccctaacaatggcagccgtcgccgaccgtcctgtggtttcggtgcaaaccatatagtccgatatggctaccgacgctacgcctactgatcctctcgctgatgtcatgaaagcctcgatccgaccagacatcgtcaccttcgtccacgataacatttccaagaacagccggcagccttacgctgtctccaagcgtgctggtcaccagacctcacctgaatgcgtggggaactggccgagccgtctaccgtatcccgcgtgttgctggtggtggctctcaccgtgctggccaaggagcttttgggaacat

SEQ ID NO: 233377 - DNA, 396 bp, Gossypium hirsutum
cttttggctatttaaaaagtccaccaaacaggtctttccttcacccccaccttctctccctctcttcttaggtctgctgtatcttagttcttgattaattagccaatcacagcagccatgtctctcctcaatgatctcatcaacctcaacctcagcgacaccactgaaaagatcatagccgaatacatatggatcggtggatctggtatggatctgagaagcaaagcaaggactttgcctggaccagtgacggacccttcaaaactcccgaagtggaactacgatggttccagtaccaatcaagcacctggagatgacagtgaggtcattctttatcctcaagctatattcaaggatccatttagaaaaggaaacaacatcttggtgatgtgcgat

SEQ ID NO: 233378 - DNA, 396 bp, Gossypium hirsutum
attatcttaaagcctgccatataatcatataaccaggctccgtcgtggtactcttcggccaccacaatgccgaaaatcgccttgggaacaagccaagaggctgctcagcctgactgcatcaaagcccttgtggtcgagtttatcaccactttcctcttcgtattcgttggagtaggagctgccatggccgccgatgagtcgggggcaaatgcgctggtgggattgtttgctgtggcggtggctcatgcccttgtcgtcggcgttatgatatcggccggacacatatcaggcggccatcttaacccagccgtcacgcttgggttgctattcggtggtcacatcacggtggtccgtgcgatcctctactggatcgatcagttgttggcatcttcagct

SEQ ID NO: 233379 - DNA, 358 bp, Gossypium hirsutum
gatataataagcacctgcccgtaagcaaaccacaaaggaaagcttggagagagacccaaaaacaatgtctaaggaaggcagtgaagaacgacagggtcgtacggactttgtggaccctgcaccgacacctttgattgacatggctgtactcacgcaatgggctttttacagagccctcatagctgagttcatagccactctcctgttactatatgtcactgttgctactgttattggtcacaagaaacaacaagatgcatgtgatggtgcaagtctattgggtattgcaaggactttccgtggcatgaactttatccttgtttactgcactgtcgtcctcttaagtgaacacattaac

SEQ ID NO: 233380 - DNA, 392 bp, Gossypium hirsutum
gaaaaaattgagtgtcagtttgaaagtgttcttcagatatggctatgaaacaagttgctaattctgctatcaaagcaattgccaattctgggtcatcctctcttcttaccagacaactccatgcttctccagggagcaaaaagattgttggggtgttttacaaggccaacgagtactttacgaagaatcccaactttgttggttgtgtggagggagccttggggttgcgcccatggctggaatcacaggggcatcagtatattgttaccgacgacaaagaaggaccggactgcgaacttgaaaagcatatccctgatctccatgtgctcatatcgaccccattccacccggcttacgttacggctgagaggatcaagaaagccaaaaacttg

SEQ ID NO: 233381 - DNA, 390 bp, Gossypium hirsutum
gcgaacatggcgataggagttaaggccttgcacttgtcctttgtgcctcatgccctcgcgattgccggcgctgttatggtattggtttggtgcattcacttcaggggtggattagcttgggaatcttctaacaaaaatctcatctttaatctccatcctgtattgatgttgattggcttcattatcttaggaggtgaagccattatgagctacaagtcattgccactgaagaaggaagttaagaaagtcatacatcttgtgctccatgccactgctctgattctaggcattattggaatctatacggcattcaagaatcataatgagagttcaatacctaatctctacagcgtgcattcttggcttgggattggaatcattaccctttat

SEQ ID NO: 233382 - DNA, 364 bp, Gossypium hirsutum
ataatatcgtgtatcgtcacggagaaatctgcgcccttcacgtcttcacagctaaaagatgccggccggagaactccggtgtgcttcttcgatctcttggccgcagatttgtcaagcaacggacacccccatggaggaagacgaggcgtggctgtgggcgcaaattaaagccgaggcacgccgcgacgccgagtgggaaccggctctagatagctacctatactccacgatcctatctcactcctctatcgagcgctccctcgccttccaccttggcaacaagctgtgctgctccacgctactctgtacgcttctctacgaccttttgctcaacactttctgttgcgatccttaggttcgagcc

SEQ ID NO: 233383 - DNA, 300 bp, Gossypium hirsutum
atggcggctaccactgcaaatacatcattactcaagccttctcctttagcttcctcctccaaatcttcaatacctatttccaaatccgtcctccactttcgaacaatccctcgaaagctcacgccgccacgttccctctccgtttccagctctctttcacaatcaaattccacccccggatccaccgtcttcttcgtcgccccaacgaaggcccctacccatgatttcatttcccgttatgcccccgacgagcctcgaaaaggcgccgatatcctctttgaagcccctgaacgcgaaggg

SEQ ID NO: 233384 - DNA, 394 bp, Gossypium hirsutum
gcggcgaacatggcgataggagttcaggccttgcacttgccctttgtgcctcatgccctcgcgattgccggcgctgttatggtattggtttggtgcattcacttcaggggtggattagcttgggaatcttctaacaaaaatctcatctttaatctccatcctgtattgatgttgattggcttcattatcttaggaggtgaagccattatgagctacaagtcattgccactgaagaaggaagttaagaaagtcatacatcttgtgctccatgccactgctctgattctaggcattattggaatctatacggcattcaagaatcataatgagagttcaatacctaatctctacagcgtgcattcttggcttgggattggaatcattaccctttatg

SEQ ID NO: 233385 - DNA, 400 bp, Gossypium hirsutum
cttctcttctccaccaatccaaaaaaaccaaagatgcagtacaaaaacctgggcagatcaggcttaaaggtgagtcaactatcgtatggagcatgggttagtttcggtaaccagctcgatgttaaagaagcaaagtcacttctccagtgttgtaaagacaacggagtcaactttttcgacaacgccgaggtttatgccaatggtcgagccgaggagatcatgggtcaggctattagggaacttgggtggaaacgatcggatatcgtggtttctaccaagatcttttggggtggtcctgggccaaatgataagggtttgtctagaaaacatattgtggaaagaaccaaggcgtccttgaagaggcttgatatggattatgttgatgtgctctattgtcata

SEQ ID NO: 233386 - DNA, 326 bp, Gossypium hirsutum
taaaaaacagggcatttccattaaaccaacaacaacatctaaaatccaaccacccagagttaaccaaaagagaaattggtcaccaaagtctacatggtttacttttccatgtttgaacatgttaggaaactgccccaagagatgaaaagggagctgtctctgccgggggagtgaatgtaactctttggggtggcagaaacactaccagaagaagttcttgggaaaatgggagcaccaccaaaaacagatgcccctatcataacaccacatgtgctgtcgggggcagatggtgtgctatttgggtttccaactagatttgggatgat

SEQ ID NO: 233387 - DNA, 361 bp, Gossypium hirsutum
gcgacatgagctacttaaccatttcccaaatctcctccctcctcttctttagcgttcttttcatttccgctcatgcagcgcgctttgaaatccgcactgagtgctcctacaccgtctgggcagcagcctctcctggaggtggccgtcgcctagaccctctgcaaagccggaccatcgatgtgcctgctggcactgctatggctcgtatttggggtcgaaccaattgcaatttccatgccagtggtaggggtcattgccaaaccggtgattgtggtggacttcctccatgcataggttggggtgtaccttcaaacaccctggctgaatatgcactttaccaatttggaaacatgggtttcta

SEQ ID NO: 233388 - DNA, 394 bp, Gossypium hirsutum
cttcgaagtggtgagctatggaagcatggacttgatagctactatcctgtttatagcttttggcatctagtgcaccaaagctttggacccttgcggacctgacccagacgactcggtccttggggtcatcccaatctatggcaaatgttcaccattcagcccagccaaagctgactcatcggtcaacacaatactgaacatggcatcaaaagacccagctggggtcacgtacttgtcgagccttgtagcccaaaagaccactgcggttaccattgattcaggccaacaagtcctaaacattggctactatatcgttcgggtaaagattggcactccgggtcaactcatgctcatggtattggacactaacaatgatgtggcttgggtcccatgc

SEQ ID NO: 233389 - DNA, 336 bp, Gossypium hirsutum
gtcaagctcaagcctttctcttgggtccctcccccaaaacaaacactcttttcaactccaccaccatctttaaccctgaccaacctcatccccaaatcttcccattttttgttccctataaaattttgatcacttaaattgttttttttccaaattttggggggttaaagatgagttcgagttccgatttggtgggttttgttgaatcggtattgggagtgtcgttagagggtttggtaacggattctatgatagtgatcgcgacgacgtcgttagcggggattctggggcttttgttgtttttctggaagaaatcgggttccgaaccgagccgtg

SEQ ID NO: 233390 - DNA, 389 bp, Gossypium hirsutum
gtccgacactcctttcctcattcttcggaactcgttcttcctttccgaccagcgacaacgatcatcgtgatatcccaattctaccctcaccgaaccccccaaattctccgctagctcatagaaaacttgtccgggattttttttcctttttttgttcttttttctttggggatggctgaatccgacaatgaatcgggggggcataacaacagcggaggaaacgctcacagcgaaacgtcggcgcgtgagcaagacaggttcttgccgatcgcaaacgtaagcaggatcatgaaaaaggcgttgccggcaaacgctaagatctccaaagacgctaaagaaacggtccaggaatgcgtctccgagttcatcagtttcatcacgggagaagc

SEQ ID NO: 233391 - DNA, 402 bp, Gossypium hirsutum
ataccacccaaacatcgtcgtcttctacactcttctctggtaagttcatcgaaagatcaaatcaagatccctgccaaaatgaacgacgctgatgtatccaagcagatccagcagatggtgagattcatccgccaggaagcggaggaaaaggctaacgagatctctgtttccgctgaagaggagttcaacatcgaaaagcttcaattggtggaagcggagaagaagaagattaggcaggagtacgagaagaaggagaagcaagttgaaatccgaaagaaaattgagtattcgatgcagcttaatgcatctaggatcaaggtccttcaggctcaagatgatgtggttaatgctatgaaagaatcagcatgcaaagaccttctcaatgtgagccatgatcaccat

SEQ ID NO: 233392 - DNA, 411 bp, Gossypium hirsutum
ctcagccgtaagtatttccaacagctcatctccgccgttgggtactgccattctcgtgggatattccaccgtgatttgaaacctgaaaatctcctcctcgacgacaacgggaacttgaaggtttcagatttcggtctcagcgccgtaactgaacagatccgagccgacggcatgctgcacaccttgtgtgggaccccagcttacgtcgcaccggagatcttgtcaaagaagggatacgatggagctaaggtggacgtgtggtcatgcggcgtcatcctcttcgtgatgaacgccggttacttgccttttaatgatcccaatctcatggctatgtacaggaagatatacaacggtgagtttcgttgtcctaaatggatgtccagcgatatgaaacggttcatttctcgactc

SEQ ID NO: 233393 - DNA, 411 bp, Gossypium hirsutum
gttgttcttcactttggttagctctacctacgtgccttgcccaccaccaccaaagagccacaagcctacccacaagagcccaccctcggcacctaaacagccagccacttgccccaaagatacactgaaactaggtgtttgtgctgatttgttgggctcggtgcgcgttgttgttggaccgtcgaggaccaaatgctgctcactcatttcgggtttggctgatctcgatgctgctgtttgcctttgcactgctattaaagctaatgtgttgggggttaacctaaacgttcctgtttcattgtctttgctcctcaattcctgcgaaaagcaaatgcctgctggttacaaatgtgcttaagcaatgtttgggtttttcttttacgtgttctttttttttctgggcgtgttaaa

SEQ ID NO: 233394 - DNA, 403 bp, Gossypium hirsutum
gcgattatctgtgctcatggtgcgtgcagctgcagatgatgtccgctttcttctatacatctaccacatgatgatgaagaaactgaatgaacgatccttgtggcaccttgcagttcgtggagctctatattgccgatgtttctgcatcaacgataataactatgccgattggccatctattcctcctattccagataacttgatggtggagggggatgctcctgaagaagaaatactttcaattctggatgttccgcaagggaagatgggacgtgtcattggaagaaaaggggttgccatattgtcaattaaggagtcttgcaatgcggaaattcattttgggggtgccaagggcccaccggacaaggtattcatcttagggcccgtgaggcatgtgaggaaa

SEQ ID NO: 233395 - DNA, 417 bp, Gossypium hirsutum
cttgttggtggcggtaaaattttattgtttgtggaaagaacaaagattcgaagatgagtaagcttcagagtgatgcgcttagagaagctatttcaaccattgtagctcagtcaaaggagaaacagcgcaaatttactgagaccattgaactccagattggtctgaaaaactatgatcctcaaaaagacaagcgattcagtggatctgtgaagctgcctcatattcctcgccccaagatgaagatttgcatgcttggagatgctcaacacgttgaagaggcagagaagataggtttggattatatggacgtggaagcattgaagaaactgaacaagaataagaagttggtgaagaagcttgcgaagaagtatcatgcctttttggcttctgaatctgtcatcaagcaaatcccacgtg

SEQ ID NO: 233396 - DNA, 415 bp, Gossypium hirsutum
ccaagacaaagcttcatattatcttttttagttccgacaaaagaaaacgaaaaaaaagaagaagaaatacaatcgttttctttttgaagtcgggttttagtttttggggtgaaaaaaatgttgggagtatttagcagtgcgatagtgtctccgccggacgagctggtggcggccggttgccgaactccatcacctaagataacggcggacgctctggtgaaacggttccttgagacgaactcctccggcgtgtccatgcacatcggagaccatgtccaattcgcttattctcaccataaagagtctcctttacagcccagatcatttgctgtgaaagacgaaatcttctgcttgtttgagggagcccttgataacttggggagtttaaagcagcaatatggtctggcaaagtcag

SEQ ID NO: 233397 - DNA, 415 bp, Gossypium hirsutum
aaaaagcttatcaagcaacagaagaaggttttttgtctctcgttaccagacaatggcctatgaacccacaaattgctgctgttggatcctgctgcctggccggtgttatctgtggtggaaccctttatgttgccaacctcggtgattcccgtgctgttctagggagagctgtgaaagccacaggaaaggttctagccgttcagctctcagctgagcataatgcgtgtatagaatctgtgagacaggagctgcaatcattacacccggatgactcgcaaattgtagttttgaagcacaatgtgtggcgtgtaaaaggtctcatacagatatccaaatctattggtgatgtatatttaaaaaaggctgagttcaacagggagcctttgtaccctagattccgcctccgtgaaccttt

SEQ ID NO: 233398 - DNA, 403 bp, Gossypium hirsutum
attaaaccttctgcttagcttaaaaaatcttgaatctgcactctcctacttccctcgttatcgtcaatggcttcggacaagaagattaagatcgggattaacggatttggaagaatcggacgtttagttgccagagttgctcttcagaggaacgatgttgaactcgtcgccgttaacgatcccttcatttccaccgattacatgacatacatgttcaaatacgacagcgttcacggtcaatggaagcaccatgatcttaaggtcaaagactctaaaaccctcctgttcggcgaaaaacccgtcactgttttcggaatcaggaaccctgaggagattccatgggctgaagccggggctgagttcgttgttgagtcaactggagtgttcactgacaaagacaagg

SEQ ID NO: 233399 - DNA, 408 bp, Gossypium hirsutum
gtcgctctctgtagccgccgcctgcgtctctctcttcatctctctgaaccaaaaagtctttagcttttcgcttcgagagagaccatgttggtttaccaggatctcatctccggtgacgagcttctttctgactcattcccctacaaggaaatcgagaatgggatgctgtgggaagttgagggaaagtgggttgtgcaaggagctgtcgatgttgacattggtgccaatccttcagccgaaggtgctgatgaggatgaaggtgttgatgaccaagctgtgaaggttgttgacattgttgacactttcaggcttcaggagcaaccccctttcgacaagaagcagtttgtcgtgttcatcaagaagttcatcaagaacttgacaccaaaactggatgcggaaaagcaagag

SEQ ID NO: 233400 - DNA, 404 bp, Gossypium hirsutum
gaaagattttttggggataatgtcatggtgtcagtagcaacacaacaagcttcaaacccggttcacacggttgctaatagtttgagtcttcctggcttacaattgatcacaaaaaaactagaattgcctgtaaagattgtttttccaaggaatttgctcggtggtgcatcccctggtgggaattcagctgacttcatgatgcttggtcttggtgatatggccattcctgccatgcttctagcattagtcctctgttttgatcatcgaaagactagggaaactgtaaatcttttagatttacattcatcgaaggggcacaaatacatatggtatgcccttcctggctatgctgttggattagtaactgcgcttgcagccggcattttgactcactcgccccaacc

SEQ ID NO: 233401 - DNA, 414 bp, Gossypium hirsutum
agttgacaagcttgctttcactggatcaactgaaacgggaaaaattgtccttgagttggctgcaaaaagcaaccttaagcccataacattggagctcggaggaaaatcgccttttattgtttgcaaggatgctgatgtcgacaaggcggttgagcttgcccactttgctttgttcttcaatcaaggacaatgttgctgtgctggctctcgtacatacgtacatgagagtgtgtatgatgaatttttagagaaggcaaaggcacgtgcattgaaacgtagtgttggcgatccatttgtagcaggcattgaacaaggtcctcagattgattcagaacagtttgaaaagatcatgaggtacataagatcaggtgttgaaagtggagcaactctagaaaccggaggggagaggatagg

SEQ ID NO: 233402 - DNA, 413 bp, Gossypium hirsutum
ttccactccaaaaaactgtagctatggctaacaatttcctatatttttgcctcttctgtagcttagttgtattaactcattcagctcctgaggaggctctggtcactcaactccctggcttttctggcacttttccttcaaatcactactctgggtatgtgaatgtcgatcaaaatcatggcaagaacatgttttactattttgtggaatctgaaaggaatccgtcagaggatccactggttctttggctcaatggtggacctggatgttccagctttgacggctttgtttacgagcacgggcctttcaattttgaagcagcaaaggcaaatgagagtttgccccaactacatctcaatccctatagttggtccaaggtctctaacattatatatttagattctccagtcggt

SEQ ID NO: 233403 - DNA, 417 bp, Gossypium hirsutum
gaagattatggagaagagagagaggaatgaacggcctagtgatttagatgaagttcttgtcaagtatcaagtggcgcttgccgatgggactattgtagcaaaaacccctgaagaaggatatgagttttacgtgaaagatggtcatctttttccagcattgacaaaagcaattgtaacaatgaaaaggggagagaaggtcaagctaattgttcaaccgaagtatgcttttggagataaggggaaggaggctactgatgggttcccaagtatcccaccaaattcagttttgaacgttgaactggaattgatctctttcaagcctgttatcgatgttacaggagattctaaggtattcaaaaaaattctgaaagagggagaaggtgctcttgtagcaaatgaaggtgctgcagtaactat

SEQ ID NO: 233404 - DNA, 414 bp, Gossypium hirsutum
atcaatttgctttgaagatcatgttggctatttttcacaaggcatttgctaatccaccagaggagctgaatagtccagcttctcataaatctactaagaagcctaaacagcctgaagaaaccctaaatgatttcctatctcatcaccctcacaacactttctccatgagctttggcaacgctgctgttttggcttatgtccgccatgaacgtgctgcttcagttcatcagaggttgttttgtgggtttgatgacatatactgccttttcttagggagcttgaacaatctatttatgctgaatagacagtatggtctttccaaagggagcaatgaggcgatgtttgtgattgaagcatataggacactaagggataggggtccataccctgctgatcaggttgttaaggatcttg

SEQ ID NO: 233405 - DNA, 409 bp, Gossypium hirsutum
acgaaatggcggaaacatgcgacttcctcgcgacaaagagatgtgcagtggtgagtggaggaaacaagggaattggattggaaatatgtaagcagttggcttccaaaggtgtcaccgtggtgttaactgccagagatgagaaaagggggcttcaagctcttgacaagctcaaggaatctggtctttctcataatctggttttccaccagctcgatgtcactaaccctcttagcgttgcttctcttgctgctttcatcaacacccaattcgggaaacttgatatcttagtcaataatgcagcaattgctggagccaatgtgaactatgagattttaactaccgctgttgaaaaagcgagtgattggccagtaggggaggaagtgtggaatgagattattacaagtgaaac

SEQ ID NO: 233406 - DNA, 409 bp, Gossypium hirsutum
gtgtacttcggtggtcggattaagtaccaagatggtggggcgagtcgtgaggttggtcctgataatgtgtacgattcagctcggttgattcgaagcaagaatgcttccatccctaatgtaaacctcacttgggaatttccagtgagtgaggattataagtatcttgttaggatgcatttttgtgatattgctagtatatcccttggattgttgtatttcaatgtttatgtcaatgaacatttggcatataaagatttggatctctcggttgttacgaattacatgctggcttctccgttttatgctgattttgtggttgatgctggtcgttccggggtcattaccgtaagcgttggaccttctagcaagagcatggggtatacggttgatgcgattctaaacggagtgg

SEQ ID NO: 233407 - DNA, 317 bp, Gossypium hirsutum
ggataaaacccagagtattccaaccattgatctttcagattttccagcacagtatgagaaactaaggcgatcatctgaagaatggggttgtttcagggtagtcaaccacaacatcccttttgaattgatgcaggaaatgaagcaagttgtgagatcattgcttgacctccccatccaaatcaagcaaaacaacgtcgatgtcattgccggcagtggttattgggctcccagtcctaaaaaccctctttatgaagctttgggtctctatgatatggcctgctcccaagctgttcataccttctgctctcagttggatg

SEQ ID NO: 233408 - DNA, 409 bp, Gossypium hirsutum
attagctactccttctcacgactctgcttcaaccacgatggctaaacacgtattggtgccggttgcgaatgggacggaaccaatggaagctgcgattacgatgcgatgtcataaggagatcgggcgctgaactcatggtggcttccgtcgagaaagagcttatcagttgatgcttgccacggggttaacatagtcggtgatgctctggattgtgattgaaaggacaccgggtttgatctaatggtactatctggaggcatgcatggtgctaccaactttaaaggttgcgcaagtctggaaagtgctgggaagaagcaagctgcagaccgacgtctatatgctgacgtgtgtgctatacctgcattagcgctaggttcatggggtctgacgaacggactgaaagctactt

SEQ ID NO: 233409 - DNA, 416 bp, Gossypium hirsutum
tccgttctatttatccttaccaaacaggttgagtgtgcaggaaaagaagcatttacttggagcgggggtggtgcaatctttacaagtggaagcccatttgacccctttgaatatgatggcaaagttttggtgcctggccaggcaaacaatgcatatattttccctggatttggctcgggtgtaataatttccggtgcgattcgtgttcacgatgacatgcttttagcagcctcgtatgctttggatttgcaagtgacggacgaacactacgagaagggattgatctacccaccattttccgatatcagaaagatatcagccaatatcgcagctaaggttgccgccaaggcatatgaactcggtctggcttctcaccttcctcagccgaaggatctggttaaatatgcagagagctg

SEQ ID NO: 233410 - DNA, 260 bp, Gossypium hirsutum
caaatatcaggcggggagggatttgttcctcaacgccaaagcggtgcgcctacgcgggcatcatgacaagtatctcgtcgccgaggaagacgaacaatacgtttcacaagaacgcaacggatgcttcaaaagcgcttgatggaccgacaatttcgtccctgggtcaaaaaacattttccgtttaaaaagcttttacaacaagattttaaccgcctccaaccagccctttttacttgggatgaccgggccaaaggggatta

SEQ ID NO: 233411 - DNA, 413 bp, Gossypium hirsutum
gcagcctatttacaaagcaattaattcttgtaatatagtatttgcactcattagcctgtccctcatggaatcccatcttgagaaacaaaatggagatgtgcttcaaaaatctttcaaagagatgatttctactctccctaaaaagagttgttggggttttcctgaagatcaatatcaatatcaaagtttttggttcagcccaccttttctacaaggagcattgtcggctcaacaacaattccaagctcagccaactgatatcatcctttgtagctttccaagaacaggcacagcctggttaaaatccctcactttcgccactattacaagaacttcatacaatgattccaccacccctttactttccaagatgcctcatgatgttgtgccttacatggagtttgatcatgccc

SEQ ID NO: 233412 - DNA, 404 bp, Gossypium hirsutum
taatgatctcacgaagctggttcagcactgcaggaaacttcagcgtctctggatactggattgtattggagacaaaggactcggagttgtagcttcaacttgtaaagaattgcaggaattgagggttttcccatcggatccatttgatgccggaaatgctgcagtgacagaggaaggtttggtccttatatcatcaggatgtcctaagctcaactcattgctgtatttctgtcatcagatgacgaatgctgccctcatcactgtagccaagaattgcacaaattttatccgtttcaggttgtgcatccttgaccccgtaaaagctgaccctgtaaccaatcagccattggatgaaggttttggggcaattgtccggtctaacaagagtctgaagcggttatcac

SEQ ID NO: 233413 - DNA, 395 bp, Gossypium hirsutum
caatgggtgcggagattgtttcgatggaccaaggccagggtgcaacaacaatacatgtgctgtcggacccggcaacaccgtcactaacaccgccggtcctggtgaggttgcacaagatgttgtctctctgcaatcaactgatgggaggaatcctggcagagtggtaaccgtgcctagattccttttcgcttgtgcaccaacttccctgcttcaaggccttgctaacggtgttgtgggaatggctggtttcggtaggtatagaattgggcttccttcgcaattctctgctgctttcagtttccgaaggaaattcgccatttgtctctcgtctgccaatggtgttattttcttcggtgatggtccatatgtgttcctccctggagttgatgcattat

SEQ ID NO: 233414 - DNA, 324 bp, Gossypium hirsutum
gtcaaaaacaaaaatttcatggctcggaaattcttcgtcggtggcaactggaaatgcaatgggacaactgaggaggttaaaaagatcgttacaacattgaatgaagctgaagttccttctgaggatgttgtggaggttgttgtgagccctccatttgtttttcttacctttgtgaaaagtctgttgcggtctgatttccatgttgctgctcagaactgttgggttcgcaaaggtggtgcttttaccggagaaattagtgctgagatgcttgttaatctgagcattccatgggttatcatcggtcactctgaaagaagggctctt

SEQ ID NO: 233415 - DNA, 381 bp, Gossypium hirsutum
cggaactcgactctctcgatcccactcttctagaactctcttgattccagtgtttttccctgcacttccgatccactgaatcaatttccatactcaccggaaatggcagccgttacagcagctcagccgcgctcttccaagacagagtcgtacgttgacaacaagcgcaaagaagacatccgccaagccaacatcaaagcagctcgagccgttgccgacgccgttcgaactagcttaggtcctaaaggtatggacaaaatgatctcgaccgccaacggcgaagtcatcataaccaacgacggcgccactatcttgaacaagatggaagtcctccagcccgccgctaaaatgctcgtagacttatctaaatcgcaagattct

SEQ ID NO: 233416 - DNA, 411 bp, Gossypium hirsutum
  unsure (1)..(411): unsure at all n locations
gcgttctcacaccccgacggttggattttgatcagacggtaatcatgccgatcagaaacatagccgttggccggcctgaagaagctactcatccagatgctcttaaggagctttagctgaattcatatcaacgttaatctttggttttgctggatctgggtcaagcatggcttttaataagctgaccgacggcggtgcaacaactncggctggtctcgttgcccgctctctagctcacggattttgcgcttttcgtcgctgtctcagtcggtgctaacatctgccgtggccatgtgaatcccgccgttacattcggtgctttcgttggcgggaacattactctnttacgtggtatcctttattggattgctcaactccttggctcaaccgtcgcttgcctgttacttaagt

SEQ ID NO: 233417 - DNA, 410 bp, Gossypium hirsutum
gccgcctgcgtctctctcttcatctctctgaaccaaaaagtctttagcttttcgcttcgagagagaccatgttggtttaccaggatctcatctccggtgacgagcttctttctgactcattcccctacaaggaaatcgagaatgggatgctgtgggaagttgagggaaagtgggttgtgcaaggagctattgatgttgacattggtgccaatccttcagccgaagatgctgatgaggatgaaggtgttgatgaccaatctgtgaaggttgttgacattgttgacactttcaggcttcaggagcaaccccctttcgacaagaagcagtttgtcgtgttcatgaagaagttcatcaagaacttgacaccgaaactggatgcggaaaagcaagagtccttcaagaaaaacatt

SEQ ID NO: 233418 - DNA, 417 bp, Gossypium hirsutum
tttgttttctctccctccaattaagatgcagatcttcgttaagaccctgaccggcaagaccatcaccctcgaagtcgagagttccgacacgatcgacaacgttaaggcgaaaatccaagacaaggaagggatcccaccagaccaacaacgtctcatcttcgccggaaaacagctcgaagatggccggaccttggccgattacaacatccagaaggagtccaccctccatctcgtcctccgtctacgtggtggcatgcagatcttcgtcaaaaccctgaccggcaagaccataactttggaagtcgaaagctctgacaccattgacaacgtcaaggcaaagatccaagacaaggaaggcatcccaccagaccagcaaaggctcatatttgccggaaaacaactcgaggacggtcgcac

SEQ ID NO: 233419 - DNA, 416 bp, Gossypium hirsutum
gttccgagaaaagaccgccaagatctctgtcacaatcacaggctgaaagttcttacaaataaactccgatcaagccacttctgaaattcagatattttgtgaggtatcaggatgaaagcactcattcttggcggtggatttggaacacgattgagaccgttgactcttagcgtcccaaagcctttggtggattttgctaacaaacccatgatactgcatcagattgaagctctcaaagctattggagttactgaagttgttctggccatcaattaccagccagaggttatgttaaatttcctaaatgaatttgagaaaaagcttggcattaaaatcacctgctcacaggagactgaaccacttggcacagctggtcctattgctctggctagagacaagttgatcgatggctctgg

SEQ ID NO: 233420 - DNA, 412 bp, Gossypium hirsutum
gagaagctgatgaagcgcccgatacggttactggggacattgtattcgtcctgcaacagaaagatcatcctaaatttaaacgaaagggtgatgacttatttgtagagcatacattggcacttactgaggccctttgtggctttcagttcatactgactcacttagatggcagacaacttctgattaaaacccaacctggggaagtcgttaagcctgatcaattcaaagcaataaacgatgaaggaatgccgatttatcagaggccatttatgagaggtaaactgtacattcagttcactgttgacttccctgactcgttgaccccggaccagtgcaaggcactagaggctgtgcttcctcccaaggcatcggttcagctgactgacatggagctggatgagtgcgaggaaac

SEQ ID NO: 233421 - DNA, 352 bp, Gossypium hirsutum
ctcatatctaatccccaatttctctcttctgctctaggttccttcctgttctcttaggattcttgtggtctgttcaaagcgtcatggcatcgaagcggattttgaaggaactcaaggatttgcaaaaggatccacccacttcttgcagtgcaggtcctgtagctgaagacatgtttcattggcaagcaacactcatgggcccttccgatagcccttatgcgggaggtgtatttttagttagtattcattttcctccagattatcctttcaagccccctaaggttgcatttaggaccaaggttttccatccaaacatcaatagcaatgggagcatttgtcttgatatcctaaa

SEQ ID NO: 233422 - DNA, 413 bp, Gossypium hirsutum
cgtggttatagatagggagcaaggcgggagggaaacgctggaggagaatgggattaaacttcatgcactttttactttaactgagatggtcaaggttttaagagctaaagggaagctggaggaagagatggaaagtttggttatgaagtttttggaggagaataagaaagtacccgtgcctaaggttgagaaagtgaggattaagtgtctggggtatcaagaaagggctaagatttctaagaatccaactgggaaaaagctgtttgagattatggttaagaaagagagtaatctctgtttggcggctgatgttgccactgctgctgagttgcttgatattgctgagaaggttggacctgaaatttgcctattgaagacccatgttgacatattccctgatttcactccagagt

SEQ ID NO: 233423 - DNA, 409 bp, Gossypium hirsutum
gttttaagctatttagtttctaaatttagttatggcgtatctatttcaagttaaaattcattactagaagccgggttttcctttttaggttggtgcagatgatgggaaagttctgaatcagatcattgattcattgacatctatagctaatccaactgaaaatcatggaaccccaagtcaacaactgaataagatttccctcaaagttggtaagctccaggagactgggatgaagaaagactccgaatccgaccccaaaaggaagaagtcggtgcttatactcggcgccggccgtgtttgtcaaccggcttgcgagctgttagcctcaataggaaccgcttcttcttgccaatggtataaaagttgcgtccaaaatgattccgaagagcagatggacgttcatgttatt

SEQ ID NO: 233424 - DNA, 414 bp, Gossypium hirsutum
gtgccacatcgccagttcccatggtaggatatctatcaatcaaagaaacattggtttttgtttgtgtttaaatttcggatctttgcaaaagaaaggagaaagaagaaatgcttgcagttttcgacaaatcggttgccaagagcccagatgctcttaatgctccagataaccctcaggctgtatctgctctcaaagatggcttcttacctaatcactttgcctctgtttatcccggttgtgtctccatcagtctcggctcttctggggttatggcttattctcttgaaaaacagaacccacttctccccagactgtttgcggttgtggatgacatattctgcttgtttcaaggccacattgagaatatagccgttcttaagcaacaatatggcttgaacaaaacagcaaatgagg

SEQ ID NO: 233425 - DNA, 399 bp, Gossypium hirsutum
ctcattcactacaacatacttaaaatcatggttcccggtgagttaagaggacttcactacctagcaccagaaaacccgatcctgattgcagccaaccttggcatgatgcaaaactctataccatcttttcatttcaatacatttgaaagcagcctaccgaattcccacatcgtaccatctgcccaggaatttgctgcggtgtcctcaagtatcagcaacacttcaacttcaaatgaggctggggagcagcaggtctatttcatcgacgaaagggaacagcggggaatgatatctaacagagaatctgctcgtaggtcgaggatgcggaaacagaagcacctggatgaactttggtcacaggtgatcaggctccgtaacgagaaccagagtctcctagac

SEQ ID NO: 233426 - DNA, 412 bp, Gossypium hirsutum
aacctcaattcctctctttgaaagtgtacggtttaaacgtatacccagattttaattttgttgatttgggtttaacttgaagagagaaaggaaatcttttcaatggggagtttaggagctcttgtgaaacacccagatgatttttatccattgttgaagctgaaaatggcttcaaggcatgccgagagacagatcccatcagagcctcactgggctttttgtttctctatgcttcacaaagtatctcgtagtttcgctctcgttattcaacagctcgacaccgagcttaaaaacgccgtctgcatattttatttggttcttcgagctcttgatactgttgaggatgacactagtgttgcaacagatatcaaagttcctatccttaaagaattttatcgccatatatatgatc

SEQ ID NO: 233427 - DNA, 415 bp, Gossypium hirsutum
aaatctgctcaagctttgttgagactttgaactgagcttcgctgaattttcgtgatcgtcgagaaagaaaatgatgggaaggaaattcttcgtcggcggaaattggaaatgcaatggaaccactgaggaagtgaataagattgtgagtactttgaatgctggagaggtgccttctccggatgttgttgaggttgtggttagccctccatttttgttccttcctttggtaaaaacttcactgagacctgagttccaagtcgctgcacaaaattgttgggtcaagaaaggaggtgctttcactggtgaagttagtgcggagatgcttgtcaatttgagcattccttgggttattattggtcattctgagaggagacttattttgatggagtcaaatgagttcgttgcggataaggtt

SEQ ID NO: 233428 - DNA, 413 bp, Gossypium hirsutum
ctcaatccttcgaaatcgtagctttggaagcatggacttcatagctactatcctgtttctagctcttgtcatctcctccgccaaagctttagacccttgcggctctcagccagatgactcggaccttttggtcatcccaatctatggcaaatgttcaccattcaacccacccaaacctgactcatggttcaacacagtcatgaacatggcatcaaaagacccagcaagggtcaagtacttgtcgagccttctagcccaaaagaccactgcggttcccattgcttcaggccaacaagtcctaaatattggcaactatgtcgtccgggtaaagattggcactccgggtcagctcatgttcatggtattggacactagcaatgatgtggcttgggtcccatgctccggctgcacca

SEQ ID NO: 233429 - DNA, 412 bp, Gossypium hirsutum
gtttcataaataatcaaaatttacgttaacaaatctgcaagttttctagcagatcgccacaaagggaattttgaaccttgtggggggttgtttttaatagaaatggtgaaccatggggacccaggaaacgtgacgggagccatgccctgatcgaattctcgacgacattggtggtgcttttggcatggctgctggtggaggtgcacacttccacttcttgaaaggcacatataactgccctagtggttctcggttgctcggaagaactcaagcagtgcgtatgaatgccattcgtgtcggcagtagttttgacggttgaagcggtctgtactgcacctttgattgcactatggtatacgtacgacagaaagaagatgcttggaactccattatagtcggtgctcgaacagga

SEQ ID NO: 233430 - DNA, 411 bp, Gossypium hirsutum
gcttacattggatgggataaatcagatggcttatcctcaaacttggttttttcttacagttgccgcaatctgtgtcattacacaattaaattacctcaacaaggccttggatacattcaatgccgagattgtttctcgggtatattatgtcatgttcacaactttgaccattattgctagcgtaatcatgttcaaggattggtcaggtcaaaacgtgagtagtattgcctctgagatttgtggattcatcactgtgctctctggaactatcatactttatgccacgagagaacaggaaccacctactgcgaggggaacagttacatggtatgttagtggggattcgatgaagagtgctgaggatgaacatttaatcactctacgcagttcggagtattacaagccatgaat

SEQ ID NO: 233431 - DNA, 373 bp, Gossypium hirsutum
aaaaaatgagctttcttcaggccttgtcaattttccttttgcttttgttgtatgtagtcgtaggatcagctgagcagtgtggaaggcaagcaggcggtgctctttgccccggtggtctatgttgtagccaatttggctggtgtggcagtactgctgactactgcacagttcctggttgccaaagtcagtgcagcggtagtggccctgcccctgggcctggtgggctaaccaatcttatatcaagagagacctttaatcagatgcttttgcataagaacgatggggcttgtcctgcccgtggcttctatacatatgatgctttcattgctgctgcccgttcttttcctgcatttgctacaactggtgaccaagc

SEQ ID NO: 233432 - DNA, 406 bp, Gossypium hirsutum
cggacgcgtggagggattttttcatttgtttcttcttacgctcgattacctcacgaaaagagaaaatgaccaagtgttacccaactgtgagcgaggaataccagaagtcagttgaaaaggctaagaggaagctcagaggtctcatcgctgagaagaactgtgctccactcatgctccgtctagcgtggcactcagctggaacttttgatgttaagaccaagacaggaggtccattcggaaccatgaagcatcctgctgagctcgcacatgctgctaacaacggccttgatatcgccgtcagacttctcgagccgatcaaggagcagttccctaacctcacctacgctgacttctatcagctcgctggtgtcgtcgccgttgagattactggtggacctgaaattcc

SEQ ID NO: 233433 - DNA, 400 bp, Gossypium hirsutum
  unsure (1)..(400): unsure at all n locations
cagcgcttcataatcgtcgatttcattaactctttgatctgtgccgacaaacccaaaattcgcggggcgtcgttttggtggaaaacgacggagaaatacaagtccggttcctccactttggtcgtgggcaaacaaatcctcctagaaaattacccgctcggcaaaacccttaagaacccacacttgccagcgttggccgggaaattcaacggcggaagtacggttagcgttattctcacggacaaagacgttgacgacgatgggttctgcatgaggtgcgggactcacggatcgaaccgnggtgctcggattcgaggtacttttatatgaggggaaactctgagactcaatagcctggtcaatgcgcctggacatttcaccaggctatttatgggcccca

SEQ ID NO: 233434 - DNA, 414 bp, Gossypium hirsutum
gaagaaatggcttccgcggatagcaatctccttatcctcaatttcctaaccttggcttcattgtccctattctatgccgacaaagctttttgtattcggattccagatcgggcctccaccacgcctcgggaactgtcagatcagtctctgaaaaccgcggtttttgccctcggtagtttctggagatcggaagctgtcttcgggtgcttaaacggtgtcgttcgaactacttctggttatgctggcggatccaaaatcaatcccgaatacagaagcttaggtgaccacgccgagtctgtaatggttgaatatgatcccaaggagattaatttcaggctacttctggaggttttttggtctagccatgacccaagacaggtttttggccaaggtcctgatgtaggtccccagtac

SEQ ID NO: 233435 - DNA, 404 bp, Gossypium hirsutum
gatggctatcaagagccaccattgctgcttcagctttatctttctgttattaccattactcctacagcttcattctgtcaaaggtgatctccagttgaactactatgctcaaagttgccccaatgctgaagagatcatcaaacaacaagtcatcaagctctacaacaaacatggaaacacagctgtttcttgggttcgaaatctcttccatgactgcatggttaagtcatgcgatgcatcgttattgttagagacggtgaatggaattgaatcggaacaaaaatcagataggagttttgggatgagaaatttcaagtacgttaagacaattaaagatgctctggagcaagaatgtccagggacagtttcctgcgctgatatcgtctctctttctgctagagatg

SEQ ID NO: 233436 - DNA, 393 bp, Gossypium hirsutum
ttaccatcttaggtaactaatgttccccgttttaagaattatatcaacttctctatattaatgtttaaaacggggaacattagttacctaagatggtaatgttcccaaaaataaaccagattttttcaatacatcaaaacataggttgctgaaaacataaaatatagcaccagcagaagctgttaaacatcggcaaaatactatcttaatatttgatttagtcgacttcttctatcttaggtccagcaccgctgccaccggtaggtggggcatcctcgtccatgccaccacccatgtcagcccctgcaccttggtacatcttggcaatgataggattgcagatgctctcgagctccttcatcttatcctcgaattcatcagcctcggctagct

SEQ ID NO: 233437 - DNA, 405 bp, Gossypium hirsutum
aatgactttcggggatagcaatctccttatgctaaatttcctaaccttgggtgcgttggccctattctatgccgacaaagctttttgtattcggattccagatcgggcctccaccacgccttgggaactgtcagatcagtctctgaaaaccgcggtttttgccctcggtagtttctggagatcggaagctggcttagggtgcttaaacggtgtcgttcgaactacttctggttatgctggcggatccaaaatgaatcccgaatacagaagcttaggtgaccaccccgagtctgtgatggttgaatatgatcccgaggagattaatttcaggctacttctggaggttttttggtctagccatgacccaagacaggtttttggccaaggtcgctgttgtagtcccca

SEQ ID NO: 233438 - DNA, 413 bp, Gossypium hirsutum
aaagaaaatgggaaaaggaactggaagctttggaaagagaaggaacaagactcacacgctgtgcgttcgatgtggtcgccgaagcttccatctacagaagagccgttgcggtgcttgtggctaccctgccagtcgcatccgaaaatataactggagcatgaaggctattagaagaaagaccaccgggactggccgcatgaggtacctccgacatgttccccgaaggttcaagactggctttagagaaggtactcaagcaactccaaggaagaagggagcagttgctgcttcgtaagttaatttgtgatgttttcgttttgttcagagagattcctgaatttagaaacgataggtttttgggtttctttcaactgtgttactttcttatttttcaccaaatgtctacaaacggg

SEQ ID NO: 233439 - DNA, 414 bp, Gossypium hirsutum
tactcactcaacattcccatttccaatctccagctcccaaggtaaatatgccgatcagaaacatagcagttggccggcccgaagaggcgactcaccccgatgctctcaaggcagctttggctgagttcatctcaaccttgatcttcgttttcgctggatcgggctcaggaatggcttttaacaagttgaccgacaacggagcaacaaccccggccggtctcgtagccgccgctctagctcatggcttcggtcttttcgtcgctgtctccgttggcgccaacatctcaggtggccacgttaaccccgccgtcaccttcggtgctttcgttggcgggaacatcactctcttgcgcggcattctttactggatcgcccaactcctaggctcaaccgtcgcttgcctgttgcttaagt

SEQ ID NO: 233440 - DNA, 414 bp, Gossypium hirsutum
gagaaagcgagagaagaagagaatcgatttttttattcaaaaaaagatatccatggcagagacagcaaacaactctaaacctaaaaactcaagatggtttctcaatggaatgactgcccttgtcaccggtggcactcgaggaattgggcatgctatagtggaagaacttgcagggcttggggcttctgtttacacatgttcaaggaatggagatgagttgaataagtgtttgaaagaatgggaaagcaaaggatttttggttaatgggtcagtttgtgatgcctcgtctaaagaccaaaggctgaaactgatagacaacgttgcctctgttttcaatgggaagcttaacattcttgtcaataatgtgggaacaaacatcagtaagccaacagttgaatacactgcggaagaata

SEQ ID NO: 233441 - DNA, 416 bp, Gossypium hirsutum
atttattcttttctttcaactcaaagtcccaagtagtattagaatcatgggtgttgtcacttataactatgactctacctcccctgtcgctcccgccaggcttttcaaggccttcgttcttgaagctgacaaggtctggcccatagctgcccctcatgcaatcaagagtattgaggttgaagctaatcctggccctggaagtatcgtaaagatcaactttgttgaaggccttccattccaatatatgaagcaccagattggaggacatgatgaaaacaaattttcatacagttacagtttgattgaaggtgggcctttgggggacaagcttgagaaaatcaactacgagaataagtttgaggcagctgtaggtggaggaagtgtgtgcaagagctcgatgaaattttacacttttg

SEQ ID NO: 233442 - DNA, 417 bp, Gossypium hirsutum
gtttcagcgaactgagtcagtacccggaccagttaacgaacgaaagaaagttcaccatggggtcggtccccaatccgggtgagttaaccgagttaactcagcctagtttagatgagttccagcatcaaacatctcttatggcgggctgcactcttatgtggaaagaactctccgatcacataagttcacttgaggcaaatctgatgagacaatcggaggccttgaaacgcaaaatcgaagcactagactcggagaccaagacctcactcgactcactcaagaagagagaactcagcatcgacgacagcgtcaagattgcagtcaaccgagtcgagcttataaaaaaagatgctttgaaaaccttaaacgacgacaatcccgacggagaagttgacaacggagacggccttttgcaaa

SEQ ID NO: 233443 - DNA, 361 bp, Gossypium hirsutum
aggccacccgttccgaaaatccggaggaccgagtgccgatcgcgcccggtcgtactcataaccgcatggggttttcaaagtgaacagtctctgttcaatggaacaatgtaagcaagggaagtcggcaaaatggatccgtaacctcacgaaaaggattggctctgagggcttggcacagaggtcccaatccctaacccgtctgctggcggcgcactgtttgagctgctcccgcggcaagagcgggtcttcgtgtgcccgccggtggactgactgggaacggttcccttgggggccttttccgggcgacgaacaaactacttataactggtacggacaaggggaattcgactgtttaattaaa

SEQ ID NO: 233444 - DNA, 413 bp, Gossypium hirsutum
gccggtagaaaaatccagaaagtatgggtcaaatgcagagaaaaggttgttccacacggctgtgacagcttctgactcggtttacaacacttggcagtgtcgagttatgtattactggttcaagaagcataagaatggacccaatttggatatgggcgggtttactaggatcttgcactctggtaaacctgacaactacatgaatgagattcccactttcattgctcagcctttaccagctggaatggatcagggttatatagtcctgaacagaccctgggcatttgtgcaatggcttcaaaaagctgacatcaaagaagattacatactgatggcagagccagaccatattattgtgaagcctataccaaacttatcaaaagatgggttgggtgctgcatttcctttctttt

SEQ ID NO: 233445 - DNA, 404 bp, Gossypium hirsutum
atacaaatacccatttcactaccatcaaaccacatcccacagacatgggtgcccacgaagaagaagccggaggtgaagagtacttgtttaagatcgtgctgatcggtgactcagctgtgggaaaatcgaaccttttgtcacgttttgctaggaacgagttcgacaataactcaaaggcaactattggagtagagttccaaacccaatgcgtggaaattgatgggaaagaagttaaagcagatctgggacaccgctggtcaagaaaggtttcgagctgttacttctgcttactatagaggagctgttggtgctcttattgtttatgatattactaggaggagtagctttgacagcattaaacgttggcttgatgaacttaccactcattgtgatactacattgac

SEQ ID NO: 233446 - DNA, 414 bp, Gossypium hirsutum
ccgttttgttcctttggatctgtgaggcagccgccggttcctttgaccaccaccaccgccacctctctgtgatcaaccttcactctctttttcaaggaaattaactgaaatggctggaggattaatccaccaggttttaaggaggaaatttcaatcacagtctgctgttcaagctttatcatggttttcatcaaggaaagttaatgacgatgcgggttctgctggtatgaggactgttgcactccttggagctggtgtttcaggtttactaggttttgcaacagtagcatctgctgatgaggcagaacacggtttaagagttgcaaattatccttggcctcacgcaggcatcctcagttcatatgaccatgcttcgattcgtcgcggtcaccaggtttaccagcaagtgtgtgc

SEQ ID NO: 233447 - DNA, 382 bp, Gossypium hirsutum
ctgagtttgaagcttcaagtgctaaaatctacggatttgcgggtggagaagacgagagcccatctctctgcttcaaagctcctgtccaggtaaaattctcttcttcccttgcgttgagttctttgctgttcaatcgccatggcttcaaagcggattttgaaagaactcaaggatttgcacaaagatccacccacttctgtgcagggctgccccactagctgaagacatgtttcattggccagcaacaatcatgggaccctcagatagcccttatgctggaggtctggttttagacactatccatttccctccagattatcctttcaagcctgctaacgtcgcgtttacgaccaaagtctttcatcccaacatcaacagcaat

SEQ ID NO: 233448 - DNA, 368 bp, Gossypium hirsutum
tgactcaacattcccatttccaatctccagctcccaaggtaaatatgccgatcagaaacatagcggttggccggcccgaagaggctactcaccccgatgctctcaaggctgctttggctgagttcatctcaaccttgatcttcgttttcgctggatcgggctcaggaatggcctttaacaagttgactgacaacggagcaaccaccccggctggtctcgtagccgccgctctagctcatggcttcggtcttttcgtcgctgtctccgttggcgccaacatctcaggtggccacgtcaaccctgccgtcaccttcggtgcttttgttggcgggaacatcactctcttgcgcggcattctttactggatc

SEQ ID NO: 233449 - DNA, 426 bp, Gossypium hirsutum
caaagcttcatattatcttttttagttccgacaaaagaaaacgaaaaaaaagaagaagaaatacaatcgttttctttttgaagtcgggttttagtttttggggtgaaaaaaatgttgggagtatttagcagtgcgatagtgtctccgccggacgagctggtggcggccggttgccgaactccatcacctaagataacggcggacgctctggtgaaacggttccttgagacgaactcctccggcgtgtccatgcacatcggagaccatgtccaattcgcttattctcaccataaagagtctcctttacagcccagatcatttgctgtgaaagacgaaatcttctgcttgtttgagggagcccttgataacttggggagtttaaagcagcaatatggtctggcaaagtcagcaaatgaagtgatattg

SEQ ID NO: 233450 - DNA, 425 bp, Gossypium hirsutum
cttctcccttttaaaccgctctccttcgccgccgcttaatttcctaaacgccgaaacccccaaccccatttccaacattacaaatggcttccttcaccatttcttcgccgtctaaatcgtcgtcgtttttgtcttcttctttatcttctctcttcactccttcctctcttagccgtaaaagcttcgctttcaatatctctcgttctcctatctgcgctcccaacagtttgaaatgtgaactgcctcaacctgtgaattatgaaaatgggataccaacgatcccagtcctcaatgaaaggatactgcccaagttcgtggaatcaaatcgaatggataaagctgttaacagaaatggtgccaagctcaaattgttttctggcaccgccaatcccgcactttctcaggaaattgcttggtacatgggc

SEQ ID NO: 233451 - DNA, 426 bp, Gossypium hirsutum
gtctttccctccctccctctcagatcaaagcttcaaaatggcatttgtcaaggctcagaaaaccaaagcttactttaagcggtttcaggttccatacaaaagaaggagagagggaaagactgactaccgggctaggattcgcctaatcaatcaagacaagaataagtacaacactccgaagtaccgattcgttgtccgatttagcaacaaagatgtcaccgcacaaatagtttctgctaatattgctggtgatatggttcttgcttctgcttactcacatgagcttccacgatatgggcttgaagtgggtcttacaaactatgccgcagcttattgcactggtttgcttgtggggcgccgcgtgcttaagatgcttgaaatggatgaagagtatcagggcaatgtagaggctactggagaggactt

SEQ ID NO: 233452 - DNA, 393 bp, Gossypium hirsutum
tttgctttgaagatcatgttggctatttttcacaaggcatttgctaatccaccagaggagctgaatagtccagcttctcataaatctactaagaagcctaaacagcctgaagaaaccctaaatgatttcctatctcatcaccctcacaacactttctccatgagctttggcaacgctgctgttttggcttatgtccgccatgaacgtgctgcttcagttcatcagaggttgttttgtgggtttgatgacatatactgccttttcttagggagcttgaacaatctatttatgctgaatagacagtatggtctttccaaagggagcaatgaggcgatgtttgtgattgaagcatataggacactaagggataggggtccataccctgctgatcag

SEQ ID NO: 233453 - DNA, 425 bp, Gossypium hirsutum
  unsure (1)..(425): unsure at all n locations
attgcttctgattggaagaagaatgagcacatgacagaagatatgttctgtcacgaattccatcttgtcgatcttcgagtgatggaaaattgcttgaaggttaccaatggagtggatcatgttttcaacctcgccgctgatatgggtggcatgggcttcatccagtccaaccactcggtcattatgtacaacaacacaatgataagtttcaacatgctcgaggctgctcgaatcagtggagttaagaggtttttttacgcctccagtgcttgtatctatcctgaatttaagcaattggaaactaatgtgagcttgaaagaatccgatgcctggcctgctgagccacaagatgcttacggcttggagaagcttgcaacggatgagttgtgcaagcactacaccaaagacttcngaattgaatgtcg

SEQ ID NO: 233454 - DNA, 405 bp, Gossypium hirsutum
tgccctcaactcttctccaaactcatcctcatcggcgcttctcccaggtttctcaatgacgaaaattaccacggagggttcgagctaggcgagattgaggaagtattttcagcaatggaagccaattacgaagcttgggtaaacgggtttgccccagtgttggtgggggccgatgtgccgacggcggttcgagagttcagccggacacttttcaacatgagaccggacatatcattgttcgtttcaaggacgatattcaacagtgatctgagaggggaactcgggaaagtgagagtgccgtgttgcgtgatccagacggcgaaagatgtgtcggttccggcatcggtggcggagtatttaaagacccatcttgggggacgaaccacggtggagattttgagaaca

SEQ ID NO: 233455 - DNA, 405 bp, Gossypium hirsutum
ctctctgtagccgccgcctgcgtctctctcttcatctctgtgaaccaaaaagtctttagcttttcgcttcgagagagaccatgttggtttaccaggatctcatctccggtgacgagcttctttctgactcattcccctacaaggaaatcgagaatgggatgctgtgggaagttgagggaaagtgggttgtgcaaggagctgtcgatgttgacattggtgccaatccttcagccgaaggtgctgatgaggatgaaggtgttgatgaccaagctgtgaaggttgttgacattgctgacactttcaggcttcaggagcaaccccctttcgacacgatgcagtgtgtcgtgttcatcaagaagttcatcaagaacttgacaccaaaactggatgcggaaaagcaagagt

SEQ ID NO: 233456 - DNA, 421 bp, Gossypium hirsutum
ggagacctggaaagatagttgataaggccacagctgaacacttattcgaagtgatcaattcgagagaggatgtgttgaggagactgattaggcggtgtgcttacttgaagtatgttgaggcaagattaggcgataggactctgtatgcagatgagattttgaaagatggtttctgcttgaatatgattgacactcctctttgccctttaaaggttgttactaacttgcaagaagctgtttgggatgctgatattgtaattaatggcttgccatcaaccgaaactcgcgtggtgtttgaggaaattagaaggtattggaaagaaagaataacagtgcccataatcatatctctggcaaagggtatagaagctgagttggagcctgaacctcgcataataactcctaccctgatgatcagtcg

SEQ ID NO: 233457 - DNA, 272 bp, Gossypium hirsutum
gcaaaaaggaagtacgtctaaaacagtaacacatttgatacatttttgatcaatttcactgccatggcaactcaaacaccccatatcatcattcatccgagtcctggtatgggtcacctaatcccactcattgagttctctaaacgactcgttcaccaccacagtttaaccatcaccggtcgtattcccaaccgccggttctttaacaccacttaaaaaatcgccgttggatcccttcccgccctcatttattaccttttttttccttccgg

SEQ ID NO: 233458 - DNA, 414 bp, Gossypium hirsutum
tttgtttgcaaaagccagcgccctctatttccagctccgtttctccaacagttccgttcccaccgccgcaccgtcgatttccacctgagtttctccgtccatggctgcaacggactctcctctaacgaccaaggtttgtatcattgggagtggccccgccgctcacacggccgctatctacgctgctcgtgctgagctcaagcctattctttttgagggatggatggctaacgatattgcgcctggtggtcagcttaccaccacttccgacgtcgagaacttccctggattcccggatggtatcatgggttcggagcttatggagcggtgccggaaccagtcgcttcggtttggtactactatctttaccgaaactgttgacaaggttgatttttcttcgtctgcgtataagat

SEQ ID NO: 233459 - DNA, 392 bp, Gossypium hirsutum
  unsure (1)..(392): unsure at all n locations
cgatctccttacagttaccgtacacactcacacacacattcactgaatgggtcgagtcatccgagctcaacgtaagggtgctggttccgtattcaaggcccacacccaccaccgtatgggtcctgctcggttccgcagcctaatacttcggtgaacgaaatggctaccttaagggtgttgtgaccgatgtcatccactaccctggtcgntgctctcctttagcccgtgttgtctctcgttaccctttacgttacaagaagcagaaggaacttctcgttgccgcacagggtatgtacactggacagttcctctattgtggtaagaaagctactcttgtggtcggaaatgtattgcctcttagatctatacctgaatgagctgtcgattgcaac

SEQ ID NO: 233460 - DNA, 313 bp, Gossypium hirsutum
gttatctctgagggtgtcttaataaacgccttcgatttactttcggtttccatttacttctttatttctacgtttttgaatttttagtaagcgaaaatgagagagtgcatttcagttcacatcggtcaggctggtatccaagtcggaaatgcctgctgggagctttactgccttgaacatggaatccagcctgatggccagatgccaagtgacaagactgtcggaggaggtgatgatgcttttaacacctttttcagtgaaactggtgctggaaagcacgtccctcgtgctggctttggggatcttgagccta

SEQ ID NO: 233461 - DNA, 417 bp, Gossypium hirsutum
cggttgccccacggggaagagggaaaacctgaaaagggggaaaaaacgcggcggcgtttgcgctccttcttcttctttctccttccccctctctctttctcagaagctcctctttcgttcttttgttcactaagtattgtaaaagatggccgacggtgaggatattcaacccctcgtctgtgataatggaactggaatggtgaaggccggttttgctggtgatgatgctccaagggcagtttttcccagtatcgttggtcgtccccgacacactggtgttatggttgggatgggtcagaaggatgcctatgtaggagatgaagcacaatctaaaagaggtatccttactttgaaatatcctattgagcatggtattgtgagcaactgggatgatatggaaaagatctggcatcatac

SEQ ID NO: 233462 - DNA, 424 bp, Gossypium hirsutum
attttccatgccttgtccaagcggaatcctcctcttcctcatcctaatctccctcccagcttcttcattcgccgtagccgatgacgacaatctatccgcgtaccaagctcttcaacagtacgacttcccagtaggcatccttcccaatggcgtggttgggtacgaattgaacagggaaacgggcgagttttcagcttatttgagtggaacctgcaagtttgacattgattcataccaactcagttacgaatccaccataaaaggagtgatctccccaggcaggataacaaatttgaagggagtgagcgttaagatcctcttcttctggcttaacatcggtgaagtgatacataatggggaccagatggagttctccgttgggattgcgtcggctaacttccctattgacaacttttatgaatct

SEQ ID NO: 233463 - DNA, 328 bp, Gossypium hirsutum
gttagtgaatccaccccaagagctgcagagtccagcttcactcacttcatcaatgaagcctaagcttccctttgaaatccttaatggttttgtctcttcaaatcccaccaacgctttttcaatgcgggttggatcttcggcttctttggcttattgtccaacccaacattccttcctccacttataaaaggttgtttagtggagtggatgaaatgcattgcatattcatgggtaatttgaacaatctatgtagcctcttaaggcaatatggtctatcaaggggcaccaatgaagcaatgttcatcattgaggcatataggccccttag

SEQ ID NO: 233464 - DNA, 427 bp, Gossypium hirsutum
ctcaattatccatttattcttttctttcaactcaaagtcccaagtagtattagaatcatgggtgttgtcacttataactatgactctacctcccctgtcgctcccgccaggcttttcaaggccttcgttcttgaagctgacaaggtctggcccatagctgcccctcatgcaatcaagagtattgaggttgaagctaatcctggccctggaagtatcgtaaagatcaactttgttgaaggccttccattccaatatatgaagcaccagattggaggacatgatgaaaacaaattttcatacagttacagtttgattgaaggtgggcctttgggggacaagcttgagaaaatcaactacgagaataagtttgaggcaactgtaggtggaggaagtgtgtgcaagagctcgatgaaattttacacttttg

SEQ ID NO: 233465 - DNA, 422 bp, Gossypium hirsutum
aagcaaagcagtaaaaagaaaaagtagcgaaatggctgacgtcgctccgggaaacgccggcggtcaatttggagattttccgacgattcatacacatggaggtcagtttattcagtataatatttttggaaatttgttcgaggtgacgtctaagtatcggcctccgatcatgccgatcggtcgtggagcctacggcatcgtttgctcggtgttgaattcggagacaaacgagatggttgcggtaaagaaaatcgccaacgcttttgataatcacatggatgctaagcgcacgcttcgtgagattaaactccttcgacatttggatcacgaaaacgttattggaatcaaagatgtgattcctccgcctttaaggagggaatttactgattgttacattgcgactgagctcatggataccgatc

SEQ ID NO: 233466 - DNA, 423 bp, Gossypium hirsutum
cttcttcaatctaagcttctcagagacttaaaatggctcgcaagaagatcagagaatacgattccaagagacttctcaaacaacacctcaaacgcgtcgctaatatcgacctccaaatctgttctgctcaggtgactcaatctactgatttcaccgagttaacgaacgaacaaccatggctttcgtccaccagattagttgttaagccggatatgttgtttggtaaacgtgggaagagtggcttggttgctctcaatttggatcttgctgaagttgctgaattcgtcaaagctcgcctcggcactgaggttgaaatgggcggttgcaaagctcctataaccacattcattgttgaaccttttgtaccccatgaacaagagtattacctttcaatagtctctgaaaggcttggttttaccatta

SEQ ID NO: 233467 - DNA, 285 bp, Gossypium hirsutum
tactcctctgtcctatccctctatttactgcgaaaaaaaaattgggacagggggacgaacaaccttgaattcgacgacgcactcaaaccatgtcttacgactatatttgtaagtacataatcattggtgacactggtggaggaaagtcatgtttgctttagcggtgtacagacaagagatcccaaccagttcatgatctaaccatcggtgttgaatttggtgctaggatggtcaccatagatggcaggcccatcaagcttcagatttgggattccggtgggcaag

SEQ ID NO: 233468 - DNA, 422 bp, Gossypium hirsutum
ggtagatcttctttcaaccgcgcctaataaccgctcggatttttctcagacgtgaaaaaaatggggctgtctttcaccaagctattcagccggctatttgccaaaaaggagatgcgtatactgatggttgggcttgatgctgctggtaaaaccaccattctttacaagctgaagttgggagagattgtcactaccattcccaccatcggtttcaatgttgagaccgttgaatacaagaacatcagcttcactgtttgggatgttggtggccaggacaagatccgaccattgtggagacactatttccaaaacatgcaaggacttattttcgtggttgatagcaatgatcgtgaccgtgtggttgaagctagagatgagttgcacaggatgttgaatgaagatgagttgagggatgctgtgct

SEQ ID NO: 233469 - DNA, 425 bp, Gossypium hirsutum
ctaatacacccactgtaaaaaaaagagagaaatctgatcagacggtgaaaatgggtagccttgaaactgagagaacaaccacaggatgggctgccagagatccttcaggagtattgtctccttacacttacactcttaggaacactggtcctgaggatgttttcgttaaggttatgtgctgtggaatctgccacactgatcttcatcaagccaaaaatgatcttggcatgtcaaactacccaatggttcctgggcatgaagtggttggtgaggtgttggaagttgggtcagatgtaagcaagttcagagttggtgatattgttggtgttggttgtcttgttggatgttgcagaaactgccgaccatgcgactcagacaatgaacaatactgtctcaagaagatctggtcgtacaatgatgtttac

SEQ ID NO: 233470 - DNA, 407 bp, Gossypium hirsutum
  unsure (1)..(407): unsure at all n locations
ctctcttactattataatctctcttctgctttgtcgccacgatttcagcttcagatcgcttctatttcttagcttgaagctaatactgcagaatgggcaaggaaaagactcacattaacattgtcgtaattggccatgtcgactctggaaagtcaaccaccactggccacttgatctacaagcttggaggtattgacaagcgtgtcattgaaaggtttgagaaggaagctgccgagatgaacaagaggtcattcaagtatgcttgggtgcttgacaagttgaaggctgagcgtgaacgtggtattaccattgacattgccctgtggaagtttgagaccaccaaatattactgcactgtcatcgatgcccctggacatcgtgactntatcaagaacatgattactggt

SEQ ID NO: 233471 - DNA, 426 bp, Gossypium hirsutum
ataatatatatagcctcggagatcggaccctataagtcgccggataatcatcgacgactgcccgagactccgccggagtcaccggaaaagtacttcttacggtttctacggcgagagaggggatttgaatatattggccgtgttttggttttcgatggcttcggaggatgtgaagactagtgaatcagctgtttcgacgatcgtgaatttagctgaagaagcgaagctcgctagagaaggcgttaaagctcctagttatgctgttcttagtatctgcaagtctctcgttgccggcggcgttgctggtggagtgtcacgaactgccgttgctcctttggaacgtttaaaaatcttacttcaggttcagaatccacatagtgtaaaatacaatggaacaattcaaggcttgaagtacatttggagaac

SEQ ID NO: 233472 - DNA, 428 bp, Gossypium hirsutum
gaaagtttcaatggcaaccctcaaagttccagttcacgttccttctccttctgaggatgctgagcaacttcggaaagcttttgaaggctggggtacgaacgagcaattgattatcgacatattggctcacaggaatgcagcacagcgcaattcaattcggaaagtttatggtgaagcttatggggaagatcttctcaagtgtttggagaaggaacttacaagtgatttcgagcgggctgtgctgctttttacgttggaccctgcagagcgagatgctcatctggctaatgaagctacaaagaagttcacatcaagcaattggattctcatggagatagcttgcagtaggtcttcgcatgaactactcaatgtgaaaaaggcgtatcatgctcgttataagaaatcccttgaagaagatgttgctcacc

SEQ ID NO: 233473 - DNA, 430 bp, Gossypium hirsutum
tctttaccttaatcaaagctttgactactaatcctattataaatttacactcaccgctctcaggatctaccagaaaatcgactaatctcccaaccatggcggtcgtgaaactattcggagcttggcttagtccgtacgtttacaaagtaatttgggctctgaaactcaaaggcataccttacgaatacatcgaagaagatctctccaacaaaagtcctttgcttcttcaatataatccaattcataagaaagtcccggtgctcgttcatgacggaaaaccgatctacgaatccaccgtcatccttcgatatatcgatgaaatttggccgcaaaatcccttgctgccggctaatccctatgacagagccgttgctctgttttggatcaaatttgccgatgacaagaatcctataatcgcaaagctttatcg

SEQ ID NO: 233474 - DNA, 422 bp, Gossypium hirsutum
gggtggagaagacgagagctcatctctctgcttcaaagctcctgtccgggttgaattctcttcttcctttgcgttgtgttctttgttgttcaatcgccatggcttcaaagcggattttgaaggaactcaaggatttgcagaaagatccacccacttcttgtagtgctggtccagtagctgaagacatgtttcattggcaagcaacaatcatgggaccctcagatagcccttatgctggaggtgtgtttttagttactatccatttccctccagattatcctttcaagcctcctaaggttgcgtttaggaccaaggtcttccatcccaacatcaacagcaatggaagcatttgtcttgatatcctcaaagaacaatggagccctgcactaaccatttccaaggttctgctctcaatctgctcg

SEQ ID NO: 233475 - DNA, 401 bp, Gossypium hirsutum
ttctatagaggtctgctctgctcaacatcctatctctttctctcgaccaaagactcagatccacgcgtgaatctttgttccagcttgttagaatggagacatttctattcacatctgagtctgtcaacgagggtcaccctgacaagctttgtgaccagatctctgatgctgtgctcgatgcctgccttgcccaggaccctgacagcaaggttgcctgtgaaacatgctccaagaccaacatggtcatggtctttggagaaattaccaccaaagctaatgtagactatgagaagattgtgcgtgacacgtgccgcaacattggatttgtttctgatgatgtgggtcttgatgctgacaactgcaaggtcctggtcaatattgagcagcagagccctgatatt

SEQ ID NO: 233476 - DNA, 422 bp, Gossypium hirsutum
ctttatctccttcaattgtttgtttttgggttagaaagctctgtttttttattaccctttttcatcaaaaagcttcaatctttcaaccatgttgcttaaagcttcccctgctttttctttgttgaagaatccccaagttgaaactcgggttcctctgttttcaagaaacggttctggggttgggtctggggctgttgttgtttgtgctaccaaaggagccaataataagccattaacaggtgtgatttttgagccttttgaggaagttaagaaggaacttaatcttgtcccaactgtgcctcaaatgtccttggctcgtcaaaagtttgctgatgagtgtgaagctgccatcaacgaacaaatcaatgtggagtacaatgtttcatatgtctaccatgctatgtttgcctattttgataggg

SEQ ID NO: 233477 - DNA, 425 bp, Gossypium hirsutum
cacagatcgtcaaagcttgtctgaatggaaagtatttgccattgaactgcccaaaaacgaaaatcaacaaggtatgtgaagaagcagcaagaactttggtgattcaattggatggagtcttgcaactgtatcgagccacaatggcctccggatgacctgttgatgaaatatcaatatatttctgatttcttcattgcacttgcttatttctcgatccccttagagcttatatacttcgtcaaaaaatctgctgtctttccatatagatgggtccttgtgcagtttggtgcttttatagtactttgtggtgcaactcatcttattaacctgtggacttttacggtgcattcaagaaccgtggcgtcagtaatgactactgcaaaagttttgactgctgctgtatcgtgcataactgccttgatgct

SEQ ID NO: 233478 - DNA, 428 bp, Gossypium hirsutum
cttctacctttttaactctaaagccaagaaagcaagccactaaggttttgagagaagatcaaaatggcttctaaaagatcagcttccatggtcctccttttggcactcaacattctctttttttccctagtcagtgcttgtggctcttgctcttcacccacccctaaaccaaggccaaacccaaaccccaacacccccactcctactccatctgcacgaggcaggtgccctagggatgccctcaaattaggtgtatgtgccaatgtgcttaacctagtcaatgtcaccgttggttcacccccagtgatgccatgctgttcccttctcaatggccttgtcgacctcgaagctgctgcatgcctttgcaccgctatcagagcaaacattttaggcatcaacctcaacatcccaatttcccttagcttgct

SEQ ID NO: 233479 - DNA, 422 bp, Gossypium hirsutum
atttttcttctttgcttctcttccttttaaacttagaaacaaaacatctagtagcattagaatcatgggtgttgtgagttatgagtttgaggtaacctccccaattgctccagccaggcttttcaaggcttttgttcttgaggctgccaagatttggcccacggctgcccctcatgcagtcaagagtgttgagctcgaaggtgatgctagtcctggaagtattgtaaagatcacctttgttgaaggccttccataccaatatatgaagcaccagattggaggacatgacgaaaacaatttttcatacagttacagtatgattgaaggtgggcctttaggggacaagcttgagaaaatcagctatgagaaccagtttgtggcagctgcagacggaggaagcatttgcaagagctcaataaaat

SEQ ID NO: 233480 - DNA, 424 bp, Gossypium hirsutum
agaaaaaaaaaaaaccagacatggcttccaacactgttgcatccgctgctcttcttcttaccttgaacttgttgttcttcactttggttagctctacctacgtgccttgcccaccaccaccaaagagccacaagcctacccacaaaagcccaccctcggcacctgaacagccaggcacttgccccagagatgcactgaaactaggcgtttgtgctgatttgttgggctcagtgcgcgttgttgttggaccgtcgaggaccaaatgctgctctctcatttcgggtttggctgatctcgatgctgctgtttgcctttgcactgctattaaagctaatgtgttgggggttaacctaaacgttcctgtttcattgtctttgctcctcaattcctgcgaaaagcaaatgcctgctggttacaaatgtgc

SEQ ID NO: 233481 - DNA, 420 bp, Gossypium hirsutum
cactctcccaccccgaccgcttgattttgatcagacggtaatcatgccgatcagaaacatagccgttggccggcctgaagaagctactcacccagatgctcttaaagcagctttagctgagttcatatcaacgttaatcttcgtttttgctggatctggttcaggcatggcttttaataagctgaccgacggcggtgcaacaactccggctggtctcgttgccgcctctctagctcacggatttgcgcttttcgtcgctgtatccgtcggcgctaacatctccggtggccatgtcaatcccgccgttacattcggtgctttcgttggcgggaacattactcttttacgtggtatcctttattggattgctcaactccttggctcaaccgtcgcttgcctgttacttaagttcgccactag

SEQ ID NO: 233482 - DNA, 430 bp, Gossypium hirsutum
cctgtccaaaattgctatcactctctcgtttctatacagattcagaaagaaataaaggaagaagaagcaatggccactcttacagtgcccacgacagttccttcggtgtctgaagattgtgaacagctaagaaaagccttttcaggatggggaactaatgagggcttaatcatagatatattgggtcacagaaatgccgagcaacgaaacttgattcgaaaaacctacgctgaaacctatggagaggatctcctcaaggcactagacaaggagctctcgaatgactttgagaggctggttttgctttgggctcttgatcctgctgaacgtgatgcccttttggctaatgaagccaccaaaaggtggacttcaagcaatcaggtccttatggaaatagcttgcacaaggtctgccaaccaactgcttcacg

SEQ ID NO: 233483 - DNA, 428 bp, Gossypium hirsutum
tcgaaatcgtagctttggaagcatggacttcatagctactatcctgtttctagctcttgtcatctcctccgccaaagctttagacccttgcggctctcagccagatgactcggaccttttggtcatcccaatctatggcaaatgttcaccattcaacccacccaaacctgactcatggttcaacacagtcatgaacatggcatcaaaagacccagcaagggtcaagtacttgtcgagccttctagcccaaaagaccactgcggttcccattgcttcaggccaacaagtcctaaatattggcaactatgtcgtccgggtaaagattggcactccgggtcagctcatgttcatggtattggacactagcaatgatgtggcttgggtcccatgctccggctgcaccaggtgctcagccaccactttctcac

SEQ ID NO: 233484 - DNA, 430 bp, Gossypium hirsutum
cccagcaccaccgaagaactcaagaaacagctccgattagatatgtcaatggtatctacatattgccctcacttcagtgggcttcgccgatcatctcccaacttacacaatgcaccatgtcaatctttccttcaacacttcagctctcaagcccgtctcccttcttctcccaaaccttgcagagctgttattgccatgtccggctctgggaagttctttgttgggggtaactggaaatgtaatggaacaaaagactccaccacgaagcttgtttctgacctgaacagcgcaaagttggagagtgatgttgatgttgttgtggcacctccctttgtctatcttgatcaggtgacttcttcattaactgatcggattgaggtatctgctcagaactcttggattggaaaaggtggggctttcacgggagaaa

SEQ ID NO: 233485 - DNA, 428 bp, Gossypium hirsutum
caattacaagggtatttggaagcctcaagagattccaaaccccgactacgttgagcttgataagcctgactttgagcctattgctgctgttggtattgagatttggacaatgcaagatggcatattgtttgacaatattttgattgccaaaaatgacaaggttgctgagtcatatagggagaccacatggaagcctaagtttgaggttgagaaagaaaaacagaaggctgaggatgagtccactgattcagatggactttcaggcgtccagaagaaggtctttgatgtcctttacaaggttgctgatattcctttcttaagtgaatacaagcttcaaatccttgatctcattgagaaggctgagaaacagccaaacatcaccattggtgtcatcgtctccattttggtgattatcctcacagttctct

SEQ ID NO: 233486 - DNA, 426 bp, Gossypium hirsutum
cggaaaagggaaagccggtaactggggcatcagacaatcttcgagaatggtggaaggataaagtgaggtttgatcgtaatggtcctgctgctatcgcgaagtaccaggcggataatgcgattcccgggaacaatgatgggtgtaacttgatcggtcctacaccgcacactttacaagaacttcaagatacaactcttggttctcttttatctgcactgatgcagcactgcgatccacctcagaggcggtttcccttagagaaaggtgttcctccgccgtggtggcctacgggaaccgaggaatggtggccgcaactcgggttaccaaaagatcaaggccctccttcttataagaaaccccatgatttgaaaaaggcttggaaagttggggttcttacagccgtaatcaagcatatctcacccgata

SEQ ID NO: 233487 - DNA, 415 bp, Gossypium hirsutum
caaacaaaagcagccccttcttccaatcccactgtcgttgatgatccttacaagcgcctcgaaatcattcttaaccccaatggctcgcttacgcgcaaccctaataggtttcccaacacttcagccatacctgatccggacccaactgtcccggttctctccaaagatatcactatcaaccaaacgacacacacatgggctcgtgtgttcctccccaggcagaaaccgcttggtaggaacaagttccctctcatagtttattaccatgcaggaggattcatccactgcagtgcggcatccacgatcttccatgttttttgctcaaacatggcggtggaactccaagccatcgttgtgtccgtcgactatcgtcgtgcccctgagcataggcttcctgctgcttacgacgatgcta

SEQ ID NO: 233488 - DNA, 420 bp, Gossypium hirsutum
gatacattcagcaagccttgcacaatggccaccatcacctctgccgctgtcgctatcccatctttcaccggccttaaagccggtgcaaccgcagctaaagttagcgccacagccaaggttgcagcctctccagtcccaagggtcagcatcaaggcctccctcaaagacgtcggtgttgctgttgcggcaactgctgcaagcgcaatccttgccaacaatgccatggccattgaagtcttgctcggcagtgacgatgggggtctggctttcattcccaaagaattcagcgtaagcccaggggagaagattgtgttcaagaacaatgccggattcccacacaatgttgtgttcgatgaggacgaaatcccaagcggcgtcgacgtatccaaaatctccatgcctgaagaagagctactcaat

SEQ ID NO: 233489 - DNA, 418 bp, Gossypium hirsutum
caagtgccaaaatctagggatttgcgggtggagaagacgagagcccatctctctgcttcaaagctcctgtccaggtagaattctcttcttcccttgcgttgtgttctttcctgttcaatcgccatggcttcaaagcggattttgaaagaactcaaggatttgcagaaagatccacccacttcttgcagtgctggtccagtagctgaagacatgtttcattggcaagcaacaatcatgggaccctcagatagcccttatgctggaggtgtgtttttagttactatccatttccctccagattatcctttcaagcctcctaaggttgcatttaggaccaaggtcttccatcccaacatcaacagcaatggaagcatttgtcttgatatcctcaaagaacaatggagccctgcactaacca

SEQ ID NO: 233490 - DNA, 430 bp, Gossypium hirsutum
gaagaagaagaagaagaaaaaaagggaacaaaagatggcaattcagattcctagagtgaaacttggaactcaaggatttgaggtttcaaagctgggatttgggtgtatgggtctttcaggtcacaataattcagtgtcagatgaagctggcatagccatcattaagcacgcattcgaaagaggaatcactcatttcgatacagccgacatgtacggacccaaaactaacgaaattctagttggaaaggcattgaagcatttgccacgagagaaggtacagttggctacaaaattcggtgttgaaagcatgggtccaggtggtccggttatcaatggcactcctgaatttgttcgttcttcacttgaggctagccttcaacggcttgatgtggattatattgatctttactatataatcagagttgaccac

SEQ ID NO: 233491 - DNA, 424 bp, Gossypium hirsutum
ttcatgccatcactggtgatgagactaagtttaagctctgcaaagttaggtctgtccaatttggccagaagggtattccatacctgaatacctacgatggacgcacaatccgttacccagaccctttgatcaaagccaacgacaccatcaagcttgacttagagagcaacaaaattgttgatttcatcaagtttgatgttgggaatgttgtcatggtcactggtggaaggaacaggggacgtgttggagtgattaagaacagggagaagcataagggtagcttcgagacaatccatgtacaagatgctgctggacacgagtttgcaactcgtctaggcaatgtcttcacaatcggtaaaggaacaaagccatggatttcgcttcccaagggcaagggtatcaagttgtcgatcattgaggaagc

SEQ ID NO: 233492 - DNA, 362 bp, Gossypium hirsutum
gttcgtctttgtttgcccctttcttgtctggggcgaaggtcagggatggctaagcatgacaatgtcagtgccataatgtggcactatcaagaaacactggccgaactatgtgaagactcggttcagtcagccagcgcgaaaggctagaagaagaatttcagggcagaagaaggctgtgaggatctttgcaaggccaactgctggaccccttcgccctattgtccatggccagactttgtagtataacatgctgctgagagctggaaagggttatacccttgaagagcttaaggctgctgttattctaaagaaacttgcaccgaccattgcgttggatgttgatcaccagctgaagaacaaat

SEQ ID NO: 233493 - DNA, 420 bp, Gossypium hirsutum
gcaattatagatgggactgtactttgtgtacatggtggcctttctcctgatgtaagaactattgatcagattagggtaattgaccggaactgtgaaatccctcatgaaggtccattctgtgatctcatgtggagtgatccggaagatattgaaacatgggcggtcagtccacgtggagccggttggctatttgggtccagggtcacatccgagttcaaccacataaacaatcttgatcttgtctgtcgagctcaccaactcgtgcaagaaggtcttaagtatatgtttcaagataaaggcctagtaactgtgtggtccgcaccgaattattgttaccgttgtgggaacgtagcttctatattgagcttcaacgagaatatggagagagaagtgaagttcttcactgaaacagaagaaaat

SEQ ID NO: 233494 - DNA, 413 bp, Gossypium hirsutum
ggtgcactgagcagaggttaaataaggaatggaaggtgaggaattcgcagtgggttgcttcctttcaattaagacaactttgggcgacgaatttgaaggtcaaattatcagtttcgaccgcctctccaacatcctcgtacttcaggagggtttggaatcaggacccagaaggaacattcggctgctgaaggctaatcacattaaagagttctctttattgcgccaagatgaagatcctcttgatgttaagaaatgttttttagaccttactagccttcaagcaagagaagattctgctattaggcaagctgaggctgattcagagaggtttggtgttggagttaccagtgaggcacagactctttttgatgctttgtctaaaacgctacctgttcgctgggacaagactgtca

SEQ ID NO: 233495 - DNA, 397 bp, Gossypium hirsutum
cacaaacccatttaagttggtgttggtgacaccgagagttcaagatccaattaaagatgaaggtgatagagaagatccaatctttgcaagaagggaaagtggtgttttcctttgagttcttccctccaaagactgaggatggagtagacaacctattcgagagaatggatcgtatggttgctcataacccgtccttctgtgacattacatggggtgcaggtggttccactgctgatctcaccctcgacattgctaacaagatgcagaatatcatctgtgtggagacgatgatgcacctcacttgcaccaatatgcccgtagagaagattgaccatgctcttcagaccatcaagtccaacggtattcagaatgttctcgccctccgaggtgatccccc

SEQ ID NO: 233496 - DNA, 414 bp, Gossypium hirsutum
cgattaagtcggcaatctctccctataaataaatcaacaaattcccccaatttcccatcaaaatccaattatttcaatagtcttctcttgattccaaatctctcctagaagatgcagatctttgtgaaaacccttactggtaagaccatcacccttgaggtagaaagttctgatactatcgataatgtcaaggctaaaatccaagacaaagaagggattcctcctgaccaacaaaggcttatctttgccggaaaacaacttgaggatggccgaactcttgctgactacaatatccaaaaggagtccaccctccacctagtgcttcgtctaaggggtggcatgcagatattcgtgaaaactcttactggcaagaccatcaccctcgaggtggaaagttctgatacaattgataat

SEQ ID NO: 233497 - DNA, 428 bp, Gossypium hirsutum
ggaaaaacaaaagcctcttccttagctaactgtctaagcggctactttataccgcatctcaaccatgatcatcccagaaaagaaccgccgcgagatctccaagtacctcttccaagagggcgtttgctatgcgaagaaagactataatttggcgaagcaccctgaaattgatgttccaaatcttcaagtaataaagctgatgcaaagcttcaagtcaaaggaatacgtgcgtgaaacttttgcttggatgcattactattggtaccttacaaatgatggcattgagttcttaaggacttacctgaaccttccttctgagattgttcctgctactttgaagaaacaagctaaacctgctggtcgtcccatggtgccctccggtgaccgtccacgcggcccaccacgctttggtgacggtgagaggagat

SEQ ID NO: 233498 - DNA, 437 bp, Gossypium hirsutum
caacattcccatttccaatctccagctcccaaggtaaatatgccgatcagaaacatagcagttggccggcccgaagaggcgactcaccccgatgctctcaaggcagctttggctgagttcatctcaaccttgatcttcgttttcgctggatcgggctcaggaatggcttttaacaagttgaccgacaacggagcaacaaccccggccggtctcgtagccgccgctctagctcatggcttcggtcttttcgtcgctgtctccgttggcgccaacatctcaggtggccacgtcaaccccgccgtcaccttcggtgctttcgttggcgggaacatcactctcttgcgcggcattctttactggatcgcccaactcctaggctcaaccgtcgcttgcctgttgcttaagttcgctaccggcgaccttgctgtaccagcttt

SEQ ID NO: 233499 - DNA, 433 bp, Gossypium hirsutum
ctcatttcttctcttgtaacactgctaatatttttttttatcgtcgtctccgtcgttcgaagattataaaaaaccggcgtcgtttcaaatggctacgagaacggatcttgatgggaggccaataaagccgttgacgatatgcatgatcggcgccggaggcttcatcggctcccacctttgcgagaaattgatgtcggagacgccgcacaaggtgctcgccttggacgtttacaatgacaagatcaagcatctcctcgagcctgactctctcccttgggctggccgtattcagttccaccgacttaacattaagcacgattctaggctcgaaggcctcatcaagatggcagatctcacgataaatcttgctgccatatgtactccggcagattataatacgcgtccactagacacgatttacagcaattttatt

SEQ ID NO: 233500 - DNA, 439 bp, Gossypium hirsutum
ggcgccgtcacaaaatgtcgtcaacggagtctctcatcctccaactccatgaaatctctgccgttaaattcggtaacttcaagctgaaatctgggatcttctcccctatctacatagacctccgtctcatcgtctcttacccttccctcctccaccaaatctcccactccctcctctcctctctccctccccaaacacactttaacctcatatgcggtgtcccttacactgccctccctatagccacctccatctctctcgacacctccatccccatgctcatgcgccgcaaagaagtgaaagactacggaactgccaagtccatcgaaggtgtttacgaaaagggtcaagcttgtttggtggtggaagacctcgtaacgtccggtgcatcggttctcgaaacggcggcaccgcttcggtctttgggtatcaacgtaac

SEQ ID NO: 233501 - DNA, 342 bp, Gossypium hirsutum
ctcgctctctgtagccgtcaactgcgtctatctcttcatctctctgaaccaaagaggctgtagcttttagcttcgagagagaccatgttggcttaccaggtatctcatgtccggcgacgagcttctttctgactcattcctctacatggatattgtgaatgggatgctctggcaaggtgacggactgtggattgtgcaaggagctggcaatgcttacattgctgcccattattcagccgatggtgctggtctggatggaggtgttgttaaccaagcctcgaaggctgtagacaatgtcgacactttcaagctttaggagcctccccctttcaacaagaagca

SEQ ID NO: 233502 - DNA, 420 bp, Gossypium hirsutum
  unsure (1)..(420): unsure at all n locations
tctttcgctatctgccttttccctttctctctatctgattcctatcgacaatggccgccgccgccacttcttcaccccgcgaggaaaatgtctacatggcgaaactcgccgagcaagccgaacgctacgaggaaatggttgagttcatggagaaagtctctgcctccgccgacaacgaggagctcaccgtcgaggaaaggaacctcctctccgtcgcttacaagaatgttatcggcgctcgccgtgcttcctggcgcatcatttcctccattgagcagaaagaggagagccgtggtaacgatgaccacgtcgctacgatccgtgattaccgggccaagatcgagtccgagcttacttcgatctgtaacgggatcttgaagctccttgacactaggctngtcccctcggcttcctctggag

SEQ ID NO: 233503 - DNA, 390 bp, Gossypium hirsutum
gtcacccttgctgacattatcatgacatgtaacctctacttgggtttctcccagatcatgactaagagttttacctcggagttccctcatgttgagaggtacttttggaccttggttaatcaaccaaaaatcaagaagattcttggtgaagtgaagcaggcagtctctctaccacctgttccttcaaagaagcctgctgcccagccaaaagaaactaaaccaaaggctgaaccaaagaaagaagccaaaaaggaggttgagaaactggcagcaaaggcagaggcagctgaggaggaggcaccaaagcccaaaccaaagaatcctcttgatttgctgcctccaagtaagatggtactggatgactggaagaggctttactctaacacaaag

SEQ ID NO: 233504 - DNA, 364 bp, Gossypium hirsutum
ataccagatctgttacactctgaattatttaagcagcacgtcacaagggatctagagcaaggttagtgaccttgggttgagtgtagagatgaggaaaatcatgggtgccaaagttcttttcttctttgctttgctttccttttcagctgtctcggcatttgcacaggatgaggaagaccaaggtcttgttatgaacttctacaaggattcttgtcctcaggctgaagacattatcaaggagcatgttaagctactgtacaagcgacacaaaaacactgctttttcttggctgagaaacattttccatgactgtgctgtccagtcatgtgatgcttcactgctgctggactccacaagaaggagc

SEQ ID NO: 233505 - DNA, 386 bp, Gossypium hirsutum
gccctcatcgtcaccattacagagagcgtgagtgagtgagagacactgcaagcctttactttaccaaacaccatggatgctgctgagagctggtcgagaaccaaatgggtcttccattttatgcttatattcgcacatttctctcttctatcactagctgaagatggtctggtggccaatggggatttcgagacgccaccgtccggcggcttcccaagcgaggcaatatccgatggagcccccgagatccccagctggagcacgaacggtacggtgaagcttgtgtccgccggtgaaaaagtgagcggcgggatgctactcatcgtaccccgaggcaggcacgccgtcagattgggcaacgacgcggagatcagtcaggaagtgac

SEQ ID NO: 233506 - DNA, 366 bp, Gossypium hirsutum
ctaccttctctcaacccaaacacatatttcccaggaaaaagaaaaagcttgagccaaaagaaaatggccgatcagcttaccgacgatcagatctctgaattcaaggaggcctttagcctgttcgacaaggacggagatggttgcattactaccaaggagttgggaactgtgatgcgatcacttgggcagaaccccactgaggcagaactgcaagatatgattaatgaagtcgatgctgatggaaatgggaccattgattttcctgaattccttaacctgatggcaagaaaaatgaaggatacagactctgaggaggagcttaaagaggcattcagggtgtttgacaaggatcagaatgggttcata

SEQ ID NO: 233507 - DNA, 358 bp, Gossypium hirsutum
  unsure (1)..(358): unsure at all n locations
tttcaatctaagaaagagtttttgttgggaaggatcgatttgcaactcaagcttgttgctggcaactcagctggcactgtcactgcttattatctgtcatctcaagggccaacccatgatgagatagactttgaattcttagggaatctgagcggtgacccttacattttacacaccaatgtctttacacatggcaaaggcaacagagaacaacagttctatctttggtttgaccctacaagatacttacacacctattccatcatntggatacccaacacatcattttcttggggataacaccccattagagtctcaaaaatgcctgatcatggtgtccattccccagagccaccca

SEQ ID NO: 233508 - DNA, 365 bp, Gossypium hirsutum
tggtgttggtaatttaacgagtgagattgaaaaaatacatggcttgaaatgtttgtcgatttttagttcgactgtcataagtttttatactttcttcagagcataaagagaatcaaagtttaaaaactcatgacagtcttactaaatctcaacagacaccctaacccttgacacaccaatgtctcaccccatggcttatgcaccacacaaccgcagttctctatccggttacaccctaccggtaccttccgcccttcttgcatcatttataaaccccctcacatcattttcttgactgataacacccccatcagagccttcaaaaatgctgaatccattgatcttccattccccatgagccaacc

SEQ ID NO: 233509 - DNA, 351 bp, Gossypium hirsutum
ctcgaagaagaagtgaagaagaatacccctcttaaaacagcctaaatgaaacgtagcgagagaggaaaagcaacgattttcagaggaagaaagcatagcaatttgaattggtatcggacggaaaatgttcaggaaccagtacgataccgtcatcactacatggagcccagctgtgcggctgttccaagtggagcacgccatggaggctgtgaagcacggttcggcgtacttcggtcttctatccaagacccatgtggtgttgggttgcgtcaacaaggctaattctgaattgtcttctcaccagaagaagatcttcgaaggctactaccacatttgggttatcattgccgg

SEQ ID NO: 233510 - DNA, 380 bp, Gossypium hirsutum
acggcatttacgaggagtgtaggcgatagtatagcggagaagattggtgtgattgctgctcctgagatctcgggtgttccgcttactcgtaatcatatattttttggtgttgcaagtgatggagttttcgagtttatctgtatcaaaactggcgtcaacatggcagacagaatacgcagatcctagggatgcatgtgctgcaactgctggagaatcccacaagctctggttggattatgaaaaacaccccgatgattttacaatcatcattgtacagattaaaggcttgtgtaattcgggtgctagggctacggataatgaagtagattgcaggccactggttatgaagtcacataagggtagttttgatacgagcagcg

SEQ ID NO: 233511 - DNA, 384 bp, Gossypium hirsutum
caaactctctcttttctaaattccctcttcaccaggtccgttactctatcacaccagcaacaaccttgagcttgaggatgactcattctcactcttctcaaaatccagtgattgagcagcagagagttataattccaaacaagcatggagaaaagcttgttggattgttacatgaaactgggtctaaagaaattgtgatcttatgccatggtttcagatccaccaaggctgatcgtactatggtcaaccttgctgttgctttagagaaagaaggaatcagtgcctttcgttttgactttgctggaaacggagaaagtgaagggtcatttgagtttggtaactactcgaaagaagccgatgatttgcattccgttatccagcact

SEQ ID NO: 233512 - DNA, 380 bp, Gossypium hirsutum
aaattacttaaaaacccacaagggttaacccctttacaaaggatcgctgttggtttagttttatccattatagcaatggtagcagcagcattgaccgaaataaaacgattgagagcagcaactacgaatggtcttgcgaataacccaaccgctcaaatcccattaagtgtcttttggttggtccctcaatttttgcttgtaggcgctggtgaagcctttacatacataggacaacttgattttttcttaagggagtgcccaaaagggatgaaaacaatgagtacgggtttatttttaagtacactttcattagggtttttcgtttgttcattattagttactatagttcataaggtgactggaaacaagcatccatggct

SEQ ID NO: 233513 - DNA, 378 bp, Gossypium hirsutum
aggaaaacaagaaaagcagagccgcatcactttttgctagctaagctactgtgggagttattgttcttcagaacagcttctgcagtagctaataataacgttatatattatataaattttatgcatcctttttaccctacgactccatatataagcaagtaaaaataaatatggctcgctctgtttcttcctttaagttccttggtgcttctgtttttgatgctctttatgtctccatatcaaggagaggttactcaggtgcaccgccggcggcagtgacggctagctttggtaggcctggagcgatggggaaagtggaacgaagatatgcgatgaaagagtcgtcgtcgtcggagacaagggcttattcttcagctt

SEQ ID NO: 233514 - DNA, 387 bp, Gossypium hirsutum
gtgaggtattgaatggagatcgactcgtgagtgctccttataaactgaattttagagaggaaaaagattcttccgttgtttgtaagaagaaactttctaaggatgaggttgtctttttccgaaaggcggttgaaaaagattattatttccaaatgtactatgatgatttgcctattgtagtaatagtcctcatatggacactcgtgacatctccattgcttgttctgggtggtattgctggcaaaaatagcagggccgagttccaagctccttgccgcaccacgaagtatcctcgagaaattccaccattgccttggtacaggagtgccattcctcagatggcaatggctggatttcttccatttagtgctatttacattgaacttt

SEQ ID NO: 233515 - DNA, 381 bp, Gossypium hirsutum
ggaggattagaagagtgtctaaaggtggatcccgataaagtaagacgtcttagcatgagtgagcaacaacttgaaaaagctgcgattactcacggaaaagaaattgtcaggtttacacagcggaatattcttagggtatatccgaggggtacacgtgtcgactcttccaattacaacccattaatcggatggatgcatggagctcaaatggttgcatttaatatgcagggttatggaagatctttatggttgatgcatggaatgttcaaagccaacgggggatgcggatacttgaaaaaacccgatttcctattgaatactaaggcagtctttgatccaactgtcaagttaccggttaaaaaaattttgaaggtaactatg

SEQ ID NO: 233516 - DNA, 384 bp, Gossypium hirsutum
ctcctttttatctttaaaacacgcacccaaaaaataaaaccctttgaagaccaaagaaggaagaagaagatgtcgtggcaagcttatgtagatgatcacttgatgtgtgaaatcgaaggaaaccatctctctgccgccgctatcatcggccaggacggcagcgtttgggcccaaagcgccagtttccctcagctcaagcctgaagaaattagtgccatcatgaatgactttaatgaaccgggttcactcgctccgaccgggttgcacctcggtggcacaaaatacatggtgatccaaggcgaaccgggagctgttatccgagggaagaagggacccggaggtgttactgttaagaagaccaatatggccttgattatcggaatc

SEQ ID NO: 233517 - DNA, 299 bp, Gossypium hirsutum
cacattctctcatacaaccatttctttaattcaactacactacatatgggcataaataatttaagtttccactcctattcacaaatcaaattgcgtgaggtccttcataccgaaggaggtcagatctgtgaccatatggtggctaaggatggcatagaggtttgcgcagatcacgggataaatcccaccggttgattccaaagagactgggatcgtcatctcgggagaattaacgattactacaatgaatccagtgggggaggattcggtgctcgagctcggctcatgagatcttgcac

SEQ ID NO: 233518 - DNA, 384 bp, Gossypium hirsutum
ctcttatttgaactcaaagtcccagctaatattagaatcatgggtgttgtcacttatgactatgagaatacctccccagtcgcccctgccaggcttttcaaggcctttactgttgaagctccgaaagtttggcccacggctgcacctaatgcagtaaagagccttgaggttgaagctaatcctagctctggaagtatcgtaaaaatcaactttgttgaaggccttccattccaatatatgaagcaccagatcggaggacatgatgaaagtaatttttcatacagttacgatttaatcgaaggtgggcctttgggggataagcttgaaaaaattagctatgagaacaggtttgaggcagctgcaggtggagggagtatttgcaag

SEQ ID NO: 233519 - DNA, 388 bp, Gossypium hirsutum
ggaagctagaagagcaaagcgaaaatgaagactatactttcctccgagacaatggacatccccgatggggttagcattaaggtcaaggctaaggtgatcgaggttgaaggtccaaggggtaagcttacccgcaacttcaagcacctcaaccttgatttccatctcatcaaggacgaagagaccggcaagcgtaagctcaggatcgaggcttggtttggctccaggaagaccagcgccgccatccgtacagctcttagccacgttgagaacctcatcaccggtgtcactaaaggataccgttacaagatgaggttcgtctacgctcactttccgattaacgcctccatcactaatggcaacaagtcgatcgagatccgtaacttccttg

SEQ ID NO: 233520 - DNA, 385 bp, Gossypium hirsutum
gttttccttcaaaaccctaatagctgtcctcgcctcctgaacgtgttcgaaaatggccggttctgagggattgactctacgtggcaccatgcgtgcccacaccgacatggtgacagccattgctactcccatcgataactccgacatgatcgtcacttcctcccgcgacaaatccatcatcctttggcacttaaccaaggacgaaaagacctacggtgtccctcgtcgtcgtctcaccggtcactctcacttcgtccaagacgttgtcctctcttccgattctcagttcgctctctctggttcctgggatggtgagcttcgtctctgggacttatctgccggtatctcagctcgccgttttgtcggccacaccaaagatgttctc

SEQ ID NO: 233521 - DNA, 386 bp, Gossypium hirsutum
gaaggttggacctgaaatttgcctattgaagacccatgttgacatattccctgatttcactccagagttcggttctaagcttcgcgcgattgcagaaaaacataacttcatgatatttgaagaccgtaaatttgcagacatcggtaacacagtaacaatgcagtatgaagggggtatcttccatatattggattgggctgatattgttaatgctcacataatctctggtcctggaattgttgatggtttgaaattgaagggtctgcctcgtggtagggggctgttgctacttgctgaaatgagctctgctggtaaccttgccacgggggactacacagctgctgccgtaaaaattgccgaacaacactccgattttgtcatcggtt

SEQ ID NO: 233522 - DNA, 382 bp, Gossypium hirsutum
ccaaattcgttgctttccatttatcgaggaaaactcagttcagtcgtggattcagtttttctgtttttaacatagttagttgaagcaagcaatcatggcaaggaagatgttggttgatggagacttaaaccaaacgaataacgagggagctgaatatgattttgacttgtttgtcatcggtgctggaagcggtggtgttcgcgctgccaggttctccgctaactatggagcaaaggttgggatttgtgagctcccatttcatccaatcagctcagaagtcattggaggggttggtggaacgtgtgttattcgtggctgtgttcccaaaaagattttggtctatggagccacgtttggaggtgaaattgaagatgctcgaaat

SEQ ID NO: 233523 - DNA, 385 bp, Gossypium hirsutum
atgagctacttaaccatttcccagatctcttccattctcttcttcagcgttcttttcatttccgcccatgcagcgcgctttgaaatccgcaatgagtgcccctacactgtttgggcggcagcctctcctggtggtggtcgtcgcctagacccttggcaaagttggaccatcgatgtgcctgctggcactgctatggctcgtatttggggtcgaaccaattgcaatttcgatgccagtggtaggggtcattgccagaccggcgattgtggtggactccttcaatgtcaaggttggggtgtacctccaaacaccctggctgaatatgcacttaaccaatttggaaacatggatttctacgacatttccttagttgatgggtttaaca

SEQ ID NO: 233524 - DNA, 385 bp, Gossypium hirsutum
gttcttccatgactgctttgtcaaaggttgtgatgggtcaatactcctagacgacacttcttctttcaggggggagaaaactgcggctcccaataataattccgtgagaggtttcaatgttgttgatgacattaaggccaaggtggagaaagcttgccccggtgtagtctcttgtgctgatatcttagcccttgcagctcgggactccgttgttattcttggagggcccggctgggatgttaagcttggaagaagggattcaaagaccgccagctttgctgctgcgaatagtggtgtcatcccacctccgaccgccacccttagtcaactcatcaatagattccaagcgcgaggtctttctgccaaggacatggttgctttatct

SEQ ID NO: 233525 - DNA, 438 bp, Gossypium hirsutum
  unsure (1)..(438): unsure at all n locations
cggaattncccgggntcgagcccacgtcgnntccgcttctacatatgccggcgaggtaaagggaaatacctgagagggtagaaaaatgccagcgtggtcacggtctcacgatctncggacctaggntnatctgttttccagaccccttcagaaagaangggttaccatcccattgtccacttatcctcaggacctacaagatcggtgactatgttgacgtcaaggtaaatggtgccgttcacaagggtatgccccacaagttctaccatggccgcactggtcgtgtctggaacgttaccaagcgcgccatcggcgttgaggtcaacaagcaggttggtaaccggattataaggaagaggattcatgtcagagtggagcatgttcaaccttcaaggtgcactgaggaattcaagctgaggaagctgaaaaatgatcagc

SEQ ID NO: 233526 - DNA, 388 bp, Gossypium hirsutum
aaagagcaggaaaacaagaaaagcagagccgcatcactttttgctagctaagctactgtgggagttattgttcttcagaacagcttctgcagtagctaataataacgttatatattatataaattttatacatcctttttaccctactactccatatataagcaagtaaaaataaatatggctcgctctgtttcttcctttaagttccttggtgcttctgtttttgatgctctttatgtctccatatcaaggagaggttactcaggtgcaccgccggcggcagtgacggctagctttggtaggcctggagcgatggggaaagtggaacgaagatatgcgatgaaagagtcgtcgtcgtcggagacaagggcttattcttcagcttggg

SEQ ID NO: 233527 - DNA, 383 bp, Gossypium hirsutum
ccaaaagaggcacaggacaaagtggcaaaattttcgttccacggacagccagcagagctcaggcatggcagtgttgtaattgctgctattacgagctgcaccaatacatcaaatcctagtgtcatgcttggggcaggacttgttgcaaaaaaggcttgtgaacttggtttacaggtcaagccttggataaagacaagtcttgcaccaggttcaggagttgttacaaaatatttactgcagagtgggttgcaagaatatttgaataagcagggcttccatattgttggatatggctgcacaacttgtattggaaattcaggagaattggatgaatcagttgcctctgctatttcagaaaacgacattgtagcgtctgctgtact

SEQ ID NO: 233528 - DNA, 384 bp, Gossypium hirsutum
gcttattggaatgaccaacagaaaggatctgcttgatgaagcccttttgaggccaggacgtttggaggttcaagttgagataagtcttcctgacgaaaatggtcgtttgcagattcttcagatccacacaaacaagatgaaagagaattcttttcttgctcctgatgttaaccttcaagagcttgctgctcgtacaaagaattacagtggagccgagcttgaaggtgtggtgaaaagtgcagtgtcttttgctttgaatagacaagtaagtatggatgatctaacaaagccagtggacgaagagaacattaaagttaccatggatgattttctcaatgcactcctagaaatcgttcctgcatttggagcctccactgatgacct

SEQ ID NO: 233529 - DNA, 386 bp, Gossypium hirsutum
ggaaaacaagaaaagcagagccgcatcactttttgctagctaagctactgtgggagttattgttcttcagaacagcttctgcagtagctaataataacgttatatattatataaattttatacatcctttttaccctacgactccatatataagcaagtaaaaataaatatggctcgctctgtttcttcctttaagttccttggtgcttctgtttttgatgctctttatgtctccatatcaaggtgcaccgccggcggcagtgacggctagctttggtaggcctggagcgatggggaaagtggaacgaatatatgcgatgaaagagtcgtcgtcgtcggagacaagggcttattcttcagcttgggcgcctgaccctgttacgggg

SEQ ID NO: 233530 - DNA, 387 bp, Gossypium hirsutum
gaacttaccctgaagagatgattcagacaggcatatcaacaattgatgtgatgaactcaattgctcgtggacagaagattcctcttttttctgctgctggtcttcctcataatgagatagctgctcaaatttgtcgtcaagcaggtctcgtaaagcgattggaaaagtctgataatctccttgatgatcaggaagaagataattttgccattgtgtttgctgccatgggggtgaacatggagacagctcaattttttaagagagattttgaggaaaatggatctatggagagagtgacgcttttcttgaacctggccaatgaccccactattgaacgaattattacacctcgaattgccctcacaactgcagagtatttggcttatg

SEQ ID NO: 233531 - DNA, 386 bp, Gossypium hirsutum
  unsure (1)..(386): unsure at all n locations
ggattgtgatgaacataagagtttatgcagcaaatatggtgttcaaggctacccaactgttcagtggtttcctaaaggctctttggaacctaaaaagtatgaaggaccacgcacagctgaggcacttgctgaatttgttaacactgaaggagggactaatgtgaagatagccactttgccatccaatgttgcagtgctaaatgcnggataatttgatgagattgtccttgatgaaaccaaagatgtgtgggttgagttttatgcaccttggtgtggccattgcaaaaaccttgctcctacctatgaaaaggtagcaacggcatttaaatcggaagaagatgtagtgatagctaatctagatgctgacaaatacagggatctagctg

SEQ ID NO: 233532 - DNA, 388 bp, Gossypium hirsutum
gccgaacgcaatggaaagaatagaattagatgaagcaatgctacaagggcaagcagagatatggcgttacatgtacagcttcgcagattccatggcgctgaagtctgccgtggagctccgcatagctgacataatacactctaatggtggccctgtcactttgtcgcaaatagcttcatgcattaatggtggccttgcttcacctgacatcaccacccttgctcgcataatgagattgctcattcgcagaaagattttcaccgtccatccttcagacggtggagatctcttgtacgacctaactcactcatcgagatggcttctacatgattcggagcaaaccctggcacccatggtattaatgaatacccatccatggcaaatgact

SEQ ID NO: 233533 - DNA, 384 bp, Gossypium hirsutum
gagctacttaaccatttcccaaatctcctccctcctcttctttagcgtgcttttcatttccgctcatgcagcgcgctttgaaatccgcaatgagtgctcctacaccgtctgggcagcagcctctcctggtggtggccgtcgcctagaccctcggcaaagttggaccatcgatgtgcctgctggcactgctatggctcgtatttggggtcgaaccaattgcaatttcgatgccagtggtaggggtcattgccaaaccggtgattgtggtggactccttcaatgcaaaggttggggtgtacctccaaacaccctggctgaatatgcacttaaccaatttggaaacatggatttctacgacatttccttagttgatgggtttaacat

SEQ ID NO: 233534 - DNA, 382 bp, Gossypium hirsutum
cgtgacttctggttattgcgttatacttctgttctagaagatggaagcctcgttgtctgtgagagatctctgaagaatactcaaaatggccctagcatgcctccagtgcagcattttgtgagagcagaaatgttgccaagtggataccttattcgaccttgtgaagggggtggttcaatcatccatattgttgatcatatggatttggagccatggagtgtgcctgaagtgttgcgcccactttatgaatcatcaacagtgcttgctcagaagacaacgatggcagctttacgacaactgaggcagatagctcaggaggtttctcagtctaatgtgactggttggggacgacggccagcagctttacgggctcttagccaga

SEQ ID NO: 233535 - DNA, 381 bp, Gossypium hirsutum
gtcatttgaagaaaatgatgttacatacaattttgattttaagaagtttttagattctatggaagatgagattggatctcaaggtaattcaaagaaagctaggagtcttgatgagcttgatcctgagatacagaccattgtattgctaagtgatacttatggagctgaaggtgaacttggtattgtcttgtctgagaaatttactgaacatgatgcctactgtatgtttgaggctctgatgagtggggctcatggttcagttgctatggcagatttcttttctcccattcctgctgctcagtcccagagtggcttgccccctgtcattgaagcctcagctgcattataccatttactgtcaattgttgattcttccctgca

SEQ ID NO: 233536 - DNA, 382 bp, Gossypium hirsutum
atttcccctaaattccgtcttttttcttcaaattccccacaaatggccatcactttctcagatctccacacggaatctggccttaaatcccttaatgacttcctcaccggcaaatcttacatctctggggataagctgactaaggatgacataaaagtttatgctgctgttttgaaaaatcctggtggttcatttcccaatgtgagccaatggtataattgtgtgtcttcccatctcgcttctagcttccctgggaaagctgttggcgtttcacttggtggcaaagctgatccagctcaatctgctgaagctaagtctcctgctgcggacgatgacgatgatgacttggatctgtttggcgatgaaacggaggaggataaga

SEQ ID NO: 233537 - DNA, 383 bp, Gossypium hirsutum
gcgtttctttctgaaactagagctgagaaaataaaacccaaagccttaaaaactatcaaaaatggttcaaaggctcacttaccgtactcgccatagctatgctaccaaatccaatcaacaccgtgtcgttaagacccccggtgggaaattgatctatcagactactaagaagagagcgagtgggcctaagtgtcctgttactggaaagcgaattcagggtattcctcacttgagacctgctgaatacaagcggtctcggttgcctaggaaccgtaagacggtgaatcgtgcctatggtggtgttttgtctggaagtgctgttagagaaaggataattccagccttcttagtggaagagcaaaagattgtgaagaaggttctga

SEQ ID NO: 233538 - DNA, 382 bp, Gossypium hirsutum
aaaaaaaaaaaggaaaaaaatggctatgcaattcaatcccatcgcttctcaaactaagaaactcccttcatatgctcttccacccatggcaagtcttagatctcccaaggtttctatggtctccactcttccacctcgctccaaaggggttgaagatctgaaacggcctttcatggctccaaagctggtacaccaggcttcccacaccatgccacctgagaagattgaaatctttaaatctttggatgattgggctagggataacattctgattcatcttaaacaagttgataaatgttggcaacccaaggattttcttcccgatccttcgtccgatggatttgaagatcaagttagagaacttagagaacgggcaaaggag

SEQ ID NO: 233539 - DNA, 406 bp, Gossypium hirsutum
  unsure (1)..(406): unsure at all n locations
cgtctcgatgtgtgcatggaagatacaatgaacannacttggttcttattcccttgctcctaaatttaccaagattgctatactctcgtactatcgccaaagaaaatccgcagctttgaggacacctgctgttgagacgattgcgaaattctgtcatgatctgcaggatctggacctcagcaaaagtttcaagcttggtgatcactcattgtatgctttggcccatggttgccctaatcttacaaaacttaacatcagtggctgcacatcattcagtgatgaaggtcttggatatttgactcaattttgtcgaaaactaaaaatattaaatctctgtggatgtgttaaagctgcaactgactgcgcattgcaggctattggacagaactgcaatatgttgcaatct

SEQ ID NO: 233540 - DNA, 382 bp, Gossypium hirsutum
ggtggcaggaaacggtgcgtattcgccacgttttttcagcatctctttctcgattgttctctgttttttgtgttttattgcttgtttggctgcgaagagagtgagagagatcaggcaaaaatggcgtgtacgcacgaccacagctgcgaagatcacgattgttcttctaattggtctctttacaagcacatcgacctcgccaaggttaccgctttaaatgaggctaatccaggaagtgttaaatcggtgtttaaggcctgggaggagcgattaaattcttctggggaacgcttggaaagtaatgagggtgatcctgagttacttgtttacattccgtttacatcagatgttaagatcaagagtatatcagttgttggtggtg

SEQ ID NO: 233541 - DNA, 382 bp, Gossypium hirsutum
ctcctttgctctttctattggtcttggaaaatggaagcctccaagcctaggatctgacacaaaccaaaaccctaagagagagcgagagagagagagagagaggaccacgcaattttaatctataaatcatccatcccctttataagttgcctgcgtccacccctccatcgtattttattctatctcagagtagatcactcccaaggttttctctctttcatctatctaagttgttgagtatggttttctgggtttttggttatggttcactggtctggaaccctgggtttgagtatgatgagaaagtcataggcttcatcaaggattacaggcgtgtttttgaccttgcatgcattgatcacagaggtacacctgaagatcc

SEQ ID NO: 233542 - DNA, 365 bp, Gossypium hirsutum
gctttgaagtgcagaatcaaaggattgtgggtggagaagaagcggtgacggatctaacttggaactccctttctcttcttaccgctattcccgacctatctctaaccccctcaatttctctcaggtagatattccttgtgttcaagcgtcttcatggcttcaaagcggattttgaaagaacttaaggatttgcagaaggatccaccaacttcctgtagtgcaggtcctgtagcagaagacatgtttcattggcaagcaacaattatgggcccctccgatagcccttttgcaggaggtgtgtttttggttaatattcattttcctccggattatccattcaagcctcctaaggttgcatttaggac

SEQ ID NO: 233543 - DNA, 368 bp, Gossypium hirsutum
aaaaatattatctacatctatcttggccgattgctctttgtgctctcatatggctatggaggatgctgagcaaccgcttctttcccctcggctagtcggcgaggacagccaccaccaggagcagttactttctagactatcaaacaccaccttcacggccggcatcgatgacatcccaccgatcaacggcgtccgtgacttcttcagagaatacctgatagagtccaagaagctctggttccttgctggccccgccatcttcacatctctttgccgatactccctcggcgctatcactcaagtcttttccggccaagttggcactctagctcttgccgccgtctccgtggagaattcattcatccccg

SEQ ID NO: 233544 - DNA, 383 bp, Gossypium hirsutum
cttgtcttgtctgtttggttcctgagaaagcgaaagaaaacgcaacggtctgtttttaaagacaaaacagtagtggtaatttgattccccctccccccttaattcttgctttaggtatctgttaaaggataaaggtgcgattcttttggtgaaaaaaacaatgaggcctgtgtttgtggggaacttcgagtacgagactcggcaatcagagctggagcgtttgttttcaaaatacgggaggatcgaacgggatgatatgaaatctggatttgcctttgtttattacgaggatgaacgtgatgctgaagatgctattcgcgaacttgataatattccttttggttatgaccgacggcgactgtctgtggagtgggctaagggtg

SEQ ID NO: 233545 - DNA, 388 bp, Gossypium hirsutum
ctccaccattccttctggctccaaagaggttgggaatctgaaaaagcctttcacgcctccaaaggaggtgcctgttcagatcacccactccatgccgcctcacaagattgagatctttaaatctttggagggctgggctgagaacaacattctgactcacctcaaaccagttgagaaatgttggcaacccgccgactttcttccagatcctaattctgatggatttcatgagcaagtcaaagagcttagggaaagggcaaaggagatcccagatgattactttgtagttttggttggtgatatgatcaccgaggaagccctttcaacttatcaaacaatgcttaataccttggatggaactcgtgatgagacaggtgctagccttacc

SEQ ID NO: 233546 - DNA, 371 bp, Gossypium hirsutum
ccggtccggaatctgagtgttcggcccaggcgtccgaaacatagcagccatggcagtccgtatgcttcttgggttaggtgtcctgctactctgccttgcaaaggtttcatctgatctgaaggcagaagaagttataaccaatgtcggtgaggtgggttctttggttaccagaggcggaaacagaagactgatgctagagattgattgtggaggattatgcaagaaaagatgcagtcaacactcgaggccaaacagatgcaacagggcgtgtgggacttgctgcttgaggtgcaagtgcgtgccaccggggacttcaaggaacagggaggtctgcgggacctgctatactggcatgaccacccatggaaacg

SEQ ID NO: 233547 - DNA, 380 bp, Gossypium hirsutum
gagagcaaagactaagaagcgatcaaaaaatggcagcagctccagaaacaaagaccgttcattcaccagcactcacttatttctccatgttatccttgctctcactttgcccactttttgttatcctactatggtatacgatggtacatgctgatggatccgttgttcaaactcggaattatctcaagcagcatggattgcaaggttttatagatatatggccaagacccactgcaattgcttggaaaattatttttgtttatggagcatttgaagcagcacttcaattgcttctccctggaaagagggttgagggtccggtatctcccactggtaaccgacctgtttacaaggcgaatggtatggcagcgtactttgtg

SEQ ID NO: 233548 - DNA, 428 bp, Gossypium hirsutum
ctcatttccagaaacatccattcaggttatcgttttaggtttgcaacactgtctggcacccaatatgcgaagccgaacctcaactatgcaacgagcattttcagtgtccaaaaaagatgggcttctcaagctaagacatctgaggatgacgacaaaatcagcatcggtcctcgtaaaagcaaagaagacgacgaagatgagaaggatgccggggttgtttactacggtccgatttcttctacaatcaagaaagtaaagatgctttcactttcgacctgctgcctctcggtatcgttaggccctgtcattacattcatgacttctcctgatatgaatgtgattgtgaaaggtgcggtagcatcctctgtgatattctttagtgctacaacaactgccgcacttcactggttcgtgagcccttacatcca

SEQ ID NO: 233549 - DNA, 414 bp, Gossypium hirsutum
ctctatctggtttttagggcttttctaactttcttgataatttttggatatgccaaagttcaatcttttaaaaaagccctaaaatctttgaatcaggtctgagcttgtggtttggtaggcctctttgatcaaactaagtttcatgtctgatcttgacgttcaaattcctactgccttcgatccctttgctgatgcaaatgctgaggactcaggtgcgggtgcaaaggagtatgtgcatattcgtattcagcagaggaatggtcgcaaaagcctgacaactgtccaggggttgaagaaagaattcagctataacaagatacttaaagacctgaagaaggagttttgctgcaatgggaccgtggtccaggaccctgaattaggacaggtgattcaacttcaaggtgaccagcgtaa

SEQ ID NO: 233550 - DNA, 416 bp, Gossypium hirsutum
atcaaatcgaagatgttgagagtggcaacgaggcggctcacttcttgttcgtctgcgtggaggtcgcaccaggccacctccgctatcgcctctcgtcctttcatcgacggctccgattcttctgattgtctcagatccaatttctcctcctcctcattttccttctctttcgcttctcaattccttcttcccaccagaggttttgcttctgagtcactcaccccaaaaagtgaccacagtgtgattcctgatgttccagcaacagtggctgctattaagaaccccagttctaaaatagtttatgatgaatacaaccatgaacgttttcctcctggtgaccccagcaagcgggcatttgcctattttgtcctgacaggtggtaggtttgtttacgcatctgttatccgtctgctcat

SEQ ID NO: 233551 - DNA, 418 bp, Gossypium hirsutum
catggctaaggtatctttgttgttgttttccttgttcattattgttgcttctgcaattatcaatgggtcagcagcagtggagaaggttgggatatatgagctgaagaaaggtgatctgagtgttaaattcaccaactggggtgcaactattgtttcagtcttcctccctgacaaatatggtaaaatgggtgatattgttctgggatatgattctgtcaatgactacaagaatgatacttcgtatattggttccattgttggaagggttgctaacagaataggaggggctcaatttactttgaatggagtccattataaattgatccctaatgaaggcaaaaacatgcttcatggtggccctattggatttagtgatgttgtatggaaagtgaacaagtataagaaagatggctattct

SEQ ID NO: 233552 - DNA, 425 bp, Gossypium hirsutum
cggaattcttattccttttatatttttcctctccaattttccgtcactttcccgagaaaatgagagaaatccttcacatccaaggtggccaatgcggcaatcagataggagccaagttctgggaagtcgtatgtgccgaacatggcatcgattcaacgggtcgatatggtggtgactcggagctccagcttgagcgaatcaatgtttactacaacgaagccagttgtggccgttttgttccccgcgcagttttaatggatctggaacccggtaccatggatagcgtaagatccggtccttacggacaaattttcagacccgataacttcgttttcggacagtcgggcgccggaaacaattgggctaagggacattacactgaaggagcggagcttatcgattccgttctcgacgtagttagaaag

SEQ ID NO: 233553 - DNA, 409 bp, Gossypium hirsutum
gagtgttgcttttcatactcatttagcccctttcattagcatcaaagtgactgcagttttttttttgactgaaaaatggttggttgggttggaaactggggttggggtcctggtggaagggtggcaaaggcttgggggggtgcaagatgtattcagacctgaacgctggcgagatgaccacaactgaaactttggttcttggtgttgcaccccagaaagcacactctgggggtgctgagatggaattcggagctgagaacggctgcaagtgtggagacagctgcacctgcaaccctagcaattgtaaatgattagggaccaaagccaaagctccctggaagcaggggcgcctccgtatttaaaaaataatatgtagtgctgtttgtgtttgtagaataaagtcagcatg

SEQ ID NO: 233554 - DNA, 407 bp, Gossypium hirsutum
aaaattttaaaccgacactttcgccattccccaattttcatcatttacaacaagaagttttagggttagggattatttttgaaggatgagtcccaccgaaggatcaacgaaaggcgggagagggaagcccaagtcaaccaaggcggtatcgagatcgcataaggctgggcttcagtttccggtggggaggatcgctaggttcttgaaagccggaaaatatgctgagcgtgttggtcccgaacttccgtttattttttcggcctattaaaatattttgcttgtgagggtttagagcttgcttgaaaccccacgagagacaattaaaagaattgaatagttccaaggcatatccaactagctgtaaggaacgatgaagagctaagtaagctttgggttcagtcaccatt

SEQ ID NO: 233555 - DNA, 415 bp, Gossypium hirsutum
caccgccataagcgaaatcaaaagccagcagcgctgcagctaaaagagcagtcgtttgacaattattcgccatgggtaaggttcacggatctctagctcgtgctggtaaggtgagaggccaaactcctaaagtggccaagcaagacaagaagaagaagccccgtggccgcgcttacaagcggatgcaatacaaccgccgcttcgtcaccgcagtggttggatttggcaaaaagaggggacctaactcatctgagaagtaagagatctatgtaggtgaaagaaggcaagaagccttgttgaaagctttgatggattttaagtctttgttttcttttgataatgtttttatgatactggtttcaaggattggattgaactaccattttgtttgctagatattatgtgatattggtat

SEQ ID NO: 233556 - DNA, 419 bp, Gossypium hirsutum
tacatcttcgctttgagattagatccaaaattcccctttcatcttatttccgattccccaatttttcctgaaaccctaatcctaatcccggattcctctcgtctacatcgtctagcaaatggcaaccgaggagccggcagtcgtggcagaccccgcaccggagacggaggaggacaagactgctgagaccaaagctacttcaaaatctggcagagcaaagaaaaccaaagaacccaaaaccaagaaagctgcagctcctcggaaaccacgggctgctcctactcatccaccttacgaagagatgatcaaagatgcgatcgttactttgaaagagaggacaggttcaagtcagtacgccattgctaagttcattgaagagaaacagaagaatcttcctgggaatttcaagaagcttcttc

SEQ ID NO: 233557 - DNA, 419 bp, Gossypium hirsutum
aaatggttgagaattttgagatgggtgtgtcaaataagactcctgagttcatcaagataaccctttggggaaggttcctgtgttggaaacacctgagggtccggtatttgagagcaatgccattgctcgttatgttgctcgctcaaaggttaacaaccctatatgtggttctacattgattgattatggtcatatcgagcaatggattgattttgcagccttggaaattgatgctaatattgccaaatggttgtatccaagacttggttacggtgtttaccttcctccagctgaggaagctgctattgctgcattgaagagagcccttggcgctttgaacactcatcttgcttccaacacatttcttgtgggacatgctgtcacccttgctgacattatcatgacatgtaatctctact

SEQ ID NO: 233558 - DNA, 418 bp, Gossypium hirsutum
cgcaaatctcgctttcggaaaatcctcaaatggcagaccaaccgcagatttatgaactcaacaatggaaccgtggttgttaagatcaccaactatggctgcactatcacctcattgtctgttcctgacaaaaacggtaaattagccgatgtcgtcctgggattcgacactgtcgaaccgtacgtgaaaggtgcttcaccttattttggatgcattgtgggaagggttgcaaacaggataaaaaatggcaagtttactcttaatggaacggagtacactttgccaatcaacaagcctccaaacagtctccacggtggattcaagggttttgacaagagaatatgggaggtagcagaatataagaaaggcgacaaaccctccattacttttaaatatcgcagcagcgatggtgaggaggg

SEQ ID NO: 233559 - DNA, 414 bp, Gossypium hirsutum
aaactaccccccatcagatgccttcctctttgcagctccaccgcaccaccaccgccgttggcacctgccaccaccaaaaacaacaacctccaccccctaccactctcacgacctttttccctcttcctactggcgtctcctttcccgacatggtctccgcctaccacttccacaccttgggtcctaaccagtgttgctccgctgtggttcaaaccatcaacgcccctgtcgaaaccgtctggtcggtggttcgccgtttcgataaccctcaagcttacaaacacttcctcaaaagctgtcatgtcatcgtcggtgacggtaacgtaggcagcctccgtgaagtccacgtcatatcgggtctccccgccgctttcagcaccgagaggcttgaaatcctcgacgacgaacatcacg

SEQ ID NO: 233560 - DNA, 422 bp, Gossypium hirsutum
ctgcttctcttctccttctcttgcctttccaggttccaaactctcgttcttcctccagctcctatcctttaacaggaaatggcggttacattcaacgacttgggttctgctgccggcttgaagaagctcgatgagtatctcctcactcgcagttacatctctggataccaagcttcaaaggatgatatcaccgtctacacagctctatctggggccccatcgtctagctatctgaatgtttctcgatggtacaaacacatcgatgcccttttgaggatctcaggtgtttctgaagaaggctgtggtgtgactgttgagggatttgctcccgctgaggctgtggccactcctccaactgcagattcaaaggctgcagctgctgaagatgacgacgatgatgatgtagacttgtttggtgaaga

SEQ ID NO: 233561 - DNA, 419 bp, Gossypium hirsutum
ccggcacttgctgcatcaaaagatacgtgatccatacatgcacccccagtttgttgcagatgtgatgaagcctcttctcattgagcaattaatggatcaggaagtggttaatctctctggaggagagctgcaaagagttgcattatgcttatgtcttggaaagccagcagatatttatctgatagatgaaccaagtgcttatcttgactccgagcagcgtattgttgcttctaaagtcataaagaggtttatcctccatgcaaagaaaactgcgtttgtggtcgagcatgattttataatggcgacttacctcgcagatagagttattgtctacgaggggaagccttcagtggattgtattgcaaacgctcctcagtccttgttaactggcatgaatctgttcctatctcatctggaca

SEQ ID NO: 233562 - DNA, 418 bp, Gossypium hirsutum
aaaaaaaaaaaccccaaacagacaatagcctaggacaggaggatctctcagggtttaggtgatggcttcaaagcggatcttgaaggagctcaaggatctccagaaagatcctcctacctcttgcagcgcaggccctgttgctgaagacatgtttcattggcaagcaactattatgggtcctcctgacagtccttatgctggtggagtgtttctagtcaccattcatttccctccggactatccatttaaaccaccaaaggttgcattcaggacaaaggtctttcacccaaatattaacagcaacggtagcatttgccttgatattttgaaggagcagtggagccctgccctcaccatatccaaggtattgctatctatctgctcactattgacggatccgaatcctgatgacccattg

SEQ ID NO: 233563 - DNA, 414 bp, Gossypium hirsutum
cgacaaaccacctaaactgaccgcaccttttgaaatggggaaactactacctgtgtctggatttatctgtaaaatacacaacctatatcgtaaatccaaatcttggtttgttttcctacccgcaatactgatggagatggaagcctattcaggcagtcaacgcctgcattttgcgaagatgggatctggatgccaacattataggaggagatgcaagattcacgctccatgtcgcaacgaggtttggtcgcgtgtggcattgccataaccaagctgtgaacctgttaagtaacccttttgacaggcacgagcttgttcgaaaagatgttgaacaagtgatttgctcggttagtgacacagaaccaggccgctgctcaactttgttcaaatagcggagtcaatatacgagaatac

SEQ ID NO: 233564 - DNA, 404 bp, Gossypium hirsutum
cggacgcgtgggttgtatttcatactcatttagcccctttcattagcatcgagatcactccagttttctttatcactgaaaaatgtcttgctgtggtggaaactgtggctgcggttctggctgcaagtgtggcagtggctgtggaggatgcaagatgtacccagacctgaacgttgccgagatgaccacaactgagactctggttcttggtgtagcaccccagaaagcacactttgagggagctgagatggaattcggggctgagaacggctgcaagtgtggagacaactgcacctgcaacccttgcaattgtaaatgattagagaccaaagccaaagctccctggaagcagagacgcctttgtctttaagaaataatatgtgttgttgttatgtgtttttaga

SEQ ID NO: 233565 - DNA, 419 bp, Gossypium hirsutum
cttgttcttgatgaagcaacagcagcagtggatgttaagactgatgcttttatccagaaaaccattcgtgaagaatttaaatcttgcacgatgctagttattgctcacagactaaataccatcattgactgcgaccagattcttgtgcttgatgctggtcaggttctagagcacagtactccagaggaactgctagctaatgaagaaagtgcattctctaaaatggttcaaagtacagggcctgcaaatgctgaatacttacgaggcttaatttttggaggtgaggagaataggtttagtggagatgatgcccggttagatggtcggaagagatggctggcatcatcccgctgggcagctgctgcacaatttgccctagctgttagcctcacttcttcacagaatgaccttaaaaggtt

SEQ ID NO: 233566 - DNA, 423 bp, Gossypium hirsutum
acgacaccctgccgccgcaacaatgaagtacaacccgcgtgtctcctcctctcgccgcaagagccgcaaggctcatttcacagcaccttcttccgtccgccgcgtcttaatgagcgcacccctctcatccgatctgaagtccaagtacaacgtccggtctatgccggtgcgcaaggatgacgaggtccaagtggttcgtgggacctacaagggacgcgaagggaaagtggttcaagtgtaccgccgcaaatgggtgatccacatcgagcgcatcacgcgcgagaaagtgaacggttccaccgtcaacgttgggatcaacccatccaaggttgtcatcaccaagctgaggctggacaaggataggaagtctttgctggatcgtaaggctaagggacgcgccgctgctgataaagataaggggac

SEQ ID NO: 233567 - DNA, 418 bp, Gossypium hirsutum
attatcaatttgaagccttcttcgaatttcctcattcaagatgcaaatgttcgtcaagacccttaccggaaagaccatcacattggaggtggagagttctgatactattgacaatgtaaaggccaagattcaggacaaggaaggcatccccccagaccagcaaaggttgatcttcgctggtaagcaacttgaggatggccgcacgttggctgattacaacatccagaaggagtccacactccacttagtgcttcgcctccgtggaggaatgcaaatttttgttaagactttgactgggaagaccattacattggaggtagagagttcagataccattgataatgttaaggcaaaaattcaggacaaggagggaattcccccagaccaacagaggctgatttttgctggtaagcaactg

SEQ ID NO: 233568 - DNA, 415 bp, Gossypium hirsutum
gtatcttatccatatccgacgaacagaatttcctgccaaagtagttcattggtgtttcctatccgaattctccgcttagaaaattttgctttccaaatcaaaagaatcataaaaaaggaaaaatggcgacctctgctttagccattgcaactgcaaagccattgacccatcgtttctccaactctaagcacacttcatcaccatccttctcctgttcttgctcttcttccacgccactcccacctcccaacgaacccaaactctctttcagctcaaaacctgttgcgaaacaatgtgttttcaatgtgggtgttgggcttttagcaacttcacttcttgcttgttcaccattggaggctgatgccaccaggatcgagtattttgcaactgtgggggaacctcaatgtgagctcaa

SEQ ID NO: 233569 - DNA, 413 bp, Gossypium hirsutum
gctttggaagcatggacttcatagctactatcctgtttctagctcttgtgatgtcctccaccaaatttttggacccttgcagccctcagccagatgactcggaccttttggtcatcccaatctatggcaaatgttcaccattcaacccacccaaacctgactcatcgttcaacacagtcatgaacatggcatcaaaagacccatcaagggtcaagtacttgtcgagccttgtagcccaaaagaccactgcggttcccattgcttcaggccaacaagtcctaaacattggcaactatatcgtccgggtaaagattggcactccgggtcagctcatgttcatggtattggacactagcaatgatgtggcttgggtcccatgctccggctgcaacgggtgctcagccaccactttc

SEQ ID NO: 233570 - DNA, 421 bp, Gossypium hirsutum
caatcgccgagaaaaaaaatgcagcaccagaggctgaagcaacagcaacaaggcgtggatgcaacaagctcttcttcaacagcagtctctctatcatcccggcatcttagctcctcctcagatagagccaattcccagtggaaatctgcctcctggttttgttccaagcacttgccgcagtgtgtatgtgggaaatatccatacacaagtgactgaaccactacttcaagaggtttttgcaagtactggccctgttgaaggttgcaagcttgtcagaaaggaaaagtcatcgtatggattcgtccactacttcgatcgcagatcagctgctcttgctatattgtctctaaatggaaggcatttgtttggacagcctatcaaggtcaattgggcatatgctagtggtcagagagaggataca

SEQ ID NO: 233571 - DNA, 419 bp, Gossypium hirsutum
cggacgcgtgggtttcctctttcaattctctgggcacccctctcagatcttggaatctctcaccatccagaataaaaggatggggctttcttttgctaagttgttcagtcgcctgtttgccaagaaggaaatgcgtattctgatggtgggtcttgatgctgctggtaagactaccatattatacaagttgaagctcggagagattgtcaccacgattcccactattgggtttaatgtggaaactgtggaatataagaacattagcttcaccgtttgggatgttggaggtcaggacaagattcgacctttgtggaggcactacttccaaaatactcaggggctaatctttgttgtggatagcaatgatcgtgatcgtgttgttgaggccagggatgagcttcaccgtatgctaaatgagg

SEQ ID NO: 233572 - DNA, 415 bp, Gossypium hirsutum
gtcttcctggaaggaaatccgtacttgctagtgatcacaatggtcgtttctgtgcttcattctgtgtttgacttcttggcttttaagaatgatatccagttttggaacaaaaataagtctatggaaggattgtctgcaaagtctgttgtggtgagctttttgtgtcagcttatagttttcctctatctactcgataatgagacctcatggatgatactggcaagttctggaattggttgttgcatcgagttttggaagatagggaaagcaatgcacatagaggtcgatagaaccggaaagatacctatgttgaggttccgagatcgtgattcatatgcaagcaataaaactaaggaatatgatgatatagcaatgaagtatttgtcctacgtgctcttcctccttgttgcaggct

SEQ ID NO: 233573 - DNA, 402 bp, Gossypium hirsutum
  unsure (1)..(402): unsure at all n locations
caccgccataagcgaaatcaaaagccagcagcgctgcagctaaaagaggggtggtttgacaattattcgccatgggtaaggttcacggatctctagctcgtgctggtaaggtgagaggccaaactcctaaagtggccaagcaagacaagaagaagaagccccgtggccgcgcttacaagcggatgcaatacaaccgccgcttcgtcaccgcagtggttggatttggcaaaaagaggggacctaactcatctgagaagtaagagatctatgtangtgaaagaaggcaagaagccttgttgaaagctttgatggattttaagtctttgttttcttttgataatgtttttatgatactggtttcaaggattggattgaactacccatttgtttgctagatattat

SEQ ID NO: 233574 - DNA, 342 bp, Gossypium hirsutum
ggattgattaattttaaaaatcttccattattgttctctcagtctccctttgggtttagatctcataaaagctctaatctgatggctgctaccatcgtttccattaaagctaggcagattttcgacagccgtggaaatccaacggtcgaggttgatgtggaaacatccaacggtaaaaaggctagagccgcagtttcaagcggtgcatccactggaatttacgaggctcttgaactgagagatggaggttccgattaccttggtaaaggtgtatcaaaggctgttgctaatgttaacacgattatcgggcctgcattgattgggaaggatccaactcagcag

SEQ ID NO: 233575 - DNA, 408 bp, Gossypium hirsutum
tgcatattatatcactgcaccatcaagcttagctgagatggctgccagtgcggtccatgcgttgttctatcttgtgtttatgatatcagcatgtgcattgttctcaaaaacttgtattgaagtctcacggtcatctgctagagatgttgccaagcagctcagggaacaacaaatggttatgcctcgccatcgcgagggaagcttacagaaagagctaaggcgctacattctcacagctgctgcattcggaggcatgtgcattggtgcactcacagtattggctgatcttatgggatcaattgggtcatggacggttattcttctcgcagtcacaatcatctatcagtattttgagacttttgagaaggagaaggcgagttatcttggcttctttggactgtgagctta

SEQ ID NO: 233576 - DNA, 420 bp, Gossypium hirsutum
cggacgcgtgggttgtatttcatactcatttagcccctttcattagcatcgaggtcactccagttttctttatcactgaaaaatgtcttgctgtggtggaaactgcggctgcggttctggctgcaagtgtggcagtggctgtggaggatgcaagatgtacccagacctgaacgttgccgagatgaccacaactgagactctggttcttggtgtagcaccccagaaagcacactttgagggagctgagatggaattcggggctgagaacggctgcaagtgtggagacaactgcacctgcaacccttgcaattgtaaatgattagagaccaaagccaaagctccctggaagcagagacgcctttgtctttaagaaataatatgtcttgttgtttatgtgtttttagaataaagtagccatgg

SEQ ID NO: 233577 - DNA, 416 bp, Gossypium hirsutum
gttttcttcttatttatcttcttgaattctctcaagaaagccctaaatgcgcgtgggatcaggtctcatcttgtggttgttaagcctatttgatcaactaagtttcatgtctgatctcgacgtccagattcctactgcctttgatccctttgctgatgcaaatgctgaggactcaggtgctggtgcaaaggagtatgtgcacattcgtattcagcaacgcaacggtaggaaaagcttgacgactgtccaagggttgaagaaagaattcagctacaacaagatactcaaagacctcaagaaggagttttgctgcaatggtactgtcgtccaggaccctgaattagggcaggttattcaactgcaaggtgaccagcgcaagaatgtgtcaaccttccttgttcaggctggcattgtga

SEQ ID NO: 233578 - DNA, 415 bp, Gossypium hirsutum
gttgccctggactatgagcaggaactggagactgcgaagagcagctcatctgttgagaagaactatgagttgcctgacggacaagtcattactattggagctgagagattccgttgcccggaagtcctcttccagccatctttcatcgggatggaagctgctggaatccatgaaactacctacaactctatcatgaagtgtgatgtggatatcaggaaggatctctacggtaacattgtgctcagtgggggttcaaccatgttccctggtattgcagaccgcatgagcaaggagatcactgcacttgctccaagcagcatgaagattaaggtcgttgcaccaccagagagaaagtacagtgtctggattggaggatctatcttggcatcactcagcaccttccagcagatgtgga

SEQ ID NO: 233579 - DNA, 416 bp, Gossypium hirsutum
gaaaaaaagttcctttatgggagcttctttggttctcagtcgttgccaatacttcaatcaccgggatgaacttgagccttatgctgaattcagttggattttatcagatttcaaagctaagtatgattccagttgtttgtgtgatggaatggatactacacagcaaacactattcggacaaagtcaagatttctgtccttgtcgtggtggttggtgttggtgtttgtacagtcactgatgtaaaagttaatgctcaaggatttatttgtgcctgtgtcgctgtcctgtctacctccttacagcaaatttcaattggctccctacaaacgaagtactcgataggctcatttgaattgctcagtcaaacagctccaatccaagctctgtctcttttgttgttcggtccctttgttgat

SEQ ID NO: 233580 - DNA, 410 bp, Gossypium hirsutum
  unsure (1)..(410): unsure at all n locations
aaaaatcatatcctcagaaaaaagaaaaaaaacgcaaagaaaagagaaaatgggtactttgggtggaattagccaggtcgatggaagcgccaatagcctggagattgaaaacctcgctcgttttgctgttgatgaacacaacaagaaagggaatacgatgctacagtttaagaaggtgacgaatgtaaaacaacaagtggtttctgggactatgtattacataacattggaggcgatggatggtgacaagacgaaagtttatgaagccaaggtgtgggacaagccatggatggatttcaaggagttacaggatttcaaggttattggcgatgctcccgccggttgtacttccaccgcttaaggtgactggagattgtagaggaaaggatatcangataccgaatgcgggt

SEQ ID NO: 233581 - DNA, 419 bp, Gossypium hirsutum
ggaaaatcatgggtgccaaagttcttttcttctttgctttgctttccttttgagctgtctcggcatttgcacaggatgaggaagaccaaggtcttgttatgaacttctacaaggattcttgtcctcaggctgaagacattatcaaggagcaagttaagctactgtacaagcgacacaaaaacactgctttttcttggctgagaaacattttccatgactgtgctgtccagtcatgtgatgcttcactgctgctggactccacaagaaggagcttgtctgagaaggagacagacaggagctttggcctaaggaatttcaggtacattgagaccatcaaagaagctgtagaaagggaatgtcctggagttgtttcttgtgctgatatccttgttctgtctgctagggaaggcatcgtttcg

SEQ ID NO: 233582 - DNA, 419 bp, Gossypium hirsutum
tctctctcggaacttgcatctctatcagataaagcgaaatctgacaaaattgatggcctcacgtgacaagaaatctgcgaagccgtcgagcagccgcgccggtggaatacgcacgctctcggatctgaaccggccctctggacccgattccgacagcgattccgatgatccccaggagtactacactggtggcgagaaaagtggcatgcttgttcaagatccttcaaagaaaaatgatgtagatgaaattttcaatcaagctaggcaactgggagctgtagaaggtcctctcgagcatcctcgtccatcaagttcaacaagttttactggaaccggtagattactctcaggggaaactgttccttctgcacctcagcagcctgattccattattcacaacatagttttctggaccaacg

SEQ ID NO: 233583 - DNA, 402 bp, Gossypium hirsutum
tttcagtaaagaagcaataatggaacttaaagctaaagctaacaactttcaagtgagacgccggcgattttaacgccgccggtgaacttatggggaaacaaagtaacgacaaatataaacccataccggagatttcatcttttcagtcactttccgctctactctggcgagccgtcacgcgtgggaggaagttaccggcttcccaaacgacgacgtttcgcatggcggtgaattgtcgtcaccgattaaacccaaagcttaatccattatactttggtaacgctattcaaagcatcccaacatacgcgtcagcaggtgacgtcacgtcacgtgatctacgctggtgtgcgcaacgattgaatgagaacgtgaatgcccaccatgatgaaacggtgcgtcgtt

SEQ ID NO: 233584 - DNA, 420 bp, Gossypium hirsutum
actccgccatcttcaataatttcttccgttgatctttgttagagattagcttgttaatttttcattatgggaaagatcaagatcggaatcaatggatttggaaggatcgggcgtttggttgcgagagttgctctccaaagcgatgatattgagctcgttgctgttaacgatcctttcatcaccactgaatacatgacgtacatgtttaagtacgacagtgttcacggtcaatggaagcatcatgagcttaaggtgaaggactcaaagacccttctctttggtgaaaagcctgtcacagttttcggtatcagaaaccctgaggaaatcccatgggctgaggctggagctgagtatgttgttgagtctactggtgtttttactgacaaggacaaggctgctgctcacttgaagggtggcgcg

SEQ ID NO: 233585 - DNA, 421 bp, Gossypium hirsutum
caacctttctcagcttaacaacaacaacaaaatggcttcttttatcactccagctgtcttaaaaatattcctcatcatctctttgtttcaaatctgtttgggtgtacgaaagctgagtgaagtggttgaggagcagcctcagctcttgaaataccacaacggtcctctcctttcaggcccaatcaccgtcaatctcatttggtacggcaagttcaggccttccgagagggctattatctctgattttgtcacctccctctcttctaacccttcttcaccctccctaaaaacccaacccacggtggctcagtggtggcggaccaccgagaaatactaccatctcgcctctaagaaatcgtctctttccttgtctttggggaagcagatccttgatgaacactattcgcttggcaagtctctc

SEQ ID NO: 233586 - DNA, 417 bp, Gossypium hirsutum
cactcctccactgactttcaccaccaccgtcactagcggcgccgtcacagagtgtcgtcaacggagtctctcatcctccaactccatgaaatctctgccgttaaattcggtaacttcaagctgaaatctgggatcttctcccctatctacatagacctccgtctcatcgtctcttacccttccctcctccaccaaatctcccactccctcctctcctctctccctccccaaacacactttaacctcatatgcggtgtcccttacactgccctccctatagccacctccatctctctcgacacctccatccccatgctcatgcgccgcaaagaagtgaaagactacggaactgccaagtccatcgaaggtgtttacgaaaagggtcaagcttgtttggtggtggaagacctcgtaacg

SEQ ID NO: 233587 - DNA, 409 bp, Gossypium hirsutum
cggacgcgtgggttcttattgattttgcagatcggttctctaatccttgttgtggggtgtagcgttgtttatacgtttggttgttgttgaagaagtgctactaccatggctacaaagaagagcgttggggacttgaaggaagctgatttgaagggaaagaaagtgtttgttagagtcgatctgaacgttccattggatgataacttcaacataactgatgacacaaggatccgtgccgctgttcccaccatcaagtatttgatgggtcatggctctaaagtcatcctctctagtcatttgggacgcccaaagggtgtcactcccaagtacagtttgaagcctcttgtgccaaggttatctgaactccttggagtcgaggtttaaatggcaaatgactgtattggtgaag

SEQ ID NO: 233588 - DNA, 417 bp, Gossypium hirsutum
ccaggattgaagagataagattatagtgaaaaactaaacataataaagccccttcgacttgcttcattgatttgccctctcaaagcccaagaaaaatggcttctgcttccgctactctcctcaagtcttcacctattatcgacaagtccgagtggattaagggccaaaacctccgccacccttcggtttgttttgtacggtcacaccctacatcggccgcctttgccgtccgtgctagttcatatgccgatgagcttgttaagaccgcgaaaactgttgcatctccaggtcgtggtattttggccatggatgaatcaaatgctacatgtgggaaacggcttgcctcgattggtctcgagaataccgaggcaaaccggcaagcttaccgtacccttctcgtgtctgcccctggcctcg

SEQ ID NO: 233589 - DNA, 412 bp, Gossypium hirsutum
gagctacttaaccatttcccaaatctcctccctcctcttctttagcgtccttggcatttccgctcatgcagcgcgctttgaaatccgcaatgagtgctcctacaccgtctgggcagcagcctctcctggtggtggccgtcgcctagaccctcggcaaagttggaccatcgatgtgcctgctggcactgctatggctcgtatttggggtcgaaccaattgcaatttcgatgccagtggtaggggtcattgccaaaccggtgattgtggtggactccttcaatgcaaaggttggggtgtacctccaaacaccctggctgaatatgcacttaaccaatttggaaacatggatttctacgacatttccttagttgatgggtttaacatccccatggtgtttggtccaactaatggc

SEQ ID NO: 233590 - DNA, 416 bp, Gossypium hirsutum
tttaatttttcttggtttcatttggtagcagaaacatggagttctcgctcagacttcagtattaccgtcttgtgtgtgtcatggtgctattacctgcactgtgttactcaaaggactatttcgtgaagtccagagcaacttactatggcagttccgacggcttaggcactacaagtggagcttgcgggtttggagaatacggaagaaatatctctagtggcaatgtcgctggggtttataggctctacaagaatggagttggctgtggtgcttgctatcaggttaggtgcacaacaaaccctcaaatctgtactaagaaaggggtgaacgtagtggtgactgactatggccaaggcgacaacaccgatttcatcctcagccaccacgcatatgaagcgatggcacgaccaggcacc

SEQ ID NO: 233591 - DNA, 420 bp, Gossypium hirsutum
agatatcactgcaagaaaaaaaaaaaaaccagacatggcttccaacactgttgcatccgctgctcttcttcttaccttgaacttgttgttcttcactttggttagctctacctacgtgccttgcccaccaccaccaaagagccacaagcctacccacaaaagcccaccctcggcacctgaacagccaggcacttgccccagagatgcactgaaactaggcgtttgtgctgatttgttgggctcagtgcgcgttgttgttggaccgtcgaggaccaaatgctgctctctcatttcgggtttggctgatctcgatgctgctgtttgcctttgcactgctattaaagctaatgtgttgggggttaacctaaacgttcctgtttcattgtctttgctcctcaattcctgcgaaaagcaaatgcc

SEQ ID NO: 233592 - DNA, 420 bp, Gossypium hirsutum
tttcttttaagataacccccaaaaatgtgtggaggtgcaattatttccgattgcggcgccgtgaaacatgacccgaaattgaccggcgatgacctttggtctgaaattgacatattctccgacctcctaggtttcgacaacaatggcaaaagctttgtcaatcatcagtttcataacaacaacaagaagctgatcaatccaaaagacaatcaacttaacaaagagagaagcgagacgattcagaagacaagccgagtcactaaaaatgttgaaaagactcagcgaactcggaaaaacttttaccgaggaataagacaaaggccatggggcaaatgggcagctgagattagagaccctcaaaaaggcgtccgagtttggctcggtacccataacacagccgaagaagcggctcgagcctac

SEQ ID NO: 233593 - DNA, 333 bp, Gossypium hirsutum
gaatgtccgatctccgcagagtgcttagcattcagctgatattagatgggtggaggcaagcaactgatctcaggcatggagaatgtcaacgaccaagaacacatagatgcacagcagtgtgaaaaatccatgccgtcatctgaagaggaggatgcacctataaggaaaaaatatggtgggatgaagcctaagaaaccaccactcatttctaatgaccacgaacgtgcatactttgactctgctgatagggcacttgtaaagcaaggtggtgagaaacccaaacgaccacttgaagacctaccgcccaaattggaatccacacaacaacctaca

SEQ ID NO: 233594 - DNA, 422 bp, Gossypium hirsutum
cggaattcttattccttttatatttttcctctccaattttccgtcactttcgcgagaaaatgagagaaatccttcacatccaaggtggccaatgcggcaatcagataggagccaagttctgggaagtcgtatgtgccgaacatggcatcgattcaacgggtcgatatggtggtgactcggagctccagcttgagcgaatcaatgtttactacaacgaagccagttgtggccgttttgttccccgcgcagttttaatggatctggaacccggtaccatggatagcgtaagatccggtccttacggacaaattttcagacccgataacttcgttttcggacagtcgggcgccggaaacaattgggctaagggacattacactgaaggagcggagcttatcgattccgttctcgacgtagttaga

SEQ ID NO: 233595 - DNA, 477 bp, Gossypium hirsutum
  unsure (1)..(477): unsure at all n locations
cgnntccgggaggggaagcccnnttccaacttactcnnnaactatgnnnttaatacctnntggatggaagctcnngtgatgannnactggtgnnntagccctnnacttcttgggcnnaacttggacnncagggccnntggactgccnnngaagaaaanncagacacannctgatctnnacttaatnnaagtatctctttacttnngtgtgggagaaagtgganccatgaggcnnaagttgagaagaaccatccagtnnatttgatcggttcaaaggaatggatccgggtacccggagaatagtccttatcntgggattcatctacacnaacattccaagaaagggcaacttttatctcacatgggaatacagctaggctagccaaggtgcatggtgacatgaatttggctcagttatgtggttcaattgcggcagatgaaaagcgccacgagacagcatacactaaaatccttgaaa

SEQ ID NO: 233596 - DNA, 411 bp, Gossypium hirsutum
ttctacttttcgccaggcttcaatgttttgttgacctctcaacttgcttaggggcctttggttgtcgtcgttgtttttcgtgaaaatggcggtggatctgatgagttttcctaagatggatgatcagatggccattcaggaggctgcaacgcaaggtatgaagagcatggagcacctgattagcctcctttctcaccagtctaaccgactcgactgcgctgaggttgccgatctcaccgtctctaagttcaaaaaggtcatctcactaattaacagaaccggtcacgctcggttcagacgtgcaccgattcagtcctcttccttttcctcatcgtcatcatccgctgcttctctaactgttactgattcccacaaggctctaactcgaactcctgccccggttgaaacacc

SEQ ID NO: 233597 - DNA, 411 bp, Gossypium hirsutum
cttcaattcctcatttcaagggagagagtgtatcagtgtttcttcccctctttacttaatttctctccgccatggctctctccgtcgagaaaaccgccgccggccgtgagtacaaggtcaaagacatgtctcaggctgacttcggtcgtctcgagatcgagttagctgaggttgaaatgcctggtttaatggcttgtagaaccgagttcggccctgcccaacctttcaaaggagccaaaattactggttctcttcacatgaccatccaaaccgccgttcttattgaaacccttaccgccctcggagctgaagtccgttggtgttcttgcaacattttctctacccaagaccacgctgccgctgccatcgctcgtgactccgccgctgttttcgcttggaaaggggagaccc

SEQ ID NO: 233598 - DNA, 394 bp, Gossypium hirsutum
cgcctggtagtgcttcaacttatcaggtaactgaagaatctgttgttgtgtgtgatgtcataaacctctccaatggagattgaccctaaacctgattctgaaaatgacgccctctttctcgttaagcaaggagctgaagctagagttttcgagtccgtattcgctgaaaaaaggtccatcatcaaagaacgcttctccaagaaatacaggcaccctgctcttgattctaagctcactctcaagcgtttaaacgcggaagctaggtgcatgaccaaggctcgacggcttggcgttttaactacggttctttacgccgtagaccctgtgatccataccctgactttcgagtacgtcgaaggcccttccgttaaagatgtttttctcggaattgggt

SEQ ID NO: 233599 - DNA, 420 bp, Gossypium hirsutum
ctaagatatcactgcaaaaaaaaaaaaaaaaaaccagacatggcttccaacactgttgcatccgctgctcttcttcttaccttgaacttgttgttcttcactttggttagctctacctacgtgccttgcccaccaccaccaaagagccacaagcctacccacaagagcccaccctcggcacctaaacagccagccacttgccccaaagatacactgaaactaggtgtttgtgctgatttgttgggctcggtgcgcgttgttgttggaccgtcgaggaccaaatgctgctcactcatttcgggtttggctgatctcgatgctgctgtttgcctttgcactgctattaaagctaatgtgttgggggttaacctaaacgttcctgtttcattgtctttgctcctcaattcctgcgaaaagcaa

SEQ ID NO: 233600 - DNA, 422 bp, Gossypium hirsutum
cgataaataaaaaatgagctttcttcaggccttgtcagttttccttttgtttttggggtatgtagtcgtaggatcagctgagcagtgtggaaggcaagcaggtggtgctctttgccccggtggtctatgttgtagccaatttggctggtgtggcagtactgctgactactgcacagttcctggttgccaaagtcagtgcagcggtagtggccctgcccctgggcctggtgggctaaccaatcttatatcaagagagacgtttaatcggatgcttttgcataggaacgatggggcttgtcctgcccgtggcttctatacatatgatgctttcattgctgctgcccgttcctttcctgcatttgctacaactggtgaccaagctactcgcaagagggaaatagctgccttcttagcccaaactt

SEQ ID NO: 233601 - DNA, 420 bp, Gossypium hirsutum
gatgattcccatgagaattcaagtgactaggatagccacactccttgtgttggtggcattaattttgggtcaaaaaggagctgaggccaggaaaggaaggatattggagtcgtttgagtacatagctatgagttgcagagcgcactctgcatcaataactgattttggaggaattggtgatgggaaaacatcaaatactaaagcatttcaagatggagtaaatcatctgagccagtatgcaaatgatggcggggctcagttatatgttcccgctggacaatggctgactgggagctttagcctctccagccatttcactctctatcttcacaaagatgctgttctccttgcttctcaggatatgagcgaatggcctgttttgaaggctttaccgtcgtatggtcgaggaagggatgcagc

SEQ ID NO: 233602 - DNA, 416 bp, Gossypium hirsutum
acttctttcactttcaaaaccaaaactagaagatcggggagagaagatggcggccggcgatcacaccgttttgcagctcagtacgccttcaacggcgaacctatcggccaaggttcatcctctcgtcatctttaacatctgcgattgctacgttagacgccccgaccaagccgagcgcgtaattggcacgctcctcggctccgtccttcctgatggcaccgttgatatccgtaactcctatgccgttcctcacactgaatccgccgaacaggttgctttggatattgaataccatcataatatgttagtctcccaccaaaaagtgaatccaaaggaagtaattgttggatggtattctactggccttggagtcacaggtggtagtgcattgatccacgatttttattctagggaag

SEQ ID NO: 233603 - DNA, 439 bp, Gossypium hirsutum
catctgcactgtaccttgcagccgtaaaaggaaatgctctggacaaggttgagtgtgaacttcttgaccttgttcaggcatcaaaaaacagtcaattgttttctcaattcactaaggacttgtcagtacctgcagagacacgggtcaaagccattaatgagatatgtgggcaagctaaattttcagatcttacaaagaactttttagttatactagctgagaatggaaggctaagacatatagaaagcattgcaaagagatttgtggagttgaccatggctcataagggagaagtgaaagctattgtcacaagtgttattccccttccttctcaggaggagaaggaactaaaggagacgttgcaggaaataattggacaggggaagcaggttaagctggaacagaagatcgatcctagtattcttggtgggcttgtcgt

SEQ ID NO: 233604 - DNA, 433 bp, Gossypium hirsutum
attcccatttccaatctccagctcccaaggtaaatatgccgatcagaaacatagcagttggccggcccgaagaggcgactcaccccgatgctctcaaggcagctttggctgagttcatctcaaccttgatcttcgttttcgctggatcgggctcaggaatggcttttaacaagttgaccgacaacggagcaacaaccccggccggtctcgtagccgccgctctagctcatggcttcggtcttttcgtcgctgtctccgttggcgccaacatcttatgtggccacgtcaaccccgccgtcaccttccgtgctttcgttggcgggaacatcactctcttgcgcggcattctttactggatcgcccaactgctaagctcaaccgtcgcttgcctgttgcttaagttcgctaccggcgacctggctgtaccagcttt

SEQ ID NO: 233605 - DNA, 434 bp, Gossypium hirsutum
ctttaaaatatagagaaaagagggaccaaagtgaaagaaaatcgaagtatagatgggattttcaatctgcattttcagggtgtggaacaatgggtgcaggtggcagaatgtcggttcctccaagtcaaaggaaacaagaatcgggctcaatgaaaagagcccctatatctaaaccaccatttactctcagtgaaataaaaaaagccatcccaccacactgtttccaacgctcacttatccgttcattttcctatctcgtttacgacttcattttagtctctatcttttactacgtagccaccacttacttccgcaacctccctcagccactatctttcgtcgcctggccaatttattgggctcttaaaggttcattcttactggcggttggttatcgcccatgaatgcggtcaccacgcttttagcgattacca

SEQ ID NO: 233606 - DNA, 432 bp, Gossypium hirsutum
gaaagaagctgctgagatgaacaagaggtcattcaagtatgcttgggtgcttgacaagctcaaggctgagcgtgagcgtggtatcaccattgatattgccttgtggaaatttgagaccaccaaatactactgcactgtgattgatgcacctggacaccgtgactttatcaagaatatgattactggtacgtcacaggctgactgtgctgttttgattattgattccaccactggtggttttgaggctggtatctcaaaggatggtcagactcgtgagcacgcattgcttgcttttacccttggtgtcaagcaaatgatttgctgttgcaacaagatggatgccactacccctaaatactcgaaggctaggtatgatgaaattgtgaaagaagtctctcctacttgaagaaggtgggatacaaccctgacaag

SEQ ID NO: 233607 - DNA, 433 bp, Gossypium hirsutum
cgtttaagctctagctctcttcgaaaaatcaaggttattttttttaatcttctctggtcttcagctccctcttgaatttcattgaaaagaaaaatgcctaggtatgatgaccgccgcggtagtggtacacgcctttatgttggtcacttgtcttcgaggacaaggtcacgtgatcttgaggacatgtttaggagatatgggagaatacgtgatgtggatatgaagcgtgactatgcattcgttgaattcagtgaccctagagatgctgatgatgcaagatattcattgaatggtagagaccttgatggaagccgtatagttgttgaatttgccaagggggtgcctcgtggccctggtgggtctagtgattaccctggaagaggtcctgctcctggagcagggcgctgcttcaactgtggaattgatggtcact

SEQ ID NO: 233608 - DNA, 438 bp, Gossypium hirsutum
accccactcattctcaatcccgtcagcacctcaagtgcttcctttcaaggtgatccatctgcagactacttcattggagtcaatggcatcaccattaatactaaaccagtgtcattcaacaaaactttgctttccatcaacaaagaaggccaaggcggaaccaagatcagcactgtcactccctacactgtgatgcaaacatcaatctacagagcagtagttaatgcttttatcaagcaaacttccaaggttgccagggttccagcagtggctcctttcagtgcatgttacaatgctaaaagccttggcagcactcgcgttgggccagcagtgccacaaatcgatctcttgctaccaaacaaagtggtatggagaatatttggagcaaactcaatggtgccaggtaacaaagacgtattgtgtttagggtttgtagat

SEQ ID NO: 233609 - DNA, 354 bp, Gossypium hirsutum
atcaatttgaagccttcttcgaatatcctcattcaagatgcaaattggggtcaaggcccttactggaaagaccatcacattggaggtggaaagttttgatactattgacaatgtaaaggccaagattcacggcttggaaaggatcccccctaaccagcaaagggtggtctttgtttgtaaaccacttggggatggccgcacgttagctgattacaacatgcaaaaagggttcacacttcaactaatgctttcgcttcaggggaggatgcaaatttttgttaaaaatttgactgggatgacccttacattggaggttgagaggtcacataccatttataatctttaggcaaaaat

SEQ ID NO: 233610 - DNA, 425 bp, Gossypium hirsutum
caacgactctgttactaagagcaagttcgataacttgtatggatgccgtcactcacttcccgatggtttgatgagagctactgatgtgatgattgccggcaaggtcgccgttgtctgtggttatggtgatgtcggaaagggttgtgctgctgccttgaagcaagccggtgctcgtgtcattgttactgagattgatcccatctgtgcccttcaggctctcatggaaggacttcaagttttgaccctaaaagatgttgtctccgaggctgatatcttcgtcaccacaaccggtaacaaggacattattatggttgatcacatgaggaagatgaagaacaatgccattgtttgcaacattggtcactttgacaatgaaatcgatatgctcggtcttgagacctattctggtgttaaacgcattacca

SEQ ID NO: 233611 - DNA, 401 bp, Gossypium hirsutum
gaagacagagagagttggagggaatgtcgtttagagggaagaggaaggatggagagggtctcggttccgacgagaacgacgatcacgcgcctcctaataaagtctcgaagatttcttctgcagtcgactctgacgattccgacgatgtcgtcgtctgcgagatatccaagaataggagagtttcagtgaggaactggaatggcaagatttgggttgatattcgtgaattttatgtcaaggatggtaaacaattgcctggcaagaaaggtatttctctaagtctggaccagtggaatgttctacgtgatcatgcagaggcaatcgataaggcacttgctgagaactcgtaggaagtagacatatggtataccaagggaatctaaggaccttttcatatattt

SEQ ID NO: 233612 - DNA, 440 bp, Gossypium hirsutum
cttgcattgagtctctaagatatcactgcaaggaaaaaaaaaaaaaaaccagccggggcttccaacactgttgcatccgctgctcttcttcttaccttgaacttgttgttcttcactttggttagctctacctacgtgccttgcccaccaccaccaaagagccacaagcctacccacaagagcccaccctcggcacctaaacagccagccacttgccccaaagatacactgaaactaggtgtttgtgctgatttgttgggctcggtgcgcgttgttgttggaccgtcgaggaccaaatgctgttcactcatttcgggtttggctgatctcgatgctgctgtttgcctttgcactgctattaaagctaatgtgttgggggttaacctaaacgttcctgtttcattgtctttgctcctcaattcctgcgaaaagcaaatgct

SEQ ID NO: 233613 - DNA, 395 bp, Gossypium hirsutum
gttttgtatttcatactcatttagcccctttcattagcatcgaaatcactccaggtgttctttatcactgaaaaatgtcttgctgtggtggaaactgtggctgcggttctggctgcaagtgtggcagtggctgtggaggatgcaagatgtacccagacctgaacgttgccgagatgaccacaactgagactctggttcttggtgtagcaccccagaaagcacactttgagggagctgagatggaattcggggctgagaacggctgcaagtgtggagacaactgcacctgcaacccttgcaattgtaaatgattagaggcccaaagccaagcttccctgaaagcagagacgccttttgctttaaaaaaaaaatatgtttggtggttatgagttttt

SEQ ID NO: 233614 - DNA, 142 bp, Gossypium hirsutum
gaaccttcaatttttcgtaggagagagcatgcatgatgatggatgcttggcgttggatgactagaaggatggtgctgttgacccaacatttttgtactatgcatatgcattgaatgaggtcaagtgctgaggtttgaagcac

SEQ ID NO: 233615 - DNA, 440 bp, Gossypium hirsutum
aagcaagttcagagttggtgatattgttggcgttggttgtattgttgggtgttgcggaaactggcgaccatgcgactcagacaatgaacaatactgtcttaagaagatctggtcgtacaatgatgtttacactgacggaaaacccacccaagggggctttgctggttccatggtcgttgatcaaaagtttgtggtgaatatcccagaaggaatggcaccagaacaggtggccccgctgttatgtgcaggggtgacagtttacagcccattgaatcactttggtttaatggggagtgggttaaggggaggaatattgggacttgtaggtgtagggcacatgggggtgaagatagccaaagcaatggggcatcacgtaacagttataagctcatctgataagaaaaaagtggaggctttggagcatcttggtgctgatgact

SEQ ID NO: 233616 - DNA, 440 bp, Gossypium hirsutum
tagcactgtccgtttgacgcaaaaaaaacaaagacagtgagggacgtaagctaaagccttttgtgctttttcatccgttgaaggaatggcttcagatcctaaagtgcacactttcgaggaggttgccaaccacaacaaaaccaaagattgttggctgattatttctgggaaggtttatgatgtaactccgttcatggatgatcatcccggaggtgatgaaattttgctgtcagctactgggaaggatgccaccaatgattttgaagatgtgggtcacagtggttcagcaagagaaatgatggaaaaatactacattggtgagattgatccaaaaactgtcccagcaaagcgcacttaacattcaccacagcaaacgccttacaatcccgataagacccctgagtttgtcaacaagatcctacaatttcttgttcccctct

SEQ ID NO: 233617 - DNA, 437 bp, Gossypium hirsutum
cttgtcttctttacttaaatggaccaggtctaccactaaagcaccccaatcagatggcaatgttcttcaatttgagaatgggtacttagttgagactgtagttgaaggcaatgagataggagttgttccttacaaaattcgggtctccgaggatggagaattatttgctgttgatgaagttaatagtaacattgttaagattactccaccattgtctcaatatagccgaggaagattggttgccgggtcatttcaaggttacacggggcatgtggatggaaagccaagtgacgctcgtttcaatcatcccaaaggtgtaaccatggatgataaagggaatgtatatgttgctgataccatgaatcttgccattcgaaagataggagatgcaggtgtcacaacgattgctggaggcaaatcaaatattgcaggatata

SEQ ID NO: 233618 - DNA, 153 bp, Gossypium hirsutum
ctttccccagggacaacatgatctatcgggagaggcattgtcccagggaggaagagaaggttcattgtcttgtcccggcacctaaaggatacgtgacccgcgttccttggcctaaaagtagggactatgtgccttatgctaaagctccctata

SEQ ID NO: 233619 - DNA, 316 bp, Gossypium hirsutum
attttctcctttttatctttaaaacacgcacccaaaaaataaaaccctttgaaaaccaaagaaggaagaagaagatgtcgtggcaagcttatgtagatgatcacttgatgtgtgaaatcgaaggaaaccatctctttgccgccgctatcatcggccaggacggcagcgtttgggcccaaaacgccaggtttcctcagctcaagcctgaagaaattagtgccatcatgaatgactttaatgaaccgggttcactcgctccgaccgggttgcacctcggtggcacaaaatacatggtgatccaaggcgaaccgggagc

SEQ ID NO: 233620 - DNA, 421 bp, Gossypium hirsutum
gaaaaacttaatcatggctcggttgacgttggtgtcctccatcatccttctgctaggctccgtcgccgccggatcaactttcgaggactccaaccccatccagatggtatccgatggcctcagcggcttcgaatcctccgttcttcgtgtcatcggtcacactcgtcatgctctctccttcgcccgttttgcatacaagcatgggaagaggtatgaaaacgtggaggagatgaagctacggtttcagattttcaaaggcaacttggatttaatcagatccactaacaagaagggactgccttacactcttgctgtcaatcagtttgctgattggagctgggaagagttccagaaacacagattgggggctgctcaaaactgctctgctaccacaaagggcaatcaccagctcactgatgtc

SEQ ID NO: 233621 - DNA, 430 bp, Gossypium hirsutum
gaaggttactagtgtaaaatttgtagcccagaatgatgtatttttaagtagttcagcagataagactgttcgcatttggcaagggtctgaagatggaaagtatgattgcaggcatattttgaaagatcatacagctgaggtgcaagctgtcacagtccatgccactaacaactactttgtaactgcttcacttgacacgacgtggtgtttttatgatctttcgtctggtttatgcttgacccaggttgaagacctatcaaattctatgggctatacgtctgcagcttttcatcctgatggccttatccttggaactggcaccactggagctactgttagaatttgggatgtgaagagtcggggaaatgttgccaactttgatggacacactggggctgtaacagccatatctttctcagaaaacggttac

SEQ ID NO: 233622 - DNA, 352 bp, Gossypium hirsutum
cttggatttaaagagatttcagttggaaatgctgtgcctgtatggtacaacatgggcaatcaaggtcttgttaatgaaccagttttttcattttggctcaaccgcaatcctgaggatgatgttggcggagaagtggtttttggtgggatggatccaaaacattacaagggggaacacacttatgttcctgtaaaacagaaaggatactggcagtttgatatgggtgatgttctgattggtgaccaaacaactggactttgtgccagtggctgcagtgctattgttgattccggaacttccttgttgactggacctacggctgttattgctcaagtcaatcatgctattggtg

SEQ ID NO: 233623 - DNA, 374 bp, Gossypium hirsutum
cttacaatgccactttgtctgttcaccaattggttgaaaatgctgatgagtgtatggttctggacaatgaggccttgtatgacatctgtttccgcacacttaagctaaccactcccagctttggtgatttgaaccatttgatatctgcaacaatgtctggagttacatgctgcttgcgattccctggtcagctcaactccgatctcaggaaacttgccgtgaatctcatcccctttcctcgtcttcactttttcatggtgggttttgctccactcacttctagggggtctcaacagtaccgagctctaacagtacctgagctcacccagcaaatgttggacgccaaagacatgatgtgtgctgctgatcctcgt

SEQ ID NO: 233624 - DNA, 419 bp, Gossypium hirsutum
caacgactctgttactaagagcaagttcgataacttgtatggatgccgtcactcacttcccgatggtttgatgagagctactgatgtgatgattgccggcaaggtcgccgttgtctgtggttatggtgatgtcggaaagggttgtgctgctgccttgaagcaagccggtgctcgtgtcattgttactgagattgatcccatctgtgcccttcaggctctcatggaaggacttcaggttttgaccctagaagatgttgtctccgaggctgatatcttcgtcaccacaaccggtaacaaggacatcatcatggttgatcacatgaggaagatgaagaacaatgccattgtttgcaacattggtcactttgacaatgaaatcgatatgctcggtcttgagacctatcctggtgttaaacgca

SEQ ID NO: 233625 - DNA, 408 bp, Gossypium hirsutum
ccaaaaacaataacaaaagagagcaaaacaaaaaaaatggagcttaaacctggcttatcaactgtggtcactggccgtgcttccggaattggtaaagctttgtgcttagctttggccttgaaagggatatttgtgacaattgtagatttctcggaagagaaagggaaggaagttgcttctttaattgagaaagagaattccaaattccatcaaaatttaagatttccttctgctatttttgttaaatgcgacgttactagcttaagagatttaaatttagcatttgagaagcatgtctcaacatatggaggactggatatatgcattaataatgctggcatcgcttatacagcacttttctggaaggatcaaactgatggcactaaaacattggaacatactattaat

SEQ ID NO: 233626 - DNA, 442 bp, Gossypium hirsutum
gcaccggcccggacacggtccggaatgtacccacgcgtccgactctacaaacccatatttcccttagaagaagatgcagatctttgtgaaaaccctgaccggcaagaccataacactcgaggtcgaaagctccgacaccatcgacaacgtcaaggccaagatccaagacaaggaagggatcccacccgaccagcagcgtctcattttcgctggcaaacagctcgaagacggtcggacccttgctgattataacatccagaaagaatccaccctccacctcgtcttacgccttcgtgggggcatgcaaatctttgtcaaaaccttaaccggcaagaccatcaccctcgaagtcgagagttccgacaccatcgacaacgttaaggccaagattcaagacaaggaaggaatcccacctgaccaaccaggtttgatcttcgctggc

SEQ ID NO: 233627 - DNA, 379 bp, Gossypium hirsutum
cggacgcgtgggcggtctgttcattaaaacagtgccacatgtagggttaaggagagttttaccagtttaacttcatttcatttgattcaacaactactacagataaaaggaactgaaagcattctacatttcaaaatccggtgtcaaaggtttggtaaatgctggaatcactaatgctcctcggatgtttatgacgatatacatttcatctaacactttactgacaacctagaaaacccaatacaaatttggttttattagtttacaaagtattgaatatgatcctagatctcttatagagatcattgttgaagttaggcattcattagatacatgggtctattttcagattgttaaccatggttatactgtatgtgtt

SEQ ID NO: 233628 - DNA, 378 bp, Gossypium hirsutum
gaaaaacttaatcatggctcggttgacgttggtgtcctacatcatccttctgctatgctccgagggcgtcggatcaactttcgaggacttcaaccccatgcagatggtattcggtggcctaagcggcttggaatcctccggtctttgggaaaaacgtcacacttgtcatgctgtttccttcacccgttttgcatacaagcctgggaaggggtatgaaaacgggggggagatgaaactactggttcagatttttaaaggctacttggattgaattagattcactaacaagcaggggccggcttacaattttgctgagaatcagtatggtgattggagctccgaagagtttcaaaaacacagattgggggctggtcaaaa

SEQ ID NO: 233629 - DNA, 401 bp, Gossypium hirsutum
tgttgagaagcaaggtatgagtgatactaggttcttggagaatgggaagtactacgatgatgtgagttctgagaacaactactacccgaaccggttcgagaactcgaggggagtcggttcgaggaacgagttcaacgagaaccgttacaataacatgggaaaatataatcagaatcaagaggagttcgaagaagagttcgagccatgaaaccacacgtatatgctaattaattagcaaaaaagagagtaaggaaagaaggggttatttattggggtttgtgttttaatttggggacccttttaatttaatttgcggggttggatagtttccttggctttggatatggaaagcttaaaagatatgataatggagcctaatctttttaacttttttaaaccag

SEQ ID NO: 233630 - DNA, 308 bp, Gossypium hirsutum
gattatttaattcccgttttccaatcttttttgagaaatcggtagcgaaaaatgtcgtcgtcggggaggaagatcacccttaagagctcagacggcgaatcattcgaggttgatgaagcggtggcgttggagtcgcagacgattaagcatatgatcgaggacgattgcgctgataacgggataccgttgcctaatgttacgaggcaaatcttagcgaaagtgatcgagtactgcaagaaacacgttgaggcttctaagacagaccatcgatccccccatgaccagctcaaaaattgggacccttactt

SEQ ID NO: 233631 - DNA, 432 bp, Gossypium hirsutum
aaaaaaaaaaaaccagacatggcttccaacactgttgcatccgctgctcttcttcttaccttgaacttgttgttcttcactttggttagctctacctacgtgccttgcccaccaccaccaaagagccacaagcctacccacaaaagcccaccctcggcacctgaacagccaggcacttgccccagagatgcactgaaactaggcgtttgtgctgatttgttgggctcagtgcgcgttgttgttggaccgtcgaggaccaaatgctgctctctcatttcgggtttggctgatctcgatgctgctggttgcctttgcactgctattaaagctaatgtgttgggggttaacctaaacggtcctgtttcattgtctttgctcctcaattcctgcgaaaagcaaatgcctgctggttacaaatgtgcttaagctcat

SEQ ID NO: 233632 - DNA, 351 bp, Gossypium hirsutum
aagagactgtgcatataaactgaccaactagcccgaccggccaacttaccgtaggccttaaacgatggcgtttcgtaaacctaacatcacaaatggcatacttagctggataaccttccaaggctgaaaagaaaatcttgtacgacgcgaaactgtgccacctgttagatgagcacactcagatctggattggcacacgcgacaaagtatactcgaaccatctctaaaacatgttgtaaagtggctgacactgcatactcagcgtgctgtaatggtgactagcattatgatgcacaacgtggtcaggatgcatgctgagaagactgtgaaccaagctttcattaactttat

SEQ ID NO: 233633 - DNA, 436 bp, Gossypium hirsutum
aaagaaatggataaagtaaagtttgtgatgctgtttgtatttttggttagcttactaggagcaacaatgggcgagcaatgcggtcggcaagctggtggggccttatgccccaacaacttatgttgcagtcagtatggatggtgtgggaacaccgatgattactgttcaccggaaaaaaattgccagagcaattgcagaagtggcccccctccccctacaggagaaggagcgactgtgagatctacttaccatttctataatccagagcaaaatggatgggatttgatggcagtgagtgcctattgctctacatgggatgctaacaagccatattcatggaggagtaagtatggttggactgccttttgtggccccgttggtccttctttcccggctgcttaggggaggtgcctgagggtaagaaactcaaggactg

SEQ ID NO: 233634 - DNA, 415 bp, Gossypium hirsutum
cataagcatagctaatgcccccttccagcttgcgttttataacaccacgcctaatgccttcacccttgcgttacgcatggctacaacacgttccgagtcgctcttccgatgggtttgggaggccaacagggggaaccctgttcgcgagaacgccacgttctctctcgggactgacgggaaccttgtcttggctgatgccgatggtcggattgcttggcaaagtaacactgccaacaaagctgtggtagggttccaattgttgcctaatggtaacatggtgttacacgattccaatggcaagttcatttggcaaagttttgatcatccaactgacacactcttggtgggtcaatcgcttagagccggaggggcgacgaagcttgtgagccgggcttctgctcaaaacaatgtcaac

SEQ ID NO: 233635 - DNA, 435 bp, Gossypium hirsutum
cttgggttaggtgtcctgctactctgccttgcaaaggtttcatctgatctgaaggcagaagaagttataaccaatgtcggtgaggtgggttctttggttaccagaggcggaaacagaagactgatgctagagattgattgtggaggattatgcaagaaaagatgcagtcaacactcgaggccaaacagatgcaacagggcgtgtgggacttgctgcttgaggtgcaagtgcgtgccaccggggacttcagggaacagggaggtctgcgggacctgctatactggcatgaccacccatggaaacgttgccaagtgcccttaacctttacgtcgcccaatatgtgttgcagccatcaaggggaaaaatgaaatgtttgtttgtgtaatatgtatgttggaacttaagatgtcttacctactcctaaaattattagta

SEQ ID NO: 233636 - DNA, 417 bp, Gossypium hirsutum
atggaagtcgtcgtggtaacgatgaagtgatggctcggggaacttttgctaacattcgccttgtgaataagctgttgaatggggaagttggacctaagacaatacatgtccccacaggagagaaactatatgtatttgatgcagcaatgaggtataaagatgcaggacacgacaccattgttttggctggagctgagtatggaagtggtagctcccgagattgggctgccaaaggcccaatgctattgggagtaaaagcggtaattgcaaaaagttttgagagaatccatcgcagtaatttggtaggaatgggaatcattccactttgtttcaagtctggtgaggacgcggacacactaggtttaacaggtcaccgagcggtataccaatgatctcccacgccaaatagatgaaata

SEQ ID NO: 233637 - DNA, 338 bp, Gossypium hirsutum
ccggcaccggtatcaaccctgctcgtagctttggggccgctgttatctacaaccaggacaagccatgggatgatcattggatcttctgggtcggaccatttattggtgcagccattgctgcaatctatcaccagtttatcctgagggcagctgctgttaaagctcttggatccttcaggagcagctctgccatgtaattaagcaaatcattctccagccacaagtttaaacaaaaaaaaaaaaacggggggggggaggggttgccatggaggattgcattaagttttatcaatgtggacaagaggctttttcagaccactcaattcggaaaatataat

SEQ ID NO: 233638 - DNA, 253 bp, Gossypium hirsutum
cttcatttgaagcagctatgtcttttagaggaggaaatgcatcatcgggcatgggagtggctgaacacagcaaaagcacgtacctggaactgcagagaaagaaggtgttccgatatgttatcttcaagattgatgagaagaaaaaggaggtcatagttgaaaagactggaggtcccacagagagctatgatgatttcgcagcctcattgccggagagtgactgccgttatgcaatttatgacttcgattttgt

SEQ ID NO: 233639 - DNA, 330 bp, Gossypium hirsutum
attccaagaaaaagtggtgtcagagtttcgatcaaataaaagaaattaagttttctgtgtcttcctcggggatccgacgaagctctggaaaaagattttttttactcaagaaatggcgggaagagctcaaattccgacaagtaattcagcactaattgccatgattgctgatgaggatacaggaactggatttttggtggctggaggtggaaatgtggatttaaagagaaaaacaaactatctaatcgttgattcaaaaacaacagtgaaagcgattgaagattcattcaaagactacaccacaaggggggatattgcaattattttgga

SEQ ID NO: 233640 - DNA, 436 bp, Gossypium hirsutum
  unsure (1)..(436): unsure at all n locations
ctcaagacaagtttcaaagcctctctctattttactcctctttctctgtctttcattgacatggatctcctcagtttctgagctatcaatttcaaacaagattcaatggccacgactgaggaatgtcattcaattcaacttattgatggagatggattgttcaatgatgttggaactgaccgtcttatcaaggaaattaagcttgctgaatgtgggttgtcatatgctgtggttgctatcatgggacctcagagcagcggtaaaagcacactgttaaatcatttgttttgcaccaatttcagggaaatggatgcatttaagggaaggtctcaaaccactaaaggtatttggatggcaaaatgtgctggtatagagccttgcactctagtaatggatntggagggtactgatggaagagaacgaggggaggatgaca

SEQ ID NO: 233641 - DNA, 435 bp, Gossypium hirsutum
aaaaaaatccaaaaaaatataaaaagaaaatgagccgaggaagtggaggcggctacgatcgtcatatcacaatcttctctcccgaaggtcgtcttttccaagtggagtatgcgtttaaggcagttaaagcagctggaatcacgtcgattggtgttcgaggcaaagactctgtctgcgttgttactcagaagaaagttcccgacaagctattggatcagactagtgtcactcatcttttccctattaccaagttccttggattgttggctactggcatgacagctgatgcaaggaccttggtccaacaagcaaggaatgaagcggccgagtttcggttcagatatggatatgagatgcctgttgatgtattgtctaaatggattgctgacaaatcacaggtttatactcaacatgcttatatgagacctcttggag

SEQ ID NO: 233642 - DNA, 383 bp, Gossypium hirsutum
cctagatctcctacatttcggagatggcggacgcgcaatccatatacgttaagctgacaaaagatcaggtacctttagaggatatccaacctggtgaacttaatcagcccattgatgttcctcagttgcatgtccgaaagtgcaatgaatgtggacagcctttacctgaaaattttgaacctcctgctgttgaaccttggacaactggaatttttggctgtgctgaagatacagaaagttgctggacgggactattttgtccatgtgttctatttgggcgtaatattgagagcttgagagatgatacgccctggactacaccatgcatttgtcatgctatttgtgttagaagtggcattgcattggcaggtgcaacagctttt

SEQ ID NO: 233643 - DNA, 430 bp, Gossypium hirsutum
agtgggttgtgatggaggtaggactcaagaatcacctactctcattaatgctttgcagttgataggaatgtcatcgtgcctagacctttctggtttctttgagaaggaggatgtatctgaaaggaagatcagatttacctcgaatcgttcgggtaaagatttgcttgcaaagatccaagacacggtgacagagatgggatttcgagtccaaatgagaaacggaaagttgaaagcaacgcaagagcacacggtccaaaaacgccttgccagtctttcaattgcagctgaagtgtttgagataagtccgtcattgtacgtagttgaattaaaaaaatcatatggcgattctacagtttatagacagttatgtacaaagctatttaatgacttaagccaaccttaaggccaaagcctggtgttcacaaaagct

SEQ ID NO: 233644 - DNA, 434 bp, Gossypium hirsutum
agaaaagaggtttttgaagaagaaagaaagaaaattatatgtgaaagtatggcggggaaagaagagaatcgaatatttgtgggaggtttgtcatgggatgtcactgaacgacagcttgagcatgcgtttagtccatttggcaaaatccttgaatctcagatcatgttggaaagagataccgggcgtccacgtggatttggatttatcacatttgctgatcgccggtccatggatgaagctatcagggagatgcatggacgggagctgggggagcgcaccatttcagtgaataaggctcaacccaagatgggtgaagatcttgatcacggttatagaggaggttactcatcaagtggcaggggtcgctatgcaggtggagacaggcctgtagcacaggatgaatgcttcaaatgtgggcgttttgggcactgggc

SEQ ID NO: 233645 - DNA, 247 bp, Gossypium hirsutum
ataatccctcgtttttcctttcagtttccaagaaatttctgtagggttttcctgagctgggcataaaaaagatgggtatatatctcagcacccccaaaactgaaaaattctctgaagatggcgagaatgacagggttagatatggtttatcatctatgcaaggatggcgtgctactatggaagatgctcatgctgcataccctgatcttgatgcttctacttcgttctttggcggttatgatgggca

SEQ ID NO: 233646 - DNA, 434 bp, Gossypium hirsutum
tcatgaccactctcgtgaccggtgtgtttctcctcctactatccgtcgccggcgtcgtatccgccgctagatatatcaccggtgatgttctccggttaccttcggaagcttcaaggttcttccgatggaggagcgatgatgatgaagttggtggcacaagatgggcggtcctgattgctggatctaatggatattggaattacaggcatcaggctgatgtttgtcatgcttatcaactcctaaggaacggtggtttgagagaggaaaatatcattgtctttatgtacgatgatatcgctttcaatgtagaaaaccctaggcctggtgttatcattaacaatcctcatggcgatgatgtttataagggagtcccgaaggactatactggaaaaaaaggtaatggtcacaacttttttgcggctctcctcggaaac

SEQ ID NO: 233647 - DNA, 388 bp, Gossypium hirsutum
cttagccaatgcttgctcactttcactcattcccctaatcactgcaaacaggatcgcttcttgttctccgatcaccggtgtctgctcagcgccatattttgatcggataagttacggttccaacgttatatctctgtctgaattgcttttttcctctctttttttttaaattttatttcccaaaaaatggcgtctgaggatgtgaaaagaagcgagtctgcggtctcgacgatcgtgaatctggcggaagaagcgaagatagccagcgaaggagttaaggcgccgagccatgcgttgcttagtatttgcaagtctcttgttgctggtggtgtcgccggtggagtgtcacgtagtgctgttgctcccctagaaagattaaaaaatttac

SEQ ID NO: 233648 - DNA, 447 bp, Gossypium hirsutum
aggaaaccgtgaaccgcaccgatctgatttgcaaaattgctagggatttcgtcgggcagaaaatataaacaaaagaagaaatggcgggggcagcatctgcactatttcttctagatataaagggccgtgttctggtgtggcgtgactaccgtggcgacgtctccgctgctcaagctgaacgcttcttcaccaaactcatcgaaaaagagggagatccgcagtcgcaagatccagtggtgtatgataatggagttacgtacatgtttatacaacacagcaacgtgtacttgatgactgcaacaaggcagaattgcaatgctgccagtcttcttttcttccttcaccgtgtagttgatgtttttaagcattatttcgaggaattagaagaggaatcgctaagggataactttgtagaagtgtatgagttacttgatgagattatggatt

SEQ ID NO: 233649 - DNA, 426 bp, Gossypium hirsutum
cccacgcgtccgcccacgcgttcgcactgtaaaaaaaaagagagaaatttgatcagacggtgaaaatgggtggccttgaaactgagagaacaacaacaggatgggctgccagagatccttcaggagtattgtctccttacacttacactcttaagagcactggtcctgaggatgttttcgttaaagttatgtgctgtggaatctgccacaccgatcttcatcaagccaaaaatgatcttggcatgtcaaactacccaatggttcctgggcatgaagtggttgggtgaggtgttggaaagttgggtcagatgtaagcaagttcagagttggtgatattgtaggcgttggttgtattgttgggtgttgcaaaaactgccgaccatgcgactcagacaatgaacaatactgtcttaagaagatctggtc

SEQ ID NO: 233650 - DNA, 442 bp, Gossypium hirsutum
ttcacttccacctgcttgcttacctatttgttgcgaaaatctcgaagcttccttttgcgtttgagatctcaaaattcaaaaagctctctttttcatctcatggctgctactatcgtctccgtcaaagctaggcagatcttcgacagccgtggaaatccaacggttgaggttgatgtggaaacatcgaacggtataaaggctagggccgcagttcctagcggtgcatccactggaatttacgaggctcttgagttgagagatggacgttccgattacctcggtaaaggtgtatcgaaggctgttgctaatgttaacacaatcatcggccctgcattgattggaaaggacccaaccgagcagactgcaattgacaatttcatggttcaacaactggatggaacccaaaatgagtggggttggtgcaaacaaaagctcggtgcaa

SEQ ID NO: 233651 - DNA, 299 bp, Gossypium hirsutum
cccccatcaagattagaggtgatattcatggtcaatattctgatctggtaagggggtttgagtatggtggatagccaccacatgccaactacttatttttaggggactatgttgatcgaggcaagcaaagtctggagaccatatgtcttattcttgcttacaagataaaacaccctgaaaactttctcctcttgaggggtaaccatgaatgtgcttctataaaccgcatatatgggttctatgatgagtgtagagaagatttaatggtaggctatggaggacaatcacgggatgtttta

SEQ ID NO: 233652 - DNA, 440 bp, Gossypium hirsutum
agaaaacaagggtttcaagtcgtagagaaaaaagaaatcgataaaaatggcgatggcgagtgtgtcgatctggtctcctacgagcagcccttcgcggcggctctcgtcctactgctcctcccacgcgtggcttcgcttcctcttctcatcacgatgatgcttatgaaaccgcaaaatgggaaaagataacatatttaggtgttgctacctgcactgttttagcgatttataacctatcaaaaggtcatccccaccatgaagagcctcctgcatacccatatttgcacattcgcaacaaggagttcccatggggtcccgatggtctggttgagaaaaaggagcatcactagggatggccggatggatgcatatcttttcgagttcggcgcatttttatcatttctctgagaaatcaatcagataattctgtggatcttttg

SEQ ID NO: 233653 - DNA, 364 bp, Gossypium hirsutum
ccggccgggaagacccacgcggacgcttctctcttcaaatcgcagggcttttgtaacctctacctctctctctagaaccgtgactagtgttttcttttggttgtttataaggcatctcaagccagccttctctcttaaaaacagctcatagatcttagtaagaatccgggagatgggttctcggtcggattggctgatgaaaacaatctctttgaatggagtgttacaatgatcgcaccacctgatactctttatgaaagggggatttttcattgccatcatgagctttccgcccaattatccaaccagccctccaccagggaaattacatcagggttttgccatcctaaagttatccggaggg

SEQ ID NO: 233654 - DNA, 359 bp, Gossypium hirsutum
tccgtattaagattagaggcgttcttcatcgaccatctttttgtttggtcaggggggtttagtttcgtggttagggatcccattcccaatgcttatttttaggaacccagtcgcttctgtgtaattatctttcaaacccagatcttcttcatcgcttaaatgctacgttgggttccctaccaggcctgctttcagctctaagctggtttcatcttctagcttgtcctcgataaacacccaccctttcaggggctccttgcttgtcaggtgttctcttgctgatggaaacggtagttcagagaagacgactactttgcatgatctgtatgaaaaagaagggcagagtccatggtatgaca

SEQ ID NO: 233655 - DNA, 292 bp, Gossypium hirsutum
gctataagtgccaaaatctagggatttgcgggtggagaagaccagagcgcatctgtgtgcttcaaagctcctgtccaggcagaatcctcttcttcccttgcgttgcgttctttcctgctcaatcgccatggcttgcaagcggatcttgaaagaactcacaggatttgcagaacgatccacccacttcttgcagcgcttgtccagtggctgaagacatgttttattggcgagcaacaatcacggcacccttaaactgcccttatgctggaggcgcgtcttaagctactatcca

SEQ ID NO: 233656 - DNA, 426 bp, Gossypium hirsutum
ggggctgtcattcgctaagcttttcagccggctttttgccaagaaggagatgcgaattttgatggtgggccttgatgcagccggtaagactaccattttgtacaagctcaagcttggagagattgtcaccactattcccaccatcggatttaatgtggaaactgttgaatataagaacatcagtttcactgtctgggatgttggtggtcaggacaagattcgttctttgtggaggcattacttccaaaatacacagggtcttattttcggggttgacagcaatgacagagaccgtgttgttgaggcagggatgaattgcatagaatgttgaatgaggatgaactgcgagatgctgggttgcttgtatttgcaaacaagcatgatcttccaaatgcaatgaatgctgctgaaataactgacaaagct

SEQ ID NO: 233657 - DNA, 380 bp, Gossypium hirsutum
  unsure (1)..(380): unsure at all n locations
gaagaacaagaatggattctgccatagctcagaaaacatgggaattagaaaacaatatacttaccgtcgagacacctgacccttcatcggattctatattctactacgacgaggcggctcaagccaagttccagcaagagaagccttgggccaatgatcctcactacttcaagcgcgttaagatctctgcgctcgctcttcttaagatggttgtccacgcccgatctggtggtaccatagaggtgatggggctgatgcaaggcaagactgacggcgatgctatcattgtcatggacgcctntgctttgcctgttgaaggcactgagactagggttaacgctcaggcggatgcctatgagtatatggtcgattattcccag

SEQ ID NO: 233658 - DNA, 366 bp, Gossypium hirsutum
ctttcttcaggccttgtcagtgttccttttgtttttgtcgtacgtagtcgtgggatcagctgagcagtgtggaaggcaagcatgtggtgctctttgccccggtgctctatgtagtagccaatttggctggtgtggcagtactgctgactactgcacagttcctggttgccaaagtcagtgctacgatagtggccctgccgctggtcctggtgggctaaccaatcttatatcacgagagacgtttaatcggatgcttttgcataggaacgatggggcttgtcctgcccgtgccttctatacatatgacgctttcattgctgctgcccgatcctttcctgcatttgctacaactggtgaccaagctac

SEQ ID NO: 233659 - DNA, 256 bp, Gossypium hirsutum
ctcttctctaatacacccactgtaaaaaaaagagagaaatttgatcagacggtgaaaatgggtggccttgaaactgagagaacaacaacaggatgggctgccagagatccttcaggagtattgtctccttacacttacactcttaggagcactggtcctgaggatgttttcgttaaggttatgtgctgtggaatctgccacaccgatcttcatcaagccaaaaatgatcttggcatgtcaaactacccaatggttc

SEQ ID NO: 233660 - DNA, 409 bp, Gossypium hirsutum
caaaaaggatctagaaaagagaatatctcatccttttattttcatttcgtcttcttttcagctcaaactcatcatcgaaattacttgtagttatcaaaatggggacaataggcaaaactactacggccgctctttttctttgtcttcttctgtttcctattgtcttttccacgcctaatgacagattggttagaattggactcaaaaagagaaagattgaccgaaacaatcggatggctgcacaccttgaatccaaggagggaaaggcatctgaagcttttcttagaaagtatcgtcttcatgggaacttgggggaatcagaggacattgatattgtggcactaaagaactacatggatgctcagtactttggtgagattggtattggcactcctacacagaacttcac

SEQ ID NO: 233661 - DNA, 413 bp, Gossypium hirsutum
  unsure (1)..(413): unsure at all n locations
caactttactatatcttctaatttttggatcaatttctcctttcgcgctttgaagttgattncttgaagatgggagcggaaaagaacttcattgacatggaggagggaactctggagatcgggatggagtatagaactgtatctggtgttgcgggaccattggtcattcttgacaaagttaagggtccaaagtatcaggagattgtcaatattcggttgggggatggaacaactcgacgtggtcaagtcctggaagttgatggggagaaagcagttgtgcaggtctttgaaggaacatctggaattgacaacaaatacacaactgtgcaatttacaggggaggtattgaaaactcctgtgtcgttggatatgctagggcgcatatttaatggctctggaaaacccattgacaa

SEQ ID NO: 233662 - DNA, 421 bp, Gossypium hirsutum
gaagaacaagaatggattctgccatagctcagaaaacatgggaattagaaaacaatatacttaccgtcgagacacctgacccttcatcggattctatattctactacgacgaggcggctcaagccaagttccagcaagagaagccttgggccaatgatcctcactacttcaagcgcgttaagatctctgcgctcgctcttcttaagatggttgtccacgcccgatctggtggtaccatagaggtgatggggctgatgcaaggcaagactgacggcgatgctatcattgtcatggacgcctttgctttgcctgttgaaggcactgagactagggttaacgctcaggcggatgcctatgagtatatggtcgattattcccagaccaacaagcaggctgggcgattggaaaatgttgttggatg

SEQ ID NO: 233663 - DNA, 405 bp, Gossypium hirsutum
gtcgtatcagacgcttttctccccttctctgaaattcccttgctatcgttttgtggaagaaaattttttgagatggcccgtacgaagcaaactgctggtaagtatactcccggcggggctgctacgaggaagcatgtcgccaatgatgcttgcacgaaggcacccacaaccggaggcgtgaagaagcctcaccgatatttgcctggaactgtagctctgcgtgaaatccggaagtaccagaaaagcactgaactcctcatcaggaaactgcctttccaaaggctcgttcgtgaaattgcccaagactttaagaccgatctacgtttccagagccatgctgtattggcgttgcaagaggcggcagaggcataccttgttgggttgttcgaagataccaacctgtgc

SEQ ID NO: 233664 - DNA, 371 bp, Gossypium hirsutum
gctgtagccacggcggcgatgaagacgacgaccctaagttcccttccatttaaccaatcagttttcgggctgaagtcccaaagaaaaggccgctttaccatggcttcacacaaagtaacactgataactccgtcgggaaccaagcaattcgactgctcggacggcgactatatcctggaccgtgccgaggaagtaggaatggatctcccgtactcgtgcagggctggggcttgctcttcgtgtgcgggactgatcaaacaaggcaccgtcgaccaatcggacaatagcttccttgatgatgaattgattgatgcaggcttcgtcctaacttgtgttgccatccctaagagtgatgttatcattgagacaca

SEQ ID NO: 233665 - DNA, 406 bp, Gossypium hirsutum
gagaaaagagtagatcttggcttctctccttcgttcgattccgcttaattatggcccgcgtttctctcagacgtgaaaaatggggctgtctttcacaaagctatttagccggcttttcgccaagaaggagatgcgtatactcatggttgggcttgatgctgcgggtaaaactaccattctttacaagcttaagttgggagagattgtcactaccattcccaccatcggtttcaatgttgagaccgttgaatacaagaacatcagctttactgtttgggatgttggtggccaggacaagatccgaccattgtggagacactacttccaaaacacccaaggacttatttttgtggctgatagcaacgatcgcgatcgtgtggttgaagctagagatgagttgcacagg

SEQ ID NO: 233666 - DNA, 377 bp, Gossypium hirsutum
taccttctggctcaggtctacccatctctcccactttgtttctcacttctaatgcccgagggccgtcactttctcaaatcaacacaccgagtctgcacttaaagctgttaatgactctctctctggaaaatcatccatctctgggacttagctgaccaaggatgacataaaagttcatgctgctgtcatgaagaaccctggagattctttccataatgcaagccaggggtgtaattctgggtcttctcaacttgcggccagcttccctggcaaagctgttgacgtcgggtttggtggcatagctgctccagctgagtctgctaaagctgaggctgcacatgatgaccacgacttggatctattccgtgatgagacag

SEQ ID NO: 233667 - DNA, 412 bp, Gossypium hirsutum
acacagagagggagaaatggtttctctgaagctacagaagcggctctccgcgagcgttctaaagtgtggaaaaggaaaggtttggctcgatcctaatgaagtcaacgagatctctatggccaactcccggcagaacataaggaagttggttaaagatggttttatcatcaggaagccaaccaagattcactctcgatctcgtgctcgtcgcatgaaggaagccaagagaaagggacgtcactctggatatggtaagcgcaagggtacaagggaggcaaggttgcccacaaagatcttatggatgagaaggatgcgtgtacttagacgcctactccgcaagtacagggaatcaaagaagattgacaagcacatgtaccatgacatgtacatgaaagtcaaaggtaatgtgttt

SEQ ID NO: 233668 - DNA, 413 bp, Gossypium hirsutum
ttgatgtggaattctgtgggcttctaccagatagcaaagctgagcatgagtgcagtatcttgctttctggaagttgtttttgacaaggttcgctactcaagggatacaaaactcagcattctactagttctccttggagttgctgtctgcactgttactgatgtgagtgtcaacgtcaagggttttttagctgctgtaattgcagtctggagcacagccctgcaacaatattatgtgcattttcttcaacgcaagcattctttaggatcttttgacttattgggacatactgctccggtacaagctgcaagccttctgttagctggtccttttgtggactattggttaacagagaaaaaggtctacgcctataactacactacggtatcaacgttcttcataatcctatcatg

SEQ ID NO: 233669 - DNA, 409 bp, Gossypium hirsutum
aagagctgttcttcttcaaaccctagcctctatctgggagccctttccaatggcttcgcgtcgactcctctcctctttcctccgctccacttctcgccgatctctctccaaatctcccagccctacccctcgcctcccttcaccttcccccacgcgccgcccttttccgtgcccctactttctctcacgcgatgctgagtactctacatctgcggctgctgccgcttctgctccatcgcagcctcctcccgctaagaagggcggaaaaggtaagatcactgatgagttcactggtgctggagccatcggtcaggtttgtcaagtaatcggtgccgtcgtcgatgttagattcgatgaaggcttgcctccgattttgactgcgcttgaagtgatggaccactcgatccgg

SEQ ID NO: 233670 - DNA, 433 bp, Gossypium hirsutum
ggaacggccgggccggcccagcgcgtcccgtttcgtgtagttataaaagatagtctcaatcggctcgattcgcctgcgttgcggtggtaaagatcccctcttttaaggatgaattcactttcgaccaaaggcttgaagaatcccgcgatatcattgccaaatatcccaatcgggtccctgtgattgtggaaagatactcaaaagcagatcttccagaaatggaaaagaaaaagtatctggttcctcgggacatgtctgttggacaattcattcatatcttaagcttgagacttcgtctgagccctggaaaagcactgtttgtgtttgtgaagaacacgttgccacaaacagctacgcttatggactctctctatgaatctttcaaagaggatgatggttttctgtatatgtgttacagcagtgagaaaacctt

SEQ ID NO: 233671 - DNA, 438 bp, Gossypium hirsutum
  unsure (1)..(438): unsure at all n locations
tcgttccggccgaagaatattaaaggcttctttcgacttgtataacaggccatacaaaacccccattatctaccgtggatggaaggtgttgatcttcgaagcatactgatnnggtttggtgaatatgctagatagaaanacggtgctcgaaggggtaatatgttggtggcacacaccggtgaaggccagctaatgagctgggatgaacacataatgcttatcggtcatactgtcaactgttttggcggatccgttaaagtaattggtaacacgggaagtgactcaaccagggaagcgattcacgccaccgaacaaggttttgctgttggaatgcatgccgctcttcacatcaatccttactatggcaaaacctctctagagggcttggtttctcactttaatagtgtactaccaatgggccctactatcatatacaac

SEQ ID NO: 233672 - DNA, 412 bp, Gossypium hirsutum
gcatattcttgtaaaatagatgtatattgggacctttcttcggctaaattcggatccgggcctgaacctttcgaggggttttatgttggtgttgttgctaataagcaaatggttttgcttcttggggacatgagtaaagaagcttgtaagaaaactggtgcaactcatataccttgtaatgccagtttagtggctaagaaggagcatgtttttggaagagggtatttggtaccaaggcgcagttttgtgataatggtcgaattcatgatctgataattggatgtgacgcggttggtatgaaagaaccttgccttataattcgtgtggatggaaaggctttgatgcaagtgaagcggctgcggtggaagttcacagggaaccataccattttggtcgatggaatggctgtaga

SEQ ID NO: 233673 - DNA, 394 bp, Gossypium hirsutum
ctttttctttcacctttcgattctccacggtgccgccaggcactgttttctctgttctagatgacaacgcaatcggatccatcggcttccgatccacaagggattgggaatgcctttgtcaaacagtactacactgttcttcacaatgacccttcacatgcttataaattttatcttgacttgagcgtgttaagccgccccggtactgatggtgcgatgaagtccgtgactaccctgaaagagataaatgagttgattctctcattggactaccagagttataaggctgagatttcttttgctgatgcccagttctcattagcaaacgggtgtgatgttttgttactggctctttgatcggaaaagtgatgtgaggaggaaagttacgcagtca

SEQ ID NO: 233674 - DNA, 347 bp, Gossypium hirsutum
gaaatccagacaggaaagaatccaccagaacaacaacgtcttatcttcgccggaaaacagctcgaagatggccggaccttggccgattacaacatccagaaggagtccaccctccatctcgtcctccgtctacgtggtggcatgcagatcttcgtcaaaaccctgaccggcaagaccataactttggaagtcgaaagctctgacaccattgacaacgtcaaggcaaagatccaagacaaggaaggcatcccaccagaccagcaaaggctcatatttgccgggaaacaactcgaggacggtcgcaccttggccgattacaacatccagaaggagtccaccctccattt

SEQ ID NO: 233675 - DNA, 360 bp, Gossypium hirsutum
cacccgtccggtttcgtgtagtaataaaggatagtttaaatcggttggattcgcctgcgtggcaggggaaggatccctttttttaaggatgaattcactttcgaccaaaggctggaagaatcccgcgatatcattgccaaatatcccaatcgggtccctgtgattgtggaaagatactcaaaagcagatcttccagaaatggaaaagaaaaagtatctggttcctcgggacatgtctgttggacaattcattcatatcttaagcttgagacttcgtctgagccctggaaaagcactgtttgtgtttgtgaagaacacgttgccacaaacagctacgcttatggactctctctatgaatct

SEQ ID NO: 233676 - DNA, 407 bp, Gossypium hirsutum
gttatggtgatgtcggaaagggttgtgctgctgccttgaagcaagccggtgctggtgtcattgttactgagattgatcccatctgtgcccttcaggctctcatggaaggacttcaggttttgaccctagaagatgttgtctccgaggctgatatcttcgtcaccacaaccggtaacaaggacatcatcatggttgatcacatgaggaagatgaagaacaatgccattgtttgcaacattggtcactttgacaatgaaatcgatatgctcggtcttgagacctatcctggtgttaaacgcatcaccattaagcctcaaaccgataggtgggtcttccctgaaaccaaaaccggcatcattgtgttggctgaaggacgtctgatgaacttgggatgtgccactggacac

SEQ ID NO: 233677 - DNA, 417 bp, Gossypium hirsutum
aaaacaacagccaattactcttcagtctcagccgatcttaaaccatgggtcgcgttcgcacaaagacggtgaagaaatcgtcccgtcaggtaatcgagcggtactattctcgaatgaccctcgattttcacaccaacaaaaagattatcgaagaagtagctataatcccatccaagaggctccgtaacaagattgccggtttctcgacccatcttatgaaacgtatccagaaaggaccagttcgcgggatttctcttaagcttcaagaagaagagcgcgagcgtcgcatggattttgtccccgatgaatcggccatcaaggtcgaccaaatcgaagttgataaggaaacacttgatatgctttcggttattggaatgggtgatattcccggccttgataaggatgacccggttgctg

SEQ ID NO: 233678 - DNA, 375 bp, Gossypium hirsutum
atttcccgtccgcttgatttccatcagacggtgataaccatgccgatccgaaacatagccgtgggccgacccgaagaggcgactcaaccggacgcactcaaagcagctttggctgagttcatctccacactcatcttcgttttcgccgggtcaggctccggcatggcctttaacaagttgaccgacaacggagccaccactccggccggtcttgttgccgcttctatagctcacggcttaggacttttcgtcgctgtatccgtcggcgctaacatctccggcggtcacgtcaatcccgccgtcactttcggcgctttcgtcggcgggaacattagtcttttacgcagcattctctatcggatcgatcaactactt

SEQ ID NO: 233679 - DNA, 450 bp, Gossypium hirsutum
  unsure (1)..(450): unsure at all n locations
cacgcccgtccgacagttcattagtatattgnngcgttgaatttcaatttgtgttgtatacatcttgaagaagaaagagtggcgtggttcttgcaaaacgaaagcatgaggttagtacatcancttcccccagccaaggctatttaagggcatttgctgaagatctggacactcctattgcccaaggttgccccacaagcaatcaagagtgtggaacgccttgaaggagatggtggccctggaactataaagaagatcacctttgctgaagggtatggattcagttatgcgaaacacagagttgatgtgttagacaaagacaacttgttgtacacttacgttgtgatcgaaagcgacttttttaacaacatggtggagaaaatcagctacgagacaaagtttgtagcagcagcagatggaggaacaagtattaaggtaaataccaccttt

SEQ ID NO: 233680 - DNA, 401 bp, Gossypium hirsutum
atttagtgcaaaaaccatcttcttttttctgctttctcgtatagcagcctggtgtgagaaactttttttttgaggaaattagaaaatgtcatcggagaacgggaaaaggttgctggaaactgatgccggcggcttgaattttgaggctaccgagctgactttagggttacctggagagcctagagtaacatcggacggtggagctaagttgggcagtaaacgtggattttcggaaacctttgatcttaagttgggtgacaacaatcaagaggttaagctgggtcactccctccaagaagctgccaagtctcccgtttcaaagacacaagtggtgggttggccgccggtgagaggctttgcaaagagaggaaagaagagttgcaaatatgtaaaagtggcgg

SEQ ID NO: 233681 - DNA, 405 bp, Gossypium hirsutum
  unsure (1)..(405): unsure at all n locations
atttttgaacaggcaaataaaagctttaattacttaaccttaaaaaccccctcccggctcctttgtggattagaaaactaaagatcaaaagatgggcacctaggaaacaaaaaagataggtgaaggatgtcaactgcttcttcattgtgttcatcaactcagattaatggctttggagggggacttggngttctaagaacccatgtttctcaacccaagacactttcttttacaagaaggagaatttctacggtagtgaaggcaacatctcgagttgataaattctcaaaaagcgatatcattgtttctccatctattctctctgctaatttcgcaaagttgggggagcaggtgaaagcagtagaagttgctggctgtgattggatccatgtngatgtaatggat

SEQ ID NO: 233682 - DNA, 407 bp, Gossypium hirsutum
cccatttccaatctccagctcccaaggtaaatatgccgatcagaaacatagcggtgggccggcccgaagaggctactcaccccgatgctctcaaggctgctttggctgagttcatctcaaccttgatcttcgttttcgctggatcgggctcaggaatggcctttaacaagttgactgacaacggagcaaccaccccggctggtctcgtagccgccgctctagctcatggcttcggtcttttcgtcgctgtctccgttggcgccaacatctcaggtggccacgtcaaccctgccgtcaccttcggtgcttttgttggcgggaacatcactctcttgcgcggcattctttactggatcgcccaactcctaggctcaaccgtcgcttgcctgttgcttaagttcgctacc

SEQ ID NO: 233683 - DNA, 457 bp, Gossypium hirsutum
  unsure (1)..(457): unsure at all n locations
tacgcccgnacggaccgggactgcccggctggacccacgcgtgcgtttttttttctcctgttccaccgccgtcaatctcgaaccttatcctcgttttcaaacatgctcaaaaaagatggccaacgctgcatcgggaatggctgtgcatgatgattgcaagttgaagttcttggagctcaagacaaaaagaacccaccgcttcattgttttcaaaatcgaggagaagcaaaagcaagttattgtggagaagcttggtgaaccaaccgaaagctacgaggattttactaaatgtctccccgctgatgaatgtcgatatgctgtgtacgattttgattttctaacggccgagaacgtcccgaagagcagaatctttttcatcgcatggtctcccgacacgtcaaggatcaggagcaagatgatttacgccagctccaaagacagattcaagcgagaactg

SEQ ID NO: 233684 - DNA, 415 bp, Gossypium hirsutum
cagagaaataaaaatgggaggctgggcaatcgcagtgcatggtggtgctggtgtagacccaaatctccctaatgaaaggcaagaggaagctaaaagactcctcaatcgttgccttgatattggaatctctgctcttcgttctaacctctccgccattgacgtcgttgaacttgtcgtgagggaattggaaacggatcctttgtttaattccgggcgtggatcggcacttacggagaaagggacggtagaaatggaagctagtattatggatggaccgaagagacgatgcggtgctgtttcgggtttaacgacagtgaagaatccgatatctcttgctcgacttgttatggataaaacaccacattcgtatttgggttttgccggcgccgaagagtttgcgaggaaacagggtgtg

SEQ ID NO: 233685 - DNA, 367 bp, Gossypium hirsutum
atagcagccatggcagtccgtatgcttttggggttaggaatcctgctactctgccttgcaaaggtttcatctgatctgaaggcagaagaagttataaccaatgtcggtgaggtgggttctttggttaccagaggcggaaacagaagactgatgctagagattgattgtggaggattatgcaagaaaagatgcagtaaacactcgaggccaaacagatgcaacagggcgtgtgggacttgctgcttgaggtgcaagagcgtgccaccggggacttcaaggaacagggaggtctgcgggacctgctatactggcatgaccacccatggaaacgttgccaagtgcccttaacctttacgtcgcccaatat

SEQ ID NO: 233686 - DNA, 411 bp, Gossypium hirsutum
atttatttgcaggagtaaggaaaaggtacaagtcaagaaaatggatatggacttatctcccaagtttccggcgacgttcgtggagacagaagatggcggatactataattgggcagctgccgattctccggtgctccgcgaggccaaagttgcagctggtaagcttgtgttgaagcctcgaggctttgctcttccacactatgcggattgctccaaagtaggttatgttcttgaaggtaaatgtggagttggattgacaacaccagcttccaacacaaaagaaaaaatggcattcataggtattaaaaaaggggacataataccaatcccttgtgcatcagtttcatggtggtacaattatggtgattcagacgtggtcatagtgttcttggccgatgcaaccaatgccta

SEQ ID NO: 233687 - DNA, 414 bp, Gossypium hirsutum
  unsure (1)..(414): unsure at all n locations
caaagagcaggaaaacaagaaaagcagagccgcatcactttttgctagctaagctactgtgggagttattgttcttcagaacagcttctgcagtagctaataataacgttatatattatataaattttatacatcctttttaccctacgactccatatataagcaagtaaaaataaatatggctcgctctgtttcttcctttaagttccttggtgcttctgtttttgatgctctttatgtctccatatcaaggagaggttactcaggtgcaccgccggcggcagtgacggctagctttggtaggcctggagcgatggggaaagtggaacgaagatatgcgatgaaagagtcgtcgtcgtcggagacaagggcttattcttcagcttgggcgcctgaccctgttacggngtatta

SEQ ID NO: 233688 - DNA, 387 bp, Gossypium hirsutum
cccatgcgtacgaaggaaaacacgaaaagcatagccgcatcactttctgctagctaagctactgtgggagatatcgttcttcacaacagcttctgcagtcgctaataataacgttatatattatataaattttatacatacttcttaccctacgactccatatataagcaagtgaaaataaatgtggctcgctctgagtcttcctttaagttccttggtgctgctgtttatgatgctctatatgtctccatatcaaggagaggatactcaggtgcaccgacggctgcagtgacggctagctttgctaggcctggagcgatgcggaaagttgcacgaagatatgcgatgaaagagtcgacagcggcggagacaagggcttattcttca

SEQ ID NO: 233689 - DNA, 415 bp, Gossypium hirsutum
atttaattcccgttttctaatctttttgggaaatcggtagcaaaaaaatgtcgtcgtcggggaggaagatcacccttaagagctcggacggcgaatcattcgaggttgatgaagcggtggcgttggagtcgcagacgattaagcatatgatcgaggacgattgcgctgataacgggataccgttgcctaatgttacgagcaagatcttagcgaaggtgatcgagtactgcaagaaacacgtcgaggctcctaagacagacgatcgatccgccgatgacgagctcaagagttgggacgctgactttgtcaaggtcgatcaagccactctctttgatctcattctggcagcgaactatttgaacatcaagggtttgctggatctcacttgccaaactgttgctgacatgatcaaggg

SEQ ID NO: 233690 - DNA, 341 bp, Gossypium hirsutum
accggacggaaggccgggcagccacccgtaaggcatcaatgacgacgcatatactgagacgacaagtgagtcacatcctttccgatgtgagccctaactctaatcctacctcttatttctgtttagctagacctttatcttaacccaccgacaccattcgagccactctctttcccggcgatggcatcggccccgagatcgctgagtccggcaaacaggtttttagaactgctgaagtgccaattgaatgggaagaacattatgttgtggaccaagttgatccaagaacctaaagttttctaacttgggaaagtctcggatcaagaaaaaagaatcgggta

SEQ ID NO: 233691 - DNA, 420 bp, Gossypium hirsutum
atctctatttctatcgcacttttattccccaataccgctctccctctctcatccgtgactctaaccctagccctctatcaggattcaaacatgaaaggaggtaaatccaagtcggatgccaagagcgccaagctctccgggaataagaaatcaatcacgaaagctggaaagaaatcggggaaggcagctaaggatccaaacaagccaaagaggcctgctagcgccttcttcgttttcatggaggagttccgcgagcaatacaagaaggagcaccctaaaaacaagtccgttgctgctgttggcaaagctggtggagataaatggaagagcctttctgaagctgaaaagcgaccttatgttgataaggcagagaaacgaaaggtcgagtatgaaaagaacatgaaagcctacaataagaga

SEQ ID NO: 233692 - DNA, 370 bp, Gossypium hirsutum
cgagacttatacagcctgtctcttctacaccaatccaaaaaaaccaaacatgcagttggagaacctgggcagatcaggcttaaaggttagtcaactatcgaatggagcatggcttagtttcggtaaccagctcgatgttaaagaagcagggtcacttttccagagttagaaagacaactgagtcaactttgtcgacagcgccgatgtttatcccaatggtcgagccgaggagatcatggtttacgctattagggaacttgcgtggaaactatcgcatatcgtggtttctaccaagatcttgagcgctggccctggtccaaatgataaggctctgtctagaaaacatattgtggacggaaccatggctttc

SEQ ID NO: 233693 - DNA, 391 bp, Gossypium hirsutum
acttgtacctttttaactctaaagccaagaaagtaagccactaaggttttgagagaagatcaaaatggcttctaaaagatcagcttccatggtcctccttttggcactcaacattctctttttttccctagtcagtgcttgtggctcttgctcttcacccacccctaaaccaaggccaaacccaaaccccaacacccccactcctactccatctgcacgaggcaggtgccctagggatgccctcaaattaggtgtatgtgccaatgtgcttaacctactcaatgtcaccattggttcacccccagtgatgccatgctgttcccttctcaatggccttgtcgacctcgaagccgctgcatgcctttgcaccgctatcagagctaacatttta

SEQ ID NO: 233694 - DNA, 413 bp, Gossypium hirsutum
ctcagccttcagtctagttcagttcactcattatcctttgcattcatagttccatggcattttccctaacaaatttatttagatctgatcagatttaactcagatccttttgtatcgagtcttctaagttccagatctttacttattttgaccttaggcagaaagaaaaagaagagatgagagagattattagcgtccacattggtcaagctgggattcaagtcgggaattcatgctgggagctttactgtcttgaacatgaaattcatcctgatggaaccatgcccagtgacacctcagtcggtgtagcacacgatgctttcaacactttcttcagcgaaacgggttcaggaaagcatgtaccgagagctgtctttgttgatctggagcccactgttatcgatgaagtgcgg

SEQ ID NO: 233695 - DNA, 409 bp, Gossypium hirsutum
gcaagttcagctgttagcattcaaaaggggacgcaaagagtaattttctcttagggtgtttttctgctacactttttgttctttgggggaaacacaaaatggtattgtcggatgatgaaatcaagaggctttttcgaattcgaaagactgtaatgcagatgttgaaagataggggttatttcgttggagattttgaaattaatttgtcaaaacaacaattcatttccaaatacggcgaaaatatgaaaagggaggatcttgttatcaataaaaccaagcggaatgataactctgatcagatctatgttttcttccctgaagaggccaaagttggtgttaagacaatgaagacgtataccaaccgaatgaaatcagagaatgtatttagggctatactagttgtgcaaca

SEQ ID NO: 233696 - DNA, 400 bp, Gossypium hirsutum
ccaattcaaagttccacaaaaaacaggtgaaaatcagagcaaaaaataaaatgcccaattttgctgatcattagcaatggcaaccaacaccacccaagagcaacaacctgcagctggtaggcaccaagaagtcggccataagagccttttgcaaagcgatgctctttaccagtatatattggagactagtgtatatccaagggagcctgaacccatgaaagagctcagagagttgaccgctaagcatccatggaaccttatgactacatcagctgatgaaggtcaattcttgaacatgcttcttaagctgatcaatgcgaagaataccatggaaattggggtttatactggttattctttgttagccaccgccctcgctttacccgatgatggaaagatc

SEQ ID NO: 233697 - DNA, 412 bp, Gossypium hirsutum
gactgactaagatttcaactgtctctcactctcctgttttgctgcctttaccaagggagaatgaaaccaaaatttctgtttctcttccttgtattatgcagtctcactatagacaacgttttagcaacctcacttggaactcatggcaaaattcccgacaatgaaacaatataccgagtctccaagcaacggtgttggggttgtattggagagtcactagagttcctattcactcacaatttggtgagggcaaccaaatgggagccactcttgttttgggatttccagcttgagaaatatgcccgatggtgggcacttcaaaggaaagcagactgcaagctacagcattcgtttccagagggagatttcaagctgggagagaacatatactggggcagtggctcggcgtgga

SEQ ID NO: 233698 - DNA, 368 bp, Gossypium hirsutum
cgagaagagccaaattataaaaaatggctgctcctataacaatgctgggtctgtgtacatcttttttatcccttagtttactttctactgctttcacttctcgagattacgctgatgctcttgaaaagtctattcttttctttgagggacaacggtcgggtccgttgccgtctaatcaacgcctcaaatggaggggtaactctggtttgtccgacggtgcttcttatcacgtggaccttgtgggtggctattatgatgctggagataatgtcaagtttggccttccaatggccttcaccacaacaatgttggcatggagtgttattgaatttggcggttcaatgcatagtcagattgggaatgcaaag

SEQ ID NO: 233699 - DNA, 407 bp, Gossypium hirsutum
attgctttccaggccgctatctggaggtggatgaccccaatcaagaagaacgagccttcagcacacgacattttcgtgggcaactggaaaccaaccaagaacgacacagaggaaaaacggggtcctacttttggctccaccatgaacgttctctacggagattacacttgcgggcaaggcgatattgatcccatgaacatcatcatctcccattaccttcattaccttgacttactaggtgtcgggcgagaggaagcagggccacacgaggagctaagctgtgccgagcagaaagcattcaacccaacctcagctccacctgctgccagtgcttcctaatctttggttcagccaatttcattgttaaaatgtagttgtcaatgaagggtaatttaataagagagctg

SEQ ID NO: 233700 - DNA, 222 bp, Gossypium hirsutum
aaaacatggtttctgaaagacgggttttatatggttatcagggcttgtgtttataaatatcctggcctaagccacagctgaagtcctttattacgagttttttttgcaagaatcccagttcactaagctgtgtagcacgaagagcatcttgaccgtcaatggcagctttccaggcctgagattcgggttcggagaggggacacagtttttgtcaacgtccac

SEQ ID NO: 233701 - DNA, 308 bp, Gossypium hirsutum
aataaatcggaattccccagcagcaatggctactccaagtgtagagtatttgcctcgcgccattggatgctactgcacagcaacccgctatctttgatggaacaatcaggttgtatctggcttatccttgcccttacgcacagcgcgtgtggatcgccaggaattgtaagggtttgcaagacaagattaagctggttcctttgaaccttcaaaatagacctgctcggtacaaggaaaaagtgtaccctgaaaacaaggtgccggccttggaacataatggcaaagtcattgaggagagtcttgatttg

SEQ ID NO: 233702 - DNA, 465 bp, Gossypium hirsutum
cggtactcggaattctccgggtccgagcccaccggcgtccgggattgagtcaaggtctattccaggaagtacctacatacatacatactactggtgggtgagtgtcgaacggaggctccataccaggtgttcaacatagtggcacttggacttgggtgaccgatgatcaaattggtaccttttgttcttgtctacacttgtcttcgccgccacttgatcctaagaggaatgcaagagattcccatgttcctgtgttggcaccactccccattggattcgctgtgttcatggttcaccttgccacaattccagtcactggcactggtatcaaccctgctaggagttttggagctgctgtcatttacaacaaagagaaggcctgggatgaccaatggatcttctgggtcggacccttcattggagctgccgcagctgcattctaccaccaatacattctcagagccg

SEQ ID NO: 233703 - DNA, 343 bp, Gossypium hirsutum
caaaaatgtctctttacccttctctcaccatgtcattgctgtctttttccttcttgttgctgtttgcttttagtgccaaagctgttgttcctccatctgaaacttttaggtttgtcaacgaaggggaatttgggccttttattgttgaatatggtgcagattaccgtgtcataagcatagctaatgcccccttccagcttgcgttttataacaccacgcctaatgccttcacccttgcgttacgcatggctacaacacgttccgagtcgctcttccgatgggtttgggaggccaaacaggggaaccctgttcgcgagaacgccacgttctctctctggactga

SEQ ID NO: 233704 - DNA, 384 bp, Gossypium hirsutum
gtgttttgctatagaagaacatatctgggtttattttaattctctttgagttcaatgcaaggagaatttttttttacttttgagtaatttatcttcttggtgtggtttacagcacaatcaaatctcttgaagtcttcaatattggttgttggagctggaggtttgggttcgccggctttattatatcttgcagcttgtggtgttggtcgcttgggtatcgctgatcatgatgttgttgagcttaataatatgcataggcaggttattcacactgaagcatatattggtcagccaaaagtgaagtctgctgctgctgcttgccgatcgatcaactacaccatacagattgttgaacacaaacaagctttgcacacgtgtaatgct

SEQ ID NO: 233705 - DNA, 291 bp, Gossypium hirsutum
cttgcgcttggggttatggatctagggatttgcgggtgtagaatactagagctcaggtctctgcttcaaagctcctgtccaggtagaattctcttcttccttcgcgttgtgttctttgatgctcagtcgccatggcttcaaagcggattttgaaggaactcaaggatttgcagaaagagccacccacttgttgcagcgctcgtccagtagctgaagacatgtttcattggcaagcaacaatcatgggaccctcatatagcccttatgctggaggtgttgttttagttacca

SEQ ID NO: 233706 - DNA, 253 bp, Gossypium hirsutum
ctcccatcccacaggccccatcacaacatccgcgaagaagctcgtctccacaacgccgccaccgtcaccaccaaccaccctcgcttctccgctaaatatgtcccgctcacctccatcaccgatcctgcctcctccgatgaatcctactctctcgacgagatcgtttaccgatctcaatctggctacctccttgacgtccagcacgacatgtacgtcctcaaacactttgacggagcttactggcgaaacctct

SEQ ID NO: 233707 - DNA, 290 bp, Gossypium hirsutum
ccaacgtggatcaatactaacctaactccctcttttcgagagggctaccatgttttcgggatggctcacatctttgattcatttaatgtcacattcattcatgtcaccgatttctctggaaagcaaacaatcgttcctatttctcgtgacctgatggtcaaagctgatagggagaattcttccccttatgcatccatgcttgcagcccaagatgtttctctactccccaaagagtacgatattactgccctctatattaatcataagaacctctgaacggtattagacca

SEQ ID NO: 233708 - DNA, 381 bp, Gossypium hirsutum
tacatttcccggcctgggttcaccgatcattcatgtggatgttacccatgttgggtggcgggttttggtcacatctgatacgtatgtagtactaattataactctatttacagatgaagacggtaagccaaaaaccggctttagcagtagaatggtgctatgaaattgcaggacccagattgttcaagatgactcccctggattcacatatagctgacaacaacaataagtcccatggtacccacttctcatggttcacgcgcataccccaacaggatcgacacctagttgcaaccgtggggaaatgcatactgatatggcaacccatgcaagcgagaacagcgctcactaatgctatcggaatcaaacatgtgttaagag

SEQ ID NO: 233709 - DNA, 283 bp, Gossypium hirsutum
gttgagtatggttttctgggtttttggttatggttcactggtctggaaccgtgggtgtgagtatgatgagaaagtcatacgcttcatcaaggattacaggcgtgtttttgaccttgcatgcattgatcacagaggtacacctgaagatcctgcaaggacttgcaccttggagcacattgaaggagccgtttgttggggtgctgcttattgtgttcggggcagtcctgaaaaggaaagagcagcaatgctgtacttggagagaagggaatgtgaatatgatcag

SEQ ID NO: 233710 - DNA, 295 bp, Gossypium hirsutum
atgacgcgtggggttttgaatctagggatttgcgggtggagaagacgagagcgtcatctctctgattaaaagctcctgttcaggtagaatacttttcctgcttagcgtcgtgacctttgctgcccactccccatgactctactgcgtattctggaggaactaccggatttgcagtaagatccaccctctcgttgcagtgctcatgcactagctgaagacatgtttcattgccaagcaacaataaccttacccttaaatagcccttatgcctgctgtgtcgttttagttaccattc

SEQ ID NO: 233711 - DNA, 300 bp, Gossypium hirsutum
ccggtatctgaattgtccggcgccaggccacgcgtgcgattctttgttattctccttctattggactcgctccgtttgctctcattcggaggagaccatccctctgtgtcaaggtgcatgcatcagtaaacgaatctgatcagccaaaatggtgcaaaaggaatgcaggaccaaatatgattgatgttcactctacaaaagaatgtatcagtgccttaagtgacgctgaggatagattagttattgtagaatgttatggaacttggtgtgcttgctgcagagcattatttaccaagctgt

SEQ ID NO: 233712 - DNA, 399 bp, Gossypium hirsutum
ctcctttacccttcttcatctccagccttcgtctgcttctccttgacccgagaaaatagattggcgatgggattatcaaatgcgagcggtgacttgtcaactgaagttgaggtagatgctttcaggtgcctctttccccttcgtttctatgagaaacatcttttagagtctatacgtcctgatgctcgtccgcttggaagagcaagagaaaccaccattgcccttggggctgttgcatctgctaatggttcagcacttgcaaaaattggttcaactactatgttggctgctatcaaaatggaggtcatgaccccttcattggaaacaccggatgagggttgtatagctattgatttccacatgcctccaatttgttctccaattgttaggcctggcaga

SEQ ID NO: 233713 - DNA, 355 bp, Gossypium hirsutum
gcagcacgtcacatgggatctagagcaaggttggtgaccttgggttgagtggcgagatgaggaaaatcatggctgccaaagttctcttcttctttgctttgctttccttttcagctgtgtcggcatttgcacaggatgaggaagaccaaggtcttgctatgaacttctacatggattcttgtcctcaggctgaagacattatcaaggagcaagtcatgctactgatcaagcgacacataaacactgctttttattggctgagaaacattctacatgactgcgctgaccagccatgttatgctttactggtgattgacttcacaagcaggagcttggctgagtacgagacacacag

SEQ ID NO: 233714 - DNA, 407 bp, Gossypium hirsutum
caaggggtggattagtgaaaactgattgggcaaaagcacctttcacagcttattacaggaacttcaatgccaatgcttgtgtctggtcaggaacaagttcatcatgtgctaaaactaactcggtctccgccggtgcatgggaaacaaacgaacttgatgcaccaggaagaagaagattaagatgggttcaaaaatatttcatgatttataactattgcactgatttgaaacgttcccctcaaggtgttccaccagagtgtaaacgcccaatgttctaaaatcaaacctgttccaccagagtgtaaacgcccaaggttctaaaatcaaacctctcctcttttccatgtaatatattctttttttcactactttcttactatgtattcaagttgaataagttattatta

SEQ ID NO: 233715 - DNA, 403 bp, Gossypium hirsutum
tttgtttgctctgtatattgaaattttctttctcgattttctctttagccaaaaaagatgcagatcttcgtcaagactctaaccggcaagacgatcactctcgaggtcgagagctccgacacgatcgacaacgtgaagaccaaaatccaagataaggaaggcatccctccagaccagcagcgtctgatcttcgccggaaaacagcttgaggacggccggaccttggccgattacaacatccaaaaggagtcaactctccacctcgtcctccgtttgcgcggtgggatgcaaatgttcgtgaaaaccttgaccggcaagacaatcactctcgaggtcgagagctccgacacgatcgacaacgttaaggcgaagatccaagacagggaaggcatcctcccagacc

SEQ ID NO: 233716 - DNA, 392 bp, Gossypium hirsutum
aaaaaactaaatcacggttggtgtgacgtacgcaacctaaatgacccttctgtttggctgcgctgcagttgaatcaactcgtaacaactacaaccccatgcagatggaatccaatggcctaaccgaataaaaatgctccgttcttagtgttatctgtcacactaaagatgctatggtgttaatccgtattgcatacaatcatgggaagaggcttgaactcgtggacgaaatgaagcatcagattcagattttcgacgacaactagtagttaatcatatccactaacaagaagggactgacttatactcttgcgtgcaatcactatactgacaggagctgcgaagagtccatgtacacagagtgggggctgctcaaaactgctctgctaccac

SEQ ID NO: 233717 - DNA, 362 bp, Gossypium hirsutum
taaaaaatgagctttcctcaggcctcgtcaatttcccttttgcttttggtgtatgtagtcgaaggatcagctgagcagtgtggaaggcaagcaggctgtgctctttgccccggtggtctatgttgaagccaatctggctggtgtggcagatctgctgactactgaacaaactctggttgtcaaagtgagtgcaacgtgagtggccctagcaatgcacctggtgggctaaccaagcttatatcaagagagaccttcaatgagatgctttagcataagaacgatgaggcttgtactgcccgtgggttatatacatatgatgctatcattgccgctgcccgttatgtttctgcatttgctacaac

SEQ ID NO: 233718 - DNA, 402 bp, Gossypium hirsutum
attaagaatgagggaaccaacgatggtggttggcgcagacagcaatgctgctggtgctgctgttggcggtgctgatggatcacctctccctccaccgacgtcttcaccgccgcaatcattagtcgagaggctcaaggactacggccaggaacacgttttcgccctttgggacgagctttctcctgatgaacgcctccacctcgtcaaggatatccagagtttggatctttcgagaatagatcggatcattcgctgctctcttcgatctcaaggactgccggtggcagcaatagagccagttcccgagagttgcgtgtcctctgtagaggagagaacgatggaggaaagggaaaggtggtggaaagatggattgaaagctatattcggaagcaaattggctgt

SEQ ID NO: 233719 - DNA, 382 bp, Gossypium hirsutum
gagagggcgaaactgaaatatctaaggctaatattcttctcccatctctttcaggtgggcctcttgcaccgatgtattccctgtcttacacgaactacgtcttgccggatcgagttttccttcagtgcaagcaaagaaattgatgcgggagttgaatttgtttcctaaagaggaagttaacctggttgatcaaggccgagtttccttaccccaggattcgaagctggtaggaaaagcgattcaagttccccgctttggaagcccttggtggcgtttctgtcgacgatttgggtcatcatgctggctattacaagcttactaattcttatgatgccagaatgtgctatttcttctttgaatcacgcagtaacaaagaggaccc

SEQ ID NO: 233720 - DNA, 398 bp, Gossypium hirsutum
cgcttagaatcggaggggcgacaaagcttgtgagccgggcttctgctcaaaacaatgttgacggagcctatagcttggtgatggagcctaaacagttggttttgcagtacaagggaatgaactctcctaaaccacttgtctacttcaaatcatctgtttggccaagtacacaagatggtactttacaaactgtgacactaaatgttgaggaaacaagtgatggctttgcttattacgttttgttagactacacagtggctaacttgtccagcggggccggaaatctcatcttgacaaggccgaaatacaacagcacattgtcgattcttcgactcgggatcgatggaaacctgagggtttttacctactatgacaaggttgatttacaggcatgggaa

SEQ ID NO: 233721 - DNA, 396 bp, Gossypium hirsutum
tgtaaatgctgcagtttctcgggagcagattggatatacctttgatgctttgaagacttatgttcctgaaatggtagagttgcttattgattctgtgagaaaccctgcttacttggattgggaggtcaatgaacaacttcagaaagtgaaagaggaaattgctgaagcagcaaagaatccacatggcttgcttttagaagctattcactcggcaggttattctggtgcattggcaaatcctcttttagccccagaatctgcagttaatatgttgaacagtacagttttggaggattttgttgcagaaatttttactgcttctcggatggtactgtcagcaactggtgtagaacatgaagaatagttatctgttgcagaaccacttatgtcagatct

SEQ ID NO: 233722 - DNA, 402 bp, Gossypium hirsutum
gcctcactccgccatcttcaataatttcttccgttgatctttgttagagattagctttttaatttttcattatgggaaagatcaagatcggaatcaatggatttggaaggatcgggcgtttggttgcgagagttgctctccaaagcgatgatattgagctcgttgctgttaacgatcctttcatcaccactgaatacatgacctacatgtttaagtacgacagtgttcacggtcaatggaagcatcatgagcttaaggtgaaggactcaaagacccttctctttggtgaaaagcctgtcacagttttcggtatcagaaaccctgaggaaatcccatgggctgaggctggagctgagtatgttgttgagtctactggtgtttttactgacaaggacaaggctg

SEQ ID NO: 233723 - DNA, 403 bp, Gossypium hirsutum
ctcgcagctcgcacgctctcatcattttcctccgggaccgtcagtcttcccaaacaccttctttccgagaaaaaaaaagctcaagagagaagaccatggccgatcaacttacggacgatcagatctctgagttcaaggaggctttcagcctctttgacaaggatggcgatggttgcattactaccaaggagctggggactgtgatgcggtcacttggtcagaaccctactgaggcagaactccaagatatgatcaatgaagttgatgctgatggaaatgggaccattgattttcctgaattccttaacctaatggcaaggaagatgaaggatactgattccgaggaagaacttaaagaggctttcagggtgtttgacaaggaccagaatggtttcatatctgg

SEQ ID NO: 233724 - DNA, 401 bp, Gossypium hirsutum
ggtggaggtcgttgtaagggattgtagtgagtggtgccttgcttgtttaaatagagcttggctactcatcttctttaacagcttatagttgttcccttcatattgtagagagaggaggcttctttgcttgccacctctcttttatctcttcaaacacttctaaaatcatggatgagaagatgagtttgactgttgctgatgcagtggactacaagggtcaccctgctgacaagtctagaactggtggctgggtacctgctgctctcagcttacgaattgaaatatgtgagaggctgtcaacaatgggaatagcagtgaaccttgtgacttacttgggtggaaccatgcaccttccaagtgctacttctgcaaatgttgtgacagacttcatggggacatca

SEQ ID NO: 233725 - DNA, 396 bp, Gossypium hirsutum
cccatttcccttgtaaaaacaaaacatcatcgattccttctaaagaaataacccacggaagatggctactttggcggcggttgcagctcgtagagcagctactctagctcgaacaccccttccatctcaacccgcttctctcattcctcgccgtggtcttgccggcgccgcagatcaccatggacctccaaaggttaatttttggcaagacccaatgagcccatctaaatggaaggaagaacattttgttatcgtctctttaactggttggggtctgcttttctttagtggatacaagttcttcactaaaggcaaaggcaaaaaggaagagaacgcggtggaagcaacacactaacgaggttggagtttttattttatttttataagatttcaagt

SEQ ID NO: 233726 - DNA, 395 bp, Gossypium hirsutum
tttggattggtggagcctgataattactggtacagggtttgtgaaggagagactgagtctgttgttcaaaggccatggcatctggtatggaaatcaaggaggttgatggatatagtgtcggcaattgcgtcaaagttgaactgggattatgactctgttcacattgtgagaggggagaaggcgaggaacagggacctgtggcctaatcttgcccaagatacctcacctgatgcccttatctcaaccttgcagaataagattgaagatgggaggaatgtttatattgcaacaaatgaacctgatacatccttctttgatcctcttaaagacaaatattcaactcactttcttgatgaatataaggatctttgggatgagaacagtgagtggtattc

SEQ ID NO: 233727 - DNA, 388 bp, Gossypium hirsutum
gcctgctgtctctaatgatttgactgctgcaaaggtggatgttaaggtaactcctggcatggaagctgcaaaaagatatatatcttctttgagtacctcagcaagcacagctcaactggcaaatcatggtttggttgttataccgtttctcagtgcatttgtcagcttgaaggtgcttaatctatctggaaatgcaatagcaaggattactgctggtgctcttcctcgaggacttcacatgttgaatctgtcaaggaataatatatccaccattgagggtttacgtgagcttactcgacttcgtgtgctgaatctgagctacaatcggatatttagaattggccatggttgggcttcttgttcctctcctaaagagttatacttggct

SEQ ID NO: 233728 - DNA, 402 bp, Gossypium hirsutum
  unsure (1)..(402): unsure at all n locations
ggagaaatacgatgaggttaagtgttggcaaggggaattgatttatgtgccggaaaaatggacaccgtttgatgtcatatttctctattttctgcctgccttgctattcgaacttgaccaaatatttgcggcgctggcgaaacgttgttcatcaggtgcaagagtggttattagccatccccaagggagggaagtgctagagcagcaacggaaagagtttcccgacattgtaaacggaaacttgcccgacaaaaccacgttacagaaagttgcagctgaccattcctttgagatgactgaatttgttgatgagcctggattttatctagctgttttgaagtttagcgaggcanattagttaaaaacttatttggatttctacttaaaactaggtgcttcatt

SEQ ID NO: 233729 - DNA, 398 bp, Gossypium hirsutum
tttttgtcccccgtggatatcagagggaaaacacaaaaactagggtttttagagagaagcgggagccaaagtgagagagaagaggcagaaatttttagtagtagggttttattatattgcttctctagggtttagaaaatggtggccgacaaaggaaagaagatgaaagtagcatagaaagttgaggaagagaaccatgaacaaatagatggagacctcgtcatttccatcgagaagcttcaagagatccaagatgagcttgagaagatcaatgaagaggcaagcgagaaagtcttggaagtggagcagaaatacaatgaggttcgcaagccggtctatgataagcggaatgaaatcatcaattcaattcctgatttctggttaacagctttcttgag

SEQ ID NO: 233730 - DNA, 401 bp, Gossypium hirsutum
cccacgcgtccggattaatgacggaaaatccaggttttccattaatgggaagcctatctaccacttcctaggcacctctactttcagtgaatacactgttgtccatgtcggccaggttgccaagatcaatcctgaggctccgcttgataaagtttgtgttctaagctgcggaatgtccacagggtttggtgccactgtgaatgtagctaaacccaaaaagggtcaatccgttgcaatatttggactaggtgctgtcggtcttgctgctgctgaaggagcaagagtttctggggcttccaggatcattggtgtcgatttgaaccctagcagattcgaactagccaagaacttcggtgttacggagtttgtgaatcccaaagatcacaacaaacctgttcaag

SEQ ID NO: 233731 - DNA, 370 bp, Gossypium hirsutum
ctgatacactctgaataatgtaagcagatcgtgacatgggatctatagcaaggctagtgacctcttgttgagcgcatatactatgaaaataaacactgccaaacatgttttcttgtttgctaagatcaactttgcagctgccttggcattagcacaggttgtgagataccaaaggctcagaatgaacttcgacacggataatggagctaaagctaaaaacattataaaggatgaagtatagctactgttcaatcgacacaaaaacactgcttttttttgacggataaacatttcttatgactgtactgtccattcatgtgacgctttactgttgctgctctccaaaagctggagcttttctgagaaggag

SEQ ID NO: 233732 - DNA, 405 bp, Gossypium hirsutum
ctttaaaacacgcacccaaaaaataaaaccctttgaaaaccaaagaaggaagaagaagatgtcgtggcaagcttatgtagatgatcacttgatgtgtgaaatcgaaggaaaccatctctctgccgccgctatcatcggccaggacggcagcgtttgggcccaaagcgccagtttccctcagctcaagcctgaagaaattagtgccatcatgaatgactttaatgaaccgggttcactcgctccgaccgggttgcacctcggtggcacaaaatacatggtgatccaaggcgaaccgggagctgttatccgagggaagaagggacccggaggtgttactgttaagaagaccaatatggccttgattatcggaatctatgatgaaccaatgacacccggccaatgcaa

SEQ ID NO: 233733 - DNA, 401 bp, Gossypium hirsutum
attcgccgcacggcatcagtctcatcaggcggggaagaatgtctcacaggaagtttgaacacccaaggcatggctcccttggatttcttccgaggaagcgagcttctcgtcacagagggaaagtgaaggcatttcctaaggatgacccaagcaaaccttgcaagctcactgcctttttgggctacaaggcaggcatgacacacattgtccgagaggtcgaaaaacctggatctaagcttcacaagaaagagacatgtgaagctgttacgatcgttgaaacccctcctatggtgattgttggggttgttggttatgtcaagacaccacgtggtcttcgcagcttgaacaccgtttgggctcagcatctgagcgaggaagtcaaacgtaggttctacaagcat

SEQ ID NO: 233734 - DNA, 395 bp, Gossypium hirsutum
ctgggagggtttatgccactggtcttaatgattttgggcagctagggtcatcagatcttataaagtactctagagagccggttgaagtttcgggtcttgcaaaaggaattgtgcaaattgcagctggttatcatcattcatgtgctattacagtggatggagaactttacatgtgggggaagaactcaagcgggcaacttggccttggaaaaaaggctgcgaaagcagttcataggccaaccaaagtggaatgcttgagcgggcttacaattaaattggctgctttgggttcagagcacacagttgctgttactgatggaggtgaggctttaagttggggagcagttgcatctggaagacttggtcatggccttgagtcgagcatttttggtttt

SEQ ID NO: 233735 - DNA, 396 bp, Gossypium hirsutum
cctcactccgccatcttcaataatttcttccgttgatctttgttagagattagctgtttaatttttcattatgggaaagatcaagatcggaatcaatggatttggaaggatcgggcgtttggttgcgagagttgctctccaaagcgatgatattgagctcgttgctgttaacgatcctttcatcaccactgaatacatgacgtacatgtttaagtacgacagtgttcacggtcaatggaagcatcatgagcttaaggtgaaggactcaaagacccttctcttttgtgtaaaggctgccacaactttcggtatcagaaaccctgaggaaatcccatgggctgaggctggagctgagtattttgttgagtctactggtgtttttactgacgaggacaa

SEQ ID NO: 233736 - DNA, 398 bp, Gossypium hirsutum
ccaatggggtcggaatcggaacttattcccatggcgacgacggcgacgacgttaagcgaaaagctggtttaaaagctctaatagccatggttttcgctagtgttacttccatcaaagctgcttacgccgagctgcaaatggctcaacatccttacgacggtgaagctatccaagttgccgaccaagctgtcgtggaacaactcaaggttctgtcagagttgagacacaagttcttaaaacaagaccttgatctttcacctcaagttactttaatgcttgctgagatccaagaacaacaaagcatgatgcgaacttacgatatcacaatcaagaatctagaatctgatatcgaagaaaaagattcagccattgatttacaccataaacagctcgaacat

SEQ ID NO: 233737 - DNA, 397 bp, Gossypium hirsutum; identical to SEQ ID NO: 199669

SEQ ID NO: 233738 - DNA, 397 bp, Gossypium hirsutum
gtgttttgctatagaagaacatatctgggtttattttaattctctttgagttcaatcaaggagaatttttttttacttttgagtaatttatcttcttggtgtggtttacagcacaatcaaatctcttgaagtcttcaatattggttgttggagctggaggtttgggttcgccggctttattatatcttgcagcttgtggtgttggtcgcttgggtatcgttgatcatgatgttgttgagcttaataatatgcataggcaggttattcacactgaagcatatattggtcagccaaaagtgaagtctgctgctgctgcttgccgctcgataactccaccatacagattgttgaacacaaacaagctttgcgcacgtttaatgctttggaaattttgagc

SEQ ID NO: 233739 - DNA, 388 bp, Gossypium hirsutum
gtgccacattgtcagttcccatggtaggatatctatcaatcaaagaaacattggttgttgtttgagtttaaatttcggatctttgcaaaagaaaggagaaagaagaaatgcttgcagttttcgacaaatcggttgccaagagcccagatgctcttaatgctccagataaccctcaggctgtatctgctctcaaagatggcttcttacctaatcactttgcctctgtttatcccggttgtgtctccatcagtctcggctcttctggggttatggcttattctcttgaaaaacagaacccacttctccccagactgtttgcggttgtggatgacatattctgcttgtttcaaggccacattgagaatatagccgttcttaagcaacaata

SEQ ID NO: 233740 - DNA, 402 bp, Gossypium hirsutum
taaaaatggaggtttcctcgcgtgacaagctgatcgtgcagacccgggtaccggctgggatggctattgtgaccatcaatccaccgaattctctgatcttcttgacccgacacatgatggcggactggaccaaggctttcaaggctcttagaaaggacaactcgctgcgggtcatgatcttgtctggagctgaacagtctttctgttcacagcgtggatttgacatgctgcacatgatgttttcaagggtgacgttacggacccggagacggatccgtttgttcagatggagcaacgccccaaacccatcatcggatctatcaacggcgttgctattactgccggcttcgagatcgccctcgcttgtgacatgctggtcgttgctaagggagccactttcgt

SEQ ID NO: 233741 - DNA, 394 bp, Gossypium hirsutum
caaaaaagaaaaaatgatgcttggagaaactcatcgtccaaatccaaccgtccacgtaccaccttggcctgatcttgacgatgatcagacggatgtagtttactctcctatccattacaatgcaaccgacaacaacttgagcagtaacggcaacccgttttacctccatgaagcgttatcagctttacaacgttatttgccatcgaacggcccggatgttgagttggattccgagtttccgggtttggatagtccggattcaccggtcgatgcttattcctgtgaccatttcaggatgtacgagttcaaaatccggaggtgtgctcgtgggcggtctcatgactggaccgagtgtccgtacgcccatcccggtgaaaaagctcgtcggagggat

SEQ ID NO: 233742 - DNA, 404 bp, Gossypium hirsutum
atcaagcaaagcattttcataacccaattttttttcttcaaacacaaatcaaagggagaaaaaagaatggcagtggagggttcatcgaagaagatgatagcaacacaagcagagatggtggagaacaaggtccccatcccgtacagggatcaatgtgcacatcttctcatcccgctcaacaagtgccgccaagccgagttttacttaccttggaaatgcgagattgaacgccactcctatgaaaagtgcgagtacgagctcgtcatggagaggatgttgcagatgcagaagatccgtgaagaagaggccaagttgaaacaggctgggaaacagggcgcttctgttcctctcatccccaaaactgctaatgcttaagctgtctccagggagggtttagactactt

SEQ ID NO: 233743 - DNA, 403 bp, Gossypium hirsutum
tacaaagcttcatattatcttttttagttccgacacaagaaaacgaaaaaaatagaagaagtacaatcggtttctttttgaagtcggcttttagtttttggggagaaaaaaatgttgggagtatttagcagtgcgatagcgtctccgccggacgagctggtggcggccggttgtcgaactccatcacctaagataacgggggatgctctggtgaaacggttccttgagacgaactcctgcggcgtgtccatgcacatcggcgaccatgtccaattcgcttattcttaccataaagagtcttctttacggcccagatcattcgctgcgaaagatgaactcttgtgctcgcttgtgggagcccttgatcacttgcggagtttcaagcatcaatatggtctggcaa

SEQ ID NO: 233744 - DNA, 401 bp, Gossypium hirsutum
ctttttatttttttcagagcctccttcaccaaactccgctctgttcagcccgtgatcttttgatctttctctatggctaccatttccaagctctctaaccccaacccagtcgcttctctttcatcatcttccaaacccagatcttcttcatcgcttaaatgcttcgttgggttccctaccaggcctggtttctgctctaagctggtttcatcttctagcttgtcctcgataaacacccaccctttcaggggctccttggttgtcaggtgttctcttgctgatggaaacggtagttcagtgaagaggactactttgcatgatctgtatgaaaaagaagggcagagtccatggtatgacaacctttgcaggccagtgaccgatttgctgccactgattgcaag

SEQ ID NO: 233745 - DNA, 389 bp, Gossypium hirsutum
tttttccttctcgctctctagggttttcttggtcaagtaaaaaatgaaggtggtcgctgcctacttgcttgccgtcttgggagggaacctttccccttctgccgatgatttgaaggatattctcggatctgttggagctgaggctgatgatgataggatagagttgctattgtccgaagttaaaggcaaagatatcaccgagctaactgcatctggaagggagaagttggcttcagtcccttcaggtgggggtgctgttgctgctgctgctcctaccactggtggcggtggtgccagtgctgcaccagctgctgaggccaagaaagaggagaaggtcgaagagaaggaagagtccgatgatgatatgggtttcagtctcttcgattaag

SEQ ID NO: 233746 - DNA, 399 bp, Gossypium hirsutum
gtttcttttagcttacagcttccattgtttttcagtagtgaagagctaaaaaagaagggaaaccaatggaggggaaagaagaagatgttagattgggagcgaacaagttctcagagaggcaacctattgggacagcagcccagtcccaagatgataaggattacactgagccacccccagcacccttgtttgagcccagtgagttgacttcatggtcgttttaccgagctggaatcgctgagttcgttgctactttcctattcttgtacatctcggtgttgactgtgatgggagtccttaaggacataaccaagtgtacaactgctgggattcaagggattgcttgggcttttggtggaatgatctttgctcttgtttactgcactgctgggatctcag

SEQ ID NO: 233747 - DNA, 402 bp, Gossypium hirsutum
aagctacttgatattggatactttgccatctgagtacgactccagagtaaaggctatggaggttgatgagaagccaactgaggactacaatgatattggtggcttggagaagcagatcccaagaactagttgaggccattgtgttgcccatgactcataaagaaaggtttcaaaagttaggcattcgtccacctaagggggtgctcttatatggacctcctggcactggaaaaaccttgatggcccgtgcttgtgcagcacaaacaaatgccacgtttctgaagctagcaggcccacagctggttcagatgtttattggagatggagcaaaacttgtccgtgatgcttttcagcttgcaaaagaaaagtctccatgcatcatttttatagatgaaattgatg

SEQ ID NO: 233748 - DNA, 396 bp, Gossypium hirsutum
taaaaaatgagctttcttcaggccttgtcaattttccttttgcttttgttgtatgtagtcgtaggatcagctgagcagtgtggaaggcaagcaggcggtgctctttgccccggtggtctatgttgtagccaatttggctggtgtggcagtactgctgactactgcacagttcctggttgccaaagtcagtgcagcggtagtggccctgcccctgggcctggtgggctaaccaatcttatatcaagagagacctttaatcagatgcttttgcataggaacgatggggcttgtcctgcccgtggcttctatacatatgatgctttcattgctgctgcccgttcttttcctgcatttgctacaactggtgaccaagctactcgcaagagggaaatagct

SEQ ID NO: 233749 - DNA, 398 bp, Gossypium hirsutum
cttccaaagctttcagacaagactagtgattcgtgttcaaagaaccaaacaagccaagtacatggttgatttggacgttcagatccctacaactttcgatccattcgccgaggctggggaatttggtggcactggaaccaaggagtatgttcatatacggattcaacaaaggaacgggaagaaaagcttgacgacggttcaaggcctgaggcatgacctgagctacgagaaaatcctcaagagtctcaagaaggacttttgttgcaacggcaacgttgttaaagacaaagagctcggcaagatcattcaactccaaggcgatcaacgcaagaacgtgtcgcagttcctcgttaatgccgggatcgtcaagaaagaccaaatcaaaattcatggttttt

SEQ ID NO: 233750 - DNA, 399 bp, Gossypium hirsutum
cgaaaacgcgaacattgcgctcgagcaaatatcggaactcgcttcaccggacggcgatacgatgcaacgtattgccgcttatttcaccgaagcactagcggaccggatcctcaaaacgtggcccggtctgcataaggctattaattcgactagggttgtcgatttggtatcggaacaagctttggttcggaggttgtttttcgaggtgtttccgtttttgaaagcggcattcttgcttgttaaccaagctataatcgaagcgatggaaggggaaaaggtggtacatgtgattgatctcgacgcggcggagcctatgcaatggattgcactcattcgaggtttgagtgcaagaccagaaggtccgccgcatttgaggatttctgggatacatgtacgaaa

SEQ ID NO: 233751 - DNA, 403 bp, Gossypium hirsutum
gctttgaagatcatgttggctatttttcacaaggcatttgctaatccaccagaggagctgaatagtccagcttctcataaatctactaagaagcctaaacagcctgaagaaaccctaaatgatttcctatctcatcaccctcacaacactttctccatgagctttggcaacgctgctgttttggcttatgtccgccatgaacgtgctgcttcagttcatcagaggttgttttgtgggtttgatgacatatactgccttttcttagggagcttgaacaatctatttatgctgaatagacagtatggtctttccaaagggagcaatgaggcgatgtttgtgattgaagcatataggacactaagggataggggtccataccctgctgatcaggttgttaaggatc

SEQ ID NO: 233752 - DNA, 400 bp, Gossypium hirsutum
aacgaatgggtcttacctttgaaagagtcaagtattggttatcggttggggcacaggcttgagagccggtgcaacgcatccttttcagagctggagtattgccttcgccacccatggtggcaatgggacgcaagggtggaccacgcgacatgcgtcccgttgatcctatgactggtcgtgttttaaacgaagagaaaccaattgctggcaaccaagaaaaaagtggcaaagatgaggctggtgatgagtcaaactctgcatgaaaagtttatattatccctaagactcctcactctgcaatatctaaaagtcgggaaaatgaaaagggggattatattggatgattagaaatttgtgacgaaaaatgacatttgccatttgcggaaactgccagcttatt

SEQ ID NO: 233753 - DNA, 403 bp, Gossypium hirsutum
caggctgcggttgaatctcacaggaaagcagctgctgctacagcttctggtaaattcaaagatgaaatagtccctgtggccaccaagattgttgatccaaagactggtgatgagaaacctgtcacaatctctgttgatgatgggatccgagctaacacatcagtgtcagatctgggaaaattgaaacctgtattcaagaaaaatgggaccactactgctggaaattctagtcaagtgagtgatggtgctggagctgttctgcttatgaaaagaagtgttgcgatgcgcaaaggactgccaattcttggtgttttcaggacttttgctgctgttggtgtggatcctgctatcatgggtgttggcccagctgtggcaattccagcagcagttaaatctgctggtc

SEQ ID NO: 233754 - DNA, 404 bp, Gossypium hirsutum
ctttggttagctctacctacgtgccttgcccaccaccaccaaagagccacaagcctacccggaggagcccaccctgggcacctaaacagccagccacttgccccaaagatacactgaaactaggtgtttgtgctgatttgttgggctcggtgcgcgttgttgttggaccgtcgaggaccaaatgctgctcactcatttcgggtttggctgatctcgatgctgctgtttgcctttgcactgctattaaagcttatgtgttgggggttaacctaaacgttcctgtttcattgactttgctcctcaatttctgcgaaaagcaaatgcctgctggttacaaatgttcctaaacaatggttgggtttttcttttaacggtttcttttttttctgggcgtgttaaatttg

SEQ ID NO: 233755 - DNA, 401 bp, Gossypium hirsutum
caatcatccacttcttctcttatttgaactcaaagtcccagctaatattagaatcatgggtgttgtcacttatgactatgagaatacctccccagtcgcccctgccaggcttttcaaggcctttactgttgaagctccgaaagtttggcccacggctgcacctaatgcagtaaagagccttgaggttgaagctaatcctagctctggaagtatcgtaaaaatcaactttgttgaaggccttccattccaatatatgaagcaccagatcggaggacatgatgaaagtaatttttcatacagttacgatttaatcgaaggtgggcctttgggggataagcttgaaaaaattagctatgagaacaggtttgaggcagctgcaggtggagggagtatttgcaaga

SEQ ID NO: 233756 - DNA, 399 bp, Gossypium hirsutum
  unsure (1)..(399): unsure at all n locations
nctccattcattatttacgttaagttcaaagaaatggctaatcctgtgaacactcgcgtccacagtctccgtgagcgtttagatgagacccttcttgcccacaggaacgagattttggccttgctctcaaggatcgagggcaaaggaaaaggaattctgcaacaccatcaaattattctagagtttgaagctatccctgaagagaacagaaagaacctcgctgatggtgcattctttgaagtattgaaggctagtcaggaagcgatcgtgttgcctccatgggttgcacttgctgttcgtccaaggcctggtgtttgggagtacattagagtgaatgttcacgcccttgttgttgaggaacttactgttgctgagtatctccacttcaaggaagagctt

SEQ ID NO: 233757 - DNA, 404 bp, Gossypium hirsutum
ttgtaatgtaagcaccttctcttagtatacaagaaaggcaacaaagaaaccccagaaaaatgagaactagcaaccatttgatagggttactaaacttcttaacatttttgttgtcaatagtaatattgggtggtggaatatggctaagcagccgagccaacagcacagattgtctcaagttcttacagtggccattgatagtaataggagcttcaatcatggtggtttcgttagcaggttttgcaggcgcgtgttataggaacaccttcttgatgtggctttacctcttcgtcatgttcttcatcatcgccgccctcatcggctttataatctttgcttatgcggtgactgataaaggctccaggcggtcggtgttgaacaaaggttacttggggtattacttg

SEQ ID NO: 233758 - DNA, 405 bp, Gossypium hirsutum
cttgcattaagtctcaaagatatcactgcaagaaaaaaaaaaaaccagacatggcttccaacactgttgcatccgctgctcttcttcttaccttgaacttgttgttcttcactttggttagctctacctacgtgccttgcccaccaccaccaaagagccacaagcctacccacaaaagcccaccctcggcacctgaacagccaggcacttgccccagagatgcactgaaactaggcgtttgtgctgatttgttgggctcagtgcgcgttgttgttggaccgtcgaggaccaaatgctgctctctcatttcgggtttggctgatctcgatgctgctgtttgcctttgcactgctattaaagctaatgtgttgggggttaacctaaacgttcctgtttcattgtctt

SEQ ID NO: 233759 - DNA, 343 bp, Gossypium hirsutum
ttgtaatgtaagcaccttcttttagtatacatgaaaggcaacaaagaaaccccaggaaaatgagaactagcaaccatttgatagggttactaaacttcttaacatttttggtgacaatagtaatattgggtggtggaatatggctaagcagccgagccaacagcacatattgtctcaagttcttacagtggccattgatagtaataggagcttcaatcatggtggtttcgttagcaggttttgcaggcgcgtgttataggaacaccttcttgatgtggcttcacctcttcgacatgttctatatcatcgccgcccctatcggctaaataatctttgcttatgc

SEQ ID NO: 233760 - DNA, 396 bp, Gossypium hirsutum
gtaatcctcaagtctactactacaggaatcggttgaagcagagaatggagggaagaagggtcattggatgggctgccagagatgtatcagcacatctttcaccttattcattcactctcaggaaaacaggtccagaagatgtggtgttgaaggtattgtattgtggagtagatcacactgatctacaccagatgaggggtgagcttatgcccatcaactacccattggttccagggcatgaagtggtgggcgaggtcgtggaagtgggttcagaagtaaacaaattcaagcttggagacaaggttggagttgggtgcctggtaagctcttgtgggaaatgcttgtcttgcaactccaataatgaacagtactgcaaccagagggtctttacatatg

SEQ ID NO: 233761 - DNA, 399 bp, Gossypium hirsutum
gtttttgtattttatcaattccgtttctccttaaatcaaaaccatgggagacagtcaatattcattttctctcacaactttcagtccttcaggaaagctagttcagatcgagcacgccttgacggcagtaggatcgggtcaaacatctcttggaatcaaagctgctaatggggtagtaattgctactgagaagaaattgccttcaatcttggttgatgaaacctctgttcagaaaatacagtgtctgacaccaaatattggagttgtttacagtggtatgggccctgattttcgagttttggttcggaaaagtagaaagcaggcagaacagtatcattagattgataaggaaccaattccagtaacacagcttgtaagggaaactgcagctgtgatgca

SEQ ID NO: 233762 - DNA, 404 bp, Gossypium hirsutum
gaaaatcaagaaccgaaaggacctttaatcttttgaaccaaacaccccccctaatcagaaccctaactttttttttcttctaatctttgattgtagaaaccaaaagcaaacgcgtaaagaaatcatgggttctgaacagaatgaaggaactagcttccctccatcggcgccaaaactttgtgccaacggctgtgggtttttcggcacggcggcgaatatgaacctctgttccaagtgttaccgtgacctccgtgccggggaggagcaagctgccaaggcgaaagctgccatggagaaatccctcagcgttaatacgaagcaggaagatgtcgttgacgagactgtgaagcctgttcttgagcttcctcatgtgggttcctcatcgacggtggtcgagatacaac

SEQ ID NO: 233763 - DNA, 402 bp, Gossypium hirsutum
ccaagacttcattgacatctccaacatcgatggctttaatgttcctatggagtttagctccaactccccagggtgcactagggttatcaagtgtacggccgacattgtcggacaatgcccgaaccagttgaaggttcccggaggttgtaacgggccttgcccagtgttcaaaactgaagaacattgctgtaattctgggaactgtcaacctaccgacttctcgaggtttttcaaggagaggtgccccgatgcttatagttacccaaaggatgacccaacaagcttgtttacatgccccacagggactaattacaaggttattttctgcccatgaagagtatttgggatggttttaagtcctttctatacacaaattagtaggtttatatcaataaatggaat

SEQ ID NO: 233764 - DNA, 410 bp, Gossypium hirsutum
gcttttactctgaagggcgagctgtagctgccgctgcagcagtttcacttggcggtaaagtgcctcttttggcttcagcttatggaagtactgcttctgccaatgcatctagagcatggctttcaggagtttttgctcttccagtggcagcttacatgcttcaggagcaggaggttcatgctgcagagatggagcgcaccttcattgctatcaagccagatggagtgcaaagagggctgatttcggagatcatctctcgttttgagcgcaaagggttcaagcttgtggctatcaagttggtagttccttcaaaggagtttgcccagaaacattatgatgacttgaaggaaagaccctttttcaatggcctgtgtgaattcctcagctcgggccctgttcttgccatggtt

SEQ ID NO: 233765 - DNA, 404 bp, Gossypium hirsutum
gtcataatcagcttaatggaagcattcctatggaaattggaggagctttctccttgaaggatttgaggctcaatgctaatttcctaggtggaaaaattcctacatcaattgagaactgcacctcgctatctactttgatcatatcacaaaacaacctgagtggcccaatacctgctgaaattggaaaactgaacaacctacaaaacgtggacctgtcttacaacaaccttgctggaaccctacccaagcaattggccaatctaccccacctcttatccttcaatatttcccacaacaatttacagggagaactgcctgctggtggattttttaacaccatatcgcccacggctgtctctgggaatccatcactttgtggctctccagttaacaaatcttgccct

SEQ ID NO: 233766 - DNA, 407 bp, Gossypium hirsutum
ctcagaaaaaaattgagtgtcagtttgaaagtgttcttcagatatggctatgaaacaagttgctaattctgctatcaaagcaattgccaattctgggtcatcctctcttcttaccagacaactgcatgcttctccagggagcaaaaagattgtgggggtgttttacaaggccaatgagtactttacgaagaatcccaactttgttggttgtgtggagggagccttggggttgcgccaatggctcgaatcacaggggcatcagtatatcgttaccgacgacaaagaaggaccggactgcgaacttgaaaagcatatccctgatctccatgtgctcatatcgaccccattccacccggcttacgttacggctgagaggatcaagaaagccaaaaacttgcaactgcttc

SEQ ID NO: 233767 - DNA, 360 bp, Gossypium hirsutum
aaaaaaaaaagatggatgaaaatgttgttaattcctggttggacattgatttgatcagtctatgggtgtttccaaaatgcatccattagtttgaagaaatgctggggaaaggtgcaatgaaaacagtgtataaagcaatctatgaggtgctgggaatggaggtggcgtggaaccaggtaaaactgaatgaggtgctccgatcgccagaggatttgcagaggctgtactcataagttcacctgctcagcaccctcaatcatgattctatcataagattccactccttctgaatcgatgttcatcgcaagaccttaaatttcataactgaaatgctcactttgggatctctcagagcataca

SEQ ID NO: 233768 - DNA, 414 bp, Gossypium hirsutum
taaagagacggcgccaatcagctgtccgccttgactgaccgtccggcatcgtcttggccctcgattttgcccttttgtaaacctttttttttcaccaattcccgaaatggcagtgaaaccctccaaggccgataagaaaatcgcgtacgacgcgaaactgtgccagctcttagatgagtacacgcagatcttgatcgccgcagccgacaatgttggctcgaagcagctccagaacattcggaaaggtctccgaggtgactcagttgttttaatgggtaagaacactatgatgaaaaggtctgttaggatgcatgctgagaagactgggaacgaaactttccttaaccttatccctttgcttcagggaaatgtgggtttgatctttacaaagggtgatttgaaggaagtcagtga

SEQ ID NO: 233769 - DNA, 405 bp, Gossypium hirsutum
aaaaatgatgatcggagaatcaatccaaccaaatcccaccatcaaaatccccggaggggacccattcaacgatccgacggctagctttcactccgttaactttaactacaacaatgcagtcagtagtccttgccccgtcgattacctcgggtctctccaccgttacctaccgtcaaacgactacgagtccgattcgctgagtgatgattcggacttacctgttgatgcattctcatgcgaccatttccggatgtacgagttcaaggtgaggaggtgtgctcgtggaaggtcacatgactggactgagtgtccgtacgctcaccctggtgagaaggcccgaagaagggacccgagaaagttccattactctggaactgcttgccccgattttcgcaagggaagctg

SEQ ID NO: 233770 - DNA, 394 bp, Gossypium hirsutum
  unsure (1)..(394): unsure at all n locations
aagtgtaaagattcagtatattcaactttntagtgatcatcttgctgtctctgagcgtgaagaaggtttgcccaaaattactgtttaccatcttccggaagttgaagagccactcgtaaatcttgaagggggtaaatcagttcaatttattgaccctgtatactcagttgatctatcagtatcacagttttcctccaccattttgcggttttcttatagctcattgcggatgcctaaatctgtctatgactatgacatgaatactggggagtctgttttgaagaagattgaaactgttttgggaggctttgatgcatctaattatgtcaccgaaaggaaatgggctacttgcttagattgcactcaaattcccatatcaattgggtaccaaaag

SEQ ID NO: 233771 - DNA, 282 bp, Gossypium hirsutum
attctctgcaatctcttctttttggagtttcatcacaccagatattacaatgggttcaatcggtgaaactcaaatgacacccacccaagtctcagatgatgaagccaacttattcgctatgcaacttgccagtgcatcagtcctccccatggtcctcaaatcagccattgaacttgacttgctcgagatcatggctaaagctggtccaggtgctttcttgtccccaaaagaagtggcttccaagctccccaccaccaaccctgatgcacccgtcatgctgga

SEQ ID NO: 233772 - DNA, 406 bp, Gossypium hirsutum
ctctctctctattttctgtcagatttcttttttctctctcaaaaatctctcagatccaatactctccgctcctctgatcttttcttcgacttggtttatgagctcgaaggagaaacccactcttggcggtacgcggattaagacccgcaaacggaatattgctgcacccctggacccttcagcatttgctgatgcagtagtccagatctatttggataatgctggtgacctggaacttgttgccaggagcattgaatcttcagatcttaacttctcaagatacggtgacaccttctttgaggttgtttttgctggaggccgcacacaacctggcacacttaaacctgatgaaggggagtgccacccttactctatcatagagtgtgaggctaaacgtgatgccatt

SEQ ID NO: 233773 - DNA, 406 bp, Gossypium hirsutum
ggaaagggtcttcgggcacttaccaaagcccagttggatgagattctaggtccagctgaatgcaccattgtttcttcattatctaacaagcaagtggactcctatgtcctttctgagtctagcctctttgtctatccatacaagattataatcaaaacctgtgggacaactaagttgcttcttgctatcccacccatcttgaaattggctggcagtctatcccttgctgtaaaatctgttaggtatactcgtgggagttttatattccctggtgctcagccatttcctcaccgaaacttctctgaagaggttgctgttcttgataactatttcgggaagctaggcgctggtagcaaggcttgtgtaatgggtgggctggataaacagaaatggcatgtgtactctg

SEQ ID NO: 233774 - DNA, 417 bp, Gossypium hirsutum
cttcgctttgagattagatccaaaattcccctttcatcttatttccgattccgcaatttttcctgaaaccctaatcctaatcccggattcctctcgtctacatcgtctagcaaatggcaaccgaggagccggcagtcgtggcagaccccgcaccggagacggaggaggacaagactgctgagaccaaagctacttcaaaatctggcagagcaaagaaaaccaaagaacccaaaaccaagaaagctgcagctcctcggaaaccacgggctgctcctactcatccaccttacgaagagatgatcaaagatgcgatcgttactttgaaagagaggacaggttcaagtcagtacgccattgctaagttcattgaagagaaacagaagaatcttcctgggaatttcaagaagcttcttcttg

SEQ ID NO: 233775 - DNA, 387 bp, Gossypium hirsutum
caaatgatcaacttcaaaacctcgctgacccttccaaagcacgatcatgggtggaatcaaatgttgtagcttactggccgagtgttcggttccgatacattgctgtcgggaatgaagtccctcattcatcttggttagctcaattcgttttgcccgccttagtgaatgtattcaacgcggttcgatcggccggtttggagagtcaaatcaaggtctcaatcgccattgatatgaccttgatcggtgtctcgtatcctccatcggctggtgcgtttcgtggggacgttaggtcgtatttggaccctatcataggccacttagcatgggctagaacacccttgcttgcaacatttacacttacttcaactattcaggcaatccaaggga

SEQ ID NO: 233776 - DNA, 409 bp, Gossypium hirsutum
gcagtctctcccgctccttctcgctgcgatttcgtcttcaagatctcagttctcaaatcgtagcgctcttttctatcaagccatggctctggtcttgcatgcagcaaaggcagaggcagctgaggaggaggaggcaccaaagcccaaaccaaagaatcctcttgatttgctgcctccaagtaagatggtactggatgactggaagaggctttactctaacacaaagaccaatttccgagaggttgcaattaaaggattctgggacatgtatgatcccgagggatactcactgtggttttgtgactacaagtacaatgaggagaatacagtttcatttgtcacaatgaacaaggttggaggattcctgcagagaatggatttggcccgcaggtatgcatttgggaagatg

SEQ ID NO: 233777 - DNA, 408 bp, Gossypium hirsutum
agccaaatacctttctcgagcgtttcttttttaactctccagttctccacgaatccatagaatttcaccaagaagaagaagaagatgtcgtggcaaacatatgtagatgagcacttgatgtgcgaaatcgatggcaatcatctctcctccgccgccatcgtcggccacgatggcagcatttgggcccagagctccaatttccctcagttcaaacaagaagagattaatgccatcatgaatgactttgctgaacctgggtcacttgctccaactggattgtaccttggtggcacaaaatatatggtgatccaaggcgaacccggatatgttattcgagggaagaagggatccggaggtattactattaaaaagtccaatatggctttgctcatcggaatctatgatgag

SEQ ID NO: 233778 - DNA, 409 bp, Gossypium hirsutum
  unsure (1)..(409): unsure at all n locations
caacaagtcctaaatattggcaactatgtcgtccgggtaaagattggcactccgggtcagctcatgttcatggtattggacactagcaatgatgtggcttgggtcccatgctccggctgcaccaggtgctcagccaccactttctcacccaacacttcttccacctatggttcgttggattgcggtttgccccaatgcgcccaggtccatgggctgtcgtgcccggctacggggtctgcggcttgctcttttaaccaatcctacggtggagattcatcattttcggccaacttggttcgagattccttaggattagccaatgacattgtcccagattttgcttttggatgtataaacgccatctctggttngtcagtaccaccgcaaggacttgttggtttgggtcggg

SEQ ID NO: 233779 - DNA, 398 bp, Gossypium hirsutum
gaaaagaaaaaggaaagggaaactatgacacacttcgttctagttcatggtatgtgtcatggagcttggtgttggtacaagattgtgtcgctgctcaaatcaggcggccaccgtgtcactcccttggatcttggtgccagtggaatcaaccccaagaccatcactgacttggcttccttgtccgattatgcggagccattaatggcattaatggcctctttgcctgaagacgagaaagtgatactagtgggtcacagttacggtggggttatcatttccttagccatggaaagcttccccatgaaagtattggccgctgtttatctcacagcttttatgccgaatcatgattcttctattgcgactggagtagctgagtacttcagaagggttatggc

SEQ ID NO: 233780 - DNA, 411 bp, Gossypium hirsutum
gcttccttctttgtcagtagggtagacaccctcattgacaaaatgcttgaaatgattggaacaccagaagcccttgatctccgaggaaaggctgctgtagcacaagcagctctggcatataggctctaccagaagaaattctccggtccaagatgggaggctttggtgaaaaagggtgccaagaaacagaggttgctctgggcttcaactagtgtcaagaaccctgcctaccctgacaccctatatgttgctcctctcattggacctgacacggtctcaaccatgcctgaccaagcactccaagccttcatagaccatggcacagtttcaaggacgattgacgcatacgtgtctgaagctgaaggcatctatagtgcacttgagaagttggggattgactggggcaaagtc

SEQ ID NO: 233781 - DNA, 386 bp, Gossypium hirsutum
ccctgatgaccctcttgttccggagattgctcacatgtataagactgatcgggcaaagtatgaagccactgctcgtagctggacccagaagtatgccatgggatgacagttgttggtgtgtaatatgtatcagctttcttatgttgccaactgtgtcgaaccattttatgttttcttttggggaagggagggggtgttttttcttaaaggaatttgtcattgtgctttggatatgggaagatatggacattctttttatttattccgcgctttataacttgtgtgaaacccttgtttcgttctcgaagtcgctgtgaaaccctttgtttcgttcaatgtaacaaaaaagtctttggttaaaaaaaattaattaattttattaaata

SEQ ID NO: 233782 - DNA, 401 bp, Gossypium hirsutum
ttcttctctcttttactcattcattctttagtttcaatatcaaagcaaaaatggcttcttcttgtaatgttgtttcaatggctttactggcttgtttggtgttgaactccttggtttttgttgcccatggtggtgacttttaccaggatttcgacctaacatggggtgacaaaagaggcaagattttcaatggtggcaagctcttgtctttgtctttagacagggtttcagggtctggttttaaatccaagaaagagtatttgtttggaaggattgatatgcaactcaagcttgttgctggcaactcagctggcactgtcactgcttattatctgtcatctcaagggccaacccatgatgagatagactttgaattcttagggaatctgagtggtgaccct

SEQ ID NO: 233783 - DNA, 405 bp, Gossypium hirsutum
gcaaggtgttatcgtcagataaaaaaacaaaccttacccaaagtcacgttattgtcgtggtgttcctgatcccaagattaggatttatgatgtgggaatgaaaaagaagggtgtggatgagttccctttctgtgttcacttggtctcttgggagaaggaaaatgtctctagtgaagctctggaagctgctcgtattgcttgcaacaagtatatggccaagtatgctgggaaggatgccttccacctgcgagtccgtgttcacccattccatgtcttgcgtatcaacaaaatgctttcatgtgctggagctgataggctccaaactggtatgcgaggtgcttttggcaagcctcatggaacatgtgctagagtagccattggtcaggtcctcctttcagttcgttg

SEQ ID NO: 233784 - DNA, 406 bp, Gossypium hirsutum
gccgtctcgcgtgcgccctgtggctctcttcaaccctcgcatatctcttcaagatctgatctgatctgacaaaaaaatgttcgggagagcaccaaagaaaagcgataatactaaatactatgagatattgggagtgcccaaaaccgcttcccaagatgatttgaagaaggcttatagaaaagctgcaattaagaatcatcctgataaaggcggtgatcctgaaaagtttaaagagttggctcaagcttatgaggtgctgagtgacccagagaagcgtgagatatatgatcagtatggcgaggacgcccttaaagaaggaatgggtggaggcggtggtgcccatgatccatttgatatcttccaatccttctttggtggcaatccttttggtggtggtggtagcagc

SEQ ID NO: 233785 - DNA, 407 bp, Gossypium hirsutum
cggacgcgtgggctcaaatccctctgaaaaatcctctcaaattttctttccatcccacgatcccccaaaatcaccatggccgctacttcaccacgtgaggaaaatgtctacaaggcgaaactcgccgagcaagccgagcgctacgaggagatggttaggttcatggaaaccgtcgtttcctccgtcgttgctcccgacgaacttaccgtcgaggaacggaatctcctctccgttgcctacaagaacgtgatcggcgcccgccgtgcttcctggaggatcgtttcttccatcgagcagaaagaggaaggacgtggcaacgccgatcatgtctccatcattcgtgagtacagggccaagatcgaggctgagttgtctgatatttgtgccggaattttgaagcttctcga

SEQ ID NO: 233786 - DNA, 405 bp, Gossypium hirsutum
gttcatctcaaccttgatcttcgttttcgctggatcgggctcaggaatggcctttaacaagttgactgacaacggagcaaccaccccggctggtctcgtagccgccgctctagctcatggcttcggtcttttcgtcgctgtctccgttggcgccaacatctcaggtggccacgtcaaccctgccgtcaccttcggtgcttttgttggcgggaacatcactctcttgcgcggcattctttactggatcgcccaactcctaggctcaaccgtcgcttgcctgttgcttaagttcgctaccggcgacctggctgtacccgcttttgggttgtcatcaggtgtgggcgtgtctaacgcattggttttcgaaatcgtgatgaccttcggattggtgtacacagtggacgc

SEQ ID NO: 233787 - DNA, 315 bp, Gossypium hirsutum
gtagagatccgactttagatggcgacattgtacgcgctgttttctcgtttatgagagatgctagcgctgatcacgtgggcatataattacgcaggtgcgatcgccaggcaagtgatatgcaagattgcggacgacaccgacgtttacgtgtcattattaacaagatcgatacatattgaacgttaaacgcaccgagggactaaccgatcttttgatggatgagcaaagtgcctaaagagccaatgccttagcggttctatgtgacacttatcagagattccgggggacgtatggccacccaatgttttgagccct

SEQ ID NO: 233788 - DNA, 412 bp, Gossypium hirsutum
taaaattatctgtttttcacattgataatcttctcttctcgatctatccgcttcgggtttgagagagaagagataaagaacatagagaaaaagagggtaaaatggcgcatagagtacatcacgagtacgattaccttttcaagatcgtgttgataggcgattctggagttggaaaaacgaatattctctctaggttcaccagaaacgagttttgtttggaatctaaatccactatcggcgtcgagttcgctactagaaccctccaggtagagggaaagactgtcaaggcacagatttgggatacggcaggtcaggaaagatatcgagccatcaccagtgcttactacagaggggctgttggtgcacttatggtctatgacataacgaagaggcaaacctttgataatgttca

SEQ ID NO: 233789 - DNA, 410 bp, Gossypium hirsutum
gaagaccaccgccggcagcggtaagaagaagaaaaagaatagtaatagcggtggtgtgagtgatttcgacggtgttacgggagcatgtgggaacgagttgggtgactcgggtcgggcgaatttgagatccgactcgctgagtttgcggttggggaatttacagaagtatgttgaaggtgaacacgtggcagccggctggcctgcttggcttagtgccgtcgccggagaagccatccatggttgggttccactcaaggccgactcttttgagaagcttgagaagatagggcaaggtacatatagcacagtgtttcgggctcgagaccttgagagtgggaaaataggtgctctaaaagagggtcgttttgacaattttgagcccgagagtgttcgattcatggcaagagaga

SEQ ID NO: 233790 - DNA, 399 bp, Gossypium hirsutum
gcatgtataaaaactggttaccttcactgttcgctttcatttttttttatcttttctgatcgagaatcagataaaaatatcttattctacaatattttccgatcaaatcgagatccccgcgaaaatgaacgacggagatgtttccaggcagattcagcagatggtgagattcatccgccaagaagcagaggagaaggctaacgagatctctgtttcagcggaagaggaattcaacatcgagaagctccagttggtggaggcagagaagaagaagatcaggcaagagtacgagaaaaaggagaagcaagttgaagttcgaaagaagattgagtattcgatgcagcttaatgcatctaggattaaggtccttcaagctcaagatgatgtggttaatgaaat

SEQ ID NO: 233791 - DNA, 403 bp, Gossypium hirsutum
caacggcacctttgattgccagcatggccctactgaatgcttgttgaacactgtggaagcttgtgcaattgatgcctggcctaaactgaatgaccatttcccatttatctattgcgttgagaatttggaattggagcgcaagccccttgaatgggaatcgtgctttaagaaattgggattggaatcaaagcctgttaatgattgttataacagtggactggggcaaaaacttgatctacaatatgcagccgaaacaagtgcccttgaaccacctcatacatatgtaccttgggttgttgtggatgggcaaccactttacgaggactatgaaaactatataagctatgtgtgcaaggcttataaaggtgctaacatgcccaaggcttgtagtggactgaccttc

SEQ ID NO: 233792 - DNA, 403 bp, Gossypium hirsutum
ctttttggacaccgtgagaatcggagaccgagaatccgtctttttagggtttggttcggattttaatttttgtagcaatggcggatgattcggagagtaagcagtcggcggtggagtcgatgatggagaagatcagcgagaagattcacggcaatgattcatcgtcatcttcggattcggatcatgagaaaccggcttccccttcctccgttaaggctaagatttatcggttgtttggaagagagagaccagttcatcatgtgcttggtggtggaaaacctgctgatgtgttcttgtggaggaacaagaagatttcagctggtgtccttggtggagcaactgcaatttgggtcctttttgagttgattgaataccacctacttactttaatatgtcacatttc

SEQ ID NO: 233793 - DNA, 340 bp, Gossypium hirsutum
  unsure (1)..(340): unsure at all n locations
gaagaagcccattagactgggaatccagagtaaaaatctccctcggaattgccagaggaatttcccacgtccattctatgggcggtccaaagttcactcatggaaacatcaagtcctcaaatgttctcatcaatcaagaacatgatgggtgtatctctgatttgggtttgacccctcttatgaatgtccctgcaactccatcccggtcagtggggtatcgtgctcccgaggtgattgaaacccgtaagcatacgcataaatcagatgtatacagctntggtgttttgctcctagagatgctgactgggaaagcaccactacaatcacctaaaagggatga

SEQ ID NO: 233794 - DNA, 212 bp, Gossypium hirsutum
cagcttctctgtcaacaacttgccgttgttttttattttcttgcttaaacaaggttaacaagagatggcggatgaggatattcaacctcttgtgtgtgacaatggaactggaatggtcaaggctgggtttgctggtgatgatgcccctagggcagtcttccctagtattgttggtcgcccacgccacacaggtgtcaatggtggggatggtc

SEQ ID NO: 233795 - DNA, 407 bp, Gossypium hirsutum
gatgaggaaaatcatgggtgccaaagttcttttcttctttgctttgctttccttttcagctgtctcggcatttgcacaggatgaggaagaccaaggtcttgttatgaacttctacaaggattcttgtcctcaggctgaagacattatcaaggagcaagttaagctactgtacaagcgacacaaaaacactgctttttcttggctgagaaacattttccatgactgtgctgtccagtcatgtgatgcttcactgctgctggactccacaagaaggagcttgtctgagaaggagacagacaggagctttggcctaaggaatttcaggtacattgagaccatcaaagaagctgtagaaagggaatgtcctggagttgtttcttgtgctgatatccttgttctgtctgcta

SEQ ID NO: 233796 - DNA, 398 bp, Gossypium hirsutum
gcaaaatggagtgctgtaggaggcctaataggagtgatatacatttgtcagtggaagaagaggccaaattggaggagcagaccagggattactttgatcacacagcacctaaacgtcacactaagcctcaacgaagcgactattcttccaactacgtcgacgctcttgccgccgctgattccggtatccctgaatacctcgagtttcaacgtctagagaatgatccccagaaaatagtttacaatggaagtgaagtgagagaagaatttgtggagactgaatattataaggatctcaattgcgtcgacaaacaccaccacacgacaggaacaggtttcataaaggtagagaacgacaatggcagaaactttaatttggaaccagattcagacaccagc

SEQ ID NO: 233797 - DNA, 264 bp, Gossypium hirsutum
atctcgtctctctctctttcacctctctagaaaaccctgcatttcaccttcttcactgccattttcttatatctcgaaaccccataaaccaaaggatcgaacccatttcagattgtattcaatggcatcatcggacttgaaagaatcagctgccaataaccctgggcttcatactacccctgatgaagctaccaaagactacatcatgcagcaaactatgtttcgaattaaggatccaaaagccagtcttgattttttactctc

SEQ ID NO: 233798 - DNA, 401 bp, Gossypium hirsutum
ctctgctctaagtcttcttcattctcactctctctccactgaactcttgctaaacggtatcgttttagtcagtctttcatcaatggcgaaagaaccggttcgcgtcctcgttactggagctgcaggacaaatcgggtatgctcttgtacccatgattgctaggggagtcatgttgggtgctgaccagcccgtgatccttcacatgcttgatatcccacctgctgcggaggctttgaatggtgtcaaaatggagttggtggatgctgcttttcctcttctaaagggtgttgttgctacaactgatgttgttgaggcatgcactggagtcaatgttgctgtcatggttggtggtttcccaaggaaggaaggaatggagaggaaagatgttatgtcaaagaatg

SEQ ID NO: 233799 - DNA, 410 bp, Gossypium hirsutum
gttattttcccaccttctttcccgaaaaaatttaatctcaaaattttctcgggaaagcgagggtttattacaaacacagctatatagtggagcagtaatcatgagctttcgagatctggaagccggacggccattggtgtcgaggcaaaacctaatcaacggcaagcaagacgccacgcaagcagttgcctctggcattttccagatcaacaccgcagtctccacctttcagcggctcgtcaacgccctcggtactcctaaggatacgcctgagctccgagaaaagctgcataaaacaaggctacatattgggcaattagtgaaggacacttcggctaaacttaaacaagctagtgaaacagatcacagtgccggaattagtgccagcaagaaggtagcagatgctaaac

SEQ ID NO: 233800 - DNA, 370 bp, Gossypium hirsutum
gatccagcggtctactctacaacttatacatatatttcccaattatgaaatccacccaacgctatgatcagtcaaccctcgacacggtttacgggttcaaagacatcggagacaactggggcgttctttgcggcttactgtacactttcaccactccatctaaccgacggatcgcttatttcggtggaccctgcttgctccttgcggttggtgctctacaatgctttatggactacttgctaatcggggcttacgtggttgaaatgatccctaaaccttcagctgcagggatgtgcatactcaagacttcatcaacatcatgctcagactctcttttatactgagttcgatgtcactgctgagccgaact

SEQ ID NO: 233801 - DNA, 332 bp, Gossypium hirsutum
gcgaaagcttatctcttttcgtctctgaatctgatcaatcaacacctgaaaaggaaaacttacaaacaactactactagtctactacccagcactagaagcagctcgtagccagccatggatgaagagtacgatgtcatagttctaggaactggtctcaaggaatgcatcctcagcggtcttctttctgttgacggactcaaggttctgcatatggataggaatgattactatggaggagagtctacatcactcaacctcattcagctctggaaagagtttagaggaaatgataagccctctgctcatttgggctctagcagaaaatataat

SEQ ID NO: 233802 - DNA, 408 bp, Gossypium hirsutum
ctttgcgaagctatgccctcaccattgctctactccactgctcttatcaactgtcattaaagaactcttattttgtttatcttcttcatcacatttggccaccattttactgctttgtgttcatggagtttcatagattcttattttatgcttcaattattctttcaatttcagtttatttgtttccgataatggcgaattcaatggggatcaactatggacaaatagcagacaatcttccgtcaccggaagatgtggttccgattgttaaatccatcggagcgaccaaagttaagctctacgacgcagatcccaaagtactcatagctttcgccaacactgtcgtcgaattcattgtcggcttaggcaacgaatacttaaacaagatgcgagatccgcccaaagccc

SEQ ID NO: 233803 - DNA, 378 bp, Gossypium hirsutum
gtaaaacacactgacctcagaaagagtacccaaaagaaaaacgctgattaaggaaggatttctagggttttttttttttccgtatcaataagcgatggcaatggcttgctctcaaacccaaagggaggcgtttcgcccctttgatctctccccgtccaatttctgctgcccgatcctctcctatcgttcccactcacgaatatgagggtccgattgtggtgcgcttatttcaactcatatctttagaaaccggatgaagagtgttaagaatattcagaaaaaaacaaaggctataaaaatggttgctgcctaaaattgagagcatttcaactaaagctgaaaattcccgaggcctttggcagccatttactgcacttt

SEQ ID NO: 233804 - DNA, 406 bp, Gossypium hirsutum
ctttctcacagtttttcttgatttttgcctttcccagacttaaaagcttcggtttttattttcactttgaaaaacgaaaatggataagattaagagtatgatgcgcgctgttcagtacagtaaatatggcggaggagtcgccgatctcaagcatgttgaagttccggttcccagtccaaaaaaggatgaagttttgatcaaagtagagacagctagtattaacccaatcgactggaaactacaggatggggtagctcggccatttttacctcggaaattcccccacattcctggtaccgatgtagcaggagaagtcgtacaagttggatcagaagtccagagtttcaaagttggggagaacgttgttgccgtacttggtaatggaggtgcactagctgaatatgct

SEQ ID NO: 233805 - DNA, 324 bp, Gossypium hirsutum
aaaaaagaaaaaatgatgcttggagaaactcatcgtccaaatccaaccgtccacgtaccaccttggcctgatcttgacgatgatcagacggatgtagtttactctcctatccattacaatgcaaccgacaacaacttgagcagtaacggcaacccgttttacctccatgaagcgttatcagctttacaacgttatttgccatcgaacggcccggatgttgagttggattccgagtttccgggtttggatagtccggattcaccggtcgatgcttattcctgtgaccatttcaggatgtacgagttcaaaatccggaggcgtgct

SEQ ID NO: 233806 - DNA, 391 bp, Gossypium hirsutum
cttcccgtaagaatctcttacatggtgtagttttgtctggtggaatatgtcctattaccaagaagatgatgctgaatacatagcagaagagtatgacatggaggacatagatgacatggatgaagagttctgcggcagagatatgtctggctcggagtctgatgttgatgaatttgattactcgaataataaaatatctgatacttctgctgctgaagctagaagaggaaaagacatccagggaataccttgggatcagctcagcatcactagggaaaaatacaggcaaactaggctagaacagtacaagaactatgagaatatcccccactctggggaagtgtcagggaaggattgcaagattaccaagaagggtgcctcatactatgac

SEQ ID NO: 233807 - DNA, 403 bp, Gossypium hirsutum
ctcattcctgcgtcgcttgtgagaatagaggcagcagtggcttgacgttccgcttggctcccttcttgcagaagccaaaagtttgagttaagaacaatggcttatgctacaatgaagccgaccaaacctggtttggaggagtcccaggagcagattcacatgatcaggatcactctctcctgcaagaatgtgaaaaaccttgagaaagcttgcgctgatttggttcgtggtgccaaggataagagactgacggttaaggggccagtgtgaatgcccaccaaggttcttcacatcacaacgaggaagtctccctgtggtgaacgaacaaacacatgggatagatttgagctccgggttcacaagcgagttatagatcttttcagctcccctgatgtggtcaagc

SEQ ID NO: 233808 - DNA, 414 bp, Gossypium hirsutum
ctttctcagagtttttcttgatttttgcctttaccacaaacttaaaagcttcggtttttattttcactttgaaaaacaaaaatggataagattaagactatgatgcgcgctgttcaatacagtaaatatggcggaggagtcgccgatctcaagcaagttgaagttccggttcccagtccaaaaaaggatgaagttttgatcaaagtagagacagctagtattaacccaatcgactggaaactacaggacggggtagctcggccatttttacctcggaaattcccccacattcctggtaccgatgtagctggagaagtcgtacaagttggatcagaagtccagagtttcaaagttggggagaacgttgttgccgtacttggtaatggaggtgcactagctgagtatgctgtcgct

SEQ ID NO: 233809 - DNA, 415 bp, Gossypium hirsutum
aattatttaagcagcacgtcacaagggatctagagcaaggttagtgaccttgggttgagtgtagagatgaggaaaatcatgggtgccaaagttcttttcttctttgctttgctttccttttcagctgtctcggcatttgcacaggatgaggaagaccaaggtcttgttatgaacttctacaaggattcttgtcctcaggctgaagacattatcaaggagcaagttaagctactgtacaagcgacacaaaaacactgctttttcttggctgagaaacattttccatgactgtgctgtccagtcatgtgatgcttcactgctgctggactccacaagaaggagcttgtctgagaaggagacagacaggagctttggcctaaggaatttcaagtacattgagaccatcaaaagagctg

SEQ ID NO: 233810 - DNA, 409 bp, Gossypium hirsutum
ctttcatttcacccttttcctccatatcttcagtgtctcactctctccgtgctgcactccagtttctcctttccctcttcgaagaaaaaatgcgtgagatccttcatattcaaggtggccaatgcggcaaccaaatcggagccaagttctgggaagttgtttgtgctgagcatggcatagatgcaactgggcgttaccaaggagacttggatcttcaacttgagcgaatcaatgtctactacaatgaagccagttgtggtagattcgttcctcgtgctgttctcatggatcttgaacctggaaccatggacagcatcagatctggccctgtcggtcagatttttagaccagataacttcgtttttggtcaatctggtgctggtaacaactgggctaagggccattacac

SEQ ID NO: 233811 - DNA, 370 bp, Gossypium hirsutum
aaaaaatggctcatcgtatggcgttttctgtgtgtgtcgtttcgtattttttattcatcgggttgatatcgtcggaggctttctcggtcgtcggatcagaagttgatccgttgatcaggcaagtaacggacggtcaagatgatggagtggagacacagcccttgaccgctgagcatcacttctcgctgttcaaggctcggttcaagaaatcgtacggctcggaggaggagcatgattaccggttcaaggttttccgggcgaacttgagacgagcggcgcgttatcagaagcttgacccgtccgcgactcacggtgtgactcagttcttcgatttgactcccggtgagttcaagaagaggtttttggggtt

SEQ ID NO: 233812 - DNA, 412 bp, Gossypium hirsutum
acgaaaaatgatgatcggagaatcaatccaaccaaatcccaccatcaaaatccccgtaggggacccattcaacgatccgacggctagctttcactccgttaactttaactacaacaatgcagtcagtagtccttgccccgtcgattacctcgggtctctccaccgttacctaccgtcaaacgactacgagtccgattcgctgagtgatgattcggacttacctgttgatgcattctcatgcgaccatttccggatgtacgagttcaaggtgaggaggtgtgctcgtggaaggtcacatgactggactgagtgtccgtacgctcaccctggtgagaaggcccgaagaagggacccgagaaagttccattactctggaactgcttgccccgatttttgcaagggaagctgtaag

SEQ ID NO: 233813 - DNA, 423 bp, Gossypium hirsutum
aaaaaaagtgtctcatttttagcaaagttacagtcgtcctcatcgaacaactatggcagccatcaaagtccacggaagccctatgtccactgctacacagagggttcttgcatgccttcacgagaaaggtactgattttcagtttgttcccataaacatggctgccggtgaacataaatccgaaaactacctttccctcaatccattcggtcaagttccagcttttgaagacggggacttaaagctcttcgagtcaagagcaatcacccattacattgctcatgaatacagcgacaaagggacccaactcttaatccctggctctaacaaggatatggctgtcttagaattatggaaggaagtggaagcccaccagttcgattctccatcttcaaaaatagcctgggaggcgttttacaagcc

SEQ ID NO: 233814 - DNA, 403 bp, Gossypium hirsutum
aaagaaaagaaaaatggttctgctagagaaactttgggatgatgtagtggccggtcctcaaccggaacgtggccttggccggctgaggaagatcaccaccaccccacccttgtccaccaaagatgaggcttcatcaatggcgatgccgacgagtccgacgacacctgggacaccatcgacgccggtgtcggctcgtagggacaacgtgtggaggagcgtgttcaatccaggtagcaaccttgcaaccaaaggtattggcgctgaagttttcgacaagcctcaacctaactctcctactgtttatgactggctttacagcggggagacccggagcaagcatcaccgttgattaggcgggggctgacggcggcggatggtagcaaaaccactagcagaaggttgc

SEQ ID NO: 233815 - DNA, 404 bp, Gossypium hirsutum
ctcaaccaaaaagcactctttctttgttttcccctcgtcattcacacttcaaacaaaaacatactcgtcttttaggctttgaagaacgctagaggcagtctgtcacagccaaaggccttctttgaaactgtactctgtccaaaggcctttgaaactgtattctgtccaatatgagtatggagaaacaatatttggattgcctactagtcccgatggggattcttttaatggttgcctaccatctatggcttctctatcgaatcttaaaacatcccaccaagactgtcatcggcatcaatgccatcaaccgtcgtttttgggttcaagctatgatggaggacgggtcaaaaggagtattggcagtgcaatcgctgcgaaacaatataatggcgtcgaccttatta

SEQ ID NO: 233816 - DNA, 393 bp, Gossypium hirsutum
cccatctctctttattagtctccattaaaagaatggatgttaaagcaaggagtagtagtggtccaaacatggtaagtactgaagaagaggacttgaaaagaggtccttggactattgaagaagattttaaactcatcaactatatttccattcatggcaaaggtcgatggaactctcttgctcattctgcaggtcttaaacgaactggaaaaagttgtaggttgagatggttgaattatcttcggcctgatgtccgacgtgggaacatcacacttgaggaacaacttttgattcttcaacttcactcgcgatggggaaatcgatggtccaaaatcgcccaatacttgcccggaagaaccgacaatgagatcaagaactattggagaactcgtg

SEQ ID NO: 233817 - DNA, 406 bp, Gossypium hirsutum
gaattatactactataactccaccactttccaccagatttacattgcagatggcttcatcaatgctgtgggcttcaagggcggcttcttacctcaagatctctgtcttccacagaggcttttccactgttctaaaggatctgaaatatgcggattctcatgagtgggtgaaggttgagggtgactctgccactattggtattactgatcatgctcaagatcatttaggtgatgttgtgtatgttgaattacccgaagtgggagctgctgtaaagcaaggtgaaagttttggagcagttgaaagtgtcaaggctacaagtgatgttaattctcctgtttcaggaaaagtggttgaagttaatgatgagctcagtggctctcctgctacagttaactcaagtccatat

SEQ ID NO: 233818 - DNA, 411 bp, Gossypium hirsutum
cgcagggcttttttaacctctccctctctctctagaaccctcactattcttttcttttgtttgtttatatggcatctcaagccagcctcctccttcaaaaacagctcaaagatctttgtaagaatccggttgatgggttctcggccggattggttgatgaaaacaatatctttgaatggagtgttacaattatcggaccacctgatactctttatgaagggggatttttcaatgccatcatgagctttccgcccaattatccaaacagccctccaacagtgaaatttacatcagagatttggcatcctaatgtttatcctgatgggcgtgtttgcatatcaattcttcatcctccaggtgatgatccaaatggttacgagcttgcaagtgagcgctggatgccagtccata

SEQ ID NO: 233819 - DNA, 425 bp, Gossypium hirsutum
ggcgccgaagagtttgcgaggaaacagggtgtggagttggtggacaatgaatatttcattacagaagacaatgtggggatgcttaagttagcaaaagaagcaaactcaatcctgttcgattaccgtatcccaaccctcaccacctgcggtggcagcgcagccatggaaaatcaattacaaatgaacggcttaccaatcagtctctacgccccagaaacagtaggttgcgttgtagttgacaaacaaggtcattgcgctgccgctacttccaccggtggattaatgaacaagatgaccggaaggattggtgactcgccgctgattggttcagggacttatgcttgtgacttagtggctgtttcatgtaccggtgaaggtgaagccattatacgaagcactttggctagggaagtagcggcggtgat

SEQ ID NO: 233820 - DNA, 421 bp, Gossypium hirsutum
taaaaaatgagctttcttcaggccttgtcaattttccttttgcttttgttggatgtagtcgtaggatcagctgagcagtgtggaaggcaagcaggcggtgctctttgccccggtggtctatgttgtagccaatttggctggtgtggcagtactgctgactactgcacagttcctggttgccaaagtcagtgcagcggtagtggccctgcccctgggcctggtgggctaaccaatcttatatcaagagagacctttaatcagatgcttttgcataggaacgatggggcttgtcctgcccgtggcttctatacatatgatgctttcattgctgctgcccgttcttttcctgcatttgctacaactggtgaccaagctactcgcaagagggaaatagctgccttcttagcccaaacttcccatg

SEQ ID NO: 233821 - DNA, 411 bp, Gossypium hirsutum
ctgagatccgacactccacatcgcagcaatgggtgaggaagtaaaggctttggttcctgagtcactgttgaagaagaacaagaggaatgaagaatgggagcttgccaaaaagcaggagctcgaagccgccaagaagaagaatgtcgagaaccggaagttgattttcaacagggctaagcaatatgcaaaggagtacgaggctcaggaaaaagagttgattcaattgaagcgggaggcaaagttgaaaggaggattctatgttgatccagaagctaagcttttgttcattgttagaatccgcggtatcaatgccatgcacccaaggaccagaaagatcttgcagctcctacgtttgagacagattttcaatggtgtttttcttaaagtgaacaaggcaacaatgaacatgct

SEQ ID NO: 233822 - DNA, 395 bp, Gossypium hirsutum
aaaaaataaaaccctttgaaaaccaaagaaggaagaagaagatgtcgtggcaagcttatgtagatgatcacttgatgtgtgaaatcgaaggaaaccatctctctgccgccgctatcatcggccaggacggcagcgtttgggcccaaagcgccagtttccctcagctcaagcctgaaaaaattagtgccatcatgaatgactttaatgaaccgggttcactcgctccgaccgggttgcacctcggtggcacaaaatacatggtgatccaaggcgaaccgggagctgttatccgagggaagaaaggacccggaggtgttactgttaagaagaccaatatggccttgattatcggaatctatgatgaaccaatgacacccggccaatgcaacatgatc

SEQ ID NO: 233823 - DNA, 404 bp, Gossypium hirsutum
attcacacacaactacttcacttccccatcacaaaaaatatattcttgacctgcatctttttggcaatcaattttgtaagcaagtatggctaatgacgttgcggttggtggtgagttccaagccaaggtctaccatgatccttcaccagcttcattggtggacggggaggagttgacaaaggggtcattttatagggctgtcatagccgagtttattgccacgctcttatttttatacatcactgtgttgacagtgatcggatacaagagtcaggttgaccctgataagggcagtgaccaatgtggtggagttggcattcttgacattacttgggcttgtggtgggatgatctctatccttgtttactgcactgctggcatctctggaggacacatcaacccat

SEQ ID NO: 233824 - DNA, 430 bp, Gossypium hirsutum
gaagactatagatgtagattctggtaaaattgatatatgttgggacttgtctaatgctagatttggttccgggccagaaccagttgaagggttttacctggctgttgcatttgaccaggaaatggtgctgcatcttggagatttgaagaaggaagcatctaagaagattaacattagcagtactcctcttagttccgatgctgttttcattgcaaaaagagagcatatttttgggaagaagttttatggtgccaaggctcagttttgtgacaagggacctattcacgatgttgtaatcgagtgcgaccccttcgatcttaaggatccatgccttgttatccgcattgatagtaaaacagtgatgcaagtgaagcggctcaagtggaagttccgcggcaaccataccattttggtggatggacttccggtg

SEQ ID NO: 233825 - DNA, 431 bp, Gossypium hirsutum
tttcatttctccaatatggctagagggttgaagaaacatttgaagaggctcaatgcccccaggcattggatgcttgacaagcttggtggtgcttttgcacccaagccatcgtctggtccccacaagtccagggaatgcttgccattgatccttattttgcgaaaccgattgaagtatgctctcacctatagagaagtcattgctattcttatgcagaggcatgttatggttgatgggaaggttaggacggataagacctatccagctggtttcatggatgttgtgtccattcctaaaacaaatgaggacttccgtctactttacgacaccaaagggcgatttcgtctccatgccatcactggcgatgaaaccaagttcaagctctgcaaggttcgatctgtccagtttggccagaacggtattccatactt

SEQ ID NO: 233826 - DNA, 391 bp, Gossypium hirsutum
cggacgcgtgggtggcggccgaaattgtcaccgaaaacacgtcgaagacgggtgattcagtttgaagggtttcagttttaaatatacatatatttctcacttctattgtaaatagacagtaattcagatcaaagggtatccgtttcttttcttatttttcgttttaatttctcgagcttttacggttcaaaaatggcggacaaagctaaaaccgaaaacccatcttttctccatggaaaataccaaccttggccgtatgttgggtcatggaacgttcgccaaagtctaccatgcgaagaaccttcaaacagggtagaatgtcgccatgaaagtggtgggcaaaagagaagtgatccaggtcgggatgatggagcagatcaagcgagagatc

SEQ ID NO: 233827 - DNA, 359 bp, Gossypium hirsutum
gtcgttcgaaaggttatggtttcgttcgattcggggatgaaaatgaaaggtggagggccatgactgaaatgaatggagtgtattgctcgagtagaccaatgaggattagtgttgccactcccaagaaagcatttggatatcagcaacagtattactcacaaggtagacaagcatcgaatggtgctgtggaacaaggtcttcattctcataatgacctcgaacaatgctactatttttgttggaggacttgactcggatgttagtgatgatgatcttagacaacccttttcccagtttggtgagatcatctctgtgaaaataccggctggaaaaggatgtgggtttgtgctatttgcaaa

SEQ ID NO: 233828 - DNA, 414 bp, Gossypium hirsutum
atcaacttttataagagcgctctccacctcccatcaaagtcccgaaggcagagataaacgaaatggcggaaacatgcgacttcctcgcgacaaagagatgtgcagtggtgagtggaggaaacaagggaattggattggaaatatgtaagcagttggcttccaaaggtgtcaccgtggtgttaactgccagagatgagaaaagggggcttcaagctcttgacaagctcaaggaatctggtctttctcataatctggttttccaccagctcgatgtcactaaccctcttagcgttgcttctcttgctgctttcatcaacacccaattcgggaaacttgatatcttagtcaataatgcagcaattgctggagccaatgtgaactatgagattttaactaccgctgttgaaaaagcga

SEQ ID NO: 233829 - DNA, 428 bp, Gossypium hirsutum
cgattttctcagcaaccaaacaaaaccttccattgtcttctagaactatccaagcacactggtattaatcaatggctcgtacaaagcaaacagccaggaaatcaaccggtggaaaagctccacgtaagcaattggcgaccaaagccgcgaggaaatcagctccagccaccggaggagtgaagaagcctcaccgtttcaggccaagaacagtggcgttgagagaaatcaggaagtaccagaagagtaccgagcttttgatccgtaaacttccgttccaaaggctagtgagggaaatcgctcaagatttcaagacggatctgagattccaaagtagtgcggtggcggctttacaagaagcggcggaagcgtatctggttggcctgtttgaggatactaatctctgtgctattcatgccaagagggttact

SEQ ID NO: 233830 - DNA, 421 bp, Gossypium hirsutum
cttgaaggaagctttgcctttgtgatctatgacagcaagactggaaccgtgtttgctgcactggggtctgatggtggagtgaagctgtattgggggattgcagctgatggctctgtggtcatatctgatgatttagatgtcattaaagaagggtgtgccaaatcctttgctcctttcccaactggattcatgttccacagtgaaggggggctgatgagctttgagcatccaatgaacaaaatcagggcaatgccgagggtagacagtgaaggagtgatttgtggtgctaatttcaaggttgatgtttacagtaaagttaatagcattccacgagtgggcagtgcaaccaattggactgatcactgggattcccattaattagtatttaaaaagaggagagagaagcaaaattaaacataag

SEQ ID NO: 233831 - DNA, 416 bp, Gossypium hirsutum
aaacgaattgaagaagattactttcttctctttggatctttccactaaccttcttcaaatctatttaagcgctcatttggagctccctgaatggtttgttcattggcttcaaaattgttggccctcttaacttctttacctgactgaaaaaagttagctctcttgccttcttgggtaagacaatggtatgttggtcattgcatggaatgaagtcataatttgtattggttgccccatggaagaccacacttttgctgttggtcaggagttccctgatgtcaaggccttccgtaatgctattaaggaagctgccattgcacagcactttgagctgcgtattataaagagtgaccttatccgttactttgccaagtgcgccacagaaggatgtccatggcgtattcgtgcagttaagc

SEQ ID NO: 233832 - DNA, 434 bp, Gossypium hirsutum
ctgagatccgacactccacatcgcagcaatgggtgaggaagtaaaggctttggttcctgagtcactgttgaagaagaacaagaggaatgaagaatgggagcttgccaaaaagcaggagctcgaagccgccaagaagaagaatgtcgagaaccggaagttgattttcaacagggctaagcaatatgcaaaggagtacgaggctcaggaaaaagagttgattcaattgaagcgggaggcaaagttgaaaggaggattctatgttgatccagaagctaagcttttgttcattgttagaatccgcggtatcaatgccatgcacccaaggaccagaaagatcttgcagctcctacgtttgagacagattttcaatggtgtttttcttaaagtgaacaaggcaacaatgaacatgcttcaccttgttgaaccttatgtga

SEQ ID NO: 233833 - DNA, 389 bp, Gossypium hirsutum
  unsure (1)..(389): unsure at all n locations
cactcctccactgactttcaccaccaccgtcactagcggcgccgtcacaaaatgtcgtgaacggagtctctcatcctccaactccatgaaatctctgccgttaaattcggtaacttcaagctgaaatctgggatcttctcccctatctacatagacctccgtctcatcgtctcttacccttccctcctccaccaaatctcccactccctcctctcctctctccctccccaaacacactgtaacctcatatgcggtgtcccttacactgccctccctatagccacctncatctctctcgacacctccatccccatgctcatgcgccgcanagaagtgaaagactacggaactgccaagtccatcgaaggtgtttacgaaaagggtcaagc

SEQ ID NO: 233834 - DNA, 387 bp, Gossypium hirsutum
taaaataagcagagaaataaacggggagactctgaggagaaataataatcagatcctccttctaaactctccacaaagaaaagggaaaaaaaaagagggagatggggttgtcttttacaaagcttttcagccggcttttcgccaagaaggagatgcgtattttaatggtgggtcttgatgcagctggtaaaactactattttatacaagctcaagctcggtgaaatagtcaccactatcccaaccatcgggttcaatgtcgagacagtggaatacaagaacatcagcttcactgtttgggatgtcggtggccaagacaagatccgtcctttgtggaggcactatttccaaaacactcaaggtctcattttcgtggtggatagcaatg

SEQ ID NO: 233835 - DNA, 416 bp, Gossypium hirsutum
ctcttttctcctccttgtgtcgtgcagataaaggatgagtacactggatgcaactagagcagaacttgctcttgtagttttgtatttgaataaggctgaagcaagggataagatatgcagggctatacaatatggctcgaaattcctaagtgatgggcagcctggcacagcacaaaatgttgacaaatcaaccagcttggcacggaaagttttccgtctttttaagtttgtgaacgatttgcatggtcttattagcccagttcctcaaggaactccccttccacttgttctgctaggaaagtcaaagaatgcactgttgtcaactttcttatttctcgatcaaattgtgtggcttggcagaacaggcatctataagaacaaagaacgtgctgagttgattggacgaatattccttt

SEQ ID NO: 233836 - DNA, 427 bp, Gossypium hirsutum
tctctctctctaaaagcccactcagcagtttaaagagagagaaagtgtactttctctctctagaactctaaagggtcaaagctttaaagccttcaaatatatacatataaatcgagagagagggagggaaacatttttttttaaattattttttgggagagattttgaatcatgggtggtgagaagaaattcggggttcttctatgcgcggaggactcggactacattaagaagaggtacggagggtattttggtgtgtttgtggaaatgctggcggaggaaggggagacgtgggacgttttcagggtggcgaacggcgagttccccgacgacgatgagatcgccgaattcgacggattcgttataaccggcagttgcaatgatgctcacgagaatgacgtttggatctgcaggttgatctcgcttt

SEQ ID NO: 233837 - DNA, 420 bp, Gossypium hirsutum
caggtgtgggcgtgtctaacgcattggttttcgaaatcgtgatgaccttcggattggtgtacacagtgtacgccacagccgttgatcccaaaaagggaagcttgggaacaatcgcaccattggcaattggtttcatcgtgggggccaacattttggcaggaggtgccttcgatggagcctcaatgaacccagctgtttcatttggaccagccttggttagctggacatgggataaccactggatctactgggtcggaccccttatcggtggtgggctcgctggtctcatctacgagttcatcttcatcagcaacacccacgagcagctcccaaccaccgattattaagcctaatcagggtttaattgatttgtctgtcactttggaaccggattttctccgatctcatttgagttttcta

SEQ ID NO: 233838 - DNA, 414 bp, Gossypium hirsutum
tttcatgcaggtgaccaagcatgaagatgcaccagagagtgactggaagagctggaattggagatcggaaggcgacctgatggtgaacggtgcatttttcacggcgtcgggtgccggtgcctcgtcgagctattccaaggcttcgagcttgggtgctaggccatcttcactggtggcaaccataaccactaatgctggttcacttaattgcaagaaaggttctcgttgctgattgagacatatatgatccaaaacgtacgacacttcgttaattaccaagtggtcgaaaatggtgtttgactgcaaattaaattcagtttttagaaggaaaaagaaactgaagaaggtgcatgtgaagaaaagtctaccaataggattaatttaaacggcttttccccctccccttcacttttt

SEQ ID NO: 233839 - DNA, 428 bp, Gossypium hirsutum
atttccaatctccagctcccaaggtaaatatgccgatcagaaacatagcagttggccggcccgaagaggcgactcaccccgatgctctcaaggcagctttggctgagttcatctcaaccttgatcttcgttttcgctggatcgggctcaggaatggcttttaacaagttgaccgacaacggagcaacaaccccggccggtctcgtagccgccgctctagctcatggcttcggtcttttcgtcgctgtctccgttggcgccaacatctcaggtggccacgtcaaccccgccgtcaccttcggtgctttcgttggcgggaacatcactctcttgcgcggcattctttactggatcgcccaactcctaggctcaaccgtcgcttgcctgttgcttaagttcgctaccggcgacctggctgtaccagctttt

SEQ ID NO: 233840 - DNA, 432 bp, Gossypium hirsutum
attgacacgccgacaattacagagaacggttcgacccagtctaaagccgccgctccttccggcggcgaccacaagcctccggcctcagctaacggagcgcaagtggaggtgtcgccggagcctgaaggaacgaaaaagaggcggtcgagtatgctaccgctggaggtgggtactcgcgtgatgtgccgctggagggacggcaaatatcatcctgtcaaagttatcgaacgccgtaagatgccctacgctgtgccctatgattacgaatactacgttcattacaccgaatttaataggaggcttgatgaatgggtgaagcttgaacagcttgatcttgattctgtcgaaactgttgtcgacgaaaagggtgaagacaaggtaacaagcttaaaaatgacacgccaccagaagcgggaagatgatgagacgcat

SEQ ID NO: 233841 - DNA, 400 bp, Gossypium hirsutum
aacgaaacccacaaaaatctgttgggtgtccaaattcaccacaaaacatcaatggcgaacctcaaagcagggacaagaccaccatgggttggtcttggtgctgctgtctgggtacagatagcatctgggaatgcctacaacttccccctttattcccattcatagaaatctgttctggggtttaaccaacatcagctgacaatgcttggtgttgctaatgatattggtgaaaacgtgggattactccctggtattgcttagtaacaagttcccaccttgggttattctattgattggatcttttgcttgtatcttgggttatggcgttctttggcttgctgttagcaaaactgttctatatctgccttattggctgttatggcttgcactttgtgtcgct

SEQ ID NO: 233842 - DNA, 399 bp, Gossypium hirsutum
ctgctaaaaagttgctatgggtgaggcgaaggctcacatcaacattgatgtgattggccatgtcacctctgaaaagtcaacatcagctggtcacttgatctacacgcttggaggtcttgacaagcgtgtgaccgagagggtcgagatggaagctgttaatataaacaaaaggtcatcaatgtatgcctgagcgctcgataagtggacggctgaacgtaagcgtcggatcactattgatattgtcttggggagggtggagacaaccaaatcctactgcactggccttgatgctgctggacatcagcgctagactaacactatgattactggtgcttctcaagctagactgtgctgtccttatgattgacttcacaactggaaggtttgaagctggtattt

SEQ ID NO: 233843 - DNA, 416 bp, Gossypium hirsutum
gaaaagagaaaaatatttctggagaagctttctgcttcaagagaagcttctgcaggaacattgctcggattctggcaataaaggaaaccaggacaatgacagaagaacctgttaatgtcaatgaattcagagaattagcaaggcaagcccttccaaaaatgtactatgatttctacactggaggagcagaggatcagtacaccttaaaagagaatgaggaagcttttagaagaatcattattcagcctagaattcttagaaatgtgaggagcattgatttatcaactacagtgttgggttataacatctcaatgccagttatgattgcccctacttctttgcaaaagctcgcaaaccctgaaggagagatcgcaactgccagagctgcatctgcgtgtaacacgataatggtttta

SEQ ID NO: 233844 - DNA, 423 bp, Gossypium hirsutum
gggaactggccgaagatggatactctggtgtcgaagtcagagttactcccatgcgtactgagatcattatcagagccactcgtacccaaaatgttctgggcgagaaagggaggaggattagggaactgacctctgttgttcaaaagcgattcaagttccctgaaaatagcgtggagctttacgctgagaaggtcaataacagaggcctttgtgccattgctcaggctgagtcccttcgctataagctcctcggaggtctcgccgtccgtagggcctgctatggtgtgcttagatttgtcatggagagtggagccaagggttgcgaggttattgttagtggaaagctaagggcacaacgtgccaaatccatgaagttcaaagacggatacatgatttcttctggtcacccagtgaacgagtaca

SEQ ID NO: 233845 - DNA, 433 bp, Gossypium hirsutum
gtttaccaggatctcatctccggtgacgagcttctttctgactcattcccctacaaggaaatcgagaatgggatgctgtgggaagttgagggaaagtgggttgtgcaaggagctattgatgttgacattggtgccaatccttcagccgaagatgctgatgaggatgaaggtgttgatgaccaatctgtgaaggttgttgacattgttgacactttcaggcttcaggagcaaccccctttcgacaagaagcagtttgtcgtgttcatgaagaagttcatcaagaacttgacaccgaaactggatgcggaaaagcaagagtccttcaagaaaaacattgagggagcaaccaagtttttgctttcaaaattgaaggaccttcaatttttcatcggggagagcatgcacgatgatggatgtttggtatttgcttact

SEQ ID NO: 233846 - DNA, 426 bp, Gossypium hirsutum
caaggagctgctgagccagcgactgcggatgtggcggagggttttgatgatagagttgcggatttgaagaggtgtttggtggattcggtttacgggacggagttggggtttcgagcggggcaggagttaagggctgagattttggagttagtcaatcagttggaagctgttaacccgacccgagctccgattgaggccactcagcttcttgatggcaactggattttgctgtatacggcattttcagaactgttgccactactggcagctggtgcaacccccttactgaaagttaaaagcataagccaatcaattgatacagcgagtcagtctattgtgaactccaccacattgtctggccctttttgttgatctctcctttagtgcatcagctaccttcgaagttagatctccttcaagaataca

SEQ ID NO: 233847 - DNA, 400 bp, Gossypium hirsutum
aaaaaaaaaaaaaaaaagaaaccacccaaacagacaatagactaggacaggaggatctctcagggtttaggtgatggcttccaagcggatcttgaaggagctcaaggatctccagaaagatcctcctacctcttgcagcgcaggccctgttgctgaagacatgtttcattggcaagcaactattatgggtcctcctgacagtccatatgctggcggagtgtttctagtcaccattcatttccctccggactatccatttaaaccaccaaaggttgcattcaggacaaaggtctttcacccaaatattaacagcaacggtagcatttgccttgatattttgaaggagcagaggagccctgccctcaccatatccaaggtattgctatctatctgctcactc

SEQ ID NO: 233848 - DNA, 431 bp, Gossypium hirsutum
caatcatccacttcttctcttctttgaactcaaagtcccagttaatattagaattatgggtgttgtcacttatgactatgagtctacctccccagtcgccccttccaggcttttcaaggcctctactgttgaagctccgaaagtttggcccacggctgcacctaatgcagtcaagagtattgaggttgaagctaatcctagctctggaagtatcgtaaaaatcaactttgttgaaggccttccattccaatatatgcagcaccagataggaggacatgatgaaaataaattttcatacagttactatttaatcgaaggtgggcctttgggggacaaacttgaaaaaatcagctatgagaacaagtttgaggcacctgcaagtggaggaagtatttgcaagagttcaatgaaattctacactgttggcgaca

SEQ ID NO: 233849 - DNA, 434 bp, Gossypium hirsutum
cttcaccatgaacaaaagcaagctccagctgcaactttgtgcagggatatttactttaagcatcctctccaatggtgcttatggtagtgacaaaatctttgacataactcacaaaatcacttctcagttgccaacttttggatcacagaagggtcttggtcaattcatttggcttctttccagcatcaaaaatgggtccacagtgaatgtgtcggagttcaaattgggaacccacactggcactcacgttgatgctcctagtcacttctttcagaagtactatgaacaaggatttgatgtttcaacccttagccttcaaactcttaatggtcctgttctagtagttgatgttcaaagaaataagaacattactgctgaagttatgaagtccttgaaaattcccagaggagtacatcgtgtgcttttcaaaacac

SEQ ID NO: 233850 - DNA, 353 bp, Gossypium hirsutum
ctttttctttccttttcctctctaaaaccctaatttgatctccaaatacctgcgagatctccaagcttcgtcaccccaaaatggccacgacacgcagatcccttcctcttctgagaaccctcatagccggaaaaacccaaacccgaaacgtgacgtacatgccccgaccaggagatggagccccaagacccgtaacgttaatccccggagacgggatcggacctttggtgacgaacgcggtggaacaagtgatggaagcgatgcacgctccggtttacttcgagaagtacgatgttcacggtgacatgaaacgggtaccacaagaagtgttggattcgataaagaagaacaag

SEQ ID NO: 233851 - DNA, 413 bp, Gossypium hirsutum
gtttccacccaaatgcaaaaccccaattttctattctcccttttgttttctatatcgatcccaattctgttgttcaacaatttaatcgctgaatcaaccttctgccctgaaacaatggcgacaaccactactttgggcggagtccacccttcccaaggctcccaaaacagcgtcgagctcgaaaacctagcacgctttgccgtcgacgagcacaacaagaaagaaaatgcaatggtggagtttgtgagggttgtgaaagcaagcgagcaagttgtggcggggacgcttcaccatttgacggtggaagctgtcgacgccggcaaaaagaagctttatgaagccaaagtttgggttaaaccttggatgaattttaaagaattgcaggagtttaaacatgctggtgatgctgatag

SEQ ID NO: 233852 - DNA, 426 bp, Gossypium hirsutum
gtttttagttctcacttaacccgtttgcctccggcatcttcccactcatggcttcggagaaagaagctgcccttgctgctgctccctctgattctcctaccatatttgacaaaatcatcaacaaggaaatcccagctaccgtggtgtatgaagatgataaggtcttagctttcagggacatagctccccaggctcctacgcacattttaattattccaaaatcaaaggatggcctaacgggtttgtctaaggctgaggagaggcactgtgaaatccttggctgccttctttatactgcaaagcttgttgcaaaacaggaagggctggaagatggattcaggattgtgatcaatgatggccctaaaggatgccaatctgtgtatcacattcatgtccacctcattggagggcgccaaatgaactggc

SEQ ID NO: 233853 - DNA, 422 bp, Gossypium hirsutum
caagtaataaaaagtggggtagcatcaatattgatatgggtgaagaggtgaaggtttttggagcatgggcaagcccttttagccgtaaggtagagctggctttgcggttgaaaggtgttccatatgactacatagaagaagacttgaataacaagagctctttgcttttgcaatacaactcggttcataagaaagtcccagttcttcttcacaacgggaaatcaattgcagagtcgattgttatacttgaatacattgaggaaacttggaaaacctatcccatcttgccacaagatcctaacgacaaagccatggctcgattctggatcaatttcattgatggcaagtgctcgtctgccattaggaaagttgcatttagccctgaggaggagagagagaaggcagtggaagaagcttgtgag

SEQ ID NO: 233854 - DNA, 386 bp, Gossypium hirsutum
caagtaataaaaagtggggtagcattaatattgatatgggtgaagaggagaagatttttggagcatgttcaagcccttttagccgtaaggtagagctggctttgcggttgaaaggtgttccatatgactacatagaagaagacttgaataacaagagctctttgcttttgcaatacaactctgttcataagaaagtcccatttcttcttcacaacgggaaatcaattgcatagtcttattgttatacttgaatacattgaggaaacttgaaaaacctatcccattttgccacaatatcctaacgacaaagccatggctcgattctggatcaatttcattgatgacaagtgctcttctgtcattatgaaagttgcatttatccctga

SEQ ID NO: 233855 - DNA, 419 bp, Gossypium hirsutum
aaaaccctagttgttagcgagcagaagcaaagagcctccaaaaaacacttcaaccctctagccatgacattcaagcgtaggaatggtggccgaaacaaacatggccgtggccatgtcaagttcatccgctgctctaactgcggtaaatgttgccctaaggataagtcaatcaagaggtttcttgtgaggaacatcgtggagcaagctgctgtcagggatgtccaggaagcctgcgtctatgacacgtacactctgcccaagctgtatgtgaagatgcaatactgtgtttcatgtgcgatccattcccacgttgtgagggtccgatcccgcactgacaggaggaaacgtgacccgcctcagcgcttcattagacgcagggatgatatgccaaagcccggtcagcctagtcaggctcctcg

SEQ ID NO: 233856 - DNA, 382 bp, Gossypium hirsutum
gtaacaatggcggcttctgcttctatttacaatcttctcactctcctgctcctttctggcatcccttttaccttctccgagctcgttaaagagcaacctctggtgttggaataccacaatgggcccattttggagggggaagatcactgttaatctcatttggtacgggaagttctccccaacccaacgctccataatcgtcgatttcatcaactctttgagctccgccgtcaaacccaaggttccgtcggcgtcgttttggtggaaaacgacggagaaatacaagtccaggtcctccactttggtcgtgggcaaacaaatcctcctagaaaattacccgctcggtaaaatccttaagaacccacacttgccggggttggcc

SEQ ID NO: 233857 - DNA, 356 bp, Gossypium hirsutum
caaacgcgcatttacgttgggagagttcagcgaaaatggcaggcgaagcagctgcggcggcgaatttctggggtgatatgccggaggaagactattacaggtcgcagggtgtacgcaacaccaagtcttacttcgacactcccaacggaaagctcttcacccagagcttcttacccttggataaaaaagtgaaggcctccgtctacatgacccacggctatggatccgacactggttggctcttccagaagatctgcatcaacttttccaattggggttatgctgttttcgccgctgatcttctcggccatggcagatccgagggtctccgctgctacttaggtgacatggagaaa

SEQ ID NO: 233858 - DNA, 423 bp, Gossypium hirsutum
cactgctcgatctccttacagctaccgtacacactcacacacacattcactgaatgggtcgagtcatccgagctcaacgtaagggtgctggttccgtcttcaaggcccacacccaccaccgcaagggtcctgctcgtttccgcagcctcgacttcggtgaacgaaatggctacctcaagggtgttgtcaccgatgtcatccacgaccctggtcgtggcgctcctttagcccgtgttgtcttccgtcaccctttccgttacaagaagcagaaggaacttttcgttgccgcagagggtatgtacactggacagttcgtctattgtggtaagaaggctactcttgtggtcggaaatgtattgcctcttagatctatccctgaaggagctgtcgtttgcaacgtcgagcatcatgtccgtgatcggg

SEQ ID NO: 233859 - DNA, 274 bp, Gossypium hirsutum
cactgctcgatctccttacagctaccgtacacactcacacacacaggcacagaatgggtcgagttatcctagctcaacgtaagggtgctggttccgtcttcaaggcccacacccaccaccgcaagggtcctgctcgtttccgcagcctcaacttcggtgaacgaaatggctacctcaagggtgttgtcaccgatgtcatccacgaccctggtcgtggcgctccttaagcccgtgttgtctttcgtcaccctttccgttacaagaagcacaatga

SEQ ID NO: 233860 - DNA, 314 bp, Gossypium hirsutum
gagactaggcatgccattatcttagcaaggctggtgtcagcgcaattaggagggtgagatagactgtcaacaacagaattgcaaacgcatctagagctgttattgtgaatcgtcctgacgaattgcaggaattcgatgtaagactgaagctgcgctatctgaggttaaaaaaatctgcgatgaattcttcgcattcattgccgaacgcaaagatccaaaagcttgcacagttctcttaagggatgctcgcaaggatctactgcacgagcgtgaaagaaatttgcacgatgccacgtctgctgttagaaacataa

SEQ ID NO: 233861 - DNA, 431 bp, Gossypium hirsutum
gaagttataaccaatgtcggtgaggtgggttctttggttaccagaggcggaaacagaagactgatgctagagattgattgtggaggattatgcaagaaaagatgcagtcaacactcgaggccaaacagatgcaacagggcgtgtgggacttgctgcttgaggtgcaagtgcgtgccaccggggacttcagggaacagggaggtctgcgggacctgctatactggcatgaccacccatggaaacgttgccaagtgcccttaacctttacgtcgcccaatatgtgttgcagccatcaaggggaaaaatgaaatggtttgtttgtgtaatatgtatgttgtagctcagatgtctcacctactcctaaaattattagtacttgtaatatatatttttaaaatagtagtatgcatttagcctccgttcagtattac

SEQ ID NO: 233862 - DNA, 371 bp, Gossypium hirsutum
cttgggttgagtgtagagatgaggaaaatcatgggtgccaaagttctcttctggtttgctttgctttccttttcagctgggtcggcatttgcacaagatgagggaagaccaaggtcttgttatgaacttctacaaggattcttgtcctcaggctgaagacattatcaaggagcaagttaagctactgtacaagcgacacaaaaacactgctttttcttggctgagaaacattttccatgactgtgctgtccagtcatgtgatgcttcactgctgctggactccacaagaaggagcttgtctgagaaggagacagacaggagctttggcctaaagaatttcaggtacattgagaccatcaaagaagctgtag

SEQ ID NO: 233863 - DNA, 354 bp, Gossypium hirsutum
  unsure (1)..(354): unsure at all n locations
agctacttaaccatttcccaaatctcctccctcctcttctttagcgtccttttcatttgcgctcatgcagcgcgctttgaaatccgcaatgagtgctcctacaccgtctgggcagcagcctctcctggtggtggccgtcgcctagaccctcggcaaagttggaccatcgatgtgcctgctggcactgctatggctcgtatttggggtcgaaccaattgcaatttcgatgccagtggtaggggtcattgccaaaccggtgattgtggtggactccttcaatgcaaaggttggggtgtacctncaaacaccctggctgaatatgcacttaaccaaatttggaaacatggatttcta

SEQ ID NO: 233864 - DNA, 288 bp, Gossypium hirsutum
cctttctcaaatcttggctcgccagtcgcctctctttcttctactgctccttcttcttgattctgtcggctgctgctgctgctttggtggcagtgatttagaagccacaactcaatttcatataaagaaaaaaaaaagagtgagatggatccagacgcagtagccaaggccttcgtcgagcactactactccacattcgatgccaaccgggccggtttagccaatctctaccaggaaggttccatgttgaccttcgaaggtcaaaagatccagggctctcagagcatc

SEQ ID NO: 233865 - DNA, 255 bp, Gossypium hirsutum
cgccctaactctttcacttcgtcttctccaatttcctccaaaagtaagaaggctgtggatccctcagagcttcggttttatgaggatgatgacactccaacaatgaacacactcaggggtgcaactactggttttgttgctggaactatgtggacaaccgttgctgctacatatgatgtgcctcgtgttgagagaagagttgccatacctcggcttgttagaacactcaataagatggggaaatatggaatgaca

SEQ ID NO: 233866 - DNA, 388 bp, Gossypium hirsutum
cttcacagatttgcttcaaccccctcccgctcttccccctgctaaaaggcttgagctttcagccaaaatgggtatttctcgtgattcgatgcacaagaggcgtgccacaggtggcaaaaagaaggcttggaggaagaagagaaagtatgagcttggaaggcaaccagcaaacacaaagttgtcaagcaacaagacagtcaggaggattagggttcgtggtggaaatgtgaagtggcgcgctctgaggctcgacactggaaactactcatggggaagtgaagctgtgactcgtaaaaccagaatattggatgtggtctacaatgcatctaacaatgagcttgttcgtactcaaactttggtgaagagtgctattgttcaagttgatgct

SEQ ID NO: 233867 - DNA, 414 bp, Gossypium hirsutum
gttggtggtcgatacagtgtttgcagtgcagttggagtgttgcctttgtctctgcagtatggtttttcaatagtagaaaagttcttaaagggggcttcaagtattgatgagcatttccgttcagctccttttgagaagaatatacctgtacttttgggtttgctaagcgtatggaacgtttcatttcttggatatcctgcaagagctattttaccatactcccaggccctcgagaaatttgctccacacattcaacaggtcagcatggagagtaatggcaagggggtgtcaattgatggtgtgccacttccttatgaggctggtgaaattgattttggtgaacctggaacgaatggccagcacagcttttatcaactaatccaccagggacgtgtaattccttgtgatttcatt

SEQ ID NO: 233868 - DNA, 438 bp, Gossypium hirsutum
cagaacatcaaccaaaagtagaacatgaagacgaggcagtagttggaggtggtgaaaagaagtggcctggatggcctggagagagtgtgtttcgaatgttggttcccgcgcaaaaggtcggtagtataatcggacgaaaaggggaattcataaaaaaaatagttgaggagacgagagcacgtattaagatacttgatggtcctccagggacgacagaaagagctgtaatggtatctgccaaggaggagcctgattcttctcttccgcccgccatggatggacttttgagggtccataaacgcattgttgatggtttggagggtgatccatctcatacacctacggctgtgggaaccaaggtttcaactaggctgctagtccctgcctcacaagccggaagtttgattggaaaacagggagcaactgtcaaatccattc

SEQ ID NO: 233869 - DNA, 435 bp, Gossypium hirsutum
  unsure (1)..(435): unsure at all n locations
ttcattttcattttcttgttccttccttcgccgactattgctttttgttacctcgatttcaagtgaatcagaatgggtaaggaaaagactcacattaacattgtggttatcggccacgtcgattctgggaaatcaaccaccactggccacctgatttacaagcttggtggtattgacaagcgtgtgattgaaaggttcgagaaagaagctgctgagatgaacaagaggtcattcaagtatgcttgggtgcttgacaagctcaaggctgagcgtgagcgtggtatcaccattgatattgccttgtggaaatttgagaccacgaaatactactgcactgtgattgatgcacctggacaccgtgactntatcaagaatatgattactggtacgtcacangctgactgtgctgatttgattattgattccaccactggt

SEQ ID NO: 233870 - DNA, 446 bp, Gossypium hirsutum; identical to SEQ ID NO: 199607

SEQ ID NO: 233871 - DNA, 443 bp, Gossypium hirsutum
cggtaacacgccactggtatatctcaacaatgttgtagatggatgtgtggctaaaattgctgccaagttggaggcaatggaaccctgctccagtgtcaaggacaggattggatatagtatgattgcagatgcagaggagaagggtctcattgtaccaggcgagagtgtgctgatcgagccaactagtggtaataccggaatagggttggcattcatggcagctgctaagggttacagactcataattacgatgccttcttcaatgagtttagaaagaagaatggtcctccgagcttttggagctgagctggttcttacggatccagcccggggcatgaagggggctgttcaaaaagctgaggaaattatgtcaaagactcctaattcttacattcttcagcaatttgaaaaccctgccaacccaaagatccattatctgacaa

SEQ ID NO: 233872 - DNA, 370 bp, Gossypium hirsutum
agaaaagaaaaaatacagtgaaaatggcaacccttaaggttccagctcatgtacctgccccttctgaggatgctgagcaacttcgtaaagcttttgaaggatggggtacaaatgagcaattgattatcgacatattggctcacaggaatgcagctcagcgcaatttgattcgtaaaacttatcgtgaagcttatggggaagatctccttaagtctttggatgaggaactttcaagtgactttgagcgagctgtggtgctgtttactttggaccctgcagagcgtgatgcatttctggctcatgaagctacaaagaggttcacatcaagccattgggttctcatggaaattgcttgcactaggtcttcaca

SEQ ID NO: 233873 - DNA, 440 bp, Gossypium hirsutum
catcgccacaccttccaaatcgggtggttggatcgcatgggccataaatccaaaggccaccggcatggcgggttcacaatccctcgttggctacaagaactccaccaccggcaccgtccaggttcatacctatgacatcagctcctacagttcaattgttgccaaggatctgtccttcgaggtctgggataagacggctgagagtagaagggacgggagtttggcgattttcgctaaaattaaggttccggcggatttagcggcgagtgggaagattaatcaggtttggcaagtgggtcccagcgtcggaactgatggcaggttggacaaacatgccttcgccgtctctaatttgcaatctaaaggaaccttggatttgaaaagtggacagagtagcactagttcttgaggagacgacaggctcaagaagaaaaatattc

SEQ ID NO: 233874 - DNA, 440 bp, Gossypium hirsutum
cattcccctacaaggaaatcgagaatgggatgctgtgggaagttgagggaaagtgggttgtgcaaggagctgtcgatgttgacattggtgccaatccttcagccgaaggtgctgatgaggatgaaggtgttgatgaccaagctgtgaaggttgttgacattgttgacactttcaggcttcaggagcaaccccctttcgacaagaagcagtttgtcgtgttcatcaagaagttcatcaagaacttgacaccaaaactggatgcggaaaagcaagagtccttcaagaaaaacattgagggagcaaccaagtttttgctttcaaaattgaaggaccttcaatttttcgtaggagagagcatgcatgatgatggatgcttggtgtttgcttactacaaggatggtgctgttgacccaacatttttgtactttgcatatgcattg

SEQ ID NO: 233875 - DNA, 441 bp, Gossypium hirsutum
  unsure (1)..(441): unsure at all n locations
cccacgcgtccgtattttgtgaatcaggtaattcaggatgcaggcgtcgtcgcatttagtcagagggaatttcggcattgagatttcaaaacggagagtattcccttgctttggtgaagttaggcaacggagtttaactttgaatcgcaatttttgcatccgaagtggttccacctgcagcggtttaagatcaggtgacgtttcgatgggagcaggacttgtacgtgccaaaaatggtatcgaaactgccgttcgctcttcggtcaaatctcgatcgatcaaagctcaagcctctggtggagacattgaggatttgacaccgatcaaccctcangcgaaatcttctggggcagttctgccatttgttggtgttgcgtgtttgggagctatgttatttggttaccatctaggggtggtaaatggtgctcttgaatatctatc

SEQ ID NO: 233876 - DNA, 434 bp, Gossypium hirsutum
ggaagatcattgcgccagagttcttcatggacaaggttaagggcatggtggggctgatggtggaatcgacagtgccattgctaaaaaagtgggaagccatgattgatgcaggtggtggtttggcagctgaaattaatgtggatgaggatttgaggagtgtttcagctgatgttattgcaagggcatgttttgggagctcttatgttaaaggcaaacagattttctccaagcttaggaccattcagaccaccattaccaaacaaggctttctttttggcctcaatggttcaagattctttcccaacaagaaagtcagcaatttagaaagagaggtggaattgttgatttgggagaccgtgaaacgacgacagcaagaatgcgtagacaaatcttcaggtcaaaaggatttaatgcagcttatattagaaagtgct

SEQ ID NO: 233877 - DNA, 409 bp, Gossypium hirsutum
ggatcaccccccggttatgtcgggtatgaagaggggggtatgctcacagaagctattagaagacgaccattcacgttgttattgcttgatgaaatagagaaggcccatccagatatattcaacatccttctacaattgtttgaagatggccacctcacagattcacagggtcgaagagtatctttcaagaatgcattggtggtgatgacttcaaatgtgggttcttctgctattgcaaaaggtagacgtgcttccatcggcttcttgctcaatgacgatgaatctgcttcatatactggaatgaaagctttggtaatggaagaactgaagacatatttccgtccagagttactcaacaggattgatgaagtagttgtatttcggtctctaaaaaaatctcagatgcttg

SEQ ID NO: 233878 - DNA, 423 bp, Gossypium hirsutum
accactcttatcaatctccaatcaactaataacctttccttcccttcttcttcttgttgttgttattattaacggactcgtttaactcagtgattcgtccaagaagccactgagtccggtgatgtggtcctgagttcttctttctttgaagggggtagaatcggaaactgaaaaaaagagagacaaaaatggatcgagcagacttgacggtcggaccggctatggatatgccgattatgcacgacggtgaccgttacgatttcgttagagatatcggatcgggtaatttcggagttgcccgacttatgacagataaggttaccaaggagctcgtcgctgtcaagtacatcgaaagaggccgtaagatagatgaaaatgttcaaagagaaattattaatcatagatcattgaggcatccgaata

SEQ ID NO: 233879 - DNA, 439 bp, Gossypium hirsutum
cggacgcgtgggcttctttcctacgccaaaatgccgccaaaatttgatccaagccaagtcgtcgacgtcttcgtccgcgtcaccggcggtgaagtcggagcagctagttcactcgctccgaagatcggtcctctcggtctctctcccaagaagatcggagaagatatcgctaaagagaccgccaaggaatggaagggtctccgcgtaaccgtcaagctcactgtccagaaccgccaggcgaaggtcatggtggtaccgtcggcggcagcgctggtaatcaaggcattgaaggaaccggggagggataggaagaagaccaagaacatcaagcataacgggaacatcggactcgatgacgtcatagagatcgctaaagtaatgaggccgaggtccatggctaaggatttgagagggacggtgaaggagattctgggcacct

SEQ ID NO: 233880 - DNA, 443 bp, Gossypium hirsutum
ctgaaacttacaacttcaccatgaacaaaagcaagctccagctgcaactttgtgcagggatatttactttaagcatcctctccaatggtgcttatggtagtgacaaaatctttgacataactcacaaaatcacttctcagttgccaacttttggatcacagaagggtcttggacaattcatttggcttctttccagcatcaaaaatgggtccacagcgaatgtgtcggagttcaaattgggaacccacactggcactcacgttgatgctcctagtcacttctttcagaagtactatgaacaaggatttgatgtttcaacccttagccttcaaactcttaatggacctgttctagtagttgatgttcaaagaaataagaacattactgctgaagttatgaagtccttgaaaattcccagaggagtacatcgggtgcttttcaaa

SEQ ID NO: 233881 - DNA, 363 bp, Gossypium hirsutum
caacattcccatttccaatctccagctcccaaggtaaatatgccgatcagaaacatagcagttggccggcccgaagaggcgactcaccccgatgctctcaaggcagctttggctgagttcatctcaaccttgatcttcgttttcgctggatcgggctcaggaatggcttttaacaagttgaccgacaacggagcaacaaccccggccggtctcgtagccgccgctctagctcatggcttcggtcttttcgtcgctgtctccgttggcgccaacatctcaagtggccacgtcaaccccgccgtcaccttcggtgctttcgttggcgggaacatcactctcttgcgcggcattctttactggatc

SEQ ID NO: 233882 - DNA, 421 bp, Gossypium hirsutum
ctttcctctcctctccacaaaacagttgaaaatatctctctcttcactttcttctctttgcaacgcagggtgaaaggcggggaggccgtaaacaatctctcttgcgctcttctcgtagaatggatcagattcaacatccaactgtcatgcagaaggtagctggccagctccttcttctagcatttcccgagattttcaagggtatgatgggtctttcaagaggcctgccctataccaaggacattttgcatatgggaattattccaatgctggaatgcactatcctattgttccatcaacagctaccgccatttgtgttcaagcccctgcagagaaaggatttaccagctttgccattgatttcctcatgggtggagtttctgctgctgtgtcaaaaacagctgctgctccgattgagcgt

SEQ ID NO: 233883 - DNA, 439 bp, Gossypium hirsutum
ctccttctaagccagagccaaagcagcagagaagaggagaggaagatagaaaaatgggcgcaacagccaccggcaaatctctccatttttgctcttcacaggaccccctttcatttctctccctaacaaaggcaaaatcaaaagcagaaaccctaaacctcaacttcagattctccaaacccccaattctcgtcgccttcgtctttccattagagcttcttcaccctcctccaccgccctcaatgacccgcctcttccctctctcaccaattccgatcttcaacttcgagttcgaatcctctctgaatcactcccctacattcagaaatttaggggaaaaaccattgtcgtcaaatacggaggtgccgccatgaaatctgcggagctcaaggcctctgttgtcagggacctcgtcctcctctcctgcgttggcctccgt

SEQ ID NO: 233884 - DNA, 438 bp, Gossypium hirsutum
catttcccaaatctcctccctcctcttctttagcgtccttttcatttccgctcatgcagcgcgctttgaaatccgcaatgagtgctcctacaccgtctgggcagcagcctctcctggtggtggccgtcgcctagaccctcggcaaagttggaccatcgatgtgcctgctggcactgctatggctcgtatttggggtcgaaccaattgcaatttcgatgccagtggtaggggtcattgccaaaccggtgattgtggtggactccttcaatgcaaaggttggggtgtacctccaaacaccctggctgaatatgcacttaaccaatttggaaacatggatttctacgacatttccttagttgatgggtttaacatccccatggtgtttggtccaactaatggcggttgtcacaacattcggtgcactgcagacatcaacgg

SEQ ID NO: 233885 - DNA, 434 bp, Gossypium hirsutum
agccgattctctttggaaatttggtagaagaagtggtagtgggtaagcatctttaaaaaagcttacttttttcccccttcatttccattctcatcattttctcttttgttttcctctttttccaatatcatcaaaaaccagccctaacagagcagctgaacctaacatcatcatcatccatggcggcaccgatctggctatgggctttctctgtagccctaactctggttccgtctgtttttggaaactctgaaggagatgctcttaacacgttgagaaaaagtttgaccgatccagataacatactccagagctgggatccgaaccttgttaatccttgtacttggtttcacatcacttgtaaccaaaataatcgagtcactcgagtagatttaggtaattctaacctgtctggacatttggtacctgagctt

SEQ ID NO: 233886 - DNA, 436 bp, Gossypium hirsutum
ctaaccatgagctacttaaccattttcaaaatctcctccctcctattctttagcgtccttttcattaccgctcatgcagcgcgctttgaaatccgcaatgagtgctcctacaccgtctgggcagcagcctctcctggaggtggccgtcgcctagaccctcggcaaagttggaccatagatgtgcctgctggcactgctatggctcgtatttggggtcaaaccaattgcaatttcgatgccagtggtaggggtcattgccaaaccggtgattgaggtggactacttcaatgcaaaggttggggtgtacctccaaacactctggctgaatatgcacttaaccaatatggaaacatggatgtgtacgacatttgcttagttgatgggtttaacatacccatcgtgtatggtgcaactaatggcgggtgacacaacattc

SEQ ID NO: 233887 - DNA, 448 bp, Gossypium hirsutum
cggaccttcactttcccagacttcaagagtgggagaaaccgattctttcttcgagaacaaatcagccaagatcttagcagcaggccatacaggcctagttggttctgccataattcgtaaacgtcagtgcctacgctttaccaaccttctactccgcacccatgcccatctggaccttactcgccaatccgacgtgcgcatccttcttcgacgatgagaaacctcactacgtcgtactagctgtcggtaaagatggtgggatccacgccaacaacacttaccctgccgatttcattgccatcaaccttcaaatccagaccaacggcatcaattcctgttaccgacacggcgtgaacaaaatcctcttcctcggatcctcgtgtatatatcccaagtgtgcgctcgaacccatccgtgcaaatgcgctcttatccgggcgcctggaacc

SEQ ID NO: 233888 - DNA, 442 bp, Gossypium hirsutum
cttttcctctcgatttcccgagctaattggaagagtcttgaaggtaaaaaccgaagaaacaaagcgctctctctctttgtgaatccaatcaaatcgaagatgttgagagtggcaacgaggcggctcacttcttgttcgtctgcgtggaggtcgcaccaggccacctccgctatcgcctctcgtcctttcatcgacggctccgattcttctgattgtctcaaatccaatttctgctcctcctcattttccttctctttcgcttctcaattccttcttcccaccagaggttttgcttctgagtcactcaccccaaaaagtgaccacagtgtgattcctgatgttccagcaacagtggctgctattaagaaccccagttctaaaatagtttatgatgaatacaaccatgaacgttttccttctggtgaccccagcaagcgggcat

SEQ ID NO: 233889 - DNA, 443 bp, Gossypium hirsutum
ctttcttcacacccgacaatctaaactacatacaagaaaaaagtgtgtttggcaaaagagaaaaaaaaaaaaaatcaaagatggcggaaaaagaagatctgggtttgagtctgagcttgagtttccctcagaatcaccactctttacagcgaaatcttaggccttcgcttgttccttcctctgctaattcttgctcttctccttctactttaacccttaacaaacactcatggaatgattcttctcctccttcagatcataacttggaatcattccgggcggagatggggtcaatttttagaggaatcgacatgaacatattgccatcgacggcagattgtgaagaagaagctggggtttcatctccgaacagcacgatatcgagcgtgagtggaaaaaggagcgaaagagaaggcaacggagacgagcttgagatcgaaaaa

SEQ ID NO: 233890 - DNA, 440 bp, Gossypium hirsutum
ccacgcgtccggctaagggtaccaccacgctagctttcatctttaaggaaggggtcatggttgccgctgattctagagctagcatgggaggctatatctcttcacaatcagtgaagaaaattattgaaatcaatccttacatgcttggaacaatggctggaggagctgctgactgccagttttggcacagaaatttaggcatcaagtgccggctgcatgaattagcaaacaagcgtagaatttcagttacaggggcatcaaaactgttggcaaacattctctattcttaccgaggaatgggactttcggttggaaccatgattgctggatgggatgaaacgggccctggactatactatgtggacagtgaagggggaaggttaaaaggaatgcgtttctctgttggatctggttcaccatatgcttatggtgtgctggat

SEQ ID NO: 233891 - DNA, 434 bp, Gossypium hirsutum
atttaattcccgttttccaatcttttttgagaaatcggtagcgaaaaatgtcgtcgtcggggaggaagatcacccttaagagctcagacggcgaatcattcgaggttgatgaagcggtggcgttggagtcgcagacgattaagcatatgatcgaggacgattgcgctgataacgggataccgttgcctaatgttacgagcaagatcttagcgaaggtgatcgagtactgcaagaaacacgtcgaggctcctaagacagacgatcgatccgccgatgacgagctcaagagttgggacgctgactttgtcaaggtcgatcaagctactctctttgatctcattctggcagcgaactatttgaacatcaagggcttgctggatctcacttgccaaactgttgctgacatgatcaagggaaagaccccagaagagatc

SEQ ID NO: 233892 - DNA, 413 bp, Gossypium hirsutum
cttatattcatcacttgtttaaggggtgtcggaccatcgaccgtttgctgtgcttcagatcgttgaaatcgaggagaaaatgcaaatattcatattgtgtaatcagggcgaagggactttggctagctgagaaatacagtggtaaagatggtgaacatgacactgattgccactgtgactgatggttttctatattgcggagggactagatgatggttgtgatctggctgatgctgaaatgtacaaacatcatgttaaggctgtatttaacaatctctacaaaggccataatgaggcttgaaggatgtgtatagaaaccggcccatatatcttccactatatgatggaaagacgtgtttgttacttgacaatgtgcgatcgatattattcgataaaacatggcttttaatata

SEQ ID NO: 233893 - DNA, 433 bp, Gossypium hirsutum
gcgaaaaggatttgctcaaagccgtggaccgcgagtacgtgtttgcttacatagatgatccatgcagtgctacttatcccttgatgcaaaagctaagacaagtccttgtcgagcacgcattcgccaatggtgacaatgaaaaggatacacacacttccattttccaaaagatcacagcatttgaagatgaattcaaagctgcattgccaaaagaagttgaaggtacaagggtttcacttgaaaatggaaatgcaacaatccctaacaagatcaagggttgtagatcatatccattgtataaatttgtgagggaagagcttggaactgggttgttgagtggtgaacaaggtaagtcacctggtgaagaatttgataaggtattcatagctatgtgtgaagggaagattatcgatccaatgatggaatgtttaaa

SEQ ID NO: 233894 - DNA, 438 bp, Gossypium hirsutum
cgcgtcgaccgagggagctctccggagtcggtgatggcggcgtcgccggagcatcgtgatgattcctcctcctcctctcccgtagaagttccggtcaaaaaagagctagaaatatgcgtcgatgctaaacagatagatagtgacggaggctcccgggaagccgccagtggcgacaattcccgcgccgaagttgattttgcattgaataacggtgctgctgagccttatagcattgttcaccgaagcttttctgaagttggaacattgcgtgtgggcacttcaaacattgaaaaattggattcaagccagcctaaattggtaaaatcaaaaactgaggcacccagacatcggagcatacttgctgaagatgcagcacagatttttgacaataagatgtctgcccaaaagaagcttcaattgttgaacagaatagctacc

SEQ ID NO: 233895 - DNA, 431 bp, Gossypium hirsutum
  unsure (1)..(431): unsure at all n locations
ctgcttcttcgatactctcaaggctcaacctttctgggttattttccttttcactttgggttctttatcactcttgaagttttcatttgtttttctgaaatgggtctggatcaattttcttagacctggtaagaatctcaaaaaatatggttcctggggtcttgttactggaccaactgatggtatcggcaaaggatttgcctttcagctggctaggaaaggccttaatcttgtcttggtgggccgtaatcctgataaactgaaagacgtttccgattcaatcttggccaagtatgccaagattcagatcaggacagttgttgtggacttcactggcgatcttgatgaaggcgtgaagaagataaaagaaactattgaaggactggatgtggnggttttgattaacaatgttgggatttcatatccttatg

SEQ ID NO: 233896 - DNA, 423 bp, Gossypium hirsutum
  unsure (1)..(423): unsure at all n locations
aaaggtttttagggcttttctaacttttctgattattttttgataatccggagttcaatcatctaaaagaagccctaaaatccttgaatcaggtctgagcttgtggtttgttaggcctctttgatcaaactaagtttcatgtctgatcttgacgttcaaattcctactgcctttgatccctttgctgatgcaaatgctgaggactcaggtgcgggtgcaaaggagtatgtgcatattcgtattcagcaaaggaatggtcgcaaaagcctgacaactgtccaggggttgaagaaagaattcagctataacaagatacttaaagacctgaagaaggagttttgctgcaatgggaccgtggtccangaccctgaattaggacaggtgattcaacttcaaggtgaccagcgtaagaatgtatcaacc

SEQ ID NO: 233897 - DNA, 445 bp, Gossypium hirsutum
atcccttcaaaaccttgccaaccctttctttcctcttcttaacccttttcagcttagccgatgcagccacatttgatataagaaacaactgcccttacaccgtttgggctgccgcatctccgggtggtggcaagagacttgaccaaggtcaagcatggcaaatcactgcagcctctggaaccacacaagcccgaatttgggctcgaaccaaatgcaatttcgatgcctccgggaaaggctcatgcgagacaggcgactgcggtggagtcctcgaatgcaagggatacggtaaagctcccaacacactagccgaatacgcaatcgaccaatttgagcaccaagacttcattgacatctccaacatcgatggctttaatgttcctatggagtttagctccaactccccagggtgcactagggttatcaagtgtacggccgacattgg

SEQ ID NO: 233898 - DNA, 425 bp, Gossypium hirsutum
gtctcaaccaaactctctctggtgacccttcaaaagaatcaccgccatggcgatgcaaaccggagtcggcttttcgaagattttgatccttgccggcgcaggttacaccggtacgatccttctcaagaacggtaagctatcggacatgttaggcgaattgcagtctcttgtgaagggactggaaaaaactggggaccaatcagatgattcagatgcccttctggctcaggtgcgtcgtctctcaacggagattaggcaactggcctcagcacggcagataactgttctgaatggggattccggcgttaagttaacctctctggtaatccctgctgctaccttgggggcattgggttatggttacatgtggtggaagggcatttcgttctctgatctattttgggtaacaaaacgcaatatggcat

SEQ ID NO: 233899 - DNA, 439 bp, Gossypium hirsutum
gtgggctaattctcttctcttgaaagaaactcaggctggagattgagtcttaattgtcatggatcttgagtttgggaagtctttggatacttcaaagaaattcttggaggacctcattgctattagcgtaccaaagtcttggtgtagtttatggggacctgagtacttctcctctttatgtctacaaaagtacatttgctgaagacattcaacattcagagacaaatgaagagatttttggtgttctatcctttgtcttctggacccttactttagtccccttattcaagtatgtgtttgtggttcttcgagcagatgacaacggagagggaggtacttttgcattatattctctgatatgccgacatgcaagagttagtcttctgcccaacagacaggtcggcgatgaagcactctttacgtataaacttgagcacca

SEQ ID NO: 233900 - DNA, 442 bp, Gossypium hirsutum
ctgagttccaaaccaatttggttccatacccccgtatccatttcatgctctcttcatatgcacctgtcatctcagctgagaaagcataccatgaacaattgtcggttcccgagatcacaaatgctgtgtttgagccttcaagcatgatggcaaaatgtgaccctaggcatgggaagtacatggcatgttgcttgatgtatcgaggagatgtcgtccccaaggatgttaatgctgctgttgctaccatcaaaacaaagaggaccgtgcagttcgttgactggtgccctactggcttcaaatgtggtattaactatcagcctccaactgttgtacctggaggagatctcgctaaggtgcagcgagctgtttgcatgataagcaacaacacagcagtggctgaggtgtttgcacgcattgaccacaagttcgatctcatgtactc

SEQ ID NO: 233901 - DNA, 422 bp, Gossypium hirsutum
ctcgaaacagtacctccggttccaacttcagctcaaaaatatgtcaggggaagaagttgcggttgcccaacccgaggcggcgcctgcactcggtgagccaatggacatcaacacagccttgccccttgtggttaggaagtcacgagctcacggtgggctcgcacggggcttgcatgaagctgccaaggcaattgaaaagcacaatgcgcatctttgcgttatagctgatgactgcgaccagccggactatgttaagctggtcaaggcactttgtgctgatcataatgttaaagtgctacgtgccccgagcgcaaaaacactcggcgagtgggctggtttgtgtaagatagactctgagggtaaagcacgaaaggtagttggttgttcctgcgtagttgtgaaagattatggtgaacaacatg

SEQ ID NO: 233902 - DNA, 214 bp, Gossypium hirsutum
attttcattttcttgttccttccttcgccgtctattgctttttgttacctcgatttcaagtgaatcagaatgggtaaggaaaagactcacattaacattgtggttatcggccacgtcgattctgggaaatcaaccaccactggccacctgatttacaagcttggtggtattgacaagcgtgtgatggaaaggttcgagaaagaacctgttgaaa

SEQ ID NO: 233903 - DNA, 435 bp, Gossypium hirsutum
ggaaaacaaagaagaaaaacttaatcatggctcggttgacgttcgtgacctccatcatccttctgctatgctccgttgccgctggatcaactttcgacgactccaaccccatccagatggtatccgatggcctcaccggcttcgaatcctccgttcttcgtgtcatcggtcacactcgccatgctctctccttcgcccgttttgcatacaagcatgggaagaggtatgaaaacgtggaggagatgaagctacggtttcagattttcgaagacaacttggatttaatcagatccactaacaagaagggactgccttatactcttgctgtcaatcagtttactgattggagctgggaagagttccagaaacacagattgggggctgctcaaaactgctctgctaccacaaagggcaatcaccagctcactgatgtcg

SEQ ID NO: 233904 - DNA, 445 bp, Gossypium hirsutum
taacccgtttgcctccggcatcttcccactcatggcttcggagaaagaagctgcccttgctgctgctccctctgattctcctaccatatttgacaaaatcatcaacaaggaaatcccagctaccgtggtgtatgaagatgataaggtcttagctttcagggacatagctccccaggctcctacgcacattttaattattccaaaatcaaaggatggcctaacgggtttgtctaaggctgaggagaggcactgtgaaatccttggctgccttctttatactgcaaagcttgttgcaaaacaggaagggctggaagatggattcaggattgtgatcaatgatggccctaaaggatgccaatctgtgtatcacattcatgtccacctcattggagggcgccaaatgaactggcctccaggctaaataaagatgttatagttgatatag

SEQ ID NO: 233905 - DNA, 398 bp, Gossypium hirsutum
gtctgccatataatcatataaccaggctccggggtggaactctgcggccaccacaatggcgaaaatagacttggggacaagccaagaggctggttaacctgactgcatcaaagcccttgtgggcgagtttatcaccactttcctcttagtattcgatggagtaagagctgccatggccggcgatgagtccgaggcaaatgcgctggtgggattggttgctggggcgtgtgctcatgcccttgacgtcggcgctatgatatcggacggacacatatgaggcggccatcttaaccgactcgccacgcttgggttgctattcagtggcaacatcacaggggtgcaagcgatcctatactggatcgatcaggtggtggcatctgcagctgcttgtatactac

SEQ ID NO: 233906 - DNA, 428 bp, Gossypium hirsutum
gactgaacaagagcaggcactctcttcagagcttagcaacaaggtgaaaggaaggcagacagcacgtgaaataattttatggattgaggaaactgtctatactattcacggccaggaaattaccctcagtgtggttatacaaactcttcttgacattgggtctaaaagtttcactcatttgatcactgtcttggagaggtatggacaggtcatggcaaaactttgcgctgatcaagataagcaggtcatgcttatatctgaagttggttcatattggaagaacaatgcacagatgacagccataacaattgatagaatgatgggttatcgtcttatatctaatttggccattgtgagatgggtcttctctccagaaaacattgagcaatttcatatatctgatcgtccatgggaggttctgaggaatg

SEQ ID NO: 233907 - DNA, 439 bp, Gossypium hirsutum
gtactttcaagggccgacagaggcaccactggacgcggagagcgcttgtacggggatatctgaaaaaggagctttcccaacatatcacgggaaaggttttgatgggcaaaacgacggaagccagctataacgcagttggagttaacggtcgtaagtatttgctcccagcgatgtggaatcctcagacctcggcatgcaaaactcttttatgaaacaaacaaaactgacaataggaacgaaggacatcctaatgttattacgtatctatatcatgaactccatccgatattgatacggacaaacacagtatgtaaaaatattgtaataaatttgtacgtgatgcatcattgtaattaaattttgtaaaatctatgtgccatttttaattataaaagggggccactcaagggccatacctaataaatatttgggcttaaaa

SEQ ID NO: 233908 - DNA, 431 bp, Gossypium hirsutum
gccgtctcttcctcctccactttcagatcaccaaaaccttcaacaatgggctttgttaaggctcaaaaaaccaaagcttactttaagcgttttcaggttccattcaagagaacgagagagggaaagactgattacagggctaggattcgcttaaccaatcaagacaagaacaaatactacacgcctaaataccgattcgttgttcgatttagcaacaaagatatcaccgcacaaataatttctgccaatattactggtgatatggttcttgcttcagcttactcacatgagcttgctcgttatggacttgaagtcggtcttacaaactatgccgctgcttattgcactggattacttttgggacgccgcgtccttaagttgcttgaaatggacgatgaatatccacgcaatgtggacgctaccggagagga

SEQ ID NO: 233909 - DNA, 438 bp, Gossypium hirsutum
gtaggattgcctcctctaccaccttgtgagtcccttcgatcgctgtctatccgtggctgccgggggtttggtgatgctagcttggctgcgttggggaagttgtgccctcaactgcagaatgtggagttgagtgggcttcatggaataacagatgttgggtttttcccattgctcgagagttgtgaggccggtttggtgaaggttaatctcagcggttgtcccaatttgggtaacaaagttgtttgtaagatggctgatttgcatggttggactctagagatgctgaatcttgatggatgcaagatcagtgatgcgggggtggttggaattgcatagaactggcacttgctcagtgatctctatgtttccaagagcacaataaccgactctggaattgcagctcttgctcgttctaatctgatcaatctgcagatccta

SEQ ID NO: 233910 - DNA, 252 bp, Gossypium hirsutum
ggggctgtcgtgcccggctacggggtctgcggcttgctcttttaaccaatcgtgcggtggagattcatttttttcggccaacttggttcgagattccttaggattagccaatgacattgtcccacattttgctttcggatgtataaacgtcatctctggtggatcagtaccaccgcaaggactgttgggtttgggtcgtcgacccatgttacttatttcacaatccggggccctctactctggtgttttatc

SEQ ID NO: 233911 - DNA, 432 bp, Gossypium hirsutum
cgtcctcccaacttccacacccatacgaaaatgacaacccgcttcaagaagaaccgcaagaagcgcggccacgtcagcgctggtcacggacgtattggtaagcataggaagcatcctggaggtcgcggaaacgccggaggcatgcaccaccacaggatcctctttgacaaatatcaccctgggtatttcggtaaagtcggtatgaggtacttccacaagctccgcaacaagttttactgccccattgtcaacatcgacaagctctggtctctcgtcccacaagacgtgaaggcaaaagccaacaaggacgctgcgccgatgatcgacgtgacccagttcgggtactttaaggtccttggaaagggtgttttgcccgaggaccaaccgatcgtggttaaggctaagttggtgtccaagacagctgaaaagaag

SEQ ID NO: 233912 - DNA, 430 bp, Gossypium hirsutum
aacaaatcaagcttcaactccactttacctgtgaaaaagcttcactcattcattcatgcatctctttttttttcctctaagaagaacaagagagttgcttgaattgaattgcctcaaaactctttgatgtctgtcccaaagctgtttcctttaacttctctttgtctcctgttctcgaagaagaggagcctgtgatatagattgaagaagcaagttagatttaaaaaggacaatgcggttgtttccatcgaattcgagtaagggtcagagtaatggtggaagcaatcgtgctttgttgtatctcaatgtatatgacctcacacctataaataactacctttactggtttgggattgggatattccactcgggtatagaagtacatggtttggagtacggatttggagcgcatgagtaccctacaagtggg

SEQ ID NO: 233913 - DNA, 442 bp, Gossypium hirsutum
gactgaacaagagcaggcactctcttcagagcttagcaacaaggtgaaaggaaggcagacagcacgtgaaataattttatggattgaggaaactgtctatactattcacggccaggaaattaccctcagtgtggttatacaaactcttcttgacattgggtctaaaagtttcactcatttgatcactgtcttggagaggtatggacaggtcatggcaaaactttgcgctgatcaagataagcaggtcatgcttatatctgaagttggttcatattggaagaacaatgcacagatgacagccataacaattgatagaatgatgggttatcgtcttatatctaatttggccattgtgagatgggtcttctctccagaaaacattgagcaatttcatatatctgatcgtccatgggaggttctgaggaatgcaattagtaagaca

SEQ ID NO: 233914 - DNA, 443 bp, Gossypium hirsutum
ggccgccgttgtcgttcagcagcagaacagcaaaagaagcaaagcaatggcaaggatcaaggttcatgagttgcgacagaaatcaaaaaccgagcttttagctcagttgaaagatctcaaagctgaacttgctcttcttcgcgttgctaaagttaccggtggtgcacctaacaagctttctaagataaaggtggtgaggctgtccattgctcaagttctgactgtaatctcacagaagcagaagtctgcattgagggaggcatacaagaataagaaattcttgcctcttgatctccgtcccaagaagacccgagccatccgcagaaggcttaccaagcaccaggcatttttgaagaccgaaagggagaagaagaaggaaatgtacttcccaatgaggaagtatgccattaaggtgtagggcaggatctcacattctatttaaa

SEQ ID NO: 233915 - DNA, 444 bp, Gossypium hirsutum
ctttgccttaccctattctcacccacacattccacggattgttcatcgctcaaactctccggtggcaaaaaacaatactccaattgcacccacctccccaccttgaacgcaaccctccatttcacctacaatgccaccaattcttccctttccatagccttctcagcacctccggctaaagccggcggttggattgcttgggccgtcaaccccacggggacaggcatggcaggttcacaaaccctcctggctttcaaaaacaatggatctatggttgttaaaacctacaacataagctcctacagttccattgtggaagggaagctttctttcgatgtttgggacttggaagccgaagccggcagcgatgggaagatgattttatatggttcattgaaagtggaggaaagtgcggagaagttgaaccaggtgtggcaagttggg

SEQ ID NO: 233916 - DNA, 446 bp, Gossypium hirsutum
gggagaggaggtgaacatgactctggcaaaaacagaggcgaagttgcttcatgagaaaatttcaaacaaagcttacagtgatgacgatgtcataagggttttggctacaagaagcaaggcacagatcaatgcaactctgaatcactacaaaaatgaatatggaaatgacataaacaaggacttgaaggctgaccctaaggatgagttccttgcactactaaggtccacagtgaagtgcttggtctatccggaaaagtattttgagaaggttcttcgcctagcaatcaatagacgaggaacggatgaaggagctcttacaagagttgtttgcactagggctgaggtggatctaaagatcatagcagatgagtatcagcgaaagaacagtgtcccactgactcgtgccattgtcaaggacactcatggagactatgaaaaattgctgg

SEQ ID NO: 233917 - DNA, 432 bp, Gossypium hirsutum
gcggagcagcagcaactagagccatggaccgacctcagtggcaaagtggtgatggtgacgggggcatcttctggtttaggtcgtgacttttgtcttgacttgagtaaagccggctgtcgtatcgtggctgccgcgcgccgcgtcgatcgccttaaatccctctgtgatgaaatcaatcacctcacctttcctttttccggaccccagcctagtggccctcgagctttcgctgtcgagctcgacgtatgtgctgacggatccaccatacagagctctgtgaaagcggcctgggatgcctttgggaggatcgatgctttaataaataacgctggcgttagaggtaatgtgaaagatcctttggaattgactgaggaggaatggaatcaaaacatcagaaccaatcttacagggtctttgttggtgtaaaatatg

SEQ ID NO: 233918 - DNA, 426 bp, Gossypium hirsutum
aaagaaccagagttttgtttctctttagtttacgttttttttgtccttttggattttttgatactaaaaaagggaagcaaagaagaagggaaatggagggcaaagaagaggatgttagattgggagccaacaagttcacagagaggcaaccaattgggaccgcggctcagactcaagatgacgggaaagactattctgaaccaccaccggctccatttttcgagcctggcgagttaacctcatggtccttttatagggctgggattgccgagtttgtggcgactttccttttcttgtatatcactattttgactgttatgggagttgttaaggaaaaaactaagtgcccaactgttgggattcaaggaattgcttgggcttttggtggtatgatctttgctcttgtttactgcactgctggcattt

SEQ ID NO: 233919 - DNA, 437 bp, Gossypium hirsutum
attccttctgtcattttgggttttactcctttttttgtgaaatcagggaaatggatcttgatctttctccaaagctggcaaagaaagtgtacggtgacgatggtggaagctactacgcatggtgccccaatgaactccctatgttgcgtcaaggcaacattggtgcagccaagttggcccttgagaagaatggctttgccctccctcgttactctgattcttccaaggttgcttacgtccttcaaggggctggtgttgctgggattattctccctgaatcagaggagaaagtgattgcaatcaagaagggtgatgcaattgctcttccatttggtgtcatcacctggtggtccaacaaggaggacactgaattggtggtccttttcatgggggatacctcaaaaggccacaaaccaggccagttcactgatttcttc

SEQ ID NO: 233920 - DNA, 352 bp, Gossypium hirsutum
aagacagcaagccattaaggttatgagataagatcaaaatgggttcagaacgatcagcttgcacagacctccttttagccctcaacattctattgtttaccctagacagtgctcattgtggatcttgttcttattgtggctctaaccaaaggccaactgccacccctactccatctgcacgaggtctgtgccctagggatgccctcaaattaggagtgtgtgccaatgtgcttaacttagtcaatgtcaccgttggatcacccccggagatgccatgtggttcccttctcaacggtcgttgggacctcgaacccgctgcttgtctatgcaccgatatgagagctaacatctt

SEQ ID NO: 233921 - DNA, 405 bp, Gossypium hirsutum
gagctacttaaccatttcccaaatctcctccctcctcttctttagcgtccttttcatttccgctcatgcagcgcgctttgaaatccgcaatgagtgctcctacaccgtctgggcagcagcctctcctggtggtggccgtcgcctagaccctcggcaaagttggaccatcgatgtgcctgctggcactgctatggctcgtatttggggtcgaaccaattgcaatttcgatgccagtggtaggggtcattgccaaaccggtgattgtggtggactccttcaatgcaaaggttggggtgtacctccaaacaccctggctgaatatgcacttaaccaatttggaaacatggatttctacgacatttccttagttgatgggtttaacatccccatggtgtttggtccaac

SEQ ID NO: 233922 - DNA, 392 bp, Gossypium hirsutum
tgaaattccaagcaaaatatcatgggcaagggtcctggtctctacactgaaatcggaaagaaagctagagatcttctttacaaggattatcagactgaccaaaagttcactttgaccactagctctcccactggtgtttcaattacctctgccggaacgaagaaaggtgatcttttcttggctgatgttaatacccagctgaagtctaggaatgttacaactgatatcaaagtggacaccagctccaatctatttaccaccataacagttgatgaacctgcacccgggctaaaggcaatctttggcttcagagtccctgatcagaggtctggcaagattgaactccagtatttgcatgagtatgctgggattagctcaagcattggattgac

SEQ ID NO: 233923 - DNA, 422 bp, Gossypium hirsutum
tcggaacccctgaaaggggtttccttgctgctgatgaatccactggcaccatcggcaggcgtctttcaggttttaatgtaaagaatgttgaagacaacaggcgtgctctccgtgagctcctattcacaactcctggagctcttcagcacctcagtggtgttattctctttgaggaaaccctttatcaaaaaaccgcttcgggcaagcccttcgttgatgttttgaaggaaggtggtgtcctccctggcatcaaggttgacaagggtacggttgagcttaatggaacccatggcgaaactttcacccagggtctagatggccttgcacagcgatgccagaagtactatgaagctggtgcccgctttgctaaatggcgtgctgtccttaagattagtgctaatgaaccaaccgagcttgcaatc

SEQ ID NO: 233924 - DNA, 418 bp, Gossypium hirsutum
  unsure (1)..(418): unsure at all n locations
cgaacatggcgatgggagttaaggccttgcacttgtcctttgtgcctcatgccctcgcgattgccggcgctgttatggtattggtttggtgcattcacttcaggggtggattagcttgggaatcttctaacaaaaatctcatctttaatctccatcctgtattgatgttgattggcttcattatcttaggaggtgaagccattatgagctacaagtcattgccactgaagaaggaagttaagaaagtcatacatcttgtgctccatgccactgctctgattctaggcattattggaatctatacggcattcaagaatcataatgagagttcaatacctaatctctacagcgtgcattcttggcttgggattggaatcattaccctntatggcattcagtggatatatgggtttctcat

SEQ ID NO: 233925 - DNA, 418 bp, Gossypium hirsutum
gattctacagtgctttccagtgaaatgtctgatgaatttatagagatggtttcaaatatctcccagctgcatcacacaaatgtaacagagctggttggctattgttccgtgcatggacagcacctgcttgtctacgagttccacaaaaatggctctcttcatgacttcctgcatatatcagatgagttcagcaagccattgatttggaactcccgtgtcaaaattgcactggggactgcacgtgcactagagtaccttcatgaagtttgctcaccgtctgtcgttcataaaaatatcaagtcagccaacatcttacttgatgctgagctcaatcctcacctttcagactcgggcttggcaacctttattcccaatgcagatcagttactgaatcgtgatgacgtgggatcccgatact

SEQ ID NO: 233926 - DNA, 298 bp, Gossypium hirsutum
tatacattcatttgtttggaaaaacttccatttctttgattgtttttaagcgcaggaacatcgaaaggcatcaggaaaaggcaaatctagatgtcgatggtatcttgaaggagctccccaatgctgggcgtatccctaaaaccaagatcgttggtactttaggtgcggctacactgtccgcacatacaatagagcacctgctgagggcatgcatgaacgctgctcgcttgaattactctcatggcagccatgactatcatcaatagaccttggatgactcataggcctgctatgcaca

SEQ ID NO: 233927 - DNA, 410 bp, Gossypium hirsutum
ggaaaatcatgggtgccaaagttcttttcttctttgctttgctttccttttcagctggctcggcatttgcaccagatgggggaaaaccaaggtctggtaatgacctctaacagggtttctggtcctaaggctgaaaccattataaaggaccaggttaagctactgtccaggcaacacaaaaccactgttttttctgggctgagaaacattttccatgactgtgctgtccagtcatgtgatgcttcactgctgctggactccacaagaaggagcttgtctgagagggacacacacgagctctggcctatggagtttcaggtgcactgtgaccatcaaagaagctgtagaaagggaatgtcctggagttgtttcttgtgctgatatccttgttctgtctgctagggaaggca

SEQ ID NO: 233928 - DNA, 421 bp, Gossypium hirsutum
acttgcattaagtctcaaagatatcactgcaagaaaaaaaaaaaaccagacatggcttccaacactgttgcatccgctgctcttcttcttaccttgaacttgttgttcttcactttggttagctctacctacgtgccttgcccaccaccaccaaagagccacaagcctacccacaaaagcccaccctcggcacctgaacagccaggcacttgccccagagatgcactgaaactaggcgtttgtgctgatttgttgggctcagtgcgcgttgttgttggaccgtcgaggaccaaatgctgctctctcatttcgggtttggctgatctcgatgctgctgtttgcctttgcactgctattaaagctaatgtgttgggggttaacctaaacgttcctgtttcattgtctttgctcctcaattcct

SEQ ID NO: 233929 - DNA, 424 bp, Gossypium hirsutum
gtctttatctcccctcttaaaacaaaaaccatggttcaagaaaagaagctagtccaggacgtatctggttggctaagagtctatgatgatggctcagtcgacagaacctggactgttccccctgaggtcaagttcatggctgaaccagtctcaccccatgaacaattcattgatggtatagccactcgtgatgtcaccatcgatcaaaattcaggcctccgggctcgaatttacttgccggaggaggaaaatcccaagtttccgatcatacttcatttccatggcggtggcttttgcatcagccaagctgattggttcatgtactatcagttttacactaggttagccaaatcgattccagctattgtcgtctcggtttacctcaggccagcacccgagaacaagcttccggcagcttgtgacg

SEQ ID NO: 233930 - DNA, 415 bp, Gossypium hirsutum
ctaccaagaacaccgtgttctaattaattctcctcttcattttgattctaaggttagtgatgaaaatgagggctggttatagcattttccttctcattctttctcttactgtttgtaatgctggtaagttgagtaatagcttttacaaaaatacttgcccacaagttgagaagatcgtgagagagattatccagattcatactcgaaacaatccatctttgggtgctcaacttattaggatgcagttccatgattgctttgttaggggatgcgatgcatcagtgttgttggatacagttaacaattccaaggctgagaaagaagcaatgccgaatcaatctttaggtggtttcgacgtgatcgacgatatcaaggcaacaatcgaaagggtttgccctaaagtcgtttcttgtgc

SEQ ID NO: 233931 - DNA, 418 bp, Gossypium hirsutum
ctgagttttgaatctagggatttgcgggtggagaagacgagagctcatctctctgcttcaaagctcctgtccgggtagaattctcttcttcctttgcgttgtgttctttgttgttcaatcgccatggcttcaaagcggattttgaaggaactcaaggatttgcagaaagatccacccacttcttgtagtgctggtccagtagctgaagacatgtttcattggcaagcaacaatcatgggaccctcagatagcccttatgctggaggtgtgtttttagttactatccatttccctgcagattatcctttcaagcctcctaaggttgcgtttaggaccaaggtcttccatcccaacatcaacagcaatggaagcatttgtcttgatatcctcaaagaacaatggagccctgcactaacca

SEQ ID NO: 233932 - DNA, 415 bp, Gossypium hirsutum
aaagcttcagaattgcaaatggagattctttctcaacgaccatcttctttctcaactttgaatcccaacgctccattgtttgttccgttagcgtatcggacggtggaggatttctctgatgagtggtgggctctcgtccaatcctccccgtgtttccgcgactactggcttcaagaacgtttccacgatccccaaaacgacgacgccgatcttctttttcccgacgatcttgatgccgtctttgacgattacgacgactttttcgttgaccctacctgtgaagggaaggaagaagatactcaaaaggaattggtacccgttggagcattcaaatggcggaaggggcgagttgtgagcgagtcaactaggtttcttgagaaagcgcccaagatcgtgaatgtgaaagtgagtccga

SEQ ID NO: 233933 - DNA, 417 bp, Gossypium hirsutum
  unsure (1)..(417): unsure at all n locations
gaaaaacttaatcatggctcggttgacgttcgtgacctccatcatccttctgctatgctccgttgccgctggatcaactttcgacgactccaaccccatccagatggtatccgatggcctcaccggcttcgaatcctccgttcttcgtgtcatcggtcacactcgccatgctctctccttcgcccgttttgcatacaagcatgggaagaggtatgaaaacgtggaggagatgaagctacggtttcagattttcgaagacaacttggatttaatcagatccactaacaagaagggactgccttatactcttgctgtcaatcagtttactgattggagctgggaagagttccagaaacacagattgggggctgctcaaaactgctctgctaccacanaggggcatcaccagctcactga

SEQ ID NO: 233934 - DNA, 187 bp, Gossypium hirsutum
ccctagccactctttgctcaactcgccaatgggggcttataagtacgtgtcggagctatggaggaagaagcagtcggatgtgatgaggtttttacagagggtgaggtgctgggaataccgccagcatccatcaattgttagggtcaaccatcctactcgccctgacaaggcacgccgcttgggttat

SEQ ID NO: 233935 - DNA, 379 bp, Gossypium hirsutum
aaaaagagcaaaaaatggcaaaaagaggcggcggagagcgtggcgcttttaggcgcggcttcggtggaggaaggggtgaccgtggtccaagaggcaggcgccgtggccgcaaggacgaagaggagaaatgggtacccgtcacgaaactcggccgtttagtcaaatccgggaaaatcacgtccctcgaacaaatttacctccactctctccctatcaaagagtaccaaatcatcgaccagctcgtcggcccttccttgaaagacgaagtcatgaagatcactcccgtccagaaacaaacacgtgcaggccagcgcacgcgtttcaaggccttcgtcgtcgttggatactgaaacggacacgtccgattgggtgtcaagtg

SEQ ID NO: 233936 - DNA, 417 bp, Gossypium hirsutum
tcttatttgaactcaaagtcccagctaatattagaatcatgggtgttgtcacttatgactatgagaatacctccccagtcgcccctgccaggcttttcaaggcctttactgttgaagctccgaaagtttggcccacggctgcacctaatgcagtaaagagccttgaggttgaagctaatcctagctctggaagtatcgtaaaaatcaactttgttgaaggccttccattccaatatatgaagcaccagatcggaggacatgatgaaagtaatttttcatacagttacgatttaatcgaaggtgggcctttgggggataagcttgaaaaaattagctatgagaacaggtttgaggcagctgcaggtggagggagtatttgcaagagctcaatgaaattctacactataggcgataatg

SEQ ID NO: 233937 - DNA, 411 bp, Gossypium hirsutum
atttgctctgaagatcatgttggctatttttcacaaggcatttgctaatccaccagaggagctgaatagtccagcttctcataaatctaccaagaagcctaaacagcctgaagaaaccctaaatgatttcctatctcatcaccctcacaacactttctccatgagctttggcaacgctgctgttttggcttatgtccgccatgaacgtgctgcttcagttcatcagaggttgttttgtgggtttgatgacatatactgcctcttcttagggagcttgaacaatctatttatgctgaatagacaatatggtctttccaaagggagcaatgaggcgatgtttgtgattgaagcatataggacgctgagggataggggtccataccctgctgatcaggttgttaaggatcttga

SEQ ID NO: 233938 - DNA, 377 bp, Gossypium hirsutum
ggtaactctcgatttcacgttttggttaatgggttagtagctttaaccaattttagcggtggggattttgtaaatcctaaagttatagaatatttgctttacgttaattcagaaaaggttgaaattcgtttcgttccagctaaaaaatcgaattttgctttcgttaatgcaatcgaagtgatatctgcaccaaaagatttggtactagaaactgcacagtatgttaatggtgataaaattgaggaatttcagggtttaaataaacaagcatttgaaactatgtatagggtaactgtcggaggtcctaaagttactccgttcaatgattctttgtggagaacttggatccctgatgatgagtatttgaaatcgagtga

SEQ ID NO: 233939 - DNA, 379 bp, Gossypium hirsutum
attgtttttgtttttaaaatataaacttacgacatctacaaatggtgacctcagtgctacctagagtagaaagcttggcaagcagtgggattcaatcaatcccgaaagaatatatcaggcctcaagaagagcttacaagcataggtaacgtgtttgaagaagagaaaaaagaggaagggcctcaggttccgaccatcgatttgacagaaatcgagtcggaggacaaagaggtccgggaaagatgtcagcaggagctgaaaaaggctgccatggaatggggtgtgatgcaccttgttaaccatggcatctccgaggagctcatggatcgtgttaggaaagttgggcagaaattctttgaactccctgtggaggagaaaga

SEQ ID NO: 233940 - DNA, 408 bp, Gossypium hirsutum
attaaaacagggaaggaaaagcagcgtaatgggtgaagaagtgaaggtttttggatactgggcaagcccttacagctacagggcagagcttgctttgaagttgaaaggtgtttcttatgagtacataaatgaggatatctttggcaacaagagcgatttgcttttgaaatacaatccggttcataagaaagtcccggttcttcttcacaacgggaaaccaattgtagagtctcttgttatacttgaatacattgaggaaacttggaagcataatccctatttgccacaagatccttatgacaaagctaccgctcgattctggatcaagttcatcgacgaaaagtgctttcctaccctttggctagctgcatggagcgccgagaatgagcgagaaaaagtgacgaatga

SEQ ID NO: 233941 - DNA, 414 bp, Gossypium hirsutum
ggacttcatagctactatcctgtttctagcggttgtgatctcctccaccaaaggtgtggacccttgcgggcctaagccagatgactagcaccttttggtcatcccaatctatggcaaatgttcaccattcaacccacccaaacctgactcatcgttcaacacagtcatgaacatggcatcaaaagacccagcaagggtcaagtacttgtcgagccttgtagcccaaaggaccactgcagttcccattgcttcaggccaacaagggctaaacattggcaactatatcgcccgggtaaagattggcactccgggtcagctcatgttcatggtattggacactagcaatgatgtggcttgggtcccatgctccggctgcaacgggtgctcagccaccactttctcacccaacacttt

SEQ ID NO: 233942 - DNA, 411 bp, Gossypium hirsutum
  unsure (1)..(411): unsure at all n locations
cttttcttctcttgtgacactgctaatattttttattgtcgtctccggcgttcgaagatcataaaaaaccggagtcgtttcaaatggctacgagaacggatctagatgggaggccaataaagccgatgacgatatgcatgatcggtgccggaggcttcatcggctcccacctttgcgagaaattgatgtcggagacgccgcacaaggtgctcgccttggacgtttacaatgacaagatcaagcacctcctcgagcctgactctctcccttgggctggccgtattcagttccaccgacttaacatcaagcacgattctaggctcgaaggcctcatcaagatggcagatctcgtgataaatcttgctgccatctgtactcccgcagattataatacgcgtncactagacacga

SEQ ID NO: 233943 - DNA, 404 bp, Gossypium hirsutum
ctaagatatcactgcaaggaaaaaaaaaaaaaaaccagacatggcttccaacactgttgcatccgctgctcttcttcttaccttgaacttgttgttcttcactttggttagctctacctacgtgccttgcccaccaccaccaaagagccacaagcctacccacaagagcccaccctcggcacctaaacagccagccacttgccccaaagatacactgaaactaggtgtttgtgctgatttgttgggctcggtgcgcgttgttgttggaccgtcgaggaccaaatgctgctcactcatttcgggtttggctgatctcgatgctgctgtttgcctttgcactgctattaaagctaatgtgttgggggttaacctaaacgttcctgtttcattgtctttgctcctca

SEQ ID NO: 233944 - DNA, 420 bp, Gossypium hirsutum
cttggcctccgctgtttattcgcttcagctcatcacttcccatagtctctcctcctccctcaccaaatcaaaatgtctctggtggcgaacgaagactttcagcacattttgcgtgtgctgaacaccaacgttgatggaaagcagaagatcatgtttgctttgacctccatcaagggtattggaaggcgtttcgctaacattgtttgcaagaaggctgatgtcgacatgaacaagagggctggtgaattgactgcacaggagctggacaatctcatgaccattgttgcaaaccccaggcagtttaagatccctgactggtttttgaataggcagaaggattacaaggatgggaagtattcccaagttgtgtctaatgctctcgacatgaagttgagagatgacttggagcgattgaagaag

SEQ ID NO: 233945 - DNA, 389 bp, Gossypium hirsutum
gcggggttgtgtaaaagctgcgacaaagaaggcaaatggaggtacttggttctaggccaagcatgttgccacctaggcttaatggaggacgccatggttctcctccaaacaggcaaacgcctcgcttccgccgcgttccgccgtgagagcatttgttggtccgacgatagcttctccctccccaccgctattgccctttcagacatctcctctgctgccacaacaccttcttccacgcccccacgcaatcctacatctttctccgaatccgaaaacatttcccagcttctatcccacatcaagctcctcatccgccgtagaactgctgccattgcggccttagatgctggcctacactccgaagccatccgccatttctccaaaatagt

SEQ ID NO: 233946 - DNA, 380 bp, Gossypium hirsutum
  unsure (1)..(380): unsure at all n locations
gcggaaatgattgcaaaggtgggtttcaaaatgttccttggggtcactgcatctgtcatgaactgggatgctgatggcacttgttgcagcattgttttggaggataatccccttgtggactttgtagagcttcctgatacttgtcaaggcctctactatcgcaacattttaagtggtgtcaataggaggagccctagagatggggggcaatgaagaccggaagtcaacctggattcgtgatatgcttagaggagatgatgcatatgagttgcaggttaaacttttgaagcaagttccagaagagtatccttacaaggatgatgaataacatgccctacttacctctttaacggccttgcgcactngccaatgttctattt

SEQ ID NO: 233947 - DNA, 418 bp, Gossypium hirsutum
ggaagagctgtcctttttctctctctatattttctcatctccttttccaccgccgttgatctcgatccgtatccccgttttcaaaaaagctccaaaaagatggccaatgctgcatcgggaatggctgtgcatgatgattgcaagttgaagttccaagaacttaaggcaaaaagaacccaccgctttattgttttcaaaatcgaggagaagcagaagcaagttatcgtggagaagcttggtgagccaactgagagctatgaagattttactaaatgtcttcccgctgatgaatgtcgttatgctgtgtacgattttgattttctaacagccgagaacgtcccaaagagcagaatctttttcatcgcatggtctcccgatacatcaaggatcaggagcaaaatgatatatgctagctcca

SEQ ID NO: 233948 - DNA, 406 bp, Gossypium hirsutum
gcagaatcaagggattgtgggtggagaagaagcggtgacggatctaacttggaactccgttttctcttcttaccgctattcccgacctatctctaaccccctcaatttctctcaggtagatattccttgtgttcaagcgtcttcatggcttcaaagcggattttgaaagaacttaaggatttgcagaaggatccaccaacttcctgtagtgcaggtcctgtagcggaagacatgtttcattggcaagcaacaattatgggcccctccgatagcccttttgcaggaggtgtgtttttggttaatattcattttcctccggattatccattcaagcctcctaaggttgcatttaggaccaaggtcttccatccaaacatcaacagcaatgggagcatttgtcttgata

SEQ ID NO: 233949 - DNA, 409 bp, Gossypium hirsutum
cttctctcttgcttttcgtcttgcgttcttttgatatggcaggaaccggggtggttgcagtttatggaaacggggctataaccgagactcacaaatcccctttctcggtgaaagtggggctagcccaaatgctccgaggcggagttataatggacgtggtcactcccgatcaagctcgcatcgctgaagaagccggagcctgcgccgtcatggctctcgaacgagtccccgccgatatccgagcccaaggcggcgtggctcgaatgagtgacccacaactcatcaaagagattaagcaatccgttactatacctgtcatggcgaaggcccgtattggacatttcgttgagcccagatcctcgaagcccatggcatcgattatgttgatgagagcgaagttcttaccctg

SEQ ID NO: 233950 - DNA, 411 bp, Gossypium hirsutum
gcaaatgcaaagatatacaaatgtgaagatgagcgatgccctcgtcctatgcgctacaaggcatatggaagtggaaaggaggatagtcctctttgtgatgtgcccggctttgaaaactgtaggatgaagttgctgagacatgtatcttttgtagattgcccaggtcatgatattctcatggctactatgcttaatggagcagcaatcatggatggtgcattacttcttatagctgccaatgaaagctgtccgcaacctcaaacttctgagcatctggctgctgttgaaattatgcgactccagcatattataattcttcaaaacaaggttgatcttattcaagagaatgtagccatcaatcagcatgaagcaattcagaaatttattcagggtacagttgctgatggtgca

SEQ ID NO: 233951 - DNA, 382 bp, Gossypium hirsutum
gaaaaaaatccctaatcaaaaaatggggaaattgtggctaatttgcattgcttcgatctcaatccttctcccatttctctgcaatgctttctctcccgaatcgccaacggatcgccgagtccttgttctcctcgacgacttcgccatcaagtcgtcacactccctctacttcaatgccctcaaatcacgtggcttcgacctggaattcaaactcgccgatgatccaaagatcgccttgcaacgctacggccagtatctttacgatgccttgatcctcttctgcccctccgtcgaacgatttggaggatctattgatgttgccgccattgtcaattttgttgattccggtcatgatttaattgttgcggcggatgttaatgct

SEQ ID NO: 233952 - DNA, 400 bp, Gossypium hirsutum
gtcttcttcattctcactctctctccactgaactcttgctaaacggtatcgttttagtcagtctttcatcaatggcgaaagaaccggttcgcgtcctcgttactggagctgcaggacaaatcgggtatgctcttgtacccatgattgctaggggagtcatgttgggtgctgaccagcccgtgatccttcacatgcttgatatcccacctgctgcggaggctttgaatggtgtcaaaatggagttggtggatgctgcttttcctcttctaaagggtgttgttgctacaactgatgttgttgaggcatgcactggagtcaatgttgctgtcatggttggtggtttcccaaggaaggaaggaatggagaggaaagatgtatgtcaaagaatgtgtctatttac

SEQ ID NO: 233953 - DNA, 327 bp, Gossypium hirsutum
ctgactttcaccaccaccgtcactagcggggccgtcacataatgtcgtcaacggaggctatcatcctacaactgcatgaaagatctgccgctaaatccggttactggaagctgaaatctgggatcttctgctctatctacatagaccgccgtctgagcgattcttaccgttgactactccaccaaatctcacactctctactttcctctctctgtgcgaaaacacactgtaacctcatatgcggtggcccatacactgtcctccctatagccacgctgcatctgtctcgacacgtccatgctcatgctcatgctccgcaaagaagtg

SEQ ID NO: 233954 - DNA, 415 bp, Gossypium hirsutum
gaagttcagatctgctgcttactccaactgcgctcgcaagccatcctgatatactcacaagcgtgccgtctgaccactagtagtggttaataaaactgttatttgctttgttagttagttttagattatttccccgaccaacttcttcctcttctctcttcgtggctggtttctttacattgcgttctcctgatttggcgactgtgtaattccgataaagtttgcagcccttggttgaatcacaatggcagtatctgcaattggatttgagggttatgaaaaaaggcttgaaatttccttttttgagcctggcatctttgctgatcctgaaggaaagggtcttcgggcacttaccaaagcccagttggatgagattctaggtccagctgaatgcaccattgtttcttcattatct

SEQ ID NO: 233955 - DNA, 386 bp, Gossypium hirsutum
atctaatacacccactgtaaaaagaagagagaaatctgatcacacggtggaagggggtaaccttgaaactgatagaacatccacaggatgggctgccagagatccttcaggagtatggtctccttacacttacacttttaagaacactggtcctgaggatgtattatttaatgttatgagctgaggaatctgccacactgatcttcatcaagccaaatatgatcttggcatgtcaaactacccaatggttcctgggcatgaagtggttgtcgaggtgttgaaagttggatcagatgtaagcaacatcagagtggctgatattgatggagtggcgcgaattgttggatgtcacaaaaactgtcgaccatgcgacttatacaatgaac

SEQ ID NO: 233956 - DNA, 346 bp, Gossypium hirsutum
gcaaaagaggggtcaaatggagggagaggtggaatcacatgcgcattagttcactgtcgttctcctggatcctcgtttagcttagcttgttctatttcttgttaatcatcatcatcatataccttttttttcgtcatggctgacgataagcaggaaatctcggcccctgttgttgatgtcaacgatccagtcactggtcacgtcatttccaccacgattggaggcaaaaatggagagcctaaacagaccatcagttatatggcagagcgcgtagtcggcaccggatcttttgggattgttttccaagcaaaatgcttggaaacgggagagactgtggctataaaaa

SEQ ID NO: 233957 - DNA, 390 bp, Gossypium hirsutum
tgactgtcaccttgcaaaacccagattaccataacagatgcaaaatctgatcggtgaacataagaaaatggagaccatgggaaaacttctaatcctgcttacagcttttttatgcctctacctcttcgttgctttgctcaatgttttctacaagtattggtggatacctcaacgggtacagttcatcatgaattcacaaggaatcagaggacctccttatgaatttatccatggaaacaacaaagaagctgcccaaatgctcatggaagcatctaccaaacctatgggcttgacacacgatatatttcccagagtcgtgcctcatgtttactcctggatcaacaaatacgggagcacttttcttagttggaatggaattcgagctcaact

SEQ ID NO: 233958 - DNA, 412 bp, Gossypium hirsutum
caatttcgaggtcccctgttactaaatttcaaaaaatggtgtcccaaaccattgatgtgttgaagaacgagctgcctcttgagcaggagcttgttgttttgcctgaagatgttgtcactggccttgttcttgtcgatatcatcaatggcttctgcactgtcggtgctggaaacctggccccaagagaacccaacagacaaatatcaagaacgatcagcgaatcagtgaggctggcaagacttttctgcgacaagaaattgcctgttatggcgtttcttgattctcatcatcctgacaagcccgaggatccttatcctcctcactgcattcaaggcaccgatgaatctaatttggttccagctttgcaatggatacaaaacgaaacaaacgtgacaatcaggcggaaagattg

SEQ ID NO: 233959 - DNA, 411 bp, Gossypium hirsutum
cagggctaagaaagagaaaaaaaaatggctttgcgaaaggcgaaggacgtcgtatctaccaatcctgtcgtcgctttcagcaagtcctactgtccgctctgtgtggatgtgaagcaattgcttcaacaacttggagcttctttcaaggccattgagctcgacagagaaagtgatggatctgatattcaagcagctctggctgagtggaccggccagcggactgtgccaaacgttttcattggtgggaaacacattggtggctgtgattctacaatggccttgcacaaggaaggtaagctggttcctctgctaactgaagctggagctattacaaaatcatctgtttagaatagagttaagctgcttgtctcccctaaaattaataaacgaataccaagttcgatttcatgt

SEQ ID NO: 233960 - DNA, 383 bp, Gossypium hirsutum
tgactgtcaccttacaaaaccttgattccgtctctatacttacttggtgtggtcaatggctacagacaagaccattaagatcgggattaacggatttggaagaatcggacgctcggtcgccagagttgctcttcagaggaacgatgtttaacctgtcggcgctaacgatcccttcatttgcaccgattacatgacatacatgttcaaatacgacagcgttcacggtctatggaagcaccatgatcttaaggtcaaagactctaaaaccctcctcttcggcgaaaaacccgtcactgttttcggaatcaggaaccctgaggagattccatgggctgaagccggagctgagttccttgttgtgtcaactggagtgttcactgaca

SEQ ID NO: 233961 - DNA, 416 bp, Gossypium hirsutum
ctttgattcgattctcaatggagaaaatcagaagagcttcgcatgcaggatcttggtacactgataacccgaacaagttatcggaagagcttgatggatggatcagggcggctggcttgccaaaatcttctgatgtaagaggtgtaattgctccgcatgccggctattcatattcaggtcgtgctgctgcatatgcttttggaaacattgacccgacaaacatcactcgggtattccttcttggtccttctcaccattattacactccaaaatgctctctctcgacagctacagtttacaagacaccaataggggacctacccattgatttggaagtcattgaagagctgaaagctacaggaaaatttgaattgatgaatctccgggttgatgaagctgagcacagcatggaaatg

SEQ ID NO: 233962 - DNA, 420 bp, Gossypium hirsutum
ccaatttcttctgaaaccctaatcctaaattgataccccaacttcggtgttccaatggccactgaggaaccaactgtcgccgtggaatctgcgcctgagccggcggaagagaaccccgctgaggctacagccaatcccaaatctggcaaagcaaagaaagctaaagagcccaaagccaagaaggctgcagctcctaggaagccacgagcttctcctgctcatcctccttacgaagagatggtcaaagatgcaatcgttactttgaaggagaagactggatcaagtcagtatgctatcactaaattcattgaagagaaacagaagaatcttcctggaaattttaagaagcttctgcttttccatttgaagaagcttgtggctgctgggaaagttgtcaaggttaagaattcgtataaactt

SEQ ID NO: 233963 - DNA, 407 bp, Gossypium hirsutum
gctgctcacattgcagccacaacggccacaactctcggacatgtcccaaccgaggggtcaaactcttcggagtccgcttgactgacgggtcgattcggaagagcgccagtatgggcaacttaagccaatattccgggtcgaattctggcgcgcataacgggaatgggtcgggttcgcccggtgagggtccggatcacaccgatggttatgcttctgaggatttcgtccccgggtcgtcttcgagtcgtgaaaggaaaaaaggtgttccttggacagaagaggagcataggatgtttctccttggtctgcagaagcttgggaaaggtgattggcgtggaatctcacgcaattatgttatatcaaggactcctactcaagtggctagccatgctcagaaatatttcatc

SEQ ID NO: 233964 - DNA, 418 bp, Gossypium hirsutum
cttttgtcccccgtagatatcagagggaaaacacaaaaactagggttttagagagaacgggagccaaagtgagagagaagaggcagatatttttaggagtagggttttgttatattgcttctctagggtttagaaaatggtggccgacaaaggaaagaagctgaaagtagcagagaaagtagaggaagagaaccatgaacaaatagatggagacctcgtcatttccattgagaagcttcaagagatccaagatgagcttgaaaagatcaatgaagaggcaagtgagaaagtcttggaagtggagcagaaatacaatgaggtttgcaagccggtctatgataagcggaatgaaatcatcaattcaattcctgatttctggttaacagctttcttgagccatcctgctcttggtgatctt

SEQ ID NO: 233965 - DNA, 464 bp, Gossypium hirsutum
cgcctgcaccaccgctcctgtaattggccgggatcgacccacgcgttcgcttgcttatcatacatcaatccgatcatccgccttggaggcaactaattccatgggtatttgggggatttttcacgagcattgactggttgtatatgatagcgaatgagcttgttgctctgttggtagcatttggtgtgatatttggaattaatccttccattcttggagtaactattctggcttggggcaattcaatgggtgatttggtgtcaaatgttgcactggcaatgaatggtggtgatagtgtgcagattgcaatgtctggctgctatgcgggtcctatgttcaacacacttgttggtctgggcatctcattgctgcttggagcttcatcaaagagtccttcctcatacttagttactcaagatagcaccttggtttacaccatgggctttctcatgtctggactaatc

SEQ ID NO: 233966 - DNA, 409 bp, Gossypium hirsutum
ctttacaaaatatctgctcctcttagtttccctttttgtcccttgtttatttgatactcccccctcatggctgccgctgatgtcgagttccggtgcttcgtcggagggctcgcatgggccaccgacgaccgggcccttgaagaagccttcagtgcgtttggtgaaatcgtcgaatcgaagatcattaatgatcgtgagactggaagatcccgaggctttggattcgttactttccgtgacgagaaagctatgagggacgcgatcgaaggaatgaacggtcaaaatcttgatggaaggaacataactgtcaacgaagcccaatcgcgcataagtggaggcggtggcggaggatttggaggaggaaacggtggttacagccgcggtggaggcggcggcggatatggtggtc

SEQ ID NO: 233967 - DNA, 413 bp, Gossypium hirsutum
cactgttttccttcaaaaccctaatagctgtcctcgcctcctgaacgtgttcgaaaatggccggttctgagggattgactctacgtggcaccatgcgtgcccacaccgacatggtgacagccattgctactcccatcgataactccgacatgatcgtcacttcctcccgcgacaaatccatcatcctttggcacttaaccaaggacgaaaagacctacggtgtccctcgtcgtcgtctcaccggtcactctcacttcgtccaagacgttgtcctctcttccgattctcagttcgctctctctggttcctgggatggtgagcttcgtctctgggacttatctgccggtatctcatctcgccgttatgtcggccacaccaaagatgttctctccgttgccttttcaattgacaac

SEQ ID NO: 233968 - DNA, 405 bp, Gossypium hirsutum
actgtgtactgttacgctatcacggcctaaggccattaaagctgagatctcttgttttctccgcttcccaaattccttctgagtcaaaccacaacgaaggaagaaaacaaagatgacaaccgtcaggagcctcacttccccatctattgttaaagctccaaccccaaaccgatttacaagtcccatcgtcagggccccaacatctcttggatctgttaaaaccatctctagatctttcggcttgaaatgttcctcaaatcaacgaacatcaatggcaatgtacaagattaagctcgtaggaccaaacggtgaagagaatgagtttgaagtccccgataaccagtacatcttagaggcagctgaggcagcaggagtagagctgccttattgttgcagagctggagc

SEQ ID NO: 233969 - DNA, 419 bp, Gossypium hirsutum
tcgctggcttattttcagcaattacttccttcgttttaggctcaacaatagccagtgatgaatttgatcctgtgcttgacatctcaggtcaagagctccgaacaggcattgactactacattttgccggtaatccgcggtagaggtggtggcctcactctagccagcactggcaacgagacctgcccacttgatgttgttcaagagcagcaggaggtgtcaaacggtctcccattaacattttcacctgtgaatgtcactcaaggcgttgtacgtgtatccactgatctaaacatcaagttctctgctgcttcaatttgtgtccagaccactctctggacactgcacttcgatgaatcggtacaaaagtatatagtaacaaccgggggagttgaaggtaacccaaggcgtgaaactctg

SEQ ID NO: 233970 - DNA, 416 bp, Gossypium hirsutum
cttcacttcattaggaacatcaataccttgatcctttgaaccaccaaatggctcttcatctcttccacctcctcctcttcctccttctcagcccattatcttatgtctctagcgttggcattaactatggcactctaggaaacaacctgccttctccaaagaaagttgctcagctcctccaatctacgctcattgataaagttaaaatctatgacaccaaccctgatatccttgaagccttttccaacaccggaattgaccttattgttgccgttgaaaactaccacgtcgccaacattagcaaggacgcagccgcagccgacgactggtttgccactcgtgtgcagcccttcatccccgccacttccatcgtagccgtttgtgtaggcaacgaatatttgacctccgatgataat

SEQ ID NO: 233971 - DNA, 343 bp, Gossypium hirsutum
gcccttctttctcgctccaaaggtaagcaatgaattaggattagaagcagctgtggaagctactgccaattttctgaacaaagctgtgaagcctgtccttgtgggtggacctaaattaagggttgcaaatgcaaaagatgcctttgtggagcttgcagatgcctgtgggtatcccattgccgtaatgccttcgggcaaaggattggtacctgaacaccatccacactttattggaacatactggggtgcggttagtactagcttttgtggggaaatagcggaatctgctgatgcctatgtttttattggcccaatctaaaatgattatcgctgtgtaggctac

SEQ ID NO: 233972 - DNA, 420 bp, Gossypium hirsutum
ttcagtgtctcactctctccgtgcttcactccagtttctcctttccctcttcgaagaaaaaatgcgtgagatccttcatattcaaggtggccaatgcggcaaccaaatcggagccaagttctgggaagttgtttgtgctgagcatggcatagatgcaactgggcgttaccaaggagacttggatcttcaacttgagcgaatcaatgtctactacaatgaagccagttgtggtagattcgttcctcgtgctgttctcatggatcttgaacctggaaccatggacagcatcagatctggccctgtcggtcagatttttagaccagataacttcgtttttggtcaatctggtgctggtaacaactgggctaagggccattacacagaaggtgctgagttaatcgattccgtacttgatgttgt

SEQ ID NO: 233973 - DNA, 409 bp, Gossypium hirsutum
gtaacaatggcggtctcacttcaagctgcagctaccctgatgcaaccaatcaaggttgctgcaccatcaaggaccaatgtgccgctcaggtcctcccagagcgtttctaaggccttcggtttggagcctgttggtgctaggcttacctgctctttgcaaactgacctcaaggacttggctctgaagtgtgttgatgctaccaagctcgctggtttcgctcttgctacatctgctcttgttgtctcgggagcaagcgctgaaggagtttcaaagcggctaacctacgctgaaatccaaagcaagacatacatggaagtcaaaggaacaggaactgctaaccagtgcccaaccatcgatggtggtgtcgactcttttgccttcaagcctggcaaatactacgccaagaagt

SEQ ID NO: 233974 - DNA, 406 bp, Gossypium hirsutum
ggaaaacaagaaaagcagagccgcatcactttttgctagctaagctactgtgggagttattgttcttcagaacagcttctgcagtagctaataataacgttatatattatataaattttatacatcctttttaccctacgactccatatataagcaagtaaaaataaatatggctcgctctgtttcttcctttaagttccttggtgcttctgtttttgatgctctttatgtctccatatcaaggtgcaccgccggcggcagtgacggctagctttggtaggcctggagcgatggggaaagtggaacgaagatatgcgatgaaagagtcgtcgtcgtcggagacaagggcttattcttcagcttgggcgcctgaccctgttacggagtattaccggccggagaactg

SEQ ID NO: 233975 - DNA, 417 bp, Gossypium hirsutum
  unsure (1)..(417): unsure at all n locations
ggaaaacaagaaaagcagagccgcatcactttttgctagctaagctactgtgggagttattgttcttcagaacagcttctgcagtagctaataataacgttatatattatataaattttatacatcctttttaccctacgactccatatataagcaagtaaaaataaatatggctcgctctgtttcttcctttaagttccttggtgcttctgtttttgatgctctttatgtctccatatcaaggagaggttactcaggtgcaccgccggcggcagtgacggctagctttggtaggcctggagcgatggggaaagtggaacgaagatatgcgatgaaagagtcgtcgtcgtcggagacaagggcttattcttcagcttgggcgcctgaccctgttacggngtattaccggccggagaa

SEQ ID NO: 233976 - DNA, 370 bp, Gossypium hirsutum
aaaaaaagatatggaaaccgttactttgacaggattacttacaaggctgcggccgagttccctaccaggcgagctttatcagtttccggcaagttcgatttgacgcatgctcaattacaacacatcatcgatcatgctgcttttcttctcatcggcttcggcattcattccggcgatgtggggggtcttactttcccaaacaccgaggagcttgttattatgttcttggctgtaattagatgccgtgcaaacgccgcgccgttaaactcagcttatactgccgaggagtttgagttttacctttctgattcagaatccaagctgttattaattccaggcgaaggcattaaagccgctgaagccgccgttt

SEQ ID NO: 233977 - DNA, 413 bp, Gossypium hirsutum
gccgccgcctgcgtctctctcttcatctctctgaacctaaaagtctttagcttttcgcttcgagagagaccatgttggtttaccaggatctcatctccggtgacgagcttctttctgactcattcccctacaaggaaatcgagaatgggatgctgtgggaagttgagggaaagtgggttgtgcaaggagctattgatgttgacattggtgccaatccttcagccgaagatgctgatgaggatgaaggtgttgatgaccaatctgtgaaggttgttgacattgttgacactttcaggcttcaggagcaaccccctttcgacaagaagcagtttgtcgtgttcatgaagaagttcatcaagaacttgacaccgaaactggatgcggaaaagcaagagtccttcaagaaaaacatt

SEQ ID NO: 233978 - DNA, 416 bp, Gossypium hirsutum
gaaatttaaaaaagagagagagaatgaaggttgttgctgcatatttgttggctgttttggggggcaacacttccccttcagctgatgatcttaaggccattcttggctctgtcggagctgaagctgaagatgaaaggattcaacttcttttatctgcggtcaagggcaaagatataacagagcttattgcatccgggagggaaaagcttgcttccgttccatctggtggtggtggtgttgctgttgcagctgctgctcctggtgctggtgccgctgctgctccagctgcagccgaggctaaaaaagaagagaaagttgaggagaaagaagaatccgatgatgatatgggattcagtctctttgattaaagagttggttttttgcagaaattctcttctttttttttcaaatttaag

SEQ ID NO: 233979 - DNA, 386 bp, Gossypium hirsutum
cgtaacttgtggggaagaatcttgctatcccttgcttttgtgtcgcaaaaaattctcaagcttgtttttaacgttcgctgaatactatcgctcatttcttccctcagaaccctaatcgataactgaagccatttaatcatgtttgggcgtgttccaaaaaaatctgataacactaagttttacgaagtacttggggttcccaaaagtgcaagtcaggatgaattaaagaaggcttataagaaagctgcaattaagaatcatccggataaaggtggagaccccgagaagtttaaggaactggctcatgcttatgaagtacttagtgccccagagaagagagaaatttatgatcaatatggtgaagatgctcttaaagagggaatggg

SEQ ID NO: 233980 - DNA, 428 bp, Gossypium hirsutum
gaaacttgaggggaagaatcttgctatcccttgcttttctctcgcaaaaaattctcaaacttgtttttaacgttcgctgaatactatcgctcatttcttccctcagaaccctaatcgataactgaagccatttaatcatgtttgggcgtgttccaaaaaaatctgataacactaagttttacgaagtacttggggttcccaaaagtgcaagtcaggatgaattaaagaaggcttataagaaagctgcaattaagaatcatccggataaaggtggagaccccgagaagtttaaggaactggctcatgcttatgaagtacttagtgacccagagaagagagaaatatatgatcaatatggtgaagatgctcttaaagagggaatgggaggaggcggttcttctcacaacccatttgacatatttgagtca

SEQ ID NO: 233981 - DNA, 387 bp, Gossypium hirsutum
aagaaagtaagccactaaggttttgagagaagatcaaaatggcttctaaaagatcagcttccatggtcctccttttggcactcaacattctctttttttccctagtcagtgcttgtggctcttgctcttcacccacccctaaaccaaggccaaacccaaaccccaacacccccactcctactccatctgcacgaggcaggtgccctagggatgccctcaaattaggtgtatgtgccaatgtgcttaacctagtcaatgtcaccattggttcacccccagtgatgccatgctgttcccttctcaatggccttgtcgacctcgaagccgctgcatgcctttgcaccgctatcagagctaacattttaggcatcaaccttaacatcccag

SEQ ID NO: 233982 - DNA, 408 bp, Gossypium hirsutum
  unsure (1)..(408): unsure at all n locations
cggacgcgtgggtgtcgagaaaagaaaaaaagaatatggaaaccgtaactttgacaggattacttcacaaggctgcggccgagttccctaccaggcgagctttatcagtttccggcaagttcgatttgacgcatgctcaattacaacacatcatcgatcatgctgcttctctcctcatcgcctccggcatccatcccggcgatgtcgtcgctcttactttcccaaacaccgtggagcttgttattatgttcttggctgtaattcgttgccgtgcaaccgccgcgccgttaaactcagcttatactgccgaggagtttgagttttacctttctgattcagaatccaagctgttattaatcccagccgaaggcatcaagccggctgaagccgncgctttcaagttgaaca

SEQ ID NO: 233983 - DNA, 399 bp, Gossypium hirsutum
aaagaacccagtcttctgatctctgccccaaagcaaaaaagttctcatcttttacaatcacagctactgcttatttattttcatggctcaaggagattctaacttccagcaagacatggctaaagaggaagaagaacagaggctgaaatacttggaattcgtgcaagtagccgccgttcacgccgctttgtgcttcaccaacctttacctttacgctaaggaaagatcggggccgttaaaacctagcgtcgagaccgttgagggaacggttaagtgcgtggttggaccggtttatgataaataccatgatgcccctgctgaattccttaaatccgttgattccaaggtgggtgaatcagcgaccaagcttgatcgtcgagtccctccagtcatcaaaca

SEQ ID NO: 233984 - DNA, 328 bp, Gossypium hirsutum
  unsure (1)..(328): unsure at all n locations
ggaaaatcatgggtgccaaagtactttacttctttgctttgctttccttttcagctgtctcggcatttgcacaggatgaggaagaccaaggtcttgttatgaacttctacaaggattcttgtcctcaggctgaagacattatcaaggagcaagttaagctactgtacaagcgacacaaaaacactgctttttcttggctgagaaacattttccatgactgtgctgtccagtcatgtgatgcttcactgctgctggactccacaagaaggagctngtctgagaaggagacagacaggagctttggcctaaggaatttcaggtacattga

SEQ ID NO: 233985 - DNA, 356 bp, Gossypium hirsutum
ataaaaatggcgatggcgagtgttcgatctggtctcctacgagcagcccttcgcggcggctctcgtcctactgctcctcccacgcgtggcttcgcttcctcttctcatcacgatgatgcttatgaaaccgcaaaatgggaaaagataacatatttaggtgttgctacctgcactggtttagcgatttataacctatcaaaaggtcatccccaccatgaagaggctcctgcatacccatatttgcacattcgcaacaaggggttcccatggggtccggatggtctgtttgagagaaaggagcatcactagggatggccggatggattcatatttttccgagttcggcgcatttttat

SEQ ID NO: 233986 - DNA, 292 bp, Gossypium hirsutum
aatacgtacacaagaaacaatcaggtggacaagggcagtttgctgatattactgttcgtttcgagccgatggatgcaggtagcggatacgagttcaagagtgaaatcaaaggtggagccgtgccgaaagaatatattcctggagtgatgaaaggactggaggagtgtatgtgtaatggtgtacttgcaggtattcctgttgttgatgtacgtgccgtgctagcagatggttcttaccatgatggcgattctagtgtcttggcatttcaactggcaaacaggggagccttact

SEQ ID NO: 233987 - DNA, 290 bp, Gossypium hirsutum
gaaacttgaggggaagaatcttgctatcccttgcttttctttcgcaaaaatatctgaaacttgtttttaacggtcgctggatactgtcgctcatttcttccctcaaaaccctaatcgataactgaagagcatttaatcatgtttgggcgtgttcaaaaagagtctgacaacgccaagttttacggagtgcttgggggtcccaaaagttcaagtgagggataatttaaggacgcttataaaaaagctgcgcttcagaataactccggttaagggggggaccccccgaagtt

SEQ ID NO: 233988 - DNA, 397 bp, Gossypium hirsutum
tgccgctgtatgtgtttttattagtttatacctcatggcttcttggaactcagtttttctttcatggcttaagaatttcagtaatattttcaagtacaaaatggatgaagtccagcttggttcacatactataaggtcccatggtctcaccattgcaaggacacacatgcatgattggcttattcttgtattgcttgtggtgatatgggttgtcatccttatcattcatccattttatcgctttgttgggaaggatatgatggatgatctaagataccccttacaaagtaatacagttcctgtttgggctgtgccgatgtatgccgttctgttgcccatgctgatttttatctttgtgtccatttcgagaagggatgtttatgatcttcattatgct

SEQ ID NO: 233989 - DNA, 389 bp, Gossypium hirsutum
aaagaaaggaagagaggtccgacaatggggagactcgtttcagtttggcttgcttttgctgtcatcgcatgctctctaacggcgatctcagctgaagagagcggcgaatcgaaagagtttgtgttgactttggatcaatctaatttcactgacaccgttagtaagcacgatttcatagtcgtcgaattttacgctccttggtgcggacactgtaagaatctttctccagagtatgagaaagcagcatctatgttgagtaaacatgatcctccgatccttctagctaaagttgatgccaatgaggaatcaaacaaagatttagcaaatgaatatgaagtcaggggtttcccgactcttaaaattttgagaaatggaggaaagaatgttca

SEQ ID NO: 233990 - DNA, 412 bp, Gossypium hirsutum
cgccggtggaataactgctggggcgactgttattctcaacattcttgttgctgggccaagtggggggggttcaatgaatccggggagggcactcgggccggctgtagcagcagggaattatagggcattgtggatttacttgatagcgcccacactgggtgctgtgatcggttctgccacctacactttggtgaagctccgcgaagatgaggtcgacgcaccacggcaggtcaggagttttcgacgctaggtaatatggagcccacgaaattatgacatcgttgaaaatggaaggggcaaaaaaagtgtggttttcttcttctaatgtctctctatgaaatgaaaccatacacatcgctgttcgtttgtttgtttgattgtgtggggtaaagataagatagcttttgggaat

SEQ ID NO: 233991 - DNA, 413 bp, Gossypium hirsutum
gtttatcagagcaagaaaaagaagggaaaatggaagggaaagaagaagatgttagattgggagctaacaagttctcagaaaggcaacctattgggacagcagctcagtcccaagatgataaggattacactgagccacccccagcacccttgtttgagcctagtgagttgacttcatggtcgttttaccgagctggaatcgctgagttcgttgctactttcctattcttgtacatctcggtgttgactgtgatgggagtccttaaggacaaaaccaagtgtacaactgttgggattcaagggattgcttgggcttttggtggtatgatctttgctcttgtttactgcactgctggtatctcaggtggtcatataaatccggcggtgacatttgggctgttcttgggaaggaaa

SEQ ID NO: 233992 - DNA, 309 bp, Gossypium hirsutum
gattttaaaagaaaaagaaaaaagcaattcaattagcagagaaaatggcaaccgaaacctcagtggtttacgatagaaccaaagagttgaagcaattcgacgacacaaaagctggtgttaaaggactcgtcgacgccggaatacttaacatccccaagattttcgttcgaccatccgaggaccttgccgccgacgaactgaattccagtcagaaaaccattgaagtcccgatcatagatgtaagcaacatcggagacagtatccggcgaaaggagatcgtaaacgaagttaagattgcatcaggggaat

SEQ ID NO: 233993 - DNA, 415 bp, Gossypium hirsutum
gttttcattccccatttaactcacacccagtttcatagattttctatactaccccaacattactctctctagattcttacattttgagcttcagtgcagaatcaggaaatggttaaaaggtatggagtgttttgatgtgtggaagatatcatgttgcagtgcgtagctggtgtgaagcatttatttgcttctgtactgcaatgttgtgatattgatttgtacaaacaatctagaggtctcggtgatcccgaacttcttgcacgagagactgtgtttagtgtaagtgaaatagaagctctttacgagctgttcaagaagataagtagcgcggtgatagatgatgggctgattaacaaggaggagtttcaattggcattattcaaaacaaacaaaaaggagagcttgtttgcagatc

SEQ ID NO: 233994 - DNA, 407 bp, Gossypium hirsutum
tttgtcacgagttcgagaggttcagtacttatctgcctgatatcaaggttgctgtcgtggtatggaggtgtcaacatcaaagttcacaaagatctactgaaaaatgaatgcccccacattgttgttgggacacctggaaggatattggctcttactagagacaaggatctttctttgaagaatgtgaggcatttcattcttgatgaatgtgacaaaatgcttgaatcacttgacatgaggagagatgtgcaggagattttcaagatgacccctcatgataaacaagttatgatgttttctgcaacgctcagcaaagaaattcgcccggtttgcaagaaatttatgcatgatccaatggaaatttatgttgatgatgaggccaagttgacccttcatggtcttgtaca

SEQ ID NO: 233995 - DNA, 353 bp, Gossypium hirsutum
cggacgcgtgggcgaatctctcccagaagatgcagatctttgtgaaaacccttactggtaaaaccatcacccttgaggtggaaagctccgatactattgataatgtcaaggccaaaatccaagacaaagaaggcattcctccagaccaacagaggcttatttttgccggaaaacaactcgaggatggccgaactcttgccgactacaacatccaaaaggagtccaccctccacctagtccttcgtctaaggggtggcatgcagatatttgtgaaaacccttacgggcaagaccatcaccctcgaggtggaaagttctgatacgattgataatgtcaaggccaagatccaagac

SEQ ID NO: 233996 - DNA, 414 bp, Gossypium hirsutum
attcaatcatccatttttcttctttgcttctcttccttttaaacttagaaacaaaacatctagtagcattagaatcatgggtgttgtgagttatgagtttgaggtaacctccccaattgctccagccaggcttttcaaggcttttgttcttgaggctgccaagatttggcccacggctgcccctcatgcagtcaagagtgttgagctcgaaggtgatgctagtcctggaagtattgtaaagatcacctttgttgaaggccttccataccaatatatgaagcaccagattggaggacatgacgaaaacaatttttcatacagttacagtatgattgaaagtgggcctttaggggacaagcttgagaaaatcagctatgagaacccagttgtggcagctgcagacggaggaagcat

SEQ ID NO: 233997 - DNA, 363 bp, Gossypium hirsutum
caaaaagttaagagcaaaagaaagagcagagtaagctaagctttgatcatcaatggcggagaagagtttcaagtacgtgatccttggcggtggtgtagctgctggatatgcggcgagagagtttgccaagcagggagtgcatcctggtgagctagcaattatttccaaggaggcggtggctccatatgaacgacctgccctgagcaaagcatatctcttccctgagggagctgcaagacttcctggtttccatgtctgtgttggaagtggcggaaagagattgcttcctgagtggtacaaggaaaaaggaattgaattgatccttaacacaaaaatagtgaaagcagatcttcccgccaatac

SEQ ID NO: 233998 - DNA, 390 bp, Gossypium hirsutum
gagctacttaaccatttcccaaatctcctccctcctcttctttagcgtccttttcattgccgctcatgcagcgcgctttgaaatccgcaatgagtgctcctacaccgtctgggcagcagcctctcctggtggtggccgtcgcctagaccctcggcaaagttggaccatcgatgtgcctgctggcactgctatggctcgtatttggggtcgaaccaattgcaatttcgatgccagtggtaggggtcattgccaaaccggtgattgtggtggactccttcaatgcaaaggttggggtgtacctccaaacaccctggctgaatatgcacttaaccaatttggaaacatggatttctacgacattttcttagttgatgggtttaacatccccat

SEQ ID NO: 233999 - DNA, 210 bp, Gossypium hirsutum
ttcttcgaccatgaccgtcggtggcacaaccagctggtcggattgtgatgggagctctttgccgattgcactccccggactgctgagaacttccgtgctctctgcaccggcgagaaaggggtaggccgtaacggcaaacctctccactacaaaggctcatccttccaccgggtgatccccaatttcatgtgtcaaggaggcgactttacc

SEQ ID NO: 234000 - DNA, 357 bp, Gossypium hirsutum
gctctttgctctatccacttacaacgatggaccgcttctgtcttctcttcctcctactttcctccgtcgttgcttcggccgcctgtttccaacgttaatagcaacgggaatcctttaatcctcaagttgtttccgatggtggtgtcgaggaggacttcgatgaccatctccttaacgcggaacaccaattgacgctggtgaaattcaaatatgggaaaacctacacatcccaggaagagcacgagtaccgactgggagtcttcaaagctaacctgcgttgggccaagcgtgataaggtgctggaccccagtggcgtacatggcgtgacaaagattttcgatataactccatatgagt

SEQ ID NO: 234001 - DNA, 416 bp, Gossypium hirsutum
ctcggggaaagatcgattcatcagtcttcttctctgagtagaggttttggatttgtaagcatttacaatgtcttcgtcctatctcccagcaaccactgactcaattgctctggccttagaagccaaaacaccatctgaagccatctcaatcctttaccgtgtactagaaaatcctgcatctgctcccgatgctctacggattaaagagcaggccataacaaatctatctgatcttcttagacaagagaaccgagcagaggagctcagaagccttctgacccaactgaggcccttttttgcactaattccaaaggcaaaaactgctaaaattgtccgtggtataattgatgatgtagctaagataccaagaacatcagatctccagatttctctttgcaaagaagtggtgcagtgga

SEQ ID NO: 234002 - DNA, 405 bp, Gossypium hirsutum
aaaaaacatctttctgttcaattcaatcctcctttttctattcaaccataatgtcttgcttcattagcaaatacgccgatgagttggctaaaaacgctgcttacattggcacccctggaaagggtatccttgctgctgatgaatccaccggcaccatcggcaagcgtctttcaagcattaatgtagtaaatattgaagaaaacaggcgtgctctccgtgagctcctcttcactgctccaggagctcttcagtacctcagtggtgttattctcttcgaggaaaccctttatcaaaaaaccgcttcgggcaagcccttcgttgatgttttgaaagaaggtggtgtcctccctggcattaaggtcgacaagggtaccgttgagcttaacggaaccaaccgcgagactt

SEQ ID NO: 234003 - DNA, 394 bp, Gossypium hirsutum
gaaaatctgaagatatagaacctggagttggtaagtgggtttcatacctcaatcgtgagaagaagttggattcacttgttggtcgccgtcctactgctcctccagccccaaaaggactctatatatatgggaatgttggaagtgggaagacaatgcttatggatatgttttatagtgccactgagggaatagttaaacatagacaaaggttccattttcatgaggcaatgctcaaaataaatgaagctatgcataaattgtggaaaaatcaagttgaggaaaagtctattcagtcaagcatatcttcttggattatgaatctttcctttgatatcaaagccaaggagtggttagctgctgaagaaagatataaacaagaggttcagatgaaaaa

SEQ ID NO: 234004 - DNA, 295 bp, Gossypium hirsutum
cactctggatgagaagaaccctcgtcgtatttttgaaggtgaagcccttcttcgtaggatgaacagatatggacttttggatgagagccagaacaagctcgattatgtgttggctttgactgttgaaaacttccttgaacgtcgtttgcaaacgctcgtgttcaagactggtatggccaagtcaattcaccatgcacgtgtgttgatcaggcaacgacacataatggtcgggagacaggttgtgaacataccgtccttcatggtgagggtcgactcccaaaagcatattgatttc

SEQ ID NO: 234005 - DNA, 382 bp, Gossypium hirsutum
agaaaatcccagttcttgttcacaatgggaaccccatctctgaatcccttgtgattcttgaatatattgatgagacatggaagcaaaatcccatattgccccaagatcctctacacagagccagggaacggttctgggccaaatttagtgatgaaaagctactaccatcagtatggggtgctttcaccaaagaagggaaagaccgagaggaagctatggctgcaacgatggagaacctgaaattcgtagaagaagagctgaaaggaaagaaattcttcagtggagagaagataggcctggtagatcttgttttcggttggcttgctaacttgatctctatttttgaagaggtatctggcttcaacatagttggtgagggata

SEQ ID NO: 234006 - DNA, 417 bp, Gossypium hirsutum
agcgctttgtttgcgagctagccgacgcaccgtcccttcctcctccgcagtttgcttctaaaggtaaaaatcttgtggctgacgtggataaagggaagttgctgcaatgggcgttcaagattatgcagagtcaaagttgaagccatctgttgatttaactggatctgcaaaagaatgtagtaacgggccatctattggtgttatagacatcggggtcagtcaaagtgccttccttttccgagttgcattgccgggcatcaggagcgatcaaagtaagttaaaatgtgagatccaacgtgatggaaaggttctgatacacggtatagtaacgcaaggcagtgaagtgctgcagggattatcgagtgcgtgccagatgacagttgacaagttatgctctcctgggccattcaccatttc

SEQ ID NO: 234007 - DNA, 408 bp, Gossypium hirsutum
gaggaaatagaatgagaggagaggagaggaaagtggagttttaaaacttgagagaaaggggagagttaataatttccaaagacatggggaacagtttaagatgttgtttggctcgtgttcttccctgtggagctctagacttgatccgtatagtccatttgaatgggtacataaaaaagcttactgttcctatcacagctgctgagatccttaaagccaaccctaaccttgtcctaagcaaaccaacctttcaaggtgttttacgtaaaatcttgatcctctctcccaattcccagctcaaaagaggcaacatctactttttgattccatccacaccgtcactgtcgaagaagaaaaaaactgttgtgcaccacatgaaatcttccaccaaaatgcaaagcaacattt

SEQ ID NO: 234008 - DNA, 297 bp, Gossypium hirsutum
aaaaccacggattcttcttcttccatttaccttcgaaccccataaggttctctattgctacgtttttgaattgttagtgagcgaaaatgagagagtgcatttcagtccacatcggtcaggctggtattcaagtcggaaatgcctgctgggaactttactgccttgaacatggaatccagcctgatggccagatgccaagtgacaagactggcggtggacgagatgatgcctttaacacctgtttcacagaaactggcgcaggaaagcacatgccttgaccgtgctttgtggatcttg

SEQ ID NO: 234009 - DNA, 427 bp, Gossypium hirsutum
ggaattctgggttttgagtatggaattgttcaaggacctttgggaccggatattgctggtccggagctagttgctgctgttgcaaacgctggtggacttggccttcttagagctcctgattgggaatcaccagattatgtgaaagagttgataaggaagactcggaagttaaccgacaaaccctttggggttggtgttgttctggcatttcctcacaaagaaaatgtaaaggctatactagaggagaaggtagcagtgttgcaactgtattggggagaatgctcaaaggagcttgtaatagaagctcataatgctggggtcaaggttgttccccaagttgggagtttggaggaagcaaaaaatgcaattaatgtgggcgtagatgcaatcattgtccaaggccgtgaagcaggagggcatgtaatcg

SEQ ID NO: 234010 - DNA, 436 bp, Gossypium hirsutum
ctgagactggccaaatttgaccaattggggctctgaattttagttcctttttttttttccctcttttatacagtcatctgctccaattctgaatacccattgtctagtttgtttaaagatcagatctttgatacatcctcggattttttttgggtcttttttctctatcaaaacagagaagatcgaaagggagaaacatggctccacctacaaggatagggcttgctggtttggctgttatgggccaaaatcttgcacttaacattgctgagaaaggctttcccatttctgtttataacagaactacctctaaagtcgatgagactgttgaaagagctaaaaaggagggagatcttcctgtatatggtttccatgatcctgaatcttttgttcagtcaatccagaaacctagagtggtaatcatgcttgttaaggc

SEQ ID NO: 234011 - DNA, 436 bp, Gossypium hirsutum
gccgcagccagcaagcaacagtagcaacagcaggagcggaagaatgtctcacaggaaatttgagcacccaaggcatggttccctcggatttcttccaaggaagcgagcctctcgtcacagaggaaaagtgaaggcattcccaaaggatgaccctaccaaaccttgcaagctcactgcctttttggggtacaaggctggtatgacacacattgtcagagaggtcgaaaaacccggatctaagcttcacaagaaggagacatgtgaagctgttacaatcattgaaacccctcctatggtgattgttggggttgttggatatgtgaagacaccacgtggccttcgctccttgaacaccgtctgggctcagcatctgagtgaggaagtcaagcgccggttctacaagcactggtgcaagtccaagaagaaggcttttgtc

SEQ ID NO: 234012 - DNA, 428 bp, Gossypium hirsutum
tgcactgccggtatctctgggggacacatcaacccagcagtaacctttggacttttcttggctaggaaggtgtcgttggttcgagccatattttacatgggtgctcagtgtttgggagccatatgtgggtgtgggctggtcaaggccttccaaaactcgtactacaaccagtatggaggaggagccaacagcctggctgaaggatacagcactggaactggtttggcggctgaaatcatcggcacctttgtccttgtctacactgttttctctgcaactgatcccaagaggaatgcaagagactcccatatccctgtcttggcaccacttcccattgggtttgctgtgttcatggttcacttagccactattcccatcaccggaaccggtatcaacccggctcgtagtttgggggctgctgttatctt

SEQ ID NO: 234013 - DNA, 433 bp, Gossypium hirsutum
tttgctctggaattttgcagcaacttgattacggtatagtccaatgccaggctctggttttggcacccactagggagttggctcaacagatcgagaaggtgatgcgggcacttggtgattaccttggtgtgaaggtccacgcttgtgttggtgggactagtgttcgcgaggatcagcgaaatcttcaaagtggtgttcatgttgttgttggtacacctggtcgtgtcttcgatatgttgagaaggcaatcactccgtccagattatattaagatgtttgtcttggatgaggctgatgaaatgctctcccgtggttttaaggatcagatctatgacatcttccagctttttccgggcaagattcaggttggggtattttctgctacaatgccacccgaagccctagagatcactcggaagttcatgaacaaacc

SEQ ID NO: 234014 - DNA, 371 bp, Gossypium hirsutum
ttcgtcttcaagatctcagttctcaaatcgtagcgctcttttctatcaagccatggctctgatcttgcatgcaggaaaaacaaacaaaaatgcctttaaggcactcattgctgcagaatatagtggtgtgcaggtcaaaatggttgagaattttgagatgggtgtgtcaaataagactcctgagttcatcaagatgaaccctttggggaaggttcctgtgttggaaacacctgagggtccggtatttgagagcaatgccattgctcgttatggtgctcgctcaaaggttaacaaccctatatgtggttctacattgattgattatggtcatatcgagcaatggattgattttgcagccttggaattgatgc

SEQ ID NO: 234015 - DNA, 427 bp, Gossypium hirsutum
aaaaaacttgtccgtcagtgaaaaacagttgattttctttttttcttctttataaagaactagtaatcaaatcgaatggcgggaatttgctgtgaagttgttggagaaagtgaagcagcggctccggttgaaccaacttcaagagcttctcgtcgccggataatggagcttctaccgtttaaattagtggccgaagctgctgttcgaccgccgttagagaacggccggaaacgtcagaagctcgatctcgttcgcccgacttctcgtgattgtgataacgctgttcaaaactcggatactgataagcttgagaaagatcaagaacttaatggaagtctaaagtttaatggagcagtaaaatcagaagccgtagaagaagaaaaggaatcgccgaagttcggcatgacatccgtttgcggatggcgac

SEQ ID NO: 234016 - DNA, 439 bp, Gossypium hirsutum
cagatttgcaggttgttttctgggaattttaggggaaacccaatgtcgaaacaaacatacagggtgtgcttttgcttcaggaggaggtttagggttgcagtgtcagaggcaccagaggagatcaagcgggtgtttgagcagtactctgagaatgggatgatgtccattgatgcactccacaggttcttagttgaattccagaaagaagataaggctaccagagaagatgctcagaaaattgttgatagtgttaagcattttcatagaaagggtctaaatcttgaaggcttttttaagtatctctttgctgatatcaatcctcctctggcttctcttggggtccaccatgatatgaatgctcctttgtcacattatttcatacataccggtcacaattcctatcttactgggaatcaactcagtagtgactgcagcgatg

SEQ ID NO: 234017 - DNA, 411 bp, Gossypium hirsutum
  unsure (1)..(411): unsure at all n locations
gcacaacttgggcctgagttggcttctactcttgtaattgtgatttcaaagagtggaggtacccctgaaacaagaaatggtctattggaagtacagaaagccttccgtgaagctggtctggattttgcaaaacagggtgttgctataacacaagaaaattctttgttggacaacactgcaaggattgagggttgggtagccaggttccctatgtttgattgggttggtggcaggacctctgaaatgtctgcagttggtttgcttcctgcagcacttcagggagttgacataagagaaatgcttattggtgcatccatgatggatgaggccactatgagcacagtcctgaggaagaatcctgcagcattgcttgctttattgttgtactgngcaactgatgggattggatct

SEQ ID NO: 234018 - DNA, 438 bp, Gossypium hirsutum
ctttttcgttttttaatttgctttctgtaatggctaaatcttatttacctgcaaactttgggtttatggcttcaagaatgctgctttttgggctgtttatggtatccctatataccacaagtgctcaaataggtgtttgctatggacagctcggcaacaacttaccatcaaggcccgaagttatatccatcttcaaccagagaaacattagaagaatgcgactctacgcgccagaccaacctagtctccaagctctcagaggaaccaacattgagctgatgctcggcgttccgaattccgatcttcaacgtatcgcggctagccaagccaatgcaaacatctgggtccagaacaatgttagaaactttggcaacgttaagttccgctacattgctgttggaaacgtagtccaaccttcgatccggcggctcaatttct

SEQ ID NO: 234019 - DNA, 366 bp, Gossypium hirsutum
ttaaaatcccagaattacttaaacaacaatggctacctatgaaggtaaagttttcactgaagaacaagaagctttggtggtcaagtcatggactgtaatgaagaagaatgcagctgaattgggtcttaaattcttcttgaagatatttgagattgcaccatcagccaagaaactattctcattcttgagagactcaaatgttccattggagcaaaacacaaagctgaagccccatgccatgtctgtctttgtcatgacatgtgaatctgcagttcaactgcgtaaagcatgcaaagttacagtgagggattcaaatttgaagattttaggagctacccattttaagtatgtgggagttgatgaaca

SEQ ID NO: 234020 - DNA, 436 bp, Gossypium hirsutum
ttcatattcaaggtggccaatgcggcaaccaaatcggagccaagttctgggaagttgtttgtgctgagcatggcatagatgcaactgggcgttaccaaggagacttggatcttcaacttgagcgaatcaatgtctactacaatgaagccagttgtggtagattcgttcctcgtgctgttctcatggatcttgaacctggaaccatggacagcatcagatctggccccgtcggtcagatttttagaccagataacttcgtttttggtcagtctggtgctggtaacaactgggctaagggccattacactgaaggtgctgagttaatcgactccgtacttgatgttgttcgtaaagaggctgaaaactgcgattgccttcaagggtttcaggtttgtcattccctgggaggaggaactgtatctggaatgggaacact

SEQ ID NO: 234021 - DNA, 358 bp, Gossypium hirsutum
gtataccaaatctgaagcactctgaattatcgaagctgcacctcacatgggatctagtgcatggttagtgacctcggttcgagtgtggagatcaggaaaatcatggatgccaaagttctcttcttttttgctttgctttccttttaaggtgtctggtcttttgcacactgtgtactataccaaagccttgctatgaacttctacaaggatccttgtccttaggctgactacattttcaatggggcaagttaagctactttccaagcgacacacaaacactggtgattattggctgagaaacatttcccatgactgggctgtccagacatgtgatgcttcactggtgctggactgcaca

SEQ ID NO: 234022 - DNA, 445 bp, Gossypium hirsutum
ggttaacttaactcgtgccgtgttaggctaccgctaggtgtcgctgggtgacgattatttgttgcagaggaggagcaggagcttgtaggaagttcaaactttaatttcaaacaccaaatctgaaacagttgactgttggttttgaggtttttgcaaatgtcgactttaagcctttcgccggttcttacatctcctagagacgatgctattcagctttaccgtgctttcaaggggctgggatgcgatactgcagcagtggtcaatattcttgcccatcgagatgcaactcagcgttctttaattcaacatgagtatagcgcaatgtattctgaagaccttctcaaacgacttgtttcggagcttcgtggaaaattggagacggctgtcttgctatggatgcatgatcctgcaggacgtgatgcaatagtcattatgcaggcacttt

SEQ ID NO: 234023 - DNA, 442 bp, Gossypium hirsutum
gaaaaagggggaaaaaagtgaggatcaagcatagatggaaaacatgggagttctaggcaaggtggtggattaccttctattgttatcattcttcagcatcacattaacagctcagttggacatccccgagtccatcctcccccacgcctacaatcccttctatcaagtttataccacgttaacccaagattatttggtgcttgagcagcctgcttttttcaaggcacttatgacgttggaacttgtttaccaactccctctcgctttgcttaacatctatgggttgttatactctaagccctggttcaacaccacctgcctcctctttggtgcctctatcgttgcctctacgacagctatggtgggagacattctcaattcccagaaggcatcagccaatttgatggccatgtattatccaccgtttcttccattaggggtt

SEQ ID NO: 234024 - DNA, 424 bp, Gossypium hirsutum
cctcactccgccatcttcaataatttcttccgttgatctttgttagagattagctttttaatttttcattatgggaaagatcaagatcggaatcaatggatttggaaggatcgggcgtttggttgcgagagttgctctccaaagcgatgatattgagctcgttgctgttaacgatcctttcatcaccactgaatacatgacgtacatgtttaagtacgacagtgttcacggtcaatggaagcatcatgagcttaaggtgaaggactcaaagacccttctctttggtgaaaagcctgtcacagttttcggtatcagaaaccctgaggaaatcccatgggctgaggctggagctgagtatgttgttgagtctactggtgtttttactgacaaggacaaggctgctgctcacttgaagggtggcgcg

SEQ ID NO: 234025 - DNA, 403 bp, Gossypium hirsutum
cctcactccgccatcttcaataatttcttccgttgatctttgttagagattagctgtttaatttttcattatgggaaagatcaagatcggaatcaatggatttggaaggatcgggcgttaggttgcgagagttgctctccaaagcgatgatattgagctcgttgctgttaacgatcctttcatcaccactgaatacatgacgtacatgtttaagtacgtcagtgttcacggtcaatggtagcatcatgagcttaaggtgaaggactcaaagacccttctctttggtgaaaagcctgtcacagtttttggtatcataaaccctgaagtaatcccaaggtcttgggctggagcttgtgtatgttgttgtgtctcatggtgtttttactgtcaaggacattgtttt

SEQ ID NO: 234026 - DNA, 442 bp, Gossypium hirsutum
ggcagagcccttagctcttagcccagttcttcattttcattttcttgttccttccttcgccgtctattgctttttgttacctcgatttcaagtgaatcagaatgggtaaggaaaagactcacattaacattgtggttatcggccacgtcgattctgggaaatcaaccaccactggccacctgatttacaagcttggtggtattgacaagcgtgtgattgaaaggttcgagaaagaagctgctgagatgaacaagaggtcattcaagtatgcttgggtgcttgacaagctcaaggctgagcgtgagcgtggtatcaccattgatattgccttgtggaaatttgagaccacgaaatactactgcactgtgattgatgcacctggacaccgtgactttatcaagaatatgattactggtacgtcacaggctgactgtgctgtttt

SEQ ID NO: 234027 - DNA, 394 bp, Gossypium hirsutum
ccaaccttttaattaccccttttttctctttgtttcctttcttcctgtcttcctcacaggtcacttcaacgaatactatggtgatagcaccattaactgcaacttctcttctgctgtttgtcttcagttttttcctgcaaggcacctttggtgactatgggggaggatggcaaggtggccatgccacattctatggtggtggtgatgcatctggcacaatgggaggtgcttgtggatatggtaacctgtatagccaaggctatgggactaacactgcagcacttagcattgccttgttcaacaatggtttgagctgcggttcttgttatgaaatgaggtgtgacaatgaccccaaatggtgcctgcccgggtccattaccatcacttgcaccaa

SEQ ID NO: 234028 - DNA, 434 bp, Gossypium hirsutum
cacacctcctttccctcttggtaagctgttgcaattaataagaaacccccaacgtagataaaacagaccgtaaatggcagcagcagcagattctgaatgcaaacgcagcctggatagaaggccctcgtcttcgtcatttcgtctacgctgctccagtctaaactcactccgtctgcgacgcgtatttgatatctttgacaagaaccgcgatggcctcatcactgtccaagagatccatcaggcccttactcgtctaggccttgaaaccgatgtttcagatctagattcaaccatcaggtcgttcataaagtcgggtaacatcggcctcacgtacgacgggtttgttgctttgcatgagtcattggaccaaaggttgttcgggttggagatggaggaggttgcagaagaggatgaatcagaatcagatttgacgg

SEQ ID NO: 234029 - DNA, 442 bp, Gossypium hirsutum
ctttctttttattgtggtctccagagcttctctgttacatcgtttattttctctcaagaactgaagaaaaaatccgaatagattaaaacttaagaaagatcaaaagatgtttggaagagcacctaagaagagtaataacaccaggtactatgagattctgggtgtttcgaataacgcttcccaggatgatttgaagaaagcttataaaaaagccgccattaaaaaccatccagacaaaggcggtgatcctgaaaaatttaaagagttggcgcaagcttatgaggtattgagcgatcctgagaaacgtgagatatatgatcagtatggtgaggatgcactcaaggaaggaatgggtggtggtgccggtgctcatgacccgtttgacatcttctcctccttctttggtggtagcccgtttggaggtggtagcagtcgaggtaga

SEQ ID NO: 234030 - DNA, 371 bp, Gossypium hirsutum
cttaaagcctgccatataatcatataaccaggctccgtcgtggtactcttcgggcaccacaatgccgaaaatcgccttgggaacaagccaagaggctgctcagcctgactgcatcaaagcccttgtggtcgagtttatcaccactttcctcttcgtattcgttggagtaggagctgccatggccgccgatgagtcgggggcaaatgcgctggtgggattgtttgctgtggcggtggctcatgcccttgtcgtcggcgttatgatatcggccggacacatatcatgcgggcatcttaacccagccgtcacgcttgggttgctattcggtggtcacatcacggtggtccgtgcgatcctctactggatcgatc

SEQ ID NO: 234031 - DNA, 439 bp, Gossypium hirsutum
cttgttttttcatttctcctacaaaagaaaaagcttgtaatcggccatggatttgtccaaagaacgtgaaagattcgtttacatcgccaagctcgctgagcaagcagaacgctttgatgatatggtgacttccatgaaaaagctagcggagcttgatgtggaactgaccgtagaagagcggaacctgctctctgttgggtacaaaaacgtgatcggtgctcgaagagcatcgtggaggatcctgtcttcgattgagcaaaaggaagagagcaaagggaatgagcaaaatgttaagaaaatcaaaacgtctaggcagaaagtagaatcggagttgtccaatatttgtaaagatattatgggtgtcattaatgagcatctcattccttcttgctcgggtggagagtctactgggttttattataaaatgaaaggagattat

SEQ ID NO: 234032 - DNA, 427 bp, Gossypium hirsutum
attttcacaggtttgttcgcgtctgaaaagctcgtgaaacaagtttaccccggcaggccagccaagtacgggctgttcatgggcggcggagggaagctgttcgcggcgcagatcatccagattctggttatcgtcgggtgggtgagtgccacaatgggaaccctgttctatttccttcacaaattcgggcttttaagaatctcagtcgaagatgaaatggctggcatggacttaaccaggcatgggggacttgcttatgtttatcatgatgaagatgaatcccaaaaaaatggcattcaaatgaggaaaattgaaagcttcccaactcctccttcagtctaaattttttttttattaaatccaaacttgttcagaatattttatcatattggatagattatatttttatatacatatgaattccctg

SEQ ID NO: 234033 - DNA, 387 bp, Gossypium hirsutum
aaactaaatactgaagtcatttgttttgggggagtgccggagaaaatggcctgttttcaatatatagtagctgctctatgctttgcagttgtacttgagggatcgttatcaaaagctcaactgaccccgacattttacgatggaacatgcccaaacgtgacagccattatccgacaagtgctcgtgaatgcttcgttttcagatccaaggattggtgccagtctcatcaggcttcacttccatgattgttttgttcaaggatgtgatgcgtcgattttattggacgatcctgtaaatggtgagaaagaagctattccaaataataattcagctaggggttatgaagttatcgatgccatgaaggctgccttagagagtgcttgcccc

SEQ ID NO: 234034 - DNA, 444 bp, Gossypium hirsutum
tctgagtcttcttccagtggttttggttcccttccgagcttgaatttgatcaagtttcagttgtcgagtgctatctcttggatttcagatgatgggcctcaaaaagattctttctttttgtcacctactcttcattccaattgcagttcatcacagaacgagaaggaaaaactgggttttctgacagatgatgatttagagcatttatataaattagttgaagaaaaagatggaggtcctgcttggattcacatgatggataagtccaccccaactatgggatatcaggcttggcaaagagatcttgagattggtcctacacaatatcgtagccggactgttttcgatgatgccactcctgagatggtgagggatttcttttgggacgatgaattccgatcaaaattgaagtgggatgaaatgcttcttagtgccgaaactctc

SEQ ID NO: 234035 - DNA, 433 bp, Gossypium hirsutum
gtgggggccaacattttggcaggaggtgccttcgatggagcctcaatgaacccagctgtttcattcggaccagccttggttagctggacatgggacaaccactggatctactgggtcggaccccttatcggtggtgggctcgctggtctcatctacgagttcatcttcatcagcaacacccacgagcagctcccaaccaccgattattaagcctaatcagggtttaattgatttgtctgtcactttgaaaccggattttctccgatcacatttgagtctcctatctctttccttgtattttgtgtttaatttgtggccgtcgatcttgtttacttttttgttttttttcattcccatcctctatcatgatcatcatgaatggcagatgtttacaattgcatgccctgaaaaaatggtatatgagtgactcact

SEQ ID NO: 234036 - DNA, 419 bp, Gossypium hirsutum
  unsure (1)..(419): unsure at all n locations
cagagacaatggatcaatttgagaagcagtttgtgaatatggaggtccaggcagaatttatggagagtgctatggccggttccacttcattgtccacaccagaaggtgaggtcaacagcttgatgcagcaagttgctgatgactatggcttggaggtctctgttgggttgccacaacctggtgctcatgctgtgtcgaccaagacagaggagaaggttgacgaggatgatttgtcgaggcggcttgcagagcttaaggctagaggttagagaaatgatggaattgatttggatgatcttgtgatatataatagtactatgatgtttgggattgtaagtgctggttgaaacatctcattccatatgntaaattgtctgaattgggtttccctttataattttaaatgctgcatttgtctc

SEQ ID NO: 234037 - DNA, 168 bp, Gossypium hirsutum
gggaatagcaacattgttccaagcatcgtcgtctatgttactgttcctaacagagaaacacgtaggaagttggctggaagcatctcgaaagagaaacttgcagcttgtgtaaatatattaccaggtctggagtcggtgtatctatgggagggaaagataaactcagat

SEQ ID NO: 234038 - DNA, 433 bp, Gossypium hirsutum
cttcaaatcgcagggcttttttaacctctccctctctctctagaaccctcactattcttttcttttgtttgtttatatggcatctcaagccagcctcctccttcaaaaacagctcaaagatctttgtaagaatccggttgatgggttctcggccggattggttgatgaaaacaatatctttgaatggagtgttacaattatcggaccacctgatactctttatgaagggggatttttcaatgccatcatgagctttccgcccaattatccaaacagccctccaacagtgaaatttacatcagagatttggcatcctaatgtttatcctgatgggcgtgtttgcatatcaattcttcatcctccaggtgatgatccaaatggttacgagcttgcaagtgagcgctggatgccagtccatacaagtgaaagtatt

SEQ ID NO: 234039 - DNA, 440 bp, Gossypium hirsutum
gaaaatcatgggtgccaaagttcttttcttctttgctttgctttccttttcagctgtctcggcatttgcacaggatgaggaagaccaaggtcttgttatgaacttctacaaggattcttgtcctcaggctgaagacattatcaaggagcaagttaagctactgtacaagcgacacaaaaacactgctttttcttggctgagaaacattttccatgactgtgctgtccagtcatgtgatgcttcactgctgctggactccacaagaaggagcttgtctgagaaggagacagactggagctttggcctaaggaatttcaggtacattgagaccatcaaagaatctgtagaaagggaatgccctgtatgttgttcttgtgctgatatcctcgttctgtctgctagggaaggcatcgtttcgttgcgaggcccttatattcctc

SEQ ID NO: 234040 - DNA, 439 bp, Gossypium hirsutum
atttcttccgttgatctttgttagagattagctttttaatttttcattatggaaagatcaagatcggaatcaatggatttggaaggatcgggtgtttggttgcgagagttgctctccaaagcgatgatattgagctcgttgctgttaacgatcctttcatcaccactgaatacatgacctacatgtttaagtacgacagtgttcacggtcaatggaagcatcatgagcttaaggtgaaggactcaaagacccttctctttggtgaaaagcctgtcacagttttcggtatcagaaaccctgaggaaatcccatgggctgaggctggagctgagtatgttgttgagtctactggtgtttttactgacaaggacaaggctgctgctcacttgaagggtggcgcgaagaatgttatcatttctgctcccagtaaggatgctcc

SEQ ID NO: 234041 - DNA, 436 bp, Gossypium hirsutum
tggtagctatgttttcaataaagggaaggttcataaggtgccagcgactgacatggaggcactcaagtctccacttatgggaatatttgagaagcgtcgtgcacggaagttcttcatatatgttcaagattatgatgaaaaggatcctaaaactcacgagggaatggacttgacaagggtgtcaactagggcactaattgcgaaatatgggcttgatgataacactgtggatttcattggtcatgcattggcacttcacagagatgaccgctacctggatgaacctgcattggatactgtaaaaaggatgaagctttatgcggagtctcttgcccgttttcaaggtggatctccgtacatatatccactgtatggattaggcgagctgcctcaggcttttgcacggcttagtgctgtttatggtggaacatatatg

SEQ ID NO: 234042 - DNA, 433 bp, Gossypium hirsutum
ggcggcttctgcttctatttactattttctcactctcctactcctttgtgccatcccttttaccttctccgagctcgttaaagagcagcctctggtgttgaagtaccacaatgggccactcttgaaggggaagatcaccgttaatctcatctggtacgggaagttctccccaacccagcgctccataatcgtcgatttcatcaactctttgagctctgccgtcaaacccaagattccgtcggcgtcgttttggtggaaaacgacggagaaatacaagtccggttcctccactttggtcgtgggcaaacaaatcctcctcgaaaattacccgctcggtaaaatccttaagaacccacacttgccagcgttggccgggaaattcaacggcgtatgtacggttagcgttatcctcacggccatagacgtcgccgtc

SEQ ID NO: 234043 - DNA, 448 bp, Gossypium hirsutum
ctttgctttatccccttccaaagatggaccgcttctctcttctcttcctcctcctttcctccgtcgttgcttcggccgtcgtctccgacgttaatagcgatgacgatcctctcatccgtcaagttgtttccgatggtggtgtcgaggaggactccgatgaccatctccttaatgcggagcaccacttcacgctgttcaaatccaagtatgggaaaacctacgcatcccaggaggagcacgattaccgactgggagtcttcaaggctaacctgcgtcgggccaagcgtcatcaggtcctggaccccagtgccgtccatggcgtcacaaagttttccgatttaactctatcggagttccgccgccagtatctaggcttgaaaccgctcaagctcccagccgatgctcaaaaggctcctatccttccgactgacaacttaccggatgactt

SEQ ID NO: 234044 - DNA, 372 bp, Gossypium hirsutum
ctttgctttatcccctaccaaagatggaccgattctctcttctcttcctcctacgttgcgttcgtcgttgcttcggccgtcgactccgacgttaatagcgatgacgatcctctcatccatcatgtagtttccgatggtggtgtctaggaggactccgatgaccatttccttaatgcggagcaccacttcacgctgttcaaatccaagtatgggaaaacctacgcatcccaagaggagcacgagtaccgactgggagtcttcaaggctaacctgcgtcgggccaagcgtcatcaggttctggaccccagtgccgtccatggcgtcacaaagttttccgatttaactctatcggagctccgtcgccagtttcta

SEQ ID NO: 234045 - DNA, 335 bp, Gossypium hirsutum
aaaaatcatatcctcagaaaaaagtaaataaacgcacagaaaagagaaaatgggtgctttgggtggaattagacaggtcgatggaagcaccaatagcctggagattgaaaacctatctcgttttgctgttgatgaacacaacaagaaagggaatacgatgctacattttaagaaggtgacgaatgtaaaacaacaagtggtttctgggactatgtattacataacatttgaagcgatggatggtgacaagacaaaagtttatgaagccaaggtgtgggacaagccatggatggatttcaaggagttacaggattttaagggtattggcgatgctt

SEQ ID NO: 234046 - DNA, 438 bp, Gossypium hirsutum
gaaaacatgagtagaggttggagctacggtggcggccaaagttccttgggctacctctttggtgccgatgagcagccaagcgcacccaccgtcacaccagcgatccagcctccatatggcatagatattaccccagagaaccctccccctcaatataaaccaagttcagagcaacagactgagaaaaacaccaccaacaactatcagagggctaaaggacagaatgcaggcaacttcataactgatcgaccatcaacaaaggtgaaatcagttccaggtggagattcctccctgggttacctgtttggagacaagtgatgcaatgattaattccttcttacaagtttttaagaagaaaattggtgaactgcttccgataaggaattgaagataaacagataagtgggtttttttagttaaatacatgtgcagaagttg

SEQ ID NO: 234047 - DNA, 396 bp, Gossypium hirsutum
gaaaaaaagaatatggaaaccgtaactttgacaggattacttcacaaggctgcggccgagttccctaccaggcgagctttatcagtttccggcaagttcgatttgacgcatgctcaattacaacacatcatcgatcatgctgcttctctcctcatcgcctccggcatccatcccggcgatgtcgtcgctcttactttcccaaacaccgtggagcttgttattatgttcttggctgtaattcgttgccgtgcaaccgccgcgccgttaaactcagcttatactgccgaggagtttgagttttacctttctgattcagaatccaagctgttattaatcccagccgaaggcatcaagccggctgaagccgccgcttccaagttgaacatccctctcgta

SEQ ID NO: 234048 - DNA, 436 bp, Gossypium hirsutum
gtgttgctcccgaggagcacccagtgcttctcacagaggcacctctcaaccccaaggccaacagagaaaagatgactcagatcatgtttgagaccttcaatgtgcctgccatgtatgttgccatccaagctgttctctctttgtatgccagtggtcggacgacaggtattgtgctggattctggtgatggtgtatctcacactgtgccaatctatgaagggtatgcccttccacatgccatcctccgtctagaccttgctggtcgtgatctcactgattctttgatgaagattcttactgagagaggttacatgttcaccaccactgctgaacgggaaattgtccgtgacatgaaggagaagcttgcttacgttgccttggactatgagcaggaactgtagactgccaagagcagctcttttgttgagaagaactt

SEQ ID NO: 234049 - DNA, 432 bp, Gossypium hirsutum
atcaatatcctctaattctaaagctaagagttttaagttaacgaagcatttgggtcgtttcgaagtaatggaaacttcaggaaaagtaaagaagggagccggaggaaggaaaggtggtggcccgaaaaaaaagcccgtttcaaggtctgtcaaagctggtctccaattccccgttggtaggatcggccgttacttgaagaaaggaaggtattcacagcgtgttggaaccggagccccggtttacttggctgctgttcttgagtacttggctgctgaggtcctggaattggctgggaacgctgcacgtgacaacatgaaaaacatgttcatcccaaggcacgttctacttgccgtgaggaacgacgaataattatggaagcttttcgccggcgtaacaatcgctcacggtggtgtgttgccgaacattaaccc

SEQ ID NO: 234050 - DNA, 428 bp, Gossypium hirsutum
cccaaatctccaattgatctgtttcatttttcagcaaagctagaaaaacaatgactaaggatatcgagactgcagagcaacatggaggggagttctcggccaaggactaccatgatccaccacctgctccattgattgatgctgaagagttaaccaaatggtcgttttacagggcagtgattgccgagttcattgctacacttctcttcctgtatgtcactgtgttgaccgtgattggttacaaggtccaaaccgaccctgctaagaacactgttgaccccgattgcggtggcgttggtattcttggtattgcttgggctttcggtggcatgatctttattcttgtttactgcatcgctggtatctctggagggcatatcaacccggctgtgacattcggtttgttcgtgggacgcaaggtgtcactc

SEQ ID NO: 234051 - DNA, 438 bp, Gossypium hirsutum
gggaaaaggaatactgcaaccgcatactttgatcgatgaactggaaaatgttgtaggcgacgacaaagctagagagaagctaagtgatggtccctttagcgaagtccttaaatctgcacaggaggccataattctgcctccatacgtggctatagcagttcgcccaagacctggtgtttgggaatacgtacgagtcaatgttcatgaactcagcgtggagcaactggatgtgtccgaatatcttcgcttcaaagaagcacttgcagatgtgggggaggacaaccattttgtgcttgagcttgattttgagccattcaatgcatcctttcctcggcccaaccgctcttcatccattggcaatggcgtccaattcctcaaccgtcacctttcttcaaacatgttccgtaacaaagattctttggagcctttacttaattt

SEQ ID NO: 234052 - DNA, 285 bp, Gossypium hirsutum
caacaatgtctcttcactcttctctcaccatgtcattgctgtctttctccttcttgttgctgtttacttttagtgccaaagctgttgttcctccatctgaaacttttaggtttgtcaacgacggacaatttgggccgtttgttgttgaatatgatgcaaattaccgtgtcataagcatagctaatgcccccttccagcttgcgttttataacaccacctctaatgccttcacccttgcgttacgcatggctacaacgcgtttcgagtcgctctttcgttgggttt

SEQ ID NO: 234053 - DNA, 408 bp, Gossypium hirsutum
cttgcattaagtctcaaagatatcactgcaagaaaaaaaaaaaaccagacatggcttccaacactgttgcatccgctgctcttattcttaccttgaacttgttgttcttcactttggttagctctacctacgtgccttgcccaccaccaccaaagagccacaagcctacccacaaaagcccaccctcggcacctgaacagccaggcacttgccccagagatgcactgaaactaggcgtttgtgctgatttgttgggctcattgcgcgttgttgttggaccgtcgaggaccaaatgctgctctcttatttcgggtttggctgatctcgatgctgctgtttgcctttgcactgctattaaagctaatgtgttgggggttaacctaaaacgttctgtttcattgactttgc

SEQ ID NO: 234054 - DNA, 342 bp, Gossypium hirsutum
acaaccagtaactttgacaggattacttcacaaggctgcggccgagttccctaccaggcgagctttatcagtttccggcaagttcgatttgacgcatgctcaattacaacacatcatcgatcatgctgcttctctcctcatcgcctccggcatccatcccggcgatgtcgtcgctcttactttcccaaacaccgtggagcttgtgattatgttcttggctgtaattcgttgccgtgcaaccgtcgcgccttttaactcagcttatactgccgaggagtttgagttttacctttctgattcagaatccaagctgttattaatcccagccttaggcagcaagcc

SEQ ID NO: 234055 - DNA, 382 bp, Gossypium hirsutum
tatgaaaagaagtgttgcgatgtgcaaaggactaccaattcttggtgttttcaggactttttgtgctgttggtgtggatcctgctatcatgggtgttggcccagctgtggcaattccagcagcagttaaatctgctggtctagaacttgatgatgttgatctttttgagataaatgaggcatttgcatcccagttcgtatattgtcaaaagaagttggagctcgatccacaaaagattaatgtaaatggaggcgcaatggcaattggacatccattgcgcgcaacaggtgctcgttgtgttgctacgcttctgcatgaaatgaagcgtcgtggcaaagactgccgattcggagtggtttcgatgtgcataggcacaggaatg

SEQ ID NO: 234056 - DNA, 432 bp, Gossypium hirsutum
agcctacccacaagagcccaccctcggcacctaaacagccagccacttgccccaaagatacactgaaactaggtgtttgtgctgatttgttgggctcggtgcgcgttgttgttggaccgtcgaggaccaaatgctgctcactcatttcgggtttggctgatctcgatgctgctgtttgcctttgcactgctattaaagctaatgtgttgggggttaacctaaacgttcctgtttcattgtctttgctcctcaattcctgcgaaaagcaaatgcctgctggttacaaatgtgcttaagcaatgtttgggtttttcttttacgcgtactttttttttctgggcgtggtaaatttggtgttttgaaatggcaagggttagataaaatggttaaggtctcttaccttaaacaatactcaattctgatctatttata

SEQ ID NO: 234057 - DNA, 242 bp, Gossypium hirsutum
agcctacccacaagagcccaccctcgttttttaaacagccagtctcttgcggagggatacactgtttctaggtgttagtgctgatttgttggactcggggcgcgttgttgtttgtaccgggaggaccaaatgctgttcacttattttgggcgtggctgatctcgatgctgcaggatgcctctgcactgctattaaagcttatgtgatgggggttaacctatacgtgcctgtttaattgtctt

SEQ ID NO: 234058 - DNA, 436 bp, Gossypium hirsutum
cggacgcgtgggtgagaactaaaggaaacaaaggccttcttcttagcactccgccgcccgttatctcatcgcaatcatgatcatcccagaaaagaaccgcagggagatatcaaagtatctctttcaagagggtgtttgctacgccaaaaaagattacaacttggcaaaacacccagaaatcgatgttccaaatcttcaagtaataaagctgatgcaaagcttcaaatccaaggaatacgttcgtgaaacttttgcttggatgcattattactggtaccttaccaacgatggcattgaatttttaaggacataccttaatctcccctctgagattgttcctgctactttgaagaagcaaactaggcccggtggtggtcgtcccatgggtccttctgataagccgccacgtggtccgtcacgctttggcgacggtgag

SEQ ID NO: 234059 - DNA, 408 bp, Gossypium hirsutum
cgccgattctaccaccaccatcaccacctattgtgaacccaccaacgcctcctatcgtgaagccaccttcaccgggaacaccgtgtcctccaccaccacctccggcacaacaaacatgccccatagacactctcaagctaggtgcatgtgtggacgtgttgggtggcttagtacacatcggcataggtagcagcgccaaagacacttgctgccctgtactacaagggctgttggatttagacgctgccatttgtctctgtactacgatcaaagccaaccttttgaatatcaatattataatccccatagctcttcaggtcctcatcgactgtggcaaaactccacctccagggttccaatgtccagcacaatgatgaaaaacataaaaaccccatgtttttttttctt

SEQ ID NO: 234060 - DNA, 406 bp, Gossypium hirsutum
gttatatcccgcagcaccgcttttattgcctcattgcccatctgaagattgtgtggtggatggatatgagatacctaaaggcacaatgctcttggtccatgcttgggccatccaaagggatcctagcatatgggaggagccaaccaagttcaagcctgaaagattttatgagggaactttggaagacaaggaaggattgaaatatcttccatttggacttggaaggagagcttgtcctggcagaaacatgggcttacggtccgttttgttggcaattggtgtttttatacaatgctttgaatgggaaaacgtagggtcagacaaggtggatatgacaccaaatactattggattgactatccacaaggctaggccattggaggctttgtgtcgcccacggcctgat

SEQ ID NO: 234061 - DNA, 394 bp, Gossypium hirsutum
aaacactacaccatggatgaagtgaagctctttgggttttggccaagtcctgtgagtagaagggtcatttgggcattaaagctaaaaggcgtggaatatgaatacattgaagaagatctgtcttataataagagtgatctgttgttgcagtacaacccacttcataaaaagatcccagtgctcgttcatggaggaaagccaattgcagagtcattggttattctggaatatatagatgaagtgcggccacataatcctttgttgccaaaagatgcttacgagagatccgtagctagattctgggccaaattcattgaggaaaagactcaaccaatgtgggaattctttcgttaattcggggaagaacagtaaatggcaatcgagaacaactatg

SEQ ID NO: 234062 - DNA, 394 bp, Gossypium hirsutum
caggtgccgtaccgattcggcgtgtccggctcggcgtacccgaccgatcaactctaacccacactccattcatgtacgtcactaatacccaaaaggtcagaaaaaaaactgggattcgtctctcattttttatcggagacatgtgtgctattattttactctgaatatgagtatttaagcgtatctttggcatttcctttatttgttacaattcgcaataccttcttccattactggctgctgcttcaaccactaagcttggaagatgggaggcgacaatggcatcagtcttgaggagatcaaaaacgagtccgctggtctggaacggattcctattgacgaagttttcgagcagctgaaatgtacaagggagggctcgtcaaccgaggaaggc

SEQ ID NO: 234063 - DNA, 418 bp, Gossypium hirsutum
cgatgatgaagagttttctaaaaagcctgttgttgttaagaaagctgtaccggctcctacaaatgttacatcatattcgatagcagaccttcagatagctactgggaggttcagtgtggaaaatatttttggggaaaggggatttgggcgcgtgtatatagctctaattgctgttggggagggtttttcggggaaaaaaatatactcatagggtctttccagtaacatgtgtgacaatttcatggagatggtgtcaaatatatcccagttgcatcacacaaatgtaaccgagttggttggctattgttcagagcatggacaacacctgcttgtctacgagttccacaaaaatggctcactctacgatttcctacatatatcagatgagtacagcaagccattgatttggaacacccga

SEQ ID NO: 234064 - DNA, 408 bp, Gossypium hirsutum
ttccaattgatctgtttcatttttcagcaaagctagaaaaacaatgactaaggatatcgagactgcagagcaacatggaggggagttctcggccaaggactaccatgatccaccacctgctccattgattgatgctgaagagttaaccaaatggtcgttttacagggcagtgattgccgagttcattgctacacttctcttcctgtatgtcactgtgttgaccgtgattggttacaaggtccaaaccgaccctgctaagaacactgttgaccccgattgcggtggcgttggtattcttggtattgcttgggctttcggtggcatgatctttattcatgtttactgcaccgatggtatctctggagggcatatcaacccggctgtgacattcggtttgttcgtgggacg

SEQ ID NO: 234065 - DNA, 409 bp, Gossypium hirsutum
gcggaaacatccctaacgtaatctgctttgaatccgacccgggtttggttaacaaattaggaggctcttatgtccacagtgaaatgaaaggaagtatctttgacaaagtggtgggaatttctcaactgaagaaaacagatgaaacaaaggaagttgtgcaaaccgtatcggaggcatgggaccggtgtaattctgacgatataaggttctgtttgttggttattatcaatgcttatattcagccagtcccgaccttgaagaacttgagatcaaagggcttttcaaccctgaactgtatggtgaagaattgtggacctcagatattggattgtcttatggatccgaattgtaggaaagcacttcaatgcttgaacaaatgcagccctgtagatcaggtgtgtaattatcg

SEQ ID NO: 234066 - DNA, 408 bp, Gossypium hirsutum
ttcggatttttctcagacgtgaaaaaaatggggctgtctttcaccaagctattcagccggctatttgccaaaaaggagatgcgtatactgatggttgggcttgatgctgctggtaaaaccaccattctttacaagctgaagttgggagagattgtcactaccattcccaccatcggtttcaatgttgagaccgttgaatacaagaacatcagcttcactgtttgggatgttggtggccaggacaagatccgaccattgtggagacactatttccaaaacatgcaaggacttattttcgtggttgatagcaatgatcgtgaccgtgtggttgaagctagagatgagttgcacaggatgttgaatgaggatgagttgagggatgctgtgcttctagtatttgcaaacaag

SEQ ID NO: 234067 - DNA, 414 bp, Gossypium hirsutum
cttcaatttccttcgctctcccactcgatattgaaatggcggaatcaaagtcattgaggaaacctgtttttaccaaggtggaccaactccgccctggcactattggtcacactcttactgtcaaggttgtcaatacaaagatggtattgcagaagggtcgggctgatggtcctcaggtgcgtcaaatgcgaattgctgaatgcttggtaggagatgaaactggaatgattatctttactgctagaaatgaacaagtggacttaatgaaagagggtactaccataactcttcgcaatgcgaaaattgacatgtttaaaggatcgatgaggcttgctgtggacaagtggggtcgtgttgaggttgctgagcctgctaatttcaatgtgaaggaagacaacaatctgtcactgatcg

SEQ ID NO: 234068 - DNA, 382 bp, Gossypium hirsutum
ctaagatatcactgcaaggaaaaaaaaaaaaaaccagacatggcttccaacactgttgcatccgctgctcttcttcttaccttgaacttgttgttcttcactttggttagctctacctacgtgccttgcccaccaccaccaaagagccacaagcctacccacaagagcccaccctcggcacctaaacagccagccacttgccccaaagatacactgaaactaggtgtttgtgctgatttgttgggctcggtgcgcgttgttgttggaccgtcgaggaccaaatgctgctcactcatttcgggtttggctgatctcgatgctgctgtttgcctctgcactgctattaaagctaatgtgttgggggttaacctaaacgttcctg

SEQ ID NO: 234069 - DNA, 408 bp, Gossypium hirsutum
gggagagccaataagcaatgtctgtaatatcttcatcgaacctgacgatctccctcaacacaactatctctctgtcatggcgctcttctcttccttctcgagccatctttccccgccccaaaaaaacccaaaaccctcgtagtcctagccaccgctttgggcgcaaaacccaccgtcctcgtggctgaaaagatcggtgacgccggtatccaactgctcaaaactttcgccaacgtcgactgctcttacaacttaagtcccgaagagctttgtaccaagatttcactttgtgatgctctgatagtgaggagtggaaccaaggtgacccgagaagtgtttgaatcggctatgggtaggctaaaggttgtgggcagagctggtgttgggattgataatgtggatatatcg

SEQ ID NO: 234070 - DNA, 409 bp, Gossypium hirsutum
tactcactcaacattcccatttccaatctccagctcccaaggtaaatatgccgatcagaaacatagcagttggccggcccgaagaggcgactcaccccgatgctctcaaggcagctttggctgagttcatctcaaccttgatcttcgttttcgctggatcgggctcaggaatggcttttaacaagttgaccgacaacggagcaacaaccccggccggtctcgtagccgccgctctagctcatggcttcggtcttttcgtcgctgtctccgttggcgccaacatctcaggtggccacgtcaaccccgccgtcaccttcggtgctttcgttggcgggaacatcactctcttgcgcggcattctttactggatcgcccaactcctaggctcaaccgtcgcttgcctgttgct

SEQ ID NO: 234071 - DNA, 402 bp, Gossypium hirsutum
gagggaagaagggacccggaggtgttactgttaagaagaccaatatggccttgattatcggaatctatgatgaaccaatgacacccggccaatgcaacatgatcgtcgagaggctcggcgattatctcctcgaacagggtttatgattctcttcagtgtgtgtccttatttgaatgcatttcttctcgggtcttttttctatatgaaaaaaagaaacatgcatcgtagcgtctccgtattactcgtatttacatggaaaaagtttgtaatggttatgttttatgatctctttgctttgtttttatgtattttgtttgatggatactatgaaggttgtggagtgaggtacttttggtttttcttcttttacatttacagtggataattctactggatttgttt

SEQ ID NO: 234072 - DNA, 417 bp, Gossypium hirsutum
gagctacctttttttctccttttccaccgccgtcgatctcgatccttatcctcggtttcaaacaagctcaaaaaagatggccaacgctgcatcgggaatggctgtgcatgatgattgcaagttgaagttcttggagctcaagacaaaaagaacccaccgcttcattgttttcaaaatcgaggagaagcaaaagcaagttattgtggagaagcttggtgaaccaaccgaaagctacgaggattttactaaatgtctccccgctgatgaatgtcgatatgctgcgtacgattttgattttctaacggccgagaacgtcccgaagagcagaatctttttcatcgcatggtctcccgacacgtcaaggatcaggagcaagatgatttacgccagctccaaagacagattcaagcgagaact

SEQ ID NO: 234073 - DNA, 437 bp, Gossypium hirsutum
aaatcccgggggcgcccccgcctccgagaaacttgaggggaagaatctcgctatcccttgcttttctctcgcaaaaaattctcaaacttgtttttaacgttcgctgaatactatcgctcatttcttccctcagaaccctaatcgataactgaagccatttaatcatgtttgggcgtgttccaaaaaaatctgataacactaagttttacgaagtacttggggttcccaaaagtgcaagtcaggatgaattaaagaaggcttataagaaagctgcaattaagaatcatccggataaaggtggagaccccgagaagtttaaggaactggctcatgcttatgaagtacttagtgacccagagaagagagaaatatatgatcaatatggtgaagatgctcttaaagagggaatgggaggaggcggttcttctcacaaccca

SEQ ID NO: 234074 - DNA, 368 bp, Gossypium hirsutum
ttccagagatttgttcttttcgcttctttcgttatggggaagatcaagatcggaatcaacggatttggaaggatcgggcgtttggttgccagagttgctctccaaagtgaagatgttgagctcgttgctgttaacgatcctttcatcaccaccgattacatgacctacatgtttaagtatgacagtgttcacggtcaatggaagcaccatgagcttaaggtgaaggactcaaaaacccttctctttggtgaaaagcctgtcactgttttcggcatcagaaaccctgaagaaatcccttggggtgagactggagctgattatgtcgttgagtctactggtgttttcactgacaaggacaaagctgctgc

SEQ ID NO: 234075 - DNA, 351 bp, Gossypium hirsutum
gttgtggagaccttctctgagtacccacccctgggtcgttttgctgtgagggacatgcgtcagaccgtggctgtgggtgttatcaagagtgtcgagaagaaggacccaaccggtgccaaggtcaccaagtctgctgctaagaagaagtgaagaggccaaaaggttttagccgtgaagcagattgagtgttttatctttggttatatgtggtttgaagtttttgcctgttttatgtaggatttttaaagtttgagatgctttggtttgccaaggcgtcttagtcaagttttgtgtctgatcttgcggaactatactttgtttttttctatatatttgtctggttcatttttc

SEQ ID NO: 234076 - DNA, 407 bp, Gossypium hirsutum
attaagcttcttcccttcagaaaacttcgactgaagctgctccaagattaaagaagcttcaatttataatactctgccccttaaactagcaagcctgatctgctgcataatcgtctaaagaaaatttgatggggataaataagttgctgtgttggtttgcagttttcttctttttgttgggtttctatgcttgcacttcgatttctgatggtgttttcgactctctcacttctactggaaggcacctgcttcaagctaagaaagctcgccctgtgaactttgagtttctgcactacacaattatcacaagccaatgcaaaggaccaaagtctccgcctcaaagttgttgttctgcattcaaggaatttgcttgtccttatgcagaacagatcaacgacttgacgact

SEQ ID NO: 234077 - DNA, 406 bp, Gossypium hirsutum
cttcgttcaaccacgcctaataaccgctcggatttttctcagacgtgaaaaaaatggggctgtctttcaccaagctattcagccggctatttgccaaaaaggagatgcgcatactgatggttgggcttgatgctgctggtaaaaccaccattctttacaagctgaagttgggagagattgtcactactattcccaccatcggtttcaatgttgagaccgttgaatacaagaacatcagcttcactgtttgggatgttggcggccaggacaagatccgaccattgtggagacactatttccaaaacacgcaaggacttattttcgtggttgatagcaatgatcgtgaccgtgtggttgaagctagagatgagttgcacaggatgttgaatgaggatgagttgaggga

SEQ ID NO: 234078 - DNA, 389 bp, Gossypium hirsutum
cttgcattgagtctctcagatataactgaaaggaaaaaaaaaaacaaccggtcttggtgttcaacactgatgcatacattgctcttattctcacatagaacttgatgcgctgcacttagggtagctttaccaacgagcgttgcccgccaccaggaaagagcgacatgcgtactctcaagagcccactttgggaacctaaacagtctgccgcttgcccggaatgtacactgacactaggtgtttgtgctggatagtggggctcaatgcgcgtagttgttggaccgctcaggaccaaatgctgtatatttattcggggtttggctgatctcgacgctgctgtgtgcctttgcactgctataaaagctaatgagtagggggttcacctaaac

SEQ ID NO: 234079 - DNA, 411 bp, Gossypium hirsutum
cgcagctgccattttcgtaagtctaccaccgttgctctcaatcccttccacttcgccatggcatcagagaagaagctttcgaacccaatgagggagatcaaagtccagaaacttgtcctcaacatctccgttggtgagagcggcgatcgtcttacacgtgcggccaaggtcttggaacagctcagtggtcaaaccccagtcttctccaaggctagatacactgtgagatcttttggaattcggcgtaatgagaagattgcttgttatgtgactgtgaggggggagaaagctatgcagcttcttgagagtggtttgaaggttaaggaatatgagcttttgaggaggaacttcagtgatactggctgctttggatttggtatccaagagcacattgatcttggtatcaagtat

SEQ ID NO: 234080 - DNA, 316 bp, Gossypium hirsutum
atcggatttttcttagacgtgaaaaaaacggggctgcataccaccaagctagtcagacggctatttgccaaaaaggagatgcgtatactgatgggcgggcttgaagctgctggtaaaaccaccattcattacatgctgaagatgggagagattgtcacataccatacacaccatcggtttcaatgttaggaccgtggtaaacaagaacattagaatgactggaagggatggtggtggccaggacaggaggccgccatagaggagacactctcatactaacatgcagggacttatttttgtggttgatagcgcagat

SEQ ID NO: 234081 - DNA, 409 bp, Gossypium hirsutum
ttttgcccgtgaggtcaaagagtgcccgtggacagcagggttcatatcctatcaagctgttctacacctctaacatgcccatcattctacattctgctcttgtttcaaacctttacttcatctctcagttactgtacagaaggtacagtggaaatttttttgtgaatctcttgggcaagtggaaggagtctgaatattcaaatggtcaatccattcctgttggtggccttgcatattatatcactgcaccatcaagcttagctgagatggctgccaatcctttccatgcgttgttctatcttgtgtttatgttatcagcatgtgcattgttctcaaaaacttggattgaagtctcagggtcatctgctagagatgttgccaagcagctcaaggaacaacaaatggttat

SEQ ID NO: 234082 - DNA, 414 bp, Gossypium hirsutum
aacagggaaagaaaagcagcgtaatgggtgaagaagtgaaggtttttggatactgggcaagcccttacagctacagggcagagcttgctttgaagttgaaaggtgtttcttatgagtacataaatgaggatatctttggcaacaagagcgatttgcttttgaaatacaatccggttcataagaaagtcccggttcttcttcacaacgggaaaccaattgtagagtctcttgttatacttgaatacattgaggaaacttggaagcataatccctatttgccacaagatccttatgacaaagctaccgctcgattctggatcaagttcatcgacgaaaagtgctttcctaccctttggctagctgcatggagcgccgagaatgagcgagaaaaagtgacgaatgaagcttgcgagt

SEQ ID NO: 234083 - DNA, 407 bp, Gossypium hirsutum
tttaacgcaaacccatttttaagtgggggaaaggtttaagttcagagtcataagcaacatcaatggctccttcaactctgacggctcttgcggaagagaaaaccttgcaggcaagcttcgttcgtgatgaagatgagcgtcctaaggttgcttacaaccaattcagtaatgatatccctgtcatctctcttgctggtatcgatgatgttgatggcaagaggggtgagatatgcaagaagattgttgaggcttgtgaggattggggtgtcttccaggttgtggatcatggtgttgatactaaactcgtgtccgaaatgacccgttttgccagagagttttttgctttgcctgctgaagagaagcttcggttcgatatgtctggtggcaagaaaggtggtttcatcgtc

SEQ ID NO: 234084 - DNA, 408 bp, Gossypium hirsutum
gccgccgcctgcgtctctctcttcatctctctgaaccaaaaagtctttagcttttcgcttcgagagagaccatgttggtttaccaggatctcatctccggtgacgagcttctttctgactcattcccctacaaggaaatcgagaatgggatgctgtgggaagttgagggaaagtgggttgtgcaaggagctattgatgttgacattggtgccaatccttcagccgaagatgctgatgaggatgaaggtgttgatgaccaatctgtgaaggttgttgacattgttgacactttcaggcttcaggagcaaccccctttcgacaagaagcagtttgtcgtgttcatgaagaagttcatcaagaacttgacaccgaaactggatgcggaaaagcaagagtccttcaagaaaa

SEQ ID NO: 234085 - DNA, 413 bp, Gossypium hirsutum
gcaagttaaggcaaatgcacaagcccccccaaagataaatggtaccacagttgtgatgactccagtagaaggtttcccgagcgaagatgctgcaagttccctacctcccaggacgtttatcaatcagctacctgattggagcatgcttcttgctgctatgacaaccattttcctggctgctgagaagcagtggatgatgcttgattggaagccaaagcggcctgacatgctcattgacccatttgggatagggaggattgttcaggatggtcttgtttttcgtcagaacttctcaattaggtcttatgagataggtgctgatcgtacagcatccatagagacgctaatgaatcatttacaggaaacagcgattaatcattgtaaaagtgctggactgctaggagatggttttg

SEQ ID NO: 234086 - DNA, 411 bp, Gossypium hirsutum
cgcagagccaaataacatcatcaaaataatttgaaaaaaaaaaagaaaaaaatggaaggagcttcgtaccagcgattcccaagggtcaaaatccgggaactcaaagacgaatacgctaaattcgagctccacgacaccgatgcttccatggccaacgccctccgccgcgtcatgatcgccgaggttcccaccatagctatcgatctcgtcgaaatcgaagttaactcttccgtcctcaacgacgagttcatcgcccatcgactcggtctcatccctctcactagccaacgcgccatgtcgatgcgattctcgcgtgactgtgacgcctgcgacggtgacggacagtgcgagttctgctccgtcgagttccatcttcgcgccaaatgcataagcgatcaaacactggatgtc

SEQ ID NO: 234087 - DNA, 411 bp, Gossypium hirsutum
attcccccaatttgttccccggaaaagttctcatttccacccaaatgcaaaaccccagatttctgttctcccttttgttttctatattgatctcaattctgttcttcaacaatataatcgctgaatcaaccttcggccctgaaacaatggcgacaaccactactttgggcggagtccacccttcccaaggctcccaaaacagcgtcgagctcgaaaacctagcacgctttgccgtcgacgagcacaacaagaaagaaaatgcaatggtggagtttgtgagggttgtgaaagcaagcgagcaagttgtggcggggacacttcaccatttgacggtggaagctgtcgacgccggcaaaaagaagctttatgaagccaaagtttgggttaaaccttggatgaattttaaagaat

SEQ ID NO: 234088 - DNA, 406 bp, Gossypium hirsutum
ctctgagtgaagatgactactttgagccttacttccccttgcattgttaaaggtgcaattcccgaacgattttcaagtgctattgtcaaagccccaacatctcttggatctgttaaaagcatctccaagtcttttggcttgaaatgttcctccaatttcagaacctcaatggcaacttacaagattaagcttgtaggaccaaaaggtgaggtgaacgagtttgagtcccctgatgataagtacattctagatgcagctgaggaagcaggggttgagctaccatattcttgcagagctggagcttgctgcacatgtgccgggaagatgatttcaggttctgtggatcaatctgatggttctttccttgacgataaacaaatggaggaaggttatctgctgacttgtg

SEQ ID NO: 234089 - DNA, 410 bp, Gossypium hirsutum
attttcccaccctctttcccgaaaaaatttaatctcaaaattttctcgggaaagcgagggtttattacaaacacagctatatagtggagcagtaatcatgagctttcgagatctggaagccggacggccattggtgtcgaggcaaaacctaatcaacggcaagcaagacgccacgcaagcagttgcctctggcattttccagatcaacaccgcagtctccacctttcagcggctcgtcaacgccctcggtactcctaaggatacgcctgagctccgagaaaagctgcataaaacaaggctacatattgggcaattagtgaaggacacttcggctaaacttaaacaagctagtgaaacagatcacagtgccggaattagtgccagcaagaaggtagcagatgctaaacttg

SEQ ID NO: 234090 - DNA, 408 bp, Gossypium hirsutum
cttccctcaataatcaaaagcttcttctttctttctttttctgtgcgtgcactctcaaaccacaacaaaccaagatgagtgaagaagataaaaatgaagctaaggtagtggaaactccacgcaaaccaccccgtctgaacgagaggattctttcgtctatgtcacggagatcagttgctgcacatccttggcatgatcttgagattggacctggagctccagcaattttcaactgtgttgttgagataccaaaaggtagtaaagtaaagtatgaacttgacaagaagacaggattgattaaggttgatcgagttttatattcatcagtggtctaccctcataactatggtttcatccctcgcacactttgtgaagacaatgatcccttggattgtttggttatcatgc

SEQ ID NO: 234091 - DNA, 409 bp, Gossypium hirsutum
gccgtgcaaccgccgcgccgttaaactcagcttatactgccgaggagtttgagttttacctttctgattcagaatccaagctgttattaatcccagccgaaggcatcaagccggctgaagccgccgcttccaagttgaacatccctctcgtatccgccgctctccaggatgaaaattccaaaataactctctcctccaaccccgagtcaaatattgattcagtcaaacaactcgttaacgaccctgccgacgtctctcttttccttcacacttccggtaccaccagtcgtcccaagggtgttcctttgactcagctcaatttggggacttcagttttgaacattaaatcggtttacgaactcactgagtcagactcgacggtcattgtgctcccgttatttcacgtgca

SEQ ID NO: 234092 - DNA, 410 bp, Gossypium hirsutum
  unsure (1)..(410): unsure at all n locations
ctgaaaagcgcgggagtggaggggataatgattgacgtttggtgggggctggtggagagggaagcgccgggtgcttataattggggtggctacgccgagcttctcgagatggcaaagaagcatggccttaaagtccaggctgtcatgtcattccatcagtgtggcggcaacgtcggtgactcttgcactattcctttgcccaagtgggttacaggggagatcgagaaggacccagacctcgcatacactgatcaatggggaagaaggaactacgaatacctttcacttggttgcgatacccttcctgtcttgaaaggccgtacgcctgttcagtgttatgctgatttcatgcgtgcctttagggacaatttcaaacacctncttggtgataccattgtggaaatccaagt

SEQ ID NO: 234093 - DNA, 411 bp, Gossypium hirsutum
cttgggttgagtgtagagatgaggaaaatcatgggtgccaaagttcttttcttctttgctttgctttccttttcagctgtctcggcatttgcacaggatgaggaagaccaaggtcttgttatgaacttctacaaggattcttgtcctcaggctgaagacattatcaaggagcaagttaagctactgtacaagcgacacaaaaacactgctttttcttggctgagaaacattttccatgactgtgctgtccagtcatgtgatgcttcactgctgctggactccacaagaaggagcttgtctgagaaggagacagacaggagctttggcctaaggaatttcaggtacattgagaccatcaaagaagctgtagaaagggaatgtcctggagttgtttcttgtgctgatatcctt

SEQ ID NO: 234094 - DNA, 402 bp, Gossypium hirsutum
gtccaattatgcaaacgagggctatctattctacatcaatggctgctatgctccgtggtgtagggctctgcgatgcaaacttggatcctactgctgcacagatgggcgtttgctatgggatgcttggcaataatctcccaaatgcatgggaagtcattcaactgtacaaatcaaacaacatccggcgattgaggctgtacgatccaaatcaacaagcattacaagctcttagcggctgcaacattgaagtaatgcaaggtgttccaaatgatcaacttcaacacctctgtgacccttccaaagcacgatcatgggtccaatcaaatgttggagcttactggccgagtgttcgggaccgatacattgctgtcgggaatgaagtccctcattcatcttgggtag

SEQ ID NO: 234095 - DNA, 411 bp, Gossypium hirsutum
gctaaccatgagctacttaaccatttcccaaatctcctccctcctcttctttagcgtccttttcatttccgctcatgcagcgcgctttgaaatccgcaatgagtgctcctacaccgtctgggcagcagcctctcctggtggtggccgtcgcctagaccctcggcaaagttggaccatcgatgtgcctgctggcactgctatggctcgtatttggggtcgaaccaattgcaatttcgatgccagtggtaggggtcattgccaaaccggtgattgtggtggactccttcaatgcaaaggttggggtgtacctccaaacaccctggctgaatatgcacttaaccaatttggaaacatggatttctacgacatttccttagttgatgggtttaacatccccatggtgtttggtcc

SEQ ID NO: 234096 - DNA, 380 bp, Gossypium hirsutum
ccttgggttgagtgtagagatgaggaaaatcatgggtgccaaagttcttttcttctttgctttgctttccttttcagctgtctcggcatttgcacaggatgaggaagaccaaggtcttgttatgaacttctacaaggattcttgtcctcaggctgaagacattatcaaggagcaagttaagctactgtacaagcgacacaaaaacactgctttttcttggctgagaaacattttccatgactgtgctgtccagtcatgtgatgcttcactgctgctggactccacaagaaggagcttgtctgagaaggagacagacaggagctttggcctaaggaatttcaggtacattgagaccatcaaagaagctgtagaaagggaat

SEQ ID NO: 234097 - DNA, 408 bp, Gossypium hirsutum
cgaaaagaaaaaatggctttgaattttaatgccatcgcctcgaaatctcagaagctcccttgctttgctcttccaccaaaggccacccttagatctcccaagttttccatgatctccaccattccttctggctccaaagaggttgggaatctgaaaaagcctttcacgcctccaaaggaggtgcctgttcagatcacccactccatgccgcctcacaagattgagatctttaaatctttggagggctgggctgagaacaacattctgactcacctcaaaccagttgagaaatgttggcaacccgccgactttcttccagatcctaattctgatggatttcatgagcaagtcaaagagcttagggaaagggcaaaggagatcccagatgattactttgtagctttggtt

SEQ ID NO: 234098 - DNA, 410 bp, Gossypium hirsutum
ctgggagatatgcctctaaagaagaggccaagaagaaggggaataaaattaacaatgtaggttggtggtttaaaccctggttctaccaacatgcgcaaacggccttaaagaagggagagtttgtagagtacattcctacaagagaatattaccacaggcacacaagatgtttgtattgggaggggaagcttatacttccattcggagatcaatggtggtttaggtttcttttgggctggttgatgccacccaaggtttccttgctcaaggctactcaaggtgaatctataagaaactattaccatgagatgcatgtcattcaagacatgcttgttcctctttacaaggttggggatgcccttgagtgggtccaccatgagatggagatctatcccatttggctctgcccg

SEQ ID NO: 234099 - DNA, 415 bp, Gossypium hirsutum
taatgaagtcgatgctgatggaaatgggaccattgattttcctgaattccttaacctgatggcaagaaaaatgaaggatacagactctgaggaggagcttaaagaggcattcagggtgtttgacaaggatcagaatgggttcatatctgcagccgagctgcgccatgtcatgacaaaccttggtgaaaagcttacagatgaggaagtcgacgagatgatccgcgaagctgatgttgatggtgatgggcagatcaactacgaggagttcgtcaaagtcatgatggccaagtaaaggacctctccaactataaccaggatttaaaattggggtttaaaaaaaaaggaagaaaggaacagggcagataagtttgctaagatatctattaatgaataggacatctatgtttttatgtta

SEQ ID NO: 234100 - DNA, 415 bp, Gossypium hirsutum
cttcaagtgccaaaatctagggatttgcgggtggagaagacgagagcccatctctctgcttcaaagctcctgtccaggtagaattctcttcttcccttgcgttgtgttctttcctgttcaatcgccatggcttcaaagcggattttgaaagaactcaaggatttgcagaaagatccacccacttcttgcagtgctggtccagtagctgaagacatgtttcattggcaagcaacaatcatgggaccctcagatagcccttatgctggaggtgtgtttttagttactatccatttccctccagattatcctttcaagcctcctaaggttgcatttaggaccaaggtcttccatcccaacatcaacagcaatggaagcatttgtcttgatatcctcaaagaacaatggagccctgcac

SEQ ID NO: 234101 - DNA, 416 bp, Gossypium hirsutum
ctctctatatctttcatcccatagcttttttttggtaaaaggccatggatgggaatggaagagttcacccagattgtcctaatgctgcaaatccctaccatgaatgtggtggactctgcttagagaagattgctgaaggcaaaggaccaaaggcaaaagaaactaaaaagtcattaagttcaaaatttcttgatgcttccagaagctttggccggaaaaagaagggatccgactctctgctgagatcccctaaagcactcgagactacccctgcaataggtgcagtttatcctggtggccctaggtcacctcgttctcatttttctagaaagaaaatggaagcagaaaacggtgagtcgtattcatcttccgagcaacactctggcgagatatattcccaagatcaatcattcgag

SEQ ID NO: 234102 - DNA, 410 bp, Gossypium hirsutum
catgttcgctttgagattagatccaaaattctcctttcctcttatttccgattcgccaatttttcctgaaaccctaatcctaatcccagattcctcctgtctacatcgattagcaaatggcaaccgaggacccggcagtcgtggcagaccccgcacccgagacgggggaggacaagactgctgagaccaaagctacttcaaaatccggcagagcaaagaaagccaaagaacccaaaaccaagaaagctgcagctcctaggaaaccacgggctgctcctactcatcctccttacgaagagatgatcaaagatgcgatcgttactttgaaagagaggacaggttcaagtcagtacgccattgctaagttcattgaagagaagcagaagaatcttcctggaaatttcaagaag

SEQ ID NO: 234103 - DNA, 406 bp, Gossypium hirsutum
gttttcattgaaaaccctagacctcccaacgaagtagcagagccgcagtttctctgtcgatatccgaaacaagaaatggctgtcacattcaacgacctgggttctgctgctggcttgaagaagctggatgagtatctccttactcgcagctacatctctgggtaccaagcttcaaaggatgatattaccgtctacgcagctctatctggtgccccatcgtctagctatgtcaatgtttctcgatggtacaaacacattgatgcccttttgagaatctcaggtgtttctgaagaaggctgtggtgtgactgttgagggatttgctcccgctgaggctgttgccactccttcagttgctgattccaaggctgcagctgctgaggatgacgacgacgatgatgtagatc

SEQ ID NO: 234104 - DNA, 403 bp, Gossypium hirsutum
aacgagacgaggttatcacggttggttcaatctttgcttctacggtgttaagaggtatcaagtttctagaaaatcactggcacgagctatgctatgacataaaaacaggtcgattaagcgattggatcaccgactcaggatgcagaaatgcggcatcattggtcatgaagcctaatccagaacaggctggtttgatagaaaatatatgtaattgtaaatcatgggaaggaatagtcagaaagctatggcccaaagcaaggtatattggttgtgtttgtactggcgttatgagacagtatattgcagaactcgagttctattgcagagggctccctttagtttcaacttcttatgcttgctcggaagctatttgtgggattaacttagaacctctatgtaaacc

SEQ ID NO: 234105 - DNA, 413 bp, Gossypium hirsutum
ctctgagtgaagatgactactttgagccttacttccccttgcattgttaaagttgcaattcccgaacgattttcaagtgctattgtcaaagccccaacatctcttggatctgttaaaagcatctccaagtcttttggcttgaaatgttcctccaatttcagaacctcaatggcaacttacaagattaagcttgtaggaccaaaaggtgaggtgaacgagtttgagtcccctgatgataagtacattctaaatgcagctgaggaagcaggggttgagctaccatattcttgcagagctggagcttgctgcacatgtgccgggaagatgatttcaggttctgtggatcaatctgatggttctttccttgacgataaacaaatggaggaaggttatctgctgacttgtgttgcgta

SEQ ID NO: 234106 - DNA, 410 bp, Gossypium hirsutum
aaaaaaaaaaaaaaccccaaacagacaatagcctaggacaggaggatctctcagggtttaggtgatggcttcaaagcggatcttgaaggagctcaaggatctccagaaagatcctcctacctcttgcagcgcaggccctgttgctgaagacatgtttcattggcaagcaactattatgggtcctcctgacagtccttatgctggtggagtgtttctagtcaccattcatttccctccggactatccatttaaaccaccaaaggttgcattcaggacaaaggtctttcacccaaatattaacagcaacggtagcatttgccttgatattttgaaggagcagtggagccctgccctcaccatatccaaggtattgctatctatctgctcactattgacggatccgaatcctg

SEQ ID NO: 234107 - DNA, 388 bp, Gossypium hirsutum
gctttatcaaactcaaatcttagtctgaacaacatggtcaaaacacccatcagatactatctggttgatgcatgcaccgactcaaccttcaggggaaacccagcagcggtttgtttgttggaggaagaaagagataggaaatggatgcaagcagtggctgctgagtttaatatctcccagacttgttacttgactcggatccccaattgcacctctacaaacaccaggtttcgatttatatggtttacccctgtcaccgagggtaagctatgtcgtcatgcaaccttagcatctgctcatactctctttacaaatggttgggtgaatgtaaacattatcgaatttgatacattatgtggaatcctaactgctacaaaggttgcagatg

SEQ ID NO: 234108 - DNA, 403 bp, Gossypium hirsutum
ggcggcttctgcttctatttacaatcttctcactctcctgctcctttctggcatcccttttaccttctccgagctcgttaaagagcagcctctggtgttgaaataccacaatgggccactcttgaaggggaagatcactgttaatctcatttggtacgggaagttctccccaacccaacgctccataatcgtcgatttcatcaactctttgagctccgccgtcaaacccaaggttccgtcggcgtcgttttggtggaaaacgacggagaaatacaagtccggttcctccactttggtcgtgggcaaacaaatcctcctcgaaaattacccgctcggtaaaatccttaagaacccacacttgccggcgttggccgggaaattcaacggcgtaggtacggtcagc

SEQ ID NO: 234109 - DNA, 408 bp, Gossypium hirsutum
aatgggagttggtttaggttattgcattgccgctgctgtggctaatccagaacggcttgtggttgcagtcgaaggggactcgggattcgggttcagtgctatggaggttgagacattggttcgatacaagttgcctgttgttgtgatagtctttaacaacggtggtgtttacggtggtgaccgaaggagccctgaagaagtaagtggccctttcaaagatgaccctgcgcccacttcctttgttcctggtgctgcttaccatactttaatcgaagcttttgggggaaagggttaccttgtcgggacacctgacgaattaaaatctgccctttctgaatccttctctgcaaggaagccggttgtgataaatgtgataatcgatccctttgccggtgcagaaagtgggag

SEQ ID NO: 234110 - DNA, 415 bp, Gossypium hirsutum
gaaaaacttaatcatggctcggttgacgttcgtgacctccatcatccttctgctatgctccgttgccgctggatcaactttcgacgactccaaccccatccagatggtatccgatggcctcaccggcttcgaatcctccgttcttcgtgtcatcggtcacactcgccatgctctctccttcgcccgttttgcatacaagcatgggaagaggtatgaaaacgtggaggagatgaagctacggtttcagattttcgaagacaacttggatttaatcagatccactaacaagaagggactgccttatactcttgctgtcaatcagtttactgattggagctgggaagagttccagaaacacagattgggggctgctcaaaactgctctgctaccacaaagggcaatcaccagctcact

SEQ ID NO: 234111 - DNA, 411 bp, Gossypium hirsutum
ccaaatcgaaatttaaggccaaaaagacacaagggttactaattaaattaatcttcagcgaatatgttggtttatcaggatcttcttacaggtgatgagctcctctcggactctttcccatacaaagaaatcgagaatggaatgttatgggaagtcgagggaaagtgggttgttcaaggagctgtcaatgtagatattggggctaacccttctgcagaaggtggtgatgatgatgaaggtgttgacgatcaagccgtcaaggttgtggacatcgtcgacactttcagacttcaggagcaacctgcttttgacaagaagcagtttgtgaccttcatgaagaggtacatcaagaacttgacacccaaattagagcctgaaaagcaagagtctttcaagaagaacatcgagggg

SEQ ID NO: 234112 - DNA, 408 bp, Gossypium hirsutum
ctcgaacccaacaatttgttgcatttctgggtacacttcatatttcaatttcatcaggtaccaaattttatttctccacgggagggaaagttagtgttaggcgaatcaatatgaaatcgccggcgttagcttcatggaaagcccctctaaagttcaggatgccaacagctgaaaatttaatacccattaggcttgacatagaagtcgatggacagcgctataaagatgctttcacttggaacccttatgatccggattcagaggtggtgatgtttgcaaaaaggactgtaaaagacttgaagcttgcccctggtttccttccgcaaattgttcaatccattcagtcacagcttgccacctttcgatcatatgaaggtcaagacatgtatgttggtgacaagatcattc

SEQ ID NO: 234113 - DNA, 423 bp, Gossypium hirsutum
  unsure (1)..(423): unsure at all n locations
gcgagatcaaaagccagcagcgcagcagctaaaagagcagtcttttgacaattattcgccatgggtaaggttcacggatctctagctcgtgccgggaaggtgagaggccaaactcctaaagtggccaagcaagacaagaagaagaagccccgtggccgcgcttacaagcggatgcaatacaaccgacgcttcgtcacagcagtggttggatttggcaaaaagaggggacctaactcatctgagaagtaagagatctatgtaggtgaagaaggcaagaagccttgttgaaagctttgatggattttaagtctttgttttcttttgataatgtttttatgatattggtttcaaggattggattgaactgccattttgtttgctagatattatgtgatattgntatcaattatcttaatttttggg

SEQ ID NO: 234114 - DNA, 410 bp, Gossypium hirsutum
cttctttcaaccgcgcctaataaccgctcggatttttctcagacgtgaaaaaaatggggctgtctttcaccaagctattcagccggctatttgccaaaaaggagatgcgtatactgatggttgggcttgatgctgctggtaaaaccaccattctttacaagctgaagttgggagagattgtcactaccattcccaccatcggtttcaatgttgagaccgttgaatacaagaacatcagcttcactgtttgggatgttggtggccaggacaagatccgaccattgtggagacactatttccaaaacatgcaaggacttattttcgtggttgatagcaatgatcgtgaccgcgtggatgaagctagagatgagttgcacaggatgttgaatgaggatgagttgagggatgct

SEQ ID NO: 234115 - DNA, 424 bp, Gossypium hirsutum
gtttataacaggtagaaccacagagagactaaagttcttcagacttcgtgtggagcagcgaatattagcaaacttcttagtgttgactgacatcatcacatcaccaactcctaggttggtcttggagcacctcaacagatgagatttcaatagggttgacactactttgacaaacgacaacattcttttctacatatatacactgttgacggcgttcgattattgagattcacacggcatgatgcacaaagctgttgagcctcacaatggcagggtagatcaagagctgatcgcactgcctttgagagacaggagacttgatgaattttaccagtcctgcaaagagtataagaggccacttgcttctaggtactacaaagggcctgagcttctggtagattgacaagactatgactattccttg

SEQ ID NO: 234116 - DNA, 425 bp, Gossypium hirsutum
acaggctggttaagaccatcgtcgacgatgaggattacaccatccgcaccgtggagcaagctaaagatgctctttgcgctttgagagaacttaacttcaataaaagatcgacggtgcccaccaccactacaacctcgttcctgaagttacacgaagcgctgttctgtcctgaggagtttaaatgtcctctttctaaagagcttatgagagatcctgtcattgtagcttctggccagacatacgacagactctttatacagaaatggctgaatgcggggaataggacttgccctcacaccgaacaggttctttcacacacgattctaactccgaatcatctaatcagggatatgatattgcagtggtgcaagagtcagggaatagaattgccgaaccctgttatggatgggaaagaggagggggtc

SEQ ID NO: 234117 - DNA, 363 bp, Gossypium hirsutum
gcagtatctcccaatccttcttgctgcgattaggccttcaagatctcagttgtggaaccgaagcgctctttcctatcaagccatggctctgatcttgcatgcaagaaaaacaaacaaaaatgcctttaaggcactcattgctgcagaatatagtggtgtgcaagccaaaatggctgagaattttgagatgggtgtgttaaataagactcctgagttcatgaagatgaaccctttggggaaggttcctgtggtggaaacacctgagggtccggttttggagagcaatgccaatgctcggcttgttgctcgctcacaaggtaacaaccctatatggggttctacattgaatgagcatggtcatat

SEQ ID NO: 234118 - DNA, 428 bp, Gossypium hirsutum
ccgcgctaccgctaccagtgaaagccgcactattcagtcttcggtcgccgctccccctttctatctattcaatctgaggtatgtcgacggccgtggcagccaccgagaccagcaaagacccaacccaacctacctccgaagtcaagcttttcaatcgctggtcttttgaggatgttcaggttactgatatctctttgagtgactacattggtgtccaagcttcgaagcatgcaacctatgtgccgcacactgctggaaggtactcagtgaagcgtttccggaaggctcaatgcccaattgttgagaggcttacgaactcactgatgatgcacggccgaaacaatgggaagaaacttatggcagttaggattgtgaagcatgccatggaaattatttatctcctgactgatcagaacccaattcaagtc

SEQ ID NO: 234119 - DNA, 428 bp, Gossypium hirsutum
gcttcatattatcttttttagttccgacaaaagaaaacgaaaaaaaagaagaagaaatacaatcgttttctttttgaagtcgggttttagtttttggggtgaaaaaaatgttgggagtatttagcagtgcgatagtgtctccgccggacgagctggtggcggccggttgccgaactccatcacctaagataacggcggacgctctggtgaaacggttccttgagacgaactccttcggcgtgtccatgcacatcggagaccatgtccaattcgcttattctcaccataaagagtctcctttacagcccagatcatttgctgtgaaagacgaaatcttctgcttgtttgagggagcccttgataacttggggagtttaaagcagcaatatggtctggcaaagtcagcaaatgaagtgatattggtcatt

SEQ ID NO: 234120 - DNA, 431 bp, Gossypium hirsutum
aaaggatcttgctttgcctaatttgtaagctttgaggttgactgaaaaaactatggcggaagagggacaagtaatcgcctgccacactgttgattcatggaaccagcagctcgagatgggaaaccagtccaagaaactggtggtggtggatttcacagcatcatggtgcgggccatgccgttttatatcaccaatcctggtggatcttgctaagaagctgcccaacgtcatattcttgaaggtggacgtggatgaactgaatactgtggctcaggagtgggctattgaggcgatgccaacttttgtgtttctgaaagaaggcaccataattgacaaggttgtgggtgcaaggaaagaagaattgcagcagaaaattgcctttcattcatctaacccggtgcaaacagcatgaatcaacatttaaatgtact

SEQ ID NO: 234121 - DNA, 428 bp, Gossypium hirsutum
cgaaaatatttcttttcttgttttgagagagagagacagccggcgggaaggcgtcgagatcgatttaagctagtcagttgaagctgccaggcattggaacacgatgtctacggttgaagcaccactatatccaatagctgtcctgatagatgagctaaaaaatgacgatattcaacttcgtttaaactcgatccgtaggctttcgacaattgcacgtgctctcggggaagagcgaaccaggtcggaattaattccatttctcagtgaaaacaatgatgatgacgatgaggtgcttcttgcaatggctgaggagctgggagtgtttattccctatgtcggcggtgttgagcatgcccatgttttgctgacgcctttggaaaccctttgcactgttgaggaaacctgtgtaagggacaaagctgttgagt

SEQ ID NO: 234122 - DNA, 358 bp, Gossypium hirsutum
caaaaatctctctcagtttcttctctatccccctaaaactctttagcaggaggcctttgttaaccaaagtgagagagtgcatttcagttcacattggtcaagctggcatccaagttggtaacgcctgttgggagctctactgtcttgaacatggcattcaccctgatggacaaatgccgggtgacaaaacagtcggaggtggggatgatgctttcaacacctttttcagtgaaaccggcgctggaaaacatgtccctcgtgctgtttttttggatcttgaaccgaccgtaattgatgaagttagaaccggggcttattgtcaattatttcaccctgaacagtttattagtggcaaaaa

SEQ ID NO: 234123 - DNA, 420 bp, Gossypium hirsutum
attagaactcaaagtcccagctaatattagaatcatgggtgttgtcacttatgactatgagaatacctgcccagtcgcccctgccaggcttttcaaggcctttactgttgaagctccgaaagtttggcccacggctgcacctaatgcagtaaagagccttgaggttgaagctaatcctagctctggaagtatcgtaaaaatcaactttgttgaaggccttccattccaatatatgaagcaccagatcggaggacatgatgaaagtaatttttcatacagttacgatttaatcgaaggtgggcctttgggggataagcttgaaaaaattagctatgagaacaggtttgaggcagctgcaggtggagggagtatttgcaagagctcaatgaaattctacactataggcgataatgttatcac

SEQ ID NO: 234124 - DNA, 364 bp, Gossypium hirsutum
ggcggcttctgcttctatttactattttctcactctcctactcctttgtgccgtcccttttaccttctgcgagctcgttaaagagcagcctctggtgttgaagtaccacaatgggccactcttgaaggggaagatcaccgttaatctcatctggtacgggaagttctccccaacccagcgctccataatcgtcgatttcatcaactctttgagctctgtcgtcaaacccaagattccgccggcgtcgttttggcggaaaacgacggataaatacacgttcgctttctacactttggtcgtgggcaaacaagatctgctagaaaataacccctttgataacatgcttgaggacccacacttggca

SEQ ID NO: 234125 - DNA, 428 bp, Gossypium hirsutum
caattttccttttgcttttgttgtatgtagtcgtaggatcagctgagcagtgtggaaggcaagcaggcggtgctctttgccccggtggtctatgttgtagccaatttggctggtgtggcagtactgctgactactgcacagttcctggttgccaaagtcagtgcagcggtagtggccctgcccctgggcctggtgggctaaccaatcttatatcaagagagacctttaatcagatgcttttgcataggaacgatggggcttgtcctgcccgtggcttctatacatatgatgctttcattgctgctgcccgttcttttcctgcatttgctacaactggtgaccaagctactcgcaagagggaaatagctgccttcttagcccaaacttcccatgaaactactggtggggcagggtgggctgcaccggat

SEQ ID NO: 234126 - DNA, 427 bp, Gossypium hirsutum
aaagaaaacaaggaattcaagatcattgatttatatgttggttttgcaatcttcaccgctctgatccaggtagtttacatggcaatggtgggatcatttcctttcaattcatttctttctggagtgctttcttgtgttaggaacagcagtccttgccgtttgtcttcgtattcaagtgaataaagaaaacacggaattcaaggatctaccacctgagcgagcttttgcagattttgttctttgcaatttggtgctccatttagtgatcatgaatttccttggctaaatcgcgcctccaggtttgctgtggactgctggctgtgattcatatttaaagcatgaaatgaaattcttaggtcattactatgagtttatgcatatagcgtatatgatcaggaattgtagtaagaattcagtggtgtctttt

SEQ ID NO: 234127 - DNA, 407 bp, Gossypium hirsutum
ggcggcgggagcggcggcggaaagtgaaccacctcaaaagcaatctccttcgtccaccggaacatcggtttccttccactcccgcccttcctctctccgaataccttttttttctctttcaaaaaaatttcaaattaacagtgaaatatccaggtttaaattgccaatggcgaaagttagcaaagtgcggaagtctgattctcagcataaaagagtgccttatccattgccctctcatcctaagagggctggaaaaggttccagaaagaagagatgttccaaagctttggagaagaaagattgggaagctgcaaaatgttccgtttgtctggagttcccacacaatgccgttctcctcctttgttcctcttacgataagggttgccgcccttacatgtgtgcgacta

SEQ ID NO: 234128 - DNA, 393 bp, Gossypium hirsutum
gtcagcaatttgtttagaagatcatgttgcctcttgtacacaagggatttgatgatctaccttaggagctgaacatttcagcttctcataaatctactaacgcgcctaaacagccttgagacaccctccacgacttggtatctcatcacgctgacgacacttgctgcatgggcaaaggcaaccgtgctcggtgcggcttatgtccgccatgaacgtgctgcttcagttcatcaaagcttgtttggtgggtttgatgacatacactgccttgtcttagggagcttgaacaatccatctatgctgtataggcagcctggtctttccaaagcgtgcaatgaggcgatgattgtgattgaagtcaatagcacactaagggatctgggtgcataccct

SEQ ID NO: 234129 - DNA, 427 bp, Gossypium hirsutum
ctaggcttgtagctaagctaagctaaacgagacttctaagacatggatcttcttgactcctttagctcattagctcttattctgtatctcattgtcttaactctgaactctaaaggtgcattaggtgcttctttcacatttgtcaatcgatgtggctacacggtgtggcctgggatattagcaaatgcaggcagtcctacactcgacagcactgggttcgagctaccaaaggactcgtctcgttcatttcaagccccaactggctggtccggtcgtttttggggtcgaacgggctgcacatttgacggatccgggtctggtacgtgcgtaacgggcgactgcgggtcgggtcagatggaatgtaacggactcggagctgctccgcccgtgactctggctgagttcactctgggaacgggtgggcaag

SEQ ID NO: 234130 - DNA, 426 bp, Gossypium hirsutum
atttcgtacctctaactggcaatcaatcactttcatggtttttttagagagaaaattgtatgtccagcgagagagttcccgttgagttattcaacggcgtttacgggcttgaaaaaatcatgctactctagactcgaggcagctctgtcctggcgtatttgtatggcggacacctgacatcttggaagaatgagcttggagaggcgtttcttttcttcagtcgtaaggcattgttctagccttcaaaagcaattttaggaagaattactatatgttgtccccaattttcaaattatggtcctcttgagccgtatggctatgccagaaattaacattggagcattgacactgacccttctgcttttccgacaaactcatccagcaaagcttacattgatttgatccttaagccttctgaagaagata

SEQ ID NO: 234131 - DNA, 433 bp, Gossypium hirsutum
  unsure (1)..(433): unsure at all n locations
gttattttgccttttcgctatcgtctttgcctatcaactccacggcgcagatccgaggagtctctatttttcaatccaaacaacccctctaaacactctcttcttttattgctcctactcttccagtcatggcaggcttggcaccagaaggatcccaatttgatgctcgtcaatatgaccagaaaatgactgagctgctccagactgatggagatgactttttcacaagttatgatgaagtttatgacagttttgatgcaatgggacttcaagagaaccttctgaggggtatctatgcatatggttttgagaagccttctgccattcagcaaagaggaattgtaccattttgcaagggtcttgatgtgattcaacaggcacaatccggaactgggaaaacagcgactntctgctctggaattctacagcaact

SEQ ID NO: 234132 - DNA, 419 bp, Gossypium hirsutum
  unsure (1)..(419): unsure at all n locations
gcagatcccgatcccactggaagaatctggaattaaaaagcgatagggtttggttcgttgttaaaaagataggcagaggcatttaaaaagttttagaaattacttaggggaagcctaatcagagagatccatggagtttttagctaaagaatacgggtacgtagcgttagtggtggtggcttactgctttctcagcatatggatgggtatccaagtagggatggctcgcaagaagtataaggtttattaccccaccctttacgctcttgaatccgagaacaaagatgcaaagctcttcaactgtgttcagagagggcatcaaaactcgctggagatgatgcctatgttctttgtactgatgattttgggagggatggctcatccttgcatctccggtgcgcttggactnttttacaccg

SEQ ID NO: 234133 - DNA, 395 bp, Gossypium hirsutum
cagagagcagcacagaccaacaaatgcttatgcttataaatactccatacgccctctcactttctagctcattagcttctttctctttcccttctgctaccacgcgccggcttctttttctttcttacacttttacccttcctccccctagattcccccattcctccctggtttcctggagggtatccccgtctttttgcacccaagcttcaaccgccaccgggaccatgggtgacgctccccacgttggtatggacgctgtccaaagacgcctcatgtctgaggatgaatgtattttaatggacgagagtgataatgttgttggccatgaatcgaagtacaactgtcatttgtgggaaaagattctaactggaaagatgctgcatagagcattc

SEQ ID NO: 234134 - DNA, 258 bp, Gossypium hirsutum
gatgaagaaaattatgggttccaaaggcatttatatctttgctgagccttgagggtcagctgtgttggcattcgcacaggatggggtagatcaagggcttgttatgaacttgtacacagatttttgatcttaaggtaaagtcattataaaggaccaagacaagctactattcacgcgacacaaaaacactgattcttttggggtgtgaaacaaatttaattactgtgctgtccagtcatgagttgcttcactgttact

SEQ ID NO: 234135 - DNA, 436 bp, Gossypium hirsutum
acgctttcccactatctgaactgaaaccgtgtgggaaaagcctgagagaggagaaaaaaatcaaaaggcaaaagcaactgaaatgagtggagcctcgacggcggcgtatttagctcgaagagcggcgcaaaaggagagggttcggatcctctaccgccgtgccctgaaagacacactcaactgggccgtccatcgccacctcttctatcaagatgcttctgaccttcgcgagaaattcgaagccaacaagcatgtggaagatcttgatacaattgacaaaatgatagatgcaggtgaagcaacttataataagtggcggcatcccgatccttatatcgttccttgggctcctggtggttccaagtttactcgaaaccctgtcccaccttctaggatcgagatcttgtatgattatggtcaagaagaaaatgactaa

SEQ ID NO: 234136 - DNA, 449 bp, Gossypium hirsutum
tttccggggtgagcccacccgtccggtaaaccctattttgttaccctattttttccagctgtagttgcagtccaagtgggggcatatccagttcaatactcctaccgtaaagatgaacaaggaaaggctcatgaaaatggctggtgcagtccgcactggtgggaagggtagcatgagaaggaagaagaaggctgtccacaagacaaccaccaccgacgacaaacgattgcagagcacccttaagagaataggagtgaatgctattcctgcaattgaggaagtcaacgtattcaaggatgatgttgttatccagtttattaatcccaaagttcaagcttctattgctgcgaacacctgggttgttagtggctctcctcagacaaagaaattgcaggatattctccctggaatcatcaaccagttgggacctgataacttggacaacttga

SEQ ID NO: 234137 - DNA, 420 bp, Gossypium hirsutum
gcttcctttgtcccccatcctccgatccgtctctacccgcattcgtcccgccggatttaacaagttttcaaacgaagaatgagggaaatccttcacgtacaaggcgggcaatgcgggaaccagatcggatccaagttctgggaagtggtttgcgacgagcacggcattgaccctaccggacgttacaccggaaactccagtctacaattggagcgcgttaatgtttactacaatgacgcttcttgtggaaggtttgtcccacgcgccgtgctcatggatcttgagcccgggaccgtggatagtgtgagaaccgggccttatggtcagatctttaggcccgataactttgtcttcggccaatctggagctggtaataattgggctaaggggcattatactgaaggagctgagcttattgac

SEQ ID NO: 234138 - DNA, 437 bp, Gossypium hirsutum
aataaatcggaattccccagcagcaatggctactccaagtgtagagtatttgcctcctccattggatgctactgcacagcaacccgctatctttgatggaacaatcaggttgtatctggcttatccttgcccttacgcacagcgcgtgtggatcgccaggaattgtaagggtttgcaagacaagattaagttggttcctttgaaccttcaaaatagacctgcttggtacaaggaaaaagtttaccctgaaaacaaggtgccgtccttggaacataatggcaaagtcattggggagagtcttgatttgattaaatatgttgatagcaacttcgaagggccgtctcttctacctgatgatgctgacaaaaaggagtactttgagacgacgttatcacacatggacgaatttctagggctggtgtatgctacatttaaag

SEQ ID NO: 234139 - DNA, 438 bp, Gossypium hirsutum
gtagccgccgcctgcgtctctctcttcatctctctgaaccaaaaagtctttagcttttcgcttcgagagagaccatgttggtttaccaggatctcatctccggtgacgagcttctttctgactcattcccctacaaggaaatcgagaatgggatgctgtgggaagttgagggaaagtgggttgtgcaaggagctgtcgatgttgacattggtgccaatccttcagccgaaggtgctgatgaggatgaaggtgttgatgaccaagctgtgaaggttgttgacattgttgacactttcaggcttcaggagcaaccccctttcgacaagaagcagtttgtcgtgttcatcaagaagttcatcaagaacttgacaccaaaactggatgcggaaaagcaagagtccttcaagaaaaacattgagggagcaaccaagtttttgg

SEQ ID NO: 234140 - DNA, 436 bp, Gossypium hirsutum
cttctcaatgctggaattcaggctgaattgattttgggatccattgcaaggaaaacaaaaaagaatggtgattttgaaggggattacttggaagatagggttacttttagcgaggataagttgatggactctgatagcaaggctgtgatgatggcttgggagaaaccattgatggaagctcatgctaaagctgtttgctctggaggtggtaacgttctaaatgttggatttggaatgggtcttgtggatactgctattcaacagtatggtccagccacgcacacaatcattgaggctcatccggaggtctatgcacgcatgcttcgcactggttgggacaagaaggataatgtgaaaataatatttgggcgttggcaagatgttctttcaaaacttgaatcttatgatggtattttcttcgacacctatggagaat

SEQ ID NO: 234141 - DNA, 422 bp, Gossypium hirsutum
aaaatctccaactttccctttgtcaaaaaagacttctgttctgttcggtatttgcagggaaaaaaaaagataatgtgtttgactgagagtattcaatattctggcgcttatgcatcgatgggaattgataatagttcacgacttgatcgattctctaacaactttagagttgaagtggttcgactcaatgaagatgacatggagtttgatatgatcgttattgatgcagctattgccaattcattcaggaggatccttatagctgatcttcctacaatggcaattgaaaaagttctcattgcaaacaaaacatcaataatccaagatgaagttcttgctcataggttgggcctcgttccaatccgtgttgacccaaggctttttgattatctttcagaaaatgatcagccaaatgaaaagag

SEQ ID NO: 234142 - DNA, 369 bp, Gossypium hirsutum
attttagattaagcaaccgtgcatcctcatttctatctctgacgagccttgtggttctattgaaatggatagctatggctacagcatctctgctacgatcattccgacgaacagacatcgttgcatatactatctatgactatagatgccttactaacaatggccaaacctccgtaggaattaattgaacaagcttttgttgagctgtcaagaaaaaacctgccggctatgatgtcattggtattgattagggcacaaccaactgctgtgttactgacatggagggaaagaatccaaaagttattgacaactgtgaaggtgcatggacaacaccttctgatgttgatttcaaccaaaaaggagagcttc

SEQ ID NO: 234143 - DNA, 434 bp, Gossypium hirsutum
cacttgcatagctagcaaagctaaagagtttgcaagatggggagcatggatagcttttggcagctgggggattatcttcgaggacaatcaaaagcctcagaggataaccaatggctgatggttgcctctaaattggctgagcagacgaggacaaagggtgaacgcctgagcaatcttgatctttcgaagggtccagccgaaataaggacaagggataaatttggtttccgggaagacaacaaattcgagaaccttaacttcaatatgttaaacttggactccaagattggagataatgtaagcaaaagctcattccgaaatggtacctacaatataaatgctgtttaccagaaaaataatagcaatagcctgggaaacctggctggcaacaaatatagcggcaataatcatagcagctaatatgtcaataataa

SEQ ID NO: 234144 - DNA, 431 bp, Gossypium hirsutum
gaggagccctcggaccttgcatctctattcggaaaacaaataatttggtgagggtgaatgagatcggggatggtggtacatatatatggaagctgcgtacacttactagtaaaacatgtattggtttcttcttccaaggaaactatgagcataaacctcaacccggcgctgcattcttggtacaggtcataacacgctatagagatggcaacatgggaattcgaagacgggtgacaaccgctgcaagaagatgggttgcaaagcagtcaccatatatatctcgccgggtttgatcaggaagcagcaacttcagttatggcccgactcgctattcatcgagctgaaacatgtcaagctagagatgttatcagatggttggacgataaccttatttgttgtgcttccaagtttggagactatatacaggaaga

SEQ ID NO: 234145 - DNA, 425 bp, Gossypium hirsutum
cgaaaagaaaaaatggctttgaattttaatcccatcgcctcgaaatctcagaagctcccttgctttgctcttccacgaaaggccaccctcagatctcccaagttttccatgatctccaccattccttctggctccaaagaggttgggaatctgaaaaagcctttcacgcctccaaaggaggtgcctgttcagatcacccactccatgccgcctcacaagattgagatctttaaatctttggagggctgggctgagaacaacattctgactcacctcaaaccagttgagaaatgttggcaacccgccgactttcttccagatcctaattctgacggatttcatgagcaagtcaaagagcttaaggaaagggcaaaggaaatcccagatgattactttgtagttttggttggtgatatgatcactga

SEQ ID NO: 234146 - DNA, 391 bp, Gossypium hirsutum
tttgaatctagggatttgcgggtggagaagacgagagctcatctctctgcttcaaagctcctgtccaggtagaattctcttcttcctttgcgttgtgttctttgttgttcagtcgccatggcttcaaagcggattttgaaggaactcaaggatttgcagaaagatccacccacttcttgcagtgctggtccagtagctgaagacatgtttctttggcaagcaacaatcatgggaccctcagatagcccttatgctagaggtgtgtttatagctaccatccatttccctgcagattatcctttcaagcctcctaatgtcacgtttaggaccaaggtctttcatcctaacattaacagcactggacgcatttttctggatatcctcaaagaac

SEQ ID NO: 234147 - DNA, 426 bp, Gossypium hirsutum
caaagagttgccagatgaattctcttggagcacaagggaatattacgccactgctattcgggccaccagaattaaaagagcacctgttcatgcatctgcaaactggtatctcgaaaatgtcttgcctgtactacagagttatgggattgctgcaatttctccattctctcaccgtttgtcttttgacaacttgccaagtgagatccagcaactacgttgtaaagtcaactttaaagcacttgtttttgtcccgcacattagagcacttggagatgccattgtccatcgcctcagatatcctcctggtgaaactgaagcacttagcagtgactatctcagggtgaccactgatcaaaatgacaaacaaaggccacaaaaatttgtcgtcttacatcttcggtttgataaggatatggcagcccattc

SEQ ID NO: 234148 - DNA, 337 bp, Gossypium hirsutum
gtttgtaacttttagtgcttacagagcattgttaaccaagaaaagaggaagatattggcttaaccatggcggacaaggtatacactattatgaccaggaagttcaagaccaacactctatctttcagtaaacaactcatcattgatgaattgcatgctgagaggcccaatgtgcctaacgcgcagatcaaggagacgcttgatcgaatgtatgtagcgatagacacagattcgctctttgtgtgcaagttcaggacatacactgtaggtggcaaagctagcggatctgttacgatctattccgcttgggcaagcgctataatatatacagctaaata

SEQ ID NO: 234149 - DNA, 430 bp, Gossypium hirsutum
gtccgccgctcacatcaacctcaaagtcaaaggccaggacgggaatgaagttttcttcaggatcaaaagaagcacacaattgaagaagctcatgaatgcatattgcgaccgacaatctgtggatttcaactcgattgccttcttgttcgatggtcgccgcctgcgaggtgagcaaactccggacgagcttgagatggaggatggtgatgagatcgatgctatgcttcaccaaaccggtggtactgtgtgaagcgagtactactttgccgcatttagtatttgatgagttagttatggtctgattatgtaagatgtttccaatgtttttatatacgaccttattgccatgttatgaagacttgtggaccttgttttgaatcatcttgctcttatagaagagcttgagtttctagtgtttacaaagtgagat

SEQ ID NO: 234150 - DNA, 395 bp, Gossypium hirsutum
attaaaccttctgcttagcttaaaaaatcttggatctgcactctacgactggcctcggaatcgggaatggctccgcacatgaagattaagatcggtatttacggatttggaagaatcgggcgtttggttgccagagttgcttttcaaaggaacgatgttgtactcggcgccgttaacgatcccttcatttacaccgattacatgacatacatgttcaaatacgacagcgttcacggtcaatggaagcaccatgatcttaaggtcaaagactctaaaaccctcctcttcggcgaaaaacccgtcactgttttcggaatcaggaaccctgaggagattgcatggtctgaagccggagctgagttcgttgtcgagtcaactggagtgttcactgacaa

SEQ ID NO: 234151 - DNA, 430 bp, Gossypium hirsutum
aaccccttccgcttcgccatggcatgagagaagaagctgtcgaacccaatgagggagatcaaagtccagaaacttgtcctcaacatctccgtcggtgagagcggcgatcgacttacacgtgccgccaaggtcttggaacagctcagtggtcaaaccccagtcttctccaaggctagatacactgtgagatcttttggaattcggcgtaatgagaagattgcttgttatgtgactgtgaggggggagaaagctattcatcttcttgagagtggtttgaaggttaaagaatatgatcttttgaggaggaacttcagtgatactggctgctttggattcggtatccaagagcacattgatcttggtatcaagtatgacccttcaactggtatctatggtatggacttctatgttgttctcgaacgagctgggt

SEQ ID NO: 234152 - DNA, 412 bp, Gossypium hirsutum
aatgtctctttacccttctctcaccatgtcattgctgtctttttccttcttgttgctgtttgcttttagtgccaaagctgttgttcctccatctgaaacttttaggtttgtcaacgaaggggaatttgggccttttattgttgaatatggtgcagattaccgtgtcataagcatagctaatgcccccttccagcttgcgttttataacaccacgcctaatgccttcacccttgcgttacgcatggctacaacacgttccgagtcgctcttccgatgggtttgggaggccaacagggggaaccctgttcgcgagaacgccacgttctctctcgggactgacgggaaccttgtcttggctgatgccgatggtcggattgcttggcaaagtaacactgccaacaaagctgtggta

SEQ ID NO: 234153 - DNA, 434 bp, Gossypium hirsutum
gacctggaatcggagggctccaaacagctgcagctgctagggatcaatatcgagcgttgggagaaaatgtagccaagttaagaaccgacctcatgaaagagcagcttgctatttttcgttctcaactcgaagaattcgctcgaaaacacaagaatgatattcgtaaaaatccgtcttttaggtctcaatttcacgaaatgtgtgcaaaagtaggagtggatcctttggcttcaaataagggattttgggctgagcttttaggaatcggtgatttctattacgaacttggagttcaaattgttgagatttgcttggcaactaggcctcttaatggaggtttgattgacctgcaagaactctgcaaattgcttcgtcagaaacgaaaacatgatcgcgaagctgtatccgaagatgattgtttgcgtgctataagt

SEQ ID NO: 234154 - DNA, 428 bp, Gossypium hirsutum
ctctcaacgctatctttttgttccttttccaagggagagtgtgatctgttcgtcttcacttcatttcactaacccatggctctttccgtcgagaaaaccgccgccggccgcgagtgcaaggtcaaggacatgtctcaggctgacttcggtcgtctcgagatcgagttggccgaggtcgaaatgcccggtctcatggcttgccgagccgagttcggccctgcccaacctttcaagggagccaaaatcaccggttctcttcacatgaccatccagaccgctgtcctcatcgaaaccctcaccgccctcggagctgaagtccgttggtgctcttgcaatatcttctctacccaagaccatgccgccgccgccattgcccgtgactcggcagccgtgttcgcctggaaaggtgagaccctccaggaatactg

SEQ ID NO: 234155 - DNA, 428 bp, Gossypium hirsutum
agcgaaaccctagccactctctgctcaactcgccaatgggggcttataagtacgtgtcggagctatggaggaagaagcagtcggatgtgatgaggtttttacagagggtgaggtgctgggaatacggccagcatccatcaattgttagggtcaaccatcctactcgccctgacaaggcacgccgcttgggttataaggccaaacaaggttatgtggtttaccgtgtccgtgttaggaggggtggtcgcaagaggcctgttcccaagggtatcgtgtatggtaagcccacaaaccagggtgtcacccaattgaagttccagcgcagcaaacggtctgttgctgaggagcgtgctggccgaaagttgggaggtctcagagttgttaactcgtactggatcaatgaggattctacttacaagtactttgag

SEQ ID NO: 234156 - DNA, 409 bp, Gossypium hirsutum
ggctcaatcatatactttttctgttaaaatttctacaattagctcttgagtaggcgatggctctaaagcggatcttgcaggatcttaaggatctacagaaagatcctcctacctgttgcagtgcaggccctgttgctgaaaacatgtttgattggcaagctactattattggtccacctgacagttcatattccgggggagtgcttctaagtaccattcatttccctccggactatacatttaagccacccaaggttgcattcaagacaaaggtctttcaccctaatattaacaacaatggcagcctttgcctcgatcttttgaaggaacagtggagccctgccctcaccatatgcaaggtgttgctctcaatctgatcacttttgacggacccaaatcccgatgatcc

SEQ ID NO: 234157 - DNA, 434 bp, Gossypium hirsutum
ccctcttcgaattatccctcaccaaaaaatattcaaacgacgaccaccgtccaccggcgcctaagaggaaagagccgtttaaataaaatatggacacaattcttcataccgaacctctatctctcactcgcttacgcgccacttcgaattccaccgcttccattcaccatatgccttgccagctcatcttcgcgcctttccaccgcctttcctttcctttatccaccgtcaacgccggctccagttctcgcaggtcatccacttttgttgtcgccgcttgcggcactctcaccgccaattccgtctcgccaagaggtggagtatatacagttggggatttcatgacgagaaaagaggatttgcatgttgtaaagccaacaacaactgttgatgaagcactggaagctcttgttgaacacagaatcaccggtttt

SEQ ID NO: 234158 - DNA, 429 bp, Gossypium hirsutum
gagaaatacacaagaaaaaaaaacaagtgatctgataaattgaagactttatttctgttaacatccattatgagtactgctggtcaagtcatccgttgcaaagctgcggtagcatgggagtcggggaagccactgtcaatagaggaagtggaagtggcaccaccgcagaaggatgaagtccgtattaagatactcttcacttctttatgtcacaccgatgtctacttctgggatgctaagggacaaaaccctctgtttcctcgcatactaggtcatgaagctggagggattgtggagagtgtaagtgagggggtgactgatctaaagccaggtgatcatgttctccccatcttcacgggggaatgcaaggagtgtccccattgcttgtcagaagaaagtaacatgtgtgatctccttaaaatcaacact

SEQ ID NO: 234159 - DNA, 430 bp, Gossypium hirsutum
gagaaatacacatgaaaaaaaaacaagtgatctgataaattgaagactgtgggtctgttaacatccattatgagtactgctggtcaagtcatccgaggcaaagctgcggttgcatgggagtcggcgaagccactgtcaatagaggaaggggaagtggcaccaccgcagaaggatgacgtccgtattaagatactcttcacttctttatgtcacaccgatgtctacttctgggatgctaagggacaaaaccctttgtgtactcgcatactaagtcatgaagctggagggattgtggagagtgtaggtgagggggtgactgatctaaagccaggagatgatgttctccccatcttcacggaggaatgcaaggagtgtccccattgcttgacataagaaaggcacatgtgtgatctccttataatcaacactg

SEQ ID NO: 234160 - DNA, 358 bp, Gossypium hirsutum
ggcggcttctgcttatatttacaatcttctcactctcctgctcctttctggcatcccttttaccttctccgagctcgttaaagagcagcctctggtgttgaaataccacaatgggccactcttgaaggggaagatcactgttaatctcatttggtacgggaagttctccccaacccaacgctccataatcgtcgatttcatcaactctttgagctccgacgtcaaacccaaagttccgtcggcgtcgttttggtggaaaacgacggagaaatacaagtccggatcctccactgtggtcgtgggcaaacaaatcctcctcgaaaattacccgctcggtaaaatccttaagaacccacac

SEQ ID NO: 234161 - DNA, 421 bp, Gossypium hirsutum
gtagagatgaggaaaatcatgggtgccaaagttcttttcttctttgctttgctttgcttttcagctgtctcggcatttgcacaggatgaggaagaccaaggtcttgttatgaacttctacaaggattcttgtcctcaggctgaagacattatcaaggagcaagttaagctactgtacaagcgacacaaaaacactgctttttcttggctgagaaacattttccatgactgtgctgtccagtcatgtgatgcttcactgctgctggactccacaagaaggagcttgtctgagaaggagacagacaggagctttggcctaaggaatttcaggtacattgagaccatcaaagaagctgtagaaagggaatgtcctggagttgtttcttgtgctgatatccttgttctgtctgctagggaaggca

SEQ ID NO: 234162 - DNA, 424 bp, Gossypium hirsutum
gtgctttaaagtgtatggatacataagtatgaaacaagggattacctttttgcaagacttcaaactcggtcactacatgaagattcctcctagatccatgttcatagctcaggttggtggtacaataatagctgcattagcgcatttgacaacagcgtggtggcttatggttacagttccagacatatgcgacagagaaatgcttccaacggacagcccctggacttgtcctggtgattgtgttttacgatgcctctgttatctggggtctgattggacctcgaagaatctttggtgatcttggctattactctgccataaactggtttttcttagttggggccatagctcctgtccttgtttggcttgcatctaaggccttcccaaacaagccatggataaaacttattactatgcctgtgct

SEQ ID NO: 234163 - DNA, 425 bp, Gossypium hirsutum
ttcactccctagaataattttctctttctcacttccaccaacgaaaaagtcgtcgatcggatcacgtattagattgatattgtaaagatgtctccaactgaatcatcacgagaggaaaatgtttacatggccaagctggctgagcaggctgaacgctatgaggaaatggtggagttcatggaggaagttgcaaaaactgttgatgttgaggagctgactgttgaggaacggaaccttctctcagtggcttacaaaaatgtgattggggcaaggagggcgtcttggaggatcatctcttccattgagcagaaggaagagagcagaggaaatgaggatcatgttgcacaactaaaggagtataggggtaagattgaagctgagcttagcaagatctgtgatgggattttgagccttcttgaatctca

SEQ ID NO: 234164 - DNA, 425 bp, Gossypium hirsutum
tttagaagaaaaaaaatggagagaaaatctcaagccaaaccaattctcttcttctttgttttagtttcggcactaatcgaaacttcctacgccggtgacatcgccatctattggggccaaaatggtaacgagggtaccctgagtgatacatgtgccaccggcagatataaatacgttaacataggtttccttaacaccttcggcaatggtgccactcctggactcaacttggccggtcactgtaatccagcatccaacggttgcacctctcttagcggtgaaataaaaagttgtcaaaaccaaggaatcaaggtcatgctctcccttggaggtggcgcgggaagctactcactcgcttctcaagaagacgccaaaagcgtagctgattatctatggaacaacttcttgggcggtacctcgtcttc

SEQ ID NO: 234165 - DNA, 409 bp, Gossypium hirsutum
agtacattgagcagcttggccggtataagaagctctcctaccgtgttgtgttcccactcgagctgaaactgagcaatactgtggaagatgcagattctgagtattctctatttgctgtagttgttcacgttggaagtggacctaaccatgggcactatgttagcctggtgaaaagccataaccactggttattttttgatgacgaaaatgtggagatgattgatgagtctgcagttcagacatttttcgggtctgcccaggagtactcaagtaatacagatcatgggtatatcttattttatgaaagcctttgtgcaaacaagagctgagaaaagagggcttcgattttaccatgagtacaggtatccatttccccaaatctcaattttcttgaaccacctatgctttt

SEQ ID NO: 234166 - DNA, 384 bp, Gossypium hirsutum
gtaaaaggccatggatgggaatggaagagttcacccagattgtcctaatgctgcaaatccctaccatgaatgtggtggactctgcttagagaagattgctgaaggcaaaggaccaaaggcaaaagaaactaaaaagtcattaagttcaaaatttcttgatgcttccagaagctttggccggaaaaagaagggatccgactctctgctgagatcccctaaagcactcgagactacccctgcaataggtgcagtttatcctggtggccctaggtcaccttgttctcatttttctagaaagaaaatggaagcagaaaacggtgagtcgtattcatcttccgagcaacactctggcgagatatattcccaagatcaatcattcgagaa

SEQ ID NO: 234167 - DNA, 405 bp, Gossypium hirsutum
gggagttagtggtgaaggacatccaagatgcctgcaaactttttgagccaatctatgaccaaacagatggaggtgatggttatgtttctgttgaggtttctcccagacttgctgatgatactaatgggaccattgaggcagccaaatatcttcataaagtggttgatcgtcccaatgtgtacattaagatccctgcaacagcaccatgcattccttcaatcaaggaagttattgcgaatggcataagtgtgaatgtcactctcatattttcgcttgctagatacgaggctgttattgatgcttacttggacggccttgaggcttctgggttgagtgatctctccagggttactagtgtagctttcttctttgtcagtagggtagataccctcattgacaaaatgc

SEQ ID NO: 234168 - DNA, 417 bp, Gossypium hirsutum
ccacgcgtccggtagcttctcgttctttcctctcttcttcttctgttccattcacttttcctttgtaatttttttttcctttcgctcatttttgtattctatttccccttatctgtttccgcaatcatcataaaatttgaactttctagaatttaacaatcagatttctcatctctggtgaacgaagcaaacaccttctttaaggaattattaattgttgtctctgatggctccgccgccggtggagcaaaacggagatgcaacgacgggtacggcggaatcacaaaggtctatacctacaccgttcttgactaaaacgtatcaattggttgatgatcacacgattgacgacgtgatttcgtggaacgacgacggatctacttttatcgtttggaatcccacggggtttgctcgtga

SEQ ID NO: 234169 - DNA, 386 bp, Gossypium hirsutum
gggagattcaaacagaggaagaagaagaagagaaaaaaaaaatgaagtctcagatctgtttagcctttggaactttggccttgttattagcttcagctttggccgatgacgtcgtcgtactgaccgaagcgaacttcgataaggaagttggtcaagatagaggagttctcatcgagttctatgctccttggtgtggacactgtaagaagctagctcctgagtacgagaagctcggggcaacttttaagaaggctaaatccgtcttgattggaaaggtggattgtgatgaacataagagtttatgcagcaaatatggtgttcaaggctacccaactgttcagtggtttcctaaaggctctttggaacctaaaaagtatgaaggacca

SEQ ID NO: 234170 - DNA, 426 bp, Gossypium hirsutum
attagggttccttcattattctctttaggaaattttaattttcaacttgttttcgtttattctcttcgattttgggttaaaccctagaaggctcctcgcgaaagtgtcagatggcaactttagctgattcattccttgcggaccttgatgaattatcagacaacgaagccgatgttctggaggaagaaaataatgatgttgcaaacatggaagaagatattgatggtgacctcgcggatatcgaaacgcttaactacgatgatctggacagtgtttccaaattgcaaaaaagtcagagatacattgatataatgcagaaagtggaagatgcgctcgagaagggttctgatatatcaaatcagggcttggtactggaagatgatcctgagtatcagctgattgtggactgtaatggactatcagttg

SEQ ID NO: 234171 - DNA, 421 bp, Gossypium hirsutum
ctattacgtggagagccttttttttgtgtagcgattctcagttagtcgtttctttaagcttacagcttctctccagagttttataatgggtaaggagaaggttcacatcaaccttgttgtcattggccatgtcgactctggcaagtcgaccactactggtcatttgatctacaagctaggtggtattgacaagcgtgtgattgagaggttcgagaaggaggctgctgaaatgaacaaaaggtcattcaagtatgcttgggtgcttgacaagcttaaggctgagcgtgaacgtggtatcaccattgatattgccctgtggaagtttgagaccaccaaatactattgcaccgttattgatgcacctggacaccgtgactttatcaagaacatgattaccggtaccttacaggctgactgtgct

SEQ ID NO: 234172 - DNA, 345 bp, Gossypium hirsutum
gttttctgctctgtttttcagtgacaagtttcaatggcaaaaccagtttccattgtagtgtggaacccaaatgggaaatacagagttattagcaccaaacctatgcctggaactcgatggatcaaccttttaatggagcaagattggcgtgtcgaaatatgtactgagaagaaaacgatttggcccgttgaggatatcatttctttgattggcaataagtgcgatggggtgattggacagtcgactgaagactggggggagactttatttgcagctttaagcagagcatgaggcaaagcattcagtcacatggctgttggttacaacaattgtgatgttaatgct

SEQ ID NO: 234173 - DNA, 312 bp, Gossypium hirsutum
ttggcttccctcccaaatgtcttcttcgacattaaccgtactcttcgtcctgcttggaactctctgttcctttatctacttcttcagctcaccaaaccgcaacaacaatggccggaaacttccacccggtcctgcccctcttcccgtcgtaggtaacatccacatgctaggcaacctcccacaccaaagtcttcactatctcgccaaaaaatatggacccatcatgtcgataatgctaggcaaagtaccaaccatcgtggtatcatcacccgaagccgctgaactgttcctcaaggtccatgacgtcgtttt

SEQ ID NO: 234174 - DNA, 365 bp, Gossypium hirsutum
atttattcgacgccatatcttccgtcaacccaaaggcttctttaaactccggtgagaaccatacgcggacgtccggttcacgtggttgctgaaccagctgcgaggtatgggacgaggcctgctatgaagcggatttgtgcctgtcccggcaacgcgagaacgaggagtggattaaagggttgaggcggctgatacttgagagccctgggcttgctttcgatgaatgcgaatccagttggctggtctgagctgaggtggatcgcatggataatgaatatagataccctgatggacaaaacggctattcgggctgggattggaaccggaaggccgacctttgtagccatccaagctgacaaggatgc

SEQ ID NO: 234175 - DNA, 408 bp, Gossypium hirsutum
tttacattagtatcggctgtaatttgcctgggattcctcatccaacatttgctagagatccagtgcccttctttctcgctccaaaggtaagcaatgaattaggattagaagcagctgtggaagctactgccaattttctgaacaaagctgtgaagcctgtccttgtgggtggacctaaattaagggttgcaaatgcaaaagatgcctttgtggagcttgcagatgcctgtgggtatcccattgccgtaatgccttcgggcaaaggattggtacctgaacaccatccacactttattggaacatactggggtgcggttagtactagcttttgtggggaaatagtggaatctgctgatgcctatgtttttattggcccaatcttcaatgattatagctctgtaggctact

SEQ ID NO: 234176 - DNA, 300 bp, Gossypium hirsutum
tcggtaaaccctattttgttacgctatcttttgcagctgtagatgcagaccaaggcgcggacatatacaggtgaatactatctaccgtagaggatgacaaggaaaggctcatgaaaatggctggtgcagtccgcactgctgggaagggttgcatgcgaaggaagaagacggcttttctcacgacaagcacctccggcgacaaacgattgcagagcgctcctaaatgaataggagtgacagctattcactgcaatgcgacgaagttaagcgatgtcctgatgatagtaggtatccagacct

SEQ ID NO: 234177 - DNA, 418 bp, Gossypium hirsutum
gttcaatggtgtatactaagtggaaaaagccattatcctgaagatctgccattactttcaagtgcagctgcaatatttcaagaatgctttgatcccattgttgcaaagtctggttgtgatttgattcctgcgatggtctatgggagaagtatatctgggcaagagtttggtggaatgtattgtgtggttttgattgtcaggtctgttgttgtatcagctggtcttcttaggatatttggtcgggagattgctgaactccctatggtagcgacaactagagaacatcaaggaaaaggatatttccaggcattatttgcttgtattgagaggtttttaagttcactaaatgtggaaagcctcatgcttcctgcagctgaggaagcttttgtcaattggacagagaagtttgggtttacaa

SEQ ID NO: 234178 - DNA, 419 bp, Gossypium hirsutum
agaagctgtagaaagggaatgtcctggagttgtttcttgtgctgatatccttgttctgtctgctagggaaggcatcgtttcgttgggaggcccttatattcctctcaaaactggaagaagagacggtagaaggagcagagcagatgttgtggaggagtatcttccggaccacaatgagaccatctctggcgttcttgacaggtttgccgccatgggtattgacacccctggagtcgttgccctcctaggagctcacagtgtcggcagaactcactgtgtgaagctggtgcatcgtttgtacccagaggttgaccctgccctcaaccccgaccatgttccacacatactccataaatgccctgatcagatcccagaccccaaggccgtccagtatgtgagaaacgaccgtgggagacata

SEQ ID NO: 234179 - DNA, 312 bp, Gossypium hirsutum
gttttccttcaaaaccctaatagctgtcctctcctcctgaacgtgttcgaaaatggctggttctgagggattgattctacgtggcaccatgcgtgcccacaccgacatggtgacagccattgctactcccatcgataactccgacatgatcgtcacttcctcccgcgacaaatccatcatcctttggcacttaaccaaggacgaaaggacctacggtgtccctcgtcgtcgtcttaccgggcaactctcacttcgtgcaaaacgttgtcctctcttccgattctcagttcgctctctctgattcctgggatg

SEQ ID NO: 234180 - DNA, 408 bp, Gossypium hirsutum
cagctaagtctcccaattcagcacgaaaagttgttgtccatttgagagcaactggggatgcccccatactaaaacaagccaaattcaagttgttgtccatttgagagcaactggggatgcccccatactaaaacaagccaaattcaagatacttggaactgacaaatttgctaaagtaattgattttttgcgtcggcaattgcaccgagatacactgtttgtgtatgtaaacagtgccttctcaccaaacccagatgaattggtgattgatctgtatgataattttggttttgatggcaaactggtggttaattatgcctgttctatggcatggggctaactcttgatgatggatcttcagagagatgagataaaaactggcaactctgtaactgtttcctacaattc

SEQ ID NO: 234181 - DNA, 395 bp, Gossypium hirsutum
aaaaccctaagccctgcctttccctttctcaatcatccaaagacagagctgaaactctccgagagccgagacctgacccgaatcgaacgcataggggctcattcccacatacggagcctaggcctggactcctctttggagccccgggacgtctcggaaggaatggtgggccaagcacaagctcgtaaagccgacggtgtcatccttcaaatgatcaaagacggtaaaattgctggccgagctatcttattagcgggacaacctggaactggcaaaactgccattgccatgggcatggcgaaatctcttggccttgaaacccctttctcgatgctgtctggcagcgaaatcttctgccttgagatgtcgaaaaccgaagctttaatgcaagcgtt

SEQ ID NO: 234182 - DNA, 405 bp, Gossypium hirsutum
gtggaattccattcaacaaggcctatggtatgactgcatttgagtaccatggcactgatcctagattcaacaaggttttcaacaggggaatgtctgatcactctaccatcaccatgaagaagattctcgatacatatgatggtttccaagggctaaaaacattggtcgatgttggcggtggtaccggtgccacgcttagcatgatcgtctctaagtaccccaccataaaaggcattaactttgatttgcctcatgtcattgaggatgctcctagctgtcctggtgtggagcatgttggtggagacatgtttgtaagtgtaccaaaaggagatgccattttcatgaagtggatatgtcatgattggagcgacgaacactgcgccaagtttttgaagaactgctatg

SEQ ID NO: 234183 - DNA, 373 bp, Gossypium hirsutum
cccagctcctaatcctgttgttgccaaaccaaagccggcgccaaaacccaaattcactccaacccctggtatattctttgcttctcttttaaatgatttccccataaacattgttggacctactcttaggaattaggacacaatctgctattgatgaaggaacatttggttctgtttctcattatagtagctattaaatttcaagatctgatagtgggggaattttttgtttatttggcagctacatcgtctaatccaattaccatagagcagatgatgacaactttctggtatgccaagggaaaaacctactactggtattccacaattgtgaccaacaaggcttacaagacactgaaggatctcaagcttt

SEQ ID NO: 234184 - DNA, 392 bp, Gossypium hirsutum
  unsure (1)..(392): unsure at all n locations
acaaaaacgccttcttcaaactagttccatgtgccagcgccagcttagcaagatacttgatgattcagaccttagcagcatcattgatggttacttggatcttgaaatgattgaattcaccttgaatgatgtactgattgcttctatcagtcaagtgatgatgaagagcactgggaaaggcatccgaatactgaatgagacagcagaagaagtcatggaggagaccttgtatggagatggcgttagacttcaacaagtcttagctgatttcttgttggtatcagttaattntgcaccaaagggaaaccaacttagtgttggagctagcttaaccaaggatcaactaggacggtccgttcatcttgcacgtttgaaccttaagataacacatg

SEQ ID NO: 234185 - DNA, 296 bp, Gossypium hirsutum
aaaaaaggcaactagacttgagaaagaaaaacagtctcaaactgcagcagaagtcaggcttcctgatcctcttgctctccctcattttccttgctctaatcttctccgacgccagaaaggaggctcccctcggaggatggagtccgatcaaagacaccaaggacccacacgtgataaagatcgcggaattcgccgtcgaggagtataacaagcagtcaaatgggagtttaaagttcgttaaagcggggaaaggcgagacccatgtggtggccgggacaaactaccggttgattttg

SEQ ID NO: 234186 - DNA, 363 bp, Gossypium hirsutum
cccgaccttcctctctgcttatcttcttcttttatgccttgtctgctctttgaaggaggggtatgccttgggacgaagagcaactgttgcagagagtcaccaccttgagcacagccataccatccaagtcagctctcttctaccctcctctatttgcagccttgcaaccaaagtattagacaaaaagtcatctttacaagttgtccacaagcatggtccatgctctcaactctatcatcacgataaagcaaatatccccactcacgccgagatcctccttcaagatgtaacccgggtcaagtccatccactcaaaacttgccaagagcctaagctctaccaaagtcgaccagactgatgcagc

SEQ ID NO: 234187 - DNA, 377 bp, Gossypium hirsutum
ggaaggtgtccttagttcgagccatattttatatggctgctcaatgtttgggagccatatgtggatgtgggctagtgaaggcattccaaaagtcatattacaacaagtatggaggaggagccaacagcctcgctgatggatacagcactggaactggtttcgcagctgaaatcattggtacctttgttcttgtctacactgtcttctctgcaactgatcccaagaggaatgcaagagattctcatatccctgtcttggcaccacttgctattggatttgctgcgttcatggctcacttggcaactattccaatcaccggcaccggtatcaaccctgctcgtagctttcgagccgctgttatctacaaccaggacaag

SEQ ID NO: 234188 - DNA, 397 bp, Gossypium hirsutum
ccttattacactcaccgatcacatttcttttattttccagatctgactccccctcccctctcccttttccaaaaagagagagttcccctctccatctaaaaaaatggaatatcgatcgagatctatccacaaatccacctccatcatgatctccgccatcgtcttcctctctctgatccacacctctcattgcttctaccttcctggtgtcgcccccgaggacttccaaaagggagatcctttgaaagtgaaagtgaacaaattgacctctatcaagacacaacttccctattcatattattccctccctttctgtccaccaaaaaagatagttgacagtgcataaaatcttgcggaagtgcttcgtggtgaccatattgaaaactctccttatgtg

SEQ ID NO: 234189 - DNA, 340 bp, Gossypium hirsutum
cttttccacttcaatttttttccctctctctaacagcgacgatcgatttttattaattttctttgccgtcggatctttggttttccattttgattcaatcaggattgcttcgttttgaacccaggcgacgatgaagaaggctatcggtcaaactgttagagagcttaagagagaggttaataagaaagttctcaaagttcctggaatagagcagaaggttcttgatgctaccagtaatgagccatggggtcctcatggatcacttcttgcagatattgcaatggctacaagaaactatcatgagtatcagatgatcatgacagtgatctggaaacgtcta

SEQ ID NO: 234190 - DNA, 393 bp, Gossypium hirsutum
caaaatctctctttctcgtcaatatggcagcaaatggcgttgtttctgacaagagcttgatcgtcagcttcggtgagatgctgatcgattttgtccccactgtctccggtgtttctctagccgaagctcccggcttcctcaaagcccctggcggtgctccggctaacgtggccattgctggtgctagactcggaggcaaagcgtcatttgtcggaaaacttggagacgacgagtttggtcacatgctggccgatattctcaagcaaaacggtgtctccggtgacgggatcttgtttgaccaatgcgctagaactgctcttgccttcgttacgttacgcgccgacggagagcgtgagttcatggtctataggaaatctagcgccgatatgctgt

SEQ ID NO: 234191 - DNA, 399 bp, Gossypium hirsutum
cattgacggatcgacggtgtgagccttcgtgactgacgaccaacagttcacgaagagcgtggatgagcgtttcgcagctcttgacctcaacaacgacggtgtcctctccaggtccgagcttcgcaaggccttcgagtctctgcgtctcctggagtcccacttcggtgtcgacgtcgccactccccccgacgagctcactcagctttacaactccattttcgagaggtttgattgcgatggcagcggcaccgttgacctccaggagttcagatctgagatgaagaagattctgcttgctattgctgatggattgggatcttgccctatccatgatgttcttgaggatgatgaccaatgttttctgaagaaagctgctgatcttgaggctgcttagctcga

SEQ ID NO: 234192 - DNA, 413 bp, Gossypium hirsutum
cgtctgctctcgccaaaagacacccaaagacaccactttgaaacccggaaatgtcggacgaggagcatcatttcgagtccaaggccgacgccggcgcttccaaaacctaccctcagcaggccggcaccatccgcaagaacggttacatcgtcataaaaaatcgcccctgcaaggttgttgaagtttccacctccaagaccgggaagcatggtcatgcgaagtgtcactttgttggaatcgatatcttcactgccaagaagctcgaagatattgttccttcttcccacaattgtgatgttccgcatgtcaatcgtactgactaccagttgattgacatttctgaggatggatttgtgagtttgctgactgagagtggagacactaaggatgatctgaggctcccaactgatgag

SEQ ID NO: 234193 - DNA, 411 bp, Gossypium hirsutum
ggaaaaggaaacaactctccttccttccgacgataaaaacccttccccttcctcttgctcttcatttcaattcattcttccttagtcaaaggactgtgatggggcaacaatcgctgatctacgccttcgtggcacgaggcaccgtcgttttagccgactacaccgagttctccggcaacttcacctccattgcttctcagtgcctccagaaacttcctgcttccaacaacaagttcacttacaactgcgacggccatacctttaactatctcgttgataacggctttacttactgtgtggttgctgttgaatctgctgggcgacaggtgccaattgcctttcttgagagaattaaggaggattttaccaagagatatggtggaggaaaagctgcagctgctcctgcaaaca

SEQ ID NO: 234194 - DNA, 406 bp, Gossypium hirsutum
attcttttatcctttgaagcctttgtcttctaaaatggcaatatcagcctgcaataacctattttcaactctaacttttcttcctaacaaagtctccattttcaccaaaactcctcagttcatcaccgctttgaatggttccaaaacgagattatactcttccaaagtaagcatgagcctaagagccggcattgttggtcttcctaacgtcggcaaatcaactctcttcaatgctgttgttgaaaacgggaaagctcaagctgcgaattttccgttttgtactatagagccaaacgttgggattgttgcagttccggatcctcggcttcatgttctttctgaactcagcaagtctcaaagagcttgccctgcttctattgagtttgttgacattgctggactcgtt

SEQ ID NO: 234195 - DNA, 409 bp, Gossypium hirsutum
cccaaatctcctccctcctcttctttagcgtccttttcatttccgctcatgcagcgcgctttgaaatccgcaatgagtgctcctacaccgtctgggcagcagcctctcctggtggtggccgtcgcctagaccctcggcaaagttggaccatcgatgtgcctgctggcactgctatggctcgtatttggggtcgaaccaattgcaatttcgatgccagtggtaggggtcattgccaaaccggtgattgtggtggactccttcaatgcaaaggttggggtgtacctccaaacaccctggctgaatatgcacttaaccaatttggaaacatggatttctacgacatctccttagttgatgggtttaacatccccatggtgtttgtccaactaatggctgttgtcacaacatt

SEQ ID NO: 234196 - DNA, 406 bp, Gossypium hirsutum
  unsure (1)..(406): unsure at all n locations
acatccttaagctcttctcctggaccatcatcaacaccaatatctcctcgcacaattcctaatatgagaaccaaaaggcctgaagaagacgagatgaagcaagtctttggctatttcgacggggatggtgatggcaaaatctctgctcttgaacttagggcgtactttgggtccatcggggagtacatgtcacatgaagatgctcaaggggtgatcaacgatcttgactcggacggggatagcatgctgcactatcaggatttcttgaagctaatgaaaagagaacccagcaaggatgatgagggagatgattatgatgatctgaagaaagcgttagagatgtttgaactggagaaaggttcggtgtgcataacacccaaagggctgcanaggatgttgaatcgac

SEQ ID NO: 234197 - DNA, 414 bp, Gossypium hirsutum
cttcttcagatactatctttccctcaaaaatggttactttcaggtttcaccagtaccaagttgttggaagggctcacccaacagagagcgatgagcatcccaagatctataggatgatgctctgggccaccaatgaggttcgggccaaatccaagttctggtacttcttgaggaagctgaagaaggttaagaagagcaatggtcaagtccttgccatcaatgagatatttgagaagaaccctaccaagatcaagaattatggtatatggctccgctaccaaagccgtaccggttatcataacatgtacaaggaataccgtgacactactctaaacggagctgttgaacaaatgtacactgagatggcttctcgccacagagtccggttcccatgtatccagattatcaagactg

SEQ ID NO: 234198 - DNA, 336 bp, Gossypium hirsutum
cgttgagtgtagagatgaggaaaatcatgggtgccaaagttcttttcttctttgctttgctttccttttcagctgtctcgggatttgcacaggatgaggaacaccaaggtcttgttatgaacttctacaaggattcctgtcctcaggctgaagacattatcaaggagcaagttaagctactgtacaagcgacacaaaaacactgctttttcttggctgagaaacattttccatgactgtgcttgccaatcatgtgatgcttcactgctgctggactccacaagaaggagcttgtcttgaaaaggagacagacagggatctttggcctaaagaattt

SEQ ID NO: 234199 - DNA, 330 bp, Gossypium hirsutum
aaaaaaaaaagaagcaaaaaaacatggccaaagttctgttgttcattgctctatgtgtgcttccagctttggttagtgctacacgcattctgaataaccaattggtggttgaaggctatgtgtactgagatacttgccgtgctggttttgaaacccctaagactagaaggctagctgatgccatggttaagctggtatgctccgacaggaagaccggcggagttgttttcgagaaggagggatataccgacaaaaccggaaaataccagattcgtgtatccgaggatcacttggatcagatctgtgatgcaatttttgtgaagagccccc

SEQ ID NO: 234200 - DNA, 342 bp, Gossypium hirsutum
accattatttccaatccttttcactttatcttctcccctcctatctctatctcgctgtccattgttggacgtagccatgattaccttgcgatagcaaaaattatctgtgaggaaaaaacggagataactaatatcactgaatatgaggccattgcaaaagagaagttacccaagatggtttatgactactatgcatcaggtgcagaggaccagtggactctcaaggagaatcgaaacgcattttctaggattttggttcgaccccacattcttattgatgctagcaagattgacatgaccaccactggcctgggatccatgatttcaatgcctatcatgatt

SEQ ID NO: 234201 - DNA, 404 bp, Gossypium hirsutum
cttttaagaagattaaagcccttgtaactactcattcccagctagctactgttttgcggaactcagcaaagcttgtagttagtgaagatggaaaaaaagtaagacgccagcatccccttactgaatcggatatggaagagttgcaattgcatgcatttgtggaatatgaaactgttgagttggctgaaaaagctgttgcggagcttaacgaagagggaaattggaggagtggccttagggtccgtctaatgcttaaacatgtgtcaaaacctgctcatgcaagagtgaaaaaggggcatgatggagaaggtcaatgtgaggaagatgatgtttgtatttctgaactgccttcaaatgagaaacaacaagaagatccttctcagttgtctgatatttattcacat

SEQ ID NO: 234202 - DNA, 414 bp, Gossypium hirsutum
  unsure (1)..(414): unsure at all n locations
agaagccgcttccgggctcgaaagtgttgagaaactcatcagattactttctgaaactcaacagcagcagcaaactaacagtaataatcaagagaaataccaagcttcctctatctcaacaacatctaattccctggatttggaaatggactgcaaagctgaggctgatgccgccgtttcaaggttcaagagagttatctctcttctgggtcgaaccaggaccggacatgctcgtttcagacgagcccctgttcaacccgatcaagagcaagaaaccaaggtttattacgcaacaccgatccagcagattccgccaccagtgactactgcttatcctnttcctnctnctcctccttctcctnctaattatcatcatcgtgattttatgacggtgaaaacagggggttaagaacg

SEQ ID NO: 234203 - DNA, 378 bp, Gossypium hirsutum
ttttcctctcagatttttaaaaaaaaaaaaaagcaaaaaaagaaaaaagagctctcttgttaatcaaggtcacgtaaaaaagacttgagaaccagctgatcatggccaatgagcgctacatcgaagaggccgaagttcgaagctatttattagaaagcaaaaattccatggagaagtgggtgaattcgccggaaacagtcacgggttcggacgataatccctcagccggttttgactgcaacatttgcctcgatactgtgcaagatccggtggtgacgctatgcggtcacctatattgttggccttgtatttacaaatggcttcactgtcaatccatctccactgaaagccatgaccaaaaacagccgcaatgccccg

SEQ ID NO: 234204 - DNA, 399 bp, Gossypium hirsutum
gtgagagagactgtaagcctttactttaccaaacaccatggatgctgctgagagctggtcgagaaccaaatgggtcttccattttatgcttatattcgctcatttctctcttctatcactagctgaagatggtctggtggccaatggtgatttcgagacgccaccgtccggcggcttcccaagcgaggcaatatccgatggacccaatgagatccccagctggagcacgaaggatacggtgaagcttgtgtccgccggtgaaaaagtgagcggcgggatgctactcatcgtaccccgaggcaagcacgccgtcagattgggcaacgacgcggagatcagtcaggaagtgacgggtgagaaaggatcggcgtacgcggttactttcagtgcggcacgcac

SEQ ID NO: 234205 - DNA, 374 bp, Gossypium hirsutum
atagatgatggctatcaagagccaccattgctgcttcagctttatctttctgttattaccattactcctacagcttcattctgtcaaaggtgatctccagttgaactactatgctcaaagttgccccaatgctgaagagatcatcaaacaacaagtcatcaagctctacaacaaacatggaaacacagctgtttcttgggttcgaaatctcttccatgactgcatggttaagtcatgcgatgcatcgttattgttagagacggtgaatggaattgaatcggaacaaaaatcggataggagttttgggatgagaaatttcaagtacgttaagacaattaaagatgctctggagcaagaatgtccagggacagttt

SEQ ID NO: 234206 - DNA, 342 bp, Gossypium hirsutum
ctaaattacaggattttattgttggaactgaagttttaaggtgatggcgaggttcaaaccacatgcttggctacaacagagcaaatggaagaaaggcccagctcgaataagtcttacaacaattataatgttgactttgattggcgttttgattctgttttttgagtttgccacctacagacactggactcaaaggtcaagaattcatattgaaaacaggtaatcagctattgagggtgacatctcttttatggattcaaagtaatccgatcttccaggatatgctattttagatactgcgtaatgctctatttcagtggagctctttaaggacattttttc

SEQ ID NO: 234207 - DNA, 346 bp, Gossypium hirsutum
gcaaacgatggctatcttttctacatcaatggctgctatgctccttctggtagggctcttcgctgcaaacttggatcctactgctgcacagattggtgtttgctatgggatgctcggcaataatctcccaaattcatgggaagtcattcaactttacaaatcaaacaacatccggcgattgaggctctacgatccaaatcaacaagcattacaagctcttagaggctccaacattgaagtaatgttaggtgttccaaatgatcaactgcaaaacctcgctgacccttccaaagcacgatcatgggttcaaacaaatgttgtagcttactggccgagtgttcggttc

SEQ ID NO: 234208 - DNA, 262 bp, Gossypium hirsutum
agtgaataagattgtgagtactttgaatgctggagaggtgccttctccggatgttgttgaggttgtggttagccctccatttttgttccttcctttggtaaaaacttcactgagacctgagttccaagtcgctgcaaaaattggtgggccaaaaaaggaggtgctttcactggtgaaagtagtgcggagatgcttgtcaatttgagcattccttgggttattattggtcattccgagaggagacttatttttgtggggtaaa

SEQ ID NO: 234209 - DNA, 270 bp, Gossypium hirsutum
gtgaggaaaaaaaaagcttcaatctttggttgttaagtgggtgaaacaaaaaaaaaaatggagggcaaagaggaggatgttaaactaggagccaacaagttctctgagagacaacctattgggacatcagctcaaacagacaaggacttcaaggagccaccaccagcaccattgtttgagcctggtgagctcaagtcatggtctttctacagagccggcattgctgagtttgttgctaccttcttgttcctttacatcactgtcttgact

SEQ ID NO: 234210 - DNA, 374 bp, Gossypium hirsutum
catttccaatctccagctcccaaggtaaatatgccgatcagaaacatagcggttggccggcccgaagaggctactcaccccgatgctctcaaggctgctttggctgagttcatctcaaccttgatcttcgttttcgctggatcgggctcaggaatggcctttaacaagttgactgacaacggagcaaccaccccggctggtctcgtagccgccgctctagctcatggcttcggtcttttcgtcgctgtctccgttggcgccaacatcttaagtggccacgtcaaccctgccgtcaccttcggtgcttttgttggcgggaacatcactctcttgcgcggcattctttactggatcgcccaactcctaggctcaac

SEQ ID NO: 234211 - DNA, 400 bp, Gossypium hirsutum
cgttgttcttcctaatcttcctgcaccgttatgcatgcatctaaaccactcaatctcttttgtattttaacggtcatgatccgtgtctgctgcgacgatctgccttatttttgggaggcaccggcatttcgaatcgggagagaatgtccacaaacaacatgggccttcctcgacaaagagatccacaatgcctccattatccatattgctatgacattagacactgcttacccacggggctccgaagctggagtcttctccgttctccaccacgccacttgtgcgagaaaacatctagtaccattttgtcaccacgcaccgacactgagctaaactcacgcgcgccattaccttcactgtccctgacctcaactttgatctctactacttcaacactaac

SEQ ID NO: 234212 - DNA, 286 bp, Gossypium hirsutum
caacaatgtcttttcactcttctctcaccatgtcattgctgtctttctccttcttgttgctggttacttttagtgccaaaactggtgttcctccatctgaaacttttaagtttggcaacgacggagaatttgggcccgttggtgttgaatatgatgcaaattaccgtgtcataagcatagctaatgccccctttcagcttgcgttttataacaccacccctaatgcctttacccttgcgttacgcatggcttcaacgccgttcgagtcgctctttcgatgggtttg

SEQ ID NO: 234213 - DNA, 407 bp, Gossypium hirsutum
tcccaattcatggagaattggtgttaccacagggatacattgatgagcattgcaaagcattatgaaacaggagagagtctccctgaagaggtatatttgaagcttcttgctgcaaggactttccgtgctggttctctaagtcttcgtcagcttcgatttgctagtgtggatttggaactgcatacaaaatacatcccagatgggtcagaatctgtttttgatgttgatcagagagtttccaaaaaaacacatgtgatccctccattgccagaagataggtttctctgcggattcaatcatatatttgcaggtggatatgctgctggatactacagttacaagtgggcagaagtattgtctgcagatgctttctcagcatttgaggatgtaggactggacaacaccta

SEQ ID NO: 234214 - DNA, 397 bp, Gossypium hirsutum
gtaacaatggcggtctcacttcaagctgcagctaccctgatgcaaccaatcagggttgctgcaccatcaaggaccaatgtgccgctcaggtcctcccagagcgtttctaaggccttcggtttggagcctgttggtgctaggcttacctgctctttgcaaactgacctcaaggacttggctctgaagtgtgttgatgctaccaagctcgctggtttcgctcttgctacatctgctcttgttgtctcgggagcaagcgctgtaggagtttcaaagcggctaacctacgctgaaatccaaagcaagacatacatggaagtcaaaggaacaggaactgcttaccagtgcccaaccatcgatggtggtgtcgactcttttgccttcaagcctggcaaatact

SEQ ID NO: 234215 - DNA, 414 bp, Gossypium hirsutum
ctttttcctctaccaggtgattttagctttgtgttagttcctttaagcaatccgccaagatgcagaacgaagagggtcaaaacatggatctttacatccccaggaagtgttccgccactaacaggctcatcacctctaaggatcatgcttccgtccaaatcaacgtgggacacttggatgagcttggcagatacactggcacattctccacttttgctctttgtggatttgtccgtgcccagggtgatgctgacagtgctcttgacaggctttggcagaagaagaaagctgaagtccgacagcagtagttggatacctttttaccctagtctatctccgagcttgggaaagaaaaatctcatggcagcgactattatgttctagtttttttcaggttaaactatgtcaaattta

SEQ ID NO: 234216 - DNA, 412 bp, Gossypium hirsutum
atgagctacttaaccatttcccaaatctcctccctgctcttctttagcgtgcgtttcatttccgctcatgcagcgcgctttgaaatccgcaatgagtgctcctacaccgtctgggcagcagcctctcctggtggcggccgccgcctagaccctctgcaaaggtggaccatcgatgtgcctgctggcactgctatggctcgtattgggggtcgaaccaattgcaatttcgatgccagtggtaggggtcattgccaaaccggtgattgtggtggactccttcaatgcaaaggttggggtgtacctccaaacaccctggctgaatatgcacttaaccaatttggaaacatggatttctacgacatttccttagctgatgggtttaacatccccatggtgtttggtccaactaatg

SEQ ID NO: 234217 - DNA, 407 bp, Gossypium hirsutum
cccatctctacttccatttcatctgccatcaatttgctttgaagatcatgttggctatttttcacaaggcatttgctaatccaccagaggagctgaatagtccagcttctcataaatctactaagaagcctaaacagcctgaagaaaccctaaatgatttcctatctcatcaccctcacaacactttctccatgagctttggcaacgctgctgttttggcttatgtccgccatgaacgtgctgcttcagttcatcagaggttgttttgtgggtttgatgacatatactgccttttcttagggagcttgaacaatctatttatgctgaatagacagtatggtctttccaaagggagcaatgaggcgatgtttgtgattgaagcatataggacactaagggataggggt

SEQ ID NO: 234218 - DNA, 419 bp, Gossypium hirsutum
ccgaagttaagtcagttgagatgcaccatgaagctgttacagaggcactttctggtgattatgttgggttcaatgttaaaaacgtcgctgttaatgatctcatgcgtggttttgttgcgtacaactacaacgatgaccctgcttatgtggctgccaacttcacttctttagtcatcattatgaaccaccctggacaaatttgtaatggatatgctccattccttgactgccacacatcacacatagatgctaatgttgcttagcttccgaccaagattgacaggcgatctgatgaggagcttgagaaggaacccaacttcttgaagtatggcgctgctggtatgattaatatgattactaccaagcccatcgtagtggagaccttgtcttagctcccacccgtgggtcgcttttctgtg

SEQ ID NO: 234219 - DNA, 411 bp, Gossypium hirsutum
gacttcccttttagctcacagctcctctcttgagtactataatgggtaaggagaaggttcacatcaacattgtggtcattggccatgtcgactccgggaagtctacaaccactggtcatttgatctacaagcttggtggtattgacaagcgtgtgattgagaggtttgagaaggaggctgctgagatgaacaaaaggtcatttaagtatgcatgggtgcttgacaagcttaaggccgaacgtgaacgtggtattactatcgatattgccctctggaagtttgagactaccaaatactactgcactgtcattgatgcccctggacaccgtgacttcatcaagaacatgattactggtacctcacaggctgactgcgctgttctcattattgactcaaccactggtggtttcg

SEQ ID NO: 234220 - DNA, 411 bp, Gossypium hirsutum
ctttttcattggaagcttctcttccaaagatggactatgtgtacggaccaggaaagaaccatctctttgttccagggccggttaacatcccggaaccagttcttcgagccatgaacaggaacaatgaggattaccgttcccctgccattcctgccatgacaaaaactcttcttcaagatgtcaagaaaattttcaagactactactggaactccctttttgattccaactacaggaactggtgcatgggagagtgcactcactaataccctgtcccctggagatcgaactgtatcttttctaattggacaattcagtctgctgtggattgatcaacaacaacgccttaaacttcaacgtcgacgttgttgaaagtgaatgggggcaaggtgctaaccttgacattctggca

SEQ ID NO: 234221 - DNA, 412 bp, Gossypium hirsutum
gtgagttggtgtgaggatgagtcgtggtgcagcagctggagctaagggaaagaaggagggagcctccttcaccatcgactgtgcgaagccggttgaggataagatcatggacatcgcttctttggagaagttccttcaggaaaggatcaaggttggtggcaaagctggtgctctaggtgactccgtcactgtcacccgcgacaagacccgtatcacggttacctctgactccaacttctctaagcggtaccttaaatacttgactaagaagtacttgaagaagcacaatgtccgggattggcttcgggtgattgcttccaacaaggaccgtaatgtttatgaactccgcttccttaatattgctgagaatgaaggggaagaggaagaatgagcaatcagttcagttactttt

SEQ ID NO: 234222 - DNA, 406 bp, Gossypium hirsutum
agagcaggaaaacaagaaaagcagagccgcatcactttttgctagctaagctgctgtgggagttattgttcttcaaaacagcttctgcagtagctaataataacgtcatatattatataaattatatacatcctttttaccctacgactccatatataagcaagtaaaaataaatatggctcgctctgtttcttcctttaagttccttggtgcttctgtttttgatgctctttatgtctccatatcaaggagaggttactcaggtgcaccgccggcggcagtgacggctagctttggtaggcctggagcgattgggaaagtggaacgaaaatatgcgatgaaagagtcgtcgtcgtcggagacaagggcttatttttcaacttgggcgcctgaccctttttccggg

SEQ ID NO: 234223 - DNA, 410 bp, Gossypium hirsutum
ctgaatctagccccaacgacctaacccattagcactaatttgtctattagcaagtattgctatctcatatacgtgtttcctcttgatccacactttgttttcactgttccaactctatctctctaagctcccaatatggccaattcccaccaaccgtttgttgcactcatcgtcggcgtcaccggcatggcggggttgagcctagctgaagccttgaagagccccaatgccctaggcggtccttggaaagtttatggctctgcttcacgtcccataccaacttggttcccttcctcgctcctcgataaatacatcgcttttgatgccaccgacgccggaaacaccgctgatacgctcactccaatctccggcgaagtcacccatgttttctgggtggcaatccaagttcg

SEQ ID NO: 234224 - DNA, 405 bp, Gossypium hirsutum
ctccctctcttcttaggtctgctgtatcttagttcttgattaattagccaatcacagcagccatgtctctcctcaatgatctcatcaacctcaacctcagcgacaccactgaaaagatcatagccgaatacatatggatcggtggatctggtatggatctgagaagcaaagcaaggactttgcctggaccagtgacggacccttcaaaactcccgaagtggaactacgatggttccagtaccaatcaagcacctggagatgacagtgaggtcattctttatcctcaagctatattcaaggatccatttagaaaaggaaacaacatcttggtgatgtgcgatgcttacacaccagccggcgaacccattcctaccaacaagagatttaatgcggccaagatcttta

SEQ ID NO: 234225 - DNA, 426 bp, Gossypium hirsutum
ctaatttccagccgctaacaaatatggagaagcctcctctgagagattataccgccgcgaacgccgtcagtgcacctccgctacttaacacacttacgccttcccgccgtacaagcttaaaccgtgcctttgccgcagtttacacgtgtgccatcgtagccttgttctaccgccatacacaaacactcttcagctccaaaaccctagtttctttctacgtaacccttacgttgttcgtctccgacctcatccttgccttcatctgggctaacgggcaagctttccgtatgcgtgcggtttaccgtaaagaattccccgaaaacctcgaaaaggtggtgaaaacaagtgatttaccggggctggacgtgttcatatgtacggcagacccgtacaaggagcctccaataagtgtggtgaacacggcgt

SEQ ID NO: 234226 - DNA, 412 bp, Gossypium hirsutum
cacacatgtcggtatgaggggtgtggatttgaccccaggacagaaacaaagaattgcgcatcgctcgagttgtgttgaagaatgctcccatcttattattggatgaagctagctcttccattgaatctgagtctagccgagtggtccaggaggcacttgatacgctgataatggggaacaaaactaccattttgatagcccatagagctgcaatgatgaggcatgttgacaacattgtagtacttaatggtggtcgaattgtagaggaaggaacacatgattctttggtagccaaaaatggcttgtatgttcgtttaatgcaacctcattttgggaagggcttgcgtcagcatcggctggtttagtttggcttgcaagtataacataccttggttctgctgtatattgctca

SEQ ID NO: 234227 - DNA, 414 bp, Gossypium hirsutum
atcaaatcctggcttgcatttgctgcgcagaaagttgttgaagttaatgcccttgcgaaggcattggctggtcagaaagatgaggccttcttctcttctaatgctgctgctcaagcctcaaggaagtcctccccaagagtcaccaatgcggctgttcaaaaggctgctgacgctttgaagggctctgaccaccgtcgtgcaacaaacgttagtgctagacttgatgcgcagcagaaaaagcttaacctaccaatcctaccaaccacgaccattggatccttccctcaaacggttgaactcaggagagttcgtcgtgaattcaaggctaacaagatctcagaggacgattacgttaaagccattaaggaggaaattaagaaggttgtcaaccttcaggaagaactcgacattgat

SEQ ID NO: 234228 - DNA, 389 bp, Gossypium hirsutum
ctacaccatggatgaagtgaagctctttgggttgtgggcaagtcctttgagtaggagggtgatttgggcattaaagctaaaatgtgcggaatatgaatacatggaagaagatttgccttataataagagtgatctgttgttgcagtacaacccatttcataaaaagatcccagtgctcggtcatggaggaaagccaattgcagagtcattggttattgtggaatatatagatgaagtgtggccacataactcctttgttgccaaaagatgcttacgagagatccgtagctagattgtgctccaaattcattgaggaaatgactcaaccactgtgggtattctgtgctaaccatggcgaagatcagcggggggctttcgagggccaccta

SEQ ID NO: 234229 - DNA, 422 bp, Gossypium hirsutum
caaatttcaaagattttgattttcttctgcaatttctcatccaccaattgaatcaggttgtgaagtattgagggtgtttattatttgttgtttttttataattactgatgtctccgccgctgcttggcgtggaggaggaaggggttcagagcaatgttactttactcggttcttcaggctcaatggaaagtgtgtgccagaatagtgctgaattgaaggaacggaactacatgggcttgtctgattgttcttcagtggatagctctgttttttcccctccctccgaggaaagaaaggctagtttgaatctaaaggcgactgatcttaggctcggacttcctggattgcagtcgcctgaaagaaatccagagctttgcttgttaagttcttctcagcttgatgagaagccgcttttccctttt

SEQ ID NO: 234230 - DNA, 369 bp, Gossypium hirsutum
  unsure (1)..(369): unsure at all n locations
cacaaacccaaatctccaattgatctgtttcatttttcagcaaagctagaaaaacaatgactaaggatatcgagactgcagagcaacatggaggggagttctcggccaaggactaccatgatccaccacctgctccattgattgatgctgaagagttaaccaaatggtcgttttacagggcagtgattgccgagttcattgctacacttctcttcctgtatgtcactgtgttgaccgtgattggttacaaggtccaaaccgaccctgctaagaacactgttgaccccgattgcggaggcgttggtattcttggtattgcttgggctttcggtggcatgatctntattcttgtttactgcaccgctggta

SEQ ID NO: 234231 - DNA, 413 bp, Gossypium hirsutum
agcaattcttaatccgcatgatcgaataatgggtttggacttaccacatggcggacatttgtcacatggatttatgactcctaaaagacgtgtatctggtacatcaatctatttcgagtcaatgccttatcggcttgatgaatccacaggcctagttgattatgacatgcttgagaaaacagctaccctctttcgaccaaaactcataatctgtggtgccagtgcatatcctcgagattttgattatcctcgcatgaggaagattgcagatgctgttggtgcatttctcatgatggatatggctcatataagtggccttgttgctgcttctgtagttgctgacccctttgaatattgtgatatcgtgacaacaaccacacacaagtctttgagaggtccaagaggtggcatga

SEQ ID NO: 234232 - DNA, 421 bp, Gossypium hirsutum
caccgttatcccttgttaaatgctctttgcccttttctcctcttctcttattttttctctctgaaaatggaaggagtgaaattggatagatggggttatgaagttaaaacctcttccgattcttgcatatctgtaatcaacgcttactatcaccaggtgctttcctatggaagaaataggaaagtgatcttagaagctcctgttcttgacaaagactgcgttttagccaacattttggccgcccattttctctcttcctctgacccttcaaaggctccttcactcatagaagctgccaacgctggaattgagcaagcctcgtcttatgagaaagccgtttttgaagctgtcaattatttgatttctcagaacagagatgatgatgttgccgtggagttacactctaagctctagagagatt

SEQ ID NO: 234233 - DNA, 404 bp, Gossypium hirsutum
ctccgacagaacatacaaagcgagctttggagggcattcgcatggaaaccacggacgagctactcgctgtgcaaggtcgcaactagctatgccttgccacagaattaccagccgaaatactgtgtataccacattgtatattggcctgacatcctgtacaaccgcctcaggacgtacaacggccgcatcggccgttacatcctcgctcagatggaggactaaagcacccagtgccacggccacattacctctgtggacgtgctgcggactcaccgcaagcttgctcactccactatgctgatgaacgcgggacaagcctccatggagcagatcattggagcagagtatgtgttgctgaatgtgtggaagacgcacaggacaagcgttgaatctggatacccaga

SEQ ID NO: 234234 - DNA, 399 bp, Gossypium hirsutum
gccatattgaactggctaagttgcattcctcctcgtataggtggtccacttgcgattttaaatccatcagatcctccagaaaggcttgtggagtacttacctgaaaattcgtgtgatcctcgggccgctatttctggtgctttagatagtagtggcaactggaagggaggtatttttgacagggatagctttgtggagacgcttgaaggttgggctagaacagttgtgacaggaagggcaaagcttggaggaatccctgtaggaatagttgcagttgagacacagacggtgatgcaggttatccctgctgatccaggacaacttgattcccatgagagagttgtccctcaagctggacaggtatggtttccagattctgctacaaagacagctcaggca

SEQ ID NO: 234235 - DNA, 349 bp, Gossypium hirsutum
cccgagccaggtttgaagaacttaacatggatctattcagaaagtgtatggaaccagttgagaaatgtttgagggatgctaagatggacaagagcactgcccatgatgttgttcttgttggtggctccactagaattccaaaggtccaacaacttttacaagatttcttcaatgggaaggagctttgcaagagcatcaaccctgatgaggccgttgcatgtggtgctgcactccaagctgctatattgagtggtgaaggtaatgagaaagtgcaagatctcttgctcttggatgtcactccattgtctttcggtttggaaaccgctggtggtgttataaccgtttttat

SEQ ID NO: 234236 - DNA, 332 bp, Gossypium hirsutum
gtaacggatagtaagcattcggcggtggagtccgtgatggagaagatcagcgaggggatccacggccatgattcatcgccttcttcgcattccgattcagatcatgagaaaccagcttcccctagctccgtgagggctaagattgatcggctgtttggtagggagagacctcttcatcacgttctcggtggcggaaagcctgctgatgtgctcttgtggaggaacatgaagacatcgagctgctgttcttggtggagcaactgcagtctgcgtcctttgtgagttgatcgaataccacctacttactctgctctgtcacatttcgatactct

SEQ ID NO: 234237 - DNA, 363 bp, Gossypium hirsutum
gagatgaggaaaatcatgggtgccaaagttcttttcttctttgctttgctttgcttttcagctgtctcggcatttgcacaggatgaggaagaccaaggtcttgttatgaacttctacaaggattcttgtcctcaggctgaagacattatcaaggagcaagttaagctactgtacaagcgacacaaaaacactgctttttcttggctgagaaacattttccatgactgtgctgtccagtcatgtgatgcttcactgctgctggactccacaagaaggagcttgtctgagaaggagacagacaggagctttggcctaaggaatttcaggtacattgagaccatcaaagaagctgtagaaagggga

SEQ ID NO: 234238 - DNA, 412 bp, Gossypium hirsutum
cttaggaagcatggacttcatagctactatcctgtttctagctcttgtcgtgtcctccaccaaagctttggaccctcgcggccctcagccagatgactcggaccttttggccatcccaatctatggcaaatgttcaccattcaacccacccaaacctgactcatcgttcaacacagtcatgaacatggcatcaaaagacccagcatgggtcaagtacttgtcgagccttgtagcccaaaagaccactgcggttcccattgcttcatgccaacaagtgctaaacattggcaactatatcgtccgggtaaagattggcactccgggtcagctcatgttcatggtattggacactagcaatgatgtggcttgtgtcccatgctccggctgcaacgggtgctcagccaccactttt

SEQ ID NO: 234239 - DNA, 406 bp, Gossypium hirsutum
agaaaaatgaagaaagtagagctgatattccttccaacaccaggagccggccacttggccccaactgttgtattcgtaaagcgtctcatccatcacgatgatcgaattctggttactattctttccattgagtggcattcttcgggtttcgccgatgcctacaccgaatcgcttgctactttgcaatctgatcgaatccaggttattcaggtttctcgggtagatcctcccccgttacatctttggaccttggcacccgaagctttcgtctatgcattaattcagagctacatccctgatgctagaaatgctgacacaaatattttgtctatgaaatccacttcggattcaacccgagttgcaggcttagttcttgatctgttttgctcgcccatggttgatgtcg

SEQ ID NO: 234240 - DNA, 309 bp, Gossypium hirsutum
tttcggtttctcgcctccgagaagaagccgacgccgccatggttcacggcaggttctaccgcaattatgggaagacatttaagaagccaaggcgtccataccagaaagaacgtttggatactgagttgaggcttgtaagagaatatgggctccgatataagagagagttgtggagggttcaatatgctgtgagacgaatcaaaaatgctgctagggatctccttactctctgtgagaagaaccctcgtggtatttttgaagaagaagatcttctttggaggatgaacaaggatggactttttgatgaga

SEQ ID NO: 234241 - DNA, 408 bp, Gossypium hirsutum
gctttcttccctctgaaaccctaaaccgccgccgtcgcccgtcaaacgccgacgaaaatggctttcgagggagtagttctccgcggcaccatgcgagcccacactgacatggtaacagccatcgccactcccatcgacaactccgatatgatcgtcacttcctctcgcgacaagtccatcatcctttggcacttgaccaaagacgaaaatgacctacggtgtcgctcgccgccgtctcaccggccactcacactttgttcaagacgttgttctctcttctgactcccagttcgctctctccggttcctgggacggcgagcttcgtctttgggatttgaacgccggaacctccgctcgtcgttttgtcggccacaccaaagacgtgctctccgttgctttttcaattga

SEQ ID NO: 234242 - DNA, 380 bp, Gossypium hirsutum
gttctctccaaaatatctgctttttcttagttttcctttttgtcccttgtttatttgatatttccccctcatggccgccgctgatgtcgagttccggtgcttcgtcggagggctcgcatgggccaccgacgaccgggccctcgaagaagccttcagtgcgtttggtgaaatcgtcgaatcgaagatcattaatgatcgtgagactggaagatcccgaggctttggattcgttactttccgtgacgagaaagctatgagggacgcgatcgaaggaatgaacggtcaaaatcttgatggaaggaacatcaccgtcaacgaagcccaatcgcgcagaagtggatgcggtggcggaggatttggaggaggaaacggtggttaca

SEQ ID NO: 234243 - DNA, 384 bp, Gossypium hirsutum
tttattttctctgagaagctgaaaaatggcggaatcggtggagttgccaggtcgtttagcaattcttccattcagaaacaaagttttattgcctggcgcctttattcgaattcgctgcacttcacagagcagtgtaaaattggtggagcaagagttatggcagcgagaggagaaaggattaataggaattcttccggttcaagatgctgctgagacgacctccatggattccatgttatctcaaggtgttggaagtgaatcaggtgagcgaagctcgaacgttcaggttagcacatctgatgctcacaaggttgatgggaaaaacccttcagaagtcattcactggcataacaggggagtggcagcacgagctttgcatctatc

SEQ ID NO: 234244 - DNA, 413 bp, Gossypium hirsutum
gttctctccaaaatatctgctttttcttagttttcctttttgtcccttgtttatttgatatttccccctcatggccgccgctgatgtcgagttccggtgcttcgtcggagggctcgcatgggccacccacgaccgggccctcgaaaaaaccttcagtgcgtttggtgaaatcgtcgaatcgaagatcattaatgatcgtgagactggaagatcccgaggctttggattcgttactttccgtgacgagaaagctatgagggacgcgatcgaaggaatgaacggtcaaaatcttgatggaaggaacatcaccgtcaacgaagcccaatcgcgcataagtggaggcggtggcggaggatttggaggaggaaacggtggttacagccgcggtggaggcggcggcggatatggtggtc

SEQ ID NO: 234245 - DNA, 418 bp, Gossypium hirsutum
ggccatctctatgcgctagatcttacactgtcttattaattgccaatcaaactgtcgatctctcttctgcacatcgaaccttattattattgtaacaacataaaataaccttatacccccagagtgccgaataaaatcggcatcaagcgcgttcagaaagaatacagagacactccagtagggaaccaagtaatcatgttgttgctcgcacataacacaagtgacattctcagaacggcattaactagcgtggaagggagtgaaggaacaccgttggcaggtggatattactatgaaaagatcaagttacctcctgagtatccatacaaacctactggaatcaccatgatcacccccaatggacggtttatgacgcaaatgaaaagatgcttgtccatgagtgattctcatccagaaa

SEQ ID NO: 234246 - DNA, 415 bp, Gossypium hirsutum
gacacacctcaaaaaggatctagaaaagagaatatctccttttattttcatttcgtgcttcatttcatctcaaatccatcatcgaaattacttgtagttatcagaatggggacaataggcaaaactactacggccactatttttctttgtcttcttctgtttcctattgtcttttccacgcctaatgacagatttgttagaattggactcaaaaagagaaagattgaccgaaacaatcggatggctgcacaccttgaatccaaggaggaaaaggcatctgaagcttttcttagaaagtatcgtcttcatgggaacttgggggaatcagaggacattgatattgtggcactaaagaactacatgctcagtactttggtgagattggtattggcactcctacacagaacttcactgt

SEQ ID NO: 234247 - DNA, 405 bp, Gossypium hirsutum
gataatccagagttcaatcatctaaaagaagccctaaaatctttgaatcaggtctgagcttgtggtttgttaggcctctttgatcaaactaagtttcatgtctgatcttgacgttcaaattcctactgccttcgatccctttgctgatgcaaatgctgaggactcaggtgcgggtgcaaaggagtatgtgcatattcgtattcagcagaggaatggtcgcaaaagcctgacaactgtccaggggttgaagaaagaattcagctataacaagatacttaaagacctgaagaaggagttttgctgcaatgggaccgtggtccaggaccctgaattaggacaggtgattcaacttcaaggtgaccagcgtaagaatgtatcaaccttcctttcaggctggcatagtga

SEQ ID NO: 234248 - DNA, 322 bp, Gossypium hirsutum
cttcacttcagttgttagcagaagaaaaagaatggcgacaaccgtggatggcggaaaccagtacgatagagccgaagaagtaaaaagattcgatgactcaaaaattggagtaaaagggctagtcgattctggtctcaccactatccctcgcatcttccttcacccacccgaaactttatccgacctcaaacccaaacccaaacccaagtcgggtgccatacccaccatcgacctctcggggccccattcgacggtcgtggagcaagtatcttctggatcttaatcctttgggttcttttaaaatggcaaccatggaattccc

SEQ ID NO: 234249 - DNA, 416 bp, Gossypium hirsutum
cggacgcgtggggtctttatacaagctttcttcaatttcaacattcaagaatcaagtgtttgcaaagatgagttctacaagcagagcatggattgttgcagctagtattggagctgtagaggctctgaaagatcaaggtatttgcagatggaactacacagtaaggtcagttgcgcagcatgccaagaaccatgtgaggtcagcttcacaggccaagaacctctcctctcaatcctcagctgcaatttcaaagggactgaacaagtctaaacaatcagaagagtctttgaggactgtcatgtacttgagctgttggggtcccaactgagccataaatctgtcaaaatcgattacaattacaaggaacattcttaatttgggtgaatcattgactcccgagtgcaagctttggtcat

SEQ ID NO: 234250 - DNA, 404 bp, Gossypium hirsutum
  unsure (1)..(404): unsure at all n locations
gccaaaaatgtctctttacccttctctcaccatgtcattgctgtctttttccttcttgttgctgtttgcttttagtgccaaagctgttgttcctccatctgaaactttaaggttggcaaccaaagggaatttgggccctttattggttaatatggggcaaattaccgggtcataagcatagctaatgcccccttccagcttgcgttttataacaccacgcctaatgccttcacccttgcgttacgcatggctacaacacgttccgagtcgctcttccgatgggtttgggaggccaacagggggaaccctgttcgcgagaacgccacgttctctctcgngactgacgggaaccttgtcttggctgatgccgatggtcggattgtttgcaaaagtacactggcaac

SEQ ID NO: 234251 - DNA, 346 bp, Gossypium hirsutum
gaaagcttgtatcagggaagaatctgtgggcaagcttaagggcattttggggtgcgttgaggaagattttttgtccactgacttcgttagggacagcaagtcgagcatatttgatgccaaggctggtattgctctaaacaagaacctttttaaacttggtttcgggtacgacaacaaataggggtacaagttttgtgtgattgatttgatcgttcacatggcattcaccaaaacatgttgaagttttttttttaaggccagcgaataaatgaggtttttgggtgaaaagaatattatgtgtttagaaaaacttccctttctttggaaaaaaaaacacaaagatttt

SEQ ID NO: 234252 - DNA, 381 bp, Gossypium hirsutum
ttgttctctctctctcttattagaaattagacactactagacttgtagaaatgcaagggctcgtcttgttgccggtactcctttgcgccacctaccatatcgctctttccgcgaccaacgttacggtggcggacgggctgttagataatggtaactttgagcaagccccgattgcctaaaccttgaaggccccggtggtggggggcgttattccataccaggatgggtaaaccaagggtttgtggaatacataaagtccgggcaaaagcaaggggacatgttgctggtggtgcctgagggagcctatgcagtcaggttggggaacgaggcttcaatcaagcaggagataaagggggcgaaagggatgtatcactccatcac

SEQ ID NO: 234253 - DNA, 390 bp, Gossypium hirsutum
catgatttgaacttggagcacagtgcaaacttggaacaaaatgcgaacttggagcacattgcaaacttggagcacatggcaaacttggagcacaatgcaaacttggagcatattgcaaacttacagcagattgcaaacttggagcacaatgcaaacttagagcacattgctaacttggagcacaatgctaacttagagcacagtgtggactcggagcagaacttaaacttggagaagaactggaagagaacttggaggagcagaaattgcagcaggaatcacaacatcaaccaaaacaagaccatgtaaacgaggcagtggttggaggtggtgaaaagaagtggcctggatggactggagagagtgtgttccggatgttatgtcctgcac

SEQ ID NO: 234254 - DNA, 412 bp, Gossypium hirsutum
cttagccggatggcggagtggcgtgatgtgacgcctcttcctcaagacgacggtcctaaccccgtcgtccccatcgcctacaaggaaaaattccgtgaaaccatggattacttccgggccatctacaaagccgatgaacgctcccctcgtgcccttcggctgacccgacgagcaatccatctcaatcctggcaattacactgtttggcattttaagcgactcgtgctcgaaacacttaatgccgatttggacgaggaattggattttcttcaacggattgctaattctaactctaagaattatcagttatggcaccatccgcggggggttgtcaaaagatttggagctaatgctagagccaaggagcttaatctcattaagaagatactatcaattgatgccaaaaactatc

SEQ ID NO: 234255 - DNA, 246 bp, Gossypium hirsutum
gattttcctgaaaaccctaaccggcaagaccataactctcaaggtcgatagcaggtttaccattaacaacctcaatgccaagatccaagacacagaaggaattccaccggactatcaacgtgtcatggtgaccagaaaacagcttgaagatggccatacctaggcttactacaacatccagaagagaatcaacactctatcttgtgaaagaagcgagagggggaaccatcgatccttctttgatgg

SEQ ID NO: 234256 - DNA, 391 bp, Gossypium hirsutum
gcgacgcgtccatcagtgcgtcgtcagagccttcgtgaagcggctcggttcatgcgccgagccacaagccgaagaacgatgcgcgagccatctatgcttgttcgagagaccgccgccgagcagctggaggaacgccagagcgattgggcttattcgaaacccgtggtgattctcgatgtcatctggaattttgctttcgttgcggtggcagctggggtcttgttcttgagccgtgatgaaaaccccgagatgccgttgaggctttggataattgggtatgcttttcagagtttgttgcatatggtttgggtttgtgtggagtacaagcggcgtaagaggcggcagagcatggagtatagtcgatttaatgcaggggaggattgtgttttga

SEQ ID NO: 234257 - DNA, 416 bp, Gossypium hirsutum
cttaagcaatggcggccgaggaggacagcggggagttttacctccgctactacgtgggccacaaagggaaattcgggcacgagtttttggagttcgagttcaggccagatgggaagctccggtacgctaacaactccaactacaaaaacgacactatgatccgcaaagaggtcttcctcactcctgccgttcttaaggaatgccgccgcatcatcgccgagagcgagataatgaaggaagatgataacaattggccagaaccagaccgtgttgggcggcaagagcttgagatagtgatggggaatgagcacatctctttcacaacttcaaagattgggtcccttgttgatgttcagagcagtaaggatcctgaaggtcttcgcatattttattatctggttcatgatttgaagtgc

SEQ ID NO: 234258 - DNA, 415 bp, Gossypium hirsutum
ggcggcttctgcttctatttactattttctcactctcctactcctttgtgccatccgttttaccttctccgagctcgttaaagagcagcctctggtgttgaagtaccacaatgggccaatcttgaaggggaagatcaccgttaatctcatctggtacgggaagttctccccaacccagcgctccataatcgtcgatttcatcaactctttgagctctgccgtcaaacccaagattccgtcggcgtcgttttggtggaaaacgacggagaaatacaagtccggttcctccactttggtcgtgggcaaacaaatccttctcgaaaattacccgctcggtaaaacccttaagaacccacacttgccagcgttggccgggatattcaacggcgtatgtacggttagcgttatcctcacg

SEQ ID NO: 234259 - DNA, 327 bp, Gossypium hirsutum
acgacgcgtgcataagggcactcttaatattgtagatttggatgattatgcggtagatgatgaacattacgaggagaagatgaaaaaagagagtttggctttcttcttcttggccacttatggagacggtgagccaacagataatgcactctgtttctataaatggttcactgagggaaaagagaggggagtatggcttcagaacatgaagtatgggatctttggccttggtatcaaacaggatgaacatttcaacagggtggcataggtcgtcgatgaactccttacactacagtgagcaaaaggcataattcctttgagttcaag

SEQ ID NO: 234260 - DNA, 400 bp, Gossypium hirsutum
gtcaatgaaaaagatccacaaagataaggatgttgaaccaacagaatttgaggaatcagttgcccaggcattcttcgatttggagaataccaacaaggatctgaaaagtgacctcaaggatctctacattaattcagcagtccaaattgatgtgtctgggagccggaaagctgttgttatccatgtcccgtaccgattgaggaaagcttttcgcaaggttcatgttaagcttgtgagggagcttgaaaagaagttcagtggaaaggatgtgattcttattgctacccggaggatattgaggcccccaaagaaaggttctgctgttcagaagcctcgcagccgcacattgactgctgtacatgaagcaatgctggaagatattgtcttacccgctgagatt

SEQ ID NO: 234261 - DNA, 312 bp, Gossypium hirsutum
gcagaaacgaccggcagagaaataaaaatgggaggctgggcaatcgcagtgggtggtggtgctggtgtagacccaaatctccctaatgaaaggcaagaggaagctaaaagactcctcaatcgttgccttgatattggaatctctgctcttcgttctaacctctccgccattgacgtcgttgaacttgtcgggagggaattggaaacggatcctttgtttaattccgggcgtggatcggcacttacggagaaagggacggtggaaatgggagctagtattatggatggacccgaaagacgatgcggtgctgtt

SEQ ID NO: 234262 - DNA, 385 bp, Gossypium hirsutum
caaaacaacagccaattactcttcagtctcagccgatcttaaaccatgggtcgcgttcgcacaaagacggtgaagaaatcgtcccgtcaggtaatcgagcggtactattctcgaatgaccctcgattttcacaccaacaaaaagattatcgaagaagtagctataatcccatccaagaggctccgtaacaagattgccggtttctcgacccatcttatgaaacgtatccagaaaggaccagttcgcgggatttctcttaagcttcaagaagaagagcgcgagcgtcgcatggattttgtccccgatgaatcggccatcaaggtcgaccaaatcgaagttgataaggaaacacttgatatgctttcggttattggaatgggtgata

SEQ ID NO: 234263 - DNA, 365 bp, Gossypium hirsutum
aacgcgattttctattttgatttctctccctccaattaagatgcagatcttcgttaagaccctgaccggcaagaccatcaccctcgaagtcgagagttccgacacgatcgacaacgttaaggcgaaaatccaagacaaggaagggatcccaccagaccaacaacgtctcatcttcgccggaaaacagctcgaagatggccggaccttggccgattacaacatccagaaggagtacaccctgcatctcgtgctccgtctacgtggtggcatgcagatcttagtcaaaaccctgaccggcaagaccataactttggaagtcgaaagctctgacaccattgacaacgtcaaggcaaagatccaagaca

SEQ ID NO: 234264 - DNA, 337 bp, Gossypium hirsutum
ccttacttggcagccatgattattccagagaagaaccgcagagaaatctgcaaatacctatttcaagagggagtttgctatgcaaagaaggattacaatcttgcgaagcaccccgagatcgatgtacccaatttgcaggtcattaaactgatgcagagcttcaagtccaaggaatatgtccgcgagacttttgcttggatgcactactactggtaccttactaatgatggaattgagtttctcagaacttaccttaatcttccatccgaaattgttcctgctactttaaagaaatctgcaaggcccccgggtaggctaggcggcccacctggtgatc

SEQ ID NO: 234265 - DNA, 393 bp, Gossypium hirsutum
gaagagctttcctttttttctctctatattttctcatctccttttccaccgccgtcgatctcgatccttatccccgttttcaaaaaagctccaaaaagatggccaatgctgcatcgggaatggctgtgcatgatgattgcaagttgaagttcttggaacttaaggcaaaaagaacccaccgctttattgttttcaaaatcgaggagaagcagaagcaagttattgtggagaagcttggtgagccaaccgagagctatgaggattttactaaatgtcttcccgctgatgaatgtcgttatgctgtgtacgattttgattttctaacggccgagaacgtcccaaagagcagaatctttttcattgcatggtctcccgatacatcaaggatcagga

SEQ ID NO: 234266 - DNA, 405 bp, Gossypium hirsutum
gaaaaaagcatttgtaattgtaattgtaaattgtttcgagatctctgtgtatagacagtctcaaatggcagcagctgcagcaccagatcacttgttccatttgaggaacaatttctacttgggttcctttcaggctgccatcaacaacagcgatcttcccaacctctcgcccgacgacgccgttgagcgcgactgcctcgtctaccgctcttacatcgctctcggcagctaccaactggtgatcaatgagatcgactccgccgctaccactcctctccaagccgttaaactgctggccctctatctctccaaccctcatgataaggaatcaacaattgcgagcttgaaagaatggttagcagatccagcgattggaagcaatgccatattaaggttgattgctgg

SEQ ID NO: 234267 - DNA, 289 bp, Gossypium hirsutum
ttccgtcctaattttcaggaaaaaatcgccgccgtgattcaaaactcagcccactgtctccgatcgtgtcaactcgtaacccaatctctcaaatatggatcgacccagattcgtaatcgacgccgtcgaagccgagcaaatggccaaacaatcaggcaagacggtgctccaactccttccttctttggtcaaatcagcccagtccgttgcccgcccgccgatctcgaagtaccaagttggggcagtcgggatcgggtcatccggtcggatctttttcggagccaattta

SEQ ID NO: 234268 - DNA, 373 bp, Gossypium hirsutum
  unsure (1)..(373): unsure at all n locations
tggaggncggccaaagcaaacacactatcagcaggcgcctgcaagccgtaaagcaaaaatctggcaaatcctataatcaaatagccgaagaaaccggcttaaccaacgtttacgtggctcagctcctcaaacgccaggctcagctcaagcctgaaaccgctcctaagctaagggcagccttgcccgaattgcctgaggagcttctccatgagatgatgaaaccaccgttacggtcctatgatccgaaccttatccaagaacccactgtttacaggttgaatgaggcagtgatgcattttggtgagagcataaaggagattatcaatgaagagtttggtgatgggatcatgtcagctatagacttctactgctc

SEQ ID NO: 234269 - DNA, 398 bp, Gossypium hirsutum
atctgccatcaatttgctttgaagatcatgttggctatttttcacaaggcatttgctaatccaccagaggagctgaatagtccagcttctcataaatctactaagaagcctaaacagcctgaagaaaccctaaatgatttcctatctcatcaccctcacaacactttctccatgagctttggcaacgctgctgttttggcttatgtccgccatgaacgtgctgcttcagttcatcagaggttgttttgtgggtttgatgacatatactgccttttcttagggagcttgaacaatctatttatgctgaatagacagtatggtctttccaaagggagcaatgaggcgatgtttgtgattgaagcatataggacactaagggataggggtccataccctgc

SEQ ID NO: 234270 - DNA, 398 bp, Gossypium hirsutum
gaaaaacttaatcatggctcggttgacgttggtgtcctccatcatccttctgctatgctccgtcgccgccggatcaactttcgaggactccaaccccatccagatggtatccgatggcctcagcggcttcgaatcctccgttcttcgtgtcatcggtcacactcgtcatgctctctccttcgcccgttttgcatacaagcatgggaagaggtatgaaaacgtggaggagatgaagctacggtttcagattttcaaaggcaacttggatttaatcagatccactaacaagaagggactgccttacactcttgctgtcaatcagtttgctgattggagctgggaagagttccaaaaacacagattgggggctgctcaaaactgctctgctaccacaaaag

SEQ ID NO: 234271 - DNA, 368 bp, Gossypium hirsutum
tattttctcactctcctactcctttgtgccatcccttttaccttctccgagctcgttaaagagcagcctctggtgttgaagtaccacaatgggccaatcttgaaggggaagatcaccgttaatctcatctggtacgggaagttctccccaacccagcgctccataatcgtcgatttcatcaactctttgagctctgccgtcaaacccaagattccgtcggcgtcgttttggtggaaaacgacggagaaatacaagtccggttcctccactttggtcgtgggcaaacaaatcctcctcgaaaattacccgctcggtaaaacccttaagaacccacacttgccagcgttggccgggaaattcaacggcgt

SEQ ID NO: 234272 - DNA, 261 bp, Gossypium hirsutum
gttcactcatcaccagaagattgttgtagtggatgctgcaatgcctaatggagatccagagaaaaggataattgtgagctttgttggaggtattgatctttgtgatgggagatatgacacacctttccattccctgttcaggaccttggacaccgctcaccatgattatttccataagccaaactccactgatgctttaatcaccaaaggtggaccaagggaaccttttctcgttatccactcccgactggaaggtgccaa

SEQ ID NO: 234273 - DNA, 362 bp, Gossypium hirsutum
gtctaagatatcactgcaaggtaaaaacaaaaagaaccagacatggcttcaaacactgctgcattggctgctctcattattacctcgaacttggtgcgcttcactgcgggttgctctacctacgtgccgtgcgcaccacctccgaagggccacaagcctacccacgagagcccaccctgggcgcctaatcagacagccacttggcccaatgatacactgtacctaggggattgtgctggttcccagcgctcggtgctcgttgttgctggaccggcgaggaccaaatgctgctcactcatttcacgtatgactgatctcgagggtgctgactgccttagcactgctatgatagctaatgcgtt

SEQ ID NO: 234274 - DNA, 393 bp, Gossypium hirsutum
gaaagcaagccactagggttttaagagaagatcaaaatggcttcaaaaaaattagcttccatggccttctttttggcactcaacattctcttcttttccctagtcagtgcttgtggctcttgctcttcacccacccctaaaccaaggccaaacccaaaacccaacacccccacccctactgcatccgcacgaggcaggtgccctagagatgccctcaaattaggtgtatgtgccaatgtgcttaacttagtcaatgtcaccgttggttcacctccagtgatgccatgctgttcccttctcaatggccttgtcgacctcgaagctgctgcttgcctttgtactgctatcagagctaacatcttaagcatcaaccttaacatcccagtttctctt

SEQ ID NO: 234275 - DNA, 395 bp, Gossypium hirsutum
  unsure (1)..(395): unsure at all n locations
gacactaaatgttgaggaaacaaatgatggctttgcttataacgttttgttagactacacagtggctaactcgtccatcgggaccggaaatctcatcttgacaaggccgaaatacaacagcacattgtcgattcttcgactcgggatcgatggaaacctgagggtttttacctactatgacaaggttgattcacaggcatgggaagagactttcactctcttctctagggactcaatatggggcactgaatgcgaactgccggagaggtgtgggaactttggactctgtgaggagaaccaatgcgttgcttgcccgtcaacaaacggattactcggttggagccagaattgtcagccgaagaaggtgaattgtangccgaatggtttcagctact

SEQ ID NO: 234276 - DNA, 385 bp, Gossypium hirsutum
cggacgcgtgggtcactctcccaccccgaccgcttgattttgatcagacggtaatccatgccgatcagaaacatagccgttggccggcctgaagaagctactcacccagatgctcttaaagcagctttagctgagttcatatcaacgttaatcttcgcttttgctggatctggttcaggcatggcttgtaataagctgaccgacggcggtgcaacaactccggctggtctcgttgccgcctctctagctcacggatttgcgcttttcgtcgctgtatccgacggcgctaacatctgcggtggccatgtcaatgccgccgttacattcggtgctttcgttggcgggaacattactcttttacgtggtatcctgtattggattgctc

SEQ ID NO: 234277 - DNA, 410 bp, Gossypium hirsutum
  unsure (1)..(410): unsure at all n locations
ccacgcgtgccgaattgttattcactcgattcttctctttagtccaaaaaagatgcacatctctcgtcaatgactctaagccggcaaagacgatacactctcgagcgtcgagaggctccagacatcgatgcgacatacgtgatagaccaacaatccaagataagagaaggcatnccctccagaccagcagcgtctgatcttcgccggaaaacagcttgaggacggccggaccttggccgattacaacatccaaaaggagtcaactctccacctcgtcctccgtttgcgcggtgggatgcaaatcttcgtgaaaaccttgaccggcaagacaatcactctcgaggtcgagagctccgacacgatcgacaacgttaaggcgaagatccaagacaaggaaggcatccccccag

SEQ ID NO: 234278 - DNA, 401 bp, Gossypium hirsutum
ctgacctcagaaagagcacccaaaagaaaaaacactgatcaacgaaggatttctagggttttttttcggtatcagcaagcgatggcaatggctgctctcagacgcgaagggaggcgtttcgcccctctgatctctccccgtccaattactgctgtccgatcctctcctatcgttcccactcacgaagatgagggtccgattggtgttcgttatatttcaacccaagtcgttagaaaccggatgaagagtgttaagaatattcagaaaattacaaaggctatgaagatggttgctgcctcaaagttgagagcagttcaaactaaagctgagaattcccgaggcctcttgcagccatttactgcacttctttgtgatcttcccagtgttgatgtcaagaagaa

SEQ ID NO: 234279 - DNA, 359 bp, Gossypium hirsutum
cgcgtagattggtggtgagggtcgaggggtgcactaccatgatcctccacaggtcccaaggctgctcggcgcggaatttgacaaagtggtcattttataggggggaagcccgcccgacagtgccgcagcgtagcttaaaaggactgtgttacagtgatcggatacaagagtcaggttgaccctgataagggcagtgaccaatgcggtggtgttggcattcttggcattgcttgggcttttggtgggatgatctttatccttgtttactgcactgctggtatctttggaggacacatcaacccaacagggacctttgggcttttcttggctaggaaggtgtccttagttcgagccatatt

SEQ ID NO: 234280 - DNA, 387 bp, Gossypium hirsutum
ctcgtctcctgcagccattgttacccatcttcttcaagcttggcataccgtcaaactatcctatatgtggtctagtctcacaacggtagcattcgaattttacgttgttgcgttacgcgtcatccaactgtcccctctcaactttccaggttccctgctttacatctcctggagaacacagtcctcaataacactatgtcctcctctttttcttctttcgctcattcaaatagaagtggaggcagaggtcaagatatgaaacatgatcgagaaagatccagaggctgtggcggcggcggcagcaaagacaaaattgatgctcttggtcgactcttgacacgaattctgcgacatatggctactgaactgaatttgaatatgcgaagt

SEQ ID NO: 234281 - DNA, 398 bp, Gossypium hirsutum
accaaatcccaccatcaaaatccccgtaggggacccattcaacgatccgacgggtagctttccctccgttaactttaactacaacaatgcagtcagtagtccttgccccgtcgattacctcgggtctctccaccgttacctaccgtcaaacgactacgagtccgattcgtttagtgatgattcggacttgcctgttgatgcattctcatgcgaccatttccggatgtacgagttcaaggtgaggaggtgtgctcgtggaaggtcacatgactggactgagtgtccgtacgctcaccctggtgagaaggcccgaagaagggacccgcaaaagtttcattactctggaactgcttgccccgattttcgcatgggaagctgtaagaaaggcgattcatgtg

SEQ ID NO: 234282 - DNA, 344 bp, Gossypium hirsutum
ccaaacacggtttctctattacttactggtcttacttatggccgccgtttaggctctcattgcttcacttctcatctctcttcttcttctccaacttgtcgctgctgatcaactggtgacaagtgccagcaagcgcaagggaactgcccccccttgcaaaatcgactgcggcggcgcttgtgcggcgaggagccgattatcatcccggccacacctatgcaagtgggcatgctgtacatgttgcgcacgctgcaactgtgttccaccgtagacagcctgctaccaagaaatgtgtccttgctatgctagcttgaccacccacggtggccgacgcaagtgccctt

SEQ ID NO: 234283 - DNA, 384 bp, Gossypium hirsutum
atcatttcagagaactgaacgctcccccctctttcccgatccttccgaactgcggaaagccactgatcttcaccacttggttttcctcagattggcggcagagttacttctaagatgtctaaagctcaagatccattctacatcgtcaaagaagagattcaagaatctattgataagttgcaatcaagttttcatcaatgggaaagaattctccccgacactggagaacaagtacatctcacgaaagagctacttgctaattgtgagagcatcgaatggcaggtagatgagttgaacaaaacaatagatgtggcagcaagagatccttcttggtatggcattgataatagagaacttgaaaagccgagaagatggaccatcact

SEQ ID NO: 234284 - DNA, 398 bp, Gossypium hirsutum
tccgcaccaagacggtaaagaaatcctctcgccaagtgattgagaggtactactctcgcatgacccttgatttccacaccaacaagaagatcatcgaagaagtggctatcatcccttccaagcgtctccgcaacaagatcgccggcttttccacccatctcatgaagcggatccagaagggtcccgttcgtggcatctctttgaagctccaagaagaagagcgtgagcgtcgcatggatttcgttcccgacgaatccgccatcaaggttgatcaaatcgaagtcgataaggaaactctcgatatgctttcggttctcgggatggctgatattcccggccttgttaaggtcgatccggttgctgttgcggttccacaaatcgggttcggtcgcggtggt

SEQ ID NO: 234285 - DNA, 406 bp, Gossypium hirsutum
cggacgcgtggggcacctctgagatttatagctttcaatgttcttttccccattgaaaaaatattttcgctagattctttaatccattaagatatcatgggcaaaggtccaggtctctacactgaaatcggcaagaaagccagagaccttctttacaaggattatcagactgaccacaagttcactctcaccaccagctctccaactggagttgctattacctctgccggaacaaagaaaggcgaactctttttggctgatgttaacacccagctgaagaataagaatgtcacaactgatattaaagtggatacctactccaatctgtataccaccataaccgttgatcaacctgcacccgggctgaaagcaatctttagcttcagagtccctgatcagaggtctg

SEQ ID NO: 234286 - DNA, 401 bp, Gossypium hirsutum
ggaaaagagaacaaaaaaaaaaaaccggagagatctttaatctatctcatgagatttcattgaagaaataaaagtatccagaaaaaggaaaaaaacgatatgtatagcaatttcaaagaacaagcgatagagtatgtgaagcaagcggtacaagaagataatgcagggaactacagcaaagcctttcctttatacatgaacgcactcgagtatttcaagacccatttgaaatacgagaagaaccccaaaattagggaggctattacccagaaattcaccgagtatttacgccgtgccgaggagatccgtgccgttctcgatgaaggagggcctgggccggcttctaatggggatgctgctgttgccacccgccccaaaagtaagcccaagagtggtggtgg

SEQ ID NO: 234287 - DNA, 391 bp, Gossypium hirsutum
cggacgaggaacaccattttgaatccaaggccgacgccggtgcctccaaaacctacccacaacaggccggaaccattcgtaagaatggttacatcgtcatcaaaaaccgtccctgcaaggttgttgaagtttcgacctccaagactgggaagcatggtcatgctaagtgtcactttgttggaattgacatcttcactgccaagaagctggaagatattgttccctcttcccacaactgtgatgttccacatgttaatcgtactgactaccagttgatcgacatttctgaggatggatttgtgagtttgctgactgacagtggagacactaaggatgatctgaggctcccaactgatgagaacctgttgaaacagatcaaggatggttttgc

SEQ ID NO: 234288 - DNA, 396 bp, Gossypium hirsutum
ctcaattatccatttattcttttctttcaactcaaagtcccaagtagtattagaatcatgggtgttgtcacttataactatgactctacctcccctgtcgctcccgccaggcttttcaaggccttcgttcttgaagctgacaaggtctggcccatagctgcccctcatgcaatcaagagtattgaggttgaagctaatcctggccctggaagtatcgtaaagatcaactttgttgaaggccttccattccaatatatgaagcaccagattggaggacatgatgaaaacaaattttcatacagttacagtttgattgaaggtgggcctttgggggacaagcttgagaaaatcaactacgagaataagtttgaggcaactgtaggtggaggaagtgtg

SEQ ID NO: 234289 - DNA, 387 bp, Gossypium hirsutum
gcgttctgtctttcatactcatttagcccctttcattagcatcgaaatcactccagttttctttatcactgaaaaatgtcttgctgtggtggaaactgtggctgcggttctggctgcaagtgtggcagtggctgtggaggatgcaagatgtacccagacctgaacgttgccgagatgaccacaactgagactctggttcttggtgtagcaccccagaaagcacactttgagggagctgagatggaattcggggctgagaacggctgcaagtgtggagacaactgcacctgcaacccttgcaattgtaaatgattagagaccaaagccaaagctccctggaagcagagacgcctttgtctttaagaaataatatgttttggtggttat

SEQ ID NO: 234290 - DNA, 401 bp, Gossypium hirsutum
aagggcagttatctcatgcgttgctgtcctactgagtcaaacgaaaaataatcgtgataggaaaatgcctcctaaagccaaatagacgccagcctagatgacacctgcggtggagaagaaagccgtatctgataaagcccgggctgagaagaagcctactgctgtgaaaaagcttcccagggaaggcggggcgtctgtcgaagacaagaagttgatgagagccttgacgagcgtccagacctacaagatctacatattcatggtcctggagcaagttcaccctgacatcgcgatctctagcaaagctatgggtgtcatgaacagatcaatcaatgatatcttcgagaagcttgctcaagaagcctctaggctggcgaggtacatcaagaaacccaccatca

SEQ ID NO: 234291 - DNA, 399 bp, Gossypium hirsutum
cgcaaaattacaaaattacagaaaattttagggataaaaccgagtgaaagaacgaagcaagaaaagtggtatcgggtgggagcaggatggggaggcgacagcaaccagaaactgtgggtgtcttagataggatcaataatttgcctgactctattctttctcacattttgtccttccttcccaataaagaagcagttcgaacttctgttctttcaaccaggtggaagtatctctttgcttcctctatatctatccttgattttgaacattgcttaaaaaatttgtgtgaggaagatgttaacaacttcatgaattttgatgatacattactttttaatcccagagagcgggtccatttagaatccttctgggtgaatgactattttgtggatgatgagg

SEQ ID NO: 234292 - DNA, 355 bp, Gossypium hirsutum
ctcaaagaaaaaatcgagtgtcagattgaaagtgttcttcagatatggctatgaaacaagtggctaattctgctatcaaagcaattgccaattctgggtcatcctctcttacttaccacacaactccatgcttatccagggagcaaaaagattgatggggtgtaccacaaggccaacgagtactttacaaagaatcccacctttgttggttgggcggagggagccttggggctgcgcccatggctggaatcacaggagcattagtgtattgataccgacaacacagcaggaccggactgtggacttgaaaagcatatgcctgatctccatgtgctcatatcaaccccatctcacc

SEQ ID NO: 234293 - DNA, 392 bp, Gossypium hirsutum
cttccattgtttttcagtagtgaagagctaaaaaagaagggaaatcaatggaggggaaagaagaagatgttagattgggagccaacaagttcccagagaggcaacctattgggacagcagctcagtcccaagatgataaggattacactgagccaccaccagcacccttgtttgagcctagtgagttgacctcatggtctttttaccgagccggaatcgctgagttcgttgctactttccttttcttgtatatctcggtattgactgtgatgggagttgttaaggacaaaaccaagtgtacaactgttgggattcaagggattgcttgggcttttggtggtatgatctttgcacttgtttactgcactgctggtatctcaggtggtcatatc

SEQ ID NO: 234294 - DNA, 402 bp, Gossypium hirsutum
gacagacagagggggggagccagattagataaactcatggaaaatggtgttctggttcaaagaccacagactctaatccacatgcggttcggatccggattctctaagatgcggttgacattcatgtgctttaattttgattgtgatctgatcccaaacgaatctattcggacgtgaaacatgactcgtcggtgatcacattgcatccacaacggccacaactctcgtacatgtccgaaccgaggggtcaaactcttcagagtccgcttgactgacgggtcgattcggaagagcgcctgtatgggcatcctaagccaatattccgggtcgaattctggcgcgcataacgggaacgggtcggcttcgcccggtgagggtccggatcacaccgatggctatgct

SEQ ID NO: 234295 - DNA, 391 bp, Gossypium hirsutum
atcccctctccctgctttgctctgaaaagtccaagtttttctccaatggcgaccgtctctccaactcctctgttgaaagatgagctcgacatcgtgattcccacgattaggaacttggactttttggagatgtggagaccctttttccagccttaccatctcatcattgttcaagatggtgatcctaccaagactatcaaggtccctgaaggcttcgattatgagctttacaataggaacgacatcaacaggattttgggtcctaaggcttcttgtatctctttcaaggattctgcttgtaggtgctttgggtacatggtttccaagaagaaatacatctataccattgatgatgactgctttgttgctaaagatccatctggaaaagaca

SEQ ID NO: 234296 - DNA, 399 bp, Gossypium hirsutum
tattttctcactctcctactcctttgtgccatcccttttaccttctccgagctcgttaaagagcagcctctggtgttgaagtaccacaatgggccaatcttgaaggggaagatcaccgttaatctcatctggtacgggaagttctccccaacccagcgctccataatcgtcgatttcatcaactctttgagctctgccgtcaaacccaagattccgtcggcgtcgttttggtggaaaacgacggagaaatacaagtccggttcctccactttggtcgtgggcaaacaaatcctcctcgaaaattacccgctcggtaaaacccttaagaacccacacttgccagcgttggccgggaaattcaacggcgtaggtacggttagcgttatcctcacggccaaa

SEQ ID NO: 234297 - DNA, 397 bp, Gossypium hirsutum
ctcaaagatatcactgcaagaaaaaaaaaaaaccagacatggcttccaacactgttgcatccgctgctcttcttcttaccttgaacttgttgttcttcactttggttagctctacctacgtgccttgcccaccaccaccaaagagccacaagcctacccacaaaagcccaccctcggcacctgaacagccaggcacttgccccagagatgcactgaaactaggcgtttgtgctgatttgttgggctcagtgcgcgttgttgttggaccgtcgaggaccaaatgctgctctctcatttcgggtttggctgatctcgatgctgctgtttgcctttgcactgctattaaagctaatgtgttgggggttaacctaaacgttcctgtttcattgtctttgct

SEQ ID NO: 234298 - DNA, 317 bp, Gossypium hirsutum
gagctacttaaccatttcccaaatctcctccctcctcttctttagcgtccttttgatttccgctcatgcagcgcgctttgaaatccgcaatgagtgctcctacaccgtctgggcagcagcctctcctggtggtggccgtcgcctagaccctcggcaaagttggaccatcgatgtgcctgctggcactgctatggctcgtatttggggtcgaaccaattgcaatttcgatgccagtggtaggggtcattgccaaaccggtgattgtggtggactccttcaatgcaaaggttggggtgtaccttccaacaccctggctg

SEQ ID NO: 234299 - DNA, 341 bp, Gossypium hirsutum
aagctaggtggtattgacaagcgtgtgattgagaggttcgagaaggaggctgctgaaatgaacaaaaggtcattcaagtatgcttgggtgcttgacaagcttaaggctgagcgtgaacgtggtatcaccattgatattgccctgtggaagtttgagaccaccaaatactattgcaccgttattgatgcacctggacaccgtgactttatcaagaacatgattaccggtacctcacaggctgactgtgctgttctcattattgactcaaccactggtggttttgaagcttgtttttctaaagaatgtcatgactcgtgagcattctttgcttgcttttaccc

SEQ ID NO: 234300 - DNA, 405 bp, Gossypium hirsutum
gctttcgccaaacaaacgcaagatttgtagattcatttctcttgtctatctgcctccgtatgaatggctttgccaaaccagcaaactgtagattatccgagcttcaagctcgttatcgtcggcgatggaggaactggaaaaactaccttcgtgaagaggcatctaactggagagtttgaaaagaaatacgagccaaccattggtgtggaggttcatcccttggacttcttcactaactgtggcaaaatccgtttctactgctgggatactgctggacaggagaagttcggtggtctcagagatggttactacatccatgggcaatgcgccgtaattatgtttgatgtaactgcccggttgacatacaagaatgttccaacatggcatcgggatctttgcagagtg

SEQ ID NO: 234301 - DNA, 323 bp, Gossypium hirsutum
gtctgccctctctgagctggatacggcttttcattccctctccaaagatgaaaaattccaggaagaattagctgggattttgaaagactatgttggtagggaaagtccactttattttgcagagcggctgtctgaacattacaagcgtcccaatggtgaagggccagatatataccttaagagggaggatcttaaccatactggtgctcataagatcaataatgctgttgctcaggcattgcttgctaaacgtttgggcaagaaacggattattgctgaaactggagctggtcagcatggagtggcaacagctaccgtgtgtg

SEQ ID NO: 234302 - DNA, 389 bp, Gossypium hirsutum
gaaacttaagctttgatttcccaagttttttttttttttttaagaaatggctcaggcaagaggcggtgcaatggcggtggcagcggcgacggtggtgctctgcttgttgctgagccactttgagttggctcaagcagcaacgtatactgttggtggaaccggtggttgggcctttaacgtggctggttggaccaaaaataagcgttttaaggctggtgatacacttgtattcaaatacaacccatcaatccacaatgtggtagctgtaaacagggccggttacagttcatgcacaaccccaaaaggtgctaaagtttaccagtccggcaaggatcaaatcaagcttgtcaaaggccaaaattatttcatctgcaactattctggacatt

SEQ ID NO: 234303 - DNA, 291 bp, Gossypium hirsutum
accaagctaggtggtattgacaagcgtgtgattgagaggttcgagaaagaggctgctgaaatgaacaaaaggtcattcaagtatgcttgggtgcttgacaagcttaatgcttatcaagaacatggtatcaccattgatattgccctgtggaagtttgagaccaccaaatactattgcaccgttattgatgcaccttgacaccgtgactttatcaagaacatgattacctgttcctcacaggctgactgagctgttctcattattgactcaaccactggtggtttagaagct

SEQ ID NO: 234304 - DNA, 406 bp, Gossypium hirsutum
tcgttcatttcctcctagccaaaaaaaaaaaaaaaaaaaagcctttttcctgtctctcgttctttttcctgttcaatcatgtcttgcttcattagcaaatatgctgatgagttggctaaaaacgctgcttacattggaacccctggaaagggtatccttgctgctgatgaatccactggcaccatcggcaagcgtctttcaagtattaatgtagagaatgttgaagacaacaggcgtgctctccgtgagctcctattcacaactcctggagctcttcagcacctcagtggtgttattctctttgaggaaaccctttatcaaaaaaccgcttcgggcaagcccttcgttgatgttttgaaggaaggtggtgtcctccctggcatcaaggttgacaagggtacggttg

SEQ ID NO: 234305 - DNA, 353 bp, Gossypium hirsutum
gattactgattgcaagggagagagtgtatcaccgtttctccccctctgttacttgattgctctccgccatggctctctccgtcgagaaaaccgccgccggccgtgagtacaaggtcaaagacatgtctcaggctgacttcggtcgtctcgagatcgagttagctgaggttgaaatgcctggtttaatggcttgtagaaccgagttcggccctgcccaacctttcaaaggagccaaaattactggttctcttcacatgaccatccaaaccgccgttcttattgaaacccttaccgccctcggagctgaagtccgttggtgctcttgcaacattttctctacccaagaccacgct

SEQ ID NO: 234306 - DNA, 379 bp, Gossypium hirsutum
cacactctctctctccctctttttctggtccaaagttgggttaacagttgccctgattcagggattaaaaagaaaaaaaagctaagttctatattcgggtgtggcaatggctactaataacaataatagcaagttagagaagttggcttctattgatgcacagctacgtgctttggttcctgctaaagtgagtgaagatgataaactggtggagtatgatgctttgcttttggaccggttcctcgatattcttcaagacttacacggcgaggatcttagggaaacggttcaagaatgttatgaactttctgctgagtatgaagggaagagtacccccaagaaacttgaggagctggggaatgttttgactagtttggat

SEQ ID NO: 234307 - DNA, 390 bp, Gossypium hirsutum
ccctttttacacttcctctttggctatcttcattttcatcttcttcctctttctttctgttctttgttttcttcaaatactgccctttcattttccttagttcttgttaaaaagaaaatgtgtgggattttagctgttttgggctgttctgatgattctcaggcaaaaagggttcgggtgctggaactttcccgtaggctcaagcaccgtggtcctgactggagtggcctctaccaacatggagactgttatttggcccatcaacgccttgccatcattgatcctgcttccggtgaccaacctctctttaatgaagacaagtctattgttgtcactgtcaatggagagatttacaaccatgaagaactaaggaagaagttggcccaccac

SEQ ID NO: 234308 - DNA, 367 bp, Gossypium hirsutum
gttgtgcaattcacactcaacaccaggtcaacgtgtcatttggaagcaaaaaccctcttcagaacgtgaaaaacctaataaaatcatttgggattccttcaaaatcatgttctcctcatgtatctctgcaacagggaaattgggtcaagctcatatgtggtgctagcttcgaggatgtagttgatatcaggaatctctcccttgtttacactctagctggagttgattgcattgattgtgctgctgatccatctgtaatcaacgctgtaaatgagggaattgaaacagctagggagattgtatctattagaagaccttgggtgatgataagtgttaatgatgatgaggatcttcattttcgtaaagc

SEQ ID NO: 234309 - DNA, 271 bp, Gossypium hirsutum
gaggttgaggactgcttgtgagagagcaaagaggacactaggatctaatggtcaaactaccagcttatattgtaacatattaccatacaatggaatttaaaacgggattctctgggacgaggatggaaaagctgaacatcaatgtgctattgatgttgacattggcgccaatgcttcagccgaagattcctatgatggttaagaggatggtgaccaatctgtgaagggtgggggcattgattacacttccaagagtgaagaggaaccccct

SEQ ID NO: 234310 - DNA, 333 bp, Gossypium hirsutum
tttatttttagcgcctactaagcaaaatgtatgattaacaccaggaacatggagtgatcatttcatctaacttttatctctcaaaatttacattcaattagatctggtttaggcgatggcttaaaagcggatcttgaaggcagctgaaggatctacagaaagatcctgctacctgttgcagtgcaagccctgttgatgaagacatgtttcattggcaagcgactcttatgggtccacctgacagtgcatatgccagtggagtgtttctagtcaccattcattttgctacggactatccatttaagccacccaaggttgcattcaggacaaagg

SEQ ID NO: 234311 - DNA, 364 bp, Gossypium hirsutum
cagaggcgaattcgaagagctaaaaaacccgcagttcagcaaccggggagcactcattcgacaagtccgccatgggtaaggttcatggatctttagctcgtgccggtaaggtgagaggtcaaacacctaaagtggctaagcaagacaagaagaagaagccccgtggccgcgcttacaagaggatgcaatacaaccgtcgtttcgtcaccgcagtggtcggattcggcaaaaagaggggacctaactcatctgagaagtaagaactatgcaatttaaaaaagttattgtttgaagcttttatggatttaatctgtatttttccctgtttttttgtaatgttttatgatacttatttttatccact

SEQ ID NO: 234312 - DNA, 351 bp, Gossypium hirsutum
cttcctattatcttccttccttttcattccttttgctatggcaggaactggggtggtcgctgtttatgggaacggcgcaatagctgaaacccacaaatcccctttctccgtcaaggttggcctagcccaaatgctccgtggcggggtgattatggatgtcgtcacccctgaccaagctcgcatcgctgaagaagctggagcctgcgccgtcatggctcttgaacgagtccccgccgacatccgagcccaaggtggcgtggcgcggatgagtgacccacaactcatcaaagaaattaagcaagctgtcaccattcccgtcatggccaaggctcgtattggccatttcgttga

SEQ ID NO: 234313 - DNA, 409 bp, Gossypium hirsutum
aaaaaacaaaaacagagcatccactctttttttcttgagtttcctttgtaaattagttcaagctggcgatcgaaaataaagaaaccactgttcgttaaatcaagcccaagaacagaaggataatgggagctggtgggcctgatgaagaagataacaggtggccgccatggttgaaacctttgctgaaagaacagttctttgttcagtgtaaacatcatgttgattttcacaagagtgaatgcaatatgttctgcttggattgcgttaatggcgctctctgttctttctgcttagcttatcacaaggatcatcgttatatccagataaggaggtcttcataccatgatgtgataagagtatctgagatacaaaaatacctagacatatctggagtccaaacttatataat

SEQ ID NO: 234314 - DNA, 405 bp, Gossypium hirsutum
ccgttagagatattcctagggtttgcatttgcggtttggggtatagggttttagacaacgccaaatcttggatttgaggaatggcgactgcgacgggacaggtgaacgcgaagagaaagccggtgttcgtgaaagtggaggatttgaagcccggtactagtgggcacactttgatcgtcaaagtggtggagatgaccccagtcaagacttccgccaggcccaacaggtcccgtgctctcctttctcgacctgtccctccggtccggatcgctgagtgcgtcgttggggacgagactggcaccatcatcttcaccgcacgcaacgaacaagttgatcttatgacaaaaggtgcaaccgtgattttacgtaatgctaagattgttatgttcaagcgaacaacaatga

SEQ ID NO: 234315 - DNA, 369 bp, Gossypium hirsutum
gctccttctcgctgcgatttcgtcttcaagatctcagttctcaaatcgtagcgctcttttctatcaagccatggctctggtcttgcatgcaggaaaaacaaacaaaaatgcctttaaggcactcattgctgcagaatatagtggtgtgcaggtcaaaatggttgagaattttgagatgggtgtgtcaaataagactcctgagttcatcaagatgaaccctttggggaaggttcctgtgttggaaacacctgagggtcctgtatttgagagcaatgccattgctcgttatgttgctcgctcaaaggttaacaaccctatatgtggttctacattgattgattatggtcatatcgagcaatggattgattt

SEQ ID NO: 234316 - DNA, 393 bp, Gossypium hirsutum
tccggtttctctccatctagccgtctcgcgtgcgccctgtggctctcttcaaccctcgcatatctcttcaagatctgatctgatctgacaaaaaaatgttcgggagagcaccaaagaaaagcgataatactaaatactatgagatattgggagtgcccaaaaccgcttcccaagatgatttgaagaaggcttatagaaaagctgcaattaagaatcatcctgataaaggcggtgatcctgaaaagtttaaagagttggctcaagcttatgaggtgctgagtgacccagagaagcgtgagatatatgatcagtatggcgaggacgcccttaaagaaggaatgggtggaggcggtggtgcccatgatccatttgatatcttccaatccttctttg

SEQ ID NO: 234317 - DNA, 372 bp, Gossypium hirsutum
cttgcaccatcactgccacataataccctctaaaactgaaaaaaccttgtcttccctctaacttgattggaaaatccacaatggccgccgtcactcgcgaagaaaatgtctacatggtgaaactcgccgagcaagccgaacgctacgaggaaatggtctactttatggagaaagtctcggcttgcgccgcccactacgagggactcaccattgaagaacgcaaccttctatacggcgtttacaagaacaggatcggcgcacgctgagcttagcggcgcatcatctccttcatcgagcacaaagtggagagccgtggtaacgaggatcacgtcggcggtatacgtgattaccgggctaagatcgagtccgagc

SEQ ID NO: 234318 - DNA, 366 bp, Gossypium hirsutum
gcattatactcgtactaagaagaaactagttgtaggcagctattatatcgtttctcctttctcccttctcttaagagtagaatgattattggaaggttacgccaatggttaagtctactggtctgtgtgcttgctgttatactactcaaatctgaaggcgctagtgtagggattacttatctgcaggatgccgtagcgaaaggagctgtttgtttggatgggagtccaccagcttaccattttgacaagggctctggcgctggacttgataattggattgttcacatggagggtggaggatggtgtgaagatgtgccgacttgcctctctcgtaagaacaccgatttaaggtcatcaaagcaaatg

SEQ ID NO: 234319 - DNA, 390 bp, Gossypium hirsutum
cgattgcatctgccatcaatttgctttgaagatcatgttggctatttttcacatggcatttgctaatccaccagaggagctgaatagtccagcttctcataaatctactaagaagcctaaacagcctgaagaaaccctaaatgatttcctatctcatcaccctcacaacactttctccatgagctttggcaacgctgctgttttggcttatgtccgccatgaacgtgctgcttcagttcatcagaggttgttttgtgggtttgatgacatatactgccttttcttagggagcttgaacaatctatttatgctgaatagacagtatggtctttccaaagggagcaatgaggcgatgtttgtgattgaagcatataggacactaagggatag

SEQ ID NO: 234320 - DNA, 389 bp, Gossypium hirsutum
cgcgtccgctttccttcccctcatccaaaccacaaaaacacacaactcagagaagagaaggggaagggaaacaacaatgatggggcaaaggcaacacgttgtccttctcattttctcagcttttcttctcttccaaacctcaaacgcccataatattacacgtctacttgcaaagcacccctctttgtccacattcaatcattacctcaccctcactcacttagctcccgagatcaaccgccgcaccaccatcactgtccttgccttagacaacgccgccatgtcttccctcttggataaaaacccttccatttacaccatcaagaacatcctttcccttcatgtcctccttgactactttggtgccaagaagcttcaccaaataagga

SEQ ID NO: 234321 - DNA, 388 bp, Gossypium hirsutum
cgcgtccggttttgaatctagggatttgcgggtggagaagacgagagctcatctctctgcttcaaagctcctgtccaggtagaattctcttcttcctttgcgttgtgttctttgttgttcagtcgccatggcttcaaagcggattttgaaggaactcaaggatttgcagaaagatccacccacttcttgcagtgctggtccagtagctgaagacatgtttcattggcaagcaacaatcatgggaccctcagatagcccttatgctggaggtgtgtttttagttaccatccatttccctccagattatcctttcaagcctcctaaagtcacgtttaggaccaaggtcttccatcctaacatcaacagcaatggaagcatttgtcttgat

SEQ ID NO: 234322 - DNA, 366 bp, Gossypium hirsutum
cgcgtccgagaaaaccaaagcgtcgtggtttttttcttgttaagtacactgtaaaagatggccgatactgaggagattcaaccccttgtctgtgataatggaactggaatggtgaaggctggttttgctggtgatgatgctcccagggcagtttttcccagtattgttggccgaccccgacacactggtgttatggttgggatgggtcagaaggatgcatatgtaggagatgaggcacaatctaaaagaggtatccttactttgaaatatcccattgagcacggtattgtcagcaactgggatgatatggaaaagatctggcatcatacattctacaatgagctccgtgttgctcctgaggagcac

SEQ ID NO: 234323 - DNA, 371 bp, Gossypium hirsutum
aaactcttcatttagcaaaaatgagtaccagttcttcggctgtttcaacccaaaaaaggcttgaagggaaggttgcattgataactggaggtgccggtggcataggtgaggctacagcaaggttatttgttcaacatggtgctaaggttgtcattgcagacattcaagatgatttaggacaagctatttctcaagaacttggagaagaaaacatctcatatgttcattgcgatgttacattagactctgatgtcggaaacgccgttgatttcgccgtttcgaagcatgggaagcttgatataatgttcaacaacgccggtatatccagtcccgataagaacatagttacttcaaacgatgagagattcaaa

SEQ ID NO: 234324 - DNA, 381 bp, Gossypium hirsutum
tttgtttctcgtcctcttaacgatatcctctgtttgcagttaagaaaagcaaatcatggctgctaccacggtcccagccgccgcaaggcagctatctcctaaagaagccgatatccagatgatgttggctgccgaggtccatctcggtaccaagaactgtgatttccaaatggagcgttacgtcttcaagcgtcgcaatgacggaatttacatcttcaaccttggcaagacctgggagaagcttcagcttgctgctcgtgtaattgtcgctatagagaaccctcaagatatcattgtccaatctgcaagaccctatggtcagagggctgtcttgaaatttgctcagtacactggttgtcatgccattgctggaaggcacac

SEQ ID NO: 234325 - DNA, 374 bp, Gossypium hirsutum
gtttgcacaaagatatttctgagcttaacctacccaaatcttgtgctataacatttccaaatggaaaggataacctgatgaattttgaggtttcaattcgccccgatgaaggatattatttcggtggcacatttttattctcctttcaagtttctcccgtctatccacatgaggcacccaaagttaagtgcaagaccaaggtctaccatccaaatattgatttggaaggaaatgtttgccttaacatcttacgtgaagattggaaaccggtgctcaatataaacactataatctatggtttatatcatcttttcacggaaccgaattatgaggatcccctcaatcatgaagctgctgcagtgttgagggataat

SEQ ID NO: 234326 - DNA, 389 bp, Gossypium hirsutum
tccgaaaaaaaatggcttcgtttcatatgattacaacccttctttttctgctaacaataatgctgggtgcatcaaatgctcaactcagtgccaccttttatgccaaaacctgccctaatgtgtccaccattgttagtaatgtgctgcaacaagctcaaggaaatgatatttggatattccctaagatcgttcgccttcattttcatgattgttttgttcatggttgtgatgcttcgttactgttgaacggtacggatggtgagaaaacggcaaccccaaacctttcgacggagggatatgaagttatcgacgatatcaaaacggcgttggagaaagcttgccctcgtgtcgtctcatgtgccgatgttttggcacttgctgctcaaatt

SEQ ID NO: 234327 - DNA, 351 bp, Gossypium hirsutum
acgcgtccggaaagatcctctccactaggaactagttatagtcttctctcttccaccagattctttttggatcatggcgatatcggatgtggtggttgggaatttgctgatcatatacgtggcggttatagcggggataaaggcgtacggtttagtgtgtgggaggaacttcggtggttggtttgtgttgatggcgtcgactacggtggtgggtctgatcttggtcggggctttgacgtgggacgtcagtcgtaaagccacgcaagcaatttccggtgaggatcaagatgctggttcccttcaagttcacgagatgtgtaaaggtggtatttgctggcacggcgtggctgt

SEQ ID NO: 234328 - DNA, 240 bp, Gossypium hirsutum
gtccgcggtttaggagttgcaaattatcctgggcctacacgcaggcatcctacagttcatatgaccatgcttcgattcgtcgcggtcaccaggtttaccagcaagtgtgtgcatcctgccactctatgtccctaatatcataccgtgatttggttggtgttgcatatacggaagaggagacgaaggctatggcagctgagattgaggtggttgacggtcctaatgatgagggtgagatgt

SEQ ID NO: 234329 - DNA, 380 bp, Gossypium hirsutum
caagcagcagccgctaccgtgtcgttggcctcgtacttagccaaatttaaggatggattcacaaattaagtttgccgtggtggtgaaaattatgggaaggacgggatcgagaggtcaagtgactcaagtgagagtcaagtttttggatgatcagaaccgttttattatgaggaacgtgaagggaccggtcagggagggagatattctcaccttgctcgagtctgagagggaagctaggaggcttcgttgatcacttcctcttatctccgttttgttactttattaatgtttatgttgcgcaagtagctagctgtttattatttctgaaaggtatccaaattttcaaatctagacttggattttgggagactgatttaaat

SEQ ID NO: 234330 - DNA, 371 bp, Gossypium hirsutum
tgcgtcgattttcttcgataaagagatccaagaaaatgtcgaataaaccgcgagagtcggttgtgatccgatccgtttggtcggaaaatttggattccgaattcgagataatcagatccataatcgacgttttcccgatcatttcaatggacacagagtttccaggagttgtcgtccgatcggagggcgccggcggcggccatcgctcccgtcgaattgacgccactgagaattaccaaagcctcaaagcgaatgttgacatactaaagcttatccaaatcggcctaacgttatcagacgctgacgggaatttaccaaatctcggcaccgagaaccggtacatttgggagttcaatttcaaagatttcgat

SEQ ID NO: 234331 - DNA, 368 bp, Gossypium hirsutum
  unsure (1)..(368): unsure at all n locations
aaagcagcgtaatgggtgaagaagtgaaggtttttggatactgggcaagcccttacagctacagggcagagcttgctttgaagttgaaaggtgtttcttatgagtacataaatgaggatatctttggcaacaagagcgatttgcttttgaaatacaatccggttcataagaaagtcccggttcttcttcacaacgggaaaccaattgtagagtctcttgttatacttgaatacattgaggaaacttggaagcataatccctatttgccacaagatccttatgacaaagctaccgctcgattctggatcaagttcatcgacgaaaagtgctntcctaccctntggctagctgcatggagcgccgagaat

SEQ ID NO: 234332 - DNA, 355 bp, Gossypium hirsutum
gtggttttggtttttcaattgaagttgagaaatccttgcctgatcttgttttcggtgatgaaaggagagtttttcaagtgatacttcatatggtcgggagcctattggatggcaatagtggaggtggaactgttgtactccgggtgttctccgagaatggtagtcaggaatggaatgatcaaagacgggcagcctggaagcacagctccttggatggagatgtacatatcaggttcgaaattaggatcgagaatagcaattctcagccagagagcagtggctcaatgtcggagttacaggtcagtggcagaaaatataacagcaatagcgccgaggaacgcttgagcttcaacat

SEQ ID NO: 234333 - DNA, 387 bp, Gossypium hirsutum
tccgaatcaagtcatttcaagattttttttctgaacaagaaaaagaaaaatagtaggacaatgccgtccttggaggatgagctgtttccgtcgacgccagggaagttcaaggtcgacagagcacacaatatgaaccgtcaattccatcgttgcttcgcttcaaccagcaccatgtttttatgggctcttttcttgatcgcattgacggcgtcgtatttgcgcttccagagtttcgttgattctggtagccgatatttcagtgcttcatggggtggtatccaatgggaaaaacaagtccgtaactccgctcagatccatcgttccggaggcatgtccgttctggtgactggagcggctggtttcgtcggtacacacgtttcccttgcc

SEQ ID NO: 234334 - DNA, 384 bp, Gossypium hirsutum
cgcgtccgtttttcacttcacatctgcaacgaaaaagaaagcgcccctttatctggtaggatcaggtattagagtggtatagtaaaaatgtcttcaactgggtcaacacgagaggaaaatgtttacatggccaagttggctgagcaagctgaacggtatgaagaaatggtggagttcatggagaaagttgtaaaagctgtcaatgtagaggagctaactgttgaggaacgaaatcttctctccgtggcttacaaaaacgtgattggggccaggagggcatcctggaggataatctcttcaattgagcagaaggaagagagcaaaggaaatggggatcatgttgctatcatcaaggagtataggggcaagatcgaagctgagctt

SEQ ID NO: 234335 - DNA, 388 bp, Gossypium hirsutum
acgcgtccggaaattttattattaatattatcatttctttttgtgtggaaaattaagggagaaagggaaagatgaagatcacgtcgttattggtgttgaagtgcaacccagaaggatctgatccgatcatattagcgaacgcaactgatgtgagccatttcggttacttccaaaggtcaagcgtgagggagtttatcgtctttgttgctcgaaccgtcgccaaacgtacacctcccggccagcgccagtccgtccagcacgaagagtacaaggtacacgcttacaacagaaatggacttgttgccttgggatttatggatgaccactatcctgttcgaagtgctttttcgcttctcaaccaggtgctagatgaatatctgaaaaattt

SEQ ID NO: 234336 - DNA, 388 bp, Gossypium hirsutum
cccacgcgtccgttttttttttttttgttcttcactttctctctgaaatattcattttccttcaactttctcgctttccaaacaagggggaaaaatgcgaagagacgatttgtgcattacgattccgaatttttttcgatgtccgatatcgttggacgtcatgaaatcaccagtaagcttgtgcactggcgtaacatatgacagaaccagcatccagcggtggctagatagcggcaacaacacttgtccggccacgatgcaggttcttcaaagcaaagaattcgttcccaaccgcaatttacaacgactcattcagatctggtccgactcagtcgctcgccgtcaacacgacgccgaattggcggcaaactcagttgtccttccttct

SEQ ID NO: 234337 - DNA, 367 bp, Gossypium hirsutum
aattaaaattccagaattacttaaacaacaatggctacctatgaaggtaatgttttcactgaagaacaagacgctttggtggtcaagtcatggactgttatgaataagaatgcaggtgaattgggtcttaaattcttcttgaagatatttgagattgcaccatcagccaagaaactattctcattcttgagagactcaaatgttccattggagcaaaacacaaagctgaagccccatgccatgtttcgttttgtcatgacatgtgaatctgcagttcaactgcgtaaagcacgcaaagttacagtgagggaatgaaatttgaagaaattaggagctacccattttaagtatggcgtagacgatgaac

SEQ ID NO: 234338 - DNA, 373 bp, Gossypium hirsutum
tgacagtattgcctctcaatttggaggttggacccataagcatgatgaagtggcaactattcatgcagattgaccaatcattccaaattcatcgtagttatggcagcatggttgaaggcgaggctgatgaacttaagagggtcttcctggaaggaaatccgtacttgctagtgatcacaatggtcgtttctttgcttcattctgtgtttgacttcttggcttttaagaatgatatccagttttggaacaaaaataagtctatggaaggattgtctgcaaagtctgttgtggtgagctttttgtgtcagcttatagttttcctctatctactcgataatgagacctcatggatgatactggcaagttctggaat

SEQ ID NO: 234339 - DNA, 390 bp, Gossypium hirsutum
tccgctggcctctttgtaggactgaacaagggccatgttgtaacaaagaaggagttggcaccacgcccctctaatcgtaaaggaaaaacgagcaaaagagtccatttcgtgaggaacttgatcagggaagttgctggttttgcaccgtatgagaagaggatcactgagcttttgaaagtcggtaaggacaagcgagctcttaaggtagctaaaagaaagttgggaactcacaaaagggcaaagaagaagcgtgaagagatgtccagcgttctccgcaagatgagagcccacggtggaggtgcagaaaagaagaaataaagctttattttcttggtttctcacccttgtcgtgctcgagtttcttgtttaggagcagctagaggtttgttt

SEQ ID NO: 234340 - DNA, 368 bp, Gossypium hirsutum
ctctccgtattcagcatatgctgaattcacaggggatcaaaggacctccttacagattcatccatggcaacaacaaggaagttaccaaaatgaaacaaaaagctttaagtaaatctgtgggcttgacagatgatttatttcccaaagtacagccacatatttacacctggaccaacagatatgggaagaattttgtttattggaacggtgctcgagctgaattggtgatttcagagcctgaattagtcaaagaggttctgagaaatagtgaacaaatttttcagaaaaagaaacttacagatattggtaggaagttcttggggaatgggcttatatttattgagggggaaaaatgggcaaagcaccga

SEQ ID NO: 234341 - DNA, 374 bp, Gossypium hirsutum
ctcaactaaacttataacgttcgatcgtttaacgcaaacccatttttaagtgagggaaaggtttcagttcagagtcataagcaacatcaatggctccttcaactctgacggctcttgcggaagagaaaaccttgcaggcaagcttcgttcgtgatgaagatgagcgtcctaaggttgcttacaaccaattcagtaatgatatccctgtcatctctcttgctggtatcgatgatgttgatggcaagaggggtgagatatgcaagaagattgttgaggcttgtgaggattggggtgtcttccaggttgtggatcatggtgttgatactaaactcgtgtccgaaatgacccgtcttgcgagagagttttttgctttg

SEQ ID NO: 234342 - DNA, 385 bp, Gossypium hirsutum
gtccgccgccgcctgcgtctctctcttcatctctctgaaccaaaaagtctttagcttttcgcttcgagagagaccatgttggtttaccaggatctcatctccggtgacgagcttctttctgactcattcccctacaaggaaatcgagaatgggatgctgtgggaagttgagggaaagtgggttgtgcaaggagctattgatgttgacattggtgccaatccttcagccgaagatgctgatgaggatgaaggtgttgatgaccaatctgtgaaggttgttgacattgttgacactttcaggcttcaggagcaaccccctttcgacaagaagcagtttgtcgtgttcatgaagaagttcatcaagaacttgacaccgaaactggatg

SEQ ID NO: 234343 - DNA, 384 bp, Gossypium hirsutum
cgcgtccgcgcagctgagatccgacactccacagcgcagcaatgggtgaggaagtaaaggctttggttcctgagtcactgttgaagaagaacaagaggaatgaagaatgggagcttgccaaaaagcaggagctcgaagccgcgaagaataagaaagtcgagaaccggaagttgattttcaacagggctaagcaatatgcaaaggagtacgaggctcaggaaaaagagttgattcaattgaagcgggaggcgaagttgaaaggaggattctatgttgatccagaagctaagcttttgttcattgttagaatccgcggtatcaatgccatgcacccaaggaccagaaagatcttgcagctcctacgtttgagacagattttcaatg

SEQ ID NO: 234344 - DNA, 386 bp, Gossypium hirsutum
cgcgtccgaattttggatcaaaggctttgattggtgcgggttcttatggaagagtttattatgccagcttgaacaatggaaaagctgtggctgtgaaaaagcttgatgtttccactgagtccgagtcgaatgtggagtttttgacccaggtttccatggtttcaagattgaagcatgacaattttgtcgagttgcaaggttactgtgttgaaggaaatctccgtgtgcttgcttacgagtttgcaacaatgggttcacttcatgacatattgcatggaaggaagggagttcaaggggcacaacctggtccggttcttgactggatgcagagggtaagaattgcagttgatgcagcaaggggcttggaatatttgcacgagaaggtt

SEQ ID NO: 234345 - DNA, 384 bp, Gossypium hirsutum
acgcgtccgatcaatggctaaggatgttgaggttggtggtgagttccaagccaaggactaccatgatcctccaccagctccattggttgatgcccaagagttaactcagtggtccttttacagggctataatagctgagttcattgccacccttttgtttttatacatcactgcgtgaacagtgatcggatacaagagccaagttgatccagataagggtggtcaagattgtgatggtgttggcattcttggtattgcttgggcctttggtggcatgattctcatccttgtttactgcactgctggtatctcagggggacatatcaacccaacagtgacctttgggcttttcttggctcgtaaggtatcattggttcgagccat

SEQ ID NO: 234346 - DNA, 366 bp, Gossypium hirsutum
tggcaatcaattttgtaagcaagtatggctaaggacgttgaggttggtggtgagttccaagccaaggactaccatgatcctccaccagctccattggtggacggggaggagttgacaaagtggtcattttatagggctgtaatagccgagtttattgccacgctcttatttttatacatcactgtgttgacagtgatcggatacaagagtcaagttgaccctgataagggcagggacgaatgtggtggtgttggcattcttggcattgcttgggcttttggtgggatgatctttatccttggttactgcactgctggtatctctggaagacacatcaacccagcagtgacctttgggcttttcttg

SEQ ID NO: 234347 - DNA, 383 bp, Gossypium hirsutum
gtccgccccgaccgcttgattttgatcagacggtaatcatgccgatcagaaacatagccgttggccggcctgaagaagctactcacccagatgctcttaaagcagctttagctgagttcatatcaacgttaatcttcgtttttgctggatctggttcaggcatggcttttaataagctgaccgacggcggtgcaacaactccggctggtctcgttgccgcctctctagctcacggatttgcgcttttcgtcgctgtatccgtcggcgctaacatctgcggtggccatgtcaatcccgccgttacattcggtgctttcgttggcgggaacattactcttttacgtggtatcctttattggattgctcaactccttggctcaacc

SEQ ID NO: 234348 - DNA, 368 bp, Gossypium hirsutum
ctttgtttgcaaaagccagcgccctctatttccagctccgtttctccaacagttccgttcccaccgccgcaccgtcgatttccacctcagtttctccgtccatggctgcaacggactctcctctaacgaccaaggtttgtatcattgggagtggccccgccgctcacacggccgctatctacgctgctcgtgctgagctcaagcctattctttttgagggatggatggctaacgatattgcgcctggtggtcagcttaccaccacttccgacgtcgagaacttccctggattcccggatggtatcatgggttcggagcttatggggcggtgccggaaccagtcgcttcggtttggtactactatcttt

SEQ ID NO: 234349 - DNA, 387 bp, Gossypium hirsutum
cgtccgctttttatagagagacactcgaaacaaaattatacgtatttatatacggaggtgatagcggcggcgctggtggcggttgtacaatcggaattcagatcggcaatctaatggctgaagacaagtataacctcaagaatccggcggtgaagaggatcttacaagaggttaaggaattgcaatccaatccttccgatgattcatgagcctaccactcgaggagaatatatttgaatggcaattcgcaattaggggtccaagggattctgaatttgaaggagggatttatcatggaaggattcaattgcctgctgagtatccatttaagcccccttcatttatgttgctcaccccaaatggacgtttcgaaacgcagactaagat

SEQ ID NO: 234350 - DNA, 342 bp, Gossypium hirsutum
cccacgcgtccgcctcgctaaaagacttttcagatgtctaacccaaggttggaaggtaaggtggctcttatcactggtggagccagcggtatcggtgaggagacggcgaggttctttgtacaacatggggctttggttgttattgttgatgtccaggatgatctggggaatcaagtcgctgcatcgatcggccttgacaaggttagttaccggcactgcgatgtacgagaggagaagcaggttgaggaagcagtaagtttcacagtggagaaatatgggaagctggatatcttattcagcaatgcgggtaccctaggctcgttaaccggaatcttagaaatt

SEQ ID NO: 234351 - DNA, 374 bp, Gossypium hirsutum
aaatggggtctctttttactcctctgctccttccactcttttgtctttgccttactctaatctcacccacacattccactgattgttcatcgctcaaactctccggtggcaaaaaacaatactccaattgcacccacctccccaccttgaacgcaaccctccatttcacctacaatgccaccaactcttccctttccatagccttctcagcacctccggctaaagccggcggttggattgcttgggccgtcaaccccacggggacaggcatggcaggttcacaagccctcctggctttcaaaaacaatggatctatggttgttaaaacctacaacataagctcctacagttccattgtggaagggaagctttct

SEQ ID NO: 234352 - DNA, 387 bp, Gossypium hirsutum
gcgtccggttttgggtcaccgagagaaaggcctcagctcatattgctttcatcgattttcctctgcattttccatcactttctcgggaaaaaaaaacagaaagtttcagaagaatgtactcgggtattcggtcgttatcgttagatggatgtgtgggggattatcaagggtcgcttgatggaaccaacttgcctggtgatgcttgtttggtcccaacaaccgaccccaagcctcgactccgatggacggccgagctccatgaacgttttgtcgatgctgttactcaactcggcggccctgacaaagcaacccctaagactattatgagaacaatgggagtaaaaggccttaccctctatcacttgaaatcacatcttcagaaatacc

SEQ ID NO: 234353 - DNA, 384 bp, Gossypium hirsutum
cgcgtccgttcttctctcttttactcattcattctttcgtttcaatatcaaagcaaaaatggcttcttcttgtaatgttgtttcaatggctttactggcttgtttggtgttgaactccttggtttttgttgcccatggtggtgacttttaccaggatttcgacctaacatggggtgacaaaagaggcaagattttcaatggtggcaagctcttgtctttgtctttagacagggtttcagggtctggttttaaatccaagaaagagtatttgtttggaaggattgatatgcaactcaagcttgttgctggcaactcagctggcactgtcactgcttattatctgtcatctcaagggccaacccatgatgagatagactttgaatt

SEQ ID NO: 234354 - DNA, 372 bp, Gossypium hirsutum
cgcgtccgaaaccaaaaatggaacacgaaattcctttttttcgccagacatgggcacgtcgccggccttagcaacctccgtgccaatcatttccactattcatttcatttcattaaacgtgtgacacgacccactggatcgaagatgccggtggccggttctgccatatacttcatgaatcttcgcggcgatgtcctcatcaatcgcctctaccgagacgatgtcggaagaaacatggtggatgccttacggatgcacattatgcaaacaaaaaaactcggaacttgtcccgtcagacagattggaggacgctctgtgttttacatgagaatcagcaacgtatacatcgtaattgcggtcagcagtaatgct

SEQ ID NO: 234355 - DNA, 385 bp, Gossypium hirsutum
cgcgtccggaaatttgttgcaattttcagttttctgggaaaagtagaggcaaattttccactttttcgttctgggttgtaaggcaaagaacaagaagagcttcaactgaaacaatggtgaccaaaacagtagatcttcgatcggatacggtaacgaaaccaactgaggcaatgagggctgcaatggcaactgctgaagttgatgatgatgtcttgggtgctgatccgaccgcggcccggttggaatccgaagtcgctaagatcatgggcaaggaagccggtttatttgttgcatcaggcaccatgggtaacctcattagtgttcttgttcattgtgatattaggggaagtgaagtcattcttggtgacaattgtcatatccatat

SEQ ID NO: 234356 - DNA, 373 bp, Gossypium hirsutum
atttcaccccttaggtttctctttcacacagagacagagagagaatcagaggagcttaatcgagatttgatattcctcaccacagatggatcagatattgaacaaggtgggctcctattggctcggccagaaggccaacaaggagatcgattccgtcggcgacgacctcaactcattatccaccagtattgaagggggagccaaatggttggttaataaaatcaaaggaaaaatgcaaaagccgttgccagagctgttaagagagtataacctgccaataggaatcttccctcgtgatgccacaaattatgaattcaatgaagagactgggaagctcactgtttttattccagcaatatgtgaagtgggatac

SEQ ID NO: 234357 - DNA, 370 bp, Gossypium hirsutum
gggaaatctattttggagttaggagctggcattggtcgatttaccggtgaattagctcagaaggctgatagtgttatagctttagacttcattgaggatgttatcaagaagaatgaaagcatcaatggacattataagaacatcaaattcctttgtgccgatgcgactgccccagatttggatatttcagaaggatcaatggacttgatattctcaaatttgctgctgatgtatctctcagatgaagaggtagagaatttggcccaagggatgatgaaatggttgaaagtcggaggacatattttcttcagggaggcttgttttgatcaatctggcgactgcaagcaaaagcatgacccttctctctacc

SEQ ID NO: 234358 - DNA, 371 bp, Gossypium hirsutum
ctcgtatcttcactctcccaccccgaccgcttgattttgatcagacggtaatcatgccgatcagaaacatagccgttggccggcctgaagaagctactcacccagatgctcttaaagcagctttagctgagttcatatcaacgttaatcttcgtttttgctggatctggttcaggcatggcttttaataagctgaccgacggcggtgcaacaactccggctggtctcgttgccgcctctctagctcacggatttgcgcttttcgtcgctgtatccgtcggcgctaacatctccggtggccatgtcaatcccgccgttacattcggtgctttcgttggcgggaacattactcttttacgtggtatcctttat

SEQ ID NO: 234359 - DNA, 385 bp, Gossypium hirsutum
cgcgtccgcccatttccaatctccagctcccaaggtaaatatgccgatcagaaacatagcagttggccggcccgaagaggcgactcaccccgatgctctcaaggcagctttggctgagttcatctcaaccttgatcttcgttttcgctggatcgggctcaggaatggcttttaacaagttgaccgacaacggagcaacaaccccggccggtctcgtagccgccgctctagctcatggcttcggtcttttcgtcgctgtctccgttggcgccaacatctcaggtggccacgtgaaccccgccgtcaccttcggtgctttcgttggcgggaacatcactctcttgcgcggcattctttactggatcgcccaactactaggctcaacc

SEQ ID NO: 234360 - DNA, 384 bp, Gossypium hirsutum
cgtccgctcaaaactattcaccagagttaccactgaaaacatggccgccacaaagcttgggaggatcaagctgggttctcagggcctggaagtgtcggcacaaggccttggatgcatggggatgtcagctttctatggtcctccaaagcctgaacccgacatgatagctctcatccaccatgctattaactctggagttacctttcttgacacctctgatgtttacggtccacataccaatgaaatccttcttggtaaggccctaaaagatggtgtaagaaacaaggttgagttggctactaagttcggtatcgattatactgatgggaaaagggaaatccggggtgaccctgtttatgtaagggctgcttgtgaaggtagctt

SEQ ID NO: 234361 - DNA, 384 bp, Gossypium hirsutum
ccgtccgcgccttctctctctcttattcaacaagccggcgagggaaggaaaaccggagagggagaaaaatgccagctggtcacggtctccgatctcggaccagggatctgttttccagacccttcagaaagaagggttacatcccattgtccacttatctcaggacctacaagattggtgactatgtggacgtcaaggtaaatggcgccgttcacaagggcatgccccacaaattctaccatggccgcactggtcgtgtctggaacatcaccaagcgcgccatcggcgttgaggtcaacaagcaggtgggtaaccggattatcaggaagaggattcatgtcagagtggagcatgttcagccttcaaggtgcactgaggaattca

SEQ ID NO: 234362 - DNA, 375 bp, Gossypium hirsutum
gtccgatttttcctgctttttctccctcgccaaacagaaatcttagatcatttctagacgcagcgaacgatggagaaagcgatcaaccgacagcaagttttgcttcaacaccttaatccttcagcttcttctttttcgtcgcaccaaaacaactctgccctctctgcatcggcttgtttagctggagatagcgctgcttatctaagaactaatgtatttggagatgatgtggtgatagtagcagcatataggaccgcgctttgcaaatccaagcgagggggtttcaaggatacttatcctgatgatttacttgcacctgttttaacggcagtgatagagaaaacaaatttgaatcctagtgaagttggggatatt

SEQ ID NO: 234363 - DNA, 371 bp, Gossypium hirsutum
ctctgtttttcttattctcggattctctcttcatctcccaattctcaaaaccctaattatatttttttatttccctttttgattcagcaatcggggcttgccaatggccaacagtaatctccctcgaagaatcatcaaggaaactcaacgtctcctcagtgaacctgctccgggaattagtgcttcaccatcagaggataatatgcgatatttcaatgtgatgatccttggtcccacacagtctccatatgaaggaggggttttcaagttggaactatttttgcctgaagaatatcccatggctgctcccaaggttcgatttcttacaaagatatatcatcctaacattgataagcttgggagaatatgcc

SEQ ID NO: 234364 - DNA, 372 bp, Gossypium hirsutum
ctatttttggttttacgtgatcttgttaatggtataaagaagaacaagtttacagcctctgaaagcagtgagatcatttccttcctacaacaggcttttgttcggctagaagcatggttccagtggttcaatactacccagttagggaaggatgttggtagctattactggcatgggagagacaatttgacaattcgtgaactaaacccaaagacactttcctctggactggatgattatcctcgtgcatcacacccaactgaagatgagcgtcacttggatcttagatgttggatgcttcttgcagcagattgcatgaattccgttgcagaattgatttggaaggaaaacaaacctggaaaggactatgct

SEQ ID NO: 234365 - DNA, 373 bp, Gossypium hirsutum
gctaacccaaaacttgaagtctcttttgttcagttgacggccataactgatcagcctacaatggaatccctccacgaaaacgccatccgaaaacctctgtttcaatcacaaatttcggatacgaaatccgaatctacaagttcggagcttgaggatgttttgtcggacggtaactcttccttgttggagcgttggggaaaagcgacatgtatcgaatcgaaactccttttccacttggcagcgccggctgtcattgtttatatgatcaactatctcatgtctatgtccacccaaatcttctccggtcatctcggtaatcttgaactcgccgccgccttcctcggaaacactggcatccaagtctttgcttatg

SEQ ID NO: 234366 - DNA, 370 bp, Gossypium hirsutum
tggcaatcaattttgtaagcaagtatggctaaggacgttgaggttggtggtgagttccaagccaaggactaccatgatcctccaccagctccattggtggacggggaggagttgacaaagtggtcattttatagggctgtaatagccgagtttattgccacgctcttatttttatacatcactgtgttgacagtgatcggatacaagagtcaggttgaccctgataagggcagtgacgaatgtggtggtgttggcattcttggcattgcttgggcttttggtgggatgatctttatccttgtttactgcactggtggtatctttgggggacaccataacccaacaatgacctttgggcttttcttggcta

SEQ ID NO: 234367 - DNA, 366 bp, Gossypium hirsutum
aaatgagttagcaatgctgatggccagactgtactctggtaatcttggtatgatttccttgagaaatgcttatcatggtggaagttctagtactattggactcactgcactgaacacatggaagtacccaataccagagggtgaaatccatcatgttattaatccagatccttttcgtggagtgtttggctctgatgctactcgttatgccaaagatgtacaagatcacattgagtatggtacttcaagaaaagttgctgggttaatagcagaaaccattcaaggagttggaggagcagttgaactagccccaggatatctgaaacaggtttatgacattgtacgcaaggctggcggtgtctgcat

SEQ ID NO: 234368 - DNA, 272 bp, Gossypium hirsutum
taactctatatccatggctataatttccaccaccgcaaaatttaagtcaacatccttgtttattattcttcttctcttgcagttctccataacgaaaggtcatggtggagacgatcacgacgagaacaacggcgaccatacaaacttgcatgacaaaggcttaatcttggtgaaaacatggtgtttgatcattcttttagtaaccacttttgcaggtggagtctccccttatttctttcgatgggacgaaagtttcctcctcttaggcacac

SEQ ID NO: 234369 - DNA, 210 bp, Gossypium hirsutum
tgaagctgctgctgctacttctgctgtcatagcactcaggtctctgcgtattgcacaaactatagactttgtggcagaccatccattcctcttcttgatcagggaaaatgcgactggagttgtgctcttcattggccacgtcctcaatcctcttgaaaactgatgagtccgttgtggtcatgaggcaagagaatatgtgttgtattttgc

SEQ ID NO: 234370 - DNA, 366 bp, Gossypium hirsutum
gtatctcctaaaactaaagcaattctttatctcaaccaaaaccttctcagcaagttgataaatccctggcaattcctcccttgctccgacattcaagatctatactttaaatcccctaagcttttctttcacctttgataactgtctgagtctctatcgaaatcccatcaaaactcaagatgaaggcaaaacagatgaacttgagtggctatcagaaaacctggattgattgctttatttgatgttgatggcactcttacagcttcaagaaaggcggctacacccaagatgtcggagcttatgaaggaactgtaaaaggttggtactgatggagaggtgggcggatctgatctaacttagatatct

SEQ ID NO: 234371 - DNA, 403 bp, Gossypium hirsutum
ttttcaaccaagtccaagagaaaacgaggaaagatttaagtcattattcgtataaacatactacaaaatcaagctttgttcgtgtattattcgtggtcatttttgttatgctgtgcttatagaataatctgggattttgtacttcaacaaaagaagcaggttctcatggctaatagtgcggcagcctgtgccgaaagggcaactcatgatatgctgattggtccagattgggctataaacattgagctatgtgatattataaacacggatccacggcaggctaaggatgctttgaaagtcctcaagaagcaactgggcaataaaaacccaaaagtacagctactagctcttaatgtattggattctctcagtaaaaattgcggggagcatgtttttcagcaga

SEQ ID NO: 234372 - DNA, 293 bp, Gossypium hirsutum
ttatctctctaaacgcgaaaaatctttagcttttcgcttcgagagagaccatatttggttaccaggaactcatttccgtggcgaactttttttttacttatttccctaccaagaaattcaaaattggattctttgggaaagtgaaggaaaatgggttgtgcaaagagctgtccatgtttacattggtgccaatccttcaacccaaagtgcttattaggattaaagtgtttataaccaaactgtgaaagttgttgacattgttgacactttcaagctttaggagcaaccccctt

SEQ ID NO: 234373 - DNA, 368 bp, Gossypium hirsutum
ggattaggcaacggggacttggagaagatgagagacccgaacaatgctcaagattgggttaaacaaaacgtgcaagcccatttaccggacacgaaaatcacctgtatctttgtcggaaacgaggttctcactttcaacgacactaatctttccgataacctcgtcccggccatgcaaagcgttcatacggcacttgtaaacctcgggctcgacaaacaggtgacagtaaccacagcgcattctttaggcatactacaaacctcttttccgccgtcagccggagctttccgtgaggatttagtcgatattttgagccaaacattgagctttcatcaaaaaacagggtcaccttttttgatcaatgcgta

SEQ ID NO: 234374 - DNA, 333 bp, Gossypium hirsutum
cgcacgcgtccggctaagggtaccaccacgctagctttcatctttaaggaaggggtcatggttgccgctgattctagagctagcatgggaggctatatctcttcacaatcagtgaagaaaattattgaaatcaatccttacatgcttggaacaatggctggaggagctgctgactgccagttttggcacagaaatttaggcatcaagtgccggctgcatgaattagcaaacaagcgtagaatttcagttacaggggcatcaaaactgttggcaaacattctctattcttaccgaggaatgcgtgaggatttagtcaatattttgagccaaaca

SEQ ID NO: 234375 - DNA, 392 bp, Gossypium hirsutum
agagacggcgccaatcagctgtccgccttgaccgaccgtccggcatcgtcttggccctcgatttttcccttttgtaaaccttttttcaccaattcccgaaatggcagtgaaaccctccaaggccgaaaagaaaatcgcgtacgacgcgaaactgtgccagctcttagatgagtacacgcagatcttgatcgccgcagccgacaatgttggctcgaaccagctccagaacattcggaaaggtctccgaggcgactcagttgttttaatgggtaagaacactatgatgaaaaggtctgttaggatgcatgctgagaagactgggaaccaagctttccttaaccttatccctttgcttcagggaaatgtgggtttgatctttactaagggtgatt

SEQ ID NO: 234376 - DNA, 402 bp, Gossypium hirsutum
ctttttccttcttgttgctgtttgcttttagtgccaaagctgttgttcctccatctgaaacttttaggtttgtcaacgaaggggaatttgggccttttattgttgaatatggtgcagattaccgtgtcataagcatagctaatgcccccttccagcttgcgttttataacaccacgcctaatgccttcacccttgcgttacgcatggctacaacacgttccgagtcgctcttccgatgggtttgggaggccaacagggggaaccctgttcgcgagaacgccacgttctctctcgggactgacgggaaccttgtcttggctgatgccgatggtcggattgcttggcaaagtaacactgccaacaaagctgtggtagggttccaattgttgcctaatggtaaca

SEQ ID NO: 234377 - DNA, 297 bp, Gossypium hirsutum
actttaaagccaagaaagcaggccattaaggtttggagaaaagatcaaaatggattcaaaaagatcagcttccatagccctccttttggcactcaacattctcttcttctccctagtcagtgctaattgtggatcttgttcttcttctggctctaacccaaggccaactcccacccctactccatcagcacgaggtaggtgccctagggatgccctcaaattaggtgtatgtgccaatgtgcttaactaagtcaatgtcaccgttggttcacccccggtgatgccatgttgttccct

SEQ ID NO: 234378 - DNA, 386 bp, Gossypium hirsutum
ccggaactaggttctctggctgtagctggaaattcgaacaacttaagtgaagggaaaaatcatgaatcaactcaagcggtggaattacctggatttagtgattgtgaggaaggatgtgatgaagagagtcgagaagaaagagatgatgatgaaccaaatccaaaaagaaggaatagcacaggggaagctgcagtagtgttgtcacacaaggctgtcgcggatgcaaaaattatcgtgcaaacaagaagtgaagttgaccttttagatgatggctatcggtggcgcaaatacgggcagaaagttgtcaaagggaaccctcatccaaggagctattacaaatgcacgagtgcaggatgcaatgttcggaagcatgtggaaagagcttc

SEQ ID NO: 234379 - DNA, 399 bp, Gossypium hirsutum
ttttgttctaattcacaaggcaagacaaactgttaagaaagtgggtaggtactaagagcagattttctattgcaactttgtttcatttgggtttcattgcttgggttaactcatcatcaaaagttgaagaaatcattttaatattgagcagcctgttcaacaggttggccagcattagataaagctcccttgcaaataattgaaggagctaacaggaaatattgagatagaaaagaaaaaggaaagggaaactatgacacacttcgttctagttcatggtatgtgtcatggagcttggtgttggtacaagattgtgtcgctgctcaaatcaggcggccaccgtgtcactcccttggatcttggtgccagtggaatcaaccccaagaccatcactgactt

SEQ ID NO: 234380 - DNA, 394 bp, Gossypium hirsutum
atctcattcaaatccttaatataccggcgatcgaaatggatagaataagggcgtttttggtagccgtggcggttgtcgccatatgcggcgtacctcaggtcagatccaccgcttccgatcatcgttacaaagctggtgatgaagttcctctttatgctaataaagtaggtccttatcacaatcccagtgagacctatcgttacttcgattttccgttctgttcctcagctcccgtgaaggagaagaaggaagctttgggtgaagtattgaatggagatcgactagtgagtgcgccttataaacttgagtttttgacggagaaagaggctgaaattgcttgtaaaaggaagcttacgaaggaagaagtggtcaagttcagaaaagctgtctcgaa

SEQ ID NO: 234381 - DNA, 388 bp, Gossypium hirsutum
  unsure (1)..(388): unsure at all n locations
ccatgagctacttaaccatttcccaaatctcctccctcctcttctttagcgtccttttcatttccgctcatgcagcgcgctttgaaatccgcaatgagtgctcctacaccgtctgggcagcagcctctcctggtggtggccgtcgcctagaccctcggcaaagttggaccatcgatgtgcctgctggcactgctatggctcgtatttggggtcgaaccaattgcaatttcgatgccagtggtaggggtcattgccaaaccggtgattgtggtggactccttcaatgcaaaggttggggtgtacctccaaacaccctggctgaatatgcacttaaccaatttggaaacatggatttctacgacatttncttagttgatgggtttaacat

SEQ ID NO: 234382 - DNA, 390 bp, Gossypium hirsutum
agaaaattcatcgatcaatatttctcccccaattcccaaagaatttgattatcgccattcattgctcaccttcggtgggtaaacttccccaaatccttgcgccgccgccggctgccatccaaatctcatcatcaattttcgatcgatcggtagagcaattagggtttccaagaaacgggaatggacgacagctgtgcggtttgtgctgacaatttggaatgggtttcctatggcgcctgtggtcatcgggacgtctgctccacgtgcgtctctcgtctccggttcatctgcaacgatcgacgctgctgcatctgtaaaactgaatccaacgtcatcttcgtcactaaggctttaggggattatacgaggatgataaatgacttctctgta

SEQ ID NO: 234383 - DNA, 359 bp, Gossypium hirsutum
aaaacaaagccatttttagtggtttcgctctctctccctctctctagagaagaggcattccctttgtcggagtgcgcttctgctgagtgtttctttcgttttcttttgttttaagttttggagtaaagagtgtttcaagcttcttagtcctattggctgcttaacgacctaagctagccccgccggatatagttatcaggtgctcatcataaaaaatgactgtcacgccaggaatttccatcaacgatgggaaccttgtggttcatgggaagaccatcctcactggaatgcctgacaacattgttttgaccccaagatccggtgtcgggcttgttgctggtgcttttataggtgctact

SEQ ID NO: 234384 - DNA, 229 bp, Gossypium hirsutum
ggaaaatgtcgaaccgagggcgtggaggttcacctggtaacaagtttaggatgtcactgggtctgccagtggcggcttacagtgaactgtgctgataacactggcgctaagaacttatacatcatttcggtgaagggaatcaagggccgtcttaaccgattgccatcagcttgtgttggagatatggtaatggttcctgtcaagaaagggaagcctgatcttaggaaga

SEQ ID NO: 234385 - DNA, 321 bp, Gossypium hirsutum
tccaattatgcaaacgatggctatcttttctacatcaatggctgctatgctcgttcttctagggctcttcgctgcaaacttggatcctactgctgcacagattggtgtttgctatgggatgcttggcaataatctcccaaattcatgggaagtcattcaactttacaaatcaaacaacatccggcgattgaggctctacgatccaaatcaacaagcattacaagctcttagaggctccaacattgaagtaatgttaggtgttccaaatgatcaacttcaaaactcttcttgacccttccaaagcacgatcatggtttcaat

SEQ ID NO: 234386 - DNA, 388 bp, Gossypium hirsutum
cggacgcgtgggcttcaccatgaacaaaagcaagctccagctgcaactttgtgcagggatatttactttaagcatcctctccaatggtgcttatggtagtgacaaaatctttgacataactcacaaaatcacttctcagttgccaacttttggatcacagaagggtcttggtcaattcatttggcttctttccagcatcaaaaatgggtccacagtgaatgtgtcggagttcaaattgggaacccacactggcactcacgttgatgctcctagtcacttctttcagaagtactatgaacaaggatttgatgtttcaacccttagccttcaaactcttaatggtcctgttctagtagttgatgttcaaagaaataagaacattactgct

SEQ ID NO: 234387 - DNA, 399 bp, Gossypium hirsutum
aaattctttgctcttcttccactgaaaccgtaaggagaagatcggagagaaaatatggcggccggcgatcgcaccgttttgcagtttaactcaccgtcatcggcgatcctgtcagcgaaagttcaccctctcgtcatatttaacatctgcgattgctacgtcaggcgtcccgaccaagccgagcgcgtcatcggcacgctcctcggctccgtcctccctgatggcaccgtcgatatccgtaactcctatgcagttcctcacacggagtccgctgaacaggttgctttggatattgaataccatcataatatgttagtctcccaccaaaaagtgaatcctaaagaagtgattgttggatggtattctaccgggctaggagtcacagggggcagtgcattg

SEQ ID NO: 234388 - DNA, 391 bp, Gossypium hirsutum
ctcgattctacttaacgcaaatagttcgagtttcgtaatcaatggctttaccgaaccaacagactgttgattatccgagctttaagctcgttatcgtcggcgatggaggcactggaaagaccacatttgtgaagaggcatctgactggagagtttgaaaagaaatatgagccaacgatcggtgtggaggttcaccctttggacttcttcactaactgtgggaaaatccgattctactgctgggatactgctggacaggaaaagtttggtggtcttcgagatggttactatatccatgggcaatgtgctataattatgtttgacgttactgcccgtttgacatacaagaatgttcctacctggcaccgtgatctttgcagggtgtgcgagaa

SEQ ID NO: 234389 - DNA, 393 bp, Gossypium hirsutum
gaaaggccgaacgcaatggaaagaatagaattagatgaagcaatgctacaagggcaagcagagatatggcgttacttgtacagtttcgcagattccatggctcttaagtgtgccgtggagctccgcatagctgacataatacactctaatggtggccccctcactttgtcgcaaatagcttcatgcattaatggtggccttacttcacctgacatcaccacccttgctcgcataatgagattgctcattcgcagaaagattttcaccgtccaccatccttcagacggtggagatctcttgtacgacctaactcactcatcgagatggcttctacatgattcggagcaaaccctggtgcccatggtattaatggagaaccatccattgcagatg

SEQ ID NO: 234390 - DNA, 375 bp, Gossypium hirsutum
ctctgctcttcgtagtctcccaaatatctttcctttgtcttatcgaatatgatgcaacaaccagcagctggaggcgtggctccgccaccttccatggcggccgatcagtctcagactcatcagtaccagcaacaaccgcagtcgcagccctggatgatgatgtctcaacaacagcagggtggtcaaccggttcctccacctaccggttggacgccgcaacctgttccttcgcccactcaaatgcagcaatactccgccggttctgctgctgctggctccggtgagattcgatctctttggatcggtgatcttcagccgtggatggatgagaattaccttatcaatatctttgctcaaactggagaggtgggttcg

SEQ ID NO: 234391 - DNA, 391 bp, Gossypium hirsutum
cgataaataaaaaatgagctttcttcaggccttgtcagttttccttttgtttttgtcgtatgtaggcgtaggatcagctgagcagtgtggaaggcaagcaggtggtgctctttgccccggtggtctatgttgtagccaatttggctggtgtggcagtactgctgactactgcacagttcctggttgccaaagtcagtgcagcggtagtggccctgcccctgggcctggtgggctaaccaatcttatatcaagagagacgtttaatcggatgcttttgcataggaacgatggggcttgtcctgcccgtggcttctatacatatgatgctttcattgctgctgcccgttcctttcctgcatttgctacaactggtgaccaagctactcgcaag

SEQ ID NO: 234392 - DNA, 384 bp, Gossypium hirsutum
cagtttctcattttcaagtctgcaaaacccctagccagccacttccccgccggctctccgaaccatgggccgagtccgtaccaagacggtaaagaaatcctctcgccatgtgatcgagaggtactactctcgcatgacgcttgatttccacaccaacaagaagatcatcgaagaagtggctatcatcccttccaagcgtctccgcaacaagatcgccggcttttccacccatctcatgaagcggatccagaagggtcccgttcgtggcatctctttgaagctccaagaagaagagcgtgaacgtcgcatggatttcgtccccgacgaatccgccatcaaggttgatcaaatcgaagtcgataaggaaactctcgatatgctttc

SEQ ID NO: 234393 - DNA, 389 bp, Gossypium hirsutum
cttgcattgagtctctaagatatcactgcaaggaaaaaaaaaaaaaaccagacgatggcttccaacactgttgcatccgctgctcttcttcttaccttgaacttgttgttcttcactttggttagctctacctacgtgccttgcccaccaccaccaaagagccacaagcctacccacaagagcccaccctcggcacctaaacagccagccacttgccccaaagatacactgaaactaggtgtttgtgctgatttgttgggctcggtgcgcgttgttgttggaccgtcgaggaccaaatgctgctcactcatttcgggtttggctgatctcgatgctgctgtttgcctttgcactgctattaaagctaatgtgttgggggttaacctaaa

SEQ ID NO: 234394 - DNA, 393 bp, Gossypium hirsutum
aaaaaatggcggaaagagcaccgatcgaatccgtacaatgcttcggccgcaagaagacggcggtggcggttacccactgcaagcgaggccgtgggcttatcaagattaacggttgtcctatcgagcttgttgagcccgaaatcctccgtttcaaggccgtcgagccaattcttctcctcggccgccagcgttttgccggcgtggacatgaggatccgtgttaaaggcggaggccacacttctcagatctacgccatccgtcaaagcattgctaaggccctcgtcgctttctaccagaagtacgtcgatgagcaaagcaagaaggagattaaggatatcttagtcgggtacgataggactttgctggtggctgatccgaggaggtgcgagccca

SEQ ID NO: 234395 - DNA, 339 bp, Gossypium hirsutum
attttcaagtctgcaaaacccctagccagccacttacccgccgcctctccgagccatgggccgagtgtcgtaccaagacggtaaagaaatcctctcgccatgtgatcgagaggtactactctcgcatgacgcttgatttccacaccaacaagaagatcatcgaagaagtggctatcatcccttccaagcgtctccgcaacaagatcgccggcttttccacccatctcatgaagcggatccagaagggtcccgttcgtggcatctctttgaagctccaagaagaagagcgtgaacgtcgcatggatttcgtccccgacgaattcgccatcaaggttgatc

SEQ ID NO: 234396 - DNA, 386 bp, Gossypium hirsutum
cggacgcgtgggaaagcgaaaccctagccactctctgctcaactcgccaatgggggcttataagtgcgtgtcggagctatggaggaagaagcagtcggatgtgatgaggtttttacagagggtgaggtgctgggaataccgccagcatacatcaattgttagggtcaaccatcctactcgccctgacaaggcacgccgcttgggttataaggccaaacaaggttatgtggtttaccgtgtccgtgttaggaggggtggtcgcaagaggcctgttcccaagggtatcgtgtatggtaagcccacaaaccagggtgtcacccaattgaagttccagcgcaacaaacggtctgttgctgaggagcgtgctggccgaaagttgggaggtc

SEQ ID NO: 234397 - DNA, 388 bp, Gossypium hirsutum
ctcagaaagagcacccaaaagaaaaaacactgatcaacgaaggatttctagggttttttttcggtatcagcaagcgatggcaatggctgctctcagacgcgaagggaggcgtttcgcccctctgatctctccccgtccaattactgctgtccgatcctctcctatcgttcccactcacgaagatgagggtccgattggtgttcgttatatttcaacccaagtcgttagaaaccggatgaagagtgttaagaatattcagaaaattacaaaggctatgaagatggttgctgcctcaaagttgagagcagttcaaactaaagctgagaattcccgaggcctctggcagccatttactgcactttttggtgatctttccagagttgatgtc

SEQ ID NO: 234398 - DNA, 389 bp, Gossypium hirsutum
aattttctttctcgattttctctttagccaaaaaagatgcagatcttcgtcaagactctaaccggcaagacgatcactctcgaggtcgagagctccgacacgatcgacaacgtgaagaccaaaatccaagataaggaaggcatccctccagaccagcagcgtctgatcttcgccggaaaacagcttgaggacggccggaccttggccgattacaacatccaaaaggagtcaactctccacctcgtcctccgtttgcgcggtgggatgcaaatcttcgtgaaaaccttgaccggcaagacaatcactctcgaggtcgagagctccgacacgatcgacaacgttaaggcgaagatccaagacaaggaaggcatccctccagaccagcaacg

SEQ ID NO: 234399 - DNA, 389 bp, Gossypium hirsutum
ggaaaaaccctggagagaggaaagactggtagacatggacgacggcaacaccaccgaggcggagcgatggctaactatagcggcgaagctactcgcttccggcgactttcacggcaccaggactttcgcgatccgagctcgagaatcggcacctgtcctcgccgaccaaatcttagctgtcaccgacactctcttaaccgctcaatctaaccctcgtgactggtacggtatcctccaactcgttcctttaactcaatccatggaagtcgtggagagtcagtataggaaactcgcgattctcttgaaccctgtgaagaacacgttgtcttttgcggatcaagcgtttcggttcgtttctgaagcttggaatgtgttgtcgaatccttcta

SEQ ID NO: 234400 - DNA, 393 bp, Gossypium hirsutum
cttaccttgaacttgttgttcttcactttggttagctctacctacgtgccttgcccaccaccaccaaagagccacaagcctacccacaagagcccaccctcggcacctaaacagccagccacttgccccaaagatacactgaaactaggtgtttgtgctgatttgttgggctcggtgcgcgttgttgttggaccgtcgaggaccaaatgctgctcactcatttcgggtttggctgatctcgatgctgctgtttgcctttgcactgctattaaagctaatgtgttgggggttaacctaaacgttcctgtttcattgtctttgctcctcaattcctgcgaaaagcaaatgcctgctggttacaaatgtgcttaagcaatgtttgggtttttcttt

SEQ ID NO: 234401 - DNA, 392 bp, Gossypium hirsutum
tttcgttttgttcctttggatctgtgaggcagccgccggttcctttgaccaccaccaccaccaccaccacctctctgtgatcaaccttcactctctttttcaaggaaattagctgaaatggctggaggattaatccaccaggttttaaggaggaaatttcaatcacagtctgctgttcaagctttatcatggttttcatcaaggaaagttaatgacgatgcgggttctgctggtatgaggaccgttgcactccttggagctggtgtttcaggtttactaggttttgcaacagtagcatctgctgatgaggcagaacacggtttaggagttccaaattatccttggcctcacgcaggcatcctcagttcatatgaccatgcttcgattcgtcg

SEQ ID NO: 234402 - DNA, 397 bp, Gossypium hirsutum
  unsure (1)..(397): unsure at all n locations
atttaaactaaatactgaagtcatttgttttgggggagtgccggagaaaatggcctgttttcaatatatagtagctgctctatgctttgcagttgtacttgagggatcgttatcaaaagctcaactgaccccgacattttacgatggaacatgcccaaacgtgacagccattatccgacaagtgctcgtgaatgcttcgttttcagatccaaggattggtgccagtctcatcaggcttcacttccatgattgttttgttcaaggatgtgatgcgtcgattntattggacgatcctgtaaatggtgagaaagaagctattccaaataataattcagctaggggttatgaagttattgatgccatgaaggctgccttagagagtgcttgccccaacact

SEQ ID NO: 234403 - DNA, 384 bp, Gossypium hirsutum
gtgcgcgttgttgttggaccgtcgaggaccaaatgctgctctctcatttcgggtttggctgatctcgatgctgctgtttgcctttgcactgctattaaagctaatgtgttgggggttaacctaaacgttcctgtttcattgtctttgctcctcaattcctgcgaaaagcaaatgcctgctggttacaaatgtgcttaagctcatttccactgtttcctcagcaatgtttgggtttttcttttacgtgttctttttttttctgggcttgtttaatttggtattttgatatgtcaagggttagataaaatggtaaaggtttcttttaccttaaccaatagtcaattctcatctatttatacaatatttgtcatgttagtaagaaag

SEQ ID NO: 234404 - DNA, 389 bp, Gossypium hirsutum
ctgacactctgcttctaagctttactttttctcttttttctctcaatactggtgcactaaaaaatgccaatcaaaaaagatccttcgattccaccgccgatgatcagcaagatcggcccttacaccgtcttcgttacccctccgtcaaccccttctccaactgaccctcctgtttttcactctcccaagaaggccgcgccgccttctccttctccttctgctccgccgcctgtgcagccaccttcccaacagttcgacaagtctttccgtacttcccaatcccttttcgacggttcatttctgggtttcttcaaaaacgctgccttcaaactccaaaacgctcattcaagcttggatgaccatttagctcgttggttcggcttaaatca

SEQ ID NO: 234405 - DNA, 373 bp, Gossypium hirsutum
ggtcgatgaagccaaagcttatctgcttttcgtctctgaatctgatcaatcaacacctgaaaaggaaaacttacaaacaactactactagtctactacccagcactagaagcagctcgtagccagccatggatgaagagtacgatgtcatagttctaggaactggtctcaaggaatgcatcctcagcggtcttctttctgttgacggactcaaggttctgcatatggataggaatgattactatggaggagagtctacatcactcaacctcattcagctctggaagaagtttagaggaaaatgataagcctcctgctcatttgggctctagcagagattataatgtggacatgggccctaagtttatgatggc

SEQ ID NO: 234406 - DNA, 254 bp, Gossypium hirsutum
caaaagcgtgtgatgcttcttgttaataataccacagatgaggaacttttgtgtcaggggttagcactaaatgacagcttgcaacgtgttctttgccggcatgatgacattctgaaaggaaatactggtcccactggagccatagcaaaaacttctggtgggccatttggtaaaattaaccattaaggttattagttcgaaaaataaattgcttaacttttttattaaatcttaaagggttatttttaaaggcc

SEQ ID NO: 234407 - DNA, 386 bp, Gossypium hirsutum
cggagaatcaatccaaccaaatcccaccatcaaaatccccgtaggggacccattcaacgatccgacggctagctttccctccgttaactttaactacaacaatgcagtcagtagtccttgccccgtcgattacctcgggtctctccaccgttacctaccgtcaaacgactacgagtccgattcgtttagtgatgattcggacttgcctgttgatgcattctcatgcgaccatttccggatgtacgagttcaaggtgaggaggtgtgctcgtggaaggtcacatgactggactgagtgtccgtacgctcaccctggtgagaaggcccgaagaagggacccgcaaaagtttcattactctggaactgcttgccccgattttcgcaagg

SEQ ID NO: 234408 - DNA, 384 bp, Gossypium hirsutum
ctttcctgcatccgggttcccactgtggaaattgttgtgtttaatcatttgagagctatgaagtgttttacattccccaattggtataaaaaagatgaaccaaagacccccagatcactttcaaaccggtctctgaactccatgtgcactgatcgcgaaatagcgaggtctggatctgaattgaactctcagaatgtctcaggcgtgagcagtgagtcaatggggcggtcctattttcctagcatgtctcaaagacctagcaatctcagagtgttcacagtttctgagcttaaatctgcaaccaagaactttagccgctctttcatgctcggagagggtggatttggctgtgtttacaagggttctctcaagagtcctgaagat

SEQ ID NO: 234409 - DNA, 362 bp, Gossypium hirsutum
attacatgtcccatcgtgcctggtattatgcccattaataactacaagggtttggtgcgaatgactggcttttgcaaaactaatataccggatgaggtcactgctgccttagagcctatcaaggacaatgatgaagcagtcaaatcctatggaatccacctcggaacagaaatgtgccgcaagattttagctcatgggattaagacgttgcacctttatacattaaacatggagaaatctgcattagctatactaatgaaccttggactgattgaagagtccaaaatttctaggtctttaccttggagacgccctgcaaatgtctttcgtgttaaggaagatgttcgcccaatattttgggc

SEQ ID NO: 234410 - DNA, 351 bp, Gossypium hirsutum
tttttagcttacagcttccattgtttttcagtagtgaagagctaaaaaagaagggaaaccaatggaggggaaagaagaagatgttagattgggagcgaacaagttctcagagaggcaacctattgggacagcagcccagtcccaagatgataaggattacactgagccacccccagcacccttgtttgagcccagtgagttgacttcatggtcgttttaccgagctggaatcgctgagttcgttgctactttcctattcttgtacatctcggtgttgactgtatgggagtccttaaggacaaaaccaagtgtacaactgttgggattcaagggattgcttgggcttttggt

SEQ ID NO: 234411 - DNA, 387 bp, Gossypium hirsutum
gcggcggcataagagttttaaggaaaatgcagatcttcgtgaaaaccctaactgggaagaccataaccctagaggttgaatccagcgacactatcgacaatgttaaggctaagatccaggacaaggaaggtatcccgccggaccagcagaggttgatcttcgccggaaagcagcttgaggatggtcgtacacttgccgactacaatatccagaaagaatcaacattgcatctggttctgaggcttcgtggtggcattatcgagccatctttgatggcattggctaggaaatacaaccaggacaagatgatctgccgcaagtgctatgctcgtctacacccccgtgctgtgaactgcaagaaaaagaagtgtgggcatagcaatcagc

SEQ ID NO: 234412 - DNA, 389 bp, Gossypium hirsutum
ctatacccctatgaccgacccttatattagttcactctctcttttccctttgaggttttgggcttctctcaatttctcaatcccaattgtttttaaaatggcttcttccactgctcaaatcaacgtactcggtggaatcggtttcgcttcttctcgaaaacccaactaccattcacccagaaccgttttcttgggtcaacgacttggtaaaccgtcgccgttaaacgcagccttcttacggttagcgaaaaccaatggaaaacggtacaatgttgggccggttagagttgtgaacgagaaagtggtcggaatcgatctcgggactactaactcggcggttgcggctatggaaggagggaaacccacgattgttacgaacgcggaagggc

SEQ ID NO: 234413 - DNA, 392 bp, Gossypium hirsutum
acgcactgacccacttatcttttttcttgaaaaaaaaaaaaaaaagttttcctagaaaatttctgtttagctctagatgataaatatcgaccaagaagaaacaagtagcgttagagaaatcagaccaaaaagcagaagaatcatgggaggaggaggaccagatgatgaagatgatgaggatgaggatatgaagtggccgccatggctgagacctctgcttcaaacaagcttttttggtcaatgcaagctgcacgcagatgctcataagagtgaatgcaacatgtattgcttggaatgcatgaatggagcgctttgttcactttgccttgcttatcacaaggaccatagaaccattcagataaggagatcatcataccatgatgtgataaggg

SEQ ID NO: 234414 - DNA, 389 bp, Gossypium hirsutum
ggcgtggcttcgcttctcccctgtttttcacagtcaacgctgcctcccaaaacgaaatcgctgtctcatttcacgatccaaagtttccaaattcctctttgggttttgctcttcaccacttaagtctcaaatggttcgtaggccaaacgacccggaacactcccgtttcgcctctctcgtcctcctcttggtgtctctgttctcctgtcttctggtctatgcggttgtttccacactattgaaccccaccgtaaatcctcaggattccagctttgagtctttggaatcggtggcgggtattgattttggggaaaagaagggcgagtgttgcagaggaattgagaatttggagctgtggggtgcagctgtgaagtgggggtctgacttca

SEQ ID NO: 234415 - DNA, 383 bp, Gossypium hirsutum
gggggtgactgatctaaagccaggtgatcatgttctccccatcttcacgggggaatgcaaggagtgtccccattgcttgtcagaagaaagtaacatgtgtgatctcctccgaatcaacactgataggggtgaaatgattaatgatggaaaatccaggttttccatcaatgggaagcctatctaccacttcctaggcacctctactttcagtgaatacactgttgtccatgtcggccaggttgccaagatcaatccggaggctccgcttgataaagtttgtgttctaagctgcggaatgtccacagggtttggtgccactgtgaatgtagctaaacccaaaaagggtcaatccgttgcaatatttggactaggtgctgtcggtc

SEQ ID NO: 234416 - DNA, 393 bp, Gossypium hirsutum
gaaggcacttattcttagttggaggggcggtatcgctttcgttcacagaaaagtggtcccctccttccttcactgttgcagaaccactctattaatccccgatcaacttaaaacgcttggtttctgttatccaattccttcaactcagtgactcacctatataataataactgcgtcccttcttgaggctctgttcgttgatgtggtagcgagaaaaatggatcgggcaacagtcggaccggctatggatatgccgatcatgcacgacagtgaccgttacgatttcgttagagatattgggtcgggtaattttggagtagcccggcttatgagagataaggttaccaaggagcttgttgctgtcaagtatatcgagagaggcgataagataga

SEQ ID NO: 234417 - DNA, 273 bp, Gossypium hirsutum
  unsure (1)..(273): unsure at all n locations
cgttaatcttcgtttttgctggatctggttcaggcatggcttttaataagctgaccgacggcggtgcaacaactccggctggtctcgttgccgcctctctagctnacggatttgcgcttttcgtgcatgcatccggcggggctaagataagcggtggccatgtcaatcccgccgttacattcggtgctttcgttggcgggaacattactcttttacgtggtatcctttattggattgctcaactccttggctcaaccgtcgcttgcctgttac

SEQ ID NO: 234418 - DNA, 403 bp, Gossypium hirsutum
gcgactgcgtggtggaatgcagatttttgtgaaaactttgactggaaaaactattacattggaggtggagagctcagacacaattgataacgtgaagaccaagatccaagacaaggagggtatcccacctgaccagcagaggttgatttttgctggaaagcaactcgaggatgggaggactcttgcggattataacatccaaaaggagtcaaccctgcacttggttctgcgccttcgaggagggatgcagatattcgttaagaccctgactggtaaaaccgtaacactggaggtcgagagctcggacaccattgacaatgttaaagcgaagattcaggacaaggagggaattcctccagaccagcagaggttgatttttgccggaaagcagcttgaggatggg

SEQ ID NO: 234419 - DNA, 397 bp, Gossypium hirsutum
ctccaaaccatgccacatttctcttctccacctttctgggcgggatcgctatcgatgcacatagactgtcagcgttccgaagccacttgtcgaattcgctaataaacccatgatcctgcatcagattgaggctctcaaggctgttggtgtaactgaagttgtgttggctattaattaccaacctgaggtgatgttgaacttcttgaaggagttcgaaactaaactcgggatcacgatcacgtgttctcaagagactgagccgctcggcactgctggtcctcttgctttggctagggacaaacttgttgacgagtccggcgaaccgttttttgtccttaacagtgacgttatcagtgagtatcccattaaagaaatgattgaattccacaaagctcat

SEQ ID NO: 234420 - DNA, 402 bp, Gossypium hirsutum
tgatctttatccttgtttactgcactgctggtatctctggaggacacatcaaccttttaataagctgaccgacggcggtgcaacaactccggctggtctcgttgccgcctctctagctcacggatttgcgcttttcgtcgctgtatccgtcggcgctaacatctccggtggccatgtcaatcccgccgttacattcggtgctttcgttggcgggaacattactcttttacgtggtatcctttattggattgctcaactccttggctcaaccgtcgcttgcctgttacttaagttcgccactagtggcctgggagtaccagctttcggactatcatccggcgtgggagcattaaacgcgttcgttttcgagatcgtgatgactttcggactggtctacaccgt

SEQ ID NO: 234421 - DNA, 390 bp, Gossypium hirsutum
gtcagcttcggtgagatgctgatcgattttgtccccactgtctccggtgtttctctagccgaagctcccggcttcctcaaagcccctggcggtgctccggctaacgtggccattgctgttgctagactcggaggcaaagcgtcatttgtcggaaaacttggagacgacgagtttggtcacatgctggccgatattctcaagcaaaacggtgtctccggtgacgggatcttgtttgaccaaggcgctagaactgctcttgccttcgttacgttacgcgccgacggagagcgtgagttcatgttctataggaatcctagcgccgatatgctgttgaagccggaggagttgaaccttgatcttatcagatcttccaaggtatttcactatgga

SEQ ID NO: 234422 - DNA, 264 bp, Gossypium hirsutum
ctcaacagcaacaccccacccgacccctaaaaatggtccagacaaaccagtccggttccggcaatgatttcaagctcgtcggattctcgaatttcgtccggtccaatccgaaatccgatcggttcaccgtcaaacgtttccaccacatcgagttttggtgtaccgacgccactaacgtcgctcgccgtttttcatggggtctcggtatgcaatttgtagctaaatcggatttatccaccggaaatttgacccatgcttcttatc

SEQ ID NO: 234423 - DNA, 325 bp, Gossypium hirsutum
acgacatatacaatttagccaactcttgtgtatttcatccacgatgaatcccttcaaggccttgccaaccctttctttcctcttcttaacccttttcagcttagcccatgcagccacatttgatataagaaacaactgcccttacaccgtttgggctgccgcatctccgggtgggggcaggagacttgaccaaggtcaagcatggcaaatcactgcagcctctggaaccacacaagcccgaatttgggctcgaaccaaatgcaatttcgatgcctccgggaaaggctcatgcgagacaggcgactgcggtggagtcctcgaatgc

SEQ ID NO: 234424 - DNA, 431 bp, Gossypium hirsutum
ctcagatttcagaagatggcccgtaccaagcaaacccgccggtagtcttcttgtggggagggttcaagggaggcacttggttccaaaggttgccgtaaatctgccccaaccaccggtggtgtgaagaagccttatcgataccgtcctggaactgttgctcttcgtgaaattcgtaaataccagaagagtactgagcttcttatcaggaaattgcctttccagaggcttgttcgtgaaattgcccaggacttcaagactgatttgcgtttccagagccatgctgttctagctctccaggaagctgcagaggcataccttgtgggtctttttgaagacaccaacctttgcgcgatccatgccaagcgtgtcacaattattcccaaagacatccagttggctcgtaggatcaagggagagcgtgcttaattttc

SEQ ID NO: 234425 - DNA, 431 bp, Gossypium hirsutum
cttaaccatttcccaaatctcctccctcctcttctttagcgtccttttcatttccgctcatgcagcgcgctttgaaatccgcaatgagtgctcctacaccgtctgggcagcagcctctcctggtggtggccgtcgcctagaccctcggcaaagttggaccatcgatgtgcctgctggcactgctatggctcgtatttggggtcgaaccaattgcaatttcgatgccagtggtaggggtcattgccaaaccggtgattgtggtggactccttcaatgcaaaggttggggtgtacctccaaacaccctggctgaatatgcacttaaccaatttggaaacatggatttctacgacatttccttagttgatgggtttaacatccccatggtgtttgtgccaactaatggcggttgtcacaacattcggtgcactg

SEQ ID NO: 234426 - DNA, 428 bp, Gossypium hirsutum
cacccaccctttcaggggctccttggttgtcaggtgttctcttgctgatggaaacggtagttcagtgaagacgactactttgcatgatctgtatgaaaaagaagggcagagtccatggtttgacaacctttgcaggccagtgaccgttttgctgccactgattgcaagtggggttagaggtgtaactagcaacccagcgattttccagaaagctatattttcatcaaatgcttacaatgatcaattcagggaacttgtgcaatcaggaaaagatatcgaaagtgcttattgggagttagtggtgaaggacatccaagatgcctgcaaactttttgagccattctatgaccaaacagatggaggtgatggttatgtttctgttgaggtttctcccaaacttgctgatgatactaatgggaccattgagg

SEQ ID NO: 234427 - DNA, 393 bp, Gossypium hirsutum
cctttgtctcttaacttatctctcccacgtctgccctgcttttcagcagcttttgacagcttccaagttactgaagatgaccaaagcagtggagaagaatacccagaaacagaatctcaagaccttgaagaacaaccacaacaagaggaagctgaagaagataaggtttcagagtctggcggtgaagaaggaaagttgtatgttgggaatttgccttattcaatgacttcttctgagttaactgagatttttagtgaggctggtagtgttgctaaagtggagattgtttatgatcgagttacggataggagcaggggatttggctttgtaacaatggggagcgttgatgaggccaaagaagcaattagactgtttgatggatctcaagtcgga

SEQ ID NO: 234428 - DNA, 433 bp, Gossypium hirsutum
aaaaaagattcgatgggtgcgtctttatccaacttaacggaaggaagcaatgggacggcgatgggaccgggattaggggacataccggagagctgtgtggcctgcgttttcacttacttgacgcctccggagatttgcaacctggcgaggttgaatcgagcgtttagaggggctgcgtcttcggattctgtttgggaaatgaaattacccagtaattatcaagatctgctggatttagtgccacccgaaaggtaccagaatttgtccaaaaaagatatttttgcccttctctctcgcccggtaccttttgatgatggaaataaggaagtatggctggacagagtgaccgggagggtatgcatggcaatatctgccaaagggatggcaataactggaattgatgatcggagatattggaattgtgtttctacag

SEQ ID NO: 234429 - DNA, 436 bp, Gossypium hirsutum
gtcacttgaaggctgaagctatggagggtaaaaatgcgaatctggaagcggcgatcgaccagttgcttaatgttgagaagcagatgcggtttgccggcgatgtgattggcaccaagaaagcggtctctgacattttgcagctctgctttgaagctaaggattggaagtctctcaatgaacagatcgttaatttgtctaagaaacgtggtcaacttaagcaggcagtgactgcaatggttcagcaagcaatgcaatacattgatgaggcaccagatcttgaaactcgtatagagcttatcaagaccctgaacactgtgtctgctggaaagatttatgttgaaattgagagagcaagattgatcagaagacttgcaaagattaaagaagaacagggccttattgctgaagctgcagatttaatgcaggaagttgcagt

SEQ ID NO: 234430 - DNA, 337 bp, Gossypium hirsutum
cagtcgtggaaaccccaccgttgaagttgatgtttctctctctgatggcaccgtcgcaagagcggctgttcctagtggtgcttccactggtatatatgaagctctggaattgagggatggaggatctgactatcttggaaagggcgtgcttaaggctgtggagaatgttaacacaattattggacccgctttggttggcaaggacccaacagagcaggccaaaattgataatttcatggtacaacagcttgatggaaaagttaatgaatggggttggtgcaaacaaaagctggaagcaaatgctatattggctgtttaacttgctgtctgtaaagca

SEQ ID NO: 234431 - DNA, 433 bp, Gossypium hirsutum
gtgaaggtgtatggcccagcctttgcttctccaaagcgagtgattgcatgtcttattgaaaaggagattgaattcgagactgtccctggtgatttgcttaaaggagagcacaaagaccctgaatttcttaagctccagccttttggaacagttcctgtcactcaagatggagattatgttttatatgaatcccgtgcaatcataaggtactatgcagaaaaatacaaatcacaagggactgatctactgggaaagacagtagaggaaaggggtcaaggggaaaattggcttgaagttggggcacacaatttcaacccatcaatttaccccttggccctacattgtatggttggtttcaaggagggggtcccttccgatgaaaatttgatcaaggaaagcgaggaaaagctaggcaaagtgcttgatatttatg

SEQ ID NO: 234432 - DNA, 333 bp, Gossypium hirsutum
attttatcactgccgctttgccagcagccgcgccacactcgagagagagctcgtcaaccatggccgaacagactgagaaagcctttttgaagcaaccaaaagtgtttttaagctcaaagaaatcttcaaaagggaagagacctggaaagggagggaaccgcttctggaagagcattggtttgggcttcaagactcctcgtgaagctattgaaggaacctacattgacaagaaatgcccgtttgccggcactgtttcgatcaggggtcgtatcttagctggtacttgccatagtgctaagatgattaggacaatcattgttcgacggaattacc

SEQ ID NO: 234433 - DNA, 437 bp, Gossypium hirsutum
tttcaaaattccagaggtttttagtaaccaaatatgattggccttgggagttacggttacactgcaccatcttccaaaaaaatcaacgcctacgatgttcctcaaggcgttgatattcgtggtcgattcgatgaagaattcgctaagattttaacaaaggatgccttacaattcgtcgctgatttgcagagagagttcaggaaccatattaagtatgcgatggaatgtcgcaaagaggcgaaaagacgatacaatgaaggggcgttgcctggtttcgatcctgcaacgaggtatattagagaagggaaatggacttgtgtgccgtttccgcctgcggtggctgatcggagggtcgaaattacagggccggtggagaggaagatgatcatcaacgctcttaactcgggagctaaagtgtttatggctgattttgagga

SEQ ID NO: 234434 - DNA, 439 bp, Gossypium hirsutum
ggttttcttccgccgttcttaatcacagaaagctttgaagaacaagcgtttggaggtgcaaaacatggggccgaagaaaggtggaaaggtggctgtgcccgccaagaagaaacaagagaaggttgtcaatccgttgtttgagaagcgtccaaagcagttcggcattggaggggctttacctcctaagaaggatttgcatcgatttgtgaagtggcctaaggttgttcgtattcaaaggaagaagaggatcctcaagcagaggttgaaggttccaccagcattgaaccagttcaccaagactcttgacaagaacctcgcaacaagtctgttcaagttgctcctcaagtacaggccagaggacaaagtggccaagaaggaacgtctcttgaaaaaagcccaggccgaggctgaaggaaaagcccccgagtctaagaaacca

SEQ ID NO: 234435 - DNA, 417 bp, Gossypium hirsutum
cgtcactagcggcgctgtcacaaaatgtcgtcaacggagtctctcatcctccaactccatgagatctccgccgtttatattcggtaacttcaagctgaaatctgggatcttctcccctatttacataaaccctccttttaatgtcttttacccttcccttcttccgccaaatttccaactccttcttttcctttttccttcccaaaccacccttaaacctaatatgtggtggtcctttacactgccctccttatagccacctccatctctctcgacacctccatccccatgctcatgcgccgcaaagaagtaaaagactacggaactgccaagtccatcgaaggtgtttacgaaaagggtcaagtttgtttggtggtggaagacctcgtaacgtccggtgcatcggttctcgaaacg

SEQ ID NO: 234436 - DNA, 425 bp, Gossypium hirsutum
  unsure (1)..(425): unsure at all n locations
attttcttgttccttccttcgccgtctattgcttttagttgcctcgatttcaagtgaatcagaatggggtaaggaaagactcacattaacattgggggccatcgggcacgtcgattctgggaaatcaaccaccactggccacctgatttaccagcttggtggtattggccaggcgtgtgttggaagggtccgagaaagaacctgctgagatgaccaggaggtcatccaagtatgctggggtgctggacaagctcaaggctgagcgtgagcgtggtatcaccattgatattgccttgtggaaatttgagaccaccaaatactactgcactgtgattgatgcacctggacaccgtgactntatcaagaatatgattactggtacgtcacaggctgactgtgctgttttgattattgattccaccact

SEQ ID NO: 234437 - DNA, 316 bp, Gossypium hirsutum
gagaaaaaagttgcccattcgatccctttctactaccaagttggtggtgagaagctggaggtactactattcttcttccactgcatcggctgcggctggagaagctgagagaactatccgggaagggcctaagaacgtttggactggccaacagatcgactccatctaccattctccccttattgatcttcttttgcatggagctgaagttcacagatatgcttataactttagaggggggcagcagagtactcttctcttaatcaagactggtggatgtagcgaggattggttctattggccttaaatctttaag

SEQ ID NO: 234438 - DNA, 436 bp, Gossypium hirsutum
ttccctcccaaatgtcttcttcgacattaaccgtactcttcgtcctccttggaactctctgttcctttatctacttcttcagctcaccaaaccgcaacaacaatggccggaaacttccacccggtcctgcccctcttcccgtcgtaggtaacatccacatgctaggcaacctcccacaccaaagtcttcactatctcgccaaaaaatatggacccatcatgtcgataatgctaggcaaagtaccaaccatcgtggtatcatcacccgaagccgctgaactgttcctcaaggtccatgacgtcgtttttgcttccaggcctaaagtccaatccgcgaaatacttcgcatatggtggcaaggccatggcttttacccagtacggttcttactggcgaactgtacggaaatggagtattttgcatttcctcagtgcttc

SEQ ID NO: 234439 - DNA, 428 bp, Gossypium hirsutum
  unsure (1)..(428): unsure at all n locations
aaaaaaatggcggaaagagcaccgatcgaatccgtacaatgcttcggccgcaagaagacggcggtggcggttacccactgcaggcaaggccgtggccttatcaagattaacggttgtcctatcgagcttgttgagcccgaaatcctccgtttaagggccgtcgagccattttttctcctcggccgccagcgttttgccggcgtcgacatgaggatccgtgttaaaggcggaggccacacttctcagatctacgccatccgtcaaagcattgctaaggccctcgtcgctttctaccagaagtacgtcgatgagcaaagcaagaaggagattaaggatatcttagtcgggtacgataggactttgctggtggctgatccgaggcggtgcgagcccaanaaattcggtggaagaggtgctagggcaaggtt

SEQ ID NO: 234440 - DNA, 423 bp, Gossypium hirsutum
atttaaactacctgcttctagctctccttccaatcaatctccatttttagggatggcaaagtgaaaggatgttaggcatttccaagaaagaattaatgaatccaccaagggggctgcatagcccaacttcactcacttcatcaaacaagaccaagcttcccaatcaaatcatcaaccatttcctttcttcaaatcccaacaatgctttctcaatggggttcggatcctcagcttgctttgcttatgctcccacagagaatcgtttccccaatcatcaaaggttgttctgtggagtggatgaaatatactgcatattcttgggggatttgaataatttgagcagcctgctaaagcagcatgggctgtcaaagggcaccaatgaagccatgtttatcatcgaagcatatcggaccctccgcgacc

SEQ ID NO: 234441 - DNA, 432 bp, Gossypium hirsutum
agaaaacccttttctaagggcatctctctctctctctctctctcttttactggtaggccactcacatggctctatcactatttcaaaactccatagctgaataataataaaacggcttggaagaaaagccatgggaagacctccttgctgtgataaagttggtatcaagaaaggtccatggacccctgaggaagatatcatacttgtctcttacatccaacaacatggtccagggaattggagatcagtacccactaatactgggttattgagatgcagcaaaagttgcaggcttcgatggactaattatctgagaacaggcatcaagcgagggaacttcactcctcatgaagaaggcatgataattcacttgcaagctttattgggtaacaaatgggcagcaattgcttcatacctaccacaaaggacaga

SEQ ID NO: 234442 - DNA, 431 bp, Gossypium hirsutum
  unsure (1)..(431): unsure at all n locations
gtggaggtcgttgtaagggattgtaagagcggaggcttctttgcttgccacctctcggttatgtcttcaaacacttctaaaatcatggatgagaagatgaagttgactgttgctgatgcaggggactccaggggtaaccctgttgccaggtctagaccggggggctgggtaccggctgttctaagctaaggcttggaattaggggaggggttgcaaccatggggaatggcagggaacctggggactaacctggggggaacaatccactttccaggtgctacttctgcaaatgtggggaaggacttcatggggacatcatttctactatgtttactgggcggcttcctagccgattcatacttgggcagatacctaacgatcgcaatattcgccatggttcagatgcttggaactngcctgttagcagtatc

SEQ ID NO: 234443 - DNA, 430 bp, Gossypium hirsutum
cacagctgaaacagacgaacatcaagatgggcacccaaaaacaccacgttcttttgtgatcagtgctttggattatgaattcccttctctatttcggtgccgatgaagatcactattaccaatttattttgcaagaagcatatattacgaagctatgcagcacaaaaaccatattgacagtgaacggtagttgtccagggcctgcgatgcgggttcgaagaggcgatactgagtatgtcaatgtccacaatcaaggaagatctgctgtttcctttgatcggcacgggactgaggatccggtggacgggtcaaactagacgatccagcctggaaactacttcactgacgagagcgaattatacgatgaactctgatcttcacggtggcatgctgggagtgctaccactaaatctaccgtgcatggcgcctt

SEQ ID NO: 234444 - DNA, 401 bp, Gossypium hirsutum
gactgtgttgatcgaagttctattctggttaggagagcttatcagctcaactgtcggttgaactagccttaaatatggatcgcgcttaaccgctcgacctatactccgggttgtcatgcaagggccagcccccgataagcatgagggcgcgaaattcggatgacaacccgattggcgagcacagtctgcgccacagccggtgctcatattaggggaagctggggaacaataaaaccattctcaattggcctcataggggggaggaacattgtgacaggacgtgcccatgatggagcctcaattaacacacctgtttcatttgtaccagacttggttagctggacgtgggataacgacttgatctactgagtcggaccccttatcggtggtggtctcggtga

SEQ ID NO: 234445 - DNA, 421 bp, Gossypium hirsutum
ctgcaactgtcaaagttgctgctaaccttatcaggctactatcctacaataacaagagcatgcttcaaactggtcttattgttggagggtgggataagtatgaaggtggtaaaatatatggaattccacttggtggaacactgattgagcagccttttgctattggaggatctggctccagttacctatatgggttttttgatcaggcgtggaaggaaggaatgacaaaggaggaagctgagcaactagtggtcaaggcagtgtcgctcgccattgctcgtgatggtgctagtggaggtgttgttcgcactgttgttatcaactccgacggagtgacaaggaacttctaccctggtgataaacttcaattgtggcacgacgaattggagccgcatcattcgttattggatatactgaacgc

SEQ ID NO: 234446 - DNA, 271 bp, Gossypium hirsutum
ctttgagaggcttcactccacagagctgtttgctctatccccttccaacgatggaccggttgtatcttctcttcctcctcctttcctccgacgatgcttcggccgccgactccgacgttaatagcgacggcgatcctctcatccatcaagtagctaccgatggtggcgtcaaggaggactccgatgaccatatccttaacgcggagcaccactaaacgctgttaaaatccaagtttggaaaaacgtacgcatccaaggaggagcacgttta

SEQ ID NO: 234447 - DNA, 343 bp, Gossypium hirsutum
gatctccgtttgcattctctctcagctttccggtcgaagaatcattcaatttaaggggaaaaagaagaaaaaaaaaaaccaaacatgtcgaaatcggtgattgaaacgcctccgaagggtgggtttagcttcgatctttgtaaaagaaacgagatgctttcaaagaaaggtgttaatccgccgtcatttcgtaaaacgggtaccactattgttggcttgatcttccaggatggtgtaattcttggagcagacactagagcaactgaaggacctatagtttgcgataagaattgtgagaaaattcattacatggccccaaacatttacttgtgtggagctggaa

SEQ ID NO: 234448 - DNA, 425 bp, Gossypium hirsutum
ccgatgtcaacgttattcgtcctaaagaatattgggactacgagctcctcactgttcaatggggcgaacaagatgattacgaggtggtgaggaaagtcggacgagggaaatacagtgaggttttcgagggggttcatattacggataacgagaaatgtgttatcaagattctcaaaccggtcaagaagaagaagattaagagggagattaaaatactgcagaatctttgtggagggccgaatattgtgaagttgctggatatagttagggatcagcagtcgaagactccaagtcttatatttgaatatgtgaataatacggattttaaagtgctttatccgacgctgtctgattatgatattcgatattatatctatgaacttcttaaggcactggactattgccacttacaaggtattatgcac

SEQ ID NO: 234449 - DNA, 437 bp, Gossypium hirsutum
acgctctctctcgctctctgtagccgccgcctgcgtctctctcttcatctctctgaaccaagaaggctttagcttttcgcttcgagagagaccatgttggtttaccaggatctcatctccggtgacgagcttctttctgactcattcccctacaaggaaatcgagaatgggatgctgtgggaagttgagggaaagtgggttgtgcaaggagctgtcgatgttgacattggtgccaatccttcagccgaaggtgctgatgaggatgaaggtgttgatgaccaagctgtgaaggttgttgacattgttgacactttcaggcttcaggagcaaccccctttcgacaagaagcagtttgtcgtgttcatcaagaagttcatcaagaacttgacaccaaaactggatgcggaaaagcaagagtccttcaagaaaaacattga

SEQ ID NO: 234450 - DNA, 433 bp, Gossypium hirsutum
aactttttagtgcaaaacgccttgagtcatacgagtatatccgaagagaagaaatgagagttgtgctaaaagggttggacgaatcattccgtgtcccaatttgtttgaaagatcgtctttcagatttgagtcttaatgtaataagtaggatggtgttcgggaaaaagtatacagaggggactggtgaaaatgagattgtgaccccgaaggagttcaaggagatgcttgatgagttattcctacttaacggagtattggatattggggactcgattccctcgctaagggtcttggatttgcaaggcaatattaagagaatgaaggccttgagcaagaagttcgacaaattcttggagcacgttttggatgaacataacgctaggcgaagagatgttaaagattattgctgccaaggatatggtggatgtacttt

SEQ ID NO: 234451 - DNA, 421 bp, Gossypium hirsutum
gaatatttgccggttactcttcatcacgtctatataagatggtcaagggccccgagggggagaaaattaccttggaaacctgctttattgttcccggtattttattccgcattttttttggacctgatgcccctatttggggaggaccatttttccgtggctgttccgttcggacacaaggttggccctggttggcttatggttcggtatatcagttcccttagtctttgtcggcagtcacttaggttaaaaaacgccacccattgaacaccctgtgaagaccaataaaatcccgaggcagatcttgaaacaggcatggtatatgaagcccgttttctccatactcatgggaggcattcttccattgggagctgtttatattgagctattctacatctaaacatcaatatggctaacccag

SEQ ID NO: 234452 - DNA, 377 bp, Gossypium hirsutum
ctcaacattcccatttccaatctccagctcccaaggtaaatatgccgatcagaaacatagcagttggccggcccgaagaggcgactcaccccgatgctctcaaggcagctttggctgagttcatctcaaccttgatcttcgttttcgctggatcgggctcaggaatggcttttaacaagttgaccggcaacggagcaacaacccccggccggtctcgtagccgccgctctagctcatggcttcggtcttttcgtcgctgtctccgttggcgccaacatctcaggtggccacgtcaaccccgccgtcaccttcggtgctttcgttggcgggaacatcactctcttgcgcggcattctttactggatcgcccaactcct

SEQ ID NO: 234453 - DNA, 331 bp, Gossypium hirsutum
ctgagttacaaaggtttcagctctgaattggttccagagaagagaacaagaaaagaaactaagaaatggcacgcaagaagatcagagagtacgattccaagagattgttgaagcagcacttcaaaaggttttccgcctacgatttgcccatcaaatctgcacaagtgacggagtcaactgatttcaatgagctagtagagaaggagccatggcttttgtcgcagaaactggttgtcaagcctgatatgttgtttggaaagcgtgggaagagtggtttggttggtttgaatcttgatttcgctcaagttactgcatttgtgaaagagcgcct

SEQ ID NO: 234454 - DNA, 306 bp, Gossypium hirsutum
agacattcttcgtcgcctcctattctttctcttttgaaaaccctaacgaccctgcttgctccaccggattcgtcaccgtcttcaccgagatcggtcaattgaacgtcgtaccaccaagacccaagccctccgatgtcttgagctctctccgtgagcgcagtaaggacatccttagcgtggtcgtcgctcttctcttcggcgtcggtagcggcgctctcacggcggctaccctctacttggtctggaccctcttctcggcccggtctgattatcatcgtgcttgtttggagatgatgagagcgacgg

SEQ ID NO: 234455 - DNA, 435 bp, Gossypium hirsutum
ctcaggtcaaggctgaagccactcgtggctcaacttttattacccaagcccaagggaaggtcttctccaacggcttttatctctactgggctcaaaccgccggatctcaacacggagccgcggaacgcgtacaccacatattggctctgtgtaaacccccgaccgcgggtcttttgtgcctctccatacgcacagcgtccgccatatcaccggacacgcctgtcgctgtatatttcttctcgcggtgtcacacgatcacctgctcatgaggagagaccggggttctttacacatgtccgaggtgcacatagcgctcacaatcccggatcactataacgcgttgttaagggaaaagatcggacacgcgtcggtccgcccggatttgttgctgcgagggttgaagatgaagggagacgaggcggataagagaggggt

SEQ ID NO: 234456 - DNA, 386 bp, Gossypium hirsutum
ctggtacgtcacaggctgactgtgctgttttgattattgattccaccactggtggttttgaggctggtatctccaaggatggtcagactcgtgagcacgcattgcttgcttttacccttggtgtcaagcaaatgatttgctgttgcaacaagatggatgccactacccctaaatactcgaaggctaggtatgatgaaattgtgaaggaagtctcttcctacttgaagaaggtgggatacaaccctgacaagattccatttgttcccatttctggttttgagggtgacaacatgattgagaggtctaccaacttggactggtacaagggccctcctcttcttgaggctcttgaccagatcaatgagcccaagaggccttcagacaag

SEQ ID NO: 234457 - DNA, 343 bp, Gossypium hirsutum
ctcttgtgacctcgatttcaagtgaaacagaatgggtaaggaaaagactcacattaacattgtggtcattggccatgtcgattcccgaaaatcgacccccattgcccacctgatctacaagctgggtggtattgacaagcgtgtgattgaaaggtttgagaaagaagctgctgagatgaacaagaggtcattcaagtatgcttgggtgcttgacaggctcaaggctgaccgtgagcgtggtatcaccattgatattgccttgtggaaatttgagaccaccaaatactactgcactgtgattgatgcgcctgcacaccgtgactttatcaagaacatgattact

SEQ ID NO: 234458 - DNA, 362 bp, Gossypium hirsutum
attcattcatcaaaaaaagcttttcctctccattttccattccatatttgttctgcgctctctgtttctgtggttgtgttttaggatttgagagatcatggcgtcgcaagaatacttggacaagatgaaggtccgtcaggagtatcggaatctctggcacacggatctcatgagcaccattcaacgcgaccctccttattgctgcttggctttttggtgtggcccatgtgtatcctacatgctccggaaacgagctctttataatgacatgtcaaggtatacatgttgtgctggttatatgccatgcaatggtaggtgtggtgaaaagaaatgtcccgagttttgcctttgcactgaggttt

SEQ ID NO: 234459 - DNA, 345 bp, Gossypium hirsutum
caaagataaggatctctgggtaatgaatgtggcttctgtcaaaatgtctgcaagattgaaaattatttatgaccgaggcttgattggaacagttcatgattggtgcgaagcattttctacatacccacgtacgtatgatcttcttcatgcctgggcggtgttttcggagattaaggagcgcggttgtagttcggaggacctcctgattgaaatggataggatacttcgtcctgacgggtttgtcattataagagataaacactcagtgataaattacatccagaaatttatcactgcattgcggtgggatggctggttatctgaagttgaacccagaactgatgc

SEQ ID NO: 234460 - DNA, 321 bp, Gossypium hirsutum
gaggtttcacatgctttgaaacaatcaattcgaagaggcttgccaagggttgaggcaagacactatctttcagtataccaagatattgagtcccataataagggtttggtggagtttgctaaaaatcgattcaaacatggtccaactttggattagaaaggacttaatgagaattcttgggggggggagggtttaaaccttcaaaggaaggtggccttccccagaaattgagtgggtggaggctttttttggaatctaagaatggtctttgggccccaatttttttttggtaaaaaggttttgacaaaagggatagcaatg

SEQ ID NO: 234461 - DNA, 346 bp, Gossypium hirsutum
ggtgaccagtgtcttcctaatggtgtagtaattactgggaatggttacagttatgagagaatgtcgacgtagatttgatcttggggatgccgactatctcaggtatcgtgggatgcaagaatttgatcaggctatgcagcatgttgaagagaaatatggtttcatgacttccgagcacacatatatatcgcggaaggatgaaaaagatagggtgattgtctttgaaaaaggcaacctggttttcgtattcaacttccactggaataacagctattttgactaccgtgtggggtgtgcaaaaccaggaaagtacaagattgttttggattcagatgatccgttattc

SEQ ID NO: 234462 - DNA, 438 bp, Gossypium hirsutum
gaaagtttcaatggcaaccctcaaagttccagttcacgttccttctccttctgatgatgctgagcaacttcggaaagcttttgaaggctggggtacgaacgagcaattgattatcgacatattggctcacaagaatgcagcacagcgcaattcaattcggaaaagttatggtgaagcttatggggaagatcttctcaagtgtttggagaaggaacttacaagtgatttcgagcgggctgtgctgctttttacgttggaccctgcagagcgagatgctcatctggctaatgaagctacaaagaagttcacatcaagcaattggattctcatggagatagcttgcagtaggtcttcgcatgaactactcaatgtgaaaaaggcgtatcatgctcgttataagaaatcccttgaagaagatgtcgctcaccacactaccgg

SEQ ID NO: 234463 - DNA, 290 bp, Gossypium hirsutum
cacagctgaaacagatgaacatcaagatgggttcccaaaaacaccacgttcttttgttatcagtgcttttgattctcaattcccttctcttttccggtgccgatgaagatcactattacgaatttattttgcaagaaacagagattacgaagctatgcagcacaaaaaccatattgacagtgaacggcagttttccagggcctgagattcgggttcgaagaggcgatactgtttatgtcaatgtccacaatcaaagaagatctgctggttcctttgattggcaagggttt

SEQ ID NO: 234464 - DNA, 395 bp, Gossypium hirsutum
gcttttcgcttcgagagagaccatgttggtttaccaggatctcatctccggtgacgagcttctttctgactcattcccctacaaggaaatcgagaatgggatgctgtgggaagttgagggaaagtgggttgtgcaaggagctattgatgtatgtattgatgacaatactttattcgcagataacgatgaggtttacagggccttgtgattcttgttggtagaggctattactgcttatgttaatgttcacatatttatgaatatctagttctttttttttgattgtcattgcttttcggattcgtgtgagggtctaaacaattttatttattcttgtaatatagttactttctagaattgatttttacttgttaaattattacattatttttttt

SEQ ID NO: 234465 - DNA, 338 bp, Gossypium hirsutum
cgacgccacgcgtccgatagactggaagacctgtctggcaacaaatatagcggcaataatcatagcaacaaagatgtcaaattataacagcagtaccagcaaataacaacaggggtgggaactgtggagacaatgctgttgacacacggttcaagacattgactgctgctgatgcactccccagaaatgaagtgcttggaggatacatttatgtttgtaacactgatacaacgcaggaagatctaaagcgactgctatttggtttaccaccattatatagggactgtgttatggcaataacacctggcttacctgtatttctctataactatactact

SEQ ID NO: 234466 - DNA, 414 bp, Gossypium hirsutum
tcgagcagtacgagagcgaagaagggaagaagagtatagatgctcagcttgaaaagatgaagaaatatgccactgttatcagggtcttggcccacacccagattaggaaaatgaagggattgaagcagaagaaggcacacctaatggagatccaagtcaatggtggaacgattgctgacaaggttgattttgcatacaagttctttgagaaacaagtccccattgatgctgttttccagaaggatgaaatgattgatatcatcggtgttacaaagggtaaaggttacgaaggtgttgtcactcgttggggtgtcacacgtctgccccgtaagacccacagaggtctgcgtaaggttgcttgtatcggtgcctggcatcctgctagagtctcgtttaccgttgccagggcaggtc

SEQ ID NO: 234467 - DNA, 418 bp, Gossypium hirsutum
agacattcttcgtcgcctcctattctttctcttttgaaaaccctaacgacccttcttcctccaccggattcgtcaccgtcttcaccgagatcggtcaattgaacgtcgtaccaccaagacccaagccctccgatgtcttgagctctctccgtgagcgcagtaaggacatccttagcgtggtcgtcgctcttctcttcggcgtcggtagcggcgctctcacggcggctaccctctacttggtctggaccctcttctcggcccggtctgattatcatcgtgcttgtttggaggatgatgagagcgacggagaacttagccctaagaagattgggtatgtaaccattcccaccgttaacgttaaggaagtcaattgatcaaattatgtgtcttaagtctttaatatgaaataagaatcatg

SEQ ID NO: 234468 - DNA, 415 bp, Gossypium hirsutum
cgaaaggagagaaaactaattggattatgcatgagtatcgattagccgacgtggaccggtcggttcgcaagaagaacagcctaaggttggacgattgggtgctgtgccggatttacaataagaaaggttgcatcgaaaaacaacctccgcgaggaagcgttacgaaaaaagctagcgtgacggagattgaggagagtaagccggataatgggacactaggcgtggaggcgtgtgaatttccgccggcagcgacggcggtgggtaacgattacgtatatttcgactcgtcggagtcggtcccgagggttcacacggactcgagctgttcggaacatgcggtgtctcgggaattcatgactgaagttcaaagcgttcccaaatggaaggaagaattgggaatggccaacaataatgc

SEQ ID NO: 234469 - DNA, 433 bp, Gossypium hirsutum
gggagttcagtgtgatggttgtggggttcttcccattactggacctcggttcaagtctaaagtaaaagacaactatgatctctgcagcatctgcttttctaaaatgggaaatgaagctgattatataagaatggacaagcctatgcattaccggcatccatggtgtttcagggcatcaaatgatcatgttccaagagttggcccagcactccctcatgtcttgaggaatcgtgtactaaagttgtctcggcctaaactagaaagtcactttatcttggatgtcaatgtattggatgggactgtaatggctccatctacaccatttacaaagatctggcgaatgcgcaacaatggtactctgccctggtatcgtgggatgcaacttgtctggattgggggagacaagttaacaaatgcaatctcggttgatata

SEQ ID NO: 234470 - DNA, 436 bp, Gossypium hirsutum
ccaagctttaggttgtcatcgttttctcgaggttttaaactatgggtatctcttgaatttgtgaagcaaagggagaaatattggttaaaaactagtagcagtgtattgaatcaagttttacaaaaaaagaagttaaaaagaaagatgaaaatccagtgtgatgtttgtgagagagctccagcaacagtgatatgttgtgcagatgaggctgcactttgtgctaaatgtgatatcgaagttcatgcagctaacaagcttgctagcaaacaccaaaggcttctccttcaatgcctttctaacaagcttcctccttgtgatatatgtcaggaaaaagcagctttcatcttttgtgttgaagacagagctcttttttgccgggattgcgacgaaccgatccatccagccggcagccttgctgcaaaccatcaaaggttct

SEQ ID NO: 234471 - DNA, 380 bp, Gossypium hirsutum
gtctgcctcgtggtagggggctgttgctacttgctgaaatgagctctgctggtaaccttgccacgggggactacacagctgctgccgtaaaaattgccgaacaacactccgattttgtcatcggtttcatctcagtcaaccccgcatcttggcccggtgcacctgtaaatccagcattcattcaggcaacccctggagttcaaatggtaaagggtggcgacgccctcggccagcaatacaacaccccgtattcagtcatctttgataggggtagcgacataataatcgttggtcggggaatcattaaggcagcgaacccagcggaggcagctcgtgagtaccgtcttcaaggatgggaagcatacatggctaaatgcact

SEQ ID NO: 234472 - DNA, 303 bp, Gossypium hirsutum
accgatttaacctcgatccgggtttcatgactaccgtgcacgctatcactgcaccacaaaagaccgtcggtggaccatcactgaaggactggggagatggtagagccaattccttcaacattattcctagcctcacctgccctatcaactctgccggaaagtgtattgctgtcctgaacgccaaacttactggaacgtcattgcaagttcctacccccgatgtatcagacgtcgctctcaccgtcagacttgcgaaatctccatctcatgatgagatcacagctgctctcatggaagagtctg

SEQ ID NO: 234473 - DNA, 379 bp, Gossypium hirsutum
aaggcagtgaagttctccccttccacccctgaaatccggggaactggccgtgtttccatgaggaaaaccaccaagcctgttccttctggtagcccatggtacggtcctgaccgagttttgtacttgggtccactttccggtgagccaccatcttacttgaccggtgagttccctggtgactatggttgggacactgctggactctcagctgatcccgagacctttgctaggaaccgtgagctcgaagtcattcactgcagatgggccatgttgggagctcttgggtgtgttttccctgagctgttggctaggaacggtgtcaagttcggtgaagctgtatggttcaaggccgggtctcaaatcttcagtgagggtggac

SEQ ID NO: 234474 - DNA, 384 bp, Gossypium hirsutum
cgtttaacctacacccttgacgaaatcgagggccctttcgaggtatccaccgatggcaccgtcaaattcgaggagaaagatgggattgattatgctgccgtcacagttcagcttcctggtggtgagcgtgtgcctttcctgttcaccatcaagcaattggttgcatcaggcaaacctgatagctttggaggagacttccttgtaccatcctaccgtggctcatctttcttggacccaaaggggaggggtggctcaaccgggtacgataatgcagtggccttgcctgctggaggaagaggggatgaggaagagctagccaaggagaacaacaagagtgctgcatcttcatcagggaaaatcaccttgagcgtcacaaagagcaag

SEQ ID NO: 234475 - DNA, 390 bp, Gossypium hirsutum
gagctacttaaccatttcccaaatctcctccctcctcttctttagcgtccttttcatttccgctcatgcagcgcgctttgaaatccgcaatgagtgctcctacaccgtctgggcagcagcctctcctggtggtggccgtcgcctagaccctcggcaaagttggaccatcgatgtgcctgctggcactgctatggctcgtatttggggtcgaaccaattgcaatttcgatgccagtggtaggggtcattgccaaaccggtgattgtggtggactccttcaatgcaaaggttggggtgtacctccaaacaccctggctgaatatgcacttaaccaatttggaaacatggatttctacgacatttccttagttgatgggttaacatccccatg

SEQ ID NO: 234476 - DNA, 407 bp, Gossypium hirsutum
ctcacttctttcactttcaaaaccaaaactagaagatcggggagagaagatggcggccggcgatcacaccgttttgcagctcagtacgccttcaacggcgaacctatcggccaaggttcatcctctcgtcatctttaacatctgcgattgctacgttagacgccccgaccaagccgagcgcgtaattggcacgctcctcggctccgtccttcctgatggcaccgttgatatccgtaactcctatgccgttcctcacactgaatccgccgaacaggttgctttggatattgaataccatcataatatgttagtctcccaccaaaaagtgaatcccaagggaagtaattgttggatggtattctactggcctgggagtcacaggtggtagtgcattgatccacgatttt

SEQ ID NO: 234477 - DNA, 357 bp, Gossypium hirsutum
gctctctgtagccgccgcctgcgtctctctcttcatctctctgaaccaaaaagtctttagcttttcgcttcgagagagaccatgttggtttaccaggatctcatctccggtgacgagcttctttctgactcattcccctacaaggaaatcgagaatgggatgctgtgggaagttgagggaaagtgggttgtgcaaggagctgtcgatgttgacattggtgccaatccttcagccgaaggtgctgatgaggatgaaggtgttgatgaccaagctgtgaaggttgttgacattgttgacactttcaggcttcaggagcaaccccctttcgacaagaagcagtttgtcgtgttcatcaag

SEQ ID NO: 234478 - DNA, 417 bp, Gossypium hirsutum
ccaaaatttgatccaagccaagtcgtcgacgtcttcgtccgcgtcaccggcggtgaagtcggagcagctagttcactcgctccgaagatcggtcctctcggtctctctcccaagaagatcggagaagatatcgctaaagagaccgccaaggaatggaagggtctccgcgtaaccgtcaagctcactgtccagaaccgccaggcgaaggtcatggtggtaccgtcggcggcagcgctggtaatcaaggcattgaaggaaccggagagggataggaagaagaccaagaacatcaagcataacgggaacatcggactcgatgacgtcatagagatcgctaaagtaatgaggccgaggtccatggctaaggatttgagagggacggtgaaggagattctgggcacctgtgtttccgttggg

SEQ ID NO: 234479 - DNA, 414 bp, Gossypium hirsutum
ctgagtttgaagcttcaagtgctaaaatctagggatttgcgggtggagaagacgagagcccatctctctgcttcaaagctcctgtccaggtagaattctcttcttcccttgcgttgtgttctttgctgttcaatcgccatggcttcaaagcggattttgaaagaactcaaggatttgcagaaagatccacccacttcttgcagtgctggtccagtagctgaagacatgtttcattggcaagcaacaatcatgggaccctcagatagcccttatgctggaggtctgtttttagttactatccatttccctccagattatcctttcaagcctcctaaggtcgcgtttaggaccaaggtcttccatcccaacatcaacagcaatggaagcatttgtcttgatatcctcaaagaacaa

SEQ ID NO: 234480 - DNA, 411 bp, Gossypium hirsutum
ctcgaaagttcctctccgttctctcccataaaacgaaaccctaactcgaattcagagccaccaaactcaccttaacaatggctcatcatggcggctccgacccagaatccgaaccaaacacccgactttacaatccataccaagaccttaacctccaggttcctatcaacaacctttacaggctccctacctccccggagttcctcttcgctgaggaatccctccaccagcgccgttcctggggcgaaaacctaacgttttataccggttccgcttatttaggcggctctgtatcgggcgcagccgtcgggctcttctccgctctcaggaatttcgagcaaggcgatactttgaaactcaaaatcaatcggatcttgaatagttcgggtcacacgggtcgatcatggggga

SEQ ID NO: 234481 - DNA, 392 bp, Gossypium hirsutum
gccatttccagtgatagatcttgctgagctccatggtgacaaaaggagcaaaacaatgacttctcttcatgaagcttgtgagaaatggggcttctttcaggttgatagccatggagttgataagaagttaatggagaaagtgaaggagatggtgaatggttactatgatgagaatttgaaggaaaagttttatgaatcagagatgactaaaagtttgaacaagaatgagaaaatctccgacatggattgggaaagtactttcttcatttggcaccgtccaaattctaacatcaatcaaatcccaaacataactaagcaactatgtgaaacaatggaggaatacatagcacaattgattaaactagctgaaaccctatcggagctgatatgcg

SEQ ID NO: 234482 - DNA, 366 bp, Gossypium hirsutum
cccacgcgtccgcggacgcgtgggaaaaaaaaacactttcatccactacagcaaggatttctagggtttcgtctgaatcggtaagcgatggctatggctgctctcagacgcgaagggaggcgtttcgcccctctgatctctcctcgtccgataaccgctgtcagatcctctcctctctatcctactcttgaggatgagggtcctcttggacttcgtcatatttcgactcaagttgttagaaaccggatgaagagtgtcaagaatattcagaaaatcacaaaagcaatgaagatggttgcagcctcgaagttgagagcatttcaaacaaaaactgataattctcgtggcctctggcagccatttact

SEQ ID NO: 234483 - DNA, 327 bp, Gossypium hirsutum
ctttccttacagaatgatttacgacgtcaattctccactcttccgctcattcctcagccagaagggcggctcctccgacaaaaggaaaatggaggagcagaagccaaaggaacagagacccaaagcaagtgagaacaaacctgttatgacagagtaactgatgcttttttttagtctgctttaagatgggacaggttggttgttgttttagaatggaaattactgtggatgtttctaatttctatattataacagtttttcttgtttgatttggaatgaacatgttcttatctggcattcaagcttctattttcctgatgttatttt

SEQ ID NO: 234484 - DNA, 412 bp, Gossypium hirsutum
tctgtctcctccatcgctctttttcatcgatcagatctcttcaaacccatctgtcaaaacaaccctccactcattccatccatgacgcttggctcaggaggatccagtgttgtggtgcctcggaacttcagattgctggaggagcttgagcgtggagaaaaaggtattggagatggtactgtcagctatggaatggatgacggagatgacatttacatgcgctcttggactggcaccattattggtcctcataatactgtacatgaaggtcgaatctatcagctgaagctgttctgtgataaagattatccagagaagccaccaagcgtccgttttcattcaagaatcaacatgacttgtgttaaccacgaaactggagtggtggaaccaaagaagtttggacttcttgcaa

SEQ ID NO: 234485 - DNA, 404 bp, Gossypium hirsutum
ctcaaagatatcactgcaagaaaaaaaaaaaaccagacatggcttccaacactgttgcatccgctgctcttcttcttaccttgaacttgttgatcttcactttggttagctctacctacgtgccttgcccaccaccaccaaagagccacatgcctacccacaaaagcccaccctcggcacctgaacagccaggcacttgccccagagatgcactgaaactaggcgtttgtgctgatttgttgggctcagtgcgcgttgttgttggaccgtcgaggaccaaatgctgctctctcatttcgggtttggctgatctcgatgctgctgtttgcctttgcactgctattaaagctaatgtgtggggggttaacctaaacgttcctgtttcattgtctttgctcctcaat

SEQ ID NO: 234486 - DNA, 407 bp, Gossypium hirsutum
atgccgccgaagttcgacccaacccaagtcgtcgacgtattcgtgcgagtcaccggcggtgaagtcggagcagccagttcactcgcacccaaaatcggtcctttgggtctatcccccaagaaaattggtgaagacatcgctaaggaaaccgccaaggaatggaagggcttacgcgtcaccgtcaagcttactgtccagaaccggcaagctaaagtcactgtagtcccatccgccgccgctctggtcatcaaggctttgaaagagcctgaaagggatcgtaagaagacgaagaatattaagcataatgggaatattagccttgatgatgtgatcgagatcgcgaaagtcatgaagccttgatccatggctaaggacctgagaggaaccgtgaaggagattttgggaac

SEQ ID NO: 234487 - DNA, 342 bp, Gossypium hirsutum
ataaaaaatgagctttcttcaggccttgtcaattttccttttgcttttgttgtatgtagtcgtaggatcagctgagcagtgtggaaggcaagcaggcggtgctctttgccccggtggtctatgttgtagccaatttggctggtgtggcagtactgctgactactgcacagttcctggttgccaaagtcagtgcagcggtagtggccctgcccctgggcctggtgggctaaccaatcttatatcaagagagacctttaatcagatgcttttgcataggaacgatggggcttgtcctgcccgtggcttctatacatatgatgctttcattgctgctgcccgttc

SEQ ID NO: 234488 - DNA, 351 bp, Gossypium hirsutum
tacaattgataatgtcaaggccaagatccaagacaaggaagggatcccaccagaccaacagaggcttatctttgccggtaaacagcttgaagatggccgaactcttgcggattacaacatccagaaagagtctaccctccaccttgtccttcgtcttaggggtgggatgcagatttttgtaaaaaccctcactggaaaaactattacgttggaggtggagagttctgatacgattgataatgttaaggccaagattcaggataaggaagggatcccaccggaccagcagaggttgatttttgctggaaagcagcttgaagatggccgaactcttgcggactataacattca

SEQ ID NO: 234489 - DNA, 407 bp, Gossypium hirsutum
cggacgcgtgggtccaactctaatggctctcaaattttagggcaaatttcatctcggtatctctcagccatcctccatcccaatcccaaccccatcatctcttctttctttcccatgcctcgattcttcaatcctttcctcttatccttatttttctgtgttttagggttagggtttggcgttgatttcggtcaagctttcaaagtcccctttagggtcaatgatgttctcccggtgcttccgcgccaggtatcttggccggtcttgaacactcttcattccgccgttgacttgttgccggcttttgtcggatccgtgaccccgaacaatggctcaattgattggaaaggagcttgctttcatggaaacgaggctcgtctcgagttcaccagtagcgatcgcgacga

SEQ ID NO: 234490 - DNA, 409 bp, Gossypium hirsutum
gacggatcgacggtgagagccttcgtgactgacgaccaacagttcacgaagagcgtggatgagcgtttcgcagctcttgacctcaacaacgacggtgtcctctccaggtccgagcttcgcaaggccttcgagtctctgcgtctcctggagtcccacttcggtgtcgacgtcgccactccccccgacgagctcactcagctttacaactccattttcgagaggtttgattgcgatggcagcggcaccgttgacctccaggagttcagatctgagatgaagaagattctgcttgctattgctgatggattgggatcttgccctatccagatggttcttgaggatgatgaccaaagttttctgaagaaagctgctgatcttgaggctgctaagctcgatccaaaccatgctc

SEQ ID NO: 234491 - DNA, 411 bp, Gossypium hirsutum
  unsure (1)..(411): unsure at all n locations
ctcaaattaggtgtatgtgccaatgtgcttaacctagtcaatgtcaccgttggttcacccccagtgatgccatgctgttcccttctcaatggccttgtcgacctcgaagctgctgcatgcctttgcaccgctatcagagcaaacattttaggcatcaacctcaacatcccaatttcccttagcttgctcctcaacgtttgttcaaggaacgttcctactggcttccaatgctaaatcatcactgttccctacattttttatcgtctttcttatggtgtttgtgtttgattttagaaagttatgatttctattatttactgtgtgttttcatttgtaactttgttggttaaatttccttgtggngatggatatagaataagtctaatacttttcttcagatgtttttcttag

SEQ ID NO: 234492 - DNA, 400 bp, Gossypium hirsutum
ctcagccccgaagccaagagaagagtggtttttgaagaagagagaaggaaaattatatgtgaaagtatggcggggaaagaagagaaccgaatatttgtgggaggattgtcatgggatgtcactgaacgacagcttgagcatgcgtttagtccatttggcaaaatccttgaatctcagatcatgttggaaagagatactgggcgtccacgtggatttggatttatcacgtttgctgatcgccggtccatggatgaagctatcagggagatgcatggacgggagctgggggaacgcaccatttcagtgaataaggctcaacccaagatgggtgaagatcttgatcatggttatagaggaggttactcatcaagtggcaggggtcgctatgcaagtggagaca

SEQ ID NO: 234493 - DNA, 412 bp, Gossypium hirsutum
ctgcaagcctttactttaccaaacaccatggatgctgctgagagctggtcgagaaccaaatgggtcttccattttatgcttatattcgcacatttctctcttctatcactagctgaagatggtctggtggccaatggggatttcgagacgccaccgtccggcggcttcccaagcgaggcaatatccgatggagcccccgagatccccagctggagcacgaacggtacggtgaagcttgtgtccgccggtgaaaaagtgagcggcgggatgctactcatcgtaccccgaggcaggcacgccgtcagattgggcaacgacgcggagatcagtcaggaagtgacggttgagaaaggatcggcgtacgcggttacgttcagtgcggcacgcacttgcgcgcagatggagtcactgt

SEQ ID NO: 234494 - DNA, 342 bp, Gossypium hirsutum
gaagagagtaaaggggaaaaaaagcgtcgtcgtttttgcttcttcttctacttcgctctctctccttctccgaagttcctctttcgttctttcatttattcagattagttgaagggcacataatacgcgttgacaagtgttttttgctgcactcactacctcgattcttgtttccagtattggaaaagatggccgacggggaggatattcaacccctcgtctgggataatggaaccggaatggggaaggctggttttgctggtgatgatgctccaagggcaggttttcccaatattggtggtcgtccccggcacaccggtgttatgggtgggatgggtcaaa

SEQ ID NO: 234495 - DNA, 367 bp, Gossypium hirsutum
  unsure (1)..(367): unsure at all n locations
ggcggcttctgcttctatttactattttctcactctcctactcctttgtgccatcccttttaccttctccgagctcgttaaagagcagcctctggtgttgaagtaccacaatgggccactcttgaaggggaagatcaccgttaatctcatctggtacgggaagttctccccaacccagcgctccataatcgtcgatttcatcaactctttgagctctgccgtcaaacccaagattccgtcggcgtcgttttggtggaaaacgacggagaaatacaagtccggttcctccactttggtcgtgggcaaacaaatcctnctcgaaaattacccgctcggtaaaatccttaagaacccacacttgccagcg

SEQ ID NO: 234496 - DNA, 406 bp, Gossypium hirsutum
attctaccgttttattcattcactcttttctgcattattctcccgatgaccatgttcaggccagaggctgagcttgctgcatgggttgtctgttacatccctgctacaatgtcgttccttaacatccttccggcaccaaaatccttcccgttcattgttccttaccttcttttcgagaataccatgtcggtgaccaagttcaatgctatgatatctggtcttttccaactcggcagtgcatacgagtgggtcgttacgaaaaagtccggacgatcttctgagggtgatcttgtttcattggttgagaaaaagccaaaacaccatcgggttggatcagaacccaatcttgaggaaatgaaagctgatctccagcaagaacaggaacaaaaggcttgtaaaaagaagc

SEQ ID NO: 234497 - DNA, 390 bp, Gossypium hirsutum
  unsure (1)..(390): unsure at all n locations
aggaaactgaggaaaaaagaccaaactagttaaaagcaatggaagatgttgcaagggcaaccgaggctcctttagcaccagtcacttgtggaaggagagtccgaaatgacttggaagataaacttgctaaaccttatatggcgagagctntggtggctccggatgtcgatcacccgaacggaacgccggtccattaccataacggaatgagtgttcttcaacaacatgcggcatatttcgaccaggacgacaatggaatcatttatccttgggagacttacgccggttgtcgagccatgggatntaatccgattgcctctcttttttttcaccattcttattaatggatctatgagctatcctacacttncaggatggttaccttcaccg

SEQ ID NO: 234498 - DNA, 400 bp, Gossypium hirsutum
  unsure (1)..(400): unsure at all n locations
gtgaacggaggcgttgatatggggagtgtttcacaagcttatttggaaagcgaaccagtgaaggaggcgagatctttgatatctgagctttgtcgccagttctatagccttggatgggtctcaggaacaggtggcagcatcaccatgaaggtccatgatagctctatccccaagcctcaacaacttatcctcatgtccccttctggtgtccaaaaggagagaatggaaccagaggacatgtatgtattatcaggagatggggctatcatatcttcaccttctccaaagccataccctcataagcctnctaaatgctctgattgtgctccgcttttcatgaaggcatatcatatgcgtaatgctggggctgttatccacagtcatggaatggaatcctgtc

SEQ ID NO: 234499 - DNA, 411 bp, Gossypium hirsutum
gttaagaacttgaaaatgtatgaaaaatacccatctccgattaaatgtgaaccgactactgtgtcaatgcccatcaaggaaggtgagccaattgtcttcacctatgaagttactttcgaggagagcgatatcaagtggccatctcgttgggatgcttatttgaagatggagggagctaaagtccattggttctcaatcttgaattctcttatggtgatcactttcctcgccggtatagtccttgtgatcttcttaaggactgtcaggcgggatctgactcggtatgaggagcttgataaggaggcgcaagcaatggtgaacgaggagctgtctgggtggaagctagttgttggggatgttttccgtgccccatccaatcctgcccttttgtgtattatggttggggatggg

SEQ ID NO: 234500 - DNA, 411 bp, Gossypium hirsutum
attgtttcctcgatgctacccaattttacgcttcaatgcgtacccaaggctgctggcccgacaatttcactttccctttcgttctcaaggcctgttccaggcttttggatttccatttaggaataagaatccatgccctcgttataaaactaggattcgatcgtgatgtctttatcaagacaagtttgctgtatttgtattccaaatgtggatatttggattatgcacgtaaggtgtttgacgatattcctgataaaaatgttatttcttggacagcaatgattagtgggtacatagatgttgaacggtatagagaagcggttgatttgtttcgtaagctaatagatatgggtttgaggcctgatagtttcagtgttgttagagttctggcagcttgtgctcacttaaggg

SEQ ID NO: 234501 - DNA, 393 bp, Gossypium hirsutum
gttgacccctgggcgtgcaaaaccggaatcgaaattaaaggggaagcaaaaaaaccactgccatagcagttttgcaggatttctgggattctaacacaagcacaaaatttgggtctttagagaagaacagaaagattaataatggaggtggaattggaagagatgcttgatgatctgttgtctataaggcaatctgtgtctgatccttctcttcatgcttcaattgacaagctgcaattgcgtgttgatcgtcttactcatcttgctaaggctgtacctgttcgacgatcaaaagtcaaggatatgagtgctgaggtggttgatagcaatccctatagtaggctcatggcacttcaaagaatgggtatcgtggagaactatgaaagggatccg

SEQ ID NO: 234502 - DNA, 409 bp, Gossypium hirsutum
gcaactttgacgcagctgctatttcttttttgtggttttcagcagcagcttgtatttggaagaatggtgagggtgagcgttttgaatgatgcactcaagagcatgtacaatgcagagaagaggggcaaacgacaggtcatgatccgaccgtcctcgaaggtgatcattaagttccttttggtcatgcagaaacatggttatattggggagtttgagtatgttgatgatcatagatctggtaaaattgtggttgaattgaatgggaggctgaacaagtgtggggtgatcagtcctcgttttgatgtcggtgttaaggagattgagggttggactgctcggttgcttccttcaagacagtttggttatattgtgctcacaacatcagctggaattatggaccatgaagaag

SEQ ID NO: 234503 - DNA, 412 bp, Gossypium hirsutum
tttcctctctattgtctctctttagaacaatcctttcatccaaaaacccaatacaactgttaacaaaccctagaaagaggaagataaagtttcttccaacgattaaagagagaaaatagaggggaaatccaggcacatgcacctagtagaggctacttcgatcaactagaaaatacagacgatttgtatttgaagaaacgatcaaggatgcgtcgttggctttgctgttcctgtcaagcagaggagagttaccaagcacacgaaaacgagcacttgaaagcccccaaggatcatacagatggaaatcatagaaactcaagggtggcagctcctgtcaaacctgaagtgcaaaaatcaccaccacctatcgaagttcctgcactatcgttggaagaattgaaagagaaaacgg

SEQ ID NO: 234504 - DNA, 403 bp, Gossypium hirsutum
agttccatggctccaaaagtccaccaaaaaggaaggaggaatcacattactgcaaaagatgagtataggcatggttctcgccataatcaccatggttatatccgccattgttgaagatagaagaagagccttagctttgagtaaccccatcggcatagattcaaagaaaagatccatttcttcactgtcaacaatgtggttaatccctcagctaacattaataggactctccgaagcattcacattaattggtttaatcgaattttactacaaacagttccctgaaaacatgagaagcattgctggatcattcacttttattggccttgcattgtcgagttacctcagcagtttcttgatatcagttgttcataagatctcggaaagatcccaaacaggtgac

SEQ ID NO: 234505 - DNA, 401 bp, Gossypium hirsutum
caaaaattgggtgagacaaaatttggaaaatacacaaagtcaggaagctgagtgggaaggggtctgtttggttgcgctgctggtgagcgcgatgatggagaaaggcaaagagcccgccgcagccaacgaggatggcgaagttggtaagaccgagagcgaggagattcaggaagccttagaaattgtcctctttcaagtctctgaatgttatgtttatttgatacctgcaaggaaaactgcagcatcttacagagctgatgaatggaatgtcaacaaatgggcatgggagggaactttgaaaggcattagcaagggagaagaatgcattatcaggcttgaagacaagaatacaggtgaattgtatgctcgagcatttctgagagatggagagccacattcag

SEQ ID NO: 234506 - DNA, 407 bp, Gossypium hirsutum
  unsure (1)..(407): unsure at all n locations
gtacgattaaccccaaggtcatagagtgcgagtatgctgtccgtggtgagattgtcacccttgcacagaaattgcaagaagagatacagactaagccagatgctcatccctttgaagagatactgtactgcaacattggaaatccacaatctcttggtcagcagccaataacttttttccgagaggttcttgcattatgcgaccatccagccattttggacaaaagtgagacacagggtttattcagtgctgactccattgaacgtgcttggcaaattcttgatcaaattcctggaagggcaactggtgcctacagtcatagccagggtatcaagggattacgagatactattgctgccggaattgaggttcgtgatggttttnctgctgatccaaatgatattttc

SEQ ID NO: 234507 - DNA, 354 bp, Gossypium hirsutum
ctgttgtcaactttcttatttctcgatcaaattgtgtggcttggcagaacaggcatctataagaacaaagaacgtgctgagttgattggacgaatatcccttttctgttggatgggatcatcaatatgtaccacattggttgagcttggggagcttggaaggctatctgcatcaatgaaaaagttggaaaagagacttaaggatagtgacaagtacaagaatgaggagtatcgtgcgaagctccaaaattcaaatgagaggactttggcccttgttaaagcgggaatggatatagtagtagcagttgggcttcttcaattggcaccgaagaaagtcacccctcgagtaacggga

SEQ ID NO: 234508 - DNA, 411 bp, Gossypium hirsutum
cgccaaatctcccactccctcctctcctctctccctccccaaacaccctttaacctcatatgtggtgtcccttacactgccctccctatagccacctccatctctctcgacacctccatccccatgctcatgcgccgcaaagaagtaaaagactacggaactgccaagtccatcgaaggtgtttacgaaaagggtcaagtttgttttgtggtggaagacctcgtaacgtccggtgcatcggttctcgaaacggcggcaccgcttcggtctttgggtatcaacgtaacggatgccatcgtggttatagatagggagcaaggcgggagggaaacgtttgaggagaatgggattaaacttcatgcactttttactttaactgagatggtcaggttttaagagccaaagggaagc

SEQ ID NO: 234509 - DNA, 410 bp, Gossypium hirsutum
cagcgacctaatttcttcctcagacgctcaatggaccttcagcatcggcgattccattttccctccattcgagctcaacagtcggggacgatatttccgcgaaaagaagacgaggaagattctttgaaggtaaaggaatgggaagttggaatgttgcaaaacgaagtcgcagcgagtcaagggattagaatacggcggcgtccaccgtcgggtccgcctttgcattacgtgggtcccttcgaattccgtttacagaatgagggaaacactcctcgtaacattcttgaagaaatagtttggcacaaagatgtggaagtttcccaaatgaaagagaagaagcctttgctttcattgaagaaggttatcgagaattcacctccaactagagatttcgtcgggtctcttaaagc

SEQ ID NO: 234510 - DNA, 413 bp, Gossypium hirsutum
ctcgctctctgtagccgccgcctgcgtctctctcttcatctctctgaaccaaaaagtctttagcttttcgcttcgagagagaccatgttggtttaccaggatctcatctccggtgacgagcttctttctgactcattcccctacaaggaaatcgagaatgggatgctgtgggaagttgagggaaagtgggttgtgcaaggagctgtcgatgttgacattggtgccaatccttcagccgaaggtgctgatgaggatgaaggtgttgatgaccaagctgtgaaggttgttgacattgttgacactttcaggcttcaggagcaaccccctttcgacaagaagcagtttgtcgtgttcatcaagaagttcatcaagaacttgacaccaatactggatgcggaaaagcaagagtcctt

SEQ ID NO: 234511 - DNA, 403 bp, Gossypium hirsutum
ctgaattctcccctttctcacctaactcttgtttgattgctttctttgtttcaatgaaattatctcccaaaatcttgcttttttatttttcttaatttttcctctccttgatcgttgctagctgcaaaaagggtacgtcagaaatggattttttcttcagaggcctaaatgaggatttttcatcttcccaaatggacattcttagatgtccatttttgagaaatattaacgagccaactaacttttccttctcgtctgcattgcctttccccatgccggtacgaggagccaaaggtccaatatttgaagatggacccaatttcgacatggcattcaggctattccatggacgtgacggagtagttccgctatctggacgatcatccttgcgttttgagaaagc

SEQ ID NO: 234512 - DNA, 414 bp, Gossypium hirsutum
gaaggtgtatggcccagcctttgcttctccaaagcgagtgattgcatgtcttattgaaaaggagattgaattcgagactgtccctgttgatttgcttaaaggagagcacaaagaccctgaatttctcaagctccagccttttggaacagttcctgtcactcaagatggagattatgttttatatgaatcccgtgcaatcataaggtactatgcagaaaaatacaaatcacaagggactgatctactgggaaagacagtagaggaaaggggtcaagtggaaaattggctagaagttgaggcacacaatttcaacccatcaatttacgccttgaccctacatgtgatgtttgcttccaagatggggttccctcctgatgaaaatttgatcaaggaaagcgaggaaaagctaggcaa

SEQ ID NO: 234513 - DNA, 416 bp, Gossypium hirsutum
ctggtttcttttagcttacagcttccattgtttttcagtagtgaagagctaaaaaagaagggaaaccaatggaggggaaagaagaagatgttagattgggagcgaacaagttctcagagaggcaacctattgggacagcagcccagtcccaagatgataaggattacactgagccacccccagcacccttgtttgagcccagtgagttgacttcatggtcgttttaccgagctggaatcgctgagttcgttgctactttcctattcttgtacatctcggtgttgactgtgatgggagtccttaaggacaaaaccaagtgtacaactgttgggattcaagggattgcttgggcttttggtggaatgatctttgctcttgtttactgcactgctgggatctcaagtggtcatatcaat

SEQ ID NO: 234514 - DNA, 390 bp, Gossypium hirsutum
caaaaaaaaaatcccaaaagccatggaaaaagagaagctggacttcatactggttccgacgggtctactcgtgcttgctctctatcatgtttggcttctttttaccattctcaagcatcccactagaaccgtgatcggcttaaatgctgaatctcgccaccaatgggttctctccatgatgtctgatcccttgaaaaatggtgttttagcagtacaaacaatacgcaacaacataatggcatctacacttttggcaaccgtggcaatcactcttagttcgttgattagtgttttcgtaaccagcagctcggactctagcaacacaacttcagaaatattttatggcaataagagtcgtctactctcttcaatcaagtatttttccatctt

SEQ ID NO: 234515 - DNA, 397 bp, Gossypium hirsutum
ttttcttgttccttccttcgccgtctattgcttttagttgcctcgatttcaagtgaatcagaatgggtaaggaaaagactcacattaacattgtggtcatcggccacgtcgattctgggaaatcaaccaccactggccacctgatttacaagcttggtggtattgacaagcgtgtgattgaaaggttcgagaaagaagctgctgagatgaacaagaggtcattcaagtatgcttgggtgcttgacaagctcaaggctgagcgtgagcgtggtatcaccattgatattgccttgtggaaatttgagaccaccaaatactactgcactgtgattgatgcacctggacaccgtgactttatcaagaatatgattactggtacgtcacaggctgactgtgc

SEQ ID NO: 234516 - DNA, 290 bp, Gossypium hirsutum
gcgagagcttatgttgctgaggcgcggggaattcgtggtgagaaagcgaatgtgaacttggctaacgtgactgcgcttacctctgcaaagcgtgcggtcaagacatattctgagaaaccacttttcaagtcgaatttgagccctgtgcagctaaatctcaaccagaattacaattactctggccacggctagcaggaatacttcgataccatgggtttcagtagaagagaagccactggccaactagtttgcatatgctgaccctgttactacgtctatagatgctggat

SEQ ID NO: 234517 - DNA, 410 bp, Gossypium hirsutum
tttgtcttgctggagtgtacttgacattggcacgggaaatggtctgctccttcaggagctttctaagcaggggttcacagatttaactggaactgattatagtgaaggagcaattgaccttgctcaaagcctagctgatcgagatggattttcaaacatcaagtttctggttgatgatattcttgagacaaagttggatagacagtttcaacttgtcatggataaggggactctcgatgccattggcttgcatcctgatgggcctatcaaaaggattatgtattgggattcagtttcaaagttgttggcccccggtggaatattagtgattacatcttgcaaccatacaaaagatgaattggtccaagaggtggaaaatttcaatcaaaggaacattgcaatatcccaag

SEQ ID NO: 234518 - DNA, 404 bp, Gossypium hirsutum
cggacgcgtgggttccgtttagcagagctttcttcgacgagcagccatctgtaatcaatcatgggtcattctaacgtctggaactctcaccccaaaacctacgggcctggctctcgcgcatgccgagtgtgtggaaaccctcatgccatcatcaggaagtacgggctcatgtgttgcagacagtgcttccgtagcaatgccaaggaaattggattcattaagtaccgctgaggaatgtttatatggctagaagttggaaacactttttggctagtatgaacctttgtttcgaaattgtagcaacttttaagataacactgctgttttttggtgaaattagtttaagagcttgaagttttgtttctgcaaaggataatttgttgttttctcaatgaagtaatcat

SEQ ID NO: 234519 - DNA, 370 bp, Gossypium hirsutum
ctttggtatctctagttggttttgggctttacgagtttggctttcctggggttgccaaatgtgcggagattggactgcctcagctgattcttatagtatttgtctcacagcacgtgcctcatgtgataaagtctggaagaaatgtctctgatcgatttgctggcttgttctcagaggtgattgtctggacttatgctcatttactcactgggggtggagcttataatggtacagcaccaaaaacacaaacaagctgtagaactgatcgttctggtctaatagatgctgctccatggataagagttccttatccctttcaatggggagcgccatcatttgatgctggtgaagcctttgctatgatgatggc

SEQ ID NO: 234520 - DNA, 402 bp, Gossypium hirsutum
ccgacggtgaggatattcaacccctcgtctgtgataatggaactggaatggtgaaggccggttttgctggtgatgatgctccaagggcagtttttcccagtatcgttggtcgtccccggcacactggtgttatggttgggatgggtcagaaggatgcctatgtaggagatgaagcacaatctaaaagaggtatccttactttgaaatatcctattgagcatggtattgtgagcaactgggatgatatggaaaagatctggcatcatacattctacaacgaactccgtgttgctcctgaggagcaccctgtgcttctcacggaagcacctctcaaccccaaggccaatagagaaaagatgactcagatcatgtttgagaccttcaatgtacctgctatgtatg

SEQ ID NO: 234521 - DNA, 412 bp, Gossypium hirsutum
cgggttcaagtccccattgccccggaatacctagcgtttaaccccaacaccggggcagggaccataatagattcgggtacggttgtaacccgattcgtccagcccatttacaaggcaatccgagatgagtttgtgaagcatgtgaaaggtccatttactgccattggagtatttgacacatgctttgatgctacagcagaagctgaggcacctttaataacattacatttcgaagccttgtcgatgccattgccaatggaaaacagcttcttacacaccagtgccgggtctcgggcatgcttggccatagcaccggtccccaacaatgtgaacgccgccatgaatgtgatagccaatttgcagcagcagaatcataggattctctttgatgtcatcaattctcgcttgggaa

SEQ ID NO: 234522 - DNA, 411 bp, Gossypium hirsutum
cccacgcgtccgcggacgcgtgggaaaaaaaaacactttcatccacgacagcaaggatttctagggtttcgtctgaatcggtaagcgatggcgatggctgctctcagacgcgaagggaggcgtttcgcccctctgatctctcctcgtccgataaccgctgtcagatcctctcctctctatcctactcttgaggatgagggtcctcttggacttcgtcatatttcgactcaagttgttagaaaccggatgaagagtgtcaagaatattcagaaaatcacaaaggcaatgaagatggttgcagcctcgaagttgagagcaattcaaacaaaaactgagaattctcgtggcctctggcagccatttactgcacttcttggcgatcttcccagtgctgatgttaagaaagaacgt

SEQ ID NO: 234523 - DNA, 311 bp, Gossypium hirsutum
cttccgtttttttttttttttttcccccaactttttgaaattatcccattaagtcttaatctttcaattgggaataatatatcttggaatgattccttcattccaataaaaagcccaattctttgtttttgatgtcaacagaagctgccacaacaaatttccaaagttcaaatttccagccggtggcgcagccgccggatttccggccggaggtgactgtcagtccccataacgggctccgcttttggcagtcatgattgcgggctccatagccggcttgcgtgagcatatggctatgttcccggttgaca

SEQ ID NO: 234524 - DNA, 274 bp, Gossypium hirsutum
tcgtttcttctacataccctccttgtggagaacccatccccctcctttagggtggagcagttaaaaagagaaaatcaaaagtatggcgaccgccactgtccccgccgccgtaaggcagctttctgctaaagaagccgacatccaaatgatgttggccgccgaagtccatctcggtaccaaaaactgtgactttcaaatggagcgttacctcttcaagcgtcgcaatgacgggatctacatcatcaaccctggcaagacctgcgagaaacttaac

SEQ ID NO: 234525 - DNA, 410 bp, Gossypium hirsutum
tcagtgtctcactctctccgtgcttcactccagtttctcctttccctcttcgaagaaaaaatgcgtgagatccttcatattcaaggtggccaatgcggcaaccaaatcggagccaagttctgggaagttgtttgtgctgagcatggcatagatgcaactgggcgttaccaaggagacttggatcttcaacttgagcgaatcaatgtctactacaatgaagccagttgtggtagattcgttcctcgtgctgttctcatggatcttgaacctggaaccatggacagcatcagatctggccctgtcggtcagatttttagaccagataacttcgtttttggtcaatctggtgctggtaacaactgggctaagggccattacacagaaggtgctgaagtaatcgattccgtact

SEQ ID NO: 234526 - DNA, 364 bp, Gossypium hirsutum
  unsure (1)..(364): unsure at all n locations
tggacgcatgggttccgcctggctccgtctgttactctgcggccacctcatggccaaaattcgtctagggcacaagcttggaggctgatcaggctgactgcatctaacccgttgcagacatgtttatcacctctttccctctacggattcgtttagaataagagctgccatggccggcgatgagtcgggggcaaatgcgctggtggaattgtttgctgtagcggcggctcatgcccttgtcttcggcgttatgatatcagccggtcacatatcangcggccatcttaacccagccgtcacgctcgtgtagctatccaggggtcacatcacggtggtccgtgcgatcctctactggatcgatcag

SEQ ID NO: 234527 - DNA, 433 bp, Gossypium hirsutum
aggtgccgtaccggtactcggcagtttccggcccagagccacgcgtactatctaccctctctcccgcaagccccaacttttttttatttcttgtttcatataattgcgttgctgatctaaaatggcgggtcggggcaaaactctcggatccggagcctcgaagaaggcgacatcgaggagtagcaaagctgggcttcaatttccggtgggtcgtatagctcgggtccttaaggctgggaaatatgctgaacgagtcggcgccggagctgcggtttacctagccgctgttcttgaatatcttgccgctgaggttcttgagcttgccggaaatgcagcgagagacaacaagaaaacccgaattgtgccacgccatattcagctagccgtaaggaacgatgaagagctaagcaaattacttggagatgtcacgatt

SEQ ID NO: 234528 - DNA, 200 bp, Gossypium hirsutum
ctagaaacataattaacaatccgaaactcgttcccggaggtggtgctacacaattaaccgtgtctgccacattgaagcagaagagtgcatctgttgaaggcatacaaaagaggccgtatgaagccgctgctcttgcttttgaagccataccacgtacttgggcacaaaattgtgcgtgtaatgtgattcgagctatgact

SEQ ID NO: 234529 - DNA, 371 bp, Gossypium hirsutum
cttccctaaaattttcccagtctcaaccaaactctctctggtgacccttcaaaagaatcaccgccatggcgatgcaaaccggagtcggcttttcgaagattttgatccttgccggcgcaggttacaccggtacgatccttctcaagaacggtaagctatcggacatgttaggcgaattgcagtctcttgtgaagggactggaaaaaaactggggaccaatcagatgattcagatgcccttctggctcaggtgcgtcgtctctcaacggagattaggcaactggcctcagcacggcagataactgttctgaatggggattccggcgttaagttaacctctctggtaatccctgctgctaccttgggggcatt

SEQ ID NO: 234530 - DNA, 421 bp, Gossypium hirsutum
tcaaagctcatctgtcaacccagagccccttctctccgccgaatctcctttttctcccgtaaaaatgtctctggtggccaacgaagattttcagcacattttgcgtgtcctgaacaccaacgttgatggaaagcagaagattatgtttgctttgacctccatcaagggtatcggaaggcgtttcgccaacattgtttgcaagaaagccgatgtagacatgaacaagagggctggtgaactgactgcacaggaattggacaatctcatgacgattgtggcgaacccgaggcagtttaaaatcccagattggtttttgaacaggcagaaggattacaaggatggaaagtattcccaagttgtgtccaatgctctcgacatgaagttgagagatgacttggagcgcttgaagaagatcaggaac

SEQ ID NO: 234531 - DNA, 416 bp, Gossypium hirsutum
gcgaaaccccaacttttatttctattttccttttcccttctctgtctcatttctttttccgccgccgattcctccatcacagccgacttacgtctcaccgattccagtttcccgtcggttcatgcgaagaagctgattagggagttgaatttgtttcctaaaggggaagtcaatgtcgttgacgaacaccgggtttcgttgccggagggtcccaaactggtggagaagcggttcaagttcccaactttggaagtgcccggtggagtttcctttgaggatttgggtcaccatgctgggtattacaagcttcctaattctcatgatgccagaatgttctacttcttcttcgaatcacgcaatagcaaaaaggaccctgttgtaatctggttgactggagggccaggttgtagcagtga

SEQ ID NO: 234532 - DNA, 408 bp, Gossypium hirsutum
ctctcttgcgtgtcgttttcatttcaacctctgccttcttttccattatttttcacccttgtttccatcttctttccgctgacttctcgggtaaatcggtactagatctctgtggtctattgccggaattttcgttcggattccggcgaccccagtcttcgatcctattttctcttcaatccagaatgaatcccgagtatgactatctgttcaaacttttgcttattggagattctggtgttggaaagtcttgtctccttttgagatttgctgatgattcatacatagatagttacataagcaccattggggtagattttaaaatacgcactgtggagcaggatgggaagaccattaaacttcaaatttgggacactgctggacaagaacgatttaggacaatcacta

SEQ ID NO: 234533 - DNA, 409 bp, Gossypium hirsutum
gaaaggccgaacgcaatggaaagaatagaattagatgaagcaatgctacaagggcaagcagagatatggcgttacttgtacagtttcgcagattccatggctcttaagtgtgccgtggagctccgcatagctgacataatacactctaatggtggccccctcactttgtcgcaaatagcttcatgcattaatggtggccttacttcacctgacatcaccacccttgctcgcataatgagattgctcattcgcagaaagattttcaccgtccaccatccttcaaacggtggagatctcttgtacgacctaactcactcatcgagatggcttctacatgattcggagcaaaccctggtgcccatggtattaatggagaaccatccattgcagatggctccttggcactact

SEQ ID NO: 234534 - DNA, 419 bp, Gossypium hirsutum
ctatgtttcatttggaccgtcctatgtacttgctgggatatctttcaagccaaagtcgggtgtatctgatagacaaagagtttaatgttatggggtacacattacttctcagcctaattgagtacaaaactcttgtgatgcgtggagacttggaaagggccaatgaaattttaccttcaattcccaaagagcaccataatagcgtggctcatttcctagaatcacgaggtatgatagaggatgctttagaagtagctacagaccctgattacagatttgagcttgccgtacagcttggtaaattaggtattgctaaggagatagccactgaagttcagagtgagtctaaatggaaagcagtgggagaattagctatgtccactggaaagctacaaatggctgaggaatgcatgaagcat

SEQ ID NO: 234535 - DNA, 416 bp, Gossypium hirsutum
tgcatggtttctcgcactggaaggcacttgcagcgatacgataacctaggccgccgccaagttgtcggttgcattccctatagatacaaatctagcagtgatggaaccatgactgatgacttggaggtacttgtgatctcctcccagaaatgtcaaaaaatgatgtttcccaagggtggctgggagcttgatgaatctagagaagaagctgcattaagagagtcacttgaagaagctggtgttctaggcaatgttgagtgtgaactggggaagtgggacttcataagcaaaagccatggcacattttatgaaggttatatgttccctttgctagtgaaagaagaacttgatttctggcctgagcaaaatctgagacaaaggacatggatgaatgttaaagaagccagggatgtgtg

SEQ ID NO: 234536 - DNA, 410 bp, Gossypium hirsutum
gaaaatatctcaaatctcctcctcctcctcagaaatcttagtatcatcaccatggcctcaaatcccaaggtcttctttgacatgactatcggtggtcagcccgctggtcggattgtgatggagcttttcgcagattgcactcctcgcactgctgagaacttccgtgccctctgtaccggcgagaaaggcgtcggccgcagcggtaagcccctccactacaaaggctcctctttccatcgtgtgatccctaactttatgtgccaaggaggtgacttcacggccggaaacggtaccggaggtgaatccatctacggatccaagttcgctgacgagaacttcatcaagaagcacactggtcccggtattctctcaatggctaacgctggtcccggaactaacggatctcagtt

SEQ ID NO: 234537 - DNA, 391 bp, Gossypium hirsutum
gggaaagatcgattcatcagtcttcttctctgagtagaggttttggatttgtaagcatttacaatgtcttcgtcctatctcccagcaaccactgactcaattgctctggccttagaagccaaaacaccatctgaagccatctcaatcctttaccgtgtactagaaaatcctgcatctgctcccgatgctctacggattaaagagcaggccataacaaatctatctgatcttcttagacaagagaaccgagcagaggagctcagaagccttctgacccaactgaggcccttttttgcactaattccaaaggcaaaaactgctaaaattgtccgtggtataattgatgatgtagctaagataccaggaacatcagatctccagatttctcttt

SEQ ID NO: 234538 - DNA, 409 bp, Gossypium hirsutum
ctcagacttcgatcatcaattttagggttttttctattatttcataatcagattgttgattatccaaaactcaatcttcagatcaggtcttagttttctagttgttgggttctttcgacgagctaagtttcatgtctgatcttgacatccagattcctactgcctttgatccgtttgctgatgcaaatgctgaagactctggtgctggtgccaaggagtatgtgcatattcgtattcagcagcggaatggtaggaaaagcctgaccacggtccaggggttgaaaaaagaattcagctataacaaaattcttaaggacctcaagaaagagttttgttgcaatggcactgtggtccaagaccctgaattaggacaggttattcagcttcaaggcgatcaaagggagaatgt

SEQ ID NO: 234539 - DNA, 416 bp, Gossypium hirsutum
aaagaatcaaatctctgctactgcatagtaaaagagagaaagagcgacaatggaggcagcaagaacagttaaggacgtttcccctcacgatttcgtcaaggcttacgccgcccatctcaagcgctccggcaagatagagcttccttcatggactgatattgacaagccggaaactctaaggactctctccatatgatcctgattggtactatatcagagccgctttcatggcgagggaaatatacccgtggggaggtcttggtgttggtgcctttagaaggatttacggtggggctaagagaaatggaagccgtcctcgccatttctgtaagagcagtggatctgttgctcgccacattcttcaacaattgcagaacgttaacatcattgatattgatcctaaaggtggtaggaga

SEQ ID NO: 234540 - DNA, 421 bp, Gossypium hirsutum
tcgaagccgccccgagaaaggaagcagagggcaagtaaaatgaagaccattctttcttcagagacaatggacatccctgatggggttgctattaaggtgaaggccaagatgatcgaggttgaaggtcccaggggtaagctcatccgtaacttcaagcacctcaacctcgattttcacctcatcaaggacgaggagagcggcaagcgcaagctcaggatcgaggcttggtttggctccagaaagactagcgccgccatccgtactgctctcagccacgttgagaatctcatcaccggcgtcaccaagggttaccgttacaagatgaggtttgtttatgctcattttccgatcaacgcctccatcactaacggcaacaagtccatcgagatccgtaatttccttggcgagaagaaggtgcgaa

SEQ ID NO: 234541 - DNA, 410 bp, Gossypium hirsutum
gctcactctcttattggactgatcgaagtccaagtgcttcttcacttcatcggcgggtattttcagattggtattttacaaattagagataattgtcaaaggatagagccatgagttgttttggctgttgtgaagaagataatatccacaatgccacagacaatggaggccaatacatggttaaaaactcagcaggaaatgttgggggttaccatacatctgaaactgcatcgaagagtgctcaaaccgtgaaggttcagcctattgaagtccctgctattttggcagatgaattgaaggaaatcacagataactatggtaacgatgctttgattggagaaggttcatatggtcgagtttattatggagttcttaaaagtggagaggctgcagcgataaaaaagttagat

SEQ ID NO: 234542 - DNA, 415 bp, Gossypium hirsutum
gcctcactccgccatcttcaataatttcttccgttgatctttgttagagatgaggggtttaattgttcatgatgggaaagatcaagatcggaatcaatggatttggaaggatcgggcgtttggttgcgagagttgctctccaaagcgatgatattgagctcgttgctgttaacgatcctttcatcaccactgaatacatgacctacatgtttaagtacgacagtgttcacggtcaatggaagcatcatgagcttaaggtggaggactcaaagacccttctctttggtgaaaaggctgtcacatttttcggtatcagataccctgagggaatcccattgtctgaggctggagccgagtgggattctttttatggctaacgctggacccggaacgaacgggtctcagttcatcattt

SEQ ID NO: 234543 - DNA, 412 bp, Gossypium hirsutum
caatcatctaaaagaagccctaaaatccttgaatcaggtctgagcttgtgggtgggtaggcctctttgatcaaactaagtttcatgtctgatcttgacgttcaaattcctactgcctttgatccctttgctgatgcaaatgctgaggactcaggtgcgggtgcaaaggagtatgtgcatattcgtattcagcaaaggaatggtcgcaaaagcctgacaactgtccaggggttgaagaaagaattcagctataacaagatacttaaagacctgaagaaggagttttgctgcaatgggaccgtggtccaggaccctgaattaggacaggtgattcaacttcaaggtgaccagcgtaagaatgtatcaaccttccttgttcaggctggcatagtgaagaaggaaaacatcaaaat

SEQ ID NO: 234544 - DNA, 410 bp, Gossypium hirsutum
attttatttttccttttttttttcccacactttttttaaaacccattagctaaaaatgcactgggttctttctgtgttgcttgcagttatcggagttactgcactgctcgttgtaactccggtaagtgggtaccgtccatggccgtacgtaaaacccaacagctccgacttaatgttcggaggctctaagaaatttgagggctcatcggagtttgtacatatgagatatcatatgggtccagtccttactgctcatatcaccatccacccaatctggtacggccggtggcagaaatcacagaagaaaatcatccgtgagttcatcaactcgatctccgccgttgattccaaacacccttcggtggctgggtggtggaagaccgtacagctttacaccgaccaaacgggag

SEQ ID NO: 234545 - DNA, 342 bp, Gossypium hirsutum
ctcatctcttccatttttggcttctctttcagatctcaaagatgtatacatcaaggaagaagatccacaaagataaggatgctgaaccaacagaatttgaggagtctgttgcgcaggcattctttgatttggagaataccaatcaagatctgaaaagtgaccttaaagatctctatattaattcagcagtccaaattgatgtttctgggagccggaaagctgttgttgtccatgtcccatatagattgaggaaagctttccgcaaggttcatgttaagcttgggagggaacttgaaaagaagttcattggcaaagatgtgattcttattgccacccggagga

SEQ ID NO: 234546 - DNA, 371 bp, Gossypium hirsutum
ggaaaacaagaaaagcagagccgcatcactttttgctagctaagctactgtgggagttattgttcttcagaacagcttctgcagtagctaataataacgttatatattatataaattttatacatcctttttaccctacgactccatatataagcaagtaaaaataaatatggctcgctctgtttcttcctttaagttccttggtgcttctgtttttgatgctctttatgtctccatatcaaggagaggttactcaggtgcaccgccggcggcagtgacggctagctttggtaggcctggagcgatggggaaagtggaacgaagatatgcgatgaaagagtcgtcgtcgtcggagacaagggcttattctt

SEQ ID NO: 234547 - DNA, 374 bp, Gossypium hirsutum
  unsure (1)..(374): unsure at all n locations
gggtggagggtctatcatccatatcgtggaccacctgaatcttgaggcattgaggggggcagaggtgctgcgggcgctttatgaatcgtctaaaggaattgcacagaaaatgacantnncgggactacgttacatcaggcagattgcccaggagacaagtggtgaggtgggttacagtctcggcaggcagccggctggactcagaacttttagccaaagattaagcagaggcttcaatgatgcaataaatggattcaatgattatggatggtctataatgaattgtgatggaacggaggatgtgataattgcagttaattcaatcaatagctttagtagcacattaaatcctgccaatgctctctcgttccttg

SEQ ID NO: 234548 - DNA, 298 bp, Gossypium hirsutum
attcctgcttctgataagggcagattctttgcttttggtcgtgtcttttctggcaaaggctcaactggattgaaggttaggatcatgggccccaactctatgcccggggagaaaaaaaacacttgtgtgtaaagagtgcgcaaagaactgactttgggatggaaaaagaacagactcttgaagatgtaccttgtggtaacacagttgccatggttggtttggatcagtttatcaccaagaatgctactttgacaaacgagaaggaagttgatgcccacccaattcgtgcaatgaagtt

SEQ ID NO: 234549 - DNA, 409 bp, Gossypium hirsutum
cttttcttctcttgtgacactgctaatattttttattgtcgtctccggcgttcgaagatcataaaaaaccggagtcgtttcaaatggctacgagaacggatctagatgggaggccaataaagccgatgacgatatgcatgatcggtgccggaggcttcatcggctcccacctttgcgagaaattgatgtcggagacgccgcacaaggtgctcgccttggacgtttacaatgacaagatcaagcacctcctcgagcctgactctctcccttgggctggccgtattcagttccaccgacttaacatcaagcacgattctaggctcgaaggcctcatcaagatggcagatctcgtgataaatcttgctgccatctgtactccggcagattataatacgcgtccactagacac

SEQ ID NO: 234550 - DNA, 415 bp, Gossypium hirsutum
ctcgactctgtctcctccatcgctctttttcatcgatcagatctcttcaaacccatgtgtcaaaacaaccctgcactcattccatccatgacgcttggctcaggaggatccagtgttgtggtgcctcggaacttcagattgctggaggagcttgagcgtggagaaaaaggtattggagatggtactgtcagctatggaatggatgacggagatgacatttacatgcgctcttggactggcaccattattggtcctcataatactgtacatgaaggtcgaatctatcagctgaagctgttctgtgataaagattatccagagaagccaccaagcgtccgttttcattcaagaatcaacatgacttgggttaaccacgaaactggagtgggggaaccaaagaagtttggacttcttg

SEQ ID NO: 234551 - DNA, 381 bp, Gossypium hirsutum
aaacaaacaaaggggcagtttaaaaagatatcattgggcggtctaacaatggcagaggcggcatacatcggggtcgagaccatcaaccgtgattgtcacgattttaagtctcttttctattgttcagacagggattttctcgttcgcaacaacggtgatcaggttaaaatctatagcttgaatgggaagaacgtcggattgtctttatcagcatcttgccgcggtccatgccgttgattcaccccacatttaatcgaggtgtacaccgtgctctcaccgtacggcgatctcgaggtcttttttatttctgcagatcaagatgcagagtcattcaatggttacttatacaagattccatgggtggcaatacctttttctgat

SEQ ID NO: 234552 - DNA, 407 bp, Gossypium hirsutum
tggcggagcagcagcaactagagccatggaccgacctcagtggcaaagtggtgatggtgacgggggcatcttctggtttaggtcgtgacttttgtcttgacttgagtaaagccggctgtcgtatcgtggctgccgcgcgccgcgtcgatcgccttaaatccctctgtgatgaaatcaatcacctcacctttcctttttccggaccccagcctagtggccctcgagctttcgctgtcgagctcgacgtatgtgctgacggatccaccatacagagctctgtgaaagcggcctgggatgcctttgggaggatcgatgctttaataaataacgctggcgttagaggtaatgtgaaggatcctttggaattgactgaggaggaatggaatcaaaacatcaagaccaatcta

SEQ ID NO: 234553 - DNA, 413 bp, Gossypium hirsutum
gaagatcttgactgagagagggtactctttcacaacaactgcggagcgagaaattggtcgtgatatgaaagaaaaacttgcttacgttgctcttgattttgagcaagaattggagactgccaagagtagctctgccatcgaaaagagttatgaattgcctgatgggcaagtgatcacaataggggcggagaggttccgttgtccagaagtactcttccagccatctctgattggaatggaagctgctggaatccatgaaactacttacaactccatcatgaagtgtgatgttgatattaggaaggatctttacggaaacattgtgcttagtggtggatcgaccatgttccctggcattgctgataggatgagcaaggaaatcactgcacttgcccctagcagcatgaagatca

SEQ ID NO: 234554 - DNA, 408 bp, Gossypium hirsutum
gcgctttgctttctctctctttttatggatgggatcatctcctttccttctccttcgtgaaggctacgatttgaagactgtttttgatttccattagcatgcgaattaggccttttcgttataattcatcgcctgaaatatctgttatcgaatacgcttctacttttttttgtttcctgattttgattttagtgataacaactggaaattttgaatgctcgagctgtaatatgggatatttgaattcggttttgcaatcttcaagtcaggttcatgctgaatatggaccggttagcggcggaggccttagccagaatggaaagtttagctacggctgtgcaagctctcctggaaagaggtcttcaatggaagatttttatgaaacaaggattgacggtgttgatggag

SEQ ID NO: 234555 - DNA, 322 bp, Gossypium hirsutum
ggcctctcactgttttccttcaaaaccctaatagctgttcctcgcctcctgaacgggttcaaaattggccggttctgagggattgactttacggggaacattccttcccacaacggcctggggaccagccattgctactccaatcgataactccgacatgatcgtcacttcctcccgcgacaaatccatcatcctttggcacttaaccaaggacgaaaagacctacggtgtccttcgtcgtcgtctcaccggtcactctaacttcgtccaagacgttgtcctctcttccgattctaagttcgctctctctggttcctgggat

SEQ ID NO: 234556 - DNA, 389 bp, Gossypium hirsutum
catctctctgaaccaaaaagtctttagcttttcgcttcgagagagaccatgttggtttaccaggatctcatctccggtgacgagcttctttctgactcattcccctacaaggaaatcgagaatgggatgctgtgggaagttgagggaaagtgggttgtgcaaggagctattgatgttgacattggtgccaatccttcagccgaagatgctgatgaggatgaaggtgttgatgaccaatctgtgaaggttgttgacattgttgacactttcaggcttcaggagcaaccccctttcgacaagaagcagtttgtcgtgttcatgaagaagttcatcaagaacttgacaccgaaactggatgcggaaaagcaagagtccttcaagaaaaacat

SEQ ID NO: 234557 - DNA, 415 bp, Gossypium hirsutum
agaagcccttgatctccgaggaaaggctgctgtagcacaagcagctctggcatataggctctaccagaagaaattctccggtccaagatgggaggctttggtgaaaaagggtgccaagaaacagaggttgctctgggcttcaactagtgtcaagaaccctgcctaccctgacaccctatatgttgctcctctcattggacctgacacggtctcaaccatgcctgaccaagcactccaagccttcatagaccatggcacagtttcaaggacgattgacgcaaacgtgtctgaagctgaaggcatctatagtgcacttgagaagttggggattgactggggcaaagtcggttcacagcttgaagacgagggagtggagtctttcaagaagagctttgacagccttctcgacacattg

SEQ ID NO: 234558 - DNA, 393 bp, Gossypium hirsutum
aatttgctttgaagatcatgttggctatttttcacaaggcatttgctaatccaccagaggagctgaatagtccagcttctcataaatctactaagaagcctaaacagcctgaagaaaccctaaatgatttcctatctcatcaccctcacaacactttctccatgagctttggcaacgctgctgttttggcttatgtccgccatgaacgtgctgcttcagttcatcagaggttgttttgtgggtttgatgacatatactgccttttcttagggagcttgaacaatctatttatgctgaatagacagtatggtctttccaaagggagcaatgaggcgatgtttgtgattgaagcatataggacactaagggataggggtccataccctgctgatc

SEQ ID NO: 234559 - DNA, 360 bp, Gossypium hirsutum
gttcttcaggcatcatactttctcatccattacctattcgcaagccaaaccgggcatgtaggagcattatactctgctttccttgctatgcacttggcggccggagtacctggtgtattagcagtgttggctctcggttacaataccaacctttttggttccataacacattatagcagcggtcaggcggccgtctactatggagccggatatatggagctaccagacgtattcaaaatgggttttgtaatggccattgttaatgccattgtatggggaggtgttggaactttatggtggaaatttttaggcatctactgatttcccagttttaaacttccccccccccaccctatcaag

SEQ ID NO: 234560 - DNA, 329 bp, Gossypium hirsutum
caatttgaagccacctgcctgcccctttctcaattcgccggaatgaagctcatcatggggaccctaaaaggcgggcactttgaaattagggttcagcccaatgataccgttatggctgtgaagaaaaacatagaggatatacaagggaaagacaattatccatgtgggcaacagctgttgattcataatgggaaggtttcgaaagatgaaactactttagctgaaaataaagtatctgaggatggttttctggttggcatgcttagcatgatcaagcatttggtgtcaactggagcgtagtttgctcatcctgcttcatcatttgcatc

SEQ ID NO: 234561 - DNA, 412 bp, Gossypium hirsutum
gttttccttactaccaaatgttattcctcagccatttctctctgtaaatttgagtgtatgtaattctgtatatagattatgattgattcctattgatacataattggtttcgggatggctacttataccccgaagaacattctcataactggggctgctgggtctattgcatcggatggtgccaatcggattgtcctcaactacccagactacaagattgttgtacttgacacgcttgattactgctcatatttgaaaaacctcattccctctgagtcatcgcctaactttaagtgtgagaaaggggatattggtagtgctgaccttgttaactacctcctcattactgagtctattgacacaataatgcactttgcatcccaaactcatgttgataactcgtttgggaaca

SEQ ID NO: 234562 - DNA, 418 bp, Gossypium hirsutum
tccacttcttctcttatttgaactcaaagtcccagctaatattagaatcatgggtggtgtcacttatgactatgagaatacctccccagtcgcccctgccaggcttttcaaggcctttactgttgaagctccgaaagtttggcccacggctgcacctaatgcagtaaagagccttgaggttgaagctaatcctagctctggaagtatcgtaaaaatcaactttgttgaaggccttccattccaatatatgaagcaccagatcggaggacatgatgaaagtaatttttcatacagttacgatttaatcgaaggtgggcctttgggggataagcttgaaaaaattagctatgagaacaggtttgaggcagctgcaggtggagggagtatttgcaagagctcaatgaaattctacactata

SEQ ID NO: 234563 - DNA, 409 bp, Gossypium hirsutum
tccctctcttcttaggtctgctgtatcttagttcttgattaattagccaatcacagcagccatgtctctcctcaatgatctcatcaacctcaacctcagcgacaccactgaaaagatcatagccgaatacatatggatcggtggatctggtatggatctgagaagcaaagcaaggactttgcctggaccagtgacggacccttcaaaactcccgaagtggaactacgatggttccagtaccaatcaagcacctggagatgacagtgaggtcattctttatcctcaagctatattcaaggatccatttagaaaaggaaacaacatcttggtgatgtgcgatgcttacacaccagccggcgaacccattcctaccaacaagagatttaatgcggccaagatctttagccac

SEQ ID NO: 234564 - DNA, 357 bp, Gossypium hirsutum
agagaagccatcggtcaatcagttcgcatacgtggaccctgttcctacgtctatagatgctggatttaatcaatcagataatgcccccttgtacttcaattcagaccagggaagtaactcgatcaattgttccgactatggctggggagaacagggtgccaaaactcctgaaatatcatccattcttgaagcttctgtagagggtgatgagtttcttgaggatgctaaccctagcaagaagctgaaaccaagttccgacaatgttatgcctgccgaagacaactccgcgaagaccttgtcggacgagctgttggctttggacaaccagatgaaatacttccaaatgcggcatttatt

SEQ ID NO: 234565 - DNA, 415 bp, Gossypium hirsutum
caggccctcatttttgtcacaaggtctcgcagctggtcctactttgaacgccctggacttctactagtcagtgcctttctagttgctcagttggtggccactttaatagctgtgtatgcagactgggggtttgcaaggattaaaggtatgggttggggatgggctggtgtaatctggctatacagtgtggtgacttttatcccactggattttatcaaatttgcaatccgctatgttcttagtggaaaggcttgggataaccttttggagaacaagactgccttcactacgaagaaagattacgggaaagaggaaagggaagcacaatgggcagctgcgcagaggactctgcatggccttcaaccacctgaaaccacaagcattttcaatgaaaggagcagttacagggaacttt

SEQ ID NO: 234566 - DNA, 401 bp, Gossypium hirsutum
  unsure (1)..(401): unsure at all n locations
gcaactttgacgcagctgctatttcttttttgtggttttcagcagcagcttgtatttggaagaatggtgagggtgagcgttttgaatgatgcactcaagagcatgtacaatgcagagaagaggggcaaacgacaggtcatgatccgaccgtcctcgaaggtgatcattaatttccttttggtcatgcagaaacatggttatattggggagtttgagtatgttgatgatcatagatctggtaaaattgtggttgaattgaatgggaggctgaacaagtgtggggtgatcagtcctcgttttgatgtcngtgttaaggagattgagggttggactgctcggttgcttacttcaagacagttntgttatattgtgctcacaacatcagctggaattatggacca

SEQ ID NO: 234567 - DNA, 409 bp, Gossypium hirsutum
ctcaaacaatggaagtggtgaagaacttggacatccaaagatacatgggaaagtggtacgagatagcttccttcccatctttctttcaacctaagaagggggagaacaccagcgctttttacactctgaaggaagatgggacggtgcatgtgcttaatgagacttttgttaatggcaagaaagattccatagaaggcaccgcctacaaggctgatcccaagagtgacgaagccaagctcaaagtcaaattctacgttcctcctttcttgcctatcattcctgttactggggattactgggttttatacattgatgaggattatcaatatgttcttggtgggggtcctaccaagaagtacctttggatattatgcaggcagaaacatatggatgaaaaaatctacaacat

SEQ ID NO: 234568 - DNA, 384 bp, Gossypium hirsutum
gcggcttctgcttctatttacaatcttctcactctcctgctcctttctggcatcccttttaccttctccgagctcgttaaagagcagcctctggtgttgaaataccacaatgggccactcttgaaggggaagatcactgttaatctcatttggtacgggaagttctccccaacccaacgctccataatcgtcgatttcatcaactctttgagctccgccgtcaaacccaaggttccgtcggcgtcgttttggtggaaaacgacggagaaatacaagtccggttcctccactttggtcgtgggcaaacaaatcctgctcgaaaattacccgctcggtaaaatccttaagaacccacacttgccggcgttggccgggaaattcaac

SEQ ID NO: 234569 - DNA, 418 bp, Gossypium hirsutum
ttttcttgttccttccttcgccgtctattgcttttagttgcctcgatttcaagtgaatcagaatgggtaaggaaaagactcacattaacattgtggtcatcggccacgtcgattctgggaaatcaaccaccactggccacctgatttacaagcttggtggtattgacaagcgtgtgattgaaaggttcgagaaagaagctgctgagatgaacaagaggtcattcaagtatgcttgggtgcttgacaagctcaaggctgagcgtgagcgtggtatcaccattgatattgccttgtggaaatttgagaccaccaaatactactgcactgtgattgatgcacctggacaccgtgactttatcaagaatatgattactggtacgtcacaggctgactgtgctgttttgattattgattccac

SEQ ID NO: 234570 - DNA, 417 bp, Gossypium hirsutum
ttcatactcatttagcccctttcattagcatcgaaatcactccagttttctttatcactgaaaaatgtcttgctgtggtggaaactgtggctgcggttctggctgcaagtgtggcagtggctgtggaggatgcaagatgtacccagacctgaacgttgccgagatgaccacaactgagactctggttcttggtgtagcaccccagaaagcacactttgagggagctgagatggaattcggggctgagaacggctgcaagtgtggagacaactgcacctgcaacccttgcaattgtaaatgattagagaccaaagccaaagctccctggaagcagagacgcctttgtctttaagaaataatatgttttgttgtttatgtgtttttagaataaagtagccatggcttgtcgtaggtttt

SEQ ID NO: 234571 - DNA, 416 bp, Gossypium hirsutum
catagcagccatggcagtccgtatgcttcttgggttaggtgtcctgctactctgccttgcaaaggtttcatctgatctgaaggcagaagaagttataaccaatgtcggtgaggtgggttctttggttaccagaggcggaaacagaagactgatgctagagattgattgtggaggattatgcaagaaaagatgcagtcaacactcgaggccaaacagatgcaacagggcgtgtgggacttgctgcttgaggtgcaagtgcgtgccaccggggacttcagggaacagggaggtctgcgggacctgctatactggcatgaccacccatggaaacgttgccaagtgcccttaacctttacgtcgcccaatatgtgttgcagccatcaaggggaaaaatgaaatgtttgtttgtgtaatat

SEQ ID NO: 234572 - DNA, 398 bp, Gossypium hirsutum
ctttatatctctgcttaaccctttctcccccaccttcgaatcaaccaaacttgccatttggctatcttcaagtgctctctcataataaactaaagaaccaaaaaaaaaatggttaaagttgcaggtgttttggtttgtcttttgattgtgggcatggatgttggagcagggatacttggcatccaagctgaagctgcacaaaacaaggttaagcacctgcggctgtggatatttgagtgcagagacccgagccatgatgctttcaagctagcgttgggtgcagcaacgttgctgacactatcccacgtacttgctaacctgcttggtgggtgcatgtgtgtttgttctcaagaagagtttcagagctcttccactaacaggcaactctctgtcgcatg

SEQ ID NO: 234573 - DNA, 373 bp, Gossypium hirsutum
tcttatttgaactcaaagtcccagctaatattagaatcatgggtgttgtcacttatgactatgagaatacctccccagtcgcccctgccaggcttttcaaggcctttactgttgaagctccgaaagtttggcccacggctgcacctaatgcagtaaagagccttgaggttgaagctaatcctagctctggaagtatcgtaaaaatcaactttgttgaaggccttccattccaatatatgaagcaccagatcggaggacatgatgaaagtaatttttcatacagttacgatttaatcgaaggtgggcctttgggggataagcttgaaaaaattagctatgagaacaggtttgaggcagctgcaagtggagggag

SEQ ID NO: 234574 - DNA, 410 bp, Gossypium hirsutum
gtaggtgccgactgctccgttctttgtagcaaagcaaagtttgtgaagcatggccgtcgggaagaacaagaggatttccaagggaaagaagggaggaaagaagaaggcagcggatccttttgctaagaaggattggtacgatatcaaggctccttcagttttcactaccagaaatgtggggaaaactctcgtctcccgtactcagggtaccaagattgcttctgaaggactcaaacaccgtgtgtttgaggttttccttgctgatcttcaaggtggtgatgaggatcatgcttacagaaagattcgtttgagagctgaagatgttcaaagaaaaaatgttttgaccaacttttggggaatgaattttacaactgacaggctgaggtctttggtccgtaaatggcaaaccc

SEQ ID NO: 234575 - DNA, 418 bp, Gossypium hirsutum
atatcctctgacctcacggagcttggaaggacaccagtagcagtcgtttctgctggtgtaaaatctatattagatattccgaggacactggaatatttggaaactcagggagtttgtgttgctgcttacaagaccaatgagtttccagctttttttactgaaacaagtggctgcaaggtgccttgtcggttaggtagcccaaaagaatgtgcacagttaattgatgcaaacaggaagcttaatctcggaaatggagtactgattgcggttcccatcgcaaaagaatactcagcttctggaagcttaatagagtctgcaatacaacaagctcttacagaagccagggaaaagaacataacagggaatgctgagactccattcttgctcgctagggttaatgaaataactggaggagcat

SEQ ID NO: 234576 - DNA, 414 bp, Gossypium hirsutum
aaagagcaggaaaacaagaaaagcagagccgcatcactttttgctagctaagctactgtgggagttattgttcttcagaacagcttctgcagtagctaataataacgttatatattatataaattttatacatcctttttaccctacgactccatatataagcaagtaaaaataaatatggctcgctctgtttcttcctttaagttccttggtgcttctgtttttgatgctctttatgtctccatatcaaggagaggttactcaggtgcaccgccggcggcagtgacggctagctttggtaggcctggagcgatggggaaagtggaacgaagatatgcgatgaaagagtcgtcgtcgtcggagacaagggcttattcttcagcttgggcgcctgaccctgttacggtgtattac

SEQ ID NO: 234577 - DNA, 402 bp, Gossypium hirsutum
cctgaaatgccggcagtacaggtggtcatattaaccctgctgtgacctttggattgtttctagcaaggaaactgtcacttacaagggcattgttctatatgatcatgcagtgcctgggtgctatctgtggagctggtgtggtgaagggattccaaggagataaccgatatgagatgttgggtggtggagctaatgttgtgaaccatggctacactaagggtgatggtcttggtgctgagataattgggacttttgtgcttgtttacactgttttctctgctactgatgctaagagaaatgccagagactcccatgttcctatcttggctccacttccgattgggtttgcagtgttcttggttcatttggccaccattcccatcactgggaactgtattaacc

SEQ ID NO: 234578 - DNA, 407 bp, Gossypium hirsutum
ctttctctttagtttacgtttattgtccttttggaatttttgatactaaaaaaaggaagcaacgaagaagggaaatggagggcaaagaagaggatgttagattgggagccaacaagttcacagagaggcaaccaattgggaccgcggctcagagtcaagatgacgggaaagactacactgaaccaccaccggctccatttttcgagcctggcgagttaacctcatggtctttttatagggctgggattgccgagtttgtggcgactttccttttcttgtatatcactattttgactgttatgggagttgttaaggaaaaaactaagtgcccaactgttgggattcaaggaattgcttgggcttttggtggtatgatctttgctcttgtttactgcactgctggcatt

SEQ ID NO: 234579 - DNA, 418 bp, Gossypium hirsutum
gcgtaacgaccttgtaaacactcaaaacgctattgccagcaaacaccgcagaatcccacgcgccacctttttccaccgatctcactcgctacccatggcgtcccccgcgaccattccgatgacgacgtctcaatctacggtcggtggtggtacccaatcacagcccccgatagccacgcctgcgtttagggcgttcctctcgcgcttcacgtcctcgatccgtcaaggactctcccaacgccgtccatgttatgaactcattgatcggtccgccatggcccgtcccgataatctaactgatgcctattcccggatccgcaaaaacctctcttacttcaaagtcaattatataactctactagtggttgtgctcgccttttctatcctatcgcatcccctctctctcctcgtcctcctc

SEQ ID NO: 234580 - DNA, 401 bp, Gossypium hirsutum
gattattcatattattattcctttcttcttctttcattctcaacaatctcttcccgctcttcttccataatactctttctcttcatatataatctttattttcaaacaccctaaatttacaaccacatattccagagaggatttttttttaaaaaatggtgatgaagttaccttatctgggttcttgtttgtttttggttttttttagtttggtttctattgttgcttctgggtctggaaaagggctcccaattctttcattcgatgaaggatataatcagttgtttggggatgataatctagttatccatagagatggtaaagctgttcacttgtctttgaacgaaagaacagggtcggggtttgtgtcacaagacctttacttgcatggttacttcagt

SEQ ID NO: 234581 - DNA, 407 bp, Gossypium hirsutum
accagttattccaggatgctttcttcgcgctaaagctataggtctgatgcctatgattgatcagggtgagaaagatgacaagattattgctgtctgtgccgatgatcctgagtatcgtcactacaatgatatcaaggaactcccacctcaccgcctggctgaaatccgtcgcttctttgaagactataagaagaatgagaacaaagaagttgctgttaatgactttctgcctgcctctactgcatacgaggcaatccaacactccttgaatctctacgcggactacatagtggagagcttgaggcggtaattgtcggttcaccgtgccccgtctatatacaaatatatatattaatatgaatatgaatatgttgctactatacaagaaattcatcgtctccttgtgc

SEQ ID NO: 234582 - DNA, 380 bp, Gossypium hirsutum
acagcctatacgaaccccaagagctcctcatctctttgtttttaccttccatttgaactcaagttcgtcgtcgttttctactctttagccatcaaagatgaccaccatggaaagcttaatcggtttagttaacaggatccaacgagcatgtacggtgctcggtgattacggtggcggcgacaacactttctcttccctttgggaagctcttccttccgttgccgtcgtcggtggtcagagttcagggaagtcttcggtgcttgaaagcatagtcggacgtgattttcttcctagaggatcaggaattgtgacgagacggcctttggtgttgcaacttcataagacagacgaaggttcacaagagtatgctgagtttcttc

SEQ ID NO: 234583 - DNA, 414 bp, Gossypium hirsutum
caagaaaagcagagccgcatcactttttgctagctaagctactgtgggagttattgttcttcagaacagcttctgcagtagctaataataacgttatatattatataaattttatacatcctttttaccctacgactccatatataagcaagtaaaaataaatatggctcgctctgtttcttcctttaagttccttggtgcttctgtttttgatgctctttatgtctccatatcaaggagaggttactcaggtgcaccgccggcggcagtgacggctagctttggtaggcctggagcgatggggaaagtggaacgaagatatgcgatgaaagagtcgtcgtcgtcggagacaagggcttattcttcagcttgggcgcctgaccctgttacggtgtattaccggccggagaactg

SEQ ID NO: 234584 - DNA, 409 bp, Gossypium hirsutum
gcgtctctctcttcatctctctgaaccaaaaagtctttagcttttcgcttcgagagagaccatgttggtttaccaggatctcatctccggtgacgagcttctttctgactcattcccctacaaggaaatcgagaatgggatgctgtgggaagttgagggaaagtgggttgtgcaaggagctattgatgttgacattggtgccaatccttcagccgaagatgctgatgaggatgaaggtgttgatgaccaatctgagaaggcagttgacattgttgacactttcaggcttcaggagcaaccccctttcgacaagaagcagtttgtcgtgttcatgaagaagttcatcaagaacttgacaccgaaactggatgcggaaaagcaagagtccttcaagaaaaacattgaggga

SEQ ID NO: 234585 - DNA, 422 bp, Gossypium hirsutum
aaaacagagcatccactctttttttcttgagtttcctttgtaaattagttcaagctggcgatcgaaaataaagaaaccactgttcgttaaatcaagcccaagaacagaaggataatgggagctggtgggcctgatgaagaagataacaggtggccgccatggttgaaacctttgctgaaagaacagttctttgttcagtgtaaacatcatgttgattttcacaagagtgaatgcaatatgttctgcttggattgcgttaatggcgctctctgttctttctgcttagcttatcacaaggatcatcgttatatccagataaggaggtcttcataccatgatgtgataagagtatctgagatacaaaaatacctagacatatctggagtccaaacttatataatcaacagtgctaagatcgtttt

SEQ ID NO: 234586 - DNA, 391 bp, Gossypium hirsutum
gattaatacctccaccctaccgtgctcgtgcttactacttccattattcctgctatttctgctctggaaatcttctaggccagaagctaagctaagctaaacctgacttctaagacatggatcttcttcactcctttagctcattagctcttcttctgtacctgattgacttaactctgaactctaaaggtgcattaagagcttctttcacattcgtcaaccgatgtggctacacggtgcggcctgggatattagcaaatgcaggcagtcctacactcgacagcactgggttcgagctaccaaaggactcgtctcgttcatttcaagccccaactggctggtccggtcgtttttggggtcgaacgggctgcacatttgacggatcccggtc

SEQ ID NO: 234587 - DNA, 376 bp, Gossypium hirsutum
tgaggaaaatcatgggtgccaaagttctcttcttctttgctttgctttccttttcagctgtgtcggcatttgcacaggatgaggaagaccaaggtcttgttatgaacttctacaaggattcttgtcctcaggctgaagacattatcaaggagcaagttaagctactgtacaagcgacacaaaaacactgctttttcttggctgagaaacattttccatgactgtgctgtccagtcatgtgatgcttcactgctgctggactccacaagaaggagcttgtctgagaaggagacagacaggagctttggcctaaggaatttcaggtacattgagaccatcaaagaagctgtagaaagggaatgttcctgaagtgtttc

SEQ ID NO: 234588 - DNA, 406 bp, Gossypium hirsutum
ccagaaagtaaaaagaacagagcttggatatcctaagctaatgtcggacgaggagcaccatttcgagtccaaggccgacgccggctcctccaaaacctatcctcagcaggccggtactattcgtaaaaacggctacatcgtcatcaaaggccgtccttgcaaggttgtcgaagtttccactttcacgactgggaagcacggacatgctaagtgtcactttgttgggatcgacatcttcactgctaagaagctggaagatatcgttccttcttcccacaaatgtgatgtgccgtacgtcaaccgtactgattaccaattgatcgacatttctgaggatggattagtgagcttgctgactgtaagccgggacactaaagatgatctgaggctcccaactgatgaaaac

SEQ ID NO: 234589 - DNA, 297 bp, Gossypium hirsutum
ctagcttatgatcgtgacgggggggtagcttgttagcccttgggtcccgacccatggtggcaaatggtcagaaagtttgtggcatgaacaaagaaggtttcaaggcatgccagccgagcgtgactggcgggaaccccagcccttcggcggcattgggcttatgttgcatggctttaaacgaagcccacctcacatgcctttgtttcttcaagaattccaagttgatgaatgattatggaattgattttaattgagctaaggacctgtccctgcaatgcaatttgaccaaatttttaa

SEQ ID NO: 234590 - DNA, 417 bp, Gossypium hirsutum
tttaaaatttttgggccaataaatttggaaggcaggattggttaaggcctttagggtggtggtgaggttcaaggcaagggcttccattaatcttcaccaacttcaatagtggaccgggaggagttgacaaaaggggcattttataggggtggaataacccagtttattggcacccttttatttttatacaataatgtgttgacagggatcggatacaaaaattaaggtgacccttataagggcagggaccaatgccggggggttggcattcttggcatttgttgggcttttggggggaagaactttattcttggttaccggaccggttggattttttgggggcacaataacccaacaagggccttttggctttttttggcttggaagggggtcttaagtcgaagcataatttatatt

SEQ ID NO: 234591 - DNA, 372 bp, Gossypium hirsutum
gcgtttgtctcagatctcagaagatggcccgtaccaagcaaaccgccctaagtcggctggtgggaaggctcctaggaagcaacttgctaccaaggccgtccgtaaatctgccccaaccactggtggtgtgaagaagcctcatcgataccgtcctggaactgttgctcttcgtgaaattcgaaagtaccagaagagtactgagcttcttatcaggaaattgcctttccagaggcttgttcgtgaaattgcccaggatttcaagactgatttgcgtttccagagccatgccgttcttgctcttcaggaagctgcagaagcataccttgtgggtcttctttgaagacaccaacctgtgtgcgattcacgccaagc

SEQ ID NO: 234592 - DNA, 219 bp, Gossypium hirsutum
atcgtcaataaggggacggtcgcttctgttcaaaccataaacggggccaaatatggcgggcgagaagcaatcgagtcgggtcaatgcttcggccggaagaagacggcggtagccgtaacgcactgcaagaggggccgtggtttgatcaagatcaatggttgtcccattgagcttgttcagcccgagatccttccttttaaggccgttgtggccaatcct

SEQ ID NO: 234593 - DNA, 392 bp, Gossypium hirsutum
gctaaccatgagctacttaaccatttcccaaatctcctccctcctcttctttagcgtccttttcatttccgctcatgcagcgcgctttgaaatccgcaatgagtgctcctacaccgtctgggcagcagcctctcctggtggtggccgtcgcctagaccctcggcaaagttggaccatcgatgtgcctgctggcactgctatggctcgtatttggggtcgaaccaattgcaatttcgatgccagtggtaggggtcattgccaaaccggtgattgtggtggactccttcaatgcaaaggttggggtgtacctccaaacaccctggctgaatatgcacttaaccaatttggaaacatggatttctacgacatttccttagttgatgggtttaaca

SEQ ID NO: 234594 - DNA, 427 bp, Gossypium hirsutum
atactgcagaaatctccaaagccagaatggtttcaaaatcacatgatgtggagtcctcttgggatgatgaattcaaaaaactggtgcaaaacttccccaaagagagaagctgggcaggatccaatctttatttctatcaaggtttttggtgcccctctcttgttctaaaagcttttatttctttccagaaacattttcaagcatttaattctgatgtcatcgttgctacttttccaaaatgtggtactacttggctcaaggccttgactttctccactctgtatcgcaatcagttcccatgggatgaaaatccattgctcacctttggccctcaccaacttgttcgtttcttcgagtatgatctttacttgaacaacccttttcctgatcttcaaaatgtttgtgcttatcagccaaggcttttttc

SEQ ID NO: 234595 - DNA, 415 bp, Gossypium hirsutum
gtcggttccttacctttcctacgatgccatctcgccgtagaacccttttgaaggtcatcatcctcggcgatagcggggtagggaagacgtctttgatgaatcaatatgttaataagaagtttagcaatcagtataaggcaacaattggggctgattttttgacaaaggaagtgcagtttgaggataggcttttcaccttacagatctgggatactgctggccaggaaagattccagagcttaggtgttgctttctaccgtggtgctgattgctgtgttcttgtatacgatgtcaactcaatgaaatcattcgacaaccttaacaactggagagaagagtttcttattcaggcaagcccttcagatccagagaatttcccttttgttgttttgggaaacaaagttgaccttggatg

SEQ ID NO: 234596 - DNA, 399 bp, Gossypium hirsutum
cgaaaacctaaagattctctctcccaaaccaaaccttcaaatttcagcaagagagagagagagagagaacttacatagctcagatttcgatcatcaatttagggtttcttagttcgatccccgattacccaatacccaaatttacagatcaggctgagtgttctagttgttcggctgtttctatcctctaagtttcatgtctgatcttgacatccagattcctactgcctttgatccgtttgctgatgcaaatcctgaaaacgctggtgctggtgccaaggaatacgttcacattcgtattcagcagcggaacggtaggaaaagcctgaccactgttcagggattgaagaaagaatttagctataacaaaattctcaaggacctcaagaaagaattttg

SEQ ID NO: 234597 - DNA, 412 bp, Gossypium hirsutum
cttctctctttttctcattcattctttagtttcaatatcaaagcaaaaatgggttcttcttgtaatgttgtttcaatggccttactggcttgtttggtgttgaactccttggtttttgttgcccacggtggtgacttttaccaggatttcgacctaacatggggtgacagaagaggcaagattttcaatggtggcaagctcttgtctttgtctttagacagggtttcagggtctggttttcaatctaagaaagagtatttgtttggaaggatcgatatgcaactcaagcttgttgctggcaactcaactggcactgtcactgcttattatctgtcatctcaagggccaacccatgatgagatagactttgaattcttagggaatctgagcggtgacccttacattttacaca

SEQ ID NO: 234598 - DNA, 410 bp, Gossypium hirsutum
caagattaagttggttcctttgaaccttcaaaatagacctgcttggtacaaggaaaaagtttaccctgaaaacaaggtgccgtccttggaacataatggcaaagtcattggggagagtcttgatttgattaaatatgttgatagcaacttcgaagggccgtctcttctacctgatgatgctgacaaaaaggagtactttgagacgacgttatcacacatggacgaatttctagggctggtgtatgctacatttaaaggagactcaacaaaggatgctgatgctgcttttgatcacttggaaactgctcttgcaaaatatgatggtccattcctcctaggcaacgagtttactctggcggacattgccttcattccttttgtcgaaagggttcagatctacttaatcagag

SEQ ID NO: 234599 - DNA, 359 bp, Gossypium hirsutum
aagcaaccgttgttttactcaaaaagatccctctccaacaatggcttctaatcccaaggtcttcttcgacatgaccgtcggtggccaaccagctggtcggattgtgatggagctctttgccgattgcactccccggactgctgagaacttacgtgctctctgcaccggcaagaaaggggtaggccgtagcggcaaacctctccactacaaaggctcatccttccaccgggtgatccctaatttcatgtgtgaaggaggcgactttaccgcctgaaacggtaccggaggtgaatgcatctattgagacaagttcgcggacgagaactttatctagaagcacacgggacctggcattcttt

SEQ ID NO: 234600 - DNA, 420 bp, Gossypium hirsutum
ctgaatctgagtttgaggatgggaaattggatattcagaatactggtgtacctcttgtggatcattgccatggagaatttgatataagcacattgcagatcattaaaaatgaagatctggaagagctaagggagttgggttcgggtacgtttgggactgtctaccacggaaaatggagaggaacagatgttgccatcaagcgaataaaaaaaatctgtttcactggtcgttcatctgagcaagagagattgactgtggagttctggcgtgaagctgacatcctttcaaagcttcaccaccccaatgtagtggccttttatggtgtggtgcaagatggacctggaggaacactagccactgtcacagagttcatggtgaatgggttttttagacatgtgttgcttagcaaagacaggcaac

SEQ ID NO: 234601 - DNA, 404 bp, Gossypium hirsutum
ctcagatcagaactagagagtttacatcctggtaagaggttgagtcgccatggcttcagcttcctccaattcactatcaatctcaccctcatccaccctcgtggatgccaaagctcctcgtcaaccaactgctgcatccccacaatgtgtcactcttcctactcttcctcccccacccgttcagtcccagagtcgtccctggaagaccactgcctactgtcgcaagattgctcgaaatgtgatggctatggccactggtgagactttggccacgcgtgaagctccaaccgaagttaccccaactgagctgacagagtttatcaacaaaatacaagaaacctgggataaagttgaggacaagtacgcagtgagttcacttgcttgagcaggtctggttttggtct

SEQ ID NO: 234602 - DNA, 331 bp, Gossypium hirsutum
agctacttaaccatttcccaaatctcctccctcctcttctttagcgtccttttcatttccgctcatgcagcgcgctttgaaatccgcaatgagtgctcctacaccgtctgggcagcagcctctcctggtggtggccgtcgcctagaccctcggcaaagttggaccatcgatgtgcctgctggcactgctatggctcgtatttggggtcgaaccaattgcaatttcgatgccagtggtaggggtcattgccaaaccggtgattgtgggggactccttcaaagcaaagggtgggttgtaccttccaaacacctttgctgtatattccccttaa

SEQ ID NO: 234603 - DNA, 420 bp, Gossypium hirsutum
tagcagccgatggagaggctgaatctgaaacacaagctcggcgataaatggatttcaaccctagccagcatatggatccagtgcaccagcggttcactctacaccttctccatctattccccaattctcaaatccacccaacgctatgatcagtcaaccctcgacacggtttccgtcttcaaagacatcggtgccaactgcggcgtcctttccggtttcctctacactttcgccactccatctaaccgccgcaacgcttattttggtggaccctgcttggtcctcgcggctggtgctatccaatgctttatgggctacttcctcatctgggcttccgtggttggattgatcccttgcccttccggtgtagggatgtgcttcttcgtgcttttggcagcgcatgctcagactttcttaata

SEQ ID NO: 234604 - DNA, 390 bp, Gossypium hirsutum
gcggcgaagcgatttgcaatctcaactcaccgtttctcacgattggattctccttaaaatcatggctgctcagattagcaagaagcgcaagtttgttgcggatggagtgttctacgcggagctaaatgaggttttgacaagggagcttgctgaggatggatactccggagttgaagtcagagttactcctatgcgtactgagatcatcatcagagctactcgtactcaaaatgttcttggtgagaagggtagaaggattagagagttgacttctgttgttcagaaacgattcaagtttccggagaacagtgtggagctctatgctgagaaagttaacaacaggggtctttgcgccattgcacaggccgagtccctgcgatacaagcttct

SEQ ID NO: 234605 - DNA, 416 bp, Gossypium hirsutum
gatcgcgggtactactcagtcgagaccgtttcacttctagtggccctcaaagtccgatatagagatagaataacaattcttagaggaaatcatgagagccggcaaataacacaagtgtatggtttttatgatgaatgcttgagaaaatatggaaatgccaacgtgtggaagtattttactgacctgtttgattatttaccactcacagctcttattgagagtcagatcttttgtttgcatggaggactttccccatctttggacacgttagacaatattcgagcattggaccgtatacaggaggttcctcatgaaggaccaatgtgtgatctcttgtggtctgatcctgatgaccgctgtggatgggggatctctcctcgtggagctggctatacatttggacaagatattgcgac

SEQ ID NO: 234606 - DNA, 413 bp, Gossypium hirsutum
aaaaaatctcaaattcccttatttgggttgatatatagtattatatatatatatttacaagaatggtagcttcggctatttcagcttctttcaatctctctctctgtactcaatccagacccacttctatttcatccctttctcccaaactcgacgaagttgatagtctctgcattgccatccccttatggagactcttctacaatggggttatctagtagaactgctgggctacctatgaagatcaacaagaagggcttacttgaatccaatccaagctacgatgcaatacaagctaaaacggggaatccacctgtgatgccagcagtaatgactccaggggggcctttggacctttcaactgtgttattccgaaatcgtatcatcttcattgggcaaccagtcaattcaca

SEQ ID NO: 234607 - DNA, 201 bp, Gossypium hirsutum
tagcagccgatggagaggctgaatctgaaacacaagctcggcgataaatggagtggagccctagccagcatatggatccagtgcaccagcggttcactctacaccttctccatctattccccaattctcaaatccacccaacgctatgatcagacaaccttcgacacggtttctcgtcttcaaagacatagttgccaactg

SEQ ID NO: 234608 - DNA, 374 bp, Gossypium hirsutum
gaaaacaaatatcattgcattaggtgcaaatcttatgtaaaagcaagaaagaagtggacggtattagagtcacctaatattcttaccattgttttaaagaggttccagtctggtaattttgggaagttaaataagtcagttcaatttcctgaggtccttgatttggccccatatatgagcggatcaagttcgaaggcggtcatatacaatctctatgctgtggttgttcacttggatgttatggatcctgccctttcaggccattacgtatgttacgtgaagagtttccgaggggaatgtttaaggattgattaacagcacggtaataccaatgtcattggagagggttttgttcgaaagggcgtacatgctct

SEQ ID NO: 234609 - DNA, 417 bp, Gossypium hirsutum
caacaaacaagattcaaaatgtgttacagcgggcaactgttgacagcaactcacaaattgggaccatatttcatattctccagacaaaggaatctcctcctacctatttccacaccaacaaatttacttctgctttccaagaaatcgtggatgcatatgggattgcgaagtatcaagaagcaaatcctggtgtattcacaatcatcacattccctttcctttttgctgttatgtttggtgactggggccatggtatatgcctgtttttggcaacatcatatttcataatcaaagaaaaaaagttttctagtcagaaacttggagacatcactgagatgatttttggtggtcgctatgttattatgatgatggcattattctcaatctacacaggattgatatacaatgaaatttttt

SEQ ID NO: 234610 - DNA, 415 bp, Gossypium hirsutum
ctctcagtctccctttctctttagatctcataaaagctctaatctgatggctgctaccatcgtttccattaaagctaggcagattttcgacagccgtggaaatccaacggtcgaggttgatgtggaaacatccaacggtaaaaaggctagagccgcagttccaagcggtgcatccactggaatttacgaggctcttgaactgagagatggaggttccgattaccttggtaaaggtgtatcaaaggctgttgctaatgttaacacgattatcgggcctgcattgattggaaaggatccaactcagcagactgctattgacaatttcatggttcaacaattagacggaactcaaaacgagtggggttggtgcaaacaaaagcttggagcaaatgccattcttgctgtgtcccttgca

SEQ ID NO: 234611 - DNA, 375 bp, Gossypium hirsutum
tattccttcatttctttaaatacttccatttttttgattttttttaagtgaaggaacagtgaaaagcaacaggaaatggcaaatatagatatcgatgggatcttgaaggagcttcccaatgatgggcgtatccctaaaaccaagatcgtttgtactttgggtccggcttcacggtccgtacctatgatagagaagctgttgagggctgggatgaacgttgctcgcttcaatttctctcatggcagtcatgagtatcatcaagagaccttggataatcttaagtctgctatgcacaacaccggcattctttgcgcggtcatgcttgacaccaagggccctgagattcgaactggattcctgaagatgggaaagctg

SEQ ID NO: 234612 - DNA, 422 bp, Gossypium hirsutum
gatcagtatcacttgtaagctttacagggaaaaagggggaaaaaaagtgcggatcaagcatagatggaaaacatgggagttttaggcaaggtggtggattaccttctattgttatcattctttagcatcacattaacagctcagttggacatccccgagtccatcctcccccacgcctacaatcccttctatcaagtttataccacgttaacccaggattatttggtgcttgagcagcctggttttttcaaggcacttatgacgttggaacttgtttaccaactccctctcgctttgcttaacatctatggattgttatactccaagccctggttcaacaccacctgcctcctctttggtgcctctatcgttgcctctacgacagctatggtgggagacattctgaattcccagaaggcatc

SEQ ID NO: 234613 - DNA, 414 bp, Gossypium hirsutum
ctctttaaagaaaaattggttttcgattccattttcaatttatatattttggattagattcggttggtcttagggaaaaacaaaggaaagggcaatgtcaaccccagcaaggaagaggctgatgagagacttcaagagactacagcaagatccacctgctggtattagtggggctcctcaagataataatatcatgttttggaacgctgtcatttttgggcctgatgatactccttgggatggcggtacgttcaagctgactttgcagttcatggaggattatccaaataagcctccaaccgttcggtttgtctcacggatgtttcatccaaatatctatgcagatgggagtatttgtctcgatattttacaaaatcagtggagtcctacatatgatgttgccgctatactcac

SEQ ID NO: 234614 - DNA, 375 bp, Gossypium hirsutum
ccgaaccttttgaagaacgaaaagcaatggcttcattcgagcaagcgccgcccggaaatgcgaaagctggggagaagatcttcaaaaccaagtgcgcgcagtgtcacaccgtagataaaggcgctggtcacaagcaaggtcggtcagatctgattttgttcttcattgaattcaggccaaatttgaatgggcttttcgggaggcagtccggcacaactgcgggatactatgattgcggtgcatcagagcactgcttacatgttttcaccggacacagtcggtgactacgagatgtgtccttgctatgctagcttgaccacccacggtggccgacgcaagtgcccttgagtgctaattgacaatcggaacgaatct

SEQ ID NO: 234615 - DNA, 419 bp, Gossypium hirsutum
aagaaccaaacacggtttctctattattttcttgtcttacttatggccgtcgttaaggctttcattgcttcacttctcatctctcttctccttctccaacttgttgctgctgatcaactggtgacaagtgccagcaagcgcaagggaactgccccccctgcgaaaattgactgcggcggggcttgtgcggcgaggtgccgattatcatcgaggccacacctatgcaagagggcatgcgggacatgttgcgcacgctgcaactgtgttccaccggggacagccggtaaccaagaaatgtgtccttgctatgctagcttgaccacccacggtggccgacgcaagtgcccttgagtgttaatcgacaatcggaacgaatctttctcttttgatgtttgtatgaaattaataaacgtatgcat

SEQ ID NO: 234616 - DNA, 346 bp, Gossypium hirsutum
ctcaaagatatcactgcaagaaaaaaaaaaaaaccagacatggcttccaacactgtggcatccgctgctcttcttcttaccttgaacttgttgttcttcactttggttagctctacctacgtgccttgcccaccaccaccaaagagccacaagcctacccacaaaagcccaccctcggcacctgaacagccaggcacttgccccagagatgcactgaaactaggcgtttgtgctgatttgttgggctcactgcgcgttgttgttggaccgtcgaggaccaaacgcagctctctcatttaaggttgggctgatctcgatgctgctgtttgcctttgcactgctatta

SEQ ID NO: 234617 - DNA, 425 bp, Gossypium hirsutum
gtaacggtttggtattgggcacctgggcatgcccgttcgagctgagggtgaagatggcactttacctcaaatctgtcacttctagaactcagaggaaaatttggccggaatccaaaagcgaccttatcctcaaatctacccttgttaatgggaaagtcccagtcctcatccatggccataatcccatctgcgagtctctaatcatcgcatgagtacatcgacgaggtttggaccacctctgctttttacatcctccattctgatgcctatgaacgcgcccagacccgattatgggcggcctatgtcgaagataagttttccactgccttaagaagagtgttgtttggtgctacagaggaagataaaagggcagccctggccgaagtatcagaagggatcgtgctgttggaggaagtctttgtgaa

SEQ ID NO: 234618 - DNA, 362 bp, Gossypium hirsutum
ttcagaaagaaataaaggaagaagaagcaatggccactcttacagtgcccacgacagttccttcggtgtctgaagattgtgaacagctaagaaaagccttttcaggatggggaactaatgagggcttaatcatagatatattgggtcacagaaatgccgagcaacgaaacttgattcgaaaaacctacgctgaaacctatggagaggatctcctcaaggcactagacaaggagctctcgaatgactttgagaggctggttttgctttgggctcttgatcctgctgaacgtgatgcccttttggctaatgaagccaccaaaaggtggacttcaagcaatcaggtccttatggaaatagcttgc

SEQ ID NO: 234619 - DNA, 416 bp, Gossypium hirsutum
  unsure (1)..(416): unsure at all n locations
gtttaaaatataagaaaaaaaatcatacgcaatgagcactgctggtcaggttattcgttgcaaagctgcggtggcatgggaggcggggaagccactatcgatagaagaagtggaagtggcaccaccccaaaagcatgaagtccgtattaagattctcttcactgctttatgtcacactgatgtatactactgggagtgtaagggttacactcctctgtttcctcgtatacttggtcatgaagcctcanggatcgtggagagtgtgggtgagggtgtgaatgatttgaaacctggagatcatgtgctccctatcttcaccggagaatgcaaagaatgtcgccactgtctgtcagaagaaagcaataacatgtgcgaactgcttaggatcaactgcgaccgaggtgttatgcttgctg

SEQ ID NO: 234620 - DNA, 375 bp, Gossypium hirsutum
gatttcctttccttttctcaccggaaaatgaaaaacatgggcgactttccgacggtgctagtcgtcgggcctttgatcttcagttgtctttcctatgttagatccgacgctttcgatcaccgttacaaggacggtgaccctgtacctctttacgccaataagggtggcccctttcacaaccccagtgaaacctatcgctacttcgatctacccttctgttctccagatcatgtaacggagaaaagagaagctttaggtgaggttttgaatggagatcgactcgtgagtgctccttataaattgaattttaaagaggaaaaagattcttctgttgtttgtaagaagcacgttttaaaagatgagggtggctttttt

SEQ ID NO: 234621 - DNA, 406 bp, Gossypium hirsutum
gcgctgtccacaacactgaaaatgttgccgttcgacacaatcgaggaggctgctacattattgggacggaacctaacggtggccgagacgatgtggttcaagtactcggctaaaaagtcggattactatctttactgccacaacatgttgtttttgttcctcatattttctgtggttcctttgccgctcgtttttgttgagatgatgagatctttgggtttcgataaatacaagattcaacccaaagttagcctgtcgttgcctgagatgttcaaatgttacaaggatgttatgcggatgtttgttcttgttgtgggtcctttgcagttagtctcttatccttcaattaagattatcgggattcgaacagggctgccattaccatcgttgtgggagattgtggcac

SEQ ID NO: 234622 - DNA, 325 bp, Gossypium hirsutum
atctcgaagcttccctttccgttttagatctcaaaattcaaaaggctctctttttcatctcatggctgctactattgtctccgtcaaagctaggcagatcttcgacagccgtggaaatcctacggttgaggttgatgtggaaacatcgaacggtataaaggctagggccgcagttcctagcggtgcatccactggaatttacgaggctcttgagttgagagatggaggttccgattacctcggtaaaggtgtatcgaaggctgttgctaatgttaacacaatcatcggccctgcattgattgggaaggacccaaccgagcagact

SEQ ID NO: 234623 - DNA, 209 bp, Gossypium hirsutum
gcctgcgttttttttttcatttctctgaaccaaaaagactttagcttttcgctgggagagagaccatgttggtttaccaggatctcatctcccgtgacgagcttttttctgactcattcccctacaaggaaatcgagaatgggatgctgtgggaagttgagggaaagtgggttgtgcaaggagctattgatgttgacattggggccaat

SEQ ID NO: 234624 - DNA, 382 bp, Gossypium hirsutum
gcatttttcacaaaaaatgagagctccagccttatcattttgctctaatgtattcccaggctcaactccgcagtgtgaaaagcaacctggcagtggcactgccatttttccaagagcccaatggggttgccgtggctccaatagttatcagcgcctcaaaaaaaattagtttccgaagcaactgcaacaaaaggcaaccccggtggtggtggcggcggcgaaggcaccggtggaggtgactgagcagcattgtaacaagggaagtgtttgaagagatgcttccgtatagaaacgatccttgttgccctgccgctgggttctacacctatgatgctttaatggaagctgcaaaggcttattctgcttttgctgcaaccggcga

SEQ ID NO: 234625 - DNA, 225 bp, Gossypium hirsutum
caatggtgtgcatacccaaggcgaccatggacgacctactggctatgcaagcttgcaacgttgctttgccttcccgagaattaccagatgaaatactatttctaccacatcctctcttggcctcagcttttttacgtcgccgaggactacaacggccggatcggcgggtacctcctttctaagatggaggaccaaagcaacgagtgccacgggcacattaccttt

SEQ ID NO: 234626 - DNA, 378 bp, Gossypium hirsutum
gccgacaatgtgggttcgaatcaacttcagaacacttcgcaaaggtctttgagggagctcagattgttctcatgggtaaatacacagtgataacacggtcggcccctgtgcgctctgagaaacccggaacccggttttcttttaaccttatccccttgcttcagggaaatgttggtttgatttttaccaagggtgatttgaaggaagttagtgaggaagttgccaagtacaaggttggagctcctgctcgtgttggtctggttgcacccattgatgtggttgtcccacccggcaacactgggcttgaccctacacaaactttttttttccaggtgcttaatattccaaccaagattaacaagggtactgttgaaatta

SEQ ID NO: 234627 - DNA, 383 bp, Gossypium hirsutum
atccgcaatgagtgctcctacaccgtctgggcagcagcctctcctggtggtggccgtcgcctagaccctcggcaaagttggaccatcgatgtgcctgctggcactgctatggctcgtatttggggtcgaaccaattgcaatttcgatgccagtggtaggggtcattgccaaaccggtgattgtggtggactccttcaatgcaaaggttggggtgtacctccaaacaccctggctgaatatgcacttaaccaatttggaaacatggatttctacgacatttccttagttgatgggtttaacatccccatggtgtttggtccaactaatggcggttgtcacaacattcggtgcactgcaaacattaacggacaatgcccgaatga

SEQ ID NO: 234628 - DNA, 427 bp, Gossypium hirsutum
tgcttgaaaatggcgaaaccatcgagagaagccatttccatggcttcaacctcgccgtcgtctctctctccttcgaaggtacccatggagctccacgtatccaaccgtcaaaagctcctcaaatctcttcgccaacacctctccaagtcctctcgcccccatcatggcttcgttctcctccagggtggcgaagagcaaacgcgctattgcaccgatcacatcgagctgttcaggcaagagagttacttcgcttacctgtttggtgtgagggagcctggtttctatggtgctattgacattgcaactgggaaatccattctttttgcgcctaggttaccagctaattatgctgtttggttgggggaaataaagccagtttcctactttcaagaaaggtatatggttagcatggtctactacactgatg

SEQ ID NO: 234629 - DNA, 101 bp, Gossypium hirsutum
tacaatctaaacttcctggagctccgcaattccttctttgtctgcttcctgataggaaaaactctgatctttatgggccatggaagcggaagaatcttttg

SEQ ID NO: 234630 - DNA, 416 bp, Gossypium hirsutum
ggcaagttagatgttcttacaagtcttcaaaaccttgtttcacttacttctcaggtgagttgccgaattcatctttttttccgaaaactcccattatgtgaccttgaatcaaacaaaggcctatatatctccaatggtgttgtatcttcttctgatcttgaacattcgaggcatgttggaccagcagtgaagctagtgatgtcgatcctcataagtgccagtgtgatcctagtactactagctatctacgcgttaatccgtgctcgatttttcaacaatggccttatggaagattatacttgggaagtgactctgtatcagaaactcgacttctcgatcgatgacatagtccacaacttgacatcatccaaccgtgaccgcactgggagcttcagggttgtatacagaggaacgat

SEQ ID NO: 234631 - DNA, 328 bp, Gossypium hirsutum
  unsure (1)..(328): unsure at all n locations
gaaagaatatatcaaacaaaaagtcacaaaccagagtaaaccctaagaacactgtcggcggcaatggcaacttacgatctaaccccgcgtatcggcccgaacctagacaggcacttagtgtttccattgctggagttcttgcaagagcgacaactatacccagatgaacagatcttgaaagcaaagatcgagcttttgaacaagacaaatatggtcgattacgctatggatatccataagagcctttaccacaccgatgatgttcctcaggacatgttcgagaggagagtcnaggttgtcgctcgtctcaaagctttggaagatgccg

SEQ ID NO: 234632 - DNA, 307 bp, Gossypium hirsutum
aaacaccctttaacctcatatgtggtgtcccttacactgccctacctatagccaccgtgcatctctgtcgacacctacatccccatgctcatgcgccgcaaagaaagaaaagactacggaactgccaagtccatcgaaggtgtttacgaaaagggtcaagtttgtttggtgggggaagacctcgtaacgtgcggtgcatcggttctcgaaacggcggcaccgctttgggctttgggtatcaacgtaacggatgccatcgtgggtatagatagggagcaaggcgggagggaaacggtggaggagaatg

SEQ ID NO: 234633 - DNA, 240 bp, Gossypium hirsutum
atcagataaaaatatcttattctacaatattttccgatcaaatcgagatccccgcgaaaatgaacgacggagatgtttccaggcagattcagcagatggtgagattcatccgccaagaagcagaggagaaggctaacgagatctctgtttcagcggaagaggaattcaacatcgagaagctccagttggtgggggcagaagagaagaagatcaggcaagagtacgagaaaaaggagaagc

SEQ ID NO: 234634 - DNA, 373 bp, Gossypium hirsutum
caaaaatagtgatatgtataacgagtggaagattgaactgaaagctatggcagaccgaattattagcatgcggaaacaactatttgatgcttaaagtgctaaaggacttcaggggactggagtcacattataaaagcaattgggatgtttactttcacaggattggacagtgatcaagttggtttcattgtcaaggggtaccacaattacatgacatctgatgggaggattagtatggcaggtcttagctccaagactgtgcctcatcttgctgatgctatacatgctgcagtgacccgtggctgttagaaagcaaattttaaagttctgtagcaagtactttttgggttttagccccatccatggcatgact

SEQ ID NO: 234635 - DNA, 181 bp, Gossypium hirsutum
atatactcaaggcagtgatgagaggaataaaactaccaacaccgtggcactacaagaaggctttaatgcgtgaaccctggctagtggagaacgggttgaaggggtctagcaaggagattcgccatggcaggactgcacacaacatgtcgtcttcgtcgttgcagaaaaaatcggacctgac

SEQ ID NO: 234636 - DNA, 371 bp, Gossypium hirsutum
cccaaatctactccctcctcttctttagcgtccttttcatttccgctcatgcagcgcgctttgaaatccgcaatgagtgctcctacaccgtctgggcagcagcctctcctggtggtggccgtcgcctagaccctcggcaaagttggaccatcgatgtgcctgctggcactgctatggctcgtatttggggtcgaaccaattgcaatttcgatgccagtggtaggggtcattgccaaaccggtgattgtggtggactccttcaatgcaaaggttggggtgtacctccaaacaccctggctgaatatgcacttaaccaatttggaaacatggatttctacgacattttcttagttgatggggttaacaacccc

SEQ ID NO: 234637 - DNA, 343 bp, Gossypium hirsutum
cgacatcccagtcaagacactgttgacggttattgaaggagcggaatctgacggagatgtgttagttttccctgaaatgatcaaatacaagggtttggcggactccgatgtggatggttttgttgaggatgtgcttgtgaatggcaagccgtgggcttctggagttcaggaaacattgactggttcatatatctttgtgtgtgctcacgggaatcgggacaagagatgtggtgtttgtggaccagctctgattcaaaagctgaatgtggagattgagttgcgtggactgaaggatcaggtgtttgtaagtgcttgctctcacattggagggcacaagtatgct

SEQ ID NO: 234638 - DNA, 331 bp, Gossypium hirsutum
  unsure (1)..(331): unsure at all n locations
ctttttctcattcattctttagtttcaatatcaaagcaaaaatgggttcttcttgtaatgttgtttcaatggccttactggcttgtttggtgttgaactccttggtttttgttgcccacggtggtgacttttaccaggatttcgacctaacatggggtgacagaagaggcaagattttcaatggtggcaagctcttgtctttgtctttagacagggtttcagggtctggttttcaatctaagaaagagtatttgtttggaaggatcgatatgcaactcaagcttgttgctggcaactcagctggcactgncactgcttattatctgtcatc

SEQ ID NO: 234639 - DNA, 374 bp, Gossypium hirsutum
gagaagtcgagttggacgatgtctggtttgcctatccttcccgtccgaaccatatggtactcaagggaataacacttaaactgcaaccaggatcaaaagttgctcttgttggccctagtggtggaggaaaaagcacgatcgcaaacttgatcgaaagattttatgatccaattaagggaaagattctattaaatggggttcctttgctagaaatatcacatgaacatttttatagaaagatcagcattgtaagccaggaacctgtccttttcaactgctcaatagagaaaaacatagcttacggatgcgaaggccgagtcaatattaccaatattgaaaacgcagcaaaaatggccaatgcacatgaattcata

SEQ ID NO: 234640 - DNA, 369 bp, Gossypium hirsutum
ttgttggccaaatcatgaccactctcgtgaccggtgtgtttctcctcctactatccggcggcggcgtcgtatccgccgctagatatatcaccggtgatggtctccgggtaccttcggaagcttcaaggttcttccgatggaggagcgatgatgatgaagttggtggcacaagatgggcgggcctgattgctggatctaatggatattggaattacaggcatcaggctgatgtttgtcatgcttatcaactcctaaggaacggtggtttgagagaggaaaatatcattgtctttatgtacgaggatatcgctttcaatgtagaaaaccctaggcctggtggtatcattaacaatccttatggcgatgatg

SEQ ID NO: 234641 - DNA, 390 bp, Gossypium hirsutum
gtgtagcgattctcagttagtcttttctttaagcttacagcttctctccagagttttataatgggtaaggagaaggttcacatcaaccttgttgtcattggccatgtcgactctggcaagtcgaccactaccggtcatttgatctacaagcttggtggtattgacaagcgtgtgattgagaggttcgagaaggaggctgctgaaatgaacaaaaggtcattcaagtatgcttgggtgcttgacaagcttaaggctgaccgtgaccgtggtatcaccattgatattgccctgtggaagttgagaccaccaaatactattgcaccggtattgaggcgcctggacaccgggactttatcaagaacatgattaccggtacctcacaggctgact

SEQ ID NO: 234642 - DNA, 280 bp, Gossypium hirsutum
ggggattttgctggtttatgatgttactgatgagtcatctttcaacaatattgggaattggattcgcagtattgaacaacatgcttcagacaatgtcaacaagatactggttggaaataaggctgacatggatgagagcaaaagggctgtgccgacctccaagggtcaagccctcgccgatgagtatggtatcaagttcttcgaaactagtgcaaagacgaatttgaatgtggaggaggttttcttttcaatagccaccgacattaagcaaaggcttaca

SEQ ID NO: 234643 - DNA, 340 bp, Gossypium hirsutum
attaaaacagggaaagaaaagcagcgtaatgggtgaagaagtgaaggtttttggatactgggcaagcccttacagctacagggcagagcttgctttgaagttgaaaggtgtttcttatgagtacataaatgaggatatctttggcaacaagagcgatttgcttttgaaatacaatccggttcataagaaagtcccggttcttcttcacaacgggaaaccaattgtagagtctcttgttatacttgaatacattgaggaaacttggaagcataatccctatttgccacaagatccttatgacaaagctaccgctcgattcttgatcaagttcatcgacaaa

SEQ ID NO: 234644 - DNA, 388 bp, Gossypium hirsutum
gagaaacttgaggggaagaatcttgctatcccttgcttttctctcgcaaaagggtctcaaacttgtttgtaacgttcgctgaatactatcgctcatttcttccctcagaaccctaatcgataactgaagccatttaatcatgtttgggcgtgttccaaaaaaatctgataacactaagttttacgaagtacttggggttcccaaaagtgcaagtcaggatgaattaaagaaggcttataagaaagctgcaattaagaatcatccggataaaggcggagaccccgagaagtttaaggaactggctcatgcttatgaagtacttagtgacccagagaagagagaaatatatgatcaatatggtgaagatgctcttaaagagggaatggga

SEQ ID NO: 234645 - DNA, 298 bp, Gossypium hirsutum
aaagaaattgtcaaaaatcatgatgttgctttctcagatagaccaagtaccactggcgctaacatcttgttttacgggcgcaccgatgtggctatcgcaccgtatggcgagtactggagacaagctaggaaggtgtgtggcactgatcttttgactcttcgaagagttaactcgtttcagttcttgagagatgatgaagttgcagtcaccatatataaactccgccgagcttctatcaagggagaggctgataacctgacggaggtgctgatggatgcttcgaataaccagatttcga

SEQ ID NO: 234646 - DNA, 319 bp, Gossypium hirsutum
gtcggcagaactcactgtgtgaagctggtgcatcgtttgtacccagaggttgaccctgccctcaaccccgaccatgttccacacatactccataaatgccctgatcagatcccagaccccaaggccgtccagtatgtgagaaacgaccgtgggacacccatggttttggataacaactactacaggaacatactggacaacaagggtttgttgattgtggatcaccaactggcgtacgacaaaaggaccagaccttatgtgaagaaaatggccaagagccaagactatttcttcaaggagttctcaagggccattactc

SEQ ID NO: 234647 - DNA, 309 bp, Gossypium hirsutum
  unsure (1)..(309): unsure at all n locations
cagaaatggatgcaacgatcagtcctggattataccctttgcaccgttgtaaaactctccatctggtgaggcatgctcagggggttcataatgtagcaggggaaatagatcacgctgcttattcatctgaagaatatttcgatgcccatctcactcctctgggctggcaacaggttgatcatctgcgcaaccatgttcatgaaactggactttctaagaaagtggatttggtcattgtttcccctttgctcaggactatgcaaactgcggtgggagtctttggtggtgaggngtataaggatgggatag

SEQ ID NO: 234648 - DNA, 217 bp, Gossypium hirsutum
ccgctgttttattggtaatctttcatgggcaacaacagataggggcctaaaagatgcatttgaaaagtttggaaatcttcttgacgctaaggttgctgttgacaagttttctggccgttctcgtggatttgggttcgtctcttttgatgataaagcagcaatggaggaagctattgaagcaatgaatggaatggatttggatggccggaatataact

SEQ ID NO: 234649 - DNA, 317 bp, Gossypium hirsutum
cttcaatcatgctccggctagcggggatctgatctggaactactgatgtcatggcggacaccgacggagcatacggaaccattaagcaacctgctgagatgggtgatgcagctaacaacgggatagatattgctaccaggcatttcgggcctagcaaggatcagatacctatactttcatacactggcttttatgagctagctggggttggagctgtagagatcaccagcgggccttgagttgcattgcattctgggagagaagacaagacttaccaaccacctgagggatgtatttccaatgctactgaaggaaca

SEQ ID NO: 234650 - DNA, 351 bp, Gossypium hirsutum
agattttcatgtttatgacttgatacaccaatctttttcacccgtattcatataatgtctttctgatcctgaaatccccaagatgaacaatctgttctcaggctccttctctcgcttccggagcgaagaggcgtcccctgatcaccatgtaatcgagatgactcagtcttcctccacctctggcggtgttaacctcgacaagttcttcgaagacgtcgagtccatcaaagacgagctcaaagaactcgagaggctaaaccacgacctttcatcgtctcacgagcgaagcaagacgttgcacaatgcgaaagccgtgaaagaattgagagcaaagatggatgctgatgtagc

SEQ ID NO: 234651 - DNA, 352 bp, Gossypium hirsutum
tatcgaaggaaagatctgaaagagaatggcaacttttgcagggactacccagaaatgcaaggcttgtgaaaaaactgtttacttggttgaccagcttactgctgacaacaaagtttatcataaagcttgcttcaggtgccaccattgcaagggtacccttaagctaagtaattatagctcctttgagggtgtcttgtattgcaagcctcactttgatcaactatttaagatgactggcagcttggataaaagttttgaaggaactcctaaaaccgttagggtagaccgatcagctgaccaggtcaccaacagcaaattttcgggcttgtttgccggaactcaaaagaaatgt

SEQ ID NO: 234652 - DNA, 357 bp, Gossypium hirsutum
  unsure (1)..(357): unsure at all n locations
cttagctctaagcagttaaaaccttccaacctcaaaacccaaagcctcaattccctggctttgtctcttaacttatctctcccacgtctgccctgcttttcagcagcttttgacagcttccaagttactgaagatgaccaaagcagtggagaagaatacccagaaacagaatctcaagaccttgaagaacaaccacaacaagaggaagctgaagaagataaggtttcagagtctggcggtgaagaaggaaagttgtatgttgggaatttgccttattcaatgacttcttctgagttaactgagatttttagtgaggctggtagtngtgctaaagtggagattgtttatgatcgagtt

SEQ ID NO: 234653 - DNA, 319 bp, Gossypium hirsutum
ctttatcttgggaaaccaggcttaaaatcatcaacggagctgctcgaggtctagctggtgtacacttttctgagaaggtcatttgtagagatttcaaggcctctaatttattgctcgatgggcactacaatgcaaaaatatcagattctggcttggctaaattggggccttctggtggagactcgcatgtaactaccagggttatgggaacatatggttatgctgcacctgaatacattgcaacaggacattcattcctcaactacgcctaggcatagacaacaatctagtagtcagcgtccacagtttcattcaaggc

SEQ ID NO: 234654 - DNA, 419 bp, Gossypium hirsutum
gcttgttcagctaattttgattttcttttggcaactgagacagacgatcaagagttagaaatgctaagggctctggtgaggaaagcagcttcaacttcagcttttgggagtgcaaattcagccccatgtgttattgctaatccaatccaccacctccagaccaaacgcttctccataggaatcctccccgatggggtcaatcgtagctccgacaattttgtccagaattccgatgccatggaacgtctcttgtctgaccttcaatcccatatcaacaaggttcttgctggaggaggagaaactgctgtgaaaaggaacaggagcagatataagcttctccctagggaacgactcgatcgtcttcttgatcctggttcttcttttctcgaattgtctcagcttgcagggcatgaattata

SEQ ID NO: 234655 - DNA, 359 bp, Gossypium hirsutum
cagttatcctcaagatgatccttcgagcacctttacttgccctgctggttccaattgcagggtcgtgttttgcccccgaggctcacctcatatagagatggtcggaagtaagagccaagaaaaataaagggatcatctcttggtctagttaatctgcgccttggaactaaaaaataaaaaagtcatttggtcttccaaatgatatcaaacacgtggttctacttggtttattttacatatgttttgtttaataatattgtgcagtttcaacagcacaagacgtcacaagttgctatcatctttcatcaaaatttccaactcataaatacccatataaaaaagttatatgaacttatatt

SEQ ID NO: 234656 - DNA, 261 bp, Gossypium hirsutum
ttaagatcgggattaacggatttggaagaatcggacgtttggttgccagagtggctcttcagaggaacgatgttcaactcgtcaccgttaacgatcccttcatttccaccggttacatgacatacatgttcaaatacgacagcgttcacggtcaatggaagcaccatgatcttaaggtcaaagactctaaaaccctcctctttggcgaaaaacccgtcactgttttccgaatcaggaaccctgaagagattccatgggctg

SEQ ID NO: 234657 - DNA, 355 bp, Gossypium hirsutum
cccaaatctcctccctcctcttctttagcgtccttttcatttccgctcatgcggcgcgctttgaaatccgcaatgagtgctcctacaccgtctgggcagcagcctctcctggtggtggccgtcgcctagaccctcggcaaagttggaccatcgatgtgcctgctggcactgctatggctcgcatttggggtcgaaccaattgcaatttcgatgccagtggtaggggtcattgccaaaccggtgattgtggtggactccttcaatgcaaaggttggggtgtacctccaaacaccctggctgtatatgcacttaaaccaattgtgaaacatggattttttacgacattttccttagt

SEQ ID NO: 234658 - DNA, 353 bp, Gossypium hirsutum
ctgccatcaatttgctttgaagatcatgttggctatttttcacaaggcatttgcgtgtccaccagaggagctgaatagtccagcttctcataaatctactaagaagcctaaacagcctgaagaaaccctaaatgatttcctatctcatcaccctcacaacactttctccatgagctttggcaacgctgctgttttggcttatgtccgccatgaacgtgctgcttcagttcatcagaggttgttttgtgggtttgatgacatatactgccttttcttagggagcttgaacaatctatgtatgctgaatagacagtatggtctttccaaagggagcaatgaggcgatgtttgtga

SEQ ID NO: 234659 - DNA, 353 bp, Gossypium hirsutum
gctttggaagcatggacttcatagctactatcctgtttctagctcttgtcatctccggcaccaaagctttggacccttgcggccctcagccagatgactcggaccttttggtcatcccaatctatggcaaatgttcaccattcaacccacccaaacctgactcatcgttcaacacagtcatgaacatggcatcaaaagacccagcaagggtcaagtacttgtcgagccttgtagcccaaaagaccactgcggttcccattgcttcaggccaacaagtcctaaacattggcaactatatcgtccgggtaaagattggcactccgggtcagctcatgttcatggtattggacact

SEQ ID NO: 234660 - DNA, 348 bp, Gossypium hirsutum
gttaaacccctccattcattatttacgttaagttcaaagaaatggctaatcctgtgatcactcgcgtccacagtctccgtgagcgtttagatgagacccttcttgcccacaggaacgagattttggccttgctctcaaggatcgagggcaaaggaaaaggaattctgcaacaccatcaaattattctagagtttgaagctatccctgaagagaacagaaagaagctcgctgatggtgcattttttgaagtattgaaggctagtcaggaagcgatcgtgttgcctccatgggttgcacttgctgttcgtccaaggcctggtgtttgggagtacattagagtgaatgttc

SEQ ID NO: 234661 - DNA, 415 bp, Gossypium hirsutum
ctcaaagatatcactgcaagaaaaaaaaaaaaaccagacatggcttccaacactggtgcatccgctgctcttcttcttaccttgaacttgttgttcttcactttggttagctctacctacgtgccttgcccaccaccaccaaagagccacaagcctacccacaaaagcccaccctcggcacctgaacagccaggcacttgccccagagatgcactgaaactaggcgtttgtgctgatttgttgggctcagtgcgcgttgttgttggaccgtcgaggaccaaatgctgctctctcatttcgggtttggctgatctcgatgctgctgtttgcctttgcactgctattaaagctaatgtgttgggggttaacctaaacgttcctgtttcattgactttgctcctcaattcctgcgaaa

SEQ ID NO: 234662 - DNA, 375 bp, Gossypium hirsutum
aaacaccttctttccgagaaaaaaaaagctcaagagagaagaccatggccgatcaacggacggacgatcagatctctgagttcaaggaggctttcagcctctttgacaaggatggcgatggttgcattactaccaaggagctggggactgtgatgcggtcacttggtcagaaccctactgaggcagaactccaagatatgatcaatgaagttgatgctgatggaaatgggaccattgattttcctgaattccttaacctaatggcaaggaagatgaaggatactgattccgaggaagaacttaaagaggctttcagggtgtttgacaaggaccagaatggtttcatatctgctgctgagcttcgccatgtcatga

SEQ ID NO: 234663 - DNA, 260 bp, Gossypium hirsutum
atttgatcaatcgaatttacatctctctctttcttctatgctgcaaaccctataggggtggcctcaagtgattttacgagaatgtctcggttctatgttgggaatacggatcctcgggtcactgagagggatctcgaagacgagtttaggattatcggcgttctccgcagtgtatggctagctcgaaggcctactcggtatgcgtatatcgagtttgacgatcgcagggatgctattgatgcagtacgagcaccgggttg

SEQ ID NO: 234664 - DNA, 328 bp, Gossypium hirsutum
aaaaaaaaaaaaaccagacatggcttccaacactgttgcatccgctgctcttcttcttaccttgaacttgttgttcttcactttggttagctctacctacgtgccttgcccaccaccaccaaagagccacaagcctacccacaagagcccaccctcggcacctaaacagccagccacttgccccaaagatacactgaaactaggtgtttgtgctgatttgttgggctcggtgcgcgttgttgttggaccgtcgaggaccaaatgctgctcactcatttcgggtttggctgatctcgatgctgctgtttgcctttgcactgctattaaa

SEQ ID NO: 234665 - DNA, 308 bp, Gossypium hirsutum
aaatggcatttgtcaaggctcagaaaaccaaagcttactttaagcggtttcaggttgcatacaaaagaaggagagagggaaagactgactaccgggctaggattcgcctaatcaatcaagacaagaataagtacaacactccgaagtaccgattcgttgtccgatttagcaacaaagatgtcaccgcacaaatagtttctgctaatattgctggtgatatggttcttgcttctgcttactcacatgagcttccacgatatgggcttgaagtgggtcttacaaactatgccgcagcttattgcactggt

SEQ ID NO: 234666 - DNA, 370 bp, Gossypium hirsutum
ggattggtaagcgacacgcctttcttactcaaaccctattctttttcccaatggcgggaatctagggttttacattctccttttcctctccaaatcaaccttatttcattttttttcttctcttagaaataatatcgtcaatgagcaacgaattagttaacttcaacatgtccggtcttggcgatgctcttaatgccgaagcacgagctggtctcgttaacgctctcaagaataaacttcaaagtcttgctggggatcactccgatgtgctggagagcctatcaccgattgtcaggaagcgtgtcgaggttcttagggagatccagagccaacatgatgaattggaggctaggttttttgaggagagggc

SEQ ID NO: 234667 - DNA, 299 bp, Gossypium hirsutum
ccaaatctctcaaaaccttcattccatcccactcaccccgaacaacctctctccaccaacatggggaaaacacgtggtatgggagcggggcgcaagctgaggacccaccgcaggaggcagaggtgggctgataaggcatacaagaagtctaaccttggaaatgaatggaagaagccatttgccggttcttcccatgctaaaggaattgtccttgagaagataggtatcgaggctaagcagccgaactctgccatccgaaagtgtgctagagttcaattgatcaaaaacggcaagaagat

SEQ ID NO: 234668 - DNA, 405 bp, Gossypium hirsutum
cctaaatagcctgtgcagagatagaaacaacatggttttcattgtcagtgctaaaagccgaaagacactcactgaatggttttctccatgtgagaaactaggaattgctgctgagcatggctacttcttgaggctcaagggagacgtggaatgggagacgtgtgtaccagccgtggactgtgcatggaagcagattgcagaacctgtgatgaagcaatacatggagactactgatggatcctacatcgaagataaggaaactgcccttgtctggtgttatgaggatgcagatccggattttggatcatgccaagctaaagaacttcttgatcatctcgaaagtgtgctggccaatgaacctgttacggtaaagagtgggcagaattctgtcgaggttaagccaca

SEQ ID NO: 234669 - DNA, 394 bp, Gossypium hirsutum
  unsure (1)..(394): unsure at all n locations
gctttttgttacctcgatttcaagtgaatcagaatgggtaaggaaaagactcacatgaacattgtggttatcggccacgtcgattctgggaaatcaaccaccactggccacctgatttacaagcttggtggtattgacaagcgtgtgattgaaaggttcgagaaagaagctgctgagatgaacaagaggtcattcaagtatgcttgggtgcttgacaagctcaaggctgagcgtgagcgtggtatcaccattgatattgccttgtggaaatttgagaccacgaaatactactgcactgtgattgatgcacctggacaccgtgactttatcaagaatatgattactgggacgtcacaggctgactgtngctgtttgattattgattccaccactg

SEQ ID NO: 234670 - DNA, 418 bp, Gossypium hirsutum
caggattcgaaaggaataagcttcagcgtccgaatcgggaggaaatggtgaagggacgccaaggagagcgtgtcagactctatgtaagaggaaccatcttgggttacaagaggtcaaagtcgaaccagtacccaaatacttctttgatccagattgagggagttaacaccaaggaggaagtagcttggtatgcaggaaagcgcatggcttatatatacaaagctaaggtgaagaagaatggctcacactatcgctgcatttggggaaaggtcactagacctcatggtaacagtggtgttgtccgtgctaagttcaagtctaaccttcccccaaaatctatgggagatcgagtcagagtcttcatgtaccctagcaatatctaagcttgctcgatgccgaacggcttgtgattgactac

SEQ ID NO: 234671 - DNA, 271 bp, Gossypium hirsutum
ctttctcatcttgtgatttgagcttcgtgtttgtgttgggttaagcaattcgccaagatgcagaacgaagagggtcaaaacatggatctttacatccccagaaaatgttcggccactaataggctgatcacctcgaaggatcatgcttctgttcagattaatgttgggcatttggatgagcttggcagatacactggaactttctccacttttgctctttgtggttttggccgtgcccagggtgatgctgacagtgcccttgacaggcttt

SEQ ID NO: 234672 - DNA, 282 bp, Gossypium hirsutum
gacaaaaggtttttcaatatcggattagatgctgttcttacgagctatgtctctatgcttgatgacttccttgtcgatatgattctgtgcatgagagaccggaccgaaaatgaccagcttgcgttagtgagagaagacatatctgtcaggcattcggtggaaagcaagggagaccctggaaacctgggtgtacgattcttgagagacataattcgcacctccatgatctcgcgcaacgatgcatgatcgggaacactcactcggtttttttacatgcttcac

SEQ ID NO: 234673 - DNA, 291 bp, Gossypium hirsutum
ttaagatcgggattaacggatttggaagaatcggacgtttggttgccagagttggtcttcagaggaacgatgttgaactcgtccccgttaacgatcccttcatttccaccgattacatgacatacatgttcaaatacgacagcgttcacggtcaatggaagcaccatgatcttaaggtcaaagactctaaaaccctcctcttcggcgaaaaacccgtcactgttttcggaatcaggaaccctgaggagattccatgggctgaagccgggctgagttctgtttgagtaactg

SEQ ID NO: 234674 - DNA, 383 bp, Gossypium hirsutum
ccgccgcctgcgtctctctcttcatctctctgaaccaaaaagtctttagcttttcgcttcgagagagaccatgttggtttaccaggatctcatctccggtgacgagcttctttctgactcattcccctacaaggaaatcgagaatgggatgctgtgggaagttgagggaaagtgggttgtgcaaggagctgtcgatgttgacattggtgccaatccttcagccgaaggtgctgatgaggatgaaggtgttgatgaccaagctgtgaaggttgttgacattgttgacactttcaggcttcaggagcaaccccctttcgacaagaagcagtttgtcgtgttcatcaagaagttcatcaagaacttgcaccaaaactggatgcgga

SEQ ID NO: 234675 - DNA, 300 bp, Gossypium hirsutum
  unsure (1)..(300): unsure at all n locations
ccaatacaaagcttnatattatcttttttagttccgccccacgaaaacgaaacagatggaggaaatacaatcgttgtgttttttaagtcgggttttagtttttggggagaaaaaaatgatgggagtgtttatcagagcgatagtgtcttctcccgacgagctggtggtggccggttgccgaactccatcacctaatataacggcggctgctctggttaaacggatccttgagacgaactcctccggcgtgtccatgcagatcggagaccatgtccaattcgcttattctcaccataaaga

SEQ ID NO: 234676 - DNA, 415 bp, Gossypium hirsutum
gtgagactcttttgtataactgtagcatatagtactagtaagcagtaatagcaatggcctcctccatgatctcatcggcaaccattgccaccgtgaactgctcctccccggcacaggccaacatggtggcccccttcaccggcctcaagtctgcctctgctttcccagtcactaggaaggccaacaacgacatcacttctcttgcaagcaatggtgggagagtgcaatgcatgcaggtgtggcctcctcttgggaagaagaagttcgagacactctcatacctccccgatcttacacccgtacagttggctaaggaagtagattaccttcttcgctctaaatggattccttgcttggaattcgaattagaggagggattcgtgcaccgtaagtactcgagcttacccacgtacta

SEQ ID NO: 234677 - DNA, 403 bp, Gossypium hirsutum
ctcaaatctcctcctcctcctcagaaatcttagtatcatcaccatggcctcaaatcccaaggtcttctttgacatgactatcggtggtcagcccgctggtcggattgtgatggagcttttcgcagattgcactcctcgcactgctgagaacttccgtgccctctgtaccggcgagaaaggcgtcggccgcagcggtaagcccctccactacaaaggctcctctttccatcgtgtgatccctaactttatgtgccaaggaggtgacttcacggccggaaacggtaccggaggtgaatccatctacggatccaagttcgctgacgagaacttcatcaagaagcacactggtcccggtattctctcaatggctaacgctggtcccggaactaacggatctcagttc

SEQ ID NO: 234678 - DNA, 398 bp, Gossypium hirsutum
agagaacatagccaaagtcaagctaagctttgagatttatcaatggcggagaagaggttcaagtacgtcatcctcggtggtggtgtcgctgccgggtatgcggcgagggagtttgccaaacagggagttcagcctggtgagctagccattatttccaaggaagcggttgctccatatgaacgtcctgctctgagtaaggcgtatctcttccctgagggagctgcaagacttcctgggttccatgtctgtgttggaagtggtggagagagattgctttctgagtggtacaatgaaaaaggaattcaggtgatccttatcactgaaatagtgaaagcagatttttctgtcagactctattaagcgcaggtggagaaacgttcaaatatcaaaatttgatc

SEQ ID NO: 234679 - DNA, 383 bp, Gossypium hirsutum
aattactcttataattcgtacccggattccggcgattcttcgccgcgatctcgggggatcgactttgaaaatgctccgccgtgggaggatcaagcgcaacaaccgcagagttataaggctaagtttatgtgcagttacggtggcaagatccatcctcggcctcatgataatcagctatcttacatcggtggagagactaagatactggccattcatcaaaccaaggtgctgatgaggatgaaggtgttgattgcccctctctggggcgggggcgacggtgatttatctttcaagtaccagctccctggtgaggacctcgacgcacttatttcggtaactaacgatgatgatctcgaacacatgatgaaaactggatgcggaaa

SEQ ID NO: 234680 - DNA, 365 bp, Gossypium hirsutum
cccacgcgtccgggtatttccaatcccacgctgctcaaaaacactctctcctgcccctctctcaccctctaatctgatcactgatttcttcgatttcaagttgaagtcaagctgcagctatactgtgatttggttaatatagaattgaaacaatgggggagctgttgggactgctaaaagtggtggttgtgcaaggtaaaaggttggttatccgggattttaagagcagcgatccttatgttatagccaagctcggtgatcaggtagcaaagactaaggttatcaacagttgcctcaatccagtatggaatgaagagctcactttctccctcactgaacctggtggagttctaaatttggaagta

SEQ ID NO: 234681 - DNA, 385 bp, Gossypium hirsutum
ggaaaacaagaaaagcagagccgcatcactttttgctagctaagctactgtgggagttattgttcttcagaacagcttctgcagtagctaataataacgttatatattatataaattttatacatcctttttaccctacgactccatatataagcaagtaaaaataaatatggctcgctctgtttcttcctttaagttccttggtgcttctgtttttgatgctctttatgtctccatatcaaggagaggttactcaggtgcaccgccggcggcagtgacggctagctttggtaggcctggagcgatggggaaagtggaacgaagatatgcgatgaaagagtcgtcgtcgtcggagacaagggcttattcttcagcttgggcgcct

SEQ ID NO: 234682 - DNA, 430 bp, Gossypium hirsutum
gccgaagagtttgcgaggaaacagggtgtggagttggtggacaatgaatatttcattacagaagacaatgtggggatgcttaagttagcaaaagaagcaaactcaatcctgttcgattaccgtatcccaaccctcaccacctgcggtggcagcgcagccatggaaaatcaattacaaatgaacggcttaccaatcagtctctacgccccagaaacagtaggttgcgttgtagttgacaaacaaggtcattgcgctgccgctacttccaccggtggattaatgaacaagatgaccggaaggattggtgactcgccgctgattggttcagggacttatgcttgtgacttagtggctgtttcatgtaccggtgaaggtgaagccattatacgaagcactttggctagggaagtagcggccgtgatggaatata

SEQ ID NO: 234683 - DNA, 385 bp, Gossypium hirsutum
gatcagtgatcgggatagatgcccacagtgcaaagggaacaaggttactcaggaaaagaaggtgctggaagtacatattgagaaaggaatgagagatggtcagaaaattacatttgagggacaagctgatgaggctccagatacaataactggagacattgtttttgtattggaacaaaagaaacaccccaaatttgataggagatttggggacgaactttatgttgaccacaaactcagtttgacagaggctctatgtgggtttcagtttgccctaactcaccttgatggcaggcagctcttaattaaatcaaaccctggcgaggtcgttaagcctggtcaatacaaggctatcaatgatgagggtatgccccaccatcagaga

SEQ ID NO: 234684 - DNA, 389 bp, Gossypium hirsutum
gcctaactttggagataattttggatctgaaacagagagagagagtatggatcgccaccacgatccaaaccctttcgatgaagaagaagtcaatccattttcgaatggtggttctgtcgcacctgcacgaccactggcatccgaacctttgggttttgggcagaaacatgatgctactgtggatatacctctggattcaatgaatgattctaagaaaagagaaaaggagctcgcagcttgggaagctgatcttaaaagaagggaaaaggatataaagagaagagaagatgctgtttcccaagctggtgtttctgtagatgataaaaattggccaccaattttcccgattatacatcatgatatagctaatgagataccgggtcatgctc

SEQ ID NO: 234685 - DNA, 381 bp, Gossypium hirsutum
  unsure (1)..(381): unsure at all n locations
caaaatatctgctcctcttagtttccctttttgggccttgtttatttgagggtggggcctcatgggtgccggtgatgtcaagttccggtgcttcgtcggagggctcgcatgggccaccgacgaccgggcccttgaagaagccttcagtgcgtgtggtgaaatcgtcgaatcgaagatcattaatgatcgtgagactggaagatcccgaggctttggattcgttactttccgtgacgagaaagctatgagggacgcgatcgaaggaatgaacggtcaaaatcttgatggaaggaacataactgtcaacgaagcccaatcgcgcaaaantggaggcggtggcggaggatttggaggaggaaacggtggttacagccgcggtgg

SEQ ID NO: 234686 - DNA, 377 bp, Gossypium hirsutum
  unsure (1)..(377): unsure at all n locations
acaccctgtcgccaagaaacgcacccnccaagacaaccactccccgtttgggggtggacgtaagangaggtgggggcgttacgtctccgagatacggtttccgggtcaaaagacacggatatggctggggtcgtttgggtcaccggggatgggagctcgggcatatgactcggcagctttctttttgaaaggcgactctgctatcctcaacttcccggagttaggggggtcacttccccgggcagggtcttgctccaggagggatatacatatcgctgcgggcaaagcggctttggaggaactcgggggcagggtaaaagaagaggagggtccggaaagcattttggtggttggatgatgtggggaatggcggggtt

SEQ ID NO: 234687 - DNA, 378 bp, Gossypium hirsutum
cttcgttcaaccactcctaataaccgctcggatttttctcatacgggggggaaatgggggtggctgtcaccaagctattcagccggctatttgccaaaaaggagatgcgcatactgatggttgggcttgatgctgctggtaaaaccaccattctttacaagctgaagttgggagagattgtcactactattcccaccatcggtttcaatgttgagaccgttgaatacaagaacatcagcttcactgtttgggatgttggcggccaggacaagatccgaccattgtggagacactattttcaaaacacgcaaggacttattttcgtgggtgatagcaatgatcgtgaccgtgtggatcaagctagagatgagttgcaca

SEQ ID NO: 234688 - DNA, 385 bp, Gossypium hirsutum
ctgagatggtcaaggttttaagagctaaagggaagctggaggaagagatgggaagtttggttatgaagtttttggaggagaataagaaagtacccgtgcctaaggttgagaaagtgaggattaagtgtctggggtatcaagaaagggctaagatttctaagaatccaactgggaaaaagctgtttgagattatggttaacaaagagagtaatctctgcttggcggctgatgttgccactgctgctgagttgcttgatattgctgagaaggttggacctgaaatttgcctattgaagacccatgttgacatattccctgatttcactccagagatcggatctaagcttcgcgcgattgcagaaaaacataacttcatgttttttgg

SEQ ID NO: 234689 - DNA, 393 bp, Gossypium hirsutum
actccccatcaaaacaacacattgcaaagagaaagggaatattatgaaaaggacccaaccatggcatttgcaggaacaacccagaaatgtatggcttgtgacaaaactgtgtatttggtcgataaattaacagctgataacagggtttatcacaaggcttgttttaggtgccatcactgcaaaggtactttgaagcttggcaactacaattcctttgaaggagtcttgtattgcaggcctcattttgatcaacttttcaaaagaactggtagtcttgagaaaagttttgaaggtacaccaaagattgcaaagccagaaaaaccagttgatggtgagaaaccaatagctactaaagtatcaggcatgtttggtggaacaagagataaatgtttt

SEQ ID NO: 234690 - DNA, 273 bp, Gossypium hirsutum
  unsure (1)..(273): unsure at all n locations
ggagtattggtcatatttttcccatatnccccattcatggattgtatnagggggggggaatgaggggggtggtatctgatttaacctgtgacagtgatgggaagattgataagttcatcggaggtgaaacaagcttgcctttacatgggtaggaggggaatggtggttgtagcattggtggtgctaatggtcggtactatttggggatgttcttgggtggggcttaccaggaatccctctgtggagtttacaacctcttttgctgcccaaatg

SEQ ID NO: 234691 - DNA, 361 bp, Gossypium hirsutum
  unsure (1)..(361): unsure at all n locations
gaaatttaaaaaagagagagagaatgaaggttggtgctgcatatttnttgggtgggggggagggcaacacttccccttcagctaatgatcttaaggccattcttggctctgtcggagctaaagctgaatatgaaaggattcaacttcttttatctgcgggcaagggcaaagatataacagagcttattgcatccgggagggaaaagcttgcttccgttccatctggtggtggtggtgttgctgttgcatctactactcctggggctggtgccgctgctgctccagctgcatcctaggctaaaaaagaaaaggaaggtgaggagaaagaagaattcgattattatattggatccagtctctt

SEQ ID NO: 234692 - DNA, 393 bp, Gossypium hirsutum
atatcctcctcttctccatcaccaagtttggcaggtggcttgcagagacggaccctttgctaccctaatttcaaccccatctgtcttttatccatcctcacttctctaatataaaccacgttcccccttgtgttctgaacgtaacaaagttcctggaagaacatccaggaggagaagaggtgttgttggaatcagcagggaaggatgcgacgaaagaattcaacgatatcggacatagcaaggcggctcagaatttgctcctcaagtatcagattggtgttctccagggtcacactttaaagaataatgaacaggttggttcaaccgaggagcccaaaaagaaagagatgagtgcatttcttatcaaggatgacctgactcctaaatatgctg

SEQ ID NO: 234693 - DNA, 355 bp, Gossypium hirsutum
tttttcttccttacttcttctatactgtgccggcgcctgcgacccattaggttctcgcctaacacaggttatcatccgttttggatctttgtccaagatggggttggacggtccaactggaaacgaaggtgtgaggagactaggatgttcattcaccaaagatgattttcttccagaggagtcatttaagagctggggtaattatgtccaagcacttcagcaaactccgagaagggttatggatcgggtatttacccgatcacttgactcaacggaactccatgaaatcaaggctcggggccagcatgaaatgaagaagaccctcttctggtgggacctcatatgggtcggtatc

SEQ ID NO: 234694 - DNA, 378 bp, Gossypium hirsutum
gcgaaaatctcgaagcttccttttccgttttagatctcaaaattggaaagggtctctttttcatctgatggctgctactatcgtctccgtcaaagctaggcagatcttcgacagccgtggaaatccaacgggtgagggtgatgtggaaacatcgaacggtataaaggctagggccgcagttcctagcggtgcatccactggaatttacgaggctcttgagttgagagatggaggttccgattacctcggtaaaggtgtatcgaaggctggtgctaatgttaacacaatcatcggccctgcattgattggaaaggacccaaccgagcagactgcaattgacaatttcatgggtcaacaactggatggaacccaaaatga

SEQ ID NO: 234695 - DNA, 392 bp, Gossypium hirsutum
cttttctcaagctttttcccaaatagccatggctatggcgatggggggggcggcaaccttcagtatctcatcagctacttcaatcttccggacttcatcttcacttaaattctcttcaaaaccagtgcttattccaatgcgtttttctccaaaaacccaatctcctcccagaactctccggatttacgctttgactagtaacgatatcaaagtgggtactaaccttgaagttgacggtgctccttggcgaattttggagtttcttcatgtgaaacctggaaaaggggctgcatttgtgaggaccaaaatgcgcaattatatcactggaaacactgtggagaaaacgtttcgagctggaagtacgattgaggaggcaaacgttttcaaggaat

SEQ ID NO: 234696 - DNA, 381 bp, Gossypium hirsutum
gtctctacttaaggaacttgaagatatggggttcaagcaggttgatttggacaaggacattttgaggaggaatgaatatgatctggagaagtctgttgatgatctttgtggggtggctgaatgggatccgatacttgaggagctgcaggaaatgggtttctgtgatgctgaaacgaacaagaagctgctgaagaagaacaacggaagcatcaagggagttgtcatggatctgttaacaggagaaggtgcttaaattattaattatggatgatggctcgtggtttctaggcattttattatatataaataaatgagtgtgcgcatctaaaccatgtctttatgaagcagctgccttttaatttcttgtcttctgaagtatgc

SEQ ID NO: 234697 - DNA, 395 bp, Gossypium hirsutum
gttcttcttcaaaggcttctttcttttcaggtgaaaatagcagtgaaaaggtaggggtaatggagacaggagcgcttatagaaaatactgctaaaacaggagggataggtcttgatcttagaggcaagttgatggaccagatagagtggctccctgtatcaattgggaaattaaaggatgtgagcgaattggacttatccgaaaaccgtatcatggcgctaccaccctccattggtggccttcaagccttgacaaagcttgatcttcactcgaaccaacttataaaccttcctgattcggttggggaacttgtgaatctaatagagcttgatctccgtgcgaacagggtaaaggcgctgcctgctacttttgggaacttgacaaacctcatgaat

SEQ ID NO: 234698 - DNA, 359 bp, Gossypium hirsutum
cttaaccatttcccaaatctcctccctcctcttctttagcgtccggatggtgtccgctcatgcagcgcgctttgaaatccgcaatgagtgctcctacaccgtctgggcagcagcctctcctggtggtggccgtcgcctagaccctcggcaaagttggaccatcgatgtgcctgctggcactgctatggctcgtatttggggtcgaaccaattgcaatttcgatgccagtggtaggggtcattgccaaaccgtttattgtggtggactccttcaatgcaaaggttggggtgttcttccaaacaccctggctggatatgcacttaaccaatttgtatacatggatttctaccacatatttc

SEQ ID NO: 234699 - DNA, 389 bp, Gossypium hirsutum
  unsure (1)..(389): unsure at all n locations
agggagaaggcagattatgcgaatgtgaattgggatgaacttggggttggggtaactaagactgaggatatgtaccttatgaaattcactgaagagtagcaaatgttttgcaacggaaccttaactcgctttggcaacattcagatgtgcccttcatctggaatattaaactatggccaggggttattcgaggggctaaaggcgtataggaaggaagacgagggtattctgctcttccgaaccgaagagaacgctctgaggatgaaggtgggtgcggatcgaatgtgcatgccatcaccaaccggtgaccaattcatagatgctngcaaaaagactgtgctggccaacaagagatgggtacctcctcatgggagaggatcattatatat

SEQ ID NO: 234700 - DNA, 386 bp, Gossypium hirsutum
  unsure (1)..(386): unsure at all n locations
ccgccgcctgcgtctctctcttcatctctctggaccaaaaagtctgtagcgtgtcgcttcgagagagaccatnttggtttaccaggatctcatctccggtgacgagcttctttctgactcattcccctacaaggaaatcgagaatgggatgctgtgggaaggtgagggaaagtgggttgtgcaaggagctgtcgatgttgacattggtgccaatccttcanccgaaggtgctgatgaggatgaaggggttgatgaccaanctgtgaagggtgttgacattggtgacactttcaggcttcaggagcaaccccctttctacaagaagcagtttggcgtgttcatcaagaagttcatcaagaacttgacaccaaaactgggtgcggaaa

SEQ ID NO: 234701 - DNA, 391 bp, Gossypium hirsutum
gcagaggacattacctttgtttcttctaaaattaaaaacacaaaagtgagaaaaatggagggagatatggaaatgaaaccatccaagttcaagagaatttgtgtcttctgtgggagcagccctggaaggaagagcagttataaagaagctactattgagcttggcagggaactggtttcgaaaaacattgatctggtctatggaggaggtagtattggattaatgggtttgatttctcaagcagttttcgatggtggccgccatgtcattggagtgattcccaagacacttatgccaagagagataactggagaaacagtgggggaagttaaggcagtagcagacatgcaccaaagaaaagcagagatggctagacaatctgatgccttca

SEQ ID NO: 234702 - DNA, 340 bp, Gossypium hirsutum
ggaaatttcactggattttaaagaggagccaagggaagagaaatggtgcagggcgatgaaaatggaaacaccactatggtggtggtttgatactcctcagaatggatcaaagcgctctccatggctccaatccactatttatgaactgtaccataggacgaaagcgatgctgaaactgatagaggaagatgcagattcctttgcgcaacgtgcagaaatgtactacaaaaagcggcccgaactgatttgtctggttgaagatctctaccgagcccaccgttcacttgccggagcgggacgatcaagttaaaacagaccctggaactctcctactaacaac

SEQ ID NO: 234703 - DNA, 361 bp, Gossypium hirsutum
  unsure (1)..(361): unsure at all n locations
aaaaaaaggcattcttccaatcaaacgatttcgatctctgatctgagatggtgcgcatgagcgatnganaagaccctntacagcgcctaaatgccattgcggagtaccgaaagaaactccttcaacacaaggagtacgagtccagggttcgtgcaggtagggagaatctgagagctgctaagaaggagtttaacaaaactgaagacgatttgaagtctcttcagagtgttggacagatcattggagaagttctcaggccttttgacaatgagcgccttattgttaaagcaaggcagtggccctttctatgtggttggttgccgcaacaaagctaacaaggagaaactgacttctggactag

SEQ ID NO: 234704 - DNA, 390 bp, Gossypium hirsutum
aacattcccatttccaatctccagctcccaaggtaaatatgccgggcaggggcatagcagttggccggcccgaataggcgactcaccccgatgctctcaaggcagctttggctgagttcatctcaaccttgatcttcgttttcgctggatcgggctcaggaatggcttttaacaagttgaccgacaacggagcaacaaccccggccggtctcgtagccgccgctctagctcatggcttcggtcttttcgtcgctgtctccgttggcgccaacatctcaggtggccacgtcaaccccgccgtcaccttcggtgctttcgttggcgggaacatcactctcttgcgcggcattctttactggatcgcccaactcctatgctcaaccgtcgctt

SEQ ID NO: 234705 - DNA, 393 bp, Gossypium hirsutum
cttggagatgctcaacacgttgaagaggcagagaagataggtttggattagtatggatgtggaagcattgaagaaactaaacaagactaagacgttagttaagaagcttgccaagaagtatcatgcctttctggcttctgaatctgtcatcaagcaaatccctcgtttattgggtcctggtctcaacaaagcaggtaaattcccaacccttgacactcaccaggaattcctagagtcgaaggtgaatgaaacaaaggcaatgggtaagttccagctgaaaaagggtctatgcatgggagctgctgttgggaatgtagcaatggaggagaagcagatcttccaaaatgtgcacatgagcgtcaatttccttgcttctttgttgaagaaaaattg

SEQ ID NO: 234706 - DNA, 377 bp, Gossypium hirsutum
tgcactggtgctaaaagtgaacagcagtctaaactggctgcaagggagggtgccagaattattcagaagcttgggtttcctgctaagtttaaggacttcaaaatccagaacattggtgggtcctgtgatggtaaatttcccatcagacttgaaggccttgcatactcccatggtgctttttcaagttatgaaccagaactgtttccaggtctgatttatcgaatgaaacaaccgaagattgggcttcttatttttgtgtcagggaagattgtgatcactggagcgaaggtgagagatgaaacatacacaggctttgagaatatatatcccggcctgacggagttcaggaagaaccaacaatgatataccaccggtga

SEQ ID NO: 234707 - DNA, 392 bp, Gossypium hirsutum
gttcctgcagagtgaggaagctcccctgaaagcttcagttgaaagggccggggcaaattcatgagatcaaggacttccttctcactgctagaaggaaagatgctcgctctgtaaaaatcaagaaaagcagagatgttgtcaagttcaaggtccgctgctccaagtacttgtacaccctttgcgtgtctgatgctgagaaggctgacaagttgaagcagtctcttcctccaggtttgagcgtccaagacctgtgaaattaaaactgcccttagcttgtactaggcaatgaaaactagattttgactcttagtttattgcttgcatttcgaatcgttttgcaacgatcaaaagtttttataatggatttttatttggggtgtttttatggacgt

SEQ ID NO: 234708 - DNA, 394 bp, Gossypium hirsutum
  unsure (1)..(394): unsure at all n locations
tcttcatccaaaatcttggcttagagatttcaaagggccttaagatcatgggcatcttaagcaagggtccaagcancaacatgggttcttctcctttcttccatgaattcaagaaacaagcttctttcttcctcaaggagaagatcaaaacagctcgtttagctttaactgatgtcacccctgctcagctgttgactgaagaagctacgaatgggaatccatgggcaccaaacacccagactcttggttccatctcaagggctgcttttgaattagatgattattggaggatcgtggagattttacataacaaattggacaaatttgaaagaaagacatggagaacctcttacaattctctgatagtgcttgaacatttgttgactcatggacc

SEQ ID NO: 234709 - DNA, 393 bp, Gossypium hirsutum
caccgcctctcttttcctctcagttccctgtcccaggtttcttttctccagatccgggccctgccccttttgctctaactccgatgctaccacaaacgaggaggatgatttttattttgacgttgacgatgatgggattgtttcttcagatgatgagacacaaccattgtctgaagacggtgtctttattgagataaaaaagcttggagggaattctcgtagaattcggtccaaaatcgggattgaagccaacctcgatactgtttggaacatcttgaccaactatgagaagttggctgatgttattccgggtcttgctgtcagcgaagttgtcgaaaagaaacacaaatttgctcgactttatcagaatggacagcaaaacttgccattggg

SEQ ID NO: 234710 - DNA, 328 bp, Gossypium hirsutum
aacgctctccttctgtttctggtcaagccaatctcaaaagactcccctttgagctgacagctcctctcttgagtactataatgggtaaggagaaggttcacatcaacattgtggtcattggccatgccgactctgggaagtctacaaccactagtcatctgatctacaagcttggtggtattgacaagcgtgtgattgacaggcttgagaaggcggctgctgagattaacaaaacgtcatttaagtatgcctggattctcgacaaacttaaagccgagcgcgcacgtggtattaccatcgatattgccctctcaaagttcgagactac

SEQ ID NO: 234711 - DNA, 379 bp, Gossypium hirsutum
atggaattcaatctgatgggcaaatgccaattgacaagaccgtcggagggggtggtgatgcttataacaccttcttcaatgaaactgcagctggtaagcacgtgcatcgtgctgtctttgcagatcttgaacctactgggattgataaagtgaggactagtgcctaccgcctatttttacacccagatcaactgatcaggagcagggacagacagctacaacaaccttgatcagggccactacactatcggcagagagatcgttcacttgatcttggaccgtttcaggaagcttgctgataactgtaccggccttaaaggttttcttgttttgaacgctcatagcggaggcactgcatcttggctttgctccctccttt

SEQ ID NO: 234712 - DNA, 362 bp, Gossypium hirsutum
gcgagcagccgcagtcagcaagcatcagtagcaacaacaggagcgggagggggtctcacaggaaatttgatcacccaaggcatggttcccttggatttcttccaaggaagcgagcctctcgtcacagaggaaaagtgaaggcattctcaaaggatgaccctaccaaaccttgcaagctcactgcctttctggggtacaaggctggtatgacacacattgtcagagaggtcgaaaaacccggatctaagcttcacaagaaggagacatgtgaagctgttacaatcattgaaacccctcctatggtgattgttggggtgggtggatatgtgaagacaccacgtggtcttcgcttcttgaacacc

SEQ ID NO: 234713 - DNA, 368 bp, Gossypium hirsutum
cgccgctgctctcaaccttccttcggtttacccaatggcatcggaaaaggggctggcgaacccaatgagggagattaaagttcaaaaacttgtcctcaacatctctgtcggtgaaagcggtgatcgtctcacccgtgccgctaaggtcttggaacagctcagtggtcaaacccctgtcttctccaaggctaggtacactgtgagatcttttggaatcaggcgtaatgaaaagattgcttgctacgtgacggtgaggggagagaaggctatgcaacttctcgagagcggtttgaaggttaaggagtatgaacttttgaggagaaacttcagggatactggatgctttggatttggcattcaggagcaca

SEQ ID NO: 234714 - DNA, 392 bp, Gossypium hirsutum
  unsure (1)..(392): unsure at all n locations
tgcactggtgctaaaagtgaacagcagtctaaactggctgcaaggaagggtgccggagttattcagaagcttgggtttcctgctaagtttaaggacttcaaaatccagaacattgttgggtcctgtgatgttaaatttcccatcagacttgaaggccttgcatactcccatggtgctttttcaagttatgaaccagaactgtttccaggtctgatttatcgaatgaaacaaccgaagattgtgcttcttatttttgtgtcagggaagattgtgatcactggagcgaaggtgagagatgaaacatacacagcctttgagaatatatatcnccgcctgacggagttcaggaagaaccaacaatgatataccacccgtgaaatcgactgtgagtc

SEQ ID NO: 234715 - DNA, 391 bp, Gossypium hirsutum
cgcagagtgaaaggcggggaggccgtagacaatctctcttgcgctcttgggggagaatggatcagattcaacatccatctgtcatgcagaaggtagctggccagctcctttcttctagcatttcccgagattttcaagggtatgatgggtctttcaggaggcctgctctataccaaggacattttgcatatgggaattattccaatgctggaatgcactatcctattgttccatcaacagctaccgccatttgtgttcaagcccctgcagagaaaggatttaccagctttgccattgatttcctcatgggtggaggttctgctgctgtgtcaaaaacagctgctgctccgattgagcgtgttaagcttttgatacagaaccaggatgaaat

SEQ ID NO: 234716 - DNA, 201 bp, Gossypium hirsutum
  unsure (1)..(201): unsure at all n locations
ggaagttagtttctcgctgtccagaagtcttttctttctacatcggggcgggtgtaaagaaagaggtttancttctttcagaatttgctatttccaatgaccaccttcctcgtgttatcaaaaagtatccagaggttcttgtttatgatttgtacaaaactctacttcctcaccacaatcattttatagagatgaggcttt

SEQ ID NO: 234717 - DNA, 387 bp, Gossypium hirsutum
  unsure (1)..(387): unsure at all n locations
aaatcgctgtctcatttcacgatccaaagtttccaaattcctctccggggtttgctcttcaccacttagtctcaaatggttcgtaggccaaacgacccggaacactcccgtttcgcctctctcgtcctcctcttggtggctctgttctcctgtcttctggtctatgcggttgtttccacactattgaaccccaccgtaaatcctcaggattccagctttgagtctttggaatcggtggcgggtattgattttggggaaaagaagggcgagtgttgcagaggcattgagaatttggagctgtggggtgcagctgtgaagtgggggtctgacttcaagtntaattcctctgtggaatgttgccaggcttgtaaggccatgtgtagtggc

SEQ ID NO: 234718 - DNA, 312 bp, Gossypium hirsutum
  unsure (1)..(312): unsure at all n locations
cgaaatttccttttctttttcgattttttcctggcgtttgnattgggagggagggatgcangatcgaaggggaataaaggagccttaggaaggaaaggcggcggtccaaagaagaagccggtttctctttcggggaatggcggagttcatgttcccgttggtcgaattggccgatacttgaagaaaggccgatactctcaacgtgtgggaaccggtgctccagtttaccttgctgctggtcttgaataccttgctgctgaggttcttggtgttgctggtaattcttcaagagacaacatgatgaattggttc

SEQ ID NO: 234719 - DNA, 389 bp, Gossypium hirsutum
ccttctttcactgaatcttctcttttccctatattttctatctccaaatgcatgggcggtctctacgaaatggcttcccacattgttggctatccccgtatgggaccaaagagagagcttaagtttgctttggaatcattttgggataagatgagcagtgctgaagatttgcagaaggttgcagctgatctcaggtcagctatttggaaacaaatggctgatgctgggatcaagtacattcctagcaacactttctcttactatgaccaggtgcttgatgccacctctatgctcggtgctgttccaccgagatatggttggaacggtggtgagatcggattcgatacttacttttccatggctaggggaaatgcctctgtgcctgctat

SEQ ID NO: 234720 - DNA, 230 bp, Gossypium hirsutum
  unsure (1)..(230): unsure at all n locations
atccaattatttttaattcaatttcattccccaaccaaattcaaaccatggggacagacccatatgggggttttaagaanatccacatctttgtgaaaacccttaccggtgagaccataacactcgaggttggaagcgtcgacaccattagtattttaaaggtcaagattcatgacaggggagggatcccacccgaccagtagcatttcatttttgctggcaaacagttc

SEQ ID NO: 234721 - DNA, 246 bp, Gossypium hirsutum
tagccttttcttattcacctattcaaaagaaccaaatatgcaatggagaagggtgtgcagatcagggttaaaggtaaatcaactatcgtatggagcatgggttagtttcaggaaccagctcgatgttaaagaagcaaagtaactgggtcggttgtgtaaagacaactggattaactttttcgacatcgccgaggttaatgccaatggtcgagccgaggagatcatgggtcatgcctattaaggaac

SEQ ID NO: 234722 - DNA, 433 bp, Gossypium hirsutum
cgcctccaggacgcctccgcccaccgtcaattaacctccatcctttctcctttccactccaaaaccctccatcaagaaaacctcttcttcgacaccccagccaataccctttcctctcaactttccgttcttcgcctccgcttcctcaacaaggacgcccgctgcatcgtttccctcaaatccaaacctactctggtagatggtgtcagccgcgtggcggaagatgaggaggaactagatccgtgttctgcacgcgcttgcgtggaggacccggcgaggttggggaagattgagtcgaggattttgaagagggttaaagaggaatttgggggtggggaagaaagggggattttgttggttaggtgggtttgagaataaacgagaggtttttaattggaaaaatctgaagctggtaggggatgagactaatttt

SEQ ID NO: 234723 - DNA, 402 bp, Gossypium hirsutum
ctgaaattttatagcaagactccttatttctccgatgtcgatcttcgaatacaacgggagtgccctaatagccatggtaggcaagaactgcttcgccattgccagcgatcggagactcggagttcaactccaaactatcgccaccgatttccagaggatttataaagtccacgatcgcctctttctcggtctctccggcctcgccaccgatgctcaaaccttgtatcaaaggctcgtctttcggcacaaactgtatcagctaagagaagaaagagacatgaaacctgagacttttgctaaccttgtttctgcgattctttacgagaaaaggtttggtccatacttctgccaacctgtaattgctggattaggagatgaagacaagcccttcatttgcaccat

SEQ ID NO: 234724 - DNA, 283 bp, Gossypium hirsutum
tcattctcttcttctttataactaaattcctattctcaatgatgatattcataatacaggggtcgtgttatattcatacaaggaaaacattaattataatcaatataaaattaagcttaacaagcagttgccttacttattctacaacattgttgacatattcaaaatcaaccctcaatatcattcacataatgattgttccaacataaaactatactcacatatataattttaattttttgttcttaaatcctatattcatcataccatctttttacctatt

SEQ ID NO: 234725 - DNA, 411 bp, Gossypium hirsutum
gattcaattgggttgttttagttcgaactaaagccagccgatgaatttaagacagaaaaagggtgacgtttgagggtttaacaaaattgggtgactgggaatggatactagcatggcatctgggaatccgtctttcgatgacttgcagaacaagggtgaggctattgatcatccacaaaatgaagacactatggattgtgagtctctaaatatttcttctcaagctgctgtaaaacctaatgggactgtgtctagcagtgttcgagagcttttggaatgccccgtttgttgtaattcgatgtacccaccaattcttcagtgtttaaatggtcacacattgtgttctggttgcaagccaaaggttgacaaccggtgccctacgtgcaggcatgaactcgggaatattaggtg

SEQ ID NO: 234726 - DNA, 348 bp, Gossypium hirsutum
caatatcggtgttgcggtacactgactacaaatagtatccttctgatcatctctctcttgctgatagccaaacgatggctggtattccgatcagattcggaatcattgggtgtgccgagatagcccgcaaagtttctcgagctatccagcttgctcctaacgccactgtctccgccgttgccagccgctccttcgacaaagccgccaatttcgccaaggctaatggcttcccacctgacaccaagatctacggctcctacgagtcccttcttgacgaccccgacatcgacgccgtttatttggctttacccactagccttcaacttaaatgggctggtttgacggctc

SEQ ID NO: 234727 - DNA, 420 bp, Gossypium hirsutum
aaccttgccaacaccaatgcattgatcctgaaggaatttgcaccttcaatccctgcaaagaacattacctgtttgacaaggttggatcataacagggcactaggtcaaatctcagagaaactaaatgtccaagtttctgatgttaagaatgtgattatttggggtaatcattcatcaactcaatatcctgatgtcaatcacgcaactgttatgactccatctggagaaaagccggttcgcgagcttgttaaggatgatgcatggttgaatggagaattcataaccactgtccaacaacgtggtgctgcgatcatcaaagctaggaaactctcaagtgcactatctgctgctagtgcttgttgtgatcacattcgtgattgggtccttggaactccccagggcacatgggtttccatgggg

SEQ ID NO: 234728 - DNA, 268 bp, Gossypium hirsutum
gaaaaagtgaccaatggagcttgcgagtatttgaaaacgcttggaagtgcgcttaatggagaggaattctttgggggagaaaccattggaaagggagatattgttgctcgctctgttggggatttcatttggggcactctagaaattatggggcgaaatatgctgtcagctgacaaattttcccaattattccaatggtgtgaagatttcgcaaattgcagcattgttaaggaaagtttgcctccaagagacaaactactttcctttg

SEQ ID NO: 234729 - DNA, 324 bp, Gossypium hirsutum
gaagaaagctagcaatttgaatcggtgtcgtacggaaaatgttcaggaaccagtacgataccgacgtcactacatggagcccagctgggcgattgtttcaagtggagtacgcgatggaggccgtgaaacaaggttcggcggggatcggtctccgatccaagacccatgtggtgttgggttgcgtcaacaaggctaattccgaattgtcttctcatcagaagaagatcttcaaagtcgacgaccacattggggtcgccatcgccggtctcaccgccgacgggcgcgtgctctctcggtatatgcgaaacgagtgtataaactaca

SEQ ID NO: 234730 - DNA, 343 bp, Gossypium hirsutum
tcgatgtcattcaaaaggacattaagaatcttcttattcttcaagagatataccgggagatgggcctttcttagaggggcaattgagtttaggtaaaatggtttttcaaaaagagatcctgggattgcagccctataccataaagttcttttttcttaggaaatcttgtttttttgagagcgggtgagaaccaacttttgaaaaacttaaaacccttttcttcaaaatggttggcacaaaggactttttggaggggatccctaacttaaacgaagacttcgggtacttgtttattccttacccctcttaatgttttgcaaggcttcacacttaaaacttttcc

SEQ ID NO: 234731 - DNA, 352 bp, Gossypium hirsutum
ggacttttgagggtccataaacgcattgttgatggtttggagggtgatccatgggatacacctacggctgtgggaaccaaggtttcaactaggctgctagtccctgcctcacaagccggaagtttgattggaaaacagggagcaactgtcaaatccattcaggaatcttctaattgtattgtcagagttctgggagcagattctgcagaagaccttcccgtctttgctcttcaagatgatagggttgttgaagttgttgcaaaagcagctggtgtgcacaaagcaatggagcttattgcaactcatctcaagaaattcttattggaccgcagtataatttccgttattttga

SEQ ID NO: 234732 - DNA, 310 bp, Gossypium hirsutum
ctctcttctttgttttccaatagttcgtaacaatggcggtctcacttcaagctgcaggtaccctgatgcaaccaatcaaggttgctgcaccatcaaggaccaatgtgccgctcaggtcctcccagagcgtttctaaggccttcggtttggagcctgttggtgctaggcttacctgctctttgcaaactgacctcaaggacttggctctgaagtgtgttgatgctaccaagctcgctggtttcgctcttgctacatctgctcttgttgtctcgggagcaagcgctgaaggagtttcaaagcgggtaaccta

SEQ ID NO: 234733 - DNA, 379 bp, Gossypium hirsutum
gctttcaatgttcttttccccattgaaaaaatattttcgctagattctttaatccattaagatatcatgggcaaaggtccaggtctctacactgaaatcggcaagaaagccagagaccttctttacaaggattatcagactgaccacaagttcactctcaccaccagctctccaactggagttgctattacctctgccggaacaaagaaaggcgaactctttttggctgatgttaacacccagctgaagaataagaatgtcacaactgatattaaagtggatacctactccaatctgtataccaccataaccgttgatcaacctgcacccgggctgaaagcaatctttagcttcagagtccctgatcagaggtctggca

SEQ ID NO: 234734 - DNA, 382 bp, Gossypium hirsutum
gggggggccacgcgtcctaattaataaaaacaaaattaagaaaggagagagaacaaacaaaaaaagtcttgggtatgtttgttcttgcgctttaacatcaacaacaaaaagaaaaactgaattatcgaaggaaagatctgaaagagaatggcaacttttgcagggactacccagaaatgcaaggcttgtgaaaaaactgtttacttggttgaccagcttactgctgacaacaaagtttatcataaagcttgcttcatgtgccaccattgcaagggtacccttaagctaagtaattatagctcctttgagggtgtcttgtattgcaggcctcactttgatcaactatttaagatgactggcagcttggataaaaatgtttgaa

SEQ ID NO: 234735 - DNA, 324 bp, Gossypium hirsutum
gtttcattgtttatcagagcaagaaaaagaagggaaaatggaagggaaagaaggggatgttagattgggagctagcaagttctcataaaggcaacctattgggacagcagctcagtcccaagatgataaggattacactgagccacccccagcacccttgtttgagcctagtgagttgacttcatggtcgttttaccgagctggaatcgctgagttcgttgctactttcctattcttgtacatctcggtgttgactgtgatgggagttcttaaagacaaaaccaattgtacaactgttggggatcaagggattgccttggcttt

SEQ ID NO: 234736 - DNA, 445 bp, Gossypium hirsutum
ttcctttgttcatattctccctttctgcttcttatttattttctttcaccttttcctttcaaggtacttctctttctcacccttttattttgtatttcgctgttcctctagtttgattcttttttttttatgatttgaattttagattgtagatctgatctttaagaaaattaaaatttaacagatcgagagaaaaaagaatggcagaggagcatagatgccaagcgccagaaggccatcgtctttgcgtcaataactgcggctttttcggaagttcggcgacgatgaacctttgctccaaatgttacagagatctctgtctcaaggaacaggaagcttcttcgatcaaatccgctctttcctcttccccttcgtcttcatcaacggtcgtcgaatccatttctcaggttcctcttttggctctccatgaagtcaacagagaatc

SEQ ID NO: 234737 - DNA, 381 bp, Gossypium hirsutum
ttcatactcatttagcccctttcattagcatcgaaatcactccagttttctttatcactgaaaaatgtcttgctgtggtggaaactgtggctgcggttctggctgcaagtgtggcagtggctgtggaggatgcaagatgtacccagacctgaacgttgccgagatgaccacaactgagactctggttcttggtgtagcaccccagaaagcacactttgagggagctgagatggaattcggggctgagaacggctgcaagtgtggagacatctgcacctgcaacccttgcaattgtaaatgattagagaccgaagccaaagctccctggaagcagagacgcctttgtctttaagaaataatatgttgtgatgtttatgcttt

SEQ ID NO: 234738 - DNA, 436 bp, Gossypium hirsutum
ctaatcactcgcccgctgcgcaatcaccgatcaaagctgaagatgggaagcctgggaaaagcaatatacaccggcggattctggattcgggagaccggtcaggctctcgatcgcctaggctgccgcctacaaggcaactattttttccaggagcaactttctaggcatcggactctgatgaacgtatttgataaatctcctctggtggacaaggatgcatttgtagcccctagcgcatctgtcattggcgatgttcaggtgggaagaggatcatctatttggtatggatgtgttttaaggggggatgtcaacagcattagtgttggatctggaactaatatacaagacaactcccttgtgcatgttgcaaagtctaatctaagggggaaagtgctaccaactaacattggaacaatgtactggaggcatagtgctg

SEQ ID NO: 234739 - DNA, 399 bp, Gossypium hirsutum
ctcaatcatccacttcttctcttctttgaactcaaagtcccagctaatattagaatcatgggtgttgtcacttatgactatgagaatacctccccagtcgcccctgccaggcttttcaaggcctttactgttgaagctccgaaagtttggcccacggctgcaccaaatgcagtcaagagcattgaggttgaagctaatcctagctctggaagtatagtaaaaatcaactttgttgaaggccttccattccaatatatgaagcaccagatcggaggacatgatgaaagtaatttttcatacaggtacgatttaatcgaaggtgggcctttgggggataagcttgaaaaaattagctatgagaacaagtttgaggcagctgcaggggggggaaggttttgc

SEQ ID NO: 234740 - DNA, 476 bp, Gossypium hirsutum
accgatccggattccgcgctcgagcacgcgtgcgaatcatcaccttcagcataaaaaaccattccctttattgggggttgtttaagcttgtaaatcttatacccggtcgttgttacatggtccaggcctagatgagtaggaagtcgcggagggcgtcacattagatggatcgcgagcccgggcggagcggtcgtcggagcagatcttgggggttgtagcttatagtcaaatgggatctttgagggccgaagaggggaaaggttacatgtgtgctggaactctcaaatgagaaagcccatcctaagcggcgacagtagataatctaacagaacgattaaagcagagacttgaacgggtgctcgacactgatgttgctacatatgcaagatcacaagggaagagtccagttacttttggtcctacggatctggtttgttgcaggaccttgcaaggtcacactggcaaggtttacttct

SEQ ID NO: 234741 - DNA, 352 bp, Gossypium hirsutum
ggccaaaaagaccgccaaggaatggaagggtctccgcgtaaccgtcaagctcactgtccagaatcgccaggcgaaggtcacggtggtaccgtcggcggcagcgctggtaatcaaggcattgaaggaaccggagagggataggaagaagaccaagaacatcaagcataacgggaacatcgcactcgatgatgtcatagagatcgctaaagtaatgaggccgaggtccatggctaaggatttgagagggacggtgaaggagattctgggcacctgtgtttccggtgggtgtaccgtcgatggtaaagaccctaaagatttgcagcaggagattgatgatggggaatgtgatgtt

SEQ ID NO: 234742 - DNA, 396 bp, Gossypium hirsutum
  unsure (1)..(396): unsure at all n locations
cagatctcctcatctccactttttttccttcttcaaatacccaatggccgtcactttcgcaaatctccacaccgagtctggtcttaaagctcttaatgacttcctctctggaaaatcttacatctctgggaataagctgaccaaggatgacataaaagtttatgccgctgttctgaagaaccctggtgattctttccccaatgttagccagtggtataattctgtttcttctcaacttgccgccagcttccctggtaaagctgttggcgttgggtttggtggcaaagctgctccagctgagtctgctaaagctgaggctgctgatgatgaggaccacttggatctatnttgggatgagacggaggaggataagaaggctgcagaggagagggaagc

SEQ ID NO: 234743 - DNA, 378 bp, Gossypium hirsutum
attttgggttctttttgcttctagattttgggggggtttgttttaaattataaatccataactgagagatcatagaaaaagggctggtccttttatcgagctaaagcaaggaccctacttttttaattataaaaaatgctttttctttttaagttaaaaagattttaaaagacccaaaaaaagtaaaaaaaaaatgtctgttgcagagctgaaagagaagcacgcggcggcaacggagacagtgaataatctaagagaacgattaaagcaaagacgtcaacagttgctcgacactgatgttgctacatatgcaagatcacaagggaagagtccagttacttttggtcctacgggtctggtttgttgcaggaccttgca

SEQ ID NO: 234744 - DNA, 443 bp, Gossypium hirsutum
aaacaacatagatataataagcacctccccgtaagcgaaccacaaaggaaaggtgggagagagacccggaggcagtggctaaggaagttagtgaagaaggacagggtcgtaaggactatgtggaccctccaccggcacctctgattgacatggctgaactcaagtcatggtctttttacagagccctcatagctgagttcatagccactctcctcttcctctatgtcactgttgctactgtaattggtcacaagaaacaacatgttgcatgtgatggtgttggtctcttgggtattgcatgggcttgcggtggcatgatctttatccttgtttactgcactgccggtatctcaggtggacacattaaccctgcggtgacttttgggttgtttttggcccgtaaagtgtctttcattagggctgtgggttacatggtgttacag

SEQ ID NO: 234745 - DNA, 401 bp, Gossypium hirsutum
aggaaatttggtatcaaaagctaggagttggggagtttcatggcggggcggaccaataatcttcattcactgagcaagatccatgcaggcttaattatggtggggtgagggattcgtctgatgacagcatcaatcaaagggggatatatagtagctgtcttaacactgatgcgagcaatggttgcagcaccttgattgatccttttgtttccagtgccattctagatgacttcttctcattggaagatgctgatttttcaaaaccctccacattgggtggttgggaactttagctcttgtcaggatggtcagtctcagattacctgtgttagccttgcagattctcaggctttttctcgtctagacttgcctgacaccttcggtggtaaaaggcgatcttt

SEQ ID NO: 234746 - DNA, 445 bp, Gossypium hirsutum
aaaaaagaagcaaaaatggtgctgtgggagatcgcattgggaacggcttatttcttggggcttaaacgaagttacaagcttgctttgaagattcagcgacggattattagtcgtaaccagccacggcttcaacaatttgttcaaagaagaacgcgtgttgtattcgacatagcactcaaggttcacaggaacatacagcatagagacttagaagttggtcgaaaccttggtgattgtatcctccgctggctccataaaataaaaccttcagctcaaatccgaggtcctccgcctcatcaagaacccaaccacggtactggcaaagcaaacatgaacatgccaaagcaagtgacaaacacatcttcaccgaaaactccacgaagcaaccagtcacctcgaaaccatgatgctgtagacatcttttagttcattaacaagtcatggc

SEQ ID NO: 234747 - DNA, 370 bp, Gossypium hirsutum
aggaaattaaatttctttaattttttctctttggcgacctaagtctcttttatttgcttgtttcaccatgaccaagcagcaggctaactggtctccttacgacaacaatggaggatcttgcgttgcgatcgctggagctgattactgtgttatcgccgccgatactcgaatgtcaaccggttacaatatactgacccgagagtactccaaaatctgtaaacttgcagataaatgtgtcatggcatcctcaggatttcaagctgacgtgagggctttacaaaagcaactggcagctaggcacttgatttatcagcatcagcacaacaagcaaatgagctgccctgcaatggctcaattgctttccaacaca

SEQ ID NO: 234748 - DNA, 337 bp, Gossypium hirsutum
ggaaagcgaactcgaaactcgttggcatagctaactgagacagatatgaactcaccgcagcttccacagacgcgtgggcgcgtgttatcctcatccgagataaacaaatccccagccgggtcaggaggagatcttgaatcttctttaatccaaatctatcaccatcaccaccacaactccctcaagctccgggatcaggccgagaaagcgaagaaagatgcgattaagaaagcggggagagtgtcggatttgttggtggaggcggtgaacggaggtgtgcaagagtcgtttataaacgagaagcgaatcgaggcggagattcgtgctttggcttcta

SEQ ID NO: 234749 - DNA, 379 bp, Gossypium hirsutum
agaaacttgaggggaagaatcttgctatcccttgcttttctctcgcaaaaaattctcaaacttgtttttaacgttcgctgaatactatcgctcatttcttccctcagaaccctaatcgataactgaagccatttaatcatgtttgggcgtgttccaaaaaaatctgataacactaagttttacgaagtacttggggttcccaaaagtgcaagtcaggatgaattaaagaaggcttataagaaagctgcaattaagaatcatccggataaaggtggagaccccgagaagtttaaggaactggctcatgcttatgaagtacttagtggcccagagaagagagaaatatatggtcaatatggtgaagatgctcttaaagagg

SEQ ID NO: 234750 - DNA, 439 bp, Gossypium hirsutum
  unsure (1)..(439): unsure at all n locations
gctggttctgttattcattcgctttgctttagccccaacaggtactggctttgtgctgccactgagcagagcatcaagatctgggatctggaaagtaagagtattgtggaagacttgaaggttgatctcaaagctgaggctgagaaatctgatgtcaccgacaatgcaaacaagaagaaggtgatatactgcacaagcttgaactggagtgcagatggaagcaccttatttagtggttatacagatggtgtaatcagagtttggggaattggtcgatactaagaccaacattcatgcatgcatgttgtgccttccaatgagtaatcatatagtattaaggaacatgtagtgatacttntagttgcttctcttaacattttcaaacctttttaaagattttgtttaaaatgtgggaaggattggttttaatttgttggag

SEQ ID NO: 234751 - DNA, 303 bp, Gossypium hirsutum
tatcacaccgtgaaacgtagccggtcggaaaacccagacaggcaaaagatgagcggaggggagctggagtggtgtgtgtcggttccaaaggttgaacttcatgctcacctcaatggttcagttaggaactctactctctttgaacttgcaagagttttgggtgataagggtgtcattgttttctcagatgtggagaatgttataatgaaagacgaccgttcgctacacgaagtatttaagcctgtttaccttatccacattctcactactgatcacttcactgttacaaggagtactaaagag

SEQ ID NO: 234752 - DNA, 402 bp, Gossypium hirsutum
agctttcctttttttctctctatattttctcatctccttttccaccgccgtcgatctcgatccttatccccgttttcaaaaaagctccaaaaagatggccaatgctgcatcgggaatggctgtgcatgatgattgcaagttgaagttcttggaacttaaggcaaaaagaacccaccgctttattgttttcaaaatcgaggagaagcagaagcaagttattgtggagaagcttggtgagccaaccgagagctatgaggattttactaaatgtcttcccgctgatgaatgtcgttatgctgtgtacgattttgattttctaacggccgagaacgttccaaagagcagaatctttttcattgcatgggtctccgatacatcaaggatcaggagcaaaatgatata

SEQ ID NO: 234753 - DNA, 417 bp, Gossypium hirsutum
aatttttagattttcaattataatcggaaaaaaaaaaccaaaaaatcaaataaaaatgcggaggataattgctgcaagttctttttgcagcaaaattttgagaaaagaaagacagcgggcttttttctcttcaacttccttactctttgatgaaactcaattacagttcaaagaaagtgttaggcaatttgcagaagaaaatatagcgcctcatgcttccaaaatcgaccaatctaattctttccccaaggaggttaatttatggaagctcatgggggattttaatcttcatgggataactgccccagaggaatatggaggacttgggcttggttacttgtatcactgcatagcaatggaagaaataagccgtgcttcggggtcggttggtctttcctatggggctcattctaatct

SEQ ID NO: 234754 - DNA, 392 bp, Gossypium hirsutum
ttttaatttgccacttaatctctctctgtcctttccttttctgttctctttcttccgggctccccctttcacatcaaccctaaccctacctcaccaatcaggatacaacatgaagggaggtaaatccaagtcagatactaagagctccaggctcgccgtgaacaagaaatctagcgccaaagctggaaagaaatcggggaaggcggctaaggatccaaacaagccaaagaggcctgctagtgccttcttcgttttcatggaggagttccgtgagcaatacaagaaggaacacccaaaaaacaaatctgtcgcttgtgtgggcaaagctggtggagaaaaatggaaaagcttgtctgatgctgaaaaagcaccttatatagcaaaggcagaga

SEQ ID NO: 234755 - DNA, 352 bp, Gossypium hirsutum
tattttttgataatccggagttcaatcatctaaaagacggcctaaaatcctttaatcaggtctgagcttatgggtcggtgggcctatttcatcaaactaagattgatgtctgatcttgacactcaaagtgctactggcttagagccctgtggtgaagcagatgctgtggactcaggcgcgggtgcacaggagtatgtgcatattcttattcagcaaaggcatgggcgtaaaagcctgacaactgtccagggggtgaagaaagaattcagttataacaagattcttaaagacctgaagaaggcgtattgctggaatgcggccgtggtccatgaccctgaattaggacaggtga

SEQ ID NO: 234756 - DNA, 434 bp, Gossypium hirsutum
cattaaaacagggaaagaaaagcagcgtaatgggtgaagaagtgaaggtttttggatgagctgggcaagcccttacagctacagggcagagcttgctttgaagttgaaaggtgtttcttatgagtacataaatgaggatatctttggcaacaagagcgatttgcttttgaaatacaatccggttcataagaaagtcccggttcttcttcacaacgggaaaccaattgtagagtctcttgttatacttgaatacattgaggaaacttggaagcataatccctatttgccacaagatccttatgacaaagctaccgctcgattctggatcaagttcatcgacgaaaagtgctttcctaccctttggctagctgcatggagcgccgagaatgagcgagaaaaagtgacgaatgaagcttgcgagtatctgaaaacgc

SEQ ID NO: 234757 - DNA, 389 bp, Gossypium hirsutum
cggaaaaaaaaaaccaaaaaatcaaataaaagtgcggaggataattgctgcaagttctttttgcagcaaaattttgagaaaagaaagacagcgggcttttttctcttcaacttccttactctttgatgaaactcaattacagttcaaagaaagtgttaggcaatttgcagaagaaaatatagcgcctcatgcttccaaaatcgaccaatctaattctttccccaaggaggttaatttatggaagctcatgggggattttaatcttcatgggataactgccccagaggaatatggaggacttggtcttggttacttgtatcactgcatagcaatggaagaaataagccgtgcttcggggtcggttggtctttcctatggtgctcattcta

SEQ ID NO: 234758 - DNA, 358 bp, Gossypium hirsutum
aatttttagtgcagcacgtgtctggaggatgttcctagtctttgggcattacaggctccgggtgttatatgggggcctcgcacggtggcgttcatcaggttatgatgttgaatccagtgcttgtagtgatgctattttgaaagccagtgctgctagtgcggcaatagagaaagtttatcgggggcaaactggtggaccactcacatttcagacaaaatttcaaacgcatcttgtctggacacttgctcaggttagaagaaacattgaggaaaagactcaccaacatatagctgcccgtaccaagcccagatgttatggtgctgcaccagaacctcgtaaaggaattagaagtggccat

SEQ ID NO: 234759 - DNA, 294 bp, Gossypium hirsutum
acgattttgcagatcggttctctaatccttttttcgggtgtagcgttgtttatacggtcggttgttgttgaagaagtgctactaccatggctacaaagaagagcgttggggacttgaaggaagctgatttgaagggaaagaaagtgtttgttagagtcgatctgaacgttccattggatgataacttcaacataactgatgacacacggatccgtgccgctgttcccaccatcaagtatttgacgggtcatggctctaaagtcatcctctctaggtatttgggacgcccaaagg

SEQ ID NO: 234760 - DNA, 430 bp, Gossypium hirsutum
ggagagccttttttttgtgtagcgattatcaggcactcttttctttaagcatacagcttgtctccaacagttttataatgggcaaggagaaagatcacatcaaccttgttgtcattggccatgtcgactgtggcaagtgctccactactggtcatttgatctacaagctagggggcattgacaaccgtgtgattgggaggtatgagacggaggctggtgcattgaacaaaaggtgattcaagtatgcttgggtgcttgacatgcttaaggcttagcgagcacggggtatcaccattgatattgcactggggaagtttgtgaccaccaaattctattgcaccgctattgatgcacctggacaccgagactgtattaagaacatgagtaccggtaactcacaggctgactgtgctgatctcattattgactc

SEQ ID NO: 234761 - DNA, 409 bp, Gossypium hirsutum
cttttctccgattagggttccttcattattctctttaggaaattttaattttcaactggttttcgtttattctcttcgattttgggttaaaccctagaaggctcctcgcgaaagtgtcagatggcaactttagctgattcattccttgcggaccttgatgaattatcagacaacgaagccgatgttctggaggaagaaaataatgatgttgcaaacatggaagaagatattgatggtgacctcgcggatatcgaaacgcttaactacgatgatctggacagtgtttccaaattgcaaaaaagtcagagatacattgatataatgcagaaagtggaagatgcgctcgagaagggttctgatatatcaaatcagggcttggtactggaagatgatcctgagtatcagctga

SEQ ID NO: 234762 - DNA, 326 bp, Gossypium hirsutum
atttattgaaacggttttgttgagaattgagagagcatcaaagcaaagcaaagcggggcaatgtctactttgagcgttccgcctgttcttacctctcctagagacgatgctattcagctttaccgtgcttttaaggggctgggatgtgatactgcagcagtggtcaatattgtttcccatcgtgatgtgacacagcgtactttcatccaacatgagtataaaacaatggatgctgatgacctactcaaaccactgaagtccgagctcagaggaaaactagagactgctgtcttgctatggatgctcgatcctgcgcaacgtggtgc

SEQ ID NO: 234763 - DNA, 290 bp, Gossypium hirsutum
  unsure (1)..(290): unsure at all n locations
ggaactcataactcctcaaaattcttcttcaatggcgtctcgagttcttgttttggcttcaattcttattttctcttggtttgcagagacatgctatggggcgatctcattctcatcccttcaaagaacacttgttgttactgcttctcatagacaaggacttttgaaagccggngaagacaagatcacagtgagatggggattgaaccagagtttcccggccggaagcgactcgtcttataagaccatcaaggtccagctttgctatgcacccatcagccaagtcgacc

SEQ ID NO: 234764 - DNA, 114 bp, Gossypium hirsutum
gaaggtgtagtataagtgggagctctcaggcgaaattgaaataccactacttttaacggggggttacttataccgtgaatcggatgcgtttcaccccccctttttttggaccca

SEQ ID NO: 234765 - DNA, 341 bp, Gossypium hirsutum
cttaaagcctgccatataatcatataaccaggctccgtcgtggtactcttcggccaccacaatgccgaaaatcgccttgggaacaagccaagaggctgctcagcctgactgcatcaaagcccttgtggtcgagtttatcaccactttcctcttcgtattcgatggagtaggagctgccatggccgccgatgagtcgggggcaaatgcgctggtgggattgattgctgcggcggtggctcatgcccttgtcgtgcggcgtatgatatcgcccggacacatactaagcggacattttaacccaggcggcacgcttgagttgctattatgagcccacatcacgc

SEQ ID NO: 234766 - DNA, 418 bp, Gossypium hirsutum
aacatagcagccatggcagtccgtatgcttcttgggttaggtgtcctgctactctgccttgcaaaggtttcatctgatctgaaggcagaagaagttataaccaatgtcggtgaggtgggttctttggttaccagaggcggaaacagaagactgatgctagagattgattgtggaggattatgcaagaaaagatgcagtcaacactcgaggccaaacagatgcaacagggcgtgtgggacttgctgcttgaggtgcaagtgcgtgccaccggggacttcagggaacagggaggtctgcgggacctgctatactggcatgaccacccatggaaacgttgccaagtgcccttaacctttacgtcgcccaatatgtgttgcagccatcaaggggaaaaatgaaatgtttgtttgtgtaatat

SEQ ID NO: 234767 - DNA, 423 bp, Gossypium hirsutum
atttgttttcctctaaaaggaacaacagagaagaaaacttcatcaaacaagggaaaaacttaacaagtaaaacaattgagagaagatgtcctggcaagcgtatgtagatgatcacttgatgtgtgatattgagggcaaccatctctctgccgccgctatcattggccaagacggcagcgtttgggcccagagctccaatttccctcagttcaagccagaagaaatcactggcatcatgaatgacttttctgaacctggatcgcttgctccgactggattgtaccttggtggcacaaaatacatggtgatccaaggtgaacccggagctgttattcgagggaaaaagggccccggaggtggtactgttaaaaagaccaacctgttcttgatcattgagatctatgacgagccaatgacttctgg

SEQ ID NO: 234768 - DNA, 361 bp, Gossypium hirsutum
ttctgatacttgtaccggtgaaaatggaggcattgggcggtaattgcgcgttttggggttggaaacttccggagataagaaacacaaagaggccgtttccgtcaaagtcaaaatcctcggattcatccgcagagtcaacgggcagtcgaggctaccgtttcccgttgaagcaagcggtgacagcttcctcactcgctctcacgggcgatactattgctcaactaagctcccattggagaaaacggaaagattccatttctggttccagtgatacaagtaaggatatcatgccaagcgtgatttcagatcatgattggcttcgagccttgaggatgacttcttatggtttccttttatatta

SEQ ID NO: 234769 - DNA, 355 bp, Gossypium hirsutum
aatttagggtttgcacgagccgtagtgcgccgttcgcatcaggaagaaatggcgggccctttgctgtctaagaagattgtgaagaagcgtgtcaagaagttcaagaggccccaaagtgaccgcaagatcttcgtcaagacaaactggcgaaggcctaaaggtattgactcccgtgttaggaggaagttcaagggatgcactttgatgcccaatattggttatgggtccgacaagaagactcgccactatcttcccaatgggtttaagaaatttgtcgtgcataacgtccaagagctggagcttctcatgatgcacaacaggacatactgtgctgagatagctcatgatgtttcaa

SEQ ID NO: 234770 - DNA, 421 bp, Gossypium hirsutum
tttcatttcacccttttccgccatatcttcagtgtctcactctctccgtgcttcactgccgcttctcctttccctcttcaaagaaaatgcgtgagatccttcatattcaaggtggccaatgcggcaaccaaatcggagccaagttctgggaagttgtttgtgctgagcatggcatagatgcaactgggcgttaccaaggagacttggatcttcaacttgagcgaatcaatgtctactacaatgaagccagttgtggtagattcgttcctcgtgctgttctcatggatcttgaacctggaaccatggacagcatcagatctggccccgtcggtcagatttttagaccagataacttcgtttttgggcagtctggtgctggtaacaactgggctaagggccattacactgaaagtgctgagtt

SEQ ID NO: 234771 - DNA, 334 bp, Gossypium hirsutum
aaaataaagaagccccaagagaaaagaaaaaggaggtgtgtggaatcttcaaagaagaccaggaggaagaatccttcccttttttctttttttccccagaaagagcgattcctttcccttcccttctagttcctcgtttactttttcttcttctttcccttctgattataataagatttgggtttcgttatcctctgaaactctcgtctctggtttgaaaggagattgaaaaaatatggctgaagaacatagatgtcaagcaccacagttatgtgccaacaactgtggatttttcggaaccccgacgactcaaaatctctgctctaaatgtatc

SEQ ID NO: 234772 - DNA, 420 bp, Gossypium hirsutum
aaacacccaaagtaaaacgagtggagactttgagacaacatcttttaggtcccccctaaaaaagggtttgtaagagaaatggctactttcccagtgatcaacttagagaagcttaatggtgatgagagatcaagaatcatggagcaaatcaaggatgcctgtgaaaactggggattttttgaggtgatgaaccatgggattccacatgattttatggacactgttgagagattaacgaaagaacattataagaaatgtatggaacaaaggtttaaagaactggtagcaagcaaggctcttgaaggacttgaggctgaagttacggatatggattgggaaagtacatttcacttgtgccatctccctgaatcaaacatggctgaaatcccagatctcagtgatgaatataggaaagtgatg

SEQ ID NO: 234773 - DNA, 292 bp, Gossypium hirsutum
ctcgtgccatttagtggtttaagggattttttttcattcggtgcttctcacgctcgattagcttacaaaaagagagaatggccaactgttacccaactgtcagcgaggaataccagaagtcatttgaaaaggccaagaggaagctcagaggtgttattggtgagaagaactgtgctgcaatcatgcgtacggatagcgtggcacttacgtggaacttttgatgttaaaaccaagaccggacgtgctatttgaaccatgaatgcatgctgctgagctctacatgctcaaacaa

SEQ ID NO: 234774 - DNA, 414 bp, Gossypium hirsutum
  unsure (1)..(414): unsure at all n locations
aaaaaaacaagtgatctgataaattgaagactttatttctgttaacatccattatgagtactgctggtcaagtcatccgttgcaaagctgcggtagcatgggagtcggggaagccactgtcaatagaggaagtggaagtggcaccaccgcagaaggatgaagtccgtattaagatactcttcacttctttatgtcacaccgatgtctacttctgggatgctaagggacaaaaccctctgtttcctcgcatactaggtcatgaagctggagggattgtggagagtaggtgagggggtgactgatctaaagccaggtgatcatgttctccccatcttcacgggggaatgcanggagtgtccccattgcttgtcagaagaaagtaacatgtgtgatctcctcagaatcacactgata

SEQ ID NO: 234775 - DNA, 420 bp, Gossypium hirsutum
ctcactcaacatttccatttccaatctccagctcccaaggtaaatatgccgggcggggacatatcagttggccggcccgaagaggcgactcaccccgatgctctcaaggcagctttggctgagttcatctcaaccttgatcttcgttttcgctggatcgggctcaggaatggcttttaacaagttgaccgacaacggagcaacaaccccggccggtctcgtagccgccgctctagctcatggcttcggtcttttcgtcgctgtctccgttggcgccaacatctcaagtggccacgtcaaccccgccgtcaccttcggtgctttcgttggcgggaacatcactctcttgcgcggcattctttactggatcgcccaactcctacgctcaaccgtcgcttgcctgttgcttaagttcgctacc

SEQ ID NO: 234776 - DNA, 431 bp, Gossypium hirsutum
cggacgcgtgggttgaagtttcctttctcgattttctatttagccaaacaagatgcagatcggggttaagactctaaccggcaagactatcactctcgaggtcgagagctccgatacgatcgacaacgtgaaggccaaaatccaagataaggaaggcatccctccagaccagcagcgtctgatcttcgccggaaaacagctcgaagacggccggaccttggccgattacaacatccaaaaggagtcaactctccacctcgtcctccgtctgcgcggtgggatgcaaatcttcgtgaaaaccttgactggcaagacaatcactctcgaggtcgagagctccgacacgatcgacaacgttaaagcgaagatccaagacaaggaaagcattcccccagaccagcaacgtctcatctttgccggaaaacaactcg

SEQ ID NO: 234777 - DNA, 379 bp, Gossypium hirsutum
ttttcttttaagataacacccaaaaatgtgtggaggtgcaattatttccgagcggggggcccccaaatatgaccggaaatttacccgcgatgacctttggtctgaacttgacatattctccgacctcctaggtttcgacaacaatggcaaaagctttgtcaatcatcagtttcataacaacaacaacaacaagctcattaatccaaaagacaatcaacttaacaaagagagaagcgagacgattcataagacaagccaagtcactaaaaaggttgaaaagactcatcgaactcggaaaaacttttacagaagaataagacaaagaccatggggcaaatgggcagctgagattagagaccctcaaaaaggcgtccgagtt

SEQ ID NO: 234778 - DNA, 419 bp, Gossypium hirsutum
cttcttctatggccacactatgatctatcgctacgcttttgtctagttagatcgtttgttttgttggttttgttcctcggcatggctgacgataaggaaatgtctacccctgttgttgaccggaacgatcccgtcaccggtcacataatttccacaactattggtggcaaaaatggagaacctaaacagaccattagttatatggcagagcgtgtagttgggacaggatcattcgggattgttttccaggcaaaatgtttggaaacgggagaaactgtggctataaagaaggttttacaagacaggatatataagaatcgtgaactgcaattgatgcgtgtgttggatcacccgaatgtgatttccttgaagcattgtttcttttccacgacaaccaataacgagcttttcctcaactt

SEQ ID NO: 234779 - DNA, 370 bp, Gossypium hirsutum
  unsure (1)..(370): unsure at all n locations
tgacgatctgatggatcaatatgcggctagggtttcggctgctgccgagaagattggaggtggagtgctggatgtgactaanctagttctcgaggcattctctgttcaaaagaaacttcttatcgagatcaagcagactcagaaacctgatatggcgggcttggtcgaatttctcaaaccactgaatgaagtgatcttgaaggttaatgctatgacggaagggaggcgatctgatttcttcaaccacttgaagagtgctggagacagtctttcagctttagcatggattgcttacacaggcaaagattgtggtatgagcatgcctatcgcacatgtggaagaaagtnggcagatggctgaaatttataac

SEQ ID NO: 234780 - DNA, 422 bp, Gossypium hirsutum
  unsure (1)..(422): unsure at all n locations
ttctcactgccatgttttgccaaggaagtgtccattgtctctctcttgcttatgtgcgagacaatgttccggaagggcgacgagcttcancttttgggattctgtctggtattgggtcttgtgcatttgtctgcggaactctgtctactcgctttctctcgactgcctccactttccaggtttcgacagcaatggcgatgctttcagcggtttacatgagggttttcctcccggattcgatcataaatgataacctttcaaccccaattatctccgaaggaaaatctgatggtgttgctaatcaaaacgaggaaccggacaagaaaatgcaggtgttcaaaaccatgccttccatggaggatatgcttgccttgttgaagagcagcttgacattttcacaagcggcaattgtttcatttgtc

SEQ ID NO: 234781 - DNA, 404 bp, Gossypium hirsutum
gtcgatccatttcttggtttaactgaatttttctgaaaaccttcttctcatgggggagcgtctttaccaatatgggaaatacacatgtttttccaacttgacacaagttgatgacccacatgaggaggcaacggcgggccaatactgcatacaaaaaatccaaccttggaaatgaatggaagaagccatttgctggtttttcccataccaaaagcattgtacttgagaagataggttttgaaactattcaaccccactctgctattaagaagtgtgctacagtctaaatgattcaagaatgggaataagatttcctcatttcttccaaaatatggttgcttaaactacattgaagagaattttgaggtatttatatcctcatttagaccaaaggttcatacttt

SEQ ID NO: 234782 - DNA, 417 bp, Gossypium hirsutum
gaaaccccatcactcatttcacctccaatcctcttaaaagcagggcattcaatgtgcaggagaccaataattctcgagtcaaccaacgaattgcaacaatctcggctcatctcaacccacccagcttttcccacatggagggtagttcgggtttgggtcgagctgactgccgagccaaaggtgggttaactggtttcaaggtggcgattttgggagcggcaggtgggatagggcaaccgttatcattgttgatgaagatgaatcctttggtttctgttcttcatctttatgatgtggttaacactcctggtgttactgctgatattagccacatggatactggagctgtggtacgtggatttctggggcaacagcaattggaggaggctctaacaggaatggaccttgtaattattc

SEQ ID NO: 234783 - DNA, 430 bp, Gossypium hirsutum
gaatgatccctttgtgatgaaggcatggaccaaaacttaccctgagaacaaagatgtcaaggttctagctgatggttcagcaacatacacccatgcccttggtcttgagctcaaccttggcgataaaggtctcggcactcgttctaggaggttcgcactcttggtcgatgaccttaaggtgaaggcagcaaatgtcgaatctggaggggagtttaccgtgtcaagtgctgatgatatccttaaagctctttagatttgctttgtgcctaataaggtctatgttttcttggcctcggctattaatatagattgctttatttagcacaccttttatggtattgttaataataaaatacgtctcttggaggatgtaagatcgaacgtgtttaagagcgaatatgttccgttttgtatcgaagaaccatgttct

SEQ ID NO: 234784 - DNA, 425 bp, Gossypium hirsutum
gtttcttttagcttacagcttccattgtttttcagtagtgaagagctaaaaaagaagggaaaccaatggaggggaaagaagaagatgttagattgggagcgaacaagttctcagagaggcaacctattgggacagcagcccagtcccaagatgataaggattacactgagccacccccagcacccttgtttgagcccagtgagttgacttcatggtcgttttaccgagctggaatcgctgagttcgttgctactttcctattcttgtacatctcggtgttgactgtgatgggagtccttaaggacaaaaccaagtgtacaactgttgggattcaagggattgcttgggcttttggtggaatgatctttgctcttgtttactgcactgctgggatctcaggtggtcatatcaatccagcggtgaca

SEQ ID NO: 234785 - DNA, 425 bp, Gossypium hirsutum
ctttcctcctagcccaaaaaaaaaaaaccctctttcctttctctcgttcttttgcccgggcaatcatgtcttgcttcattagcaaatatgccgatgagttggctaaaaacgctgcttacattggaacccctggaaagggtatccttgctgctgatgaatccactggcaccatcggcaagcgtctttcaagcattaatgtagagaatgttgaagataacaggcgtgctctccgtgagctcctattcacaactccaggagctcttcagtacctcagtggtgttattctctttgaggaaaccctttatcaaaaaaccgcttcgggcaagcccttcgttgatgttttgaaggaaggtggtgtcctccctggcatcaaggtcgacaagggtaccgttgagcttaacggaaccaatggcgaaactttcacc

SEQ ID NO: 234786 - DNA, 433 bp, Gossypium hirsutum
ctttcttctccatattttcctctgtggagaacccatccccctcctttagggtttagcagtgaaaaagagaaaaacaaaagtatggcgaccgccactgtccccgccgccgtaaggcagctttctcctaaagaagccgacatccaaatgatgttggccgccgaagtccatctcggtaccaaaaactgtgacttccaaatggagcgttacgtcttcaagcgtcgcaatgacggaatctacatcatcaaccttggcaagacctgggagaaacttcaacttgctgctcgtgttattgttgctattgagaaccctcaggacatcattgtccaatctgcaaggccctatggtcagagagctgtactgaagtttgcacagtacactggttgtcatgcaattgctggaaggcacactcctggtaccttcactaaccagctct

SEQ ID NO: 234787 - DNA, 423 bp, Gossypium hirsutum
cgataaataaaaaatgagctttcttcaggccttgtcaattttccttttgctttggggggatgtagtcgtaggatcagctgagcagtgtggaaggcaagcaggcggtgctctttgccccggtggtctatgttgtagccaatttggctggtgtggcagtactgctgactactgcacagttcctggttgccaaagtcagtgcaacggtagtggccctgcccctgggcctggtgggctaaccaatcttatatcaagagagacctttaatcagatgcttttgcataggaacgatggggcttgtcctgcccgtggcttctatacatatgatgctttcattgctgctgcccgttcttttcctgcatttgctacaactcgtgaccaagctactcgcaagagggaaatagctgcccttcttagcccaaactt

SEQ ID NO: 234788 - DNA, 419 bp, Gossypium hirsutum
cagaaatggatgcaacgatcagtcctggattataccctttgcaccgttgtaaaactggccatctggtgaggcatgctcagggggttcataatgtagcaggggaaatagatcacgctgcttattcatctgaagaatatttcgatgcccatctcactcctctgggctggcaacaggttgatcatctgcgcaaccatgttcatgaaactggactttctaagaaagtggatttggtcattgtttcccctttgctcaggactatgcaaactgcggtgggagtctttggtggtgaggggtataaggatgggatagaagttcctccactaatggtggcaaatgcagggcaaagtgaccgtcctgagatttcaagcttgaattgcccaccatttgtagctggtgaactttgtcgagaacatttggga

SEQ ID NO: 234789 - DNA, 294 bp, Gossypium hirsutum
gaagaataggctttctggtgagatacataacctgttctcaaattccgtgtcttggaagattgaagacttgaatttgagtaataacattttctatggaagcttgcctcaatctttgggcaatttgacttatttgatgtacttggatcttcatggaaataaatttactggtgccattccttcagaaattggtaacttgatgcaactagagtattttgatgtatctggaaacagattatccggacagattccagaggaagtgtgcagtttgttcagtctgttctacttgaatctagc

SEQ ID NO: 234790 - DNA, 430 bp, Gossypium hirsutum
gtttacaacaagaaatccaagcacccaataaatctaaaaggaataatggtgggaaatgcagtgacagacaactattatgataaccttgggacagtgacatactggtggagccatgccatgatttctgataaaacgtatgagcaactcatcaacacatgcgatttccgacggcagatagagtcgaacgaatgcgaatcgttgtattcttatgccatggatcaagaatttggaaacattgatcagtacaacatatatgctcccccttgcaataactcagatggcagccgttttaccaggcataatatgcgattgccttatcgaccacattcgattttcaggcagttatcaggctatgatccatgcactgaaaagtatgctgatatttactacaacaggccagatgtgcagaaggcactccatgccaacacaa

SEQ ID NO: 234791 - DNA, 423 bp, Gossypium hirsutum
atttccaccacttattctctatggccaattctttgatcccatcatcttcacaaaaccgagcgttgtaagcacaaacaagcaaattcactagccacccatctccctattctcaatggcaatggcaacccaagcctccctcttcactccatcaaccctccgcaccccaaaatccggcgaccgcatcgccgccgtgttacggaaacaaccaccattcctaacactccctagcttcaagtccccaaaaatcatcatcgccccacgcaccatcaaagcctaagcaacctaagagaaagccgagacaaccgccacaaaggaagcaccagtcggtttcaccccaccagagctggacccaaacaccccatcaccgatcttcggcggcagcaccggcgggcttttacgcaaagcacaagtggaagagtttta

SEQ ID NO: 234792 - DNA, 334 bp, Gossypium hirsutum
aatctttccagtttcaattttctcacaacaaaactgaaaatgtcttgctgttcaagaaaatggggctgcggcgctgattgcaagtgtggcaatggctgtaacggatgcagtatgttccctgacataatagagaagactacaactgagactattgttcttggtgtggcaactcagaaaatgcactttgagggatctgagatgggagttggggttgaggttccattccccctgggagactacctaatatgctatccttggacttgtggaatgtgaacctcatacataagaacaatggggcttgtcattctaactaaatatatactattactgtttt

SEQ ID NO: 234793 - DNA, 345 bp, Gossypium hirsutum
gaaagagagagtttcttcttcgctgctgcggaaggtttattttctttcccaaagaatgaaagctttttctgcaggagcgttcaagtttttaccaatccaaaatttcaatttaaagaaaaaggagaaaacagaaatggctcgctctttctcaaacgctaagcttttctctactttcgttgtcgatggaatctctaacgttatctccagacgaggatatgcggcggcgtcacaaggaattgtgtcgagtggaataagagatgtctggcggagctaaagagaaggtttcatgggttcccgacccgggtaccggatgctacagacccgagaactgtgccaacgagatcg

SEQ ID NO: 234794 - DNA, 426 bp, Gossypium hirsutum
agaggccttcagacaagcctctccgtctcccacttcaggatgtgtacaagattggtggtattggaactgttccagtcggccgtgttgaaaccggtgtcttgaagcctggtatggttgtgacctttggcccgtctggtctgacaactgaagttaagtcagttgagatgcaccatgaagctcttacagaagcacttcccggtgataatgttgggttcaatgttaaaaacgttgctgttaaggatctcaagcgtggttttgttgcatccaactccaaggatgaccctgctaaggaggctgccaacttcacttctcaggtcatcattatgaaccaccctggacaaattggaaatggatatgccccagtccttgactgccacacgtcacacattgctgttaagtttgctgagcttttgaccaagattgaca

SEQ ID NO: 234795 - DNA, 407 bp, Gossypium hirsutum
gctcttacacctccgcaaatactcggccaactctgcgtcgacgacaccgccacgggaggcgacaccggcacagatccaagcaatgggccgcgtccgtaccaaaacagtgaagaaatcctcccgtcagggcatcgagcgctactactctcgcatgaccctagatttccacactaacaagaagatcatcgaagaagttgccattatcccatccaagaggctccgcaacaagatcgccggcttctcgacccatttgatgaaacggatccagaggggtccggttcgcggcatttccttgaagctccaagaggaagagcgtgagcgccgcatggatttcgtccccgatgaatcggccatcaaggtcgaccaaatcgaagttgataaggaaactcttgatatgctttcgggtc

SEQ ID NO: 234796 - DNA, 428 bp, Gossypium hirsutum
ataggtcttaaaacatgcctttccgtctgccacttgacgatgtgtacaagattgggggtgtgggaactgtgtcagacggccgtgttgaaacccctgtaatgaagcctggtatggttagaacctttggcccgtagggtatgaccactggagttaaagtctatgagatgcaccatgaagctcttacagaagctctcacaagggataatggtggaatgaatggataaaactttgttgtgaaggatcttaagcgtgtttttagagccatccaacttacgggatgaccttgctaaggggcgctggcaacttcacttttcagtgtattagtcaggaaccacactcgacaaattgaaaatggatattctctattcctcgactgtcacacgagatacattgctaagaagaatgatgagcttttgaccaaaattgac

SEQ ID NO: 234797 - DNA, 398 bp, Gossypium hirsutum
cttcacccggctcgttaccggactcaaccgtgtaaagatgggtcgggttgtcgtcggcgggggtgttactttgctcatgctgctgaccagctccgtctcgtaagctctactaaaacttacgactgatcaacaagtgggaaaacgctgacgttttggattgcatctgtatctggctcacacactgttagtgcagtgaccagcggataacaatcatactccagtaccgctgatgggtcaggatttaagaaagttccattgatcaatctccgatgcaacgccccaggagaagctatggcccctgcaatgttaactaaaccgtttacgccaagaaccgcggtaaacaggacggctatgatgagtctgtcagtgcgtgcggatctgtcctgcgctttccaggc

SEQ ID NO: 234798 - DNA, 258 bp, Gossypium hirsutum
ctcaacgctctccttctgtttctggtcaagccaatctcaaaagactccccttttagcgcacgaggtcctctcttgagggcgtataatgggtaaggagaaggttcacatcaacattgtggtcattggccatgtcgactctgggaagactacaaccactggacatttgatctacaagcttgcaggaattgacaagcgtgtgattcagaggactatgaaggaggctgctcgagagaacaaaagggtatttaagcgttcatg

SEQ ID NO: 234799 - DNA, 399 bp, Gossypium hirsutum
gattgattactcaatcataaaaatcgatcaaagttagcagccgatggagaggctggagctgaaacacaagctcggcgataaatggatttcaaccctagccagcatatggatccagtgcaccagcggttcactctacaccttctccatctattccccaattctcaaatccacccaacgctatgatcagtcaaccctcgacacggtttccgtcttcaaagacatcggtgccaactgcggcgtcctttccggtttcctctacactttcgccactccatctaaccgccgcaacgcttattttggtggaccctgcttggtcctcgcggctggtgctatccaatgctttatgggctacttcctcatctgggctttcgcggttggattgatccctcgccctccggt

SEQ ID NO: 234800 - DNA, 422 bp, Gossypium hirsutum
gtggcactctagtcccgatcattcaactactccccattcagagagatggacacgggggcggcgtttcttggtcgggcatttctttgttttttccactctttatttctttccgacgccgatgttactggaaattcgtccgatcccggcctaactctctgcgtcgactctctctgcgcccagcttatcgagcccaatggttatttctgcactgaacacactattcaaactaagggtggctatttattagctctccaacgcgtctcatctcgttctggggatcttaaagttcagcatgggcatcctgttctgcttcagcatggattattcatggcaggtgaggcatggtttttggattccactgaacagtcgatgggctttattcttgcagaccaggggtttggatgggtgggttggtaatggtc

SEQ ID NO: 234801 - DNA, 350 bp, Gossypium hirsutum
gaatgaattcaaactgtttcacacagtagtcattttgaaggattcaagagaagcaagaggggggctactaaagggcggaaggggaggagttctgatatgccctacaaaacaagaaacaggagaaactgcctcggaatacgaaagctacatttgacaaaagaaaaaaggtacgttggaggatgttattgcccataagcaagcaattgcattccaacgcttctgtggaggaggtggacgaaccgaacaggctaagaagcgacattctaaaggacaaggccagtggcccgagaaattggaaaatttatgcacgaagtgatcaagaatgccgagagcaatgctgaggtaaaagg

SEQ ID NO: 234802 - DNA, 397 bp, Gossypium hirsutum
ctttgctgcatctcattctcacttcaccttttttttttattgtctggatcatcggagggaaattaaagaaccaatcatgaagcttgacaccagcggactagaatcggctgctcctgtctggggtgctcccagtgaacttgttgacgggttttcggctgctccgtcggtcgatctcccaaacactactgattttgatgggtttcaaaaagaagctatccagatggtaaaacctgctaagggtaccaccacgctagtttttatttttaaggaaggggcattggttgccctttattctagagctagcatgggaggcgtatatcttttcacaattagtgaaggaatttattgaaatcaatccttacatgcttggaacaatggctggaggagctgttgactg

SEQ ID NO: 234803 - DNA, 285 bp, Gossypium hirsutum
gcgggccagcgaccggcagcgtaatgggtgaagaagtgaaggtttttggatactgggcaagcccttacagctgcaggggggaacttgttttggaggggaaaggtttcccttatgagtacataaacgaggatatttttggcaacaagagcgatatgcttttgaaatacaattcggttcataagaaaggtccgctctttattcacaacgggaaaccaattggagcgtctctgttatactggaatacattgaggaaacttggaagcataatccctatgcgccacagga

SEQ ID NO: 234804 - DNA, 262 bp, Gossypium hirsutum
ctgaggccaagaagcctgaagattgggatgacaaggaatacatccctgatcctgaagacaaaaagccagagggttatgatgacattccaaaagagattcctgatcctgatgctaagaagcctgaagattgggatgatgaagaagacggtgaatggacaccctcaacaattcccaaccccgagtacaagggcccatggaagccaaagaaaatcaagaaccccaactacaagggcaagtggaaggcaccaatgattgacaaccc

SEQ ID NO: 234805 - DNA, 394 bp, Gossypium hirsutum
attgaagtttcctttctcgattttctatttagccaaacaagatgcagatcttcgttaagactctaaccggcaagactatcactctcgaggtcgagagctccgatacgatcgacaacgtgaaggccaaaatccaagataaggaaggcatccctccagaccagcagcgtctgatcttcgccggaaaacagctcgaagacggccggaccttggccgattacaacatccaaaaggaggcaactctgcacctcgtgctccgtctgcgcggtgggatgcaaatcttcgtgaaaaccttgactggcaagacaatcactctcgaggtgagagctccgacacgatcgacaactttaaagcgaagatccaagacaaggaaggcattcccccagaccagcaacgt

SEQ ID NO: 234806 - DNA, 348 bp, Gossypium hirsutum
attgaagtttcctttctcgattttctatttagccaaacaagatgcaaatcgtcgttaagactctaaccggcgagacgatcactctcgaggtcgagagctccgatacgatcgacaacgtgaaggccaaaatccaagataaggaaggcattcctccagaccagcagcgtctgatcttcgccggaaaacagctctaagacggccggaccttggccgattacaacatccaaaaggagtgaactctccacctcgttcttcgtctgcgcggggggatgcaaatcttcgtgaaaaccttgactggcaagacaatcacttctcgaggtgagagctccgacacgatctgacaacgtt

SEQ ID NO: 234807 - DNA, 395 bp, Gossypium hirsutum
gcgatacaaagactgcaatataacctcaagctctgacacccacttttcagaccttaacaccaaactcataccaaacactcttgctccatatatctgcctctctttctttctttacaattctcaggtttctgttctttgaatcctgctttcaagatcataatagaaacaaagaaaggcaaagcttagaagatgggatcaggtgaatggtgccttcaaaaacgagatagtttcaagagtgaaacgcttgtaggcaatgagactgtgccagaaattgggtgcctttcgattattgttcttggcgcctctggtgatcttgccaagaagaagacctttccctgctctctttcatctttattgccaggggatttttgccaccaaatgaggtgcacattttc

SEQ ID NO: 234808 - DNA, 400 bp, Gossypium hirsutum
ggcagttgccttcggtgttcccgatgagaaatatggcgaggagataaattgtgcggtgattttaaggggaggaagcttggatgaagcagaaatcacgaaatattgcaaaagaaatcttgcgagtttcaaagtacccaagaaagttttcatcacggattccgtgccgaaaacagctactggaaaaatccagaggaggatagtagcagagcatttcttggctcaaacgtctgccgctaaagtacccaaatttggagcttaaattcagcattgcttgtctattgcttaggtacatatttaagcgactgcaatttattgtttgtgtaaaaggggattactaaagcaccatgttacatgtaattctgattagaaattattggaaagtctacattcataaatattt

SEQ ID NO: 234809 - DNA, 385 bp, Gossypium hirsutum
cgattctgaaattttgcctgccgctccatctctacatcacaggaatggcgacagatgttgcagcccccgccaccgccgcacccaaagacccaacccaacctcaccttgaagtaaaactcttcaaccgctggagcttcgaggaagttcaggttgctgatatctccttgagtgattacattggtgtccaagcttcgaagcatgctacctatgtgccacacactgctgggaggtactcagttaagcgtttcaggaaggctcagtgcccaattgttgaaaggcttacaaactcacttatgatgcatggccgaaacaatgggaagaagcttatggcagtcaggattgtgaagcatgccatggatattatttatctcttgactgatcagaa

SEQ ID NO: 234810 - DNA, 412 bp, Gossypium hirsutum
  unsure (1)..(412): unsure at all n locations
caaggatagccctatagcagcagcagcagaagcagaagcaaagggtttagagacgagaatggcagcgaaaaggaagactcccgtcaagaccagaaacccggatctgatccgtggtgtgggaaagtattccaggtctaagatgtaccacaagcgtggcctttgggcaatcaaggccaaaaatggcggtgctttcccccgccatgatcccaaacctaaggcccccgctgccgctgagaaacctcccaagttttacccggctgaggatgtcaagaagccgctccttaacaagcgcaaacctaaacccaccaaactcagagcaagcattacaccagggactgtgttgattttgttggctggaaggtttatggngaagagagttgtttttttgagcaacttacttctggctcctttt

SEQ ID NO: 234811 - DNA, 402 bp, Gossypium hirsutum
cgattctgaaattttgcctgccgctccatctctacatcacaggaatggcgacagatgttgcagcccccgccaccgccgcacccaaagacccaacccaacctcaccttgaagtaaaactcttcaaccgctggagcttcgaggaagttcaggttgctgatatctccttgagtgattacattggtgtccaagcttcgaagcatgctacctatgtgccacacactgctgggaggtactcagttaagcgtttcaggaaggctcagtgcccaattgttgaaaggcttacaaactcacttatgatgcatggccgaaacaatgggaagaagcttatggcagtcaggattgtgaagcatgccatggatattatttatctcttgactgatcagaacccaattcaagtcattg

SEQ ID NO: 234812 - DNA, 348 bp, Gossypium hirsutum
gtgatttttgaggaaattaggcgacgtggcctcaaagtagctgttgctggaatcccaaagaccattgacaatgacattccggttattgacaaatcatttggttttgatactgcggttgaggaggctcaacgtgccattaatgctgcacatgttgaatcactaagtattgagaatggcattggacttgtaaagctaatgggacgctatagtggtttcattgcaatgtatgctactctagccagccgagatgttgactgttgcttgattccagagtcaccattctatcttgaaggaagtggtggactttatgaatatattgagaaacggctcaaagaaaatggacattat

SEQ ID NO: 234813 - DNA, 396 bp, Gossypium hirsutum
gttccatgtgaacggcacttgcacatgggttagtcgatcctaagagacgggggaagcccgtccgacagcgcgtccagcgcgagcttcgaaagggaatcgggttaaaattcctgaaccgggacgcggcggctgacggcaacgttagggagtccggagacgtcggcgggggcctcgggaagagttatcttttctgtttaacggcctgcccaccctggaagaggcagccgaccgcaggttgatggcactcgtatgtgaggcaaagggagattacgaggcggctcttgagcaccttgtcctagccagcatggcaatgattgccaatgggcaggagaatgaagtagcttcaattgatgtcagcattggcaatatttacatgtctctatgtcgctttgatga

SEQ ID NO: 234814 - DNA, 391 bp, Gossypium hirsutum
catcaacaaaaaaccaaacacccagagttaaccaaaagagaaaatggtcaccaaagtctacattgtatactattccatgtatggacatgttgagaaactggcccaagagatgaagaaaggagctgaatctgtcgagggagtggacgtcaaactttggcaggtagcagaaacactaccagaagaagttcttgggaaaatgggagcaccaccaaagacagatgcgcctatcataacaccagatgagctgacggaggcagatggtgtgctatttgggtttccaactagatttgggatgatggctgcacagtttaaagcattcatggatgcaactgggggtctatggagaacacaagcccttgctggtaaacctgctggcattttctacagcact

SEQ ID NO: 234815 - DNA, 395 bp, Gossypium hirsutum
ctcattttccgggaaaacatacaacgaaaaagaaaatttcgaagagagagagaaaaaatgtttgcatacgatcgcgtaagccactcgagtgccaacaaggcggatgagatagatctagaatcaggggagactttgtacccgggactcagctacggcgagaaccaactccggtggggttttatccgcaaggtttacggcatcttggcagcgcagttggttctaaccaccgtggtatccgcctttgaggttctttcggctccggtcaacgagctccttcggggaaattctggcctcttgcttttcctctgtttaatccccttcgtcttggtgtggcccttgcatgtttaataccaaaagcaccctgtgaacttggttatcctcagccttttcaccgt

SEQ ID NO: 234816 - DNA, 404 bp, Gossypium hirsutum
ctacgcgagcactctcagactactctttcgaaccagctacaccatcacccccaagaaacagagcaaattgtagaagatggcaacacaagcacttgtatcatcgcctcttacctactcagtggagactgcaaggcagattcttggagctaaacgacaaattgggtcttcaaggaaaggatcctttgttggtaaggcaggttcaactccacccgttaagcaaggagctgatagacctttatggtttgcatctaaacaaagcctttcatacttggatggcagccttccaggtgattatggatttgaccccttgggactctcagaccctgaaggaacaggagggttcatcgagcctaaatggctagcctacggtgagatcatcaacgggcgttatgctatgttgggtg

SEQ ID NO: 234817 - DNA, 372 bp, Gossypium hirsutum
gggacacttaacattattttggggcaaaaacacagaggatattttcccaggatggtcaggtggaagcttctgttcttatttctttgggttaatttgggtgtttcttctttcattcatggtggaacgactttcccacacaaagtttatcaagcaagggaccaatcatgtcgttgcagggcttttgcagacacttatgtatgcaaccagggtggctttggcttacttagtgatgttggctgtcatgtcgtttaacgttggtgttcttttagcttcggttggtgggtatgctgttgggttcttggtttatgggagtccggcttttaggaaggcagactttattcaatacgaggaatcttctgacattccaccttt

SEQ ID NO: 234818 - DNA, 403 bp, Gossypium hirsutum
aaaatcgctaaagcgatatggctttgcagctatgggaaacgttgaaggaggcgacaacggcgtatacgggtctatctccggccactttttttacggttctagctctgttatgggctgtttactatgtagcaaagggtctatttgggtcatccgatgatcatatccatcaacggtctacggctttcgaggagcagatggagccgctaccgccaccggttcagctcggcgagattaccgaggaggaacttaagcagtatgatgggtcggattcaaagaaatcactccttatggccatcaagggccagatctatgatgtttctcaaagcagaatgttttatggacctggtggaccttacgcgttgtttgctggaaaagatgcgagcagagctcttgcaaagatgtc

SEQ ID NO: 234819 - DNA, 403 bp, Gossypium hirsutum
cttttcgccactttcttgaacgggcttacaagtaccgcccagtcaaggttctagagtttgaaaagccaaaacaacagtgcgttgtgtacctggacctgaagcgcgaggaatgcgcgcatctgtttccaggtggtaaagtttattcacaagcattccatcttggtggacaagggttttttcttctccgcacattgccatatggaccagcaaagctcattccactgctttgggctatttttgggaatgcaagagaagggtgccgtcacttttgccgttgactatgagtttgcagcaaggtcaaaaccaactgaggattacgtaagtaagtacaaaggtaactacacattcacaggctgaaaggccattggctatcgtaacctgttcggtataccatggacgacat

SEQ ID NO: 234820 - DNA, 381 bp, Gossypium hirsutum
acccgccaattactcttcagtctcagccgatcttaaaccatgggtcgcgttcgcacaaagacggtgaagaaatcgtcccgtcaggtaatcgagcggtactattctcgaatgaccctcgattttcacaccaacaaaaagattatcgcagaagtagctataatcccatccaagaggctccgtaacaagattgccggcttctcgacccatcttatgaaacgtatccagaaaggaccagttcgcgggatttctcttaagcttcaagaagaagagcgcgagcgtcgcatggattttgtccccgatgaatcggccatcaaggtcgaccaaatcgaagttgataaggaaacacttgatatgctctcggatattggaatgggtgatatt

SEQ ID NO: 234821 - DNA, 386 bp, Gossypium hirsutum
gctattttctctctccccaaacacccttttaagccaaaaagaagacaatggccgatcagctcaccgatgatcagatctctgagttcaaggaggcctttagcctattcgacaaggacggcgatggctgcattactaccaaggagctcgggactgtgatgcgatcacttgggcagaaccctactgaggcagaacttcaagatatgattaatgaagttgatgctgatggaaatgggaccatcgattttcctgaattccttaacctgatggcgaggaagatgaaggatactgattctgaggaggaacttaaagaggctttcagggtttttgacaaggatcagaatggtttcatatcagctgctgagctgcgccatgtcatgacaaatctc

SEQ ID NO: 234822 - DNA, 309 bp, Gossypium hirsutum
cacagtcttacaatgtctccccatctaccttttgggtgcaaaatctgaccaacaataacaccaccaaccactcatcgttatcttgtactcccaggattaatcctgtaatagccaaggcactgcgtactgaagcagctgccacagcacagcccataaaaatggtgaaagctatcagggttcatcaacttggtggacctcaggtccttaaatgggaggatgtggaacttggggaacccacagagggtgagatacgaattaaaaacagagctattggaccgcattgcatcggtatctattttcagagaggag

SEQ ID NO: 234823 - DNA, 335 bp, Gossypium hirsutum
ccaaaatcagaccacgaccaaaataagcttccttttcctatcatttcagggatcttgcccaggcatcaagggcaaggttgtttaaggaatacaaagaggtgcagcgagaaaagacggcggatcccgatattcaacttgtttgtgatgattccaacatatttaaatggactgctctaatcaagggaccatctgagacaccttatgaaggtggagtgtttcagcttgcattcgctgttcccgagcagtaccctttgcaaccccctcaagtgcggttcttgacaaaaatatttcaccccactgtgcattttaagacgggagagatctggcttgatata

SEQ ID NO: 234824 - DNA, 283 bp, Gossypium hirsutum
ctctctcgctctctgtagccgccgcctgcgtttctctcttcatctgtctgaaccaaaaagtctttagcttttcgcttcgagagagaccatgttggtttaccaggatctcatctccggtgacgagcttctttctgactcattcccctacaaggaaatcgagaatgggatgctgtgggaagttgagggaaagtgggttgtgcaaggagctgtcgatgttgacattggtgccaatccttcagccgaaggtgctgatgaggatgaaggtgttgacgaccaagctgtg

SEQ ID NO: 234825 - DNA, 393 bp, Gossypium hirsutum
caaccgagggctccggtgatgtcggatcaaacaaaagcaaccctcttccaatcccactgtcgttgatgatccttacaagcgcctagaaatcactcgtaaccccaatggctcgcttacgcgcaaccctaataggtttcccaacacttcagccacacctgatccggacccaactgtcccggttctctccaaagatgtcactatcaaccaaacgacacacacatgggctcgtgtgttcctccccaggcagaagccgcttgatacgaacaagttccctctcatagtttattaccatgcaggaggcttcatccactgcagtgcggcatccacgatcttccatgttttttgctcaaacatggcgttggaactccaagccatcgtcgtgtccgtcgacta

SEQ ID NO: 234826 - DNA, 407 bp, Gossypium hirsutum
ataaatagccccaaagcccaaccccttcccccatcgaatttgatatttataaaagaggatggggctgtcttttgctaagctgtttagtcggctgtttgccaagaaagagatgcgaattcttatggtgggtcttgatgctgctggtaagactaccattttgtataagctcaagctcggtgagattgtcactaccattcccaccattggctttaacgtggagaccgtagaatataagaacattagcttcactgtttgggatgttggtggtcaggacaagattcgacctttgtggaggcactacttccaaaacactcagggtctaatctttgttgttgatagcaatgaccgcgaccgtgtggttgaggccagggatgagcttcatcgtatgctaaatgaggacgagctgg

SEQ ID NO: 234827 - DNA, 365 bp, Gossypium hirsutum
ggggacccacccccccaactcaaatctcctcctcctcctcagaaatcttagtatcatcaccatggccggaaatcccaaggtcttctttgacatgactatcggtggtcagcccgctggtcggattgtgatggagcttttcgcagattgcactcctcgcactgctgagaacttccgtgccctctgtaccggcgagaaaggcgtctgccgcagcggtaagcccctccactacaaaggctcctctttccatcgggtgatccctaactttatgtgccaagggggtgacttcacggccggaaacgggaccggaggtgaatccatctacggatcccaggtcgctgacgagaacttcatcaagaagcacactg

SEQ ID NO: 234828 - DNA, 400 bp, Gossypium hirsutum
attaactctatatccatggctataatttccaccactgcaaaatttatgtcaacaggcttgtttattattcttcttctcttgcagttctccataacgaaaggtcatggtggagacgatcacgacgagaacaacggtggagtctccccttatttctttcgatgggacgaaagttttctcctcttaggcacacagtttgccggtggggtttttctggccacctctttgatccatttcttgagcgattctaatgaaactttcggtgatctcacaaccaaaacctaccctttcgccttcatgttggcatcggtggggtatcttctgaccatgcttggtgattgcataatcgttagtgttacatcgagtagtaaaagagaagttagagtgcaagtgcaagtggaag

SEQ ID NO: 234829 - DNA, 380 bp, Gossypium hirsutum
cggacgcgtgggtcattatttacgttaagttcaaagaaatggctgatcgtgtggggactcgcgtccacaggctccgtgagcgtttggatgagacccttcttgctcacaggaacgagattttggccttgctctcaaggatcgagggcaaaggaaaaggaattctgcaacaccatcaaattattctagagtttgaagctatccctgaagagaacagaaagaagctcgctaatggtgcattttttgaagtattgaaggctagtcaggaagcgatcgtgttgcctccatgggttgcacttgctgtttttccaagggctggtgtttgggagtacattttcagtgattggtcactcccttgttgttgaggtactcactgttccctg

SEQ ID NO: 234830 - DNA, 401 bp, Gossypium hirsutum
tctcaaatctcctcctcctcctcagaaatcttagtatcatcaccatggcctcaaatcccaaggtcttctttgacatgactatcggtggtcagcccgctggtcggattgtgatggagcttttcgcagattgcactcctcgcactgctgagaacttccgtgccctctgtaccggcgagaaaggcgtcggccgcagcggtaagcccctccactacaaaggctcctctttccatcgtgtgatccctaactttatgtgccaaggaggtgacttcacggccggaaacggtaccggaggtgaatccatctacggatccaagttcgctgacgagaacttcatcaagaagcacactggtcccggtattctctcaatggctaacgctggtcccggaactaacggatctcag

SEQ ID NO: 234831 - DNA, 396 bp, Gossypium hirsutum
gagcaggaaaacaagaaaagcagagccgcatcactttttgctagctaagctactgtgggagttattgttcttcagaacagcttctgcagtagctaataataacgttatatattatataaattttatacatcctttttaccctacgactccatatataagcaagtaaaaataaatatggctcgctctgtttcttcctttaagttccttggtgcttctgtttttgatgctctttatgtctccatatcaaggagaggttactcaggtgcaccgccggcggcagtgacggctagctttggtaggcctggagcgatggggaaagtggaacgaagatatgcgatgaaagagtcgtcgtcgtcggagacaagggcttattcttcagcttgggcgcctgaccct

SEQ ID NO: 234832 - DNA, 402 bp, Gossypium hirsutum
ctctaagatatcactgcaaggaaaaaaaaaaaaaaccagacatggcttccaacactgttgcatccgctgctcttcttcttaccttgaacttgttgttcttcactttggttagctctacctacgtgccttgcccaccaccaccaaagagccacaagcctacccacaagagcccaccctcggcacctaaacagccagccacttgccccaaagatacactgaaactaggtgtttgtgctgatttgttgggctcggtgcgcgttgttgttggaccgtcgaggaccaaatgctgctcactcatttcgggtttggctgatctcgatgctgctgtttgcctttgcactgctattaaagctaatgtgttgggggttaacctaaacgttcctgtttcattggctttgctcc

SEQ ID NO: 234833 - DNA, 401 bp, Gossypium hirsutum
caacattttcatattgcttgcctagcattaggtcacctaacttttctgggtcattgagacttggaccaagtgggcaacctgtgaggatcaaatacaccccgttgctcaagaaccctaggagaccctcactttattacgtcaatttgattggaattagggttggaagaaggattgttgatatcccaccaagtgccattgctttcaatccttccactggtgctggcaccattattgattctggtactgtcttcacccggctagttgaaccagcctatgtagctgtccgggacgcattccggagacgagtaagggtggcgaacgtgacatctctgggtgggttcgacacatgttactcggtcccaatcaatgcaccgaccataacatttatgttttcgggcatg

SEQ ID NO: 234834 - DNA, 403 bp, Gossypium hirsutum
attttctttatcattattgaaggaaaaaaaaaaaggaggaattagaaacctaaattgaagaaggaaaagatgttgggaattgtaaggcaaaagatgttggaacagtcattgaagaagattccacccgccgtgtcggtgttgagaagttactcatctgctgcaaaacagatgactataagagatgcattaaactctgctctcgatgaggagatgtcagctgattcgaaagtctttttgatgggtgaagaggtcggagaatatcagggtgcatacaagataaccaaggggcttctcgataagtacggacccgagagggttcttgatactccaattacggaggctggttttaccggagttgcggttggtgctgcttactatggtgtgaagcctggtgtggagttca

SEQ ID NO: 234835 - DNA, 320 bp, Gossypium hirsutum
atcgattcatcagtcttcttctctgagtagaggttttggatttgtaagcgtttacaatgtcttcgtcctatctcccagcaaccactgactcaattgctctggccttagaagccaaaacaccatctgaagccatctcaatcctttaccgtgtactagaaaatcctgcatctgctcccgatgctctacggattaaagagcaggccataacaaatctatctgatcttcttagacaagagaaccgagcagaggagctcagaagccttctgacccaactgaggcccttttttgcactaatttcaaaggcaaaaactgctaaaatt

SEQ ID NO: 234836 - DNA, 400 bp, Gossypium hirsutum
ggcagcaaacagcaccattgttggtgttatcaacttcatcaccttgcttgtctcgattccagtcatcggagcaggaatctggcttgcaaacgaaccggacaacgcttgcgtgaagatactgcaatggcctcttataatactaggcacctcaatcgcggtcgtggcactgttaggcttcgtaggagggtgttggcgcatcacttggctcctcatcttttacctttttgcaatgttcatcctgatactagtgtttgcttgtttggttgttttaatctatgtgatcaccaaccagggttcaggtcacccagcaccaggccgcatatacttggaacatgaccttgatgatttttccggctggcttcgtcgaaaagtaacgaatccttacaagtgggatcggatt

SEQ ID NO: 234837 - DNA, 381 bp, Gossypium hirsutum
gattaattgatccatcaaagccctctgcgaaaatccctactttcaagtttcgatgcgatcgacgctgctggtgttccttctgccgattactgataaaggagaaatgccatcgcagaagattgaaactggccaccaggacacggtccatgatgtggccatggatttttatggtaagcgtattgctaccgcctcatcagacagcacaattaagatagttggggtgagcaacaacacacatcagcatttagcgactctgacaggtcaccagggaccagtatggcaggtggcttgggctcatccaaagtttggctctttacttgcttcttgttgttatgatggacgtgtgattatttggaaggaaggcaatcagaatgattgggc

SEQ ID NO: 234838 - DNA, 394 bp, Gossypium hirsutum
caaaatatgatgatcagaaaacccattacacgacccttccccaccgtcaatatccccgactgggaaccgttaaatgattcggcggataactttctggctgtcggctttaactgcaatgcaccctgcagcccttgtcccgtagaataccttacggcgctccgccgttacctcccctcgaacgatctcgagcccgacacccttagtgacgactccgacgtacacatcatcgatgcattctcgtgcgatcatttccgtatgtacgagttcaaggtgaggaggtgtgctcgtggcaggtcacatgactggaccgagtgtccgtacgcccaccctggggagaaggctcggcggagggatccgaggaagttccattactctggatccgcttgcccggatt

SEQ ID NO: 234839 - DNA, 401 bp, Gossypium hirsutum
cagaaacagcatgggccggcgctgcttataacctcattctctacatgctggctagccatgttttaggagcttgctggtatcttctcgcaatagagcgacaagaagcatgctggaggactgcctgtgatgtcgaggatccatggtgtcagtataaattttttgattgccacagggttaaagaccctggcagggatacctggttcaagtccagcaatattactaacctatgcagtccaagttccagcttctatgtgttcggtatatatggtgatgccttgacatttgatgttacaacttcaccattcttcaacaagtacttttattgcctctggtggggtttaaggaacttgagttcactgggacaaaatcttgacacaagcacttatgtgggtgaaataatt

SEQ ID NO: 234840 - DNA, 375 bp, Gossypium hirsutum
cacccaaacctgactcatcgttcaacacggtcatgaacatggcatcaaaagacccagcaagggtcaagtacttgtcgagccttgtagcccaaaagaccactgcggttcccattgcttcaggccaacaagtcctaaacattggcaactatatcgtccgggtaaagattggcactccgggtcagctcatgttcatggtattgcacactagcaatgatgtggcttgcttcccatgctccggctgcaacaggtgctcagccaccactttctcacccaacacttcttccacctatggttcgttagattgcggtttgccccaatgcgcccaggtccgtgggctgtcgtgcccggctacggggtctgcggctcgctctttta

SEQ ID NO: 234841 - DNA, 367 bp, Gossypium hirsutum
gtggagagtttgtgccctggtgttggttcttgcgctgatattgttgcaggtgctgctcgcgattctgttgctgctcttggagggcctagctggatagttcttttgggtagaagagatccaaccactgcaagcttgagtgctggtaattccaacatccctgctccaactttggatcttagtggtctgatcactgctttttcaaacaaaggtttcactgctaaagaaatgggagccctctcaggatctcacaccattggacaagccaggtgtaccactttccggacaagaatttacaatgaaaccaacatcggctccaccctttgcgacatcgataagagcgaactggccaagccatggtggagacaac

SEQ ID NO: 234842 - DNA, 296 bp, Gossypium hirsutum
ctttcataaaatctaccgtaggtagcaacttataggatggcgagagtcaggggctcgcaagatacacttacgagcatgtacaatgcccctaagaggggcaaacgacaggtgatgatcaggcctacctcctaagcgatcattaagcttatattgttcatgcagaggcatggttctatcgcgagagtatagtattggcctgagcacagatcactgagacatgcgggtgaatcaaccgcggggctgctcaactatggcactaacactccttacatagatgtctgagacaaagagatcga

SEQ ID NO: 234843 - DNA, 375 bp, Gossypium hirsutum
aaataaaaccaagtaatcacattgacaaaagactttatttctgttaacagccattatgagtactgctggtcaagtcatccgttgcaaagctgctgtagcatgggagtcgggaaagccactgtcaatagaggaagtggaagtggcaccaccgcagaaggatgaagtccgtattaagatactcttcacttctctatgtcacaccgatgtctacttctgggatgctaagggacaaaatcctctgtttcctcgcatacttggacatgaagcttgggggattgtggagagtgtaggaaagggcgtcactggtctaaagccagggggtcatgttctccccaactttaatgggggaaagcaaggggtggccccatttgcttt

SEQ ID NO: 234844 - DNA, 205 bp, Gossypium hirsutum
tggcctctcactggtttccttcaaaaccctaatagctggcctctcctcctgaagggtgtcaaaaatggccgggtttcacggattgattctacatggcaccatgcgtgcccacaccgacatggtgacagccattgctcttcccatcgatgactccgacatgagcgtaactttctcccgggacaaatccatggtgcgttggcactta

SEQ ID NO: 234845 - DNA, 420 bp, Gossypium hirsutum
atcttgtgatttgagcttcgtgtttgtgttgggttaagcaattctccaagatgcggaaccaaagggggtcaaaaacataaatctttataatccccagaaaattttcgcccactaataggctgatcacctcgaaggatcatgcttctgtccagattaatgttgggcatttggatgagcttggcagatacactggaactttctccacttttgctctttggggctttgtccgcgcccagggtgatgctgacagtgcacttgacaggcttttgcagaagaagaaagctgaagtcccacagcactagtgggaggtggattgctttttactaattgcttgggacttttgaattttggagggaaaaatgggtttttttttttaatcaggggaccttttaaatttttacctagggttttttaaaatgg

SEQ ID NO: 234846 - DNA, 324 bp, Gossypium hirsutum
cgtcttcaagatctcagttctcaaatcgtagcgctcttttctatcaagccatggctctggtcttgcatgcaggaaaaacaaacaaaaatgcctttaaggcactcattgctgcagaatatagtggtgtgcaggtcaaaatggttgagaattttgagatgggtgtgtcaaataagactcctgagttcatcaagatgaaccctttggggaaggttcctgtgttggaaacacctgggggtcctgtatttgagagcaatgccattgctcgatatgttgctcgctcaaaggttaacaaccctatatgcgggtttacatagagtgcttatg

SEQ ID NO: 234847 - DNA, 287 bp, Gossypium hirsutum
ccgtctagcgatgaacatgacgccacgtttgccgtcatcgaaagtggctccagcgtcgcggctggtgttggaccgttcttactccaccgaaacggaagctcaaaaggtggaaccgaaagcctccttcggcagcggcggcgccaacatgaaaaccttccaaatctattgatggaacccagataatgctacgaaaccccaacttcaagacttcaaaatcaacttaaaagaatgcggacccatggtgcttgatgccttgatcaagatcaagaacgagatggatccatcgc

SEQ ID NO: 234848 - DNA, 335 bp, Gossypium hirsutum
tttccatcccagcaaaagcctgaaacagtattaatcgtcgataaaatggaaggacaaggtgaagatgttaggctgggagcaaataagtacagggaaaggcagcctataggaacagctgctcaaacccaagataccaaggactacaaggaaccacctgctgcaccactgtttgagcctgccgagttatcctcatggtccttttacagggctggcattgccgaattcgttgccactttcttgtttctttacatcaccgctttaactgtaatgggtgtcgctaaatcttcaaccaagtgttctactgtagggattcagggcattgcttgggctttttg

SEQ ID NO: 234849 - DNA, 270 bp, Gossypium hirsutum
tcgatattcttcattgtaccatattttacccttcaattttgtcagcaaggagggcttatgacgctttggtttgagattacttccaagacctgggctcccattatcctccaccaggttcattggtggactgggaggtgttgtcaaacaggtcattttatagggctgtcatagccgagtttattgccacgctcttatttttatacatcattgtggtgacagtgatcgggttcaagagtcaggttgaccctgatcagggcagggcccaatgtg

SEQ ID NO: 234850 - DNA, 290 bp, Gossypium hirsutum
gaagagccaaattataaaaaaggggtgctcctataacaatgttgatgctgggtgcatcttggtgatggactggtcttactccaccggaacggaatcttaaaaggtggaactcgaagcctcctccggcagaggcggcgccaacatgaaaaccttccaaatctatcgatggaacccagataatcctacgaaaccccaacttcaagactttaaaatcaacttaaaagaatgcggacccatggtgcttgatgccttgatcaagatcaagaacgagatggatccatcggtcacct

SEQ ID NO: 234851 - DNA, 319 bp, Gossypium hirsutum
cccacgcgtccgctaaagccaagaaagtaagccactaaggttttgagagaagatcaaaatggcttctaaaagatcatcttccatggtcctccttttggcactcaacattctcttttttttcctagtcagtgcttgtggctcttgctcttcacccacccctaaactaaggccaaacccaaaccccaacacccccactcctactccatctgcacgaggcaggtgccctagggatgccctcaaattaggtgtatgtgccaatgtgcttaacctattcaatgtcaccattggttcacccccaaggatgccatgctgtttcctt

SEQ ID NO: 234852 - DNA, 323 bp, Gossypium hirsutum
gctttggaagcatggacttcatagctactatcctgtttctagctcttgtcatggcctccaccaaagctttggacccttgcggccctcagccagatgactcggaccttttggtcatcccaatctatggcaaatgttcaccattcaacccacccaaacctgactcatcgttcaacacagtcatgaacatggcatcaaaagacccagcaagggtcaagtacttgtcgagccttgtagcccaaaagaccactgcggttcccattgcttcaggccaacaagtcctaaacattggcaactatatcgtccgggtaaagattggcactccg

SEQ ID NO: 234853 - DNA, 388 bp, Gossypium hirsutum
aaaaatgtctcttcactcttctctcaccatgtcattgctgtctttctgggtgtttgttgctgtttacttttagtgccaaagctattgttcctccatctgaaacttttaggtttgtcaacgacggagaatttgggccgtatgttgttgaatatggtgcaaattaccgtgtcataagcatagctaatgcccccttccagcttgcgttttataacaccacctctaatgccttcacccttgcgttacgcatggctacaacgcgttccgagtcgctcttccgatgggtttgggaggccaacaggtggaaccccgttcgcgagaatgccacgttctctgtcggaactgacgggacccttgactttcttttgccgatggtcggattgtttttcaa

SEQ ID NO: 234854 - DNA, 387 bp, Gossypium hirsutum
cttccttcgcaaacaatattggcttactcttgttctttgttccactcctggggggcctacaagtggaacttgggggtgctgcaccatcggaaccaccccaagttcaaccgccccgcgcctatcgtcatctcatgctcctcctcctgcacattcgatccttcttcaaccactagttcctccaataacatctccccttcaccccaaaagaaccgtcgccttgccgatgagaatatccgtgacgaggctcgacgccaccggtccaccgccaagaacaccctcttcgccaaatatgttccggtcaacgccggtcccgactgcaccgagttctactccctcgacgagatcgtttaccggagtcgttccggtggattactcgacgtttaacac

SEQ ID NO: 234855 - DNA, 400 bp, Gossypium hirsutum
atataattgaaagaaaagaaaaatggttctgctagagaaactttgggatgatgtagtggccggacctcaaccggaacgtggccttggccggctgaggaagatcacaaccaccccacccttgtccaccaaagatgaggcttcatcaatggcgatgccgacgagtccgacgacacctgggacaccgtcgacgccggtgtcggctcgtagggacaacgtgtggaggagcgtgttcaatccaggtagcaaccttgcaaccaaaggtattggcgctgaagttttcgacaagcctcaacctaactctcctactgtttatgactggctttacagcggggagacccggagcaagcatcaccgctgattgggcgatggctgacggcggcggagggtagcaaaaccacta

SEQ ID NO: 234856 - DNA, 400 bp, Gossypium hirsutum
ggagatcttaatgacaaaggtattcaaactagtgaagactacaggttttatgctatttcagctgagttcccagaagttaacaacaagggaaagactctagtcttccaattttctgtgaagcacgagcagaagcttgactgtggtggtggctacatgaagttgctcagtggtgatgttgaccagaagaaatttggcggtgacaccccgtacagcatcatgtttggccctgatatttgcggctacagcaccaagaaagtacatgccattcttacatacaatgggacaaatcacttgatcaaaaaggaagttccttgcgagactgaccaactcactcatgtttatacattcattctccgtccagatgctacctacagcatccttattgataatgttgagaaac

SEQ ID NO: 234857 - DNA, 389 bp, Gossypium hirsutum
agtactctcactgcctacaaatctgctcaggacattgccaacgccgagggggctcctactcacccgattcgacttggactggcactcaatttctctgttttctactatgagattctcaattctcccgatcgcgcttgcaatctcgccaaacaggcatttgatgaagcgatagctgagttggatactctaggcgaggaatcgtacaaagacagcaccctcatcatgcaactcctccgtgacaatctcactctctggacctccgatatgcaggatgacggggctgatgatattaaagaagcaccgaagcgtgacgaggaggagcaacaacaaaagccacagcagtagtgagagactgagagtcagcccggctcttactttcattatataat

SEQ ID NO: 234858 - DNA, 371 bp, Gossypium hirsutum
  unsure (1)..(371): unsure at all n locations
tacgcattgaggacgtctccgcaatggctcggtccacaaatcgaagtgatcggattcgcaaccaaatcgatcgaaagagagatcaattctgtcaacgacaaccctttgatcgacgtttcgaggaacaaagcattacatggtggcaatttccaaggtacacctattggtgtttcaatggacaatactcgtttagctatcgcagctattgggaaacttatgtttgctcagttttcggaactcgttaacgatttctacaacaacggtctcccatcaaacctttnngctagtaggaacccgagtcttgattatggtttcaaaggtgctgaaatcgcaatggcctcctattgttccgagctccaatacttagctaa

SEQ ID NO: 234859 - DNA, 366 bp, Gossypium hirsutum
aaaaatgtctcttcactcttctctcaccatgtcattgctgtctttctcctgttttgttgctggttactttgagtgccaaagctattgttcctccatctgaaacttttaggtttgtcaacgacggagaatttgggccgtatgttgttgaatatggtgcaaattaccgtgtcataagcatagctaatgcccccttccagcttgcgttttataacaccacctctaatgccttcacccttgcgttacgcatggctacaacgcgttccgagtcgctcttccgatgggtttgggaggccaacagggggaaccccgttcgcgagaatgccacgttctctctcgggactgacgggaaccttgtcttggctgatg

SEQ ID NO: 234860 - DNA, 347 bp, Gossypium hirsutum
gttgacctgagcgggaaagggaatcataaagggcatagtcactttaacagagggtttgatagtggggctgatacgctaaagtacaaatgatgcatgtggggctacaaactattctttagaagaacaactttagaaaggtctgtctacattaaggatgattgcctaatcatgaactggactggtggagcagtcacaactctgcttgagggaccaaaactgttttctattactgtcccgccatcagacatgggccaaaatcttacagctttgttataatccggaggtgggtgggatactgggtcaacgccgtcatgagacattcaacgcacataagttggatccttggt

SEQ ID NO: 234861 - DNA, 389 bp, Gossypium hirsutum
accctctcctatatattcaacctctacccctgccctacgcgtttttgtctaggatgagctctaactgaaacttacattcatccacttagccgtcatgccttcctcactgaagctccatccacctctcgccgccactattggcacctgcaaccagaaacaaaatcaacccatcacaaccagtaccgcgctgactaggtttttccctcttccttgcgggatctcgttgcctgacacggtggcgacgtaccatgtccacaccctgggacctaaccagtgtggttcagcagttgttcaagccatcgaagcccctatcgaaaccgtttggtcagaggttcgtcgttttgataaccctcaagcttacaagcaagttctcaagagctggcacatca

SEQ ID NO: 234862 - DNA, 393 bp, Gossypium hirsutum
gattagtattactcaatgacgaccctaactccaaataacccagactccgtgtatgcttttactgttaaggatgctgagggaaacgatgtggatctcaatatttaccaaggaaaagtgatgttgattgttaatgttgcttccaaatgtggaatgacaaattccaactacacagaactgaaccaattatacgagaagtataaagatcaaggcttggagattcttgcttttccgtgcaatcaatttggagaggaggaaccaggatcaaatgttgagatttctgaatttgtttgcacctgctttagatcggaattccctatctttgataagattgaagtaaatggtgataatgcctcttcactgtacaagtacttaaaggtggtgaaatggggaatt

SEQ ID NO: 234863 - DNA, 393 bp, Gossypium hirsutum
caaaaccctaacggctacagctttagaattcaagcctttcgaccatggcggatgttgagacggaggtggcggcggctggagtgcccaagaagcgaacattcaagaagtttagcttcagaggtgttgatttggatgctctccttgatatgtccactgatgagcttgtcaagctctttcctgcccgtgctcgcagaaggttccggaggggtctcaagagaaagcccatggctttaatcaagaaacttcgcaaggcgaaaagggaggctccaccaggtgagaagccagaaccagtcagaacccacctccgaaatatgatcatagtacccgaaatgattggtagcattatcggtgtgtacaatggcaagacattcaatcaggttgagatcaagcccg

SEQ ID NO: 234864 - DNA, 401 bp, Gossypium hirsutum
tggcaaccttagaaggattgagggctcgttcatcccataaacaagagatcctggatattgacaacgaagacgaagagtgtaggccttggcgtcgaaggttctcaatggctttcacctggggttcctctctcaggatcactcttcttctcctccttattgctgctattgttttcgcttgtttcaccctccctgttgaaaagattctgaaggattttttgttatgggttgacaaggatcttggaccttggggtccacttgtgctggctgttgcttatattcctttgacagtcttggccgttccagcttcagtgcttacccttggtggtggttatctttttggattgcctgtgggctttgttgcggattctattggtgcaacccttggtgcgggagcggcattc

SEQ ID NO: 234865 - DNA, 396 bp, Gossypium hirsutum
caataattcaaccctcaaaaagcccatatccatggctacgttttctcctgctcctctacctacatctttctctgtcagaccacacttaacccacaattcaagtctttctctccctttcaagagaccctttcttctactatccactattcccaagtctttaccagacaatggagctggggtttccgcttctgttgctgctgtcgaagacccagcatccaaccagattgaaaacgccgcggaagtctctgctgggtctaacggagcggctatggccacatcggctgcaaatgctgaggtttcgagcaagtttgatgaccctaggtggattggaggcacttgggacttgcaacagtttgcaaaagatggaaccactgactgggatgctgttattgatgc

SEQ ID NO: 234866 - DNA, 362 bp, Gossypium hirsutum
aaaaaaattgagtgtcagtttgaaagtgttcttcagatatggctatgaagcgaggttgctaattctgctagcaaagcaattgccaattctgggtcatcctctcttcttaccagacaactgcatgcttctccagggagcaaaaagattgtgggggtgttttacaaggccaatgagtactttacgaagaatcccaactttgttggttgtgtggagggagccttggggttgcgccaatggctcgaatcacaggggcatcagtatatcgttaccgacgacaaagaaggaccgggctgcgaacttgaaaagcatatccctgatctccatgtgctcatatcgaccccattccacccggcttacgttac

SEQ ID NO: 234867 - DNA, 378 bp, Gossypium hirsutum
ccacaatcgaaacctttaggcggcgactactactcgagcttcataacacacggagcttttaactatggcgggtgtagagacggaggttgcggcggccggtgtgcccaagaagagaacattcaagaagtttagcttccgaggtgtcgatttggatgctctccttgatatgtccactgatgagcttgtcaagctcttccctgctcgagctcgcagaaggttccagaggggtttgaagagaaagcccatggctctaattaagaagcttcgcaaggcgaaaagggaggctccacctggtgagaagccggaaccagttagaacccacctgcgtatcatgatcattgtacacgttatgattgggggggttaaccttgtgtacaa

SEQ ID NO: 234868 - DNA, 389 bp, Gossypium hirsutum
gataaattagatgtactagtgaaaaagtgcaattccttttcatcattgacctatgttgctgtcaacaaaaaggggaatttgttatcaaacattggcctcacagatgtgaatgcagtaacttggggagtcttccctgctaaagaaataatccaaccaactgtggtggatcctgccagttttgtggtgtggaaggacgaagcatttgaaatctggtctcgatcatggtccgccttgtacccggacggcgatccttccaagaatttgctcgaagagattcagagcagctactatttggtgagcttggtagataacaattacatggatggtaatatttttggtgtttttgaagatctttgaagatgagacttatgcttatgattttatgttta

SEQ ID NO: 234869 - DNA, 383 bp, Gossypium hirsutum
aaagatatcactgcaagaaaaaaaaaaaaccagacatggcttccaacactgttgcatccgctgctcttcttcttaccttgaacttgttgttcttcactttggttagctctacctacgtgccttgcccaccaccaccaaagagccacaagcctacccacaaaagcccaccctcggcacctgaacagccaggcacttgccccagagatgcactgaaactaggcgtttgtgctgatttgttgggctcagtgcgcgttgttgttggaccgtcgaggaccaaatgctgctctctcatttcgggtttggctgatctcgatgctgctgtttgcctttgcactgctattaaagctaatgtgttgggggttaacctaaacgttcctgtttca

SEQ ID NO: 234870 - DNA, 398 bp, Gossypium hirsutum
gctttttcagttcttttactttggaaatctaaatcataaacagaatcatggccgccaaccatgccgccgaagtttgacccgacccaagtcgtcgacgtctttgttcgagtcgccggcggtgaagttggagctgccagttcactggcacccaaaattggtccactgggtctctcgcccaaaaaaattggtgaagatatcgcgaaagaaaccgccaaggaatggaagggtttacgtgtcacagtcaaactgactgtgcagaaccgtcaagccaaagttatggtggttccctctgccgccgctttggtcatcaaggcactgaaagagcctgagagggatcgtaagaagacaaagaatattaaacataatgggaacattagcctcgatgatgtgatagagat

SEQ ID NO: 234871 - DNA, 355 bp, Gossypium hirsutum
gctgctgcaaattatctctcgtgggaaacagtacctccggttccaactggaggtcaaaaatatgtcaggggaagaagttgcggttgcccaacccgaggcggcgcctgcactcggtgagccaatggacatcaacacagccttgccccttgaggttaggaagtcacgagctcacggagggctcgcacggggcttgcatgaagctgccaaagcgatggaaaagcacattgcgcatctttgcgttatagctgatgactgcgaccagccggactatgttaagctgatcaaggcactttgtgctgatcataatgttaaagagctacgtgccccgagcgcaaaaacactctgcgagtgggct

SEQ ID NO: 234872 - DNA, 370 bp, Gossypium hirsutum
ggaaaatcgctgcccggcgcaaccaagcttgaacatctagcaaaggttagcggcgccgcccaccatcttaacacaactgggaaaaacccaaaacccactactctgaaccggcggattataagtgaagacaacatacccaattccaagaagaagatggagagctccagtgccagtcaacgcctgccactttccgaagtcgtctccgattgcgttaaacgttggttcaaagatactctcaaggaagccatagccggcgacgttaacatgcacgttcttgtgggtcaaatgtattatagcggttatggtgctccccgagatgcccaaaagggaatgatttggatgacaagggcgtgtaggctgcggtcttctg

SEQ ID NO: 234873 - DNA, 285 bp, Gossypium hirsutum
ttataagtctccatctaacctgattgattacgcactagatctctattaaagcggcgcataccaatataataactaatctaatcccacaaaaaattgcataatcaaactccactgaaatactataataccaaattctattaaatctttttaaatcccaaaaccatttaaccaaataattaactcaagactcatagaaattctttaatcaataatcattctaataaaggcgatgatccttataagttctaaaaattggctcaagcttatgaggtgctgagtgaccca

SEQ ID NO: 234874 - DNA, 393 bp, Gossypium hirsutum
gaagtttcctttctcgattttctatttagccaaacaagatgcagatcttcgtgaagactctaaccggcaagacgatcactctcgaggtcgagagctccgatacgatcgacaacgtgaaggccaaaatccaagataaggaaggcatccctccagaccagcagcgtctgatcttcgccggaaaacagctcgaagacggccggaccttggccgattacaacatccaaaaggagtcaactctccacctcgtcctccgtctgcgcggtgggatgcaaatcttcgtgaaaaccttgactggcaagacaatcactctcgaggtcgagagctccgacacgatcgacaacgttaaagcgaagatccaagacaaggaatgcattcccccagaccagcaacgtc

SEQ ID NO: 234875 - DNA, 298 bp, Gossypium hirsutum
gaaatatgggaccatgttggcgatgtgaacgacacaaacagtggtcacgtggttgccaccacaattggaggcaaaaatggtgaggccaaacagaccatcaagtatctggccagagcgcgtaggcggcaccaggatcttttgggattgctttgcaagcaaaatgcttggaaacgggagagactgtggctataaaaaaagttctgcacgacacactatataaaaatcgtgaactgcacatgatgcgtgtgctggatcatgcaaacgtgattgcctcgaagcactgcttctttcacacgac

SEQ ID NO: 234876 - DNA, 361 bp, Gossypium hirsutum
tatcaacctggtgggcattgtggctggcgtatcatatgctataaacaggggttaccaatcctggggtcctctttttggcaagcttttctttgccatctgggtgattgctcatttgtatcctttcttgaaaggtttggtgggtcgtcaaaatcgtacccctacaattgtcatcgtctggtctatacttcttgcttccatcttctcattgctgtgggtgcgtatcgacccctttacctcataagctacaaaagctgccgctaatggtcaatgtggcatcaactgctagtttcattttcggatcattttattccggtaaatgctctctccttcaagtggctattgtgttattaccaaagagaaa

SEQ ID NO: 234877 - DNA, 391 bp, Gossypium hirsutum
tctaaagccaagaaagcaagccattaaggttttgagaaaagatcaaaatggattcaaaaagatcagcttccatagccctccttttggcactcaacattctcttcttctccctagtcagtgctaattgtggatcttgttcttcttctggctctaacccaaggccaactcccacccctactccatcagcacgaggtaggtgccctagggatgccctcaaattaggtgtatgtgccaatgtgcttaacttagtcaatgtcaccgttggttcacccccggtgatgccatgttgttcccttcttaatggtcttgtggacctcgaagccgctgcttgcctttgcaccgctatcagagctaacatcttaggcatcaaccttaacatcccagtttccct

SEQ ID NO: 234878 - DNA, 336 bp, Gossypium hirsutum
caaaatttaagcttagagcttttttgtttgtgatttgatttaaaatgggggggttagagtttgagaacaagaatttaggcctcaagcacctaaacttcgtcagggtggctacaatccacgccttggtttgcgtctcgaacctttacgattactctaaacagatctcggggccgttgagatccaccgttgacaccgtcgagcatgccgttaccactgccgtcggtcccgcctacgggaaatttaaggatgttcctgatcattttcttggattgcttgataacaaggtagatgaggtttcacacaaatttgacgagcatgctccagcaccagccaagc

SEQ ID NO: 234879 - DNA, 260 bp, Gossypium hirsutum
cttgggttgagtgtaaaaatgaggtaaatcatgggtgccaaagttcttgaagatgttgctttgctttccttttcacctgactctgcatttgcacaggatgaggaagaccaaggtcttgttatgaacttctacaaggattcttgtcctcatgctgaagacattatcaaggtagccgttgagctactgtacatgcgacagaaaaacactgtttttatttgtctgagaaacattttccatgactgtgctgtgcagtcatgtta

SEQ ID NO: 234880 - DNA, 384 bp, Gossypium hirsutum
ctttcattttgcttagttcttgttaaaaagaaaatgtgtgggattttagctggtttgggctgttctgatgattctcaggcaaaaagggttcgagtgctggaactttcccgtaggctgaagcaccgtggtcctgactggagtggcctctaccaacatggagactgttatttggcccatcaacgccttgccatcattgatcctgcttccggtgaccaacctctctttaatgaagacaagtctattgctgtcactgtcaatggagagatttacaaccatgaagaactaaggaagaagttgtcccaccacatgttcaggactgtcagtgactgtgatgttattgcccatctgtatgaggagtatggtgaagactttgtggacatgttg

SEQ ID NO: 234881 - DNA, 216 bp, Gossypium hirsutum
atcaatggcactcctgaatttgttcgttcttcacttgaggctagccttcagcgcctcgatgtggattatattgatctttactatataatcagagtagaccgcaagactcctatagaagatactatggaagaactgaagaagtcggtggaagagggaaaaataaagtacatggtatatctgaagctagcccggaacctataaggagggcacaccctg

SEQ ID NO: 234882 - DNA, 288 bp, Gossypium hirsutum
aaaagccctaattcgacagctctctcaggctctgattttgaccgataacgatgtcgaggagaaaggtctgggatcccaaggtggagaatactaccctcgggccagctgtccaagatggcgagcatgttttagggggggctcacattttggcttcatctaatgacacatttattcatgtgacagattcgtctggaagggaaacactggttcgcattcccggttgcttgatcgtgaaagctgaatgggatgagtgttccccttatgctgacatgctcgcatgacaagatg

SEQ ID NO: 234883 - DNA, 320 bp, Gossypium hirsutum
tcgccgccgcctgaatatctgtctcgatatctctgaaccaacaagcgtggagccttaccctgcgagagagaccatgtaggcataccagaacctcatctgccgtgacgagcttctgtttgactcattcccctacagggcaatcgagaatgggaccgctagaacaagttgaggcaatgcggacatgtgcaaggagctattgatgtagacattggtgccaatccttcagtcaacgatgccgctgaggctgaaggtgtcgatgaccaatctgagaacgttgtcgacattgctgacacttacaggcttcaggagcaaccctcttt

SEQ ID NO: 234884 - DNA, 348 bp, Gossypium hirsutum
gcattttataactgtccaaaacctgtcttttctttgtctttttttcttgtgaagttcaaaatgtgtagggttaattcgacaagtatagcatttcttactgttttgctgatatgtttttcgagctttgaggtgacgtatagtgctcgggtaggcacacagtggaggaagcatagcatagctggtggtttccgccgtctaatggcgaagggaggaagctctgacgttgtagccgacgccactaccacctttaatgtgttggactacggcgccaaaggtgatggacgcacagatgactccaaggcattcgaagcagcatgggctgatgcttgtcaagttgaggcatcaaca

SEQ ID NO: 234885 - DNA, 302 bp, Gossypium hirsutum
gcgaaaccacatccaaaggaacggtcttggcataatcagcggggaaagaaaagcgtgtttagcttgactctagtacaactttgtgaaatgacttgaaaggtgtaggataagagggagctctcgggctaaattgaaataccactacttttaacgttattttacttattccgagaatcgtaggcggggcacggctccttttttttggacccaaagccatctttttccggtcgatccattcataagacttttttaggtggttagttatttcttttgcggctcatatgttaaattataacgcattt

SEQ ID NO: 234886 - DNA, 406 bp, Gossypium hirsutum
caaatcttgacatatggtgagaggaaacccgaggagcatctcttgaagggggtcaatgaaattacaccaaaggatatttcttcagtagccaaaaagcttctatcttctaatctcacaatggcatcttacgggaatgtcattaacgtaccaagatacgatcccattagcagcaagttcaagggaaaatgaaaaactgctttgttctgtcgaacttgggtattccatctgtctttcaacagtattattatgcatctgcatatcttaaagagttgtttttcatataaatgatgcggatgaaaatatgaagttttaagctcttctattttgaacaaaataaattactggtctctagctagtgagcaaaacatattagttaaaaataatagcttctgcaaacaatggggtt

SEQ ID NO: 234887 - DNA, 356 bp, Gossypium hirsutum
cttcaattcctcatttcaagggagagagtgtatcagtgtttcttcccctgtttacttaatttctctccgccatggctctctccgtcgagaaaaccgccgccggccgtgagtacaaggtcaaagacatgtctcaggctgacttcggtcgtctcgagatcgagttagctgaggttgaaatgcctggtttaatggcttgtagaaccgagttcggccctgcccaacctttcaaaggagccaaaattactggttctcttcacatgaccatccaaaccgccgttcttattgaaacccttaccgccctcggagctgaagtccgttggtgttcttgcaacattttctctacccaagaccacgct

SEQ ID NO: 234888 - DNA, 363 bp, Gossypium hirsutum
gctttggaagcatggacttcatagctactatcctgtttctagctcttgtcggctcctccaccaaagctttggacccttgcggccctcagccagatgactcggaccttttggtcatcccaatctatggcaaatgttcaccattcaacccacccaaacctgactcatcgttcaacacagtcatgaacatggcatcaaaagacccagcaagggtcaagtacttgtcgagccttgtagcccaaaagaccactgcgggtaccattgcttcaggccaacaagtcctaaacattgtcaacgatatttcccaggtgaagatggtcactccgggtcagctcatgttcatggttttggacactagcaatgatg

SEQ ID NO: 234889 - DNA, 378 bp, Gossypium hirsutum
agcttagtcacagaggaaaatgatgatgcgattttcacttcaaaaagtgaagaatttaccggctttaaggcctcaggttttggcttctgcgagtcctcgtttctctactgctgccgaatcttcttttaatcaccgtaatccttcgagggttcctaatcttataggaggtgcttttgttgattcgaaatcaacatcaaccattgatgttataaaccctgcgacacaagaagttgtttcacaaattcctttaactacaaatgaagagttcaaagctgcagtggctgcagcaaagcaagctttcccgtcatggcgaaataccccaattacaactcgtcagcgtattatgttcaaactccaagagcttattcgtagggatat

SEQ ID NO: 234890 - DNA, 388 bp, Gossypium hirsutum
aggaaaacaagaaaagcagagccgcatcactttttgctagctaagctactgtgggagttattgttcttcagaacagcttctgcagtagctaataataacgttatatattatataaattttatacatcctttttaccctacgactccatatataagcaagtaaaaataaatatggctcgctctgtttcttcctttaagttccttggtgcttctgtttttgatgctctttatgtctccatatcaaggagaggttactcaggtgcaccgccggcggcagtgacggctagctttggtaggcctggagcgatggggaaagtggaacgaagatatgcgatgaaagagtcgtcgtcgtcggagacaagggcttattcttcagcttgggcgcctga

SEQ ID NO: 234891 - DNA, 412 bp, Gossypium hirsutum
tgctttgttttgttttgctttgctttagcttgagaagatgcaaatggaagaaagaagagggaacatcaaagcagagaatgagatgaccatcaacatgaaggaagaacaaagcacacttgactggagagggaggccctccaaccctaacaaacatggtggcttccaagctgcttcatttgttcttgggcttcaggcatttgagataatggcaatagcagcagtggggaacaacctgattacatatgttataaatgagatgcatttctccctctccaactcggcaaacatagtgacaaactttgtgggaacaatcttccttttgccccttcttggtggttacctctctgactctttttttgggagtttctggaccatgctaatctttggctttgtggagctttctggattgata

SEQ ID NO: 234892 - DNA, 412 bp, Gossypium hirsutum
gtctctctcttcatctctctgaaccaaaaagtctttagcttttcgcttcgagagagaccatgttggtttaccaggatctcatctccggtgacgagcttctttctgactcattcccctacaaggaaatcgagaatgggatgctgtgggaagttgagggaaagtgggttgtgcaaggagctattgatgttgacattggtgccaatccttcagccgaagatgctgatgaggatgaaggtgttgatgaccaatctgtgaaggttgttgacattgttgacactttcaggcttcaggagcaaccccctttcgacaagaagcagtttgtcgtgttcatgaagaagttcatcaagaacttgacaccgaaactggatgcggaaaagcaagagtccttcaagaaaaacattgagggagcaac

SEQ ID NO: 234893 - DNA, 412 bp, Gossypium hirsutum
aaaggatctagaaaagagaatatctccttttattttcatttcgtcttcattggatctcaaatccatcatcgaaattacttgtagttatcagaatggggacaataggcaaaactactacggccactatttttctttgtcttcttctgtttcctattgtcttttccacgcctaatgacagatttgttagaattggactcaaaaagagaaagattgaccgaaacaatcggatggctgcacaccttgaatccaaggaggaaaaggcatctgaagcttttcttagaaagtatcgtcttcatgggaacttgggggaatcagaggacattgatattgtggcactaaacaactacatggacgctcaatactttggtgagatcggtactggcactcctacacagaacttcactgtgatatt

SEQ ID NO: 234894 - DNA, 370 bp, Gossypium hirsutum
aaaaatctgaaaaaaaaaaaattctcttgaatggtagttaagctaaagctaaaacaaccccatcatcccatttcttcattgttcatgctttagagacctttgacatgttcatatggccttgtttggtagtccaggaaagttaagtggactattattaagaattgggcagtgtttttctgcagctgcttcaattggtttcatggtttctgctcatggcttttttaactccactgctttctgctatttgattgcgtcaatggggattcaagttttatggagctttggacttgcatgtctcgatttccatgctttgaggtcaaagacaaacctacacaatcctgtcttagtaagcttgtttgttattggtgat

SEQ ID NO: 234895 - DNA, 367 bp, Gossypium hirsutum
atcagaggttaaagagacggcgccaatcagctgtccgccttgactgaccgtccggcatcgtcttggccctcgattttgcccttttgtaaaccttttttttcaccaattcccgaaatggcagtgaaaccctccaaggccgataagaaaatcgcgtacgacgcgaaactgtgccagctcttagatgagtacacgcagatcttgatcgccgcagccgacaatgttggctcgaagcagctccagaacattcggaaaggtctccgaggtgactcagttgttttaatgggtaagaacactatgatgaaaaggtcttgtaggatgcatgctgagaagactgggaacgaagcttttcttaaccttatccctttgc

SEQ ID NO: 234896 - DNA, 415 bp, Gossypium hirsutum
ctccagcagctgcaccacaactacagagaagagagtaaaggggaaaaaaggggcggtggtcttgctttcttcttctacttcgctctctctctttctcggaggtccctcctcggtcctttatttattcaggattggaaaagatggcccgccgggagggtattcaacccctcggctgggataatgggaccggaaaggtgaaggccgcgtttgccggtgaggaggcccccagggccggttttcccacaattgtgggtcgcgcccccgccactcgggtgttatggttgggatgggtcagaaggatgcctatgtaggagatgaagcacaatctaaaagaggtatcctcactgtgaaatatcccattgagcatggtattgtgagcaactgggatgatatgggaaaagattggcctcataca

SEQ ID NO: 234897 - DNA, 371 bp, Gossypium hirsutum
  unsure (1)..(371): unsure at all n locations
ccacgcgtccgcactcatacatctattctttgctttcaactcaaagtcgcaagtaggattagaatcatgggtgttgtcacttataactatgactctacctcccctgtcgctcccgccaggcttttcaaggccttcgttcttgaagctgacaaggtctggcccatagctgcccctcatgcaatcaagagtattgaggttgaagctaatcctggccctggatgtatcgtaaagatcaactttgttgaaggccttccattccaatatatgaagcaccaaattggaggacatgatgaaaacaaattttcatacagttacaatttgattgaaggtgggcctttggggaacatgctngagaaaatcaactacgagaa

SEQ ID NO: 234898 - DNA, 414 bp, Gossypium hirsutum
atcccctcgtccattgatcttttgatcttctagagacttctcttcctcggtgggtgtctctgggtttgccctcgtaatggcgtctgctttagaaaccaaagccaaagaagcatacttcgatgaccacttcgaactcgccctcgatctctactcgcaagccatcggaatcaaccctaaaaaggccgagctctacgctgaccgtgctcaagccaacatcaaactcaacaatctccctgacgctgtggcagatgctaacaaagcaattgagttggatccgcccatgtctaaatcctacttgcgtaaagctactgcgtgtatgaagcttgaggagtatcaaactgctaaggctgcgttggagacttggggctgctttggcaccagaagactcgagattttccaagttgattaaagaat

SEQ ID NO: 234899 - DNA, 347 bp, Gossypium hirsutum
aagcaggtagccttccttttaccttatttcttctcgcttacaaaacagccatgggtgggaaaaagatgagctccgagcctgcgaccagacccgcttctgcaagcgagctcgatttcgcaaacccggcgcctgcactctaatcgcccacgatgtctccatctccgatggtgatctcactgccaagctcattcctaaagctccacacgaccaagaccaagatcagatcaagccgttgactctctctgtttcagtctaccaggatgggatcatgcggctcaagatcgacgaagatccctcgttgcacccacccaagaaacggttccaagtcgccgatgtggttatttccg

SEQ ID NO: 234900 - DNA, 396 bp, Gossypium hirsutum
  unsure (1)..(396): unsure at all n locations
gctagaaccaaaatgcaagaaagcagttcacagttgtctgccacttcatatcaaagcgtcccaactttccctcttcattcaaccaatgagaaagctattccccttctaggttttggcacagccgaataccctttcggtgcttccatcgataccatgaaacaaaccattctcgaagctatcgaagtagggtaccgtcacttcgatacggctgctctttaccaaactgaacagcctttaggtgaagcaatatcagatgctcttcgtctagggttaatcaaatccagagacgaactctttatcacttccaagctctggtgtagcgatgcacaccatgattgtgttctcccagcactcaaaaaaacactncaaaaatttgaagttggaatatcttgatct

SEQ ID NO: 234901 - DNA, 290 bp, Gossypium hirsutum
cacagccagaggcgaggagccagataagaaaaactaaaggaaaattgttttctggttcaaaaccacagccctatcccacatgcggttcggatccggattctctaagatccgattgacattcatcgctttaattttcattctgatctgatcccaaacgaatctattcggccgtgaaaaatgactcgtcgctgctcacattgcagccacaacggccacaactctcggacatgtcccaaccgaggggtcaaactcttcggagtccgcttgactgacggttcgattcggaagag

SEQ ID NO: 234902 - DNA, 415 bp, Gossypium hirsutum
gtttccttttcttacactgtaacagccatggaagctgtgaacatgaagaaaaaagacccaaaaatagtggtggccgtggacgagagtgatgagagcatgtatgcactttcatggtgcttagcaaatttgatttcccagacctcaaccagcaacctcgtccttctttatgtaaaaccttcaccccctgtctattcttccctcgacgctgcaaggtatatgttttccaccgatgtgatcgtagccttggaaaaatacggcagtgacatggtgaatacagtgatgagaagagctgaagctatttgcagaaaatccaccaccaaaataaatgtggagagaatcgtggggagtggagatgccaaggatgaaatatgtaacatagtgggcaaaatcaaagctgatacgtttggtatgggat

SEQ ID NO: 234903 - DNA, 429 bp, Gossypium hirsutum
gcgcttcatctcttatcctttcttcttcactttcggcagatcccaatggcaccaaagaaagacaaagctcctcctccatcatcaaagcctgcaaagtctggaggtggcaagcaaaagaagaagaagtggagcaagggaaagcaaaaggagaaggtcaacaatatggtgctattcgaccaagctacttatgataagcttctctctgaagctcctaaatacaagctcatcactccctcgattctctctgatcgtatgaggatcaacggatcgcttgcgagaaaggctataagggaactgatggcaagagggtctattaggttggtttccgcccattcgagccagcagatttacactagggcaacaaacacctaggtctcatatttgtacgttttttgcttaatagttatacatagtaatgctttttgctga

SEQ ID NO: 234904 - DNA, 312 bp, Gossypium hirsutum
aaccagttcgcgtcctcgttactggagctgcaggacaaatcgggtatgctcttgtacccatgattgctaggggagtcatgttgggtgctgaccagcccgtgatccttcacatgcttgatatcccacctgctgcggaggctttgaatggtgtcaaaatggagttggtggatgctgcatttcctcttctaaagggtgttgttgctacaactgatgctgttgaggcatgcactggagtcaatgttgctgtcatggttggtggtttcccaaggaaggaaggaatggagaggaaagatgttatgtcaaagaatgtgt

SEQ ID NO: 234905 - DNA, 436 bp, Gossypium hirsutum
caaagcttcatattatcttttttagttccgacaaaagaaaacgaaaaaaatagaaggggtacaatcgttttctttttgaagtcgggttttagtttttggggagaaaaaaatgttgggagtatttagcagtgcgatagtgtctccgccggacgagctggtggcggccggttgccgaactccatcacctaagataacggcggatgctctggtgaaacggttccttgagacgaactcctccggcgtgtccatgcagatcggagaccatgtccaattcgcttattctcaccataaagagtctcctttacggcccagatcatttgctgtgaaagatgaaatcttctgcttgtttgagggagcccttgataacttggggagtttaaagcagcaatatggtctggcaaagtcggcaaatgaagtgattttggtcattgaagct

SEQ ID NO: 234906 - DNA, 393 bp, Gossypium hirsutum
aaagcacgctcttcttccttgtgtaagcggcgccggcaagaagctaaggccagtccacctcggatctctcgtctctgccttccatcgacaacaatctatcttacatgtttcacttcttctttcatcaaagattttgatggcgtcaaaattgcagcagttgcaatctcaggcgtgccaagcttcaaagtttgtggcgaagcacggaactgcttactacaagcagttgttggagcagaacaagcaatacattcaagagccgccgacagtggagaagtgcaacgagttggctaagcaactcttttacactcgccttgctagtatcccaggtcgtacagagtcattctggaaggagctcgattatgtcaagcaactatggaaggaacaggaaagagc

SEQ ID NO: 234907 - DNA, 371 bp, Gossypium hirsutum
caatcagttccggcgaatcaaatggcaaaagaagttgttaatcccgatgagctggttgttgttggagaggaattagaccatgtaagaatcatcactttgaacaggcctcgacatttgaatgtcatctcatccaaagtggtctccctgctagctaaatacttaaaaaaatgggaaagagatgagcaagctcagcttatactgatcaagggagccgggcgtgcattttctggtggtggggatttaaaaatgttctatgagggaaggaaatcaaaggattcctgccttgaagtggtctatagaatgtattggctttgctatcacattcatacctataagaaaactcaggttgctcttgttcaaggaatttcaat

SEQ ID NO: 234908 - DNA, 421 bp, Gossypium hirsutum
gttaaaaaaccttgagctgtgacagagagggagaatggcgagccgtacaaatggcggtggcagcaatggaccggtggataaaggagctgattttgccaattacttctgcacttacgctttcctttaccaccagaaagagatgcttagtgatcgagtccgtatggacgcttattacaatgctgtttttcagaacaagcatcatttccaaggaaaggctgtattggatgtaggaacaggaagtggcattcttgcaatctggtctgcccaggctggtgcaaggaaggtctatgccgttgaagcaactaagatgtcggagcatgcccggactcttgttcaggcaaacaatcttcaagacattgtagaagtaattgagggctctatggaggaagttgtcttaccagagaaagttgatgtgattatc

SEQ ID NO: 234909 - DNA, 443 bp, Gossypium hirsutum
gtgattcgaatttcagtgttttgatatggaacaaaaagccttcaaacgtccctttgttgactgggtttacatctttttcctgagtcacctggtgttttgtcaactcgattatagattctatgacagtacttgtcccagtctcacagggattgttagatatggtgtttggtcagccattgctaacgatactcggatggcggcctctcttgttcgacttcacttccatgattgttttgttaacggatgtgatgcttcaatcttacttgatgatattgactcaacatttgtgggggaaaaaacagcaagtgttaatcaaaactcagtaagaggctatgaggttattgacaaaattaaggctaatgttgagaaagcttgcccatcaactgtgtcttgcactgatatattaactcttgcagcaagagaagctgctaatattgcagggg

SEQ ID NO: 234910 - DNA, 283 bp, Gossypium hirsutum
gcagtctctcccgctccttctcgctgcgatttcgtcttcaagatctcagttctcaggtcgtagcgctcttttctatcaagccatggctctggtcttgcatgcaggaaaaacaaacaaaaatgcctttaaggcactcattgctgcagaatatagtggtgtgcaggtcaaaatggttgagaattttgagatgggtgtgtcaaataagactcctgagttcatcaagatgaaccctttggggaaggttcctgtgttggaaacacctgagggtcctgtatttgagagc

SEQ ID NO: 234911 - DNA, 293 bp, Gossypium hirsutum
tttcaatcatcgccaccacctatggttgtggaattatcccagaaatacaggcaactatagctcccccagtgaaggggaagatgttcaaaggtttatgtgtgtgctttggtgtgatagttagcacatatttcagtgtggcaatctctgggtattgggcatttggcaatcaatctcaaccatcaattctttcaaattttatggatgaaaacaggccattgctgccctcttggtttttattgctcaccaacatctttactcttatgcaactggctacaatcactgtgatttacttg

SEQ ID NO: 234912 - DNA, 379 bp, Gossypium hirsutum
cttatctctccaccggcgagctacctaattgagctacaccgctatgcatccatctaagccaggcaatctcttttttatggtaacggtcatgatccgtctctgcttcgccgatctgccttgttttcgggaggcaccggcatgccgaaacggcagagagtggccacaaacaacctggtcctccctcgacaaagagatccacaatgccttcattatgcatatcggtatgacattagacactgcttacctccggggctccggcgctggagtctattgcggtctacaccacgccacgtgtgcggaaaacatcgagtaccattttggccccacgccccgacacggagctaaactaacgcgcgccgatacctccatttttccttac

SEQ ID NO: 234913 - DNA, 428 bp, Gossypium hirsutum
cggacgcgtgggcttccaattatcttaaagcctgccatataatcatataaccaggcggcggcggggtactcttgggccaccacaatgccgaaaatcgccttgggaacaagccaagaggctgctcagcctgactgcatcaaagcccttgtggtcgagtttatcaccactttcctcttcgtattcgttggagtaggagctgccatggccgccgatgagtcgggggcaaatgcgctggtgggattgtttgctgtggcggtggctcatgcccttggcggcggcgttatgatatcggccggacacatatcaggcgggcatcttaacccagccgtcacgcttgggttgctattcggtggtcacatcacggtggtcccggcgatcctctactggatcgatcagttgttggcatcttcagctgctggatacttctc

SEQ ID NO: 234914 - DNA, 280 bp, Gossypium hirsutum
cgaaaagaaaaaatggctttgaattttaatgccatcgcctcgaaatctcagaagctgccttgctttgctcttccaccaaaggccacccttagatctcccaagttttccatgatctccaccattccttctggctccaaagaggttgggaatctgaaaaagcctttcacgcctccaaaggaggtgcctgttcagatcacccactccatgccgcctcacaagattgagatctttaaatctttggagggctgggctgagaacaacattctgactcacctcaaac

SEQ ID NO: 234915 - DNA, 321 bp, Gossypium hirsutum
cttccttgtatctttattttctcgcctttgacgaggagccgacgctaccatggttggggtcagtttctaccgcaactatgggaagacctttaagaagccacgacgtccgtatgagaaggaacgattggatgctgagttgaggcttgtaggagagtatgggctccgatgcaagagggagctgtggagggttcagtatgctttgagccgcatccgtaatgctgctagggaccttctcactcttgatgagaagaaccctcgtcgtatttttgaaggtgaagcccttcttcgtaggatgaacaggtatggacttttggatgagag

SEQ ID NO: 234916 - DNA, 395 bp, Gossypium hirsutum
atttctctctataaacttgtacggccaaagattccttcccagcaaaaaatcggaaagaaagaaaaaacatggggatgccgcctgccacgtgcgcctccgcctcttcctcctccatcgtcaactcttctccgatcggtggcgctggcggaggaggtggagagatcatgctttttggagtcagagtggtggttgattccatgaggaaaagtgtgagtatgaacaacctttctcaatacgaacaacctcatgagtcgaacaagcataacaacaagagcaacaaagatcaaggcgatgataacctcaccgctggttacgcctcccgcgacgatgccgttcctcactcctctggaaatcgagagcgcaaaagaggggtgccgtggacggaagaggagcac

SEQ ID NO: 234917 - DNA, 314 bp, Gossypium hirsutum
cggacgcgtgggtctgaaactcaccttccatattatttaaactaaatacaggactcatttgtgttgggggaatgcctgagaaaatggctcgcattcaatatataggagctgctctatgctttgcagatttacttgagggatcgctatcaaaagctcaactgaccccgacattttacgatgaaacatgcccaaacgtgacagccattatccgacatgtgctcgagaatgcttcgttttcagatccaaggattggcgccagtctcaccaggcttcactctcatgattgctttggcaacgatgcgatgcgacgattt

SEQ ID NO: 234918 - DNA, 361 bp, Gossypium hirsutum
cttccttcgccgtctactgctcttgtgacctcgatttcaagtgaaacagggggggtggggaaaagactcacattaacattgtggtcattggccatgtcgattccggaaaatcgaccaccactggccacctgatctacaagcttggtggtattgacaagcgtgtgattgaaaggtttgagaaagaagctgctgagatgaacaagaggtcattcaagtatgcttgggtgcttgacaagctcaaggctgaacgtgagcgtggtatcaccattgatattgccttgtggaaatttgagaccaccaaatactactgcactgtgattgatgcgcctggacaccgggaactttatcaagaaacatgatt

SEQ ID NO: 234919 - DNA, 388 bp, Gossypium hirsutum
caagatgcaaattttcgtcaagaccctcaccggaaagaccatcacattggaggtggagagttctgatactattgacaatgtaaaggccaagattcaggacaaggaaggcatccccccagaccagcaaaggttgatcttcgctggtaagcaacttgaggatggccgcacgttggctgattacaacatccagaaggagtccacactccacttagtgcttcgcctccgtggaggaatgcaaatttttgttaagactttgactgggaagaccattacattggaggtagagagttcagataccattgataatgttaaggcaaaaattcatgacaaggagggaattcccccagaccaacaaaggctgatttttgctggtaagcaactggaggat

SEQ ID NO: 234920 - DNA, 409 bp, Gossypium hirsutum
gcttcaagtgccaaaatctagggatttgcgggtggagaagacgagagcccatctctctgcttcaaagctcctgtccaggtagaattctcttcttcccttgcgttgtgttctttcctgttcaatcgccatggcttcaaagcggattttgaaagaactcaaggatttgcagaaagatccacccacttcttgcagtgctggtccagtagctgaagacatgtttcattggcaagcaacaatcatgggaccctcagatagcccttatgctggaggtgtgtttttagttactatccatttccctccagattatcctttcaagcctcctaaggttgcatttaggaccaaggtcttccatcccaacatcaacagcaatggaagcatttgtcttgatatcctcaaagaacaatggagt

SEQ ID NO: 234921 - DNA, 386 bp, Gossypium hirsutum
actttctggactgatctgtttgtcttctgcaaaacccagagtttttttttttcatttgttttcagaaattgtccaccatggctggtggagggtttggtaatgaaggagggaatttgaagagagctcatctctatgaatacaagattaccaattattttatatttgcttgccttgttgctgctacagggggatctctttttggatatgatcttggtgtttctggtggagtgacttccatggatgatttcttgaaggaattcttcccaaaaatatatagaaggaaacaagcacatcttcatgaaactgactactgcaaatatgacaaccagctcctcacactctttacgtcttcgctctacttcgcaggccttgtttctacatttgga

SEQ ID NO: 234922 - DNA, 393 bp, Gossypium hirsutum
atttcatccacgatgaatcccttcaaaaccttgccaaccctttctttcctcttctgaacccttttcagcttagcccatgcagccacatttgatataagaaacaactgcccttacaccgtttgggctgccgcatctccgggtggtggcaagagacttgaccaaggtcaagcatggcaaatcactgcagcctctggaaccacacaagcccgaatttgggctcgaaccaaatgcaatttcgatgcctccgggaaaggctcatgcgagacaggcgactgcggtggagtcctcgaatgcaagggatacggtaaagctcccaacacactagccgaatacgcaatcgaccaatttgagcaccaagacttcattgacatctccaacatcgatggctttaat

SEQ ID NO: 234923 - DNA, 424 bp, Gossypium hirsutum
caaaaaacccttctttttttccctcatcaatccaccatgggaggaggaaatggccggaaatccaagatggcccgtgagaagaacttggaaaagcaaaaagctgctggcaaaggaagccagcttgagtctaacaagaaggccatgtccatccagtgcaaggtgtgtatgcaaacattcatgtgtaccacaacggaagtgaaatgccgggagcacgctgaggcgaagcatccaaagtccgacgtgtacgcgtgctttcctcatcttaaaaaataaacatcgaaactccacagaaagaacggagatgtcaagacagcttggaatgcatatcatctatctatgttggatcttgggactctataatttatcttaaattctcttttacaaggctggaaaaaaaaaaaatatatttatataaatatttttt

SEQ ID NO: 234924 - DNA, 298 bp, Gossypium hirsutum
acaccaagaagccctatctgaggctctacccgaagacaatgttggattcaacatcaggaacggtgctgttaagggtctcaaacacaatttctttgcttaaaactataaagatgaatctgcaaaggcagctggccgctacacctctcaggccatgatcatgaaccaccctgggcagattggaaacggatactccccagtacttgactgccatacctgctacattgctgtgaagatctctgaattgctcaccaagatcaacaggcgatctggaaaggcccttgataaggagccaatgttc

SEQ ID NO: 234925 - DNA, 432 bp, Gossypium hirsutum
gcaagccattaaggttttgagaaaagatcaaaatggattcaaaaagatcagcttccacagccctccttttagccctcaacattctcttcttttccctagtcagtgctaattgtggatcttgttcttcttctggctctaacccaaggccaactcccacccctactccatctgcacgaggtaggtgccctagggatgccctcaaattaggtgtatgtgccaatgtgcttaacttagtcaatgtcaccgttggttcacccccggtgatgccatgttgttcccttctcaacggtcttgtggacctcgaagccgctgcttgcctttgcaccgctatcagagctaacatcttaagcatcaaccttaacatcccagtttcccttagcttgcttctcaacgtttgctcaaggaatggtcctactggtttccaatgctaag

SEQ ID NO: 234926 - DNA, 392 bp, Gossypium hirsutum
aaaaaaaccaaagatgcagtacaaaaacctgggcagatcaggcttaaaggtgagtcagctagggtatggagcatgggttagtttcggtaaccagctcgatgttaaagaagcaaagtcacttctccagtgttgtaaagacaacggagtcaactttttcgacaacgccgaggtttatgccaatggtcgagccgaggagatcatgggtcatgctattacggaacttgggtggaaacgatcggatatcgcggtgtgtaccaagatcttttggggtggtcctgggccaaatgataagggtttgtctagaaaacatattgtggaaggaaccaaggcgttcttgaagaggcttgatatggattatgttgatgtgctctattggcataggccagacacac

SEQ ID NO: 234927 - DNA, 422 bp, Gossypium hirsutum
attttcttgttccttccttcgccgtctattgctttttgttacctcgatttcaagtgaatcagatgggtaaggaaaagactcacattaacattgtggttatcggccacgtcgattctgggaaatcaaccaccactggccacctgatttacaagcttggtggtattgacaagcgtgtgattgaaaggttcgagaaagaagctgctgagatgaacaagaggtcattcaagtatgcttgggtgcttgacaagctcaaggctgagcgtgagcgtggtatcaccattgatattgccttgtggaaatttgagaccacgaaatactactgcactgtgattgatgcacctggacaccgtgactttatcaagaatatgattactgggacgtcacaggctgactgtgctgttttgattattgattccaccact

SEQ ID NO: 234928 - DNA, 406 bp, Gossypium hirsutum
tgcttaggagaaaagagaagaaaacaatgtcaggtcctcagtgctgttcgaatccacgggacattggattctgcaagtggggctggtcacgttgagaatcttgctggtctcaacacttatgtttctgggtctcttcaatctaagcttgctgtttttcttatctctgatattttcggatatgaggctccaaactttagaaagctcgcggacaaggttgcagccgctgggttctatgtggtggctcctgacttcttttatggagaaccctatgaccctaataaccctgatagacctctatctggttggataaaggatcatggaccggataaaggttacgaggatgcaaagctcgtaattgacgctttgaaaagtaaaggggtttcatccattggagctgctgggttct

SEQ ID NO: 234929 - DNA, 331 bp, Gossypium hirsutum
ctaacacagccagaggcgaggagccagataagaaaaactaaaggaaaattggtttgtggttcaaaaccacagccctatcccacatgcggttcggatccggattctctaagatccgattgacattcatcgctttaattttcattctgatctgatcccaaacgaatctattcggccgtgaaaaatgactcgtcgctgctcacattgcagccacaacggccacaactctcggacatgtcccaaccgaggggtcaaactcttcggagtccgcttgactgacgggtcgattcggaagagcgccagtatgggcaacttaagccaatattccgggtcg

SEQ ID NO: 234930 - DNA, 361 bp, Gossypium hirsutum
cagattcagaaagaaataaaggaagaagaagcaatggccactcttacagtgcccacgacagttccttcggtgtctgaagattgtgaacagctaagaaaagccttttcaggatggggaactaatgagggcttaatcatagatatattgggtcacagaaatgccgagcaacgaaacttgattcgaaaaacctacgctgaaacctatggagaggatctcctcaaggcactagacaaggagctctcgaatgactttgagaggctggttttgctttgggctcttgatcctgctgaacgtgatgcccttttggctaatgaagccaccaaaaggtggacttcaaagcatcaggttctttatggaaata

SEQ ID NO: 234931 - DNA, 418 bp, Gossypium hirsutum
aaacggtatcgttttagtcagtctttcatcaatggcgaaagaaccggttcgcgtccgcgttactggagctgcaggacaaatcgggtatgctcttgtacccatgattgctaggggagtcatgttgggtgctgaccagcccgtgatccttcacatgcttgatatcccacctgctgcggaggctttgaatggtgtcaaaatggagttggtggatgctgcttttcctcttctaaagggtgttgttgctacaactgatgttgttgaggcatgcactggagtcaatgttgctgtcatgggtggtggtttcccaaggaaggaaggaatggagaggaaagatgttatgtcaaagaatgggtctatttacaagtctcaggcttttgccttggaacaacatgcagcttctaactgcaagggtttgggt

SEQ ID NO: 234932 - DNA, 381 bp, Gossypium hirsutum
gtcaaagagaggtatcctcactttaaagtaccctatcgaacatggcattggcagcaattgggatgacatggagaagatttggcaccatactttctacaatgagcttcgtgttgcccctgaagagcatccagtacttcttacagaagcaccactcaaccctaaggcgaatagggagaagatgacccagattatgtttgaaacattcaattctccggctatgtatgttgctattcaggcagttctttcactttatgccagtggacgaacaacaggtattgtcttggactctggtgatggtgtgagccacactgtgccaatttatgaaggctatgccctcccccatgctattctttcgttggaccttgctggacgtgatcttac

SEQ ID NO: 234933 - DNA, 356 bp, Gossypium hirsutum
ctcaaagaaaaaattgagtgtcagtttgaaagtgttcttcagatatggctatgaaacaggttggtaattctgctatcaaagcaattgccaattctgggtcatcctctcttcttaccagacaactccatgcttctccagggagcaaaaagattgttggggtgttttacaaggccaacgagtactttacgaagaatcccaactttgttggttgtgtggagggagccttggggttgcgcccatggctggaatcacaggggcatcagtatattgttaccgacgacaaagaaggaccggactgcgaacttgaaaagcatatccctgatctccatgtgctcatatcgaccccattccacccg

SEQ ID NO: 234934 - DNA, 319 bp, Gossypium hirsutum
ggcgatcccaactcagttagtcctctcctttctcctcctttctttttcccctgtcgttttttgagaccgtgaagattgcgtttactcggtctacataaggacgggatccatcatcaaaggcggaaccgactccatcatcggcctacggctctacgatgccaatggctactcagtggagatcagcaacatcgaagcatggggtgggttaatggggccaggatacaactatttcgagaggggtaatttggacattttctcaggtaggggacgttgcttggatgcccctctttgtgccatgaacttgaccttcgatggttcg

SEQ ID NO: 234935 - DNA, 434 bp, Gossypium hirsutum
gcagcatgcgctgcacatccaactgccgatgtttttattaactttgcatcatatcggagtgctggtgcttcgtccatgtctgctctgaaacaacctaccattcgagttgttgctataattgctgaaggtgttcctgaatcagacaccaaacagctgattgcatatgcacgttccaacaacaaggttgttattggcccagctactgttggaggaattcaagctggagcttttaagataggtgacactgctggaacaattgacaatattgttcattgcaagctgtacaggcctggatctgttggctttgtctccaaatctggtggcatgtcgaatgaaatgtacaacactattgcccgtgttacagatggaatctatgaaggcatagctattggaggagatgtcttcccgggatccaccttatccgaccatatttt

SEQ ID NO: 234936 - DNA, 349 bp, Gossypium hirsutum
gcagctatttggtttaccaccaagatatagggactctgttcgggcaattacacctggcgttacctctatttctctataactatactactcatcagttgcatggtatttttgaggcagcaacttttgggggttctaacatcgatccaactgcttgggaagacaaaaatgcaaaggcgagtcaaggtttcctgctcaggtgagaatctgtattaggaaactctgcaaggcattggaagagatgcgtttaggccagtcttgcaccactatgatggccccaagtttcgtctcgagctctcagttcctgagacgttggatctattagacctttgtgaacaagcaggttcttcat

SEQ ID NO: 234937 - DNA, 399 bp, Gossypium hirsutum
  unsure (1)..(399): unsure at all n locations
accgnccggaancccggtcgaccgcgcgtccgaaagccctaaaattgaaatgccctcgaatatggccgccaccgccacaagcaccnccacattcgggcttggcaatccccttgcctcttcctcttcctcatccgtttactcctccaagaaattgcctgtcaatttcagaaaatttgcgcttcagacgtcgcctgtgaaaagcttttctgtttcttgtactctaactagaaaaccagtcccagctgctccggtttccatggattcggacccgaacggatggcaacgacccgactcgtttggtcggtttggcaaatttggcggcaaatacgttcccgagaccctaatgtctgccctctctgagctggatgcggcttttcattccttctccaaggatgaaaa

SEQ ID NO: 234938 - DNA, 433 bp, Gossypium hirsutum
acttcttctcttatttgaactcaaagtcccagctaatattagaatcatgggtgttgtcacttatgactatgagaatacctccccagtcgcccctgccaggcttttcaaggcctttactgttgaagctccgaaagtttggcccacggctgcacctaatgcagtaaagagccttgaggttgaagctaatcctagctctggaagtatcgtaaaaatcaactttgttgaaggccttccattccaatatatgaagcaccagatcggaggacatgatgaaagtaatttttcatacagttacgatttaatcgaaggtgggcctttgggggataagcttgaaaaaattagctatgagaacaggtttgaggcacctgcaggtggagggagtatttgcaagagctcaatgaaattctacactataggcgataatgttatcact

SEQ ID NO: 234939 - DNA, 374 bp, Gossypium hirsutum
aaaatataagaaaaaaaatcatacgcaatgagcactgctggtcaggttattcgttgcaaagctgcggtggcatgggaggcggggaagccactatcgatagaagaagtggaagtggcaccaccccaaaagcatgaagtccgtattaagattctcttcactgctttatgtcacactgatgtatactactgggagtgtaagggttacactcctctgtttcctcgtatacttggtcatgaagcctcagggatcgtggagagtgtgggtgagggtgtgaatgatttgaaacctggagatcatgtgctccctatcttcaccggagaatgcaaagaatgtcgccactgtctgtcagaagaaagcaataacatgtgcgaact

SEQ ID NO: 234940 - DNA, 314 bp, Gossypium hirsutum
atggcatcaaaagacccagcaagggtcaagtacttgtcgagccttctagcccaaaagaccactgcggttcccattgcttcaggccaacaagtcctaaatattggcaactatgtcgtccgggtaaagattggcactccgggtcagctcatgttcatggtattggacactagcaatgatgtggcttgggtcccatgctccggctgcaccaggtgctcagccaccactttctcacccaacacttcttccacctatggttcgttggattgcggtttgccccaatgcgcccaggtccatgggctgtcgtgcccggctac

SEQ ID NO: 234941 - DNA, 439 bp, Gossypium hirsutum
aattccggggcgcggacgcgtccgggtaccggaaaatttgtttggcaaggtttgcatcatcatagacaagattgaaaagatcccaatagatgagattaagagagagttgaacgctactgggttatcagaagaggctattgaggaactattacaagtgctttccataaagtcattgactaagttggaagagatacttggaggtgctggggaagctgttgctgacttgaaagaactgttctcactttctgagaagtttggttactctgagtggattcagtttgatgcatctgttgttcgcggtcttgcctactatacgggtatcgtttttgagggttttgatagacaaggaaagctaaaagctatttgtggcggtgggcgatatgatagactactttctacttttggtggggatgatggtccagcttgtggctttgggttc

SEQ ID NO: 234942 - DNA, 322 bp, Gossypium hirsutum
gctttgtatattgaagtttcctttctcgattttctatttagccaaacaagatgcagagcttcgttaagactctaaccggcaagacgatcactctcgaggtcgagagctccgatacgaacgacaacgtgaaggccaaaatccaagataaggaaggcattcctccagaccagcagcgtctgatctttgccggaaaacagctcgaagacggccggaccttggccgattacaacattcaaaaggagtcaactcttcaccctcgtctccgtctgcgcggtgggatgcaaatcttcgtgaaaaccttgactggcaagacaatcactct

SEQ ID NO: 234943 - DNA, 400 bp, Gossypium hirsutum
caaccctgggaaacttttggcataagggagggaagagcagtgattgttggtgttgttgaatcatgagttgcaacgggtgccgcgtcttacgaaaaggatgcagcgagtcatgtattttacgaccttgtctgcaatggatcgacggccctgaagcgcaaggccatgccactattttcgtcgccaagttctttggccgagcggggctcatgtccttcatctctgccgtgccagaatctcaacgttctgctttgttccaatcactgttgctcgaagcttgtggtagaacagtgaatccagtgaacagagctgtcggacttttatggacagggaactggcatgtttgccaagcgggagttgaaactgtcttacgaggaggaactgtcgggcggtcctgaactta

SEQ ID NO: 234944 - DNA, 314 bp, Gossypium hirsutum
atccaatatcgctgctaaaaatgatgacccagttatccctaaggttgagataacacagaaaatgcgtgttgatggggaagtcaacagggctagatgtatgcctcaaaacccggttattatcggcgcaaagaccagtggctccgacgttttcgtgtttgattatgccaagcaggctgcagctaaagagcaggagggtgactgtgttgctgatttgaggttgaggggtcatgaaaaggaagggtatggattatcatggagtccatttaaggagggttatcttttgagtggttcacaagaccataagatatgccttt

SEQ ID NO: 234945 - DNA, 307 bp, Gossypium hirsutum
atccgctgcgtccaaaccgcatccgaggtcgtcgccgccctgtgtgccgtcgatgtcgaggccaatgccaagtcatctgccgacgtcataaaattcgacccatcaaaagtcaaggtttctattgagtatggtttgtgtgagatgttaaacaaagaagcgattagggttgatgtagcgccgaaagatggaaacttcggtttcgatgttccactgcttgagactatgttcccgagtgggacgtttgatcctagtcttggacgagtttacggaaagatgccacaatgggaagaaacggtggtttaatcta

SEQ ID NO: 234946 - DNA, 381 bp, Gossypium hirsutum
gccactaagcttttgagagaagatcagaatggcgtctaaaagagcagcttccatgggcctccttttggcactcaacattctgtttttttccctagtcagagcttgtggctcttgctcttcacccacccgcaacccaagggcgaacccgaccgcgaacaaccccacttctacgtcatctgcacgaggcaggtgccctagggatgccctcaaattaggtgtatgtgccaatgtgcttaacctagtcaatgtcaccgggggttcacccccagtgatgccaggctggtcccttctcaatggccttggcgacctagaagcgtgggcatgcctttgcaccgctatcagagcaaacattttagggcttaacctcaacatcccaatttc

SEQ ID NO: 234947 - DNA, 352 bp, Gossypium hirsutum
tgaaatctcgttccccatcgacgcctctgcttatcgcatcatcagccatgtcgaggagaaaggttagggagccaaaggaagagactacaacccttgggcctgctgtacgagacggagagcatgttttcggtgttgcccacatttttgcatcttttaatgacactttcattcatgtgactgatttgtctggaagagagactatggttcgtattacaggtggtatgaaggtgaaagccgacagggatgaatcttcaccttatgctgctatgcttgcagcacaagatgttttccagagatgcaaggaacttggaatcacggcccttcacattaaattacgtgccacagaggtaac

SEQ ID NO: 234948 - DNA, 333 bp, Gossypium hirsutum
caatcagttccggcgaatcaaatggcaaaagaagttgttaatcccgatgaactggttgttgttggagaggaattagaccatgtaagaatcatcactttgaacaggcctcgacatttgaatgtcatctcatccaaagtggtctccctgctagctaaatacttagaaaaatgggaaagagatgagcaagctcagcttatactgatcaagggagccgggcgtgcattttctgctggtggagatttaaaaatgttctatgagggaaggaaatcaaaggattcctgccttgaagtggtctataaaatggattggctttgctatcacattcatacctat

SEQ ID NO: 234949 - DNA, 469 bp, Gossypium hirsutum
cggtccgacctacccggttcgatccactccagtcgctctctgcgccatcttttctttttctttcttcttcatttaaagagaaggttgaggaaccctagctgattttttttttccaaaataaaattgaaggttgaggctttagctttccattgagaccatgacgacatcgtttgggagtgcaacgagtaccgtgatacccaacgatcccaagattagaatgcaaagctttacggggttgaaatctttgcattctatagctttggcgaggaatcatcgcgtgtttccacttcccttctccactccttctgttattagagctgtctctacgccagtgaaacccgaaaccagtacaacagagccaaagcgaagtaaagttgaaatattcaaagaacaaagcaatttcattagataccctcttaatgaggagatattgactgatacacccaatataaacgaggctgcgacacaa

SEQ ID NO: 234950 - DNA, 453 bp, Gossypium hirsutum
ctgcgcgtgcttatgccatccctctctcactaaaaacactacactgggctcaaacccctacgggtgaccattctttgcggcaccaccgtacatcccttatataactatccaacactgtctgcattggagcccatacggaccgaatcgtatcacccgagcggcgaggattttgtgcacatcgacaaccctaaccctaatgtcgtggacgcattgagcgatagcatcgtgaacgttgaaaaggaggaggaggaagaagaacaagaagaagcagcatcagcatcataagagatccgagacgaggattattactacagaaacgatggcgatgtttttaggagcgaaagatcttattcctcggagagaaggaatgttgaactcccggaggagattgcgaggagcgttattgttctctcgagccaatcctcttctgagggcggaaatttcgatgtttac

SEQ ID NO: 234951 - DNA, 317 bp, Gossypium hirsutum
gtttccttaaacccaaaatttcccccttcattggaatcttggtggtactgttagtctagaattacataaacaggctctgtggttcatgatcttcaatattaccagcaccaatgtcatccttcttgcaccaacgacccatccagaatccattctcgaacgcctatccagtctccccacgttcttcatcaacctcgcaaagacccatttcgatctttagtccaacaggcctaattatcctcctctccctaatggtaatcctcggagtgttcgtgccttggtctggcatggcccgagccaccttttctaactctaaaaag

SEQ ID NO: 234952 - DNA, 463 bp, Gossypium hirsutum
  unsure (1)..(463): unsure at all n locations
ggaaatgccggctggaccaacgcgtacgattataagcacctncggataagcaaaccacataggactgcttggagagagacccaaaagcaatgtctaaggaagtgagagaagaatgacagagtcgtaaggactatgtgtaccctacaccggcacctctgattgatttggctgaactcaaggcatggtctttttacagaggcctcatagctgagttcatagccactctcctcttcctatatgtcactgttgctaccgtaattggtcacaagaaacaacaagatgcatgtgatggtgtaggtctcttgggtattgcatgggctttcgggggcatgatctttatccttgtttactgcactgacggtatctaaagtggacacattaaccctgcggtgacttttgggttggttttggcccgtaaagtatctcttatcaaggctggggcttacatggtgtcacagtgctt

SEQ ID NO: 234953 - DNA, 444 bp, Gossypium hirsutum
tagcaaagcaagtggcacaaagacatatggaggcgaaagtagtgacagtgaagtcgatgggagagtacataaacatccaatgaatatacagggaatgagttctggtgtttcaagtgagaagagggaaggtgtcaagaggagggctgctggagatattgcaccgactgttcggcactacagaagtgtttcaatggacagttacatgggaagtctgcagtttgatgaggatccaccaaaaattcctccttcaggaaatcatggcaatcatcactctcctggtagctcaagcgatgcaaattcaagtaaattcaactttgagcttgggagtagtgagttcaatgaatctgagcttaaaaagatcatggaaaatgagaagctggctgagatggcatctgtagatccaaaacgcgtcaaaaggattttggctaatcgtgaatcagctgg

SEQ ID NO: 234954 - DNA, 435 bp, Gossypium hirsutum
ccgacaccggaatttagtccaactcttgggatattgccggcgcaaagatgagctgctgggggtctatgactacatgcctaatggaagtcttgataagtatttgcatgaccagccaaaagtcaccctaaattggagacaaagattcagagtcatcaaaggtgtagcatcaggattgttctatttacatggagaatgggatcaaggtgtggttcatagagatgttaaagccagcaatggtttactggatggcgaattaaatggaagattgggagattttgggcttgctagattatatgaccatggaacggatccccaaacaactcacgttgtgggaactcttggttatttggctcccgagcatactcgaaccgggaaagccacgccgtccaccgatgtgtttgctttcggggcatttttgcttgaagttgcgtgtgg

SEQ ID NO: 234955 - DNA, 373 bp, Gossypium hirsutum
ggcaccttaacttattacaatatccaaaaacaatccaccctccaccgggtacttactgtgtgagggggcatgcaaatcttaatcaaaactctcactttaaatacaactacctttgaagtccaaagttcctattccattttcaatctcaaaaccaatattcactacaaaaaaatttcttccaccataccaacaaaaatttattttttctccaaaacaactttcattattcataactcttccccactataatatacaaaaagagtctacatctccatttttgtctccttcttccgattttattctaatctttttaaaaactcttaccaaaaaaccatcatttttaaagttaaaagatccaatcctttacattttt

SEQ ID NO: 234956 - DNA, 154 bp, Gossypium hirsutum
ggatccgtaacctagggaaaaggattggctcttagggctgggcacggggatcccagaggggaacacttctggtgacggcgcactgatcgagctgctcccgcagcgagagcggttctacgtgtgccggccgggggacagactgggaacggctccc

SEQ ID NO: 234957 - DNA, 483 bp, Gossypium hirsutum
  unsure (1)..(483): unsure at all n locations
ccggcccgcatttccggggcggacgccacgcgtccgaatacaaatacccattttcaccaccatcaaaccacatcccacagacatgggtgcccacgaagaanaagccggaggtgaagagtacttgtttaagatcgtgctgatcggtgactcagctgtgggaaaatcgaaccttttgtcacgttttgctaggaacgagttcgacaataactcaaaggcaactattggagtagagttccaaacgcaatgcgtggaaattgatgggaaagaaggtaaagcacatatctgggacactgctggtcaagaaagggttcgagctgttacttctgcttactatagaggagctgttggtgctcttattgtttatgatattactaggaggagtagctttgacagcattaaacgttggcttgatgaacttaccactcattgtgaaactacattgacaagaatgctggtggggaacaaatgtgatttggagaacat

SEQ ID NO: 234958 - DNA, 423 bp, Gossypium hirsutum
agacaccactttgaaacccggaaatgtcggacgaggagcatcatttcgagtccaaggccgacgccggcgctgggaaaacctaccctcagcaggccggcaccatccgcaagaacggttacatcgtcataaaaaatcgcccctgcaagggtggtgaagtttccacctccaagaccgggaagcatggtcatgcgaagtgtcactttgttggaatcgatatcttcactgccaagaagctcgaagatattggtccttcttcccacaattgtgatgttccgcatgtcaatcgtactgactaccagttgattgacatttctgaggatggatttgggagtttgctgactgagagtggagacactaaagatgatctggggctcccaactgatgagaacttattgaaacagatcaaggatggttttgctgagg

SEQ ID NO: 234959 - DNA, 442 bp, Gossypium hirsutum
cagaatttgaggagtctattgcgcaggcattcttcgatttggagagtgccaatcaagagcgtgaaaagggaccttaaagatctctatattaattcagcagtccaaattgatgtttctgggagccggaaagctgttgttatccatgtcccgtatagattgaggaaagctttccgcaaggttcatgttaagcttgtgagggaacttgaaaagaagttcagcggcaaggatgtgattcttattgccaccaggaggatattaaggcctccaaagaaaggttctgcagttcagaggccacgcagccgcacattgactgctgtacatgaggcaatgctagaagatgttgtcttacctgctgagattgttgggaagcgcactagatatagaattgatggatcaaagataatgaaggtggatttggaccccaaggaacgtgataacacag

SEQ ID NO: 234960 - DNA, 422 bp, Gossypium hirsutum
  unsure (1)..(422): unsure at all n locations
gaaccgtgaaaggcagtctctcccgctccttctcgctgcgatttcgtggtcaanatctgggttctcaaatcgtggcgctcttttctatcaagccatggctctggtcttgcatgcaggaaaaacaaacaaaaatgcctttaaggcactcattgctgcagaatatagtggtgtgcaggacaaaatggttgagaattttgagatgggtgtgtcaaataagactcctgagttcatcaagatgaaccctttggggaaggttcctgtgttggaaacacctgagggtcctgtatttgagagcaatgccattgctcggtatggtgctcgctcaaagggtaacaaccctatatgtgggtctacattgattgattatgggcatatccagcaatggattgatttacagccatggaaatggatctaatattgca

SEQ ID NO: 234961 - DNA, 417 bp, Gossypium hirsutum
attaaaccttctgcttagcttaaaaaatcttgaatctgcactctcctacttccctcggtgtcgccaatgggttggggcgggaagattaagatcggcattaacggatttggaagaatcggacgtttggttgccagagttgctcttcagaggaacgatgttgaactcgtcgccgttaacgatcccttcatttccaccgattacatgacatacatgttcaaatacaacagcgttcacgggcaatggaagcaccatgatcttaaggtcaaagactctaaaaccctgctcttgggcgaaaaacccggcactgttttcgggatcatgaaccctgaggagattccatgggctgaagccagcgctgagttcgttgttgagtcaactggagtgttcactgacaaagacaaggctggtgctcacttg

SEQ ID NO: 234962 - DNA, 475 bp, Gossypium hirsutum
cgggccggaattcccggggcgcgcgacgcgtgcgcggggatatcactgcgagggaaaaaaaaaaaaaccagacatgggttccaacactatgggagccgctactctggggcttaccttgaacgtgggtggtcttcactttggttagctctacctacgtgccttggccaccaccaccaaagaggcacaaggctaccgacaagagcccaccctcgggacctaaacaggcaggcacttgccccaaagatacactgaaactagggggttgggctgatttggtgggctcggtgcgcgttggtgttggaccggccaggaccaaatgcgggtgactcatttcgggtttggctgatctcgatggtggtggttggctttgcactgcgtattaaaggtaatggggtgggggggaacctaaacgggcctgggtcattggctttgctcctcaattcctgggaaaagcgaatggctgctgggtacaaat

SEQ ID NO: 234963 - DNA, 410 bp, Gossypium hirsutum
  unsure (1)..(410): unsure at all n locations
acgcgtgcgggacaacatggggaggagacctgcaaggtgttatcgccaaatcaagaacaagccatacgcggaaatctcggtattgccgtggtgttccggatcctaanatcagaatttatgatgttgggatgaagaaaaaaggtgttgacgagttccctttctgtgtccatcttggcaggtgggagaaagagaatgtctcaagtgaggcgttggaggctgctcgcattgcctgcaacaagtacatggccaaatttgctggaaaggatgcgttccatttgagggtaagggttcatcccttccatgttctgcggatcaacaagatgctttcatgtgctggtgctgataggcttcaaactggaatgaggggtgcttttgggaagcctcaaggaacatgtgcaagagttgacatt

SEQ ID NO: 234964 - DNA, 434 bp, Gossypium hirsutum
  unsure (1)..(434): unsure at all n locations
ggcgcacacgtccgcttgggttgagtgtanagatgaggaaaatcatgggtgccaaaggtcttttcttctttggggtgctttccttgggagctggctcagcatttgcacangatgaggaaaaccaangtcttggtatgaacttctacaaggattcttgtcctcaggctgaaaacattatcaaggagcaaggtaagctactgtacaagcgacacaaaaacactggtttttcttggctgagaaacattttccatgactgggctggccagtcatgtgatgcttcactggtgctggactccacaaaaaggagcttgtctgagaaagagacagacaggagctttggcctaangaatttcaggtacattgagaccatcaaagaagctgtagaaagggaatgtcctggagttgtttcttgtgctgatatccttggtctggct

SEQ ID NO: 234965 - DNA, 366 bp, Gossypium hirsutum
  unsure (1)..(366): unsure at all n locations
gccgggtctgaattaccggggcggggacgcgtgtcgggccacgcgtccgaaacgatcaaccaaccagaaaagagaaacatgatggtttcagggtcagggatctacacgaagagagtgggtgtggatgcaangcatcacatgctaggaaggtgcgcttccattttgggcaacgagttggtgaatgggcaaaaaggagtgggtggtcgatgcgaagagatttgtatgtcgggtggtttagtgaggcagaaaatgaattacatgatgttcttgaggaaacagatgaacactaaggcttctcatggccccattcattttcgggctcctgctaagatcctctggcgtaccattcgtggcatgattccccac

SEQ ID NO: 234966 - DNA, 427 bp, Gossypium hirsutum
gggatagagaattgtgacctgagattattggcttgcaaagacccaattgactatggaacaagaagtatggtaagggatagagcaaggttggtttgggcagaaaacacgcaagcaaggagtgcttgcattgatagccctgatagctatgattatggagcttataaatggaccgttcaactcgttaccaacgatagtccgtctcgagaaaatactttttcctatcttgtggggtcttatgactctcagcacatttgggaacttggagagcacaacagaatggctggagggtgttttcaacatcattgatcttactaggggacttgttctagtcacaatgttgattggtaacattaacgtgtttttgcatgcaacaacgtgcaaaaaacaagcaatgcaattgaagatgaggaacataaactggtggatg

SEQ ID NO: 234967 - DNA, 352 bp, Gossypium hirsutum
ctcaaagccaatggcttcctctctcaacagcacccactctatacggggcttcatttattgatcttggtgctcttcctccccccccactaaactatcactcccttccacttacctatctttctcttcttctatcaaatccctcgctatctctcctctttctcaccacaaaatgtgatcggctgtcacaatatccattaccggatggtttacctatctacccagtccaaaatgctctgcttcagatcctgatcaccagaagagtgctatatacaatatcaaggatcttttcaaatacaaattctgccatcctattctgattcaactaaggtgacacgatactggtacctacaac

SEQ ID NO: 234968 - DNA, 363 bp, Gossypium hirsutum
  unsure (1)..(363): unsure at all n locations
agaaaagcagagccgcatcactttttgctagctaagctactgtgggagttattgttctgcagaacagcttctgcagtagctaataataacgttatatattatataaattttatacatcctttttaccctacgactccatatataagcaagtaaaaataaatatggctcgctctgtttcttcctttaagttccttggtgcttctgtttttgatgctctttatgtctccatatcaaggagaggttactcangtgcaccgccggcggcagtgacggctagctttggtaggcctggagcgatggggaaagtggaacgaagatatgcgatgaaagagtcgtcgtcgtcggagacaagggcttattctt

SEQ ID NO: 234969 - DNA, 456 bp, Gossypium hirsutum
gcggagcaaacgagctcaaaagccttctgacccaactgaggcccttttttgcactaattccaaaggcaaaaactggtaaaattggccgtggtataattgatgatgtagctaagataccaggaacatcagatctccagatttctctttgcaaagaagtggtgcagtggactcgtgctgagaagcgaactttccttcgccaacgagttgaggcaaagcttgcggcacttttgatggagaacaaggagtactctgaagcactgaatctcctttctggtctaatcaaggaggtcagaaggttggatgacaagcttcttctagtcgacatagacttgttagagagtaagcttcatttctctcttcgaaacctgcgcgaaagcaaaggcatctctaacagctgcaaggacagcggcaaatgcaatttatgtgccaccagcgcaacaaggtaatatagatttg

SEQ ID NO: 234970 - DNA, 446 bp, Gossypium hirsutum
ggaaaacaagaaaagcagagccgcatcactttttgctagctaagctactgtgggagttgttggtcttcagaggagcttctgcagtagctaataataacgttatatattatataaattttatacatcctttttaccctacgactccatatataagcaagtaaaaataaatatggctcgctctgtttcttcctttaagttccttggtgcttctgtttttgatgctctttatgtctccatatcaaggagaggttactcaggtgcaccgccggcggcagtgacggctatctttggtaggcctggagcgatggggaaagtggaacgaagatatgcgatgaaagagtcgtcgtcgtcagagacaagggcttattcttcagcttgggcgcctgaccctgttacggggtattaccggccggagaactgtggggctgagatcgatgcggcggatc

SEQ ID NO: 234971 - DNA, 439 bp, Gossypium hirsutum
  unsure (1)..(439): unsure at all n locations
gggatattgaacaagctgactcctgagaagtatgatcttctgaagggccaacttattgggtctggtatcacatcagctgatatcttgaagggtgttatttctctaatatttgagaaggctgttctggagccgacgttttgccctatgtattctctcttatgttctgatcttaatgataagctgccctcattcccatctgatgaacctggtggaaaagatattacatttaagcgagtcctcttgaataactgccaggaggcatttgaaggagctgacaagcttanggaagaagtgaggcttatgactgcccctgagcaagagatggatcgtagagataaagaaaggatggccaagctccgcactttgggtaatattcgtttaattggcgagcttctgaagcagaaaatggtacctgagaagatagtccatcacattgtac

SEQ ID NO: 234972 - DNA, 441 bp, Gossypium hirsutum
tttgactggtggaatatgtcctattaccaagacgatgatgctgaatggatggcaaatgggtgtggcatggaggacatagatgacatggatgaagagttccgtgccagagatatgtctggctcggagtctgatgttgatgaatatgatttctcgaataacaaaatatctgatacttctgctgctgaagctagaagaggaaaagacatccagggaataccttgggatcggctaagcatcactagggaaaagtataggcaaactaggctagagcagtacaagaactatgagaatatcccccactctggagaagtctccgggaaggattgcaagattaccaagaagggtgcctcatactatgacttcaggctaaattcaagatctgtggaatcaacaatacttcattttcagttgaggaacttgatatgggctacatcaaaacat

SEQ ID NO: 234973 - DNA, 443 bp, Gossypium hirsutum
gtgaactaaaaaaagaaaacccgtaattttaaagacaaaaaaatgcggggttctccatgggttcttctgtcaaaaaccatgattttcccataccaaaaatcaaaccttgaatacctcaagctttcaatttccaatctttctatactatcttgccattacattcaaaaagggtgcctctttactctcccttcaatccccattaattcactgatttcccttctcaaacaatccttgtccaagacgctgtcatttttccctcctctcgccggccgtttttacacaaacccaaatggttacatttacattacttgtaaccacgccggcgttgaattccaccatgccaaatgtgacaccaaattcattcgtgacgtcatcagtcctgttcatgtaccacaagtggttaaagagtttttcacctttgataaaacggtgaggtatcgagg

SEQ ID NO: 234974 - DNA, 400 bp, Gossypium hirsutum
caagtgtgttttgcttttcatactcatttattccctttcattagcgggaaaatcactgggggtttctttatcactgaaaaatgtcttgctgtggtggaaactgtggctgcggtactggctgcaagtgtggcattggctgtggaggatgcaagatgtatccagacctgaacgctgccgagatgaccacaactgagactctggttcttggtgtagcaccccagaaagcacactttgagggagctgagatggaattcggggctgagaacggctgcaagtgtggagacaactgcacctgcaacccttgcaattgtaaatgattagagaccaaagccaaagctccctggaagcagaggcgcctttgtctttaagaaataatatgttttggtggttatgtgttttt

SEQ ID NO: 234975 - DNA, 396 bp, Gossypium hirsutum
  unsure (1)..(396): unsure at all n locations
atacggaaaaaatggctttgaattttaatcccatcgtctcnaaacctcaggggcttctttcctttgctcttccacgaaaggccaccctcacatctcccaagttttccatgatctacaccattccttctggctccaaaaagggtgggaaaatgaaaaagcctttcacacctacaaatgagttgcctgttcatatcacccactccatgccgccttacaagattgagaactttaaatatttggagggctgggctgagaacaacattcttactcacctcaaaccacttgaaaaatgtgcgcaacccatcaactttcttacatatactaattctgacggatttcatgatcaagtcaaagagcttaaggaaagggcaaatgaaataccagaccattactttg

SEQ ID NO: 234976 - DNA, 442 bp, Gossypium hirsutum
ccgagagtagcgaatccctccaccgtcgctgtaaattgaaaagccaacctctacccttcctcttttgtcacggacaagaaatctaagtctggctgttcaatccctcaccacaccattattatatcccctctggaaatcttttgttttcttagaccatatagatcgcaaaggagttaagaaatgggggctgggcgagaagtagcaatatcacttgatggagtgagggacaagaacgtgatgcagctgaagaagctcaacacagctctcttccctgttcgttacaacgataagtactacgccgatgctctcgcttctggcgaattcaccaagcttgcatattacagtgacatctgtgtcggatcaattgcttgccggctggaaaagaaggaaggtggggccatccgtgtgtacatcatgactttgggtgttttagcaccatatc

SEQ ID NO: 234977 - DNA, 455 bp, Gossypium hirsutum
  unsure (1)..(455): unsure at all n locations
ctgattcangcatttccgcaaacactttctcaaaagaaacgtgttcttttacactaacatgggtagaccacgggaacgatatcaaggggtccgacaaacgcattggggttcttgggtttctgaaattcgccatactcttttgaaaactagaatttggctgggaacatttgaaacggcagaagacgcggctcgtgcctatgatgaagctgcaaggcttatgtgtggacccaggactagaactaacttcccttacgatcccaatgcacctcagtcatcatgatccaagctgctctcagcaactttgacagctaaactacataaatgctacttggcttgacttgaaatgaccaaacaacaatcagtgcaggagccaaaaagagagccaccgactccacatatcatcaccaacaatggcatttcatatagaggtagtgagactggagttcgtctgctgg

SEQ ID NO: 234978 - DNA, 458 bp, Gossypium hirsutum
  unsure (1)..(458): unsure at all n locations
gggggccgcgtgcgggtgatctttcaatcatgggttctcttcagtatcttctcttcatttcattcttantttgtgttnttggtggtgggttagcccaacagtcgttccaccccaaggccctggtcgttccagtctctaaagacgcctccacacttcaatacctcaccactattaaccaaaggacaccctttggtcctatacgcgttggggttgatctcggtggccgatacttgtgggttgattgtgaacgggattatgtttcatcgacttaccggcctggcaggtgcgggtcancccaatgctcgctggctggagccaatgggtgcggagattggttcgatggaccaaggccagggtgcaacaacaatacatgtgctggcggacccggcaacaccgtcactaacaccggcggtcctggtgagggtgcacaacatggtggctctctgcaatcaactggt

SEQ ID NO: 234979 - DNA, 435 bp, Gossypium hirsutum
gagcataactgcggcatttcttcctcagaagacccatcaaacagagatgaagttcaagagtgcaaatccgactactggttgccaaaaaaaggtggaaattgatgatgaccagaaacttcgagccttttttgacaagaggatctcacaggaagtcactggtgatgccctcggtgaggagtttaagggctatgtattcaagatcatgggaggctgtgataaacatggttttccaatgaagcatggagttctcactcctgggcgtgttcggcttttgcttcacagaggtactccctgcttacgggggtatggtaggagaaatggagagcgtaagaagaactcagttcgcagatgcattgtgagtcaggatctttcagttttgaacttggttattgtgaaaaaaggatgaaaatgatcttcctggactgactgacactg

SEQ ID NO: 234980 - DNA, 370 bp, Gossypium hirsutum
  unsure (1)..(370): unsure at all n locations
ggactcgaatctgatcccatctgctgctgcgagtgaatcaaangttgggtatttaaagaggaaaggggattatcatcggtatttaccaaagtttaaggttggtgatgacaggaaagctgctgctgacgatactatgctggcttacaaggctgctcacgatatcgcactgacggatctagcaccaacgcacccgatcaggctgggacttgcgctgaattactcggggttttactatgagattctgaatcactcccataaggcttggagcatggctaaacacgcatttgaggaagccattgctgagcttgacacgctgggagaagagttttaccaggaccagcactcttattatgcaacttcctaaagggat

SEQ ID NO: 234981 - DNA, 439 bp, Gossypium hirsutum
gagaaatacaaatacccatttcactaccatcaaaccacatcccacaggcatgggtgcggaggaagaagaagccggaggtgaagagtacttgtttaagatcgtgctgatcggtgactcagctgtgggaaaatcgaaccttttgtcacgttttgctaggaacgagttcgacaataactcaaaggcaactattggagtagagttccaaacccaatgcgtggaaattgatgggaaagaagttaaagcacagatctgggacaccggtggtcaagaaagggttcgagctgttacttctgcttactatagaggagctggtggtgctcttattggttatgatattactaggaggagtagctttgacagcattaaacgttggcttgatgaacttaccactcattgtgatactacattgacaagaatgctgggggggaacaaatgtgat

SEQ ID NO: 234982 - DNA, 452 bp, Gossypium hirsutum
acaaaattagaggcaaaaatgcttacttcactttgcttcgtctttatcttcatctttgggttctcccctttcgcaacccctaccttattgttccagggtttcaactgggaatcatccaacaaggctggtggatggtataactttctccagagttctgtttccgatatttctaacgccggtgttactcatgtttggctcccaccaccctcccagtcagccgctccccagggatacttgccaggaaggctatatgatcttgatgcatcaaagtatggatctcaggctgaattgaagtcattaatcgatgctttccatcaaaagggagtcaaatgtgtagctgacatcgtcataaatcatagaacagccgagaggcaagataacaggggtatatattgcctcttcgaaggtggaacttcggatgatcgtctagattggggaccatccttcatttg

SEQ ID NO: 234983 - DNA, 445 bp, Gossypium hirsutum
ctgcaattaaaatcccagaattacttaaacaacaatggctacctatgaaggtaaagtttggactgaagaacaagaagcttgggtggtcaagtcatggactgtaatgaagaagaatgcagctgaattgggtcttaaattcttcttgaagatatttgagattgcaccatcagccaagaaactattctcattcttgagagactcaaatgttccattggagcaaaacacaaagctgaagccccatgccatgtctgtctttgtcatgacatgtgaatctgcagttcaactgcgtaaagcaggcaaagttacagtgagggaatcaaatttgaagaaattaggagctacccattttaagtatggggtagttgatgaacattttgaggtaacaaaatttgctcttttggagaccataaaagaagcagtaccagatatgtggtcagatgagatg

SEQ ID NO: 234984 - DNA, 451 bp, Gossypium hirsutum
  unsure (1)..(451): unsure at all n locations
gcggcttatcctctcgaacactctcgactcttatcaaattgaacttatatatcaccatggcacaaacccggcgcgtgccggcacatgcaccctcacacaccaccttactctctcctttatcctcccaaagggcctcctttcctccaaatgcatcacccatcctcctcccatcccttccctacggttctcccgacggcctcttacccctctttcccacgccgtccgatgtctccctctcgctcccacgcgcttcacttacatccgttggcgcgtgaaccgctccgggaactccgcctactctgcgatcaactcggggtcgaacttcagcgaccggccggcgactgaaatggccccgctgtttccgggttgggattatgagcattggcttatcggtatggataaccccggtggagaaagaggctctaagcanggaatgatcgattggtatatc

SEQ ID NO: 234985 - DNA, 447 bp, Gossypium hirsutum
cacgattcccctacaacgacgcccttctctaacgtacgccctgctcgttcttaaccaagggctccccagattcactcctcttctctggaaccacgctcagcttcacctctgtgctgacggtggcgccaatcgcttgtatgacgaaatgcctctgttcttccctcaggaagatgcctctgatgttcgacgcagatacaagccggatgtaattaaaggagatatggattcgatacgaagagaagttcttgagttttatgccagccttggaactgaaattgttgataaatctcatgatcaagataccactgatctacataaatgtgtaacatacattcgggactctgcttcgggtttggataagtctaatctttgcattcttgttgttggagctcttggtggacgatttgatcatgagatggggaacctaaatgtcatatgccggttctc

SEQ ID NO: 234986 - DNA, 419 bp, Gossypium hirsutum
  unsure (1)..(419): unsure at all n locations
ggagatccatcactgaaccagcaccagcaacgtcaatggctagacgggcctcacgactggctgcgatctttgtcatcccagttttctcatcgcaaatccccactcagtcccctccattcacggtcgttctcggcggctccggcgcctcaaccggcggttttcgtagacaagaacacccgcgttatttgccaaggcataaccggaaagaatggcactttccacaccgagcaagccatcgaatatggcactaagatgggggggggagttacaccgaagaagggcggcacagagcacttangacttcctgttttcaactcagtagctgaagcaaaagctgaaaccaaggccaatgcttctgtcatatatgttcctcccccttttgctgcggcggctatcatggaggctatggaagctgagct

SEQ ID NO: 234987 - DNA, 430 bp, Gossypium hirsutum
ccatgagctacttaaccatttcccaaatctcctccctcctcttctttagcgtccttttgatttccgctcatgcagcgcgctttgaaatccgcaatgagtgctcctacaccgtctgggcagcagcctctcctggtggtggccgtcgcctagaccctcggcaaagttggaccatcgatgtgcctgctggcactgctatggctcgtatttggggtcgaaccaattgcaatttcgatgccagtggtaggggtcattgccaaaccggtgattgtggtggactccttcaatgcaaaggttggggtgtacctccaaacaccctggctgaatatgcacttaaccaatttggaaacatggatttctacgacattttcttagttgatgggtttaacatccccatggtgtttggtccaactaatggcgggtggcacaacat

SEQ ID NO: 234988 - DNA, 306 bp, Gossypium hirsutum
tcgctcttacaagcctactttctcttctgagtctttcgtcgcttttgcaggcgatgattctcggggctactatgatatgcactgataactcaaagtggatacgaaacagcgattattctccggctcgatatcaagcccaagctgatgctggtaggcttatctgtggtgctaaaacccaatctaatccggagtatacgggggggattttgactatggcgggcaaaagagtacgtgtttggctacttctactatcgatcttggaaaaatattggtttgcattcacggtcttgaaatgtggggggagat

SEQ ID NO: 234989 - DNA, 423 bp, Gossypium hirsutum
aagtggggtagcatcaatattgatatgggtgaagaggtgaagggggggggagcatggggaggcccttttaaccggaagggagaactaactttgcagttaaaaggtgttccatatgactacatagaacaagacttgaataacaagagctctttgattttgcaatacaactcggctcataagaaaggcccaggtcttgttcacaacgggaaatcaattggagaggcgatgggtatacttgaatacattgaggaaacttggaaaacctatcccatcttggcacaagatcctaacgacaaaggcatggctcgattctggatcaattacatcgatggcaagagctcgtctgccattaggaaaggtgcatttaggcctgaggaggagagagagaaggcagtggaagaagctgggagttgttgaaaacac

SEQ ID NO: 234990 - DNA, 296 bp, Gossypium hirsutum
  unsure (1)..(296): unsure at all n locations
gtttgacgcaactgctatttcttttttgtggttttcaacagcagcttgtatttagaagaatggtgagggggagcgttttgaatgatgcactcaagancatgtacaatgcagagaagaggggcaaacgacaggtgatgatccgaccgtcctcgaaggcgatcattaagttccttttggtcatgcagaaacatggttatattgggggaggttgaggatgttgatgatcatagatctggtaaaattgggggtgaactgaatgggaggctgaacaaatgtggggtgatcaagcctctttt

SEQ ID NO: 234991 - DNA, 414 bp, Gossypium hirsutum
aaactcacccctcccttcctctctgcttttttggagatgtggaggccctttttccaggcgtaccatctcatgattggtcaagatggcgatccttccaaaaccatcaagggtccggagggcttctactatgagctttacaataggaacgatatcaacaggattttgggtcctaagtcttcttgtatctctttcaaggattctgcttggcgctgctttggttacatggtttccaagaagaagtacatttataccattgatgatgactgctttggtgcgaaagatccatccggcaaagacattaacgcactggagcagcacataaagaaccttctttggccatctactgcggttttcttcaacactctctatgacccgtaccgagctggtgcacatttcgttcgtgggtacccattc

SEQ ID NO: 234992 - DNA, 289 bp, Gossypium hirsutum
gggacgcgacgcgttcgccctgacaagattccatttgttcccatttctggttttgagggtgcaggatgattgagggggctaccaacttggactgggacaagggccctactcttcttgagggtcttgaccagatcaacgaggccaagagggcttcagacaagcctgttcggctcccacttcaggatgtgtacaagattggtggtattggaactggtccaggcgggcgggttgaaaccggggtgttgaaacctggtatgggtgtgacctttggcccgtctggtctgacaac

SEQ ID NO: 234993 - DNA, 420 bp, Gossypium hirsutum
acgctttagtttcaatatcaaagcaaaaatgggttcttcttgtaatggtggttcaatggccggactggcttgtttggtgttgaactacttggtttttgttgcccacggtggtgacttttaccaggatttcaacctaacatggggtgacagaagaagcaagattttcaatggtggcaagctcttgtctttgtctttagacaggggttcagggtctggttttcaatctaagaaagagtatttgtttggaaggatcgatatgcaactcaagcttgttggtgggaaactagctggcactgtcactggttattatctgtcatctcaagggccaacccatgatgagatagactttgaattcttaggggatctgagcggtgacccttacattttacaaaccaatgtttttacacaaggcaaagggaa

SEQ ID NO: 234994 - DNA, 443 bp, Gossypium hirsutum
aaaaagcaaggcgcattttccagccttatcgccgctaaatcgatcccaaaaagcttacattgtttggcaatgaggttgatggaggaacgaatctcgcatccggacaaatatacagatgaagggaaaccaatgcctccggaattcgaggatccgaagctttaccattacgctatcttttctgataacgttcttgctgcatccgtggtggtgaattcagccacgaagaacgcgaaagagccatggaaacatgttttccatgtggtgacggacaagatgaatcttggggcaatgcatgttatgttcaaattgaaagattataatggagctcatattgaagtgaaggcgggagaggattataagtttttgaattcatcctatgttccagtggtaagacagttagaatcggctaatctgcagaagttttattttgagaacacgctgga

SEQ ID NO: 234995 - DNA, 474 bp, Gossypium hirsutum
  unsure (1)..(474): unsure at all n locations
tgcacgtaccgcgccggaatgtaccggtccgggttcccgggggggcgacgcgttcgatttttcaaccatgtcggagatggcgaacacggatcccgaaggggtggacgccatgcggaggacgtggaacgtgtggccacncaccaaagtcgaagctaggaagggcgtgatcccggtggcggctaccatcgctccgatccgtcctcacccggacatcccgacgctcccttacgcgcctctacggggcaggatgtggtcagctgcgctcaacggctttgcgcgtgttgacttcgttgccaagatctggatctgccctttctgttaccagcggaaccactttgcggctcactatgctatgatctgcgaaacgaacctaccgtgcgaactctacccagaatacaccaccgtgcaatacacgctccaactggatccgaacaaccctttcaggctcctaaatggccggcggggtttggattt

SEQ ID NO: 234996 - DNA, 386 bp, Gossypium hirsutum
agcggtggggtgggagtcgcagacgattaagcatatgatcgaggacgattgcgctgataacgggataccgttgcctaatgttacgagcaagatcttagcgaaggtgatcgagtactgcaagaaacacgtcgaggctcctaagacagacgatcgatccgccgatgacgagctcaagagttgggacgctgactttgtcaaggtcgatcaagctactctctttgatctcattctggcagcgaactatttgaacatcaagggcttgctggatctcacttgccaaactggtgctgacatgatcaagggaaagaccccagaagagatcaggaagactttcaatatcaagaatgacttcaccccggaagggaagaaaggttcgtcggagaacc

SEQ ID NO: 234997 - DNA, 468 bp, Gossypium hirsutum
ttaccggtgggcgcacgcgtgcgagcgagtttactggaaaaccctagaaaccagcggctctttcttcaattttcacttcttggggcggcgataactgagagggtgttttcttcttcacaagacacaatggcagatggtcatgaaactgacaagaacatcgagatttggaaaataaaaaagctaatcaaggcactagaatctgcgcaggggaaatgggaccagcatgatatccctcattatgcctgctcgtgatcaaatatcccgtgtcacaaagatgttaggtgacgaatttggaactgcatcgaacatcaaaagtggggtcaaccgtcagtctgtgttggctggcattacttctgcgtaacagagggggaagctctataacaaggttccccctaacgggctggtgctctacactgggacaattgttactggagatggcaaggaaaagaaggggacaattgactttga

SEQ ID NO: 234998 - DNA, 440 bp, Gossypium hirsutum
tacgcctgcagtaccggtccgggaatccgtgcggtgcgatgcgcttgtataaaaaagaagaagaaaaaaacagaggaaagaacggacttttggaggaacaactgggggtccacctacaagaataggacttgctgatttggctgttatgggccaaaatcttgctcttaacattgccgagaaaggctttcccatttctgtttacaacagaactaccttcaaagtcgatgagactgttgaaagagctaaacaggaaggggatcttcctttatttggtttccatgatcctgaatcttttggtcagtcgatccagaaacctagagtgataatgatgcttgttaaggcaggggcccctggtgaccataccattaaaactctattttgatacattgagaaaggtggttgtatcattgatgggggctaaaagtggtactagaacaccg

SEQ ID NO: 234999 - DNA, 252 bp, Gossypium hirsutum
ttacgatccgtcctcacccttacatcccaaccctcccttacactcctatacagtgcaggatttgttcaactgcgctcaacaccttttcgcctgtttacttctttgccaaaatcaagatcttccctttcttttaccagcggaaccacttttcgcctcactatgctatgatctccgaaacaaacctaccggtcgaactctacctccaatacaccaccgtgcaatacacactccaacttgatccgaacaaccctt

SEQ ID NO: 235000 - DNA, 383 bp, Gossypium hirsutum
ttgtacttttaactctaagccaagaaagcatgtcactagggttttaagagaagatcaaaatggcgtcaaaaagatcagcttccatggccctctttttggcactcaacattctcttcttttccctgggcagtgcttgtggttcttgctattcacccacccctaaaccaaagccaaacccaaaccccaaccccacccccactccatcttcacaaggcaaatgccctagagatgcccttaaattaggcgtatgtgctaatgtgcttggcttagccaagcccgtcattggttcacccccagtgatgccatgctgttcccttcttgatggcctcgtcgatctcgaagctgctgtttgcctctgcaccgctatcaaagctaacatctta

SEQ ID NO: 235001 - DNA, 382 bp, Gossypium hirsutum
tttctcgagaaccatacttcgagatggcatttctcatgccttcacctgaaatttccaccgcctctgcaaattttttctctaaccctaccccccgccctaaattcctcaagagctgtgcgatttcgaagaacgacgacgagaaagtttggtcaaggaccaacgctagggtcggtgttaaagatgccggcagtacggtttcgtgtttgagccaaaacttgaggttgtacgtacaattttcggctccagtgaagcgaggatcgaagcccagcaaagaggaagaggagaagcaggattattacgtgaatatgggttacgctattcggaccttgagagaggagtttccggacatcttctacagagagcttagttttgatatttacag

SEQ ID NO: 235002 - DNA, 399 bp, Gossypium hirsutum
catttcttcaaccccttcactaaacaaggaagtattcgctcaaatccgacccgacttccttgattttgcaaagaaaccagagattatggattggatggttggtattagaagaaaaatacacgagaatcctgagcttggttatgaagagtttgagactagtaagcttataagagccgagcttgatctgatggggatcccttacaaatacccagttgctgttaccggtgttgttggctatattggcactggcaagcctccttttgtcgcacttagagcagatatggatgctcttgccttggaggagctggtagagtgggaacataagagtaaggttcctggaaagatgcatgcttgtggacatgatgctcatgttgctatgcttcttggtgctgcaaagat

SEQ ID NO: 235003 - DNA, 384 bp, Gossypium hirsutum
cccgctccttctcgctgcgatttcgtcttcaagatctcagttctcaaatcgtagcgctcttttctatcaagccatggctctggtcttgcatgcaggaaaaacaaacaaaaatgcctttaaggcactcattgctgcagaatatagtggtgtgcaggtcaaaatggttgagaattttgagatgggtgtgtcaaataagactcctgagttcatcaagatgaaccctttggggaaggttcctgtgttggaaacacctgagggtcctgtatttgagagcaatgccattgctcgttatgttgctcgctcaaaggttaacaaccctatatgtggttctacattgattgattatggtcatatcgagcaatggattgattttgcagccatgga

SEQ ID NO: 235004 - DNA, 398 bp, Gossypium hirsutum
cttgaatcattgaatgtaacaaattaaaagaaaagaaaaaaaagacaatggcagacactggagacactgccagctccagtagaactggtgatttgccggagctctcatcggaagcaaccctgttcgggaaatacgagcttgggaagttgctgggatgtggggctttcgcaaaggtttaccacgcgcgcgacgtcgactccgggcagagcgtggccatcaaggccgtcagcaagaagaaggttttaaaaggcgggttcatggcacatgttaagagggagatcgctatcatgcgccggttgcgccaccctaacatcgtcaagctcatcgaggttttggctaccaagactaaggcttatttcgtcatggaattcgccaaaggcggagaattgttcacgagg

SEQ ID NO: 235005 - DNA, 391 bp, Gossypium hirsutum
gaaccaccctgggcagattggaaacggatatgccccagtccttgactgccatacctcccacattgctgtgaaattttccgaatcgctgaccaagatcgacaggcgatctggaaaggagcttgagaaggagcccaagttcttgaagaatggtgatgcagggatgataaagatggttcccaccaagcctatggttgtggagactttctctgagtacccaccacttggacggattgctgtcagggacatgcgtcagactgtggctcgtggagtcatcaagagcgttgagaagaacgacccaactggtgctaaggtcaccaaatctgctgccaagaagaaatgagattgcatttgatagtatcagagcctttggattttggttatctttgtagat

SEQ ID NO: 235006 - DNA, 388 bp, Gossypium hirsutum
gctacttaaccatttcccaaatctcctccctcctcttctttagcgtccttttcatttccgctcatgcagcgcgctttgaaatccgcaatgagtgctcctacaccgtctgggcagcagcctctcctggtggtggccgtcgcctagaccctcggcaaagttggaccatcgatgtgcctgctggcactgctatggctcgtatttggggtcgaaccaattgcaatttcgatgccagtggtaggggtcattgccaaaccggtgattgtggtggactccttcaatgcaaaggttggggtgtacctccaaacaccctggctgaatatgcacttaaccaatttggaaacatggatttctacgacatttccttagttgatgggtttaacatccccat

SEQ ID NO: 235007 - DNA, 394 bp, Gossypium hirsutum
atgcgcacgatcaaggttctgatggccaccaatcggattgatatcttggatcaagctcttcttaggccaggacgaattgacaggaagattgaatttccaaatcctaatgaggagtctcgtttcgacatcttaaaaatacattctagaagaatgaatttgatgagagggattgatctaaagaagattgctgagaagatgaacggtgcttctggtgcagagcttaaggctgtgtgcacagaatcaggaatgtttgctttgagggaaaggagagtccacgtaacacaagaagattttgagatggcggtggcgaaagtaatgaagaaggagagcgagaagaacatgtccttacggaagctatggaagtgattatgttttattatttattgggctttcg

SEQ ID NO: 235008 - DNA, 381 bp, Gossypium hirsutum
cggacgcgtggggttccaggaggcatgctttctgttccatatgatatgggcagcatgccaatgcgtgatgcaccactttctcaaccaattccaattggagctttggcctcagcacttgcaaatgctactccagaacagcaaagaacgatgctgggggagaatctctatccactcgttgagcagctggaacccgatgcagcagccaaagtaacagggatgcttctggagatggaccagacggaggttttacacttgctcgagtcaccagaagctctaaaagccaaagttgcagaagcaatggaggttctgaggactgtagcacagcaacagcagcaagctggtggagctgctgatcagctggcttcattgtctttaaatgac

SEQ ID NO: 235009 - DNA, 338 bp, Gossypium hirsutum
ctgacgcgtgggtttcagtcgtcttctcttttagtcctctcgatcccaaagcaagctctggatcgcgaatctgtcccagaagacacatatttttgtgcaaacccttactgataaaaccagtccccttgaggtggaatgcttcgatactatagattacgtggaggcctgaatgcatgacacagaaagcattcctgcagaccaacagaagcttatttttcggcggaaaacagctcgaggatggtcgaactgttgccgactacaacatccacactgtgcccacccttcaactagtgctttggcttaggcgtgggatgcaaatgtttgtgcatacccttacg

SEQ ID NO: 235010 - DNA, 397 bp, Gossypium hirsutum
atcatccgccacttccttcgctaccattctctcttttccttgtatctgggtgtcttttagataaaagatgagtacgctggacgcaactagagcagaacttgctcttatagttttgtatttgaataaggctgaagcaagggataagatatgcagggctatacaatatggttcgaaattcttaagtaatgggcaacctggcacagcccaaaatgttgacaagtcaaccagcttggctcggaaagttttccgtctttttaagtttgtcaatgatttgcatggtcttattagcccagttcctcgaggaactccccttccacttgctctgctgggaaagtccaaaaatgcactgttgtcaactttcttgtttctcgatcaaattgtctggcttggcagaaca

SEQ ID NO: 235011 - DNA, 381 bp, Gossypium hirsutum
catgtccttccccttgatctcccactcgactcggatcacgactcgctcgactcgtttagcgtttttctttcaataggtgtacccgcctcgacgacttagtcagtaactcgaattaaacgatggagccgatggatatcgtagggaagtcgaaggaggacgcttcgcttcccaaagcaacaatgaccaaaattataaaggaaatgttaccgccagatgtacgcgttgcaagagatactcaagatcttttgattgagtgctgtgtagagtttatcaatctcatttcatcagaatcgaatgaagtttgtaacagagaggagaagcggaccatagcacccgagcatgtactcaaggctttagaggttcttgggtttggagaataca

SEQ ID NO: 235012 - DNA, 382 bp, Gossypium hirsutum
ttcagaaccaggatgaaatgattaaaagtggtaggctctctgaaccctacaagggtattggtgattgtttcaagcgaacgattaaagatgaaggatttgcctctttgtggagaggaaacaccgcaaacgttattcgttatttccccactcaggccttgaactttgctttcaaggactacttcaagaggcttttcaacttcaagaaagacagagatggttactggaaatggtttgctggtaacttggcatctggaggagctgctggtgcttcttcccttctgtttgtctactccttggactatgcgcgaacccgtcttgccaatgatgcaaaggctgcaaagaagggaggagagaggcaattcaatggccttgttgatgtcta

SEQ ID NO: 235013 - DNA, 393 bp, Gossypium hirsutum
gttctttgttaacgaataaggatcttttaagatacgccggatccgataaaatacgccgatccccgttcgtcttccgatcatatggggctgcttgaccagttgtgggatgataccgttgcgggtccccgacccgataatggtctgggcaagctccgaaagcactccactttcactttccggcctaactctgccaaggaatcggatggcggtagtgtaagatcgtacggtgatgaagcgccagatgaagcgacgagagtgacacgtagtattatgatcgtaaaaccgcctggttaccagagcggatcgcctgcggtttctccggccggatcgaccccttcggtatctactttttgcggaggcagagaatcatatcggtttcggagaatgtccaca

SEQ ID NO: 235014 - DNA, 394 bp, Gossypium hirsutum
taacgttcgatcgtttaacgcaaacccatttttaagtgagggaaaggtttcagttcagagtcataagcaacatcaatggctccttcaactctgacggctcttgcggaagagaaaaccttgcaggcaagcttcgttcgtgatgaagatgagcgtcctaaggttgcttacaaccaattcagtaatgatatccctgtcatctctcttgctggtatcgatgatgttgatggcaagaggggtgagatatgcaagaagattgttgaggcttgtgaggattggggtgtcttccaggttgtggatcatggtgttgatactaaactcgtgtccgaaatgacccgtcttgcgagagagttttttgctttgcctgctgaagagaagcttcggttcgatatgtctg

SEQ ID NO: 235015 - DNA, 391 bp, Gossypium hirsutum
gcttgacgttcccctttgctcccttcttccagaagccaaaagtttgagttaagaacaatggcttatgctacaatgaagccgaccaaacctggtttggaggagtcccaggagcagattcacaagatcaggatcactctctcctccaagaatgtgaaaaaccttgagaaagtttgtgctgatttggttcgtggtgccaaggataagagactgagggttaaggggccagtgagaatgcccaccaaggttcttcacatcacaacgaggaagtctccctgtggtgaaggaacaaacacatgggatagatttgagctccgtgttcacaagcgagttattgatcttttcagctcccctgatgtggtcaagcagatcacctctatcaccattgaacctg

SEQ ID NO: 235016 - DNA, 280 bp, Gossypium hirsutum
gtttgtgcacaagcatcttaaactcaaacatccagagcttgtgatggagctaacggataaaatgcgtgcagagctttatttccagaactacatgaatgatccaggtgcacctggtgctgacacctgttatgcaacaatctggacctgatgacaagcctatgagacgtaaaatgttggaaaaccgtttgaaagatgagcgtagctcacgtagcgaacgttgtaatcgagctaatggaagtgatagatatgataggcatgggaaccctcaatgaagtgattt

SEQ ID NO: 235017 - DNA, 378 bp, Gossypium hirsutum
  unsure (1)..(378): unsure at all n locations
ggctaatgggcttgcccgaaggtgcatcgtgcaggtctcttatgctattggtgtgcctgagcccttgtctgtctttgtagacagctatggaactggaaagattcctgacaaagaaatcctccaaattgtgaaggagaacttcgacttcaggcccggtatgatcaccatcaacctggatctcaagaggggtggcaatggccggtttttgaagacagctgcctacggacactttggaagggacgacccggacttcacctgggaaggtgtgaagcccctcaagtgggaaaagcctcagtcttaaaatccagctttggctgtcctcgaatgtctctaatctcatacatatgatgccccccattcattttcattntcattttc

SEQ ID NO: 235018 - DNA, 382 bp, Gossypium hirsutum
ctctcccgctccttctcgctgcgatttcgtcttcaagatctcagttctcaaatcgtagcgctcttttctatcaagccatggctctgatcttgcatgcaggaaaaacaaacaaaaatgcctttaaggcactcattgctgcagaatatagtggtgtgcaggtcaaaatggttgagaattttgagatgggtgtgtcaaataagactcctgagttcatcaagatgaaccctttggggaaggttcctgtgttggaaacacctgagggtccggtatttgagagcaatgccattgctcgttatgttgctcgctcaaaggttaacaaccctatatgtggttctacattgattgattatggtcatatcgagcaatggattgattttgcagc

SEQ ID NO: 235019 - DNA, 301 bp, Gossypium hirsutum
gttctttgctccatgaaagtccctcctcgtttgctgaacgctggtaatttcttgcacggtggagctactgcatcactggtggatttggttggatcagcggttatttactcctacggaggtagtaccagtggagtttctgtcgaaatcagtatcacttacttggatgctgcttatgttggcgaggaaatcgagatagaggctaaggcattgcgtgttgggaagactgttgccgttgtcacggttgagtttcggaagaaaaaaactgggaaaatcattgcgcaggggcgtcatactaagtacc

SEQ ID NO: 235020 - DNA, 356 bp, Gossypium hirsutum
cgacgaaggattatgctgtggagttggtagattctttcaagtgtgaactggagctattttatggcaaaaacccattggcgtcaaaagacttgtctcgcgtagtgaattctaatcactttgcccgcttgctaaagcttttagatgaggacacggtttcaagtcagattgtctatggcggtgaaagagataactcgaacttgcagattgctgccactgtcttgcttgatgccccacaagattcactgatcatgaacgaacagatatttggtacattgcttccaattatcacgattgacatagtggaagacagctctgatctgataactgctggaacaaaaccactagcagcatgtatg

SEQ ID NO: 235021 - DNA, 392 bp, Gossypium hirsutum
cttttaactctaaagccaagaaagcaagccattaaggttttgagaaaagatcaaaatggattcaaaaagatcagcttccatagccctccttttggcactcaacattctcttcttctccctagtcagtgctaattgcggatcttgttcttcttctggctctaacccaaggccaactcccacccctactccatcagcacgaggtaggtgccctagggatgccctcaaattaggtgtatgtgccaatgtgcttaacttagtcaatgtcaccgttggttcacccccggtgatgccatgttgttcccttcttaatggtcttgtggacctcgaagccgctgcttgcctttgcaccgctatcagagctaacatcttaggcatcaaccttaacatcccag

SEQ ID NO: 235022 - DNA, 368 bp, Gossypium hirsutum
gggacatccaagagtcattccatttttgcaagtataggagggatgaaaatcaactgtatatattcgctgatgatgttgatccgagatggcttactgcatcataccatatagattttgacaccatggctggtgcagacaagttcggtaatgtctattttgtgcggctaccacaagatgtctcagatgaaatagaggaagacccaactggtggaaagataaaatgggaacaagggaggctcaatggagctcctaacaaggtagaggagatagttcagttccatgtcggggatgtggtaactagttcgcagaaggcatctcttataccgagtggtggagaatgtgttctttatggaactgtgatggagagc

SEQ ID NO: 235023 - DNA, 384 bp, Gossypium hirsutum
tttccctttctttccttttcctgtaaaaatggagggttcctcgtctgacaagctgatcgttgtgacccgtgaacctgatgggatcgctattgttaccatcaatcgacccaaatctctcaactccttgacccgacccatgatggtggacttggccaaggctttcaaggctcttgcgaaggacaactcggtgcgggtcatcatcttgtctggagctggacgggctttctgttcaggcgtggatttgacggctgcacaagatgttttcaagggtgacgttaaggacccggagacggatccggttgttcagatggagcaatgccccaaacccatcatcggagctatcaacggcgttgctattactgccggcttcgagatcgccctcgc

SEQ ID NO: 235024 - DNA, 367 bp, Gossypium hirsutum
cttcaataccgaagatacagagctaagtgagttggtgtgaggatgagtcgcggtgcatcagctggagctaagggaaagaagaagggagcctacttcaccatcgactgtgcgaagccggttgaggataagatcatggacatcgcttctttggagaagttccttcaggaaaggatcaaggttggtggcaaagctggtgctctaggtgactccgtcactgtcacccgcgacatgacccgtatcacggttacctatgactccaacttctctaagcggtaccttaaatacttgactaagaagtacttgaagaagcacaatgtccgggattggcttacggtgattgcttacaacaaggaccgttatgtttatg

SEQ ID NO: 235025 - DNA, 387 bp, Gossypium hirsutum
gccgccgcctgcgtctctctcttcatctctctgaaccaaaaagtctttagcttttcgcttcgagagagaccatgttggtttaccaggatctcatctccggtgacgagcttctttctgactcattcccctacaaggaaatcgagaatgggatgctgtgggaagttgagggaaagtgggttgtgcaaggagctgtcgatgttgacattggtgccaatccttcagccgaaggtgctgatgaggatgaaggtgttgatgaccaagctgtgaaggttgttgacattgttgacactttcaggcttcaggagcaaccccctttcgacaagaagcagtttgtcgtgttcatcaagaagttcatcaagaacttgacaccaaaactggatgcggaaa

SEQ ID NO: 235026 - DNA, 387 bp, Gossypium hirsutum
tctcactttctatccagtgagcttttgctaaacggtatcgttttagtcagtctttcatcaatggcgaaagaaccggttcgcgtcctcgttactggagctgcaggacaaatcgggtatgctcttgtacccatgattgctaggggagtcatgttgggtgctgaccagcccgtgatccttcacatgcttgatatcccacctgctgcggaggctttgaatggtgtcaaaatggagttggtggatgctgcttttcctcttctaaagggtgttgttgctacaactgatgttgttgaggcatgcactggagtcaatgttgctgtcatggttggtggtttcccaaggaaggaaggaatggagaggaaagatgttatgtcaaagaatgtgtctatt

SEQ ID NO: 235027 - DNA, 380 bp, Gossypium hirsutum
aaattgctgttagcagcaaggaaggtcagaagggctacctgcacggattttgttatatctttggttgctgatgatttttctagggccagctatacatatgtcggtaaactaaggtctaatttttttggtactaagttcacaatacatgacagtcaacctccgtgtgactcaataatcccatcaagtacccgatcgagtcgaagattccactcgaagcaggtgtttccaaaactatcttcgtccaactacaatattggtaccattacctatgagctcaatgttctgcgaacacgaggaccaaggagaatgcattgtgttttgcactcgattcccatgtcttcgattcaggaaggaggcactgcaccaacaccattagcgtt

SEQ ID NO: 235028 - DNA, 375 bp, Gossypium hirsutum
gtcttttctacactaaaatagatgctcgccactgttgcgtctttggctacttgtcttgcagttgaatctgttgttcctttgtgttattcatggcacacactcttggtcttactcaaccagcaaacatagaactccccaagatctcttttgctgcaaaagagatcgatgtggcagaatggaaaggggacttacttgcagttggggtcactgaaaaagacatgaccaaagatgaaaactccaagttccaaaacccaattttgaaaaaattagatggcctgttgggtagtctcttagctgaggcctcttttgaggaggatttcactgggaaagctggccagtccttggttcatagacttccaggccttggctccaaaa

SEQ ID NO: 235029 - DNA, 374 bp, Gossypium hirsutum
cttgctaaacggtatcgttttagtcagtctttcatcaatggcgaaagaaccggttcgcgtcctcgttactggagctgcaggacaaatcgggtatgctcttgtacccatgattgctaggggagtcatgttgggtgctgaccagcccgtgatccttcacatgcttgatatcccacctgctgcggaggctttgaatggtgtcaaaatggagttggtggatgctgcttttcctcttctaaagggtgttgttgctacaactgatgttgttgaggcatgcactggagtcaatgttgctgtcatggttggtggtttcccaaggaaggaaggaatggagaggaaagatgttatgtcaaagaatgtgtctatttacaagtctc

SEQ ID NO: 235030 - DNA, 368 bp, Gossypium hirsutum
ctcttcttatgttaagaaagttggttacaaccctgagaagatcccatttgtcccaatctctggttttgagggtgacaacatgatcgagagatctacaaacctcgattggtacaagggtcctactctccttgaggctcttgaccagatcaccgagccacaagaggccctcggataagccactccgtcttccacttgaggatgtatacaagattggtggtatcggaactgtccctgctggtcgtgttgaaactggtgtcctaaaacccggtatggttgctacttttggtgctactggtctgaccactgaagttaagtctgttgagatgcaccatgaatacctgccggtagctttctctggtgacaatgtt

SEQ ID NO: 235031 - DNA, 342 bp, Gossypium hirsutum
ctcccttactaacaacaaaaacttggaaatgtcggacgacgatcatcatttcgaatccaaggctgatgccggcgcatccaaaacctatcctcagcaagccggtactatccgtaagaacggctatatcgacattaaaggccgtccctgcaaggttgtggaagtttccacctccaagacggggaagcacggacatgctaagtggcacttggttgggatcgatatcttcactggcaggaagatgctagatattgttccctcctgccataactgtgatgttccgcatgtcaatcggactgactaccaattgattgacatttctgaggatggatttgtgagtttgct

SEQ ID NO: 235032 - DNA, 353 bp, Gossypium hirsutum
gtctcgtgctaagtggcaagcatggcacaaattgggtgctatgcctccagaggatgcaatgcataaatacattgatgttgtgacagagctatatccatcttgggctgctggttcagctatgggcaaaggtggggctgataatgcttcaagtaaagatgtcaaaggaccaatgggaccggttttcagctcttttgtgtatgaagaggaatctgaaaatgatttgaaaatggatgctatccacacttttgccagagaaggagaactggataatttgcttaaatgcattgaaagtggtgtttctgtgcatttgcaagacagtgaaggcaggaccccgatgcattgggctgtagatc

SEQ ID NO: 235033 - DNA, 379 bp, Gossypium hirsutum
catgtctcaatattaacagaaaaaactgggtgtttacacttatgagtgcgagatagctacatgaatcccaccagctaaaatgtacaaggctcgtatccttgacggtgacactgtgattcagcagattcttgcttaggcttacaagagtgatgagtacattgaacgcaatggtgaggccgctagcatcaatatggtcactgtcggagaaggtagccacttcaaatacgtgaagctgactgttgtagcagtacacaaagacaaatttgcgtatatttacagtgtgatcgaacgtgatgcattgatggataagctagcgatgatctattacgagacgaagttagacacctctccggatgggggatcagtatgcaagactact

SEQ ID NO: 235034 - DNA, 377 bp, Gossypium hirsutum
ttcgatctttgcaacctccggaacctattgtaactgctgagaaagtgttcgatgaaatgcctgtgacagttatgactgaggaagacgaagaaataattagatccgttgtttgtggaatgactccttcatattctttggaatctaaattagatgattgcaagagagcagctgcgatcaggcgtgaggctttgcagagaataacagggaagtcattatcaggattgcccttggatggttttgattatgagtcgatattgggacagtgttgtgagatgccgggtggttacgtgcagattcccgtgggcattgctgggcctttgctgcttaatggaagagaatactcggttcccatggcaaccaccgaatgatgcttggta

SEQ ID NO: 235035 - DNA, 376 bp, Gossypium hirsutum
cggacgcgtgggcattttcacagcttaaaacacaatctgactaaggatattgagaccacggcggagcaaggccgcggagcggagttctcagcgtaggactaccaggacccaccaccggcaccgttgattgacttggaagaactcaccaaatggtcgctttatagggcggcgatcgctgagttcattgccacccttcttttcttgtatgtcacggtgttgactgtgatcgggtataaagtgcaaaccgacccggcaaagaatactgtcgacccggattgtggtggtgttggtatacttggtattgctcgagcttttggtggcatgatctttatccttgtttactgcactgctcgtatctctggaggacacatcaacc

SEQ ID NO: 235036 - DNA, 382 bp, Gossypium hirsutum
tttttaaagaaccctagtttccgaaattacctttccaaaatgccttcaattccagaagagccactgctggccgcgaacccagaccgattctgtatgttcccgatccaatacccagaagtatgggaaatgtacaagaaagccgaagcgtcgttttggaccgcagaggaagtcgatctgtcttccgatcttcgtcactgggaagctctcaccgctgacgagcaccacttcattagtcacgttctcgccttttttgccgcctccgatggcatagtccttgagaaccttgctgttcggttcatgaaagaggtccaaatctccgaggcgcgtgctttttatggtttccaaatcgctatcgaaaatatccactccgagatgtacagtc

SEQ ID NO: 235037 - DNA, 378 bp, Gossypium hirsutum
ctttgacttcccttcatcatttcaagaaatgggttcaggagaaaaggtatttgtttatgaagatctggtgaagcacaaagacagaaatgattgttggcttttgatctctggaaaggtgtataatgtaacccaattcttggaggaccatcctggtggagatgaagttttgcttgctgctagtggaaaagatgcgaccaatgatttcgaagacgtaggtcacagtgatgatgcaagagagcagatgcagaagtactatattggtgaggtcgatgccaccaccattcccgcacgaaggatgtacaaagcacagacgtcaaccgcggcaactcaacaagaggagcctggctttctgtttaagattatacagttcctggtacc

SEQ ID NO: 235038 - DNA, 386 bp, Gossypium hirsutum
gcgatgtataagaagatttacagaggagatttcaagtgtccgccatggttctcacctgaagctcggaggctaatatccaagcttttagacccgaacccgaaaacccgaatcgccatctccaagatcacggaatcatcttggttcaaaaaatcaatccccaagactaaaacaactaaggaagaaatagaattcgaagcattcaatggagagaaatcttctaaacccgagaccttaaacgcattccacataatttcattgtcggaaggcttcgatttatctccgttgttcgaagagaaaaagagggaagagaaagaggagttgaggttcgccacgacgaggccggcaagcagcgtgatatcgaggctcgaagaggtggccaaatcggg

SEQ ID NO: 235039 - DNA, 390 bp, Gossypium hirsutum
tttgttttcaattttccatgtctttcttctctgttaaacaaccttagaaactcatttccttaattaccaaacataaaaaaaaaaccttatttttaaacagcaaaagaaaatggtgtctcctgagttttctctttcgcagttttctccaatggcgaaacctcgaaaccggtcgttttggtgtctgtccgatagtttcctttactgcggcggtgtctttttagctatcttattagtatgttcattttggtcgtttttcacaccgaccctcaacttcagctccgccattaccgacccgtcgtctgcggtcagctgtaaggaaagtgggttcggagttaacttaaaatccgacccgaaagacctgaccttctacgacgacccagagttgagtta

SEQ ID NO: 235040 - DNA, 386 bp, Gossypium hirsutum
aagagagcgaacatggcgataggagttaaggccttgcacttgtcgtttgtgcctcatgccctcgcgattgccggcgctgttatggtattggtttggtgcattcacttcaggggtggattagcttgggaatcttctaacaaaaatctcatctttaatctccatcctgtattgatgttgattggcttcattatcttaggaggtgaagccattatgagctacaagtctttgccactgaagaaggaagttaagaaagtcatacatcttgtgctccatgccactgctctgattctaggcattattggaatctatacggcattcaagaatcataatgagagttcaatacctaatctctacagcgtgcattcttggccttgggattggaatca

SEQ ID NO: 235041 - DNA, 381 bp, Gossypium hirsutum
cttgcattgagtctctaagatatcactgcaaggaaaaaaaaaaaaaaccagacatggcttccaacactgttgcatccgctgctcttcttcttaccttgaacttgttgttcttcactttggttagctctacctacgtgccttgcccaccaccaccaaagagccacaagcctacccacaagagcccaccctcggcacctaaacagccagccacttgccccaaagatacactgaaactaggtgtttgtgctgatttgttgggctcggtgcgcgttgttgttggaccgtcgaggaccaaatgctgctcactcatttcgggtttggctgatctcgatgctgctgtttgcctttgcactgctattaaagctaatgtgttgggggtta

SEQ ID NO: 235042 - DNA, 381 bp, Gossypium hirsutum
cattttctcctttttatctttaaaacacgcacccaaaaaataaaaccctttgaaaaccaaagaaggaagaagaagatgtcgtggcaagcttatgtagatgatcacttgatgtgtgaaatcgaaggaaaccatctctctgccgccgctatcatcggccaggacggcagcgtttgggcccaaagcgccagtttccctcagctcaagcctgaagaaattagtgccatcatgaatgactttaatgaaccgggttcactcgctccgaccgggttgcacctcggtggcacaaaatacatggtgatccaaggcgaaccgggagctgttatccgagggaagaagggacccggaggtgttactgttaagaagaccaatatggccttgatt

SEQ ID NO: 235043 - DNA, 361 bp, Gossypium hirsutum
  unsure (1)..(361): unsure at all n locations
ggatattcaacccctcgtctgtgataatggaactggaatggtgaaggctggttttgctggtgatgatgctccaagggcagtttttcccagtattgttggtcgtccccggcacactggtgttatggttgggatgggtcagaaggatgcctatgtaggagatgaagcacaatctaaaagaggtatccttactttgaaatatcctattgagcatggtattgngagcaactgggatgatatggaaaagatctggcatcatacattctacaatgaactccgtgttgctcctgaggagcaccctgtgcttctcacggaggcaccctctcaccccaaagccaatagagaaaagatgactcagatcatg

SEQ ID NO: 235044 - DNA, 384 bp, Gossypium hirsutum
cttggggtgacagatgcttataacaaggatccaagcccaaacaagttgaatttaggtggtggcgcttacagaactgaggaaggaaaacctgtagttctaaatgctgatcgaaaagcagaacagcttcttggtaatgacctgtggagagtcaaggagtctcttactattcttggtattgcatagttcaatggatggagtgctaagctcatttttggagatgacagtcctgctattcaagagaacagagtgtctactgctcagcgcttgtctgctactggttacttgagggttgctgctgagtttttagcagagcattaccaccaacgtactatatacattccacagtcatcatggcgaaaccatgtgaacgttttcacgatggct

SEQ ID NO: 235045 - DNA, 387 bp, Gossypium hirsutum
gttctgcactgctgccttttcttcttcttcgagcgatctaaacccctaaatcagaatgaattttacggcttcaaagcaacctgaaaattgcttgcttggccctgaatctgactcccaaaggacactgtatccatatgtgacaggaacatcagtcgtggctttaaagtataaagatgggattttgatggctgctgatatgggaggttcgtatgggtccaccctgcggtacaagagtgtggagcgaatgaagcctattggcaagcattcccttctgggtgctagtggggaaatcagtgatttccaagagattttgaagtatcttgacgagcttatcttatatgacaatatgtgggatgacggcaactctttggggcctaaagaggtgca

SEQ ID NO: 235046 - DNA, 305 bp, Gossypium hirsutum
aaaaaagaagcaaaaaaacatggccaaagttctgttgttcattgcactatgtgtgcttccagctttggttagtgctacacgcattctgaataatcaattggtggtagaaggctatgtgtactgtgatacttgccgtgctggttttgaaacccctaagactagaagcctagctgatgccatggttaggttggtatgctccgacaggaagagcggccaagttgtcttcaaaaaggagggatacaccgacaaaaccggaaaataccagattcgtgtatccgaggatcacttggatcagatctgggatg

SEQ ID NO: 235047 - DNA, 378 bp, Gossypium hirsutum
aaaacatcttctatttgagagaaattgatgatgctgataagttggtagaagcaatcaaagcaaagaagaatggaaaggctgttatcgttggtggaggttatattggtcttgagcttggtgcagccttgaaaattaacaatcttgatgtcagcatggtgtacccggaaccatggtgcatgccccggcttttcacctctggcatagctgctttttatgagggttattatgctaataaagggatcaaaattataaaggggacagttgcggttggattcacctctaactccaatggagaggtgaaggaagttcaacttaaggatggcagagttctggaagctgacattgttgtggttggtgttggtggaaggcctcttacag

SEQ ID NO: 235048 - DNA, 384 bp, Gossypium hirsutum
cttgaggggaagaatcttgctatcccttgcttttctctcgcaaaaaattctgaaacttgtttttaacgttcgctgaatactatcgctcatttcttccctcagaaccctaatcgataactgaagccatttaatcatgtttgggcgtgttccaaaaaaatctgataacactaagttttacgaagtacttggggttcccaaaagtgcaagtcaggatgaattaaagaaggcttataagaaagctgcaattaagaatcatccggataaaggtggagaccccgagaagtttaaggaactggctcatgcttatgaagtacttagtgacccagagaagagagaaatatatgatcaatatggtgaagatgctcttaaagagggaatgggagg

SEQ ID NO: 235049 - DNA, 380 bp, Gossypium hirsutum
cttccatatccaacactatctcacacacacaaacaccaaaaatgccgtttaagagatacgtcgagatcgggagagtggctctcgttaactacggcaaagactacggcaagttggtcgtcatcgttgatgtcgtcgaccagaacagggcacttgttgatgccccggatatggtaagaggccaaatgaacttcaagaggcttacattgacagatatcacaattgacattccccgtgttcctaagaagaagacattgatcgaagctatggagaaggctgatgttaagaacaaatgggaaagtagctcgtggggtagaaagttgattgtccagaagagaagagcatctctcaacgacttcgacaggttcaagcttatgttggct

SEQ ID NO: 235050 - DNA, 382 bp, Gossypium hirsutum
caggaaaacaagaaaagcagagccgcatcactttttgctagctaagctactgtgggagttattgttcttcagaacagcttctgcagtagctaataataacgttatatattatataaattttatacatcctttttaccctacgactccatatataagcaagtaaaaataaatatggctcgctctgtttcttcctttaagttccttggtgcttctgtttttgatgctctttatgtctccatatcaaggagaggttactcaggtgcaccgccggcggcagtgacggctagctttggtaggcctggagcgatggggaaagtggaacgaagatatgcgatgaaagagtcgtcgtcgtcggagacaagggcttattcttcagcttggg

SEQ ID NO: 235051 - DNA, 387 bp, Gossypium hirsutum
  unsure (1)..(387): unsure at all n locations
ctcctcgcgaaagtgtcagatggcaactttagctgattcattccttgcggaccttgatgaattatcagacaacgaagccgatgttctggaggaagaaaataatgatgttgcaaacatggaagaagatattgatggtgacctcgcggatatcgaaacgcttaactacgatgatctggacagtgtttccaaattgcaaaaaagtcagagatacattgatataatgcagaaagtggaagatgcgctcgagaagggttctgatatatcaaatcagggcttggtactggaagatgatcctgagtatcagctgattgtggactgtaatggactatcagttgatatcgagaatgagattgttattatccataantttatacgtgataagtaccg

SEQ ID NO: 235052 - DNA, 383 bp, Gossypium hirsutum
gcggttcacagagacatcaagcctgcaaatttgctcgtaaatcttaaaggggagcccaaaataacagattttggcataagtgctggcctagataattcaatggcaatgtgtgctacctttgtcggaactgttacatacatgtcacccgagcgaattcgaaatgagagttattcttatcctgctgatatatggagccttggtcttgctctctttgagtgcggaactggagaatttccatatatggctaatgaaggacctgttaatctcatgttgcagatcttggatgatccttccccatcaccgccaaaacacaaattttcaccagagttctgttcatttatcgatgcttgcctgcagaaggatgcagatgccagaccaacagc

SEQ ID NO: 235053 - DNA, 271 bp, Gossypium hirsutum
caggtgttcaaggtgaacagccgctggccaatgtatcattgtatgtttgagcaaaaaggactttggcttctcgcttcgagagaaaccatgttgttttaccaggatctcatgtggcggggacgagcttctttttgactctttcccctacaaggaaactgagaatgggatgctgggggaagttgagggaaagtgtgttgtgcaaggagctgtcgatgttgacattggtgccaatcctttacccgaaggtgctgatgaggatgaaggtgttgat

SEQ ID NO: 235054 - DNA, 383 bp, Gossypium hirsutum
cggacgcgtgggttctctttggcttatctatcgctttgatttcgcatccttgctgtgcactcgatggcaaatcgatggttgaggcctgaggtgtatccgctgtttgcggccgtaggtgttgctgtcggaatctgcgggtttcagttggtgcgcaatatctgcatcaaccctgaagtcagggtaaccaaggagaacagggctgctggggttttggacaactttgctgagggagaaaaatattctgaacatttcttgagaaaatatgtccgcaacaagacgccagaaatcatgcccagtatcaacagcttcttcactgacccaaagtgaggcttcactcttgctttatgctgaaactaaaaaataaaaaaaatagaagaactaag

SEQ ID NO: 235055 - DNA, 370 bp, Gossypium hirsutum
gtgtagagatgaggaaaatcatgggtgccaaagttctcttcttctttgctttgctttccttttcagctgtgtcggcatttgcacaggatgaggaagaccaaggtcttgttatgaacttctacaaggattcttgtcctcaggctgaagacattatcaaggagcaagttaagctactgtacaagcgacacaaaaacactgctttttcttggctgagaaacattttccatgactgtgctgtccagtcatgtgatgcttcactgctgctggactccacaagaaggagcttgtctgagaaggagacagacaggagctttggcctaaagaatttcaggtacattgagaccatcaaagaagctgtagaaagggaatg

SEQ ID NO: 235056 - DNA, 356 bp, Gossypium hirsutum
  unsure (1)..(356): unsure at all n locations
tgcttgttcccttggttagctggagggttcttgatgagtgtggtttggagttacatcatagctcaagaattggttggcttattgatttcacttggccacatacttggaatcactcagtcaatccttggtttcacagtccttgcttggggcaactcacttggagacattgtcaccaacttgacaatggcattgaatggtggtccagaaggggttcaagtggctatatcaggctgctatgctggtcctatcttcaacactctctttggtttaggcatgtcattggttggctcagcctggcatgggtacccttcacctgttcagatccctaaagacccgtatctncttgaaacactggg

SEQ ID NO: 235057 - DNA, 379 bp, Gossypium hirsutum
gcgtgtgctttgtatattgaagtttcctttctcgattttctatttagccaaacaagatgcagatcttcgttaagactctaaccggcaagacgatccttctggaggccaaaggctccattccaacgacaacgtgaaggccaaaatccaagataaggaaggcatccctccagaccagcagcgtctgatcttcgccggaaaacagctcgaagacggccggaccttggccgattacaacatccaaaaggagtcaactctccacctcgtcctccgtctgcgcggtgggatgcaaatcttcgtgaaaaccttgactggcaagacaatcactctcgaggtcgagagctccgacacgatcgacaacgttgaagcgaagatccaagac

SEQ ID NO: 235058 - DNA, 308 bp, Gossypium hirsutum
ctcattccccctaaataccgacttttttcttcaaattccccaccaacggccgtcactgtctcagatctgcacaccgaatctggccttaaatcccttaacgacttcctcaccggcaaatcttaaatctctggggataagctgactaacgatgacataaaagtttatgctgctgttttgaaaaatcctggagattcatttcccaatgtgagccaactggatcactgtgtgtcttgccatctcgctgatagctttcctgggaaagctgttggctatcacttgctgcaaagctgatcagctcaatctgtgag

SEQ ID NO: 235059 - DNA, 339 bp, Gossypium hirsutum
gaaagtgggagagaaaaggaaacaatagagttagatgaagcacggctacaggggcaagcggagatatggcgatacatgttcagctttgcagattctatggcgcttaagtctgccgtggagctccgcatagctgacataatacactctcatggtgtcgccatcactctatcgaaaatagcttcatgcattaatggcagccttacttcggcggacaccaccacccttgctcgcataatgagattgctcgtccgtagaaagattttcactggccaccacccttcagacgggggagatcccttggacgaactgactcactcatcgagatggctactacatgac

SEQ ID NO: 235060 - DNA, 406 bp, Gossypium hirsutum
caccgtcactagcggcgccgtcacaaaatgtcgtcaacggagtctctcatcctccaactccatgaaatctctgccgttaaattcggtaacttcaagctgaaatctgggatcttctcccctatctacatagacctccgtctcatcgtctcttacccttccctcctccaccaaatctcccactccctcctctcctctctccctccccaaacacactttaacctcatatgcggtgtcccttacactgccctccctatagccacctccatctctctcgacacctccatccccatgctcatgcgccgcaaagaagtgaaagactacggaactgccaagtccatcgaaggtgtttacgaaaagggtcaagcttgtttggtggtggaagacctcgtaacgtccggtgcatcgg

SEQ ID NO: 235061 - DNA, 335 bp, Gossypium hirsutum
  unsure (1)..(335): unsure at all n locations
ctcgtggcactttcggaaccgttcatcgtgggatgtatgatggccaagatgttgctgttaaacttcttgactggggagaagagggccacagatccgaggccgaaatagcttcacttcgagcagcttttactcaagaggttgcggtgtggcataagcttaatcatcctaatgtaacaaagtttataggggcgacaatgggctcatcggacctgaacatacagatggaaaatggtcaaattggcatgccaattntgtgtgttaatgtggaaatattgtcctgggggtgcactgaaatcctacttgataaagaatcggagaaggaagttggcttttaa

SEQ ID NO: 235062 - DNA, 422 bp, Gossypium hirsutum
cccacgcgtccgtaccattcatagcatagcagcttagtccaacagtccaactccacacccaccaccattggctgtttctgatcatccgaaaaagaatggtgaccgtggaagaagttcgtaaggctcaacgtgcccaaggccctgccaccgtgttggccatcggcacatcaaccccgcctaattgtgttgatcagagcacataccctgactactatttccgtatcacaaatagtgagcacaagaccgagttgaaagagaagttcaagcgcatgtgtgaaaaatcgatgatcaagaagcgatacatgtaccttacagaagagattttgaaagagaatcccaatgtatgtgaatacatggctccttcactggatgctaggcaagatatggtggtagttgaggtgccaaagctaggcaaagaagca

SEQ ID NO: 235063 - DNA, 372 bp, Gossypium hirsutum
ctttaccataaattgaacgttgaactcctcaaaaatcttcaaagcttcaacttttccaaacatcagcgatccctttcactccaaatttcatcgggtgaataatggcgacgtttgagctttaccggaggtcaacgatcgggatgtgtttgacggagactttagacgagatggtttccagcagtactttaagccctgagctcgctattcaggttctcgtccagttcgataagtctatgactgaagccctggaaagtcaagtgaagagcaaggtttccattaagggacatctgcacacctatagattctgtgacaatgtttggaccttcatcttacaagatgctttgtttaagaacgaggatactcaagaaaacg

SEQ ID NO: 235064 - DNA, 318 bp, Gossypium hirsutum
acgttttctggctacatgtgtcgacatggagtgtaatggcagcaactggagcaggggctgtcaggcaaagaacagcgaatcgttgctttgtccaagaagatgccaaaagagctcccaagttagcttgctgccaatcatcatctcattgtaaacaggctgattctagccccactggtgtagcagatgctcgtgatcaccctgcagttgatctcaatgctctcaacaggaaccctttctgatccaatctactgcctagaatgaggtggtggcttcagttgcagcctaactatggaccccaaatgggcttaaaaaatgagc

SEQ ID NO: 235065 - DNA, 402 bp, Gossypium hirsutum
attacagcccatttttctaaactccatcaatattcaaaaaggaacttcaatggctttaaagaaacctggtttgattgctttatttgatgttgatggaacacttacagctccaagaaaggtggctacccctgaaatgctggagttcatgaaggaactgagaaaggttgttactgttggagtagtaggtggatctgatcttattaagatatctgagcaacttgggaaatcagtgattaatgactatgattatgtattttctgaaaatggacttgttgctcataaagatgggaaactcattggaacccagagtttgaagtcgtttctcggagaagataagctgaaggaatttttaaacttcacattgcattatattgctgacttggatatcccaataaaaagggg

SEQ ID NO: 235066 - DNA, 400 bp, Gossypium hirsutum
agcagaaaatatctcaaatctcctcctcctcctcagaaatcttagtatcatcaccatggcctcaaatcccaaggtcttctttgacatgactatcggtggtcagcccgctggtcggattgtgatggagcttttcgcagattgcactcctcgcactgctgagaacttccgtgccctctgtaccggcgagaaaggcgtcggccgcagcggtaagcccctccactacaaaggctcctctttccatcgtgtgatccctaactttatgtgccaaggaggtgacttcacggccggaaacggtaccggaggtgaatccatctacggatccaagttcgctgacgagaacttcatcaagaagcacactggtcccggtattctctcaatggctaacgctggtcccggaact

SEQ ID NO: 235067 - DNA, 358 bp, Gossypium hirsutum
attctttaatccattaagatatcatgggcaagggtccaggtctctacactgaaatcggcaagaaagccagagaccttctttacaaggattatcagactgaccacaagttcactctcaccaccagctctccaactggagttgctattacatctgccggaacgaagaaaggcgaactctttttggctgatgttaacacccagctgaagaataagaatgtcacaactgatattaaaggggatacctactccaatctctataccaccataaccgttgatcaacctgcacccgggctgaaagcaatctttagcttcagagtccctgatcagaggtctggcaaggttgaacttcagtatttgca

SEQ ID NO: 235068 - DNA, 339 bp, Gossypium hirsutum
gtggagagccttctacagcgagcgcattcttagttccaggtctctacacggggatcggtacgacagccagagaccttcttttcaagggatgataagaccgtccacacctacactctcaccacctgctgtccaactggagttgctattacatctgccggaacgaaaaaaggcgaactctttttggctgatgttaacacccagctgaagaataagaatgtcacaactgatattaaagtggatacctacttcaatctgtataccaccataaccgttgatcaacctgcacccgggctgaaagcaatatttagcttaagagtccctgatcagacgtttggcaag

SEQ ID NO: 235069 - DNA, 408 bp, Gossypium hirsutum
atagagtcatttgcaaggagcagtgtgacgatgggaagagggctcaaaggcagtgaactgttgcctttcacggtacagttcctgagaggaagatggtttgcactttttgcatcctttctaatcatggctggagctggtgccacatatctatttggaacctactccaaagagatcaaagctgcactggattatgatcagacaacgctcaatctcttgggcttctcaaaggatcttggtgctaacgttggggttttttccggtcttattgctgaggtaactcccacttggtttgttcttctagttggtgctgcattaaacttcggagggtatttcatgatatggttagctgtgactggtagaatagccaagccaaaggtttggcaaatgtgcatttacatctgcatagga

SEQ ID NO: 235070 - DNA, 389 bp, Gossypium hirsutum
gggaagcaacaaccgttgaaaagatcagttagtgctgggctttacatgagcccggggagcccatctgggtccgatttgagcgattccagcgtccccgttttatcatcttcacacgtgtacaagcccatcccgaggaccggcggagtcagcgttgacgtcaatgttatgccattacctggggtcgaagcggcggcgtcttcttctaacgatccaccgacttcactgagtttgtctttacctggggctgaatcgtatgagttgtcagtttcaaccctcccagttaccgagtctactcagacgaggaacgaagcaaaaaatgatggaaagggaggcgaggtgatggggttcagtgcggagtttatggcggtgatgcaagaaatgataagaat

SEQ ID NO: 235071 - DNA, 389 bp, Gossypium hirsutum
caaatgggcatccttggcaatgacccttcagttcaagacctgttggtgatggtgttattggtattgacctgggtacaaccaactcatgtgtatcagttatggagggaaagaattccagggtaattgagaatgctgaaggagctagaaccacaccatctgtggttgccttcaaccagcagggggagctaattgttggaacaccagccaaacggcaggctgtgaccaacccaacaaacacattttttggaacaaaacgtctgattgggagacggtttgatgatgctcagacacagaaagaaatgaagatggtaccttataagatagttagagcttccaatggggatgcttggcttgaagccaatggaaaaacttattccccgagccagatt

SEQ ID NO: 235072 - DNA, 202 bp, Gossypium hirsutum
acttaaccattttccaaaactcctcccttctcttctttagcggcctttttagttttgcccaatccagcggcgtcttaaaaacacaaaaaggggtcctacaacccctggggagcaaactctcctggtggtggccgtcgcctagaccctcggcaaagttggaccatcgatgtgcctgctggcactgctatggctcgtatttggg

SEQ ID NO: 235073 - DNA, 328 bp, Gossypium hirsutum
caaaaccttcattacattccactcactttttacaacctccctccaccaacatggggaaaacacgtggtatgggagctgggcgcaagctgaggacccaccgcatgctgcagaggtgggctgataaggcatacaagaagtctaacctttgaaatgaatggaagaagccatttgccggttcttcccatgctaaaggaattgtccttgagaagataggtatcgaggctaagcagccaaactctgccatccgaaagtgtgctagagttcaattgatcaaaaacggcaagaagattgctgcttttgttccaaatgatggttgcttaaactacat

SEQ ID NO: 235074 - DNA, 232 bp, Gossypium hirsutum
gctttagaatccatcccttcttctttgtttgattatagcaatttcctatatcaatgggcttttgctattgcatctgctggtattaccagtggctccattgcagaaagaacccaattcgttgcttatcttatttactcgtctttcttgactggattagtttacccccttgtttcacatttatttttggcggctgatggttgggctagtgcttttagaacacatgattttcttt

SEQ ID NO: 235075 - DNA, 399 bp, Gossypium hirsutum
ctcttattggggaccaaaggctggttataatatttatcatatgaagagtgcagatatgttgtttggaggggttacaattgtatgtgggattttaggaacaatatctggtggcttcatcctagatcgcatgggtgctacaatatctaatgcttttattcttctttcaggtgcaacatttctgggtgcaatatcttgcttctctgctttctgtctcaggagcttgtatggttttatagttctttttgctgtgggtgaattacttgtttttgcaactcaggctccagtcaattatgtatgtctccattgtgtaagaccgagtttgagaccattatctatggcaatctctactgtatcgattcacatatttggcgatgtaccttcctcaccacttgttgggat

SEQ ID NO: 235076 - DNA, 388 bp, Gossypium hirsutum
cttgagaggtcttgcaggacagtgatgagcaaatctcctaacaagcacaaccgtctgtacatggaggctcgacccttggaggaaggtcttgctgaggctattgacgatggacgcattggtccaagagatgatcctaaggttcgttccaagatcctggctgaggagtttggttgggacaaagatctcgctaagaagatttggtgttttggccctgagaccactggccctaacatggtggtcgatatgtgtaagggagttcaatatctgaatgaaattaaggattcagttgttgctgggttccagtgggcatcaaaagaaggtgccctggcttgagaaaacatgagaggcatctgcttcgaagtctgtgacgtggtccttcatgctgatg

SEQ ID NO: 235077 - DNA, 399 bp, Gossypium hirsutum
aggcaatccattttccccgagtaaaacgccaaagaaaacaaaaaatatgagagaggtcttgcacatccaagggggtgaatgtgtcaaccagatcggggctaagttctgggaagtcatatgcgacgagcatggagttgacaacactggaaaatataacggtgactccgaccttcagttggagcgcatcaatgtctactacaatgaagccagtggtggaaggtatgtcccacgcgctgttctcatggatctggagccgggcactatggattccgtcagatctggtccttttggacaaatctttcgccccgataacttcgtcttcggacagtctggtgctggcaacaactgggccaagggtcattacacggagggagctgagctcattgattctggtcctga

SEQ ID NO: 235078 - DNA, 420 bp, Gossypium hirsutum
ggcggacccacgcgtccggaaaatcaagaaggaaaaaaaacccttaaaatcaaaaccctaatcctattggttgggcctttttgattgtggaaaacaaagcaagccctcaactggacaacatggggtctgaacagaatcaaggaaccagctttcccccgtcggagccgaagctttgcgctaacggttgcgggtttttcggaacggcggcgaacatgaacctctgctccaagtgttaccgggacctccgtgctggggaggagcaagcggcgaaggcgaaagctgccatggagaaatcccttagcgtcaaaccgaaagaagatgtcgttgtggagacgtttaagcccgttgagaagctgcctcatgcgggttcatcatcagcggcggttgagcaaccggccgtggctctttccggcgatgaac

SEQ ID NO: 235079 - DNA, 363 bp, Gossypium hirsutum
ccttgagattatcaatttgaagccttcttcgaatttcctcattcaagatgcaaattttcgtcaagaccctcaccggaaagaccatcacattggtggtggagagttctgatactattgacaatgtaaaggccaagattcaagacaaggaaggcatccccccagaccagcaaaggttgatcttcgctggtaagcaacttgaggatggccgcacgttggctgattacaacatccagaaggagtccacactccacttagtgcttcgcctccgtggaggaatgcaaatttttgttaagactttgactgggaagaccattacattggaggtagagagttcagataccattgataatgttaaggcaaaaa

SEQ ID NO: 235080 - DNA, 406 bp, Gossypium hirsutum
cttgacgcaaagaaagagggtaacagctgtggttctgagaaagagtaaagatggctggttacagagctgaggatgactatgactatcttttcaaggtggttttgatcggtgattccggtgtcggaaagtcaaatctgctctcgaggttcaccaggaacgagtttagcctcgagtccaagtccactattggtgttgagttcgctacacgtagcttgaatgttgatggaaaggtcatcaaggctcagatttgggacactgctggtcaagaaaggtatcgtgccataacaagtgcctattatcgaggagctgttggtgcacttcttgtgtatgatgttacacgacactccacattcgaaaatgtcgagaggtggttaagagagttgagggatcacacagatcccaacat

SEQ ID NO: 235081 - DNA, 402 bp, Gossypium hirsutum
ctctcccgaaatttcttacttaaaaccaaaaaacaaaaacagagcatgcactctttttttcttgagtgtgctttgtaaattagttacaagctggcgatcgaaaataaagaaaccactgttcgttaaatcaagcccaagaacagaaggataatgggagctggtgggcctgatgaagaagataacaggtggccgccatggttgaaacctttgctgaaagaacagttctttgttcagtgtaaacatcatgttgattttcacaagagtgaatgcaatatgttctgcttggattgcgataatggcgctctatgatctttctgcttagcttatgacaaggatcatcgttatattcagataaggaggtcttcataccatgatgtgataagagtctctgagatacaaaaa

SEQ ID NO: 235082 - DNA, 287 bp, Gossypium hirsutum
ctcctccgaatttgttaaatccttaataacattccactcactacgggcaaccttttttcactagcatggggaaaacacgttggatgggagctgggcgctagctgaggacccatcctatgcggcagatgaggctctgataaggcatacataaagtctgaccttggaaatgaatggaagaagccattttccgggtcttgccatgctacaatgtattgttcaacagaagattggtatcggggatcagcaatcagactttgacatgcgaaagtgcgctatagttcaggttt

SEQ ID NO: 235083 - DNA, 379 bp, Gossypium hirsutum
gggagattgaaatcagtgaatcacagagtgatgatgagcggagacaaagatcgatactctatagcagcttttgtcattccaaatgagggtactataatcaagacacccaaagagtttatagatgaccaacatcctcggcttttcaaggacttagatttcatggagttcttcctttttgccttttccgacccagcaaggcacatcgacaacggggagttgctccatgtctttgctggcctctcaccatcagtttccaattaaaattatgctcatatagacaagtaaaagtttggttttggttttaaattaatattacaaataataaattgagtcctatactcgagatctacgttttcgaactgtattaacatgttatatt

SEQ ID NO: 235084 - DNA, 342 bp, Gossypium hirsutum
cttcgctatacattcctgtttatgatttgtttccaatttgatatccatggcttccgaaacttgttccccttttaacaagttgagatttctcctaggaatggttttatttcttcttatgaatatggccactgtccagttgtcctctaccttttattcaacaacatgccctaaagcacttttcaccattaaatcagcagtcaactttgctgtgttcaatgaagctagcatgggggcttttttgcttcgacttcattctcacgattgctatgtcaatggatgctatggatccatactgtttgatgatacagcaaattttacaggagaaataacagctgtttcaat

SEQ ID NO: 235085 - DNA, 414 bp, Gossypium hirsutum
cgcgtccgtccttacacagccccgccgtcaaacaagcctctcagcagccctttcttcctgttcttctcctccccttctccccttctccggtccctgagcaggccaggccagtaattcaaataagatcttgaggatgtatacatcaatgaagaagatccacaaggataaggatgttgaaccaactgaatttgaggagtcggttgcccaggcattcttcgatttggagaataccaaccaggacctgaaaagtgacctcaaagatctctacattaattcagcagtccaaattgatgtttccgggagccggaaagctgttgttatccatgttccctacagattaaggaaagcttttcgcaaggttcatgttaagcttgtgagggaacttgaaaagaagttcagtggcaaggatgtgat

SEQ ID NO: 235086 - DNA, 397 bp, Gossypium hirsutum
gccagaggggaggagccagataagaaaaactaaaggaaaattgttttctggttcaaaaccacagccctaatccacatgcggttcggatccggattctctaagatccggttgacattcatcgctttaattttcattctgatctgatcccaaacgaatctattcggccgtgaaaaatgacgcgtcgctgctcacattgcagccacaacggccacaactctcggacatgtccgaaccgaggggtcaaactcttcggagtccgcttgactgacgggtcgattcggaagagcgccagtatgggcaacttaagccaatattccgggtcgaattctggcgcgcataacgggaacgggtcgggttcgcccggtgagggtccggatcacaccgatggttatgcttc

SEQ ID NO: 235087 - DNA, 408 bp, Gossypium hirsutum
aatcaatccaaccaaatcccaccatcaaaatccccgtaggggacccattcaacgatccgacggctagctttcactccgttaactttaactacaacaatgcagtcagtagtccttgccccgtcgattacctcgggtctctccaccgttacctaccgtcaaacgactacgagtccgattcgctgagtgatgattcggacttacctgttgatgcattctcatgcgaccatttccggatgtacgagttcaaggtgaggaggtgtgctcgtggaaggtcacatgactggactgagtgtccgtacgctcaccctggtgagaaggcccgaagaagggacccgagaaagttccattactctggaactgcttggcccgattttcgcaagggaagctgttagaaaagcgattcatgtg

SEQ ID NO: 235088 - DNA, 391 bp, Gossypium hirsutum
ctgtatcttagttcttgattaattagccaatcacagcagccatgtctctcctcaatgatctcatcaacctcaacctcggcgacgccactgaaaagatcatagccgaatacatatggatcggtggatctggaatggatctgagaagcaaagcaaggactttgcctggaccagtggcggacccttcaaaactcccgaagtggaactacgatggttccagtaccaatcaagcacctggagatgacagtgaggtcattctttatcctcaagctatattcaaggatccatttagaaaaggaaacaacatcttggtgatgtgcgatgcttacacaccagccggcgaacccattcctaccaacaagagatttaatgcggccaagatctttagccaccc

SEQ ID NO: 235089 - DNA, 362 bp, Gossypium hirsutum
atcagtatcacttgtaagctttacagggaaaaagggggaaaaaaagtgcggatcaagcatagatggaaaacatgggagttttaggcaaggtggtggattaccttctattgttatcattctttagcatcacattaacagctcagttggacatccccgagtccatcctcccccacgcctacaatcccttctatcaagtttataccacgttaacccaggattatttggtgcttgagcagcctggttttttcaaggcacttatgacgttggaacttgtttaccaactccctctcgctttgcttaacatctatggattgttatactccaagccctggttcaacaccacctgcctcctctttggtgcc

SEQ ID NO: 235090 - DNA, 407 bp, Gossypium hirsutum
tgcaagtgttagggtcagcaacgagctcggatcggaacatcccaagtcggcggcattcacggttgctgtcgtgactttggtctccctcataattgctgtagtggaagctgtcattgtatttgctctgcgagatgttataagctatgcatttacggaaggtgagacggtggcaaaagcagtctcggacctatgcccattcttggctgtcactcttatccttaatgggattcaacctgtcttgtctggggtggctgttggatgtggatggcaagcatttgtagcctatgtaaacgtgggatgctattacgtagttgggattcccttgggctgtgttctcggattcaagtacgacctcggtgcaaagggaatatggtccgggatgataggaggaacaatgatgcaaaccc

SEQ ID NO: 235091 - DNA, 409 bp, Gossypium hirsutum
gggagtgggagccgaatagtgtttccttgtagagccttctcactggcattcctagtcccttctttcacttcctcaactcaactcagcctcaaatctttcctcgcccacacctctcttccccccactgccttctcttttctccgaatggcttcctcatcatcttcttccctcaccaacggtaacgatatcaatccttccaatgacgctgctgccccttctcccccctccgcttcctctgccatcgattttctcactctctgtcatcgcctcaagacgacgaaacgagcggggtgggtgcggagagatgtacagaatccggaatcaatagctgatcatatgtatcgaatgggattaatggctttaattgcttctgatattcctggaattgatcaagacaagtgtgttaaaa

SEQ ID NO: 235092 - DNA, 388 bp, Gossypium hirsutum
cttcccctttccctccaactttaatctaccacaactgtaacgacgccatggttcacgtcagtttctaccgtaactatgggaagacctttaagaagccaagacgtccatatgagaaagaacgattagatgcagagttgaggcttgtaggagagtatgggctccgatgtaagagggagttgtggagggttcagtatgctttgagccgtatccgtaatgctgctagggaccttctcacccttgatgagaagaaccctcgtcgtatttttgaaggtgaagctcttcttcgtaggatgaacaggtatggacttttggatgagagccagaacaagcttgattatgtcttggctttgaccgtcgagaacttccttgaacgccgcttgcaaacact

SEQ ID NO: 235093 - DNA, 398 bp, Gossypium hirsutum
gcctcactcgccgtctcgcctctcgcttattggttcaagatctggttttgatctgatcagatcggataaaaatatcaaaacatgtttgggagagcaccgaataaaagcgataataccaaatactatgagattttgggagtatcgaaaaacgcttctcaagatgatctaaagaaagcttatagaaaagccgctattaagaatcataccgataaaggcggcgatcctgaaaagtttaaagagttggctcaagcttatgaggtgctgagtgacccggagaagcgtgagatttatgatcagtatggtgaggactcccttaaagaatggatgggcagccgtcgcggtggccatgaccctttcgatatcttccagacattctttggtggcaatccttttggtgc

SEQ ID NO: 235094 - DNA, 357 bp, Gossypium hirsutum
ctctgctcgaaatcttcttcattctcattctctctccactgaactcttgctaaacggtatcgttttagtcagtctttcatcaatggcgaaagaaccagttcgcgtcctcgttactggagctgcaggacaaatcgggtatgctcttgtacccatgattgctaggggagtcatgttgggtgctgaccagcccgtgatccttcacatgcttgatatcccacctgctgcggaggctttgaatggtgtcaaaatggagttggtggatgctgcatttcctcttctaaagggtgttgttgctacaactgatgctgttgaggcatgcactggagtcaatgttgctgtcatggttggtggtttccc

SEQ ID NO: 235095 - DNA, 411 bp, Gossypium hirsutum
aatcgatccaaccagatcccaccatcaaaatccccgtaggggacccattcagcgatgcgacggctcgctttcactccgttaactttaactacaacaatgcaggcagtggtccttgccccgtcgattacgtggggtctctccaccgttacctaccggcaaacgactacgagtccgattcgctgagtgatgattcggacttacctgttgatgcattctcatgcgaccatttccggatgtaccagttcaaggagaggaggtgttctcgtggaaggtcacatgactggactgagggtccgcacgctcaccctggtgagaaggccctaagaagggacccgagaaagttccattactctggaactgctagcccctattatcgcaaggggagctgtaagaaaggcgattcatgtcaat

SEQ ID NO: 235096 - DNA, 355 bp, Gossypium hirsutum
gttttgaatctagggatttgcgggtggagaagacgagagctcatctctctgcttcaaagctcctgtccaggtagaattctcttcttcctttgcgttgtgttctttgttgttcagtcgccatggcttcaaagcggattttgaaggaactcaaggatttgcagaaagatccacccacttcttgcagtgctggtccagtagctgaagacatgtttcattggcaagcaacaatcatgggaccctcagatagcccttatgctggaggtgtgtttttagttaccatccatttccctccagattatcctttcaagccttctaaggtcacgtttaggaccaagggttttcatcctaacattaa

SEQ ID NO: 235097 - DNA, 412 bp, Gossypium hirsutum
caattttctcccttactaacaacaaaaaccctgaaatgtcggacgacgatcatcatgtcgaatccaaggctgatgccggcgcctccaaaacctatcctcagcaagccggtactatccgtaagaacggctatatcgtcattaaaggccgtccctgcaaggttgtggaagtttccacctccaagacggggaagcacggtcatgctaagtgtcacttcgttgggatcgatatcttcactggcaagaagttggaagatattgttccctcctcccataactgtgatgttccgcatgtcaatcgtactgactaccaattgattgacatttctgaggatggatttgtgagcttgctgactgatagtggggatactaaagacgatctcaggctcccaactgatgagaacttgttgaaaca

SEQ ID NO: 235098 - DNA, 396 bp, Gossypium hirsutum
ggagagggagctgctgcatttgttcgacgccgccaaaaaagctgccgatttggccgcctccgacgccgtttcctccaacgcccctgaagtttccagatgcgttgacgccttgaaccagcttaaggatttccccgtcacttatgacactcttgtttctacacaggttggaaaaaagctgcgacctctcactaagcatcctagagagaaaatcaagactgtggcttctgacttgcttgagttgtggaagaaaattgttattgaggagactaccaagagtaagaaaaatggcaccactagtgctgtcaaggttgagaaacttcctaagccaagtgctgtaaagtctgaaaaactctacaatacagaatctgtgaaggttgagagatctaaaggtgattc

SEQ ID NO: 235099 - DNA, 385 bp, Gossypium hirsutum
gttttgtatttcatactcatttagcccctttcattagcatcgaaatcactccagttttctttatcactgaaaaatgtcttgctgtggtggaaactgtggctgcggttctggctgcaagtgtggcagtggctgtggaggatgcaagatgtacccagacctgaacgttgccgagatgaccacaactgagactctggttcttggtgtagcaccccagaaagcacactttgagggagctgagatggaattcggggctgagaacggctgcaagtgtggagacaactgcacctgcaacccttgcaattgtaaatgattagagaccaaagccaaagctccctggaagcagagacgcctttgtctttaaaaaataatatgttttggtcgttat

SEQ ID NO: 235100 - DNA, 411 bp, Gossypium hirsutum
ctcatcctctaccaacgattaccaattgtttctgttacagatttctactttttcttctgataatgatatcaaggcaccaaagaaacaatatggattagaaggaggtggtaattcaaagatgaagggcaatggaagcattagtggcaaagacttgatctttagaggtgatcaaattgatttaaaaagcttagacatgcagctggagaagcacctgagccgagtttggtctaggaacattgagaaacaaaggccagctgaggaatggcagattgatttggctaagtcgcatttaaggaatgatatagctcatggcacctatgggactgtttatcgtgccacttatgataaccaaaatgttgcacgaacactgaccagatgaggaaatacaaaatgaagcagatgaaaggcttt

SEQ ID NO: 235101 - DNA, 389 bp, Gossypium hirsutum
ggttttcggcggctaacggtgcaaatttcaccttccggggtttttttgagctgtacccatgtcaaagctcttttcttttagtggaactgatgatttttgccctggggggtcgatctacacaaaccccaaggaatcaagtctctttttgtcccttggacgtcatgtggatgtatattttccctatcgcaagaggtcccgcatcagtgcgccttttgttttctctggagagaggtctgagaagaacaaatcatcaattgaggttctccctgatgaatgcttattcgaaattttgagacgattaccagggggacaagagaggagtttctgcgcttgtgtcttcaggcgttggcttacaattgtaagcaacatccgcagcaatgaaatcagtg

SEQ ID NO: 235102 - DNA, 235 bp, Gossypium hirsutum
acgggaattgttcgtcgccgccgagggtatgtacaccggacagttcgtgtattgtggtgaggaaagctacccttgtgggtggaaatgtgttgccccttagatctatccctgaaggagctgtcgtttgcaacgttgagcaccatgttggtgaccgtggggttttcgctagagcttctggggattatgctattgttattagtcacaaccctgataatgataccaccaggatcaagct

SEQ ID NO: 235103 - DNA, 402 bp, Gossypium hirsutum
cttttgggcaatcaattttgtaagcaagtatggctaaggacgttgaggttggtggtgagttccaagccaaggactaccatgatcctccaccagctccattagtggacggggaggagttgacaaagtggtcattttatagggctgtaatagccgagtttattgccacgctcttatttttatacatcactgtgttgacagtgatcggatacaagagtcaggttgaccctgataagggcagagacgaatgcggtggtgttggcattcttggcattgcttgggcttttggtgggatgatctttatccttgtttactgcactgctggtatctctggaggacacatcaacccagcagtgacctttgggcttttcttggctaggaaggtgtccttagttcgagccatat

SEQ ID NO: 235104 - DNA, 387 bp, Gossypium hirsutum
cttaagtcttcccataaaacagagcagagaaggtcaaacccaaagtttgaaaaccatcaaaaatggttcaaaggctcacttaccgtactcgccatagctacgctaccaaatccaaccaacaccgtgtcgttaagacccctggtgggaaattggtctatcagacaactaagaaaagagcaagtgggcctaagtgtcctgtcactggcaagagaattcagggtattcctcacttgagacctgctgaatacaaaaggtctagattgccaaggaaccgccggactgtgaatcgtgcttatggtggtgttttgtcctgcagtgctgttagagagaggataattcgagccttcttggtggaagagcagaaaattgtgaagaaggttctgaaga

SEQ ID NO: 235105 - DNA, 391 bp, Gossypium hirsutum
aaagagcaggaaaacaagaaaagcagagccgcatcactttttgctagctaagctactgtgggagttattgttcttcagaacagcttctgcagtagctaataatatcgttatatattatataaattttatacatcctttttaccctacaactccatataagcaagtaaaaataaatatggctcgctctgtttcttcctttaagctccttggtgcttctatttttgatggtctttatgtctccatatcaaggagaggttactcgggtgcaccgccggcggcagtgacggctagctttggtaggcctggggcgatggggaaagtggaacgaagagatgcgatgaaagagtcgtcgtcgtcggagacaagggcttattcttcagcttgggcgcct

SEQ ID NO: 235106 - DNA, 390 bp, Gossypium hirsutum
gggggtcacagtgattcagcaagagaaatgatggaaaaatcctatattggtgagattgatccaaaaactgtcccggcaaagcgcacttacattccaccccagcaaacgccttacaatcccgataagacccctgagtttgtcatcaagatcctacaatttcttgttcccctcttgatcctgggcttggctattgcggtacgtcactataccaagaaagagtagcttattactatacaggactttacctgttacgagggaagaatcagtgtgtctcatctgttagttgaaatagcacagtcatatcttttgtttaatttccttttagcatttgtgtgtcgaactaaatacctgttgatgatatgctccattgtcaaaagacaatatatttgt

SEQ ID NO: 235107 - DNA, 389 bp, Gossypium hirsutum
ctcagttatattcagataatattggtttcccattatgcagttcctacgattataatggtggcaatggtagtgatggtttcaattcatttcattttggtcctcaatggaaaccacagctacaatttcaagaacagcttcaaaatcatgagattgatgagttcatcaaatcacaggatgagagattgagattattattacaagaacaaagaaaccaacaagtttcaaccatggtgaaaaagcttgaatccaaggcatcttttttagaagaagagatcacaaaggccaaaaacagaacaatggagcttcaaattttaatgaataagctagaaatggagaaccaaacatggcaaagagtggcacaagagaatgaagccatggttgtctctttg

SEQ ID NO: 235108 - DNA, 388 bp, Gossypium hirsutum
gtactcactcaacattcccattttcaatctccagctcccaaggtaaatatgccgatcagaaacatagcagttggccggcccgaagaggcgactcaccccgatgctctcaaggcagctttggctgagttcatctcaaccttgatcttcgttttcgctggatcgggctcaggaatggcttttaacaagttgaccgacaacggagcaacaaccccggccggtctcgtagccgccgctctagctcatggcttcggtcttttcgtcgctgtctccgttggcgccaacatcttatgtggccacgtcaaccccgccgtcaccttctgtgctttcgttggcgggaacatcactctcttgcgcggcattctttactggatcgcccaactcctaggct

SEQ ID NO: 235109 - DNA, 387 bp, Gossypium hirsutum
tttcattttacaacccagtaaggggatatttttctcttctctttgaaaaatccgaaaagtaattttccaaagggaaacttttgctcgtaatattctcagatctgctctcaaatcgtcacattttgaatagccaatatgggaggcgggttcagagtacttcatttggttagaccatttctttcgtttctgcctgaagttcagagtgctgataggaaaatcccttttagagagaaggtcatctatactgtgatatccctctttattttcctggtttgcagtcagcttcccctttatggaatacattctacgacgggcgctgatccgttttattggatgcgtgttatccttgcatccaaccgtggaaccgttatggaacttgggattact

SEQ ID NO: 235110 - DNA, 383 bp, Gossypium hirsutum
atcaaccttgttgtcattggccatgtcgactctggcaagtcgaccactactggtcatttgatctacaagctaggtggtattgacaagcgtgtgattgagaggttcgagaaggaggctgctgaaatgaacaaaaggtcattcaagtatgcttgggtgcttgacaagcttaaggctgagcgtgaacgtggtatcaccattgatattgccctgtggaagtttgagaccaccaaatactattgcaccgttattgatgcacctggacaccgtgactttatcaagaacatgattaccggtacctcacaggctgactgtgctgttctcattattgactcaaccactggtggttttgaagctggtatctctaaagatggtcagactcgtga

SEQ ID NO: 235111 - DNA, 386 bp, Gossypium hirsutum
ctgacattggttgagtacatgatgctactttaccgtgctttactgccaactccagtttggtaccgtttcttcttaaacaaagactatggaagcctcttttcatcactaatgacagggttgtacttaaccttcaagctgacatctgttgttgagaaggtacaatccttctttgctgcattgaaggcattatctcgtaaagaggtacattatggtgcttatgcaacatcagagcaggtgaatgctgctggggacctgtgtgccatctgccaagagaagatgcatgctcctatactactgcgttgtaaacacatcttttgtgaagattgtgtgtctgagtggtttgagagggaaagaacatgtcctttgtgcagggcgttggttaaacc

SEQ ID NO: 235112 - DNA, 388 bp, Gossypium hirsutum
atggtgaattcttccttacctggtactctcagatgctgttagaacacggggcgagaattctatcgtccgcaacatcgatttttgacggtgcaggtgtgaagatctctgtgaaagttgcgggaatccactggcattatggaacccgatcccatgctcctgaactcacagctgggtactataacacaaggtaccgagatggttacctcccgatcgctcaaatgctagcacgtcatggtgccgttttcaacttcacttgcatagagatgcgggatcatgagcagccccaagatgccttgtgtgcaccggagaagctagtgaagcaagttgctttagcaacaggagcagcacaagttccacttgccggggagaatgcacttccccgttatga

SEQ ID NO: 235113 - DNA, 386 bp, Gossypium hirsutum
tcaagttatttcccattttttggtctttctttatgccaactgataatcaaatgaaagacatgaaaccgaattccataatgggatcgtcagtcaccgacggcgagatcgtgtgcgtaacaggcggctctgggttcattggttcatggctcatcaagctgctcttggaacgcggttatgtcgtccgagccactgtgcgcgaccctggcaactcgaagaaggtgaagcatttactagagctacctaaagcagagacgcacttgactctttggaaagcagatttagctgaagagggaagctttgatgatgcaattcaagcttgtacgggtgtgttccatgtggccacgcctatggacttcgagtccgaggaccctgagaatgaagtcata

SEQ ID NO: 235114 - DNA, 386 bp, Gossypium hirsutum
aatcaatccaaccaaatcccaccatcaaaatccccgtaggggacccattcaacgatccgacggctagctttcactccgttaactttaactacaacaatgcagtcagtagtccttgccccgtcgattacctcgggtctctccaccgttacctaccgtcaaacgactacgagtccgattcgctgagtgatgattcggacttacctgttgatgcattctcatgcgaccatttccggatgtacgagttcaaggtgaggaggtgtgctcgtggaaggtcacatgactggactgagtgtccgtacgctcaccctggtgagaaggcccgaagaagggacccgagaaagttccattactctggaactgcttgccccgattttcgcaagggaagc

SEQ ID NO: 235115 - DNA, 388 bp, Gossypium hirsutum
  unsure (1)..(388): unsure at all n locations
tcgcactgtccattttttccaattattgttccttttttttattgtttttaattaagatggctgcaggcaaagtggtatggccagcgatttcttgctcttcttccggtctcgacggtggccagtcagtacctcttcccaaggccggcttcgtgaagttaccgttaccggcgccgttgacttctttggggttgagtagtggcaacaatgcgaggttgagctcggtgcaggcgactgaggaatccaccgtagtgattacggatgatcgcgttgctgttatttcaggtgaaaatctccgccagatggctacgaacattgtatggcacaaaagttcagttggtaaacttcatcgacaggagtngcttcagcaaaagggtngtgtcatatgggt

SEQ ID NO: 235116 - DNA, 391 bp, Gossypium hirsutum
tcttatttgaactcaaagtcccagctaatattagaatcatgggtgttgtcacttatgactatgagaatacctccccagtcgcccctgccaggcttttcaaggcctttactgttgaagctccgaaagtttggcccacggctgcacctaatgcagtaaagagccttgaggttgaagctaatcctagctctggaagtatcgtaaaaatcaactttgttgaaggccttccattccaatatatgaagcaccagatcggaggacatgatgaaagtaatttttcatacagttacgatttaatcgaaggtgggcctttgggggataagcttgaaaaaattagctatgagaacaggtttgaggcagctgcaggtggagggagtatttgcaagagctcaat

SEQ ID NO: 235117 - DNA, 385 bp, Gossypium hirsutum
ggcgacttaagccatgtcggaaaaacgggtcgtcctgctctgcggcgactatgccgaggactatgaggttatggtccctttccaggctctgttggcttatggtatatcagtggacgctgtttgtcccggcaagaaggccggcgaaacttgccgcaccgctattcatcaactttccggccatcagacctataccgagatccgtggtcacaatttcacactaaatgcatcatttgaagatatagaccatactaaatatgatggtttagttatagccggaggacgagctcctgaatatcttgctatggatgcatttgtattgaacatggttcgcaattttgttaattctggaaagcctgttgcttcaatttgtcatggtcaattgata

SEQ ID NO: 235118 - DNA, 388 bp, Gossypium hirsutum
ttccggttcgcctgtcattcaacgagagaaaaacaaaaaaacactcccgaaatggcacgcaagaagatcagagagtacgattccaagagattgttgaaagaacatttcaagaggctttccggtagagatttgccaatcaaatctgcacaaattacggaatcaactgatttcaatcagctagtagagaaggagccatggctttcgtcacagaaactggttgttaaacctgatatgttgttcggtaagcgtgggaagagtggtttggttggcttaaatctggattttgctcaagttattgctttcgtgaaagagcgccttggcaaagaggtggaaatgagtggatgcaagggacctgttacaactttcattgttgaacctttcatccctc

SEQ ID NO: 235119 - DNA, 385 bp, Gossypium hirsutum
attggtttcagttcagctgctccgtattatatagtcaactactatggcaaccagaatggctgttagatacgtttctcgtaggttctcgagtgggagtgggaagatactcagtgaggaagaaaaggctgctgaaaatatttacatccagaaaactgagcgagagaaattggagaaacttgcacgcaagggacccaagccagaggagaaaccggatgctggttcagggggtgctgcgaccgatggtagcactacctctacatcgggaacatctgctgagaaagtatcaaccgataagtaccgaaactacggggttctcgctggtgttgcaaccctcggtgctgctgtgggatggtatctcaactctaaagacatgaagcaagaggcc

SEQ ID NO: 235120 - DNA, 368 bp, Gossypium hirsutum
cttgaattctctcaagaaagccctaaatacctcggatcaggtctcagcttgtggttgttaagcctatttgatcaactaagtttcatgtctgatctcgacgtccagattcctactgcctttgatccctttgctgatgcaaatgctgaggactcaggtgctggtgcaaaggagtatgtgcacattcgtattcagcaacgcaacggtaggaaaagcttgacgactgtccaagggttgaagaaagaattcagctacaacaagatactcaaagacctcaagaaggagttttgctgcaatggtactgtcgtccaggaccctgaattagggcaggttattcaactgcaaggtgaccagcgcaagaatgtgtcaac

SEQ ID NO: 235121 - DNA, 367 bp, Gossypium hirsutum
aggaaaacaagaaaagcagagccgcatcactttttgctagctaagctactgtgggagttattgttcttcagaacagcttctgcagtagctaataataacgttatatattatataaattttatacatcctttttaccctacgactccatatataagcaagtaaaaataaatatggctcgctctgtttcttcctttaagttccttggtgcttctgtttttgatgctctttatgtctccatatcaaggagaggttactcaggtgcaccgccggcggcagtgacggctagctttggtaggcctggagcgatggggaaagtggaacgaagatatgcgatgaaagagtcgtcgtcgtcggagacaagggctta

SEQ ID NO: 235122 - DNA, 387 bp, Gossypium hirsutum
aatcaatccaaccaaatcccaccatcaaaatccccgtaggggacccattcaacgatccgacggctagctttcactccgttaactttaactacaacaatgcagtcagtagtccttgccccgtcgattacctcgggtctctccaccgttacctaccgtcaaacgactacgagtccgattcgctgagtgatgattcggacttacctgttgatgcattctcatgcgaccatttccggatgtacgagttcaaggtgaggaggtgtgctcgtggaaggtcacatgactggactgagtgtccgtacgctcaccctggtgagaaggcccgaagaagggacccgagaaagttccattactctggaactgcttgccccgattttcgcaagggaagct

SEQ ID NO: 235123 - DNA, 387 bp, Gossypium hirsutum
cggatttggctgttgctgttccttaatctcaaatctcatctgcaccagccgacgacatggggaggagacctgcaaggtgttatcgccaaatcaagaataagccataccccaaatctcgatactgccgaggtgtcccagatcctaagatcagaatttatgacgttgggatgaagaaaaaaggtgttgatgagtttcctttctgtgtccatcttgtgagttgggagaaggagaacgtctcaagtgaggcattggaagctgcccgtattgcctgcaacatgtacatggccaagtttgcagggaaggatgctttccatttgagagtgcgggttcatcccttccatgttctgcgtatcaacaagatgctttcatgtgccggtgctgataggc

SEQ ID NO: 235124 - DNA, 390 bp, Gossypium hirsutum
tttccctccaaatagggaaataccatcgctttgcatttgcaaagcctttcactgactcaaaaataacaatgacgtcctcttcatcgtccaccgccggcggttacgacgtgccttgggtagaaaaatacaggccgagcaaagtctcggacatcgtcggcaacgaagatgccgtgtctcgactccaagtcattgctcgcgatggcaacatgcccaatctcatcttatccggtcctcctggaactggtaaaacaactagtattttggctcttgcacatgagcttttggggccagtctataaggaggctgttttggagcttaatgcatcagatgacaggggtatagatgtcgttcggaacaagattaagatgtttgctcaaaagaaagtaactt

SEQ ID NO: 235125 - DNA, 383 bp, Gossypium hirsutum
gaaagcttgaattctgaaatcgtttcaagccatgagcacgactcaacaaggaacccactcccttgccttcagggtgatgcggctttgcaagccttctttccacgtcgaacctcccttccgccttgaccccgccgatctcttcgtcggtgaagacatctttgacgacccactcgctgccgctaaccttcctccgctcttatcttcccaactcactaagtcaatggactcctccgatctgacttacggcaaccgattcctcctccaccatccatctgatgctatgggcttctctggcctcctcctcctccctcaatccttcggggcgatttatttgggagagacattctgcagctatattagcatcaataataactctaattttg

SEQ ID NO: 235126 - DNA, 382 bp, Gossypium hirsutum
ttcaaaaggagctacaagaatgtagcagagaaaaagactcttcgggcattagcgtctctccaaaatcagacaatcttgctcgcttgactggcatcatccctggtccccttggcactccctatgaagggggctcctttgaaatcgatatcacattgcctgatgggtatccatttgagcctcccaaaatgaagtttgtgacgaaagtttggcacccaaacatcagcagccaaagtggggcgatatgcctggatatattgaaggaccagtggagtcctgcactcactcttaagacagctcttctttctgttcaagctttgctttcagctcctgaacctgatgatcctcaagatgctgtagtagcacaacagtatcttagagagta

SEQ ID NO: 235127 - DNA, 393 bp, Gossypium hirsutum
ttttcttctcttgtgacactgctaatattttttttattgtcgtctccggcgttcgaagatcataaaaaaccggagtcgtttcaaatggctacgagaacggatctagatgggaggccaataaagccgatgacgatatgcatgatcggtgccggaggcttcatcggctcccacctttgcgagaaattgatgtcggagacgccgcacaaggtgctcgccttggacgtttacaatgacaagatcaagcacctcctcgagcctgactctctcccttgggctggccgtattcagttccaccgacttaacatcaagcacgattctaggctcgaaggcctcatcaagatggcagatctcgtgataaatcttgctgccatctgtactccggcagattataat

SEQ ID NO: 235128 - DNA, 392 bp, Gossypium hirsutum
ggaaaacaagaaaagcagagccgcatcactttttgctagctaagctactgtgggagttattgttcttcagaacagcttctgcagtagctaataataacgttatatattatataaattttatacatcctttttaccctacgactccatatataagcaagtaaaaataaatatggctcgctctgtttcttcctttaagttccttggtgcttctgtttttgatgctctttatgtctccatatcaaggagaggttactcaggtgcaccgccggcggcagtgacggctagctttggtaggcctggagcgatggggaaagtggaacgaagatatgcgatgaaagagtcgtcgtcgtcggagacaagggcttattcttcagcttgggcgcctgaccctg

SEQ ID NO: 235129 - DNA, 388 bp, Gossypium hirsutum
gaagaccattaaacttcaaatttgggacactgctggtcaagaaagatttaggacaattactagcagctactaccgtggggctcatggcataataattgtttatgatgtgacagaccaagaaagcttcaataacgttaggcaatggctgagtgaaattgatcgctatgctagtgataatgttaacaaaatactggttggaaacaagtgtgatcttacagcgaataaagttgtgtcatacgaaacaggcaaggcacttgcagatgaagttggcataccttttatggaaactagtgcaaaagattcaactaatgtggaacaggctttcatggccatggctgcttccatcaaggacagaatggcaagccaaccagccatgaacaatgcaaag

SEQ ID NO: 235130 - DNA, 386 bp, Gossypium hirsutum
cggacgcgtggggaagacagagaggtctcctcacaaccaccgtaatgggtcgtgtcattcgagctcaacgtaagggtgccggttcggtcttcaaggcccatacccaccaccggaagggtcccgcccgtttccgcagcctcgacttcggtgaacggaacggttaccttaaaggtgtcgtcaccgacgtcattcacgaccctggacgtggggctccgttagcccgcgtcgttttccgccaccctttccgttacaagaaacagaaggaattgttcgtcgccgccgagggtatgttcaccggacagttcgtgtattgcggtaagaaagctacccttgtggttggaaatgtgttgccccttagatctatccctgaaggagctgtcgtttgc

SEQ ID NO: 235131 - DNA, 378 bp, Gossypium hirsutum
gggaaaacaaagattaccttttttttttttttgggggtttgagaatggcgtttgctgttacttcatcgtcttcttcaactgcgatttctggttctagctttcctcgttcaagtgcctcccctgatcccaaagttccacaaattggttcagtccggtttgcagatcgtcatgcaacggtgaatctgtctcgaagacgttgcgcagtgaagcccgtaaatgcggagccaaagcgtaatgattccatcgttcctttagcagcaaccatcgctgctccagaaatatcggaaaaaatagaggcggaggatttcgagcaattggctaaagaacttgacaacgcttcttcacttgaaattatggataaggctttagagaaatttg

SEQ ID NO: 235132 - DNA, 386 bp, Gossypium hirsutum
cggacgcgtgggttgggttgagtgtagagatgaggaaaatcatgggtgccaaagttcttttcttctttgctttgctttccttttcagctgtctcggcatttgcacaggatgaggaagaccaaggtcttgttatgaacttctacaaggattcttgtcctcaggctgaagacattatcaaggagcaagttaagctactgtacaagcgacacaaaaacactgctttttcttggctgagaaacattttccatgactgtgctgtccagtcatgtgatgctccactgctgctggactccacaagaaggagcttgtctgagaaggagacagacaggagctttggcctaaggaatttcaggtacattgagaccatcaaagaagctgtagaaagg

SEQ ID NO: 235133 - DNA, 387 bp, Gossypium hirsutum
atatccgcctgtctcatcttccgttgtttatacgtttggttgttgttgaagaagtgctactaccatggctacaaagaagagcgttggggacttgaaggaagctgatttgaagggaaagaaagtgtttgttagagtcgatctgaacgttccattggatgataacttcaacataactgatgacacaaggatccgtgccgctgttcccaccatcaagtatttgatgggtcatggctctaaagtcatcctctctagtcatttgggacgcccaaagggtgtcactcccaagtacagtttgaagcctcttgtgccaaggttatctgaactccttggagtcgaggttaaaatggcaaatgactgtattggtgaagaagttgagaaaatggtggc

SEQ ID NO: 235134 - DNA, 392 bp, Gossypium hirsutum
aatcaatggaggggaaagaagaagatgttagattgggagccaacaagttcccagagaggcaacctattgggacagcagctcagtcccaagatgataaggattacactgagccaccaccagcacccttgtttgagcctagtgagttgacctcatggtctttttaccgagccggaatcgctgagttcgttgctactttccttttcttgtatatctcggtattgactgtgatgggagttgttaaggacaaaaccaagtgtacaactgttgggattcaagggattgcttgggcttttggtggtatgatctttgcacttgtttactgcactgctggtatctcaggtggtcatatcaatccagcggtgacatttgggctgttcttgggtaggaaattg

SEQ ID NO: 235135 - DNA, 380 bp, Gossypium hirsutum
gaaaatctggaatagtaagaaactagattacaagcttgagaaagagtttttagctgaagttgaaatactgggcagcattcgccattccaacatagtgaagttgttgtgttgcatttccagtgaagattcaaagcttctggtatacgagtacatggaaaatcagagccttgataaatggcttcatgggaataagagatcaccaatgtcaaggatgggttcagttttggattggccaacaaggttgcaaattgctgttggagctgctcaggggctatgctacatgcaccatgagtgtccaacaccaatcattcatcgtgatgtgaagtcgagcaatatcttattagactccgaattcaaggcaaaaattgcagattttggac

SEQ ID NO: 235136 - DNA, 385 bp, Gossypium hirsutum
atttatttgagtttgaatcccctctcgttaatcaaattagggtttcttgaagccaaatcgaccagacatgggaggaggcaatgcccaaaaatccaagatggctcgtgaaaagaatctcgagaaggctaaaaacgcagctaaaggcagccagctggaaacaaacaagaaagctatgacgattcagtgcaaggtatgtatgcaaacgtttatatgcacaacatcagaggtaaagtgcagggaacacgcagaagcaaagcatccgaaatccgatgtgtatgcttgcttccctcatctcaagaagtgatgtatttgaagcaagaaaatgccatatatatattatagaattgtttggaatatcttttcccttatcatgtaaaacctcagc

SEQ ID NO: 235137 - DNA, 383 bp, Gossypium hirsutum
cttaaaagaacgctgtaccatcaaaaccagctagctaaatcaaccgcattccaccaggatggctagaggattgaagaaacacttgaagaggctcaatgcccctaggcattggatgcttgacaagcttggtggtgcttttgcacccaaaccatcatctggaccccacaaatgcagggaatgcttgccattaattctcattctgcgaaacagatcgaagtatgctctcacgtacagagaagttattgctattctcatgcacaggcatgtcatggttgatgggaaggctcggaccgataagacttatcctgctggtttcatggatgttgtgtccattcctaaaacaaatgatgacttgcgtgtcctttatgacaccaaagggcgtt

SEQ ID NO: 235138 - DNA, 368 bp, Gossypium hirsutum
gaaaaaccctagaaccgggatcgagatggctgtgtagatgcatgtcggcggaataacgttggatctgaattggttcctgcaattcattttcacgctcttcattgtcgcattggcgtctcttcgcttgctgaagaacacggcgtcgaactacttggaggtctacgccaatttttgtcgggaccaaccaatgccttgcatgccgatggacgccgatcacttgccttgcgccgtatgctctaatcccgccttcaagaagtgctctcggtgcatatccggtcgttattgctcctcatcctgccaacaggtggactggaaggatgggcataagacaaagtgcataggcttatcaacacatactacaaccacca

SEQ ID NO: 235139 - DNA, 386 bp, Gossypium hirsutum
ctcttttactcattcattctttagtttcaatatcaaagcaaaaatggcttcttcttgtaatgttgtttcaatggctttactggcttgtttggtgttgaactccttggtttttgttgcccatggtggtgacttttaccaggatttcgacctaacatggggtgacaaaagaggcaagattttcaatggtggcaagctcttgtctttgtctttagacagggtttcagggtctggttttaaatccaagaaagagtatttgtttggaaggattgatatgcaactcaagcttgttgctggcaactcagctggcactgtcactgcttattatctgtcatctcaagggccaacccatgatgagatagactttgaattcttagggaatctgagtg

SEQ ID NO: 235140 - DNA, 388 bp, Gossypium hirsutum
agattatcaatttgaagccttcttcgaatttcctcattcaagatgcaaattttcgtcaagaccctcaccggaaagaccatcacattggaggtggagagttctgatactattgacaatgtaaaggccaagattcaggacaaggaaggcatccccccagaccagcaaaggttgatcttcgctggtaagcaacttgaggatggccgcacgttggctgattacaacatccagaaggagtccacactccacttagtgcttcgcctccgtggaggaatgcaaatttttgttaagactttgactgggaagaccattacattggaggtagagagttcagataccattgataatgttaaggcaaaaattcaggacaaggagggaattcccccagacc

SEQ ID NO: 235141 - DNA, 390 bp, Gossypium hirsutum
gaagtagtttgggttttcgttttttgagtcaaactatcagtttacttcctctatcatcgcaaattctgaaagaagagggatccgatctgatctgctgcaaatgggggagaaatgggtgttgatgaaaacggctcagacgcctaccaacattgcagtgattaagtattgggggaagagggatgagacccttattttgcccgtcaatgatagcatcagcgttactcttgatcctgctcatctctgcaccacaaccaccgtcgctgttagccctgctttccaacaagatcgtatgtggctcaatggcaaggaaatatccctttccggaggaaggtaccagaactgtttgagggaaatcagaaaacgggctagggaagttgaggataaagagag

SEQ ID NO: 235142 - DNA, 383 bp, Gossypium hirsutum
gttaaacccaatggcgatcccaactcagttagtcctctcctttctcctcctttctttttcccctgtcgttttttcagaccgtgaagattgcgtttactcggtctacataaggacgggatccatcatcaaaggcggaaccgactccatcatcggcctacggctctacgatgccaatggctactcagtggagatcagcaacatcgaagcatggggtgggttaatggggccaggatacaactatttcgagaggggtaatttggacattttctcaggtaggggacgttgcttggatgcccctctttgtgccatgaacttgacctccgatggttcgggtgagcaccatggatggtactgtaactatgtggaagttaccatgactggcg

SEQ ID NO: 235143 - DNA, 388 bp, Gossypium hirsutum
gtgtgttagaaagaaaaaaaaaaaacgaagggttcaaatctctttgtctgtggggtttccagaccagttcttgttggcgaatttgatcttaaaagtgcctcatttctgcttctaatggccgtaatgaagtccacatggagatccattatgccaaggtgttcaacgggtcttgaagaaccacccgcagacgccgaggccgaaccagcgacaaagtaacaagattcaaaacatggttctttttccaggcttgcaatgatagatttaagttacccaagttcgaggttcaccgaggatctttccacatggcttgccagttcaaatctatatgtttttacactggcggaattaaaggcgataacacagtgcttctcatcggctaattttctag

SEQ ID NO: 235144 - DNA, 388 bp, Gossypium hirsutum
aaagagttaaacccctaaaaacactttcttcttccatctctcttctcccttaaacaacaagcttaaccctagcaacaatggcatccatgctgcaaccccaaatcattcttttgaaagaagggacggacacatcacaggggaaggcgcagctcgtcagcaacataaacgcttgcaccgcagtggctgatgtggttagaacgaccctgggtcccaggggcatggacaagctcatccacgatgacaaaggaaatgtcaccatttccaacgatggcgccaccatcatgaagctcctcgatattgtccatcctgccgccaagatccttgttgatatcgccaagtctcaggactcagaggttggtgatggtactacaactgttgtactgctagc

SEQ ID NO: 235145 - DNA, 388 bp, Gossypium hirsutum
caaaaatcttgttcaaaaagaaaccctaaatcatgggtcagggaacaccgggtggtctgaaccgacaaggctttccaggggatcggaaacaggatggtgccgataagaaggagaagaaatttgagccggcggcaccaccggctagggtgggccgtaagcaacgaaaacaaaaaggaccggaagcggcggcccggcttcctactgtgacgccgcatactaagtgtaagctccggctgttgaagctggagcgggtcaaggactatttactaatggaagaagaattcgttgctaatcaggaacggctcaagccgcaggaagagaaagccgaggaagatcgatctaaagtcgatgatttgagagggtcgccaatgagtgtgggtaatttgga

SEQ ID NO: 235146 - DNA, 383 bp, Gossypium hirsutum
cttcaaagaacgctttaccatcaaaaccagctagctaaatcaaccgcatttcaccaggatggctagaggattgaagaaacacttgaagaggctcaatgcccctaggcattggatgcttgacaagcttggtggtgcttttgcacccaagccatcatctggaccccacaaatccagggaatgcttgccattaattctcattctgcgaaacagattgaagtatgctctcacgtacagagaagttattgctattctcatgcagaggcatgtcatggttgatgggaaggttcggaccgataagacttatcctgctggtttcatggatgttgtgtccattcctaaaacaaatgaggacttccgtctcctttatgacaccaaagggcgtt

SEQ ID NO: 235147 - DNA, 388 bp, Gossypium hirsutum
cttcacatctttttggcaatcaattttgtaagcaagtatggctaaggacgttgaggttggtggtgagttccaagccaaggactaccatgatcctccaccagctccattggtggacggggaggagttgacaaagtggtcattttatagggctgtaatagccgagtttattgccacgctcttatttttatacatcactgtgttgacagtgatcggatacaagagtcaggttgaccctgataagggcagtgacgaatgtggtggtgttggcattcttggcattgcttgggcttttggtgggatgatctttatccttgtttactgcactgctggtatctctggaggacacatcaacccagcagtgacctttgggcttttcttggctaggaag

SEQ ID NO: 235148 - DNA, 389 bp, Gossypium hirsutum
cttggagttcctgtacgaccagtcgccggaaagcatgcgaagcacggcggcagccctgtattggacagccatttccatggggaattacattgggacattgctggtttcgcttgttcataaatacacaggtgaaaacagtaactggttgccagataggaatctgaacaggggaaaacttgaatattattattggcttgttagtgggatccaagtcctgaatctcatttattacataatttgtgcttatctttatacttacaaaccattagaagaggttacagaggaagaagaagaagatggtgaattcaatggaaagaagatttcagaaaaaggagttgagcttactgtaaacgaaacagcttagttggctttgctattaagggaattat

SEQ ID NO: 235149 - DNA, 392 bp, Gossypium hirsutum
caactaatggcggttgtcacaacattcggtgcactgcagacatcaacggacaatgcccgaatgagttaagagctcctggtgggtgcaataacccatgcacggtgtttaagaccaatgaatattgttgcactcaagggtacgggacctgtggtccgacccgttattcaaggtttttcaaggaccggtgccgtgattcatacagttatcctcaagatgatccttcgagcacctttacttgccctgctggttccaattacagggtcgtgttttgcccccgaggctcacctcatatagagatggtcggaagtaagagccaagaaaaataaagggatcatctcttggtctagttaatctgcgccttggaactaaaaaataaaaaagtcatttggtct

SEQ ID NO: 235150 - DNA, 392 bp, Gossypium hirsutum
gtttctctccatctagccgtatcgcgtgcgccctgtggctctcttcaaccctcgcatatctcttcaagatctgatctgatctgacaaaaaaatgttcgggagagcaccaaagaaaagcgattatactaaatactatgagatattgggagtgcccaaaaccgcttcccaagatgatttgaagaaggcttatagaaaagctgcaattaagaatcatcctgataaaggcggtgatcctgaaaagtctaaagagttggctcaagcttatgaggtgctgagtgacccagagaagcgtgagatatatgatcagtatggcgaggacgcccttaaagaaagaatgggtggatgcggtggtgcccatgatccatatgatatcttccaatccttctttggtg

SEQ ID NO: 235151 - DNA, 390 bp, Gossypium hirsutum
caagccactaaggttttgagagaagatcaaaatggcttctaaaagatcagcttccatggtcctccttttggcactcaacattctctttttttccctagtcagtgcttgtggctcttgctcttcacccacccctaaaccaaggccaaacccaaaccccaacacccccactcctactccatctgcacgaggcaggtgccctagggatgccctcaaattaggtgtatgtgccaatgtgcttaacctagtcaatgtcaccgttggttcacccccagtgatgccatgctgttcccttctcaatggccttgtcgacctcgaagctgctgcatgcctttgcaccgctatcagagcaaacattttaggcatcaacctcaacatcccaatttcccttag

SEQ ID NO: 235152 - DNA, 380 bp, Gossypium hirsutum
cttcgaagtcgtagctttggaagcatggacttcatagctactatcctgtttctagctcttgtcatctcctccaccaaagctttggacccttgcggccctcagccagatgactcggaccttttggtcatcccaatctatggcaaatgttcaccattcaacccacccaaacctgactcatcgttcaacacagtcatgaacatggcatcaaaagacccagcaagggtcaagtacttgtcgagccttgtagcccaaaagaccactgcggttcccattgcttcaggccaacaagtcctaaacattggcaactatatcgtccgggtaaagattggcactccgggtcagctcatgttcatggtattggacactagcaatgatgtggc

SEQ ID NO: 235153 - DNA, 386 bp, Gossypium hirsutum
ccctatatcaattatccctaaccaaaaaatattcaaacgacgaccaccggccaccgacggcgaagaggaaagagccgtttaaataaaatatggacacaacggtccataccgaacctgtatctatcactcgcttacgcgccacttagaattgcaccgctttcattcaccatatgcctggccagctaatattgcgtgctttccaccgactttgctttactttatccaccgacaacgccggattcagttctcgcaggtcatgcacttttgttgtcgtcgcttgcgacactatgaccgccaattccgtctcgccaagaggtggagtatatacaggtggggatttcatgacgagaaaagaggatttgcatgttgtaaagccaacatcatct

SEQ ID NO: 235154 - DNA, 389 bp, Gossypium hirsutum
gtcaaccactaactcccagcgatctggagagaaagaagagatgaaagtgaagtcgtggttagttgcatcggcgccatttgcagccatggtggctgtggagtgcctggatgttggcttaaccaccctcagcaaagctgccatgtccaaaggaatgagccactttgtccttgtcgtctactcaaatgctctagcttccctcattcttcttccggcggcttttttcttcacaaggaaaaagcggccaccaattactttatcttttctgtgcaaaattttctgcttaagcattgctgggatcactttgatgcagaactgtgtaatcaccggtgtaagttacagctctccaacccttgcttctgctcttgccaacttaatcccagctttcactt

SEQ ID NO: 235155 - DNA, 383 bp, Gossypium hirsutum
aaagaccccatccactctatgcttaactcgtcaacggtggccaataacctcgtgtactagctatgtacgtagactccgactctatatatgtgtctttcacagagggtgagggagtgagaaaacaaggagcatgcatcaaatggagcaacaaccattcaactacgcctgacagggaccaggcaccgtgttattaggccactctacggtatgcaccgtaccctgtaccggcttagaggggcagtgtctagagaaactttcctatggaaacaacatgtggactgacaactgacaagggcataccccaaactatgtcgcagatcacgacaccacttattgcggaggagctatcgaatccaaaggcagacaggctcatatggcattac

SEQ ID NO: 235156 - DNA, 384 bp, Gossypium hirsutum
gaaggttgtagaagcagctgcgtgagcttcctaagctacctagggtttccttcattcgaaaatgatttacgacgtcaattctcctctcttccgctctttcctcagccagaagggaggctcctccgacaagagaaaaatggaggagcagaagcctaaggaacagagacccaaagcaaatgagaataagcctgtcatgacagagtaacagctgcttttgtttagtatgaatggcaagttggtggatggttgttcttagaactctgatatgttcgagattggaaatgcttggtgatgtattcaaatactatcacaacgatttttcttctttgagatggaatgatattcaactgtgtggatgatatttaactttttggtatgataggg

SEQ ID NO: 235157 - DNA, 382 bp, Gossypium hirsutum
gcagcagcagtcgcggcggcggcagttctacccagggtctgttttctaaacaaccatcaaacagaaatgaagttcaatattgcaaatccgactactggctgccagaagaagctggaaattgacgatgaccagaaactccgagccttctttgacaagaggatctcccaagaagtcagtggtgatgcccttggtgaggagtttaagggctatgtgttcaagataatgggaggctgtgacaagcaaggttttccaatgaagcaaggagttctgactccaggtcgtgttcgtcttttgcttcacagaggtactccctgcttccgtgggtatggtaggagaaatggagagcgaaggaggaagtcagttcgcggatgcattgttagtc

SEQ ID NO: 235158 - DNA, 387 bp, Gossypium hirsutum
ctcagaggttgatttctttttcacaagacacaatggcagatggtcatgaaactgacacgaacatcgagatttggaaaataaaaaagctaatcaaggcactagaatctgccaggggaaatgggaccagcatgatatccctcattatgcctcctcgtgatcaaatatcccgtgtcacaaagatgttaggtgacgaatttggaactgcatcgaacatcaaaagtagggtcaaccgtcagtctgtgttggctgccattacttctgctcaacagaggtggaagctctataacaaggttccccctaacgggctggtgctctacactgggacaattgttactgaagatggcaaggaaaagaaggtgacaattgactctgaacctttcaaaccta

SEQ ID NO: 235159 - DNA, 365 bp, Gossypium hirsutum
aaaaaagaaaaaatgatgcttggagaaactcatcgtccaaatccaaccgtccacgtaccaccttggcctgatcttgacgatgatcagacggatgtagtttactctcctatccattacaatgcaaccgacaacaacttgagcagtaacggcaacccgttttacctccatgaagcgttatcagctttacaacgttatttgccatcgaacggcccggatgttgagttggattccgagtttccgggtttggatagtccggattcaccggtcgatgcttattcctgtgaccatttcaggatgtacgagttcaaaatccggaggtgtgctcgtgggcggtctcatgactggaccgagtgtccgtacgccca

SEQ ID NO: 235160 - DNA, 383 bp, Gossypium hirsutum
caacattcccatttccaatctccagctcccaaggtaaatatgccgatcagaaacatagcagttggccggcccgaagaggcgactcaccccgatgccctcaaggcagctttggctgagttcatctcaaccttgatcttcgttttcgctggatcgggctcaggaatggcttttaacaagttgaccgacaacggagcaacaaccccggccggtctcgtagccgccgctctagctcatggcttcggtcttttcgtcgctgtctccgttggcgccaacatttcacgtggccacgtcaaccccgccgtcaccttccgtgctttcgttggcgggaacatcactctcttgcgcggcattctttactggatcgcccaactcctaagctcaac

SEQ ID NO: 235161 - DNA, 373 bp, Gossypium hirsutum
gcttcctaaaatctacatttcttatctttctttttgctatggcaggtactggagtgggcgatgcattatggggaacacgcactagctgaaacccacaaatgccctttttccgacaagggtggcctatcccaacagctccccggtgggatgatgatgggtgttacactgcgtgaacaagatcacattggtgaaaaacctggagcctgacccgagatggcttttcaacgcgtgcaagccgacataccatcgctacgttgcgattcgcggaagaatgacccacaactgatcagagagatcttgcaggctgacaccattgcactcatggccaaggctcgtattaaccattgcgctgaggcccacatgcttgaagcca

SEQ ID NO: 235162 - DNA, 351 bp, Gossypium hirsutum
gtttcattctgactgtttaggcaaaggatacaatatggcataatggactgatactggcttggctacattgctttcaatgattgctactgatgaaactagaattcctgttgttgattctgacggtgcttgtcaaagtgcccatgccactttctatggcggcagcgatgcttttggcacaatggatgtagcttgtggatatagaaacttatacagccaacgctatagtctcaacacagctgctttgagtactgctcttttcaacaatgggttcagctcggggccctgttttgaaatcaaatgtgtaaaccaaccacaatgctgtcattctgctagtgcttcattttcattaca

SEQ ID NO: 235163 - DNA, 385 bp, Gossypium hirsutum
caacaatgtctcttcactcttctctcaccatgtcattgctgtctttctccttcttgttgctgtttacttttagtgccaaagctgttgttcctccatctgaaacttttaggtttgtcaacgacggagaatttgggccgtttgttgttgaatatgatgcaaattaccgtgtcataagcatagctaatgcccccttccagcttgcgttttataacaccacccctaatgccttcacccttgcgttacgcatggctacaacgcgttccgagtcgctcttccgatgggtttgggaggccaacagggggaaccctgttcgcgagaacgccacgttctctctcgggactgacgggaaccttgtcttggctgatgccgatggtcggattgcttg

SEQ ID NO: 235164 - DNA, 390 bp, Gossypium hirsutum
cttgcatgtaagcatactgcatccgatcatccgcctcggaggtttttaattccatgggtatttgggggattttttacgagcattgtctggttttatatgattgcgaatgagcttgttgctctgttggtagcatttggtgtgatatttggaattaatccttccattcttggagtaactattctggcttggggcaattcaatgggtgatttggtgtcaaatgttgcactggcaatgaatggtggtgatagtgtgcagattgcaatgtctggctgctatgcgggtcctatgttcaacacacttgttggtctgggcatatcattgctgcttggagcttcatcaaagagtccttcctcatacttagttcctcaagatagcagcttgttttacacc

SEQ ID NO: 235165 - DNA, 388 bp, Gossypium hirsutum
aaaatataagaaaaaaaatcatacgcaatgagcactgctggtcaggttattcgttgcaaagctgcggtggcatgggaggcggggaagccactatcgatagaagaagtggaagtggcaccaccccaaaagcatgaagtccgtattaagattctcttcactgctttatgtcacactgatgtatactactgggagtgtaagggttacactcctctgtttcctcgtatacttggtcatgaagcctcagggatcgtggagagtgtgggtgagggtgtgaatgatttgaaacctggagatcatgtgctccctatcttcaccggagaatgcaaagaatgtcgccactgtctgtcagaagaaagcaataacatgtgcgaactgcttaggatcaact

SEQ ID NO: 235166 - DNA, 382 bp, Gossypium hirsutum
gttggctcgtaagctttcttcgcgctctccaagcaagtttgagaaattttattttttagcaatcaacagtgatggcttcatctctagctctcaagaggctcctctcatgcaacatcctccctagctccttgcgggtggtccgcccaatggccatcgctccatcctcctccaggctctttaacaccaatgccatgcgtgagttcgacgacgatggtgatgggcgtgacctcagtgatgaacgccagcgttcactttctcgccgcggtgacggtttcttcacagaggtgttcgatccttttgctccaacatggagcctgagccaagtcctgaacatgatggatcagttcatggagagcccatttctctccgcttcccgtggcat

SEQ ID NO: 235167 - DNA, 389 bp, Gossypium hirsutum
cttggccgttctatatcttccacaacacagaggcagctaagtgagttggtgcgaagatgagtcgtggggcagcagcgggaccccaggggaagaagaaaggggcctcctttaccatcgactgttctaagccggttgaagataagatcatggacatagcctctctagaaaagttcctccaggaaaggatcaaggtcggtggcaaagccggtgctctcggcgattccgtcactgtcacccgcgacaagagcaaaatcactgtctcctccgactccaacttctctaagcggtatcttaagtacttgactaagaagtacttgaagaagcacaatgttcgggattggcttcgagtgatttcttccaacaaggatcggaccgtttacgagctccga

SEQ ID NO: 235168 - DNA, 383 bp, Gossypium hirsutum
cttcactccacatcttatattccttcatttctgtctaaatccttccattttttgatattttttttgtaagtaaaggaacagtgaaaagcaacaggaaatggcaaatatagatatcgatgggatcttgaaggagcttcccaatgatgggcgtatacctaaaaccaagatcgtttgtactttgggtccggcttcacggtccgtacctatgatagagaagctgttgagggccgggatgaacgttgatcgcttcaatttctctcatggcagtcatgagtattatcaagagaccttggataatctgaggtctgctatgcacaacaccgacatcctttgcgctgtcatgcttgacaccatgggccctgagattcgaactggattcctga

SEQ ID NO: 235169 - DNA, 336 bp, Gossypium hirsutum
cggacgcgtgggtctctctattctctttggcttatctatcgctttgatttcgcatccttgctgtgcactcgatggcaaatcgatggttgaggcctgaggtgtatccgctgtttgcggccgtaggtgttgctgtcggaatctgcgggtttcagttggtgcgcaatatctgcatcaaccctgaagtcagggtaaccaaggagaacagggctgctggggttttggacaactttgctgagggagaaaaatattctgaacatttcttgagaaaatatgtccgcaacaagacgccagaaatcatgcccagtatcaacagcttcttcactgacccaaagtgag

SEQ ID NO: 235170 - DNA, 384 bp, Gossypium hirsutum
tacttaaccatttcccaaatctcctccctcctcttctttagcgtccttttcatttccgctcatgcagcgcgctttgaaatccgcaatgagtgctcctacaccgtctgggcagcagcctctcctggtggtggccgtcgcctagaccctcggcaaagttggaccatcgatgtgcctgctggcactgctatggctcgtatttggggtcgaaccaattgcaatttcgatgccagtggtaggggtcattgccaaaccggtgattgcggtggactccttcaatgcaaaggttggggtgtacctccaaacaccctggctgaatatgcacttaaccaatttggaaacatggatttctacgacatttccttagttgatgggtttaacatcccc

SEQ ID NO: 235171 - DNA, 386 bp, Gossypium hirsutum
cgggagggagacgagaaaaggaagacaacgatggtgtctctgaagttacagaagcggctcgccgctagcgtcctgaagtgtggccgtggcaaggtttggcttgatcctaatgaaatcaatgaaatctccatggccaactccaggcagaatgttaggaaacttgttaaggatggttttatcatccggaagcctaccaagattcactcccgatctcgtgcacgcagaatgaaagaggccaagagaaagggtcgtcattctggctatggtaagaggaagggtaccagggaggcaagattgcctacaaagatcctttggatgaggagaatgcgagtactaaggcgtttgcttcgtaagtacagggaatccaagaagattgacaagcacat

SEQ ID NO: 235172 - DNA, 391 bp, Gossypium hirsutum
tcacaggccatgggtatcgacttggtcgccggcggcaagagcaagaagacgaagagaactgctcccaagtccgatgatatctacctcaaactcatcgtcaagctttaccgatttctggtaaggactggcagcaaattcaatgctgtgattttgaagcgtctttttatgtgcaaagtgaacaagcctcctctgcctctatccagattgattgaattcatgaagggcaaggaggataagattgcagtggtagttggaactgtcaccgatgacattcgtatatatgaagttcccgctctgaaggttactgcactaaggttcactaagacagcgagggcgagaattgacaaggctggtggggaatgtttaacatttgaccaacttgctcttcgag

SEQ ID NO: 235173 - DNA, 391 bp, Gossypium hirsutum
cacctccactgcagcaggagcagagggaaaaaggataaaagcatcgtcgcgttctcgcttcttcaactctgtctctacgtctctgaacctcctcctttcgttcttttcttattcagtattgtaaaagatggccgatgctgaggatattcaacccctcgtctgtgacaatggaactggaatggtgaaggctggttttgctggtgatgatgctcccagggctgtttttcccagtattgttggtcgaccccgacacactggtgtcatggttgggatgggtcagaaggatgcctatgtaggagatgaagcacaatccaaaagaggtattcttactttgaaatatcccattgagcatgggatcgtcagcaactgggatgatatggaaaagatctgg

SEQ ID NO: 235174 - DNA, 388 bp, Gossypium hirsutum
cgggcaagagtatgcccaagtgcttcgtatgctaggcaatggccggtgtgaagccatgtgcatagatggtactaagcgcctttgccatatccgaggaaagatgcacaagaaggtttggattgcagctggtgatataattcttgttgggcttcgcgactatcaggatgataaggctgatgtgatccttaagtacatgcccgatgaagcaaggctcttaaaggcatacggtgagcttccagagaacactcgtcttaatgaaggtattgtcgatgaggaagatgaaggaggtgcagatgattacattgagttcgaagacgaagatatcgataaaatatagggttttggaattggttttgtttgaatgatttgcttaaatgttggaagagag

SEQ ID NO: 235175 - DNA, 380 bp, Gossypium hirsutum
gaaaaacttaatcatggctcggttgacgttggtgacctacatcatccttctgctatgctccggcgccgccggatcaactttcgaggactccaaccccatccagatggtatccgatggcctcagcggcttcgaatcctccgttcttcgcgtcatcggacacactcgccatgctctctgcttcgcccgttgtgcatacaagcatgggaagaggtatgaaaacgtggaggagatgaagctacggttttagattttcaaaggcaacttggatttaatcagatccactaacaagaagggactgccttacactcttgctgtcaatcagtttgctgattggagctgggaagagttccataaacacagattgggggctgctcaaaact

SEQ ID NO: 235176 - DNA, 378 bp, Gossypium hirsutum
cttcactccacatctcatattccttcatttctttctaaatacttccatttgtttgattttttttaagtgaaggaacagtgaaaagcaacaggaaatggcaaatatagatatcgatgggatcttgaaggagcttcccaatgatgggcgtatccctaaaaccaagatcgtttgtactttgggtccggcttcacggtccgtacctatgatagagaagctgttgagggctgggatgaacgttgctcgcttcaatttctctcatggcagtcatgagtatcatcaagagaccttggataatcttaggtctgctatgcacaacaccggcatactttgcgcggtcatgcttgacaccaagggccctgagattcgaactggattcct

SEQ ID NO: 235177 - DNA, 219 bp, Gossypium hirsutum
agtaaacttcctcctcgccaagcaagacttgttgtttacaataaaaggtccaatgagaccagtatattggtaggtgaattattaaaaagttattgctgcaactggggggggccacaacaggggcaaagtattttggtttaaagtggttccggttgtgcaacctccaatggatgctttggaatttgctgaatgggaggctgtggttaaaaactttcttct

SEQ ID NO: 235178 - DNA, 389 bp, Gossypium hirsutum
attttctcctttttatctttaaaacacgcacccaaaaaataaaaccctttgaaaaccaaagaaggaagaagaagatgtcgtggcaagcttatgtagatgatcacttgatgtgtgaaatcgaaggaaaccatctctctgccgccgctatcatcggccaggacggcagcgtttgggcccaaagcgccagtttccctcagctcaagcctgaagaaattagtgccatcatgaatgactttaatgaaccgggttcactcgctccgaccgggttgcacctcggtggcacaaaatacatggtgatccaaggcgaaccgggagctgttatccgagggaagaagggacccggaggtgttactgttaagaagaccaatatggccttgattatcggaatc

SEQ ID NO: 235179 - DNA, 388 bp, Gossypium hirsutum
gatacactatgtagtacacctgagaggcacgcaattatttctcctcttctctcccgctctatctctgcaactctcgtcaggagctttaacaatggcggactctttgtagccaaagacttccagtttccctctcttccgctcttgcttttcttttctcattagttgccaaaatgcgttccaaggacaaaatatcctacttttacgacggagatgtagggagcgtatactttggacctaatcatccaatgaaacctcaccggctttgtatgactcaccatttggtccttgcctatgacctccataaaaagatggaaatttatcgtccccacaaggcttaccccgttgaactcgctcagttccattcagctgattatgtcgagtttttgca

SEQ ID NO: 235180 - DNA, 385 bp, Gossypium hirsutum
ctcatcacattttattgtgcttctctctcagatcttgaaaatgtatacatcaatgaagaagatccacaaagataaggatgttgaaccaacagaatttgaggaatcagttgcccaggcattctttgatttggagaataccaaccaggatctgaaaagtgacctcaaggatctctacattaattcagcagtccaaattgatgtgtctgggagccggaaagctgttgttatccatgtcccctaccgattgaggaaagcttttcgcaaggttcatgttaagcttgtgagggagcttgaaaagaagttcagtggaaaggatgtgattcttattgccacccggaggatattgaggcccccaaagaaaggttctgccgttcagaggcctcgc

SEQ ID NO: 235181 - DNA, 354 bp, Gossypium hirsutum
taaaaaatgagctttcttcaggccttgtcaattttccttttgcttttgttgtatgtagtcgtaggatcagctgagcagtgtggaaggcaagcaggcggtgctctttgccccggtggtctatgttgtagccaatttggctggtgtggcagtactgctgactactgcacagttcctggttgccaaagtcagtgcagcggtagtggccctgcccctgggcctggtgggctaaccaatcttatatcaagagagacctttaatcagatgcttttgcataggaacgatggggcttgtcctgcccgtggcttctatacatatgatgctttcattgctgctgcccgttctttttctgcattt

SEQ ID NO: 235182 - DNA, 385 bp, Gossypium hirsutum
gagcttttcttttaagctctgcttctctcaattgtttatatggcatctcaagccagtctcctccttcaaaagcagctcaaagatctttgtaagaatccggttgatggtttctcagccggattggttgacgagaacaatatctttgaatggagtgttacgattattggaccacccgatactctttatgaagggggattttttaatgccatcatgagctttccacctaattatccaaacagccctccagcggtgaaatttacgtcagaggtttggcatcctaatgtttacgcggatgggcgtgtttgcatatcaattcttcatcctccgggtgatgatccaaatggttacgagcttgcaagtgagcgctggatgccagtacatacag

SEQ ID NO: 235183 - DNA, 377 bp, Gossypium hirsutum
cgggcaagagtatgcccaagtgcttcgtatgctaggcaatggccggtgtgaagccatgtgcatagatggtactaagcgcctttgccatatccgaggaaagatgcacaagaaggtttggattgcagctggtgatataattcttgttgggcttcgcgactatcaggatgataaggctgatgtgatccttaagtacatgcccgatgaagcatggctcttaaaggcatacggtgagcttacagagaacactcgtcttaatgaaggtattgtcgatgaggaagatgaaggaggtgcagatgattacattgagttcgaagacgaagatatcgataaaatatagggttttggaattggttttgtttgaatgatctgcttaaatg

SEQ ID NO: 235184 - DNA, 389 bp, Gossypium hirsutum
aaaatatctgctcctcttagtttccctttttgtcccttgtttatttgatactcccccctcatggctgccgctgatgtcgagttccggtgcttcgtcggagggctcgcatgggccaccgacgaccgggcccttgaagaagccttcagtgcgtttggtgaaatcgtcgaatcgaagatcattaatgatcgtgagactggaagatcccgaggctttggattcgttactttccgtgacgagaaagctatgagggacgcgatcgaaggaatgaacggtcaaaatcttgatggaaggaacataactgtcaacgaagcccaatcgcgcagaagtggaggcggtggcggaggatttggaggaggaaacggtggttacagccgcggtggaggcggcgg

SEQ ID NO: 235185 - DNA, 387 bp, Gossypium hirsutum
tttcctttttgctcagatctcctcatctctcccactttttttctttcttctaatacccaatggccgtcactttctcaaatctccacaccgagtctggtcttaaagctcttaatgacttcctctctggaaaatcttacatctctgggaataagctgaccaaggatgacataaaagtttatgctgctgttctgaagaaccctggtgattctttccccaatgttagccagtggtataattctgtttcttctcaacttgcggccagcttccctggcaaagctgttggcgttgggtttggtggcaaagctgctccagctgagtctgctaaagctgaggctgcagatgatgacgacgacttggatctattcggtgatgagacagaggaggata

SEQ ID NO: 235186 - DNA, 383 bp, Gossypium hirsutum
aaaaaagagaaaatgatgcgcggagaaactcattgtccaaatccaaccgttcacgtaccaccttggcctgatcttgacgatgatcagacggatgtagtttactgtactatacattacaaggcaaccgacaacaactcgagcagttacggcaacccgttttaccttcatgaagcgttatcagctttacaacgttatttgccatcgaacggtccggatgatgagttggattccgagttttcgggtttggatagtccggattcaccggacgatgcttattgctgtgaccattgaaagatgtgcgaggtcaaaatccggaggtgtgctcgcgggcggtctgatgactggaccgagtggccgtacgcccatcccggagaaaaagctcg

SEQ ID NO: 235187 - DNA, 378 bp, Gossypium hirsutum
caaaaccttaattcgatgccactcaccccgaacaacctatctccaccaacatggggaaaacacgtggtatgggagcggggcgcaagctgaggacccaccgaatgaggcagaggtgggctgataaggcatacaagaagtctaaccttggaaatgaatggaagaagccatttgccggttcttcccatgctaaaggaattgtccttgagaagataggtatggaggctaagcatccgaactctgccatccgaaagggtgctagagttcaattgatcataaacggcatgaagattgctgcttttgctacaaatgatggttgcttaaactacattgaacagaatgatgaggggtcgatggctggattcggactgacgggtcatg

SEQ ID NO: 235188 - DNA, 385 bp, Gossypium hirsutum
caacattcccatttccaatctccagctcccaaggtaaatatgccgatcagaaacatagcagttggccggcccgaagaggcgactcaccccgatgccctcaaggcagctttggctgagttcatctcaaccttgatcttcgttttcgctggatcgggctcaggaatggcttttaacaagttgaccgacaacggagcaacaaccccggccggtctcgtagccgccgctctagctcatggcttcggtcttttcgtcgctgtctccgttggcgccaacatctcaggtggccacgtcaaccccgccgtcaccttcggtgctttcgttggcgggaacatcactctcttgcgcggcattctttactggatcgcccaactcctaggctcaaccg

SEQ ID NO: 235189 - DNA, 387 bp, Gossypium hirsutum
ctgcaaggaaaaaaaaaaaaaaccagacatggcttccaacactgttgcatccgctgctcttcttcttaccttgaacttgttgttcttcactttggttagctctacctacgtgccttgcccaccaccaccaaagagccacaagcctacccacaagagcccaccctcggcacctaaacagccagccacttgccccaaagatacactgaaactaggtgtttgtgctgatttgttgggctcggtgcgcgttgttgttggaccgtcgaggaccaaatgctgctcactcatttcgggtttggctgatctcgatgctgctgtttgcctttgcactgctattaaagctaatgtgttgggggttaacctaaacgttcctgtttcattgtctttgct

SEQ ID NO: 235190 - DNA, 345 bp, Gossypium hirsutum
acaaaaaacatgttttggttcaatacaatcctcatttttctaatgaactcataacgcttgagttatagcaaaacgccggtgtgtaggataaaaacgctgtttacatggtacaccccatggaaagggtatcactggtgctgatgaatgcaccggctccataaggaagcgtatctaatgcattaatgtaccagacattgaataaaacaggcgggctctacacgtgctacgattgactgtttcaggagctctccaacacgttagcgaagctattatctgcgaggacaccgtggataaaaaaaccgtttcgaacaagcactttgcagatgttgtgaacgaaggtgccgt

SEQ ID NO: 235191 - DNA, 382 bp, Gossypium hirsutum
atcacacgcccctccgacacctccgctaaaaacagctacttctcaccagatctcttacatccaacggccttgatatctccacgtctccgtaccccaatccattatttgaatctagctctttatttcttctccacatcctccgtcctttcctccactctttttcttacacgaagagaaagaatcaaccggcgccgctgcgattgaccgcctctttcgccgccgccgtacgccgttaatcttgaaggaggagattttggtttgaaatcagacggtcgagatgccgagcacgattcaaaaagcgatcggggccgttaaggaccaaaccagcataggactagcgaaggtggctagcaacatggcgccggacctcgaggtggcgatt

SEQ ID NO: 235192 - DNA, 386 bp, Gossypium hirsutum
caaagatatcactgcaagaaaaaaaaaaaaccagacatggcttccaacactgttgcatccgctgctcttcttcttaccttgaacttgttgttcttcactttggttagctctacctacgtgccttgcccaccaccaccaaagagccacaagcctacccacaaaagcccaccctcggcacctgaacagccaggcacttgccccagagatgcactgaaactaggcgtttgtgctgatttgttgggctcagtgcgcgttgttgttggaccgtcgaggaccaaatgctgctctctcatttcgggtttggctgatctcgatgctgctgtttgcctttgcactgctattaaagctaatgtgttgggggttaacctaaacgttcctgtttcatt

SEQ ID NO: 235193 - DNA, 375 bp, Gossypium hirsutum
ataatttggtggagactgcatttttttggtatctgcagcgaaagaggcaaggggagatccgatactgaatcaacagcaacagcaatggctagacaagcttcacgacttattcaatctttgtcttccaggatttctcctcacaaacctcaactatccccgctcactccctcttcctcttcttctcagcttttgactcagtcacgctctttctcggcggctccggcgcctcaaccggcggttttcgtagacaagaacactcgtgtcatttgccaagggatcactggaaagaatggcactttccacactgaacaagccatagaatatggcactaagatggttggtggagtaacacccaagaagggtggcacacagcac

SEQ ID NO: 235194 - DNA, 379 bp, Gossypium hirsutum
cgtggagagccttttttgtgtagcgattctcagttagtcttttctttaagcttacagcttctctccagagttttataatgggtaaggagaaggttcacatcaaccttgttgtcattggccatgtcgactctggcaagtcgaccactaccggtcatttgatctacaagcttggtggtattgacaagcgtgtgattgagaggttcgagaaggaggctgctgaaatgaacaaaaggtcattcaagtatgcttgggtgcttgacaagcttaaggctgagcgtgaacgtggtatcaccattgatattgccctgtggaagtttgagaccaccaaatactattgcaccgttattgatgcacctggacaccgtgactttatcaagaa

SEQ ID NO: 235195 - DNA, 390 bp, Gossypium hirsutum
agtgaactgaaaaaagaaaacccggaattttaaagacaaaaaaatgccttcttctccgttgattcttctctcaaaaaccatgattttcccagaccaaaaatcaaaccttgaagacctcaagctttcagtttccgatcttcctatgctatcttgccattacattcaaaaaggttgcctctttactcgcccttcaatccccattaattcactgatttcccttctcaaacaatccttgtccaagacgctgtcgtttttccctcctctcgccggccgtttttacacagacccaaatggttacatttacattacttgtaacgacgccggcgttgaattccaccatgccaaatgtgacaccaagttcatccgtgacgtcatcggtccggttcatgt

SEQ ID NO: 235196 - DNA, 388 bp, Gossypium hirsutum
ctcaactccgtctcccttcttctcctaaaccttgcagagctgttattgccatgtccggctctgggaagttctttgttgggggtaactggaaatgtaatggaacaaaagactccatcacgaagcttgtttctgacctgaacagcgcaaagttggagagtgatgttgatgttgttgtggcacctccctttgtctatcttgatcaggtgacttcttcattaactgatcggattgaggtatctgctcagaactcttggattggaaaaggtggggctttcacgggagaaatcagtgtggagcaactgaaagatattggctgcaaatgggtcattcttgggcattctgaacgcagacatgttattggtgaagatgatcagtttataggaaagaa

SEQ ID NO: 235197 - DNA, 385 bp, Gossypium hirsutum
gattcttccgagattcatcagagtttgatttctgaggggcaaaggtttgatcaagaaatggaggttcatgatacgagggactcactggaggaagacaaccttaatcttttacaagccatggccagtgtgtacttatggattttgttctttgccatggcatgtggcatggggtcggggcttgccacggtgaataaccttggccaaataggagaatctcttggttactccaactttgagaacaacactttggtttccttgtggagcatctggaattttctaggccggttcggggctggatatgtatcggatcatttcctgtatgttaaaggatgggcaaggccattgttcatggtgctaaccctgtcaagcatgagtgttggtcatg

SEQ ID NO: 235198 - DNA, 388 bp, Gossypium hirsutum
tctctctctctctctctctctctctctctcatggattctctttctctcttctgtaccggggctcttttagccggcggtctgtactggttcgtttgcgttttaggccccgcagagcagaagggcaagcgagctgtcgatctctccggcggttccatttccgctgaaaaggttcgagacaactacaagcagtattggtctttcttccgccgcccaaaggagatcgaaaccgccgagaaagtcccggacttcgtcgacactttttacaatctagtcaccgatatatacgaatggggctggggtcaatcctttcatttctctccttccatccccgggaaatctcaccgtgacgcgacgcgtctccacgaagagatggccgtcgatctcatcg

SEQ ID NO: 235199 - DNA, 387 bp, Gossypium hirsutum
gaaagatttccaagcaaacaaaaatccccaagcggaatccaagaagacgacgataccgccttacatgaaagccatttcaggctccttcggcggtatcgtagaagcctgttgtttgcaacccatcgatgtcatcaaaaccaggttgcaattggacaggatggggaattacaaagggatcgttcactgcggcgccaccgtgtctagcaccgaaggggtgcgggctctttggaaaggattaacgcccttcgctactcacctcacgcttaagtacgcgctccggatgggatccaacgccatgttgcagagcgcgttcaaagactcggatactggcaccttgagtaacaaagcgaggtttttatctgggttcggtgctggggttcttgaggc

SEQ ID NO: 235200 - DNA, 391 bp, Gossypium hirsutum
ccaaagtagcagtgatcatgacaaggctaaacagctgctgcaacgtgtccgaggcaccactgatgtcgaagcagaactcgaggatctcatcaaagcaaggtcaatctcaaaaaccatcaagcacccattcaagaaaatcatacaaagaaagtataggcctcaactagtaatggcaatagccataccatttttccaacaagtgacaggcatcaatgtcattgcattttatgccacacttctattcagaacaattggaataggtgaaagtgcttccctactctcctctgtggcaaccggtgttatcggagccggatcaacattcatatcaatgcttatcgtcgataaattcgggcgacgagccttattcatggttggaggaatccaaatgctt

SEQ ID NO: 235201 - DNA, 390 bp, Gossypium hirsutum
ctctcctgctcgctgcgatttcgcctgcaagatctcaattttcaaattgtagcgccctttttatcaagcaatggctctggtcttgcatgcaggaaaaacaaacaaaaatgcctttaaggcactcattgctgcagaatatagtggtgtgcaggtcaaaatggttgagaattttgagatgggtgtgtcaaataagactcctgagttcatcaagatgaaccctttggggaaggttcctgtgttggaaacacctgagggtcctgtatttgagagcaatgccattgctcgttatgttgctcgcttaaaggttaacaaccctatatgtggttctacattgattgattatggtcatatcgagcaatggattgattttgcagccatggaaattgatgc

SEQ ID NO: 235202 - DNA, 342 bp, Gossypium hirsutum
agatgacctcatctcttattgtataacgattccaccaaacaatgcaactggggtagactacctacgtattgcctgatcgagttctccgtctgtgcacgcaaagaaattgataagggagtggaatttgtttcctaaagaggaagttaacctggtcgatcgaggccgagtttcgttaccccaggattcgaagctggtggaaaagcggttcaagttccccggtttggaagcccttggtggggtttctgtttacgattagagtcatcatgctggctattacaagcttcctaattcttatgatgccagaatgttctatttcctttttgaattactcattatcaatga

SEQ ID NO: 235203 - DNA, 383 bp, Gossypium hirsutum
cttcactcttctctcaccatgtcattgctgtctttctccttcttgttgctgtttacttttagtgccaaagctgttgttcctccatctgaaacttttaggtttgtcaacgacggagaatttgggccgtttgttgttgaatatgatgcaaattaccgtgtcataagcatagctaatgcccccttccagcttgcgttttataacaccacccctaatgccttcacccttgcgttacgcatggctacaacgcgttccgagtcgctcttccgatgggtttgggaggccaacagggggaaccctgttcgcgagaacgccacgttctctctcgggactgacgggaaccttgtcttggctgatgccgatggtcggattgcttgcaaagtaac

SEQ ID NO: 235204 - DNA, 382 bp, Gossypium hirsutum
acttgtacctttttaactctaaagccaagaaagtaagccactaaggttttgagagaagatcaaaatggcttctaaaagatcagcttccatggtcctccttttggcactcaacattctctttttttccctagtcagtgcttgtggctcttgctcttcacccacccctaaaccaaggccaaacccaaaccccaacacccccactcctactccatctgcacgaggcaggtgccctagggatgccctcaaattaggtgtatgtgccaatgtgcttaacctagtcaatgtcaccattggttcacccccagtgatgccatgctgttcccttctcaatggccttgtcgacctcgaagccgctgcatgcctttgcaccgctatcagagct

SEQ ID NO: 235205 - DNA, 385 bp, Gossypium hirsutum
agcagcacacacacatactaacatctatggggagttcagggcaggaggtctgctggaaattggcggatcacccaacacttccaaaggggaagacccttgctctcatcgttctcgatggctggggcgaggacaaacccgatgagtacaattgcattcatgttgctcaaactcccaccatggattctctcaaacagggtgcccctgaaaagtggagattaatcagagctcatggtaaggctgtagggctccccacagaggatgacatgggaaacagtgaagttggtcacaatgctctcggtgcaggtcgcattttcgctcaaggggctaagcttgttgatattgctcttgcctctggaaaaatctatgaaggagaaggattcaagta

SEQ ID NO: 235206 - DNA, 393 bp, Gossypium hirsutum
ccacgcgtccgcctatactctctgattatctctcttcttcgagccgctaggtcgtactgttttagcttcaagtctctcttttttgaaagttcctagttaatactggataatgggtaaggagaaggttcacatcaacattgttgtcattggccatgttgactctggaaagtcaaccacaacgggtcacttgatatacaagcttggaggtattgacaagcgtgtgatcgagaggttcgagaaggaagctgctgagatgaacaaaaggtcattcaagtatgcctgggtgctcgacaagttgaaggctgagcgtgagcgtggtatcaccattgatattgccttgtggaagtttgagacaaccaagtactactgcactgtcattgatgctcctggaca

SEQ ID NO: 235207 - DNA, 383 bp, Gossypium hirsutum
ggagacgacgcgctcgttgagggccaaggaaggaaggaagaagagagagagagagataaaaaggagaatctgcttcaaagtttcaaactttcccgtctcatatctaatccccaatttctctcttctgctctaggttccttcctgtcctcttaggattcttgtggtctgttcaaagccatggcctcgaagcggattttgaaggaactcaaggatttgcaaaaggatccacccacttcttgcagtgcaggacctgtagctgaagacatgtttcattggcaagcaacaatcatgggcccttccgatagcccttatgcgggaggtgtatttttagttagtattcattttcctccagattatcctttcaagccccctaaggttgcatt

SEQ ID NO: 235208 - DNA, 390 bp, Gossypium hirsutum
cttcattctactccatcttcactccccctcctcacccaaaccctacaaaatggccgccgccgcgcgccctcttgtctccgtccaaaccatagagtccgacatggctactgatgccactccaaccgttcctctcgctgatgtgatgaaagcctcgattcgacccgacatcgtcaccttcgttcacgacaatatatccaaaaacagccgtcaaccctatgccgtctccaaacgcgctggtcaccaaacttcagctgaatcctggggtaccggtcgtgccgtctcacgtatccctcgtgttcctggtgggggtactcaccgtgcaggccaaggtgctttcggaaacatgtgtcgcggtggacgcatgtttgctcctaccaagatctggcgccg

SEQ ID NO: 235209 - DNA, 265 bp, Gossypium hirsutum
agaagaggaagaagagatggcagtgagcgcaacggtgatcggagcactactgggactgggcacccagatgtactacaacgctctccgcaagctcccttatatgcaacatccgggaaagcacctgttggggatgggtctgggagacgatcacgtaactcagaacgtgaattgtcatggggaattccaatgttaccttaaaacaaagcattttaagggtccgggtggaagctcacgcaatgttcattttttgcccagtgctttgaat

SEQ ID NO: 235210 - DNA, 413 bp, Gossypium hirsutum
caatttgctctgaagatcatgttggctatttttcacaaggcatttgctaatccaccagaggagctgaatagtccagcttctcataaatctaccaagaagcctaaacagcctgaagaaaccctaaatgatttcctatctcatcaccctcacaacactttctccatgagctttggcaacgctgctgttttggcttatgtccgccatgaacgtgctgcttcagttcatcagaggttgttttgtgggtttgatgacatatactgcctcttcttagggagcttgaacaatctatttatgctgaatagacaatatggtctttccaaagggagcaatgaggcgatgtttgtgattgaagcatataggacgctgagggataggggtccataccctgctgatcaggttgttaaggatcttga

SEQ ID NO: 235211 - DNA, 400 bp, Gossypium hirsutum
atccgaaacgccgtcgtcttagtcggaaccacttcgatccacaatgtcttctactttcagcggcgatgaaacggcaccgttcttcggcttcctcggcgccgctgctgctctcgtcttctcctgtatgggagctgcatatgggacggctaagagcggtgttggtgtggcttcaatgggtgtgatgaggcctgaattggtgatgaaatctattgtaccagttgttatggctggtgttttgggtatttatggcttgattatcgctgtcattattagtactgggatcaatcctaaggccaaatcgtattaccttttcgatggttacgcccatctttcttctggtcttgcttggggccttgctgggctttctgctggaatggcaattggaatcgtcggcgatgct

SEQ ID NO: 235212 - DNA, 401 bp, Gossypium hirsutum
cttcattttcctctgaattctttgtctctatttaaaaaaaaagagcaatttttttgaggtggtagtatacaaaaacaaaatgaagatctgttgcattggagctggttatgttggtgggcctacaatggctgtgatcgcgcttaaatgtccggatattgaagtggctgtcgttgatatctctgtacctaggatcgctgcctggaacagtgaccagctccctatctatgagcctggtcttgatggtgttgtgaaggagtgtcgtggcagaaaccttttcttcagcactgatgtagagaaacatgtgcgtgaggctgatatagtctttgtttctgtcaacactcccaccaagactcgggggctcggagctggcaaagctgcagaccttacatattgggaaagtg

SEQ ID NO: 235213 - DNA, 417 bp, Gossypium hirsutum
aaaccccccaaattttccctcgttccttgaattgtttgaacactcttttgtaaaaaaaaaaaaaaaaaaaaaaacagttgtgttctttgaaaaatcaaggaaactgtgtttttttattctagctggaaaaaaaaaacatgtatgccgacacagggctgttttttccttacatgcagaactttgctcaagattttcagcagtttgaaggttactgtaaaacccataaaccgaatgcttcaatgaacaacatggttccgacctcgacgatatcggaatatgatttgggaggagatggtgatttgttcaaagctccagaaccaatcatcgaagaaccaattgtaagccttgatccgatgactgcagccatatcatcgttagtctcgtgcggtgaagatgttattacttcgcaagaactta

SEQ ID NO: 235214 - DNA, 409 bp, Gossypium hirsutum
caacaatgtctcttcactcttctctcaccatgtcattgctgtctttctccttcttgttgctgtttacttttagtgccaaagctgttgttcctccatctgaaacttttaggtttgtcaacgacggagaatttgggccgtttgttgttgaatatgatgcaaattaccgtgtcataagcatagctaatgcccccttccagcttgcgttttataacaccacccctaatgccttcacccttgcgttacgcatggctacaacgcgttccgagtcgctcttccgatgggtttgggaggccaacagggggaaccctgttcgcgagaacgccacgttctctctcgggactgacgggaaccttgtcttggctgatgccgatggtcggattgcttggcaaagtaacactgccaacaaagg

SEQ ID NO: 235215 - DNA, 408 bp, Gossypium hirsutum
ctcccactttatcatcatcactgtctctttagcctttaccctttgtttcgttgatttgtttctaaggatttaatctccaaaccttcttcccatttcttcattacattgttcaagaaaaaagaagcaaaaaaacatggccaaagttctgttgttcattgcactatgtgtgcttccagctttggttagtgctacacgcattctgaataatcaattggtggtagaaggctatgtgtactgtgatacttgccgtgctggttttgaaacccctaagactagaagcctagctgatgccatggttaggttggtatgctccgacaggaagagcggccaagttgtcttcaaaaaggagggatacaccgacaaaaccggaaaataccagattcgtgtatcccaggatcacttggatca

SEQ ID NO: 235216 - DNA, 406 bp, Gossypium hirsutum
caaagaaccggttcctcaatctctctaatcctcactttcttccccatcaaacacaccttcgattttcccaaggttgtagaagatggcagaaggtgaggatattcagccacttgtttgtgacaatggaactggaatggttaaggctggatttgctggggatgatgctccccgagccgtattccctagcatcgttggtcggccacgtcacaccggtgtgatggttggcatgggccagaaagatgcatatgttggtgatgaagctcaatcaaagagaggtattttgactttgaaataccctattgagcatggtattgtgagcaactgggatgatatggaaaagatttggcatcataccttttataatgagcttcgtgttgccccggaagagcacccagttctccttact

SEQ ID NO: 235217 - DNA, 415 bp, Gossypium hirsutum
cttcttctctctttttctcattcattctttagtttcaatatcaaagcaaaaatgggttcttcttgtaatgttgtttcaatggccttactggcttgtttggtgttgaactccttggttttttgtgcccacggcggtgacttttaccaggatttggacctaacttggggtgacacaaggggcaagattttcaatggtggcaagctcttgtctttgtctttagacagggtttcagggtctggttttcaatctaagaaagagtatttgtttggaaggatcgatatgcaactcaagcttggtgctggcaactcagctggcactgtcactgcttattatctgtcatctcaagggccaacccatgatgagatagactttgaattcttagggaatctgagcggtgacccttacattttacaca

SEQ ID NO: 235218 - DNA, 419 bp, Gossypium hirsutum
tgaatctccaaatcgaaatttaaggccaaaaagacacaagggttactaattaaattaatcttcagcgaatatgttggtttatcaggatcttcttacaggtgatgagctcctctcggactctttcccatacaaagaaatcgagaatggaatgttatgggaagtcgagggaaagtgggttgttcaaggagctgtcaatgtagatattggggctaacccttctgcagaaggtggtgatgatgatgaaggtgttgacgatcaagccgtcaaggttgtggacatcgtcgacactttcagacttcaggagcaacctgcttttgacaagaagcagtttgtgaccttcatgaagaggtacatcaagaacttgacacccaaattagagcctgaaaagcaagagtctttcaagagaacatcgaggggct

SEQ ID NO: 235219 - DNA, 414 bp, Gossypium hirsutum
  unsure (1)..(414): unsure at all n locations
gtggagagcctttttttgtgtagcgattctcagttagtcttttctttaagcttacagcttctctccagagttttataatgggtaaggagaaggttcacatcaaccttgttgtcattggccatgtcgactctggcaagtcgaccactaccggtcatttgatctacaagcttggtggtattgacaagcgtgtgattgagaggttcgagaaggaggctgctgaaatgaacaaaaggtcattcaagtatgcttgggtgcttgacaagcttaaggctgagcgtgaacgtggtatcaccattgatattgccctgtggaagtttgagaccaccaaatactattgcaccgttattgatgcacctggacaccgtgactntatcaagaacatgattaccggtacctcacaggctgactgtgctg

SEQ ID NO: 235220 - DNA, 408 bp, Gossypium hirsutum
ttcttcctcaatttaccaaatccctagtgcttttaaattggttcatattggtttttagctgtacgaagaaaaatctcttgactgtgtcgtgcagataaaggatgagtacactggatgcaactagagcagaacttgctcttgtagttttgtatttgaataaggctgaagcaagggataagatatgcagggctatacaatatggctcgaaattcctaagtgatgggcagcctggcacagcacaaaatgttgacaaatcaaccagcttggcacggaaagttttccgtctttttaagtttgtgaacgatttgcatggtcttattagcccagttcctcaaggaactccccttccacttgttctgctaggaaagtcaaagaatgcactgttgtcaactttcttatttctcgatc

SEQ ID NO: 235221 - DNA, 362 bp, Gossypium hirsutum
ctttggaagcatggacttcatagctactatcctgtttctagctcttgtcatctcctacaccaaagctttggacccttgcggccctcatccagatgactcggaccttttggtcatcccaatctatggcaaatgttcaccattcaacccacccaaacctgactcatggttcaacacagtcatgaacatggcttcaaaagacccaacatgggtcaagtacttgtcgtgccttgtagcccaaaagaccactgcggtttccattgcttgacgccaacaggtcctaaacattgtccactatatcgtccgggtaaaagatggcacttctggtcacctcatgtttatggtattggacactagcaatgatg

SEQ ID NO: 235222 - DNA, 404 bp, Gossypium hirsutum
ccaacatatcctcgaacgtatgatctgcttcatgcaaatgggctcctctcacatctcacttcagagaggtgtggcttgatggagttatttatagagatggatcgaattcttcgtccggagggctgggttgtgctctctgataaattaggagttatagagttggcacgtgcacatgctacacaaatacgatgggatgcaagggtgatcgaccttcacaatggcagtgacaagcgcctacttgtttgtcagaaaccttttgtgaagaaatgattgctttagcgccaaaaggtctcaagaccacagatctgtaaacttttcttgatctgaggatgaactatcggtggcatcacaatgttagatatgctccagagtttcgacaggttcgatattaatgacttgagaag

SEQ ID NO: 235223 - DNA, 401 bp, Gossypium hirsutum
aaaatactaaattataaattccctttgcaaacccaaaaaagctcgaagtgaacgaagcagcagcaaaaatggtgctcacaaccactaccccagcgcctgagcagtatgttgaatacagtacctttgcttgcagatatgtacgccaacctgttcccaggctccagatgccaaaaaattcaatgcccaatgaagcagcctatcaagtaataactgatgaactgatgcttgatggaaatcccaggatgaacttagcataatttgtgaccacatggatggaacccgagtgcgataaactcatgatggcttcaataaacaagaactacgtcgacatggacgaataccctgtcaccactgagcttcagaatcgatgtgtcaacatgatatcaaacttatgtaatgct

SEQ ID NO: 235224 - DNA, 400 bp, Gossypium hirsutum
aaaatcttgccttcttttgagatttgctgatgattcatatgtagaaagttacataagcaccatgggggttgattttaaaatacgcactgtggagcaggatgggaagaccattaaacttaaaatttgggacactgctggtcaagaaagatttaggacaattactagcagctactaccgtggggctcatggcataataattgtttatgatgtgacagaccaagaaagcttcaataacgttaggcaatggctgagtgaaattgatcgctatgctagtgataatgttaacaaaatactggttggaaacaagtgtgatcttacagcgaataaagttgtgtcatacgaaacaggcaaggcacttgcagatgaaagtggcataccttttatggaaactagtgcaaaa

SEQ ID NO: 235225 - DNA, 417 bp, Gossypium hirsutum
ccttgcccaccaccaccaaagagccacaagcctacccacaagagcccaccctcggcacctaaacagccagccacttgccccaaagatacactgaaactaggtgtttgtgctgatttgttgggctcggtgcgcgttgttgttggaccgtcgaggaccaaatgctgctcactcatttcgggtttggctgatctcgatgctgctgtttgcctttgcactgctattaaagctaatgtgttgggggttaacctaaacgttcctgtttcattgtctttgctcctcaattcctgcgaaaagcaaatgcctgctggttacaaatgtgcttaagcaatgtttgggtttttcttttacgtgttctttttttttctgggcgtgttaaatttggtgttttgatatgtcaagggttagataaaatggtta

SEQ ID NO: 235226 - DNA, 408 bp, Gossypium hirsutum
ctcacagtacgtgcctcatgtgataaagtctggaagaaatgtctttgatcgatttgctgtcttgttttcagtggtgattgtctggatttatgctcatttactcactgtgggtggagcttataatggtacagcaccaaaaacacaaacaagctgtagaactgatcgttctggtctaatagatgctgctccatggataagagttccttatccctttcaatggggagcgccatcatttgatgctggtgaagcctttgctatgatgatggcttcttttgttgcccttgtagagtccactggggcttttatttctgtgtcaagatatgcaagtgcgactccaatgccaccatctattcttagccgtggtattggttggcagggagttgcaattttggtgtcgggattgtttgg

SEQ ID NO: 235227 - DNA, 409 bp, Gossypium hirsutum
gttcgtgattgaaaacacaccaatatgtaatccccataccctatccctccaccaactttgtccaatagcatagcaatagaacgagataaagttagtaagtatatagacttccaactgtgaccgaagaaactccaatggcttctcttcaatggctgctgcaactgagctccagtcccttcttgctctttgcatcaatcctccttctccttaaacttcttttcaaccaaaactccaccaaaacaaaacccaatcttccaccatgccctcccaagttacccatcatcggcaacctccaccagctaggtaccatgcctcatctgtcactccgtcgcctgtccaacaagttcggcccaataatttacttacagctgggtcagatccccaccgtggtggtttcatcagctaaatt

SEQ ID NO: 235228 - DNA, 336 bp, Gossypium hirsutum
gggacatccgataaaattggaacgatacagagaagattagcatggcccctgcgcaaggatgacacgcacaaatcgagaaatggtccaaatttttgtaactcattttcatttctctcaatttttatatctggttcttgcataattaaattctgagtatgcttagctgagcttatgctttggggtcactgtggttcttgctgggcttttggagctgttgaatcactatctgatcgggtctgtatccattttgacatgaacatatctctgtctgttaatgatcttcttgcatgctggggctttctatgtggagatcgttgtgatggagggtattcaatc

SEQ ID NO: 235229 - DNA, 408 bp, Gossypium hirsutum
gtgaaatcgaaggaaaccatctctctgccgccgctatcatcggccaggacggcagcgtttgggcccaaagcgccagtttccctcagctcaagcctgaagaaattagtgccatcatgaatgactttaatgaaccgggttcactcgctccgaccgggttgcacctcggtggcacaaaatacatggtgatccaaggcgaaccgggagctgttatccgagggaagaagggacccggaggtgttactgttaagaagaccaatatggccttgattatcggaatctatgatgaaccaatgacacccggccaatgcaacatgatcgtcgagaggctcggcgattatcttctcgaacagggtttatgattctcttcagtgtgtgtccttatttgaatgcatttcttctcgggtcttt

SEQ ID NO: 235230 - DNA, 400 bp, Gossypium hirsutum
gcaaaaatgagggattccccatcatgttttggtgaaaatggggttcaagtagctgattcatcatcatcaaacacaagtaaaaatggacaaaacatagttctttgtgtttatcaatgtcaaatcttaggtagatcgtgtttaataactgtgacttggaacaagagtttaatgggacaaggcttaagtgttggtattgatgattctacaaatcaatgtctttgtaaagttgatataaagccatggttattctctaaaagaaaagggtctaagtctttagaagcatatttttgtaaattagacatattttgggacctttcgacggcgaaattcagttccggaccggaaccatcgcaagggttttatgtttgtgttgttgctaataaacaaatggtattgcttc

SEQ ID NO: 235231 - DNA, 399 bp, Gossypium hirsutum
aaaaacaaaattaatatattttccgttacagtctcgaaaatcggtcaaaattctcgtcagaagcatttatgaccgtcggatcaagctcgtgatctgtgacgacgacattattttttctactggttttttttcaaggtgcgcgcggctaaaattttccctgttgttgaaattgtggatctgaaaatcagatcattggcggcggatccttgattcttcgtgtggaagcgtagatgtcggggccactcgatcgattcgctagaccttgctttgaggggttttcaggtagtgatgagagaagagagaggaaatctgattttgagaactccgaggatgaaagacgcactaaaattggatcattgaagaagaaagcaataaatgcatctactagatttaagcatt

SEQ ID NO: 235232 - DNA, 409 bp, Gossypium hirsutum
  unsure (1)..(409): unsure at all n locations
ttcattagtaattgaaccaaagaaaagacatgggagtttcaggcacttaggagtatttgtctgatttaatgagcagtagtggtcataagcacaagaagagaaaacaattgcagacagtagagctgaaggtgaggatggactgtgatggttgtgaactcaaggtcaagaaagccctctcttcattgaatggagtgaaatcggtgaacataaacaggaaacagcagaaggtgactgtaacgggatatgttgaagctaacaaagtgttgaagaaagctaagtcaacagggaaaaaggctgagatttggccttatgttccttacaatctggtggctcaaccttacgctgttactgcttatgacaagaaggcacctnctggttatgttaggaaagtagacaacaatgtaagcag

SEQ ID NO: 235233 - DNA, 411 bp, Gossypium hirsutum
gttggtgatgaaatccattgttccagttgttatggctggtgttttgggtatttatgggttgattattgctgttattattagtactggcatcaatccaaaggccaaatcgtattatctttttgatggctatgctcatctttcctctggtcttgcttgtggacttgctgggctttcagctggaatggcaattggaattgttggtgatgctggtgtcagagctaatgcacagcagccaaaactttttgttggaatgatcctgatcctcatctttgctgaagctttggctctttacggccttatcgtgggcatcatcttgtcttctcgggctggccaatctagagcagagtaaggcgctggtagagctgttttagtagtattcttttattgcttatcgcgtttattatgattgga

SEQ ID NO: 235234 - DNA, 389 bp, Gossypium hirsutum
cggacgcgtgggctctcaccatgtcattgctgtctttctcctttttgttgctgtttacttttagtgccaaagctattgttcctccatctgaaacttttaggtttgtcaacgacggagaatttgggccgtatgttgttgaatatggtgcaaattaccgtgtcataagcatagctaatgcccccttccagcttgcgttttataacaccacctctaatgccttcacccttgcgttacgcatggctacaacgcgttccgagtcgctcttccgatgggtttgggaggccaacagggggaaccccgttcgcgagaatgccacgttctctctcgggactgacgggaaccttgtcttggctgatgccgatggtcggattgcttggcaaagtaacact

SEQ ID NO: 235235 - DNA, 389 bp, Gossypium hirsutum
tagggtttgcacgagccgtagtgcgccgttcgcatcaggaagaaatggcggtccctttgctgtctaagaagattgtgaagaagcgtgtcaagaagttcaagaggccccaaagtgaccgcaagatctccgtcaagacaaactggcgaaggcctaaaggtattgactcccgtgttaggaggaagttcaagggatgcactttgatgcccaatattggttatgggtccgacaagaagactcgccactatcttcccaatgggtttaagaaatttgtcgtgcataacgtccaagagctggagcttctcatgatgcacaacaggacatactgtgctgagatagctcatgatgtttcaacaaagaagaggaaggaaattgtcgagcgggcagcacag

SEQ ID NO: 235236 - DNA, 417 bp, Gossypium hirsutum
gtcaccttgcaaaacccagattaccataacagatgcaaaatctgatcggtgaacataagaaaatggagaccatgggaaaacttctaatcctgcttacagcttttttatgcctctacctcttcgttgctttgctcaatgttttctacaagtattggtggatacctcaacgggtacagttcatcatgaattcacaaggaatcagaggacctccttatgaatttatccatggaaacaacaaagaagctgcccaaatgctcatggaagcatctaccaaacctatgggcttgacacacgatatatttcccagagtcgtgcctcatgtttactcctggatcaacaaatacgggagcacttttcttagttggaatggaattcgagctcaacttgcaattacagacccagatctggtcaaagagg

SEQ ID NO: 235237 - DNA, 406 bp, Gossypium hirsutum
ccggagtgccagccgtggtcgaccttgcttgtatgcgtgatgctatgcacaagcttggcagtgatacaagcaagattaatcctctggttcctgtagatcttgttatcgatcattcggttcaagttgatgtaacaagatcagaaaatgctgtgcaagcaaatatggagcttgagtttcagcgaaacaaggaaagattttcattccttaaatggggatcttctgccttccgtaacatgcttgttgttcctcctggttctggtatcgtgcatcaggttaatcttgaatatcttggtcggcttgtgttcaacaccgatggcattctctaccctgatagtgtggttggaactgattctcatacaaccatgatagatgggctcggagtagctggctggggagtaggaggtat

SEQ ID NO: 235238 - DNA, 409 bp, Gossypium hirsutum
gatggtttttctttgtttcgagtgttaaaaattttgcagacgatgtcaaacttaatactttttgaggatatttttgttgttgataagcttgacccagatgggaaaaagtttgataaagttacccgcattgaagcacggagccagaactgtgatatgttcatgcacctcgatgtaaatacagagatatatcctatgcatgttggtgataaattcacaatggcgttagctcacacgttgaatttggatgggacgcctgatactggctatttcaatccggggaggaagtctcttgcagataagtatgagtatgtcatgcatgggaagttatacaagatatcagatgattcttcagggaaaggacttaaagcggagatctatgtatcatatggtgggcttttaatgctattga

SEQ ID NO: 235239 - DNA, 414 bp, Gossypium hirsutum
ccaaaatctcatctttccattagagcgcagctctcattcctctcgattttctttcactttgttcgcctcttcgattatcaattccgctctcagattcttgaagcaagcgaagttcaattctccaccctacatcagaagaaaactctgattccccaaaattagggtaatctcaatccctaaaagatgccggccaccgcagggagggttcgaatgcccgcgaacaaccgggtgcatagtagcgccgccttgcaaacccacgggatttggcaaagtgcaatcgggtatgacccttatgctcctaataaagatgattcaaaaaattcatcgagtcagatgactgccgctgctgaacccgatggtgaaaacgcatacgctagctttcaagggcttctagcccttgcccggatcacgggt

SEQ ID NO: 235240 - DNA, 415 bp, Gossypium hirsutum
ataaattttacaccttccataaataaaatttaataaatttcacatatatatcacaagacaacgtcttctaagaagcagccatcttcaacagaagctgaatatagaactgtggcttgtactgtttctgaattgatatggattgaataattgttagttgagcttggaattgagttcagtactttggtgtgaaaacacaagtgctgttgccatgtccagtaatcctgttttgcatggtcgatccgaacatgtggagcttaactaacattttgtaagagatcatgtagccgatgggaagcttgagatcaactatgtaccagcaaaggagccaattgcagtctgtttaagtgtgtttgtaactaaacagcagttgtaactaagtttgttaacctcagccttctatgcattatgctcattg

SEQ ID NO: 235241 - DNA, 410 bp, Gossypium hirsutum
cgagctgtgaagtgcagaatcaagggattgtgggtggagaagaagcggtgacggatctaacttggaactccgttttctcttcttaccgctattcccgacctatctctaaccccctcaatttctctcaggtagatattccttgtgttcaagcgtcttcatggcttcaaagcggattttgaaagaacttaaggatttgcagaaggatccaccaacttcctgtagtgcaggtcctgtagcggaagacatgtttcattggcaagcaacaattatgggcccctccgatagcccttttgcaggaggtgtgtttttggttaatattcattttcctccggattatccattcaagcctcctaaggttgcatttaggaccaaggtcttccatccaaacatcaacagcaatgggagcattt

SEQ ID NO: 235242 - DNA, 319 bp, Gossypium hirsutum
cacttatccctattgttgatcaatctgtggtggagaagacaattcggccatgcctagttgaactaagtgaggatccagatgttgatgtcaggtatttcgccacccaagctctacaatcaagtgatcagcaaatgatgatgtctagctagaaccctacattacttgtatcacacttctacatcctttcctttttcctttttaaatttattttaccttaaagcttttgttttgtttttttccttattttaattgtatatctttttttcagattgaaacactcctttgctatatatgtaatttttctaaaattgaattgttg

SEQ ID NO: 235243 - DNA, 397 bp, Gossypium hirsutum
agtaaatcaagccgtgcacgtacctacatggctgatggttaaccagcggatatccattgtggcactggtgctatatctggatactttagtgaggaccatgatacagatggtgatcttaccgtttaacatatggaatacattgaagcaacaaacgagtgcagcttaacattcttgattgccaagtttgatggtatactacgacttggatttaaagagatttcatttagaaatgctcgacctgtatcgtacaacatgacaaatcaaggtcttgctaatgaaccaagtctttgattctaacttacaccgcattctaatgataatgtacgcctataagtgagaattcggggtatggatacaaaacatcacaggggggaacacacttatgttcctgtgacac

SEQ ID NO: 235244 - DNA, 394 bp, Gossypium hirsutum
ctctctatattttctcatctccttttccaccgccgtcgatctcgatccttatccccgttttcaaaaaagctccaaaaagatggccaatgctgcatcgggaatggctgtgcatgatgattgcaagttgaagttcttggaacttaaggcaaaaagaacccaccgctttattgttttcaaaatcgaggagaagcagaagcaagttattgtggagaagcttggtgagccaaccgagagctatgaggattttactaaatgtcttcccgctgatgaatgtcgttatgctgtgtacgattttgattttctaacggccgagaacgtcccaaagagcagaatctttttcattgcatggtctcccgatacatcaaggatcaggagcaaaatgatatacgctagc

SEQ ID NO: 235245 - DNA, 395 bp, Gossypium hirsutum
  unsure (1)..(395): unsure at all n locations
ctcaacctccattttgcccattccactgctcgatctccttacagctaccgtacacactcacacacacattcactgaatgggtcgagtcatccgagctcaacgtaagggtgctggttccgtcttcaaggcccacacccaccaccgcaagggtcctgctcgtttccgcagcctcgacttcggtgaacgaaatggctacctcaagggtgttgtcaccgatgtcatccacgaccctggtcgtggcgctcctttagcccgtgttgtcttccgtcaccctttccgttacaagaagcagaaggaacttttcgttgccgcagagggtatgtacactggacaggtcgtctattgtggtaagaaggctactctngtggtcggaaatgtattgcctcttagatcta

SEQ ID NO: 235246 - DNA, 413 bp, Gossypium hirsutum
aactaacccgtgtcaaaatcacagataccatcacaataacaaatttttttcaataggaaaaacatttgcaaaaataagaaaacctcactcccagccagtgggagcaggagcagatacatcgattccagggccagggatttgtggtggagcacttgcaggatcccaaacatcagcgctaacagcaacttgatcaccccagttaattgcagggacacccgaaattggtggctgaaccacatcagctgaccactgatcacccatttgggagggccattggtcagttcctaaagcactcattccaaaatctgcagcagggagtccataatcaggagcagcaactgcttcctcctcttcctgttgtttagcttcctcaggctccctgtagaaaaatagatccaccatcacatcccact

SEQ ID NO: 235247 - DNA, 411 bp, Gossypium hirsutum
gaaaatccaaatgggttttaggaatattattggcagaaggcttggccttggccttgtaaggaggaggaaacctttttcgactgctacttgcgatggcgatggcaatggcaacgccaaatccatcaacctttactccgctatcaatcaagcccttcatattgcgcttgaaactgataatcgcgcatttgttttcggagaagatgttagctttggcggggttttccgttgcactaccggactcgctgaccgatttggtaaagctagggttttcaatacccctctctgtgaacagggcattgtcggatttggaattggcctagccgcaatgggaaatcgggccatagcggaaattcagtttgcagattacatataccctgcttttgatcagattgtaaatgaagctgccaagtt

SEQ ID NO: 235248 - DNA, 413 bp, Gossypium hirsutum
aaaaaaattcaaatttcattctcttattttattttattttatttcatattttgggagagggagaacgatcagcgaaaatgaatatattcagattagcaggggacatgacccatttgtttagtgttcttgctttgcttcttaagatccacacaatcaagtcttgtgctggcatttcactgaagactcaagaactctatgctattgtctttgctactcgttacttggacatattcactaatcatatctcaccttataacacaatcatgaagctaatattcctgggcagctctttctcaattggatggtacatgcggtataacaaaatacaccgtagatcttatgataaggaccaggatacatttcgacattatatccttatactgccttgcctgattcttgcccttcttataaac

SEQ ID NO: 235249 - DNA, 404 bp, Gossypium hirsutum
cttcacctttgctcccactcctccactgactttcaccaccaccgtcactagcggcgccgtcacaaaatgtcgtcaacggagtctctcatcctccaactccatgaaatctctgccgttaaattcggtaacttcaagctgaaatctgggatcttctcccctatctacatagacctccgtctcatcgtctcttacccttccctgctccaccaaatctcccactccctcctctcctctctccctccccaaacacactttaacctcatatgcggtgtcccttacactgccctccctatagccacctccatctctctcgacacctccatccccatgctcatgcgccgcaaagaagtgaaagactacggaactgccaagtccatcgaaggtgtttacgaaaagggtcaagc

SEQ ID NO: 235250 - DNA, 412 bp, Gossypium hirsutum
gtgtctttgcagagtatcgggtagtcctttcaatcctcagccatggcggaacagacggagaaagcatttctcaaacaacccaaggtgtttttaagctctaaaaaaaatgggaaaggaaagagacctggaaagggcgggaatcgcttctggaaaagcattgggttaggctttaagacacccagagaggccattgaaggaacatatattgataagaaatgcccatttactggcactgtttctattagaggccgtatccttgccggtacttgccatagtgcaaaaatggtaaggactattatcgtccgaaggaactaccttcactacatcaagaaataccaaagatacgagaaaaggcacagcaatatcccagctcatatattcccctgctttcgtgttaaagaaggagatcatg

SEQ ID NO: 235251 - DNA, 405 bp, Gossypium hirsutum
ggaaaacaagaaaagcagagccgcatcactttttgctagctaagctactgtgggagttattgttcttcagaacagcttctgcagtagctaataataacgttatatattatataaattttatacatcctttttaccctacgactccatatataagcaagtaaaaataaatatggctcgctctgtttcttcctttaagttccttggtgcttctgtttttgatgctctttatgtctccatatcaaggagaggttactcaggtgcaccgccggcggcagtgacggctagctttggtaggcctggagcgatggggaaagtggaacgaagatatgcgatgaaagagtcgtcgtcgtcggagacaagggcttatttttcagcttgggcgcctgaccctgttacggggtatta

SEQ ID NO: 235252 - DNA, 413 bp, Gossypium hirsutum
gtgagcagtcaagctaaggtttgagatttatcaatggcggagaagagtttcaagtacgtcatcctcggtggtggtgtcgctgccgggtatgccgcgagggagtttgccaagcagggagttcagcctggtgagctagccattatttccaaggaagcggttgctccatatgaacgtcctgctctgagtaaggcgtatctcttccctgagggagctgcaagacttcctggtttccatgtctgtgttggaagtggtggagagagattgcttcctgagtggtacaaggaaaaagggattcagttgatccttagcactgaaatagtgaaagcagatcttcctgccaagactgtagtaagcgcagctggagaaacattcaaatatcaaattttgatcattgcaactggttccacagttat

SEQ ID NO: 235253 - DNA, 389 bp, Gossypium hirsutum
ctcatctccacttatttcttgttttccgccgccaagataattcgatctcagcccgcccgtaggcttaacgccatcttcctcaattccatcggtttcacgagatggcaacagagggaggcaagagctttgcaaggagagacaaactacttgaaatcgagtcaaaggttagagtttggtgggatgaaaaagatgttttcaaggctgaacctgctgaaaaaccacctcaaccaggtgaaaaattctttgggaactttccgtttccttatatgaatggttttttacatctaggtcatgccttttctctgtccaaactcgagtttgctgctgcttaccatagattaagaggtgcgaatgtgttattgccatttgcttttcactgtactggtatg

SEQ ID NO: 235254 - DNA, 410 bp, Gossypium hirsutum
ctaaagccaagaaagcaagccattaaggttttgagaaaagatcaaaatggattcaaaaagatcagcttccacagccctccttttagccctcaacattctcttcttttccctagtcagtgctaattgtggatcttgttcttcttctggctctaacccaaggccaactcccacccctactccatctgcacgaggtaggtgccctagggatgccctcaaattaggtgtatgtgccaatgtgcttaacttagtcaatgtcaccgttggttcacccccggtgatgccatgttgttcccttctcaacggtcttgtggacctcgaagccgctgcttgcctttgcaccgctatcagagctaacatcttaggcatcaaccttaacatcccagtttcccttagcttgcttctcaacgttt

SEQ ID NO: 235255 - DNA, 413 bp, Gossypium hirsutum
caacatccaaaaggagtccaccctccacctagtccttcgtataaggggtggcatgcagatatttgtgaaaacccttactggcaagaccatcaccctcgagttggaaagttctgatacgattgataatgtcaaggccaagatccaagacaaggaagggatccctacagaccaacagaggcttatttttgcaggtaaacagcttgaagatggccgaactcttgcggattacaacatacagaaagagtctaccctacaccttgtccttcgtacttaggggtgggatgcagatctttgttaaaacccttactggtaagaccatcacccttgaggtggagagctacgatactatcgataatgtcaaggccaatatccaagacaaggaagggattccaccagatcagcagaagttgatt

SEQ ID NO: 235256 - DNA, 410 bp, Gossypium hirsutum
cggacgcgagggtttttctacatatcaggagcagggcaactaactggtttagggtaaggggatagcatagctttagagataaccaaacactgcaccgattgacacatcatccactggctgtacttacaaacccatcacgccaccgaagatggaaacgtctgtgaatcttcaaggatcaaatgttttcagccctgccctgattgttacgctgattacacgacttgctcagaacgaaagcgtgccatgactgtctctagggacaacatgatctatccggagaggcactgtactcaacaggaagagaagatgcattgctttgccccggcacctaaatgatacctcaccggcgtttacttggcctacgagtcgggactatgagatttatgctaatgctccctataaggccttga

SEQ ID NO: 235257 - DNA, 415 bp, Gossypium hirsutum
acttgagagtcaatttgctggcttcttccctctccttggagcttcaaaggggaaactgcagggattttctttttcattctttcttttttggtttttgaaagcagagaaaatttgaatcgcttcaatgtcgtccgtactcaacactgtatcatccttgaggctatccagagtttacaatagcaacaacaacaatcacctgcgactcccaattcactccgttttaactcctccttctgtctccttcaccagacggagattgactatcagagcggcggacactgatactaatgaagtaaaatccaaggcaccggataaggcacccgccggcggtggttctagcttcaaccaacttcttggtatcaaaggagctgctcaagaaactgataaatggaagattcgtcttcaacttacaaag

SEQ ID NO: 235258 - DNA, 369 bp, Gossypium hirsutum
  unsure (1)..(369): unsure at all n locations
gnagcccacccgtccggaaaatatctcaaatctcctactcctcctcggaaatcttagtatcatcaccatggcctcaaatcccaaggtcttctttgacatgactatcggtggtcagcccgctggtcggattgtgatggagcttttcgcagattgcactcctcgcactgctgagaacttccgtgccctctgtaccggcgagaaaggcgtcggccgcagcggtaagcccctccactacaaaggctcctctttccatcgtgtgatccctaactttatgtgccaaggaggtgacttcaccgccggaaacggtaccggaggtgaattcatctacggatccaagttcgctgacgagaacttcatcaagaaacacac

SEQ ID NO: 235259 - DNA, 398 bp, Gossypium hirsutum
aagcaccgtgggaactaggtgatcctaaacgtcttaaccgtgggctgtgcagacaccgatagaagaatcgtgctagaagcgctaattataacagctgctgcgtgggcatctctaactgtctacactagctgggcataaaataaaggcgcggactccaactatatgagaccgattcagtgctaccagcttattaccctcatcataacgggtctaattcagatgtttattccgataaggcaaacatgtaccgctatatattgcggaattagagcgaaggttggctgtccatacatagtatataacaccggcaacctagaaagacaacctcacatattaggatgacagtatggccttcgccactctgtattaggacatcctgaatttgaacatttacattt

SEQ ID NO: 235260 - DNA, 414 bp, Gossypium hirsutum
accaaaaagaaaaaaaagaaaaaaaacagaaaatggcggtggcgggtctttacagaagagttcttccctctcctcctgccatcgagttttcttctcccgaaggcaagcaattgttcacggaagctttagcgggaggaacggcggaagggtttttcaaactaatatcatactaccaaacgcaatcggagcctgcgtattgcggactcgccactctcgccatggtcttaaacgccctcgctatcgatcctggtagaacctggaaaggaccttggagatggtttgatgattcaatgttagattgttgcgagccactggagaaaatcaaaagtcaaggcatcacttttgggaaagttgcttgtttggctgtttgcaatggtgctcaagttgaacctttcaggaccgatcaatctagca

SEQ ID NO: 235261 - DNA, 412 bp, Gossypium hirsutum
cttaagggttaaagctagcaagagcagcgctgcggcatttcttccttagaagacccggcaaacagaaatgaagttcaacattgcaaattccactactggttgccaaaaaaagctggaaattgatgatgaccagaaacttcgtgccttttttgacaagaggatctcacaggaagtcagtggtgatgccctcggtgaggagtttaagggctatgtattcaagatcatgggaggctgtgataaacaagggtttccaatgaagcaaggagttctcactcctggacgtggtcgacttttgcttcacagaggtactccctgcttaacggggtattgtaggagaaattgagagcgcaagaggaagtcagttcgaggatgcattgttagtcaggatcttttacgtttgaacttggttatt

SEQ ID NO: 235262 - DNA, 422 bp, Gossypium hirsutum
cgcaaatccccgcccaactctccgccgccgccaccgccacggcaaccgccaccgccacagatccaagcaatgggccgcgtccgtaccaaaacagtgaagaaatcctcccgtcaggtcatcgagcgctactactctcgcatgaccctagatttccacactaacaagaagatcatcgaagaagttgccattatcccatccaagaggctccgcaacaagatcgccggcttctcgacccatttgatgaaacggatccagaggggtccggttcgcggcatttccttgaagctccaagaggaagagcgtgagcgccgcatggatttcgtccccgatgaatcggccatcaaggtcgaccaaatcgaagttgataaggaaactcttgatatgctttcggttcttgggatgtctgatattccggggcttgg

SEQ ID NO: 235263 - DNA, 410 bp, Gossypium hirsutum
aaagcagctgatttatacgtttcctgaagatgctgcaaccagtactggggctccgttctggtctgccccaaaaagattccctcagccatttcagttctcagtagctgatccaagtcatctgcaatttgttatggctgcttctatcctgagggctgaaacatttggcattcctattcctgattggattgagcatccgaagatgttggctgaggctattgagaaactaatagtcccagactttgagccgaagaaagatgtaaaaattgtaacggatgagaaggctactacactctctgttgcatctatagatgatgcagcagttatcgatgaactcatcttcaagttagagctttgcacgaaaaatttgccactagggttcaagatgaaacctattcagtttgagaaggatg

SEQ ID NO: 235264 - DNA, 407 bp, Gossypium hirsutum
aattcttctttgtttgccacagagtattgagaaaaatcgctttgctgcacttccttatttgctaatatgacgctgattacagatctcgttaaccttaatctctccgactgcactgacaaaatcattgctgaatacatatggatcggtggatctgggacggacctcataagcaaagcaaggacacttgctggtcctgtaagtgacccttcaaagctacccaaatggaattatgacagtctcagcacaggtcaagcccgtggtgaagatagcgaagtcatcctatatcctcaagctatcttcaaagacccattcaggaggggaaacaatattcttgatatgtgcgatgcttacacaccagctggtgagcccatccgcacaaacaagagatgcaacgctgccaagatatt

SEQ ID NO: 235265 - DNA, 410 bp, Gossypium hirsutum
gcagctgcaccacaactacagagaagagagtaaaggggaaaaaaagcgtcgtcgtttttgcttcttcttctacttcgctctctctccttctccgaagttcctctttcgttctttcatttattcagtattgtaaaagatggccgacggtgaggatattcaacccctcgtctgtgataatggaactggaatggtgaaggctggttttgctggtgatgatgctccaagggcagtttttcccagtattgttggtcgtccccggcacactggtgttatggttgggatgggtcagaaggatgcctatgtaggagatgaagcacaatctaaaagaggtatccttactttgaaatatcctattgagcatggtattgtgagcaactgggatgatatggaaaagatctggcatcatacat

SEQ ID NO: 235266 - DNA, 239 bp, Gossypium hirsutum
caggccacttataatgggctagaacacccttgattgccaacatacacacttacttgatctcttcaggcaatccaagggatatgtgacttgcatatgctcatatcacattcgcttcacctgttcaatgggatcatggacagggatcccacaccctatacgatgcatagatgcttgtattatactcggctctcgtgaaagcgaggcaggtaatggtccaagctaaggtgtacaaaagggga

SEQ ID NO: 235267 - DNA, 385 bp, Gossypium hirsutum
caactccacctgctaaaatgcaccaatttccggtgcttctcagcctcatcgcagtggctgtactgctgatggtaactccagccattggataccggccatggcctcacttaaaacccaacagctccgatttaacgtttggaagctccaaaaaatgcgagggctcataagagatcgtccaaatgagataccatatgggaccagttttcaccgtcaacatcaccgttcacatagtttggtacgggcgatggcaaaaatctcagaagatgatcatccgtgaggacatcaactcaatctgcgacgttgatgcacaagcgcccttctgttgccggctggcggaagaccctacaactttatacggaccaaacgggcgccaacattttccata

SEQ ID NO: 235268 - DNA, 400 bp, Gossypium hirsutum
  unsure (1)..(400): unsure at all n locations
gagatgaggaaaatcatgggtgccaaagttctcttcttctttgctttgctttccttttcagctgtgtcggcatttgcacaggatgaggaagaccaaggtcttgttatgaacttctacaaggattcttgtcctcaggctgaagacattatcaaggagcaagttaagctactgtacaagcgacacaaaaacactgctttttcttggctgagaaacattttccatgactgtgctgtccagtcatgtgatgcttcactgctgctggactccacaagaaagagcttgtctgagaaggaaacagacaggagctntggcctaaggaatntcaggtacattgagaccatcaaagaagctgtagaaagggaatgtcctggagtttgttcttgtgctgatatccttgttc

SEQ ID NO: 235269 - DNA, 390 bp, Gossypium hirsutum
ctcgtgtccatcgcgtggctttcctatcttcatttcttcacactctccgacgaaagaaaccagagaaaaatgaccaagtgttacccaaccgttagcgaggagtaccaaaacgccgttcaaaaggctaagaggaagctaagaggtctcatcgctgagaagaactgtgctacactcatgctccgtctagcgtggcactcagctggaacttttgatgtcaagaccaagaccggaggtccattcggaaccatgaagcaacctgctgagctcgctcatgctgataacaacggtctcgatattgcagtcaggcttctcgagccgatcaaggagcagttccctatcctttcatacgctgacttctatcagcttgctggtgttgttgctgttgagatc

SEQ ID NO: 235270 - DNA, 405 bp, Gossypium hirsutum
  unsure (1)..(405): unsure at all n locations
gccgttttgttctcttaaattccaacaccaaaagggaaaaaatctgaaaaattacaactcgttcttgttgacctcggttcacccgccctttttttggttgtctcgaatcggtctcgagtntttggaactcagttcgtgacttggatctggtaaggcttttaaggtaaatcagaaactgtatcagaatgaaggcacttattcttgatggagggtttggaactcgattgaggccattgactctcagtgttccgaagccacttgtcgaattcgctaataaacccatgatcctgcatcagattgaggctctcaaggctgttggtgtaactgaagttgtgttggctattaattaccaacctgaggtgatgctgatacttttgaaggagttcgaaactaaactcgggatca

SEQ ID NO: 235271 - DNA, 342 bp, Gossypium hirsutum
aatttgttatccatggcttccgaaacttgttccccttctaacaagttgagattcctcctaggaatggttttatttcttcttatgaatatgaccactgaacagttgtcctctaccttttattcaacaacatgccctaaagcacttgccaccattaaatcagcagtcaactctgctgtgtccaatgaagctcgcatgggggcttctttgcttcgtcttcatttccacgactgctttgtcaatggatgcgatggatccatactgttggatgatacagcaaatatgacaggagaaaaaacagctgttccaaacagcaattcaatcaggggatttgaagttattgat

SEQ ID NO: 235272 - DNA, 400 bp, Gossypium hirsutum
ttatagctctctcctgattagaatttgtacaataaaaagaagcttttttgttttttgttaacattttcagatccaattcattactctcttcaaaggaccaaaaagaagatggcttcaacattcagcggcgatgaaactgctcctttcttcggcttcttgggtgctgctgctgccctcgttttctcttgtatgggagcagcttatggtacagcgaaaagtggtgttggtgtagcatcaatgggtgtaatgagaccggagctggtgatgaaatcgatcgtcccggtggtaatggctggtgtgctgggtatttatggtttaatcatcgctgttataatcagtactgggattaacccaaaggctaaatcttattaccttttcgatgggtatgctcatttatctt

SEQ ID NO: 235273 - DNA, 400 bp, Gossypium hirsutum
attttctctttatccaaacagagaaaagacccagggaagccaacttaccggaaacctgaaacgatggcgtttcgtttgagcaacaacttatttggaatcctcaactcgattaccttcctcctctcgatccccatacttggcgccggtatctggctgagacgagaaggcgtaacagaatgcgaacagttcttggacacgcccgttatcataatcggagtcttcctcatgttggtctcgctcgcgggactaattggcgcgtgctgtctcgtgactttgctactctggctctacctggtcgtcatgttcctactgatcgtcctcggcatagccttcaccatcttcgctttcgtagtgacgaacaaaggtgcgggacatgtattatccgggaaaggttataaag

SEQ ID NO: 235274 - DNA, 391 bp, Gossypium hirsutum
atagccccgaagcccaaccccttcccccattgaatttgatattttataaaaaaggatggggctgtcttttgctaagctgtttagtcgactgtttgccaagaaagagatgcgaattcttatggtgggtcttgatgctgctggtaagactaccattttgtacaagctcaagctcggtgagattgtcactaccattcccaccattggctttaatgtggagaccgtagaatataagaacattagcttcactgtttgggatgttggtggtcaggacaagattcgacctttgtggaggcactatttccaaaacactcaggggctaatctttgttgttgatagcaatgaccgtgaccgtgtggttgaggccagggatgagcttcatcgtatgctaaat

SEQ ID NO: 235275 - DNA, 396 bp, Gossypium hirsutum
gcagaatcaagggattgtgggtggagaagaagcggtgacggatctaacttggaactccgttttctcttcttaccgctattcccgacctatctctaaccccctcaatttctctcaggtcgatattccttgcgttcaagcgtcttcatggcttcaaagcggattttgaaagaacttaaggatttgcagaaggatccaccaacttcctgtagtgcaggtcctgtagcggaagacatgtttcattggcaagcaacaattatgggcccctccgatagcccttttgcaggaggtgtgtttttggttaatattcattttcctccggattatccattcaagccttctaaggttgcatttaggaccaaggtcttccatccaaacatcaacagcaatgggagcatt

SEQ ID NO: 235276 - DNA, 394 bp, Gossypium hirsutum
cttaaccatttcccaaatctcctccctcctcttctttagcgtccttttcatttccgctcatgcagcgcgctttgaaatccgcaatgagtgctcctacaccgtctgggcagcagcctctcctggtggtggccgtcgcctagaccctcggcaaagttggaccatcgatgtgcctgctggcactgctatggctcgtatttggggtcgaaccaattgcaatttcgatgccagtggtaggggtcattgccaaaccggtgattgtggtggactccttcaatgcaaaggttggggtgtacctccaaacaccctggctgaatatgcacttaaccaatttggaaacatggatttctacgacatttccttagttgatgggtttaacatccccatggtgtttggt

SEQ ID NO: 235277 - DNA, 404 bp, Gossypium hirsutum
gaaaaagaacgcagtcttttgatctctgccccaaagcaaaaagttgtcatcttttacaatcacaactactggttatttattttcatggctcaaggagattctaacttccagcaagacatggctaaagaggaagaagaacagaggctgaaatacttggagttcgtgcaagtagccgccgttcacgccgctttgtgcttcaccaacctttacctttacgctaaggaaagatcggggccgttgaaacctagcgtcgagaccgttgagggaacggttaagagtgtggttggaccggtttatgataaataccatgatgtccctgttgaattccttaaattcgttgattccaaggtgggtgaatcagtgaccaaacttgatcgtcgagtccctccagtcatcaaacaggt

SEQ ID NO: 235278 - DNA, 408 bp, Gossypium hirsutum
aagatatctacttcattgctttcttttagctcttcttactaccaaagcagcatctcatctttttcaatccaatgccaatgccaatgccaatcgaaagagctatattgtgtatatgggtgaccgacttaaagatggagcttccacagctttgcttcatggcagcatggtacaagatgtttttggcagtgagtcgaagacagtgctgtacagctacaaaaagagttttaatgggttcgtggtggatttgactgaggaagaagcacaaaaaatggccggaatgaagggcgtagtatcagtgtttccaaatgaaaagagaaaactacatacaacaaggtcatgggattttatgggattccctcaacaagttgaaagagcaaccatggaaagtgatgttatcattggagtttt

SEQ ID NO: 235279 - DNA, 393 bp, Gossypium hirsutum
cttttagggggggggggtttagatcgtgtgctttttttcagtttctcaaaaaccatggcgatttcttcgactttttccgctgctaaattggatagtttgttgatgaattattgttcatcgtcttcggcttctttttctggggcttattttcaagatcaacaacaaaagaaggtctttcccaggcctaatcatggaaataaaggtatggtttcgaggaatgggggagttagatgtgaagctgctgaattcaacgccgctttgggaccccaaaaaatcgatctttctaaggcttctgcactgtcagctcttcaacaactcaagacatctgcggctggcagatataccaagggaaggggcaacattggtgtcatagggctcaatgttcacactgca

SEQ ID NO: 235280 - DNA, 406 bp, Gossypium hirsutum
gtgagggtgacaagaaaaggaagacatcggtggtgtatctgaagtgacagaagcggatggccgctagcgttctgaagtgtggccgggacgaggatcggctcgttcctaatgaaatgaatgaaatcttcatggccaactgcaggcagaatgttatgaaactagccaaggcatggttatatcattcgagagcctacacaagatccactactagaactcgtgcacgcaggatgaaagaggccacgagacagggtggacatcatgactatggtaagaggaacgataccagggaggctagattgcatacaaagatcctgtggatgatgagaatgcatgtactaaagcgttggcttcgtatgtacagagaatgcaagactgatgacaagctcatgtaccatgacatgtacat

SEQ ID NO: 235281 - DNA, 399 bp, Gossypium hirsutum
gttttgatgattccggtatgccggaggttcctgctaagtggcgtggtgagtgtgaatcggctcctgattttaatcccaagttttgcaacaggaaactcattggagctcgaagcttttcaaaaggttaccgtatggcatccggcggtggtgggatttacaaaaaaccgggagagatccagtccccgcgtgataaagatggtcacggtacacacactgctagcaccgccgctggatctcacgtggcaaacgctagtctcctcggatacgctagcggaacggctcgtgggatggcgactcacgcccgcgtcgccacctacaaggtttgttgggaaacgggttgtttcggatccgacattctggccggtatggaacgggcaatcgaagacggcgtcgacgtcc

SEQ ID NO: 235282 - DNA, 354 bp, Gossypium hirsutum
gttccacgaaaacccaccttgaaatttgccaagtttatcactatgatacaccatgccgtctggctgacaacaggtcgcgaatctccacaggccgccacgcctgcaaatgaggtgcctggtcacatgacccactccatgccatctaacgagattgagatctttaaatgttggcagggctggagttataacaactgtttgactcacctcacaccattggaacaaatgaggcaaccgtccggctctcttacagatactaaatctgacggattgtatgatcaagtgaaacagcttagggcatggacaaagcagatccccgattgttactcgggcgctgtggttcttaatatcatcacc

SEQ ID NO: 235283 - DNA, 389 bp, Gossypium hirsutum
atccatcatgtctccaataaaaactagctttatatccttacttatcatcggttccatgggcgttgctgtcgccgtcgccgacaagacacacgtcatagatttccaatggcctaacctctacccagaaggcatggcctgggacctattagcccagcacttcatcgtcggttccctaaaccaccgtacaatccactccgtgtccgacgcaggcgttgacaaaactctgatctccgatcccgccctccctgaaaacgttactgttttaggtgtgacggtcgatttcactaaaaaccgccttctcgcttgcctccactctgtttcccctctacctacattcaacgccctcgtcgcctacgacctccgcacccgtcgacgactatttctctccc

SEQ ID NO: 235284 - DNA, 399 bp, Gossypium hirsutum
gtgaggcggcggaggaagctaacgtccctgcagcggctgcggcggaagcacccacaacagggaccgagaagcaaccacataagcttgaaagaaagtggaccttttggtttgataaccaatcaaagcctaaacaaggcgctgcttggggttcctctttacgcaaagtttacacttttgacactgtagaagaattttggtgtttgtatgatcaaatattcaagcctagcaagttgcctggaaatgctgatttccacttgtttaaggctggaattgagcccaaatgggaagatcctgagtgtgctaatggaggaaaatggtctgtcactagcaacagaaaggctaatcttgagaacatgtggcttgaaagtttgatggcattgatcggggagcaatttgatg

SEQ ID NO: 235285 - DNA, 396 bp, Gossypium hirsutum
ctttttggcaatcaattttgtaagcaagtatggctaatgacgttgaggatgctggtgagttccaagccaaggactaccatgatcctgcaccagctccattggtggacggggaggagttgacaaagtggtcattctatagggatggaatagccgagtttattgccacgctcttatttttatacatcactgtgttgacagtgatcggatacaagagtcaggttgaccctgatcagggcagagactaatgtggtggtgtaagcattcttggcattgcttgggcttttggtgagatgatctttcatgatatttactgcactgatggtatctctggatgacacatcaacataccacagacctttgggcttttgttgactaggaacgcatgcttagttcgag

SEQ ID NO: 235286 - DNA, 388 bp, Gossypium hirsutum
  unsure (1)..(388): unsure at all n locations
caaagctataaagatggagaagattgagcacaccacggtgaccaccaacggcataaagatgcatgtggcatccattggctccggcccaataatccttttcttacacggcttccctgagctttggtacacctggcgccgccagcttctttcgctctcatcccttggctaccgttgcgtcgctcccgatctccgtggctacggtgacagcgacgcccctccatcgcccgaatcatacactgtttttcacgttgtgggggatctcgtaggcctcctcgacgcccttggtgttgacaaggtgttcttggtggggcatgattggggtgcgatgattgcttggaatttttgcttgttcaggcctgatagaatcaaggctttggtcaactngagc

SEQ ID NO: 235287 - DNA, 403 bp, Gossypium hirsutum
ctttttcattggaagcttctcttccaaagatggactatgtgtacggaccaggaaagaaccatctctttgttccagggccggttaacatcccggaaccagttcttcgagccatgaacaggaacaatgaggattaccgttcccatgccattcctgccatgacaaaaactcttcttcaagatgtcaagaaaattttcaagactactactggaactccctttttgattccaactacaggaactggtgcatgggagagtgcactcactaataccctgtcccctggagatcgaactgtatcttttctaattggacaattcagtctgctgtggattgatcaacaacaacgcctcaacttcaacgtctacattgttgaaagtgagtggggtcaacgtgctaaccttgacat

SEQ ID NO: 235288 - DNA, 401 bp, Gossypium hirsutum
atttagatcttgaagtgtgagatggcgacaacatcagcaacaaccttctcaattgggtcgactgtctccttcggaagcaggggaaatccacttccacaatctaaaccttttgttgcgaggttcacctgcccaaattcacttgcaagttttagtggtctcaaggcagcaacatatgtgaactgtgagtcagagtcctcattcttcaccaaggaaagcagcgccgctcttagaggctcatttgtaccaaaagcacagaaagcaaaccagaagtctcagaatggtctacagcctgtggcatgttacaaagtcgcaatacttggagctgctggagggatagggcagccattatcccttataatcaagatgtctacattagttgcagccctgaacctctatgatat

SEQ ID NO: 235289 - DNA, 394 bp, Gossypium hirsutum
aaaaaatgagctttcttcaggccttgtcagttttccttttgtttttgtcgtatgtagtcgtaggatcagctgagcagtgtggaaggcaagcaggtggtgctctttgccccggtggtctatgttgtagccaatttggctggtgtggcagtactgctgactactgcacagttcctggttgccaaagtcagtgcagcggtagtggccctgcccctgggcctggtgggctaaccaatcttatatcaagagagacgtttaatcggatgcttttgcataggaacgatggggcttgtcctgcccgtggcttctatacatatgatgctttcattgctgctgcccgttcctttcctgcatttgctacaactggtgaccaagctactcgcaagagggaaatagc

SEQ ID NO: 235290 - DNA, 397 bp, Gossypium hirsutum
ccgtttcctcatcggttgccttggtgcactagctcctcttcccctgtcctctatttgctcactcggaggtgttaacctaaactatagctcaattgaagcctcccttccagctgtagaagcaactcaaaaacaccccggtgatcccactgcagttgccgttgtggaggtcacacaagatggccgccataagattttaggagaaatctcggcctcaaaactatggaaatgtgactatttagctgcagcttgggcattagccaacctctcagccggacaatttgttatgggggctgaggataatgtgagttcaagattgcttcctgatatttcggttaattcaacagttgaagataataaggtagcgaatggtggtgggtcagcaagggcaagaaaattc

SEQ ID NO: 235291 - DNA, 390 bp, Gossypium hirsutum
  unsure (1)..(390): unsure at all n locations
ctagcaagagcagtgctgcggcatttcttcctcaaaagacccgtcaaacagaaatgaagttcaacattgcaaatccgactactggttgccaaaaaaagctggaaattgatgatgaccagaaacttcgagccttttttgacaagaggatctcacaggaagtcagtggtgatcccctcggtgaggagttaaacggctatgtattcaagatcatgggaggctgtgataaacagggttttccaatgaagcaaggagttctcactcctggacgtgttcgtcttttgcttcacagaggtactccctgcttccgtgggtatggtaggagaaatggagagcgcangaggaagtcagttcgtggatgcattgttagtcaggatctttcagttttgaact

SEQ ID NO: 235292 - DNA, 395 bp, Gossypium hirsutum
gctaaatcttatttacctgcaaactttgggtttatggcttcaagaatgctgctttttgggctgtttatggtatccctatataccacaagtgctcaaataggtgtttgctatggacagctcggcaacaacttaccatcaaggcccgaagttatatccatcttcaaccagagaaacattagaagaatgcgactctacgcgccagaccaacctagtctccaagctctcagaggaaccaacattgagctgatgctcggcgttccgaattccgatcttcaacgtatcgcggctagccaagccaatgcaaacatctgggtccagaacaatgttagaaactttggcaacgttaagttccgctacattgctgttggaaacgaagtccaaccttccgatccggc

SEQ ID NO: 235293 - DNA, 418 bp, Gossypium hirsutum
  unsure (1)..(418): unsure at all n locations
ggcgcgacccacgcgtncgtaaattcataaaacatcccttcccgtcttcagccggaggtaagtcatggttaaacataacaacgttgtgccaaatgggcacttcaaaaagcactggcagaactatgtgaaaacctggttcaatcagccagcaagaaaggctagaagaaggattgcaaggcaaaagaaggccggtaggatctttccaagaccaacttctggacctcttcgcccaatcgtccatggccaaactttgaagtacaacatgaagttgagagctggcaagggtttcactcttgaagagcttaaggctgctggtatttcaaagaaacttgcacctaccattggtattgcagtcgatcaccgtcgtaagaacaagtcccttgaaggtcttcaagccaatgttcagaggcttaaaact

SEQ ID NO: 235294 - DNA, 438 bp, Gossypium hirsutum
  unsure (1)..(438): unsure at all n locations
cggaanncccgggacgacccaggcggcccacgcaaccaagctcnctncagcacccgcaatacaaaaacaaatcgaaagggcatccccgcgctgggggtaccttacttggccgccatgattattccagagaagaatcccagagaaatctgcaaatacctatttcaagagggagtttgctatgcaaagaaggattacaatcttgcaaagcaccccgagatcgatgcacccaattagcgggtcattaaactgatgcagagcttcaagtccaaggaatatgtccgcgagacttttgcttggatgcactactactggtaccttactaatgatggaattgagtttctcagaacttaccttaatcttccatccgaaattgttcctgctactttaaagaaatctgcaaggccacccggtaggctaggcggcccacctggtgatcgc

SEQ ID NO: 235295 - DNA, 399 bp, Gossypium hirsutum
cacaaacccatatatgcaatactgtttcatttttcagcaaagctagaaagacaatgactaagggtatatgagactgcacaccaacgcgaaggggtgtttttggccaaagactaccatgatccaccacctgctacattgattgtggctgaagacataaccaaatggtcgtttaacagggcaaagattgccgagatcattgctacacttctcttcctgtatgtcactgtgaagaccgtgattggttacaaggaccaaaccgacccttctaagaacacttgtaacccctattgccgggtcgatggtattcttcgtattgctttgactttgcagagcatgatctatattcttgcttactgcaccgctcgtgtatgttgagggcatatcaacccggctgctaca

SEQ ID NO: 235296 - DNA, 400 bp, Gossypium hirsutum
cttccaccaaaggccacccttagatctcccaagttttccatgatctccaccattccttctggctccaaagaggttgggaatctgaaaaagcctttcacgcctccaaaggaggtgcctgttcagatcacccactccatgccgcctcacaagattgagatctttaaatctttggagggctgggctgagaacaacattctgactcacctcaaaccagttgagaaatgttggcaacccgccgactttcttccagatcctaattctgatggatttcatgagcaagtcaaagagcttagggaaagggcaaaggagatcccagatgattactttgtagttttggttggtgatatgatcaccgaggaagccctttcaacttatcaaacaatgcttaataccttggatg

SEQ ID NO: 235297 - DNA, 396 bp, Gossypium hirsutum
cttttgggaattacctcaaacaaaaattgttggaagtgtgtaatgaagaacagagaatgcagattctgttaatggttacagaagaaccagggcaacttgttagaatatctctcaacactcatggcactcgtgtagttcaaaagttgatcgagactctcaaaaccaggcagcaaatttcactggttatatcagtacttgagcctgggtttctatctctcatcaaggacctgaacggaaatcatgtcgtgcagcgttgcttgcaatgtcttagcagtgaagataacaagtttatctttgtagctgccgcaaagtattgcgttgatattgcaactcatcagcacggctgttgcgttgcaacgatgtattagccattcaactggtgagtatcgagaaaag

SEQ ID NO: 235298 - DNA, 402 bp, Gossypium hirsutum
caagagccaccattgctgcttcagctttatctttctgttattaccattactcctacagcttcattctgtcaaaggtgatctccagttgaactactatgctcaaagttgccccaatgctgaagagatcatcaaacaacaagtcatcaagctctacaacaaacatggaaacacagctgtttcttgggttcgaaatctcttccatgactgcatggttaagtcatgcgatgcatcgttattgttagagacggtgaatggaattgaatcggaacaaaaatcagataggagttttgggatgagaaatttcaagtacgttaagacaattaaagatgctctggagcaagaatgtccagggacagtttcctgcgctgatatcgtctctctttctgctagagatggcattgt

SEQ ID NO: 235299 - DNA, 403 bp, Gossypium hirsutum
ggcttccaacactgttgcatccgctgctcttcttcttaccttgaacttgttgttcttcactttggttagctctacctacgtgccttgcccaccaccaccaaagagccacaagcctacccacaagagcccaccctcggcacctaaacagccagccacttgccccaaagatacactgaaactaggtgtttgtgctgatttgttgggctcggtgcgcgttgttgttggaccgtcgaggaccaaatgctgctcactcatttcgggtttggctgatctcgatgctgctgtttgcctttgcactgctattaaagctaatgtgttgggggttaacctaaacgttcctgtttcattgtctttgctcctcaattcctgcgaaaagcaaatgcctgctggttacaaatgtgct

SEQ ID NO: 235300 - DNA, 403 bp, Gossypium hirsutum
acatcaatggctgctatgctccttctagggctcttcgctgcaaacttggatcctactgctgcacagattggtgtttgctatgggatgcttggcaacaatctcccaaattcatgggaagtcattcaactttacaaatcaaacaacatccggcgattaaggctgtacgatccaaatcaacaagcattacaagctcttagaggctccaacattgaagtaatattaggtgttccaaatgatcaacttcaaaacctcgctgacccttccaaagcacaatcatgggttcaatcaaatgttgtagcttattggccgagcgtttggttccgatacattgctgtcgggaacgaagtccctccttcatcttggttagctcaattcgttttgcccgccttagtgaatgtattca

SEQ ID NO: 235301 - DNA, 396 bp, Gossypium hirsutum
aaaaaaagaaaaagtttgaaacccggaaatgtcggacgaggaacaccattttgaatccaaggccgacgccggtgcctccaaaacctacccacaacaggccggaaccattcgtaagaatggttacatcgtcataaaaaaccgtccctgcaaggttgttgaagtttcgacctccaagactgggaagcatggtcatgctaagtgtcactttgttggaattgacatcttcaccgccaagaagctggaagatattgttccctcttcccacaactgtgatgttccacatgttaatcgtactgactaccagttgatcgacatttctgaggatggatttgtgagtttgctgaccgaaagtggagacactaaagatgatcttgggctcccaactgatgagaacct

SEQ ID NO: 235302 - DNA, 395 bp, Gossypium hirsutum
gaaaattaagcgcgtggtttggacctgacgtagaaggccactaccaataattcttctataaatttcgattccttccaccacctctgcttcatactaacgccaatcaatatcctcttcttcctcttccctcagatttttttctcttttcccaaagcaaaacaaaagccatgtctcagactgttgtgctcaaggttggcatgtcatgccaaggatgtgttggagcctgtaagagagttctggggaaaatggaaggtgtggaatcatatgaagtagatttggagcaacagacagtgactgtgaagggcaacgtccagcctgatgctgtgctgcagaccgtgtcaaagaccggcaagaagactgccttttgggaagcacaagctttggctgaatccgag

SEQ ID NO: 235303 - DNA, 399 bp, Gossypium hirsutum
attttgtaagcaagtatggctaaggacgttgaggttggtggtgagttccaagccaaggactaccatgatcctccaccagctccattagtggacggggaggagttgacaaagtggtcattttatagggctgtaatagccgagtttattgccacgctcttatttttatacatcactgtgttgacagtgatcggatacaagagtcaggttgaccctgataagggcagtgacgaatgcggaggtgttggcattcttggcattgcttgggcttttggggggatgatctttatccttgtttactgcactgctggtatctctggaggacacatcaacccagcagtgacctttgggcttttcttggctaggaaggtgtccttagttcgagccatattttatatggct

SEQ ID NO: 235304 - DNA, 394 bp, Gossypium hirsutum
aaatgatttgactgaagtagtcaaagaaatgagtgaagaaggcaaagaatacctctcaacggctgccgagaattcccctcctgaagtcaaagaaatcgttgagaccttctcttcctccgccgaagatttcaatgacgtttccaaagttcatgactttcatgtcggtataccttatggttttattctttcagttgggggatttctttctttcatggtgacagggagtatatctgccattaggtttggtattattctaggtggagctcttttggcattaagcgtatcgagcttaaaatctcataaaagaggagagtcgtctcctcttgccatcaaaggacaagcagtgatctcatctgtactacttttgagggagttaagcttgctgattcggaga

SEQ ID NO: 235305 - DNA, 392 bp, Gossypium hirsutum
gttcttctcccctttccccctttctccctttctttccctctcctaaactaacgtttcaaaccacactccctttacctcaaaagctctctccttttcttgtttttgcggaaagaaaatgaatcccgctgataacactgaccaccctcagcttccaactatcaagatccaccacccatcatcccctcaccaccctacctgtgctgctacccccaccccaacatccggtgcccgacgtaagatcggggtagccgtcgacctctccgatgagtctgcttttgccgttcgttgggctgtccagaactacctcaggcccggtgacgccgtcatccttctccacgtgtcccccacttcagtactctttggagctgactggggtccactccctcaaaccc

SEQ ID NO: 235306 - DNA, 402 bp, Gossypium hirsutum
cacaaacccaaatctccaattctgtttcatttttcagcaaagctagaaagacaatgactaaggatattgagactgcagagcaacgtggaggggagttctcggccaaggactaccatgatccaccacctgctccattgattgatgctgaagagttaaccaaatggtcgttttacagggcagtgattgccgagttcattgctacacttctcttcctgtatgtcactgtgttgaccgtgattggttacaaggtccaaaccgaccctgctaagaacactgttgaccccgattgcggtggcgttggtattcttggtattgcttgggctttcggtggcatgatctttattcttgtttactgcaccgctggtatctctggagggcatatcaacccggctgtgacattcg

SEQ ID NO: 235307 - DNA, 388 bp, Gossypium hirsutum
gaactctcctgatcgtgcttgcactctcgcaaaacaggcttttgatgaagccattgccgagcttgatacacttggagaggattcatacaaggacagcactttgataatgcaacttcttcgtgataacctcactttgtggacctcagacatgcaggatgatgggacagatgaaatcaaagaagctcccaaacaagaggatgagaaacaaccgtgaagtctctaatcttcatgggagtgttttacttctctggttgtttttgtatggagaagtcgctcggtcctactatcgtcttcaattacttgtttttagtagatcacgcctcaatttatgaaccttggaagtactcctaagaatttcttagtgtttcactggttatttgttttgagt

SEQ ID NO: 235308 - DNA, 403 bp, Gossypium hirsutum
ctttttcactttatgaagctttcatttctactccactctttttctcatcttcagatctcatctccttccctaaggttaaccaatggcaacagttcgaaatctgaaaatcaagacatccacttgcaaacgaattcttaaagagcttcactcatatgagaaggaagttgaaagagaagctgctaaaacagctgacatgaaagagaaaggagctgacccttgtgacctaaagcaacaggaaaatgtgctggctgaatcaaggatgatggtccctgattgtcacaagcggctagaggcttcattagctgaccttaaagcaactttggctgaattggaggaagcgaatgagaaggaaggccctgaattcgaagatgctcgcagcaccatcatcgaagttgaaaagttg

SEQ ID NO: 235309 - DNA, 393 bp, Gossypium hirsutum
ttctcatttagcattacgataaccaatcatggtagttatgcacccacttttccgatcctcagataaatcgggaatttaaccagtttttgcccaccattttcatcttcaccccaagcacgcttgaactcttcaaccacatgctcgctcaaaagctccacacccttctccttacccttctgatacgcggaccatgatcttaaataagtaaagtaatcctctaaacccatccatctctcattctcaaactcaaacggtcccgtactatcctctccatcgactgcctcgaacggaaaatcgatggttttgtacttatcatccaccatctgtcgtgctgaatcccagtatgggtttttgtaaaatcgttcaagcaccttgtccatggagtcgttgact

SEQ ID NO: 235310 - DNA, 408 bp, Gossypium hirsutum
ctcactcgccgactcgcctctcgcttattggttcaagatctggttttgatctgatcagatcggataaaaatatcaaaacatgtttgggagagcaccgaagaaaagcgataataccaaatactatgagattttgggagtatcgaaaaacgcttctcaagatgatctaaagaaagcttatagaaaagccgctattaagaatcatcccgataaaggcggcgatcctgaaaagtttaaagagttggctcaagcttatgaggcgctgagtgacccggagaagcgtgagatttatgatcagtatggggaggacgcccttaaagaagggatgggcagcggtggcggaggacatgaccctttcgatatcttccagtcattctttggtggcaatccttttggtgctggtggaagcag

SEQ ID NO: 235311 - DNA, 448 bp, Gossypium hirsutum
gcccgcggcacacggtccggaattgaccgacgcgtccacacatacgggccaacgctgaaaattatatcatcgaaacaataccttcggctccaacttcagctcaaaaatatgtcaggggacgaagtggcggctgcccaacccgaggcggcgcctgcactcggtgagccaatggacatcaacacagccttgccccttgtggttaggaagtcacgagctcacggtgggctcgcacggggcttgcatgaagctgccaaggcaattgaaaagcacaatgcgcatctttgcgttatagctgatgactgcgaccagccggactatgttaagctggtcaaggcactttgtgctgatcataatgttaaagtgctacgtgccccgagcgcaaaaacactccgcgagtgggctggtttgtgtaagatagactctgaaggtaaagcacgaaaggtagttg

SEQ ID NO: 235312 - DNA, 413 bp, Gossypium hirsutum
gaaagtttcaatggcaaccctcaaagttccagttcacgttccttctgcttctgaggatgctgagcaacttcggaaagcttttgaaggctggggcacgaacgagcaattgattatcgacatattggctcacaggaatgcagcacagcgcaattcaattcggaaagtttatggtgaagcttatggggaagatcttctcaagtgtttggagaaggaacttacaagtgatttcgagcgggctgtgctgctttttacgttggaccctgcagagcgagatgctcatctggctaatgaagctacaaagaagttcacatcaagcaattggattctcatggagatagcttgcagtaggtcttcgcatgaactactcaatgtgaaaaaggcgtatcatgctcgttataagaaatcccttgaag

SEQ ID NO: 235313 - DNA, 388 bp, Gossypium hirsutum
cacctacactgtttaacgccaagacacaggaaagcaacaccttttcttcagatccttctgaaaatcacgcaatcatgtcacgtggaaaataaccccaaaagatccaaaaacccaatattcctttttcattgttcttcccattttcagtttctcaaatgcaaaaaaatgttaaagactgtaattttcttttttatactaaactggttttaacctttaagctcatcaatggccgcatcttcactttcgaaatgcaacaccggttctctgaaccagtaaagaattggtctaactccaccggaaaactctctcattggcctttaaaagattcttttgaatactacgccgttttagctcaccgggatcgtctcctacgtggccgtaaactctc

SEQ ID NO: 235314 - DNA, 401 bp, Gossypium hirsutum
tcgcccagctgctgcaaattatctctcgaaacagtacctccggttccaacttcagctcaaaaatatgtcaggggaagaagttgcggttgcccaacccgaggcggcgcctgcactcggtgagccaatggacatcaacacagccttgccccttgtggttaggaagtcacgagctcacggtgggctcgcacggggcttgcatgaagctgccaaggcaattgaaaagcacaatgcgcatctttgcgttatagctgatgactgcgaccagccggactatgttaagctggtcaaggcactttgtgctgatcataatgttaaagtgctacgtgccccgagcgcaaaaacactcggcgagtgggctggtttgtgtaagatagactctgagggtaaagcacgaaaggtag

SEQ ID NO: 235315 - DNA, 400 bp, Gossypium hirsutum
aagaaagtaagaaaaaacactaaaacctccctgaaatctgagtccaggaaagaaaatctgaatgcaaatcacttgcttcttgaagagcccataagaatggcttccattcttgagccatcaaagcctagtttctttcctgcaatgactaaaattgtggggacacttggtccgaagtcgcgatctgttgaaataatatccgattgccttaaggctggaatgtctgtggcgaggttcgatttttcgtggggtgatattgaatttcaccaagagacattggaaaatttgaagactgctgttaaacgcactaggaagctttgtgccattatgcttgatactgggggtccagaattgcaagtagttaataaaacggagcaccccatttgccttgaagcagatacaa

SEQ ID NO: 235316 - DNA, 402 bp, Gossypium hirsutum
gcgaaaaggggaaaggaaacaactctccttccttccgacgataaaaacccttccccttcctcttgctcttcatttcaattcaatcttcctgagtcaaaggactgtgatggggcagcaatcgctgatctacgccttcgtggcacgaggcaccgtcgttttagccgactacactgagttctccggcaacttcacctccattgcttctcagtgcctccagaaacttcctgcttccaacaacaagttcacttacaactgcgacggccatacctttaactatctcgttgataacggctttacttactgtgtggttgctgttgaatccgctgggcgacaggtgccaattgcctttcttgagagaattaaggaggattttaccaagagatatggtggaggaaaagctgc

SEQ ID NO: 235317 - DNA, 389 bp, Gossypium hirsutum
aaaaaaatcacctactctctcactttgctctcttcttgttcctgtcctctttcaccaaactatcgccgacaacctctccaaaagaatggcatatgaagggattctgttggggatgggtaatcctctccttgacatttcgttagtcgtggacgaagagttcttgaaaaaatatgatatcaagttgaacaatgcaattttagctgaggagaaacaccttcccatgtatcaagaaatggcatccaagcccaatgtagagtatattgctggaggtgctactcaaaattcaatcaaagttgcacagtggatgcttcaaattcctggtgcaactggttacattggctgcattgggaaggacaagtttggggaggaaatgaaaagaactcaaaagc

SEQ ID NO: 235318 - DNA, 340 bp, Gossypium hirsutum
ctcctgctgagtttgctaagatcaataacaagcttgggatccggaaggaagacctgcccaagtgtgaagaacaactggagctaaaaattgccaaggcgcaattggaggagcttgagaaggatgctcttgaagcaatggaaacacaaaagaagcgggaggaatttaaggatgaggcaatgcctgttgtgaagtcattggacatccggaacttcatctgaaactcgaaattaccctttggtggttccagcttgagggggaacaaaggtaactgttcaacgagtgcttaaaacctttctttttcattttgctacaatgatatgatgatttataataatgaaaa

SEQ ID NO: 235319 - DNA, 402 bp, Gossypium hirsutum
cttacagctacagggcagagcttgctttgaagttgaaaggtgtttcttatgagtacataaatgaggatatctttggcaacaagagcgatttgcttttgaaatacaatccggttcataagaaagtcccggttcttcttcacaacgggaaaccaattgtagagtctcttgttatacttgaatacattgaggaaacttggaagcataatccctatttgccacaagatccttatgacaaagctaccgctcgattctggatcaagttcatcgacgaaaagtgctttcctaccctttggctagctgcatggagcgccgagaatgagcgagaaaaagtgacgaatgaagcttgcgagtatctgaaaacgcttgaaagtgcgcttaatggaaagaaattctttggtggag

SEQ ID NO: 235320 - DNA, 379 bp, Gossypium hirsutum
ctctcttctttcctcctagcccaaaaaaaaaaaaaccctctttcctttctctcgttctttttcccgttcaatcatgtcttgcttcattagcaaatatgccgatgagttggctaaaaacgctgcttacattggaacccctggaaagggtatccttgctgctgatgaatccactggcaccatcggcaagcgtctttcaagcattaatgtagagaatgttgaagataacaggcgtgctctccgtgagctcctattcacaactccaggagctcttcagtacctcagtggtgttattctctttgaggaaaccctttatcaaaaaaccgcttcgggcaagcccttcgttgatgttttgaaggaaggtggtgtccctactggcatc

SEQ ID NO: 235321 - DNA, 408 bp, Gossypium hirsutum
ataagccctccctccttttccaacctctccttcttctttgaaatttagctgaaatggctactgcaacaatgagcttcaatttggtgggagcatttaggggtctttctctagcatcaagctcgacgtcgtcctttatgaaaggagaagtgggttccattcacaaaacggcagtcgtttcgttcccgaggaagtctccgttccctttgacgatcgaatcggcgcacaaaaaaggagccggtagtactaaaaacggtcgcgattcaaagggtcaacgactcggcgtcaaaatctacggcgaccaggtcgccaagcccggcgctattatcgttaggcaacatggaaccaagtttcatccagggaaaaatgtggggcttggcaaggatcacacaatcttttcattgattgatg

SEQ ID NO: 235322 - DNA, 401 bp, Gossypium hirsutum
ctctttacccttctctcaccatgtcattgctgtctttttccttgttgttgctgtttgcttttagtgccaaagctgttgttcccccatctgaaacttttaggtttgtcaacgaaggggaatttgggccttttattgttgaatatggtgcagattaccgtgtcataagcatagctaatgcccccttccagcttgcgttttataacaccacccgtaatgccttcacccttgcgttacgcatggctacaacgcgttcggagtcgctcttccgatgggtttgggaggccaacagggggaaccctgttcgcgagaacgccacgttctctctcgggactgacgggaaccttgtcttggctgatgccgatggtcggattgcttggcaaagtaacactgcccacaaaggt

SEQ ID NO: 235323 - DNA, 397 bp, Gossypium hirsutum
  unsure (1)..(397): unsure at all n locations
ttctcccgctccttttcgctgcgatttcgtcttcaagatctcagttctcaaatcgtagcgctcttttctatcaagccatggctctgatcttgcatgcaggaaaaacaaacaaaaatgcctttaaggccctcattgctgcagaatatagtggtgtgcaggtcaaaatggttgagaantttgagatgggtgtgtcaaataagactcctgagttcatcaagatgaaccctttggggaaggttcctgtgttggaaacacctgagggtccggtatttgagagcaatgccattgctcgttatgttgctcgctcaaaggttaacaaccctatatgtggttctacattgattgattatggtcatatcgagcaatggattgattntgcagccttggaaattgatgc

SEQ ID NO: 235324 - DNA, 405 bp, Gossypium hirsutum
caggtgatggaggagggagtttctcttcagaaactcatcaccaagaacaacaagtaggaaactttcatggaggctcaaactctttgctttcaactaacagtaatggcggctccactgctcctccaccagctaagaagaaaagaaaccttccaggaactcctgatcccaatgcagaagtgattgctttatcaccaaagacccttttggcgacaaaccgattcgtgtgtgaaatatgcaacaaagggttccaaagagaccaaaaccttcaactccatcgacgaggccataacctaccatggaagctaaagcaaagaaccagcaccgagatccgtaaaagggtttacgtctgccctgaaccatcatgcgttcaccataacccagctcgagccctaggtgatctcaccg

SEQ ID NO: 235325 - DNA, 411 bp, Gossypium hirsutum
ctccactgactttcaccaccaccgtcactagcggcgccgtcacaaaatgtcgtcaacggagtctctcatcctccaactccatgaaatctctgccgttaaattcggtaacttcaagctgaaatctgggatcttctcccctatctacatagacctccgtctcatcgtctcttacccttccctcctccaccaaatctcccactccctcctctcctctctccctccccaaacacactttaacctcatatgcggtgtcccttacactgccctccctatagccacctccatctctctcgacacctccatccccatgctcatgcgccgcaaagaagtgaaagactacggaactgccaagtccatcgaaggtgtttacgaaaagggtcaagcttgtttggtggtggaagacctcgtaac

SEQ ID NO: 235326 - DNA, 420 bp, Gossypium hirsutum
aaaattattatttcaatccaaaaaatatccccaaaacctccccccatccccaccttcactccccataatcggccacctccacctccttaaaactcctatccaccgtttctaccaccatctttctcaaaaatacggccctgtcttctccctccgccttggatctcggctctttgtggtggtttcgtcttcagccgttgccgaggaatgcttcaccgtaaacgacatagttttagccaaccgtcccaagttgatcgcagggaagtacctcggctacaactacaccacagtttccacctcgtcttacggtgaccattggcgcaacttacgtcgcatcggcgctattgaaatcttctcctcgagtcgtctcaacgcctttgccgctgttcggaaagacgaggtccggcggttgttggtgagttt

SEQ ID NO: 235327 - DNA, 429 bp, Gossypium hirsutum
agctcacaagaaatatgcatttgagtcccacatttaccagaggatgttcagtgggtttcaacaggagaacttctccattaaattggataatgttacagtcaataaagagagcttcttccagcaatatctggctctgagggagatggatccattggacatgttgggccagaatcctgattccttattcgggaaattttcccagagcaagtacctgatggttgttcatccaaagatggaagcttcattctttggaaatttagaccagcgtaattatgtaacaggaggtgggcatcctaggactccattttaccaagcctttctaaaattggctaaatctatttggcttttgcatcggctggcttactcattcaaccctaacgtgaaagtctttcaagttaaaaggggaagtgaatactcagaggtttatat

SEQ ID NO: 235328 - DNA, 423 bp, Gossypium hirsutum
gaaatatttacggagttctaccgccatggggagaagacctgcagggtgttatcgtcagataaaaaacaaaccttacccaaagtcacgttattgtcgtggtgttcctgatcccaagattaggatttatgatgtgggaatgaaaaagaagggtgtggatgagttccctttctgtgttcacttggtctcttgggagaaggaaaatgtctctagtgaagctctggaagctgctcgtattgcttgcaacaagtatatggccaagtatgctgggaaggatgccttccacctgcgagtccgtgttcacccattccatgtcttgcgtatcaacaaaatgctttcatgtgctggagctgataggctccaaactggtatgcgaggtgcttttggcaagcctcagggaacatgtgctagagtagccattggtca

SEQ ID NO: 235329 - DNA, 432 bp, Gossypium hirsutum
gtccaacgcgcttgttcatctgtggagtttagattccttgtttgcttctattgaaagctcaactacacacagtacgcatctccctttctggttctggtgtctatgctattttctctgagaagctgaaaaagggcacgaatcggtggagttgcgcaggcgctcagcaattcttccattcagaaacaaagtactattgcctggcgcctctattcgaatctgctagcacttaacagagcattgtaaaattcatggagcaagagttatggcaacgagaggagaaaggattaataggaattctcccggatcaagaggctgctgagacgacctacatcgattccatgttatctcaaggcggcaccagtgaatcatgtgagcgaagctcgaacgtcacgttagcacatctgatgctcacacggttgatcggaaaaaccc

SEQ ID NO: 235330 - DNA, 433 bp, Gossypium hirsutum
cttagtttctgcttttttctttaaaacaataaagatcccttagttccttctttctttcttcgccttttcctccaacaggagttatgattcggctgtttaaagtaaaggaaaagcagagagaacttgctgaaaatgcaaatgggggagctcctaccaaaaagcaaagtccaggagagttgcgtttgcacaaagatatttctgagcttaacttacccaaatcttgtgctataacatttccaaatggaaaggataacctgatgaattttgaggtttcaattcgacccgatgaaggatattatttctgtggcacatttttattctcctttcaagtttctcccgtctatccgcatgaggcacccaaagttaagtgccagaccaaggtctaccatccaaatattgatttggaaggaaatgttcgccttaacatcttacg

SEQ ID NO: 235331 - DNA, 320 bp, Gossypium hirsutum
tcgttattaatcggcggaagcagatagcctctagccatgactttcaagcgtaggaatggtggccgcaacaagcatggccgtggccatgtcaaattcatccgctgttctaactgtggcaaatgctgccccaaggataagtcaattaagaggtttcttgtgaggaacattgtggaacaagctgctgttagagatgtccaagaagcctgcgtttatgacacttatactttgcctaagctgtatgttaagatgcaatactgtgtctcgtgtgcgatccactcccacgttgggagagtccgatcccgcaccgataggaggaaacg

SEQ ID NO: 235332 - DNA, 284 bp, Gossypium hirsutum
atgagatttatctattctcaagaaaaaggatatcgctagaataaaatatcatagcggggatatttaaagaggcggacggcccggatcatcatgacgcacacttcaagagcaaaagctgcattggcataaaaaccaaatgatgcttgattattctacagtgggtacacctgaatataatgacgcacaggtttccctgtagaaaggatatggtacggaatgcgataggtgcactctggaagctatcatgtatgaaatgcttgatgatatgcacccttttattcaga

SEQ ID NO: 235333 - DNA, 363 bp, Gossypium hirsutum
ccgtcactagcggcgccgtcacaaaatgtcgtcaacggagtctctcatcctccaactccatgaaatctctgccgttaaattcggtaacttcaagctgaaatctgggatcttctcccctatctacatagacctccgtctcatcgtctcttacccttccctcctccaccaaatctcccactccctcctctcctctctccctccccaaacacactttaacctcatatgcggtgtcccttacactgccctccctatagccacctccatctctctcgacacctccatccccatgctcatgcgccgcaaagaagtgaaagactacggaactgccaagtccatcgaaagtgtttacgaaaagggtcaagc

SEQ ID NO: 235334 - DNA, 394 bp, Gossypium hirsutum
gcgtccggttctaactcaacattcccatttcaaatctcaagctcccaaggtaattatgcggttcagaaacatattaattgaccgacccgaataggctactaacccggatgctctaaaggaagttttggctgagttaatctaaaccttgatcttcgttttcgctggatcggcctcaggaatgctttttaccaagttgaccgacaccggagcaccacccccgcccggtctcgtagccgccgttctagctaatggcttcggtcttttcgtcgttgtctccgtgggcgccaacatctcaggtggccacgtgaacccggccgtcaccttcggtgctttcgttggcggaacatcactcttttgcgcggcattctttactggatcgcccaactcctaggct

SEQ ID NO: 235335 - DNA, 429 bp, Gossypium hirsutum
caggaaaacaagaaaagcagagccgcatcactttttgctagctaagctactgggggagttattgttcttcagaacagcttctgcagtagctaataataacgttatatattatataaattttatacatcctttttaccctacgactccatatataagcaagtaaaaataaatatggctcgctctgtttcttcctttaagttccttggtgcttctgtttttgatgctctttatgtctccatatcaaggagaggttactcaggtgcaccgccggcggcagtgacggctagctttggtaggcctggagcgatggggaaagtggaacgaagatatgcgatgaaagagtcgtcgtcgtcggagacaagggcttattcttcagcttgggcgcctgaccctgttacggggtattaccggccggagaactgtggggct

SEQ ID NO: 235336 - DNA, 426 bp, Gossypium hirsutum
atgcgaaagtagagaagttggatgtaatgcatggatgtacacaggcacaccttgcacttgcctgggttctccaccacggtgatgacgactctcctattccgggatcaactaaaaataaaaatttcgaccgcaacattgcacgagtgcatgtaaagctcacagaagactgattggtaagaagttgcatatgctacccaaatccatgaggttgcagggtgtactcatcctgacggtttacagcagtacacttggagatatggccatacaccaccaaagaagaggacctatgtttagaagcgacctttcatgggtgttgggatgaatggatttcccaggaaactgcgtgcattacaagatcgatgagttactaaagctttgcattgtcattaatggagggttcagtgtttatgacgtaggtgcgtcata

SEQ ID NO: 235337 - DNA, 348 bp, Gossypium hirsutum
gataatacccaacacccaacctaaaaacatgtatcagatttggaagctcatgctcttagtttcacttttaatttgccaccttctatccaaggtgccgggaacatcatcggagccaccaaagcactttgtgctggttcatgggtcttgccatggcgcttggtcatggtacaaggtggtgccactgctaaaatcaggtggccacaatgttaccgccttagacctgggtgggtcaggggttgatccacagcaagtcaacactctgagatcgatctctgattacataaagcccttgagggaattcatggcatcgttacccaatgaaaaaaagtggtgcttgttgtcacagtt

SEQ ID NO: 235338 - DNA, 365 bp, Gossypium hirsutum
ttttcaaaccctagcctgtatctgggagccctttccaatggcttcgcgtcgactcctctcttctctcctccgctccacttctcgccgatctctctccaaatctcccagccctacccctcgcctcccttccccttcccccacgcgccgcccttttccttgcccttactttctctcacgcgatgctgagtactctacatctgcggctgctgccgcttctgctccatcgcagcctcctcccgctaagaagggcggaaaaggtaagatcactgatgagttcactggtgctggagccatcggtcaggtttgtcaagtgatcggtgccgtcgtcgatgttagattcgatgaaagtttgcctccgattttga

SEQ ID NO: 235339 - DNA, 430 bp, Gossypium hirsutum
cccgaccagggtttactattatacaaaagtttggaggagaacttttcaatgcaagacaagatttttctcctttcaatgtggttgcctggcatggtaattatgtcccatataagtatgatcttagcaagttctgcccttacaatactgttttaatcgatcatggtgatccatcaataaatacagttctgacggcaccaactgataaactgggtgtggcattgcttgattttgtcattttccctccccgatggttggttgctgaacatacattcagacctccatattaccatcgcaattgcatgagtgaatttatgggcctaatatatggtggatatgaagcaaaagctgatggttttctgcccggtggtgctagccttcacagctgcatgactcctcatggtcctgacaccaagacatatgatgccactgt

SEQ ID NO: 235340 - DNA, 433 bp, Gossypium hirsutum
gttttgaatctagggatttgcgggtggagaagacgagagctcatctctctgcttcaaagctcctgtccaggtagaattctcttcttcctttgcgttgtgttctttgttgttcagtcgccatggcttcaaagcggattttgaaggaactcaaggatttgcagaaagatccacccacttcttgcagtgctggtccagtagctgaagacatgtttcattggcaagcaacaatcatgggaccctcagattgcccttatgctggaggtgtgtttttagttaccatccatttccctccagattatcctttcaagcctcctaaggtcacgtttaggaccaaggtcttccatcctaacatcaacagcaatggaagcatttgtcttgatatcctcaaagaacaatggagccctgcactaaccattttcaaggttctgctctc

SEQ ID NO: 235341 - DNA, 403 bp, Gossypium hirsutum
ggggacaggagaggtagagaaatagtgtgatggcatccgggtggggaatcaacggtaacaaaggcaggtgctacgatttctgggtcgacttcagcgagtgcatgtcccgttgcagagaacccaaggactgtggtcttctccgtgaagattatctcgagtgcctccaccattctaaagagtttcaacgaaggaatcgaatttataaggaggagcaacgtaaattaagagctgccgcacgaaaagacaaggaaggcgaaaatggtgttcatcatcatgcatagtcataatttgtgatcctttaatttgccaataataataatgcgtggagattgttgtatttatgttgggattggatttttaactcttagctaaattaccttttggtttcctttcgttggaatgg

SEQ ID NO: 235342 - DNA, 437 bp, Gossypium hirsutum
ccggattggaattcagacacagtgaacttcaacctttgctgtttcctgtttctcgagaaacaaacagagaagagaaaggatggtgctctcctcatctctgcattcgctttgcataatcccccatacctctcaatctaaaatcccaagtatcttcaacctcctaaagtctcctttatccaaaacccacctcaaattcaaccccattttcaaaccctcttccctttcccttttccctcaaccatccaagctcagaccaaaaacccaaaatttccgtacccccaccatccgctccctctttaccggtatcgtcgaagaaatgggtgaaatcaagcaactgggtatggccgatcacggcggattcgatctcaaaatacacgccaaaactgttatagaggatgtccacctcggtgacagcattgcggttaatggaacttgcc

SEQ ID NO: 235343 - DNA, 408 bp, Gossypium hirsutum
cttattcttcttctattggtcttgctccgcttgctctgattcccagaaaaccatcgctctctttcaaggtgcatgcaacagtcgaagaaactgagcagccaaaatggtgggaaaggaatgcgggaccaaatatgattgatattcattctacaaaagaatttatcagtgccttaagtgaagctggggatagattagttattgtagaattttatggaacttggtgtgcttcctgcagagcattatttcccaagctctgcagaacggcgcaagaacatccggaaattatattcctcaaagtaaattttgatgagaataaacctatgtgtaaaagtttgaatgttaaggtgcttccttatttccacttctatcgcggagcagacggacagctagagtcctttttttgttcac

SEQ ID NO: 235344 - DNA, 440 bp, Gossypium hirsutum
  unsure (1)..(440): unsure at all n locations
cgtccggttcactgttcctactcaactcgtttgattttgatcagaccgtgatcatgccgatcagaaacatagccgttggccggcctgaagaggnnatcatgagagccgtcatataacacaagtgtatggtttttatgattaatgcttgagaaaatattgtaagaccaacgtgtggaatgttttttactgacctttttgattatttaccaaacacatctcttattgttagttgcagcttttgtatctatcgaattctcgctttatgtttcgacacgttttacattatttgagcattggaccgtgtacaggaagttcctcatgaaggtccaatgtgtgatcttttgtgtactgattcttgtgaccgttaatttatgggggatctattatagtggagttatttatacattttgactaattattgcttacgtattttatcctta

SEQ ID NO: 235345 - DNA, 390 bp, Gossypium hirsutum
cgaacattttcacagcttaaaacacaatatgactaaggatattgagaccacggcggagcaaggcggcggagcggagttctcagcgaaggactaccaggacccaccaccggcaccgttgattgacttggaagaactcaccaaatggtcgctttatagggcggcgatcgctgagttcattgccacccttcttttcttgtatgtcacggtgttgactgtgatcgggtataaagtccaaaccgacccggtaaagaatactgttgacccggattgtggtggtgttggtatacttggtattgcttgggcttttggtggcaatgatctttatccttgttactgcactgctgtatctctgaggacacataaccccgccgtgacgttggactgtcgtgg

SEQ ID NO: 235346 - DNA, 430 bp, Gossypium hirsutum
cactctcccaccccgaccgcttgattttgatcagacggtaatcatgccgatcagaaacatagccgttggccggcctgaagaagctactcatccagatgctcttaaagcagctttagctgagttcatatcaacgttaatcttcgtttttgctgggatctggttcaggcatggcttttaataagctgaccgacggcggtgcaacaactccggctggtctcgttgccgcctctctagctcacggatttgcgcttttcgtcgctgtctcagtcggtgctaacatctccggtggccatgtgaatcccgccgttacattcggtgctttcgttggcgggaacattactcttttacgtggtatcctttattggattgctcaactccttggctcaaccgtcgcttgcctgttacttaagttcgccactagtggcctggg

SEQ ID NO: 235347 - DNA, 433 bp, Gossypium hirsutum
gcagtctctcccgctccttctcgctgcgatttcgtcttcaagatctcagttctcaaatcgtagcgctcttttctatcaagccatggctctgatcttgcatgcaggaaaaacaaacaaaaatgcctttaaggcactcattgctgcagaatatagtggtgtgcaggtcaaaatggttgagaattttgagatgggtgtgtcaaataagactcctgagttcatcaagatgaaccctttggggaaggttcctgtgttggaaacacctgagggtccggtatttgagagcaatgccattgctcgttatgttgctcgctcaaaggttaacaaccctatatgtggttctacattgattgattatggtcatatcgagcaatggattgattttgcagccttggaaattgatgctaatattgccaaatggttgtatccaagactt

SEQ ID NO: 235348 - DNA, 326 bp, Gossypium hirsutum
cgacactccaaattttcagatttcctttcctttctcaccggaaaatgaaaaacatgggcgactttccgacgtttctagtcgtcgcacttttgatcttcagttgtctttcctatgttagatccgacgcttccgatcaccgttacaaggacggtgacgctgtacctctttacgccaataaggttggcccctttcacaaccccagtgaaacctatcgctacttcgatctacccttctgttctccagatcatgtaacggagaagagagaagctttaggtgaggttttgaatggagatcgactcgtgagtgctccttataaattgaatttt

SEQ ID NO: 235349 - DNA, 296 bp, Gossypium hirsutum
cttcaattcctcatttcaagggagagagtgtatcagtgtttcttccccttttttaccttaaatttttttccgccatggttcttcttccgtcgagaaaaccgccgccggccgtgagtacaaggccaaagacatgtctcaggctgacttcggtcgtctcgagatcgagttagctgaggttgaaaggcctggttaaagggctggtagaaccgagttcggccctgcccaacctttcaagggagccaaatttactggttcttttaacatgaccatccaacccgccgttcttattgaaaccc

SEQ ID NO: 235350 - DNA, 439 bp, Gossypium hirsutum
cccacgcgtccgctcactcaacattcccatttccaatctccgctcccaaggtaaatatgccgatcagaaacatagcagttggccggcccgaagaggcgactcaccccgatgctctcaaggcagctttggctgagttcatctcaaccttgatcttcgttttcgctggatcgggctcaggaatggcttttaacaagttgaccgacaacggagcaacaaccccggccggtctcgtagccgccgctctagctcatggcttcggtcttttcgtcgctgtctccgttggcgccaacatctcaggtggccacgtcaaccccgccgtcaccttcggtgctttcgttggcgggaacatcactctcttgcgcggcattctttactggatcgcccaactcctaggctcaaccgtcgcttgcctgttgcttaagttcgctaccggcgacct

SEQ ID NO: 235351 - DNA, 440 bp, Gossypium hirsutum
ctctttctctattctctttggcttatctatcgctttgatttcgcgtccttactgtgcactcgatggcaaatcgatggttgaggcctgaggtgtatccgctgttcgcggccgtaggtgttgctgtcggaatctgcggttttcagttggtgcgaaatatctgcatcaaccctgaagtcagggtaaccaaggagaacagggctgctggggtcttggacaactttgctgagggagaaaaatattctgaacatttcttgagaaaatatgtccgcaacaagacgccagagatcatgcccagtatcaacagcttcttcactgacccaaagtgaggctttactcttgctttatgctgaaactaaaataaaaaaatcgaagaactaactctcattcaatcaataccaagttttgccctttctttctgctgactgtgatgcaaatatgtg

SEQ ID NO: 235352 - DNA, 401 bp, Gossypium hirsutum
cccatctctcctctcatacttcactctaacgttccctttgaggttttaggaaaacagcagagaaattaaggaatggagaccttcctatttacctcggagtctgtgaacgagggacatcccgacaagctgtgtgatcagatctctgatgcagtcctcgatgcctgtttggcacaggatcctgagagcaaggtggcttgcgagacctgcagcaagacaaacatggtgatggtgtttggtgagatcactaccaaagccgacgtatactacgagaagattgtgcgtgacacctgccgtggcatcggtttcacatctgacgatgtgggtctggatgccgacaactgcaaagtgctggttaacatagagcaacaaagccctgatattgcccaaggtgtccatggcca

SEQ ID NO: 235353 - DNA, 431 bp, Gossypium hirsutum
caaatacccattttcaccaccatcaaaccacatcccacagacatgggtgcccacgaagaagaagccggaggtgaagagtacttgtttaagatcgtgctgatcggtgactcagctgtgggaaaatcgaaccttttgtcacgttttgctaggaacgagttcgacaataactcaaaggcaactattggagtagagttccaaacgcaatgcgtggaaattgatgggaaagaagttaaagcacagatctgggacactgctggtcaagaaaggtttcgagctgttacttctgcttactatagaggagctgttggtgctcttattgtttatgatattactaggaggagtagctttgacagcattaaacgttggcttgatgaacttaccactcattgtgaaactacattgacaagaatgctggtggggaacaaatgtga

SEQ ID NO: 235354 - DNA, 431 bp, Gossypium hirsutum
cttgggttgagtgtagagatgaggaaaatcatgggtgccaaagttcttttcttctttgctttgctttccttttcagctggctcggcatttgcacaggatgaggaagaccaaggtcttgttatgaacttctacaaggattcttgtcctcaggctgaagacattatcaaggagcaagttaagctactgtacaagcgacacaaaaacactgctttttcttggctgagaaacattttccatgactgtgctgtccagtcatgtgatgcttcactgctgctggactccacaagaaggagcttgtctgagaaggagacagacaggagctttggcctaaggaatttcaggtacattgagaccatcaaagaagctgtagaaagggaatgtcctggagttgtttcttgtgctgatatccttgttctgtctgctagggaagg

SEQ ID NO: 235355 - DNA, 441 bp, Gossypium hirsutum
ttttctttcaactcaaagtcccaagtagtattagaatcatgggtgttgtcacttataactatgactctacctcccctgtcgctcccgccaggcttttcaaggccttcgttcttgaagctgacaaggtctggcccatagctgcccctcatgcaatcaagagtattgaggttgaagctaatcctggccctggatgtatcgtaaagatcaactttgttgaaggccttccattccaatatatgaagcaccagattggaggacatgatgaaaacaaattttcatacagttacaatttgattgaaggtgggcctttggggaacaagcttgagaaaatcaactacgagaataagtttgaggcagctgtaggtggaggaagtgtttgcaagagctcgatgaaattttacacttttggtgactatgtaatcactgaagatgaaatcaagg

SEQ ID NO: 235356 - DNA, 442 bp, Gossypium hirsutum
gccaacccatgatgagatagactttgaattcttagggaatctgagcggtgacccttacattttacacaccaatgtctttacacaaggcaaaggcaacagagaacaacagttctatctttggtttgaccctacaagaaacttccacacctattccatcatttggaaaccccaacacatcattttcttggtggataacacccccattagagtcttcaaaaatgctgaatccattggtgtaccattccccaagagccaacccatgaggatttactctagtttatggaatgctgatgattgggccacaaggggtggattagtgaaaactgattgggcaaaagcacctttcacagcttattacaggaacttcaatgccaatgcttgtgtctggtcaggaacaagttcatcatgtgctaaaactaactcggtctccgccggtgcatgg

SEQ ID NO: 235357 - DNA, 432 bp, Gossypium hirsutum
atacccccctcactattgaagaatttcatatgcctcgtcctaaagctggagaagttcttattaaaaccaaggcctgcggagtatgccactctgatcttcatgttataaaaggcgaaataccattttctagtccttgtgttatcgggcacgaggtaactggggaaatcgttgaacatgggccacttaccgatcgcaaaatcatcgaaagatttccaattggatctcaagtggtgggagcttttatcatgccttgtggtaactgtttcttctgttctaagggccatgatgatttatgtgaagacttctttgcctataatcgggcgaaggggaccctttatgatggggaaacacggcttttcctccgcaacagtggaaaaccggtatacatgtatagcatgggaggccttgctgaatactgtgtcattccagcac

SEQ ID NO: 235358 - DNA, 416 bp, Gossypium hirsutum
agaagaaattgcatatatatagccctcagcaaacaaggatgaaaacagtaatgggatcccatagatcttcctcaacaagtattacaaatataacaagccaatgatgcaaaatcatagatagattcaacaaaatttggctcttatgttattagggacgtaacatacttaaaagataagataccctctaagtgcatttagccatgtaggcttcccatccttgaagacggtactcacgagctgcctcagctgggtttgctgccttaatgattccccgaccaacgattattatgtcgctacccctatcaaagatgactgaatacggagtgttgtattgttggccgagggcatcgccaccctttaccatttgaactccaggggttgcctgaatgaatgctggatttacaggtgcaccgggc

SEQ ID NO: 235359 - DNA, 427 bp, Gossypium hirsutum
tgataaaaacaaaatattttctcggaaaccaaacagtgtttgctttgatagtcaaatttcgaggtttagaaacgctgggctcacatttacgttgaaagctgtccagtctgatcccattcttgaatccaagtctcctgcaacttccaaatctcttgataggctaagattatttgttggtctgcctctagatgcggtttccgatggcaattcggtaaaccatgcccgggcaattggggcgggactgaaagctttgaaacttttgggtgtggaaggtgttgaattgcctgtctggtggggagtggtcgaaaatgagatggggaagtatgactggtcaggctatcttgctgttgctgagatggttcaaaaagcaggtctgaagcttcacgtatcgctctgcttccacgcttcgagtcaaccgagaattccg

SEQ ID NO: 235360 - DNA, 426 bp, Gossypium hirsutum
ctgggtctctctgtgtactgtcttccccttttccatttctcgtaaacaaagtgcataacattcgtctctcagatcctttcctcttagatcatcaaatccattcctttttttcaccaaaacatgagggaaatcataagcattcatataggtcaagctggtattcaagtcggtaactcatgttgggagctttactgccttgaacatgaaatccaacccgatggaatgatgcccagtgacacctctgtaggtgtagcaaatgatgctttcaacactttctttagtgaaactggttcagggaaacatgttcctagagctgtgtttgtggatctggaacctactgtgatcgatgaagttaggactgggacttaccgacaacttttccaccctgaacagcttatttctggcaaagaagatgctgccaataac

SEQ ID NO: 235361 - DNA, 405 bp, Gossypium hirsutum
cttcactcttctctcaccatgtcattgctgtctttctcctttttgttgctgtttacttttagtgccaaagctattgttcctccatctgaaacttttaggtttgtcaacgacggagaatttgggccgtatgttgttgaatatggtgcaaattaccgtgtcataagcatagctaatgcccccttccagcttgcgttttataacaccacctctaatgccttcacccttgcgttacgcatggctacaacgcgttccgagtcgctcttccgatgggtttgggaggccaacagggggaaccccgttcgcgagaatgccacgttctctctcgggactgacgggaaccttgtcttggctgatgccgatggtcggattgcttggcaaagtaacactgccaacaaaggtgtagta

SEQ ID NO: 235362 - DNA, 436 bp, Gossypium hirsutum
cacttcttctcttatttgaactcaaagtcccagctaatattagaatcatgggtgttgtcacttatgactatgagaatacctccccagtcgcccctgccaggcttttcaaggcctttactgttgaagctccgaaagtttggcccacggctgcacctaatgcagtaaagagccttgaggttgaagctaatcctagctctggaagtatcgtaaaaatcaactttgttgaaggccttccattccaatatatgaagcaccagatcggaggacatgatgaaagtaatttttcatacagttacgatttaatcgaaggtgggcctttgggggataagcttgaaaaaattagctatgagaacaggtttgaggcagctgcaggtggagggagtatttgcaagagctcaatgaaattctacactataggcgatattgttatcactga

SEQ ID NO: 235363 - DNA, 405 bp, Gossypium hirsutum
aaaaagaaaaatggcgtctttggctcaacagttcacaggtctaagatgtccaccactctcctcatctcggttttctgtgaaaccaaagcaaacccagaaagtgggcgcttttgcttctcctatagtttcagccgtggctgtctcaaatgcacagaccaaagataggcttgaactcaagaagatgttcgtggatgcttacgaacgctgtcgaactgctcctatggaaggcgtttcttttactgttgaggattttcaaaatgctctggagaaatatgactttgattctgagcttggaaccaaggttaaaggaacagttttctgcacagatggcagtggggcattggttgatattactgccaaatcttctgcatatctaccggtccatgaggccagcattcacaaaat

SEQ ID NO: 235364 - DNA, 387 bp, Gossypium hirsutum
aaagagcaggaaaacaagaaaagcagagccgcatcactttttgctagctaagctactgtgggagttattgttcttcagaacagcttctgcagtagctaataatatcgttatatattatataaattttatacatcctttttaccctacaactccatataagcaagtaaaaataaatatggctcgctctgtttcttcctttaagctccttggtgcttctatttttgatggtctttatgtctccatatcaaggagaggttactcgggtgcaccgccggcggcagtgacggctagctttggtaggcctggggcgatggggaaagtggaacgaagagatgcgatgaaagagtcgtcgtcgtcggagacaagggcttattcttcaacttgggc

SEQ ID NO: 235365 - DNA, 428 bp, Gossypium hirsutum
cttaaaccctagcagcttcattcgtttcttgctgtttctctcacaaatttctttgtcctttttctcttcttaaagttacattagcatattatggcattttctagcaaacttggaagccttctgaggttaaatgggcaaatcccagctacatccattcttagctctattcactgcatgtccacatcaaccaaaaagctttttattggaggcctttcatatggaactgatgatcaaactctcaaggaagcattttccgggtttggtgatgtgacagaagctaagattatcatcgatagagacactgggaggtctaggggcttcggttttgtaaactttgctgatgatgaatctgccagcaatgccttgtcagccatggatggtcaggaactcaatggccgaaatattcgagtaagttatgccaatgaaag

SEQ ID NO: 235366 - DNA, 361 bp, Gossypium hirsutum
gtcgcctctctttctccttcttcttcttcattctgttggctgctgctgctgctttggtggcgtgatttagaagccacaactcaatttcatataaagaaaaaaaaagtgagatggatccagacgcagtagccaaggccttcgtcgagcactactactccacattcgatgccaaccgggccggtttagccaatctctaccaggaaggttccatgttgaccttcgaaggtcaaaagatccagggctctcagagcatcgtcgttaaactcaccagccttcctttccagcagtgcaagcacaacatcaccaccgatggacgccagcctttcggcttcggcagtatgctattgtttgatagtgctga

SEQ ID NO: 235367 - DNA, 344 bp, Gossypium hirsutum
cacatactctttttaaccatcctcaaaccatatgccacatgcctgggtgcccgcgaaggaaaaacccggggttgagagttcttgatgacgatcgagctgatcggggtctcacttgtgggaaagtcgaaccttttgtcacgttctgctaggaactacttcaccagtaactaagaggcatctatttgtgtatagctcctaacgcagcgctttgaaatggatgggaacgaggttaacgcacagacatgatacactggtgactaagagaggataagagctgttacttttgattactatttgggagccgttggggctcattattgttaatgatatgactaggaggggta

SEQ ID NO: 235368 - DNA, 377 bp, Gossypium hirsutum
cggtctcaaagctccaacctttcgcccaccaaatggggttctttcttttctttttcctttcgcttctctctttagcttcttcagcttccagagtggatcagaaaaccttcatcgttagagtccaaaacgaagccaagccttccgttttcaccactcacaagcactggtatgaatcttcactttcctctgttctctccccatcaactcctacccaacttcttcacgtctacgacagcgttttccacggtttctcggctaagctttcgccgactgaagccctcaagcttcaaacgcttccccatgtcatcgccgtcatacccgaacaagtccggcacttgcaaaccacgcgttctcctctcttcttaggtctcaaaacc

SEQ ID NO: 235369 - DNA, 447 bp, Gossypium hirsutum
agtgttcaacctgtgctctctggagttgcggtgggagctggatggcagcgcgtagtggcatgggttaacattgcctcgtattatctagttggcattccaattggtgttgtgcttggatacgtttggaatatgcatgtcaagggtgtttggattggcatgttgctaggaacattgcttcaaacaattgtactggttgtgatcacttggagaactgactgggataaacaggtcatcttagctcgcactcgacttaataaatggtttgtacctgaatccagagaagacaaccaaaatgtggctgcctgatttcaaatgcatttctttaaaattttggggtttctttggcctcaactttgcaatataccaaatgaagttacatcttgtatgtgactgcaataacctgttgtggatgaatatttgtaacaaaatttgatgcgttgtaatttc

SEQ ID NO: 235370 - DNA, 424 bp, Gossypium hirsutum
ggatccttaagcagaggttgaaggtcccaccagcattgaaccagtttaccaagactcttgataagaaccttgctacgagtctattcaagctgcttctcaagtacagaccggaggacaaggcagccaagaaggaacgtctactgaaaaaggctcaggctgaggctgaaggcaaagcttctgagtctaagaaaccaattgttgtgaaatatggacttaaccatgttacctaccttattgaacagaacaaggcacaattggttgttatcgctcacgatgtggatcccatagagcttgtagtctggcttcctgctttgtgtagaaagatggaggtcccctactgcattgtcaaggggaaagcacgattgggatcgattgtctacaagaaaactgcatccgtcttgtgcttgaccacggttaaaaacga

SEQ ID NO: 235371 - DNA, 195 bp, Gossypium hirsutum
gtctgtagcaaccacatctgattggccttgggagttacagttacactggaccatcaaccaaagaaattaacgcctaccatgttcctaaaggggccacacttggcggtcctttactataataacccactcagattatgacaaaggctgccttacgattccattgtcctttgctaagtgagttcaagccccatattc

SEQ ID NO: 235372 - DNA, 408 bp, Gossypium hirsutum
aagaaaaaaaaaaaaaaaaccagacatggcttccaacactgttgcatccgctgctcttcttcttaccttgaacttgttgttcttcactttggttagctctacctacgtgccttgcccaccaccaccaaagagccacaagcctacccacaagagcccaccctcggcacctaaacagccagccacttgccccaaagatacactgaaactaggtgtttgtgctgatttgttgggctcggtgcgcgttgttgttggaccgtcgaggaccaaatgctgctcactcatttcgggtttggctgatctcgatgctgctgtttgcctttgcactgctattaaagctaatgtgttgggggttaacctaaacgttcctgtttcattgtctttgctcctcaattcctgcgaaaagcaaat

SEQ ID NO: 235373 - DNA, 331 bp, Gossypium hirsutum
caaaaacatagcagccatggcagtccgtatgcttcttgggttaggtgtcctgctactctgccttgcaaaggtttcatctgatctgaaggcagaagaagttataaccaatgtcggtgaggtgggttctttggttaccagaggcggaaacagaagactgatgctagagattgattgtggaggattatgcaagaaaagatgcagtcaacactcgaggccaaacagatgcaacagggcgtgtgggacttgctgcttgaggtgcaagtgcgtgccacccgggacttcagggacagggaggtctgcggacctgtatactgcatgacaccatggaacg

SEQ ID NO: 235374 - DNA, 421 bp, Gossypium hirsutum
ctttgtttgagtgtatagatgaggaaaatcatgggtgccaaagttctcttcttctgtgctttgctttccttttcagctgtgttggcatttgcacaggatgaggaagaccaaggtcttgttatgaacttctacaaggattcttgtcctcaggctgaagacattatcaaggagcaagttaagctactgtacaagcgacacaaaaacactgctttttcttggctgagaaacattttccatgactgtgctcgccagacatgtgatgcttcactgctgctggactccacaagaaggagcttgtctgagaaggagacagacaggagccttggcctaaagaaatttaagtacattgagaccactcaagaagcttttgaaagggaatgttctgggggttgtttttgggctgaatatcctttttttggct

SEQ ID NO: 235375 - DNA, 409 bp, Gossypium hirsutum
ctcctttgtgccatcccttttaccttctccgagctcgttaaagagcagcctctggtgttgaagtaccacaatgggccaatcttgaaggggaagatcaccgttaatctcatctggtacgggaagttctccccaacccagcgctccataatcgtcgatttcatcaactctttgagctctgccgtcaaacccaagattccgtcggcgtcgttttggtggaaaacgacggagaaatacaagtccggttcctccactttggtcgtgggcaaacaaatcctcctcgaaaattacccgctcggtaaaacccttaagaacccacacttgccagcgttggccgggaaattcaacggcgtaggtacggttagcgttatcctcacggccaaagacgtcgccgtcgatgggttctgcatga

SEQ ID NO: 235376 - DNA, 407 bp, Gossypium hirsutum
gagattatcaatttgaagccttcttcgaatttcctcattcaagatgcaaattttcgtcaagaccctcaccggaaagaccatcacattggaggtggagagttctgatactattgacaatgtaaaggccaagattcaggacaaggaaggcatccccccagaccagcaaaggttgatcttcgctggtaagcaacttgaggatggccgcacgttggctgattacaacatccagaaggagtccacactccacttagtgcttcgcctccgtggaggaatgcaaatttttgttaagactttgactgggaagaccattacattggaggtagagagttcagataccattgataatgttaaggcaaaaattcaggacaaggagggaattcccccagaccaacagaggctgatttttg

SEQ ID NO: 235377 - DNA, 408 bp, Gossypium hirsutum
ggcgaacgaagactttcagcacattttgcgtgtgctgaacaccaacgttgatggaaagcagaagatcatgtttgctttgacctccatcaagggtattggaaggcgtttcgctaacattgtttgcaagaaggctgatgtcgacatgaacaagagggctggtgaattgactgcacaggagctggacaatctcatgaccattgttgcaaaccccaggcagtttaagatccctgactggtttttgaataggcagaaggattacaaggatgggaagtgttcccaagttgtgtctaatgctctcgacatgaagttgtgagatgacttggagcgattgaagaagatcatgcaccaccgtgggctgaggcactattggggtctttgtgttcgtggtcagcacaccaaaaccactgg

SEQ ID NO: 235378 - DNA, 416 bp, Gossypium hirsutum
ctacgatgtccccaaaaaggattttcggtttcagttcatgaactcagttagagttgcggagaagccgttgaagcttacttacattcacggcagaggggacaaccggaccgtgttggacgggacactcaccttagactctgccaacaaggtgtcggctaattacatgtttggtacgaggaactgtaaggtcaagtacagttactcgcacggaggggctacgacttttgagccatgctatgatttcgggaagaatgcgtgggattttgcaatttcaaggagagtgtatgacgatgtttttaaggcaacgtatcagacgtggagcagggatttggctttggagtggtcgaggaactctaagtttaatgggacttttaagatttcagcatccgtcaatctggccgaagaaactaagatcc

SEQ ID NO: 235379 - DNA, 412 bp, Gossypium hirsutum
agccgctcctcactttccgaaccagacaggcgcagatcctctcagcccagcgaccatgacaaagagaacgaagaaggccggaattgttggcaaatatggtacccgttatggtgccagtttgaggaagcaaattaagaagatggaggtgagtcaacagcaagtacttctgcgagttttgtggaaagtatgcagtgaagagaaaggctgtaggaatctggggctgcaaggattgcgggaaagttaaagctggtggtgcttatactttgaacactgccagcgctgtgacggtgaggagtactattagaaggttgagggagcaaactgagagttgagctgctgctgactacgttatgttcacaactttggtatgatgttcgtgtatgtgttggctacaaaccagttgagtcatttt

SEQ ID NO: 235380 - DNA, 400 bp, Gossypium hirsutum
ctacttttaacgttattttacttattccgtgaatcggaggcggggcacggaaaaagaaatacattccatggaattggacccctctgaaaactccaactggctccttgattatggcatacctgatttcccgccttcagctgccgccttcgcatggccttgtcaatctactctcaatgctccctctaatgtcagtgctacagttgattgctcctttgctgattcagattgcttgaaggatgttgtctctaggaaaagggtgaaatcggaatcatgcgggggatccggatcgaaagcatgccgggagaaattgcggagggatagattgaatgataggttcttggaactgggtgccgttttggagcctgaaaggccaatgaaagcagataaagttgctattttg

SEQ ID NO: 235381 - DNA, 376 bp, Gossypium hirsutum
agccgctcctcactttccgaaccagacaggcgcagatcctctcagcccagcgaccatgacaaagagaacgaagaaggccggaattgttggcaaatatggtacccgttatggtgccagtttgaggaagcaaattaagaagatggaggtgagtcaacagcaagtacttctgcgagttttgtggaaagtatgcagggaagagaaaggctgtaggaatctggggctgcaaggattgcgggaaagttaaagctggtggtgcttatactttgaacactgccagcgctgtgacggtgaggagtactattagaaggttgagggagcaaactgagagttgagctgctgctgactacgttatgttcacaactttggtatgatgttc

SEQ ID NO: 235382 - DNA, 326 bp, Gossypium hirsutum
cggagcacgtcggcggggccctgggaagggagttatttttcttgtttaaacacgctcggcaccctgtgaacacgtctaacgggggtggggtccacagggcgtactcataaccgcataaggtgtctaaggggaacagactctgtgcaaagggacaaagtatgcaagggaggtcggcaaaatggatcctccacctcctgaaaaggagtgtctcttatggctggtcacggcggtgccaattcccaacccctcggttgtcggcgcactccttgagctggttcctccgggagagcgggtcgccccgtgccggccgggggacggactgggaa

SEQ ID NO: 235383 - DNA, 412 bp, Gossypium hirsutum
acgcttaatttgtggggtttttttttttttttgggttgctgcttaatccatggcttcttccatgctgaatggagctgaaaccttcactctcatccgaggtgttaccccaaaaagtattggttttttggggtcaggtttacatgggaaacagttttccagtgcgggtttaatctacagtccgaagatgtccagggtaggaacgacgatagccccgaggtgcagcttatcagcgtcaaggccagcttcacaaccaagattcatacaacacaaaaaagaggccttttggttctacaggttcctctcaattgtctatgaccatgtcataaacccaggtcactggactgaagacatgagggatgatgcacttgagccggctgatctcaatgacagggacatggtagttgtagatgtt

SEQ ID NO: 235384 - DNA, 416 bp, Gossypium hirsutum
ctcgtaaacagcaaggatcttataccatgaagctattctacacctcaaacatgcctatcatgctggagcttgcacttgatccaaatttttatttcatctcccagctgctgaacaggaagtacagtggtaacttctttgtgaatctgttgggttaatggaaggaatctgaatatgtcaggcggccaacataattgtgcctgtggatacccaacatgagggactgctctatcaagctaagctgtcatgggaaaaaatttcttccatgcatcaatttagcttgcgttcatgcttttagtatgaccgtgttttttaaaaactttgaatatggtgttttcaggtctaatatatacattgatttttttcaacaatccttatgtaggaaccttttttttttaatactactttctatttttttt

SEQ ID NO: 235385 - DNA, 263 bp, Gossypium hirsutum
cccacgcgtccgcggacgcgtgggtgaaattccaagcaaaatatcatgggcaagggtcctggtgggtacactgaaatcggaaagaaagctagagatcttctttacaaggattatcagactgaccaaaagttcactttgaccactagctttcccactggtgtttcaatttcctttgccggcacgaaaaaaggtgattttttttaggctgatgataaaacccagatcaaggaatggaatgccacaactgaaataaaatttgccaa

SEQ ID NO: 235386 - DNA, 410 bp, Gossypium hirsutum
ctgactccgtttgcattctctctcagctttccggtcgaagaatcattcaatttaaggggaaaaagaaaaaaaaataccaaacatgtcgaaatcggtgattgaaatgcctccaaagggtgggtttagcttcgatctttgtaaaagaaacgagatgctttcaaagaaaggcgttaatccgccgtcatttcgtaaaacgggtaccacaattgtcggcttgatcttccaggatggtgtaattcttggagcagacactagagcaactgaaggacttatagtttgcgataaaaattgtgaaaaaattcattacatggccccgaacatttactgttgtggagctggaactgctgctgacacaaaagctgtaactgacatggtcagttcacagctccagttacaccgctatcatactg

SEQ ID NO: 235387 - DNA, 402 bp, Gossypium hirsutum
ctacctctctttccctctctctaatgacgcttagctcaggaggatctagtgtcgtggtgcctcggaacttccgattgctggaggagcttgagcgtggagaaaaaggtatcggagatggtactgtcagctatggaatggatgacggagatgatatttacatgcgctcatggaccggcaccattattggtcctctcaataccatacatgaaggtcgaatctatcagctgaagctgttctgtgataaagattatccggagaagccaccgagcgtccgttttcattcaaggatcaacatgacttgtgttaaccatgaaacggggctggtagaatcaaagaagttcggaattctcgcaaattggcggagggagtatactatggaagatatactgacccagctgaaaa

SEQ ID NO: 235388 - DNA, 333 bp, Gossypium hirsutum
cccacgcgtccgcggacgcgtgggtgaaattccaagcaaaatatcatgggcaagggtcctggtctctacactgaaatcggaaagaaagctagagatcttctttacaaggattatcagactgaccaaaagttcactttgaccactagctctcccactggtgtttcaattacctctgccggaacgaagaaaggtgatcttttcttggctgatgttaatacccagctgaagtctaggaatgttacaactgatatcaaagtggacaccagctccaatctatttaccaccataacagttggtgaacctgcacccgggcttaaggcaatctttggcttt

SEQ ID NO: 235389 - DNA, 281 bp, Gossypium hirsutum
cttcaacagacccccccccaaaaaaaaacccttgaactttttccgcagtcaaaatgggtatctctcgtggttcgatgcacaagaggcgtgccactggaggtaaaaagaaggcttggaggaagaagagaaagtgttagcttggaaggcgaccagcaaacacaaagctcttaagccacaagacagtttggaggattagggttcgcgggggaaatgtcaagtggcgtgctctgaggctcgacactggaaactactcgtggggaagtgaggccccgactcttaag

SEQ ID NO: 235390 - DNA, 418 bp, Gossypium hirsutum
ggatttgcagaaagatccacccacttcttgcagtgctggtccagtagctgaagacatgtttcattggcaagcaacaatcatgggaccctcagatagcccttatgctggaggtgtgtttttagttactatccatttccctccagattatcctttcaagcctcctaaggttgcatttaggaccaaggtcttccatcccaacatcaacagcaatggaagcatttgtcttgatatcctcaaagaacaatggagccctgcactaaccatttccaaggttctgctctcaatctgctcactgctgaccgatccaaaccctgatgaccctcttgttccggagattgctcacatgtataagaccgatcgggccaagtatgaagccactgctcgtagctggacccagaagtatgcgatgggatgacag

SEQ ID NO: 235391 - DNA, 411 bp, Gossypium hirsutum
cacgcttacgccttacgccatacgcatttgcccgcacgttgttttgtgctctgtgtttctcaataaattccttattcctacaaaacccccaaaattaaagaaggatcaaaccgaccctttgcaattccaagacacaagaaccaagagacataccacgatggcaacaacgacggagaagcaagccatggttgttggaatcgacgacagcgagcacagtacgtacgcgctgcagtggatcctcgatcacttctttgctcctttcgcttccaatcctcctttcaagctcgtcatcgttcatgccaagcctactgcttcttctgctgttggtctcgccggacctggagctgctgatgtattgccctatgtggatgcggatttgaggaagatcgctgccagggttgttgagaaagc

SEQ ID NO: 235392 - DNA, 461 bp, Gossypium hirsutum
agcgctgagccggtccggaatctgcccgcactgcgacccacgtcgtaccgatataccacgcagctaaactctttatggatacaacatggttacagcaatcccaccagctaaaatgaggcacggcttgtatccttgatggtgacactctcattccccagattcttcctcaggcttttaagagtgttgagtacattgaaggcaatggtgaggccggtagcatcaagaaggtcacttttggagaaggaagccaattcaaatacgtgaagcagaaggttgaagcagtagacaaagacaaatttgtgtatatttacagtgtgatcgaaggtgatgcattgatggataagcttgagaagatctcttacgagacgaagttagagacctctccggatgggggatcagtatgcaagactactagtaagtattacaccattggtgagtttgagctcaaggaagagggaatc

SEQ ID NO: 235393 - DNA, 423 bp, Gossypium hirsutum
  unsure (1)..(423): unsure at all n locations
cacgcccgtccgctactgcatcatctaantttgttgtgcgtttcttctttttgggcatcaatcactcgcgtttctgtgttctcgcatctattatantttttcctccgatttatacacatgtccgaaatcttttctcttttgtgatttgcaaagnaaaagaaacatgaagggaaagttgggcaactcctcttcacctcaaatctttgaaccacatcttccttgtgtgtagatcaggtgaggaatccatgaacttttattaagatattcttgggtttggtccaatcaggagacctggatcatttggctttaaaggggcatgggtggttggataccggaatggaatacattttctggaatcgggggatccagagaggttggcttagaaaaaaggaaatcaaccccagggttatcacattttttttc

SEQ ID NO: 235394 - DNA, 407 bp, Gossypium hirsutum
aagaaaaaaaagttagggttttaatttgaaatcggattcggtagagattaagcaatggctggagaaagggccttgttcaagttccttaagcctgggcaacgtctacagcccgccgacgttcaagctgccgccatgtggggcgtcgctgccactaccggcgctctttggctcattcagccttttgattggttgaagaagacctttctggagaaaccagagtcggattagaagcaaatgggacatcttgcaactcattgcggttttgtttatcgggtttgctgatgaacaaatcatggaaagaataaaaataataatgtagtaagtgtaattttttgtggtttattgttaagagaacaagcctctttgcttttggtatcaattactgggaagttttgaacctttcacct

SEQ ID NO: 235395 - DNA, 414 bp, Gossypium hirsutum
gtctcaacattttttgatcaagttgtgacgctttccactcatccttatgggtgccgagttatacagagaatattggagcactgcaaggacccaaagacacagagtaaggttatggatgagattttaggatctgttagcctgttggcccaagaccagtatggcaattacgttgtccagcatgtgctggggcatggaaaacctcatgaacgctcaatcatcattaaggagctggctgggaagattgtccagatgagtcagcagaagtttgcatctaatgttgtcgagaagtgcttaacttttggtggccctgctgaacgtcagttattggtgaatgaaatgcttggttctactgatgagaatgagcctcttcaggcaatgatgaaggatcagtttgcaaactacgttgtacagaaa

SEQ ID NO: 235396 - DNA, 413 bp, Gossypium hirsutum
ggaaaatctccattttagcagactatcttcgccgcctcctcttcctcctatctcatagcagccatgatcattccagagaagaaccgccgcgagatctccaagtacctctttcaagagggtgtttgctatgcaaagaaagattacaacttggcgaagcacccagaaatcgatgttcccaatcttcaagtcataaagctgatgcaaagcttcaagtcaaaagaatacgtgcgtgaaacttttgcatggatgcattattactggtaccttaccaatgatggcattgagttccttaggacatatctgaatcttccttctgagattgttcccgctactttgaagaaacaagctaagcctgctggtcgtcccatgggccctcctggtgaccgcccacgtggtcctcctcgctttggtga

SEQ ID NO: 235397 - DNA, 416 bp, Gossypium hirsutum
aagagtcgccctttggtgtttttctaattcaatcagtgaggtgaagaaaaatgtcttgctgtggtggaaactgcggttgcggctccggttgcaagtgcggcggcggcggcggctgcggctgcggcggttgcaagatgtaccctgagatgaactttgctgagcaaaccacaactgagacacttgttcttggcgtggcaccccggaaagtgaactttgatggagctgaaatggaaactggggctgaaaatggctgcaaatgtggagataactgcacttgcaacccttgcaattgtaaatgaggggaaaaaaaaaaaccgaagcatattatggaagctgatctaaataatatatgatgtatttgggtttttattattagaataaagcagccatggttcattaggtgttttgcttcttgg

SEQ ID NO: 235398 - DNA, 409 bp, Gossypium hirsutum
tgttgagaagcaaggtatgagtgatactaggttcttggagaatgggaagtactaccatgatgtgagttctgagaacaactactacccgaaccggttcgagaactcgaggggagtcggttcgaggaacgagttcaacgagaaccgttacaataacatgggaaaatataatcagaatcaagaggagttcgaagaagagttcgagccatgaaaccacacgtatatgctaattaattagcaaaaagagagtaaggaagaaagggcttatttattgggttttgcgttttattttgggatcctttttattttatttgcagggtttgatagtatcctttgcttttgatattgaaatgctaaaagatattataatggagccttaagctttttacttttcttaaacagggttatgcaa

SEQ ID NO: 235399 - DNA, 406 bp, Gossypium hirsutum
cgccgcctgcgtctctctcttcatctctctgaaccaaaaagtctttagcttttcgcttcgagagagaccatgttggtttaccaggatctcatctccggtgacgagcttctttctgactcattcccctacaaggaaatcgagaatgggatgctgtgggaagttgagggaaagtgggttgtgcaaggagctgtcgatgttgacattggtgccaatccttcagccgaaggtgctgatgaggatgaaggtgttgatgaccaagctgtgaaggttgttgacattgttgacactttcaggcttcaagagcaaccccctttcgacaagaagcagtttgtcgtgttcatcaagaagttcatcaagaacttgacaccaaaactggatgcggaaaagcaagagtccttcaagaaaa

SEQ ID NO: 235400 - DNA, 422 bp, Gossypium hirsutum
agagttgcctgtagaccatgtggagaagaaaccttctcagatgattcttgataagaagtttgcagggacgctggatcagggtgctggatgccttgtcatctttgacgatcccaagagtgatgccattttccctgcaacattggaaaccctctataacattggcaaggttgtagataggccttatggggggggtggtaacataatgggctaagagtcaagatttaccgatgcttatatacagcttgcaactcggttctagcgaaaaacaagtgttcaggtacactgtatatgcacatgttttgacgtttcagcttttaatttaatgggattgcggcacaacatttgggtcaaaatatggagttgattcagacaatattgtgtttgctcaccatatgcttgtctactggttgacttttcaatta

SEQ ID NO: 235401 - DNA, 417 bp, Gossypium hirsutum
aaaaatttatttttctcaaattatttttttcctttttttttgagtgacgaattcaagcatgagtgagctcactcgttatagtcgggtattactgttaatggtattaggattaagcgcgggagcctgttacggtttcggtactttcggattcgaattccatcacagatactcggatcccgttaaacaaatcctggccgtcgatgaattgccgccgaaaggaagtccggaatattacagtgctatgatccaccgcgataaaataatcaagggccgttcattggcggtagagaacgatcagacgccggttacttttctcgaaggaaacgcaacttatcgattgaggtccttgggatatttgcattacgccaatgtgaccgtggggacaccagctttttggtttttggtagcattagacac

SEQ ID NO: 235402 - DNA, 416 bp, Gossypium hirsutum
aagaaataaaggaagaagaagcaatggtcactcttacagtgcctacgacagttacttcagtgtctgaagattgtgaacaactaagaaaatcctttttaggatggcgaactaatgagggcttaatcatagatatattgggtcacagaaatgcggagcaacgaaacttgattcgaaaaacctacgctgtaacctatggagaggatctcctcaaggcactagacaaggaactctcgaatgactgtgagaggctggctatgcttaggactcttgatcctgctgaacgagatgccctttgggctaatgcagccaccaaaaggtggactttaagcgatcaagtccttatggacatagtctgcacaaggtctgtcaaccaactgcttcacgcaaggcaggcttatcatgctcaatataagaag

SEQ ID NO: 235403 - DNA, 159 bp, Gossypium hirsutum
tgagttgcctgtagaccatgtggagaagaaaccttctcagatgattcttgataagaagtttgcagggacgctggatcagggtgctggatgccttgtcatctctgacgatcccaagacggacgccattttccctgcgacattggagactacctataacat

SEQ ID NO: 235404 - DNA, 406 bp, Gossypium hirsutum
cccttactaacaacaaaaaccctgaaatgtcggacgacgatcatcatttcgaatccaaggctgatgccggcgcctccaaaacctatcctcagcaagccggtactatccgtaagaacggctatatcgtcattaaaggccgtccctgcaaggttgtggaagtttccacctccaagacggggaagcacggtcatgctaagtgtcacttcgttgggatcgatatcttcactggcaagaagttggaagatattgttccctcctcccataactgtgatgttccgcatgtcaatcgtactgactaccaattgattgacatttctgaggatggatttgtgagcttgctgactgatagtggtgatactaaggacgatctcaggctcccaactgatgagaacttgttgaaacagat

SEQ ID NO: 235405 - DNA, 365 bp, Gossypium hirsutum
tgaagctcttacagaggcacttcctggtgataatgttgggttcaatgttaagaatgttgctgttaaggatctcaagcgtggttatgttgcatccaactccaaggatgatcctgctaaggaggctgcaaacttcacttctcaggtcatcatcatgaaccatcctggacaaattggaaacggatatgccccagtcctcgactgccacacctcacacattgctgttaagtttgctgaacttttgaccaagattgacaggcgatctggtaaggagcttgagaaggaacccaagttcttgaagaatggtgatgctggtatgattaagatgattcccaccaagcccatggttgtggagaccttttctgagt

SEQ ID NO: 235406 - DNA, 414 bp, Gossypium hirsutum
ctttgctataccctaggactatagggttctctttcgatccatgcattactttcaaattttcttcttagatcaaacaaaacaatgtccggcgtttgggttttgaagaatggtgtggctcgcttggttgagaatccagcgggtgagtcattagacggaagccgaccgagttcgaacactcgccgcaaagtgcttgtgcacacttcttataatgaagtgatcacttcttatgcggatctcgcacataagctatggtctttcgggtgggaacggtcttacaaggaccccagggttgttgaattccataagcgatcaactgtgcatttgatctctctcccaaaagatgttaatacgttcaagtcggttcacatgtatgacattgtcgatgaaaaccataacgtgtgtgaagttagggat

SEQ ID NO: 235407 - DNA, 409 bp, Gossypium hirsutum
tctagttttgatacgtccttttttttgttcatttctggatgacttggtagctttgttttacaggtaaattttatagttttgttcgtggaaagaacagagattcagagatgagtaagcttcagagtgatgcccttagagaagctatttcaaccattgtagctcagtccaaggagaagcagcgtaagtttactgagactattgaactccagattgggttgaaaaactatgatccccaaaaagacaagcgtttcagtggttctgtgaagttgccacacattcctcgccctaaaatgaagatctgcatgcttggagatgcccagcatgttgaagaggcagagaagataggtttggattatatggatgtttgagcactgaagaagcttaaccagacaaaaagttggtaaaaagc

SEQ ID NO: 235408 - DNA, 420 bp, Gossypium hirsutum
gaaagacaatatgtttgtcactgggagggttgtggaaagaaatttttggatagttcaaaacttaaaagacacttcctcattcacactggagagagagacttcatatgcccacatgaaggttgtggtaaggcattctccttggatttcaacctgaggtcacacatgaaaacacattcacaagaaaactaccatatctgtccatacccagattgtggaaagagatatgctcatgagtacaagctaaagaatcacattgcatcacaccatgaaaagaacacgacaccagaagtggcaaaatatgccccacctttagagaagatagttaaaactccaaagcctactggtggcacctatggttctgcatcatctgatcgcccttatgcttgcccttatgaaggttgtgagaaagcttacatacat

SEQ ID NO: 235409 - DNA, 408 bp, Gossypium hirsutum
tgcgagggtggctaatgctcattcattcattgtgaagctacctgatggtttcgacactcaggttggggagagaggacttcaactctcaggtggacagaagcaaagaatcgctatagcgagggcaatgttgaagaatccagcaatcctgttattggatgaagctactagtgcactagattctgagtccgaaaagctggtgcaagaggcccttgatcggtttatgattgggaggactactctcgtaattgctcatcggctttccactattcggaaggctgatcttgtagctgtactccaggagggaagtgtttcggaaatcggtacgcatgatgaacttatggccaaaggagaaaacggtgcttatgctaaactcattcggatgcaagaggcagcacacgaaactgccct

SEQ ID NO: 235410 - DNA, 318 bp, Gossypium hirsutum
ccttgagattatcaatttgaagccttcttcgaatttcctcattcaagatgcaaattttcgtcaagaccctcaccggaaagaccatcacattggaggtggagagttctgatactattgacaatgtaaaggccaagattcaggacaaggaaggcatccccccagaccagcaaaggttgatcttcgctggtaagcaacttgaggatggccgcacgttggctgattacaacatccagaaggagtccacacttcacttagtgcttcgccttcgtggaggaatgcaaattttttgtaagactttggctgggaagaccatttcat

SEQ ID NO: 235411 - DNA, 416 bp, Gossypium hirsutum
ctcactccgccatcttcaataatttcttccgttgatctttgttagagattagctttttaatttttcattatgggaaagatcaagatcggaatcaatggatttggaaggatcgggcgtttggttgcgagagttgctctccaaagcgatgatattgagctcgttgctgttaacgatcctttcatcaccactgaatacatgacctacatgtttaagtacgacagtgttcacggtcaatggaagcatcatgagcttaaggtgaaggactcaaagacccttctctttggtgaaaagcctgtcacagttttcggtatcagaaaccctgaggaaatcccatgggctgaggctggagctgagtatgttgttgagtctactggtgtttttactgacaaggacaaggctgctgctcacttgaaggg

SEQ ID NO: 235412 - DNA, 270 bp, Gossypium hirsutum
gaaaaaatattggtgccaaaggtctcttcttctttgctttgcttttcttttcacggtgttgcatttggcgaggatgaaaaacacccttatttttttgaacttctacaaagattcttgttcttaggctgaaaacattatcaaggagcaagttaagctactgtacaagcgacacaaaaacacttctttttcttggctgagaaacaattttcatgactgtgctggccacgcatgtgatacttcactgttgctcgactccacaagaaggagctc

SEQ ID NO: 235413 - DNA, 414 bp, Gossypium hirsutum
  unsure (1)..(414): unsure at all n locations
cttgtaacactgctaatatttttttttatcgtcgtctccgtcgttcgaaagatataaaaaaccggcgtcgtttcaaatggctacaagaacggatcttgatgggaggccataaaggcgttgacgatatgcatgatccgcgcccgagggtttatttggttcacctttttgagaaattgatgtctgagacgccgcacaaggtgctcgccttggacgtttacaatgacaagatcaagcatnttctcgagcctgactctctcccttgggctggccgtattcagttccaccgacttaacattaagcacgattctaggctcgaaggcctcatcaagatggcagatctcacgataaatcttgctgccatatgtactccggcagattataatacgcgtncactagacacgatttacagcaatt

SEQ ID NO: 235414 - DNA, 364 bp, Gossypium hirsutum
aaaaaggggttccaagagaaaagtagaagaaatggcctcaaagcttcttcgtcaaaccctaaccaaaaccaacagaaccgccgctatacgctgcttcttcaccgcggcttctgtcgcttccccttccgagtatgagtacccaacaggaatcaccatgaaaggtgtgaaaatttcgggtcgtccgctttacctcgacatgcaagcgactacccccgtggatcctagggttttagattcgatgcttcctttttacctctctcgttacgggaaccctcactcccgtactcacctgtatggttgggaatctgaaaccgccgtcgaaacagcccgcgcacaagtcgcggcactcattggggctttcccg

SEQ ID NO: 235415 - DNA, 409 bp, Gossypium hirsutum
ggcaaagagacagagaccgatcattatactactacccaaagcaagacacgcactgaaactggaagacagcagacgatatgagggtgctacaagttttggcagtttccaagattctcacctcacacttgtctcgcacgcaccgcccctctgcctctcgtcagatgagtactgctgcttcttcgcttaaaaaatcccccatatttcgaaccctgggtctaataggagggaaatggattgacgcttatgatgccaaaactattcaagttaacaatccatccactggggaaattatagcagaggttccctttatgggcactctggagaccaatgatgccatttcttctgcgtctgatgcttttaattcttggagtaaactcactgctgctgagaggagcaaataccttagaaa

SEQ ID NO: 235416 - DNA, 397 bp, Gossypium hirsutum
  unsure (1)..(397): unsure at all n locations
cgccgcagaccgtccggattccggtcgaccacgcgtncgccacgcgtccgaaacatccatttattcttttctttcaactcaaagtcccaagtagtattagaatcatgggtgttgtcacttataactatgactctacctcccctgtcgctcccgccaggcttttcaaggccttcgttcttgaagctgacaaggtctggcccatagctgcccctcatgcaatcaagagtattgaggttgaagctaatcctggccctggatgtatccgaaagatcaactttggtgaaggccttccattccaatatatgaagcaccagattggaggacatgatgaaaacaaattttcatacagttacaatttgattgaaagtgggcctttggggaacaagcttgagaaaat

SEQ ID NO: 235417 - DNA, 448 bp, Gossypium hirsutum
cccgaatcgccccacgcgcccacgcgtccgcccacgcgtacgcaatcatccatttattcttttctttcaactcaaaggcccaagtggtattagaatcatgggtgttgacacttataactatgactctacctcccctgtcgctcccgacaggctttgcaaggccttcgttcttgaagctgacaagggctggcccatagctggccctcatgcaatcaagagtatagcggttgtagctaatcctgcccctgaatgtatcgtaaagatcaactttgttgaaggccttccattccaaaatataaagcaccatattgcaggacgggaggaagacacattttcatacatgcacaattcgattgaaggcgggcctttggggaacacgcttgagagagtcaactacgagaataaatttgaggcatctgtaggtggaggaagtgattgcaagagctct

SEQ ID NO: 235418 - DNA, 340 bp, Gossypium hirsutum
cctgtaagtatcagtaggcgttagtatctccaggacttggttctgagctctaatcatctaactgggaaaatcccagctgagctaggtaactgcactagtctccggaaaatagaaatttatgatgaccttctaagcggtactatccctgctgaccgcgggaacttgactattatttaagctcttcgagctggggggaacaaacacattgtgggaagaatccctgatgagattggggactgcagccacttgactgcgttggggctagctgatacaagagttctaggttctttaccagcttcacttgggaagcgtagcccgctccataccttgtctatataca

SEQ ID NO: 235419 - DNA, 338 bp, Gossypium hirsutum
caattatccaaacgatggctatcttttcttcatccatggctgctatgctcattctagggctcctcactgcaaacttggatcctactgttgcgcaaattggtgtttgctatgggatgcttggcaacaatcttccaaatgcaagggaagtcatcaatctttacaaatcaaacaacatcaagcgaatgagactctacgatccaaatcaacaagcattacaagctcttagaggctcaaacattgaaattattttaggtgtcccgaatgatcaacttcaaaaccttgcttacccttccaaagcacaatcatgggttcgatcaaatgttgtagcctattggcca

SEQ ID NO: 235420 - DNA, 423 bp, Gossypium hirsutum
cacaaagaagaagaagaaaaaggaaacaaaagatggcaattgagattcctagagtgaaacttggaactcaaggatttgaggtttcaaagctgggatttgggtgcatgagtcttacaggtcacgatcattcagtgtcagatgaagatggcatagccatcattaagcatgcagtcgaaagaggagtcactcacatcgatacagccgacctctatggacccaaaactaacgaaattctggtcggaaaggcattgaagcatctgccacgagagaaggtacagttggctacaaaattcggtgttgaaagcatgggtccagatggtccggttatcaatggcactcctgaatttgttcgttcttcacttgaggctagccttcaacgcctcgatgtggattatattgatctttactatataatcagagttg

SEQ ID NO: 235421 - DNA, 388 bp, Gossypium hirsutum
ctccctctgagatcaaagcttcaaaatggcatttgtcaaggctcagaaaaccaaagcttactttaagcgggttcaggttccatacaagagaaggagagagggaaagactgactaccgggctaggattcgcctaatcaatcaagacaagaataagtacaacacttctaagtaccgattcggtgtccgatttagcaacaaagatgtcaccgcacaaataggttctgctaatattgctggtgatatgggtcttgcttctgcttacttacatgagcttacacgatttgggcttgaaggggggcttacaaactatgctgcagattattgcactggattgctgttggggcgccgtgtgcttaaaatgctcgaaatggatgatgagtatcaaggc

SEQ ID NO: 235422 - DNA, 294 bp, Gossypium hirsutum
gggggcaaggtcaaacaatcctgttatgatcatctctcgttggtttcaaaatgacgcttagccgcaagccaaattttcacaagctttcatggctatcaatccttgctgctgtcatgtcttttacttatgcttgcattggtcatggactgttcatcgctaaagctgcaagtggcggagaacatgtgacgacaagcttaactggtgtacaagtaggggtcgacgtctcaggctgttgaaaggtttggagaacattccacggtattggggacattggctttgggtatgcttactcca

SEQ ID NO: 235423 - DNA, 364 bp, Gossypium hirsutum
gttggattgaaaaggatagcattgaggaggaccaaatgatggctgctcggttggctaatacaatgggttactcactcaaggggaggcctatttagggtcgagtgttggaaggtaaagcgccaccccagctcattgcactattccaacccatggttggacttaagggtggtttaagccctggctccacgaatagtgtagctgacaaacgcctgccggatgaaacctataccgtaaagagtgttgctttaattcatattttcggcacagcttgacacaatattcaaacattgccaggtgttgcggcggccacatcattgaactgaactgagtgcttactcttgcaatctgggaccataatttttac

SEQ ID NO: 235424 - DNA, 424 bp, Gossypium hirsutum
gaatgttaacttcaagaatcatgtcattcagtggttcgaagtgcttgatgggttattgggtccatattggaaggcattaggacttgccttcaattgtactttcctcttatttggatctgtcatacaacttataggctgtgcaagtaatatatactacgttaatgacaaattggacacgaggacatggacctacatatttggagcttgttgtgcaacaacagttttcataccatcttttcacaactaccgtatttggtcttttcttggccttgggatgaccacttatacagcttggtacttggctattgccgccctcgttcacggccaggctgagggcgtgacgcatagcggtccgacgaagcttgtgctttatttcaccggagccaccaacattctctacactatcggcggacatgccgtcacc

SEQ ID NO: 235425 - DNA, 411 bp, Gossypium hirsutum
agaatatctcatccttttattttcatttcgtcttcttttcagctcaaagtcatcatggaaattacttgtaggtatcaaaatggggacaataggcaaaactactacggccgctctttttctttggcttcttctggttcctattgtctttgccacgcctaatgacagattggttagaattggactcaaaacgagaaagattgaccgaaacaatcggatggctgcacaccttgaatccaaggagggaaaggcatctgaagcttttcttagaaagtatcgtcttcatgggaacttgggggaatcagaggacattgatattgtggcactaaagaactacatggatgctcagtactttggtgagattggtattggcactcctacacagaacttcactgtgatatttgacactgggag

SEQ ID NO: 235426 - DNA, 424 bp, Gossypium hirsutum
gctgctgaagctaacaaggacaagttgtccgctcttatggttacttatccttcaacacatggagtgtatgaagaaggcatcgatgagatatgtaagattattcatgacaatggaggtcaagtttacatggatggggctaacatgaatgcccaggtcggtttgacaagtccgggttttattggagccgatgtttgccatctgaatctccacaaaaccttctgcattccacacggaggtggtggacctggcatgggacctattggtgtcaagaagcatttggcaccatttttgccttcacaccctgtggtacccacaggaggtatcccagccccagaaaaatcagaccctcttggtaccatttccgctgcaccttggggctctgcacttatcctgccgatatcttatacttatatagccatgatgg

SEQ ID NO: 235427 - DNA, 420 bp, Gossypium hirsutum
gaaaaagaaaaagtgggttttatttttcgatgaaaatgagtaaagcatcaattgttttactctattttggcttcatattcatccattgtgaagctaaatcgatcagagaaaagcctcaagcttttgagtccttcaatgtcagttatatacagaatttagggagctgttcttactcggtggtttttacaacgagctgttcatcaactagttacactcgagatcaaatcagtattgctttcggtgatgcctatggtaaccagatatatgtgccgaggttggatgatccagcgtctagggcatttgaacaatgttcttcagataagtttgagattaaaggaccatgtgcgtatcagatctgctatgtttatctctaccgaactggaccagatggttcgaagccggagcatgtgaagatttatg

SEQ ID NO: 235428 - DNA, 330 bp, Gossypium hirsutum
ccatcatgtctgagggtgttgtttgaaatgatgatggtttgcagcctagatttcaaaaaactgtatgccgcgtggaagacctcctataatggatctgaaaacagcttatgatgctgaactcagtggatctagaattcagcatgaactatggccattagatgaaattgctccggggaaagcaaagttttcttgctggctggtttggaccccactcccagttgtctaatggttggcaccttctcattggccacgttggcatttgccgagaagctggcccgattctggactgttcaggatcatattttgcgaatgtcacggattttgtttttg

SEQ ID NO: 235429 - DNA, 408 bp, Gossypium hirsutum
tttctcctttttatctttaaaacacgcacccaaaaaataaaaccctttgaaaaccgaagatggaagaagaagatgtcgtggcatgcttatgtagatgatcacttgatgtgtgaaatcaaaggaaaccatctctctgccgtcgctatcatcggccaggacggcagcgtttgggcccaaagcgccagtttcccttagctcaagcctgaagaaattagtgccatcatgaatgactttaatgaaccgggttcactcactccgaccgggttgcacctgggaggcacaaaatacatggtgatccaaggcgaaccgggagctgttatccgagggaagaaaggacccggtggtgttactgttaagaagaccaatatggccttgattatcggaatctatgatgaaccaatgacaccc

SEQ ID NO: 235430 - DNA, 323 bp, Gossypium hirsutum
cccgttcgagctaacaaggacaagttgaacagtctaagggttacttaaacggcaacggatggtgcaactgctgtggggatcgatgagatatgcatgattattcatgccattgggagctaggactacatggagggggctagaccctatgtccagccttaccagacaagtacgggttatattggagccgatacttgccatatgaatctccacaaaaccttctgcattccacacggcggtgggggacccgtcatgggacctattggtgctaagacgcattgggcaccatttatggcttcacaccgtgggggctccacaggaggggt

SEQ ID NO: 235431 - DNA, 417 bp, Gossypium hirsutum
tccatcccctctccctgctttgctctgaaaagtccaagtttttctccaatggcgaccgtctctccaactcctctgttgaaagatgagctcgacatcgtgattcccacgattaggaacttggactttttggagatgtggagaccctttttccagccttaccatctcatcattgttcaagatggtgatcctaccaagactatcaaggtccctgaaggcttcgattatgagctttacaataggaacgacatcaacaggattttgggtcctaaggcttcttgtatctctttcaaggattctgcttgtaggtgctttgggtacatggtttccaagaagaaatacatctataccattgatgatgactgctttgttgctaaagatccatctggaaaagacatcaatgcattggagcagcacata

SEQ ID NO: 235432 - DNA, 356 bp, Gossypium hirsutum
gtgtccatcgcgtggctttcctatcttcatttcttcacactctccgacgaaagaaaccagagaaaaatgaccaagtgttacccaaccgttagcgaggactaccaaaacgccgttcaaaaggctaagaggaagctaagaggtctcatcgctgagaagaactgtgctccactcatgctccgtctagcgtggcactcagctggaacttttgatgtcaagaccaagaccggaggtccattcggaaccatgaagcaacctgctgagctcgctcatgctgctaacaacggtctcgatattgcagtcaggcttctcgagccgatcaaggagcagcttcctatcctttcatacgctgacttcta

SEQ ID NO: 235433 - DNA, 384 bp, Gossypium hirsutum
gatgaagtagcagtgaaaaggctgtcgagacaatctgggcaaggttgggatgagttaaagaacgaagcaattctaataggcaaactccaacacaaaaacctcgtcaaagttcttggttgttgcattgaaagagatgaaaagattcttatctatgagtatttgcccaataagagcttggatactctcctctttggtaccaatgcaatggttacactaccttggaaaactcgagttcgaatcatcgaagggattgctcaaggtcttctttatctccatcaatattctagggttcaaattattcacagggatttgaaggccagcaacattttgttggatgaagatatgaaccctaaaatttcggactttgggatgggctagaatttt

SEQ ID NO: 235434 - DNA, 411 bp, Gossypium hirsutum
tttctatttagttttctcttcctccaattaagatgcagatcttcgttaagaccctgaccggcaagaccatcaccctcgaagtcgagagttccgacacgatcgacaacgttaaggcgaaaatccaagacaaggaagggatcccaccagaccaacaacgtctcatcttcgccggaaaacagctcgaagatggccggaccttggccgattacaacatccagaaggagtccaccctccatctcgtcctccgtctacgtggtggcatgcagatcttcgtcaaaaccctgaccggcaagaccataactttggaagtcgaaagctctgacaccattgacaacgtcaaggccaagatccaagacaaggaaggcatcccaccagaccagcaaaggctcatctttgccgggaaacaactcg

SEQ ID NO: 235435 - DNA, 406 bp, Gossypium hirsutum
gcttttccctttccttgctttcgctggattgttcttcctcttccgtcgggctcaaggtggtccaggtggccccggtgggcttggcggacccatggattttggacgatccaaatccaagttccaggaagtgccagagactggtgttaccttctctgacgtagcgggagctgaccaggcaaaattggaactccaagaggttgtcgatttcttgaagaacccagacaagtacacagctttaggagctaaaatcccgaaaggttgtttattggttggccctcctggtactggaaagactctattggcgagagcagtagcaggagaagccggggttccgtttttctcatgcgctgcttctgagtttgtggagttgttcgttggagtaggtgcatccagagtaagggactta

SEQ ID NO: 235436 - DNA, 320 bp, Gossypium hirsutum
aattgacccacgcggcccacgcgtctcggtttcattgtttatcagagcaacgaaaaagaagggaaaatggaagggaaagaagaagatgttagattgggagctaacaagttctcagaaaggcaacctattgggacagcagctcagtcccaagatgataaggattacactgagccacccccagcacccttgtttgagcctagggagttgactttatggtcgttttaccgagctggaatcgctgagttcgtggctactacactattctcgtacatctcagtgttcactgtgatgcgagtccttaaggacatatccaaggtgta

SEQ ID NO: 235437 - DNA, 398 bp, Gossypium hirsutum
ccaccgccgtcgatctcgatccttatcctcgttttcaaacaagctcgaaaaagatggccaacgctgcatcgggaatggctgtgcatgatgattgcaagttgaagttcttggagctcaaggcaaaaagaacccaccgcttcattgttttcaaaattgaggagaagcaaaagcaagttattgtggagaagcttggtgaaccaaccgaaagctatgaggattttactaaatgtctccccgctgatgaatgtcgatatgctgcgtacgattttgattttctaacggccgagaacgtaccgaagagcagaatctttttcatagcatggtctcccgacacgtcaaggatcaggagcaagatgatttacgccagctccaaagatagattcaagcgagaactggat

SEQ ID NO: 235438 - DNA, 412 bp, Gossypium hirsutum
aatacaaagagcaggaaaacaagaaaagcagagccgcatcactttttgctagctaagctactgtgggagttattgttcttcagaacagcttctgcagtagctaataataacgttatatattatataaattttatacatcctttttaccctacgactccatatataagcaagtaaaaataaatatggctcgctctgtttcttcctttaagttccttggtgcttgtgtttttgatgctctttatgtctccatatcaaggagaggttactcaggtgcaccgccggcggcagtgacggctagctttggtaggcctggaacgatggggaaaggggaacgaagatatgccatgaaagaatcgtcgtcgtccgagacaagggcttattttttaagttgggcccctgacccttgtaccgg

SEQ ID NO: 235439 - DNA, 419 bp, Gossypium hirsutum
gcgctttgctttctctctctttttatggatgggatcatctcctttccttctccttcatgaaggctacgatttgaagactgtttttgatttccattagcatgcgaattaggccttttcgttataattcatcgcctgaaatatctgttatcgaatacgcttctacttttttttgtttcctgattttgattttagtgataacaactggaaattttgaatgctcgagctgtaatatgggatatttgaattcggttttgcaatcttcaagtcaggttcatgctgaatatggaccggttagcggcggaggccttagccagaatggaaagtttagctacggctgtgcaagctctcctggaaagaggtcttcaatggaagatttttatgaaacaaggattgacggtgttgatggagagatagttggt

SEQ ID NO: 235440 - DNA, 420 bp, Gossypium hirsutum
aaaaaaggttgtaaaaaactcagcagcgccactgtccctaatgtgaaaatcttctgggacctttcaagggcaaagttcggatccggacctgaacccgactctgggttcttcgttgccgtcgtcgtcgacggtgaaatgacgattctcgtcggcgatgctaccaaggaagcttatactcgaactagagctcaaaaccctgggagtagaagcagcccaactcttgttttgagaaaagagcacgtgttggggaacagagtttacagcacataagccagattcggaggcaaattaagggatatctcgatcgattgtagggtaaacgaggatgcgcagctgtgtttgagcgtggataacaaaagggtattgcaaataaagcggcttaaatggaaatttagagggaatgagaggattgaagtggat

SEQ ID NO: 235441 - DNA, 367 bp, Gossypium hirsutum
gaaaaagaaaaagtgggttttatttttcgatgaaaatgagtaaagcatcaattgttttactctattttggcttcatattcatccattgtgaagctaaatcgatcagagaaaagcctcaagcttttgagtccttcaatgtcagttatatacagaatttagggagctgttcttactcggtggtttttacaacgagctgttcatcaactagttacactcgggatcaaatcagtattgctttcggtgatgcctatggtaaccagatatatgtgccgaggttggatgatccagcgtctagggcatttgaacaatgtttctcagataagtttgagattaacggaccatgtgcgtatcacatctgctatggtta

SEQ ID NO: 235442 - DNA, 416 bp, Gossypium hirsutum
ataccagatctgttacactctgaattatttaagcagcacgtcacaagggatctagagcaaggttagtgaccttgggttgagtgtagagatgaggaaaatcatgggtgccaaagttcttttcttctttgctttgctttccttttcagctgtctcggcatttgcacaggatgaggaagaccaaggtcttgttatgaacttctacaaggattcttgtcctcaggctgaagacattatcgaggagcaagttaagctactgtacaagcgacacaaaaacactgctttttcttggctgagaaacattttccatgactgtgctgtccagtcatgtgatgcttcactgctgctggactccacaagaaggagcttgtctgagaaggagacagacaggagctttggcctaaggaatttcaagtaca

SEQ ID NO: 235443 - DNA, 343 bp, Gossypium hirsutum
cttgttgccggtactcctttgcgccacctaccatatcgctctttccgcgaccaacgttacggtggcggacgggctgttagataatggtaactttgagcaagccccgaatgccttaaacctgaaaggcactgttgttgtggggcgttatgcaataccaggatgggtaaacgaagggtttgtggaatacataaagtccgggcaaaagcaaggggacatgttgctggtggtgcctgagggagcctatgcagtcaggttggggaacgaggcttcaatcaagcaggaaataaaggtggcgaaagggatgtattactccattaaccttagtgctgcccgtacttgtgct

SEQ ID NO: 235444 - DNA, 420 bp, Gossypium hirsutum
gtcgagccgaatcgcaaccatcaaggatcatccgcgaaatttcactctatggcacccataaagggcattctttccttgcaaagggcatctttgttaagagcttgcggtgaaaggtggaaactaggcactagatcatttagtactcaaggagcaacaactgctgatgctccacaggcacctgctgctgctccaccgcctgaaaaaacccattttggtggtctaaaagatgaagaccgtattttcaccaacttatatgggttgcatgacccttttctcaaaggtgccatgaaacgtggtgactggtatagaaccaaggatttagtactcaagggtgctgattggattgtgaatgaaatgaagaaatctggacttcgaggacgtggtggtgctggatttccatcgggcctcaaatggtctttt

SEQ ID NO: 235445 - DNA, 421 bp, Gossypium hirsutum
cggcatcagtctcagcaggcggggaagaatgtctcacaggaagtttgaacacccaaggcatggttcccttggatttcttccgaggaagcgagcttctcgtcacagagggaaagtgaaggcatttcctaaggatgacccaagcaaaccttgcaagctcactgcctttttgggctacaaggcaggcatgacacacattgtccgagaggtcgaaaaacctggatctaagcttcacaagaaagagacatgtgaagctgttacgatcattgaaacccctcctatggtgattgttggggttgttggttatgtcaagacaccacgtggtcttcgcagcttgaacaccgtttgggctcagcatctgagcgaggaagtcaaacgtaggttctacaagcattggtgcaagtacaagaagaaggctttcacc

SEQ ID NO: 235446 - DNA, 393 bp, Gossypium hirsutum
attgttccttccttcgccgtctactgctcttgtgacctcgatttcaagtgaaacagaatgggtaaggaaaagactcacattaacattgtggtcattggccatgtcgattccggaaaatcgaccaccactggccacctgatctacaagcttggtggtattgacaagcgtgtgattgaaaggtttgagaaagaagctgctgagatgaacaacaggtcattcaagtatgcttgggtgcttgacaagctcaaggctgaacctgagcgtggtatcaccattgatattgccttggggaaatttgagaccaccaaatactactgcactgtgattgatgcgcctggacaccgtgactttatcaagaacatgattactggtaccttacaagctgactgggct

SEQ ID NO: 235447 - DNA, 345 bp, Gossypium hirsutum
cacaaacccaaatctccaattgatctgtttcatttttcagcaaagctagaaaaacaatgactaaggatatcgagactgcagagcaacatggaggggagttctcggccaaggactaccatgatccaccacctgctccattgattgatgctgaagagttaaccaaatggtcgttttacagggcagtgattgccgagttcattgctacacttctcttcctgtatgtcactgtgttgaccgtgattggttacaaggtccaaaccgaccctgctaagaacactgttgaccccgattgcggtggcgttggtattcttggtattgcttgggctttcggtggcatgatcttta

SEQ ID NO: 235448 - DNA, 361 bp, Gossypium hirsutum
aacgctagcacgagcagtgctgaggaatttgttcctcatacgacccgtaaaacagaattgaagttgaacattgcaaatccgactactggttgccaaaaaatgctggaaattgatgatgaccataaactttgcgccttttttgacaagaggatctcacaggaggtcagaggtgatgccctcggtgaggaggttaagggctatgtattcaatatcatgggtggctgtgatgaacagggttttgcaatggagcatggagttcttactcctggacgtgttcatgttttgctttacagaggtacttcgtgtttctctgggtatggtacgagaaatggatagcgcaagatgaagtcaattcggggat

SEQ ID NO: 235449 - DNA, 414 bp, Gossypium hirsutum
ctcgccggcgcctgcgtctctctcttcatctctctgaaccaaaaagtctttagcttttcgcttcgagagagaccatgttggtttaccaggatctcatctccggtgacgagcttctttctgactcattcccctacaaggaaatcgagaatgggatgctgtgggaagttgagggaaagtgggttgtgcaaggagctattgatgttgacattggtgccaatccttcagccgaagatgctgatgaggatgaaggtgttgatgaccaatctgtgaaggttgttgacattgttgacactttcaggcttcaggagcaaccccctttcgacaagaagcagtttgtcgtgttcatgaagaagttcatcaagaacttgacaccgaaactggatgcggaaaagcaagagtccttcaagaaaaaca

SEQ ID NO: 235450 - DNA, 417 bp, Gossypium hirsutum
gaaaaacaaacaaaaatgcctttaaggcactcattgctgcagaatatagtggtgtgcatgtcaaaatggttgagaattttgagatgggtgtgtcaaataagactcctgagttcatcaagatgaaccctttggggaaggttcctgtgttggaaacacctgagggtccggtatttgagagcaatgccattgctcgttatgttgctcgctcaaaggttaacaaccctatatgtggttctacattgattgattatggtcatatcgagcaatggattgattttgcagccttggaaatggatgctaatattgccaaatggttgtatccaaaacttggttacggtgtttacctttctccagctgaggaagctgctattgctgcattgaagagagcccttggcgctttgaacactcatcttgctt

SEQ ID NO: 235451 - DNA, 373 bp, Gossypium hirsutum
cgccgtctcgcctctcgcttattggttcaagatctggttttgatctgatcagatcgtataaaaatatcaaaacatgtttgggagagcaccgaataaaagcgataattccaaatactatgagattttgggagtatcgaaaaacgcttgccaagatgatctaaagaaagcttatagaaaagccgctattaagaatcatcccgataaaggcggcgatcctgaaaagtttaaagagttggctcaagcttatgaggtgctgagtgacccggagaagcgtgagatttatgatcagtatggtgaggacgcccttaaagaagggatgggcagcggtggcggtggccatgaccctttcgatatcttccagtctttctttggt

SEQ ID NO: 235452 - DNA, 338 bp, Gossypium hirsutum
ctttgactgagctgatccaatccagtggtaacgcagacagaaaatggattcaagagaagacgacggcggagagccacttagccggatggcggagtggcgtgatgtgacgcctcttcctcaagacgacggtcctaaccccgtcgtgcccatcgcctacaaggaagaatttcgtgaaaccatggattacttccgggccatctacaaagccgatgaacgctcccctcgtgccctacgcctgacccgacgagcaatccatctcaatcctggcaattacactggttggcattttaggcgactcgtgctccaagcacttaatgccgatttggacgatgaattgg

SEQ ID NO: 235453 - DNA, 353 bp, Gossypium hirsutum
gtgaactgaaaaaagaaaacccggaattttaaagacaaaaaaatgccttcttctccgttgattcttctctcaaaaaccatgattttcccagaccaaaaatcaaaccttgaagacctcaagctttcaggttccgatcttcctatgctatcttgccattacattcaaaaaggttgcctctttactcgcccttcaatccccattaattcactgatttcccttctcaaacaatccttgttcaagacgctgtcgtttttccctcctctcgccgggcgtttttacacagacccaaatgggtacaattacattacttgtaacgacgccggcgttgaattccaccatgccaaatgtgacac

SEQ ID NO: 235454 - DNA, 400 bp, Gossypium hirsutum
atcatcatcactctccccacccaccaacctttcccaacacaaaaacaaagcagctgtttttactagttttgattgtgagagagagagaggatgagagtgagtgtaaattatgcgaatcctttgtgacgcttgtgaaagtgctcctgctattgtcttctgtgctgctgatgaagctgctctctgccattcttgtgatgaaaaggtccatatgtgcaataagcttgctagccgtcatgtccgtgttggactagcaaatccaagcgctgttcctcgttgtgacatatgtgaaaatgcacccgctttttttttattgcgagatagatgggagttccctttgtttacaatgtgatatgattgtacatattggtggtaaaaaaacacatggaagataccttttttt

SEQ ID NO: 235455 - DNA, 411 bp, Gossypium hirsutum
agcgtttgtctcagatttttgaagatggcccgtaccaagcagacagcccgtaagtcgactggtgggaaggctccaaggaagcaacttgctaccaaggctgcccgtaaatctgccccaaccaccggtggtgtgaagaagcctcatcgctaccgtcctggaactgttgctcttcgtgaaattcgaaagtaccaaaagagtactgagcttcttatcaggaaattgcctttccagaggcttgttcgtgaaattgcccaggacttcaagactgatttgcgtttccagagccatgctgttctagctctccaggaagctgcagaggcataccttgtgggtctttttgaagacaccaacctttgtgcgatccacgccaagcgtgtcacaattatgcccaaggacatccagttggctcgt

SEQ ID NO: 235456 - DNA, 368 bp, Gossypium hirsutum
gtgtaggataagtgggagctctcgggcgaaattgaaataccactacttttaacgtgattttacttattccgtgaatcggaggcggggcacggcccctctttttggacccaaggccggcttcggccggccgatccgggcggaagacattgtcaggtggggagtttggctggggcggcacatctgttaaaagataacgcacgtgtcctaagatgagctcaacgagaacagaaatctcgtgtggaacaaaaacgacatccctgttaagacactgttgacggttattgaaggagagcaatctgatggagatgtgctgattttccctgaaatgatcaaatacaagggtttgactgaaggtgatgtggatggct

SEQ ID NO: 235457 - DNA, 356 bp, Gossypium hirsutum
gtttctttcaatcgaagaagaaagctagcaattaagacggtggcgtagaggaaaatgttcaggaaccagtacgatacagacgttaccacatggagtcctgcggggcggttgttccaagtggaatacgcgatggaagctgtgaagcaaggttcagccgcgatcgggcttcgatctaagacccatgtagttttaggttgcgtcaacaaggctaactccgagttgtcttctcaccagaaaaagattttcaaagtcgacgaccacatcggcgttgccatcgccggtctcaccgctgacggccgcgtcctttctcggtatattagaaatgagtgtattaactacaacttcacgtatgaatc

SEQ ID NO: 235458 - DNA, 357 bp, Gossypium hirsutum
ctttgttgttgttttccttgttcattattgttgcttctgcaattatcaatgggtcagcagcagtggagaaggttgggatatatgagctgaagaaaggtgatctgagtgttaaattcaccaactggggtgcaactattgtttcagtcttcctccctgacaaatatggtaaaatgggtgatattgttctgggatatgattctgtcaatgactacaagaatgatacttcgtatattggttccattgttggaagggttgctaacagaataggaggggctcaatttactttggaatggagtccattataaattgatccctaatgaaggcaaaaacatgcttcatggtggccctattggattt

SEQ ID NO: 235459 - DNA, 422 bp, Gossypium hirsutum
aaaagatcgaataaattagaatcagaagcaaaaatcgccgaggaaaacaagatgtcggggcagcaagaagaagataagaagcccggcgatcagtccgcggctcacatcaacctcaaagtcaaaggccaggacgggaatgaagttttcttcaggatcaaaagaagcacacaattgaagaagctcatgaatgcatattgcgaccgacaatctgtggatttcaactcgattgccttcttgttcgatggtcgccgcctgcgaggtgagcaaactcctgacgagcttgagatggaggatggtgatgagatcgatgctatgcttcaccaaaccggtggtactgtgtgaagcgagtactactttgccacatttagtatttgatgagttcgttatggtctgattatgtagatgtttccaatgtttttata

SEQ ID NO: 235460 - DNA, 327 bp, Gossypium hirsutum
caagtccagtgtttgtgatattcctcctcggggcctgtctatggcatctacctttgtcggcaactcaacctccattcaggagatgttcaggcgagtgagtgagcaattcactgctatgttcaggaggaaggctttcttgcactggtacactggtgaagggatggatgaaatggaattcactgaggctgagagcaacatgaatgacctagtgtatgaatatcaacaataccaggatgcaacagcggaagatgaacttggatacgaggatgaagactaggaaactgttcatggagatgaaaggtggtatgctacttgatactatgtcat

SEQ ID NO: 235461 - DNA, 422 bp, Gossypium hirsutum
aaaagatcgaataaattagaatcagaagcaaaaattgccgaggaaaacaagatgtcggggcagcaagaagaagataagaagcccggcgatcagtccgcggctcacatcaacctcaaagtcaaaggccaggacgggaatgaagttttcttcaggatcaaaagacgcacacaattggagaagcctcatgaatgcctattggggcccacaattctgtggatatcaaactcgattgccttcttgttcgatggtcgccgcctgcgaggtgagcaaactcctgacgagcttgagatggaggatggtgatgagatcgatgctatgcttcaccaaaccggtggtactgagtgaagcgagtactactttgccacatttagtatttgatgagttagttatggtctgattatgtagatgtttccaatgtttta

SEQ ID NO: 235462 - DNA, 398 bp, Gossypium hirsutum
aattaataaaatcttgatatagttgctctgcttttgcttctcttatactgagttccaagcaaaacccctttttgtttttcgtctgattcagctaaggtcttctttgggtagtttgagatttgagttattcatcatactatggcttctcaaccttctaagggatcagttcatgatttcactgttaaggatgcaagagggaatgatgttgatttaagtatttacaagggcaaggttttgttgattgtcaatgttgcatcacaatgtggcttgaccaattccaactacactgagctgagtaaattgtatgagcaatataaagatcaaggttttgagattcttgcattcccatgtaaccagtttggaggacaggagccagggaacaatgagcaaatcttaga

SEQ ID NO: 235463 - DNA, 343 bp, Gossypium hirsutum
ctttggtgtatctcatatcttccatttttggcttttttttcagatctcaaagatgtagacatcaaggaagaagatccacaaagataaggatgctgaaccaacagaatttgaggagtctgttgcgcaggcattctttgatttggagaataccaatcaagatctgaaaagtgaccttaaagatctctatattaattcagcagtccaaattgatgtttctgggagccggaaagctgttgttgtccatgtcccatatagattgaggaaagctttccgcaaggttcatgttaagcttgtgagggaacttgaaaagaagttcaatggccaaggatgtgaattttatttg

SEQ ID NO: 235464 - DNA, 423 bp, Gossypium hirsutum
gctctctgtagccgccgcctgcgtctctctcttcatctctctgaaccaaaaagtctttagcttttcgcttcgagagagaccatgttggtttaccaggatctcatctccggtgacgagcttctttctgactcattcccctacaaggaaatcgagaatgggatgctgtgggaagttgagggaaagtgggttgtgcaaggagctgtcgatgttgacattggtgccaatccttcagccgaaggtgctgatgaggatgaaggtgttgatgaccaagctgtgaaggttgttgacattgttgacactttcaggcttcaggagcaaccccctttcgacaagaagcagtttgtcgtgttcatcaagaagttcatcaagaacttgacaccaaaactggatgcggaaaagcaagagtccttcaagaaaaacatt

SEQ ID NO: 235465 - DNA, 424 bp, Gossypium hirsutum
ctcatctacccccaaatctcctcacattatgtctttggtggccaacgaagattttcagcacattttacgtgtgctgaacaccaacgttgatgggaagcagaagattatgtttgcattgacctccatcaagggtatcggaaggcgattcgctaacatcgtttgcaagaaggctgatgtcgacatgaacaagagggctggtgaattgactgcacaggagttggacaatctcatgaccattgttgcaaaccccaggcagtttaaaatccctgactggtttttaaataggcagaaggattacaaggacgggaagtattcccaagtcgtgtctaatgctcttgacatgaagttgagggatgatttggagcgtttgaagaagatcaggaaccaccgtggtttgaggcactactggggccttcgcgtccgt

SEQ ID NO: 235466 - DNA, 425 bp, Gossypium hirsutum
gctagatccaggactaaaaagtttgctacgaaagaggcaacttttaatgcgttccaaacactttacagcctggcacagtgcacacccgacatttccagtgaggattgctacagatgcctccaggacgctattgcagacttgcaattctatttcggtggaaaacaatcaggatttgctatgtaccctagctgtactgcacagtatcagacaagccctttctatagcctaaaccaaactggattagctaagcccccggtctcgcctcaacatcctcttctactccctgcacctccacctcctcctccaggtaaaagggggatatcatcacagacagtgatcaaaattgttgtttcaacagttggctttttggttttgtcctgtttcttatgtggtgttcttggttggaaagcaaccaagaaactaac

SEQ ID NO: 235467 - DNA, 425 bp, Gossypium hirsutum
aatggagagaaaatctcaagccaaaccaattctcttcttctttgttttagtttcggcactaatcgaaacttcctacgccggtgacatcgccatctattggggccaaaatggtaacgagggtaccctgagtgatacatgtgccaccggcagatataaatacgttaacataggtttccttaacaccttcggcaatggtgccactcctggactcaacttggccggtcactgtaatccagcatccaacggttgcacctctcttagcggtgaaataaaaagttgtcaaaaccaaggaatcaaggtcatgctctcccttggaggtggcgcgggaagctactcactcgcttctcaagaagacgccaaaagcgtagctgattatctatggaacaacttcttgggcggtacctcgtcttctcgtccgttgggtg

SEQ ID NO: 235468 - DNA, 424 bp, Gossypium hirsutum
caagaaaagcagagccgcatcactttttgctagctaagctactgtgggagttattgttcttcagaacagcttctgcagtagctaataataacgttatatattatataaattttatacatcctttttaccctacgactccatatataagcaagtaaaaataaatatggctcgctctgtttcttcctttaagttccttggtgcttctgtttttgatgctctttatgtctccatatcaaggagaggttactcaggtgcaccgccggcggcagtgacggctagctttggtaggcctggagcgatggggaaagtggaacgaagatatgcgatgaaagagtcgtcgtcgtcggagacaagggcttattcttcagcttgggcgcctgaccctgttacggggtattaccggccggagaactgtggggctgag

SEQ ID NO: 235469 - DNA, 420 bp, Gossypium hirsutum
tacctgtaaaagaaaaccctagccgtctcttacataccaaaactgactggagagccagtgaaccccaaagcataccctattagcacatgctcaacaaacgaccactattctggatctcgaccaacaagctgctaactacacgcagatcaaaaagggagctactgaagctactaagacacttaacagagtgtatatccgagttggttgagatggcatgccatactgagcctgttgagacactttcgcatattcctttgcttgctgaagataagaatgccccatatgtatttgatccttcaaagcaagcactagtccgagcatgcggcgtcacaagacctgtaatcgcatgctctgtcacatcaaatgaaggaggcctgctgaaatcgcaaatacaacagcttaaggatgccattgagaagc

SEQ ID NO: 235470 - DNA, 425 bp, Gossypium hirsutum
ctttcatctccttttctctttaaagaaaaattggttttcgattccattttcaatttatatattttggattagattcggttggtcttagggaaaaacaaaggaaagggcaatgtcaaccccagcaaggaagaggctgatgagagacttcaagagactacagcaagatccacctgctggtattagtggggctcctcaagataataatatcatgttttggaacgctgtcatttttgggcctgatgatactccttgggatggcggtacgttcaagctgactttgcagttcatggaggattatccaaataagcctccaaccgttcggtttgtctcacggatgtttcatccaaatatctatgcaaatgggagtatttgactcgatattctacaaaatcagtggagtcctatatatgatgttgccgctatac

SEQ ID NO: 235471 - DNA, 425 bp, Gossypium hirsutum
cccagatctcttccattctcttcttcagcgttcttttcatttccgcccatgcagcgcgctttgaaatccgcaatgagtgcccctacactgtttgggcggcagcctctcctggtggtggtcgtcgcctagacccttggcaaagttggaccatcgatgtgcctgctggcactgctatggctcgtatttggggtcgaaccaattgcaatttcgatgccagtggtaggggtcattgccagaccggcgattgtggtggactccttcaatgtcaaggttggggtgtacctccaaacaccctggctgaatatgcacttaaccaatttggaaacatggatttctacgacatttccttagttgatgggtttaacatccccatggtgtttggtccaactaatggcggttgtcacaacattcggtgcactgcagac

SEQ ID NO: 235472 - DNA, 416 bp, Gossypium hirsutum
gaaaaaagtcatacgcaatgagcactgccggtcaggttattcgttgcaaagctgcggtggcatgggaggccgggaagccactatctatagaagaagtggaagtggcaccaccccaaaaacatgaagtccgtattaagattctcttcactgctttatgtcacactgatgtatactactgggagtgtaagggttacactcctctgtttcctcgtatacttggtcatgaagcctcagggatcgtggagagtgtgggtgagggtgtgaatgatttgaaacctggggatcatgtgcttcctatcttcaccggagaatgcaaagaatgtcgccactgtctgtcagaagaaagcaataacatgtgcgaactgcttaggatcaactgcgaccgaggtgttatgcttgctgatgggaaaaccaga

SEQ ID NO: 235473 - DNA, 423 bp, Gossypium hirsutum
aaagaaatcactcctctcacaaacctcaaacaatggaagtggtgaagaacttggacatccaaagatacatgggaaagtggtacgagatagcttccttcccatctttctttcaacctaagaagggggagaacaccagcgctttttacactctgaaggaagatgggacggtgcatgtgcttaatgagacttttgttaatggcaagaaagattccatagaaggcaccgcctacaaggctgatcccaagagtgacgaagccaagctcaaagtcaaattctacgttcctcctttcttgcctatcattcctgttactggggattactgggttttatacattgatgaggattatcaatatgttcttggtggtggtcctaccaagaagtacctttggatattatgcaagcagaaacatatggatgaagaaa

SEQ ID NO: 235474 - DNA, 421 bp, Gossypium hirsutum
caaaactctctcagttcatcccatatatatacacacacaactccacttgcccatcacaaaaaatatattcttcacttcacatcttttgggcaatcaattttgtaagcaagtatggctaaggacgttgaggttggtggtgagttccaagccaaggactaccatgatcctccaccagctccattagtggacggggaggagttgacaaagtggtcattttatagggctgtaatagccgagtttattgccacgctcttatttttatacatcactgtgttgacagtgatcggatacaagagtcaggttgaccctgataagggcagtgacgaatgcggtggtgttggcattcttggcattgcttgggcttttggtgggatgatctttatccttgtttactgcactgctggtatctctggaggacaca

SEQ ID NO: 235475 - DNA, 420 bp, Gossypium hirsutum
gcctattgaaaaattttcgagtgttgatttcagtagccatcgaaaccctaattcctctttcaccatgaactgttcaatctccggtgaggtgccggaggagcccgttgtctccacgaaatccggcttgctctacgagaaacgcttaatcgagcgtcatatttcggattatgggaagtgtccagttactggggaggtacttactatggacgacattgtcccggtcaaaaccggcaagattgtgaagcccagatctttaacagcagctagcattcctgggatgcttggaatgtttcagaatgaatgggatgctttaatgctatccaattttgcattggagcagcagcttcatacagccaggcaagagttaagtcatgcactctaccagcatgatgctgcctgccgtgtgattgcaagacttaa

SEQ ID NO: 235476 - DNA, 423 bp, Gossypium hirsutum
cgaaaccttaattccatcaaaataattcaaaggaaaatatctgcagaatcataatggagaattatctctttctgttctcgcttgttcttctctttggtcttttacccttttcctctcaaaccccaaaccctaaaaaccccaatcccaaacctccgctcacccaggcacacaccgagcttataaactatggttttccgatcggtcttcttccggcctcggtgacgaagtacactcttaaccaaacatccggtaacttcgccattgatctcggtggcacgtgcaagatcacgctcccgcctgacaactacctggctacttactcgaagcgggtaacgggaaagattgaaaacggaaagatagcggaactcgatgggatcagggtacgggctttgttcaaatggtggtccataaccgggattcgat

SEQ ID NO: 235477 - DNA, 398 bp, Gossypium hirsutum
aaagcattatactcgtactaagaagaaactagttgtagtaagctattatatcgtttctcctttctccctcctcgtaagaatgattagtggaatgttacgccaatggttaagtctactggtctgtgtgcttgctgttatactactcaaatctgaaggcgctagtgtagggattacttatctgcaggatgccgtagcgaaaggagctgtttgtttggatgggagtccaccagcttaccattttgacaagggctctggcgctggagttgataattggattgttcacatggagggtggaggatggtgtgaagatgtgccgacttgcctctctcgtaagaacaccgatttagggtcatcaaagcaaatggtgaagcaatttggcttctctggactcttgagcg

SEQ ID NO: 235478 - DNA, 426 bp, Gossypium hirsutum
gcacgttaaatcacgtgatggcgagtgctgacgtggaggccgtggatttcgagccggaggacgacgacctcatggacgaggacgccgccgctggtgacgcatcacctcaagtctccatgcctaagctcaagtctgccatcactggcggcgcttccgtttctctttctggccctaagaagactaaaggccgtggcttccgccaggacgacgccgaccgtcactcccatctcgcttcccgcgactttgactctctcggctctgacggcggccccggtccacagagatctattgaaggatggataattttggtcactggtgtacatgaggaagcacaagaggatgatttgcacaatacatttggtgaatttggtgagatcaagaatttgcatttaaatcttgatcgtcgcactggatttgtcaagggat

SEQ ID NO: 235479 - DNA, 424 bp, Gossypium hirsutum
gcaaagttgaaagaaaagagtgataaacatggtgcctgacaacaataggaatgaggttgaggattataagttaactgttcaagtccctgaaactgcccatcaagttagcactgattcatggctccaggccggttttgtcttgacaactggtgttaacagtgtatttgtgttgggatattctgggacaatcatggtccctcttggctggataggaggcatagtcggtttgcttttagccaccgtgctgtcgctgaacgccaacatgcttgttgccaagctccatgaacatgggggaaagaggcatatcagatacagagatcttgcagcacaaatatacggtaggagagcctatacaattacatgggcaatgcaatatatcaatctgttcatgattaacattgggtttctcattttgggtggttct

SEQ ID NO: 235480 - DNA, 427 bp, Gossypium hirsutum
gcagccatggcagtccgtatgcttcttgggttaggtgtcctgctactctgccttgcaaaggtttcatctgatctgaaggcagaagaagttataaccaatgtcggtgaggtgggttctttggttaccagaggcggaaacagaagactgatgctagagattgattgtggaggattatgcaagaaaagatgcagtcaacactcgaggccaaacagatgcaacagggcgtgtgggacttgctgcttgaggtgcaagtgcgtgccaccggggacttcagggaacagggaggtctgcgggacctgctatactggcatgaccacccatggaaacgttgccaagtgcccttaacctttacgtcgcccaatatgtgttgcagccatcaaggggaaaaatgaaatgtttggttgtgtaatatgtatgttgtagctca

SEQ ID NO: 235481 - DNA, 424 bp, Gossypium hirsutum
gtcacacccgaaagcgcaaaaaaaaaaaaaaaaaggaaaagaggaaaaacgttctctcccacgaaacccaccattactgcaaatggcgacgacggcccccgacaacctgagccgcgatcagtacgtttacttagcgaagctatccgagcaagctgagcgctatgaggagatggttcagttcatgcaaaaactggtcctcggctcaaccccagccgctgaattaactgtcgaggaaaggaaccttctctccgtcgcctacaaaaacgtcatcggatctctacgtgccgcgtggagaatcgtttcttccatcgagcagaaagaagaaggtcgaaagaacgaggaacatgttgtgctggttaaggagtacaaatccaagattgaatccgaattgtcggaagtttgcgctagtatcttgactttattg

SEQ ID NO: 235482 - DNA, 424 bp, Gossypium hirsutum
ctcatcttccgttgtttatacgtttggttgttgttgaagaagtgctactaccatggctacaaagaagagcgttggggacttgaaggaagctgatttgaagggaaagaaagtgtttgttagagtcgatctgaacgttccattggatgataacttcaacataactgatgacacaaggatccgtgccgctgttcccaccatcaagtatttgatgggtcatggctctaaagtcatcctctctagtcatttgggacgcccaaagggtgtcactcccaagtacagtttgaagcctcttgtgccaaggttatctgaactccttggagtcgaggttaaaatggcaaatgactgtattggtgaagaagttgagaaaatggtggctgcattaccagatggcggtgtattgctgcttgagaatgtgaggttctac

SEQ ID NO: 235483 - DNA, 425 bp, Gossypium hirsutum
cggacgcgtgggtttttaactctaaagccaagaaagcaagccactaaggttttgagagaagatcaaaatggcttctaaaagatcagcttccatggtcctccttttggcactcaacattctctttttttccctagtcagtgcttgtggctcttgctcttcacccacccctaaaccaaggccaaacccaaaccccaacacccccactcctactccatctgcacgaggcaggtgccctagggatgccctcaaattaggtgtatgtgccaatgtgcttaacctagtcaatgtcaccgttggttcacccccagtgatgccatgctgttcccttctcaatggccttgtcgacctcgaagctgctgcatgcctttgcaccgctatcagagcaaacattttaggcatcaacctcaacatcccaatttccctta

SEQ ID NO: 235484 - DNA, 349 bp, Gossypium hirsutum
gaaaaacatgggttttgaaaggcgggaggttatatggttatcagggcttgtgttttgaatatccttgtcttatccacagctgatgtccattattacgagtttttttgcaagaatcccagttcactaagctgtgtagcacgaagagcatcttgaccgtcaatggcagctttccagggcctgagattcgggttcgcagaggggacacagtttttgtcaacgtccacaatcaaggaaaccatgctgtatccctcaagtgggagggcgttaagggttcaattgatggttcgaatgagttaattcagccagggagaaacttcacttacaagatagagttaaaggatgaaatagg

SEQ ID NO: 235485 - DNA, 425 bp, Gossypium hirsutum
ggaaccgatggttccgtttaattatacagggattgcaccgaataatacgaatgtgatgaatgggactcgtacggtggtgttgccgtttaatacgagtgtggagctagtgatgcaggataccagcattcttggtgctgagagtcatccattgcatcttcatggtttcaatttctttgttgttggacaagggtttgggaactttgatccggttaaggatccggcgaagttcaatcttgttgacccgatggaacggaatacggccggtgtgcctgccggtggttggatagccattcggttcttagcagacaacccaggggtgtggttcatgcactgtcacttagatgttcatacaagctggggactgaaaatggcatggatagtgttggatggtccggaaccgaatcagaagctgcaaccaccaccgt

SEQ ID NO: 235486 - DNA, 424 bp, Gossypium hirsutum
ctcactgttttccttcaaaaccctaatagctgtcctcgcctcctgaacgtgttcgaaaatggccggttctgagggattgactctacgtggcaccatgcgtgcccacaccgacatggtgacagccattgctactcccatcgataactccgacatgatcgtcacttcctcccgcgacaaatccatcatcctttggcacttaaccaaggacgaaaagacctacggtgtccctcgtcgtcgtctcaccggtcactctcacttcgtccaagacgttgtcctctcttccgattctcagttcgctctctctggttcctgggatggtgagcttcgtctctgggacttatctgccggtatctcagctcgccgttttgtcggccacaccaaagatgttctctccgttgccttttcaattgacaaccgtcaaatt

SEQ ID NO: 235487 - DNA, 420 bp, Gossypium hirsutum
gcagcctcatatgtcagtgtgttccgatgtgaaattggcattgcaggggataaataagatattggagaccacgggagctaagctgaatcttgattattcggaatggaggcaggagttaaacgagcagaagctgaaattccctttgagttacaagacctttggtgaagctattccacctcaatatgcaattcaggttcttgatgaattaactggcgggaatgcaattataagtaccggtgttggccagcatcaaatgtgggctgctcaattttacaagtataagaagcctcgtcaatggttaacgtctgggggattgggtgctatgggatttggattgcctgctgctattggagctgcttgtgcaaacccggaggcagttgttgtagacatcgacggtgatggaagttttatcatgaatgt

SEQ ID NO: 235488 - DNA, 429 bp, Gossypium hirsutum
aaaaaatatcttgaaacccggagatgtcggacgaggagcaccatttcgaatccaaggccgacgccggcgcctctaaaacctatcctcagcaggccggtactatccgcaagaacggctatatcgtcataaaaaaccgcccatgcaaggttgttgaagtttccacctccaagactgggaagcatggtcatgctaagtgtcactttgtcggaatcgacatcttcactggcaagaaactggaagatattgttccatcttcccacaactgtgatgttccacatgtcaatcgtactgattaccagttgattgacatttctgaggacggatttgtgagtttgctgactgacagtggagacaccaaagatgatttgaggcttccaactgatgacaacttgttgaaacagataaaggacggttttgctgaggggaaag

SEQ ID NO: 235489 - DNA, 423 bp, Gossypium hirsutum
ctactttatatctctcttctctgcttttacaagcaaatttcttcgaggctgtattttcagatatcggaactggcaaacagcaattccacggacaaatggattataaagcggctggtttatatacgttggatgaagcccttgaaactgtggggtttgggaaattccagggctttgttcttggatacgctggtcttggttggtttgctgaagccatggagattatgattctttcctttataggacaagctgttaaatctgagtggcaactttcctctggtcaggagagccttttaagtaccatcgtctttgctgggatgcttctcggagccaatacatggggccttttatcagataactacgggaggaggaaaggttttcttactatatctatggtaacttttggagctggattactgagcacat

SEQ ID NO: 235490 - DNA, 427 bp, Gossypium hirsutum
gtaccaaaaaaagataccttgttttatttgatcttcaagtcctgaggatgaggatgagtcgaggttacaacaggttagccagctccatgtttacaatggtcagccctcgattcttttccacagcagcaacacggggggtcctctccaacgacatggtgaaggctcccgccgttggacttggcgtgcgctgcaggagctctatggcggcgatagctggtggtgacaaggagcaggagaagaaacaagcagtaggcggcggcggcggctcctccaaggatgacaaagagatcgtcagttattggggcttggatccaactaaggtgtccaaagaggacggctccccatggaagtggacctgctttaggccatgggatacgtaccaggcagacttgtcaatagatctgaagagacattacgcaccggtgac

SEQ ID NO: 235491 - DNA, 425 bp, Gossypium hirsutum
agaaaacgcacttctggaactatcgaagaagagagaattatttcaagatttggctccattgttgtggaattcttttggtactattgctgcacttttacaggagatagtttcaatttatcctgttctctcacctccaaatctgactccagctcaatcaaatcgagtttgtaatgctcttgctctgcttcagtgtgtagcttctcatccagacacaaggatgttattcctgaatgctcatatacccttgtatctgtatcctttccttaatacgaccagtaagtcaaggccgtttgagtatttgaggcttactagcttaggtgtcattggtgccttggtgaaggttgatgatactgaagttatcagcttcctcctgtccactgagataatcccattatgtctgcgcacaatggagatgggcagtgaac

SEQ ID NO: 235492 - DNA, 420 bp, Gossypium hirsutum
ctttttatctttaaaacacgcacccaaaaaataaaacccttcgaaaaccaaagaaggaagaagaagatgtcgtggcaagcttacgtagatgatcacttgatgtgtgaaatccaaggaaaccatctctctgccgccgctatcatcgcccacgacggcagcgtttgggcccaaagcgccaatttccctcagttcaagcccgaagaaattaatgccatcatgaatgactttaatgaaccgggtacgctcgctcccaccgggttgcacctcggtggcacgaaatacatggtgatccaaggcgaaccgggagctgttatccgagggaagaagggacccggaggtgttactgttaagaagaccaatatggccttgatcatcggaatctatgatgaaccaatgacacctcgccaatgcaacatgatc

SEQ ID NO: 235493 - DNA, 426 bp, Gossypium hirsutum
ctgccgcatctcagtacctccgcagttcactgagaaatggatgaggaagttaaggctgtggttcctgagtcactcttgaagaaacagaagagggctgaagaatgggagcttgccaaaaagcaggagcttgaagttgcaaagaagaagaaagtcgagaaccgcaagctgatttacactagggctaagcagtatgcaaaggagtacgaggctcaggaaaaagagctgattcaattgaagcgggaggcaaagttgaaaggaggattctatgtagatccagaagctaaactcttgttcatcatccgaatccgtggtatcaatgccatgcacccgagaacaagaaagatcttgcagctattgcgtttgagacagattttcaatggtgtttttcttaaagtgaacaaggcaacaatgaacatgcttcacctg

SEQ ID NO: 235494 - DNA, 421 bp, Gossypium hirsutum
cgctcactgggtctctctgtactgtcttctccataacattcgtctctcagatcctttcctcttagatcatcaaatccattcctttttttcaccaaaacatgagggaaatcataagcattcatataggtcaagctggtattcaagtcggtaactcatgttgggagctttactgccttgaacatgaaatccaacccgatggaatgatgcccagtgacacctctgtaggtgtagcaaatgatgctttcaacactttctttagtgaaactggttcagggaaacatgttcctagagctgtgtttgtggatctggaacctactgtgatcgatgaagttaggactgggacttaccgacaacttttccaccctgaacagcttatttctggcaaagaagatgctgccaataactttgccagaggccatta

SEQ ID NO: 235495 - DNA, 422 bp, Gossypium hirsutum
ttttgtttcagcccaaatcatctttctattagcctgttcctcatggaatcccatattgagaaaaaaaaaagatgcgcttcaaaaatctttcaaagaaatgatatctactctccctaaagggaattgttggggttgttttgaagatctatgtcaatatcaaggtttttggttcttctcgacttttctacaaggagctttgtcggctcaacaacaattccaggcgcaacccactgatatcatcctttgtagctctccaagaacaggcacagcctggttaaaatccctcactttcgccactattacaagaaccttatacgatgattccaccacccctttgctttccaagatgcctcatgatgttgtgcctttcatggagttcgatcatgcccagttttccactaatcgacatcttggaattcctc

SEQ ID NO: 235496 - DNA, 425 bp, Gossypium hirsutum
gtttcttcaatggaattttggtgcatccttaacctcagagccactcttattactcttcttcttattctcttttttcatctttccaagaaactttactctaaattctttcctcctccttccgttcttcatcttccttctccttcttcatccacttcccttcctgaatctcaatcaagaatcccagagattgtatctgattcagacttgaagtttttgattgataatctggatgagaagctcgatgaggacgagaaatgggagactgtaattgataagaaaaccaactctttatcctacaaggcaaaatgctgcagacctaagaataaaccactaaaatacctgagcacgactgtatttgagggttgctctccggagcttctgagggacttctatatggacaataattatagaaagcagtgggataa

SEQ ID NO: 235497 - DNA, 423 bp, Gossypium hirsutum
gctctctttcattaacttaagaattttaaaagaaaaaaagtatcgtattgttgattaaacctgcttggttaatcccagattcagcttgggataatacgaattgcaattgctgaattgttgttggctagaaagggtgaaagaggcagagaagaaatcagacatgttgcagtgtatatttcttctatctgattctggagaggtgatgctagagaaacagctaactgggcatcgcgttgacagatcaatatgtgattggttttgggatcatgttatttctcaaggcgattccttcaagtcacagccagtgattgcttcacctactcattatcttttccaagtagttcgagaggggattacatttttagcttgcacccaagttgaaatgcctcctttaatgggcatcgagttcctctgcagagtttc

SEQ ID NO: 235498 - DNA, 426 bp, Gossypium hirsutum
aagaaaagaaaaattacagtgaaaatgtcaacccttaaagttccagctcatgtacctgccccttctgaggatgctgagcaacttcgtaaagcttttgaaggatggggtacaaatgagcaattgattatcgacattttggctcacaggaatgcagctcagcgcaatttgattcgtaaaacttatcgtgaagcttatggggaagatctccttaagtctttggatgaggaactttcaagtgactttgagcgagctgtggtgctgtttactttggaccctgcagagcgtgatgcatttctggctcatgaagctacaaagaggttcacatcaagccattgggttctcatggaaattgcttgcactaggtcttcacatgaactgttcaatgtgaggaaggcgtatcacgatctttacaagaaatcccttgaa

SEQ ID NO: 235499 - DNA, 429 bp, Gossypium hirsutum
ggaagaagcaatggcgagaatcaaggtccatgagttgagacagaaatcaaaaactgagcttttggctcagttgaaagatctcaaagctgagctcgctcttcttcgtgttgccaaagttaccggtggtgcacctaacaagctttccaagataaaggtggtgaggttgtcaattgctcaggtgttgacagtgatctcacagaagcagaaggctgcactgagggaggcatataagaagaagaagttcttgccccttgatctccgtccaaagaagaccagagccatcaggagaaggcttaccaagcatcaggcatcgctgaagacagaacgtgaaaagaagaaggaaatgtacttccccatgaggaagtatgccattaaggtgtaggataagatatttgagattctattttgaaatccgtttgtgtttactta

SEQ ID NO: 235500 - DNA, 427 bp, Gossypium hirsutum
attttcattgggcacactctttcaaactaacccaaacgcggccgccgggttttgttttcagaatcagcagcagcttgtatttagaaggatggtgagggtcagcgttttgaacgatgcactgaagagcatgtacaatgcagaaaagaggggcaaacggcaggtcatgatcaggccatcctcaaaagtgatcatcaagttccttttggtcatgcagaagcacggttacattggagagtttgagtacgttgatgatcacagatctggtaaaattgtagttgaactgaacggaaggctgaacaagtgcggggtgatcagtcctcgcttcgacgtaagagtgaaggagatcgagggttggactgccaggctgcttccatcaagacagtttgggtacatagtgctgacaacatcagctggaataatggaccat

SEQ ID NO: 235501 - DNA, 422 bp, Gossypium hirsutum
ctcaatcatccatttattcttttctttcaactcaaagtcccaagtagtattagaatcatgggtgttgtcacttataactatgactctacctcccctgtcgctcccgccaggcttttcaaggccttcgttcttgaagctgacaaggtctggcccatagctgcccctcatgcaatcaagagtattgaggttgaagctaatcctggccctggatgtatcgtaaagatcaactttgttgaaggccttccattccaatatatgaagcaccagattggaggacatgatgaaaacaaattttcatacagttacaatttgattgaaggtgggcctttggggaacaagcttgagaaaatcaactacgagaataagtttgaggcagctgtaggtggaggaagtgtttgcaagagctcgatgaaattttacac

SEQ ID NO: 235502 - DNA, 409 bp, Gossypium hirsutum
aatgacttcccaattcccagtcccacagaatcagagtaattcatttccaagcgataagttttagggttttgagttctattctcttgacaatggctgcgatttacagtctttacataatcaacaaatcaggaggtttgatattttataaggattatggatccaaggggcgcatggatacgaatgatagcttgagagtggctagtctatggcattcgatgcacgctatctcacagcagctatcgcctaccactggttgttctggaattgagctacttgaagctgatacatttgatctccattgttttcaatctcttaccgggacaaagttctttgtagtttgcgaacctgggacacagcacatggaggctctcttgaaagttgtttatgagctctacacagattatgtttt

SEQ ID NO: 235503 - DNA, 343 bp, Gossypium hirsutum
tcgaacgtggtgtggtgtccggtgcgcccccggcggaccttgaaaatccggaggaccgtgtgcctgtcgcgcccggtcgtactcataaccgcatcaggtctgcaaggtgaacagcctatggtcaatggaacaatgtaggcaagggaagtcggcaaaatggatccgtaacctatggaaaaggattggctctgagggctgggcacgggggttccagttccgaacccgtcagctgacggcgcactgttcgagctgctcccgcggcgagagcggatcgccgtgtgccggccgtgggactgactgtgaacggctccctcgggggccttccccgggcgacgaacagtcg

SEQ ID NO: 235504 - DNA, 423 bp, Gossypium hirsutum
atttaaagctgccgctgatttctctcgtggggggtttttttttttttctcttttttaattttcttaagtagccataggatgaggaagctagagtttcatgagaaaaaactgttgaagaaagtaaattttttggaatggaaaagagaaggtggtcaccgggagaatctcattctgcatcgttatcatgtcactggtcgtgacgattataagaaatattccggtttgtgccggatggtccagaaattggtgaatatattgaagcagatggatcctcgagacccttttcgaatcgagatgactgatttgctgttagagaaactatacaatatgggcgtaatcccaaccaggaaaagcttggctctatgtgatcggttatcagtgtcatctttttgtaggcgtaggctctcaaccgtgctggtgcac

SEQ ID NO: 235505 - DNA, 421 bp, Gossypium hirsutum
tccgtctaaggaagagaatccaaaagcaaaggcaatagaaaatggcagaaaacgaagacattcagcctcttgtttgtgacaatgggactggaatggtcaaggctggatttgctggagatgatgctccaagagctgtattccctagcattgttggtcgcccacgtcacacaggtgtgatggtcggtatgggccaaaaggatgcttacgtgggagatgaagctcaatcgaaaagaggtattttgactttaaagtacccaattgagcatggtattgttagcaattgggatgacatggagaaaatctggcatcataccttctacaatgagcttcgagttgcccccgaagaacatccggttctcctcacagaagctcctcttaacccaaaagccaatcgtgaaaaaatgactcaaattatgtttga

SEQ ID NO: 235506 - DNA, 424 bp, Gossypium hirsutum
cccaaatctccaattctgtttcatttttcagcaaagctagaaagacaatgactaaggatattgagactgcagagcaacgtggaggggagttctcggccaaggactaccatgatccaccacctgctccattgattgatgctgaagagttaaccaaatggtcgttttacagggcagtgattgccgagttcattgctacacttctcttcctgtatgtcactgtgttgaccgtgattggttacaaggtccaaaccgaccctgctaagaacactgttgaccccgattgcggtggcgttggtattcttggtattgcttgggctttcggtggcatgatctttattcttgtttactgcaccgctggtatctctggagggcatatcaacccggctgtgacattcggtttgtttgtgggacgcaaggtgtcact

SEQ ID NO: 235507 - DNA, 423 bp, Gossypium hirsutum
cgcccatcgtctgcttttgccaaaagacacctaaagacgccactttgaaaaccggaaatgtcggacgaggagcatcatttcgagtccaaggccgacgccggcgcttccaaaacctaccctcagcaggccggcaccatccgcaagaacggttacatcgtcatcaaaaatcgcccctgcaaggttgttgaagtttccacctccaagaccgggaagcatggtcatgcaaagtgtcactttgttggaatcgatatcttcactgccaagaagctcgaagatattgttccttcttcccacaattgtgatgttccgcatgtcaatcgtactgactaccagttgattgacatttctgaggatggatttgtgagtttgctgactgatagtggagacactaaggatgatctgaggctcccaactgatgagaac

SEQ ID NO: 235508 - DNA, 425 bp, Gossypium hirsutum
gccgcctgcgtctctctcttcatctctctgaaccaaaaagtctttagcttttcgcttcgagagagaccatgttggtttaccaggatctcatctccggtgacgagcttctttctgactcattcccctacaaggaaatcgagaatgggatgctgtgggaagttgagggaaagtgggttgtgcaaggagctgtcgatgttgacattggtgccaatccttcagccgaaggtgctgatgaggatgaaggtgttgatgaccaagctgtgaaggttgttgacattgttgacactttcaggcttcaggagcaaccccctttcgacaagaagcagtttgtcgtgttcatcaagaagttcatcaagaacttgacaccaaaactggatgcggaaaagcaagagtccttcaagaaaaacattgagggagcaaccaag

SEQ ID NO: 235509 - DNA, 425 bp, Gossypium hirsutum
caaagatatcactgcaagaaaaaaaaaaaaccagacatggcttccaacactgttgcatccgctgctcttcttcttaccttgaacttgttgttcttcactttggttagctctacctacgtgccttgcccaccaccaccaaagagccacaagcctacccacaaaagcccaccctcggcacctgaacagccaggcacttgccccagagatgcactgaaactaggcgtttgtgctgatttgttgggctcagtgcgcgttgttgttggaccgtcgaggaccaaatgctgctctctcatttcgggtttggctgatctcgatgctgctgtttgcctttgcactgctattaaagctaatgtgttgggggttaacctaaacgttcctgtttcattgtctttgctcctcaattcctgcgaaaagcaaatgcctgc

SEQ ID NO: 235510 - DNA, 416 bp, Gossypium hirsutum
ctcactgttttccttcaaaaccctaatagctgtcctcgcctcctgaacgtgttcgaaaatggccggttctgagggattgactctacgtggcaccatgcgtgcccacaccgacatggtgacagccattgctactcccatcgataactccgacatgatcgtcacttcctcccgcgacaaatccatcatcctttggcacttaaccaaggacgaaaagacctacggtgtccctcgtcgtcgtctcaccggtcactctcacttcgtccaagacgttgtcctctcttccgattctcagttcgctctctctggttcctgggatggtgagcttcgtctctgggacttatctgccggtatctcagctcgccgttttgtcggccacaccaaagatgttctctccgttgccttttcaattgacaacc

SEQ ID NO: 235511 - DNA, 410 bp, Gossypium hirsutum
ggaaacctgtaattttgcctcaagcatttgcgcaatccaagccaactgcagacagcggttacttccgtctcaacaccatttgatctttcaggacttggagttccggaagatgggcagaaaatgatcagcgaactcatgtcggtttacgataacaacattcaaggcagcaaaaacatgaatcccagtaacaatccaatcgccgaaggccaaaatattcttcacccgaaaatccaacagccacaggatgaatactttcgtggtcaaggaaacttcttcgaggactccagcatgcccaataaccatcagatgtttccacaaggggaaggtcaatttgaccggttcaagggcctgaattctctgtttgagaccgaacataacaacaacaacagctttccggtgatggtcgggtt

SEQ ID NO: 235512 - DNA, 429 bp, Gossypium hirsutum
  unsure (1)..(429): unsure at all n locations
cagactctggctaggttgggaattaggacccatcatcaaccctgcgctgcttgtaggatgctacgcaggcgatgcgacagtaactgcatcctcgccccatatttcccaggcgatgagcctgacaaatttgccggtgtgcataaggtttttggtgctagcaacgttatcaaactgattcagatggtggaggaaacaaacagggaggatgctgttaaagcgctggtgtatgaagcgagagcaaggctccgagaccctgtttatggcagcacgggaaccatttttcagctgcagaggatggtgcaagacctaaaactgcagcttaaatcaacaaatgctcgagtattggaattgcagcagcaaaaagatcagttgctgggcatctttatgaattttgatcatcttgatgtactctcttnncgtgatcatggg

SEQ ID NO: 235513 - DNA, 429 bp, Gossypium hirsutum
gcgaccctctttttcctctaccaggtgattttagctttgtgttagttcctttaagcaatccgccaagatgcagaacgaagagggtcaaaacatggatctttacatccccaggaagtgttccgccactaacaggctcatcacctctaaggatcatgcttccgtccaaatcaacgtgggacacttggatgagcttggcagatacactggcacattctccacttttgctctttgtggatttgtccgtgcccagggtgatgctgacagtgctcttgacaggctttggcagaagaagaaagctgaagtccgacagcagtagttggatacctttttaccctagtctatctccgagcttgggaaagaaaaatctcatggcagcgactattatgttctaggttttttcaggttaaactatgtcaaatttatattttt

SEQ ID NO: 235514 - DNA, 422 bp, Gossypium hirsutum
gaaaactctgagagaaatggcttcttcaattatatctttgcaaaccagcaatttgaggtctgcatttttgggagagaaaaatgggagctgtgtttctagcattcccataactcgcgtaagtttagtgaggaaggctattgagtgtaaggagtcgagaatcgggaagcagccaataacggttccgtccaatgtgacgattactatggagggtcaggacataaaagtaaaaggtcctttgggagaaatggcattgacatatccacgagaagtaaaggttgatagggaggaatccggagccctaaggatcagaaagtcagtggagactaggagagccaaccaaatgcatggccttttcaggactcttactgacaatatggtggtgggagtatcaaagggttttgagaagagacttcaactaattg

SEQ ID NO: 235515 - DNA, 287 bp, Gossypium hirsutum
ctcttttactcattcattctttagtttcaatatgaaagcaaaaatggcttgttattgtaatgtggctacaatggctttactggcttgttaggtgttgaactccttggtttttgttgcccatggtggtgacttttaccaggatttcaacctaacatggggtgacaaaagaggtatgatattcaatggtggcaggctcttgtctttgtttatagacaggttttcagggtctgggtttaaatacaagaaagagtatttgtgtggaaggattgatatgcaactcatgcttg

SEQ ID NO: 235516 - DNA, 422 bp, Gossypium hirsutum
atttagttttctcttcctccaattaagatgcagatcttcgttaagaccctgaccggcaagaccatcaccctcgaagtcgagagttccgacacgatcgacaacgttaaggcgaaaatccaagacaaggaagggatcccaccagaccaacaacgtctcatcttcgccggaaaacagctcgaagatggccggaccttggccgattacaacatccagaaggagtccaccctccatctcgtcctccgtctacgtggtggcatgcagatcttcgtcaaaaccctgaccggcaagaccataactttggaagtcgaaagctctgacaccattgacaacgtcaaggccaagatccaagacaaggaaggcatcccaccagaccagcaaaggctcatctttgccgggaaacaactcgaggacggtcgcacctt

SEQ ID NO: 235517 - DNA, 422 bp, Gossypium hirsutum
cttcgaagtcgtagctttggaagcatggacttcatagctactatcctgtttctagctcttgtcatctcctccaccaaagctttggacccttgcggccctcagccagatgactcggaccttttggtcatcccaatctatggcaaatgttcaccattcaacccacccaaacctgactcatcgttcaacacagtcatgaacatggcatcaaaagacccagcaagggtcaagtacttgtcgagccttgtagcccaaaagaccactgcggttcccattgcttcaggccaacaagtcctaaacattggcaactatatcgtccgggtaaagattggcactccgggtcagctcatgttcatggtattggacactagcaatgatgtggcttgggtcccatgctccggctgcaacgggtgctcagccaccac

SEQ ID NO: 235518 - DNA, 411 bp, Gossypium hirsutum
caacaatggtggagaaggtgtatggcccagcctttgctattccaacgcgagtgattgcatgtcttattgaaaaggccattgaattcgagactggccctgtcgatctgcttaaaggagagcacaaagaccctgaatttctcaagctccagccttttgcaacagttcctgtcactcaagatggatattatgttttatatgaatcccgtgcaatcataaggtactatgcagaaaaatgcagatcacaagggactgatctactgggaaagacagtagaggaaaggggacaagagcaaaatatggctagaagttgaggcacacaatttccacccatcaatttacgccttgaccctacatgtgatgtttgcttgcaagaatgggttccctcctgatgaaaatttggtcaaggcaagc

SEQ ID NO: 235519 - DNA, 414 bp, Gossypium hirsutum
caaaccatgtggttggccatctaattgggagctttgctttcattgtctttgacaaatccacctccactttgtttgtggcttctgatcaatttggtaaggttcctctctattggggaatcaccgccgacggatatgtggcctttgctgataatgctgaattgctgaaaggtgcctgtggcaaatctcctgcttcttttcctcaaggctgtttctactccacagcagtaggaggattaagaagctatgagaatcctaagaacaagatcactgcagtgcctgctgaagaagaggagatatggggtgctaaattcaaggtggaagggccaacagttgttgctgccacagagtagtcctttgctttctccttctaaatctatggatccatgggaatataggagctgcaaatgcatagca

SEQ ID NO: 235520 - DNA, 410 bp, Gossypium hirsutum
agaaattatcagggttgccacctgagactgtgttccagccattgctcaaggataatcttgtggcaaaagggctagttctttcattcatgacagacttcttcaaggactatctggtggataatagccttgatgatttaatttctcttctgaagcgagggaaaattgaggatgatctcctgcagtttttcccctccacaaagcgatctgctgaaggtttctctgagcattttaccaaggcagggttggtacccttggttgaatacaatgagaaaaaaaatatttgaggtaaaattgaaggaaatgaagtctgctttgacaacacagatagtagaggaatctgatatgtctgaagtcattgaaactgtcaaacaacgtgttaaagatgctaaattacctgatattgaggttat

SEQ ID NO: 235521 - DNA, 441 bp, Gossypium hirsutum
cccggaccgacccacgcgtgcgaacacattccattgatttttacggcgaaaaaaagaggaaaaggaaaacgaagaaaatggcgtccctctctgcccaaatccctctctgcttggccttaatgatggctgcctgtttgatgataggcatcaatggaagcatagatggagctcagagggagttcgattactttgctttgtctcttcaatggcccggcaccatctgccacaagactcgccattgctgctcctccaatgcctgctgccgaggctcgaactctccaactgaatttaccattcatggattgtggccggattataatgatggaacctggccttcctgttgttaccgatctcagtttgatgtcaaagagatttcaacattgcttgatgcacttgagaagtactggccatcgttatattgtggcaaatcatcaacctgct

SEQ ID NO: 235522 - DNA, 421 bp, Gossypium hirsutum
taaaacctttcgaaaaagagggaaaagaaaaaagcggtcgagattttcacagccatggcgagcaccaaagtacagaggattatgacccaacccatcaacctgatcttcaggtttctccaaagtaaagctcgcattcagatttggcttttcgagcagaaagatttgaggattgaaggccgaatcattggttttgacgagtacatgaatttagttcttgatgatgctgaagaagttaacgtcaagaagaaaagccgaaagtcattaggaaggattcttcttaaaggagacaacattactcttatgatgaatagtggaaaatgattgtagatccagcagttatttggactcgtgaatgcaaaatcttcttgtcatcgtataggtcaatctactatgacaatatcgtgctatctttaaaaacatg

SEQ ID NO: 235523 - DNA, 426 bp, Gossypium hirsutum
tgcactcactgggtctctctgtgtactgtcttccccttttccatttctcgtaaacaaagtccataacattcgtctctcagatcctttcctcttagatcatcaaatccattcctttttttcaccaaaacatgagggaaatcataagcattcatataggtcaagctggtattcaagtcggtaactcatgttgggagctttactgccttgaacatgaaatccaacccgatggaatgatgcccagtgacacctctgtaggtgtagcaaatgatgctttcaacactttctttagtgaaactggttcagggaaacatgttcctagagctgtgtttgtggatctggaacctactgtgatcgatgaagttaggactgggacttaccgacaacttttccaccctgaacagcttatttctggcaaagaagatgctg

SEQ ID NO: 235524 - DNA, 424 bp, Gossypium hirsutum
ggaaagctggacaccgagcaagagagtgcactgcacccccaatgccacccggggacgttaggttatgcaataattgctacaagtctggacatatagcagctgactgcacaaatgacaaggcatgcaactgtaggagaccaggtcacttggcacgggagtgtacaaatgatccaatttgcaacttgtgcaacgtagccggacatgtggctaggcattgccctaaaggcaacatgataggtgagcgaggcagttttggtggtggtggtggtggtagtggtagtcgtggcggtggctatcgagatcatcatcatagagatgtagtgtgccgtaactgccatcaattcggtcatataagccgggattgcatgggaccgttgatgatctgtcacaactgtggtggaagaggacacatggcatatgagtg

SEQ ID NO: 235525 - DNA, 420 bp, Gossypium hirsutum
gcacttggttttgcgacttcgaggagggatgcagatatttgttaagaccttgactggtaaaaccatcaccctggaggtcgagagctcggacaccattgacaatgttaaagcgaaaattcaggacaaggaggggattcctccagaccagcagaggttgatttttgccggaaagcagcttgaggatgggaggacacttgcggactataacattcaaaaggaatccaccctgcatttggttttgcgccttagaggagggatgcagatattcgtgaagactttgactgggaaaaccatcaccctggaggtggagagctcggacacgattgacaatgtgaaagctaagattcaagacaaggaggggattcctccagaccagcagaggttgatctttgctgggaaagcagtggaggatggtcgaac

SEQ ID NO: 235526 - DNA, 405 bp, Gossypium hirsutum
tgctaacacagccagaggggaggagccagataagaaaaactaaaggaaaattgttttctggttcaaaaccacagccctaatccacatgcggttcggatccggattctctaagatccggttgacattcatcgctttaattttcattctgatctgatcccaaacgaatctattcggccgtgaaaaatgacgcgtcgctgctcacattgcagccacaacggccacaactctcggacatgtccgaaccgaggggtcaaactcttcggagtccgcttgactgacgggtcgattcggaagagcgccagtatgggcaacttaagccaatattccgggtcgaattctggcgcgcataacgggaacgggtcgggttccgccggtgagggtccggatcacaccgatggttatgct

SEQ ID NO: 235527 - DNA, 424 bp, Gossypium hirsutum
tgccgtcatggcggctctctccactgttccacacctacagatccactgctcaaagaccgagtcagactcagttcataaacccattactttcccttcaaaaacaataagacccatcatccatgtcccgagaaaactggtcttttccccaaagagtgtcgacgataagatctcaaacagcaatttccttgccaatggacccgttccttcaactccaactcgttcaaaggtgaggcggcatacgatttcggtgtttgttggggatgaaagtgggatgattaataggattgctggagtttttgctagacgagggtataatattgagtcacttgcggttggtttaaataaagataaggcactttttaccattgttgtgtctggtactgatagagtgcttcagcaagttgtggagcagttacaaaagctt

SEQ ID NO: 235528 - DNA, 414 bp, Gossypium hirsutum
ctcgtgatagtgctccttccatcatattcattgatgaaatagattccttgtgtggtcagcgaggtgagggcaacgagagtgaagcatcaagacgtatcaaaactgaacttcttgtgcagatgcagggtgttggacatagtgatcagaaagtcttagtgcttgcagcaacgaatactccctatgctcttgatcaggccatccgccgccgttttgataagcgtatttacattcctctccctgatttgaaggctcgacaacatatgttctttttgaacctgttcgtaaaacccaagatgcaatgtttttctacaagacgcctaatgacatgtggatgccatgtggacccaagcaagcaggtgttgtccaaatcactatgcaagaattggcagccaaaggacttgcagcacaggttct

SEQ ID NO: 235529 - DNA, 367 bp, Gossypium hirsutum
gcccgatccaaaacgtggttttttgataaaaaaaccacctaacatgggggaaaacaagatggctttcctgcatgaaccatggctagtggagaacgggttgatagggatctagcagggagattcgccatggcaggactgtacacaacatgtcgacttcctcattgcggaaaaaaccggacctgacgctagtttccaaggttctgcttgcaaagcttatgcagttcctctcccaacttcaagaggtgatattttggaccaagctctgcgatctctttcctgctatttcatcggccattgttgctgagtggtatggctattgaagaccatcggtgtttgcgttaagttcactatgacttacaccattggg

SEQ ID NO: 235530 - DNA, 351 bp, Gossypium hirsutum
tttatttatcttcttatccactcccctctgctatttcatttatccttcgcccatattctctttcactgcaaactgtgagcgagtgagagagatggcttgctcagctacttcatcggccgcggctctcatctcctctaagccaagggctttctcctccaattccaagcccttctcccaatccctttctctccccaatcccttcactggtctcccgcgcctcccctttctcgcaagtctttcgtcgtcaaagccaccagtgagcttccactggtgggaaatcctgcccctgattttgaggctgaggccgtctttgaccaggagttcattaaggtcaagctctctgaatacatt

SEQ ID NO: 235531 - DNA, 340 bp, Gossypium hirsutum
ttagtcgacatacttgggaaaacccgacccaacaaaaatattcggtccctaactcacctgtgaagccgttccattcccagatattgtaattcactgctttcaaaagcatcaaaatgtcagactggccctgggctcgagtctcttgaagatcagactatctcggtcattaccaatgatggacgtaacatagtgggagttttaaaaggctttgatcaggctacaaatatcattttcgatgaatctcatgaacgcgtgtactccaccaaggtttgtgtcacatttacaactttttttttttaattactatttgttcctttaatcactaggcacctagtttatt

SEQ ID NO: 235532 - DNA, 348 bp, Gossypium hirsutum
tcgtccacgcgtccgattttttctttgtatctctttgtgcttatttataaacaaagatcaagaaaaatgaagatggtattggtgcttttcttgcttgtttctcttgctctcagctcttgtttcttcgaggtgtcgattgccggttcggatttttgtgactcaaagtgtgcggtgaggtgctcaaaggcaggggttcaagacaggtgtttgaaatattgtgggatttgttgtgagaaatgtcattgtgttccatctgggacatttgggcataaagatgaatgcccttgttatagggacatgaagaactctaagggcaaatccaagtgcccttagatgtttttttcccca

SEQ ID NO: 235533 - DNA, 382 bp, Gossypium hirsutum
tcgttaagaacgccggaaagagagcatggataagttgaggagggatatggaacaaaccagaggcgaaactgttgtcttgagtactggtttgaaggacaaagacggcagaagaaattcaatgatggatcctgaagatgaattttacaagaatttacgatcggttggagtgtcagcgatttctggtgctggaatgaatgaattctttaaagccattgaagcctgtgccgaggaatacatggaaacttacaaggctgatctggacaagagacgagcagaaaaacaacgcctagaggaagaacgccagatctatgatgtttctcaaagcagaatgttttatggacctggtggaccttatgcgttgttcgccggaaaagatgcaagc

SEQ ID NO: 235534 - DNA, 417 bp, Gossypium hirsutum
gcccaatgtattgatacttcctcgaagtgctgattatagtgaagaagtgtggatggagattagggagaaggctatctctatgttgcaaacattcttttgtgatggggttattccaaaggatgctacttctgatgaggatgaggaagaaagtgaaatagttgatgaaaaagaacagtttagcatacaagagaaagaaagtgctttgcggggatccagtggtgaacaatttactgatgatattcaacttagtcctgaaagttccgttaaaaaggataccaaccaagctaaggattatcctaatcagaatcagcattatggtatgtcttctggtactccaactaaatcagatgctaaacgcagcagatcaggtaaaaaagccaaaaagaggcatgcccgccgaaataacctacaaaaatc

SEQ ID NO: 235535 - DNA, 327 bp, Gossypium hirsutum
tttgttacttcacaaaggcagggaaattagagagccaaaatgaggttcaacagccacagcaaccaaccaaaggcaccagcttctttagaacttgtttcaatggtctcaatgccttatcaggcgttgggatactgtcaattccatacgcacttgctcaagggggatggctaagcttattgcttcttttcctggtagctgttctctgttggtacacaggattacttctacgacgttgtatggatacgcatcccctcatcaaaacctaccccgatatagttgagtttctgatattagaaggtgacaatctggacaagctgttttcaaaca

SEQ ID NO: 235536 - DNA, 312 bp, Gossypium hirsutum
tcgttccacgcgtccgacaggcctttttcgatgatgttgatcactacaggatgatcaaggcaatgtgcaggctttcgtgcagtgtatgtgacaagatggatgagcagtccaatgatggggcgaagcggcgagggaagtttaggaacattgaacagctgaaaggtcatttgtttcataaacatagattggttatgtgcagcctgtgtttggagggtcgaaaggtgtttatttgtgaacaaaagctatatactagagcggcggaggagagcaatagcagcgaagatctttgctggacttcggatgtacggtaac

SEQ ID NO: 235537 - DNA, 349 bp, Gossypium hirsutum
ttcatgcgtccggttttgatgaaaagctattgtctcgggtgaataaagctggatctgagaatcctgtagaaccgagttctgattctgtgtcacactttgacttcgagggtgaggaagacatgcaaaatgaatccatctcagaagctgaggaaatgtctgagggtgatgttgatgctgaggacttgatggaagaaactcaaactttgcctgtcaagagaaaggactggaggagagtgagaaaaaattatgaacgaagtaagcagtacatatttgttgccgcaacccttccagttaacggaaagaaaactgctggtgcagttttgaaaaagatgtttccggatgccaactg

SEQ ID NO: 235538 - DNA, 346 bp, Gossypium hirsutum
atatatcattcgttaagcttctgttaaattattagaatcgaaaaccgcagtagtctaaatcgttaggctcgatcaattctattacctgatctgtctgtcttttttatttttttatcggaatctgtacttttaggatattgaaatggcggaatcaaagtcattgaggaaacctgtttttaccaaggtggaccaactccgccctggcactattggtcacactcttactgtcaaggttgtcaatacaaagatggtattgcaaaagggtcgggctgatggtcctcaggtgcgtcaaatgcgaattgctgaatgcttggtaggagatgaaactggaatgattatctttact

SEQ ID NO: 235539 - DNA, 325 bp, Gossypium hirsutum
tgaaaacatgtctcgaaagagagacaaaccctacttctcccgtcacgccccagcttccatctctaaacggcgtcgtcctctgccacctcacccgccacctctgccgtcttctgagaatgaggccaagccaaagtcgccaccggctgttattgtcatgggtcttcccccgaattgctcggtgctcgatttgaagtcgaggtttgagatctacggttcgatctctcgcatccgcatcaattgtgatgctgtcggttacattgtatatcgcactaaggaatccgccgagtccgccattgcggcttcccttgattcctctttcggcatt

SEQ ID NO: 235540 - DNA, 345 bp, Gossypium hirsutum
gcaatgccgaggcaagagatcttcaaacttatcagatggtggccagtcttttaactttagcatctctggccataagttattatacgctctcccttctgtgtagcctttgaaaaattgttgagtattgatctccacctcacagccagctagacaatcaatagccttaacttcaggcatctccaacttttcacataaagcacgccacattaccatcggttcccagcttaaaccggatgaatttgcaagagtattcttaactataaccggttcacctttagcccatcgggtttgaaagtgacgaaagccttcgtcaagattatcatttgaagttgaagaatataagcc

SEQ ID NO: 235541 - DNA, 445 bp, Gossypium hirsutum
caccaattggttttgaaaatgaggaaactggcgagacagtgtcgaaattcggaagatgataagttctctctccccaccgtcgacgatgctcgtcccatggatatcaacgaacaagaggagttggttcgttctcttgaaaagatgcaagctcaccaaagtctacaatggaagagcgtgtttgcagcacttctcttttgttactcggcgtttcttctatactcaatctatcagcagaccttatttccatgggaactgcggtaccatgcttacttcatggaagatgttgattcatggataataataactgcagattggctagctgttttggcatgctcaatggccattatgggtctattcaataattcaaaggatcacataaagtggatatggtactcatgctcaattggccttgtgcttgcaattttctgggtatactatatgctga

SEQ ID NO: 235542 - DNA, 405 bp, Gossypium hirsutum
caaacagcaaacgggaaaaaaatggcgggctggttcggatcgcaatcatatacggttgccaccatgactgtcaccagtacaccgtctccagatctcgcttttactaatcttgcttactgctcaccgtccgatcttcagagcttcgccgtccctggctccagactcttccttgttaatgttggcgatgcctttgttctttccatctctcctcatgaaagcattcgcagtaaatatattgcccttaatgctattcatcgtcggcttgcgaaggtttctaatggtgacactgtatcagtgagcagatttgttccacctgaaaatttcaaccttgcactgcttagggttgagttggaatttgtgacagaagggtactaaaaatgaacaggttgatgctgttcatctggc

SEQ ID NO: 235543 - DNA, 321 bp, Gossypium hirsutum
aatgagtgcttagactaaaggttagagaggcagcgaaaaggcagagaggacaagggagagaaccgggagcctgggcaattgcagggcatggtggtgctggcctcgaccctaatctccctaaagaaagacaagaggaggctaagggactcctcactcgttgccttgatattggaatctctgctatccgctctaacctacacgacattgacgttgatgagcttgtcacgagagaattggaaaccggtcctctgtataactccggccgtggctctgccctgacagagagtggaacggtggaaatggaagccagcattatggatg

SEQ ID NO: 235544 - DNA, 436 bp, Gossypium hirsutum
ttcatgcctaaatggttcctggttggtggtctttggaggatgtggaagacaaggattgctcaatgacgtctttgtccttgacttggatgccaaacaacctacatggaaagaagtttctggtggtgctccccctctccctagatcttggcatagctcttgcacaatagacggttctaagttggttgtgtctggtgggtgcacggatgcgggggtgcttctcagtgacacgtatctgttggatcttactacagacaagccaacatggaaagagattccgacatcatgggcacccccatcaaggttgggccattcgctttcagtttatgggcgtactaaaattcttatgtttggggggcttgcaaagagcgggaacttgcgattgcgatcaggtgaagcctacaccattgatttggaggacgaagaaccacagtggcgg

SEQ ID NO: 235545 - DNA, 357 bp, Gossypium hirsutum
gtcaaccctaggtctgcgtcttccttggagacgcgtcattcagattctggcaatagcatactagaagatacagaaatttccaaaaccccaactacttaaagcgatactactcttgagtcgggtgctgattagagatgagtggagcagaaaaggttgtgtgcgtaactggagcgtctggttacgtagcttcgtggctcgttaagctcttattacaacgcggctacactgttaaagccactgttcgtgacccaaatgatccaaaaaagacacagcacctgcttgcccttgatggggctaaggaaaggcttcatttgttgaaagcgcagttgttggaggaaggatgctttgactctatag

SEQ ID NO: 235546 - DNA, 407 bp, Gossypium hirsutum
aaagaaccttatcagtgccagaagcagcaatagtggacataggacatgagtctttcctatgaccaaacttaccacactaaaaacaaatcaattgtagcccatcatatttaacacgttgacaaaccttgccgagactaacagatgaacacgatagtttggttaaatccaaatcaatacaaacccttgcaaatcctcctgtatgaacatcttccgtattccaatcaatgcaaattaccctccccacacaagaaacaatcctccaaactgccataactgcgtaatattccagaggtaattttgaaaaatgaacccaagcaataagaaactcaaatcttatcacaacttggctgaaaattcagaaaccattaacaaacagtaaggtagtgtccactaatgatctaatgacc

SEQ ID NO: 235547 - DNA, 350 bp, Gossypium hirsutum
tcggacgcgtgggcttatacaagcccaatttgtgggggccaaatggcttgggaaagcaatccctgtataatgtcagtattactgttgatgtcaagggatatggagagtctgatacgtggggccatctatttggtattcgcaagatcgagtctcacatagatagtgctactggagggagattgttcaaggtaaatgggcagcctatttttatccgtggtggtaactggatattgtcagactgtttgctacgcctttctaaggagcgtttcaaaacagacataaaatttcatgcagatatgaatctgaacatgattcgttgttggggaggtgggttggctgaaaggcctgat

SEQ ID NO: 235548 - DNA, 511 bp, Gossypium hirsutum
atcaaggattacccttttgccaatgatggactggttctgtgggatattctcaaagaatgggtctctgattatgtgaaccattactatccagaggcaagcctagtggagtcagacgaagagcttcaagcatggtggactgaaatccgtacggttgggcatggtgacaagaaagatgaaccctggtggcctgtcctcaaaacaccacaagacttgatccaaattgttacaaccatcgcttgggtaacctcaggtcatcatgcatctgtcaactttggacaatatacctatgctggttactttcccagcaggccaacgattgctagaaagaatatgccaaccgaagaggcaactgaaagagattgggagtttttcatgaataaacctgaagttttacttctactgtgcttcccttcacaaattcaagctaccacggtgatggctattttggatgtgttatcgaaccattctccggacgaggaatacttgggagaaaaatcggagttggcatggg

SEQ ID NO: 235549 - DNA, 494 bp, Gossypium hirsutum
cggacgcgtgggcggacgcgtgggaaatttcttgcgtagttttatctgatctgtgtcttcgaagcctcacgtgaaaaatggggctgtctttcacaaagctatttagccggcttttcgccaagaaggagatgcgtatactcatggttgggcttgatgctgcgggtaaaactaccattctttacaagcttaagttgggagagattgtcactaccattcccaccatcggtttcaatgttgagaccgttgaatacaagaacatcagctttactgtttgggatgttggtggccaggacaagatccgaccattgtggagacactacttccaaaacacccaaggacttatttttgtggttgatagcaacgatcgtgatcgtgtggttgaagctagagatgagttgcacaggatgttgaatgaggatgagctgagggatgctgtgctgctagtattcgcaaacaagcaagatctatcaatgctatgaatgctgctgagatta

SEQ ID NO: 235550 - DNA, 210 bp, Gossypium hirsutum
gtttaaaacataagaaaaaagattatacgcaatgagcactgctggacaggttattggatgcaaacctgcggtggcatgggaggcagcgaagccactatcgatagaagaagtggaagtggcaccaccccagaagcatgaagtgcgagttaagaatctgttcactgctccatggcacactgatgtatactactgggagtgcaaggggtacac

SEQ ID NO: 235551 - DNA, 365 bp, Gossypium hirsutum
cccacgcgtccgagcagaccgaaacagaacttaggtctgtttttcttgagggttgagacatgcttgtgttgttcgagactccggcaggctttgcccttttcaaagtcttagatgaagggaagctgaataaagttgaggacttgtcaaaggaattcttggctcctgactctgccagaaaggttgtgtcgttgaaagccttttccaagtttgaaaacactgcagaagctttggaagctgcaaccaaactacttgaaagtgcacccagtaaaggtctgcgcaagtttttgcgtgcgcattgtgatggtgaaacacttggagtggctgattcaaagcttggaaatgcaattaaggaaaaactgaaaatt

SEQ ID NO: 235552 - DNA, 366 bp, Gossypium hirsutum
cttaatccttgagccttaagcagatctggatcttctctttgaaagaaaaaaaaaggaaaagaaaaaaaaacacgttaaaaacggtttcaacttcccgggaacatcacagctcgtttcttgatcattaatctcagctgtcagttctaaagggctaagcttagagaagatcgaagatggtgctggtgtcggccgtacgggattatgtttaccggatgttacaagacatctccggcatgaaagtcctcattcttgattctcaaacggttagcattgtgagtgttggttattcccaatcagagctacttcagaaagaagtctttttggtcgaattgatagactccatctccaagtcaaaagaatctatgt

SEQ ID NO: 235553 - DNA, 418 bp, Gossypium hirsutum
cccacgcgtccgcttggctcaggggattcgagttacagttgttcttgccagcaggaatgatgtcgaacatgtacggatgccatctgcagttagatttcgcaattccagatcctatgatcacaggaggaatcggatgaggcaaaaggagaacattgctgtgccttctgtagctaaactatacaattcgaagtcttaccagacaaaaaggaatgatgggaaattcgagctctgtgcctgcactatgctctggaaccaggcaccagcactgcgggagtggattatgtaccatacctggctcggagttgaacgttggttcatttatgacaataatagtgatgatggaatccaagatgttatcgaagaacttgattttcaagactataatgttagcagacatacctggccatggattaaaact

SEQ ID NO: 235554 - DNA, 491 bp, Gossypium hirsutum
caatttctcgccttttcttcccaagcaaagcacatgttttccaacaggaaaacaaaattaattaatcaataaataaaaaccctaagtaattttggtggaaatgtcgggtaaaggagcgaaagggttgattacggctagcaaatccgccaaagacaaagataaggacaagaagaaacccatctctcgctcatctcgtgctggtctccagttccctgtcggtcgtgtccaccgtctgttgaagacaagagttaatgcacatggaagggttggagcaacagctgctgtatacactgctgccatactggagtacctgactgcagaggtgctagaactggcaggtaacgcaagcaaagatctgaaggttaagcgtataacgcctaggcatttgcagcttgcaattcggggtgatgaagaacttgataccttgatcaagggaaccatagcagggggtggcgttatcccgcacattcacaagtcgcttatcaacaaat

SEQ ID NO: 235555 - DNA, 441 bp, Gossypium hirsutum
tctttctggcagggccaacactgtttggacatgtgatcaacatagcttccgtagttgcctgtgactctctttccactggtgctaaaaaatactttgttttgttgataatcacggatggggttataactgacctccaagaaaccaaagatgccctcgtaaaagcatctggtctcccattgtcgatcctcattgttggagttggaggagctgacttcaaagaaatggagattttagatgcagacaaaggagaaagacttgaaagcacaactggatgtatagcttcacgtgacatcgttcagtttgttccatttcgggatgtacagagtggagaaatttctatggttggagcacttctagcagaattaccaacacaatttttaacctacatgcgacgcagagatattaaaccaagcacttaattttttgtgtatatatatattt

SEQ ID NO: 235556 - DNA, 389 bp, Gossypium hirsutum
tttttacgcgtccgctgagaactcggtttttgcggggcctgtaacagctttgggactcttcccagatgtaggagcgtcatatttcttgtcaagactcccaggatttttcggagaatatgtcggtcttactggtgcaagattggatggtgcagaaatgcttgcatgtggccttgcaactcactttgtcccttcagctaaattacctatggtagaagcagcattatgtgatgcagattccagcgatccagtaatcatatcatcaattattgatcagtactgtgagaaaccctcattgaaagagcagactgtgtacaatcgattagatgtcattgatagatgtttctctcaaagaacggttgaagaaattttgtctgctcttgagagggagg

SEQ ID NO: 235557 - DNA, 329 bp, Gossypium hirsutum
gtgctgtgcatgaatggggcaaagcacagatttgagggttcccatggatcaaatccaaaaccaagaacaagataaggtgaatcttcataatcaaggcattgatgatgctatactaatggctactcccaagggagagaacattaggcgacctagaggaagaccagcaggttccaaaaacaaacccaaaccacccattattgtcactcgtgatagtgcaaatgcattacgagctcatgcaatggaagtaacttcaggttgtgatgtgcatgagagtttagctagttttgcaaggagaaaacaacgtgggatttgtgttcttagtgggagtg

SEQ ID NO: 235558 - DNA, 386 bp, Gossypium hirsutum
gaaacccagaaattccctttttttgaattttttgggctcaaaaccaagtggagaggacgagaaaaaaggaagaaagaaagaaaaaaacaatgggttttgcttcatttgttggacgagtttgctttgcttccattttcattctatcagcttggcaaatgttcaatgagttcggggtcgatggcgggcccgcaggaaaggagttggcaccaaagcttaatcttgctaagaaacatttatcttcacaattccatgtaaattttccggatatcgaagttagacaaatagttttaactgctattgctatgaaaggacttggtgctattctctttgtattcggccatggttttggagctttcctcctgatcgtgtatttgctggttagcact

SEQ ID NO: 235559 - DNA, 317 bp, Gossypium hirsutum
ttttctcggtgggcagcttttctctgccatggtagtgcggaaaccagctcatcgcttcctcgacgaactcgccattgaatatgatgaacaagacgactatgttgtgatcaagcatgcagcccttttcacatccactatcatgagcaagcttctagcccgccccaacgtgaagctgttcaacgctgtggcggcggaggacttaatagtgaaggaagggagagttggtggtgttgtgacaaactgggccctggtgtcaatgaaccatgacacacagtcctgcatggaccctaatgtgatggaggccaaggtggtggtga

SEQ ID NO: 235560 - DNA, 310 bp, Gossypium hirsutum
ctttcgcgtccgagctgcttctaatgctgtgccagcatgaggttgatcggcttgaagtttgggcacaacctctttcaaaggaaggcacatcttcgcggcccaaaattagcccagacaaatggatcgaatatgccaggactgctttctctgtggatcctcgaattgccttttcgttagcctcaagatttccaacaaacactcatctgaaggctgaaatagctcagctagtccagtcacacatactggatatccgctgtatacctgaggcattgccatattttgtcacaccaaaggcagttgatgaaaattc

SEQ ID NO: 235561 - DNA, 366 bp, Gossypium hirsutum
ttctgttgcagctgtggaaaaagctgggcttgctgacaagatgagccacatctctactggtggtggtgccagcttggagcttcttgagggcaaacaacttcctggagtccttgctcttaatgacgcttaaacttttaattttgcacctctatgctgtttttgagcattgttcactgctgtaatggtggctagtatttttagccaagagtgaattttagtagagctgaggttgtagaggctgatagggtggacttgttataaataatttggtttctcctcattatccatcagagatgcatttgaattggatgtcttttatgatatcttgattgttaatgataaaattgcagtagtgcttgttctatt

SEQ ID NO: 235562 - DNA, 404 bp, Gossypium hirsutum
ttttctcgtgggcggacgcgtgggtgacgatcaacgaatccttcactgcctttgtcgatgggatccctttttcttttatttgcagataaggggtgagatttagattaagagagaaacaaaagaatatataaatgatgttgcagaaagttgcgagcaatgcgtattcatggtggtgggctagccacatcagaactaagcaatcaaaatggctggaacagaatcttcatgatgtggaggagaaagtctctaacatgcttgaaatcattgatgatgatggagattcctttgcacaaagagcaaatatgtattatagaaagagaccagagcttttagccattgttgaagacacttatcgagcttatcgagcattagctgagagatttgattacttatcaagggatcta

SEQ ID NO: 235563 - DNA, 472 bp, Gossypium hirsutum
ttttctttggagaactccttgctcatccaattataaagagtcttctggggaccaaggtggagtggctttattatatcctccaatcctttaactctgggaatttggttcgctatgaagaattgcgtcgcgtgcacaatgctgcactgagtgctcaaccagccttggttgagaatgagaagaagctcttggaaaaaattaatattctgtgcttaatggagattatcttcagccgcccatctgatgatcgaactattcctttaaaagttattgctgagagaacaaaattgtcaattgaggatgttgagtatcttcttatgaagagcctgtctgttcgtctgattgagggtataatcgatcaagttgagggaacaattcatgtctcttgggtgcagccaagagttctggggatttcacagatcaaatccttgcgtgaccggttggataattggatgggcaaagtacataacgcttg

SEQ ID NO: 235564 - DNA, 498 bp, Gossypium hirsutum
ctttcgcgtgggtttttcttttctttgcattcattgggttcatttttttccccagcaaatggaagacttggttcccttgtggaactatcaagaggattttgatgaactgaaactcaagcttcaatacactagtattgagctagagtcggtgaaaatggaagcatatgaacaaataaggaaatacagggatgaagtgaaccatttggtgaatcttgtaaaacttgcttgccaagaaagagatgaagcaagagatcagttccaaaagctagttaacaagttaatggcttcttcttcttcttcttcttcttctacaatcctccctcaaccccagcctgaaaatctgcttgtgattgcagcagcaaaagcaaactcaagcataactgaatcaaacagtttatctgagacgtataatcatcacccctcacatgggtcttccccagtagattccttgtttgatgcagtcacttcaccagattttttaagcattaataataacat

SEQ ID NO: 235565 - DNA, 331 bp, Gossypium hirsutum
tcgtcacgcgtccgcttttttttttcctttattttttgtgtttgtataatattcttagcccgcaaataagatggctgaaggagaagcaaatgcaaatgaaacttcacgtcaagcaccaaagttgaatgaaaggatcctttcatctttatcaaggagatcagttgctgcacatccttggcatgatcttgagattgggcccgatgctccgaatgttttcaactgtgttgttgagatagcaaaaggtagtaaggtcaaatatgaacttgacaagaaaaccggaatgattaaggtcgatcgagttctgtattcttcggtggtatatccacacaac

SEQ ID NO: 235566 - DNA, 402 bp, Gossypium hirsutum
ttttacgcgtccgatcaattccatcactccctgagctttcaaagatgaaaaattggtttgtaataatatttgcgttccttgtgtgtcaagctaacgcttttcgaccaatcctccttctaggcaaccagaatctgatagagagaacttgcaagcaaacacccttctatgatctttgcatttggtccctcaaatcaaaccccgaaagccgcgacgccagcgtgaagaagctagctcagatcatggtggattcactcaaaactaaagcgaccgagacacttgatctaatcgacgagctactacaggatggacttgcccttgaccctgaaatgcaaaaggccttaacatcttgcgctgaacgctataacgtcattataaggggagatgtacctgagatcaacgaag

SEQ ID NO: 235567 - DNA, 389 bp, Gossypium hirsutum
tcttacgcgtgggaaaatgggagaaatgctactgctaactttactactggcatgtggtcactgaaacccattattttttctccatcactttccctagagttttttaagtactcaacaataaagaaattcccagaaagcctacatacccagaagatatgtacaagaaccaactgcaagagttggctcaaagaagttgctttaatctgccgtcttagtcatgcatccgagaaggacctgatcatgctcctcggtttaaagctactgtcaattttaatggagagactttcgaaagccctacattttgctctactttgagacaagccgaacatgctgcagctgaagtagctctaaatacgcttgccaacagaggccctttcaaagcattggct

SEQ ID NO: 235568 - DNA, 283 bp, Gossypium hirsutum
ctgttaggctgggctggaggatccagaagcatgacgaagctgctatggagcagctttgtgaagaaaccggggtccaaaggcaagttcttaaggtctggatgcataacaacaagtgcactcttggtaagaaaccctaatttcccatcaaaaccaaaacaacagtgcttaaacattgttacttgggaagaaacaaaacattccagagaagcatatgataatggggaatcgaagaaaaaaaacatcatgtgatttcagtagggattgtatcgcactagggttctca

SEQ ID NO: 235569 - DNA, 426 bp, Gossypium hirsutum
acctgcttttcagggcgtgttggatggaaagtatgatgacctgcccgagcagtcgttttacatggttggaggaatcgaggaagtgattgccaaggcagataagattgccaaggaatctgcagcctaatcaaatccacataccttaatttctgctgagtaatttcgaaaataatctaggtggtgttggtaatgccagcaacagaactgttcatttattttgggggtttgttgtttatgtttaatgatgttattcaagagtgtaaaagagcacttcggccccgcttttttctttgcttaaataagggaaatagaaggcggatgtgtacattttttttgttcgaaaacgctggctgctaaagccttatcctttctgactgccgtttattcggaactactgatgttttgaaatgcattcgagactaatgt

SEQ ID NO: 235570 - DNA, 454 bp, Gossypium hirsutum
gaacaatgctagtttcagagtagcagatcagtgtctttaccaacttccctctgctcaaccaattcaagttttttttttttttggtttcaaaatttccctccaagttgacttggcattgaggagaaatggaaactagctcagtttccaagctgttgattttcttcttcacagcctttttagcgagttctaagctaatccagtgcagcattacctatgataaaaaagccattctaatcaatggacaaaggagaatcctcatctccggctccattcattatcccagaagcactcctgagatgtgggcaggatcttattaagcaagctaaagatggaggcttggatgtcatagacacatatgtcttttggaatggccatgaaccttctcctggcaattataatttcgagggaagatatgatcttgtacggtttatcaagacagtgcaaaaactcggac

SEQ ID NO: 235571 - DNA, 483 bp, Gossypium hirsutum
tggaaaaaaaaccagagtgcaaactacgtcagaaaccccccaccccccgaaaaaaaaaagccgtacaaaaagaagaagaagaagaacaagcaattatgactttgggcttgatcaatgcgaacccagtagttcacgccaagaaagaacgagtcgttcgtaacgaagatcctcacggtgacgacgccgttgatccactcgaaatctatgatttcgtgagggatatcagagatcctgaacatccttattcattggagcagcttagtgttctttccgaggaatcaatcaccgttgatgagaagctcggccgtattctgataactttcactcccacaattcagcattgcagcatggcgactgtaatcggtttatgcctaagggttaaattaaaagaatgttttcctccgcattttaaggttgacattaaagtcgccccgggatctcatgctgatgaagaatcagttaataagctgttgaatgataaag

SEQ ID NO: 235572 - DNA, 421 bp, Gossypium hirsutum
cttattgttgcagtgcctttgagaagttgaaagcaatggagcaatcattagaaaaaggtaagcagattcaagataactgtggtgcttcgataaaaaggcttcgggctatgctccactcaactgaagatcaactccgagtgcacaaaaaaaagaccacgttcttggcacagttaactgcaaaaacccttcccaaaggtcttcattgcctgcctttgcgtcttactactgagtattataccttgaattcttcacaacagaactttctagatgaagacaaattagaagacccccgactgtaccattacgcacttttctctgataatatattagcagctgctgttgttgtaaactcaaccatttcccatgttaagcacccttcgaagcatgttttccacattgttacagataggctcagttatgc

SEQ ID NO: 235573 - DNA, 472 bp, Gossypium hirsutum
cttgttccaaatgttgtttcttacaacaatttgattaatacccattgcgataggggtgaagttgatattgctatccaagtttaccacgagattttggagaaggcaccttttaacccctctccggtgacgtataggcacttgaccaagggcttgatcgatgctgggaggataggggaagcagtggatctgctgagggagatgttgaataaagggcacggtgccgactctttggttttcaacaaccttatatcagggtttttgaatttggggaatttggacaaagccaatgagttgtttgatgagttgaaagagcgttgtttggtttatgacggggttgtcaatgctacgtttatggaatggtggtttaatcagggaaaagataaggaggccatggagtcgtataagtctttgttggataggaaatttaagatgcctcctcccacttgtaatacccttttggaggttttgctta

SEQ ID NO: 235574 - DNA, 464 bp, Gossypium hirsutum
ccctcgcgtccggccaaaacccccaaaaaatgaatgatgaaaaatacatcatcggccggccgccaacattaacttccgatcaattccccgatagctttcccccacttttcctgactttctctttatccaaacaaaccccatctctctcacccaagctacaaaatcaaaagtaaaaattaaatccttctaatggatttcaacgaactagaagcaatcgagggcctacggtggccgtggcattcatggcccacaacaaaacctgacgcttcctcattaacgatcccactcgccgtcatgtgcacgccgttgacggagttctcggagctcccaatcctcccttacgaccctctcatttgttccaagtgcggcgccgttttgaacccgtacgcgcgcgtcgattacacctgccgtgtctggtattgttctttctgcttctccaaaaactctttccctcgaacttactc

SEQ ID NO: 235575 - DNA, 428 bp, Gossypium hirsutum
tcgattagggcaagagtttggtggaatgtattgcgtggttttgattgtgaggtccctcgttgtagctggccttcttagaatatttggtcgggaggttgccgagctccctattgtagctacaagtagaaaacatcaaggaaaaggatatttgcaggcattatttgcttgcattgagaatttactaagttccctgaatgtcgaaaacctggtgctcccggcagctgatgaagctttgtcgatttggacgaagaaatttggcttcacaaagatgagtgagcagcaagtaagtgccgtctaaatcttttacctttacaagaaagacttgaataaactttccaactctaacatgaacaccgaaacttaactcaccttgatttaaccataaagttaataacctgaatccaacccaaaattaactcaaactcgaa

SEQ ID NO: 235576 - DNA, 503 bp, Gossypium hirsutum
gttatctttttttgtttggggagagtagtatttctaaagagaagcaaagcagagatttattgttgttgttattattattatcagaatttccatttccatatgctcaatccatttcttctccttcacaaccaaattaaatccctgttcataaactaaaaatcccacctttgaaacagagcattcaaaaatggtgactggctggagaagagctttttgtacttcaattcctaaaaaacaggacagccctgttttaccagaaaaacaacaacaagaagaaagccatggtactaaaagtccaagattttcatcaaagtttgggtttttctccaacccatcaacaccaaggttacgatctcaaccgggttcaagccccagtctccgttgccgaaccgtttctactgctacttcatcccttccaaatagccccaagctccatttcagaacacctcatttatctaccccttcttcccctaaatccccttctagtttctccttccttaaat

SEQ ID NO: 235577 - DNA, 449 bp, Gossypium hirsutum
gtttaatcagaatctttccttcttcgattttttcgtagctttcgacgcttaagagaagtctggtattctgcagttaatgtaacaccctagtggattaaacctgtttctgtgtctgaaaagtgaactaagtcatccatgtttcaattcaatatggatagcaaatttaaaggcatagtttgggttggtaacatttatcagaggtttgaagctttgtgcttggagatggatgatatggtctgccaggaaacattccaatacgttgaagaccagttgcagactgtgggagctaatgctaggcaattctgtacagaactaatgcaagaagtgctcccttcatctcctaccaattcgaaggaagaacttaacttgtctctattgcaaaatgctgctgtcacagccaataaagattcaaacataaatgttcataaagattgcattcagaaagaact

SEQ ID NO: 235578 - DNA, 261 bp, Gossypium hirsutum
tcgatccgcgaaagtgaggattggagatacgactgacggagacgaaataaagattatgacagacgcttgcataagagccgatgtggaatctatccactcttgtgccacacaggccgtgctctatctgtccggcggcgcctctctcgccttggggttgttgatgtcagttcctggagcttcaaatacggcgctggaagctgctgtgccatactgcagaatgtgcatgatccaattactggctaagatgcctgccaagtattg

SEQ ID NO: 235579 - DNA, 464 bp, Gossypium hirsutum
  unsure (1)..(464): unsure at all n locations
aaacccgtaaggcgcaaggaagctgatatggctattcaaaaatttgggtcttagaatcttcacaggagcaaattttcagagtgaaccaagagaatggctcattgaaacaaaatttgaatgcaacaaatgcggctccgagtgcagctagaagtgaaatttccaaagtatcaaataatggaattaatgcactcaagggaaaaggtgatcagtcagcaaaccgacagcataagtcaacaagtttagtgaaaaactgttatgctggaatccaaatgtccaatggtcttagctctaaacatgatgaggagcttgcagatttgctggaagaaaaaactaggtccctggaggccattcaagctagtcatgaatcacaaataaagcaattcaagatggaacttgaaaaagagcatgataaattagtgaacgtacagataagattacaagaggagcacangctgaatgagtct

SEQ ID NO: 235580 - DNA, 228 bp, Gossypium hirsutum
ctcggtaaccgcccccggttgagagcaaattgccttgcacccttgaagagctgtatactggttcaacaaggaagatgaagatctcaagaactatagttaatgcatcagggcggcaagcacaggaatcggaaatattaaccattgatgtgaagccagggtggaagaaaggaacaaagattacttttccagataaaggaaatgagcagccaaatcagcttccagcagacc

SEQ ID NO: 235581 - DNA, 402 bp, Gossypium hirsutum
cccactcgtccgaattggttacttttagttcttatccccttttaaatccaccggaggtttctaatgctgggaggcatctctctgctgccgagttccattctgttcttcaaagtgctcggcaacttatgaagaatggaagtcctaccgatgataagcagctggttctattggatgcaagaaatttatatgagacgagaataggcaagtttcatgctccaagtgtggaaacactagatccaggtatcaggcagtacagtgatctgccctcttggatagatgataattcagaactgttgcgaggaaaacatgtcctcatgttagtattctaaatcctgataatgttctgccgatgtttattccagttctttcacacctgcccctttattcttatcaagttaagga

SEQ ID NO: 235582 - DNA, 349 bp, Gossypium hirsutum
tctgtataaggagccaaagcgatataatacaaaaaaaagaaccgagttctttttttttagtctatctaaaataaaataggagatcatatgaaaaatgtaaccgattctttcgtttccttgggtcactggccatccgccgggagtttcggggttaataccgatattttagcaacaaatctaataaatctaagtgtagtccttggtgtattgatcttttttggaaagggagtgtgtgcgagttgtttatttcaagaataggctggattcacccagttgtactttttttcattataactaggaaagaaaagagtgcatgatcccgcgaattacttctgaataaatttctaaa

SEQ ID NO: 235583 - DNA, 349 bp, Gossypium hirsutum
gagaatttgaacatggggagataaatagactggaagcactcttggctgagggccgaatcttctgtgatatgccagccttagctgatagagacagcattcttttaaaggatacccatcttgaaaatgccctgatctgccaaccacagcagcgcaacattcatggtcgaatttttggaggttttttaatgcatcgagcttttgagttagctttctcaacagcttatgcatttgctggactagtaccttgctttttggaagttgatcatgttgatttcttaaggcctgttgacgtaggggatttccttcgtctaaatcatgtgttctgtacacggaacttgagaaccctgat

SEQ ID NO: 235584 - DNA, 476 bp, Gossypium hirsutum
cccacgcgtccggcgtggatagcagggctcttcatttcattttctaccttgccttgcctccctactctcacctcatttcacataaatatggttgttccaaccaaaaaagctatgaaccaaaggcttgcgtcgtggacgttggttgttgggttgtttgtagtatcgcgtgtggcagagcttgagcggtttgaacacgcaggcaaaccagatgggtctctgagcttcttggtggtcggagattggggaaggagaggacactataaccaatctcaagtggcttttcagatggggaaaatcggagagcaattagatatcgacttcataatctcaaccggcgataatttttacgacaatggtctgaccggcgttgacgatccattgttccatcaatccttcactgatatttatacagctcccagcttgcaaaaacaatggtacaatgtgttgggtaatcatgattacaggggcaacgctga

SEQ ID NO: 235585 - DNA, 455 bp, Gossypium hirsutum
cggacgcgtgggcggacgcgtgggagaggggataaacagccttaattcataaaatttcataaaattacataagagactttaaagccaacaaaatggctccattgacgataatagtggtgttttttctctgggtaggatcactacttatggttcaaggtggagatcccaccattagtttcgagtggaaggtcacttatggcaccatatctcctttgggtgttcccgtaaaaggtattctcattaacgggcaattccctgggccaaatatgaactctaccaccaacaacaatgttatagtcaatgtgtttaacaaccttgatgagccattccttttgacatggagtggcgtgcagcataggaagaatccttggcagatggtgtgcttggaaccaactgtcctatcccccccgggacgaattacacctataaattccaggtgaaggaccaaattggca

SEQ ID NO: 235586 - DNA, 393 bp, Gossypium hirsutum
  unsure (1)..(393): unsure at all n locations
cccacgcgtccggatcgcgagtggccgccctttctttttttttttttccaaancccttgcgatatgccattcttagctgatagagacagcattcttataaaggatacccatcttgaaacagccgtgatctgccaaccacagaagagcaacattcatggtcgaatctttggaggttgtttaatgcatcgagctgtcgagttagctttctcaacagcttatgcatgtgctggactagtacctcgctttcgggaagttgaccatgttgatttcttaaggcctgttgacgcaggggatgtccttcgtctagaatcatgtgttctgtacacggaacttgagaaccctgatcaaccactaattaatgttgaagttgctgctcatgttacaaggccggag

SEQ ID NO: 235587 - DNA, 347 bp, Gossypium hirsutum
cttttaagtgagtaaatatggattttgatgaatatgagtatttagaaaagacggttgaaaatcctgagcatcaaaaggtgaagaaggaagatggtaatggtagagttgataatgttaagtctgaagagaagattcgaagtgggagttcaaagcataagagggaggagagagtcgatgattatgatgattatcgaagtcattccaaacgttcaaaatcacgagaggaatgattgtatgatcatgaccggcataaggaacgaggctcttgtcgtcacaggtcacggtctagagatggtgagaaggataggcacaggagtagcagagaagatagagtcaaagacagggac

SEQ ID NO: 235588 - DNA, 355 bp, Gossypium hirsutum
gttgaatccatagtgaagaacactgctaatagagctttgtaagatgacccaacgctgacagcagggtcgtcttggacgcaactacatgagtgcagcccgcgggaggattgtgatggagcttttcgcagattgcactcctcgcactgctgagaacttccgtgccctttgtaccggcgagaaaggcgtcggtcgcagcggtaagcccctccactacaaaggctcctctttccatcgtgtgatccctaactttatgtgccaaggaggtgacttcacggccggaaacggtaccggaggtgaatccatttacggatccaagttcgctgacgagaactttatcaagaagcacactggtccc

SEQ ID NO: 235589 - DNA, 431 bp, Gossypium hirsutum
gcctcctcatttctcttcaaacaaacatcagtttctttctctctctttcctcgacaatatttcgattttcaccctatttttatttttattcgtattttatttttggtttacttaccaaaaattacatactggcaaaaataaaattaaaagggcaatttgagttgagatcaactttgatagctgctgttcaaaacaagaaatgggatctcatctgaatttcaaggacttcggtgatgcttcaagtatggaaggaaacgagtctaagccactggggaattttccattgacaaggcagtcatccatatactcgttgacttttgatgagttacagaacacctttggtggaattggaaaggacttcggatcaatgaacatggatgaactcttgaagaacatatcaactgctgaagagactcaggcttttatgacag

SEQ ID NO: 235590 - DNA, 286 bp, Gossypium hirsutum
ttatatctgaaaaaggctttctatggggcaaaaggtcccacctttggctccaaagttagcaactacccaccatgttcgaccccggacaaaattcatggagtccaaactctcgatgaggccaagagcaatttccctaatggcaagtacctctttgctggagtctgtggacggaaggaacatctgggccaatgatcttgctgcttctttcagcactatgaaggagcttgaggctgttgctggcaaagaaaaccctgtggtgtccacatcatgctggcttgtccacacc

SEQ ID NO: 235591 - DNA, 438 bp, Gossypium hirsutum
attgatcgagacctactttgctgatcttacttgtgaggcatacaagacactcatcgggctgaagggtgtcactgcttatggccttggacttgggttccgcggaagcccaccactctaatagtttggtcaaatagcaacgtggcctaatggcaattacctctaaagggacagtagaggcattgcttacctgtatagaagtagagatttcattcactggactaaggctaaacacccttttcattcagcgcccaatacaggcatgtgggaatgtcctgatttttatcctgtttcgttatctagtaaagagggtttggatccatcttacatgggaaaacatgttaagcatgttctaaaagtgagcttggatgatgcaagatacgattactacacacttggaacatatttaactaatgaggatcaatatgtacctgacaatgc

SEQ ID NO: 235592 - DNA, 400 bp, Gossypium hirsutum
  unsure (1)..(400): unsure at all n locations
cttctttccagctgcgactccaactctcagagccgacatgaggtaacgagatgtaggtatgcttatgacccctgacatccactgatcctctgctacttggtggaacataggcatatgactcctgatgcagcttatgagtatgtgagatctatcagacctagggtccttctggcacctgcacagcagcaggctgttcaagattactatcttcacaaggtgaataataatggaatctgtggagactcttgctcaatgataatgaagaaaactctagttgtagctgcaaaacaggatacggcggtcttcgacgatggctctgtagttgttgtaacagagtcggaccttgatgggtatgatgctagctntgacacagatgtgttaagtagcaagatgttggatg

SEQ ID NO: 235593 - DNA, 332 bp, Gossypium hirsutum
ctgtttcctaacagtgcacagaacaaggtgcctgcatacttgggtgcaatttcagttttcgcatgctttatggctgctttggtgtcccttggaatttctatttccattgagcctcgacaagtgatacccatgtctggtcaattcatgcccttccaatccctcaagcttgacctgcctgaactgcaaggagaaccggaagaaatatccaaagaaaaggcttgtttggctgctgtccaggtgaatggaccagtgttggttgaagatacatgtctttgtttcaatgcactaaagggtcttccagggccatacgtcaagtggtttttgcagaagat

SEQ ID NO: 235594 - DNA, 402 bp, Gossypium hirsutum
atgggtttcccctatgatctgtctcccttccatcgcaccgtttgttttgacctccgtcgcactcatccctgatttttcttctgaaggtcgagtttgcaaggtgatcacggtttgtgtttcttcccaagcgccaacatctgtgtctttgtctacacttattctaagctcaaaatgcatcagggctcgccggacatgccatattccggtggaaggccactagggaccattcattagcctgcggactatccatttaagccacccaaagttgcattcaagacaaaggtctttcaccctaatattaacagcaatggcagcatttgcctcgatattttgaaggagcagtggagccctgccctcaccatatccaaggtattgctctcaatctgctcacttttgacggac

SEQ ID NO: 235595 - DNA, 306 bp, Gossypium hirsutum
aaaataatacttgatttttagttttgggtgaattatgaatgtaataataatgtatcacttgaagattgaacacccaagcatgtttccctggtatttcttccgaggaagcgaagcttctcgtcacagagggaaagtgaaggcatttcctaaggatgacccaagcaaaccttgcaagctcactgcctttttgggctacaaggcaggcatgacacacattgtccgagaggtcgaaaaacctggatctaagcttcacaagaaagagacatgtgaagctgttacgatcattgaaacccctcctatggtgat

SEQ ID NO: 235596 - DNA, 204 bp, Gossypium hirsutum
tttacaggaggatctctcagctactttttctctcaaaatttctccaattagctctggtttaggcgatggcttcaaagcggatcttgaaggagctcaaggatctacagaaagatcctcctacctcttgcagtgcaggccctgttgctgaagacatgtttcattggcaagcgactattatgggtccacctgacagtccatatgccg

SEQ ID NO: 235597 - DNA, 442 bp, Gossypium hirsutum
gtctcacaggttgggccaatttcaattaatctcattgtctcatatattcttctcagcttggtgttgtgaaggaaattcaaaatgggagattgtaagggagatagactaagagcatgttgttttatcattatcttggttatgctgcttgtgtgctgctgcaccaatggagaagatccatacaggttctatacttggaatgtcacgtatggtgatatctaccctcttggagtgaaacaacaggtgatattgataaatggccaatttccgggaccacaaattgaaaccgtgaccaacgaaaacttgatcattaatgtcttcaatagcttggatcaaccctttctcatctcttggaatggcgtgcagcagagaagaaattcttggcaagacggagtatatggcaccaactgccccatccctccctgggggaacttcacctacactc

SEQ ID NO: 235598 - DNA, 356 bp, Gossypium hirsutum
ctgacctatgtctcggaaagcctgcgctgcggtccctctctgtctctgccaccgccggcgatgcctggacgtctttggagagatccagaggccactctccttgaggagcatctctctggatcaagaaggaggtttgcaaccgtctcgcagaaggtctctctttaccttggcatcctacatgcttattttctcagccagggcaggcgatcttccagagttaattcctattgttaaagcatctctgacagataaaatagttgatccttacctcaaattagttgaggatgtgagactccaggctgtgcgtgtgaaatctgatgtggacagtgtagcatatggatcaaaggaagatgatg

SEQ ID NO: 235599 - DNA, 312 bp, Gossypium hirsutum
cccacgcgtccgcagagcgatatttcttggtgtccgaattggtgatcctactgcggtaggccaagagcagttctcccctagctcaccaggatggccgcctttcatgagagtaaatcctatcttggactggtcatacagagatgtgtgggctttcctcttaacctgcaaggtccaatactgcagtctttatgaccaaggttacacttcaattggaagcatttatgatacagtgccaaatgcattgctttccatcagcagcacctccagcaaagagaaatttaaacctgcatatttgcttgctgatggaagact

SEQ ID NO: 235600 - DNA, 391 bp, Gossypium hirsutum
tcccacgcgtccgcctttttatggttctctataatttggccaaatcatgacatctcttgtggttggcgcgaacactctcttgttgtctaaaaccgaacctagactgaccgcaaaaaagactaccctttttgcccatttactctccttattcaacaaattcggcatcacatcccccaaaatagtcgcttttttatctcttgctctcttcatctgcttcaagtcatggctggtgtagcacccgaaggatcccaattcgatgctcgtcaatttgatcagaaaatgagtgatttgctccaaacggatggagatgatgttttcacttcttatgatgaagtttatgacagttttgatgcaatgggacttcaagagaaccttctgaggggcatctatg

SEQ ID NO: 235601 - DNA, 211 bp, Gossypium hirsutum
ggtcgaatatcgttctatatgacatcatttggtgaagaagcggctaccatatcatccgctgctgcacttaccaaagatgatattatcttgcctcagtatcgggaaccaggagctcttctgtggcgtggtttcacattgcaagaatttgtcaaccaatgctttgggaacaaggatgatggtgggaaaggtaggcagatgccagttcattacg

SEQ ID NO: 235602 - DNA, 253 bp, Gossypium hirsutum
aaaaaaataaaagcgagagaaacgagcgggcatgacgcgaaagccaacggcgtttgggacaatcctcacccttggctcaacctcttcgtgtccaaatcagacatcgttgaattcgatcggacggtgtttaaaaagatggtgaaaaatggaatcggtgggcccatgttaatctaccctcttttacgaagcaaatgggatagtcggacatcggtggcgttgccagaaggggagatcttttacatcgtggcgttgc

SEQ ID NO: 235603 - DNA, 387 bp, Gossypium hirsutum
tccacgcgtccggtctgcacaagctgccaaacacaatggtttatttattggttccaggtcttttcagcaaccatggccccctatactttgtcagcacaaaaacaagcttctcaaaattgggtctaacttgccatattggctcaaaacacagtgtggatcccaccggtcgttaccaaggagacttggatcttcaactcgagagaatcaatgtctactacaatgaagccagttgtggtagattcgttcctcgtgccgtcctcatggatcttgaacccggtaccatggacagcatcagatctggtcccgtcggccagatcttccgacccgataactttgttttcggtcagtccggtgctggtaacaactgggctaaaggccattacactg

SEQ ID NO: 235604 - DNA, 239 bp, Gossypium hirsutum
gcgttttcaaacccatgaagcaatgcgttactcccttttagccggtggcaaaagggtccgcccggctctttgtttggcttcctgtgaccttgttggtggcacagaatgcatggctatgccagcagcttgtgctcttgaaatgatccacaccatgtctttagtccacgatgatcttccttgcatggacaacgacgatcttcgtagagggaaaccaactgaccacaaagttcatggtgaag

SEQ ID NO: 235605 - DNA, 331 bp, Gossypium hirsutum
cttcttctcttcatattggttttttcccttagcactccacgacacagatccgaggagttggggaaaaccctcacacaaattctatatctaaatcttaaccgagcaagtctccaaaaaagactactaacttggcatattgacaaaattcacagtgaggcttcagtcgagaaaaatgccaaagaaataaaggattacattgaggaaatttattggggttccaagaaacgcgttttgcttcttggacatagcaaaggtggcgtagatgcagcggctgctttatctatctattggtctgacttgaaagataaagttgctgggttggcaatagcac

SEQ ID NO: 235606 - DNA, 401 bp, Gossypium hirsutum
ttcaaggaagcacttgctgttggatacggcacagaaggtggtgtagattactttcttgtgaggaattcatggggtcctaactggggagagaatggatacatcaagatggaacgtaatgtcgcaggtacatcaaccggcaagtgcggtattgcaatgatggcctcgtaccccatcaagaaaggaccaaatccacctaaaccggctccatctcccccttctcccgtaaaacccccaaccgtgtgcaacgagtactactcatgtcctcaaggaagcacttgctgttgcttatatgagtatggcaaatactgccttggctggggatgttgcccaatggaatctgcaacctgctgtgatgatcactacagttgttgccctcatgagtatcccgtatgtgacctgac

SEQ ID NO: 235607 - DNA, 347 bp, Gossypium hirsutum
ctcacgcgtccgctggcgtggcgctgctggatgcttttttttgatcaatagaacaggaagaggagggagcctagaggaaagaccacgaaaactacatggctcaacttgatgctactttcttcttggctctcattgccatctccatggttcaaactttggttatggcatcacatggacatggtggtcaccattatgataacaaacgttatggacctggaagtctcaagccttaccaatgtccatctcagtgcacaaggaggtgtagccagacacagtaccataaaccatgcatgttcttctgtcagaaatgttgcaggacatgcctttgtgttcctccagggtattat

SEQ ID NO: 235608 - DNA, 399 bp, Gossypium hirsutum
gttttgcgggctgtttcacggcgactagttccttcttcttcagttttaggccaatcatttcgaaatgctcgaccttcacgttgttacagttcttcctcaaatgaggcctatgcaaagactttagtttcgagaaaagggacatcacaagttgcagggattgtgggttctctagggtttccagttggctcaaggcctctaagggacgttatttcatttgttcaaagatatcctccaatatttgtccacactaggtcattttctgccgatagtggtgaacttgttgatgctgttgttcctttcatgggggaatccatcactgatggaactctagcaagttttctgaagcatcctggtgatcgtgtagaagtagatgagccaattgcacaaatagaaactgat

SEQ ID NO: 235609 - DNA, 434 bp, Gossypium hirsutum
ggcttcaaaacagatggaccaagtgttttctcaccggtccaccgatttccccaactctcacttccttagggtagaagctgaagaacagcctgagatatctgaggaatactcggtttctgctgtgcctttttttgtcttcttcaaggatggaaaggttgtcgataaattggagggtgcagatccttccagtctggccaacaaagttgccaaggttactgggtcaattaaccccggagaagctgctgctcctgctagtcttgggatggctgctggccccaccgtcctcgagagtgtccaagatttggcaaaggcaaacggttcttcccaaatgggaaatcaagtgcaaactggtctcgatgacaaaattaagaaacgattgcagcaattgattgactctcatcctgtaatgctattcatgaaaggaaaccctgaag

SEQ ID NO: 235610 - DNA, 462 bp, Gossypium hirsutum
cccacgcgtccgcccacgcgtccggttaggatgcacaagtaaagctgaagctcctcttcaatggcgaactctaagcttaccacttatcttattctcatcatttgctcttgctttacagttccttcaacagcaaagacatcaactttagtacaagaaatcaagcagcaaagtcaggttcaagataaagaaccgtttgtgggtgttaacttaggcacggatgtctcagatctgctatcagcaacggacttggtttcattcttgcaagtgcaaaaaatttcgcacattcgactttatgacgcaaatcaagacatactcaaagcattggcgaagacaaagatccgggtcattatcagtgtaccaaataaccagcttttggcaataggatcatccaacaccactgctgcttcttggatcgatcgatacgtcgtcgcttactacccggaaacgctcatcaccggtatt

SEQ ID NO: 235611 - DNA, 155 bp, Gossypium hirsutum
tgataatcatataaagcggaagatattttagccattggcatcaagctcaaacttccttcttgcatgcgtgctcctccggaagcacacactagaataagaggtaaaaaattattggtagcatatttcgatcaaacgggtgattttatcgcctacta

SEQ ID NO: 235612 - DNA, 456 bp, Gossypium hirsutum
gtttacaaccgtgattactcgaaaaagctcaggcaaggagaaaaaaccaccagaaattggcggtgcaaggccatttcttggccacctccacctgttaggagggccaaaaccagcccacattaccttgggtaactttgccgacgcatacgggccgatcttcaccttcaggctaggcatgcacccaacactagtagtaagcaattgggaaatggctaaagagtgtttcaccaccaacgataaagccttcgccagtcgtcccagaactctagcggcggagcttttgggatacaacttcgccatgtttgggttcagctcttacggcccttactggcgtcacgttcgcaagatagcgacgctcgaggtactgtccaactaccgattggcaaagctgagacatgtacgagaatcggaaatcagagcatcaatcaaacggctttacgagttagttaccaaaaa

SEQ ID NO: 235613 - DNA, 476 bp, Gossypium hirsutum
gtcgaaaactggccccacattggataatactcatgtgagcactgttgtgaagggcagctttggctatttggatcctgagtatttcagaaggcaacagctaactgataagtccgatgtttactcatttggggtcgtcctttttgagatcctttgtgcccgtccagcattgaatcctacgctgcacattgtcacaagaaaggcatccttgatcagataatggatccatatctgaaagggaagatagcaccggaatgcttcaaaaagtttgctgagactgcaatgaagtgtgtagctgatcagggaatcgacagaccgtccatgggtgatgtgctatggaacctggagtttgctttgcagctgcaggagagcgccgaagagagtggcaagggaattagtgaattggaagttgaggaggggacctacgatgtaacctgtaaaggcaaaaaggatcctaatgcatcccctggttttgacat

SEQ ID NO: 235614 - DNA, 422 bp, Gossypium hirsutum
ggcaattcccttggaaaatggtgacaatgtgaaccttcatatgtcaaagaaagtacagggaatttgcatcaaaactgtttgctctgtcccacaatataaggaaagcaatgcaaatgcatgaagatctgtcacaggctttgcatagacctgctgagttgatagtgggttcttttgatgggattaaggctttgcaagagcagcaggatgctgatggttttgataagctaggaatgaggcttctgcttgccacacttccaaagatatttgattcactgcagacagcatatgaaggtcaaattgttggagtttttgtctttaatggggcatctcagccaggatcaagcctgttgatttctggagatcttattatggtgctgatcattacatatctagatttcagaaacctggagaaatagaaggtg

SEQ ID NO: 235615 - DNA, 419 bp, Gossypium hirsutum
  unsure (1)..(419): unsure at all n locations
ataaaagtaaaatctgctcttcgactggcagcactaacacacagagaagggaagggaagagagaaaaactaagaagatggaggctttgggatggtggttaatgctggtgggttcacttcgattagcatccgtttggttcggcttcttcgatatttgggctcttcgtcttgctgttttctccaacaccactatgtctgaagttcatgggaggacgtttggagtttggacgcttttgacttgtactctctgttttctttgtgcatttaacttggaaaataagccgctctacttgntgacgtttctgtcattcatctatgcatttggtcactttttgactgaatacctcttctatcaaacaatggccctctcaaatctgacgactgtaggcatatttgcagggacatcaattatatggatgc

SEQ ID NO: 235616 - DNA, 434 bp, Gossypium hirsutum
cctacgcgtccgtgaaaaatcctttgaatggtattagatttacccacaaacttttagaaactacagccatttctgaaaatcagaagcaattacttgagactagtgatgcttgtgaaagacagatcacggtaataattgaggatattgactttcgaagcgatgatgaaggcatggagctgagcatggaagaatttgttctagggaacgatctcgatgctgtcgtcagtcaagtcatgattttgcttaaagaaaggaacttacaactctttcatgaaactccgaaggaaatcaaggcactatctttatacggtgatcgaattaggctccagctagtcctatcggatttcttgcttaacatggtgcatcatgctccttctccagatggatgggtagaaatcaagatttcacctggtctaaagctactacgagatggt

SEQ ID NO: 235617 - DNA, 313 bp, Gossypium hirsutum
ctccctctgtgccacgaagtcctggaggggcagagaaccctgtaaaccctgggtcacggtggaaaaaagggaagcttctgggtagaggcacatttggtcatgtttatgttggttttaacagtgagagtggtgaaatgtgtgcgatgaaagaggttacgttattttctgatgatgccaagtcaaatgaaagtactaagcagttgatgcaggaaattgctttgttgagccgtttatggcatccaaatattgtgcaatactacggctctgaaaaggttgatgacaggctttacatatacctcgagtatgtatctgg

SEQ ID NO: 235618 - DNA, 392 bp, Gossypium hirsutum
tccacgcgtccgcctacgcctacaacttctcttcccctcatcaaactcagaaagagggtgaaacctgcacataagcattataaaggtgatgtgggttcaaccaatagctaaaaaactagatgccaagggtaaaaattttaagaatgagaacataaaagtaccaacctgctacactgctggcagaacctctgcatctgcttctcaacaagagctttagtcgctttactatgaatctcacacactttatgccgacggtgatagtcctttgcattagaaagatcttccttacaattatcaacctgacacatggggtagctggtactcccaggcgatccaccacggacctttttgttaggcctagaaacaggctcttccacagaattcaatccccc

SEQ ID NO: 235619 - DNA, 328 bp, Gossypium hirsutum
tgacatttcttttatttcctaaatctgtcagaaattacacactagaattgtagcaatgcaagggctcgtcttactatcggtgctcctttgcgccagctgccatatctccctttccttgaccaatagtactgccagcaacggtacagtggcggacggactactggaaaatggcaacttcgaaaacgccccaaatgcaacaaacatgaaaggcaccgtggttgtgggacgctacacaataccaggatgggtgaatgaggggtttgtggaatacattaagtcggggcaaaagcaaggggacatgctgctggtggtgcccgaaggggcctat

SEQ ID NO: 235620 - DNA, 256 bp, Gossypium hirsutum
ccttaacctcgatgaaacagaggtatcactttaacgttatggattcgagactcaaccagcacgtggagaaaggaaaagaagatgggttgtatattagctgcgtagcgtcgtcatcgaatctatgggccattgttatggatgcagggacggggtttacatctcaggtttatgagttatcaccaatctttttgcataaggagtggataatggaacaatgggagaagaattactacatcacttccgttgtcggagcatg

SEQ ID NO: 235621 - DNA, 191 bp, Gossypium hirsutum
tcggttttactcctttgttgtttcttgttgttacccttttacgtatttgctaccccggttttaaagctattaagacagccggacgatgtggcggagatgtcgggggtggcggcgatttggatgatacctttgcactttagctttgcgtttcagttcccattacaaaggttcttgcaaagccagtcgaagac

SEQ ID NO: 235622 - DNA, 357 bp, Gossypium hirsutum
gttaatctttgttaagaccttgacaggaaagacaattactttggaggttgagagttcagataccattgacaatgtcaaggctaagatccaggataaggagggtattcagccagaccagcagaggttgatctttgctggtaagcaactagaagatggccgcaccctggctgactacatcatccaaaaggaatccaccctctatttggtgcttcgtctccgtggtggtatgcaaatgtggtggtatgcaaatatttgttaagactcttaccggaaagaccattactttggaggttgagagttcagataccattgacaatgtcaaggctaagatccaggacaaagagggtattcccccag

SEQ ID NO: 235623 - DNA, 99 bp, Gossypium hirsutum
tcgctaagagcaagttcgataacttgtatggatgccgtcactctcttcccgatgggttgatgagagctaccgatgtcatgattgctggtaaggtcgctg

SEQ ID NO: 235624 - DNA, 310 bp, Gossypium hirsutum
ctttccttcgtttcctggttcagggctttctgttgtgttatattcgctctctcccccgaaataaagtgaataagaaagctgttttgatacactacactgctgaaaaccaaaaaaaaaaaaaagataaaaaaagatgtttggaagagcacccaagaagagtgataatacgaggtactatgagattctgggtgtttccaagaatgcttcccacgatgatttaaagaaagcctataaaaaagccgccattaaaaaccatccagacaaaggttggtgatcctgaaaagtttaaagagttagctcaagcttatga

SEQ ID NO: 235625 - DNA, 305 bp, Gossypium hirsutum
tcgtttacgcgtccggaatttggtaagaagaaaacaggtagattgtgcccataccaagcgttcggataatcctcagctggctaaagagttgaccattcctcatctcgtagcagtcggtgttggatcaacaatcggagctggagtttatattcttgctggagcagttgctagagagcattctgggccagctctctccatgtgctttctaattgccggaattgccgctgccctctctgctttttgctatgctgagcttgctagtcgttgcccatctgctggcagtgcctatcattattcatacattt

SEQ ID NO: 235626 - DNA, 390 bp, Gossypium hirsutum
tcgtttacgcgtgggcggacgcgtggggtttccgataaggcttcaaagcttgattcttttgttaaaagattagaagaagaaatgagaaagatcgatggttttaaacgtgaacttcctctttctatgcttcttttgaatgatgcgattctagctttgaaagaggaatcaacgcaatgtattagaagaagaaatgttgaacctgttttagaagaatttattccattgaagaacaatcgaaaggagaataataatcacagcgatgatgaagaagaagatgattctaagaaaaattggatgagttctgttcagctttggaacactgccgatgatgatcatagctccattgatgatgaattagatactaagagaaaccatggggatccatttaaa

SEQ ID NO: 235627 - DNA, 423 bp, Gossypium hirsutum
tcgttcacgcgtgcggttcgcctaacacagatggggaagcactttacggctcatagaatagaccatatattaggcttgtgtagaatttgggaactaccagacaatgctatgacgggtctgattggaaaattccgaccctgtatccctctaagccaggaagaacttgaaagagagggtatttgggactttgaccgcttgactcgcccatatgttcgaaaggagttttacaggaaaattttggagattcttggattttgattgcggcaaatttttttaaggaatatctagaccgttatgagttcaaggaggagtgcaacacggagaaaaaaattgctgccaaggcgcactcatgtgcgtagaagtccttgctaccagagagcgaagacaagatacgttgagatctatttgatcttctaaagaaca

SEQ ID NO: 235628 - DNA, 233 bp, Gossypium hirsutum
ctgttatcatactacgccatacaacgaaaagaagaaatggttgtatcctttctttccaaactctctattctaacattcactgcttcagttttagtagcttcagctctggctcatgatttctccattgtcggttattcgcctgaggatttgagttccagggataaacttattgagctctttgaatcatgggtatccaagcatgccaaattctatgaatcctttgaagagaagct

SEQ ID NO: 235629 - DNA, 119 bp, Gossypium hirsutum
gatagtcttaagctggaaggaggcctggaatatcacccaaagaaccgtggcatacacaaaccacactgttctacctgaggctttggagaaatggagtttagaacttatgcagaaactgt

SEQ ID NO: 235630 - DNA, 258 bp, Gossypium hirsutum
tcggtcacttataaccgaaaactagtccaaaaaatgactgctaaaccaccattagggacaccagctagacctggttcagtcacaccaacatttattttctccttatatgatgaaaaccaaaagacaggtccaacaaccgaaagacattggggcttgttacgttccaatggaacaccgatttacgaaatcgatctcaccggtaaacgacctctctcgagttacaaaccattacctgcagttagaaacaacgtaccatat

SEQ ID NO: 235631 - DNA, 239 bp, Gossypium hirsutum
tcgttttccttaattttccgactcttttggctctgttccgatggcttttatttcccgagcccgccgcaccttcaccggacccttccctccatgttcttacttggcttcgattcgtctcagttcgactctcacttcccccaagcttttcattagcggtctcccaagggaaacaacagatgaacagttccaagaggcattttacccatttggccagattgtcgaagccaaagtcgtgagag

SEQ ID NO: 235632 - DNA, 359 bp, Gossypium hirsutum
tttggaagctgctgcagctgtagtggaagaatatggtcttccttgtggaaaggaggaatttcttgcagaacttcagccagtattctatgcacagttgtgcaacattaaacctcttccaggtgcctgtcggctacttaaacatttgagtggtcatggtgtgcccatggctttagcttcaaactctccaaggggaagcatagaatccaaaatttcttatcaccaaggttggaaagattatttctccgccattgttggtggtgatgaagtgactgcagggaagccaagtcctgagatattcctggaagctgctaaaaggctaaatagagaaccttcaagctgcctagtcattgaagattcta

SEQ ID NO: 235633 - DNA, 342 bp, Gossypium hirsutum
gtgctttgatggttgagattgggaattatgattccttctatgaggctggtgttattttctccccagagcagatactaaagctaacaaaggaaacaaggggcaatcttccttctataacactatcagttacagtgcctcacacacttagcctccctgaccaggtcaagcttgcagagatgctggaaaaagaaggtgttgatgttatccaaactgaaggaggaaaatgttccactccctcaaaatctggtgtccttggtttgattgagaaggcaacaccaacattagcagcagcatattcaatatcaagggcagtgaagataccagtaatgtgttcatctggac

SEQ ID NO: 235634 - DNA, 268 bp, Gossypium hirsutum
tctagtaagcaaatagttgaagattggaaggttggatggagagtgaagaagaacaaggtaggtgaaggtgaacatttggtgagcagagaagaaattgcagagctagtgcgcaggtttttggattttgagagcatggagcagatggaaatgagacaaagggcttggaaaattggagaaacatgtcaaacagcaattgcaaaaggcggatccacagatattaacctagatgctttcatcaaggacattttcgaaagacaccatcattagc

SEQ ID NO: 235635 - DNA, 264 bp, Gossypium hirsutum
tccgtccttttatctttttctgtaaaaacctaaatctgaagttcttgaaatgacgaaaggaaagggagttgtaagccctaatttgaagctctctcttcctcctccagccgagacctccgtctccaaatttctgaccgaaagcggcacattcaaagacggcgatcttctcgtcaacaaggacggtgttcgaattgtctctcaatccgagcctgaagctcatccgcccattaagccatcagaagctgacaatgacgatcagttgag

SEQ ID NO: 235636 - DNA, 401 bp, Gossypium hirsutum
tccactcgtccggcggaaagtatttgaggccctggatacacttggaagcaccaaatggagagtgaataacaaggtgcttgccgtggtagagagtatttgggctagtggtggcaacattgcaggcttggttgatcgtaatgatattcctataccagagaaaccttattcagaggattcaacagaaatccaagagtggaaatggagcgtgagaaaggcaaacaaggttaatcgtgaaagacattctcagcgatgcgacaccgaacttaagctttctgtggctcggaaaatggaaaatgaggaaggcttttattatcctcacaatcttgattttcgaggccgtgcataccccatgcatccacatttgaatcatctaagttctgatctctgtcgaggagttcttg

SEQ ID NO: 235637 - DNA, 395 bp, Gossypium hirsutum
tcgttgaaatcttctaatcctgtttgcagcttctttatgcctctacctcttcgttgctttgctcaatgttttctacaagtattggtggatacctcatcgggtacagttcatcatgaattcacaaggaatcagaggacctccttatgaatttatccatggaaacaacaaagaaattgcccaaatgctcatggaagcatctatcaaacctatggccttgacacacgatatatttcccagagtcatgcctcatgtttactcctggatcaacaaatacgggaagacttatcttagttggaatggaattcgagctcaactgctaattacagacccagaactggtcaaagaggtccttaaaaacagtgaaaaagcttttcgaaagccaaagactacatatt

SEQ ID NO: 235638 - DNA, 241 bp, Gossypium hirsutum
tccacgcgtccgcccacgcgtccgctgaaatagagatacctgaaagttacattgattcactccccaggaacggaagagcgagcctcggtgattcgatctataaaggcattacggtggaccactttgatccatcacaattcctttcgactatggacttgtcgacggaacacaaagttcttgaccttaagaataggattgaggcttccattgtcatttggaagaggaagatgcaccaaaaaga

SEQ ID NO: 235639 - DNA, 414 bp, Gossypium hirsutum
ttgacgcgtgggttcgctggctacaacaaatctgttagagtgtttgatgtacatcgacctggtagagattttgtacaatattcaacactacaagggaacaaagaaggtcaaacgggtattatatctgcaattgccttttgtcctactcacactggaatgctagcgacgggatcttacagccagactactgcaatatatagggaagacaatatggagctcttatatgttttacatggacaagaaggtgggataacgcatgtgcaattttcaaaagatggcaattatctatatactggagcccggaaggatccttatattatgtgctgggacataagaaaagctgttgaagttgtctacaagttatacagatcatctgaatctaccaaccaacgaatagctttcgatattgagtgc

SEQ ID NO: 235640 - DNA, 444 bp, Gossypium hirsutum
ggaaaataaaaaaaaatgtcaagctcccacaattctgcaccagaacaactctgctacatcccttgcaacctttgcaacatcattcttgcggtcaatgttccatgcaacagcttgtttgaaacagtaacagtcagatgtgggcagtgctccaatctgtgttcggtaaacctggcagcttcctttcaatcaagggctggaaaagatgttcaggtgcctaattacacatcatcggagtacagaattgacttagggtcttcctccaggtgcaagaacaagttaccaaagcgagcaacaactataaacactaccactcaagaaagggttgttaatcgacctcctgacaagaggcatagggctccttcattgtacaatcagttcatcaaagaggagattcagaggatcaagctgaacaatcctgatatcactcacagggaggcatttagc

SEQ ID NO: 235641 - DNA, 357 bp, Gossypium hirsutum
ttttcagcaaaggaaagggctgaaccagggtactgtcgccgtgtcaaggactttgtggttgggcggcatggttatggaagcataaagttcctgggtgagacagatgtgagatgccttgatctagagtcccttgtccagttcaacaaccgcgaggtaattgtttacatggatgacagcaagaaacctcctgttggacaaggtcttaataaacctgcagaagtaacgctgattaacatcaagtgcttcgacaaatggaccagagaagcaattgaacccgagagaaaagattcggaggctccgaaaggcactgtagagcaagctagaggattcgacaacatggcaacaaatgagacccta

SEQ ID NO: 235642 - DNA, 330 bp, Gossypium hirsutum
tcgggtttctcagcttcatggtgcaccgaagtctcgtgctcccctgatgaagttgagtccaaatccaatggcttagattcgtccaaggccaagaaccaaactgtggagattactcggtcaccacttgtgaggacctccagagggcgagttcaggtacttccttcgcggatcaatgattctgtaattgagaattggaagaaagaaggtaaaactagcttgcctgatgatagtttagatgatggtgatgatgacgacgattatgattttgaatgtaaaaacgataaatttagctttaagaaacctaaagtttgtaagcagaacatgaaaaat

SEQ ID NO: 235643 - DNA, 391 bp, Gossypium hirsutum
gctaaaaaaaaaaaaaaaaagcgcagaaaaaaaaaagaagagctaaaaagaacgatgtcgcaaagtaaagtgacgatggaggtcggaaacgacggcgttgcagtcatcaccatctccaatcctcctgttaacgctttagctattccaataattgatggattgaaggagaaattcgctgaggcgacggggcgaaacgatgttaaagctattgttcttaccggcaagggaggaaggttttccggtggttttgatatcaatgttttcacgaaagttcatggaaccggtgatgtgtcggtcatgcctgatgtatctgttgatcttgtcactaatgcttgagaagattgcaagaagcctattgtggctgctgttgaaggattggctctcggaggtg

SEQ ID NO: 235644 - DNA, 290 bp, Gossypium hirsutum
ttcttttaataaaaacatggcaccacaccttattattgttccttccatgtttgtgcttttattattattcatttcagcctctaatgtccaatcaggcgctattgatgttgttgccaagtttggcgcaaaagctgacgggaaaacggttctgagtaagccatttttggatgcttggaaagaagcatgtgcctttgtaaccccatcaacagttgtgattcctaaagggacatatttattatcaaaagtaaacttagaaggtccatgcaaggctcctattgagattaatgttc

SEQ ID NO: 235645 - DNA, 406 bp, Gossypium hirsutum
cccactcgtccgccatttcctctttcatcgccaccgcttaaaatgtctcttcaccatttgctctttcccattctaatactcgcattctccgctgcttcttcattagctgccactgcaaaagaccaaactttgaacactcatcaagctgagttctttaatcccaagcttccacccagaatcctttcctcttccaataagttcgaaggctcatcggacattgtcgacctccgttaccacatgggtcccgtcctttcctcgtcgccgatcaatatctacctcatttggtacggtagttggtctgtttcccaaaaactcctcatcaaagacttcataaactcaatttccccttccgcgacgccgtctccttccgtttccgactggtggaaaaccgtctctctttacactg

SEQ ID NO: 235646 - DNA, 315 bp, Gossypium hirsutum
tcgtgtcgcgtgggcggacgcgtggggggaaagtcttgaattcgattcatgctcgaaaaagtggatcgattgggaaatggtttcaacaccacaaggaattaggcaccaacacagtgaagaagaaagatatgatacgtgcggaaaatgctcgggtgcactctgctgattcggttgctggactagctgcaggtttggcagctttagccgcagctggaaagtccaatgggacaaccacaggctcaaagatgagcacgtgattggcatttgcaactcaacttttggcatcacattgcattgaattagctgaactagccg

SEQ ID NO: 235647 - DNA, 348 bp, Gossypium hirsutum
cccacgcttccgcaaaatgttgagcacaaatgcgattagaaccatcgttgggatcatcggaaatatcatctccttgttcctgtttctctcgcccgttcccacatttattaaaatatttaaattgaaatccgtggaagagttcaagccggatccatatgtagcaacaatcttgaactgtgccatgtgggtgttctatggtctccccatagtccatcccgacagtcttttgatcattaccattaatggtgttggcctggtgattgagggtgtcttcgtaaccatcttctttatcttctctaacaacaagaaacgaaagaggatttgcttttaatcttttgatcgaaatca

SEQ ID NO: 235648 - DNA, 430 bp, Gossypium hirsutum
ggtgattgtgccaatgcgggtgcctgtagatgagagcccagttttcctactctatcaggattgggcattgggtctcattttccttaagatctggactagactggttatgctggatcatatgatgctcgcttctccacaccgctgttgatctagtgaatgagactaagctagacgatgaaatcaaatcgtggctcgcatttgctgcccagaaagttgttgaagtcaatgcacttgccaaggcattggctggtcaaaaggatgaggccttcttctctgccaatgctgctgctcaggcttcaaggaagtcctccccaagagtgactaacgaggctgttcaaaaggctgctgctgctttgaagggctctgatcaccgtcgtgcaactaatgttagtgctagactcgatgcccagcagaaaaagcttaacctttc

SEQ ID NO: 235649 - DNA, 380 bp, Gossypium hirsutum
caatactgtagtacagtgagaaggaaaaaaaaaatggagttgggagctcaagattatgctgataggaagaaagatatcagccaattcctgtctcaagatatttaccaagatgaaatcaaggcaatgataaatcacaagcgtcgccgtctcatcgtcaacatctccgatctacactcttttaacaacttggctactaggattctgaagaatccgagtgaatatatgcaaccttttttcgatgcggtgactgaagctgctaaaagtattgacccaaagtacttgaaagaaggggaaatagttcatgtgggatttgaaggtcctttcgtttctcgtcgcgtcacacccagagagctcctttccgaatttattggctccatggt

SEQ ID NO: 235650 - DNA, 284 bp, Gossypium hirsutum
tcttttctaaaagaatcaacagatcaagctgcaacgtgttcaggcaacatcgatgccccattcgacgagactttattcgatatcgagaaagagattgatgatttattgcctgtcgaagtaaaagaacagcgtctaagtaactttgttacaagctaccatggtaggcggttgtgttgcagcaatgcctatacttaaaaagatcccaacttcggtcctatggggttactttgccttcatggctatcgaaagcttaccggggaattaattttgggaaaggatcttat

SEQ ID NO: 235651 - DNA, 389 bp, Gossypium hirsutum
tcgttttgaaatagtaaatgttgagttttttaagggcatatgccagttatttgaaatgtttttctattttgtatttgaaacatttggtctgcaaaacatgaatttgagtggaaagacttcgacggactctcttaattatcggttaaagactgccttatcacaaataacgcaagattgtgaagagtggataaaaacttcatcaggacccttatcatcttcaactgcacatgcagatttgacagccactgctcctcaaaatacaaattttggttctccagcaggcacctcctttggtctaaaggaaagatgtgcaggtgctgatactgtagcttttgtagctcggatattgcatagatctagaactaatcttcaatcattgctattaaaga

SEQ ID NO: 235652 - DNA, 342 bp, Gossypium hirsutum
ttgtttcgtgggcggacgcgtgggcggacgcgggggattaaatggttacatgtgggtttattatggagttgtgaagcccaatagtattctggtagccactgttaatggctttggtgctgaccttgagcttgtatatgtcatcatcttcctaatctttgcacctcccagagcgagagccataactgccgtactttttggtgttttggatgaggtgttcccaatagcagctgtgttgataactcagatgtcctgtaatagagaaatgcatataactattgcaggcttcttgtatctggttttcagtgtacttacctatggttcacctctttctatcatgaaaac

SEQ ID NO: 235653 - DNA, 433 bp, Gossypium hirsutum
gtcgttatgttcgaacacgtgaagctggtatccaggacattcaccataaaattagacctgaagaagttgagcttgttcgacgtgattatactgcaaatgaaggttgggaaacatttttgtcgtatgaagatacgcgccaggatattcttgttgggttgttgcggctgcgaaaatgtggccggaacactacttgccctgaactaatggggaaatgttctattgtccgtgaacttcacgtgtatggaactgctgttccggttcatggcagggatgctgacaaactccaacaccagggttatggtacactcttgatggaagaagcagagcggattgcgagcagagagcatagatcaacaaaaatagctgttatatctggggtaggaacccggcattactataggaagttaggctatgagcttgaagggccttacat

SEQ ID NO: 235654 - DNA, 483 bp, Gossypium hirsutum
tcggtcggatctggaatgaaacatggttgtcgagtttcttttacaagccttgcaattatgaactatttgtgaagcagtctctcaatatggaaatggccattgtcatggcaagggatgctggaatggagtggatactgcatcttgatactgatgagctaatacacccagctggtgcaagtgaatattctttgaggcagttgctacttaatgtacctagcaatgttgatatggtcatatttcctaactatgagagcagcgttgaacgagatgatatcaaggatccttttactgaggtgtcaatgttcaagaagaactatgaccatctaccaaaggacacatactttggcatgtataaagaatcaactcgtggtaatccaaattatttcttgacttatgggaatgggaaagcagctgcccgcattcaggatcatcttcgtccaaatggtgctcacagatggcacaattatatgaaaaccccaaatg

SEQ ID NO: 235655 - DNA, 354 bp, Gossypium hirsutum
ttttattctgtccgatttctttctttcaatgggttttattggttcaatccgtggaaccatttgtttacgacgtcaactttgctggagccgttggagatggagagagtgatgatacagaggccttcaagaatgcatggaatgttatctgttgttcgcatatccctttagggatatttcgtgttccttacggacaaaagtttctggtgcaacccttgacttttaatggtgaatgtcgaccaaaaaatattaccattcagattgatggaatactcattgccccaagtgatccatcttcatggaaatgcaatgatgcaaactgtaacaattggataacctttcaacatttttgatggc

SEQ ID NO: 235656 - DNA, 433 bp, Gossypium hirsutum
ttacttccaaaagtttattcagtttcagctgacagtgaatgttgcagccttggtcatcaatttcattgctgctgtatcttctggagatgtaccattaactgcagtccaactattgtgggtgaaccttataatggacactttgggtgcactggccttggctaccgagcaacccactaatgatctcatggacaagcgacctgtgggtagaaccgagccacttataacaaaagttatgtggaggaacctcattgctcaagcactctatcaggtagctatcctactgattttacaatttaaaggcaaatccatttttggtgtgtcggaggaggtcaaggataccctgatattcaatacatttgttctctgtcaaatctttaatgagttcaatgcaagaaatatggataagaagaacatattcaaggggatacataag

SEQ ID NO: 235657 - DNA, 322 bp, Gossypium hirsutum
tttttcacgcgtacgcccacgcgtccgctttttctcacttcttcaagaaacagacggttaaagcaccgagtaagagatagcatagataaaagaaggttgtgagtgagcttggtagctatggcgggagaacaattgcaggtgcttaatgctcttgatgtagccaaaacacattggtatcatttcacagctatcatcattgctgggatgggtttcttcactgacgcatatgatctcttctgcatatctctcgtcaccaaaattgcttggccgaatatactataatgttgatggtgcggagaagcctgtaagtttgcctcccaat

SEQ ID NO: 235658 - DNA, 417 bp, Gossypium hirsutum
ttcattcgtccgcccacgcgtccgttacaacttctttagaagtttcctcctacaaatcttcatcactaccacccgctttcgcttccttcaaacctctggcgcacttcttgtttttgcttcaaaaatattgtgggtaaaagcttatagatgggtcagaaacttgatacgatgcgcccaaagccatcaaaagacgagttgctttatcaggctgcaattgccgggaacgtggatggcattaaatctctttgcagagaaggtactggccttgagtggatagacagagatggaaagactgccctcattgtggcatgcatgaatcctgaattaatagatgtggccaagacactgattgagatgggtgccaatgtcaatgcttaccgccctggacgtaatgcagggactccgttacatcatgct

SEQ ID NO: 235659 - DNA, 407 bp, Gossypium hirsutum
tctttacgcgtccgaaccggtagaatttccacccaaaaaagaaacactgtttaatcacatttcaaaggtcactgctgctcagtttgcagccaaatgctaagggagatgcaaaaaccgtagcaaaagagcaatgcccaccaactttgtttcttccaggataatggaatggcgaaacttggattgcacaaacaaattgtgggtgatctttcactgcccgactcttctccttttgctaagcttttgggttcctacatccaatccaagtctttccttgatatacgtcggttacatgttcggataatcaaatctaattttgcgtctgagacttttatcctaaacaggcttatcgatgcctacggcagatgtggctccttggaggatgccgggaaggtgtttaacagaatgcc

SEQ ID NO: 235660 - DNA, 335 bp, Gossypium hirsutum
tcgttcacgcgtccgcggacgcgtgggcggacgcgtgggcgggagcaaatatgagctcggagacgaagtaggaagaggccatttcggttatacttgtacggcgaagtttaagaaaggagagcttaaaggacaacaagttgccgttaaagttatacctaaagcgaagatgactactgcaattgccattgaggatgttagaagggaggtaaaaatattaagagctctatctggacatagcaatttagtacaatttctatgatgcctacgaggaccatgataatgtctacatagtgatggaattatgtgaaggaggggagctcttggacagaattctt

SEQ ID NO: 235661 - DNA, 268 bp, Gossypium hirsutum
gtcggatgatctttaccgatgctttccaggaaactccaattggtggggtaacaaggactattacgaagcataattatcttgttcttgatgtggatgatattcctaggattgttagtgaggctttctttttagcttcctcgggcaggccgggacctgttctgattgatgttcctaaggatatacaacagcaacttgctgttcctaaatggaaccattctcttagattgccagggtatttgtctaggttgcctaaagctcccggtgaggc

SEQ ID NO: 235662 - DNA, 287 bp, Gossypium hirsutum
caccttattaacacgacactgctcgctagtccgggtgctaagggttcagtggttggaattggtgacccttctatgaataataatctggttcagaccacagggctgcagggtggtgggatggggatagttggtttaggctcacccgcaagccagatatcttctgatgtggtttcaaagaacagcaccgataccacttcgccatcaccagttccttacatattcggccgaagaagaaaatggggtgcaaatttggagaaagtatttgagagaaggcaaaggagaatgat

SEQ ID NO: 235663 - DNA, 284 bp, Gossypium hirsutum
cccacgctttcggggaacgggccatagcagtgagcgggggcggatcttcttctttattacaaagatggttgctttcaggtttcatcagtaccaagtggtggggcgaggtctcccaacagaagcagatcagcatcctaagatctacagaatgaagctttgggccaccaatgaagtccgtgccacatccaagttttggtattttctgaggaagctgaagaaggtgaagaaaagcaatggacaagttttagcaattaatgagatttttgagaaaaaccctaccaaga

SEQ ID NO: 235664 - DNA, 366 bp, Gossypium hirsutum
tgcaattttcacaccaaggggtcggtacagtgtcgaacttgatctttcattcttgagactccaagggcaggcaaatgatttcaaaattcagtatagcagtgttgttcgcctgtttttgcttccaaagtccaaccaacctcacacttttgttgttgtcacgcttgatccacctatccgcaaagggcaaactttgtacccccatattgtcatgcagtttgaaactgattatgtcgttcaaagcaccttgtccataaatgaggatcttttgaatacaaagtacaaggacaggttggaaccttcttacaagggactcatccatgaagtgtttaccacagtaatgcgtggtttatctggtgcaaaagttta

SEQ ID NO: 235665 - DNA, 272 bp, Gossypium hirsutum
tctgcacatgatgggcattgtttacagggacttgaaaccagagaatgttttggttagagaagatgggcatattatgctatcggatttcgatctttccttcaaatgtgatgtctgtcccaagctgttaaggcgtagtaagcccaacttggaagacaatgaagatgacgataacttttgcttgacaccttcatgtgcttcccccatgcaaccggtgctgtcttgtttctcatcttccaacaggaaaaagaaaggttctagggttacaacaatta

SEQ ID NO: 235666 - DNA, 137 bp, Gossypium hirsutum
ctttttacatattttaaatgctaatgtgatctaccgtgatttaaaggcttccaacattcttctcgattcggactacaatgcaaagctttcagatttcggcttggcaagagatggtccaactggcgataacactcatg

SEQ ID NO: 235667 - DNA, 150 bp, Gossypium hirsutum
ctgttcgctttggttcaatggcaaccctcaaagttccaggtcacgtttcttttccttctgatgatgctgagcaactccggaaagcttttgaaggctggggtacgaacgagcaattgattatcgacatattggctcacaggaatgcagcac

SEQ ID NO: 235668 - DNA, 393 bp, Gossypium hirsutum
gcaagttttagttttcaccattttctgacagtggagttgttggggaggagtcctatgaggaccaaaatgaccaggatagtcacagtcctcttggtgggttttatattgggtgtaagaagtggtgaggccaggaaaggaaaggtgacagagtcctttgcgtacactgggataagttgcagacgacacactgcatcaatcacagactttggaggagttggtgatgggaaaacatccaatactaaagcattccaggatgcagttaatcatctcagcaagtatgcatctgatggaggggctcagctttatgttcctgctggaaaatggctgaccgggagttttagcctaaccagccacttcactttttatctttaaaaacacgctcttctttttgct

SEQ ID NO: 235669 - DNA, 330 bp, Gossypium hirsutum
caagaactagccaagttttggaagcagcatccagctttagtggaggcagaattgttgatccaagcccagttgactcgtgagtctaaagctctgacaccagctttgttgcgtgattttagacgtatgctagagctttcaccccgccttcttgaggaactagtgaagatggcattgctaccacgtactgctcaagggcatggatggttgagacctgctattggcgtggttgagctttctcagaatatcattcaggctgttccgctaagtgctagaaaggttgctgggggatctagtgaaagtgttgcaccctttctacagttgccgcatttt

SEQ ID NO: 235670 - DNA, 464 bp, Gossypium hirsutum
cattttccctttatttcctttgccgcccctagggtttaattgcattccgcacatggcttctgcagatgtcgagtaccagtgctttgtcggaggtctcgcatggaccatcaacgaccgtgctctcgaagaagccttcagtgcttacggcgagatcgtcgattcgaaggtccgtttgtcgcagtgatcggactccagatctgactcgaatccaacccgacctgggcctccatgtctatgatctgtgatccttgatctgttattttgtgttactactcgataatctcttgttactattctaaactgttttctaaagtctcgctgatcattaacgatcgtgagactggaagatccagaggctttggcttcgttactttccgtgatgagaaatcgatgagagatgctattgaaggaatgaacggtcggagtctcgatggaaggaatataaccgtcaacgaagcacaatc

SEQ ID NO: 235671 - DNA, 378 bp, Gossypium hirsutum
gggaggaggaaatgcccaaaaatccaagatggctcgtgagaggaacttggaaaagcaaaaggctgccgccaaaggaagccagcttgattctaacaagaaggccatgaccatccaggtagtatctttgcttcatttgttaggttcaacactctgtttttttttgctcgatctgttggctttttttttgatcaaatgatttatgattattttgtttccttgtacatatagatcaaacttgacaaattgggttgaatttattttcactgtttttttcctgggttaatatattcatttcttgttagttggttttcactatttgatttgtgtacatgctttctagattcttacattaagttgtacagctactggaacttattt

SEQ ID NO: 235672 - DNA, 324 bp, Gossypium hirsutum
cccacgcgtccttaaaatccccaaaaaccaaagatctcaaaggcagggacttacacaacttgagctaagatgccgaacctcgaatgtcgaatgtacgaagccaagtatccggaggtggatatggcggtgatgatacaagtaaagaacatcgccgacatgggtgcgtacgtttcgctccttgaatacaacaacatcgaaggcatgatcttgttctcggagctctcccgccgtcggattcgtagcgtcagcagtctaatcaaggtcggacgaaccgagcccgtcatggtcctacgtgtcgacaaggaaaagggttacatcgatttg

SEQ ID NO: 235673 - DNA, 441 bp, Gossypium hirsutum
cccacgcgtccgcccacgcgtccggtcattcttcaggacttcgggtggtatgacttcattctaaaactgcacaagctctacaacggcacacatttgtcactgaataatgtgacctcaagaaatgtatatacgattgaagtagatgagatttcagggggtggaaacattttcattcagtctgatggggaacatctaggatttcttcctaggaagttgtctattctacctggtgctatcgagatgatatgctaacgtgaaccctggaagaaattgatcctatacaaccggcgtatcagcttactccgaaactatgcatctccatggatagagtccagtaagacaagcaattgacgtcatcaaacttagaagtaggaagatatgggacagaagaaagatagtgatggagatgagtcattagtgttaccccttatttaatatttt

SEQ ID NO: 235674 - DNA, 450 bp, Gossypium hirsutum
ccctcgcgtccgtgaagaacaagaatggattctgccatagctcagaaaacatgggaattagaaaacaatatacttaccgtcgagacacctgacccttcatcggattctatattctactacgacgaggcggctcaagccaagttccagcaagagaagccttgggccaatgatcctcactacttcaagcgcgttaagatctctgcgctcgctcttcttaagatggttgaatctaattctgatgatccagtgaatcacagattgtctgaacggattatccgtccggattcagtacttaagcattcgtcacagtgggagcatgcagatatactaattttcaactcatatttgtggtggagacaaggcccagtaaagcttttatggagttctgaagaaaatggaaactgtgaggaactcgatgggctaggagccatggcatgttttcattacagc

SEQ ID NO: 235675 - DNA, 391 bp, Gossypium hirsutum
gttagatgaaacatcatttaccatccattttcctgctcaaggagaaacatctgtggtcaaagcatggcttcttcgtccttctctgatgtggaaggatggtaattgggttgaatggtccagttgtggggataatgatggctcttcccacgagggtgataccccactggaaaagcgaccaaggatatgcagtcctgtgatagagaacaaagaggatagtactaaatgttttgacagtaaggaatctgagaaacctgacaacacaagattgctggatttaactgctggtgaaaaaatatttaatatcggtaaaagcaccagagacgagagtaagcctggttcactcagaatgaaacgttctggtttaaagaaagaaggatcaagggttattttt

SEQ ID NO: 235676 - DNA, 491 bp, Gossypium hirsutum
  unsure (1)..(491): unsure at all n locations
tctgattctgccccttgtattattctgcataaacagtttacgagtgacttttggaatgaactccccctttaaaatagtacaattgattcaattactaatgttgatcatcttactgtccttttatcagatcggattggccatgtctcctctgagcaataattcccttttcctggactatcatcgcaacccatttccttcattctttcagcgtgggctaaatgtttctctttcatctgatgatcctttacaaattcatttgacgaaggaagctcttgtagaagagtacagtgttgcagcacaggtttgttacttgcttttgacagtactatatctataatactgtggaaaaccaaatggccagntctctctctctctgtatatatttatatatatccttttccaatattcctgaaaatgtggaacgaaaaaaaaaaattcatccaactgttcccccacacagtctaaaggaactagtaaattaaaagacacat

SEQ ID NO: 235677 - DNA, 317 bp, Gossypium hirsutum
ctttttctttcactgacttgtgatgaaggatttggggccggacacatgcatgacacatatacaaagggaattcgggtttggggaaccccgctcgaagtggatattgatggagtaagaacttatgttttctaccttgacaccgagggttttgaaagtgttgggaagtcaaatgtatacgacgataggattattgcattggcaactgttatgagctctgtactaatttacaagctgcctgagacgactcgtgaagctgacatatctcggctgtcatttgctgccgagcttgctgaagaattttatggaagagtgaaggg

SEQ ID NO: 235678 - DNA, 428 bp, Gossypium hirsutum
ccctcgcgtccgaaatgtaactggtattccttatcaatgggaaacttgcagtgatgttgttggatataactggacggactctcctctctctatgcttcctatataccaagaactaattgctgctggtattcggatatgggtatacagtggagacactgacgcagtggttccagtgactgcaactcgatactccattgatgccctgaaactacctaccattaacaagtggcatccttggtatgacaatggcaaggttggtgggtggagccaagaatacaaagggctgacatttgtgacagtaaccggagcaggtcatgaggttccactgcatcgtcctcgtcaagctttcattcttttcagatcattcttggagaacaagtcaatgccaagttacttgtattcattatccgccgtgaataagtggaaag

SEQ ID NO: 235679 - DNA, 405 bp, Gossypium hirsutum
attctaaagccatccccccaaaaaaaataatttcctttttgaaccctaaatatcccttttttttccccttaaacctcaattgaaccgctcaatctcaccatgaacggtacgaaaagatttgccttatcgagctcggctgccgatgccaatgattctgctttccgcaacaaaagaataatggcaggatctccttttgatcctcaaagggcagaaccatctcaacagcagccgaatgcaacaccaccattagacccgcagcgagctgagttgtctcggcggcatgtgaaagctctcaacatccaatttgcaagttgggtgcagtcacaactgaagaatcaccctgatgagctttggcaagatggtgttagtgattacctaagtcatgcttcaaacattatggaaaag

SEQ ID NO: 235680 - DNA, 518 bp, Gossypium hirsutum
gtctcatgtttactcctggatcaacaaatacgggagcacttttcttagttggaatggaattcgagctcaactgcaaattacagacccagatctggtcaaagaggtccttaaaaacagtgacaaagcttttcgaaagccaaagacttcatatttcttcgtcaagctaataggcgatgggcttgcttcaaccgaacgtgagaaatgggcaaggcaaaggaaactggccaattatgcctttcatggggagagcttaaaaaatatgactccagcagtagttgctagcgttgaaaccatgcttgagaaatggaaaagtaaggagggcaaagagatagaagtgttccaagagttcagattattgacttcagaagtgatatccagaaccgcctttggtagcagttacttggaaggggagaagatttttgacatgctgatgaagttgacagtaattgcgggcagatatattttaaaagcaaagattcccatcatcagcaagttttggaaatctgctgatgaaattg

SEQ ID NO: 235681 - DNA, 453 bp, Gossypium hirsutum
ctttcgcgtggggagaaattcaaggagtcagttcataggcttgagaaagaatcagggtttttcttcaacatgaaatactttgaagagaaagttcaggcaggtgaatgggaagaagttgagcggtatttatcaggttttacaaaagttgatgataatcgatattccatgaagatattctttgagataaggaagcagaagtatctggaagcacttgatcggcaagacaaggcaaaggctgttgaaatattggtcggtgatttgaaggtgttttctacatttaatgaggaactctacaaagaaatcactcaacttttgaccctcaacaatttcagggaaaatgagcagctgtccaaatatggggatacaaaaactgctcgcagtataatgttggcagaactaaagaaactcatagaagcaaatccacttttccgtgataagcttgctttccctact

SEQ ID NO: 235682 - DNA, 457 bp, Gossypium hirsutum
tttatctcgaaaaccccatctgagatagaacaaaagaaaaggaaaaaagaaatgtcgccgccagcagcagcagcgggcggaggaggaggacagcctcagcggcagcagcaacaaggtggattcggacagagcataaccggaatcataaggatcgccgtcttctggtacttcgcttccaaattcttctctcccaaaaagcccgtcgatccttctaacctcatctccaatctcttccagaagggcgaacccctggatatgtggttgtatctttctgagcaccaaaggttcaatgactttgggaacgaagcttctcttgtttggcatgaaactaatataccttatgccacttggggtcctgaaagcactcgtactctttctttagactaccatccttccgataccttgaaaaacaatggcagtctttatgctcatgttttctttgctcgctcgggttacc

SEQ ID NO: 235683 - DNA, 424 bp, Gossypium hirsutum
gtgctttggtatttttttgtcctatattcttaaacctaggtttcagcttgaaggaactattttcatttctgtgcactattattttcttcatttcaaagtaatggaagatcaagctctggaccctaatggtccgagccatggttcagagagaagtgaaccagtaaggtcaaggtggacaccaaaaccagaacaaatcctcatactagagtccatcttcaatagtggcatggttaaccctcctaaagatgaaactgtgagaataaggaagctgcttgagaaattcgggtctgttggtgatgctaatgtcttttactggttccaaaaccgacgttcgaggtctcgtcgccggcaacgacaacagctgttagctgccggtgcacgggaacaaaggaataaccaatcacaaatactcggtaacggcggt

SEQ ID NO: 235684 - DNA, 419 bp, Gossypium hirsutum
tgtagaagcttgggcggagtaaaaatgagaatattgtggcgcagtctcaaaatgcatctggactggttggtttattggaaacgatgcgtgtccagatggagatttctgaggcaatggacattaggacaagacaaggattgcttaatgccctttctgggaaagttggaaaaaggatggacacactactgattcccctggaattattgtgttgtatttcacgaacagaattttctgacaagaaagcatatataaggtggcaaaaaaggcagttgaacatgttggcagagggtcttgttaatcaccccgctgttggatttggggaatctggacgcaaaaccagtgagtttaggattcttttggcaaaggttgaggaatctgaggcttttccaccttctactggtgaagtccaaaggacagaa

SEQ ID NO: 235685 - DNA, 267 bp, Gossypium hirsutum
cgttctcgtgggcggacgcgtgggcggacgcgtggggggaaatcatcgatgattgcggcaatggcaaacctattggactacgatgtttatgatctcgaactcactgcagtgaaggaaaacacggagttgagaaggcttttgcttgatacgtcaagcaagtcgattatcgtgatcgaggatattgattgctctatcgatctcacaggccaaaggggtaagaagacggagaaagatggaaacgaagacgagccctcggatccggtcacc

SEQ ID NO: 235686 - DNA, 254 bp, Gossypium hirsutum
ttttagagaagatgaatactaacagcaataataaccctattggatttatcaccaaagctgaaatgagaattccagttcaagaaaggagtccggacttgaatctggacctgagaattagccctgcttattaccagcatacccaaccagagtcattcaaaactggaggaagaactctttgatttatttgcagcttgggagttaaaaacagcagagattgcacttgcatgcaccattactactgctgctggtagcag

SEQ ID NO: 235687 - DNA, 448 bp, Gossypium hirsutum
  unsure (1)..(448): unsure at all n locations
tttttctttgccttttgtttttagatctcccaactgcttatacccttaagtgtcccaacggtcgcttttccatcgatcttcccacactttccctttttgattagtattcaatcccctgcacattccaaaccatcaaccgcctctctccctcctaccatgtcccaaaatcacttccttcctctctttctctatctcattttcgtgtcgctgccgcgttctttggcccagcacggcggcggaacggtggtcacggagctttggtgtgtcgcaaagaacaacgccgaggacgcggcgctgcagggagcgctggactgggcttgcggtcctggcggaacggactgcagccggatccagcaaggcggaccctgttacgacccctctgatgtccagaaaacggcgtcttatgccttcaatgactactactngaagcacggcatgactgacgatg

SEQ ID NO: 235688 - DNA, 492 bp, Gossypium hirsutum
tttctaaatcaaagtaattttcaagcagattcagaacattcccatctcaagaagtgtgttcatgatttgctgaaaatgacatctgttgagggaaatacggctgagcctcggaaaactagtaatccggctgctaacactgctaagattcagagttcatcattgtcattccgaaggtggggtaggaagtatccttttatcagatatgggcttccaatgatttcgttgacagtgtttggggcagttggccttggtcatctcttgcagggcagtgaatatatctgctgtgcagagaacagcatatatcattttaactttgaggggcaaaccatgttatggcgtaaataattggctcagttctgttcacggtgtatttctcatgatcggagttggacctatggtattaggccgtcagttctgatggtggtatatagttgtaaatttttaaagttggagaaaagaattccaatgacaataggatgtaatcatatgatt

SEQ ID NO: 235689 - DNA, 373 bp, Gossypium hirsutum
ttctcttcaccaccatctcttactacaatggcgtttactttcatcttctgtttcattcctccattcttattcatttttctattccattctcttcttcttcatttcttcaaacccaatcgccccaaattacctctccctcctggaactatgggttggccttacatcggtgaaacctttcacctttactcccagaaccccaatgtcttctttgcttccaagcagaaaaggtatggctccatattcaagacccacatactaggttgtccatgcgtgatgatttccagccctgatgctgcgaaattcgtgctcgttaccaaatctcatcttttcaagccaacattccctgcaagtaaagagaggatgttaggcaaac

SEQ ID NO: 235690 - DNA, 393 bp, Gossypium hirsutum
ccttgggttgagtgtagagatgaggaaaatcatgggtgccaaagttcttttcttctttgctttgctttccttttcagctgtctcggcatttgcacaggatgaggaagaccaaggtcttgttatgaacttctacaaggattcttgtcctcaggctgaagacattatcaaggagcaagttaagctactgtacaagcgacacaaaaacactgctttttcttgtctgagaaggagacagacaggagctttggcctaaggaatttcaggtacattgagaccatcaaagaagctgtagaaagggaatgtcctggagttgtttcttgtgctgatatccttgttctgtctgctagggaaggcatcgtttcgttgggaggcccttatattcctctcaaaact

SEQ ID NO: 235691 - DNA, 341 bp, Gossypium hirsutum
gttttataagagaaagaaatggcaaaagcttctgtgatctcccttgtttccttatttatttgcattttctcctcacccagctttgcctatgcttcagcttcagctccaggtccatctccatcatccaatcaacaaatgagattcgaggtcttaggtcatgtttattgtgacacttgtcgtgttgaatttgagacatctatcagtgaacctattcccggtgcaacagtgaagttagaatgtaggaatcgtacagacgaaaagatcacttatcaaagtccagaaataacggctggcgataaaggaaattataaaatccaagtgacgggtgattatgaagaatc

SEQ ID NO: 235692 - DNA, 248 bp, Gossypium hirsutum
ctgcgactgctctgacaagagccaatgtgtttaagtaatccataatcatccatccatgatggagcttgccagaagaaaggaaacgccttggtcattgagactgagaaaagctacatcagcactgtagtggtcgaggctatggcagagaacgatggcaagtgcaagtgtggagctagctgcagctgcacaaactgcacatgtggcaatcattaagcagacatatagaaccatgatgtttagtactccat

SEQ ID NO: 235693 - DNA, 410 bp, Gossypium hirsutum
tttatgggccttgatgcgctacctaggcagcagcataattcatctgcacaaagatgccgttttaaaggcccttctcgacattcttcgtgtcactgtgagataccagtggaaagctgggagcaggatcaaagctttccagatgagcaaatgcaatgcgaagtaagtccctatgaagtgccgaacaaatacaaagatgtgtatgaaatctggcaacaatccccaagaactacttattcaagagacagctctccacaaaaagggaggtatagtgataatgcaaatgagaataaaatggctttagttcgtcagaagtttatggaagcaaaacatctagtgacagatgaaaagcttcgccagtccaaggaatttcaagatgcactggaagtcttaagttccaatagagagttatt

SEQ ID NO: 235694 - DNA, 415 bp, Gossypium hirsutum
  unsure (1)..(415): unsure at all n locations
gtgttgacaagaaatgccctggcgagtcccgcttccctgctcaggttcgggtgttaacaaggaaaatctgtgagccacttgaggaggactcctttaggccaattctccaccactacgatggtcccaagttccgccttgaactcaacgtgccggaggcactctccctattggatatatttgctgaacaagatccttaagcaaacatactacaaaggacatacaaatacacaaagataaaggaagggaagaataagtagagagaatatagagagcatatntgggagttttaagacgttatctatggggtgaactgaatgcaaggatccataacctgcgagttgtaaacctttttgctcacaggattgctatggctgccatttatttgttatacagtttgtcttatacataaataata

SEQ ID NO: 235695 - DNA, 283 bp, Gossypium hirsutum
tctacgcatcgtctataaattataaaccactaacatttcagaccgtttcttgttccaaattagggtttgatattacaaattttgcgagaggaaaagcatttcatcgtcagccaaaaaaagggaattttagtcttcaggggaacgatcgaacgatgtcgtacctactaccacacctgcactcaggatgggccgtagatcaggccatcttggcagaggaagagcgtttcgtcgtcatccgattcggtcacgactgggacgaaacttgcatgcagatggatgaggt

SEQ ID NO: 235696 - DNA, 210 bp, Gossypium hirsutum
ttttacgcgtgggcgcaagcgctctggtgtccttctttatggtcctccaggaacagggaaaactttgttggcaaaagctgtggcaactgagtgttccttaaatttccttagtgtaaaagggcctgaactaattaacatgtacataggagagtcagagaagaatgttcgagacattttccagaaggccagatcagcacggccatgtgtcat

SEQ ID NO: 235697 - DNA, 255 bp, Gossypium hirsutum
tttacgcgtccgtgagaagcaaacaaggcatatacttgataccattgttgaaactttatcaaaggatagtcgacggaagttcatatgggaagagatgtcttatttggaaaggtggtggagagatgcctcagatgataaaagggagtctttcacaaatttggtgaggaatggtcagttagaaatagtaggaggtggctgggtgatgaatgatgaggcaaattcacattactttgctataatcgagcagataactga

SEQ ID NO: 235698 - DNA, 382 bp, Gossypium hirsutum
ttggcttctatcttagaactatcacaggacatggtcaaggatcaaacatacttcctttcgcatctctcacagttccagctcaaacaacttattttcccacttggatgtctctcaaaggatgaagttcgccaactagctgctaaatttgacttgcctaacaaaggtaggaaggattcacaaggaatttgctttcttgggaagataaggttcagtgattttgttgcaaggcatattggggagatggaaggaatcatattagaagccgagacaggagatttccttgggaaacatagagggttttggttctacacaattggtcaacgccaaggcctacgtctccctgggggaccttggtatgttgttcagaaggatgtaaaaaata

SEQ ID NO: 235699 - DNA, 326 bp, Gossypium hirsutum
tcgtttttacagggaggctatgcgcaaggttctgaagttccatctcactcgggcacaagatcggatgaaacagatggctgacaaacgaaggtcggaacgcgaattccaggtaggcgatttggtttacttgaagctgcaaccatatcgtcaacattccttgcataagtttaaaaatcaaaagttagcacctcgatactttggaccttttccggtagaagctcgagtcggccaaattgcttacaaactctcgctgccatcatcggcccgtattcatcctgtttttcatgtctcacaattgaaaaatcatataggctcagcagtgagtg

SEQ ID NO: 235700 - DNA, 339 bp, Gossypium hirsutum
ttagaatgcaaattcgaaaccttaccaacgacatgggaatggagaacaggcctagacatgacccgaaccaggattcatattgaccggatgaaccagagctcgacctttacaccataccgagctacttctgttggcgtgttcggaacgagatgcacgaaacagaaaggcatgcattgacagaatggttggaaggcagctgaatctcaagaacccctaaaatctacaaggagtacagggatttcatcatcaacaaatacagggaagacccttctcgccgcctcactttcaccgaaatccgcaaatccctcatcggagacgtcactttactccacaaggtct

SEQ ID NO: 235701 - DNA, 171 bp, Gossypium hirsutum
tctcacgcgtccgggcaacttcgcatggatggttggcctactctgtcaattcatggagataaaagtcaagcagaaagggattgggtcctttcagagtttaaagctggcaagagccctataatgactgcaacagatgttgcagctcgtggtttagatgtgaaagatgtgaag

SEQ ID NO: 235702 - DNA, 137 bp, Gossypium hirsutum
atgcatgtccttcctatatgcagccggctgttaaatcaagagatatttcgagtctcaggaatgatggccaaccaaggatttggcgaccttgaccggttgaggcatagaagccccagtcccatggcttcttcaaacct

SEQ ID NO: 235703 - DNA, 414 bp, Gossypium hirsutum
ttaactcagccccgtcggcagcccttcgtccggcaacatatcagacagttcttctaaagaacaagaccggttcctccccatagctaacgtgagtcggataatgaaaaaatccctccccgccaacgcaaaaatatccaaagaagccaaagagacagtgcaagaatgtgtgtcggagttcatcagtttcatcaccggcgaggcttccgataagtgtcagagggagaaaaggaagaccataaacggggatgatctgttgtgggcaatgacgacactgggttttgagaattacgtgggtcctctcaaggtttacctcaacaagtatagggaaaccgaaggggagaagaattccatggctaggcaagaagaccatcaccatcaccatcaccatcaatcacccacatcgtacggtttgat

SEQ ID NO: 235704 - DNA, 433 bp, Gossypium hirsutum
aggtgttgatgtgcttgtagtcatggtcacaaatgaagctcaagctgagagtgttttatttggggatctggctgcagtttcagcccttccatctggagcatctataattctttcttccacagtctcccctgcatatgtgatccaacttgaacggcgtttacagaatgaaggcaaagatttgaaattggttgatgctcctgtttctggtggtgttaaaagagcttctatgggagaacttacaataatggctgcaggttcagatgatgctctcaaaagtgcaggtcttatcctctcagcattaagtgagaagctctatgttatcaaagggggttgtggagcaggaagtggtgtaaagatggttaatcaattacttgctggagttcatatagcagcatcagctgaggcaatggcttttggggcccgattatgtctt

SEQ ID NO: 235705 - DNA, 326 bp, Gossypium hirsutum
ttcttcacgcgtccgctttctcattgcatcagagttttcactgtaaaatggcaacttattcgaaagaagctagaagagttaagttctgggttaatggcgattgaaaactgtggttcaagttctgctcaaaacatagaggtcttttctgcgttggttccttccattttagtcaccgtaaatgaatgtcactgtctcgcaagagcatgtgtggatctttcttatagtgggaaactcttgatgcaaagctacctcgatgtaatacttgctaaattcgacaaccatgtgaaggatctttctgggttttacactactgggattttaagcca

SEQ ID NO: 235706 - DNA, 469 bp, Gossypium hirsutum
tttcactcgtccgcggacgcgtggggccacataagccggaaaaattctaaatggctacaggagaatctcacagatatggatacgaaagtcaaacaaatgatcaagctcattgaagaagatgctgattcctttgccaggcgagcagagatgtattacaagaaacggccagagttaatgaaattggttgaagagttttatcgagcataccgtgcattggctgaaagatatgatcatgcaactggggtgcttcgtcaggctcatcggaccatggctgaagtatttccgaaccaagttcccatggtgtttgcagatgactcgccgggaggttttgctccagaggttgatccctgtacacctgagatgacgccacttgtacgagcatatttggagcctgatgagctgcagaaggatgctgtggggatctcttcgcatgctatcaagaggaatgtagcattctcagaagaatctg

SEQ ID NO: 235707 - DNA, 439 bp, Gossypium hirsutum
gggtgtcttcagggaatcaccaacttattttaggtgctgttatacgtcatctagaccacaaaaatgtgtcccatgaccctcagctgaaatctaatatcgtacaagtagcggctgctttagctaggcaaactagatctagaggggtgcttgccgaaactggtttcgttagtgatctatgcaggcatctgagaaaaagtttccaagccactcttgaatcggtagggcagcaagagtcaaacttaaatatcttgcttcaaaattccattgaagactgcttgttggaaatagcaaaagggattgataatgcactacctctgttcaacatgatggcaatatcactcgagaagttgccttcttctggcattgttgctcgtgcaacaattggatcattgatggtccttgctcatatgatttcattagcattaatctcctctcgctc

SEQ ID NO: 235708 - DNA, 419 bp, Gossypium hirsutum
tcgttcacgcgtccgttttatttaattttcttttcgacggatcttagcagctcaaagttgaaaccctaattttcttgaattttttttctcattcgaaaagaaagatgggattatgggaagcttttctcaattggcttcgaagtctcttcttcaagcaagaaatggagctatcgttaataggcctccagaatgctggaaaaacgtccctagttaatgtcattgcaaccggtggatatagtgaagatatgataccaactgtaggatttaatatgaggaaggtaacaaaaggaaatgtcactataaagttatgggatcttgggggtcaaccaaggtttcgaagtatgtgggagagatactgccgcgctgtttcagctattgtatatgtcgtggacgctgctgataatgataacttatctgtc

SEQ ID NO: 235709 - DNA, 279 bp, Gossypium hirsutum
ccttaatgcttacattggttgccattattcagcaaagcagcctactatccacataagctttcgttttctgttgtctataatgaagtggcaaaagcttggttaaaagatttggttgtttatagtttacaatttttgcagtggcacataccaggaagaagcaacagaaatgaggaggactgaactggaccttaatctggaacctatttactcatgccatttgggatgctttgctgcatgaaaatgggtacaattaatttaactatgcttttggttatatgt

SEQ ID NO: 235710 - DNA, 372 bp, Gossypium hirsutum
ttctcgacgagttcttcaaaatccagatttttaaccaaaaacaagaatttcccaggtctaaaaacgttaaatccaatcaaatccaggaactggggtctaaacgtgagtgccccatttagagttgcatccgttgaagaagatgagggaaggaaagagagaaaccatggtattaatggatttgaggaacaagaacaagaggcagggttcgaccctggggcgcctccgccgtttaagctggctgatataagagcggccataccgaagcattgttgggtgaaggatccatggaaatctatgagctacgtggtgagggatgtcgctgtggtgttaggccttgcggctgctgcggtctatgttaacaactggattgtt

SEQ ID NO: 235711 - DNA, 453 bp, Gossypium hirsutum
attaatattaattattaataattattattatgggtaaaattgaatccaacttggtcaacacaccccatttcaatcccttaaaccctcaagagtttagaaaacaagctcatgaaatggtggatttcattgctgattattatcaaaatatcgagagctacccagttttaagtcaggtgcaaccaggctatctccgggctaacttgccgcaaaacgcaccgtctctgcctgaatcccttgaaacgatccttgaggacgttaaaaaccagataatcccagggatgacgcattggttaagccctaatttctttgctttttttccttcaactgttagcactgccggtttccttggtgaaatgctttgtacttgctttaactccgttggtttcaactggattgcttccccggcggcaactgagttggaaatgctggtcatcgattggctggctgacatgc

SEQ ID NO: 235712 - DNA, 387 bp, Gossypium hirsutum
tttgaagctgaggcagccatgcttggtcagccgatgagcatggttttgcctggtgttgttggattccagttatctggaaaactaagaaatggtgtgacagctactgacttggttctgactgtgacacaaatgctgaggaaacatggtgttgttggcaaatttgttgagttttatggggatggtatgggtgaactatcattggctgacagagctaccattgctaatatgtctcctgagtacggtgcaaccatgggattcttccctgttgatcacgtcactctgcaatatctcaaattgactggcagaagtgatgaaacggtggcaatgatagaatcatatctccgtgcaaataatatgtttgttgactatgacgagccccaacaaaaa

SEQ ID NO: 235713 - DNA, 391 bp, Gossypium hirsutum
tttacgcgtccgtatccacatgtgaaggatatatgggtcacttatctgtcgaagtttgtaaagagatatgggaaatcaaaactggaacgagcaagggagctgtttgagcatgctgttgaaacagcacctgctgatttagtaaaacccctgtatcttcaatatgcaaagctggaggaggattacgggctagcaaaacgagctatgaaggtctacgatcaagcgactaaggctgtttcaaatcatgagaagcttggcatgtatgagatttacattgcccgtgcagctgagatctttggtgttccaaaaacaagagaaatttatgagcaggcaatacagtctggccttccagataaagatgtgaagacaatgtgtttaaaatatgcagagttag

SEQ ID NO: 235714 - DNA, 330 bp, Gossypium hirsutum
ccttgtttcatcaaccttcaaaccaaatcaaacataagcaaaatcaacaaatttaagaaaaacccaacatagaacatatattcgtaatatattatacgtcatatatagattttcctgggatttggttttggaaaaatggatcgttatgagatactgaaagatattgggtctgggaactttggtgttgcaaagctggttagggaaaaatggagtggcgacctttatgctgtcaagtatattgaaagaggacccaagatagatgaacatgtgcagagggagattatgaaccataggtctttgaagcatccaaatataattaaattcaaagag

SEQ ID NO: 235715 - DNA, 413 bp, Gossypium hirsutum
gttgtctgcaccaggacctcgaggcgccttgaaaatagtctcttttaattttgcgaggagccgaaatccaaaccccaaagcaaaaagtgcttaacatggatgccgccggcaatcgaagttgtaagttactattatttttctttgctgccataatcccagccctgcaaggtcacatcggagaatatgatgagtattggaaacaacgtgaattggaagctaaagaaaacaccgagcaggcatataaccccaatcctgaggaagttacccagcatgtcaaccaccttgtttccaggtcgctgatgaggctaaatagcacaagacgacatttgagggcaagaaaaaaaggcggtccctgcgatccaaccagccccattgaccagtgctggcgctgtgatcgtaactgggagaaaaac

SEQ ID NO: 235716 - DNA, 446 bp, Gossypium hirsutum
ctcattcgtccgcccacgcgtccgaatttgaccaagtcgacagggaaaagaactgggatgatcaaatattgttcaatggaatcctgtttttcttggctaacaaatacgtccccggggcttcacacttaccactatggagaacggatggtgtgattataaccatgttgctccatgtcggtcctgtggagttcctttactactggtttcatagagctctgcaccatcattatctttactctcgttaccattctcatcaccattcctccattgtcactgagcctatcacttctgtgatacatccatttgcagaaaacatagtatattttgcactgttcgcaataccaatgttgacagttgtgcttactggaactggatctatcatcgccattgctggctacatcacttacatcgacttgatgaacaacatggggcattgcaacttcgag

SEQ ID NO: 235717 - DNA, 408 bp, Gossypium hirsutum
gtttcaggcttagaaaatttggggttttgattgtaatgtgggttttgtgttgagtgctttcctattgccatggattcctcttttgaaggagttgcgctcgatccatcaaaatgtagtaaattgagcatggatgaaaaacgagaacttgtatatgaattatcgaagaggacaagtagagcctctgaaatgctacaatcatggagccgccaagagattttacaagtcctatgtgccgagatggggaaggaaaggaaatataccggtttgactaagcttaaaattattgaaaacttgttgaaaattgtagccgaaaagaattcaggggatcatgaaggtgtgacggatcccgaatcacattcatccctatcaagtggctcgagattatccaaaaggcaaaggaaagctgat

SEQ ID NO: 235718 - DNA, 402 bp, Gossypium hirsutum
taaatcttaaaatagaaaaagatacagaggctttgcagttgttctacgaccataagggattaacaataaaggtttcattggcgctggtacctgaggagatagagagtttggttcaacgtctgagggaaaactctgatgtctttgtgtggtctgtgatggatattccaagggtagatccttaggtaattgtctatagactgaatgtgctccccgagatgaggccaattaagcaaaggaagagaaggttcactccctaggttgtagaagcagtgaggcaaggttcatcaaagaaattgagtatccaaactagatttcgaatgttttcatggtaaagaaagctagttgcaaatggagaatatgtattgattttaccaacctcaataaggcataccctaaggacag

SEQ ID NO: 235719 - DNA, 407 bp, Gossypium hirsutum
ctcacgcgtccggaaaactttagggttgactgataagagatgggcatgtgggatgttggttcatgcattgtttcctgagtcgagttggaaggagaagaaagggaaaggaccggagttttcgaggaatatcggagaaagagcggcggaggttgttgatagatggaaagggcaattggatggtgaaaaagaagggcttacgccgggggaagcggttatgtttttgcatatggtggttggttttgaattgaaagagaggtttgatgaagggtttttgaggaaattggttttggatttttcttcgaggagggatatggctaagcttgctgctgctttggggtttgaggataaaatgggagatattattgatgaactagtaaagaatggcaaagagatcgaggcagtgtact

SEQ ID NO: 235720 - DNA, 455 bp, Gossypium hirsutum
tggacgcgtggggttcttgattgattgatcaagaatcatctaagggtcattaagatgaagtctttgctgtttcaattcatattggtaccatttgttatcttgaactttgtcaacaatgtgaatgccggtatcacgagtagattcattcgagaggagtggccatcggtcgatatccctcttgatcatgaagtatttgcagttcccaaaggatacaatgcacctcaacaagtgcatataacacaagggaactatgacggaaatgctgtaataatctcatggattacatttgatgaaccagggtccagcaaagtacaatatggtaaatctgatacgaactatgaattcagtgcagaagggaaaatgacaaactacaccttttataaatacaattctggctatattcatcatgttctcgttgatggccttgagtatgataccaagtactattacaagac

SEQ ID NO: 235721 - DNA, 410 bp, Gossypium hirsutum
tctcacgcgtccgcccacgcgtccgatagatttcgtttccatggctcatttcttaacttatcttttactctcgtttcttataatctacgactctcttggcctctcgcaatccaaccagttttgtgatgctggggttggatatcctgagtcaacgtgtgggttttcgtcatcatcgtcgtcaaagctgttgattaagggaggaactgtgttgaatgctcaccagcaggaggtagctgatgtttatgttgaagatggcattattgttgctgttaagcctaatataaaggttgatgaggatgtcaccttgcttgatgccactggaaaatatgtcatgccaggaggaattgatcctcacacacacctggctatggagttcatgggtactgagactattgatgacttctttagcg

SEQ ID NO: 235722 - DNA, 426 bp, Gossypium hirsutum
gtttgaccaaattggtgttgtttcagaacttgattcatgaactcataacaccgttgctgatggctttcgggctgtggttcacattgtttgagcttttactcaagttgtttcttatcttagcctttgtgaaaaagggcagtgcgggaattacaagtacttttactcgtacgaaatggcaatcttttgatatccctcttgaccataaagtacttgcaattcctaatggttacaatgctccgcaacaagtgcatattactcaaggtgactatgatggaaaagctgtaatgatatcatgggttactgctgataaacctgggtcttctagagtacagtatggcacatcagagaagaaatatgactttaaagctgatggcacagtggctaattacaccttttacaactataaatctggctatattcatcact

SEQ ID NO: 235723 - DNA, 419 bp, Gossypium hirsutum
ggaagactattcccatcagattgctgaaatgattggattgagaaatgaatctaacttcatacaagctggggtcagaaccatcttggatataggatgtggttatggaagctttggagcacatcttttttccaaacagctcttaaccatgtgcattgcaaattatgagtcatcaggcagtcaagtccaactcactctagaaaggggccttcctgcaatgatcggttctttcaatgcaaaacaattgccatatccatctctttcatttgatatgctgcattgtgcacgctgcggtattgactgggatgaaaaagatggtattttcttgattgaagttgatagagttctaaagcctggtggatactttgtatggacttcacctcttaccaatgttcagagttttcttcgtaacaaagagaagc

SEQ ID NO: 235724 - DNA, 385 bp, Gossypium hirsutum
ccctcgtgtccgcccacgcgtccgcccacgcgtccgcggacgcgtgggcatcaaccaaccataaactgctttttgtctctctattcattcatctctatccccatctccaatttctctcttcttcttttttctttttccaattaaaactttccctaaacccacaataaaacaacaccatgagtcgcttctggactgtgctctccaatcttcatgctttagctgggcctgtggtgatgtcgctgtatcccctatatgcctcagtgatagctatagaaacaccagggaaagaagatgatgaaccacggcttgcttattggatcctatattctttgctaactttaacagagatggtgcttcaatcagcattagagtggataccaatttg

SEQ ID NO: 235725 - DNA, 300 bp, Gossypium hirsutum
cgcccacgcgtccgaaaggccttctcatcatcataatttcaaggctggagccctcaacgtccttcttcgagtctcagcgataataagcaattctccatatattctaatgcttgactgcgacatgtactgcaatgacccaacttcagttaggcaagcaatgtgttattattgcgatccccaaacaccttcttctatagcatttgtgcaattccctcaaacatttcgaaatatatgtcaagatgacatctacgacagccaaattcgacatttattcaagatactttggcacggttttgatgg

SEQ ID NO: 235726 - DNA, 314 bp, Gossypium hirsutum
ttttctttcttttagaattagcgggggtcttctttgggacttgtaatggtgattttcataggctaagtgcccaactgttgggattcaaggaattgcttgggcttttggtggtatgatctttgctcttgtttactgcactgctggcatttcaggtggccatatcaacccggcagtgacttttggactgttcttggcgaggaagctgtcgttgacgagggcaattttctacatggtgatgcagtgtttgggcgccatatgcggggcgggtgtggtgaaaggtttcatggggaagactcattacggtatgttgggcg

SEQ ID NO: 235727 - DNA, 399 bp, Gossypium hirsutum
  unsure (1)..(399): unsure at all n locations
tattcagacacggtgctgaagcattccatctataaagccctcctgcccttttcaccagcaaactaagtagtcatgaatattagtgaacaagaacaggacatcgtcatcgtcggcggtggtatttctggcttggctaccgcccttgctcttcgcaggaaaggaataaagagcatggtgttagagagatcggaaacgctgcgagccgccggcgttggcatcattatgcaaccgaatgggtggcgtgcacttgatcagttgggtgttgccgccaagcttcggcagacttgcactnnaattccatcgggagtatttatatcagttgctgagggcaagtgtcgtgaatcagaattacctcttgggaaaggggaattacgttgtttgaaacggatggagctgatg

SEQ ID NO: 235728 - DNA, 395 bp, Gossypium hirsutum
ttgtttgaatgaacagagaagatcacaagaagaccgaccacgattcccacttctccgaatggaagcttctcatttgtcctcatgactggaaaaatgggaaaggaggagcagtgaccagataccggtttgaaaatcttccgaaaagttcaggtccaggaatctatgagcttgcggtgtgtaaactgccgagtagggaccgccgtggcaagcttgaacctgattcggtggtttatgttggggaggctgaaaatataagagcaagactccaacaatatggccgtgatggtactcatctctgtcgaaaaaatggatttggtgaaaaaggatgtcctttgtttgataaaatttttgcaaggggttgctctattatctacagatgggctcgtatgaaaagt

SEQ ID NO: 235729 - DNA, 449 bp, Gossypium hirsutum
ttattatttgggaaatgctttgaaagatgttggtcgtgttgatgaggcaatacaatgttataataaatgtctcactttgcaacctaatcatccgcaagcacttaccaacctcgggaacatatatatggaatggaacatggttgctgctgctgcttcttattataaggctacgttgtctgttacaactggcttgtctgctccattcaacaaccttgccgtaatctataagcaacagggaaattacgtggaagctatatcatgttacaatgaggtattgcggattgatcccttggcagctgatgggctcgtaaataggggtaacacttacaaggagattggtagagtgactgaagcaattcaagattatattcgtgctattaatatccgcccaaatatggctgaagctcatgcaaatctggcttctgcttataaggatagtggacatgtcg

SEQ ID NO: 235730 - DNA, 339 bp, Gossypium hirsutum
tcgttcacgcgtccgcccacgcgtccgaaagcaaggaaagcttctctgcaaacaccttaattttacaactttgttattgctttgcaaagatgggttcacttgaaaccagtaaaccccacattgtaatcgtcccatttccagcacaaggtcatgttaaccccatgatgctacttgctaagctcttacactctagaggcttcttcataacctttgttaacactgagttcaaccataggcgtttggtcaggtccaaaggccctgactttgttaaaggtctgcctgatttccagttcgaaacaattccggaagggctgacatcgtccgatcgaaatgcaacac

SEQ ID NO: 235731 - DNA, 423 bp, Gossypium hirsutum
ttccacgcgtccgtgttgtttttgaaatccaattgcaaatggccatcttcaagtctcttttgacttccctgcttctttctctgttttttcttcgctttgctgagtcgtccgatccactggtgatcgagaacatggtggaggagaactctttcaatgataagaaaatatattgcggtaggcttgtgctgagagatgcaagttatcgtcaaggcctaacctttgcaagagagcatgtgggacatgttgttctcgttgcaactgtgttcctccgggcacctacgataactatgatgtgtgtccttgctaccgtgacatgaccacccatggcggcagacacaaatgcccatagcctaaaactccacttcatcagcctgtcgtgcgtcaaactcgtagtaaattatacaataagaatgtgatgatgat

SEQ ID NO: 235732 - DNA, 463 bp, Gossypium hirsutum
tttttacgcgtccgcccacgcgtccgctttttctctacttatatacataaaaagggccctgcaattacaagctgcaaaaaattaaattaaaaaaggaaaaccctaatttcggcaatggccagaactgatcaagaagcaatcgagactttcatcaacatcaccggggcatcagaagctgttgccattgaaaagcttgaggagcatggtggtgatctcaatgcagctgtaaatgcacatttcagtgaaggagatagaaacaccacaaggtcaacgtcaactgtagttcctgtagatgacgccatggatatagatgatccaatagaagctgtaccaagcaggccagcctttccacttcttccaccatctagaacaatgaatgcattctcattgcttgatccaaactttcgtagaagcttctttgatggtgtttccgattttacaactcgtgaaccattggttacac

SEQ ID NO: 235733 - DNA, 391 bp, Gossypium hirsutum
ttttctcgtccgcccacgcgtccgaaaaaagtaagatccatggtttccctgcaggtctttgtactagtttaggtgttggtgggcatataacgggaggtgcgtatggttctatgatgagaaaatatggtctcggtgttgataatgttatcgatgctcgaattgtcgatgttaatggacgtgtcctcgatcgagccgctatgggtgaagatcttttttgggcaatccgtggtggtgcaggtggaagctttggcattattcttcaatggaaaatacagctagtaccagtaccatctaccgtgacagtctttactatcaccaagtccttacaacataacagtaccaaaatcttccatcgatggatcgaggttgccgataacctcgacaacgacct

SEQ ID NO: 235734 - DNA, 447 bp, Gossypium hirsutum
ttctttgatacgagtactgatgttgctttcatgggctacctcaataggtggttcagcagtcgagtgcaccaccgtgagagaactaatctcgttctgtgccacctttatcagcaacggttcaccagatccttaccctggtacaccatgttgcgaggctgtcacgaacctctacatgatgactcattccactgacaataggagatcactttgtgggtgcttaatggggcttgttaccgctaacaattctaattccaccgctatcgctacgttgcctggcttttgtggtgtcccgctcggtttcaccatcggccctgataccgactgcaacttcgttccgtgacgatgagtacacaaagtggtggcaatgtggcgttgaaaggagaaggtttgctctaaccattcaacagtttcatatgaattttttgttcaagatttgaacatggaaac

SEQ ID NO: 235735 - DNA, 361 bp, Gossypium hirsutum
ctcctgtcaatatcagtcctggttcagtacagagagtatttggcagcttttgagagcaatgaagtggccaaacagagaatgccaaaggcattattgtcagcattcgataaccgatcttggattccagttacaactattcttttacgtctgtgcaagggttctgggtttggttcttcaaagcatggagaatcttcatcatcatcaattattttccagggactgttgcgtgaagcttgcatctccgatgaagagttgttctcagcttttctcaatcgtctatttaacactctcagctggacaatgactgaattctcagtttccattcgggaaatgcaagaaaaataccaggtattggagtttc

SEQ ID NO: 235736 - DNA, 404 bp, Gossypium hirsutum
ttttctcgtccgccgagacttcacattgggacacagggattcgtggggtagggatccgttcgacgccgagagaacggttctgaacgcaccagtcttggatcatccttcgcagtatgtgattcgggatcaaatcaaaagtttccaagacctgtttggtgaatgggcaagtttcattgccggcttcaatccatctctcgatgttctcccgatcatatgtgatcccagtgcataatgtgacgggatctttcatcaaatcaagagaaataggacatcggaaatgcatcggaacgttgatttccgcatccaaatcttcacacaagcgattgttgttcttcattttgttgttatgggctctgcgatttctccaagataaaatcattgcggagtatttaaagaaacaaatg

SEQ ID NO: 235737 - DNA, 423 bp, Gossypium hirsutum
ttcttgcgtccggattttgattggagcgggaaacaaggtatcaacatggaaagcggggctgcggtggtggagctacaaagaaattcaacaaattttgcaaacatagtagaagagatagtgaagctggaaaagaagatattccccaagcacgaatcacttgctaggtccttcgatcaagagctgagaaagaacaacactggattgctttacatgatggatcttcatggagaggttgtcggctatgtcatgtattcttggccctcttcactttctgcttccataacaaagcttgcagtgaaggagagtcgtagaaggcaaggccatggggaagcattactaaaagcagcaattcataaatgcaggaccagaaacatccatcggatatctcttcatgttgatcctttgagaattcctgccatgggt

SEQ ID NO: 235738 - DNA, 363 bp, Gossypium hirsutum
acgcgtgggcttttttttcaaacccccccattattctctcttgttttcaacacccccctccttttccttcttatctcactttcctttcctccaaaaaaagcatctctgcaattccctaaaaaaaaagggtttcaagtgcctcacaaatgaagaagattgtgctgaagttggatttgcatgatgataaagccaagcacaaggctctaaaaacagtctcgactctttcaggaattgataccattgccatggatatgaaagcacagcaattgacagtgattggaacagttgaccctgtgaatgtggtgagcaaattgcgcaagaactggtcgaccactatagtatcggtagggccagcaaaaccgc

SEQ ID NO: 235739 - DNA, 478 bp, Gossypium hirsutum
gtttgtttagaacaatgaacaacaattcagcaaagagccctatgatcgtctcgttcggcgagatgctaatagacttcgttcctgatgttgccggcgtttccttggctgaatcctacgctttcatcaaagctcccggcggcgcacctgctaacgttgcatgtgccatcgctaagctcggaggcaacgctgccttcattggcaaagtaggagacgatgagttcggtcacatgttggcgaatctgttgaataagagcggagtgaacagcgacgggatctgctctgacaaagatgcgaggactgcgttggcattcgttacgctgaaggcggatgggcaaagggaattcatgttttatcgatcccctaatgcggatatgtctgtgaaagaatcggagttgaaattggatctcattaagcaagccaagatattccattatggatccataagtttgatatcggaaccctgcaaatcagctcacat

SEQ ID NO: 235740 - DNA, 442 bp, Gossypium hirsutum
  unsure (1)..(442): unsure at all n locations
tttcttttctcttctcttcccttttgttctttttttttctcctgagtttactggctctctctgtcaatggacaaggacaagcaccagcaacagctgtctttggcaaagagttccaggcaaagttgcaatgaatggatttttagggatgttccaagtgatatcacaatagaagtaaatggagggacaattgctctacacaagtttcctcttgtctctcgaagtgggcgaatccggaagctagttgaggaacatagggactcagatatctcaagggtggagctcatgaatctacctggtggtgccgagtcatttgagttggcagcaaaattctgttatggcattaactntgagattacacccttaaatgtggctcagctctgttgtgtttcggattacctcgaaatgacagaagaattttcaaaggataatctttacttacatg

SEQ ID NO: 235741 - DNA, 329 bp, Gossypium hirsutum
ttttctactaaaaaaggatcaaaaaccacgtgtgaaattcagtttcctgcctgcctctcttacataaacttggttcttcaaaatactcaaaatcaaagaatgaatttggttctctctactgatgcaaagcctaggctaaagtggacacctgaacttcatcaaagatttgttgatgcagtcaatcaacttggagggccagacaaagcaacaccaaagagtgtgatgagggtcatggggattcctggactcactttgtatcatcttaaaagccatttacagaaatacaggctggggaaaagccttgggaataatacagattacaaagagat

SEQ ID NO: 235742 - DNA, 438 bp, Gossypium hirsutum
tttaaggtctctcgccacctatttagatggagagaaagaagtggcatatgcagattactatgaacgggccctcacaaatggtgtactaggcatccaaaggggcacagaacctggagtgatgatttacatgctaccacaaggtcgtggagtctcaaaggctgtaagctaccacaagtggggaacaccatttaattcattttggtgctgctatggtacaggaattgaatcgttttccaagttaggagattctatatatttcgaagaggaagggagcatccctagtctttacattatccaatatgtatcaagtactctagattggaaatccggaaaaattgtgctcaactagaaagttattcctgttgtttcttcagatccataccttcgtgtgacgttgacttcctcttaaaagagggatcggagcaattatctactttg

SEQ ID NO: 235743 - DNA, 356 bp, Gossypium hirsutum
ttccacgcgtccggaagaagaagaagaagaaagatgatggaaattgaggaagtaagcaattatgaggcattgccattgctctcattgaatcatgtatcattgttgtgtagatcagttttggattctatgaggttctatgaagaaatcttgggctttgttctcatcaaacgcccctcttctttcaaattcaatggagcttggttgtataactatggcattgggatacacttaatcgagaacccatccattgatgatttcgacaccattgtcgaaccacggccaatcaatcccaaggataatcacatattattccaagtgtaggatgtggggcttgtgacgaggaggcttgaagacat

SEQ ID NO: 235744 - DNA, 466 bp, Gossypium hirsutum
  unsure (1)..(466): unsure at all n locations
ttctcgcgtncgcccacgcgtccgcccacgcgtgcgatagaatccccatcaatgtgggcaattttcccccttcaggatttgttagctcttaaggaagagtacatgactcgccctgctacagaggaaacgataaatgacccaacaaatccaaagcactattgcagataccgtgttcatgtaacaatggagtccttgataaaggataaagagttaaaaacgaccattaaagatcttatacaagggactggacgatcatatcctcacattggagaagctgaaaggcagttgagtcaagaaacagcagccttagctctggggaagcagtagcaccatgtgagtggtccagatataatttgtagtcgagtttcacagaaaggacatgttggtaatcctttacaaagcgaaggttgttcgtgtgtaagctcattactttggaattccagttcactaaataacaagcaaggga

SEQ ID NO: 235745 - DNA, 415 bp, Gossypium hirsutum
ttaagatcatgaacccagaaaacgaacatgatccacaaaataactttaaattcaaactcaaagctttgaaccttttgtttctagcgtttttggccatgatcttagatcctttttgcacgttttcaattcacgatttggttcagataatccgccatgataacttaaaaacaatcacaatatcctcattttctctcattttcttagtaaccctttacttcagaaaccgtcgtagaaaagtttacctactgaatttcgcatgttataagcctaaaccagatcaaatatgcagcaaagaacgtataatgaaaatatttgcaggcactgggaaattcacagaagagagcttagcattccaaaagaaaatcatggagaaatcaggtgttggtgataagacatgtgttccgagagctatgat

SEQ ID NO: 235746 - DNA, 147 bp, Gossypium hirsutum
tttacgcgtgggctaggtgcaatcatgtatgagatgctcataggctatcctccattttgttctgatgatcctcggataacatgccgcaagattgtcaactggaggacttgcttgaaattccctgaggaaccaaaaatatcccccgag

SEQ ID NO: 235747 - DNA, 168 bp, Gossypium hirsutum
tttgaatgaatatgcatataatatacatggggttggggtttgggttcgctatgtagatccagatgcggaagtggtttctttgtcgcctaaaacgctgctagaatcggaccgatacgtgtgtgagatctgcaatcaaggattccagggagaccaaaacctacagatgca

SEQ ID NO: 235748 - DNA, 338 bp, Gossypium hirsutum
tgtggtggtagctatggggttgctggttggagcgtttcttatggtggctattaaaaaggtgttggtccttggagctgtcggttcggtggtggtgccaatggggctgggattagcttggaattgcatttggggaaggaaaggcttgctggggttcattaggaaatacccagattctgagcttaaaggagctgttgatggccaatatgtgaaggttactgggattgtcacctgtggccgcattcctttggagtaatcttaccaaaaggtggctagatgtgtttatgtgtccacagaattgtacgagtataaaggatggggcgggaaaagttctgaaccct

SEQ ID NO: 235749 - DNA, 443 bp, Gossypium hirsutum
ttgtttgggaattgcagccttggattgccaaagatgacgaccaaggtcagaagatgtggagaatcaaccagcgaattgtaaaattgatagtcgagctgatgagaaatcatgatagcgcagaatcattggtcattgtggcaagtgcttctgatctacttctacgtgccacagatggtatgcttgttgatggggaagcttgtactttaccacaactggagctgctggaagcaacagctagagcagttcagccggtactcgagtggggagaatcaggactggcagtagcagatggactttcaaacctgttaaagtgtcgtctaccagctacgactcgatgcctttctcatccaagcgcacatgttcgagctctcagcacatcagtccttcgcaatattttgcatataggttcaatcaattcaaaatctaaggtggaaatatatggt

SEQ ID NO: 235750 - DNA, 388 bp, Gossypium hirsutum
tcgtatcactttacataccattaccacacctcttttttcttacataacatatctgttccattcggtagtaggttgaagaagaaatggcccttcttacagcttcagacactttcgttctttatttcctatgtttcatgttgtgttcatttggtatcagcaatggtggaataactggtaactttgtaagaaaaaagtattcacctgatatgccccttgacagtgatgttttccaggttccttctggttacaatgcaccccaacaggtgcatattacacaaggggatatggatggtagtggcagtgatcatctcatggataacccctgatgaacctggttccaacatggtttactattggcctgaaaatagtaaccataagaacaaagctg

SEQ ID NO: 235751 - DNA, 428 bp, Gossypium hirsutum
tctttaaacaccagattgtttcctaaacgatccggttcggttaaatcggatccgcccgtcattgaaccttcttcgcctaaagtttcttgcatgggaagagtcagatcgaaacgagaccgtaatcgccgaattaaaaagaaccgccaaaaatcagctggaatcgaaacagttaaaaagaaaacaacgagggcagggagcggtttcttctcgagtttccgtgctattttccggtgcaatggtaaagcacgtgagtcacacgctctgccattaacactgtcgccgccgcgatacagtgacattaggtctcgtttgccgccggatgatggtgatgacgtattgaatgtagctcctgaaatagctgagagtggaccggttgcagagccggtcagtctaggtggaatgaagcggttctcgtcgggtaggagatc

SEQ ID NO: 235752 - DNA, 399 bp, Gossypium hirsutum
ttctctcgtccgtgctgatcctacagtattgtcggtgttggtcttcttggcactttcacatatcgtcacaaatataagataaatcaagtcagcttctccagttctactccttcttcttactattgtcgtgcaacactatcaacaacgatggaggaagtgaagccaacatttgattcagacaaagctgctgtactagttaacgagctcaggaaaacctttaattccggcaagacaaagagctatgaatggagaatatcacaattggaaagcatatcaaagatgattgatgaaaaggagaaggaaattgtagaagcactacagaaggacctctcaaaacctgaacttgaagcgttcttatcagaaattttgatggcaagatcctcatgtaagttggctctg

SEQ ID NO: 235753 - DNA, 400 bp, Gossypium hirsutum
ttttcacgcgtccggggctatggacctaatgaagtgcttattgcaattattggaagtcaatttatgtacagaggcttgtggttggagcatgcacttattttacaggctttattgccgctctttgccgacttttcttctgataatgattctatttcccaccctaaaatcattgttttaagcagtgattcagcaagcaactacagcatggctgttgagaaaattgctcttaacttaagatatcccagtggggtggtgaagcatgtagctgttcatggagatgttgatggtgttctgagcatgactgaccttgtgatatatggctcgtttcttgaggagccttcatttccagaaattttgataaaagccatgagccatgggaaaccaatcatagcaccagatc

SEQ ID NO: 235754 - DNA, 368 bp, Gossypium hirsutum
cttataccatcatgcagatattaggagacactttgaagcttttgcttgggcttatatttctcaacaatgcagaccaagagatgtttgggaaggaattctgctgaaattgatcaccccatcaaaggaggagaaggaagaaattttgagaatgagggatgaggaattagcaaagaagctttacaaagttcagcaagagaagaaatgtttgattgtgattgatgatatttggaccagtgaggcgtgggagactttattccctgctttccctgatgaaacaactgttggtagcaaaatattgctcacaacccgcaataggaaagtagctttggatgctgatcagaatggattccttcatgaaccagagtgtt

SEQ ID NO: 235755 - DNA, 411 bp, Gossypium hirsutum
cttttcgttttctctttattttgggatttgttagatttagaaggaaaattcagtattgcaggagagttattgaaatcaagagatgttagaacagttgctgatatttactaggggaggattaatcctctggacatgtaaagaacttgggaatgctcttaaaggatcaccaattgacaccttaatccggtcttgtcttttggaggaacgctctggtgcagcatcatataactatgatgccccaggtgcttcttataccctcaagtggaccttccataatgagcttggccttgtatttgttgctgtttatcagcgtattctccatcttctgtatgtggatgatcttcttgcactggtcaggcgtgagttctctgagatttatgatccgaaaatgactgtttataatgattttga

SEQ ID NO: 235756 - DNA, 379 bp, Gossypium hirsutum
  unsure (1)..(379): unsure at all n locations
agaacattcactcttttccttctcaagtgccgggaatttcaacgccggctgctaactccggctcggggatgggaattccggtcaggcaaagatggcgtcggagcaaagatggattccatggatttagagagagagaaagggattactatccaatctgctgccacgtattgcacctggaaggattaccagattaatattatcgatacgcctggtcatgttgattttacgattgaagtggagagggcgctgcgtgttcttgacggtgccattttagttttgtgtagtgttggtnggtgtacaaagtcagtcaattactggttgatcgacaaatgagaagatatgaggttccgagactcgcctttattaacaagcttgatag

SEQ ID NO: 235757 - DNA, 440 bp, Gossypium hirsutum
aaaggttctagttcaagtggttcattggaatctgaaaaagttgtgcagttgaacaaccatactgtatctcgaatggaaccgagctcttgtccgaatccagctttgaatatgtgcgctggcacacattatgctgaagccaaacaaagtttcaccaatactgaagttagtgaatgtgcaaacagtgttgaaaagtctggtgaaagcggtgaagtgagtaattccttcgatttaggtgagagtaggaagacaagcctctatagagagagcactggtagtgatgttagcgatgaaagcagctcgagttttctaagcagtacagtgtataagccccataaagcaaatgatataagatgggaagcaattcaagccgttcgatctcagaagggagatttggacttcaagcacttcagggtgctgaagagactcggatgtggggatat

SEQ ID NO: 235758 - DNA, 428 bp, Gossypium hirsutum
gcgattcctcgattaaatcccattgctccgaaatgagcacgggcgaccttcttaccatcgatcctttagagctcaagtttccttttgagctgaggaaacagatctcatgttctcttcaattgtcgaataaaactgataatcatgtagctttcaaggtgaaaacaacaaatccaaaaaagtactgtgttcgtcccaatacggggatcgtcttgcctcgatctacatgcgaagttatagttaccatgcaagcacaaaaggaggcccctgctgatatgcaatgcaaggacaaattcctccttcaaagtgtaaaagcccctgatggtgttaccgcaaaggatataactgcagaaatgttcaacagagaagctgggaatgtggctgaggaatgcaagttgagagtggtttatgttttttcgcatcaacaaact

SEQ ID NO: 235759 - DNA, 346 bp, Gossypium hirsutum
  unsure (1)..(346): unsure at all n locations
cccacgcgtccggaagaatcgaaagttaaactaagcaacattagcttcaagaacatccgtggcacatctgcgcttccagaagctgtcaagtttatttgcagcggttcttcgccatgtcaaaatgtggaacttgcagacattgatattaagcacaccggacctgaacccgcaacatcccaatgtttgaatgtcaagcctaaaactagtggcaaattaaacccgactccatgttccagccctgtcccaaaaaccctaagtgccaccgcttaaaccataccaacagattcaatgcaattgtaattaatatatttattcatattacataaaaacagttctttntcatttt

SEQ ID NO: 235760 - DNA, 497 bp, Gossypium hirsutum
cccactcgtccgaactacaataaaatacaggtttaggaagaaatgggttctctagtggggcatgttctcccaggtttagccttctttttacttggtttttggcatctctttaatcacatcaagctccattctctccatccgaatccctacacatctcccacatggttccccacaccaaaatcaaggcacttagagctgttcctcatcatggtagcttcctccatctccatctccatggagctctttatcagccctgcaaggcaccaacctttggatcctgatggaaccatcccatcaactcatctccacaactttgagcactcttccatatctatgactttctttacttatgcagctttcgctattatccttgataaaattagccccaaagctaagcatagcctaacacagtttattgcagccgtagcttttgcccagcagctcctcctcttccactttcattcagctgatcacatgggagtggagggtcagtatca

SEQ ID NO: 235761 - DNA, 439 bp, Gossypium hirsutum
aagttgggaagctcttggcaaggaagagaggagaaagaaagagaagctcttgatgcaaattggttcatttcattgaaacacacgctgtggaatttcaagaacagctccattttgcacttgctttcaccataactattgccatattagtggtcaccatccttgttaaaggcaacaagagacaaaagaggaggcccccagagccagatggggcattaccttttattggtcatcttcatctttttggaaaaaaccagctgctacacaggatatttgcagacatggctgacaagcatggaccggccttcttgatccgtctcggggttcgtcgagcacttgtggtgaataactgggaagttgcaaaagaatgtttcacgaccaacgataaggtcttctccacacgtccaaagtccatagctgtaaagtatatgggatatgacta

SEQ ID NO: 235762 - DNA, 477 bp, Gossypium hirsutum
gggattttcgagaggcattggggtatcttcaattacgatggaagtatcaaatatccgttggatttgggaaaaggcaaagcactcacccaagccaaaggcgtcaagtacttggccaggcaatggtgcgtgttatcgccttcagcgggcgtttcggaccccaacgcgttggctcaaagcattagccaagcttgccagtacgccgattgcacaagcattggccccggatcctcgtgttctaatctagacccccaacgcaacgcttcatatgcgttcaatatgtattatcaaaccatggatcaaaggaaagatgcatgttcgtttaataacttatcaacggttacaaccgtggatccatctcagccaccttgtcgtttcgagatcatgatcgacatcgggaaacacgaactctctgtgtctaacaaagttccagcagccggatttggaagcctgctacttgtatctctgatgctggtattg

SEQ ID NO: 235763 - DNA, 411 bp, Gossypium hirsutum
caagacctagaatttgaatctgaagaacatgatagaaatgatgaggaagatgaagaagatgatgatggtggttatgggagtgagaacggggaagagggaagtcctaaaaatttggattcggaggttgtcgccgaaaataccgaggttaagaatgtgaagttacccaatctaacggttaaggaaaagaaagagctggcttcttacgctcatggtttagggaagaccttgcagtgtcaactggtgggcaaatctggtgttactgataatgtcattttctcttttcttgagactcttgaagccaatgagcttctgaagatcaaaattcaccggacctgtcctggagagctagaggatgtggtcagcatgagaaagaaagcagttggctttgaacaaaaggacctaacacaacct

SEQ ID NO: 235764 - DNA, 414 bp, Gossypium hirsutum
tgaaaatatctctctcttcactttcttctcttttcaacgcagggtgaaaggcggggaggccgtagacaatctctcttgcgctcttctcgtagaatggatcagattcaacatccaactgtcatgcagaaggtagctggccagctcctttcttctagcatttcccgagattttcaagggtatgatgaccctatctctgaatatcagaccattcctctgaataagattgaagactttggtgtgcattgtaaacagtattatgcattggacatcacttatttcaaatcctcacttgattgtcacctcctggatctgttatggaataagtactgggtaaacaccctttcttcttcacctctcttgggtaatggagattatgttgcaggacaaatttcagatttagctgaaaagctggag

SEQ ID NO: 235765 - DNA, 387 bp, Gossypium hirsutum
atttgttgcaaaggatgcttgtttttgacccatctaagagaattaccgtcacagaagctctcctacacccatacatgtcagggctatatgatccgaggtgcaatccacctgcccaagtcccgattgatctcgacatagacgagaacatgagagaagagatgattagggagatgatgtgggctgagatgcttcattaccacccagaggctgcatctgcaaatgcttagatgacattgttttaagctatgctgggttctgttactttgttataatgtttgtttcgcaaccagtattattatttaacctagaagaacaccattgaaacttctgcatgccatggaactttgcattgagatttttagttttgattggctcgtgttaacctgt

SEQ ID NO: 235766 - DNA, 422 bp, Gossypium hirsutum
cccactcgtccgcggacgcgtgggggaaaatccaaaatgagtgaggtgttcgaaggttatgaacgccaatactgcgagctctccgacaatttgacccgcagctgcacctccgccagcgttcttcatggagagctgaagaagcagaaactttctgaaataaaagagggactggatgaagctgatgctttgattcggaaaatggaccttgaagcaaggagtttgcagccaagcataaaggccacacttcttgctaaattaagggaatataaacattatctgaacaacttgaagactgatgttaaaagaattacttcaaccgatacaaatcaggccgcccgagacgagttgttggagtcaggaatcgatggaacaatgacggtctctgctgatcaaaaaggcagattattgatgtcaacagagag

SEQ ID NO: 235767 - DNA, 399 bp, Gossypium hirsutum
cagttttaaaagatacctatcttaatttccttttgattttcaatggcgggtatgctagctggtgttgaatgtgctcgaagaagacggttccatcaaagcggtggttcatctgattcggttcttgggttcacgaggagaccctctttttgtttgtatacaagcaaccatgaatcccttcatagctctgttttttctcaggtaattcggtttcttttttttgttttatttcccagatttttatagtgattttaaactttgggtttatttggggaaattaattgaagcagaggagggtactaattgaagggtatgaagatgatgatgagaagcttggtgaagtagcaagagaagctaaggaaagattagatgaaaggttgagatcacaaagaaaatcagaac

SEQ ID NO: 235768 - DNA, 445 bp, Gossypium hirsutum
cggacgcgtgggctttaccctttttataaccaaacagctgtttcagtttcagttccaccacctccattaactcctcctgcaataactccaggaaaaagcaagaagacattgccaataattattgcaattattgctccaattgctgtctctgttcttctcttgttattgggttgttgtttactaaaaaggagagcaaggaggaagtacaaagctgtagaagaagaaaatgcaaaagatgatatatccacaattgagtccttgcaatatgattttagcactatagaagttgccacaaacaacttctcaaatagcaacaagctaggtgaaggtggtttcggagaagtatacaagggtacacttcctaatggacaagaaatagctgttaaaaggctatcaagaagttcagggcagggtattgaagaatttaaaaatgaagctctattag

SEQ ID NO: 235769 - DNA, 394 bp, Gossypium hirsutum
gtttattgtaacaatgaattttgtgctgctgcacatgacggtaaactcaaagattgtgagcctgatcttcaatgtgaatactatgttacttacggtgacgggacctcaaatggtggatactttgtaaaagataccatagaacttcagcaagtgactggtaaccttcaaacttcacccacaaacgggagtatagtattcgggtgcgggtctaaacgagctggtcagacaactacatcaagtgaatcagttgatggaatcattggatttggacaagcaaattcatccatgatttcacaactagctcaaaacggagtagtgaaaaataaattcgcacattttttggataatgtggacggaggtggaatctttgcaattggtgaagtggtaggacctc

SEQ ID NO: 235770 - DNA, 412 bp, Gossypium hirsutum
atccttgctaattattgaagaagattaagaaattctgtcttcgtttgatctattggagtaatcaatttggtaaatcccccaagctttaagggagttgttttgggggcaataaatattgaatttgaaaaaaatcgagtgaaaacagcttagattaagctcttttgggggcatttggtattgttgaagagatagagagtagcttttgttttcttggcttgagatggatcgtgtaattggtggtaagttcaagcttggaagaaagattgggagtggatcttttggagagctttatttaggggtaaatgtgcaaactggagaggaagttgctgtcaaactggaatctgtgaagaccaagcatccacagcttcattatgagtcaaaattgtatatgcttcttcaaggaggaactggt

SEQ ID NO: 235771 - DNA, 466 bp, Gossypium hirsutum
cgaggcctgaagaaaagtcctggatgtagttggattgaggtggggaacgggattcatactttcatggcaagagacaagtgtcatccagagtgtcatcatataaccaagaaattggatcaaatcacggaaaagctggagaaggaaggaggttatatagctcaaacaaagtttgttttgcacaatgtggaggaaaatgagaaagttaagatgctatatgggcacagtgaaagattagccattgcatatggtctgctcaagactgctgagcaaacccccattcgggttacaaagaatctacgtgtctgtggtgattgccatactttctgtaagttagtctctaaactctttggacgggaactacttgtgagggatgccaatagatttcaccattttgaggatggggcttgttcttgtggggatttctggtgaatgttacatccaattatttgaattggacttttcgaca

SEQ ID NO: 235772 - DNA, 443 bp, Gossypium hirsutum
gtagtaatgtcaaccctttgtacatttcttttctcagttctactctttgcctcacagccccttatcctccccactgctgccgacggccggtggcagctgctacaaaaaagcattggcatctcatccatgcacatgcaactccttaaaaatgaccgtgttgttatgtatgataggactgatttcggcccatccactctgccattggcaagtgggaaatgccacaatgacccaaccaacaccgctgtccaagtagattgtacggcgcattcagttgagtacgatgttttgagcaacaagttcagggctcttactgtccgaagctgttacgacgaggggaaacgtacagccgaaaccctgacaatggactatcacagaggagctggagttgaggttaggattgcccggattttcaatacttacggacctcgtatgtgcatcgatga

SEQ ID NO: 235773 - DNA, 237 bp, Gossypium hirsutum
caaaacttggtccagagttcaacaatagttgctcctgggtatgttcctagtgaacttgacgagagaattttgttagaactcccttcatccatggttcggccactgagggttatacgaggaacctttcaagtaacctcaaagaaaataaattttgtagttgataaaactgaatgcaacatatcgatggatggttcagaagacaactctgaagcaaaaaatgatgaaaaagaccgtagt

SEQ ID NO: 235774 - DNA, 423 bp, Gossypium hirsutum
gggcggacgcgtgggaaaaaattagaaggtgtgggaggcgttgcttggaccgaagaagaagatcagttgctcaagaaatgtatagagcgttatggagaagggaagtggcatcgggtacctcttttggctggtctaaacaggtgtcgtaaaagctgtagactgagatggctaaactacctacgcccaaacatcaaaagaggaacctttgcagaagatgaagttcagctcatcattaagcttcacaagctcctcggaaacaaatggtcattgatagctgggagactcccaggaagaacagcaaatgatgtaaagaattattggaactgccacctgagtaaaaagctcaacaatgctcaagaaaccgaagaggaatatcaaaatggcatgaaaatggaaaccctaaaaccccagccacgatgcatt

SEQ ID NO: 235775 - DNA, 443 bp, Gossypium hirsutum
gtttaagtggtaaaaaagcaggttcatcaacacggggaatacttggagaaactgaagggcagaggctttgtgaatcgttcagggaaaatcagtatcctgatcgagccacgaaagagagattaggtaaagatctcgatatgactttccggcaggtcagcaaatggtttgaaaatgctcgttggagcttcaatcatccaacatctaatcaggaaaccacagctaaaagagttgcagaaaatgccataacctctgttgttccgaagaaaaactgaatgatcggcatcgtagagagggagaaagagagaaatcaaaattggtgaaatggagaggtattgaggcagttgatttatatagctttaaatttaatgaacattattggataggaatagaaggaactttgttgctcgaggaaaatttgcagtgaaatgaagttgtgaccctta

SEQ ID NO: 235776 - DNA, 436 bp, Gossypium hirsutum
gtttttctacaatcagacccctttcttaatgaacttgcgagcatgtttgagcgaagcactgagacaggctctgtttgggttactcttaaacgatcatctttaaaatcgaaggctcaaaggaacaaaatgaagactgctgaacaacccattgaatatcgatgccttgttcgtgcaactaatggaaaaaagacaatttctacttcggtgggagcaaaggatcaccagcgtttccaagcttcatatgccaccattcttaaggcccacatgactgccttgaagaaaagggagagaaaggacaggaaaaaggctgcagaggataagaaagaaggtggttcaaagaagccgaaaagggcttgaagggctttactctttccattgccttcaagctgtcatcatcacctagaaaatgcttaggttctttgttttttctttaaaa

SEQ ID NO: 235777 - DNA, 447 bp, Gossypium hirsutum
ataacattgcggggatacctttcggttatcgtggattctcagacaaaggcttggctgaaatgccgctatcgcggaaagtagtccaaaatattcacctttcaggtggaagcttgttaggagtttcacgtggaggaccctctgtcagtgatattgtctctagtatggaggaaagaggaatcaacatgctttttgtgctaggtggaaatggtactcatgctggggctaatgctattcacgatgagtgccgcaaaagaaagttgaaagtggctgtagttggtgtgccaaaaactattgacaatgacattctgttgatggacaaaacctttggttttgatactgctgttgaagaagcacaacgagcgatcaactctgcatacattgaggcacatagtgcttaccatggaatcggtgtcgtgaaattgatgggtcgtagtagtggtttcatag

SEQ ID NO: 235778 - DNA, 465 bp, Gossypium hirsutum
ccaatatccatcattttttcttgctgggtatatctcatatctctcttagtaatttgcgttggagggccaggcagcagcaatggagctgttctacttcgtcgtgttcggggcattgggagcggtggtggccgcattagagctaagcaagaccagcaaggaccgaaccaacacgtcccctgctttcaattccttcaagaacaattaccttcttgtctactctctcatgatggctggagactggcttcagggtccatatgtttactatctgtacagtacatatggatttggaaaaggggagatcggacagctttttattgctggttttggctcttccatgttgtttgggacaattgttggatctctagctgacaaacagggcaggaggagggcatgcgttacatactgcataacttacatacttagctgcatcaccaagcattctcctgaatacaaagttttgatgat

SEQ ID NO: 235779 - DNA, 362 bp, Gossypium hirsutum
tgcttctcccttctccctttctctctcggtgacccctttctcttctgttttacttggggtcgcctaaaatcaccaaaaaaatttaaaaaaattgaaaaaacctcaaaattcctattgtatttctaaattattaatcaaatttaatccctacaaatagtttttttttttataaaacttttgaatatatttttcaaccatgtcggagatggcgaacacggatcccgaagggattgacgccgtgcggatgacgtggaacgtttggccacgcaccaaagtcgaagctagcaagtgcgtgatcccgttggcggctaccatcgctccgatccgtcctcacccggacatcccgacgctcccttacgcgc

SEQ ID NO: 235780 - DNA, 460 bp, Gossypium hirsutum
gtctcaacactaagcaggttttgatcaatatcaggtgcatataaaatatcagtaatgaacttagtacctgaacaacttataatggctatatttcttttgactgcagtatagtcaccgttcccaattctgaccttcttgaactcggtactctttaggtttttgaacaactttttgtcatgtgtcatatgattagtgaaaccattatcaatgagccagcttttacttgtttcgtaactagtgaaataagttacaacaaaaagctaatcttcttcttcttgatctgccacttgcacttcatctccttattgctgatttttgtacttacaaataacaacttcatgtctcatttggttacacttgttgcactttgcatctagtcttctctaacacttaaatggagggtgacatttcttgccgcaatgttgacatagaggataatccttatttactcctaatcttc

SEQ ID NO: 235781 - DNA, 363 bp, Gossypium hirsutum
tgctcgttgtgattattggaatttgagtgatgcagcaatgagacatgagaatgagacttgtttgctatatgccgatcaattgaaacaaagatgtgtggagcagtttatagaagggagtttgaggattgaacagcttgctgatgttgatgggttatttgatttggtttcgaaagtgattggtgcagctgagcctgctaggatatacaatgtcaatctctcgattttcacttcgatcccggatttttggagtattggtcaggtttttcctatagtcccaattcaccgattggatgaaaagcccgaagtgaggggagtattgtctgatttaacttgtgatagtgatgggaagattgataagttcat

SEQ ID NO: 235782 - DNA, 467 bp, Gossypium hirsutum
ttcacgcgtccgcccacgcgtccgggaaattaaaaagggaaagaaagcagggaaatgcttaatctatggaatcttctcttcctctcctttgttcatttctcatcattcagtgttactttgggtggggtgtcgggaaacccatttactccaaaatcctccttcattcgctattggaacaaagagctccacaaggaaatccccaacacccattttttactctctaaagtttcaccattaactgccgtcgactccgccagtttctcgaaactcgccgcccacaacaacctcgcttctcgtcttccttccttttgttcctccgctaaactcttttgcttccccgacttatcgcccagtctcgagaaacattccaaagacgttaacttcgccgtctacctcgacaggaacttcactaattacgactccgatcgactcgctggactcgactccttcaagaactactctgaaaa

SEQ ID NO: 235783 - DNA, 396 bp, Gossypium hirsutum
ggctggactcgctgctagtccggctataaagttcaccgagtctcaggtaaaatgttatatgcatcagttgttatcggggctcgaacattgtcacaaccgacatgtattgcatcgtgatattaaggggtcgaatcttcttattgacaatggtggtgttcttaagatagcggattttggtttagcttcatttttcgatcctaatcacaagcagccaatgactagtagggtggttacactttggtatcgacctccagagctccttcttggtgccacagattatggtgttggtgtggatctctggagtgctggttgcattttagctgagttattagctggaaggcccatcatgcctggtcgcaccgaggtggagcaattacacaagatattcaaactatg

SEQ ID NO: 235784 - DNA, 473 bp, Gossypium hirsutum
gtttcttcttctgctaatagctctctctgctttgaacctttgtaagtgaaaaaaaaaataaaaaataaagttaaatgaagcttcaaaaatggcgttaatggcaacgatacgagcccaattatctaggttcttaagccggacactaacacgatcgggatttatagccttcaacggctcgattcggcagccagaagcaccaccggttcaccgcaacttctcctcctccgccgcagccgcagcggtgttgcctcaaagagagccgatgggagttaaagaatacgaggattatagacgatctctttacggagatatcacacataaagctctccttgttgatgctgctggaaccctcttagctccatctcagcctatggcacagatttatagagagattggtgagaaatatggagttcagtactctgaagctgagatattgaatagatatcgaagggcttatgctcaaccatggggta

SEQ ID NO: 235785 - DNA, 292 bp, Gossypium hirsutum
ttcttttacttctttggagaagaaaggacctagggttgctgacacagtcattggggaggggaacactacagcatggaaaatgtgtggtcttgacaagagtacttgctttacggttttatttgatgtttcatccactgacaaattaaatgctcttggagttgcaaatccacagctctatttgcagcttcttacaagctatcaagaccctgagggtaaaacaatgctccgagttactactgtgactagacaatgggtagacagtgctgttagttctgaggaattaatacaaggc

SEQ ID NO: 235786 - DNA, 361 bp, Gossypium hirsutum
ctttaccctaaccaactccaagtgtcgagccacccagctcactattaacaatggcgcatcatcgtggctccgaccctgaaaccgaaccaaacacgcaactttacaacccataccaagacttgaaccttcaagttcccataaccaacctgtacaagctcccaacctctccggagttcctctttcctgaggaatccctccaccaacgccgctcttggggagaaaatctgaccttttacaccggttccgcttatttaggtggctctgtatccggcgcagccgtcgggctcttctcggttctcaagaacttcgagcaaggcgatactttgaagctgaagatcaaccggatcttgaatagttcggg

SEQ ID NO: 235787 - DNA, 414 bp, Gossypium hirsutum
ttcacgcgtccgcggacgcgtgggcggacgcgtggggtgaaggcgaggatgagcatgatgttgtctggttttggctggagaaaggcaaaccacatgagtgtccagtttgctcacagtattttgtgctggaagttgtgggacctggaggacctccagacggacatggcgatgatgatcatcattaattgcaactttgaatttttttttcctgttggaataaaattgcagaagacgattaaatgatgttccaatatacaatgcaccttcaaatgttcaaaagctgttatctgtcgtttggttctgagatggtattctctgtttctttatggtactttagactgatacacaggtatgggaatttttttggtaaacttaaaatgcatcgccaaataaataaatcttttccattcattc

SEQ ID NO: 235788 - DNA, 411 bp, Gossypium hirsutum
ttcttattaggaaatgttgttggggaacgccatagccggtgctcgtataatcatggcgtcgtcatccaaccacatcgtcttcgaacctgatgacatccctttcggctcttttgagtggttcgtctttgcgggagtttcctgcttgcttgtgctcttcgccggcataatgtccggccttaccttgggcttgatgtctctgggcctcgttgacctcgaaattctttagagaagcggcactatcaccgagatgaagcaagctgctgttatcttaccagttcttaaaaagcagcatcagcttctcgtaactctgcttctctgtaacgcttgtgccatggaggctcttcctataacccttgataaaatttttcacccctttgttgcagtgtcgctgtctgttacttttgttctggc

SEQ ID NO: 235789 - DNA, 514 bp, Gossypium hirsutum
gaattttatttttccctctgttttgaatcagaatacaacggatcaaggagaagcaatgcaagaaatcaatcatccatatggattcaacgatggtgcgaatattgggaattcggtatcacagctgatattgtcaggaggctcaaataccttagattcaatcttctctcgttgcgagccatcaatagcggccgtcggcaccaactctgtttatgagccattaggctcttcagtttatcttcggcagagagatctccttctaaaattctgtcaaggaaacgcttcattttcacgcaactccgtagcggatcagcttcgaaagagccaaaacaccgcatcgacgagcaactgcgtcagtcctcaaaagacgaagctgtacaggggcgtgaggcagagacagtggggtaaatgggtggccgaaattcggctcccacaaaacagagtgcgggtctggttaggcacttacgaaacgcccgagacggcagcttatgcatacgatcgtgcggcgtataagctc

SEQ ID NO: 235790 - DNA, 503 bp, Gossypium hirsutum
ttctttgacgcgtgggtagatcgcgagcggcccccttttttttttatttcttatatagggtcgggcactgttgaacgcaattggaaatttagggcttactggagcttatgcagaggccttgagcaagcttggacacaacctagaaaatatagcttcccaggagcctgatgctgccctagggaatggaggccttggtcgacttgcctcctgttttctggattctttggcaacattgaattatccagcatggggttatgggcttagatataggtatggcttatttaaacagcgtattacaaaggatgggcaagaagaagttgctgaaaattggcttgagatgagcaatccttgggaaattgtgagaaatgatgttgtatatcctatcaagttttatggcaaagttcttacagattcagatggaaagaaacactggactggaggagaggatatacaggctgttgcttatgatgtcccaataccaggatatgaaactaaaaccacga

SEQ ID NO: 235791 - DNA, 532 bp, Gossypium hirsutum
cccacgcgtccggtcggatcttcttcaagtaatttcaagctctacgatcaattcgaattgctggaatatgaagataggttagtgttcaaatcccccgaatctcccgatcaaggcttttcgatttgccgtcgtcaaggaaacatcgaacccctatctgatgaatcttcttctggaaaaccatccaaaacctctaccatttatggcgtggctggaacaattagattgcttgcaggaacatatgtacttgtaataacttcaagaaaggaagttgggagttttctaggtttccctgtctaccgagttgaatctatgaaattcctggcttgcaatgaggctttgaggttttccaattctcaagaaaaaagagacgaggcttacttcatgtccttgttgaaaacagttgaagcaactcctggattatactactcgtacgaaacagatataacagtgaacttgcagagaagatgcaaattaatggaagcgtggacgagcaaaccattatggaaacaggctgatccctcgtttgtttgga

SEQ ID NO: 235792 - DNA, 515 bp, Gossypium hirsutum
gatatctaatagttatattatgacagatcaccagcagaggattcatcctgtggtggaagtcgaagcaccagcccccacgacgcctttggtgcctcatggctcggctacatcggagaaaggcagcccgattcaacagcgtccaccacaacgaaccattccggtgaggccaccaccaccaccaaggaagcgaagctgttgttgcaagtgcatatgttggacagttagtctcattgtcgtcctcctcataatcctgggtgccactatcggcattctctaccttgtcttccgcccccaactccccaaatactccattgatagcctgagaataagtaatttgaggctcaacttcgatatgaccttgtatgcgaaattcgacgttaagatcacggccaataaccccaacaagaaaatcgggatatactacgagaaaggagggcgattaagcgtgtggtatacaaactcaaagctttgtgaagggtcattgccaaagttctaccaaggtcaccaaaacataa

SEQ ID NO: 235793 - DNA, 472 bp, Gossypium hirsutum
cggacgcgtgggctcaaagcccgaaaaaaaacagatttttcttcttcaaatttagaaccccagaatttgggaggtttgctgtttttggattttcatggtgaattcgaaatggttggaaattcgctagctggactgcaagatcacttgaaattggctcgagaatacgctctcgaaggcctctacgacacttccattatcttctttgatggcgccattgctcagatcaacaagcatctagccaatcttgatgacccgctaattcgtgcaaaatggatgaatgtaaagaaagcactatcagaggagacagaagttgtgaagcaattggatgctgagagaaggtcatttaaggaagctcctaatgggcggcgtccttcttcgccgccgattcatgctaagtcatctttcgtattccaaccattagatgagtatccaacttcatcaggtgccccagtggatgatcctgatgtgtgga

SEQ ID NO: 235794 - DNA, 374 bp, Gossypium hirsutum
ttttcaaggacacgtatgactcgaaaggcaaaggaggattcaagcaagcgagacttcgatttaaagctgactcgacacgaaccaggataatgttctatagcacgttttacaccatgaaaaatgacaactcgggttctctctgtggaccagtggtggatgatgtgaagttggttagtattcaaaaattgcatcatttgtaaaattcatgttttaaatttgttttgcattgattatgctacaaattaatgtgtttcatccatttaggggtttactttaggattatttaatctatcaaattaatgagttcaccaccaatgttgacatttatgtatctactttcttcgttaaattaatggtgtgaaccaagttctttt

SEQ ID NO: 235795 - DNA, 458 bp, Gossypium hirsutum
tggtaacgctaggtaagcttcgccacccaaacatcgttaagatcctagggttttgctcttcgggtctcgatcggattttgatttatgagttcattgagagagggagtctcgaccaattgatttacggtgaagatcaagaaaacccggacggcaggtttctatgttggtatacgaggaagaagatagttcttgggatagctaatggtctagcttatttgcatggactggatacacccatcatccatagagatattaaggccagcaatgtgttgttagatcgggatttcgaagcccatatttctgattttggtctggctcggcaaatcgaggagtcccaaacacacgtatccacacaggtggccgggacaatgggctacatgccgccggagtaccgtgaagggaacacagcggcgacggttgtggcagatgtttatagcttcggagtattgatgatcgag

SEQ ID NO: 235796 - DNA, 298 bp, Gossypium hirsutum
tcgttgctgtcctgcgtgaatttgccaaaacccagattgattatatccttggcaaaaatcctcgaaaaatgagctatgttgtgggctttggtaaccattatccaaagcatgttcaccatagaggtgcatctatccctaagaataagatcaaatataactgtaaagggggatggaaatggagggatacgtgtcaggaactgaatcaatcaggtccatcttattgcacccacttcaatcatcaacaatccccatactcagttcatacccccagaaaaaacaaaattataagtttcccttt

SEQ ID NO: 235797 - DNA, 454 bp, Gossypium hirsutum
tccacgcgtccgcttcgttttggtttttttgctttgctctgaaactccaagctctcatcaatggcggatccagcgactatctcaccagccacgctgttgaaagatgagcttgacatcgtgattcccaccattaggaacttggatttcttggagatgtggagaccctttttccaaccttaccatctcatcatagttcaagatggcgatccttcaaaggccatcaaagttcctgaaggctttgattacgagctttacaacaggaacgatatcaataggattttgggtcctaaagcttcttgcatctctttcaaggactctgcttgtcggtgctttggatacatggtttccaagaagaagtacatctataccattgacgacgattgtttcgtaagctcaatattcatctctcatgttgctaaagatccatctggaaaagacattaatgcattggagc

SEQ ID NO: 235798 - DNA, 486 bp, Gossypium hirsutum
tttctttttttttttttgaaaaacctcgagcaagaatcacagataaagaagatggaaggcatggagatgaaggaggtaaagttcgagaataaggatctgaagcacctaggcttcgtgagggtggttgctatccacgccttggtttgcgtgtcgaacctctacgagttcgctaaacagaactccggtccgttgagatccaccgtcgaaggccccgttacgaccgtcgttggtcccgtctacgagaaattcaaggatgttgctgatcatcttcttcgatttcttgataagaaggtagatgaggctttacacaaaattgataatcaccttccggccaaagctaagcaagcaattaaccaagcccaatacttggttcacaagacagcacaacatgcttggaaactagtcgacgaggcacgaaccaacggaccacgaggagcgttgcactacgccacagccgagtacaagcacctcatggtcataaactca

SEQ ID NO: 235799 - DNA, 508 bp, Gossypium hirsutum
cttgcttctcggtgaagaggaaagcaaagataattctttaatggcagtcgacggtgactctcctccgcattacaatgacgactgttcaacgtctcctttcaggaaatctccatggtcgtctcacgaatccactcatttatatgcttcggctgttgaagacaccaacaacgtcactcctaacgtgctcatgggttcgttggtacgtgaagaagggcatatatattccttggctgcctctggggatttgttatacacgggttcccatagcaagaacattagagtttggaggaaccagaaggagttttctgggtttaaatccaacagtggattggttaaaaccatagtcattgctggagagaagatctttacgggtcatcaagatgggaagattcgggtttggaagattgctaacaaaaactcaggtgttcataaacgagttggtacattaccagcttttaaagattatttaataagctccatgaagccaagtagttatgttgaagtgaac

SEQ ID NO: 235800 - DNA, 470 bp, Gossypium hirsutum
ttttatattttctatatttaaatacataaaacagtattgtcgagtctattctcacaatataataaaaggggtaatatttaccataatcctctcttttatttgtaaattaaatctaaaatttcactgctaaccctcccttttctgcgaatctcggtcgctcctttggctgttctgtccatggcgattgcagcggcagctgttatcgtcccattgggccttcttttcttcatctccggcctcgctgtgaatctcattcaggcagtatgctttgttcttattcgaccactgtccaagaacacatatagaaagatcaatagggtattggcagagttgttgtggctgcaactagtttggctggttgattggtgggcaggcgttaagattgaagtgttcgcagatcatgaaagcttcaatttaatgggtaaggaacatgcccttgtcatatgcaatcacagaagtgatattgattg

SEQ ID NO: 235801 - DNA, 307 bp, Gossypium hirsutum
aggggggctctgagattttgcttgcttgttcgattttttttcccaatttttcctgcttaagttaagcttgatcttgatgactatcaattcattttctcttatgatgattgactaaagctaaaaggaaaaaaaagatcacataccaaaatggtgaaagccgttgccgtccttagcagcaatgaaggtgttagcggaactgttttcttctcccaagaaggagatggtccaactaccgtgactgggaacctttctggtcttaaggccggactccatggcttccatgttcatgcccttggtgacataacta

SEQ ID NO: 235802 - DNA, 340 bp, Gossypium hirsutum
cccacgcgtccgatacccaactattgaactccccatttattccttttttccccctccgccattgtttctgattttgcagtcgagtcgaatcgcgcagtgtcaacgaacatctgcaacattttacgctatggcacccataaagggcatcctttccttgcaaagggcagcaatgttcagagccagcagtgagaggtggaaactaggcattagatcatttagtactcaaggagcaacaactgctggtgctccacaggcatcccctccaccaccacccgaaaaaacccattttggtggtttaaaagatgaagatcgtattttcaccaacttatatgggttgcat

SEQ ID NO: 235803 - DNA, 336 bp, Gossypium hirsutum
ttctttagtagctgggaattgtggaagaggaagtggttatgattatgggaggtttgcatccaggtcaaatttatatcttgggaaagattttttggcttgagacttgtgtaataataattcattttgaagaagagcaaatgggtgtttgtcaaaagctttaaaaggtttctagaatggaaacgggaggaggttctgggttattgcgagagttaagaaagggaagaagcatgattacccttggccggataatattgacctggatatcaaagacgggcacttgacttacttgtgtcatttcaagcctttggctgagaaaccgaaaccggtgaccttacc

SEQ ID NO: 235804 - DNA, 338 bp, Gossypium hirsutum
tctttgacgcgtgggtgagtgagagacactgcaagcctttactttaccaaacaccatggatgctgctgtgagctggtcgagaaccaaatgggtcttccattttatgcttatattcgcacatttctctcttctatcactagctgaagatggtctggtggccaatggggatttcgagacgccaccgtccggcggcttcccaagcgaggcaatatccgatggagcccccgagatccccagctggagcacgaacggtacggtgaagcttgtgtccgccggtgaaaaagtgagcggcgggatgctactcatcgtaccccgaggcaggcacgccgtcagattgg

SEQ ID NO: 235805 - DNA, 340 bp, Gossypium hirsutum
tcttggacgcgtgggttttcattttcttgttccttccttcgccgtctattgctttttgttacctcgatttcaagtgaatcagaatgggtaaggaaaagactcacattaacattgtggttatcggccacgtcgattctgggaaatcaaccaccactggccacctgatttacaagcttggtggtattgacaagcgtgtgattgaaaggttcgagaaagaagctgctgagatgaacaagaggtcattcaagtatgcttgggtgcttgacaagctcaaggctgagcgtgagcgtggtatcaccattgatattgccttgtggaaatttgagaccacgaaatacta

SEQ ID NO: 235806 - DNA, 340 bp, Gossypium hirsutum
tcgattccttctgtcattttgggttttactcttcttctttttttttgtgaaatcaagatggatcttgatctttctccaaagctggcaaagaaagtgtacggtgacgatgctggaagctactacgcatggtgccccgatgaacttcctatgttgcgtcaaggcaacattggtgcagccaagttggcccttgagaagaatggctttgccctccctctttactctgattcttccaaggttgcttatgtccttcaaggggctggtgttgctgggattattctccctgaatcagaggagaaagtgattgcaatcaagaagggtgatgcaattgctcttccatttg

SEQ ID NO: 235807 - DNA, 338 bp, Gossypium hirsutum
gacttcatcaccacttcagttcttcccctggatgtcaccctctcctggtataggatcccctttcccatggctatgggagctcaaacctgaggagaggggtttatggttgattcgtcttcttgttgcatgtgcaaaccatgtagctgctggtagtcttgagaatgccaatattggcttagagcaaatatcccaccttgcttctcccgatggagataccatgcaaagaattgctgcttacttcactgaggcacttgctaatagaatgcttaaagcatggcctggccttcacaaagccctcaattccacgaaaatatcatcggtacccgacgaaattcttg

SEQ ID NO: 235808 - DNA, 343 bp, Gossypium hirsutum
tcttccacgcgtccggttgctgttattttctttgttactattctcttagtattatcaactctctgatgtaggagccaatgattaacacatatgccagatttagagatgatgttcttccccgtattaaaagacttgggtacaatgctattcagatcatggctattcaagagcactcatattatgctagcttcgagtattacctccatcgtaatattagctcaaatctatttgtttctgtgtatgtttgtaagtttgtaaacttgtactaactgctatgtggcagatataagtagacacatttttctacttaaaacaagttgcatttaatattttacaggtacca

SEQ ID NO: 235809 - DNA, 340 bp, Gossypium hirsutum
ttcttaattggttccctttgaggagtgtattgagctacattctagcgataatgcagttttgagagttcctgagtatcttctccttacacataatgggcgcaccttcaacataattgttgatcctatgaatcttcgtgatggtcttcattattatgaagtctatggaattgactgcaaagccccatggcgtggtcctcttttcagaatcccgattactataacaaagccaaaggctgtaatgaatcggccaccactagtttcattctcaagaatgtcattccttccaggccacatagaacgaaggtatatagaggtgccacttggtgctagttgggttgag

SEQ ID NO: 235810 - DNA, 333 bp, Gossypium hirsutum
tttgaaaacaggtatagctcgtataatagtgcagccatcgacgaagcgcatccatcacgattccctctacgaggatgttggttgtcacatatcagatgacttatcagaatgtggtcttattttgggtatcaagcaaccaaagttagacatgattcttcctaatagagcttatgccttcttctcacatactcacaaagctcagaaggagaatatgccattattggataagatcctcgcggagagggtatcgttgtatgactatgagcttattgttggggacaatggtaaaaggttacttgcatttggcaaatatgctggcagagcaggaatgat

SEQ ID NO: 235811 - DNA, 336 bp, Gossypium hirsutum
ctcttctcttatagaagccactacatttttatatcacccagaaggacaaaagaaaaaaaatggtacaggcagccaaatctatggtttttcttgcatttgttctacttttcttcccttcatctggggtagctgatccattgacttataacgttcttaactatggagccaaacccgatgacaattttgactcaacccaagccttggttgctgcatggactttggcctgtggctccatcaatcccgcaactatttacgtcccgcctgggaggtttttggtgcgcaatgttgtttttcgtggacagtgcaagaacaatggtattgtttttcgtatcgatg

SEQ ID NO: 235812 - DNA, 230 bp, Gossypium hirsutum
tttttcgcgtgggcggacgcgtgggggctttgcgagtgcattctataattaaaggagctgttgtggcgttctctgcataccgggattttaatgccttccccaggagactcacggagggctgtcagagaactggagtcaaactcatagatgtcccaaatggaaggaaggatgctgccgacaaggctattttggttgacatgttcttattcgccctggataaccccccacct

SEQ ID NO: 235813 - DNA, 331 bp, Gossypium hirsutum
tccacgcgtccgcccacgcgtccgcttctccttgcttgaagggctgacagaggtcaatgtagtggtctggaacagcaatactttatctagtgatgacttaataggctatggaagaattcaattgcagaaggctatttctcaaggttatgatgatagttcttgggccattcaaaccaaaactggcagatttgcaggagaagtgcagctgatactgcattatcccaacgccaaacaccaagcctcaggaggatatagtcaaccgtcggcaccaccagcatatgcaccgccacctcatcaaccacctccatacggcggaccacctgttccagct

SEQ ID NO: 235814 - DNA, 301 bp, Gossypium hirsutum
tttcattcgtccgcgagctttacaacagaaacgatatcaataggattttgggtcctaaagcttcttgcatctctttcaaggactctgcttgtcggtgctttggatacatgatttccaagaagaagtacatctataccattgacgacaattgtttcgttgctaaagatccatctggaaaagacattaatgcattggagcagcacataaagaaccttctgagtccctctactccgtttttcttcaacaccctttacgatccataccgagctggtgccgattttgttcgcgggtacccatttag

SEQ ID NO: 235815 - DNA, 289 bp, Gossypium hirsutum
tcgttactgactaataattttaagtaccaacaaccatcattcatgtaatgtacttgtttgtgggcatagcacgaatctatgaacattcctttagcaaccctgagctgtgtggtccttatttggggccttgcaaagatggggttgctaaaggaacacatgaaactcatgttaaaggtggactctctgcatctttgaagcttttgctcgtaataggcctgcttgtcttctccatcttgttcgcagtcgcagctataatcaaagcacggtccttgaagaaagcgagcgatgc

SEQ ID NO: 235816 - DNA, 278 bp, Gossypium hirsutum
attttgcaagaacaagatgctgggaatccaaaaatgctgataaaggttgtagctgaaagggaaatcaaacaaagtgatcctttacttctgaattacggatgtctaagcaatgacttttttctactggattatggatttgttataccatcaaatccgtatgaccatatcgagctcaaatatgatggtgctcttatggatgctgccagtatggctgctggtgtttcttcacccaatttctcatcaccagctccatggcaacaagaaattctctttcagct

SEQ ID NO: 235817 - DNA, 359 bp, Gossypium hirsutum
tcgatcaacggagtggcagaagaacacaaccattgtgagttgatggtaccaaggtagtcgatcggacgatcggcatctgccctttttcggagcaacgcaacgtgttggcgttgaccatatttccgtttacaagtgctccgatggtatcatcgatgctattcaggggtccaccgccattaccatttccaactgccacttcactgaccacaacgatgtgatgctgtttggagcaagcgacagctacagtgctgatgagaagatgcaaatcaccgttgctttcacccgcttcggtaaaaatttggtacaaaggatgcctagggtccgatttggtttcgtccatgttgtgaacaacgattacc

SEQ ID NO: 235818 - DNA, 328 bp, Gossypium hirsutum
ccttcgcgtccgcttatttgtccttcatttggccgaggttaattacaacaaacgggggcaagctgctgtgtgttttttcttctttctcttgtcccactgttcctttgatctgttgctgaaataaaataaaataaataaataacttcgacaaaaaatggcattcactggaactttggacaagtgcaaggtttgcgacaagactgtccatgtggtcgatatgatgacactcgaaggagtgccataccataaaacttgtttcaaatgcagccattgcaagggtaaccttcagatgaccacttattcttggatggatggaatactgtattgc

SEQ ID NO: 235819 - DNA, 340 bp, Gossypium hirsutum
tcgattttattttctttaaactgtgaatttcatgtgcttgcagacagagagagagagagcagtgcagtgcagtgaaggtgaaatggctttcggtagtactccagttcttctttggctcttcttcttatctttatctccattgaccaaagctaaagttccagccatcatagtgttcggagactcctccgtggattcgggcaacaacaacctgatctcgacggttttgaagagcaattttcagccttacggtcgtgatttttacgggggtcaaccaactggacgcttctgcaatggccgaatccctcccgatttcatcttcgaagcttttggactgaaacca

SEQ ID NO: 235820 - DNA, 284 bp, Gossypium hirsutum
tctttttaggagcttttggagaggtaagattgggtcaggataaaaaatcagggggtgtttttaacacgaaaaagtttaagaagtcagaaatgcttatcagaggacaggttgaacatgtaagagctgagaggaatttgctggcagaagttgccagtcacttcattgtgaaactctattattcttttcaagatgctgagtatctatatctaatcatggagtatctgcctggtggtgacatgatgactttgctaatgagagaagacactctaactgatactgtggct

SEQ ID NO: 235821 - DNA, 435 bp, Gossypium hirsutum
ctttttccgctcatataagtagtgaataataaggaaagggttttcaatagttgtagaaagagagccctagcagtcatttaaacttataaacagagagagatggcagccgaggtgatcttgaagctcacaatatgcttcctagcattaatggttggtgtccaaggtggagacccttacttattcttcacatggaacgtcacctacggcaccatctctccattgggagttcctcaacaaggaatactcattaacggtcaattcccaggacccgaaattaatgccaccagcaataataatatcgtggtcaatgtgttcaataaccttgatgagccattccttttaacatggagcggtgttcaacataagaaaaattcatggcaggacggtgtacttggaacaaattgtcctattgcacctggtactaactttacgtac

SEQ ID NO: 235822 - DNA, 345 bp, Gossypium hirsutum
ttgttttttcgctgtgtttcatctctcaggtaatggcaatggcgatggcgaagccgtggatgtattgcttgcttgtttgtttaggtatggcgttgaacaatgtggcttcagggcaaggagaaaacccttttgagccagatggtggaaggagaagagaaatggtgcctgctatgttcatatttggagattctctcattgacaatggcaataacaacgacctcccttctttcgctaaggctaattatttcccttatggtattgacttcaatggcggtcctactggtcgtttctctaatggttacaccatggttgatgaaatcgctgaactactaggacttcctttaa

SEQ ID NO: 235823 - DNA, 340 bp, Gossypium hirsutum
ttttctttttcgcccacgcgtccgcccacgcgtccggggagctcttgttgtcaacgcctgatggcgaaggcggctcgactggaaatcgttgttctaagactagaaaacttcctccaggtccaccaaggtggcctatagttggcaatcttcttcaattaagctcactcccacatagggacttagcttccttatgtgacaaatacggtccactagtgtacctccggctcggtaaggtagatgccatcaccacgaatgacccagatatcatacgtgaaatacttcttcgccaagacgatgtctttgcttctaggccacgaaccctagctgccgtccaccttgc

SEQ ID NO: 235824 - DNA, 424 bp, Gossypium hirsutum
ttgctttagtttccttcccttctttcttcccaaatctgtcaagatccagaagagagaccgccaaatattcggctgcagcaatgccccacctactcctccactatcacgttccaattacaaccgtccatctcagatgttctttcccctcccctaaaccaacggcccatattcacctacgctccaatccaacaacaggcgcgaccgtaaagtgcatggccaatcctaggagagttaaaatggtatcgaaacagataaggagagagctttcggacatgctcttaactgacaaagtgttgcaatacgctatattgcctgaagccgccttaggagccgaccgctacctcttttcccttactaccataagtgatgttgaagtttcagctgatttacaggttgttaaagtgtatgtatctgtttttggtga

SEQ ID NO: 235825 - DNA, 376 bp, Gossypium hirsutum
acgcgttcgggtgaataaataaaatggggggctgtctaagttttcaggccttcggctgcttaatttttttctcttgtatgctattctgctcatacgcacccactttcgcattaaccgacgtctaacaatcttacatcgctcgtggtcaactattggcactccgtgagaatcgtaaactccccgatgggtatgaatatactgtgaaaacgacagagaaattcgagaatgtatggcttaggggggctttcattgctcttcaagcatggaagaaggctatgtactctgaccccaagaacatcacgagcaactggtttgggcccaacgtgtgtgattacaaaggtgtttattgtgtccgagcaatggatgaccccaaatt

SEQ ID NO: 235826 - DNA, 430 bp, Gossypium hirsutum
gtaaattgtttttcgtgtttgtctaattttgtgggggttagggtttttaatcgatctgagagagtcagattatgggtggggatggcgattctagtgagtcaggactcggtgacaatggaggaggagaagaagagggagtaatggttaatatccgatgctctaatggttcaaaatttacggttaggaccaaactcgaatcaaccattggatctttcaaagttgttttagctcagagttgcgatatcccagctgatcagcaacgattgatttataaaggccgaatcttaaaagacgaccaaacccttcaaagttactgtttgcaagctgatcatactgttcatatggtccgtagttttgccccatcttcatcagcccctcctcctgttgctactacaaatgttggaactcctaatactacaccaggggtcac

SEQ ID NO: 235827 - DNA, 407 bp, Gossypium hirsutum
tctctcacgcgtccggaaattccatctgcctttcccggtctatttgctcacagtcacaggttcagctgtagaacaagaaggaaggcgcttcgctcaaccaaaggtgtttcactgcattatctgtttagccagtccaaacgatggaccgatctagacttaatatgaggggtcgttgctccggttcaacaccatcagaggaatcggctttggattttgaaagaacctgctgctgtcatcctcatcttccttcatttagttcaccgacacttcagccttttgcttcggctggacagcacagtgataacaatgctccttacttttcatggccgacatccagcaggttaaacgatgctgctgaagagagggcaaactattttgctaatctacagaaaggagttctgcctgag

SEQ ID NO: 235828 - DNA, 382 bp, Gossypium hirsutum
ttattaatttctcgaagatctgcacaacaaagaggggtttttttcctcactgagcagagcgatgaccgaccccatcggaccatcaacgtcaacgattccgaatccaagtgcgaccactcttctccacccgcgacgcgagcctttcgagcacggcctcctaccaatgcagaagctcatattcactgacccactccaggccctaacctctctgaagcaaaagctcgtatcatcctccattcaacgagtcgactcggcggccctcgctgacgccctccagatctctttggaccatgcacgtctcgtcctcgacactctcgcctcggtgctccactccgaatccgaccctctcgtcacctcgcgcttcgacgatgttgactccgtt

SEQ ID NO: 235829 - DNA, 166 bp, Gossypium hirsutum
attacatgcagttatacccagtagtaagagaagtgaggcatacaagttgctttttggtgaactaaatgaagagaggcagaaagcacgccatatgatgaagagaatgttcaatacatcttttggggccaccttcctcactgacaaaggtcaagaatctgtttttgct

SEQ ID NO: 235830 - DNA, 309 bp, Gossypium hirsutum
cgacatcggagaagaagaagacgaagaaggaacgccatcgccgtcatcgatatcgccgccgcttcagtacttcgacagagatcgccacgtggcgttcttggagatgatgtacaatttgatgccccatcactatcaatcgcaggagatcaatcgcctcactcttgcatttttcactatctctggccttcatctcctccgagccttagatcgcgttgataaggacagagttgccgattgggtttttatcatttcaagctcatccgagaagtcgagccgaattgaaaattggtcaattttatggatttcatg

SEQ ID NO: 235831 - DNA, 271 bp, Gossypium hirsutum
ctgaagagagtgatgatgataatgaagacgacaatgctattccattaggtccacagtgctctctcaaagaacagcttgaaaaagacaaggatgacgagagcttaaggaaatggaaagaacagcttcttggaagtgtggatattaacaacattggagagacactcgatccagatgtgaagttccttagcgtgtcgatcgtgtcggcggacaggcaggacatggtgctttcgatccctgaagatgggaagccgcatggcttatgggttacact

SEQ ID NO: 235832 - DNA, 333 bp, Gossypium hirsutum
acaactcgaagggagaaagaagaaaaaatcgaaaatggagaaagatgaatcgttggcaaccgtagcacccaaagcgccagtaactagtgaaaggaagattctagataacttggacgaaaaattaccaaagccctatttggcaagagcactggtagcacctgacgtggaacatccaaaaggaacggaaggacgtgtgaacaatggaatgagtgtacttcaacaacatgttgccttttttgatcgagataacgatggaattatttatccctgggacacttataacggtttgcgagatattggttttggtccagtatcctcttttattttaggagt

SEQ ID NO: 235833 - DNA, 176 bp, Gossypium hirsutum
tttctttcgacagttgtttgatcaccgcttcaatttgggttcatctcattgcttaattcttcatttacaagttcaagatgcttggaaatggtgttgttgggattctttccgagtcatcaaataaatgggaaagaagggttcctctcaccccatcacattgtgctcgacttttacac

SEQ ID NO: 235834 - DNA, 349 bp, Gossypium hirsutum
tttgacaacatccttatgctggaagattgtggctaaaactgttgattcaactggagttggactcgtaatatatcaaaagccttcctcatattcctgttacaagcatcgcaaagaaaaacttccacctttgtgtgaacagaaaaccaatcagaatgcctcatggtacgagcctcttagttattgtatttcgcgccttccagttgacaggatgggtaatttgctcagatggtccacaccatggccacaaaggcttagcagtaagcctccaagccttccatccgaaccagatgctgaagacatattcattgaggacaccaaacattgtgcagcacttgtatcagaggtgtat

SEQ ID NO: 235835 - DNA, 257 bp, Gossypium hirsutum
  unsure (1)..(257): unsure at all n locations
tccctctcttactcgatcaccgcttcgnnncacggatgatcacatacaacctgcaagcaaaaccccaaaaagttcaaccccaaggattagaaccccacgttttattactcctttgggaagtccaattagaagggctttttaagcttaccaggcttgaccctcatgatgcttggcttcccatcactgagtcaaggaatggaaatgcctattacgctgcaatttatactctttgttcagggattggtattcaagccctt

SEQ ID NO: 235836 - DNA, 348 bp, Gossypium hirsutum
ttctttccaatcttacgccaaaaattccaatggagagaaagtcgatttttcaaactatggccaatctttcaatgaaggaaccgataaattcacggggtacggccaaggagccgtgggtcaatccattgggttcaaaatctatggaagaaacaacactttcaaggattatgcaaaaaaggagggcatcgttttcggtagatacaacaatggcagctcctctgaaactgctcaagttaagggcggtagcagtgccgtgagtaaatgggtggagccgggcaaattctttcgggaaaagttgttgaagcagggaaccgtgatgccaatgccggacattaaagataaaatgcc

SEQ ID NO: 235837 - DNA, 352 bp, Gossypium hirsutum
gatggctaaaagagggttgcttccaaaatgcatctccattcaagttcactgcatttcaggcaggaccaagaatatgccttggaaaggactctgcctatctccagatgaagatggcattggccattctgtgcaggtttttcaaatttaatttggtgccaaaccatccagtaaagtataggatgatgactattctatcaatggagaaaggtttgaagctcaaaatagccagacaatcttgttgaggtggccaatggtctacttctggtccaaagttaaaccataccaaatgttgtccaaacgataatatacactttagaattttgcaagcaatcaattcggattcttaacttat

SEQ ID NO: 235838 - DNA, 433 bp, Gossypium hirsutum
tcggttttcatcatctggctgctaatgatggggtcagggaaaccattgatccggagatcactgcaacttgcaaagatcttggagctgttaagaaagtttttcagcttgcccttctatgcaccaagagacacccatcggatcgaccaacaatgcatgaagtgacacgagttctaggaagcctaatgccattggaacccccagcaaagcaaccaaccacaatcccaccggcaccactttcatctaccaagggcacttcttacatggatgagtatgcaaatctcaagactccacacttagtcaattgcccatctatgagtacctcagatgcacaacttttcatcaactttggagaggttatatctcgaaacagtgagtgaaaggaagtccaatgtcgtcaaatttaaaatcaaaatcaaaatcaaaatatttcatg

SEQ ID NO: 235839 - DNA, 392 bp, Gossypium hirsutum
aattaaggtttctaattgatttaatctgaacggggcgagatttaagggtttacccttcattcccagaaagactgaactctgtcaggttatagggtttagttgctttgaggttcaaaggattttggtattggagtcctttttggatttgatcaggaatgactcgtagggtgcggcgcaaggtggcaaagaaagggaaggacgacgctgtttcactaagttatcttgaaattgaagttgaggatttaggtcttgagagaaatggcgatgttgattggacaagcttgcctgatgatacagtgattcaattgtttttttgtctgaattatcgagatagggtaagcctgtcgtcaacctgtaagacatggagagttttgggtgcttctcagtgttta

SEQ ID NO: 235840 - DNA, 443 bp, Gossypium hirsutum
aaatggttggatttttgggaccagagtttggatctttcttgttcatgaattaagcttttgttcaagattttaatggcttatttgtctgagccatcatcttctttgagtttcagttcatcttctcatctatctaatggctcaatcactcacaatataccccctttttctgttcctgaaactggggctaaccttgaagctttaagtttgaccaagctcagctctagtttggagcaactaattgttgaaaattgtcctgtttttagtgatgctgatatagttgttgaaggtgttgctgttggtgttcatagatgtattttagctgttaggagtaagtttttcaatgaggtttttaaggatggatctgggtcttctgagaaagatggaaagccaagttataacatgtctgagttgttgccttatggcaagattgcacttgaagcttt

SEQ ID NO: 235841 - DNA, 481 bp, Gossypium hirsutum
tcgggattcaacaaaaacacaatgttgatgcgctacgttcgttcgtccctcatcgcgtcgcgttttttctcgacggcagcgtcggtagagaaagcagtaccaactaacgaagtcgctccgaaaagcagcggtggaggtcgacgaaacacgttgggacggaggcttataggccttgtgtatccgaaacacaccgctgtagctacaatacagaaatggaaagaggaaggtcgtacggtcagaaagtatgagctcaatagagtcgttcgagagcttcgtaagctcaagcgctataagcacgccctcgagatatgtgaatggatgagattgcagaaagatatcaagctcttaccaggtgactacgccattcacttggacttaattgcaaaaattcgtggtttagatagcgcggagaaattcttcaaagatcttccagacaagatgagagaccaagccacatatacagctctgcttcacacgtatg

SEQ ID NO: 235842 - DNA, 405 bp, Gossypium hirsutum
tcgaataaagagagaagaaaatgaatcgttttatagtaaggtcggtgatgcaaaaccacctgagcaatggccgaagcatcagcaacggtcacgtttgcagctccgccatagttgggagaagcttggagttgagcggacaacataacgttgtgatgcttgtaagatttgaatggagaaggatgatgagctctactcctgcttctgtggaaaaggtgtcgtctggaagggaagagaaaatggagaactcggtgacggaagagacgaagggaaaggattcgtcggcgttaagttattgggggatttctagacctaagatcaccagagcggacggcaccgactggccctggaattgtttcatgccatgggaaacttacagcgcaaagctgtcaattgacttgaaaaagc

SEQ ID NO: 235843 - DNA, 449 bp, Gossypium hirsutum
tcgcttttcgcgtgggcggacgcgtgggcggacgcgtgggcggacgcgtgggaaatttcatggctcggaaattctttgtcggtggcaactggaaatgcaatgggacaactgaggaggttaaaaagatcattacaacattgaatgaagctgaagttccttctgaggatgttgtggaggttgttgtgagccctccatttgttttccttacctttgtgaaaagtctgttgcggtctgatttccatgttgctgctcagaactgttgggttcgcaaaggtggtgcttttaccggagaaattagtgctgagatgcttgttaatctgagcattccatgggttatcatcggtcactctgaaagaagggctctcttgaatgagtccaatgagtttgttggagacaaagtagcgtatgcactttctcaaggcttgaaggttattgtctgcattggggag

SEQ ID NO: 235844 - DNA, 353 bp, Gossypium hirsutum
tcgctttggccacctgaagccaggcagagtttattacttgcagtgcaggagctagggactcgatttccacaagaccttacaaaacttaatcctgttacggacatgaaaattgaagatcaagaaattgttgagttagtgaaacaaattgaggaacacgaaaagaagttgtttgctcatccactccacaagtctcaagatgagaatcaaattagatcttttcagaggaaggcagaggtgaatcatgagattcaacagctcaagtcaaaaatgcgtgattcccagcttcaaaaattccgtgatgaacttaagaaccgttcaagggtcctgaagaagttaggccatattgatgctga

SEQ ID NO: 235845 - DNA, 374 bp, Gossypium hirsutum
cttacgcgtgggttcgggatatatgctgttgtatgtctgatatcgtgggtgtttgtgttcttgaaagtaccagagaccaaaggaatgccacttgaagtcattaccgagttcttttctgttggtgcaagacaagctggtgctacaaagaatgagtgaagtcacactgctttcaatggtgtcaaattcttttttcaatttcggccgttaagctttcatcatttttgttccttcttgttgctttgaaaattagggatcctcttattcaaacattaaaattataaaattttcccactagaaattgagtttacgtgtattttacatggtgaaccaccctttttaacttggatttcataaacaataattgcatcaacaag

SEQ ID NO: 235846 - DNA, 411 bp, Gossypium hirsutum
cccacgcgtccgcccacgcgtccgcgtttctgttttttttttgtttttttttttgggtatccttcatctattctacaggagttgttgaagcttccatagatgcgatgtcaacaaaaatagacctctcactctcccgacccaaccgcatctatcgcccctccgagcctcttgaaggcaaaatcttggtgaagtctgcatcttccatttctcactatggaattcgcatggccatcaacggctcagtcaacctccaggttcggggaggatcggcaggagtcatcgagtccttttatggtgttgtcaaaccaattaccatcctgagtaggacccttgagattagaccatctgggaaaattgtttcaggtacaacagagataccgttctctataactctgcggaatcctaaagaag

SEQ ID NO: 235847 - DNA, 403 bp, Gossypium hirsutum
tcgcctacgcgtccgcccacgcgtccgcccacgcgggcgttccttttggatctaacgtaaccgtaaacggaaacggaaacgtcggtggcggaggttctccggtatcgaagatcttctcggccttgcctgtacgaaagactgcagcagataattttttgaattcggagaacgaaaagtctgattatgattggcttcttactccacctggtacaccactatttccctctttggaaatggaatcacagaagactctaatgagccagattgggatgtctaatgctcgtccagtttcactgaaaacaaggctggcaaatctcccggaggaacctgctttgaagagcacccttgccttaaagcaacaagctccgtcagccggagtaatcttttccagtactctaaatag

SEQ ID NO: 235848 - DNA, 524 bp, Gossypium hirsutum
cccacgcgtccgtccaaagttgggttaacagttgccctgattcagggattaaaaagaaaaaaaagctaagttctatattcgggtgtggcaatggctactaataacaataatagcaagttagagaagttggcttctattgatgcacagctacgtgctttggttcctgctaaagtgagtgaagatgataaactggtggagtatgatgctttgcttttggaccggttcctcgatattcttcaagacttacacggcgaggatcttagggaaacggttcaagaatgttatgaactttctgctgagtatgaagggaagagtacccccaagaaacttgaggagctggggaatgttttgactagtttggatccaggggactccattgttatagctaaggctttctcccacatgcttaacttggctaacttggctgaggaagttcagattgcttaccggcgaaggatcaagttgaagaaaggtgattttgccgatgagaactctgcaacaactgaatcggatatcgaagaaac

SEQ ID NO: 235849 - DNA, 329 bp, Gossypium hirsutum
tcggatgaactgaagacaaaagtgggacatgttatagtgatgattctattggtgaagatgtttgaaagaagcaaaatggtggccataaacactggcatggatctccttagttatgctatctgtattttcctctcttctgcttctttgtacatccttcatcatcttcacaagcctgaatagttccatcactccctctcctctcactttctatatacatgtagacactattttctacacgtcaaactgttactttgtgggatttgtagagagtaacacatgcactacttggttgatattaataagagaatttgagtccttaatttttattt

SEQ ID NO: 235850 - DNA, 402 bp, Gossypium hirsutum
tcgaatcatttaatgcaggggtctttctttccttttacaaacactgacatgcaagcagcagcctctaatgttctaccaactttatctctgtggttgatgacttgggaaaagaggaaacaagcatgaggctgatgaacttgcagagaagatgttagagatggcttcagatggtagagtggaaaataagatatctcgaaaaccaaagaaattgatccatagaaaagaaacgaagtatggtggagatgactggcaaacaatagtacacaggtatggctaaagtagtaattctgtttggtgctaaatgataatttccaaatatagacagtagtgaactatagtcttccctcaaaaaagtattaaagaaccattatctaataaaatcacatatgtcatgtcatgaca

SEQ ID NO: 235851 - DNA, 471 bp, Gossypium hirsutum
cccacgcgtccgccattctacattaattgccaagatttggatccagaaattataggaaatattcatggcatcacggctgcaaatcgagggcgatgcctcagtgctgcttcgagtcactcactccaacctcaaaagcttcgccgctgacattcgcttctctcttcagatgagcgtggaagcagtgaaagataagctatggaagaaatgtgggacttcagtaaattcaatgcggttagagctatatgatgattgtaaaaataaactttgtgatttaagggatgattcaagacctctcggtttctattctccagtagatgggttccgactacacattatagatcttgatccttcatcggtaacttcgggagggtggcttgaagatacgtcattagtcgagaagtactcgatttctgaagatgaatacaataaacgttctggtacatttaggaaattcaaggaacagatggcatc

SEQ ID NO: 235852 - DNA, 425 bp, Gossypium hirsutum
tcgcttttaatggcagaaagagaaatttgagagagagtgggaagagttagatgggaaaaagttaaaaattgagaaagagttgaagaatgtcaacctacagcaggagaaatttgacaaagaaaaacttgctgaggatgaaaggttaaagaatgagaagcaagtcgccgaggattgtataaaaagagagttggaagctcttgaagttgctaaagaaacatttgctgccaccatggaacatgagcggtcagtggtagctgagaaagctgaaagtgagagaagccaaaggcttcatgaccttgagttgttgaaaagtcaacttgagagtgatatgcaggatatatttgaggagatggaaaaggaattacgagagagaaaaaagccctttgaggaagaaaaagagagagaattgtacaatattaattatt

SEQ ID NO: 235853 - DNA, 468 bp, Gossypium hirsutum
  unsure (1)..(468): unsure at all n locations
tcgattataaaagaacggcggaaaaaggcctggggaaagcgtgaaggactttcaggagctgatatgcggtttcttccagacagtgccgccatggataatgaccagcagtgttacaaatcaagggcgggatgagatactgttgcatatggctcaacttcgaaattattggctgaaacactgaagggaagagaacccatggtcaaagctttttgtatgttgttaacgtagttgattttcaaacgccatttatttcaagtatcccaatgattacattttcattccgatacacaatcagtgtctgattagggatggtaagataactggaatttatcagactgactcagacctaacctgaccttataaggagatatataacttttgaaaatcaagttcagtgattgggtgagacttanagtaaaatgttggggtgttttataaatgtatattaaaatattaaaaaataaatac

SEQ ID NO: 235854 - DNA, 339 bp, Gossypium hirsutum
aatttggtttcatgattcagaacatgatgaatgagggaaggattgtttcttccgaggtaacaattaagcttcttcaaaaagcaatgttggatagtggtaatgacaagttccttattgatggttttcctcgtaatgaagaaaacagagctgcatttgaagctcttactaaaattgagccagaatttgtcctgtattttaattgtcctgaaaaagaaatggagaggcgaattcttaatagaaaccagggaagagaagatgataacattgaaacaataaggaagcgatttaaggtgtttctagagtctagtcttcctgtaattgagtactataaaggaaagg

SEQ ID NO: 235855 - DNA, 391 bp, Gossypium hirsutum
tgtcttcgcgtccgattgattccgccggcgagggccctttgaattaccaaccggatgtgggtattccaaatgacgacgtcgttttaatccaattacccaaagacccatcggaacccaccatcgtcaccgtcaattgccccgataagcccggtctcggctgtgatatttgccgtacccttctcgaattcggactttcaatcaccagagcagatttttcgacggatggaagatggtgttacatggtgttttggttggttccaaatgtttcgaattcatgtgaaattgattgggaaagcttgaagaataggcttgtttcgatgtgcccttcgtgtttgggtccatttttttcctttaattatcagcaaggaggagatggaaatggaagcacaac

SEQ ID NO: 235856 - DNA, 337 bp, Gossypium hirsutum
ccctcgcgtccgcccacgcgtccgcccacgcgtccgcagtcgacgaagctcttcagattgtgctcagcgttgcccagaaactgccacctgtcaccgtcccacttcaccaagctcttggaaaagttttggctcaagatatcgttcctcctgaccctttgcctccttatccagcctcaatcaaggatggttatgctgtgattgcttcggatggtcctggtgagtatcctgtaatagttgaatcaagagctggaaatgatgggcttggtgtcacagtgactcctggaactgttgcatatgtcacaactggaggaccaatacccgatggtgctgatgcagt

SEQ ID NO: 235857 - DNA, 286 bp, Gossypium hirsutum
tggttttttgcaaagagctactaacggtcgaatgtggcatttatatagttggcatgttgtggtgcaaatgcctggcggagaagttgttgatcctccccattctttgaagactaccgaagtgtgtgatgttgatcagaatttgaagattgaagggcgtgttccagacaaagtaaactgttaccagggagttttctataattactttagcataggaatggatgcgcaagtggcttatggatttcatcatttacgtaatgagaaaccttaccttgcacaaggtcctatt

SEQ ID NO: 235858 - DNA, 486 bp, Gossypium hirsutum
cgtgtcgcttggggtttttaaagaaaaaaagtttggatttttaaagcgaaaccattgttatatgagagggattagtgtttgagatttgggtttttttattagtcggaaatgttaagatttgggacattttaaattttttttttctagtgaaccccttcaaggatatttttgtagatcgaagaagcagaggtgaagttttcaagtgctcgaaagagagtaaagtttcgaatttttctttatcaagatgaagtttatgaaactgggatccaagcctgattcatttcagactgatggtgatcatatcaggtatgttgcaaccgagttggcaactgacatagtcgttaatgttggggatgtgaaattctactgtcataagtttccattgttatcgaaaagtgcacgtttgcaaaagctggtcgcgacgtcgaatgacgagaacggtgatgaactacaacattcaagacataccgggcggacctggagctt

SEQ ID NO: 235859 - DNA, 495 bp, Gossypium hirsutum
  unsure (1)..(495): unsure at all n locations
gttttccataaaaagttctcattcattttcagtgtttgttttgtggaaaatgaaaacattttacaaacatggataaaatccaaagcaacattttggaaattgtcttaccgatttctaatccgtatgacattttccctttctcctttctcttctaagtaaattttcttccacatcctctgcctcctcatcttcgttcgtcacctcacctcaccatctccgtccgtcatctccatcgaccgtcggccttacttgtattttgaagaaaccctaaaaaattagcagccacagtcaagaaaagaagacccagaagcaatggttctctctctgtcatcaacaggatgggaatgaagttttctttaggatcaaaagaaacactcaactgaagaagctcatgaatgcatattgtgatcgacaatctgtggatttcaactcgattgccttcttgttcgatggtcaccgnctgcgaggcgaacaaacttctaatgagctggaaat

SEQ ID NO: 235860 - DNA, 446 bp, Gossypium hirsutum
tcgccttcgcgtccgcccacgcgtccgctcttttctgcacctcaaatttccaataataataataatggaaaaccaaaacccgctccaaaatggagctcttgagggtgccgctggaaacggtggtcgcagtggtgatggatcggctctgatctttcttggaaccggctgctccagtgccgtcccaaacgctatgtgcttgattcagccctctgatcctccctgtcaagtctgctcccaatccctctccattccccccgatcgtaaccctaattacaggtgcaatacatctttgcttatagattattgttccagcgatggtatacgcaattatattattattgatgtgggcaagacatttagggaacaagttcttcggtggttcactttccacaagattcctcgagtagattctattgttttgactcatgaacatgctgatgcaattc

SEQ ID NO: 235861 - DNA, 339 bp, Gossypium hirsutum
ctttcgcttgggctgaaaactttaaaaatccatcccacaccgaccgttcaaagtgtagtggttgtcggcgagctttttctgatggggattcgagaaagtcacacgttcagtgcctggaaatggctaggcttcgtatctgcagtatgggtgcagaccatttcaggcaataattacactttctcaaactactctgatgccatcaagacgcttatgaaccttacccagcttcagcttaacaatttgtcagtggctaaagatgttggtaaggcttttggtctccttgccggtcttgcttctgatcgtttgcccactcccgtcatcctccttattggtgccatt

SEQ ID NO: 235862 - DNA, 412 bp, Gossypium hirsutum
ttggtttcaggcatttattggagaatctgagttggccagaactgaggttgtcaagagattgtggacctatatccgagagaagaatttgcaagatccaaaggacaaaagaaatgtattatgtgatgactcattgtatgctctttttcgtgtgaagtccatcaacatgtttcagatgaataaagctctgtctaaacacatatggccattaaatgaggaagaagtgacggttcaagctgactctgcaaaaacagaaagaaaatctaaacaagcaagggaacgggttgcagatgaaccaaaacagaaagaaaagaagcagaagaaaggggcatctggttttcttgctcctcttcctctttcagatgctctagtgaaattttttgctactggtgaaaatgcattatctcgcgctgat

SEQ ID NO: 235863 - DNA, 351 bp, Gossypium hirsutum
ctttcacttgctatacaaataaaaccttccacttgtttgtttttttttcttctcaagtcctaattgaacccatactatgccctccttcttttagttcatttccattccatctcttaccttaaattaattctctctttcagagcaaagatatcaaggaaataagaaatataaagtctcttatttttcttttctactttttttccccacacccaccacctttctttttgatttttgtgggttcttagcaacataaatatggggctaagggacattggagctacactgcctcctgggtttaggttttatccaagtgatgaggaattggtttgccattatctttacaaaaagatt

SEQ ID NO: 235864 - DNA, 416 bp, Gossypium hirsutum
tcgcttacgcgtgggtggctatcggcggtctgatttccaaccggagtttcggttcttttatcggttcaggtaaagtatgtcaaggggaacaagccattttgcttcacaagggagagagatcaggcattgctgttctgcatggtaacatgttttaccgaaagctttggagggatgtgatgttgtcatcattccagctggggtgcctagaaagcccggtatgactcgtgatgatcttttcaacattaatgccggaatcgtcaagggtctatgttctgcaattgctaagtattgccccaatgcacttgtcaatatgatcagcaaccctgtcaattcaactgttcctatcgcagctgaggtttttaagaaggcaaggacatatgatgagagaaagttgtttggcgtaaccacccttgatg

SEQ ID NO: 235865 - DNA, 459 bp, Gossypium hirsutum
cccacgcgtccgatccaaacaaaaccttcttacttaattttccaaagtttccgagtagctcatggtgtatcccatccaaatttagtcatttccctacttacaaggtaagctaatcctgtaaaggcagaattgtggagaataaaagagacagtgtaaacaccctagctactgctccatggccatggcaacagcaaccatgatgatgagcagaatgatgaatatgccaccgtcatcgtcatcgtcaacaccatcatcttcttcttcgccgttggcaactcagtcactctcaacaccatcatcaccatcttcatcaaggcaagcaagcagcctcccactccgtacaataccaggatcctacgggtggcctttggtaggaccgatatccgaccgtctagactacttctggttccaaggaccagacaccttcttccggtcgagaatggagaagcacaagagcac

SEQ ID NO: 235866 - DNA, 423 bp, Gossypium hirsutum
tcgccttcgcgtccgcatcgatcctgataccggtcgatcccttccgaagaataccccgggcgaattgtgtgtcaggagccaatgtgtaatgcaaggttactataaaaacaaggaggagacaaatcgaaccattgacaagaatggatggctccatactggtgacattgcttatatagatgatgatggagatattttcattgtggatcgcataaaggagttaatcaagtataagggttttcaagtagctccagcggaactagaagccatcctccttactcattcctcagttgaagatgcagcagtggtgccgctgcctgacgaagaagcaggggaaatcccggcggcatgcgttgtgatgaacccaaatgccaaagaaaacgaaagggacataatggagtatgtagcctccaatgttgcacacta

SEQ ID NO: 235867 - DNA, 292 bp, Gossypium hirsutum
tttccctctcgtccggaagaaatgacatcaacaggttggaagaaattagacttgccgaggaactgctaagccaactacaaaatcagtgcatcccagataaagcaataacatcgtcaatgaaggaattcggccttgaaagggcaaaaatgaatgggtggccaaatacgtatgtatttacaaaggcaatgggagagatgcttttagggaagttcaaaggagatttgcctcttgttataatacgccccacaatcattgcaagcacttacaaacaacctttccctggttggattga

SEQ ID NO: 235868 - DNA, 387 bp, Gossypium hirsutum
tgttttaaacctgataaccaggggcgtaaaagccagaggaatagacgaggaagacctagccgacagactcagtgagttaccggataatgttattttgcacatcatgtcatcgcttccgatgaaagaagcagttcgaacatgccttctgtctaccagatggaaggatctttttacttccatatccaatattgagctcgatggagttctaaggaagggggctttacgtaatagattcatggaatttgtggatggatttctgtccttgcgtaaggatatcagtgtggatagatttcgcctctgctatggacccggaattgatcatcgcaagatcaatgaatggatactgtacgcagtaaggcatggcgttagagaacttgaattgatctt

SEQ ID NO: 235869 - DNA, 197 bp, Gossypium hirsutum
acgtttacgcttccgcccacgcgttcggggtagtgagctttttaaacacaatgcttccaaagaagcattaggtgacttgtccattttatttgatgctttgtataaatcaaggtgcatagacaaagtggttttcgatttgagtctcgacagaggtcttgattattatactggtgtcatatttgaagctgctttcaaag

SEQ ID NO: 235870 - DNA, 366 bp, Gossypium hirsutum
ttcacgcttccgaattgctttaaaagaacaatagcagatgaaggcatgatgtctttgtggagaggaaacgcagctaatgtgatccgttatttcccgactcaggccttgaactttgccttcaaggattactttaaaaaactgttcaactttaagaaggaccgtgatggctactggaagtggtttgctgggaacttagcatctggtggtgcagctggtgcctcttcccttctctttgtctattccctggattatgctcggactcgtctggctaacgatgccaaagccgcaaagacaggaggggagaggcaattcaatggcttggttgatgtatacaccaagactctcaaattagatggtattgctggc

SEQ ID NO: 235871 - DNA, 427 bp, Gossypium hirsutum
gtgatcgtcgattcaagaggtctcctgtcaggccttcttctacacatctgtccagcatcagcgacttctccattgacagtgcacagaaatctcataaagagcaggactatttcagagaacgtttattggccatggaagaagaaacaaagatgctgaaagaagctttggcaatacgtaacagtgaactactggcttcaaggaacctgtgtgcaaagacatccagcaagctccaaactttagaagcacaacttgccatcagcaaccaacaaagaagtccttcaaaaacaattgttcagattcctacagaggtttactccagccaaattgctagcaatccaccaagtatgacttctgtgtctgaagatggaaatgatgatgatagaagctgtgctgagtcatgggctacagctttgatctctgagctctc

SEQ ID NO: 235872 - DNA, 309 bp, Gossypium hirsutum
ttccacgcgtccggttcgatgcggtttggcatgggccaaaacagcgatgtagcttggcacattgcaatgattctactgaacccatgcctgatcttaatcgatcacggtcattttcagtacaattgtatcagcttgggtcttaccatagctgccattgctgcagcactctctcaaaaggatcttgtggcttccgtgctatattgtcttgctctcaaccataaacagatgagtgcatattttgcacccgccttttttggctatctattgggtaaatgcctgaggaaaaagaatccactgctcgaggtgaca

SEQ ID NO: 235873 - DNA, 389 bp, Gossypium hirsutum
ggacacctaagcaaaacaaaatgttcgagaaggctctggctgaatttgaccaggacactcctgagcgctggattaatattgctaaagctgtgggtggaaagtcagctgaggaagtcaagcagcactatgagatcctagtcagggatgtcaaagagatcgagtctggacggtacccttatccatatccaagtgggagcagcaactaaagcagtgagttatcagcttaccgtatccaaagggtaatgtgctagtgactttgtaccactcagtacccaacctaataaataatcagctaatatccaaaaccactttatatgatcattcacagctctattcacttgtgtgaaacccttgtttcgttcaatttcaaagtcgctgtgaaacccttt

SEQ ID NO: 235874 - DNA, 268 bp, Gossypium hirsutum
tttattttgaaagatgaatggtttaaaaagggttacaagcctcctgtgttcgaggagaaagacgatacgaatttagacgatgtataagctgtttttaaagattatgaagagcaccatgtaacataacagagagaagaacaaccaacagctatgaacgctttcgagttaatttctatgtcaaaagggttaaaccttgggaacctgttcgatgcagaagagggatttaagagagaaacaaggtttacatctaaatgttctgctaatgaga

SEQ ID NO: 235875 - DNA, 405 bp, Gossypium hirsutum
gttttctcttttcctctttctctgtgtaagggtttcttttctttctgttccttttttttaaaatacaataattataacaacaacaaaaaaagtcatgtcgaagaagaggaaatccgatgctacgcgcctggacgaggtgagtcggagcatgtacactgccttctgcagcgccgctaattctctttctcagctttattcccactccatgaaccaccagagcctctctttccaggctggcgaacgttacgccttggagaaactttttgagtggattttgaggcagcaagaagaaggattgaaagtgatgacaactgatattgttgcttatttgcagaatgagcttgaatatggagcagaggatttccctatgtcccccagacagccatttcagcagcagcagcaccc

SEQ ID NO: 235876 - DNA, 408 bp, Gossypium hirsutum
ttttggatgactatacatgtaatttacccaaacattagtattataaatattatcatattaatcaaatatgacgtgaattcatcaaccgaagcaaaatactctcgctttcaataacttcagccgcaagtaaccgagatttcgcaaccacaaatgtttccgaaacatgaaaacagcccttttttgtgagcacgtcttcttgaatgtctcgactttttggttgacgttgtcggagtctgactagaaaggaagctcgaaaattcattacttgagtcataaaccggtgggagttcggttctccaccgttcgagtttcgaatcgagcccttccatgcttccatctaaactccatccttcgcccaccgaactctccatcttttccattttacggtttcttgttcctcagcaccgc

SEQ ID NO: 235877 - DNA, 331 bp, Gossypium hirsutum
ctcggattttaagatttggcttcttacaatctaatggagtggaagcaaaggttgccctagaagatgaacattttgctttgtgacaatctgaagcaggaagttgcgttttcttccacagcagtggcattgagatggatatgaacttcactgctgattcttccctggctccatccagatggagaaaagttgcatacggagggatgcaacccggatacgacgacaaccacacagatgaaactttccttgaagatatggcaatgaatgctaatgtcgttaaacggaatatgcttaaggtgatgcaagattcgggttccatctcacaatatctatg

SEQ ID NO: 235878 - DNA, 366 bp, Gossypium hirsutum
cccactctttcgcccacgcgtccgggacagtacaagagccacagtaaaggaggagttacttaccctgcctacacggatgacaagaccgtgcccaaagatagtttgaccccaacttttgcagccgctgccttgttcatagacaatgcacgatgggatggggtgccttttcttatgaaagccggaaaagcattacataataagagggcggagataagggtacaattcatgcacgtgcctggcaatttatataaccgaaattatggaactgatcttgatcaagctacgaatgagcttgtcattagagtgcagccagatgaagctatttatttgaagatcaataacaaggtccctggactcgggatgaga

SEQ ID NO: 235879 - DNA, 448 bp, Gossypium hirsutum
ttcttttcaaaaatggcttcttctttgttagttttagctaccatttttgtgttatgcagctttggtaaagctactcatcctggtctcattttaacagtcgttaacaactgccctttcaccatttatcctgctatccaacccaacgctggccaccctgtcctcgaacgaggcggcttcgctcttcataccctcacccaccgttccttccctgcccccaccgtccactggtctggccgtatctgggctcgaactggctgcacctactctaacggacatttctcctgtgccacgggagattgtggccaccgcattgaatgcaacggtctcggtggagccactcctatcacaattgctcagttcagcctccaccacggtggccataaagatctctcttcctacgaagtcagccttgtggacggttttaacatccccatgactgttaccccgc

SEQ ID NO: 235880 - DNA, 461 bp, Gossypium hirsutum
tctgtttctttattttctaagccaaagcaaagcaaagcaatagtcagtccttcaccaacctcctcacttcactcctcctcctccttcaccaccctatcttcaaatatctctatcttatttgagtttgtttgtttttcagttcccttttgagcaccatgggttcttccatctatggtgtctcttcctcccacatctcccttttccttttcttctcctttctttcgctctccacggctgcattgcctcaaaacccgtctgggaaatcctcaccttctggtcagatcaactccaactccgtccttgttgctcttcttgactcgcattatactgagttagctgaactcgtcgagaaagctttacttctccagacgcttgaagaagcggttggcaagcacaatattaccatttttgcccctcgcaatgaagccgtggagcgtcaactcgaccccgagttcaagcgc

SEQ ID NO: 235881 - DNA, 405 bp, Gossypium hirsutum
aacagcaatatgatcgtttcttggaatcatatcactccttggaaaaaaaatactaagggccaacctgatagtgttgttgcattagccaaatggaggatcttaaatagattgcatgacaggaatgaaacactatactacagagtccttatggacaacatcaaagattttgcacctataatttatacgccgactgtggggctagtatgtcaaaactactctggattgtttagacgcccacgtggtatgtatttcagtgcgaaggataaaggagagatgatgtctatgatatataattggccagctcaacatgttgatatgatagtcctgactgatggcagtcgtattcttggccttggtgaccttggagctcagggtattggaataccaattggaaaacttgatatg

SEQ ID NO: 235882 - DNA, 405 bp, Gossypium hirsutum
ccctcgcgtccgcttgccgggagtaagttttgtttgttcgagtacggaccggagatatcggcgatcggtgaagcgatgagtttcgggtgtgtgcccgtggtgattactgaccgtccgatccaggacttgccgttgatggatttgcttgcgtggcaacagatcgcggtgttcgtgggatcaagcggtggagttaatgagatcaagagggttttggggcgcgtggtggtggaagagtacgaggatatgagggaatcagctgcggtcgcgagtaagcattttgtgtggaacgatacgccagatccgtgcgatgcgttccatatggtgatgtatcagttatggctgagaaggcataccatcagatatgctgagagagaatgggcttaagagagcttaaggatttaaaga

SEQ ID NO: 235883 - DNA, 418 bp, Gossypium hirsutum
tcaaaatctctgaactcaaaatgcttgaccaaagctaaagcttttggggtagatccaattcacccatcaaaccttagtttgccctgccaattttattttccttagagaaataagaaaaaaatgacaatccattcggatgtaatccaaaaactcttaacaacaaatgctcacatcggtcgacaagtaacaacccaccacttcaaacagttcacctacggcttccgaaatatacaatgcattatcgattgcgtcaagaccctaatctgtctccgcaatgctctcaacttcctttcctgcctctctcgtgatccttgttgctctttcctcttcatcaacactaaccctctgttccaacccataatcgacgagatgacctccagagtcaccagcttaagccctgaaagggctagtagccttt

SEQ ID NO: 235884 - DNA, 469 bp, Gossypium hirsutum
ggcacttcctggtgataatgttgggttcaatgttaagaatgttgctgttaaggatctcaagcgtggttatgttgcatcctggacaaattggaaacggatatgccccagtcctcgactgccacacctcacacattgctgttaagtttgctggaccgcggcatcaccttcttgcaccggatgggaatcgggtttttgatctcagtattagccactctcgtagcagggttcatagaagtgaagcgtaaacaagcagctgtggcacatgggcttgaggacaagcctcattctatcatccccatgtcagtcttttggctcgtgcctcagtacggtctacatggaatagctgaggctttcatgtcaattggacacttggagttcttttatgatcaatcaccagaaagcatgaggagcagtgctactgctttgttctggactgcaatttcagttgggaattatgtgagtacgttgc

SEQ ID NO: 235885 - DNA, 517 bp, Gossypium hirsutum
cggtcgcttgggtttcaatttctcatgcaatcatcaaaagctatagaacccattttgttcaaaacccatttatccactatgctcaaaatcctccacaaaagaatcaaaggccttttccctcgtctccgatggccggttcgatgccgttcaaattccaaaatcgtcattaaagtctacaccaaacctcacgatgataccgtgaatggaggttcgcaaattcaccaaaatggcgaatcgggtgttttaaactcggcgtcggcgaggccaattcgtatagcgaatttcaatgccgccatgttttcaatggcacctgcaatgccaaaaccagataaatcttcgagttttgactacgataatgaaggttttacaaagtctacaaacgatcaccggccaaagggtatactaaaacaatcccccttacacccaaattccatgaacgaaaacgatagtctcacgaaacaacaaatattcgtgaaatctaagctgagggtgccgattaatttaccagataatgaga

SEQ ID NO: 235886 - DNA, 482 bp, Gossypium hirsutum
atcaaatcccagcttagcaacctcacaaattttttctttaaaaaacccatctttctggttctaaactcacccccatccatctcttttgcatataccttcagtcactaagcaatagcagccactactgcaaatggcttccaacaaaacctgtgctgtccttacagttttctctcttcttcttttcaacttatcattccaccacctgctgcatgccctccaccaccagcaaagcctgcttcttgccctaaggacacattgaagctaggtgtttgtgctgacctacttggactggtaaacatagtggtgggaacacctccttcgagcaaatgctgtgctttgctccaaggcttggctgatttagaagctgccctttgcctttgcaccgccattaaagccaatgtgcttggggccaacctcaacatccctattacccttagcttactccttagtgcatgtcagaaggaaatccctccaggcttcaa

SEQ ID NO: 235887 - DNA, 407 bp, Gossypium hirsutum
cccacgcgtccgctccaacaaagaagctaagagatctcaccgtactggaaaaatgggattagggttgttagcttcaagaacccttaagacctccagggttctctcttctcagtactctcgattccgacccatcgtcaccaaacctggcctccaatcccccgatgcatcagctgccgcaccagcaacgcagccggagcccactccgcctctgcctaagaaacctgtgggcggtgcccgggtccacttcaccaacccagatgatgctctcgaggtgttcgttgatggataccctgtgaaaatccctaagggcatgactgttcttcaggcctgcgagatcgctggagttgacattcctaggttttgttatcatagccgactttcgatcgcgggaaactgccgtatgtgcc

SEQ ID NO: 235888 - DNA, 487 bp, Gossypium hirsutum
gcattgttttctctgtttgccatttgccttaatcatcttcctctttctttaaaacctcttgaactctgctatagatcactctgtgcttgtggtgatcggccaatagctgatggaagccttcttgatttcttacggcaagtttctacctttgggctttcacttgtgaggcttgatatccgacaggaatctgatagacatactgatgtccttgatgctatcacaaagcacctggatattggatcttatcgagaatggcctgaggaacgccgacaggaatggctcttatctgaactcagaggcaagcgccctctattcggccctgatcttcccaaaacagaagaagtcgctgatgtattggacacatttcatgtcatttctgaactgccttcagacagctttggtgcctatataatctcaatggctacagccccatctgatgtgcttgctgttgagcttttacaacgtgaatgccatgtaaagcaaccat

SEQ ID NO: 235889 - DNA, 496 bp, Gossypium hirsutum
tcggtctcgtgggccgggacaaaaaagaagaagaagagcggccattgaaattttcttcgtcaagctgcttttctcctctggttaaaaccccagaattcgagttttccgaggagaaggaatcgatggatttagatcaatggatatcaaaggttaaagaagggcagcatctcttggaagacgagctccagcttctttgtgaatacgtaaaagaaatcctcatcgaggagtcaaatgtgcaacctgtcaacagtccagttactgtttgcggtgatatccatggtcagtttcatgatctaatgaaactttttcggactggaggtcatgtaccagagacaaattacatttttatgggagattttgttgatcgaggttataatagtcttgaagttttcactattcttttgcttcttaaggcaagatacccagcgaatatcactctcttgcgtgggaatcatgaaagcagacagcttactcaggtttatggtttctatgatga

SEQ ID NO: 235890 - DNA, 421 bp, Gossypium hirsutum
atttgttcatgtttcttccttcactctcttttgtttcctgtcccatgaatcggtggaacaaccaaaatccataataacattctttcacttccttctttctttttctcttttccattttgatccctcacaatttctgggtctgcaatcaaggacgtctaaacctttcacattcatcacaaccgggtctgtttatattgtctcaaaggttatcataagcctatataataataaaagaaacatgcaaaaggataacagtgcaccatctacacctactagtgctcgagctcggcaccgaagacggtccaatgagtttccggctgatgagagcaaaacaaacggacatcttttactagtaaatgatcacaacaaataccggtcaatgtggattcgagctttttcatctctgtggatgctggggttc

SEQ ID NO: 235891 - DNA, 418 bp, Gossypium hirsutum
tcctctcgtccgcccacgcgtccggttctcagtctataaaaacaggttttccgggcaatttccagccaatttcggtcggttctcccctttgattagtattgacatatcagagaatcaattttcaggtggattcccgaggttcttgtgtgagaggggaaagctaaaactcttactggctcttgagaacaacttttcaggggagtttccggattcttatgttgaatgcaaatcactggtaaggctcagggtgaacaagaaccatctttctggaaatattcctgatggattttgggcacttccgcatgccaatatgattgacttcagcgataatgacttcactggaggagtatccgccagcattggatcttccatcggcttgaatcagttggttttgcaaaacaataaattttcgagctct

SEQ ID NO: 235892 - DNA, 503 bp, Gossypium hirsutum
cttcttttgggattctttcaggcatcgggtcttctgccttcgtctgcggaactctgtctacccgtttcctctctactgcttccactttccaggtcgcgacagcaatggggatgctgtcagcggtttacatgagggttttcctcccggattcgatcgtaaatgataatctttctactccaattatgtcagaaggaaaacttgatggcattgttaatcaggatgaagagtcagacaagaaaattcagatgtttaaaaccctaccttcaatagaagatatgcttgtcttgttgaaaagcagcttgacgttttcacaagcagcaattgtttcttttttcagcactctttccgatgtcggcctccatgcttctttactgtattatttgaaggccaggtttcacttcaacaaagatcagttcgctgatttaatggtcatcactggaattgcagggactgtatcccagcttcttctcatgcccatactagctcctgttcttggagaagct

SEQ ID NO: 235893 - DNA, 478 bp, Gossypium hirsutum
ttttgttactaacaagttcaatatttaccctgagcaaatttcttcatggcttatggattggatacctgaaaaaggtggttatctactcggcaatctacagccagctcacatggattttaggttcttcacactcgggaacctctggtccattgtctcatcgctgggcactccgaaacagaacgaagctatattgaacttaatcgaagccaaatgggatgatattgcagggcaaatgcctttcaagatatgctaccctgctttggagaatgaggagtggcgcataattaccggcagtgacccgaaaaatacgccatggtcctatcataacggcggatcttggccaacacttctttggcagtttactttggcatgcatcaagatgggaagattagaactagctcaaaaagcagtttctttggtcgagaagaggctctcaatcgaccgatggcctgaatattacgacactcgtagggggaag

SEQ ID NO: 235894 - DNA, 326 bp, Gossypium hirsutum
cctcgcttccgcggacgcgtgggcggacgcgtggggattaaaaaaatatccaatctttctctgctgattactaaaatggcccttcttactctatacttcttctttcattcgctttccggctcgagtggggagttctcaagtcaagcgggagtaaactacggtcagctggggaacaatctgccatctccgaaacaatcggataagctaatccaatctctgggagccaaacgcgtcaaaatctacgatgcaaatcacgacatccttaatgctctcaatggcacaaaccttcaagtctgcatcatggtccccaacgagatcataaacaa

SEQ ID NO: 235895 - DNA, 495 bp, Gossypium hirsutum
tttttcaaaatctcaaactgcaccatcactaatacttcgaatggagctcgaatcaaaacttggccaggcgagcatggtggggcattatcagaaatacattttgaggatattaccatgaataatgtctcttcccctatcctaattgatcaacaatattgcccatggaataaatgcaagaaaaatgaagaatccaaagttaaactaagcaacattagcttcaagaacatccgtggcacatctgcgcttccagaagctatcaagtttatttgcagcggttcttcgccatgtcaaaatgtggaacttgcggacattgacattaagcacaacggagctaaacccgcaacatcccaatgtttgaatgtcaagcctataactagtggcaaattaaatccgattccatgttccggccctatcccaaaaacccctagcgccaccgcttaaagcataccaacaaattcaatgcaattggaattaatatatttattcatattatat

SEQ ID NO: 235896 - DNA, 485 bp, Gossypium hirsutum
cccattcgttcgaaagtggtacatggtggtggaggagatttcgacaccataaccaaagccattgaaagtgttcccacaggaaacaccaaacgtgtgatcatatcgattggacctggagtttatcgagagaaaatcaaaattgaacgaactaagcctttcattacattgattggagatcccaaaagtatggcaaatttgacattcgacggcacggctaagcagtatggaactgtagatagtgccacccttattgttgagtctgatttcttcgtggctgctaatctgtttatagtaaacattgctccaaagccagacggtgaaatggagggagcacaaggggtttccttgagagtttctggtgataaagcagctttctataattgcaagatcattggtttccaaaatactttgtgcgatgacaagggcaaccatttctttatgaattgctacattcgtggcactgtcgatttcatttttgggaatgg

SEQ ID NO: 235897 - DNA, 451 bp, Gossypium hirsutum
tgatcgggatgctcctacaagacctgtagaaattatggggactttgagtagcataatcaaggctgagaagcttataaatgctgtcatagcagaggctgatgctgggggttctccttccctagtagctaggggccttgctaccacacaggctgctggtgctgccgatcaaattgagatacaagttccaaatgagaaggttggtttaatcattggtagaggtggggaaactataaaaggactgcagacgaggtcaggggctcgaattcagttgatacctcaacatctcccagaaggggatggatcaaaagaaaggacagtgagggtaactggggataagaagcaaattgagattgccagagaaatgataaaagatgttatgaatcagactgtcaggccatcacctctttctggtggtttcaatcagcaaggctatcgacctcggggaaacagt

SEQ ID NO: 235898 - DNA, 410 bp, Gossypium hirsutum
tttatcttatgggacctatgaagaacttgatagagggaattcggtaaccaatctccatttcaaaatgcgagatatggtgtatctgttggtgcatacatgtgaagtaaaggtaaatggtcagaggacaaaaaaggacatactcaaatccaatgggaaatctgaggtaaatgagtccttgagggattctgaaacaaggtcagatgagaaaagattgcctgatttatctattgatggacctgatattgatgacgaatctgagagcacatctgatgtacatgaggatcaagaaactgaaactaccatgattgcagagaaatctgcagattttgaacagttaaatggggatagcagggacgtgataggaaatcctaaagcaggagcgtgttgggatgtctttcgtcgacaggatg

SEQ ID NO: 235899 - DNA, 341 bp, Gossypium hirsutum
ggagaagagaagttttgcgctacatcattggagtctttcgtggatttcggtgtttctaagctgggaaaaacatccagcttttgtcagctgagttggagaaagaaacgcaaaacccagagtttagtattggtgatcagggggtgaaattgatgggaaaaacggagattgtttgccacaaaatggattatgcatatgctgtgttcttctgccactcaattgctaaaacaaacgtgtatagggttccattagttggggcagatgggacaagggctacaatattggctatttgtcatgaagatacttcagcttggagccccggacacttggcttttcagactctc

SEQ ID NO: 235900 - DNA, 504 bp, Gossypium hirsutum
cccacgcgtccgcccacgcgtccgcttttaagtttgagattggaagtgaaactaaaataactgagttaatatggcggtccaagttccgagtcgacaattattcatcgatggcgagtggagagagcccattctcaagaagcgactcccaaccatcaatcctgctactgaagagatcatcggtaacattccagcggctacagctgaagacgtggagcttgcggtggcggctgctcggagagctctttctagaaacaaaggtaaggattgggctaccgctcctggcgctgtccgtgccaagtatttacgtgccatcgctgctaaggtaacagagagaaaaactgagttggctaagcttgaagcaattgattgtgggaaacctcttgatgaagcagtttgggacattgaagatgttgctggatgttttgagtactatgcagaccttgctgaaggcttagatgcaaggcaaaaggctcctgtctctcttcctatggagacatttaagag

SEQ ID NO: 235901 - DNA, 487 bp, Gossypium hirsutum
gtttacttgtattctactacaacggagagcagaaaaaagcgtaaatctcgagcgcccgagcggaagcgaagcagttgttttttcatttcttttggctctgattaacggagagactggtttaattgcattcttggagccttctgttatcctcatgatattagctgccaatgctgcagtaggagtaattacagaaacaaatgctgaaaaggcacttgaggagttacgtgcctaccaagctgatattgcaaccgtgctgcgcaatggttgtttctcaatacttcctgcaacagagttagttccaggagacatagtagaagttagtgtgggatgcaaaattcctgctgatatgagaatgattgagatgttaagtggtcagttacgtgttgatcaagcaatttccgagaggttgcgattaaaggattctgggacatgtatgatcccgagggatactcactgtggttttgtgactacaagtacaatgaggaga

SEQ ID NO: 235902 - DNA, 477 bp, Gossypium hirsutum
cagctaccaagatttccaccctatttataatttattaaacatggcattctatttcatgattcccttatttgcttccattttctttatttttctcttcaattctctgcttaatttgttcaaatccaaaaaatcccgggatttacccctcccgccaggcaccttgggttggccgtacatcggtgaaacctttcagctctactcccaaaacccaaatgtcttctttgcttccaagcagaaaaggtacggctccatattcaagacccatatactcgggtgtccctgtgtgatgattttgagccaccacttatccctgctaagacgattcctgatccagacgataagaaacctgaggactgggatgagagagccaaaattccagacccaaatgctgtaaagccggatgattgggatgaggatgctcccatggaaattgaagatgaggaggctgtgaaaccagaaggatggttagatgatgag

SEQ ID NO: 235903 - DNA, 495 bp, Gossypium hirsutum
gaaggctaacacacacaagaggccacctcgtagagctaatgaactctcataacattcttatctctaacctaaccttccggaattcaccattttggaccattcatcctatttactgcagcaatgtcgttattaagggcatgacaatattggctccccttaatgccccaaatacagacggaatagaccccgactcaagtaccgatgtatgtattgaagactgctatattgagagtggagatgatcttgtagcagtgaaaagtggatgggaccagtatggcatcagagtggcacgaccaagctcaaacataatagtaaggagaatctcaggcactacaccaacttgttctggtgttggcattggtagtgagatgtctggagggatttctaatgtaattattgaagatatgaatatttggaattcagcagctggggttcgtataaaaactgacaagggtagaggaggatacattgcaaatatcaccataaaaaacataa

SEQ ID NO: 235904 - DNA, 120 bp, Gossypium hirsutum
gtccctggagggtatgtttaccagaaggcttatgttgagtttttttgctcaaaggaaaaactagatgcacttgtcaataaatgcaagcccttgtcatctattacctacattgctgtcaac

SEQ ID NO: 235905 - DNA, 120 bp, Gossypium hirsutum
gtggatgttgcccattgtgtttgcggttgagaacaggtggtgttctatagggatgtctgatttgagggctacgcctgatcctcagatttataagaaaggacctgcctttgggatgcctgg

SEQ ID NO: 235906 - DNA, 149 bp, Gossypium hirsutum
cccactgcgtccggcggtggttactgttccagcttacgtgaatgttgcaccaaaggcaggccacaaaggatgctggcattattgccgggctcaatgttgctagaattatcaatgaaccaactgcagctgccattgcctatggtttggac

SEQ ID NO: 235907 - DNA, 264 bp, Gossypium hirsutum
ctatgtcaagatcgtgcactggcagcttttaatcttgaggccgacaaatggggagtcaatgtgcagccttattcgtgtacttctgcaaatttcgccgtttatacggcacttttgttgcctggtgatcggatgatgggattggattcgccatctggagggcatatgagccatggatggtatatgccgagtgggaagaaagtgtctgctgcgtcgatattctttgagagttttccttacaaggtgaattctcaaacagggtttatt

SEQ ID NO: 235908 - DNA, 433 bp, Gossypium hirsutum
cggacgcgtgggaaagcattaagtacaatgtttgggcgagcacaccaaatggtaacaaaaagcttgatgcagcttaccaggaagctcagcagaaatctggtcactgccctatatttctcttcttctcggtcaatacaagtgggcaatttgtcggcattgccgagatggtaggggcagttgattttcaaaagaatgtggagttctggcaacaagacaaatggactggctgtttcccagtaagatggctcattattaaggatgtacctaataattccttgaagcacattaccttagagaacaatgagaataagcccgtcacaaatagcagggatacgcaagagatcaagcttgatcaaggccttaagttgctcaaaatcttcaaggaccattccagcaaaacttgcattttagacgatttcgaattttacgagat

SEQ ID NO: 235909 - DNA, 308 bp, Gossypium hirsutum
cccacgcgtccgcccaaatgcgcgaagcccatatcctctggggcttcacttctcgccaacccattttcctctacaactccctcatcagagcctactcttctcttcaccaattctctcaatccctcgccatttttcaccacatgatcattgcccaaaggccctttgacattttcacattgcctcccgttctcaaatcttgcggacacttatctcatgtaacacttggaagacagctccatggatctgttgtggctaatgggtattcattcgatttggcaaataacaattctttgatcagtatgtatgga

SEQ ID NO: 235910 - DNA, 444 bp, Gossypium hirsutum
gctttccgtaaaagtgaggcttctttcattacttataggggggacgttcctccaaccccgaagaataaaagtaatttcttctactggtatatataacaatggtagaacctcggcgtttactcctgatattctttttgtcgacattgttgattgcttatagcaatgcaaatgtcgaagagattcagaaggataccgaggaaggggacgaagaagttaaggtaggaggtcagaaggctctgggtgtgacatacgacgcaaggtccttgatcatcaatggcaaacgagagcttctcttttcgggagctatccattacccacgtagcaccccagatatgtggccggacctgattaaaaaagctaagcagggaggcatcaatgcgattgagacgtatgttttctggaatggacatgaaccagttgagggacagtccaactttgaaggag

SEQ ID NO: 235911 - DNA, 377 bp, Gossypium hirsutum
gcggttggtttcggcccgatattactgatacggtcatggcaccgttgttaagattcttgaatggaaccaaatcgttctttttcattgatgtttatccttatttagcatggtcagctaatccgaaaaacatcagtttagattttgctctctttagaagcagggtgaaccaaactgaccatggaagtcacttggtttacaccaatctattagaccaaatgctcgattcggtcattttcgcaatgagaaaactcggataccccgatatccgacttgctatagccgaaaccgggtggccaaccataggtgatatcgatcaagtaggtgctaatatcaacaatgcagccacttataaccgaaaactagtccaaaaaatgact

SEQ ID NO: 235912 - DNA, 311 bp, Gossypium hirsutum
cttattgacatagcttacaggatgccagaagacggggggtactttttgttttatagggaatctttcatggccaacctcagataggggcctaaaggatgcatttgagaagtttggaaatcttatcgaggctaaggttgctgtcgacaagatttctggacgttctcgtggatttggatttatctcttttgatgagaaagcggccatggaagaagctattgaagcaatgaatggaatggacttggatgggcggaatataacagttgatagagctaaccctcaacatgggtctgggagagattatgatggtgacc

SEQ ID NO: 235913 - DNA, 382 bp, Gossypium hirsutum
gggtcaaaaaaatccataaaacagagcacttaaacataaccaaatcattaccaaaagtcaacaacaacatgcaatagaagttatatttaaagggtttttttttcttataaacatggttgatccaacttcattttcatatctttaattaaattgacagcttctttttgtttttgcccttaagttatcaaattgagtgaaaataaaaaacagagacagcaaatgaaaaacgaagaacaagcacgtttcttgtttgggatttcactctctgatttgcctaaatggaaacagtttcttatttgttcttctgggttcttctttggttaccttgctaatggcgcttgtgaggaatatgtatacaacagactccagttcagctatgggt

SEQ ID NO: 235914 - DNA, 349 bp, Gossypium hirsutum
agagatcattagcaaatgatgtcttttcttgctaaggccatgcaaagtccaggtttcttaagccagcttgtacagcaacagaatgaaagcaacagacaccttactggtggaaacaaaaagaggagactctcagactggatgaagaaaatttaaccggtgaacatggtaccatatttcctaatagacggattgtaaaatttcagccttcattgaatgaggcagcgaaagcaatgttgcaccagatattgaagatgaacacatcacctaggttggaaccttcgatagataaccccgatactttcatgattgatggtattcctccttccaatgcattagacagcaggagctg

SEQ ID NO: 235915 - DNA, 369 bp, Gossypium hirsutum
ggcatttccttgattcctttcctttctcaagaattgtggaaaatcatatttttggaggttctgagaatggagacgcagaagctagacagtcatatgcaatcagctgcagcttttgtgcaagggggaatcctggatgccaatgacgattcttgtagcatatgccttgaggagttttctgctagtgatccttctacggtgactaattgtaagcatgagtttcacctccaatgtattcttgaatggtgccagagaagctcacaatgtccaatgtgctggcaagccattagcttgaaggaccctgcaagtcaagaattgcttcaagcagtagaaacggaaaggagcattagggttactgcaccaagaaatact

SEQ ID NO: 235916 - DNA, 187 bp, Gossypium hirsutum
gcaaatccttacaattccattttgaagactttggagaagccgcaggtttttgaattcggcaaaccactattctccacctgctctcaatgatccaaggatcgataaacttccttactctattaaaatactttttgaattcccaatccgtaactgcgatgagtttcaagttaagagtgaggatgttgag

SEQ ID NO: 235917 - DNA, 404 bp, Gossypium hirsutum
aatcattgttggcagctacaaacccaacagaggagcatgtgcactccacttttgcttctagatatgttcgcgctcctgttccaaggttcaagatgccggagaagtcgattccaaaggacgcggcgtatcaagtaatacatgatgagcttatgctggatggaaatccgaggttgaacttggcttcatttgttacaacatggatggaacctgagtgtgataagcttatgatggctgcaattaataagaactatgttgacatggatgaataccctgtcaccactgaactccagaatcgatgtgtaaacatgattgcaaacctgttccatgctccggtcggggaagaagagacagcagtaggtgtgggaacagctggttcctctgaggctataatgctggctggatta

SEQ ID NO: 235918 - DNA, 334 bp, Gossypium hirsutum
cccacttcgtccgcgtacgggtttttcacttgaagatgcgacagggctggccataaaaggagatgtggacattcattcagtttatgcaacctctcttcccacctctcatccaagtttttccccccaaagagtactggaaatgtcaccaaaatggaaagcttctcccttgcctaagagatcaattcgactttttattgggattctctctgctactaatcactttgcagaacgcatggcagttagacaaacttggatgcaatcttcagccatcaagtctttagatgtagcggtccgtttctttgttgcactgaatcctaagaaggaggtgaatgga

SEQ ID NO: 235919 - DNA, 406 bp, Gossypium hirsutum
tcgcctacgcgtccggttgaaacttggtctcgcccgtttagatgaaaagcatttgttggcagttatatttttcggatctcaggtcttgctcacttccataaacatttggttgccctctttcttttgagggaaaatctgattgcctcgtttggttgtttgggaaaagaaatcaaggaaaatggtttatcactctagttttgttggtgaggaaggaattactaaagcttgtggcttccctttacttcctttgaaaagccatataaagggtcctgctcctgtttcagatcaaggtaaaactgatattgttgatgaagcgatcacattctttcgtgccaatgtgttctttagaaactttgatgttaagagccctgcagataagctccttatatatttgactttctacata

SEQ ID NO: 235920 - DNA, 425 bp, Gossypium hirsutum
ctgtgatcaggaaattgcacctgaccacacagtaaagttagatcgtgtgggagctgatatacaaattgttcgaaggcatggaagcagctttcgtcgtttgacgctgattggctctgacggctctcaaaggcatttcattgtccagacatctttgactcctaatgctagaagtgatgagcggatattgcagctcttccgtgtaatgaaccagatgtttgataagcacaaggagtcccgacgtcgtcatatatgcatccacacacccattataattcctgtttggtcgcaggtgcgcatggttgaagacgatttgatgtacagcacattccttgaggtgtatgaaaatcattgtgcaagaaatgaccgagaggagatcgtccaatcacctacttcaaggagcaattaaaccaggctatattggggca

SEQ ID NO: 235921 - DNA, 513 bp, Gossypium hirsutum
ctatcttctctgttggcttggtctcacttgtaaggtgttgtttgtttccatattgcagagaagaacttgaagaagaaaaagtatggcctttactacccttagactccctccttatccaaagcttgttaccaacaacaggtttagcggcatctttgcttctcaatttcattcttccgctttaccatcaagattggtgcttggtagttcctcttcctgtgtgggaactcttagcttaagcatcaatcatcatagctcacgatggtcctctactactttcacatgcttttctcagacatcagagctctccgtttcagttgatacatatggcaataacattattggtggaggcggaagagaacacgctctttgctatgcattgcagcggtcgccgtcttgcgatgctgtcttctgtgcaccaggcaacgcggggatttccacctcggggaatgcaacctgtattcctgaccttgacatctttgatagcttagctgtgatttcttttgcagcaatggg

SEQ ID NO: 235922 - DNA, 470 bp, Gossypium hirsutum
  unsure (1)..(470): unsure at all n locations
ttcacgcgtccgagaagctgaaatagtgtgctgcccctttgctaccacttcgcctccgctactctgccatccaactggtacatgaagcaaccttttttccagtgctcaaccattgttagctaaagctgctaaaggtgtctttgattacggatattagatatgtttaacattgcaacgaccttctgcaaaaggataagcgtgaaggagctagttaccagcgctcctgtgtttggcacaatcacggatggatcttcttctggcttaagtttgatgcttaggcggtgggctagtaaaaaaactgctggatcaactaagaatggaagagattcaaaacccaagaatcttgggtgaaagaagtcttggtggcgagagggtgattcctggaaacattataggttcgtcaacgaggaaacacgtttccatcctggaaactatgtnnggatgggaaaaagatcatactctctatgccc

SEQ ID NO: 235923 - DNA, 426 bp, Gossypium hirsutum
ttcaaacaaactttttagttctcaactctctcaaattcaccatggctgacaagtgtggcaactgcgattgcgctgacaagagccagtgtgtgaagaaaggaaacagcttggtcattgagactgaggagagctacatcagcaccgtagtggtcgagcctctggcagagaacgatggcaagtgcaagtgcggaactagctgcagctgcacaaactgcacatgtggcagtcactaagcagacatatagaatgatgaagtttgggacctaaaaagaataaaagttgggttgaataatttgtgtcttttgttgtagtttgagtgtgttttcttgtctatctgtccgatgattgtctatgtctctcattttatacaatgatggaatgaccatgtcaatggcctttgtctgattaatgaactattattagtat

SEQ ID NO: 235924 - DNA, 508 bp, Gossypium hirsutum
tttggaactcattggcttacgaatcggactctcccaccagggaaaaaagtttcatcttttagataaaagaaaatgcgtgatcatctcgtagtatgtgttgaccgccttacgaaatccgaaagtttgaaaccagtgaatgaacccgaggttgcaggaccttcgggtgaaggttcttttatagttgctgacccacatgtttgtgctattgatgttgaagaagtggaagaacacagttcatgtgatgaagaagaaccgcttatccaaacggttgaatgccgaatctgccaggatgaagacaacattaacaatttggagacaccttgctcatgcagcggcagtttgaagtttgctcataggaaatgtgttcaaaggctggtgcaacgagaaaggagacataacgtgtgagatatgtcatcagccttatcaaccaggatatactgcaccaccacctcccccttgccagaggttgctacaattgatatcagtgagtggatggtcgctggtgctc

SEQ ID NO: 235925 - DNA, 326 bp, Gossypium hirsutum
ttttcgcgtccgcctaggcatgatagtgctgagactattaaacgggcacttgaacttggcatcagtgttaagatgatcaccggtgaccagctcgccattggcaaagagactggtcggagacttgggatgggaactgatatgtatccctcttctgccttacttggagagtgtggggatgaggatattgctgctattcctattgatgacctcattgagaaagctgatggatttgcaggagtcttccctgaacataagtacgaaattgttggaagacttcaagaaaggaagcatatatgtggtatgacaggagatggtgtgaacgatgc

SEQ ID NO: 235926 - DNA, 431 bp, Gossypium hirsutum
gttcaccaaattgcttggtcgcatttattaccacaaagcaggctcttctacccctggttattcgcttcgtaccttctcaggacattctggtaacgttatgtcacttgacttccacccaactaaggatgaccttatttgctcttgtgatggtgatggcgaaattagatactggagtatcaaccacgggagctgtgcaagagttttcaagggtggtactgctcctggtacggcccagttaagatttcaacctcgctttggaaagtatcttgctttagctgcggagaatgttgtatcaatattggatgccgaaactcaaacttgtcgacactcattacagggacatacaaagctaatcattatccttttttctcccttgattttttttttttttggttattctgagtttgtgtcctgtatcagtgtcgtattgc

SEQ ID NO: 235927 - DNA, 449 bp, Gossypium hirsutum
tgtcacgcgtccgatttgattgaagaactttggaaacaaagtctttttgattaaattgaggaaattcagggggaatcggtcatggagggcaaatgtgcaatcaagaaagatgttactgaattaataggtaatacccctatggtatatctgaaccatatcgtcgatggctgcggtgctcgaattgctgccaagctcgagctgatggaaccttgctccagtgttaaagacaggattgcatacagtatgattaaagatgcagaagataagggcttgattacaccagggaagagtgtccttatcgagcctaccagtggtaataccggcattggattggctttcattggagcagctaggggttataaagttattgtcacaatgccagcttctgtgagcatcgagaggagaatagttcttcgagcttttggagctgaagtatgcctcaaaaccca

SEQ ID NO: 235928 - DNA, 429 bp, Gossypium hirsutum
atttaacctcttgtattcttttatctttctttttctttttgtaggattttaaagatttccaagaaacaggagatttattgagattaaagtatgttagagcagttgctgatatttaccagaggagggttaatcctctggacttgtaaagagcttggaaatgctcttaaagggtcaccaattgacaccttgatccggtcctgtcttttggaggaacggtctggtgcagcatcatatagctatgatgccccaggagcttcttataccctcaagtggacattccataatgagcttggccttgtattcgttgctgtgtatcaacgtattctccatcttttgtatgtggatgagcttcttgcaatggtcagacgtgagttttcagagatttatgatccaaaaaggatggtctataatgacttcaatgaaactttt

SEQ ID NO: 235929 - DNA, 448 bp, Gossypium hirsutum
ttcacgcgtccgcccacgcgtccgcccacgcgtccgatcgaatcgaaacccctcaagttttgttccaatttgtctaaatcggtgaaaaagattaacaatgcctgcaattgccgatcgcagttcgtctcctttcaaggcaatgttggcagccaagagctgcgagctggctggatccggcggctgctgcactcctcagaaacggaggttaaggtccgatacggcattggcggccaaagagagtccggtttcaacgcctatgaaactcaaatcgccacgacgtcgtctagattcaagtccaagcagccctgcaaataggattaagaaagatccgagtgaaaaaacattgaagaaatgttggaatccgagagatgttgagcaaatgagggatgtgaaggaggctgtacatgtttcaacagctccatcaactgttgtgtgccgagaagatgag

SEQ ID NO: 235930 - DNA, 360 bp, Gossypium hirsutum
ttctcactgaacgattattagcaatggaagaagaaacaaagatgctgaaagaagctttggcaaagcgtaacagtgaactactggcttctaggaatctgtgtgctaagacatctagcaagcttcaaactttagaagcacaacttgccatcagcaaccagcaaagaagcccctcaaaagctagcaattcaccaagtgtgacttctgtgtctgaagatggaattgatgatgaaaaaagttgtgccgactcatgggcaactggtatgatctccgagctctctcaattcaaaaaggaaaagagcattgaaaagttgaataaaactgaaaatgtgaagcacctgcatcttatggacgactttcttg

SEQ ID NO: 235931 - DNA, 434 bp, Gossypium hirsutum
attttccacttccttgccttgcttaaccttttcatctcacattccatttccaaggagaatattgtgacaatgacgagtgatacctcatattacgatatattgggtgtcaaggttagtgcatccgcagctgaaatcaagaaggcttattacctcaaagcaaggcaagttcatcccgataaaaaccccggagatccaaaagccgatgaaaaatttgctgcactctccgaggcttatcaggtattaagtgatcctgacaaacgtgaacactatgacaagaatggaaaggatggaatcataccaggctccatgttggatccttcagctgtatttgggatggctttcggaagtgactacttcgatgaatacgtaggcacactagcaatggctactttggcatctcttgaagttgaatttgaagaaagttcagtagataa

SEQ ID NO: 235932 - DNA, 365 bp, Gossypium hirsutum
tttgatgcctccactgtttcctctcccaacaatggtggcatcaaacttctctcttgctttgacactcgctgccattatatctgtctgggtggccgctgatgccgcccaccaccaccacacggcgtcggctccttccccttcctcttcctcttcctccgtggactgctcctccctcatcttgaacatggccgactgtttgtccttcgtatctagcgggagtgaagtgttgaagcctgaaggaacttgttgttctggcttgaaaactgtgctgaaaaccgacgctgagtgcttgtgtgaggcttataagagcagtgcttctctgggtgctactctgaatgtcaccaaggccatgactttgcctgctc

SEQ ID NO: 235933 - DNA, 329 bp, Gossypium hirsutum
ttagtatattactcccaattcgtttctttccccatctacacttggcaagaaaaatcaaggacagttgaggtagaggaggaagaaaaaccaaaagaaggagaagaagaaaagccagagggtgagaagaaaaagaagacaactaaaactgagaaatattaggactgggaattagcaaatgaagcaaaaccaatatggctgagtttgttgttctgtcacctctataaatatgcgaaatccaaaggatgttgaaaagggtgagtacaatgaattctacaagaagactttcaatgaattcttggatcctcttggatacactcacttcactacag

SEQ ID NO: 235934 - DNA, 424 bp, Gossypium hirsutum
tttcccactgcttgtaacaccgtaagcatggagatcaaaatactcctggtattataccgctggcaataaaggatgtattcagcattatccaagatactccagggcgagaattcttactccgtgtgtcatatcttgaaatctacaatgaggttataaatgatttgcttgatcccactggtcaaaatttgcgcgttagagaagatgctcagggaacttacatcgagggtgtaaaggaagaagtgtctttgtcgcctgggcatgccctatcttttattgctgcaggggaagagcatcgtcatgttggttcaaataacttcaatctctttagcagccgaagtcacactatattcacattgatgattgagagtagtgcccgtggtgatgaatatatggaagtgatcttctctcaacttaatttgattga

SEQ ID NO: 235935 - DNA, 365 bp, Gossypium hirsutum
cggactcgtgggcggacgcgtgggtttaaaagcgaagtggaaaattgttatatattttttcccatctctgaaatcccagaattcaatcatttttagctcaaaaccccacttttttccccctttccttttaatatatagtctttacctgagaaactacaaggttcatcagcccccccacattgaaaatgacggagacgccgttctcaaaactctccgacgacgtcggtcttaacatcttctccaagctcgaacatcaccccaagagctgggcttgtctcgcttgtgtctgcaccaaattctcttctctcattcacaacacctgcttcaaacaaaaatgcttcataaccatccccgtcgtttgcgcc

SEQ ID NO: 235936 - DNA, 407 bp, Gossypium hirsutum
gcttgcgagaagagccttgcgtcatctaattccaccgacactaaggagttgataaggacgagtttccaagcagcgatagaggaagtaaggaaagtgttggcgaattcaacgacgatacaagacttaaataaagatgacaacaacagagaggcgcttaaggtttgtcaagaagtgttggatttatcgattgatgacttgcaattgtcgtttgataagatgggggaatacgatatgagtaagatcgatgattacttactgaacctgagagtgtggttaagcggtgccttaactacccaacaaacatgtgtagacacattcgcggaggtaagtaatgaacaagcggagaagatgaaattagtgctgaagacttccatggagcttaccgcttatgctttaaccatggtcac

SEQ ID NO: 235937 - DNA, 403 bp, Gossypium hirsutum
gcctcaaccttttacatatgggttttgctttctgggatattttatcacctatacaaccaatcatcttatcaggcacttgatgagattagccctttgacattttcagttgggaacaccatgaagagagttgtggttatagtgtcaacttttttggtgtttaggaatccagtgaggcctttgaatgcacttggatctgggattgccattcttggaactttcttgtattctcaagcaacagctaagaaggtctctgctcctgaaaaaaaaagctaaggattcagtaatctcttcaaagttttaaactttttttttggggggtctttccttttgatcagatgatatttgcattttgttcccttttcccccttactataaatgtcaataaatgaccttaatattttgc

SEQ ID NO: 235938 - DNA, 458 bp, Gossypium hirsutum
cccacgcgtccgatatcctgaagtttctgccattccaagagcaacctgtcacaataattttgccatattaatccatctgaaggctccccatccaagtgggggaagaaatgaaactatgttttcccctacaactcaaaattctcgggcaccagttgaccttgtcacagttcttgatgttagtggaagcatggctggtaccaagattgcgttactaaagcgagctatggggtttgttatacagcatcttgggccatctgaccggctctctgttattgcattctcctccacagcccgtcgcctctttcctcttcgccggatgactgaaacaggccaacaggaagcattgcaggctgtaaattctcttacttcaaatggtgggactaatattgctgaagggcttaggaaagctgccaaggtaataggagaccgaaagtggaagaacccagttggaagcatta

SEQ ID NO: 235939 - DNA, 547 bp, Gossypium hirsutum
agctctactctttttccatggaggccagggtttgttccggggtattaaccaaaattcagtccccctttttaagccctttacatgcaagtaaactccaatcttcaagaaacatgtctattttgcctaatactatacatacccatcaattctcaaatgcttccctttatcttcgctcccatcaattctcaaatgcttccctttatcttcgctcaactttttctagcagaacccatggtttcaaacaggcgattaaagatgattctcgcgagttcgaattatcaacattaaccgcattgtcacctttggatggtcgttattggggtaaagtgaaagacttggctccctatatgagtgaatatgggcttatttactttcgggttcttgttgagattaaatggttgctgatgctttcacaaattcctgaagtcattgaggttccaagctttagtgcagaggctcagtcttatttgctaggactcattgatggatttagcatggatgatgccctgcaagttaaaaaaatagagagagtaactaatcatgatgt

SEQ ID NO: 235940 - DNA, 351 bp, Gossypium hirsutum
tttttgtcgcgtgggcagctgcaaaagtcgttgggtgggttggccgacgaggtacatgattataccggatgcagccgagggactttcatatttgcatcatgattgtctgcctccgattgtgcatagagatgtcaagtccaataatatcttattggatggtgactttggcgctagagtggcggatttcggagttgccaaggtggttgatgctgctggaaaggtcgctaagtctatgtctgtcattgccggatcttgtggttacattgctccagagtatgcgtatacgctacgggtgaacgagaagagtgacatatacagctttggagtcgtaatacttgagttagtcacagg

SEQ ID NO: 235941 - DNA, 407 bp, Gossypium hirsutum
ctttttctgaatcttctcttttcaccaacaaataattaaaaagttattgggtgtttcgaaaatctccctaaaaaatatatgtttttgtcccttcacttttcattttagcaggattttagcaatgggtgttctcttactgaattcgctcccattagggttccggttccgaccgactgacgaggaactgatccatttttatttacggtctaagataaacggaaatagaaacgatgagattgaaattattcgtgaaattgatgtttgcaaatgcgagccctgggatttgcctgacttgtctgctataaaaacccaagatccgtagtggttcttcttttgcccactcgaccggaagtacccaaccggcaacaggctgaatagggctaccgaggctggttactggaaagcta

SEQ ID NO: 235942 - DNA, 411 bp, Gossypium hirsutum
cccacgcgtccgctccatcgtaagggcgaagcatacaaattattttggcctaatcaaccagaatttgtgagattcgcagcacaatttggggcaaccattgtaccattcggggctgtaggagaagatgatatggcaaaagttgtctttgattactatgactatatgaaaatccctatgcttaatgatagaatcaaagaagtcattcggaacggtggtgtacaaataagggataaagcaaagggagaggtggctagccaagagatattcataccgggaatgataccgaaaattccgggtcgattttactatctgtttgggaaaccgataaagctgaaaggaagggaagatttggtggagaatagagaatctgcaaatgaagtatatttgcaggcaaaagctgaagttgaacgc

SEQ ID NO: 235943 - DNA, 399 bp, Gossypium hirsutum
ttggtttgtggggtatgtgggcatagagctgcgggtttatttgacaaaacgtcgcttcaagtcagtgctttcccctccgtgatattgcctgattttctttatttgggtagctacgataatgcctctcgttctgagcttcttaagactcagggtattactcgtgtcctcaatactgtacctgcttgtcaaaatctctacaagaattcatttacctatcactgcctacaagatgacaaaattttgcaatttgatgatgctgtacaatttttagagcaatgtgagagagataaggctcgagtccttgtgcactgcatgtcaggaaaaaataagtcaccggctattgtaatagcttacttgatgaagtctaaaggatggaggcttcaaccgagctatcagtgg

SEQ ID NO: 235944 - DNA, 357 bp, Gossypium hirsutum
gttacatgaacagctgccatgtcctcaagagtttatgtgtcctctttctaaaaagcttatgagagatcccgttgttttatcttctggtcagacatatgaaagacccttcatcgagaaatggctgaaagcaggcaatcggacttgccctcaaacccaacaagttctttcccacacagttttaactccgaatcaccttgtgagtgaaatgatatcgcagtggtgtaagagtcaaggaattgaattgccggacccagttcagaaccgtatacaggagggtgtcaccgaagcagagcgtctgcatttcttttctttgctagataagttatctgccgccgcgcttcctcaacagaaggaagc

SEQ ID NO: 235945 - DNA, 465 bp, Gossypium hirsutum
tttatgcaaatggtggcaacagcagcagccatggatgatcggcctagctgctttaggtaccccagaggcaatggcattggttctattctcccaccaaacaacaaaggaacaccattagagattgggaagggaagagtactaagagaaggaagtggcagggtggccattttggggtatggaacaatcgtacaaagttgtgtgaaagcagctgaacaactacaaatgcatggcatctccgcaacggtggcggatgctcgtttttgtaagccaatcgacggagatttattgaaacaactagctcaagaacacgagatattaatcaccgtggaagaaggatcaatcggagggttcagcacccacgtctcacatttcttgtgcttgaatggactactagatggcaagcttaagtggaggccaatggtgctaccagatagatacattgaccatggatctcaaagtgatcaa

SEQ ID NO: 235946 - DNA, 458 bp, Gossypium hirsutum
gcgtccacgcgtccgggctggcaatgaatcacatgctgccatgactgactatgacaggactgagaaggatattacaccaattggtggattcccccattatggagtggtgaaagaagattatttgatgattaaagggggttgtgttggaccgaagaaacgtgttgtgacattaaggcaatcactgttgaatcaaacatcaagggttgcacttgaagagatcaagctcaagttcattgatacttcatctaagttcggtcatggtcgtttccagacaacacaagaaaaggccaagttctatgggaagcttaaagcttgaccgcatagggatggttttttatggagggattgtttgttccattttctgattgcccacaactttgaattttgttttttcgttaaaccatgatgagttttggacaattatcttttattatatcgattaatgtgtttttatggcc

SEQ ID NO: 235947 - DNA, 517 bp, Gossypium hirsutum
gcgcccacgcgtccggaaaatctaatctttaaacccaaaatccaaattcagaacccttattttttcttttcaaaacctttcaaaaaaaaaagaaaacccaagaacaaatgttattattgttattaatattccagcaaaaaaaaaaaacacaagaaataagaaataatgggttgtatctgcaattgcttcgtagggttgctgaacagcgtattgctaacagtagggataggtttcgtcatatctggtgcttacctcaacatcaatggtaacagcgattgcgagaaagttttaaccaccccgttaattgtgatgggtggtcttttgctcatcctttcccttataggaataatgggaacctcatgcagcagcaccttctgcatgtacatttatttgaccctcatgttccttttgatactcggtgtcatcgctttcaccatcttcgttttcatgatcaccaaccaagccgtcgggaaagccatcgccgatagcgagaaagtcattgaacccaaaaacccca

SEQ ID NO: 235948 - DNA, 544 bp, Gossypium hirsutum
gaaactctcccatcccaaatcccaatacatcctgccccaaagcaatctctcattgttttatgaaagaaacgtaatcaggcagccatgttttggtataggaacttgatcaaactatccacacctatcaaatccaaaacccccatcaccaaaaatcttctacaagcttctttatccaacttcagcaccgccaaccaaccccctgcctcggctcaggctcagccatcaggtctcggacccaccaagccacacgacaaaccaagggtggtggtgttaggatctggatgggctggttgcaggctaatgaaaggcttggaccccaagctgtatgacatcgtttgtgtctcgcctaggaaccatatggtatttactcccctattggcttctacttgtgttgggactcttgagttcaggtccgttgccgaacccattgcgaggattcagccctgcatctcttcagcacctggatcttatttttttcttgccaattctactgcagtggatactgaaaaccatgaggtgcattgtgagactgttactgatggaa

SEQ ID NO: 235949 - DNA, 392 bp, Gossypium hirsutum
cccacgcgtccgattttgcttctttggtggtgggggaaacataaatttcattgcctataaccaagaatgatagagcatccatagttggagatgctatagactacatcaaggaacttcttggaactgttcgtgagcttcaattactggtggacaaaaagagatgcggccaagacaggagcaaaaggcttaagactgaagatgctgctagtgctgctgatgcaggggatgttgagttcaagtctttaggtgatccagaccaatgctataatacttccttgaggagttcttggcttcaaaggaagtccaaggattctgaggttgatgtacgcatcgttgatgatgaagttaccatcaaacttgttcaaagaaagaagatcaactgcttgctgttt

SEQ ID NO: 235950 - DNA, 504 bp, Gossypium hirsutum
ggacaacaaaactggctaataggctaaatgtttgcgggctcatgaactgtcagtatgcaatcacagcttctggtgatgttttcttacttgaggcaaatccccgtgcttcacgtactgtaccatttgtttccaaggcaattgggcacccactggctaagtatgctgctcttgttgtgtcagggaagtcactttatgatctagatttcacaaaagaagtgactccaaaacatgtgtctgttaaggaagctgttcttccatttgagaagtttcaaggctgtgatgtgttgttaggtcctgaaatgaaaagtacaggtgaggtgatgggcattgactttgagtttgcaatagcatttgcaaaagcccagattgctgcagggcagaagcttccactttccggcacggttttcctcagtttaaatgacttgacaaagccctatcttgaaagaatcgcaaaagctttcttggggctgggattccatattatttcaacatctgggacagctc

SEQ ID NO: 235951 - DNA, 449 bp, Gossypium hirsutum
gctcagcttatttaccagacggctctaatggagagtggtttcaatctacccgatcccaaggattttgcttcacgcatctacagctcggtgaaatctagcctaaatattagtcccgatgcaacaattgaggatgatgatgatgatgtagaagaaaccgagacagaatcggacacaaaagacagtgcagtcaaagatgagttgtagattgcctgaaacctcggggacatgccttttgagttagttttaccctctgatgacaagccgaaggaactgtaacatgcattttcaagtctgaaacttggataaagggaaacattacaaacattacttagtagaatatatgtaaaccgtagtcgactgtgaaattaatctgtctgcaatttttgctcttttaatgcatcgcagtggttttaagaatttcgcgtattaatatatggttgtttcgatct

SEQ ID NO: 235952 - DNA, 492 bp, Gossypium hirsutum
  unsure (1)..(492): unsure at all n locations
aactggagcagtattactgggagtgctaataagcctcacaaaggaaatgatcctaggtggaatgccatcctggctatccgggctcgagatggaattttgggaatgagtcatttcagattgcttaaacggcttggttgtggtgacattggcagtgtatatctctcagagctgagtggtacttcttgttattttgctatgaaagtaatggacaaggcatcacttgcaagtcgtaagaagttgactagggctcagactgaaagggagattctgcagcttctggaccatccatttctgcccactctttatactcattttgagaccgacagattctcatgtctagtcatggaatattgtccagggngggatctacacactttgagacaacggcaacctggaaagcatttcttagagtatgctgcaaggttttacgccgcagaggttctattagcacttgagtatctccacatgcttggtgttgtctatagggacttg

SEQ ID NO: 235953 - DNA, 236 bp, Gossypium hirsutum
ataaaggtggtattcaatgtggtctgtatcaagcatactcacagggcttctatctttcatgctggataacagtgctaccactggcagtgtaaacactacagctgctgagaagcaacgcctggcacaaacatccctttcttttaattgtaaaaacccaacttgaagtatgtcggtattgaattgtggcaggtaaaatctggaacaatgtttgataacatcttagttgccgatgatgt

SEQ ID NO: 235954 - DNA, 476 bp, Gossypium hirsutum
gtcttatttaaccctgttacacaaggtatctgaggcagatgacatgcttggaataggcaaaacgtttaaaggattatctacagaagcaatgcatcggccagatctgtatgcagttgagaaggagttgtatttgggttctttatgcgaagtttcagacagttcaaagccatggcaattttggatggttatgttgaaaaatggaaactttgatacaaaggccggtttttgtcctgaaaatgggaaacccaaacctccttttactacttcaaagaacttcccttgctttggagaagggtgcatgaatcaacccactttgaaccatcagcctacacaactgttaggtgatggtacaatgaggggatggttcaatggaacttatgatttggatgctgatattgggaaaggtcttacaaatttatccttttatgaagtgatttgggagaaaacgcttggttctggaagttgggtatttaagc

SEQ ID NO: 235955 - DNA, 489 bp, Gossypium hirsutum
ggagttatcaacggttagtgggaaaacttatctatctttgtcacactcgttcagacatagcttttggagtaagtgttataagtcaatttatgcatactcctagggagaaacatttggaagctgcctacaggatattgagatacttaaaagggactcctggtaaggggttgcattccaagaaagatgtaaatcgaagcatagaagtctacattgatgcagactgggcaggggcaattaatgacaggcgctccacaagcggttactgcagctatgtttggggtaatcttgtgacatggaggagtaaaaagcaatctgttgtggcacgcagcagtgctgaatctgaatatcgagcattgtcccacggtatatgtgaaggaatgtggttacaacagctaatgagagactaaaattatcctatacaaaacctataacattatattgtgacaaccaggcagcagttagcatagctcataaccctgtacaccatga

SEQ ID NO: 235956 - DNA, 346 bp, Gossypium hirsutum
ggtaccagatgccaacctcatgcggggtttgttaacatcagatgttattgatctgatgaacctaggacaaaggaatcgtgcagttggtgcaacagccctaaatgaccgtagtagccggtctcatagttgcttgaccgtccatgttcaaggaagagatttaacatctggaactactctccgaggctgcatgcatcttgtggatcttgcaggcagtgagagagtagacaagtctgaggtaacaggagatcgactaaaagaggcacagcacataaacaaatctatatcagctctaggagatgtgattgcttaccttgcccaaaagaatccacatgttccttacagaaac

SEQ ID NO: 235957 - DNA, 395 bp, Gossypium hirsutum
gctgcatgtacctttggaaacttttgaaagattgcactcaggatgcagtaaaaactctatcaaactatcttacgtataatggtgttgaaggtcttcatacaaaagtgaccgaatttgtgaaggacaaggactgtctcgtctgtggtccgggtgccctcatcgagctggatactgcagttaccctaaaaaagttcgttgatatgctagaggaggatcctaaggtgctgatgacaaaggcctcgatcacatatcacggaaagaatctatacatgcaggctcctcctgttttggaagagatgacccgatcaaatctggagttacccctatatgatcttatggataaaacccccaaagacgtcctccatgcaactggtacgatcaacaaggatgacaaa

SEQ ID NO: 235958 - DNA, 400 bp, Gossypium hirsutum
cccatgcttccgatttgttttctctgttatccgatgggagttctttaaataccaaaaatgctgtttttttgctgctcaaaaaccagagttcggggtgtgaaaatggcttctgatgtgccttgttgtggtgctgaattctcattgtatctgttgatcatagtggggttagtgtgttttgctgggttaatggctggtctaacactgggtctcatgtctctgggtcttgtagaccttgaagtcctcatcatgtctgggccgcctcaagatcgtatccatgctgcaaagatatttcctgtggtgaaaaaccagcaccttctgctatgtactctattgattggaaactctttggcaatggaggctcttcccatttttttggacaagcttgtgcctccatgggctg

SEQ ID NO: 235959 - DNA, 446 bp, Gossypium hirsutum
aaggaaggtcaaatgggggatttaattacaggcaatcaggatcatgattgcgactgtcttgcttcttagtttgatttgatatatgggatgtataggagcctaaatctgatcctttgatgaatgatacatcaaaaggattagaagttccaggtcagacggtgaggaaaaccagtatatctgaagatttctggaccactagcgcttgcgatatggataacagtgcagcgcagtcacaaggaagcatctcgtcaatcagcgtgatcaatcagtctctagatccccatggcaatgccaatagcccatctgaattcgtaaatcatggtcttcttctctggaatcgaactaggcagcagtggattggaaacacgaagtctgaaaatcggcctcaaaaggttcgggaacccaaactgagttggaatgcgagttacgaaagtttacttggaaac

SEQ ID NO: 235960 - DNA, 422 bp, Gossypium hirsutum
ctcctatattctctttcctctgcacctgaccctatcagggggacctatttaaccatcttgctaccagacgaccatgttttgaactccttcttcatcgttttctctacttccccttcttcttctgctctccaatggctatccccgccacaaacgtttaacaaaaaaacacccttttgtttatgcccaatgccagtgtatccacgcgcgttccattttcccatgtcaaaacactcccgcggcgggaatccgctactctgctctgctttgctcaatgtccattttgggtcctaaggcttcttgtatctctttcaaggattctacttgtaggtgctttgggtacatggtttccaagaagaaatacatctataccattgatgatgactgctttgtaagctcaaccctcgtctcttccctcttctatt

SEQ ID NO: 235961 - DNA, 513 bp, Gossypium hirsutum
cgcggggttatactgggagggaaaaccaaaacatgtatgggggccatattatcaccatccatccattgtctggaagaaacactcagcactctagattatgctcatcgtgccaagaatatcaagaacaaaccagagattaaccagaagatgatgaaatctgctttaataaaagatctatattctgaaattgatcggctaaggcaagaggtgtatgctgcaagagagaaaaatgggatttatattccacgagatcgctatctccatgacgaagcagaaaagaaggctatggctgaaaaaatagagcgcatggaacttgtgtcagaatctaaagagaagcaaattactgagcttcaggaactctacaattcacagcagatggtgactgcagatttaagtgagaaacttggaaagacagagaaaaaactggaggaaactgaaaatgcgttggttgatcttgaagataaacatagacaagcaaatgcaactattaaagagaaggaatttttaatatct

SEQ ID NO: 235962 - DNA, 440 bp, Gossypium hirsutum
cttatttgtccgcagccgcccggcgtgagttcggctggtggttttattccgccgccgttgatgcagtaccaggtgcctgcaggtcaggttccgaatcctgctcttagaccgtttgctccgattccaaatggatatgcagcgctaccgggagctgttcctccgggcaccatgcctcctccggtaggctgtatactttctggtagttataaggataatttcccattcatgggtttatgaattgccagcagcagaccatgttaacaactgactgcttcttccttccatgtgggcactgtgtggcttgctttgcatgtggaacaagaatagcagaggctgatggaacttgccccatttgccgtcggagtatgaaaaaagggaggaagattttcacggtataatcagggggaacagcagtttatgctgatgtcccttaatcgagt

SEQ ID NO: 235963 - DNA, 308 bp, Gossypium hirsutum
gggatggcctttttgaggctattactggttatggtcgtgggggattctatatggcactgtttggaagagtcggtggtggaatatatacaaaggctgctgatgtcggtgctgatcttgtaggaaaggttgaaaggaacattccagaggatgacccaagaaacccagctgtcattgccgacaatgttggcgataatgttggggatattgctggtatgggttctgatctatttggctcatatgctgaatcctactgtgctgctcttgttgttgcttctatatcctcttttggaataaaccacgagttcact

SEQ ID NO: 235964 - DNA, 217 bp, Gossypium hirsutum
ctttattgagcgaccctaatccaattattggccccatcactctacttcacccacgacgcgagcctttcgagcatggcctcttacctatccagaagctcattttcaccgaccccctgcaagccctaatccctctcaaacaaaaactcgcttcttcttcttcttcttcctctactcaccgagtcaactcggatgcccttgctgatgcgctccagatctc

SEQ ID NO: 235965 - DNA, 267 bp, Gossypium hirsutum
gcttttgagagatgtttccaagttggaggtctttagaagggagcttatgcagtcacttcaagaggacgatgaaagttctgccacagggggtcctccaatcattgcgaagccaacactgtcagaagatgattctgccttgatttcaagaactgcttcaatgcgcagccagtactctgattcgggtgcagaggatcgtgactcagatgtgtcagcctcaagacctggcttacctcatggcctcctgctagcatcacaaacaagcacacc

SEQ ID NO: 235966 - DNA, 328 bp, Gossypium hirsutum
gtctttgtccgttataattaactaataatccgggaatcttttttacgcattttcgtttatttctttagcctttttttttttttgatttctagaatttgggcacaatgttcgcagaggctgatagctttccgagatccaagattggaaacattatgcattccgatcctaacatgtccatacctggttctgggagtgaagatgatatgtacgtgcggtatagcagtgcatccacttccggccctgcctacgaagcccataggacgagtctagaaggctcgcccataaccatgtcaccgtggaaccaaaccacttctttcatgaaaccttc

SEQ ID NO: 235967 - DNA, 396 bp, Gossypium hirsutum
ggaagtattaatgatgggcactcacctccaggtaggagtggtttgtaaggtgtaccctggaaagatttctcccaaggtggttttagacttgggaaggagggttctttgatgggaaagacatctggaaagaatgcctctggtaaacaaggagaccatgccggcacggttcgtaaaaacaagcgggcccctaagagacgtctacttgatggggaattcagtgaagatgacaatgatgatgagatccgttacttggaaaaacttaaaacttcgaagattagtccagcatataaggaagatgatgatgaaccaggcaagaaacagaaaaaactctccagggtttccatcatagaaaactttggcacttcaagttctgccaaagatgagaaaaggaagcat

SEQ ID NO: 235968 - DNA, 441 bp, Gossypium hirsutum
  unsure (1)..(441): unsure at all n locations
gggatttcaaaaaggaaaagaaaagggggcatatttttgaatttcgtggatctcatcgcatcgnattttgcaaaaatatcacagcatctaatttccttttgaataacatattaataatttatttttcttatattcaattcctccgccttcttcaaggaattttaactctcaattcgatagctcatcaaagaattggaattggttcctagttgaaggtggtgaaatcggatatgcagagccagcttatctgtactgggtgtcggagcattcttctttatcctagaggtgctaccagtgtttgctgtgcattatgcaatacaattactccccctgggatggaaatggctcaactcatatgtggaggttgtcgaacattatccaatagtatactttataacattcatttcttttagaattaagattatggtatttcaacttata

SEQ ID NO: 235969 - DNA, 351 bp, Gossypium hirsutum
aaggattttaagattctaaaatttttggggtttatgtggagagtccactgtcatgggtgatggaagctgctgcaatcatggccattgctttggctaatggtgatggaaagcccccagattggcaagactttgttggtattgtttgtttgttggtaattaactctaccatcagtttcattgaagaaaacaatgctggcaatgctgccgccgctcttatggctggtcttgcccccaaaaccaaggtgcttagggatggcaaatggagtgaacaagaagcagcgattctggttcctggagacatcattagtattaaattgggagatattatccctgccgatgctcgtcttcttg

SEQ ID NO: 235970 - DNA, 403 bp, Gossypium hirsutum
ggggatttcaatgagtatttcagtgaggcaacagatgttgatgctgttgtttatttaatgctggccaattctctgataaataacatcttgccagatgcgactgtaattgctgaagatgtttctggtatgcctggacttggtaggccagtctctgaagggggaattgggtttgactaccgcctggctatggccatccctgacaagtggattgattacttgaagaataagaatgatgaagagtggtcaatgatggacttatcctgtagcttgacaaataggagatacactgagaagtgtatatcctatgctgagagtcacgatcagtctatcgtaggtgacaagacaatagcatttttcctaatggataaagaaatgtactctggcatgtcatgtttaacagatg

SEQ ID NO: 235971 - DNA, 433 bp, Gossypium hirsutum
agccttctcaagtaccggacatcaatcaatgtcttctgtggtggagttgacagcatctcaagaaagccatgatgagggtaaaaatgaacggttagataattttcttaacatggatccaacgctttctaatagtttgtcactctctgctgatactttccttaaagctgccatgactctcaagaaccaggtagtggaggttacatggaaaggaaggggaagtggcggcggcggcggcggcgggttaggtacgggaatagacccgactgtttatacgggtctgctggggacagctttcacttgcttgagatcttacgaggctactggtaatcggcaggacttggtattgtccgctgagatcgttgacacgtgcctctcagtcgcacgtgcctcccctagacatgtgacatttttatgtggtagaggaggggtgtat

SEQ ID NO: 235972 - DNA, 508 bp, Gossypium hirsutum
cttttatttttttctctttgttgacctaaatctcttggatttgcttctttcaccatgaccaagcagcaggctaactggtctccttacgacaacaatggaggatcttgcgttgcgatcgctggagctgattactgtgttatcgccgccgatactcgaatgtcaaccggttacaatatactgacccgagattactccaaaatatgtaaacttgcagataaatgtgtcatggcatcctcaggatttcaagctgacgtgagggctttacaaaagcaactggcagctaggcacttgatttatcagcatcagcacaacaagctgactttgaaagataccttgaagccgattttgataccctgctacgatctctgttccaacgcgccattcttgttttcccgcgctgatgcattggaaatggacggctatgatttcaagatgaaagacgtgtgctacgcaacgtcggctgatccgacggttgtgggagcagtgcgaatgaagtcagtggatgaga

SEQ ID NO: 235973 - DNA, 403 bp, Gossypium hirsutum
aatcttaagagcaaaaaaaaaaaagaaaaaaaaaaaggagagaatgaaacactcttttttgcctattcccattccccccactctttttcttttgccctttttgggattctggaaatcccaatcaatgttcttccatttcatttgaccttttttcataaaattgttttagcttctgtttttttcttttgttgttgttaagctgatactgctggtggttgctgtcagaaacaaaacatgggtgctatcagtcttgaagagatcaagaacgagactgttgatctggaaaaaatcccaatagaggaagtgtttgagcagctgaaatgtagcagagaaggattgagttcagaggagggagccaacaggcttcagatttttggaccaaacaagttagaggagaagaagg

SEQ ID NO: 235974 - DNA, 435 bp, Gossypium hirsutum
gcagtacaatgaaatccttggaaaagggggttcatttacagattatagagcatttgatgagtatgaagggattgaagttgcttggaaccaagtcaaactttatgattttcttcaaagccctgaagatcttgaaagactgtattgtgagattcatctccttaagacattgaagcacaagaatattatgaagttctatacttcttgggttgacaccgcccgtttttgggctgcttatcttgacgacaagtggttcccttccttgagagctattggtatggctgaaggagaggatgcaaggaaagcagccatagggcaagtggaggaagggctgatgctgttagaggaggcatttgacaagtgcagccaagggcaggcattctttgggaaggatcaaattggatatctcgacataacatttgggtgctttttggggtg

SEQ ID NO: 235975 - DNA, 380 bp, Gossypium hirsutum
aatgtgtggcaaagaagtacgtagatcattcttttatgtgtgggtttttagacctctttgatgctgaggacccccgggaaagggactgtttgaaaacaattctgcacagaatttacgggaaactcatggtgcacaggccctttgtacgaaaagctgttagcaatatcatctatcgatttgtttttgaaactgaaaggcataatggtattgctgaacttctcgagatattcggaagtattattagtggttttgctgtaccattgaaagaggaacacaagatgttttttgggaaatcccttattcctttacacaaaccgaaactggtgggtgtttatcatcagcaattaacattttgtgttgtacagtttatagataaggat

SEQ ID NO: 235976 - DNA, 254 bp, Gossypium hirsutum
gagtgagtgagagatagagagatgggaggtccaccgtacgattgcttggcgaatcccctaggagccgtccgattagcattcgagaaggcaatagggtcagaattggagactccttcgacccatccctccgcctttaacggcaaagattggggtgcccttgaactcttccgccacttcctcttccaagaatcagggctttcccaggttcccatccttaatcccaaaacattaagatgggttcaacccaacagtct

SEQ ID NO: 235977 - DNA, 374 bp, Gossypium hirsutum
ctttgaatggcggtggagtatagttgttgtgaatgggagttggttattcacatattaatagtagtgttgttggtattgttcgcgggtttgatgtcggggcttactttgggccttatgtcgatgagtctcgtcgatcttgaggttcttgccaagtccggaactcccaaggatcgtaaacatgctgcaaaaatattgccggttgtcaaaaaacagcatttgttgctttgtacactacttatatgcaatgctgctgcgatggaggcacttcccattttccttgatggtttggtcactgcttggggtgctatcttgatttcagtgaccttgattcttctgtttggtgagataataccgcaatccgtctgttctcgata

SEQ ID NO: 235978 - DNA, 272 bp, Gossypium hirsutum
tcgcccacgcgtccgcccacgcgtacggagaagagggttatccctggctcgggtcctgaccaattcaagtttgcctcgttcatgtctgtaactctaagctgcgatcatcgagctattgatggtgcgattggtgctgaatggctgaaagctttcaaagggtacattgagaatccagagtcaatgttgctctaaatcaatggtgtttgcttctttaaactaaacacactttcttgctgtgatcaattttcgagatggcttgaatccaatacatg

SEQ ID NO: 235979 - DNA, 252 bp, Gossypium hirsutum
tcgggattctttctcaaacatgctatcttatggctctcgatacttgctacaaatatttctgtcacaagtacgagaaactagagggcaaacagttccctctttctgatgctgcggtacttcatattccattctactcataacaagctcgtgcagaaaagcacatatcgttagttgttcaatgacttctcgaggaatgccagctctgtcgatgaaattaccaaggaaaaactggctccattttcaactttgacc

SEQ ID NO: 235980 - DNA, 355 bp, Gossypium hirsutum
tcgggagctttcggcactcgctccgagcagcatgaagagcaaggttgtcgctccacctgagcgaaagtacagtgtctggatcggaggctcgatcttggcttccctcagcacccttccaacaaatgtggattgcaaaggccgagtatgatgaatcaggtccagcgatcgtccacaggaaatgcttctaaatgttattggtatggggataggatgaaagagagaagtactgtttcattgtttcttgatgcagcttggaactttgctttgttctaatggctttgttatccttctgtgtgttttcatgttggagtgaaacaatgaactttgagaaagccagtgatttaatttttgttcc

SEQ ID NO: 235981 - DNA, 356 bp, Gossypium hirsutum
cccacttcttccgcaaatgagagattaccagacaagaaaggaagtgtttggtctaacatcatgtggtggaacgcatgtgcttgcagcagaatctgctgagaaaggatggtttttgaataattcccattggtggtttcatgttcataacgagttaaatgaaaatgacattgcatttggttttaaaggaaatcgaaaggtgattgtttttcgaggaagaaaactaggatttgagattaatgatggcaagaagctgaaaaatgaagagcatttcatgaccgctgttgaattctccatggaatatccttatggaaaagctatagctttgttcaaccttaaatctgctattatagagatca

SEQ ID NO: 235982 - DNA, 112 bp, Gossypium hirsutum
aaagttgctagtgttgagctatattacaaggctggccacttttacttgcaagagcatcctgatctcatcaatgatatgctgaatgtgcttgcgcttcgtgtggatcatactc

SEQ ID NO: 235983 - DNA, 241 bp, Gossypium hirsutum
cagtactaccattcgccgccgcaacaacaatgtcatgagtagagtctctcatcctccaactccacgaaatctccgccgttaaattcggcaacttcaagctaaaatccggcatctctttccctatctacatagaccttcgcctaatcgtctcctacccttccctcctctgccaaatctcccaatccctcctctcttctctccctccccaaatacctctcaacctcatctgcggcgttcctta

SEQ ID NO: 235984 - DNA, 201 bp, Gossypium hirsutum
ctcacgcgtccggttggacgtagccaagattacgtgtgtgtattgcaaaaattatctgttaggaaaaaaaatggagataactaatgtcactgaatatgaggccattgcaaaaaagaagttacccaagatggtttatgactactatgcatcaggtgcagaggaccagtggactctcaaggagaattgaaatgcattttccag

SEQ ID NO: 235985 - DNA, 393 bp, Gossypium hirsutum
tatgatacagttaactgggaaacgtgatgataggaaccatcatactgctgtttgatctggaaaccccgctgccgtgtctgaaatattgaaaaacactgggccggatgaacttaaagaactgttgcctaaacagaaccaatccggcgaaaccgccttatatgtcgccgctgaatacggctatgtcgatttggtcgaggagatgattaactattatgatcttacagatgctgcgatcaaagctagaaatggttttgatgcttttcacattgctgctaaacaaggagatttagagattttgaaactgctgctgggggtgcatccggaattggcaatgacggttgatttatcaaacactactgcattgcacacagctgcaacacatggccatataga

SEQ ID NO: 235986 - DNA, 428 bp, Gossypium hirsutum
ctgttctcgtgggatgatttgcacgaaagacagaggggggatttttatgaagattttggttttttcaacccggctacaaaatagaaaatttaccagaacgcttagtggaattgcagaaaacagaaaattaaccagaatacttagtggaactgaaaggattggtttgagctggccagagcctccactaaactttcttcctcagaatgttttggagagaccaggttctttcaaaccaagaaaatcttttagagcaataaagtcttttaaaacatataattccttcaagtccataaatgatatgggccatatggtatctgtgatagctttgcttgctgaacttgaccttgaatccctcatgaagaggaaaagaagatcatcatatgtcagaatagtaagcaagcagatggcaggaattttcctcactatat

SEQ ID NO: 235987 - DNA, 162 bp, Gossypium hirsutum
tgataaatatctaacctccttaaatctgagaaaaggcttgtttagcgtgcttttgaactccgagcagagcttgaaaacgctgcatcagatgtctcagatttgcctgccaagattgaaaggaaggataaaattgaagatggaaacaaatcacttatccaaaag
